United States Patent Application Publication US 2005/0244851 A1 - sequence listing, part 4

SEQ ID NO: 119316 - DNA, 25 bp, Homo sapien
aatgcaaagagtccaagatcttcat

SEQ ID NO: 119317 - DNA, 25 bp, Homo sapien
tccaaatgcaaagagtccaagatct

SEQ ID NO: 119318 - DNA, 25 bp, Homo sapien
atattctgaattattatggtgcctg

SEQ ID NO: 119319 - DNA, 25 bp, Homo sapien
atagtctccagtcaaaaattctgca

SEQ ID NO: 119320 - DNA, 25 bp, Homo sapien
tactatagtctccagtcaaaaattc

SEQ ID NO: 119321 - DNA, 25 bp, Homo sapien
ctactatagtctccagtcaaaaatt

SEQ ID NO: 119322 - DNA, 25 bp, Homo sapien
ctatagtctccagtcaaaaattctg

SEQ ID NO: 119323 - DNA, 25 bp, Homo sapien
aacctgtgtcttgcatatccccaga

SEQ ID NO: 119324 - DNA, 25 bp, Homo sapien
tatggttcacagaacagcgctttca

SEQ ID NO: 119325 - DNA, 25 bp, Homo sapien
tttacctgccactacaagtattgcc

SEQ ID NO: 119326 - DNA, 25 bp, Homo sapien
tatgggtaatcaaacattggctgag

SEQ ID NO: 119327 - DNA, 25 bp, Homo sapien
cctcccagcagtaactcagaatcac

SEQ ID NO: 119328 - DNA, 25 bp, Homo sapien
tcctcccagcagtaactcagaatca

SEQ ID NO: 119329 - DNA, 25 bp, Homo sapien
ctcccagcagtaactcagaatcaca

SEQ ID NO: 119330 - DNA, 25 bp, Homo sapien
tagacccagacagttgcagtgccag

SEQ ID NO: 119331 - DNA, 25 bp, Homo sapien
tctttcattgaggaacacctggcaa

SEQ ID NO: 119332 - DNA, 25 bp, Homo sapien
caaagcactgaactgtgggactgaa

SEQ ID NO: 119333 - DNA, 25 bp, Homo sapien
aaggcccagggctctatgtctgaaa

SEQ ID NO: 119334 - DNA, 25 bp, Homo sapien
gttaacgtgattttgtatttgttca

SEQ ID NO: 119335 - DNA, 25 bp, Homo sapien
cgtgattttgtatttgttcattgaa

SEQ ID NO: 119336 - DNA, 25 bp, Homo sapien
taacgtgattttgtatttgttcatt

SEQ ID NO: 119337 - DNA, 25 bp, Homo sapien
aagggcattaatcaccaattgtaaa

SEQ ID NO: 119338 - DNA, 25 bp, Homo sapien
gattattagtagtgtttgtccatca

SEQ ID NO: 119339 - DNA, 25 bp, Homo sapien
tatgattattagtagtgtttgtcca

SEQ ID NO: 119340 - DNA, 25 bp, Homo sapien
tgccaacacatatgattattagtag

SEQ ID NO: 119341 - DNA, 25 bp, Homo sapien
agggaacacaatgccaacacatatg

SEQ ID NO: 119342 - DNA, 25 bp, Homo sapien
aaatgataaactacttgtgtagcca

SEQ ID NO: 119343 - DNA, 25 bp, Homo sapien
gataaactacttgtgtagccaagaa

SEQ ID NO: 119344 - DNA, 25 bp, Homo sapien
aaactacttgtgtagccaagaaagc

SEQ ID NO: 119345 - DNA, 25 bp, Homo sapien
atgataaactacttgtgtagccaag

SEQ ID NO: 119346 - DNA, 25 bp, Homo sapien
agaggacaagggatggaccattttt

SEQ ID NO: 119347 - DNA, 25 bp, Homo sapien
cagaggacaagggatggaccatttt

SEQ ID NO: 119348 - DNA, 25 bp, Homo sapien
gctttggcttacaatcatctgtaac

SEQ ID NO: 119349 - DNA, 25 bp, Homo sapien
tttggcttacaatcatctgtaacat

SEQ ID NO: 119350 - DNA, 25 bp, Homo sapien
ctttggcttacaatcatctgtaaca

SEQ ID NO: 119351 - DNA, 25 bp, Homo sapien
tggcttacaatcatctgtaacattt

SEQ ID NO: 119352 - DNA, 25 bp, Homo sapien
ccatggttggtaaggcataagcact

SEQ ID NO: 119353 - DNA, 25 bp, Homo sapien
tttgaagttcacagtatatgggcaa

SEQ ID NO: 119354 - DNA, 25 bp, Homo sapien
gcaatattgaggtatggcagagaaa

SEQ ID NO: 119355 - DNA, 25 bp, Homo sapien
aaaagccatggttggtaaggcataa

SEQ ID NO: 119356 - DNA, 25 bp, Homo sapien
ctgtattggtaacattctgcattct

SEQ ID NO: 119357 - DNA, 25 bp, Homo sapien
aaaagtgaggtacccaaagagtgca

SEQ ID NO: 119358 - DNA, 25 bp, Homo sapien
tgagaaaacttaaagcaattgctgt

SEQ ID NO: 119359 - DNA, 25 bp, Homo sapien
ggtacccaaagagtgcagatataaa

SEQ ID NO: 119360 - DNA, 25 bp, Homo sapien
acctctctgggctttagttgttcat

SEQ ID NO: 119361 - DNA, 25 bp, Homo sapien
taattctgtgacaggtcacttcacc

SEQ ID NO: 119362 - DNA, 25 bp, Homo sapien
ctttaattctgtgacaggtcacttc

SEQ ID NO: 119363 - DNA, 25 bp, Homo sapien
cacctctctgggctttagttgttca

SEQ ID NO: 119364 - DNA, 25 bp, Homo sapien
tttcacagctgtaatcagagcaagt

SEQ ID NO: 119365 - DNA, 25 bp, Homo sapien
acagctgtaatcagagcaagtatca

SEQ ID NO: 119366 - DNA, 25 bp, Homo sapien
tcacagctgtaatcagagcaagtat

SEQ ID NO: 119367 - DNA, 25 bp, Homo sapien
cctttcacagctgtaatcagagcaa

SEQ ID NO: 119368 - DNA, 25 bp, Homo sapien
ttctttttggtgctagagacagcat

SEQ ID NO: 119369 - DNA, 25 bp, Homo sapien
catgtgataagtatttactataacc

SEQ ID NO: 119370 - DNA, 25 bp, Homo sapien
gattagagggactgtcaaaagcaca

SEQ ID NO: 119371 - DNA, 25 bp, Homo sapien
ctataaccttttagtaattctgact

SEQ ID NO: 119372 - DNA, 25 bp, Homo sapien
atgacaacaacatcatgtgataagt

SEQ ID NO: 119373 - DNA, 25 bp, Homo sapien
catatattgcaagtaaaacgatgat

SEQ ID NO: 119374 - DNA, 25 bp, Homo sapien
aacatcattgttacagcttttctgg

SEQ ID NO: 119375 - DNA, 25 bp, Homo sapien
cgatgataatattgagtgctagagt

SEQ ID NO: 119376 - DNA, 25 bp, Homo sapien
gtgctagagtgatcaaaaaatggcg

SEQ ID NO: 119377 - DNA, 25 bp, Homo sapien
gataaaatagtcctgggaatataaa

SEQ ID NO: 119378 - DNA, 25 bp, Homo sapien
tctctgctaagtttaagataaaata

SEQ ID NO: 119379 - DNA, 25 bp, Homo sapien
ttccatgacagaaaatcctctctgc

SEQ ID NO: 119380 - DNA, 25 bp, Homo sapien
cctctctgctaagtttaagataaaa

SEQ ID NO: 119381 - DNA, 25 bp, Homo sapien
ggattatttgttaaatctctactct

SEQ ID NO: 119382 - DNA, 25 bp, Homo sapien
taaaatagaagtcttgaaagaaaga

SEQ ID NO: 119383 - DNA, 25 bp, Homo sapien
tattgactttcttgatgcaggtaaa

SEQ ID NO: 119384 - DNA, 25 bp, Homo sapien
tactctctgcaataatgtattctat

SEQ ID NO: 119385 - DNA, 25 bp, Homo sapien
aatgatgagtgctaaactaaaattc

SEQ ID NO: 119386 - DNA, 25 bp, Homo sapien
aaatgatgagtgctaaactaaaatt

SEQ ID NO: 119387 - DNA, 25 bp, Homo sapien
tgatgagtgctaaactaaaattccc

SEQ ID NO: 119388 - DNA, 25 bp, Homo sapien
atgatgagtgctaaactaaaattcc

SEQ ID NO: 119389 - DNA, 25 bp, Homo sapien
aatgtaccacatgaacgcaagagtt

SEQ ID NO: 119390 - DNA, 25 bp, Homo sapien
aaatcagtggttgctagtggctgcc

SEQ ID NO: 119391 - DNA, 25 bp, Homo sapien
ggtaaaacggtatatgtgaactctg

SEQ ID NO: 119392 - DNA, 25 bp, Homo sapien
gtataacaaattcccgtgacacgag

SEQ ID NO: 119393 - DNA, 25 bp, Homo sapien
tttctaaacgaaataaggcagtctg

SEQ ID NO: 119394 - DNA, 25 bp, Homo sapien
tgcacacgaatgcttagagcagctt

SEQ ID NO: 119395 - DNA, 25 bp, Homo sapien
aagacgagcaggtactattcctaca

SEQ ID NO: 119396 - DNA, 25 bp, Homo sapien
gcaaccaagagatctttcaacaggt

SEQ ID NO: 119397 - DNA, 25 bp, Homo sapien
ggaactgtgctccatggtatttact

SEQ ID NO: 119398 - DNA, 25 bp, Homo sapien
cataaaaacctacacaggggctggg

SEQ ID NO: 119399 - DNA, 25 bp, Homo sapien
cattcttaccatacagtgtaggaac

SEQ ID NO: 119400 - DNA, 25 bp, Homo sapien
aactctaatttactgctctctggaa

SEQ ID NO: 119401 - DNA, 25 bp, Homo sapien
gatttaccagtatactaagctgaag

SEQ ID NO: 119402 - DNA, 25 bp, Homo sapien
ggataattcgtttctgcttttccac

SEQ ID NO: 119403 - DNA, 25 bp, Homo sapien
agttcaccggaaaatggataattcg

SEQ ID NO: 119404 - DNA, 25 bp, Homo sapien
ccatctgaaggcacatacaaagttc

SEQ ID NO: 119405 - DNA, 25 bp, Homo sapien
tattggcagtgtcagcactacagcc

SEQ ID NO: 119406 - DNA, 25 bp, Homo sapien
gctgtagcacttccaccaatgggtg

SEQ ID NO: 119407 - DNA, 25 bp, Homo sapien
agattacccagtaacctgagcctgc

SEQ ID NO: 119408 - DNA, 25 bp, Homo sapien
cctgactgacagcttggcaaagcag

SEQ ID NO: 119409 - DNA, 25 bp, Homo sapien
ggtgacagttgacccgaggcttaaa

SEQ ID NO: 119410 - DNA, 25 bp, Homo sapien
gaaactttcagtctagtggacacag

SEQ ID NO: 119411 - DNA, 25 bp, Homo sapien
gaagcccggcttgcaaaggtctttg

SEQ ID NO: 119412 - DNA, 25 bp, Homo sapien
ttccagcagtgacctgtataacagg

SEQ ID NO: 119413 - DNA, 25 bp, Homo sapien
taaatttaaaatctgtaccatgtgc

SEQ ID NO: 119414 - DNA, 25 bp, Homo sapien
tatgccaacatttgcgggtgtatat

SEQ ID NO: 119415 - DNA, 25 bp, Homo sapien
taagagaggcatagaatatactggg

SEQ ID NO: 119416 - DNA, 25 bp, Homo sapien
tcttacaaggtactaatggtatacc

SEQ ID NO: 119417 - DNA, 25 bp, Homo sapien
tggatagaaatatatactacagata

SEQ ID NO: 119418 - DNA, 25 bp, Homo sapien
ttgacccagaattccagttaaatgg

SEQ ID NO: 119419 - DNA, 25 bp, Homo sapien
taatgaaggtcaatgtagtaatacc

SEQ ID NO: 119420 - DNA, 25 bp, Homo sapien
ttaaaaatgcacatgccctttgacc

SEQ ID NO: 119421 - DNA, 25 bp, Homo sapien
cattctcattgtcttcatgttgagg

SEQ ID NO: 119422 - DNA, 25 bp, Homo sapien
tctcattgtcttcatgttgaggagg

SEQ ID NO: 119423 - DNA, 25 bp, Homo sapien
tgttgaggaggctgagaagaaggca

SEQ ID NO: 119424 - DNA, 25 bp, Homo sapien
ttcatgttgaggaggctgagaagaa

SEQ ID NO: 119425 - DNA, 25 bp, Homo sapien
caaaatactgtctggctgatgtaac

SEQ ID NO: 119426 - DNA, 25 bp, Homo sapien
gaacctggtctatacaccgaagtgc

SEQ ID NO: 119427 - DNA, 25 bp, Homo sapien
taacagaacagatttaggtgccaca

SEQ ID NO: 119428 - DNA, 25 bp, Homo sapien
ccgaagtgccagctcagtagtgtca

SEQ ID NO: 119429 - DNA, 25 bp, Homo sapien
cctattgcatgcaggtacaggcagt

SEQ ID NO: 119430 - DNA, 25 bp, Homo sapien
aaaccacttcgacttgcttcccaga

SEQ ID NO: 119431 - DNA, 25 bp, Homo sapien
ctgaagctgcagttggtaagaacca

SEQ ID NO: 119432 - DNA, 25 bp, Homo sapien
tcaggtgctatgactttcaccaggc

SEQ ID NO: 119433 - DNA, 25 bp, Homo sapien
tctcctggctgctgtattaaccact

SEQ ID NO: 119434 - DNA, 25 bp, Homo sapien
tccctcgcgctgacaatgcgtgtgt

SEQ ID NO: 119435 - DNA, 25 bp, Homo sapien
cgagagctgtctggcgtctcctggc

SEQ ID NO: 119436 - DNA, 25 bp, Homo sapien
aatttgaaccaggtgccgagagctg

SEQ ID NO: 119437 - DNA, 25 bp, Homo sapien
gccctctaattccatcccaaggctc

SEQ ID NO: 119438 - DNA, 25 bp, Homo sapien
gccatgtggccctctaattccatcc

SEQ ID NO: 119439 - DNA, 25 bp, Homo sapien
gtggccctctaattccatcccaagg

SEQ ID NO: 119440 - DNA, 25 bp, Homo sapien
atgtggccctctaattccatcccaa

SEQ ID NO: 119441 - DNA, 25 bp, Homo sapien
gaggtgtagtctacccacagtggcc

SEQ ID NO: 119442 - DNA, 25 bp, Homo sapien
tacagtccactaggtgaacctctgg

SEQ ID NO: 119443 - DNA, 25 bp, Homo sapien
tctctggctgaacccaacaggaagc

SEQ ID NO: 119444 - DNA, 25 bp, Homo sapien
gaacctggcaagcatggctacacat

SEQ ID NO: 119445 - DNA, 25 bp, Homo sapien
atcaaggtgtggacacgtttggttc

SEQ ID NO: 119446 - DNA, 25 bp, Homo sapien
gtgtggacacgtttggttctcctga

SEQ ID NO: 119447 - DNA, 25 bp, Homo sapien
caaggtgtggacacgtttggttctc

SEQ ID NO: 119448 - DNA, 25 bp, Homo sapien
aggtgtggacacgtttggttctcct

SEQ ID NO: 119449 - DNA, 25 bp, Homo sapien
tagagtccgcattctcagctactcg

SEQ ID NO: 119450 - DNA, 25 bp, Homo sapien
tgtccccagaagatttagagtccgc

SEQ ID NO: 119451 - DNA, 25 bp, Homo sapien
tctagctgccagattgaagtgtgac

SEQ ID NO: 119452 - DNA, 25 bp, Homo sapien
tactcgggtgctctcagttccagat

SEQ ID NO: 119453 - DNA, 25 bp, Homo sapien
gagtacaaatcaatagctgtgatca

SEQ ID NO: 119454 - DNA, 25 bp, Homo sapien
tttaagagatgcatggccgcaaggg

SEQ ID NO: 119455 - DNA, 25 bp, Homo sapien
ccgcaagggccgtgggagtacaaat

SEQ ID NO: 119456 - DNA, 25 bp, Homo sapien
ttaagagatgcatggccgcaagggc

SEQ ID NO: 119457 - DNA, 25 bp, Homo sapien
tgattggattgcatcagtctttctc

SEQ ID NO: 119458 - DNA, 25 bp, Homo sapien
ctgtccttgattggattgcatcagt

SEQ ID NO: 119459 - DNA, 25 bp, Homo sapien
gattggattgcatcagtctttctct

SEQ ID NO: 119460 - DNA, 25 bp, Homo sapien
tcactgtccttgattggattgcatc

SEQ ID NO: 119461 - DNA, 25 bp, Homo sapien
tgacattgtggcagacagctatgcc

SEQ ID NO: 119462 - DNA, 25 bp, Homo sapien
caaaagactatgttgatggactatg

SEQ ID NO: 119463 - DNA, 25 bp, Homo sapien
taccaatcatgcctgaaacaaaaga

SEQ ID NO: 119464 - DNA, 25 bp, Homo sapien
gaagtactactccatacacagtgat

SEQ ID NO: 119465 - DNA, 25 bp, Homo sapien
catatgtgtgtcaatacactcataa

SEQ ID NO: 119466 - DNA, 25 bp, Homo sapien
tgtgtcccagaaggattggcaaatt

SEQ ID NO: 119467 - DNA, 25 bp, Homo sapien
cattggctgctatgggtaattctga

SEQ ID NO: 119468 - DNA, 25 bp, Homo sapien
ggctttactaacagctgttagcaca

SEQ ID NO: 119469 - DNA, 25 bp, Homo sapien
gaaatgcaggctctttcacagagga

SEQ ID NO: 119470 - DNA, 25 bp, Homo sapien
cgcacacccatagtcagaagtggag

SEQ ID NO: 119471 - DNA, 25 bp, Homo sapien
ggtatcgagtactttcaatccagct

SEQ ID NO: 119472 - DNA, 25 bp, Homo sapien
caatgctctggacactgggtatcga

SEQ ID NO: 119473 - DNA, 25 bp, Homo sapien
tccgaaccactgaaatcacatgggt

SEQ ID NO: 119474 - DNA, 25 bp, Homo sapien
gttcctattcctccgaaccactgaa

SEQ ID NO: 119475 - DNA, 25 bp, Homo sapien
actgaaatcacatgggtgtctgccc

SEQ ID NO: 119476 - DNA, 25 bp, Homo sapien
aatcacatgggtgtctgccctttgg

SEQ ID NO: 119477 - DNA, 25 bp, Homo sapien
gctccctttgtgtctgttcagcctc

SEQ ID NO: 119478 - DNA, 25 bp, Homo sapien
taactgtggatcagttataacagtc

SEQ ID NO: 119479 - DNA, 25 bp, Homo sapien
cgccctgcgtggttatgggctccct

SEQ ID NO: 119480 - DNA, 25 bp, Homo sapien
tccctgatgttctaactgtggatca

SEQ ID NO: 119481 - DNA, 25 bp, Homo sapien
gccaggcttgtagtacgtgcttagt

SEQ ID NO: 119482 - DNA, 25 bp, Homo sapien
tctggaagagcaattgtcaggccca

SEQ ID NO: 119483 - DNA, 25 bp, Homo sapien
agtgctgagtacagagccaggcttg

SEQ ID NO: 119484 - DNA, 25 bp, Homo sapien
cgtgggtgggatccatgcaactaca

SEQ ID NO: 119485 - DNA, 25 bp, Homo sapien
acagacacctattctaatcatgcat

SEQ ID NO: 119486 - DNA, 25 bp, Homo sapien
cagacacctattctaatcatgcatt

SEQ ID NO: 119487 - DNA, 25 bp, Homo sapien
ctcatttgctttttccaatcaagga

SEQ ID NO: 119488 - DNA, 25 bp, Homo sapien
acacctattctaatcatgcattttc

SEQ ID NO: 119489 - DNA, 25 bp, Homo sapien
taggattcaagtaaatagcctttgg

SEQ ID NO: 119490 - DNA, 25 bp, Homo sapien
tgctcagcccttctaaggaaggaaa

SEQ ID NO: 119491 - DNA, 25 bp, Homo sapien
ataatgtttacagcattgggcatgg

SEQ ID NO: 119492 - DNA, 25 bp, Homo sapien
catggtttgcacataagatcttggc

SEQ ID NO: 119493 - DNA, 25 bp, Homo sapien
tggagcatgctatgggtcccagaac

SEQ ID NO: 119494 - DNA, 25 bp, Homo sapien
tttatttagccatgtcgagacaggg

SEQ ID NO: 119495 - DNA, 25 bp, Homo sapien
gacataatcaacgatggcatcctgg

SEQ ID NO: 119496 - DNA, 25 bp, Homo sapien
tcctaaaggcttgcaagtcaaatgc

SEQ ID NO: 119497 - DNA, 25 bp, Homo sapien
cagctatttttatcaccgcaggaag

SEQ ID NO: 119498 - DNA, 25 bp, Homo sapien
tgcctgacctggaacaggagagcac

SEQ ID NO: 119499 - DNA, 25 bp, Homo sapien
ctgtagaaatgagctgtgggttgtc

SEQ ID NO: 119500 - DNA, 25 bp, Homo sapien
gacgtgctgggctacctttgcagga

SEQ ID NO: 119501 - DNA, 25 bp, Homo sapien
tgagccggggtgtcgtaaatcacca

SEQ ID NO: 119502 - DNA, 25 bp, Homo sapien
ctggaagctccctgatggtgcactg

SEQ ID NO: 119503 - DNA, 25 bp, Homo sapien
gtgaagttggagattctacctggaa

SEQ ID NO: 119504 - DNA, 25 bp, Homo sapien
tcactctggctccataaatcactgg

SEQ ID NO: 119505 - DNA, 25 bp, Homo sapien
tgcccacagcgatgtgaaacctatt

SEQ ID NO: 119506 - DNA, 25 bp, Homo sapien
caagtggaacctctttgtcttgtca

SEQ ID NO: 119507 - DNA, 25 bp, Homo sapien
ggccggcaccacataaagagctaaa

SEQ ID NO: 119508 - DNA, 25 bp, Homo sapien
caaagccatcgagagagccctgtgg

SEQ ID NO: 119509 - DNA, 25 bp, Homo sapien
gttgaccacaactgccttggcacag

SEQ ID NO: 119510 - DNA, 25 bp, Homo sapien
aactggcatttaagtccggagcgga

SEQ ID NO: 119511 - DNA, 25 bp, Homo sapien
gtgagggagtcacaaaactggcatt

SEQ ID NO: 119512 - DNA, 25 bp, Homo sapien
tcctcggagagctggagttgaccac

SEQ ID NO: 119513 - DNA, 25 bp, Homo sapien
ccttcaaggttgggtcctgatgctc

SEQ ID NO: 119514 - DNA, 25 bp, Homo sapien
cttcaaggttgggtcctgatgctca

SEQ ID NO: 119515 - DNA, 25 bp, Homo sapien
ctccttcaaggttgggtcctgatgc

SEQ ID NO: 119516 - DNA, 25 bp, Homo sapien
tccttcaaggttgggtcctgatgct

SEQ ID NO: 119517 - DNA, 25 bp, Homo sapien
agagccctggcctctagatgccctg

SEQ ID NO: 119518 - DNA, 25 bp, Homo sapien
tgaatccatggtgcctgcctgtgcc

SEQ ID NO: 119519 - DNA, 25 bp, Homo sapien
gctgacgttactgaaggctgtggca

SEQ ID NO: 119520 - DNA, 25 bp, Homo sapien
tccaaagctgtatatggagctgacg

SEQ ID NO: 119521 - DNA, 25 bp, Homo sapien
ccagaacagtccagactcagagaga

SEQ ID NO: 119522 - DNA, 25 bp, Homo sapien
agaacagtccagactcagagagagg

SEQ ID NO: 119523 - DNA, 25 bp, Homo sapien
gaccagaacagtccagactcagaga

SEQ ID NO: 119524 - DNA, 25 bp, Homo sapien
agtccagactcagagagaggcttcc

SEQ ID NO: 119525 - DNA, 25 bp, Homo sapien
gagttcttcactgagttcattgagg

SEQ ID NO: 119526 - DNA, 25 bp, Homo sapien
tcattgaggtcctccggtggcctcc

SEQ ID NO: 119527 - DNA, 25 bp, Homo sapien
agttcattgaggtcctccggtggcc

SEQ ID NO: 119528 - DNA, 25 bp, Homo sapien
attcattgagttcttcactgagttc

SEQ ID NO: 119529 - DNA, 25 bp, Homo sapien
cccaaatcagtaggaatttctcctc

SEQ ID NO: 119530 - DNA, 25 bp, Homo sapien
ttctcctcctaagaccttggcctta

SEQ ID NO: 119531 - DNA, 25 bp, Homo sapien
tcagtaggaatttctcctcctaaga

SEQ ID NO: 119532 - DNA, 25 bp, Homo sapien
aaatcagtaggaatttctcctccta

SEQ ID NO: 119533 - DNA, 25 bp, Homo sapien
cactgtgcagctacttttgatggac

SEQ ID NO: 119534 - DNA, 25 bp, Homo sapien
ggtttggcgaccacaggctacaggt

SEQ ID NO: 119535 - DNA, 25 bp, Homo sapien
gccttcagggccgaatcaaatttct

SEQ ID NO: 119536 - DNA, 25 bp, Homo sapien
ttgatggaccctccggaaatcgctt

SEQ ID NO: 119537 - DNA, 25 bp, Homo sapien
gatgacacagatcgcaatggcagtg

SEQ ID NO: 119538 - DNA, 25 bp, Homo sapien
gagtagtcatgcttgagcccaatgt

SEQ ID NO: 119539 - DNA, 25 bp, Homo sapien
tgccggtgagcaaggctgatgacac

SEQ ID NO: 119540 - DNA, 25 bp, Homo sapien
cagtcgggacaccacaggactaggg

SEQ ID NO: 119541 - DNA, 25 bp, Homo sapien
tcaggtctccagtaagtaggaaaat

SEQ ID NO: 119542 - DNA, 25 bp, Homo sapien
tagaaattgttatcccggtcatggg

SEQ ID NO: 119543 - DNA, 25 bp, Homo sapien
tcatgggaaggtcattgacaagttt

SEQ ID NO: 119544 - DNA, 25 bp, Homo sapien
aggcagtgacaagtttagaaattgt

SEQ ID NO: 119545 - DNA, 25 bp, Homo sapien
atctacccagcttataggactccct

SEQ ID NO: 119546 - DNA, 25 bp, Homo sapien
ctttgataactgatgcttggcgcat

SEQ ID NO: 119547 - DNA, 25 bp, Homo sapien
tgttcccatcctggttgagtccttc

SEQ ID NO: 119548 - DNA, 25 bp, Homo sapien
gatgggaacccagatctttgataac

SEQ ID NO: 119549 - DNA, 25 bp, Homo sapien
tgatctcgtcttttcgggtgcccac

SEQ ID NO: 119550 - DNA, 25 bp, Homo sapien
gttggtccagttgatctcgtctttt

SEQ ID NO: 119551 - DNA, 25 bp, Homo sapien
cagttgatctcgtcttttcgggtgc

SEQ ID NO: 119552 - DNA, 25 bp, Homo sapien
gtccagttgatctcgtcttttcggg

SEQ ID NO: 119553 - DNA, 25 bp, Homo sapien
tctggcttcttggaggtttgggaga

SEQ ID NO: 119554 - DNA, 25 bp, Homo sapien
agatgctggggtcccagccgctcac

SEQ ID NO: 119555 - DNA, 25 bp, Homo sapien
tcactctggcttcttggaggtttgg

SEQ ID NO: 119556 - DNA, 25 bp, Homo sapien
cttcttggaggtttgggagatgctg

SEQ ID NO: 119557 - DNA, 25 bp, Homo sapien
gggtcaagacagcaggcagatggcc

SEQ ID NO: 119558 - DNA, 25 bp, Homo sapien
gtagggtcaagacagcaggcagatg

SEQ ID NO: 119559 - DNA, 25 bp, Homo sapien
ggtcaagacagcaggcagatggcca

SEQ ID NO: 119560 - DNA, 25 bp, Homo sapien
aaggtagggtcaagacagcaggcag

SEQ ID NO: 119561 - DNA, 25 bp, Homo sapien
caggggttgtaacatccttgcagag

SEQ ID NO: 119562 - DNA, 25 bp, Homo sapien
aagcacacatgtactttccgcctgc

SEQ ID NO: 119563 - DNA, 25 bp, Homo sapien
tttcccttttgttgcattccaagca

SEQ ID NO: 119564 - DNA, 25 bp, Homo sapien
gaggctgcggcttatgacctatcat

SEQ ID NO: 119565 - DNA, 25 bp, Homo sapien
tacacttactgctaaaggcgtcctt

SEQ ID NO: 119566 - DNA, 25 bp, Homo sapien
cacttaccaggtacacttactgcta

SEQ ID NO: 119567 - DNA, 25 bp, Homo sapien
taccaggtacacttactgctaaagg

SEQ ID NO: 119568 - DNA, 25 bp, Homo sapien
tgagcacttaccaggtacacttact

SEQ ID NO: 119569 - DNA, 25 bp, Homo sapien
cgagaggtgacttgagtcaaagcct

SEQ ID NO: 119570 - DNA, 25 bp, Homo sapien
agccttgaacgccagcaggattgga

SEQ ID NO: 119571 - DNA, 25 bp, Homo sapien
tgactaaaccatacaaaacgagagg

SEQ ID NO: 119572 - DNA, 25 bp, Homo sapien
ggggtcagtgcttgcctcataatca

SEQ ID NO: 119573 - DNA, 25 bp, Homo sapien
tgccattacccactctgaaccgaat

SEQ ID NO: 119574 - DNA, 25 bp, Homo sapien
aactcagtccgtggaaagcaccaat

SEQ ID NO: 119575 - DNA, 25 bp, Homo sapien
aaccgaatcattctctgctgttgga

SEQ ID NO: 119576 - DNA, 25 bp, Homo sapien
tagcctctgatgcatagatgtgacc

SEQ ID NO: 119577 - DNA, 25 bp, Homo sapien
ttcctctggacctgagctctgatac

SEQ ID NO: 119578 - DNA, 25 bp, Homo sapien
tacccactgcattgtcagaatcaga

SEQ ID NO: 119579 - DNA, 25 bp, Homo sapien
tggacctgagctctgatacccactg

SEQ ID NO: 119580 - DNA, 25 bp, Homo sapien
cactgcattgtcagaatcagagcaa

SEQ ID NO: 119581 - DNA, 25 bp, Homo sapien
gaccctgatacgatcctggaccagg

SEQ ID NO: 119582 - DNA, 25 bp, Homo sapien
ccagaccctgatacgatcctggacc

SEQ ID NO: 119583 - DNA, 25 bp, Homo sapien
agaccctgatacgatcctggaccag

SEQ ID NO: 119584 - DNA, 25 bp, Homo sapien
aggcaggcattacaccccgataagc

SEQ ID NO: 119585 - DNA, 25 bp, Homo sapien
taccctaagctccttactcctgacc

SEQ ID NO: 119586 - DNA, 25 bp, Homo sapien
tttaccctaagctccttactcctga

SEQ ID NO: 119587 - DNA, 25 bp, Homo sapien
ccctaagctccttactcctgaccat

SEQ ID NO: 119588 - DNA, 25 bp, Homo sapien
ttaccctaagctccttactcctgac

SEQ ID NO: 119589 - DNA, 25 bp, Homo sapien
atcaatccattgtctcttggtacag

SEQ ID NO: 119590 - DNA, 25 bp, Homo sapien
tatcaatccattgtctcttggtaca

SEQ ID NO: 119591 - DNA, 25 bp, Homo sapien
catccaaaggcggaaactgggccat

SEQ ID NO: 119592 - DNA, 25 bp, Homo sapien
catcatccaaaggcggaaactgggc

SEQ ID NO: 119593 - DNA, 25 bp, Homo sapien
taaagcagcaaaagtatgtgaaaac

SEQ ID NO: 119594 - DNA, 25 bp, Homo sapien
gaaaaatatggaatgagtttcttag

SEQ ID NO: 119595 - DNA, 25 bp, Homo sapien
cattcactttcaaaagcagatgatg

SEQ ID NO: 119596 - DNA, 25 bp, Homo sapien
cataaatccataacattcactttca

SEQ ID NO: 119597 - DNA, 25 bp, Homo sapien
gcagcttaagtttaatgccaaactt

SEQ ID NO: 119598 - DNA, 25 bp, Homo sapien
tctttgcgtgcagcttaagtttaat

SEQ ID NO: 119599 - DNA, 25 bp, Homo sapien
atgaatattctttgcgtgcagctta

SEQ ID NO: 119600 - DNA, 25 bp, Homo sapien
gcgtgcagcttaagtttaatgccaa

SEQ ID NO: 119601 - DNA, 25 bp, Homo sapien
tcccctgacaagtggcggtagtggc

SEQ ID NO: 119602 - DNA, 25 bp, Homo sapien
aatgtggatctcatcctgtctgggt

SEQ ID NO: 119603 - DNA, 25 bp, Homo sapien
gatatgaggtgcttgaagaccactc

SEQ ID NO: 119604 - DNA, 25 bp, Homo sapien
catgctactattatcacaggcagca

SEQ ID NO: 119605 - DNA, 25 bp, Homo sapien
tagaaagtggaacatagctatagca

SEQ ID NO: 119606 - DNA, 25 bp, Homo sapien
cgctttattgcaacatagaaagtgg

SEQ ID NO: 119607 - DNA, 25 bp, Homo sapien
tactcttctatcgaaacatggcaag

SEQ ID NO: 119608 - DNA, 25 bp, Homo sapien
catagctatagcagggtcgtactct

SEQ ID NO: 119609 - DNA, 25 bp, Homo sapien
gaaagcatattagtagtgtttcctg

SEQ ID NO: 119610 - DNA, 25 bp, Homo sapien
tgtttcctgtcaaaatacacagagg

SEQ ID NO: 119611 - DNA, 25 bp, Homo sapien
gcactttatttggaccattttctcc

SEQ ID NO: 119612 - DNA, 25 bp, Homo sapien
atacacagaggaagcactttatttg

SEQ ID NO: 119613 - DNA, 25 bp, Homo sapien
gggtctctaagtccaatttatatgc

SEQ ID NO: 119614 - DNA, 25 bp, Homo sapien
tatgccatgcccactgtgcactgag

SEQ ID NO: 119615 - DNA, 25 bp, Homo sapien
gatcggtgttaaccctgacctctga

SEQ ID NO: 119616 - DNA, 25 bp, Homo sapien
tgtcagcttcaaagttccaccgaga

SEQ ID NO: 119617 - DNA, 25 bp, Homo sapien
aaactgtgtttcttgtttcccatca

SEQ ID NO: 119618 - DNA, 25 bp, Homo sapien
aactgtgtttcttgtttcccatcac

SEQ ID NO: 119619 - DNA, 25 bp, Homo sapien
gaatgaagtttttgcttttccttca

SEQ ID NO: 119620 - DNA, 25 bp, Homo sapien
catcccacccaaggaatgaagtttt

SEQ ID NO: 119621 - DNA, 25 bp, Homo sapien
ggaacgcagcgtacaatttctcagg

SEQ ID NO: 119622 - DNA, 25 bp, Homo sapien
gaatcccgttctaaagatgtgcact

SEQ ID NO: 119623 - DNA, 25 bp, Homo sapien
atttttcctgcgctgtacacccggg

SEQ ID NO: 119624 - DNA, 25 bp, Homo sapien
gagaaaaggattcaactctgccacc

SEQ ID NO: 119625 - DNA, 25 bp, Homo sapien
tactactcctccaacggcatcaagg

SEQ ID NO: 119626 - DNA, 25 bp, Homo sapien
tggtggaccgactaccacgtcaagt

SEQ ID NO: 119627 - DNA, 25 bp, Homo sapien
tggagtacgactatacaggcgaccc

SEQ ID NO: 119628 - DNA, 25 bp, Homo sapien
gggcccagtgtacctctactacgag

SEQ ID NO: 119629 - DNA, 25 bp, Homo sapien
gtccccgggcttgcgcggcgcggag

SEQ ID NO: 119630 - DNA, 25 bp, Homo sapien
gcggcgcggagagggaggcgccccg

SEQ ID NO: 119631 - DNA, 25 bp, Homo sapien
acccgcgagcagtccccgggcttgc

SEQ ID NO: 119632 - DNA, 25 bp, Homo sapien
tggcgggaaacccgacccgcgagca

SEQ ID NO: 119633 - DNA, 25 bp, Homo sapien
cggaggcagaggaggggcccgggca

SEQ ID NO: 119634 - DNA, 25 bp, Homo sapien
ctgtgacggaggcagaggaggggcc

SEQ ID NO: 119635 - DNA, 25 bp, Homo sapien
gaggcagaggaggggcccgggcaaa

SEQ ID NO: 119636 - DNA, 25 bp, Homo sapien
tgacggaggcagaggaggggcccgg

SEQ ID NO: 119637 - DNA, 25 bp, Homo sapien
gcgaggtgcggctcccggtgacccg

SEQ ID NO: 119638 - DNA, 25 bp, Homo sapien
gggcgaggtgcggctcccggtgacc

SEQ ID NO: 119639 - DNA, 25 bp, Homo sapien
ggggtgcagcgcacctgggcggagg

SEQ ID NO: 119640 - DNA, 25 bp, Homo sapien
gacccgcgggggtgcagcgcacctg

SEQ ID NO: 119641 - DNA, 25 bp, Homo sapien
tgcaaggtgacacagcactggtgcc

SEQ ID NO: 119642 - DNA, 25 bp, Homo sapien
gatgacgttctactcctgtgacagc

SEQ ID NO: 119643 - DNA, 25 bp, Homo sapien
taagctgaagtaggtgagtggctcc

SEQ ID NO: 119644 - DNA, 25 bp, Homo sapien
tatggaggtgcaaaaaccaagagcc

SEQ ID NO: 119645 - DNA, 25 bp, Homo sapien
cttgcactatctttctgctttatgc

SEQ ID NO: 119646 - DNA, 25 bp, Homo sapien
gttgctgcagacccagagggattca

SEQ ID NO: 119647 - DNA, 25 bp, Homo sapien
atctttctgctttatgccccttggt

SEQ ID NO: 119648 - DNA, 25 bp, Homo sapien
ttgctgcagacccagagggattcac

SEQ ID NO: 119649 - DNA, 25 bp, Homo sapien
gctctagtttgattttaggttggga

SEQ ID NO: 119650 - DNA, 25 bp, Homo sapien
catgggagatgaaagtagagttgaa

SEQ ID NO: 119651 - DNA, 25 bp, Homo sapien
aaatatataagctgaactgagaggc

SEQ ID NO: 119652 - DNA, 25 bp, Homo sapien
ttgggagggtgtattcaaaaatata

SEQ ID NO: 119653 - DNA, 25 bp, Homo sapien
tgaagattgttataatcacacagaa

SEQ ID NO: 119654 - DNA, 25 bp, Homo sapien
gaagattgttataatcacacagaaa

SEQ ID NO: 119655 - DNA, 25 bp, Homo sapien
tataatcacacagaaatatggccat

SEQ ID NO: 119656 - DNA, 25 bp, Homo sapien
ttgttataatcacacagaaatatgg

SEQ ID NO: 119657 - DNA, 25 bp, Homo sapien
gcatttgataccttgccaggcacat

SEQ ID NO: 119658 - DNA, 25 bp, Homo sapien
ggcacatggtacacttcagctgtta

SEQ ID NO: 119659 - DNA, 25 bp, Homo sapien
agaaaacaatgcaacacgggtaaat

SEQ ID NO: 119660 - DNA, 25 bp, Homo sapien
taattaacataaggcatttgatacc

SEQ ID NO: 119661 - DNA, 25 bp, Homo sapien
ttgtaaagcctgctcccaaacgtcc

SEQ ID NO: 119662 - DNA, 25 bp, Homo sapien
ctctagctttaagagccactaaagg

SEQ ID NO: 119663 - DNA, 25 bp, Homo sapien
tttcctccaaacagctgaactctag

SEQ ID NO: 119664 - DNA, 25 bp, Homo sapien
gatgtcgcatctaccctgtgggtca

SEQ ID NO: 119665 - DNA, 25 bp, Homo sapien
gtatttgcagtcagagtgggcagcc

SEQ ID NO: 119666 - DNA, 25 bp, Homo sapien
gcgcggcaagggcagaaaatgttca

SEQ ID NO: 119667 - DNA, 25 bp, Homo sapien
tatgccgcaaagcttgctccctgag

SEQ ID NO: 119668 - DNA, 25 bp, Homo sapien
aacacacacgcggaagaaattgcct

SEQ ID NO: 119669 - DNA, 25 bp, Homo sapien
ggaaaggcagcgcctaagcgcccct

SEQ ID NO: 119670 - DNA, 25 bp, Homo sapien
gagaaccgggagtcccgtctcaggc

SEQ ID NO: 119671 - DNA, 25 bp, Homo sapien
aagcgcccctcgactggccattctg

SEQ ID NO: 119672 - DNA, 25 bp, Homo sapien
gccgcgctgcttcgcagcgggagaa

SEQ ID NO: 119673 - DNA, 25 bp, Homo sapien
cccttcttgaagagcgagtggcgca

SEQ ID NO: 119674 - DNA, 25 bp, Homo sapien
cgcaaaactcctcgttgtacgtggg

SEQ ID NO: 119675 - DNA, 25 bp, Homo sapien
caaccctcgaaggtgtccgaggcgc

SEQ ID NO: 119676 - DNA, 25 bp, Homo sapien
cgtcggtgacgttagcgcaaaactc

SEQ ID NO: 119677 - DNA, 25 bp, Homo sapien
ccacaaagcgatgggaaagcgggac

SEQ ID NO: 119678 - DNA, 25 bp, Homo sapien
caaagtctggagggaattccctcag

SEQ ID NO: 119679 - DNA, 25 bp, Homo sapien
ccctcagccacaaagcgatgggaaa

SEQ ID NO: 119680 - DNA, 25 bp, Homo sapien
gcggccacgtggacgaagaccaaag

SEQ ID NO: 119681 - DNA, 25 bp, Homo sapien
acttcccgttaggccaagccgctgt

SEQ ID NO: 119682 - DNA, 25 bp, Homo sapien
ctgcccgacttcccgttaggccaag

SEQ ID NO: 119683 - DNA, 25 bp, Homo sapien
cgacttcccgttaggccaagccgct

SEQ ID NO: 119684 - DNA, 25 bp, Homo sapien
tgcccgacttcccgttaggccaagc

SEQ ID NO: 119685 - DNA, 25 bp, Homo sapien
cagtgtagctcatgtacctctggga

SEQ ID NO: 119686 - DNA, 25 bp, Homo sapien
tacctctgggatgtgcaagccgaaa

SEQ ID NO: 119687 - DNA, 25 bp, Homo sapien
gatgtgcaagccgaaacacgtgtgc

SEQ ID NO: 119688 - DNA, 25 bp, Homo sapien
catttccctgccagtgtagctcatg

SEQ ID NO: 119689 - DNA, 25 bp, Homo sapien
tcaaagtgggaacgatgacacctgc

SEQ ID NO: 119690 - DNA, 25 bp, Homo sapien
cctgagagtcttcaaatggcgtact

SEQ ID NO: 119691 - DNA, 25 bp, Homo sapien
gttagcaccgtgtagagcgctctag

SEQ ID NO: 119692 - DNA, 25 bp, Homo sapien
taggcagtaaaagcatgttagcacc

SEQ ID NO: 119693 - DNA, 25 bp, Homo sapien
ctgagttgccttcttggcagcttta

SEQ ID NO: 119694 - DNA, 25 bp, Homo sapien
catattactgtatgtggctatccag

SEQ ID NO: 119695 - DNA, 25 bp, Homo sapien
ggcatgaaggtgagtgcctattgaa

SEQ ID NO: 119696 - DNA, 25 bp, Homo sapien
tggtgccttttgtacgctatctaaa

SEQ ID NO: 119697 - DNA, 25 bp, Homo sapien
tcgggagggctgaaccaggaaaaca

SEQ ID NO: 119698 - DNA, 25 bp, Homo sapien
caatcatgagaataaacaacggcac

SEQ ID NO: 119699 - DNA, 25 bp, Homo sapien
tagtaacatggctgcttcacctgac

SEQ ID NO: 119700 - DNA, 25 bp, Homo sapien
taaacactgtgggttgatcagtcag

SEQ ID NO: 119701 - DNA, 25 bp, Homo sapien
tcactcctgggcttcgccagcgcag

SEQ ID NO: 119702 - DNA, 25 bp, Homo sapien
tgggcaccgggaagaaaaatgaaca

SEQ ID NO: 119703 - DNA, 25 bp, Homo sapien
actcctgggcttcgccagcgcagtc

SEQ ID NO: 119704 - DNA, 25 bp, Homo sapien
tgggcttcgccagcgcagtctcctg

SEQ ID NO: 119705 - DNA, 25 bp, Homo sapien
ggcctgtttatggatgtctttgtag

SEQ ID NO: 119706 - DNA, 25 bp, Homo sapien
tctttgtagttacatggagagtgac

SEQ ID NO: 119707 - DNA, 25 bp, Homo sapien
catggagagtgacatattttttcta

SEQ ID NO: 119708 - DNA, 25 bp, Homo sapien
cactacagggagagctccttgagct

SEQ ID NO: 119709 - DNA, 25 bp, Homo sapien
catgcactggcaatacaacgggaac

SEQ ID NO: 119710 - DNA, 25 bp, Homo sapien
tcctgttcagaacacagagttggcc

SEQ ID NO: 119711 - DNA, 25 bp, Homo sapien
gttggccacgtaggaaaggctctgc

SEQ ID NO: 119712 - DNA, 25 bp, Homo sapien
tcaccaggcttaggacctcacaagg

SEQ ID NO: 119713 - DNA, 25 bp, Homo sapien
ttcagtgagggctgaaacacctccg

SEQ ID NO: 119714 - DNA, 25 bp, Homo sapien
tcctgtggaaacacttacagtgcaa

SEQ ID NO: 119715 - DNA, 25 bp, Homo sapien
tgcagcaagagatgttaagatctgt

SEQ ID NO: 119716 - DNA, 25 bp, Homo sapien
gttctgctgcatagccacaacagtg

SEQ ID NO: 119717 - DNA, 25 bp, Homo sapien
tactggaaacgccaatcaggccttg

SEQ ID NO: 119718 - DNA, 25 bp, Homo sapien
gctatcttgagaatgaggcgacaca

SEQ ID NO: 119719 - DNA, 25 bp, Homo sapien
taagtagcgattatattccagccca

SEQ ID NO: 119720 - DNA, 25 bp, Homo sapien
gaaagtcaagtccagttaagtagcg

SEQ ID NO: 119721 - DNA, 25 bp, Homo sapien
aagaacaggtctggtcacaaggcaa

SEQ ID NO: 119722 - DNA, 25 bp, Homo sapien
cagctgctggattgatcgtcccaca

SEQ ID NO: 119723 - DNA, 25 bp, Homo sapien
agcactctccactaccttgcttgtg

SEQ ID NO: 119724 - DNA, 25 bp, Homo sapien
ggtctggtcacaaggcaaccatcca

SEQ ID NO: 119725 - DNA, 25 bp, Homo sapien
aagtctgttcacctagccttgtaag

SEQ ID NO: 119726 - DNA, 25 bp, Homo sapien
gaaagagatgcaaggagccattgcc

SEQ ID NO: 119727 - DNA, 25 bp, Homo sapien
ccttgtaagtggcagccttcaaagt

SEQ ID NO: 119728 - DNA, 25 bp, Homo sapien
tgcttcccagggttaatctgagttg

SEQ ID NO: 119729 - DNA, 25 bp, Homo sapien
aagaatgccaagcgctcagtcagtc

SEQ ID NO: 119730 - DNA, 25 bp, Homo sapien
aagcgctcagtcagtctgacaggca

SEQ ID NO: 119731 - DNA, 25 bp, Homo sapien
gctcagtcagtctgacaggcagttc

SEQ ID NO: 119732 - DNA, 25 bp, Homo sapien
tgccaagcgctcagtcagtctgaca

SEQ ID NO: 119733 - DNA, 25 bp, Homo sapien
gaccagtgttccgatgacttgccat

SEQ ID NO: 119734 - DNA, 25 bp, Homo sapien
gcttggaagttcacgcacaggtgtg

SEQ ID NO: 119735 - DNA, 25 bp, Homo sapien
cctggagggttgctgaccaaagatg

SEQ ID NO: 119736 - DNA, 25 bp, Homo sapien
gcagatgtgcagatatgccatagaa

SEQ ID NO: 119737 - DNA, 25 bp, Homo sapien
gctattgtcgctaaagatacaggca

SEQ ID NO: 119738 - DNA, 25 bp, Homo sapien
taagatgagagaatgccacatacgc

SEQ ID NO: 119739 - DNA, 25 bp, Homo sapien
aaaactctgtctgtggtaaggtggc

SEQ ID NO: 119740 - DNA, 25 bp, Homo sapien
gatacaggcatgctctaatgataag

SEQ ID NO: 119741 - DNA, 25 bp, Homo sapien
ttacttcttcaacttctcaggctcc

SEQ ID NO: 119742 - DNA, 25 bp, Homo sapien
ttcttcaacttctcaggctcctgga

SEQ ID NO: 119743 - DNA, 25 bp, Homo sapien
acttctcaggctcctggaagccaag

SEQ ID NO: 119744 - DNA, 25 bp, Homo sapien
caacttctcaggctcctggaagcca

SEQ ID NO: 119745 - DNA, 25 bp, Homo sapien
caatttgtccaagcgtcaggcatgg

SEQ ID NO: 119746 - DNA, 25 bp, Homo sapien
tattagaacttactcaggcactgat

SEQ ID NO: 119747 - DNA, 25 bp, Homo sapien
agaaattgtccccttgcctgtaagg

SEQ ID NO: 119748 - DNA, 25 bp, Homo sapien
tactttccgtgcgtagctactgtag

SEQ ID NO: 119749 - DNA, 25 bp, Homo sapien
ggccacttctctcagccattcccat

SEQ ID NO: 119750 - DNA, 25 bp, Homo sapien
tcacttccaggccacttctctcagc

SEQ ID NO: 119751 - DNA, 25 bp, Homo sapien
tccaggccacttctctcagccattc

SEQ ID NO: 119752 - DNA, 25 bp, Homo sapien
tggccttcacttccaggccacttct

SEQ ID NO: 119753 - DNA, 25 bp, Homo sapien
gaaaacagactttcctactcatcga

SEQ ID NO: 119754 - DNA, 25 bp, Homo sapien
tgcttccacaagcaatggaatatgt

SEQ ID NO: 119755 - DNA, 25 bp, Homo sapien
taggaaagtggatatattcaggaaa

SEQ ID NO: 119756 - DNA, 25 bp, Homo sapien
aaaagtcctgcatataacccttggg

SEQ ID NO: 119757 - DNA, 25 bp, Homo sapien
ctgctgactctaccctttctctgtg

SEQ ID NO: 119758 - DNA, 25 bp, Homo sapien
tcgcagttcagtctggaggagtctc

SEQ ID NO: 119759 - DNA, 25 bp, Homo sapien
gagtctccttgtgtcaggtattagg

SEQ ID NO: 119760 - DNA, 25 bp, Homo sapien
tattaggcagaagacccggcatgaa

SEQ ID NO: 119761 - DNA, 25 bp, Homo sapien
gcctttcctcgcagttcagtctgga

SEQ ID NO: 119762 - DNA, 25 bp, Homo sapien
gatcactcatgtggcctaaggcaca

SEQ ID NO: 119763 - DNA, 25 bp, Homo sapien
tcactcatgtggcctaaggcacaca

SEQ ID NO: 119764 - DNA, 25 bp, Homo sapien
ggatcactcatgtggcctaaggcac

SEQ ID NO: 119765 - DNA, 25 bp, Homo sapien
aggatcactcatgtggcctaaggca

SEQ ID NO: 119766 - DNA, 25 bp, Homo sapien
aaaggtctgtaacactgtatcggag

SEQ ID NO: 119767 - DNA, 25 bp, Homo sapien
gagtatggactctagatctaagggc

SEQ ID NO: 119768 - DNA, 25 bp, Homo sapien
aaaagatgctggcttaaggaccttc

SEQ ID NO: 119769 - DNA, 25 bp, Homo sapien
ttagagcaggagtttgcagacaagg

SEQ ID NO: 119770 - DNA, 25 bp, Homo sapien
caaataattaggctagcaacagtcc

SEQ ID NO: 119771 - DNA, 25 bp, Homo sapien
taagagactgtctcagtggtacaag

SEQ ID NO: 119772 - DNA, 25 bp, Homo sapien
cagtcctaaaacaacatgctggagg

SEQ ID NO: 119773 - DNA, 25 bp, Homo sapien
ggatgatgaaaagcccaaaggcagc

SEQ ID NO: 119774 - DNA, 25 bp, Homo sapien
gcccatcaggtccaaagcttctggt

SEQ ID NO: 119775 - DNA, 25 bp, Homo sapien
ccagcccatcaggtccaaagcttct

SEQ ID NO: 119776 - DNA, 25 bp, Homo sapien
gacagaggctctgaagagaccaagc

SEQ ID NO: 119777 - DNA, 25 bp, Homo sapien
atcaggtccaaagcttctggtgctc

SEQ ID NO: 119778 - DNA, 25 bp, Homo sapien
tatctcatcacttgcaataagtctg

SEQ ID NO: 119779 - DNA, 25 bp, Homo sapien
catcacttgcaataagtctgtaacc

SEQ ID NO: 119780 - DNA, 25 bp, Homo sapien
catacacatatctcatcacttgcaa

SEQ ID NO: 119781 - DNA, 25 bp, Homo sapien
acatatctcatcacttgcaataagt

SEQ ID NO: 119782 - DNA, 25 bp, Homo sapien
acccactgtggtggaaaagccggat

SEQ ID NO: 119783 - DNA, 25 bp, Homo sapien
cactgtggtggaaaagccggattta

SEQ ID NO: 119784 - DNA, 25 bp, Homo sapien
cggatttaaacacggtcttcaagtg

SEQ ID NO: 119785 - DNA, 25 bp, Homo sapien
atttaaacacggtcttcaagtgttg

SEQ ID NO: 119786 - DNA, 25 bp, Homo sapien
ccccaagatgggtcaggagctactc

SEQ ID NO: 119787 - DNA, 25 bp, Homo sapien
ggagctctcacaagtagaacaggtt

SEQ ID NO: 119788 - DNA, 25 bp, Homo sapien
gacagcaggagattccaccagttag

SEQ ID NO: 119789 - DNA, 25 bp, Homo sapien
gacctcacaacataaactactgctg

SEQ ID NO: 119790 - DNA, 25 bp, Homo sapien
ggtgtcgtcctctgcatatagtcca

SEQ ID NO: 119791 - DNA, 25 bp, Homo sapien
gtttccgaaagaccccatacagcat

SEQ ID NO: 119792 - DNA, 25 bp, Homo sapien
caccactagcttaggtgggcggact

SEQ ID NO: 119793 - DNA, 25 bp, Homo sapien
gaagtcttttcatatggtgtcgtcc

SEQ ID NO: 119794 - DNA, 25 bp, Homo sapien
taggagccttgcattcactactctt

SEQ ID NO: 119795 - DNA, 25 bp, Homo sapien
tctggtcaatcttaaggaagcacta

SEQ ID NO: 119796 - DNA, 25 bp, Homo sapien
gaacacatgtggcttggtcaactgc

SEQ ID NO: 119797 - DNA, 25 bp, Homo sapien
gagtctctgctacatatttccacca

SEQ ID NO: 119798 - DNA, 25 bp, Homo sapien
gagacctccatatcttatgcatatg

SEQ ID NO: 119799 - DNA, 25 bp, Homo sapien
tgcatatggcttataagagcagcat

SEQ ID NO: 119800 - DNA, 25 bp, Homo sapien
tactaaaccacatggcaagaatatg

SEQ ID NO: 119801 - DNA, 25 bp, Homo sapien
aaatagagaaataacggcaacatac

SEQ ID NO: 119802 - DNA, 25 bp, Homo sapien
aaatactttcccctctggctcgaga

SEQ ID NO: 119803 - DNA, 25 bp, Homo sapien
attaccacaaatactttcccctctg

SEQ ID NO: 119804 - DNA, 25 bp, Homo sapien
acaaatactttcccctctggctcga

SEQ ID NO: 119805 - DNA, 25 bp, Homo sapien
atactttcccctctggctcgagatc

SEQ ID NO: 119806 - DNA, 25 bp, Homo sapien
tggacaaacagatcaacaggacaga

SEQ ID NO: 119807 - DNA, 25 bp, Homo sapien
tcaatttaagaaggcatacagacct

SEQ ID NO: 119808 - DNA, 25 bp, Homo sapien
ggagggctcatactatgtaaccata

SEQ ID NO: 119809 - DNA, 25 bp, Homo sapien
gaacaactgcattcgtgtattgaaa

SEQ ID NO: 119810 - DNA, 25 bp, Homo sapien
caactctttctggacagggaccact

SEQ ID NO: 119811 - DNA, 25 bp, Homo sapien
ccactgggcttcttgctgcagtaag

SEQ ID NO: 119812 - DNA, 25 bp, Homo sapien
ttaactgttttccttatcagcaact

SEQ ID NO: 119813 - DNA, 25 bp, Homo sapien
cttatcagcaactctttctggacag

SEQ ID NO: 119814 - DNA, 25 bp, Homo sapien
cttccaggagcgaggtcaagctagg

SEQ ID NO: 119815 - DNA, 25 bp, Homo sapien
tatccaagatgggaactagagctcc

SEQ ID NO: 119816 - DNA, 25 bp, Homo sapien
ttgacagtgcctccaggatcctagg

SEQ ID NO: 119817 - DNA, 25 bp, Homo sapien
cttacttaacacagacaggcagcca

SEQ ID NO: 119818 - DNA, 25 bp, Homo sapien
tgttaccaccaatgcaaacattact

SEQ ID NO: 119819 - DNA, 25 bp, Homo sapien
gcaagcactcagatactatttcaca

SEQ ID NO: 119820 - DNA, 25 bp, Homo sapien
cggtaaacaatctggtgaaacagtc

SEQ ID NO: 119821 - DNA, 25 bp, Homo sapien
gtgccaatttggaagacggtaaaca

SEQ ID NO: 119822 - DNA, 25 bp, Homo sapien
cacagatgcagagtgacacctttaa

SEQ ID NO: 119823 - DNA, 25 bp, Homo sapien
gaataaagattgacattaggcagct

SEQ ID NO: 119824 - DNA, 25 bp, Homo sapien
gatccagttcttagcttcaggaagg

SEQ ID NO: 119825 - DNA, 25 bp, Homo sapien
cctttaacaagatgaacagtggtga

SEQ ID NO: 119826 - DNA, 25 bp, Homo sapien
tcagccccggatcaaaaagtgagat

SEQ ID NO: 119827 - DNA, 25 bp, Homo sapien
gaccaacactggtggagccatgcct

SEQ ID NO: 119828 - DNA, 25 bp, Homo sapien
tatactacgaaaaaactgtggctcc

SEQ ID NO: 119829 - DNA, 25 bp, Homo sapien
aactctgctcggcacaatgctgaga

SEQ ID NO: 119830 - DNA, 25 bp, Homo sapien
gatgggatggtttgttggaagtcgc

SEQ ID NO: 119831 - DNA, 25 bp, Homo sapien
tccaggcttggaagtcctgacttca

SEQ ID NO: 119832 - DNA, 25 bp, Homo sapien
ctttccccagaagcccactggatat

SEQ ID NO: 119833 - DNA, 25 bp, Homo sapien
gtcgctggggctcaatccttgctga

SEQ ID NO: 119834 - DNA, 25 bp, Homo sapien
attagaaagtgtctgggcaagagcg

SEQ ID NO: 119835 - DNA, 25 bp, Homo sapien
tggtgagacgcagatacaaaacgtt

SEQ ID NO: 119836 - DNA, 25 bp, Homo sapien
tcacggtcacacgaaagattgcaga

SEQ ID NO: 119837 - DNA, 25 bp, Homo sapien
aacgtttgtcaagatagttggctgc

SEQ ID NO: 119838 - DNA, 25 bp, Homo sapien
cagtgtgtgaatgtaagcgcagaac

SEQ ID NO: 119839 - DNA, 25 bp, Homo sapien
cgtacgtgcagtttgcagtgtgtga

SEQ ID NO: 119840 - DNA, 25 bp, Homo sapien
cacagaacaggatagacctgcgcag

SEQ ID NO: 119841 - DNA, 25 bp, Homo sapien
gacctgcgcagatgttagatctttc

SEQ ID NO: 119842 - DNA, 25 bp, Homo sapien
cattctaggattccctgaggccctg

SEQ ID NO: 119843 - DNA, 25 bp, Homo sapien
aaaacagtggacgagagcatatgct

SEQ ID NO: 119844 - DNA, 25 bp, Homo sapien
gagggtaggagccagtttcacttga

SEQ ID NO: 119845 - DNA, 25 bp, Homo sapien
tgcatacatattggaagacagcggg

SEQ ID NO: 119846 - DNA, 25 bp, Homo sapien
ctctttgcccaagactatgtatgtg

SEQ ID NO: 119847 - DNA, 25 bp, Homo sapien
taactctttgcccaagactatgtat

SEQ ID NO: 119848 - DNA, 25 bp, Homo sapien
agaaaggttagggatcatgtttact

SEQ ID NO: 119849 - DNA, 25 bp, Homo sapien
ttcagaaaggttagggatcatgttt

SEQ ID NO: 119850 - DNA, 25 bp, Homo sapien
tgcctctactcttgattccatggaa

SEQ ID NO: 119851 - DNA, 25 bp, Homo sapien
gaaaagttctagtgctccacagtct

SEQ ID NO: 119852 - DNA, 25 bp, Homo sapien
ccctaaagcctaaaattgctgagca

SEQ ID NO: 119853 - DNA, 25 bp, Homo sapien
tttagcctttctagtggtatctcat

SEQ ID NO: 119854 - DNA, 25 bp, Homo sapien
ggcccccatggcttccaatgacttt

SEQ ID NO: 119855 - DNA, 25 bp, Homo sapien
ggcttccaatgactttcactgtcac

SEQ ID NO: 119856 - DNA, 25 bp, Homo sapien
catttggtcacataaagaaaatggg

SEQ ID NO: 119857 - DNA, 25 bp, Homo sapien
ctgggactttgcaagacatttggtc

SEQ ID NO: 119858 - DNA, 25 bp, Homo sapien
cctttggcgcttcctggtaaaatgt

SEQ ID NO: 119859 - DNA, 25 bp, Homo sapien
gctgcctcagatacgtggccatgaa

SEQ ID NO: 119860 - DNA, 25 bp, Homo sapien
gactcgccttcgcatagccctttgg

SEQ ID NO: 119861 - DNA, 25 bp, Homo sapien
cttgtgtccattgatctggtggact

SEQ ID NO: 119862 - DNA, 25 bp, Homo sapien
tgcacagatgagtctaccgcagctg

SEQ ID NO: 119863 - DNA, 25 bp, Homo sapien
tgtgtccatatcacccctggagtcc

SEQ ID NO: 119864 - DNA, 25 bp, Homo sapien
gatgctgaagtaaacggacacagat

SEQ ID NO: 119865 - DNA, 25 bp, Homo sapien
cagagttgctgccacaatatgccct

SEQ ID NO: 119866 - DNA, 25 bp, Homo sapien
ggcactgataaccctgtttcccaaa

SEQ ID NO: 119867 - DNA, 25 bp, Homo sapien
ctgataaccctgtttcccaaacact

SEQ ID NO: 119868 - DNA, 25 bp, Homo sapien
gcactgataaccctgtttcccaaac

SEQ ID NO: 119869 - DNA, 25 bp, Homo sapien
cactgataaccctgtttcccaaaca

SEQ ID NO: 119870 - DNA, 25 bp, Homo sapien
ggaacccaaatgacaggcaagcctg

SEQ ID NO: 119871 - DNA, 25 bp, Homo sapien
tgatgggcctggctaaaccacctga

SEQ ID NO: 119872 - DNA, 25 bp, Homo sapien
tcttattcagtccatccaagggaag

SEQ ID NO: 119873 - DNA, 25 bp, Homo sapien
gattttcttatccacacataggcta

SEQ ID NO: 119874 - DNA, 25 bp, Homo sapien
ccttgacagcagctggtgcgcccat

SEQ ID NO: 119875 - DNA, 25 bp, Homo sapien
agtccagccagttacagcagagtca

SEQ ID NO: 119876 - DNA, 25 bp, Homo sapien
aacaagactggactcgtctggcccc

SEQ ID NO: 119877 - DNA, 25 bp, Homo sapien
gtctggcccccttgacagcagctgg

SEQ ID NO: 119878 - DNA, 25 bp, Homo sapien
tgatggcagcgtttatggacgacac

SEQ ID NO: 119879 - DNA, 25 bp, Homo sapien
cgtttatggacgacacaggtgcaca

SEQ ID NO: 119880 - DNA, 25 bp, Homo sapien
ttggcaagtacaggctgtaacaatt

SEQ ID NO: 119881 - DNA, 25 bp, Homo sapien
tgtaacaattagatgatggcagcgt

SEQ ID NO: 119882 - DNA, 25 bp, Homo sapien
tgatcccgaacctctgttctgcaat

SEQ ID NO: 119883 - DNA, 25 bp, Homo sapien
cagtgatcgcagaatgttggcactt

SEQ ID NO: 119884 - DNA, 25 bp, Homo sapien
tgaagtccttgtcgcattattcccc

SEQ ID NO: 119885 - DNA, 25 bp, Homo sapien
gatgttgatcccgaacctctgttct

SEQ ID NO: 119886 - DNA, 25 bp, Homo sapien
tatctaaaaccatcagttctaggac

SEQ ID NO: 119887 - DNA, 25 bp, Homo sapien
accatcagttctaggacagattctg

SEQ ID NO: 119888 - DNA, 25 bp, Homo sapien
tctaaaaccatcagttctaggacag

SEQ ID NO: 119889 - DNA, 25 bp, Homo sapien
acatatctaaaaccatcagttctag

SEQ ID NO: 119890 - DNA, 25 bp, Homo sapien
cagttaggggccacgttcgcttgac

SEQ ID NO: 119891 - DNA, 25 bp, Homo sapien
gcttgacatcgaatatgcacattca

SEQ ID NO: 119892 - DNA, 25 bp, Homo sapien
tggagaaatatttccgggttggaga

SEQ ID NO: 119893 - DNA, 25 bp, Homo sapien
cagggtcttggcaagttccaccgca

SEQ ID NO: 119894 - DNA, 25 bp, Homo sapien
gagatcttcaagttgaaccgcttta

SEQ ID NO: 119895 - DNA, 25 bp, Homo sapien
tagaggtgaggacgctgacgcccat

SEQ ID NO: 119896 - DNA, 25 bp, Homo sapien
ttcacaatccataaaccaaaacttc

SEQ ID NO: 119897 - DNA, 25 bp, Homo sapien
caagttgaaccgctttagaggtgag

SEQ ID NO: 119898 - DNA, 25 bp, Homo sapien
taagccatggagttacagttagcgc

SEQ ID NO: 119899 - DNA, 25 bp, Homo sapien
cagttagcgctcaagtggaagtgca

SEQ ID NO: 119900 - DNA, 25 bp, Homo sapien
gatgatcggttctgccactcgaaac

SEQ ID NO: 119901 - DNA, 25 bp, Homo sapien
tgcatggaaacaccaatgccttgtg

SEQ ID NO: 119902 - DNA, 25 bp, Homo sapien
cgtcttagggtcgatctggaaacga

SEQ ID NO: 119903 - DNA, 25 bp, Homo sapien
tttccctgtcgtcttagggtcgatc

SEQ ID NO: 119904 - DNA, 25 bp, Homo sapien
gataccaagtcggttggaagaatta

SEQ ID NO: 119905 - DNA, 25 bp, Homo sapien
ccccaacactcggatgaactcaaag

SEQ ID NO: 119906 - DNA, 25 bp, Homo sapien
ggccagagacaggatccttttctcg

SEQ ID NO: 119907 - DNA, 25 bp, Homo sapien
cagagacaggatccttttctcggtc

SEQ ID NO: 119908 - DNA, 25 bp, Homo sapien
gaaggggtgattgcgggccagagac

SEQ ID NO: 119909 - DNA, 25 bp, Homo sapien
gagacaggatccttttctcggtcat

SEQ ID NO: 119910 - DNA, 25 bp, Homo sapien
aatgccctgggatgttccaaatcaa

SEQ ID NO: 119911 - DNA, 25 bp, Homo sapien
catcaagacaatgagcccatggcat

SEQ ID NO: 119912 - DNA, 25 bp, Homo sapien
gatgaccttttcaatcctgggacac

SEQ ID NO: 119913 - DNA, 25 bp, Homo sapien
caaagggtcgttgctaaggccagaa

SEQ ID NO: 119914 - DNA, 25 bp, Homo sapien
ccagccaaggaagtcgtttcaaggc

SEQ ID NO: 119915 - DNA, 25 bp, Homo sapien
gggaaccaaggaccaatccagcaga

SEQ ID NO: 119916 - DNA, 25 bp, Homo sapien
caaggaccaatccagcagagggaaa

SEQ ID NO: 119917 - DNA, 25 bp, Homo sapien
gaagtcgtttcaaggctactccagg

SEQ ID NO: 119918 - DNA, 25 bp, Homo sapien
tccactcctctattccaagaaaaga

SEQ ID NO: 119919 - DNA, 25 bp, Homo sapien
tcaagctgtaactccactcctctat

SEQ ID NO: 119920 - DNA, 25 bp, Homo sapien
attccaagaaaagagcccaacaagg

SEQ ID NO: 119921 - DNA, 25 bp, Homo sapien
gtaactccactcctctattccaaga

SEQ ID NO: 119922 - DNA, 25 bp, Homo sapien
agcaggggtacattccctttatcct

SEQ ID NO: 119923 - DNA, 25 bp, Homo sapien
tgggttcccactacttctttatcat

SEQ ID NO: 119924 - DNA, 25 bp, Homo sapien
ctttatcatttagcctaaagcaggg

SEQ ID NO: 119925 - DNA, 25 bp, Homo sapien
gtgggttcccactacttctttatca

SEQ ID NO: 119926 - DNA, 25 bp, Homo sapien
tctctccaggaggagaaccgaaggg

SEQ ID NO: 119927 - DNA, 25 bp, Homo sapien
ccctagtctttgttcctctctctcc

SEQ ID NO: 119928 - DNA, 25 bp, Homo sapien
gatgggaggcctggattccagcaca

SEQ ID NO: 119929 - DNA, 25 bp, Homo sapien
ggaggcccctgcgagccggggatgg

SEQ ID NO: 119930 - DNA, 25 bp, Homo sapien
cttgcaggctgacatcgtaaagacg

SEQ ID NO: 119931 - DNA, 25 bp, Homo sapien
aagcgaccggcatcggagcgtcctg

SEQ ID NO: 119932 - DNA, 25 bp, Homo sapien
acatcgtaaagacgccccagcaggc

SEQ ID NO: 119933 - DNA, 25 bp, Homo sapien
ggagcgggaggaggcaaaagcgacc

SEQ ID NO: 119934 - DNA, 25 bp, Homo sapien
tgttggccatttgagaagtggtttc

SEQ ID NO: 119935 - DNA, 25 bp, Homo sapien
aactttgttggccatttgagaagtg

SEQ ID NO: 119936 - DNA, 25 bp, Homo sapien
tggccatttgagaagtggtttctta

SEQ ID NO: 119937 - DNA, 25 bp, Homo sapien
atttcaactttgttggccatttgag

SEQ ID NO: 119938 - DNA, 25 bp, Homo sapien
tgccagtgcacaactctctacacga

SEQ ID NO: 119939 - DNA, 25 bp, Homo sapien
tgctcatgagatgctgtggataatt

SEQ ID NO: 119940 - DNA, 25 bp, Homo sapien
tctacacgacgagtctgctaacttt

SEQ ID NO: 119941 - DNA, 25 bp, Homo sapien
tgagatgctgtggataattccggac

SEQ ID NO: 119942 - DNA, 25 bp, Homo sapien
tccaggaattgccacagggagcagc

SEQ ID NO: 119943 - DNA, 25 bp, Homo sapien
gtggcaacgggagcaaatgcagcct

SEQ ID NO: 119944 - DNA, 25 bp, Homo sapien
cagactagtcttgccagcgggatga

SEQ ID NO: 119945 - DNA, 25 bp, Homo sapien
gagggtcaccagctgagactataag

SEQ ID NO: 119946 - DNA, 25 bp, Homo sapien
taatgtttagaacgtcatataccac

SEQ ID NO: 119947 - DNA, 25 bp, Homo sapien
gtttagaacgtcatataccacaaga

SEQ ID NO: 119948 - DNA, 25 bp, Homo sapien
tagaacgtcatataccacaagaatg

SEQ ID NO: 119949 - DNA, 25 bp, Homo sapien
tttaatgtttagaacgtcatatacc

SEQ ID NO: 119950 - DNA, 25 bp, Homo sapien
atcttgaactgcctttcaccactgg

SEQ ID NO: 119951 - DNA, 25 bp, Homo sapien
tcttgattgtgtccaactcatcttg

SEQ ID NO: 119952 - DNA, 25 bp, Homo sapien
agatatgattgtagaaggtctgggc

SEQ ID NO: 119953 - DNA, 25 bp, Homo sapien
gaggagctatgacatatttgttccc

SEQ ID NO: 119954 - DNA, 25 bp, Homo sapien
ccactcccatgattgctgccttggg

SEQ ID NO: 119955 - DNA, 25 bp, Homo sapien
cttgaccccactcccatgattgctg

SEQ ID NO: 119956 - DNA, 25 bp, Homo sapien
ttccttgaccccactcccatgattg

SEQ ID NO: 119957 - DNA, 25 bp, Homo sapien
gaccccactcccatgattgctgcct

SEQ ID NO: 119958 - DNA, 25 bp, Homo sapien
gctctgagtggcgatgatggctaac

SEQ ID NO: 119959 - DNA, 25 bp, Homo sapien
gatgtgtcctgaagcccaaataaga

SEQ ID NO: 119960 - DNA, 25 bp, Homo sapien
ttgcgattggccagagatgtgtcct

SEQ ID NO: 119961 - DNA, 25 bp, Homo sapien
tagcccggtaaagcagacagctctg

SEQ ID NO: 119962 - DNA, 25 bp, Homo sapien
cacacaggatgggaatctgactcac

SEQ ID NO: 119963 - DNA, 25 bp, Homo sapien
gcacgttttcccatgctggttggga

SEQ ID NO: 119964 - DNA, 25 bp, Homo sapien
tatctgtttgtacaatccaaccaca

SEQ ID NO: 119965 - DNA, 25 bp, Homo sapien
caaagcccaatcatattgctatcag

SEQ ID NO: 119966 - DNA, 25 bp, Homo sapien
gatggaacctcctttggcatttctg

SEQ ID NO: 119967 - DNA, 25 bp, Homo sapien
tgatcaggggtacagcagagtcaga

SEQ ID NO: 119968 - DNA, 25 bp, Homo sapien
cctcttcctgatggaacctcctttg

SEQ ID NO: 119969 - DNA, 25 bp, Homo sapien
gagtcagagcacaagtcccctcttc

SEQ ID NO: 119970 - DNA, 25 bp, Homo sapien
aaagctgcagagtgctattgacggc

SEQ ID NO: 119971 - DNA, 25 bp, Homo sapien
tatttctacatgaataacaagctca

SEQ ID NO: 119972 - DNA, 25 bp, Homo sapien
gaataacaagctcatgctgtatgaa

SEQ ID NO: 119973 - DNA, 25 bp, Homo sapien
aaggaaatctccgtaacagatagca

SEQ ID NO: 119974 - DNA, 25 bp, Homo sapien
ccctggtatgactaagaggaagccc

SEQ ID NO: 119975 - DNA, 25 bp, Homo sapien
cagaagccaagtgcctcatacagtg

SEQ ID NO: 119976 - DNA, 25 bp, Homo sapien
gaggagattttgtgcccagtgccca

SEQ ID NO: 119977 - DNA, 25 bp, Homo sapien
gcttgaggtccaagagcaactcctg

SEQ ID NO: 119978 - DNA, 25 bp, Homo sapien
cccacaggatgagtgccatcgactt

SEQ ID NO: 119979 - DNA, 25 bp, Homo sapien
atcgacttgggaccccgtgatacca

SEQ ID NO: 119980 - DNA, 25 bp, Homo sapien
aggcgacgtctctgagcaagggaaa

SEQ ID NO: 119981 - DNA, 25 bp, Homo sapien
tcaggcgacgtctctgagcaaggga

SEQ ID NO: 119982 - DNA, 25 bp, Homo sapien
aacacaagagagggcccaatgtggt

SEQ ID NO: 119983 - DNA, 25 bp, Homo sapien
cacaagagagggcccaatgtggtgt

SEQ ID NO: 119984 - DNA, 25 bp, Homo sapien
caagagagggcccaatgtggtgtag

SEQ ID NO: 119985 - DNA, 25 bp, Homo sapien
agagggcccaatgtggtgtagcaat

SEQ ID NO: 119986 - DNA, 25 bp, Homo sapien
cgacgagacttctgaatgtggaaca

SEQ ID NO: 119987 - DNA, 25 bp, Homo sapien
gaagcgagctcgtgcttcatcaaaa

SEQ ID NO: 119988 - DNA, 25 bp, Homo sapien
tgatttctgcagcatagaagcgagc

SEQ ID NO: 119989 - DNA, 25 bp, Homo sapien
tttatcatggaggaacatgagagcc

SEQ ID NO: 119990 - DNA, 25 bp, Homo sapien
aggcagtgaattagaagacagggca

SEQ ID NO: 119991 - DNA, 25 bp, Homo sapien
gcagtgaattagaagacagggcagc

SEQ ID NO: 119992 - DNA, 25 bp, Homo sapien
ggcagtgaattagaagacagggcag

SEQ ID NO: 119993 - DNA, 25 bp, Homo sapien
taactcccttcaccatcagagatca

SEQ ID NO: 119994 - DNA, 25 bp, Homo sapien
ttaactcccttcaccatcagagatc

SEQ ID NO: 119995 - DNA, 25 bp, Homo sapien
ctcccttcaccatcagagatcatac

SEQ ID NO: 119996 - DNA, 25 bp, Homo sapien
actcccttcaccatcagagatcata

SEQ ID NO: 119997 - DNA, 25 bp, Homo sapien
tctgttcctccacaaaatacaagtg

SEQ ID NO: 119998 - DNA, 25 bp, Homo sapien
taactggcccatgtcctcttgcaca

SEQ ID NO: 119999 - DNA, 25 bp, Homo sapien
gaatgcgtgcaaacgtaactggccc

SEQ ID NO: 120000 - DNA, 25 bp, Homo sapien
tcagaacacaagacggaatgcgtgc

SEQ ID NO: 120001 - DNA, 25 bp, Homo sapien
gggccatggcaggttccagaccctc

SEQ ID NO: 120002 - DNA, 25 bp, Homo sapien
ctgggccatggcaggttccagaccc

SEQ ID NO: 120003 - DNA, 25 bp, Homo sapien
ggcaggttccagaccctccaaccaa

SEQ ID NO: 120004 - DNA, 25 bp, Homo sapien
gttccagaccctccaaccaaaggca

SEQ ID NO: 120005 - DNA, 25 bp, Homo sapien
actgaaaaccccaaacacgtgtatg

SEQ ID NO: 120006 - DNA, 25 bp, Homo sapien
gagctccaagcctaacatgcatggc

SEQ ID NO: 120007 - DNA, 25 bp, Homo sapien
taatgagccaaacgcatgacaacgc

SEQ ID NO: 120008 - DNA, 25 bp, Homo sapien
gacaacgcctcggtctaatccttgg

SEQ ID NO: 120009 - DNA, 25 bp, Homo sapien
tagaattttgtcagcggaacacagt

SEQ ID NO: 120010 - DNA, 25 bp, Homo sapien
cagcaattctgtacgtgaaagcaca

SEQ ID NO: 120011 - DNA, 25 bp, Homo sapien
acaggcttacatggctactctggag

SEQ ID NO: 120012 - DNA, 25 bp, Homo sapien
gaactgaagctactgggaaacaatg

SEQ ID NO: 120013 - DNA, 25 bp, Homo sapien
gggacaaaccatccaggtcaatata

SEQ ID NO: 120014 - DNA, 25 bp, Homo sapien
cgtacgagactcttggtgtagcttt

SEQ ID NO: 120015 - DNA, 25 bp, Homo sapien
ttatgtagccatgacaaatgaggaa

SEQ ID NO: 120016 - DNA, 25 bp, Homo sapien
tgggattaaaatgagcacacatctc

SEQ ID NO: 120017 - DNA, 25 bp, Homo sapien
tcaagaagagccagtgaccataggg

SEQ ID NO: 120018 - DNA, 25 bp, Homo sapien
tcatggaattctgaagagcaacttt

SEQ ID NO: 120019 - DNA, 25 bp, Homo sapien
gcagttagttcagggctgcttccat

SEQ ID NO: 120020 - DNA, 25 bp, Homo sapien
ctgagaataaagagccccagggcag

SEQ ID NO: 120021 - DNA, 25 bp, Homo sapien
tctatctctgcatagctctccagac

SEQ ID NO: 120022 - DNA, 25 bp, Homo sapien
gggcctctttctagagtccacttct

SEQ ID NO: 120023 - DNA, 25 bp, Homo sapien
tcagatccagcacccaatgctaaca

SEQ ID NO: 120024 - DNA, 25 bp, Homo sapien
cccaatgctaacaatgcattacagg

SEQ ID NO: 120025 - DNA, 25 bp, Homo sapien
ttagaattcccagtagactaaatcc

SEQ ID NO: 120026 - DNA, 25 bp, Homo sapien
gaattcccagtagactaaatcctga

SEQ ID NO: 120027 - DNA, 25 bp, Homo sapien
cccagtagactaaatcctgagagca

SEQ ID NO: 120028 - DNA, 25 bp, Homo sapien
atgtgtgtttagaattcccagtaga

SEQ ID NO: 120029 - DNA, 25 bp, Homo sapien
tcctctgatcataccgagtcctcat

SEQ ID NO: 120030 - DNA, 25 bp, Homo sapien
tcagactcccttcgatgtgaatcgc

SEQ ID NO: 120031 - DNA, 25 bp, Homo sapien
cattactggcttgccccaagctgtg

SEQ ID NO: 120032 - DNA, 25 bp, Homo sapien
gaaatctcggagtcatctttaacgc

SEQ ID NO: 120033 - DNA, 25 bp, Homo sapien
ttgcctgacctatgagaagacctcc

SEQ ID NO: 120034 - DNA, 25 bp, Homo sapien
cagttgagtcccgtgagttcaagta

SEQ ID NO: 120035 - DNA, 25 bp, Homo sapien
gagccaggccgcatctctaactgct

SEQ ID NO: 120036 - DNA, 25 bp, Homo sapien
caagtattcccttagacagatggct

SEQ ID NO: 120037 - DNA, 25 bp, Homo sapien
atggctccccagtctaaatccctat

SEQ ID NO: 120038 - DNA, 25 bp, Homo sapien
tgtaaaattaaaaggtcagccagga

SEQ ID NO: 120039 - DNA, 25 bp, Homo sapien
ccagagaaggcagtttgggaacaca

SEQ ID NO: 120040 - DNA, 25 bp, Homo sapien
tgtgtggctggtgattaaaaatcct

SEQ ID NO: 120041 - DNA, 25 bp, Homo sapien
cagcctcatgagttctactcctgga

SEQ ID NO: 120042 - DNA, 25 bp, Homo sapien
ggttgcattccctttattcatacac

SEQ ID NO: 120043 - DNA, 25 bp, Homo sapien
ggctgggtagccaattaagtactaa

SEQ ID NO: 120044 - DNA, 25 bp, Homo sapien
aaggtacctggcacaaggctgggta

SEQ ID NO: 120045 - DNA, 25 bp, Homo sapien
cttgagtgtaaagtgtaaagttctg

SEQ ID NO: 120046 - DNA, 25 bp, Homo sapien
gaactcttggagtggcttctgtcat

SEQ ID NO: 120047 - DNA, 25 bp, Homo sapien
cccggcatgttctgatggacacaga

SEQ ID NO: 120048 - DNA, 25 bp, Homo sapien
taaaacgatgggatgggacacgatg

SEQ ID NO: 120049 - DNA, 25 bp, Homo sapien
cattaagacagggtccgtgagcaga

SEQ ID NO: 120050 - DNA, 25 bp, Homo sapien
tagaatcagtactgtggccacctca

SEQ ID NO: 120051 - DNA, 25 bp, Homo sapien
aagaatttacgggaccagcctcagg

SEQ ID NO: 120052 - DNA, 25 bp, Homo sapien
tacaaactctaaggtcaggtctgga

SEQ ID NO: 120053 - DNA, 25 bp, Homo sapien
taatgccttacacagtatcagaggg

SEQ ID NO: 120054 - DNA, 25 bp, Homo sapien
aagttgcagccatttgctgtcccag

SEQ ID NO: 120055 - DNA, 25 bp, Homo sapien
aaaagcaagcagtgaaagttgcagc

SEQ ID NO: 120056 - DNA, 25 bp, Homo sapien
cagtgaaagttgcagccatttgctg

SEQ ID NO: 120057 - DNA, 25 bp, Homo sapien
gcagccatttgctgtcccagtgcac

SEQ ID NO: 120058 - DNA, 25 bp, Homo sapien
tatcagcactgaagctagttcctcg

SEQ ID NO: 120059 - DNA, 25 bp, Homo sapien
gacattcgattgtcagaaaatagca

SEQ ID NO: 120060 - DNA, 25 bp, Homo sapien
gctttgccagcgttggaacttttct

SEQ ID NO: 120061 - DNA, 25 bp, Homo sapien
tagcaatgtccttgctttgccagcg

SEQ ID NO: 120062 - DNA, 25 bp, Homo sapien
tggtcccctctaatggaaacagtgc

SEQ ID NO: 120063 - DNA, 25 bp, Homo sapien
gctatggctctcatcctcaggaagg

SEQ ID NO: 120064 - DNA, 25 bp, Homo sapien
gtcttagcctgtctacccatcctgg

SEQ ID NO: 120065 - DNA, 25 bp, Homo sapien
ttaaatgttctagggcacacagtgc

SEQ ID NO: 120066 - DNA, 25 bp, Homo sapien
tggaggcagaatccaacaaggaaat

SEQ ID NO: 120067 - DNA, 25 bp, Homo sapien
ctgatagccagtcactcaagggcag

SEQ ID NO: 120068 - DNA, 25 bp, Homo sapien
tttctgatagccagtcactcaaggg

SEQ ID NO: 120069 - DNA, 25 bp, Homo sapien
gacaaacaggatcaaagagccatgg

SEQ ID NO: 120070 - DNA, 25 bp, Homo sapien
gaaaccactgggtcggctttgcttc

SEQ ID NO: 120071 - DNA, 25 bp, Homo sapien
gacctgacagtccaaagggcataaa

SEQ ID NO: 120072 - DNA, 25 bp, Homo sapien
ctttggtggctaagggtctcctgac

SEQ ID NO: 120073 - DNA, 25 bp, Homo sapien
gatgctgcggccaacagtacacttg

SEQ ID NO: 120074 - DNA, 25 bp, Homo sapien
gcgggtcagcttatagatgcactta

SEQ ID NO: 120075 - DNA, 25 bp, Homo sapien
tccctggctgaagcggtgcaaattt

SEQ ID NO: 120076 - DNA, 25 bp, Homo sapien
tcaggcaaagacaccaggagacaac

SEQ ID NO: 120077 - DNA, 25 bp, Homo sapien
tgaaacacaagaaggccagaagtct

SEQ ID NO: 120078 - DNA, 25 bp, Homo sapien
cattggtcagagtgcaaaggatttc

SEQ ID NO: 120079 - DNA, 25 bp, Homo sapien
tgaatttcctactaaaagcagcagc

SEQ ID NO: 120080 - DNA, 25 bp, Homo sapien
tcctgtttgcttagagaacctgcac

SEQ ID NO: 120081 - DNA, 25 bp, Homo sapien
tgcagggaaaaggacccattggtca

SEQ ID NO: 120082 - DNA, 25 bp, Homo sapien
gaattcccaagtgattgaagacaaa

SEQ ID NO: 120083 - DNA, 25 bp, Homo sapien
attcccaagtgattgaagacaaagg

SEQ ID NO: 120084 - DNA, 25 bp, Homo sapien
aattcccaagtgattgaagacaaag

SEQ ID NO: 120085 - DNA, 25 bp, Homo sapien
ctctatgaagtctgtcctgatgtcc

SEQ ID NO: 120086 - DNA, 25 bp, Homo sapien
gggtgcccagtttatacttctatga

SEQ ID NO: 120087 - DNA, 25 bp, Homo sapien
ttctatgatagcataccccgcactg

SEQ ID NO: 120088 - DNA, 25 bp, Homo sapien
actctgctcctagggtgcccagttt

SEQ ID NO: 120089 - DNA, 25 bp, Homo sapien
aaatccaaaacggtctcaagcgttg

SEQ ID NO: 120090 - DNA, 25 bp, Homo sapien
aaacggtctcaagcgttgacccgca

SEQ ID NO: 120091 - DNA, 25 bp, Homo sapien
ttttcccgaagccagtatgcctgct

SEQ ID NO: 120092 - DNA, 25 bp, Homo sapien
tgctgaagtcttggaaaggatcttc

SEQ ID NO: 120093 - DNA, 25 bp, Homo sapien
tggctccaagatgatgcgcccatta

SEQ ID NO: 120094 - DNA, 25 bp, Homo sapien
ctccaagatgatgcgcccattaaga

SEQ ID NO: 120095 - DNA, 25 bp, Homo sapien
agatgatgcgcccattaagaatggg

SEQ ID NO: 120096 - DNA, 25 bp, Homo sapien
ctcatggctccaagatgatgcgccc

SEQ ID NO: 120097 - DNA, 25 bp, Homo sapien
gagcgatatagtctggcgtgccaca

SEQ ID NO: 120098 - DNA, 25 bp, Homo sapien
tgccacagaatgtggccgtggtgac

SEQ ID NO: 120099 - DNA, 25 bp, Homo sapien
cgaagtctgccagtttacagtgacc

SEQ ID NO: 120100 - DNA, 25 bp, Homo sapien
ccctcgtggtccaacaggacattgt

SEQ ID NO: 120101 - DNA, 25 bp, Homo sapien
agggggcagcgtgagaaggtggttc

SEQ ID NO: 120102 - DNA, 25 bp, Homo sapien
ggggcagcgtgagaaggtggttcat

SEQ ID NO: 120103 - DNA, 25 bp, Homo sapien
ggcagcgtgagaaggtggttcatac

SEQ ID NO: 120104 - DNA, 25 bp, Homo sapien
cagcgtgagaaggtggttcatacat

SEQ ID NO: 120105 - DNA, 25 bp, Homo sapien
atctcatagagcaacacgcccattg

SEQ ID NO: 120106 - DNA, 25 bp, Homo sapien
tcatggagccaggtagggtagacca

SEQ ID NO: 120107 - DNA, 25 bp, Homo sapien
ggatccctgtggcatcttcatggag

SEQ ID NO: 120108 - DNA, 25 bp, Homo sapien
catcattcagtatggcctcaaagag

SEQ ID NO: 120109 - DNA, 25 bp, Homo sapien
agtccacaacctcgggggtgttgcg

SEQ ID NO: 120110 - DNA, 25 bp, Homo sapien
agacaatgctcggatgatgaaatct

SEQ ID NO: 120111 - DNA, 25 bp, Homo sapien
tgcagacaatgctcggatgatgaaa

SEQ ID NO: 120112 - DNA, 25 bp, Homo sapien
gacaatgctcggatgatgaaatctg

SEQ ID NO: 120113 - DNA, 25 bp, Homo sapien
ctgcagacaatgctcggatgatgaa

SEQ ID NO: 120114 - DNA, 25 bp, Homo sapien
aaagaggatccccgaattaactgtg

SEQ ID NO: 120115 - DNA, 25 bp, Homo sapien
agaggatccccgaattaactgtggt

SEQ ID NO: 120116 - DNA, 25 bp, Homo sapien
gatccccgaattaactgtggttctc

SEQ ID NO: 120117 - DNA, 25 bp, Homo sapien
cagggctaaaagaggatccccgaat

SEQ ID NO: 120118 - DNA, 25 bp, Homo sapien
ggtgctgctatggaatactggacga

SEQ ID NO: 120119 - DNA, 25 bp, Homo sapien
tctaggttcttataccgaatggtgc

SEQ ID NO: 120120 - DNA, 25 bp, Homo sapien
cttggacctggcattgataagtcac

SEQ ID NO: 120121 - DNA, 25 bp, Homo sapien
ggagaggtgctctatcctgctaaga

SEQ ID NO: 120122 - DNA, 25 bp, Homo sapien
agttagaaggcaaggaaactatgcc

SEQ ID NO: 120123 - DNA, 25 bp, Homo sapien
tatgagtcttgaaataactgggccc

SEQ ID NO: 120124 - DNA, 25 bp, Homo sapien
tgttgggcaaacaaaatgaccttct

SEQ ID NO: 120125 - DNA, 25 bp, Homo sapien
tgccaatattccagagcgatgatcc

SEQ ID NO: 120126 - DNA, 25 bp, Homo sapien
gggctggccatctaacgctcagaga

SEQ ID NO: 120127 - DNA, 25 bp, Homo sapien
catagaaacggcctggagttgagca

SEQ ID NO: 120128 - DNA, 25 bp, Homo sapien
tgatccaagagggaaagtcggccaa

SEQ ID NO: 120129 - DNA, 25 bp, Homo sapien
ggatagcttgccatcctaggctggg

SEQ ID NO: 120130 - DNA, 25 bp, Homo sapien
gaccgtccgtcctctaaaaactgca

SEQ ID NO: 120131 - DNA, 25 bp, Homo sapien
gacaagtagaccaaacacgaccgtc

SEQ ID NO: 120132 - DNA, 25 bp, Homo sapien
gaggccttgcctgacgacaagtaga

SEQ ID NO: 120133 - DNA, 25 bp, Homo sapien
aataccttggcctgagccctttaga

SEQ ID NO: 120134 - DNA, 25 bp, Homo sapien
gtgggcagcagacatcttatgaatg

SEQ ID NO: 120135 - DNA, 25 bp, Homo sapien
gctgtttcgaagtaggttcaatgac

SEQ ID NO: 120136 - DNA, 25 bp, Homo sapien
tgcagcgaagatatcatagctctag

SEQ ID NO: 120137 - DNA, 25 bp, Homo sapien
gaaaaggtctgtgtcctggctctag

SEQ ID NO: 120138 - DNA, 25 bp, Homo sapien
ccatttcagacatggccactaaaag

SEQ ID NO: 120139 - DNA, 25 bp, Homo sapien
actaaaagaaagcaggagggtccag

SEQ ID NO: 120140 - DNA, 25 bp, Homo sapien
agaaagcaggagggtccagttttct

SEQ ID NO: 120141 - DNA, 25 bp, Homo sapien
tcagacatggccactaaaagaaagc

SEQ ID NO: 120142 - DNA, 25 bp, Homo sapien
tctgaaaggcggttctatttggcga

SEQ ID NO: 120143 - DNA, 25 bp, Homo sapien
gatgtctcaagatggcgtgctcgcc

SEQ ID NO: 120144 - DNA, 25 bp, Homo sapien
agctgggcccagtcgatttccttaa

SEQ ID NO: 120145 - DNA, 25 bp, Homo sapien
agtcaggctgcccaagcgcatggtg

SEQ ID NO: 120146 - DNA, 25 bp, Homo sapien
tgaccattgaaggaacggctttacc

SEQ ID NO: 120147 - DNA, 25 bp, Homo sapien
tctgtataaacaaacgctgcaaaga

SEQ ID NO: 120148 - DNA, 25 bp, Homo sapien
tactctctaggtagatgcgttacgc

SEQ ID NO: 120149 - DNA, 25 bp, Homo sapien
ggtgcctggtgtccaacagcctagt

SEQ ID NO: 120150 - DNA, 25 bp, Homo sapien
tattgtttgcgcagagttctagaca

SEQ ID NO: 120151 - DNA, 25 bp, Homo sapien
tacctattgtttgcgcagagttcta

SEQ ID NO: 120152 - DNA, 25 bp, Homo sapien
tgtcctacctattgtttgcgcagag

SEQ ID NO: 120153 - DNA, 25 bp, Homo sapien
cacacttgtcctacctattgtttgc

SEQ ID NO: 120154 - DNA, 25 bp, Homo sapien
gaagatgtccctcatcaattggagt

SEQ ID NO: 120155 - DNA, 25 bp, Homo sapien
tatgaagtcagggtcaaaattactg

SEQ ID NO: 120156 - DNA, 25 bp, Homo sapien
aaaattactgacatcttctcgggat

SEQ ID NO: 120157 - DNA, 25 bp, Homo sapien
gttgcaattctggagacacatagga

SEQ ID NO: 120158 - DNA, 25 bp, Homo sapien
ttgctccttgaaggtaaggttcttg

SEQ ID NO: 120159 - DNA, 25 bp, Homo sapien
cttgttctaaggctgatgctgggaa

SEQ ID NO: 120160 - DNA, 25 bp, Homo sapien
tgctgggaaggtcccatagaggaaa

SEQ ID NO: 120161 - DNA, 25 bp, Homo sapien
tctggactctaaatagttgatatct

SEQ ID NO: 120162 - DNA, 25 bp, Homo sapien
tgttaacatcccaagcccacagaga

SEQ ID NO: 120163 - DNA, 25 bp, Homo sapien
cctgttaacatcccaagcccacaga

SEQ ID NO: 120164 - DNA, 25 bp, Homo sapien
ggtggagcggtatacttcataaaat

SEQ ID NO: 120165 - DNA, 25 bp, Homo sapien
aggtggagcggtatacttcataaaa

SEQ ID NO: 120166 - DNA, 25 bp, Homo sapien
tgtgacatatgcaacgtggagaggc

SEQ ID NO: 120167 - DNA, 25 bp, Homo sapien
gatcagattacccaggtaggcaggc

SEQ ID NO: 120168 - DNA, 25 bp, Homo sapien
gccacaaatctggtcactgacatga

SEQ ID NO: 120169 - DNA, 25 bp, Homo sapien
tgagcacacggcgatacagacaaga

SEQ ID NO: 120170 - DNA, 25 bp, Homo sapien
tgggcacgtcatgaagatctagtgg

SEQ ID NO: 120171 - DNA, 25 bp, Homo sapien
gcacgtcatgaagatctagtggcat

SEQ ID NO: 120172 - DNA, 25 bp, Homo sapien
ggaatagtgggcacgtcatgaagat

SEQ ID NO: 120173 - DNA, 25 bp, Homo sapien
tagtgggcacgtcatgaagatctag

SEQ ID NO: 120174 - DNA, 25 bp, Homo sapien
tgccaaagacgcagaaacacatggg

SEQ ID NO: 120175 - DNA, 25 bp, Homo sapien
ggaaaggtgactgccatttctgggc

SEQ ID NO: 120176 - DNA, 25 bp, Homo sapien
gacgcagaaacacatgggaaaggtg

SEQ ID NO: 120177 - DNA, 25 bp, Homo sapien
gctgacacagggtgatgccaaagac

SEQ ID NO: 120178 - DNA, 25 bp, Homo sapien
taggagtgctgaggccttttccatt

SEQ ID NO: 120179 - DNA, 25 bp, Homo sapien
tatggagactcttgttttactagaa

SEQ ID NO: 120180 - DNA, 25 bp, Homo sapien
gaatacacaggactatggagactct

SEQ ID NO: 120181 - DNA, 25 bp, Homo sapien
gataggagtgctgaggccttttcca

SEQ ID NO: 120182 - DNA, 25 bp, Homo sapien
cggggctttctctgaacacacacct

SEQ ID NO: 120183 - DNA, 25 bp, Homo sapien
gagcagatctttacactggcattca

SEQ ID NO: 120184 - DNA, 25 bp, Homo sapien
cagatctttacactggcattcagca

SEQ ID NO: 120185 - DNA, 25 bp, Homo sapien
ccccagagcagatctttacactggc

SEQ ID NO: 120186 - DNA, 25 bp, Homo sapien
cctgtatatggctagtgggcatttc

SEQ ID NO: 120187 - DNA, 25 bp, Homo sapien
tggaatggcagttccgggctggcag

SEQ ID NO: 120188 - DNA, 25 bp, Homo sapien
ggctgttacaacattcccgctctgc

SEQ ID NO: 120189 - DNA, 25 bp, Homo sapien
ctggcaggcaaacagtatttttcca

SEQ ID NO: 120190 - DNA, 25 bp, Homo sapien
aaacagccgcttgaccagagccaac

SEQ ID NO: 120191 - DNA, 25 bp, Homo sapien
caagactcttccagctgacctacta

SEQ ID NO: 120192 - DNA, 25 bp, Homo sapien
gagtacaaatggcactcatgcccaa

SEQ ID NO: 120193 - DNA, 25 bp, Homo sapien
agagccaaccgacaacctcctgtga

SEQ ID NO: 120194 - DNA, 25 bp, Homo sapien
taggctgtaatttaacggtcgcagg

SEQ ID NO: 120195 - DNA, 25 bp, Homo sapien
tgtaatttaacggtcgcaggagagt

SEQ ID NO: 120196 - DNA, 25 bp, Homo sapien
agagaagcggatgtttttaggctgt

SEQ ID NO: 120197 - DNA, 25 bp, Homo sapien
aaagagaagcggatgtttttaggct

SEQ ID NO: 120198 - DNA, 25 bp, Homo sapien
ggaactgagtccagcagcactgagg

SEQ ID NO: 120199 - DNA, 25 bp, Homo sapien
aagtgaaaacagtgccaggctgcgc

SEQ ID NO: 120200 - DNA, 25 bp, Homo sapien
cacatgggttactccagggacttct

SEQ ID NO: 120201 - DNA, 25 bp, Homo sapien
ccgtttcccctaaagcatttgacag

SEQ ID NO: 120202 - DNA, 25 bp, Homo sapien
ccggtgagacacaatagactggaag

SEQ ID NO: 120203 - DNA, 25 bp, Homo sapien
taactatggcggactccggtgagac

SEQ ID NO: 120204 - DNA, 25 bp, Homo sapien
catggagtaggtaaacaaggacgtt

SEQ ID NO: 120205 - DNA, 25 bp, Homo sapien
tgtatgactctaagaactccatgga

SEQ ID NO: 120206 - DNA, 25 bp, Homo sapien
taagtaaattgtagtatgtctgagt

SEQ ID NO: 120207 - DNA, 25 bp, Homo sapien
tttgctaagtaaattgtagtatgtc

SEQ ID NO: 120208 - DNA, 25 bp, Homo sapien
agtaaattgtagtatgtctgagtca

SEQ ID NO: 120209 - DNA, 25 bp, Homo sapien
gctaagtaaattgtagtatgtctga

SEQ ID NO: 120210 - DNA, 25 bp, Homo sapien
tcatggtggaggcacggatttagca

SEQ ID NO: 120211 - DNA, 25 bp, Homo sapien
atttgacaccactcggaaaatatca

SEQ ID NO: 120212 - DNA, 25 bp, Homo sapien
tcctcccaagtctgacgtgaagtca

SEQ ID NO: 120213 - DNA, 25 bp, Homo sapien
gacgtgaagtcaggctgtttcatat

SEQ ID NO: 120214 - DNA, 25 bp, Homo sapien
agtggcaggatttcacactcggctg

SEQ ID NO: 120215 - DNA, 25 bp, Homo sapien
tattttcggccttgtttccagttgc

SEQ ID NO: 120216 - DNA, 25 bp, Homo sapien
actcggctgccacatctcattactg

SEQ ID NO: 120217 - DNA, 25 bp, Homo sapien
tgtcctgaagctgggattctgcctg

SEQ ID NO: 120218 - DNA, 25 bp, Homo sapien
ctgttcatgctgtgaagatgtaatg

SEQ ID NO: 120219 - DNA, 25 bp, Homo sapien
ttcttggaccacgtcacactgctgt

SEQ ID NO: 120220 - DNA, 25 bp, Homo sapien
ggaccacgtcacactgctgtttgga

SEQ ID NO: 120221 - DNA, 25 bp, Homo sapien
ttagggcagcgccacttcttggacc

SEQ ID NO: 120222 - DNA, 25 bp, Homo sapien
ttagaccaggcatttcatcaggttc

SEQ ID NO: 120223 - DNA, 25 bp, Homo sapien
caggtcaggctgctatcacaggaca

SEQ ID NO: 120224 - DNA, 25 bp, Homo sapien
ggtgaagaactgcactctgactcag

SEQ ID NO: 120225 - DNA, 25 bp, Homo sapien
ttcgcatggctttgacaggtcaggc

SEQ ID NO: 120226 - DNA, 25 bp, Homo sapien
gatcccgtgagcaagcaggcacgtg

SEQ ID NO: 120227 - DNA, 25 bp, Homo sapien
gcttgggacattatactgcaggcta

SEQ ID NO: 120228 - DNA, 25 bp, Homo sapien
tcaggatattatactcgagagccag

SEQ ID NO: 120229 - DNA, 25 bp, Homo sapien
gatattgaaccatacatagccctgt

SEQ ID NO: 120230 - DNA, 25 bp, Homo sapien
taaacatgtgctagctccaagtgaa

SEQ ID NO: 120231 - DNA, 25 bp, Homo sapien
tggtcaatgtagtgaaaccttgcct

SEQ ID NO: 120232 - DNA, 25 bp, Homo sapien
ctggtcaatgtagtgaaaccttgcc

SEQ ID NO: 120233 - DNA, 25 bp, Homo sapien
gcctggtcaatgtagtgaaaccttg

SEQ ID NO: 120234 - DNA, 25 bp, Homo sapien
cctggtcaatgtagtgaaaccttgc

SEQ ID NO: 120235 - DNA, 25 bp, Homo sapien
cccatttgaaagtaggggcagtatt

SEQ ID NO: 120236 - DNA, 25 bp, Homo sapien
taatgattgcaaacttagtacaagg

SEQ ID NO: 120237 - DNA, 25 bp, Homo sapien
tttccagactcactcttctagaagc

SEQ ID NO: 120238 - DNA, 25 bp, Homo sapien
caacagttttctaatgattgcaaac

SEQ ID NO: 120239 - DNA, 25 bp, Homo sapien
tacaagcagacaataacatgtaagt

SEQ ID NO: 120240 - DNA, 25 bp, Homo sapien
tttggaaattgttcttagatcacac

SEQ ID NO: 120241 - DNA, 25 bp, Homo sapien
taagcatggtcctataaatactttc

SEQ ID NO: 120242 - DNA, 25 bp, Homo sapien
tggtttcataaactggctgttgttc

SEQ ID NO: 120243 - DNA, 25 bp, Homo sapien
aaattcactccccaatgttgcagag

SEQ ID NO: 120244 - DNA, 25 bp, Homo sapien
gatatggaaaggacgcctcttggca

SEQ ID NO: 120245 - DNA, 25 bp, Homo sapien
tgaaatgtacttttgtggcctagct

SEQ ID NO: 120246 - DNA, 25 bp, Homo sapien
taaaacctgggcaactctgatagtg

SEQ ID NO: 120247 - DNA, 25 bp, Homo sapien
tcactatattctgactagaaaggaa

SEQ ID NO: 120248 - DNA, 25 bp, Homo sapien
ccaacatcaaagtcaattggaagat

SEQ ID NO: 120249 - DNA, 25 bp, Homo sapien
ttggtatttctccaacatcaaagtc

SEQ ID NO: 120250 - DNA, 25 bp, Homo sapien
atattctgactagaaaggaaaatga

SEQ ID NO: 120251 - DNA, 25 bp, Homo sapien
acaacaatagccaccaaaaatagcc

SEQ ID NO: 120252 - DNA, 25 bp, Homo sapien
aacaactagatattcacacgcaaag

SEQ ID NO: 120253 - DNA, 25 bp, Homo sapien
gccattcgtttttgacagaggagca

SEQ ID NO: 120254 - DNA, 25 bp, Homo sapien
cagaaataagcccacacaacaatag

SEQ ID NO: 120255 - DNA, 25 bp, Homo sapien
tagtttgttcagaaaaagaatagta

SEQ ID NO: 120256 - DNA, 25 bp, Homo sapien
atagtttgttcagaaaaagaatagt

SEQ ID NO: 120257 - DNA, 25 bp, Homo sapien
cacgtgctcgtctgtgtttagcggc

SEQ ID NO: 120258 - DNA, 25 bp, Homo sapien
agtgctgggcacgattgccgcccaa

SEQ ID NO: 120259 - DNA, 25 bp, Homo sapien
cttctccgaaggaaggcggtgcccg

SEQ ID NO: 120260 - DNA, 25 bp, Homo sapien
gatttcggttgcctggtcccaaaca

SEQ ID NO: 120261 - DNA, 25 bp, Homo sapien
gcgggaaacccctcgtgagactaga

SEQ ID NO: 120262 - DNA, 25 bp, Homo sapien
cctccacacgcggagaagagaagga

SEQ ID NO: 120263 - DNA, 25 bp, Homo sapien
tcccctcagacgaggcagcactgtg

SEQ ID NO: 120264 - DNA, 25 bp, Homo sapien
ccgaagcgacgaagagggtgatcct

SEQ ID NO: 120265 - DNA, 25 bp, Homo sapien
gcgatgtcttcacggcgggcggccc

SEQ ID NO: 120266 - DNA, 25 bp, Homo sapien
atcggtccccgcgatgtcttcacgg

SEQ ID NO: 120267 - DNA, 25 bp, Homo sapien
tgaatcggtccccgcgatgtcttca

SEQ ID NO: 120268 - DNA, 25 bp, Homo sapien
gtccccgcgatgtcttcacggcggg

SEQ ID NO: 120269 - DNA, 25 bp, Homo sapien
ttttcttgtcgttcgcgccgccggc

SEQ ID NO: 120270 - DNA, 25 bp, Homo sapien
ttcttgtcgttcgcgccgccggcgc

SEQ ID NO: 120271 - DNA, 25 bp, Homo sapien
tttcttgtcgttcgcgccgccggcg

SEQ ID NO: 120272 - DNA, 25 bp, Homo sapien
tgttttccaaactccgacattggga

SEQ ID NO: 120273 - DNA, 25 bp, Homo sapien
taagttcagcccctataactaggaa

SEQ ID NO: 120274 - DNA, 25 bp, Homo sapien
tagaaaactggcactacacagaggt

SEQ ID NO: 120275 - DNA, 25 bp, Homo sapien
gaaatgtcctgcgttaaatctacag

SEQ ID NO: 120276 - DNA, 25 bp, Homo sapien
tactaggtgccaatataacccaagg

SEQ ID NO: 120277 - DNA, 25 bp, Homo sapien
tcaagactcctgcaatgggctaagt

SEQ ID NO: 120278 - DNA, 25 bp, Homo sapien
caggaggcctccactagagtagaga

SEQ ID NO: 120279 - DNA, 25 bp, Homo sapien
gggacccttaactcagaggtatctg

SEQ ID NO: 120280 - DNA, 25 bp, Homo sapien
cagtactaagaatgcagtgtcttgc

SEQ ID NO: 120281 - DNA, 25 bp, Homo sapien
actaagaatgcagtgtcttgcacat

SEQ ID NO: 120282 - DNA, 25 bp, Homo sapien
gtactaagaatgcagtgtcttgcac

SEQ ID NO: 120283 - DNA, 25 bp, Homo sapien
ccagtactaagaatgcagtgtcttg

SEQ ID NO: 120284 - DNA, 25 bp, Homo sapien
gaaacatatccagttttataatgga

SEQ ID NO: 120285 - DNA, 25 bp, Homo sapien
gaacagaaacgtatcccaaccctca

SEQ ID NO: 120286 - DNA, 25 bp, Homo sapien
gcctacttgggatttggtccactga

SEQ ID NO: 120287 - DNA, 25 bp, Homo sapien
gaatttacaagactcttaagaacag

SEQ ID NO: 120288 - DNA, 25 bp, Homo sapien
agagctcactgtgtacaccacgtac

SEQ ID NO: 120289 - DNA, 25 bp, Homo sapien
ccgtgccgggccgacaatatttcta

SEQ ID NO: 120290 - DNA, 25 bp, Homo sapien
gccgggccgacaatatttctaaaga

SEQ ID NO: 120291 - DNA, 25 bp, Homo sapien
cactgtgtacaccacgtaccagtat

SEQ ID NO: 120292 - DNA, 25 bp, Homo sapien
catacagacagcctgtcagtggcag

SEQ ID NO: 120293 - DNA, 25 bp, Homo sapien
cagagtaaggccagcatgcaaatag

SEQ ID NO: 120294 - DNA, 25 bp, Homo sapien
tatacaagccaagtaatatcaagac

SEQ ID NO: 120295 - DNA, 25 bp, Homo sapien
tgctacttgcaataagaagaatcct

SEQ ID NO: 120296 - DNA, 25 bp, Homo sapien
gcagactggccaatgcgcctgtggt

SEQ ID NO: 120297 - DNA, 25 bp, Homo sapien
tcagactgaggtcactgggtacatc

SEQ ID NO: 120298 - DNA, 25 bp, Homo sapien
aaattcagaggattattttgctcca

SEQ ID NO: 120299 - DNA, 25 bp, Homo sapien
tagttctgtatacttgcctcaagcc

SEQ ID NO: 120300 - DNA, 25 bp, Homo sapien
catcacacgccggggcctgttgtgg

SEQ ID NO: 120301 - DNA, 25 bp, Homo sapien
tcacacgccggggcctgttgtgggg

SEQ ID NO: 120302 - DNA, 25 bp, Homo sapien
tggggggagcggggagggatagcat

SEQ ID NO: 120303 - DNA, 25 bp, Homo sapien
aacatcacacgccggggcctgttgt

SEQ ID NO: 120304 - DNA, 25 bp, Homo sapien
tctgaaagaagtagtaatctaactt

SEQ ID NO: 120305 - DNA, 25 bp, Homo sapien
accgcgcctggccagctttgttttt

SEQ ID NO: 120306 - DNA, 25 bp, Homo sapien
cgcgcctggccagctttgttttttt

SEQ ID NO: 120307 - DNA, 25 bp, Homo sapien
ccgcgcctggccagctttgtttttt

SEQ ID NO: 120308 - DNA, 25 bp, Homo sapien
ctttatcatctttatgttttccgaa

SEQ ID NO: 120309 - DNA, 25 bp, Homo sapien
ttatcatctttatgttttccgaacc

SEQ ID NO: 120310 - DNA, 25 bp, Homo sapien
aaggaatacttaaacatctttatca

SEQ ID NO: 120311 - DNA, 25 bp, Homo sapien
atctttatcatctttatgttttccg

SEQ ID NO: 120312 - DNA, 25 bp, Homo sapien
tccatagaggcggagacttttgtct

SEQ ID NO: 120313 - DNA, 25 bp, Homo sapien
tcaagtctttgtcgcagtctcaccc

SEQ ID NO: 120314 - DNA, 25 bp, Homo sapien
tgctaccctaaatacccacaaggct

SEQ ID NO: 120315 - DNA, 25 bp, Homo sapien
gcactagttgttccccttgcctgga

SEQ ID NO: 120316 - DNA, 25 bp, Homo sapien
ggcttccaaaactggtcctctctgg

SEQ ID NO: 120317 - DNA, 25 bp, Homo sapien
cagtagtgatgtgcgtaagtttgac

SEQ ID NO: 120318 - DNA, 25 bp, Homo sapien
gcttactctactccttctgcctggg

SEQ ID NO: 120319 - DNA, 25 bp, Homo sapien
cattaaatgtacacaggacaaggtc

SEQ ID NO: 120320 - DNA, 25 bp, Homo sapien
cacaatgtgctcagttaatctactt

SEQ ID NO: 120321 - DNA, 25 bp, Homo sapien
tccttacacacagctctactctata

SEQ ID NO: 120322 - DNA, 25 bp, Homo sapien
cttagatttttgaacgttccagcaa

SEQ ID NO: 120323 - DNA, 25 bp, Homo sapien
gcataagactgtttactaacctgag

SEQ ID NO: 120324 - DNA, 25 bp, Homo sapien
ggaactgaaataccagcaaacgaat

SEQ ID NO: 120325 - DNA, 25 bp, Homo sapien
aatggaaaatccaccaagttcttgg

SEQ ID NO: 120326 - DNA, 25 bp, Homo sapien
aatgatgcagtctcctaacatgagg

SEQ ID NO: 120327 - DNA, 25 bp, Homo sapien
actctcaaggtctaatcctcaaggt

SEQ ID NO: 120328 - DNA, 25 bp, Homo sapien
tgaaaggcacctacaatggtaatag

SEQ ID NO: 120329 - DNA, 25 bp, Homo sapien
aatcccttccggtaatgccaatcat

SEQ ID NO: 120330 - DNA, 25 bp, Homo sapien
gaaaggcacctacaatggtaataga

SEQ ID NO: 120331 - DNA, 25 bp, Homo sapien
gtaatcccttccggtaatgccaatc

SEQ ID NO: 120332 - DNA, 25 bp, Homo sapien
tatgcatggtgcttactaataacac

SEQ ID NO: 120333 - DNA, 25 bp, Homo sapien
ctaataacacagtggtattctaaac

SEQ ID NO: 120334 - DNA, 25 bp, Homo sapien
taaagggtatccaatcaagctaact

SEQ ID NO: 120335 - DNA, 25 bp, Homo sapien
tacaggcgcgagtatatgcttttaa

SEQ ID NO: 120336 - DNA, 25 bp, Homo sapien
ctaactatggtgatggaatgtctcc

SEQ ID NO: 120337 - DNA, 25 bp, Homo sapien
tagcaatgactatctaaggagtggc

SEQ ID NO: 120338 - DNA, 25 bp, Homo sapien
gcctctaaaatagagtgatggtcaa

SEQ ID NO: 120339 - DNA, 25 bp, Homo sapien
caaatgccacaatcattccaggcgt

SEQ ID NO: 120340 - DNA, 25 bp, Homo sapien
gcagtgatagctgtgggaaatagat

SEQ ID NO: 120341 - DNA, 25 bp, Homo sapien
ctagcaggtccctattggccctaac

SEQ ID NO: 120342 - DNA, 25 bp, Homo sapien
tagcagctataagccagtgcaggtt

SEQ ID NO: 120343 - DNA, 25 bp, Homo sapien
tacagagaaaccacgattaaggcta

SEQ ID NO: 120344 - DNA, 25 bp, Homo sapien
tggattactgcacacataaggaact

SEQ ID NO: 120345 - DNA, 25 bp, Homo sapien
tatcacagaaggattagaagatgcc

SEQ ID NO: 120346 - DNA, 25 bp, Homo sapien
cgcaaatagctgatggtaagcctca

SEQ ID NO: 120347 - DNA, 25 bp, Homo sapien
gattctttacttcgccgagatctgg

SEQ ID NO: 120348 - DNA, 25 bp, Homo sapien
ggccttatcaagatgcgaactcaca

SEQ ID NO: 120349 - DNA, 25 bp, Homo sapien
cacattatgtggaagtggcaactga

SEQ ID NO: 120350 - DNA, 25 bp, Homo sapien
gcacctaccagcgtgcccatctaat

SEQ ID NO: 120351 - DNA, 25 bp, Homo sapien
ggcacctaccagcgtgcccatctaa

SEQ ID NO: 120352 - DNA, 25 bp, Homo sapien
aggcacctaccagcgtgcccatcta

SEQ ID NO: 120353 - DNA, 25 bp, Homo sapien
gtatttgttcacattatcagaaatg

SEQ ID NO: 120354 - DNA, 25 bp, Homo sapien
ctgagttaatcccatgtatttgttc

SEQ ID NO: 120355 - DNA, 25 bp, Homo sapien
accatcatctgtgagaaccataaca

SEQ ID NO: 120356 - DNA, 25 bp, Homo sapien
ccatcatctgtgagaaccataacaa

SEQ ID NO: 120357 - DNA, 25 bp, Homo sapien
aaacacactgtgtccagttagttca

SEQ ID NO: 120358 - DNA, 25 bp, Homo sapien
acacactgtgtccagttagttcaaa

SEQ ID NO: 120359 - DNA, 25 bp, Homo sapien
aacacactgtgtccagttagttcaa

SEQ ID NO: 120360 - DNA, 25 bp, Homo sapien
gatcgcttgagtcccagcggtcaag

SEQ ID NO: 120361 - DNA, 25 bp, Homo sapien
tcttattatgtaaaaccacctgtca

SEQ ID NO: 120362 - DNA, 25 bp, Homo sapien
tatttatgcaattaggtgggctttc

SEQ ID NO: 120363 - DNA, 25 bp, Homo sapien
gccttgggtaagtacaatagcaaag

SEQ ID NO: 120364 - DNA, 25 bp, Homo sapien
cattctgagaaaaaagcttcgctgt

SEQ ID NO: 120365 - DNA, 25 bp, Homo sapien
tgttgcagactttatgttcatagtt

SEQ ID NO: 120366 - DNA, 25 bp, Homo sapien
tgttcatagttcttcctcggctagt

SEQ ID NO: 120367 - DNA, 25 bp, Homo sapien
tagttagggtacacttcattctgag

SEQ ID NO: 120368 - DNA, 25 bp, Homo sapien
tggtatcatatacgtgaatgtggcc

SEQ ID NO: 120369 - DNA, 25 bp, Homo sapien
catatacgtgaatgtggcctgtgca

SEQ ID NO: 120370 - DNA, 25 bp, Homo sapien
tatcatatacgtgaatgtggcctgt

SEQ ID NO: 120371 - DNA, 25 bp, Homo sapien
ctgttggtatcatatacgtgaatgt

SEQ ID NO: 120372 - DNA, 25 bp, Homo sapien
tcttatacccacactgaggttggtt

SEQ ID NO: 120373 - DNA, 25 bp, Homo sapien
tgaggaatgggttcacaaatcagca

SEQ ID NO: 120374 - DNA, 25 bp, Homo sapien
gaggaaagtcttgctatctaaagga

SEQ ID NO: 120375 - DNA, 25 bp, Homo sapien
tatccaggctgtgtcgactgaggaa

SEQ ID NO: 120376 - DNA, 25 bp, Homo sapien
ggctcatatcccatcaattcggtaa

SEQ ID NO: 120377 - DNA, 25 bp, Homo sapien
gttttggtcagatgatcagagtcca

SEQ ID NO: 120378 - DNA, 25 bp, Homo sapien
gataatattcataaattgagcggcc

SEQ ID NO: 120379 - DNA, 25 bp, Homo sapien
ttgagcggcctaaaagttcttctgg

SEQ ID NO: 120380 - DNA, 25 bp, Homo sapien
cctgtggtgacttgtcctttagtaa

SEQ ID NO: 120381 - DNA, 25 bp, Homo sapien
ccagacatatccacctcttttggca

SEQ ID NO: 120382 - DNA, 25 bp, Homo sapien
caagcatcctgtactgtcctgtggt

SEQ ID NO: 120383 - DNA, 25 bp, Homo sapien
tacaatgcactgtggttgagaattc

SEQ ID NO: 120384 - DNA, 25 bp, Homo sapien
taaatgaacagagtatccaaaaaga

SEQ ID NO: 120385 - DNA, 25 bp, Homo sapien
cttatcttcctataaatgaacagag

SEQ ID NO: 120386 - DNA, 25 bp, Homo sapien
tatcttatcttcctataaatgaaca

SEQ ID NO: 120387 - DNA, 25 bp, Homo sapien
ttcctataaatgaacagagtatcca

SEQ ID NO: 120388 - DNA, 25 bp, Homo sapien
taatgagtggtagagctatgataca

SEQ ID NO: 120389 - DNA, 25 bp, Homo sapien
ataattagaccaaaccaatcaatgg

SEQ ID NO: 120390 - DNA, 25 bp, Homo sapien
ggccaggattcttcctacaaaaaga

SEQ ID NO: 120391 - DNA, 25 bp, Homo sapien
agaacacagctgtcttgagatagta

SEQ ID NO: 120392 - DNA, 25 bp, Homo sapien
gacacattctgtttgttgaagggag

SEQ ID NO: 120393 - DNA, 25 bp, Homo sapien
agattcaaccggtttaaggacacat

SEQ ID NO: 120394 - DNA, 25 bp, Homo sapien
gaggctacttgtatcttctgattca

SEQ ID NO: 120395 - DNA, 25 bp, Homo sapien
tccttcttaagtttgtcaaagaggc

SEQ ID NO: 120396 - DNA, 25 bp, Homo sapien
aaaatctaaagatatgattgtgtct

SEQ ID NO: 120397 - DNA, 25 bp, Homo sapien
aatctaaagatatgattgtgtctcc

SEQ ID NO: 120398 - DNA, 25 bp, Homo sapien
atctaaagatatgattgtgtctcca

SEQ ID NO: 120399 - DNA, 25 bp, Homo sapien
aaatctaaagatatgattgtgtctc

SEQ ID NO: 120400 - DNA, 25 bp, Homo sapien
tcgaagtggctttggcgtttcagcg

SEQ ID NO: 120401 - DNA, 25 bp, Homo sapien
gaactttgtctagtgcttccatcgg

SEQ ID NO: 120402 - DNA, 25 bp, Homo sapien
cttccatcggaaggactaggtgtct

SEQ ID NO: 120403 - DNA, 25 bp, Homo sapien
taatggtacttcctcaagttgctgg

SEQ ID NO: 120404 - DNA, 25 bp, Homo sapien
tataatgttcagatctaagttgccc

SEQ ID NO: 120405 - DNA, 25 bp, Homo sapien
tatttttagatgtaggaagccctaa

SEQ ID NO: 120406 - DNA, 25 bp, Homo sapien
tatattcattcaacacaaggctgtg

SEQ ID NO: 120407 - DNA, 25 bp, Homo sapien
caaggctgtgagatgtcaaatcccc

SEQ ID NO: 120408 - DNA, 25 bp, Homo sapien
ctgaagaagcttccatatactttgc

SEQ ID NO: 120409 - DNA, 25 bp, Homo sapien
aaccaagtccatcgtgtttatcaaa

SEQ ID NO: 120410 - DNA, 25 bp, Homo sapien
caaggtggagggataatgaggtcaa

SEQ ID NO: 120411 - DNA, 25 bp, Homo sapien
aagaagcttccatatactttgctag

SEQ ID NO: 120412 - DNA, 25 bp, Homo sapien
aaaaacaatattcactgggactatt

SEQ ID NO: 120413 - DNA, 25 bp, Homo sapien
aaacaatattcactgggactattag

SEQ ID NO: 120414 - DNA, 25 bp, Homo sapien
aaaacaatattcactgggactatta

SEQ ID NO: 120415 - DNA, 25 bp, Homo sapien
tctaccaattccaacttgaattcat

SEQ ID NO: 120416 - DNA, 25 bp, Homo sapien
ttctaccaattccaacttgaattca

SEQ ID NO: 120417 - DNA, 25 bp, Homo sapien
tgactcaaagcgacagataacacgt

SEQ ID NO: 120418 - DNA, 25 bp, Homo sapien
tcgaaggaacgtaactggaagtcat

SEQ ID NO: 120419 - DNA, 25 bp, Homo sapien
tctaatggtgacaactgatcgaagg

SEQ ID NO: 120420 - DNA, 25 bp, Homo sapien
gaggacttgcgctttcagggcttgc

SEQ ID NO: 120421 - DNA, 25 bp, Homo sapien
agtgagtaagtgacacagtaaataa

SEQ ID NO: 120422 - DNA, 25 bp, Homo sapien
actgtgattgccctcgtggagctca

SEQ ID NO: 120423 - DNA, 25 bp, Homo sapien
tagtatcactaaaatgcccaagaca

SEQ ID NO: 120424 - DNA, 25 bp, Homo sapien
gaagtactacacattaggtcatgag

SEQ ID NO: 120425 - DNA, 25 bp, Homo sapien
ttcagtgtacactacattggaacta

SEQ ID NO: 120426 - DNA, 25 bp, Homo sapien
tattatatagacagggaagtttaaa

SEQ ID NO: 120427 - DNA, 25 bp, Homo sapien
tacagatatattgtctttatgaaat

SEQ ID NO: 120428 - DNA, 25 bp, Homo sapien
aaattcttatacagatatattgtct

SEQ ID NO: 120429 - DNA, 25 bp, Homo sapien
tcaaagtcctactgctcactagttg

SEQ ID NO: 120430 - DNA, 25 bp, Homo sapien
gagcacctggccgtcaaagcttaat

SEQ ID NO: 120431 - DNA, 25 bp, Homo sapien
ttagaaccctgaggcctattgggta

SEQ ID NO: 120432 - DNA, 25 bp, Homo sapien
taaggcaggcatatcatacccattt

SEQ ID NO: 120433 - DNA, 25 bp, Homo sapien
ctactgcttgaaaaagtgaaccatc

SEQ ID NO: 120434 - DNA, 25 bp, Homo sapien
attctgcaaagctagtatctttgga

SEQ ID NO: 120435 - DNA, 25 bp, Homo sapien
aattcctactgcttgaaaaagtgaa

SEQ ID NO: 120436 - DNA, 25 bp, Homo sapien
tctgcaaagctagtatctttggatt

SEQ ID NO: 120437 - DNA, 25 bp, Homo sapien
atttaataacattataggcagtttc

SEQ ID NO: 120438 - DNA, 25 bp, Homo sapien
ccattctgttcactagatttgcatc

SEQ ID NO: 120439 - DNA, 25 bp, Homo sapien
agtagctgcatgatcgtctggctgc

SEQ ID NO: 120440 - DNA, 25 bp, Homo sapien
ccaagaaagtgatgtagtagctgca

SEQ ID NO: 120441 - DNA, 25 bp, Homo sapien
tgcatccttttacacgtttccaaga

SEQ ID NO: 120442 - DNA, 25 bp, Homo sapien
aagtaagtataatccagtgatactg

SEQ ID NO: 120443 - DNA, 25 bp, Homo sapien
tacaggatacaataaaggcacaaag

SEQ ID NO: 120444 - DNA, 25 bp, Homo sapien
gaggcatgtctgtagtgcgagctac

SEQ ID NO: 120445 - DNA, 25 bp, Homo sapien
tatggtgggcatcaaagctgatgcc

SEQ ID NO: 120446 - DNA, 25 bp, Homo sapien
ccttgtataggagcattaacttcac

SEQ ID NO: 120447 - DNA, 25 bp, Homo sapien
cattgattgccccagcagtctacat

SEQ ID NO: 120448 - DNA, 25 bp, Homo sapien
gagtaattcttcaccctgcagtagg

SEQ ID NO: 120449 - DNA, 25 bp, Homo sapien
taactggtcagctgtggtaatccac

SEQ ID NO: 120450 - DNA, 25 bp, Homo sapien
tgctttaggtaatgagccaccagtg

SEQ ID NO: 120451 - DNA, 25 bp, Homo sapien
ttgtgcagtattgtagccaggcttc

SEQ ID NO: 120452 - DNA, 25 bp, Homo sapien
cataaacttccacaactacataggg

SEQ ID NO: 120453 - DNA, 25 bp, Homo sapien
tgttagatccaaccacaaagagcaa

SEQ ID NO: 120454 - DNA, 25 bp, Homo sapien
gtgactataatgctgagaactgctt

SEQ ID NO: 120455 - DNA, 25 bp, Homo sapien
gaagctctagcctttgtaacattgt

SEQ ID NO: 120456 - DNA, 25 bp, Homo sapien
taacaacatactcttttcaatggga

SEQ ID NO: 120457 - DNA, 25 bp, Homo sapien
catacattaaggtgatggcactaag

SEQ ID NO: 120458 - DNA, 25 bp, Homo sapien
tcttttctgtacagaggcttctagg

SEQ ID NO: 120459 - DNA, 25 bp, Homo sapien
tactttcaagtgacatcggatcctc

SEQ ID NO: 120460 - DNA, 25 bp, Homo sapien
gccattaagtcaaaacagctctggg

SEQ ID NO: 120461 - DNA, 25 bp, Homo sapien
cagaacccactaaatggcacttgaa

SEQ ID NO: 120462 - DNA, 25 bp, Homo sapien
atcatgtagcgccagccacaccagg

SEQ ID NO: 120463 - DNA, 25 bp, Homo sapien
ctcgggttggcttgggtttcgcatc

SEQ ID NO: 120464 - DNA, 25 bp, Homo sapien
ttctcgggttggcttgggtttcgca

SEQ ID NO: 120465 - DNA, 25 bp, Homo sapien
gggtttcgcatcctcatcatgtagc

SEQ ID NO: 120466 - DNA, 25 bp, Homo sapien
cacacgtacgcgcagcgggcagcag

SEQ ID NO: 120467 - DNA, 25 bp, Homo sapien
cgtacacgaaagtcgccttgcgcgg

SEQ ID NO: 120468 - DNA, 25 bp, Homo sapien
gcatgcgctcccacacgtacgcgca

SEQ ID NO: 120469 - DNA, 25 bp, Homo sapien
ctggcgccgcccgttcgcaggccag

SEQ ID NO: 120470 - DNA, 25 bp, Homo sapien
ccgactttgacaagtcccagaagac

SEQ ID NO: 120471 - DNA, 25 bp, Homo sapien
cgactttgacaagtcccagaagaca

SEQ ID NO: 120472 - DNA, 25 bp, Homo sapien
tctatacactcatctcccttctgtc

SEQ ID NO: 120473 - DNA, 25 bp, Homo sapien
tcccttctgtccaacaagattatct

SEQ ID NO: 120474 - DNA, 25 bp, Homo sapien
ggctccaagctttttccgtactcta

SEQ ID NO: 120475 - DNA, 25 bp, Homo sapien
tcttctcccaaaggattctcaatag

SEQ ID NO: 120476 - DNA, 25 bp, Homo sapien
acccgaagcccgcacgcctccgaag

SEQ ID NO: 120477 - DNA, 25 bp, Homo sapien
aagcccgcacgcctctaacggacta

SEQ ID NO: 120478 - DNA, 25 bp, Homo sapien
acgcctctaacggactagccagcgg

SEQ ID NO: 120479 - DNA, 25 bp, Homo sapien
cctctaacggactagccagcggtgg

SEQ ID NO: 120480 - DNA, 25 bp, Homo sapien
tttctccagagctccgtgaagtcct

SEQ ID NO: 120481 - DNA, 25 bp, Homo sapien
tgaagtcctcgaagcgtacactgtc

SEQ ID NO: 120482 - DNA, 25 bp, Homo sapien
tacactgtccgtctcctggaagcgg

SEQ ID NO: 120483 - DNA, 25 bp, Homo sapien
gatagtcccgaacttcatgtttctc

SEQ ID NO: 120484 - DNA, 25 bp, Homo sapien
gccacatttgtgcatattataggtt

SEQ ID NO: 120485 - DNA, 25 bp, Homo sapien
cacatttgtgcatattataggtttc

SEQ ID NO: 120486 - DNA, 25 bp, Homo sapien
catttgtgcatattataggtttcta

SEQ ID NO: 120487 - DNA, 25 bp, Homo sapien
gtgcatattataggtttctatgtaa

SEQ ID NO: 120488 - DNA, 25 bp, Homo sapien
gcagatacaaagcaccaactctgat

SEQ ID NO: 120489 - DNA, 25 bp, Homo sapien
aaatatcgccaagccaaagctaaag

SEQ ID NO: 120490 - DNA, 25 bp, Homo sapien
gggtattatataatccatatagcag

SEQ ID NO: 120491 - DNA, 25 bp, Homo sapien
ggaggtaaaaaatatcgccaagcca

SEQ ID NO: 120492 - DNA, 25 bp, Homo sapien
tgcatcaaaatgctgtgcatttact

SEQ ID NO: 120493 - DNA, 25 bp, Homo sapien
gaaatgctctgtctagtcgtagctt

SEQ ID NO: 120494 - DNA, 25 bp, Homo sapien
aaaacttcatcccaatccttcaggg

SEQ ID NO: 120495 - DNA, 25 bp, Homo sapien
tcccaatccttcagggcaactctga

SEQ ID NO: 120496 - DNA, 25 bp, Homo sapien
gatcacttgggtccttaaattcttc

SEQ ID NO: 120497 - DNA, 25 bp, Homo sapien
catcacacgatcacttgggtcctta

SEQ ID NO: 120498 - DNA, 25 bp, Homo sapien
cacacgatcacttgggtccttaaat

SEQ ID NO: 120499 - DNA, 25 bp, Homo sapien
ataagtttcatcacacgatcacttg

SEQ ID NO: 120500 - DNA, 25 bp, Homo sapien
gatgctccaaaactatgttcttaat

SEQ ID NO: 120501 - DNA, 25 bp, Homo sapien
gctccaaaactatgttcttaatatt

SEQ ID NO: 120502 - DNA, 25 bp, Homo sapien
gataatgatcatgaacattcagcat

SEQ ID NO: 120503 - DNA, 25 bp, Homo sapien
gttctgataatgatcatgaacattc

SEQ ID NO: 120504 - DNA, 25 bp, Homo sapien
tgtcatgcagcaaagtggaatcagt

SEQ ID NO: 120505 - DNA, 25 bp, Homo sapien
caaggctagcctttaggtttccagg

SEQ ID NO: 120506 - DNA, 25 bp, Homo sapien
tgtgtaaacagagaaacacctgccc

SEQ ID NO: 120507 - DNA, 25 bp, Homo sapien
ggaatcagtgttaccagaccttctg

SEQ ID NO: 120508 - DNA, 25 bp, Homo sapien
tctccatcattagtttttgacttta

SEQ ID NO: 120509 - DNA, 25 bp, Homo sapien
tccgtttcttgtgaatttccttcca

SEQ ID NO: 120510 - DNA, 25 bp, Homo sapien
cattagtttttgactttaaggatgg

SEQ ID NO: 120511 - DNA, 25 bp, Homo sapien
ttttcttctccatcattagtttttg

SEQ ID NO: 120512 - DNA, 25 bp, Homo sapien
ttttattttcgctaatgattctgcc

SEQ ID NO: 120513 - DNA, 25 bp, Homo sapien
tcgctaatgattctgccctttcaca

SEQ ID NO: 120514 - DNA, 25 bp, Homo sapien
tgattttattttcgctaatgattct

SEQ ID NO: 120515 - DNA, 25 bp, Homo sapien
tattttcgctaatgattctgccctt

SEQ ID NO: 120516 - DNA, 25 bp, Homo sapien
ctcagagctaggcaactgatctcct

SEQ ID NO: 120517 - DNA, 25 bp, Homo sapien
ctgatctcctgtacaaaacagaagg

SEQ ID NO: 120518 - DNA, 25 bp, Homo sapien
ctgaagaggctaaacgagaaaggat

SEQ ID NO: 120519 - DNA, 25 bp, Homo sapien
aaaggatgtgggctcaaaggaaact

SEQ ID NO: 120520 - DNA, 25 bp, Homo sapien
gatggttgacaaagttgacaacaaa

SEQ ID NO: 120521 - DNA, 25 bp, Homo sapien
accacctgatggttgacaaagttga

SEQ ID NO: 120522 - DNA, 25 bp, Homo sapien
acacacctacgaccacctgatggtt

SEQ ID NO: 120523 - DNA, 25 bp, Homo sapien
aaccacagacacactacagtaacca

SEQ ID NO: 120524 - DNA, 25 bp, Homo sapien
caaccacgtatagctgtctctcagt

SEQ ID NO: 120525 - DNA, 25 bp, Homo sapien
ttccttcgtataccaaaatccagag

SEQ ID NO: 120526 - DNA, 25 bp, Homo sapien
aaatccagagaagctcaaattcctg

SEQ ID NO: 120527 - DNA, 25 bp, Homo sapien
tccaggacttccttcgtataccaaa

SEQ ID NO: 120528 - DNA, 25 bp, Homo sapien
ctagttgctttgacttgcccttgac

SEQ ID NO: 120529 - DNA, 25 bp, Homo sapien
agtcgagtttgacttgacgatgcct

SEQ ID NO: 120530 - DNA, 25 bp, Homo sapien
tagttgctttgacttgcccttgacc

SEQ ID NO: 120531 - DNA, 25 bp, Homo sapien
gaagagtcgagtttgacttgacgat

SEQ ID NO: 120532 - DNA, 25 bp, Homo sapien
tcctctcccctattgcttatgtgaa

SEQ ID NO: 120533 - DNA, 25 bp, Homo sapien
gattcattgagccagagtaaattgc

SEQ ID NO: 120534 - DNA, 25 bp, Homo sapien
tccagagaagcctgggaatttaatt

SEQ ID NO: 120535 - DNA, 25 bp, Homo sapien
tcagtaagctgcaaagtgttccctc

SEQ ID NO: 120536 - DNA, 25 bp, Homo sapien
aagaatgtgccaatttactctccca

SEQ ID NO: 120537 - DNA, 25 bp, Homo sapien
gcctccctagctttttagtaactgc

SEQ ID NO: 120538 - DNA, 25 bp, Homo sapien
gacctgattctaaattgctctatga

SEQ ID NO: 120539 - DNA, 25 bp, Homo sapien
tcctatatgcactgactgtctgcct

SEQ ID NO: 120540 - DNA, 25 bp, Homo sapien
cagtgttccagaaaataagagcata

SEQ ID NO: 120541 - DNA, 25 bp, Homo sapien
tatatttgagaaagatagcaaaaaa

SEQ ID NO: 120542 - DNA, 25 bp, Homo sapien
aaggaaacatataaaagagaatgca

SEQ ID NO: 120543 - DNA, 25 bp, Homo sapien
agagaatgcaatatatttgagaaag

SEQ ID NO: 120544 - DNA, 25 bp, Homo sapien
tatcttccttgtgtatattctgcac

SEQ ID NO: 120545 - DNA, 25 bp, Homo sapien
caggcatactcagacttaaaggttt

SEQ ID NO: 120546 - DNA, 25 bp, Homo sapien
cagacttaaaggtttatcttccttg

SEQ ID NO: 120547 - DNA, 25 bp, Homo sapien
tgtaattacaggcatactcagactt

SEQ ID NO: 120548 - DNA, 25 bp, Homo sapien
ctagtttgaccaaattttatctgta

SEQ ID NO: 120549 - DNA, 25 bp, Homo sapien
tagtttgaccaaattttatctgtac

SEQ ID NO: 120550 - DNA, 25 bp, Homo sapien
acaggagatgccagaaccaacactc

SEQ ID NO: 120551 - DNA, 25 bp, Homo sapien
gccagaaccaacactcgaataattg

SEQ ID NO: 120552 - DNA, 25 bp, Homo sapien
ggagatgccagaaccaacactcgaa

SEQ ID NO: 120553 - DNA, 25 bp, Homo sapien
gaaccaacactcgaataattgtcca

SEQ ID NO: 120554 - DNA, 25 bp, Homo sapien
tctcctcttcttggatgcagtgaac

SEQ ID NO: 120555 - DNA, 25 bp, Homo sapien
taacagagtggcatattcatgaagc

SEQ ID NO: 120556 - DNA, 25 bp, Homo sapien
tagtattaccagactgtattaggac

SEQ ID NO: 120557 - DNA, 25 bp, Homo sapien
tcaactattctgtaccagagacaca

SEQ ID NO: 120558 - DNA, 25 bp, Homo sapien
ggcagtcttcctgttcaatacacaa

SEQ ID NO: 120559 - DNA, 25 bp, Homo sapien
cagttgagccaacaacatgataggg

SEQ ID NO: 120560 - DNA, 25 bp, Homo sapien
tattggcagcaattcaaacaacatg

SEQ ID NO: 120561 - DNA, 25 bp, Homo sapien
tgtgaaacaggttaaggctgggtac

SEQ ID NO: 120562 - DNA, 25 bp, Homo sapien
tagggatatggtctgctattggcag

SEQ ID NO: 120563 - DNA, 25 bp, Homo sapien
tagtcttacctatctgaggagtcag

SEQ ID NO: 120564 - DNA, 25 bp, Homo sapien
taaaacctcatattaaagtgcctgc

SEQ ID NO: 120565 - DNA, 25 bp, Homo sapien
tcaagccattaggttaacaagacac

SEQ ID NO: 120566 - DNA, 25 bp, Homo sapien
tcgtaaattaggagacaccctgcac

SEQ ID NO: 120567 - DNA, 25 bp, Homo sapien
tgggtgttgccttccctaaaagtga

SEQ ID NO: 120568 - DNA, 25 bp, Homo sapien
gagaatacattcagttaaccaccta

SEQ ID NO: 120569 - DNA, 25 bp, Homo sapien
caactagctaggcagaatggctggc

SEQ ID NO: 120570 - DNA, 25 bp, Homo sapien
cagaagagttaaccatttgtgagac

SEQ ID NO: 120571 - DNA, 25 bp, Homo sapien
ggttaaaatcgtaggctctggagcc

SEQ ID NO: 120572 - DNA, 25 bp, Homo sapien
taaaacgcagtaaactgggtgctgg

SEQ ID NO: 120573 - DNA, 25 bp, Homo sapien
tgaaaccagagcaagaggcagtagg

SEQ ID NO: 120574 - DNA, 25 bp, Homo sapien
gaaagtagcagaatctccaaggaga

SEQ ID NO: 120575 - DNA, 25 bp, Homo sapien
tgccatcgtcttcgtataccctcgg

SEQ ID NO: 120576 - DNA, 25 bp, Homo sapien
tcggcagactcttgcctcactgctg

SEQ ID NO: 120577 - DNA, 25 bp, Homo sapien
gtcagtgtctgccatcgtcttcgta

SEQ ID NO: 120578 - DNA, 25 bp, Homo sapien
tcttcgtataccctcggcagactct

SEQ ID NO: 120579 - DNA, 25 bp, Homo sapien
caacgcccataagaacttggactcc

SEQ ID NO: 120580 - DNA, 25 bp, Homo sapien
tttcctcctcggcagtaaggctgct

SEQ ID NO: 120581 - DNA, 25 bp, Homo sapien
agggatccacccgtggttgatttag

SEQ ID NO: 120582 - DNA, 25 bp, Homo sapien
ttgatttagcatctccacaacgccc

SEQ ID NO: 120583 - DNA, 25 bp, Homo sapien
tctggacctcagagctcgtcagacc

SEQ ID NO: 120584 - DNA, 25 bp, Homo sapien
tggacctcagagctcgtcagacctc

SEQ ID NO: 120585 - DNA, 25 bp, Homo sapien
gagctcgtcagacctccacagccat

SEQ ID NO: 120586 - DNA, 25 bp, Homo sapien
gctcgtcagacctccacagccatga

SEQ ID NO: 120587 - DNA, 25 bp, Homo sapien
ttttttcttggggttgcatccatgt

SEQ ID NO: 120588 - DNA, 25 bp, Homo sapien
taagaggtatcaggccccatctgtc

SEQ ID NO: 120589 - DNA, 25 bp, Homo sapien
gatggtaagaggtatcaggccccat

SEQ ID NO: 120590 - DNA, 25 bp, Homo sapien
ggtaagaggtatcaggccccatctg

SEQ ID NO: 120591 - DNA, 25 bp, Homo sapien
aaaatagttcccagcacgtagtagg

SEQ ID NO: 120592 - DNA, 25 bp, Homo sapien
aactaactgattggacgtccactgg

SEQ ID NO: 120593 - DNA, 25 bp, Homo sapien
gccatctccgtaggctccaagtggg

SEQ ID NO: 120594 - DNA, 25 bp, Homo sapien
caagtgggccgtgctcttcatgtca

SEQ ID NO: 120595 - DNA, 25 bp, Homo sapien
tcggcaggcccggtgcgctcggggg

SEQ ID NO: 120596 - DNA, 25 bp, Homo sapien
ctcctcggcaggcccggtgcgctcg

SEQ ID NO: 120597 - DNA, 25 bp, Homo sapien
cgcgctcctcggcaggcccggtgcg

SEQ ID NO: 120598 - DNA, 25 bp, Homo sapien
ggcaggcccggtgcgctcgggggcc

SEQ ID NO: 120599 - DNA, 25 bp, Homo sapien
ctgcccgacggccgcccaggttcgg

SEQ ID NO: 120600 - DNA, 25 bp, Homo sapien
agggggctgcccgacggccgcccag

SEQ ID NO: 120601 - DNA, 25 bp, Homo sapien
gacgagggggctgcccgacggccgc

SEQ ID NO: 120602 - DNA, 25 bp, Homo sapien
tcggacgagggggctgcccgacggc

SEQ ID NO: 120603 - DNA, 25 bp, Homo sapien
acctgccctttcaagccccgccagg

SEQ ID NO: 120604 - DNA, 25 bp, Homo sapien
ctgccctttcaagccccgccaggca

SEQ ID NO: 120605 - DNA, 25 bp, Homo sapien
cctgccctttcaagccccgccaggc

SEQ ID NO: 120606 - DNA, 25 bp, Homo sapien
cacctgccctttcaagccccgccag

SEQ ID NO: 120607 - DNA, 25 bp, Homo sapien
gcgccaggcgcacgcccttctgcca

SEQ ID NO: 120608 - DNA, 25 bp, Homo sapien
cccgcgaagggctgcgatggcaggc

SEQ ID NO: 120609 - DNA, 25 bp, Homo sapien
gctgcgatggcaggccccgctgcca

SEQ ID NO: 120610 - DNA, 25 bp, Homo sapien
cccgctgccacacggcatcgagggt

SEQ ID NO: 120611 - DNA, 25 bp, Homo sapien
cccagaactcgaggcgaaccttgaa

SEQ ID NO: 120612 - DNA, 25 bp, Homo sapien
ttgtgctgcccgctgcgaatacagc

SEQ ID NO: 120613 - DNA, 25 bp, Homo sapien
gcgcagtgccttcgtttgcccggct

SEQ ID NO: 120614 - DNA, 25 bp, Homo sapien
gaaccttgaactcacagcgccaaaa

SEQ ID NO: 120615 - DNA, 25 bp, Homo sapien
tcaacctgatgtctccaggcactcc

SEQ ID NO: 120616 - DNA, 25 bp, Homo sapien
ctgatgtctccaggcactcctccca

SEQ ID NO: 120617 - DNA, 25 bp, Homo sapien
caacctgatgtctccaggcactcct

SEQ ID NO: 120618 - DNA, 25 bp, Homo sapien
atgtctccaggcactcctcccaccc

SEQ ID NO: 120619 - DNA, 25 bp, Homo sapien
gccaaatgcacatcagcggagaagt

SEQ ID NO: 120620 - DNA, 25 bp, Homo sapien
gagatcgccaaatgcacatcagcgg

SEQ ID NO: 120621 - DNA, 25 bp, Homo sapien
aagcccagagagatcgccaaatgca

SEQ ID NO: 120622 - DNA, 25 bp, Homo sapien
tcagcggagaagtgctcaaaaccct

SEQ ID NO: 120623 - DNA, 25 bp, Homo sapien
aactccatgcctatttactggaaac

SEQ ID NO: 120624 - DNA, 25 bp, Homo sapien
cctttgacaaagagtgggtgcccat

SEQ ID NO: 120625 - DNA, 25 bp, Homo sapien
gatgtggcccatgtcaagcacctgt

SEQ ID NO: 120626 - DNA, 25 bp, Homo sapien
gagcaaccgctccacggatgggaaa

SEQ ID NO: 120627 - DNA, 25 bp, Homo sapien
gatgctggacatgaggtgaacccct

SEQ ID NO: 120628 - DNA, 25 bp, Homo sapien
agcagcagcatgtcggaatgtgcag

SEQ ID NO: 120629 - DNA, 25 bp, Homo sapien
gagggtcctctgacagcctagttgc

SEQ ID NO: 120630 - DNA, 25 bp, Homo sapien
tcagggtggtcgtcagtgggtgaac

SEQ ID NO: 120631 - DNA, 25 bp, Homo sapien
tgcagtggtcatgacggagccaact

SEQ ID NO: 120632 - DNA, 25 bp, Homo sapien
ccagaaagccaacagtagatggaca

SEQ ID NO: 120633 - DNA, 25 bp, Homo sapien
cagaaagccaacagtagatggacat

SEQ ID NO: 120634 - DNA, 25 bp, Homo sapien
tccagaaagccaacagtagatggac

SEQ ID NO: 120635 - DNA, 25 bp, Homo sapien
ccttagcaagagtcacactccattt

SEQ ID NO: 120636 - DNA, 25 bp, Homo sapien
cttacaaaagttcccatccagacag

SEQ ID NO: 120637 - DNA, 25 bp, Homo sapien
gattgtgttctgtcagaaacacaga

SEQ ID NO: 120638 - DNA, 25 bp, Homo sapien
gaaagaaagcctatgccaaaaggga

SEQ ID NO: 120639 - DNA, 25 bp, Homo sapien
ttgggtgactgttccgttgattatt

SEQ ID NO: 120640 - DNA, 25 bp, Homo sapien
tgggtgactgttccgttgattattt

SEQ ID NO: 120641 - DNA, 25 bp, Homo sapien
ggtgactgttccgttgattatttct

SEQ ID NO: 120642 - DNA, 25 bp, Homo sapien
tgactgttccgttgattatttcttc

SEQ ID NO: 120643 - DNA, 25 bp, Homo sapien
cattgcatggctgtactgaaacctc

SEQ ID NO: 120644 - DNA, 25 bp, Homo sapien
ttcaaagcaatcgaactcatggaca

SEQ ID NO: 120645 - DNA, 25 bp, Homo sapien
gctatcagaggctagaagagtggca

SEQ ID NO: 120646 - DNA, 25 bp, Homo sapien
aatttttaaagcctgcgacagatta

SEQ ID NO: 120647 - DNA, 25 bp, Homo sapien
tcatcttggaacacagcggccttcc

SEQ ID NO: 120648 - DNA, 25 bp, Homo sapien
aacaccgaaaccagtcgttctggct

SEQ ID NO: 120649 - DNA, 25 bp, Homo sapien
ttccgcggcagctgcaacaccgaaa

SEQ ID NO: 120650 - DNA, 25 bp, Homo sapien
gcagcccacgactagcacgtgtctg

SEQ ID NO: 120651 - DNA, 25 bp, Homo sapien
cgccaaattgaggccgcgcagcgag

SEQ ID NO: 120652 - DNA, 25 bp, Homo sapien
tgcctcgccatgcagcacttggtag

SEQ ID NO: 120653 - DNA, 25 bp, Homo sapien
cacttggtaggccaggttgctcatc

SEQ ID NO: 120654 - DNA, 25 bp, Homo sapien
ggccgaagcggccttggcctgtgca

SEQ ID NO: 120655 - DNA, 25 bp, Homo sapien
ggcgctggcagacactagggcccaa

SEQ ID NO: 120656 - DNA, 25 bp, Homo sapien
tagggaccggcataaaagggcctga

SEQ ID NO: 120657 - DNA, 25 bp, Homo sapien
tgtgatttagccctccaggcgctgg

SEQ ID NO: 120658 - DNA, 25 bp, Homo sapien
accggccagccacatgcgtcattaa

SEQ ID NO: 120659 - DNA, 25 bp, Homo sapien
ggagcatcccgccatccgcgcagtt

SEQ ID NO: 120660 - DNA, 25 bp, Homo sapien
gaccccggttaagacacggagcatc

SEQ ID NO: 120661 - DNA, 25 bp, Homo sapien
gttaagacacggagcatcccgccat

SEQ ID NO: 120662 - DNA, 25 bp, Homo sapien
ccggttaagacacggagcatcccgc

SEQ ID NO: 120663 - DNA, 25 bp, Homo sapien
gactcgcagcaattttcagcacttt

SEQ ID NO: 120664 - DNA, 25 bp, Homo sapien
ggtgccccagaatccagaagtcgct

SEQ ID NO: 120665 - DNA, 25 bp, Homo sapien
atgagtcacagtgggccatttcccg

SEQ ID NO: 120666 - DNA, 25 bp, Homo sapien
gcccagtaactgcagggagcggcat

SEQ ID NO: 120667 - DNA, 25 bp, Homo sapien
ttcagagggatgtgtagggcatgag

SEQ ID NO: 120668 - DNA, 25 bp, Homo sapien
gtaaatcacataaatgaggagagca

SEQ ID NO: 120669 - DNA, 25 bp, Homo sapien
cctttccggactgcttctcctaaga

SEQ ID NO: 120670 - DNA, 25 bp, Homo sapien
ttgtaaatcacataaatgaggagag

SEQ ID NO: 120671 - DNA, 25 bp, Homo sapien
ctgtttccctttccggactgcttct

SEQ ID NO: 120672 - DNA, 25 bp, Homo sapien
ttccaccgttttgggcagcccaggc

SEQ ID NO: 120673 - DNA, 25 bp, Homo sapien
ggccatgaggtcccccacaatattc

SEQ ID NO: 120674 - DNA, 25 bp, Homo sapien
tggaaatgttccaccgttttgggca

SEQ ID NO: 120675 - DNA, 25 bp, Homo sapien
tgaggtcccccacaatattccaaac

SEQ ID NO: 120676 - DNA, 25 bp, Homo sapien
aatgatctgcagcttaaatacaaaa

SEQ ID NO: 120677 - DNA, 25 bp, Homo sapien
tccattaataagtcacccaatatat

SEQ ID NO: 120678 - DNA, 25 bp, Homo sapien
aataaatatatctttgcggtattac

SEQ ID NO: 120679 - DNA, 25 bp, Homo sapien
atatctttgcggtattacggcaatc

SEQ ID NO: 120680 - DNA, 25 bp, Homo sapien
tgtcatacattgctagggagaatac

SEQ ID NO: 120681 - DNA, 25 bp, Homo sapien
tgtgtacccatctaccatataaccc

SEQ ID NO: 120682 - DNA, 25 bp, Homo sapien
taaagcatgtatccacacaaatact

SEQ ID NO: 120683 - DNA, 25 bp, Homo sapien
ttttgtagagctaaatgtgtaccca

SEQ ID NO: 120684 - DNA, 25 bp, Homo sapien
gaagatgtagtgtctggttagagcc

SEQ ID NO: 120685 - DNA, 25 bp, Homo sapien
tagtgtctggttagagcctgctccc

SEQ ID NO: 120686 - DNA, 25 bp, Homo sapien
cactggaagatgtagtgtctggtta

SEQ ID NO: 120687 - DNA, 25 bp, Homo sapien
gatgtagtgtctggttagagcctgc

SEQ ID NO: 120688 - DNA, 25 bp, Homo sapien
caaaagcttgaaatgcgctgtcccc

SEQ ID NO: 120689 - DNA, 25 bp, Homo sapien
gggcaaaagcttgaaatgcgctgtc

SEQ ID NO: 120690 - DNA, 25 bp, Homo sapien
aaagcttgaaatgcgctgtcccctt

SEQ ID NO: 120691 - DNA, 25 bp, Homo sapien
ctgcggggcaaaagcttgaaatgcg

SEQ ID NO: 120692 - DNA, 25 bp, Homo sapien
cttctgtgtgggagttcaatcatct

SEQ ID NO: 120693 - DNA, 25 bp, Homo sapien
tcttggtgctctagatttggaagcc

SEQ ID NO: 120694 - DNA, 25 bp, Homo sapien
taagcaggaagtggtacccacacaa

SEQ ID NO: 120695 - DNA, 25 bp, Homo sapien
tgccattaacgataccaacttccaa

SEQ ID NO: 120696 - DNA, 25 bp, Homo sapien
agttgttatcaacctacctgtgcga

SEQ ID NO: 120697 - DNA, 25 bp, Homo sapien
cagtgtgagcagtatccaggagaaa

SEQ ID NO: 120698 - DNA, 25 bp, Homo sapien
aatgcataggattcggccaagtatc

SEQ ID NO: 120699 - DNA, 25 bp, Homo sapien
tcattattgataccctcgaaggact

SEQ ID NO: 120700 - DNA, 25 bp, Homo sapien
caacttctctcaggaattactggca

SEQ ID NO: 120701 - DNA, 25 bp, Homo sapien
gaatagtatctaattcacgacggtg

SEQ ID NO: 120702 - DNA, 25 bp, Homo sapien
taaagcttaaacgagagtctgacac

SEQ ID NO: 120703 - DNA, 25 bp, Homo sapien
gacaggcctggacctagagatataa

SEQ ID NO: 120704 - DNA, 25 bp, Homo sapien
tgagagaaatcaggaggaagtctgc

SEQ ID NO: 120705 - DNA, 25 bp, Homo sapien
ttgaggaatcaccacgctgcttata

SEQ ID NO: 120706 - DNA, 25 bp, Homo sapien
gaatcaccacgctgcttataaagca

SEQ ID NO: 120707 - DNA, 25 bp, Homo sapien
caaggcactaagttgagccctaagt

SEQ ID NO: 120708 - DNA, 25 bp, Homo sapien
ctaggtggaatggtagctctgtgtc

SEQ ID NO: 120709 - DNA, 25 bp, Homo sapien
agtacctgttgtttccctgtttgtg

SEQ ID NO: 120710 - DNA, 25 bp, Homo sapien
gttgtttccctgtttgtgtccatga

SEQ ID NO: 120711 - DNA, 25 bp, Homo sapien
ttgtttccctgtttgtgtccatgag

SEQ ID NO: 120712 - DNA, 25 bp, Homo sapien
ctccagtacctgttgtttccctgtt

SEQ ID NO: 120713 - DNA, 25 bp, Homo sapien
gctacccatgcaaatttataaacca

SEQ ID NO: 120714 - DNA, 25 bp, Homo sapien
cactagtttcattgctacccatgca

SEQ ID NO: 120715 - DNA, 25 bp, Homo sapien
cctggcctacaaatagtccacttct

SEQ ID NO: 120716 - DNA, 25 bp, Homo sapien
ccacttctttgtaacactagtttca

SEQ ID NO: 120717 - DNA, 25 bp, Homo sapien
taccacaaaatccctttagagtctg

SEQ ID NO: 120718 - DNA, 25 bp, Homo sapien
accacaaaatccctttagagtctgt

SEQ ID NO: 120719 - DNA, 25 bp, Homo sapien
cacaaaatccctttagagtctgttt

SEQ ID NO: 120720 - DNA, 25 bp, Homo sapien
ccacaaaatccctttagagtctgtt

SEQ ID NO: 120721 - DNA, 25 bp, Homo sapien
tgaggcccgactgccgtgaaagcct

SEQ ID NO: 120722 - DNA, 25 bp, Homo sapien
ttctgaggcccgactgccgtgaaag

SEQ ID NO: 120723 - DNA, 25 bp, Homo sapien
ccgactgccgtgaaagcctccagtt

SEQ ID NO: 120724 - DNA, 25 bp, Homo sapien
cattctgaggcccgactgccgtgaa

SEQ ID NO: 120725 - DNA, 25 bp, Homo sapien
tgggaggccatctgtaccaggcatt

SEQ ID NO: 120726 - DNA, 25 bp, Homo sapien
catgggaggccatctgtaccaggca

SEQ ID NO: 120727 - DNA, 25 bp, Homo sapien
ggaggccatctgtaccaggcattcc

SEQ ID NO: 120728 - DNA, 25 bp, Homo sapien
caggcattccacttggtgattatca

SEQ ID NO: 120729 - DNA, 25 bp, Homo sapien
gcgtgcccacatcactctgctgcac

SEQ ID NO: 120730 - DNA, 25 bp, Homo sapien
gtgcccacatcactctgctgcacat

SEQ ID NO: 120731 - DNA, 25 bp, Homo sapien
ttgcgtgcccacatcactctgctgc

SEQ ID NO: 120732 - DNA, 25 bp, Homo sapien
tgcccacatcactctgctgcacatc

SEQ ID NO: 120733 - DNA, 25 bp, Homo sapien
aggaagctgaacagcaataggattc

SEQ ID NO: 120734 - DNA, 25 bp, Homo sapien
gcaataggattcagcattgttatta

SEQ ID NO: 120735 - DNA, 25 bp, Homo sapien
ttgttattattgtgacacattagaa

SEQ ID NO: 120736 - DNA, 25 bp, Homo sapien
ctagaggaagctgaacagcaatagg

SEQ ID NO: 120737 - DNA, 25 bp, Homo sapien
tgtgaaccaagtaggctgccacgtg

SEQ ID NO: 120738 - DNA, 25 bp, Homo sapien
ggactgtgaaccaagtaggctgcca

SEQ ID NO: 120739 - DNA, 25 bp, Homo sapien
actgtgaaccaagtaggctgccacg

SEQ ID NO: 120740 - DNA, 25 bp, Homo sapien
gtgaaccaagtaggctgccacgtgg

SEQ ID NO: 120741 - DNA, 25 bp, Homo sapien
ttcattatatccttggagtaagcta

SEQ ID NO: 120742 - DNA, 25 bp, Homo sapien
tatatccttggagtaagctattatt

SEQ ID NO: 120743 - DNA, 25 bp, Homo sapien
cattatatccttggagtaagctatt

SEQ ID NO: 120744 - DNA, 25 bp, Homo sapien
actgtctgtgctaatttcatttcat

SEQ ID NO: 120745 - DNA, 25 bp, Homo sapien
ggtagtgcaccaccattagacctgc

SEQ ID NO: 120746 - DNA, 25 bp, Homo sapien
tgacgtcagttgcacaaagcgttgg

SEQ ID NO: 120747 - DNA, 25 bp, Homo sapien
gccttacaagaagtactcaagggaa

SEQ ID NO: 120748 - DNA, 25 bp, Homo sapien
cagaatattgtgctactgtagtggc

SEQ ID NO: 120749 - DNA, 25 bp, Homo sapien
ctcctatcgtttcaaaacacagctt

SEQ ID NO: 120750 - DNA, 25 bp, Homo sapien
cccagtcttgtctttagaatgcttt

SEQ ID NO: 120751 - DNA, 25 bp, Homo sapien
atcccagtcttgtctttagaatgct

SEQ ID NO: 120752 - DNA, 25 bp, Homo sapien
aggcctcctatcgtttcaaaacaca

SEQ ID NO: 120753 - DNA, 25 bp, Homo sapien
tgttcattactgaagtgactattgc

SEQ ID NO: 120754 - DNA, 25 bp, Homo sapien
tgaagtgactattgctacacatttt

SEQ ID NO: 120755 - DNA, 25 bp, Homo sapien
tcattagtggttatcaaaatgaggt

SEQ ID NO: 120756 - DNA, 25 bp, Homo sapien
tatcaaaatgaggtctcctagggtc

SEQ ID NO: 120757 - DNA, 25 bp, Homo sapien
aaggatctctatttcccagtttcac

SEQ ID NO: 120758 - DNA, 25 bp, Homo sapien
gctgaaattggtctgtctctgaaag

SEQ ID NO: 120759 - DNA, 25 bp, Homo sapien
cagtttcacttctatgaagagcgca

SEQ ID NO: 120760 - DNA, 25 bp, Homo sapien
agagcgcagactgctgaaattggtc

SEQ ID NO: 120761 - DNA, 25 bp, Homo sapien
ttgaatgtgaactatagaataagca

SEQ ID NO: 120762 - DNA, 25 bp, Homo sapien
tgagaaattaatttggaggtctctt

SEQ ID NO: 120763 - DNA, 25 bp, Homo sapien
tgtccagttgttcagttccttcagt

SEQ ID NO: 120764 - DNA, 25 bp, Homo sapien
ctatagaataagcatgttgagaaat

SEQ ID NO: 120765 - DNA, 25 bp, Homo sapien
aaagcacatgtggtaacttgcggtc

SEQ ID NO: 120766 - DNA, 25 bp, Homo sapien
caattgggccactgggacattgtgg

SEQ ID NO: 120767 - DNA, 25 bp, Homo sapien
cctccgcaatagaagaaagcacatg

SEQ ID NO: 120768 - DNA, 25 bp, Homo sapien
tgcggtcatcactggcccaattggg

SEQ ID NO: 120769 - DNA, 25 bp, Homo sapien
ggtccttagtaagtgcccagaaatg

SEQ ID NO: 120770 - DNA, 25 bp, Homo sapien
agcgttcagcatccctcttgttttg

SEQ ID NO: 120771 - DNA, 25 bp, Homo sapien
gcaaccaggtccttagtaagtgccc

SEQ ID NO: 120772 - DNA, 25 bp, Homo sapien
tttccatggttacaaaaagcgttca

SEQ ID NO: 120773 - DNA, 25 bp, Homo sapien
taacaggatgtccataactaagaaa

SEQ ID NO: 120774 - DNA, 25 bp, Homo sapien
gatatctgtcatccacgtgaaggca

SEQ ID NO: 120775 - DNA, 25 bp, Homo sapien
tgtcatccacgtgaaggcagttgga

SEQ ID NO: 120776 - DNA, 25 bp, Homo sapien
gatgtccataactaagaaaggaaga

SEQ ID NO: 120777 - DNA, 25 bp, Homo sapien
cacttatgagtgtgaaccttcacag

SEQ ID NO: 120778 - DNA, 25 bp, Homo sapien
cttatgagtgtgaaccttcacagct

SEQ ID NO: 120779 - DNA, 25 bp, Homo sapien
acttatgagtgtgaaccttcacagc

SEQ ID NO: 120780 - DNA, 25 bp, Homo sapien
ctaggtctagagctaccaaccagaa

SEQ ID NO: 120781 - DNA, 25 bp, Homo sapien
ctttcttggtcctacatcgatatca

SEQ ID NO: 120782 - DNA, 25 bp, Homo sapien
ggctacagccattctctttcttggt

SEQ ID NO: 120783 - DNA, 25 bp, Homo sapien
cattggatctacattcattttggaa

SEQ ID NO: 120784 - DNA, 25 bp, Homo sapien
gactgatcagagctacattctgctc

SEQ ID NO: 120785 - DNA, 25 bp, Homo sapien
ggcagactgatcagagctacattct

SEQ ID NO: 120786 - DNA, 25 bp, Homo sapien
ctatggcagactgatcagagctaca

SEQ ID NO: 120787 - DNA, 25 bp, Homo sapien
tatggcagactgatcagagctacat

SEQ ID NO: 120788 - DNA, 25 bp, Homo sapien
tacctgttcacatagattagtagct

SEQ ID NO: 120789 - DNA, 25 bp, Homo sapien
tcatgattagtagaagggaaaagat

SEQ ID NO: 120790 - DNA, 25 bp, Homo sapien
gaaaagatgcccgaaagttcaacta

SEQ ID NO: 120791 - DNA, 25 bp, Homo sapien
cacatttgcccctcttgttttcatg

SEQ ID NO: 120792 - DNA, 25 bp, Homo sapien
cgttttcgtcatccaagccaccgaa

SEQ ID NO: 120793 - DNA, 25 bp, Homo sapien
catcattcccgttttcgtcatccaa

SEQ ID NO: 120794 - DNA, 25 bp, Homo sapien
gtcatccaagccaccgaatttcctt

SEQ ID NO: 120795 - DNA, 25 bp, Homo sapien
tccaagccaccgaatttccttctaa

SEQ ID NO: 120796 - DNA, 25 bp, Homo sapien
aaagtagaagcaggatccctctctc

SEQ ID NO: 120797 - DNA, 25 bp, Homo sapien
tacttgtaatattcccctgaccaga

SEQ ID NO: 120798 - DNA, 25 bp, Homo sapien
gcctacatagcttgcacagtgtcag

SEQ ID NO: 120799 - DNA, 25 bp, Homo sapien
acgccctgtgcttacccctatggaa

SEQ ID NO: 120800 - DNA, 25 bp, Homo sapien
agtgtgaaactgtcagcctctctga

SEQ ID NO: 120801 - DNA, 25 bp, Homo sapien
tgcttgataggacccaagagttgtg

SEQ ID NO: 120802 - DNA, 25 bp, Homo sapien
tgcctcctataagggaattgcttga

SEQ ID NO: 120803 - DNA, 25 bp, Homo sapien
tactctaagctgtttcatcactgca

SEQ ID NO: 120804 - DNA, 25 bp, Homo sapien
tctgtcggcttcaccacttttgagg

SEQ ID NO: 120805 - DNA, 25 bp, Homo sapien
taatacacctatatcagccccaagt

SEQ ID NO: 120806 - DNA, 25 bp, Homo sapien
gctttgggactcttggactttcgac

SEQ ID NO: 120807 - DNA, 25 bp, Homo sapien
tattagctttgttcctctagaggac

SEQ ID NO: 120808 - DNA, 25 bp, Homo sapien
tccaccagcataagaaggggctggt

SEQ ID NO: 120809 - DNA, 25 bp, Homo sapien
ctggattttgcagacctggtagacg

SEQ ID NO: 120810 - DNA, 25 bp, Homo sapien
tagacgtgagatagtatttcactgt

SEQ ID NO: 120811 - DNA, 25 bp, Homo sapien
ctggtgacacccttgcccaagctgg

SEQ ID NO: 120812 - DNA, 25 bp, Homo sapien
cttcattgcctccagtgcaaagcaa

SEQ ID NO: 120813 - DNA, 25 bp, Homo sapien
gggactccgccgtgtcttcattgcc

SEQ ID NO: 120814 - DNA, 25 bp, Homo sapien
gctgggactccgccgtgtcttcatt

SEQ ID NO: 120815 - DNA, 25 bp, Homo sapien
ctttcatgcctcccgaagagcctcc

SEQ ID NO: 120816 - DNA, 25 bp, Homo sapien
gtgggaagtgcccaacacctgctca

SEQ ID NO: 120817 - DNA, 25 bp, Homo sapien
tggaggtggagtgctctgtaggagc

SEQ ID NO: 120818 - DNA, 25 bp, Homo sapien
tgctctgtaggagctaacaacactg

SEQ ID NO: 120819 - DNA, 25 bp, Homo sapien
taggagctaacaacactgcctggaa

SEQ ID NO: 120820 - DNA, 25 bp, Homo sapien
caagagccatgagtctcctgtgtgg

SEQ ID NO: 120821 - DNA, 25 bp, Homo sapien
aaacaagagccatgagtctcctgtg

SEQ ID NO: 120822 - DNA, 25 bp, Homo sapien
tgggagtaaacaagagccatgagtc

SEQ ID NO: 120823 - DNA, 25 bp, Homo sapien
gagtaaacaagagccatgagtctcc

SEQ ID NO: 120824 - DNA, 25 bp, Homo sapien
cgtgtgtcaacaacgaacggctgaa

SEQ ID NO: 120825 - DNA, 25 bp, Homo sapien
tctgggaccgggacacggaaatctc

SEQ ID NO: 120826 - DNA, 25 bp, Homo sapien
tcactgaacggaaactctgggaccg

SEQ ID NO: 120827 - DNA, 25 bp, Homo sapien
ctcgtcactgtcagaagatgtggac

SEQ ID NO: 120828 - DNA, 25 bp, Homo sapien
catctacagctatgccctcatttga

SEQ ID NO: 120829 - DNA, 25 bp, Homo sapien
acatctacagctatgccctcatttg

SEQ ID NO: 120830 - DNA, 25 bp, Homo sapien
gaacatctacagctatgccctcatt

SEQ ID NO: 120831 - DNA, 25 bp, Homo sapien
atctacagctatgccctcatttgac

SEQ ID NO: 120832 - DNA, 25 bp, Homo sapien
caagatcagtaataagagaattttc

SEQ ID NO: 120833 - DNA, 25 bp, Homo sapien
aaagctacattaagccttgaaaagt

SEQ ID NO: 120834 - DNA, 25 bp, Homo sapien
tgtctcatgactttaactcctacgg

SEQ ID NO: 120835 - DNA, 25 bp, Homo sapien
tacggtgataataccaagatcagta

SEQ ID NO: 120836 - DNA, 25 bp, Homo sapien
cctcatccaacccatccaaccccat

SEQ ID NO: 120837 - DNA, 25 bp, Homo sapien
ctgcctggcctgaactggcctcatc

SEQ ID NO: 120838 - DNA, 25 bp, Homo sapien
gcctggcctgaactggcctcatcca

SEQ ID NO: 120839 - DNA, 25 bp, Homo sapien
ctggcctgaactggcctcatccaac

SEQ ID NO: 120840 - DNA, 25 bp, Homo sapien
gatgtggtcatcttcaccgtaggag

SEQ ID NO: 120841 - DNA, 25 bp, Homo sapien
tgaggctttggaccacactggactc

SEQ ID NO: 120842 - DNA, 25 bp, Homo sapien
cactggactcttggtgagatgtgcc

SEQ ID NO: 120843 - DNA, 25 bp, Homo sapien
gaataacgccgttggctggctccat

SEQ ID NO: 120844 - DNA, 25 bp, Homo sapien
aagctgtctccatctccaagctgcc

SEQ ID NO: 120845 - DNA, 25 bp, Homo sapien
aaagctgtctccatctccaagctgc

SEQ ID NO: 120846 - DNA, 25 bp, Homo sapien
aaaagctgtctccatctccaagctg

SEQ ID NO: 120847 - DNA, 25 bp, Homo sapien
gctgtctccatctccaagctgccct

SEQ ID NO: 120848 - DNA, 25 bp, Homo sapien
aggaatcttcaaatccccggctatt

SEQ ID NO: 120849 - DNA, 25 bp, Homo sapien
aggagctgtcagtggcataggaatc

SEQ ID NO: 120850 - DNA, 25 bp, Homo sapien
gctgtcagtggcataggaatcttca

SEQ ID NO: 120851 - DNA, 25 bp, Homo sapien
ggcataggaatcttcaaatccccgg

SEQ ID NO: 120852 - DNA, 25 bp, Homo sapien
caatgaaagaatgaaaaacaaataa

SEQ ID NO: 120853 - DNA, 25 bp, Homo sapien
atgagaaaggagagtggaaagaggg

SEQ ID NO: 120854 - DNA, 25 bp, Homo sapien
tgagaaaggagagtggaaagagggg

SEQ ID NO: 120855 - DNA, 25 bp, Homo sapien
gatgagaaaggagagtggaaagagg

SEQ ID NO: 120856 - DNA, 25 bp, Homo sapien
gagaaaggagagtggaaagagggga

SEQ ID NO: 120857 - DNA, 25 bp, Homo sapien
tactgattaatgctgtctcctaggc

SEQ ID NO: 120858 - DNA, 25 bp, Homo sapien
cacagaatcatgataggagggatct

SEQ ID NO: 120859 - DNA, 25 bp, Homo sapien
tacaaaaccaatgtcaatggccaga

SEQ ID NO: 120860 - DNA, 25 bp, Homo sapien
tatatattcacagtgcaagatctgc

SEQ ID NO: 120861 - DNA, 25 bp, Homo sapien
cctaataagagatgcatcctgttta

SEQ ID NO: 120862 - DNA, 25 bp, Homo sapien
ccaagtcctaataagagatgcatcc

SEQ ID NO: 120863 - DNA, 25 bp, Homo sapien
agtcctaataagagatgcatcctgt

SEQ ID NO: 120864 - DNA, 25 bp, Homo sapien
actccaagtcctaataagagatgca

SEQ ID NO: 120865 - DNA, 25 bp, Homo sapien
agctccagcaggcaggtaaatggga

SEQ ID NO: 120866 - DNA, 25 bp, Homo sapien
ctattaaagctccagcaggcaggta

SEQ ID NO: 120867 - DNA, 25 bp, Homo sapien
tcaataccgagtcttctattaaagc

SEQ ID NO: 120868 - DNA, 25 bp, Homo sapien
ggtaaatgggaggtgacctggagaa

SEQ ID NO: 120869 - DNA, 25 bp, Homo sapien
cttgggtactgttaataccactaat

SEQ ID NO: 120870 - DNA, 25 bp, Homo sapien
ggagctcctcacttgggtactgtta

SEQ ID NO: 120871 - DNA, 25 bp, Homo sapien
gtactgttaataccactaatccatc

SEQ ID NO: 120872 - DNA, 25 bp, Homo sapien
caggcaactgaaggagctcctcact

SEQ ID NO: 120873 - DNA, 25 bp, Homo sapien
gaggacttgacagacagtagacatc

SEQ ID NO: 120874 - DNA, 25 bp, Homo sapien
aagtagaggacttgacagacagtag

SEQ ID NO: 120875 - DNA, 25 bp, Homo sapien
tctgtgtagggatgttgtaaaaagt

SEQ ID NO: 120876 - DNA, 25 bp, Homo sapien
tagggatgttgtaaaaagtagagga

SEQ ID NO: 120877 - DNA, 25 bp, Homo sapien
cacactttgagatgggctctgagac

SEQ ID NO: 120878 - DNA, 25 bp, Homo sapien
gcagcactacatgaacttgccagga

SEQ ID NO: 120879 - DNA, 25 bp, Homo sapien
ggttgggccctctctgtatgttcgt

SEQ ID NO: 120880 - DNA, 25 bp, Homo sapien
ggctggcggctctatattcaaagat

SEQ ID NO: 120881 - DNA, 25 bp, Homo sapien
gctgagatagaatagtttctctccc

SEQ ID NO: 120882 - DNA, 25 bp, Homo sapien
gcttatattacttcttggctccaga

SEQ ID NO: 120883 - DNA, 25 bp, Homo sapien
ggtggctgagatagaatagtttctc

SEQ ID NO: 120884 - DNA, 25 bp, Homo sapien
tctcccatcattctctctcgggtca

SEQ ID NO: 120885 - DNA, 25 bp, Homo sapien
tagcagcaccatttaacatactcac

SEQ ID NO: 120886 - DNA, 25 bp, Homo sapien
cctccatgagacagcgactgcgtgg

SEQ ID NO: 120887 - DNA, 25 bp, Homo sapien
atcactgtgagaaaccgcagatggg

SEQ ID NO: 120888 - DNA, 25 bp, Homo sapien
ttaacagcgaggtttcggaaatggc

SEQ ID NO: 120889 - DNA, 25 bp, Homo sapien
cccgttgtggcattgtacgagagcc

SEQ ID NO: 120890 - DNA, 25 bp, Homo sapien
ggccagtctatttcatgtccagaaa

SEQ ID NO: 120891 - DNA, 25 bp, Homo sapien
aaacaatatagacacacaggccagt

SEQ ID NO: 120892 - DNA, 25 bp, Homo sapien
acgtattagcagattttaattgccc

SEQ ID NO: 120893 - DNA, 25 bp, Homo sapien
gcccatacacattatgttgctgaaa

SEQ ID NO: 120894 - DNA, 25 bp, Homo sapien
gaatacctaatgtttcatgtggctc

SEQ ID NO: 120895 - DNA, 25 bp, Homo sapien
gtttcatgtggctcactatccagca

SEQ ID NO: 120896 - DNA, 25 bp, Homo sapien
cattagtacttctacatgcacaggg

SEQ ID NO: 120897 - DNA, 25 bp, Homo sapien
ggctcactatccagcacacattgct

SEQ ID NO: 120898 - DNA, 25 bp, Homo sapien
catagtacgcctgttataaacggaa

SEQ ID NO: 120899 - DNA, 25 bp, Homo sapien
tatagacaggattgggctgaccacg

SEQ ID NO: 120900 - DNA, 25 bp, Homo sapien
gacgtcttgcaacgggacatctctt

SEQ ID NO: 120901 - DNA, 25 bp, Homo sapien
tgaccacgccgaatggacgtcttgc

SEQ ID NO: 120902 - DNA, 25 bp, Homo sapien
ggacacttagtgtcagtagacagca

SEQ ID NO: 120903 - DNA, 25 bp, Homo sapien
tagtaacaattaacagctcccttgc

SEQ ID NO: 120904 - DNA, 25 bp, Homo sapien
tctgattcatccacctaaatggttg

SEQ ID NO: 120905 - DNA, 25 bp, Homo sapien
cacaggtaaccaaggtggacacagc

SEQ ID NO: 120906 - DNA, 25 bp, Homo sapien
gcccggctctatgctaggcacatta

SEQ ID NO: 120907 - DNA, 25 bp, Homo sapien
cacagttggactctattaaggctca

SEQ ID NO: 120908 - DNA, 25 bp, Homo sapien
ctttatttacgaatccagcctggct

SEQ ID NO: 120909 - DNA, 25 bp, Homo sapien
gaatgctaactacatgcccggctct

SEQ ID NO: 120910 - DNA, 25 bp, Homo sapien
ggtaacactgtcactcaaaggcatg

SEQ ID NO: 120911 - DNA, 25 bp, Homo sapien
gggtatattcatgggtgtcctctca

SEQ ID NO: 120912 - DNA, 25 bp, Homo sapien
gcaagttagcggcttcattccaaga

SEQ ID NO: 120913 - DNA, 25 bp, Homo sapien
gaaaggcctcagatctccatgactg

SEQ ID NO: 120914 - DNA, 25 bp, Homo sapien
tcactgctggaatggaatgatgcat

SEQ ID NO: 120915 - DNA, 25 bp, Homo sapien
gaaatgtgtcaagtttgtacagacc

SEQ ID NO: 120916 - DNA, 25 bp, Homo sapien
gcatagactgacaaacaagtgtacc

SEQ ID NO: 120917 - DNA, 25 bp, Homo sapien
tagcattccaggatctaacttactg

SEQ ID NO: 120918 - DNA, 25 bp, Homo sapien
gaaacatggtcctagaatgcaacta

SEQ ID NO: 120919 - DNA, 25 bp, Homo sapien
tcaactgggcaacacgaaaaacttg

SEQ ID NO: 120920 - DNA, 25 bp, Homo sapien
ttttcaggccaccaaagattttgag

SEQ ID NO: 120921 - DNA, 25 bp, Homo sapien
taagctttggtcaaggcattggcta

SEQ ID NO: 120922 - DNA, 25 bp, Homo sapien
tacaactataccttcatctctgcaa

SEQ ID NO: 120923 - DNA, 25 bp, Homo sapien
agaacacaggcctcatcaactttaa

SEQ ID NO: 120924 - DNA, 25 bp, Homo sapien
gctcattagtggaagatttgatatc

SEQ ID NO: 120925 - DNA, 25 bp, Homo sapien
tctctgcaataatgccaggttctgc

SEQ ID NO: 120926 - DNA, 25 bp, Homo sapien
taagaacagtgtactccatgtaggg

SEQ ID NO: 120927 - DNA, 25 bp, Homo sapien
tgaaaatgcctatgaaacactggga

SEQ ID NO: 120928 - DNA, 25 bp, Homo sapien
gaactataatagcatccaggtctga

SEQ ID NO: 120929 - DNA, 25 bp, Homo sapien
caaggacacccatcaaaagttgaga

SEQ ID NO: 120930 - DNA, 25 bp, Homo sapien
cagaaatagtgtttagactgcataa

SEQ ID NO: 120931 - DNA, 25 bp, Homo sapien
tccttgtcacaggtaaagttttaca

SEQ ID NO: 120932 - DNA, 25 bp, Homo sapien
ttattgataaaaccagtagcagcag

SEQ ID NO: 120933 - DNA, 25 bp, Homo sapien
tcagagggcatttctaacaaaaagt

SEQ ID NO: 120934 - DNA, 25 bp, Homo sapien
gaccatagatataatgccaatcctg

SEQ ID NO: 120935 - DNA, 25 bp, Homo sapien
ccatagatataatgccaatcctgtc

SEQ ID NO: 120936 - DNA, 25 bp, Homo sapien
tagatataatgccaatcctgtctcc

SEQ ID NO: 120937 - DNA, 25 bp, Homo sapien
catagatataatgccaatcctgtct

SEQ ID NO: 120938 - DNA, 25 bp, Homo sapien
actcaatcttgtccctcctcgacat

SEQ ID NO: 120939 - DNA, 25 bp, Homo sapien
cactcaatcttgtccctcctcgaca

SEQ ID NO: 120940 - DNA, 25 bp, Homo sapien
agaatctatccaaattctaatcttc

SEQ ID NO: 120941 - DNA, 25 bp, Homo sapien
tcttcggagagagaatcgcactgaa

SEQ ID NO: 120942 - DNA, 25 bp, Homo sapien
gagagagaatcgcactgaagaagag

SEQ ID NO: 120943 - DNA, 25 bp, Homo sapien
aagctatcttcggagagagaatcgc

SEQ ID NO: 120944 - DNA, 25 bp, Homo sapien
ccaaagctatcttcggagagagaat

SEQ ID NO: 120945 - DNA, 25 bp, Homo sapien
tcttcgccttggagtaggaccctga

SEQ ID NO: 120946 - DNA, 25 bp, Homo sapien
tgtctgcaggtttgagcacttgata

SEQ ID NO: 120947 - DNA, 25 bp, Homo sapien
ggatgagcagtacgggatcttccgc

SEQ ID NO: 120948 - DNA, 25 bp, Homo sapien
gactctcctccctagtgtgttcgtg

SEQ ID NO: 120949 - DNA, 25 bp, Homo sapien
agccccgacagaagggtcccgactg

SEQ ID NO: 120950 - DNA, 25 bp, Homo sapien
caaggttgagagctggaacgccgag

SEQ ID NO: 120951 - DNA, 25 bp, Homo sapien
tgagagctggaacgccgaggggcgg

SEQ ID NO: 120952 - DNA, 25 bp, Homo sapien
cgaacaaagagccccgacagaaggg

SEQ ID NO: 120953 - DNA, 25 bp, Homo sapien
tttcctgtaggtcgagtgcgccggc

SEQ ID NO: 120954 - DNA, 25 bp, Homo sapien
ttgctaggagcgttgctaggaggcg

SEQ ID NO: 120955 - DNA, 25 bp, Homo sapien
aggaggcgatgacgcccctccacag

SEQ ID NO: 120956 - DNA, 25 bp, Homo sapien
aactttcctgtaggtcgagtgcgcc

SEQ ID NO: 120957 - DNA, 25 bp, Homo sapien
taggcgggcgcgcagctgttctcag

SEQ ID NO: 120958 - DNA, 25 bp, Homo sapien
ggcgcgcagctgttctcagctcgca

SEQ ID NO: 120959 - DNA, 25 bp, Homo sapien
ctaggcgggcgcgcagctgttctca

SEQ ID NO: 120960 - DNA, 25 bp, Homo sapien
cagctgttctcagctcgcattggac

SEQ ID NO: 120961 - DNA, 25 bp, Homo sapien
catgcacctgttaggtagaagcgcg

SEQ ID NO: 120962 - DNA, 25 bp, Homo sapien
gggttcggtgctcactcctgctttt

SEQ ID NO: 120963 - DNA, 25 bp, Homo sapien
gctgtcactcttcagtcgggcgctg

SEQ ID NO: 120964 - DNA, 25 bp, Homo sapien
cagatcggcgcatgcacctgttagg

SEQ ID NO: 120965 - DNA, 25 bp, Homo sapien
caggctcatgaatggttacctgaga

SEQ ID NO: 120966 - DNA, 25 bp, Homo sapien
cagcctcaggctcatgaatggttac

SEQ ID NO: 120967 - DNA, 25 bp, Homo sapien
gcacagcgagcatttctcacagcct

SEQ ID NO: 120968 - DNA, 25 bp, Homo sapien
aaaatctggtgagagttcccctttg

SEQ ID NO: 120969 - DNA, 25 bp, Homo sapien
taatgctgaatcaatccgaaaagtg

SEQ ID NO: 120970 - DNA, 25 bp, Homo sapien
ctggtaatgctgaatcaatccgaaa

SEQ ID NO: 120971 - DNA, 25 bp, Homo sapien
tgctgaatcaatccgaaaagtgtat

SEQ ID NO: 120972 - DNA, 25 bp, Homo sapien
ggtaatgctgaatcaatccgaaaag

SEQ ID NO: 120973 - DNA, 25 bp, Homo sapien
ttccttcattcggacatgcactcgt

SEQ ID NO: 120974 - DNA, 25 bp, Homo sapien
cttcattcggacatgcactcgtgtg

SEQ ID NO: 120975 - DNA, 25 bp, Homo sapien
catgcactcgtgtgctcagtaggct

SEQ ID NO: 120976 - DNA, 25 bp, Homo sapien
tgctcagtaggcttccgcttggcat

SEQ ID NO: 120977 - DNA, 25 bp, Homo sapien
tgcagcccctcagaagtcaaatacc

SEQ ID NO: 120978 - DNA, 25 bp, Homo sapien
tcaacgtggtgaagcagtgacaact

SEQ ID NO: 120979 - DNA, 25 bp, Homo sapien
tatggtgtagccatcgtcctaacac

SEQ ID NO: 120980 - DNA, 25 bp, Homo sapien
aattggtattctcccttcaacgtgg

SEQ ID NO: 120981 - DNA, 25 bp, Homo sapien
ttggaaaatacccatggtaatcttg

SEQ ID NO: 120982 - DNA, 25 bp, Homo sapien
catggtaatcttgatgtaaatcttc

SEQ ID NO: 120983 - DNA, 25 bp, Homo sapien
tcgacgttgttaatgtatatgttaa

SEQ ID NO: 120984 - DNA, 25 bp, Homo sapien
ctcttaaagtaggctactttcgacg

SEQ ID NO: 120985 - DNA, 25 bp, Homo sapien
gaatgcaagttctgtcctcaggtaa

SEQ ID NO: 120986 - DNA, 25 bp, Homo sapien
agctctctttctccgtctctagatg

SEQ ID NO: 120987 - DNA, 25 bp, Homo sapien
aatatgcagtcttataacagggagc

SEQ ID NO: 120988 - DNA, 25 bp, Homo sapien
gtctctagatgtatcttcctcagca

SEQ ID NO: 120989 - DNA, 25 bp, Homo sapien
cataatagagagactgagaacagca

SEQ ID NO: 120990 - DNA, 25 bp, Homo sapien
tgctccaagtggctgctagtgtagc

SEQ ID NO: 120991 - DNA, 25 bp, Homo sapien
cacaatatgatacgaatgcagctct

SEQ ID NO: 120992 - DNA, 25 bp, Homo sapien
tctccgaagcataaggcacaatatg

SEQ ID NO: 120993 - DNA, 25 bp, Homo sapien
ttaattcattttataaataagcaac

SEQ ID NO: 120994 - DNA, 25 bp, Homo sapien
tctatgtggtcttcaacaatgcagg

SEQ ID NO: 120995 - DNA, 25 bp, Homo sapien
tacagacacggtcctaaaccaagtg

SEQ ID NO: 120996 - DNA, 25 bp, Homo sapien
ccagtgattaattagagggaccaag

SEQ ID NO: 120997 - DNA, 25 bp, Homo sapien
cagtgcaaagtttcatccaggcagc

SEQ ID NO: 120998 - DNA, 25 bp, Homo sapien
tgggtagtcagcaaagcaagcctgt

SEQ ID NO: 120999 - DNA, 25 bp, Homo sapien
tcctgtaataaagcacgctgggtag

SEQ ID NO: 121000 - DNA, 25 bp, Homo sapien
gcaagcctgtatttgggtctccctg

SEQ ID NO: 121001 - DNA, 25 bp, Homo sapien
cccggtagtctattggttaactcag

SEQ ID NO: 121002 - DNA, 25 bp, Homo sapien
caaattgaagaagactgcccctctg

SEQ ID NO: 121003 - DNA, 25 bp, Homo sapien
caaaggagttcagccagtactgcaa

SEQ ID NO: 121004 - DNA, 25 bp, Homo sapien
ttactgagaccccagcgactgagga

SEQ ID NO: 121005 - DNA, 25 bp, Homo sapien
gcttttaggctaggtggacacccac

SEQ ID NO: 121006 - DNA, 25 bp, Homo sapien
aggactcatctgaacctgatgccat

SEQ ID NO: 121007 - DNA, 25 bp, Homo sapien
gaggactcatctgaacctgatgcca

SEQ ID NO: 121008 - DNA, 25 bp, Homo sapien
gtcattaagttggtcccagaaacca

SEQ ID NO: 121009 - DNA, 25 bp, Homo sapien
cacaaaaccgagagagtgtagaatc

SEQ ID NO: 121010 - DNA, 25 bp, Homo sapien
gagagtgtagaatcagtcattaagt

SEQ ID NO: 121011 - DNA, 25 bp, Homo sapien
tcattaagttggtcccagaaaccat

SEQ ID NO: 121012 - DNA, 25 bp, Homo sapien
taagccagtcagttcgttttgctca

SEQ ID NO: 121013 - DNA, 25 bp, Homo sapien
acaacacccaaagctaagccagtca

SEQ ID NO: 121014 - DNA, 25 bp, Homo sapien
agtccaagtccaagggtaggacaca

SEQ ID NO: 121015 - DNA, 25 bp, Homo sapien
taggacacaacacccaaagctaagc

SEQ ID NO: 121016 - DNA, 25 bp, Homo sapien
actcatccagaagcttttgtgttca

SEQ ID NO: 121017 - DNA, 25 bp, Homo sapien
ctgaagggtggccactcatccagaa

SEQ ID NO: 121018 - DNA, 25 bp, Homo sapien
tcagtgctataaggaggctttgggc

SEQ ID NO: 121019 - DNA, 25 bp, Homo sapien
ctgttccgtttatgcaggagagaga

SEQ ID NO: 121020 - DNA, 25 bp, Homo sapien
tctaatgcacctgtccgtgttctcc

SEQ ID NO: 121021 - DNA, 25 bp, Homo sapien
cagaagagtcatctaatgcacctgt

SEQ ID NO: 121022 - DNA, 25 bp, Homo sapien
gagtcatctaatgcacctgtccgtg

SEQ ID NO: 121023 - DNA, 25 bp, Homo sapien
caggcagaagagtcatctaatgcac

SEQ ID NO: 121024 - DNA, 25 bp, Homo sapien
gtggctgccgttactggcacacaga

SEQ ID NO: 121025 - DNA, 25 bp, Homo sapien
gcagcgctttcccaggaagggcatc

SEQ ID NO: 121026 - DNA, 25 bp, Homo sapien
caggtggctgccgttactggcacac

SEQ ID NO: 121027 - DNA, 25 bp, Homo sapien
tgctgaggcaaagggcacaactgca

SEQ ID NO: 121028 - DNA, 25 bp, Homo sapien
ctgggcaatttgattgaccttcagc

SEQ ID NO: 121029 - DNA, 25 bp, Homo sapien
tgaccttcagcgtaggtgacccctt

SEQ ID NO: 121030 - DNA, 25 bp, Homo sapien
cagcgtaggtgaccccttcatcttt

SEQ ID NO: 121031 - DNA, 25 bp, Homo sapien
caatttgattgaccttcagcgtagg

SEQ ID NO: 121032 - DNA, 25 bp, Homo sapien
tccaatagcatgcaaatagcaccaa

SEQ ID NO: 121033 - DNA, 25 bp, Homo sapien
cggagcccggatttaggctctgatt

SEQ ID NO: 121034 - DNA, 25 bp, Homo sapien
catctctgcattccaatagcatgca

SEQ ID NO: 121035 - DNA, 25 bp, Homo sapien
tcgatctgctcggagcccggattta

SEQ ID NO: 121036 - DNA, 25 bp, Homo sapien
gttcctgcactttgtggccagtcac

SEQ ID NO: 121037 - DNA, 25 bp, Homo sapien
caagcctcttctcaacctggtcctc

SEQ ID NO: 121038 - DNA, 25 bp, Homo sapien
ttgtccggcattggcagaataaagg

SEQ ID NO: 121039 - DNA, 25 bp, Homo sapien
atgatcatcactaggattgtccggc

SEQ ID NO: 121040 - DNA, 25 bp, Homo sapien
gcctttgcatataaaactgctgcat

SEQ ID NO: 121041 - DNA, 25 bp, Homo sapien
caagaactccatctactctgagcag

SEQ ID NO: 121042 - DNA, 25 bp, Homo sapien
taggctcctcaccagattttccaag

SEQ ID NO: 121043 - DNA, 25 bp, Homo sapien
ttcatagtgactagaaccttcttca

SEQ ID NO: 121044 - DNA, 25 bp, Homo sapien
tacacctattggatctgtcagcctc

SEQ ID NO: 121045 - DNA, 25 bp, Homo sapien
tctgtaaggactgcctcaggtaggt

SEQ ID NO: 121046 - DNA, 25 bp, Homo sapien
catctcttgcactccagttcctgag

SEQ ID NO: 121047 - DNA, 25 bp, Homo sapien
ctgactagacgatggctgagaatcc

SEQ ID NO: 121048 - DNA, 25 bp, Homo sapien
tggttgggatatgccaatggtaatc

SEQ ID NO: 121049 - DNA, 25 bp, Homo sapien
cagatggttgggatatgccaatggt

SEQ ID NO: 121050 - DNA, 25 bp, Homo sapien
gtctctcacagtgtagagccacagt

SEQ ID NO: 121051 - DNA, 25 bp, Homo sapien
ggatatgccaatggtaatcatttta

SEQ ID NO: 121052 - DNA, 25 bp, Homo sapien
ctaagccaggttctttgtcagaaag

SEQ ID NO: 121053 - DNA, 25 bp, Homo sapien
tgatatatttaataggccatctaag

SEQ ID NO: 121054 - DNA, 25 bp, Homo sapien
ttaataggccatctaagccaggttc

SEQ ID NO: 121055 - DNA, 25 bp, Homo sapien
agcctttctgtagtgggaacactca

SEQ ID NO: 121056 - DNA, 25 bp, Homo sapien
gcatccacggaaggcaaagctgaaa

SEQ ID NO: 121057 - DNA, 25 bp, Homo sapien
catgggcccgcactgagttttgctc

SEQ ID NO: 121058 - DNA, 25 bp, Homo sapien
tgttgaacacttaaggcatccacgg

SEQ ID NO: 121059 - DNA, 25 bp, Homo sapien
gacagagagctactgcctcacacaa

SEQ ID NO: 121060 - DNA, 25 bp, Homo sapien
taaaaactctttggctagccttcag

SEQ ID NO: 121061 - DNA, 25 bp, Homo sapien
aatctgcatgccctctttggtgaaa

SEQ ID NO: 121062 - DNA, 25 bp, Homo sapien
ttttgcataagatacgacatttggg

SEQ ID NO: 121063 - DNA, 25 bp, Homo sapien
tctaaatacaaagtcgctgctgaat

SEQ ID NO: 121064 - DNA, 25 bp, Homo sapien
tgctatggatagcttcatccttgtc

SEQ ID NO: 121065 - DNA, 25 bp, Homo sapien
gactactgtagccaatcaaacaaag

SEQ ID NO: 121066 - DNA, 25 bp, Homo sapien
caaagctcagtagctatcacagcaa

SEQ ID NO: 121067 - DNA, 25 bp, Homo sapien
gtagctatcacagcaaacaatggaa

SEQ ID NO: 121068 - DNA, 25 bp, Homo sapien
ggtcgatggagagatctagagccat

SEQ ID NO: 121069 - DNA, 25 bp, Homo sapien
acagagaaaagaaggtcgatggaga

SEQ ID NO: 121070 - DNA, 25 bp, Homo sapien
aagaaggtcgatggagagatctaga

SEQ ID NO: 121071 - DNA, 25 bp, Homo sapien
agaaaagaaggtcgatggagagatc

SEQ ID NO: 121072 - DNA, 25 bp, Homo sapien
gcttaacagtgattaatagttccac

SEQ ID NO: 121073 - DNA, 25 bp, Homo sapien
aaatacagacttgttaacatggcac

SEQ ID NO: 121074 - DNA, 25 bp, Homo sapien
tccttctggataaaatacagacttg

SEQ ID NO: 121075 - DNA, 25 bp, Homo sapien
gcaagcttaacagtgattaatagtt

SEQ ID NO: 121076 - DNA, 25 bp, Homo sapien
tcttgaataccaaactgattatgcc

SEQ ID NO: 121077 - DNA, 25 bp, Homo sapien
ttgaataccaaactgattatgccac

SEQ ID NO: 121078 - DNA, 25 bp, Homo sapien
ttcttgaataccaaactgattatgc

SEQ ID NO: 121079 - DNA, 25 bp, Homo sapien
gaataccaaactgattatgccacat

SEQ ID NO: 121080 - DNA, 25 bp, Homo sapien
aagaatgaggtctgtagtttggtgc

SEQ ID NO: 121081 - DNA, 25 bp, Homo sapien
gaaagaatgaggtctgtagtttggt

SEQ ID NO: 121082 - DNA, 25 bp, Homo sapien
aaagaatgaggtctgtagtttggtg

SEQ ID NO: 121083 - DNA, 25 bp, Homo sapien
gaaacattgatacttttgccctgag

SEQ ID NO: 121084 - DNA, 25 bp, Homo sapien
cagtcctgagcctctacttcctgtg

SEQ ID NO: 121085 - DNA, 25 bp, Homo sapien
tacttcctgtgtacccgaaacattg

SEQ ID NO: 121086 - DNA, 25 bp, Homo sapien
tgccctgagaccattttctaacttt

SEQ ID NO: 121087 - DNA, 25 bp, Homo sapien
cttgagagcgttgccctgtaatttt

SEQ ID NO: 121088 - DNA, 25 bp, Homo sapien
actgaaggcccctgcattgctgaaa

SEQ ID NO: 121089 - DNA, 25 bp, Homo sapien
ccttctgataagttttcttctccat

SEQ ID NO: 121090 - DNA, 25 bp, Homo sapien
gccttctgataagttttcttctcca

SEQ ID NO: 121091 - DNA, 25 bp, Homo sapien
tgccttctgataagttttcttctcc

SEQ ID NO: 121092 - DNA, 25 bp, Homo sapien
ctgccttctgataagttttcttctc

SEQ ID NO: 121093 - DNA, 25 bp, Homo sapien
tcttctagaagttcgtggtacaggg

SEQ ID NO: 121094 - DNA, 25 bp, Homo sapien
catagggtagaggactaaaagcttc

SEQ ID NO: 121095 - DNA, 25 bp, Homo sapien
acctcaggctcggtgtaataactgc

SEQ ID NO: 121096 - DNA, 25 bp, Homo sapien
catgtgcatttgttgtagacctagg

SEQ ID NO: 121097 - DNA, 25 bp, Homo sapien
taacaatcactgtttgtgacatccc

SEQ ID NO: 121098 - DNA, 25 bp, Homo sapien
tccagagtatgcatttcaaagccag

SEQ ID NO: 121099 - DNA, 25 bp, Homo sapien
catataagcctaattactaagttga

SEQ ID NO: 121100 - DNA, 25 bp, Homo sapien
tcaaagccagtccattgtaacaatc

SEQ ID NO: 121101 - DNA, 25 bp, Homo sapien
catggggacaggctttagtcagagc

SEQ ID NO: 121102 - DNA, 25 bp, Homo sapien
aggctttagtcagagccagcaggag

SEQ ID NO: 121103 - DNA, 25 bp, Homo sapien
gggacaggctttagtcagagccagc

SEQ ID NO: 121104 - DNA, 25 bp, Homo sapien
tttagtcagagccagcaggagtggc

SEQ ID NO: 121105 - DNA, 25 bp, Homo sapien
caggacaagttcaggtacttgttga

SEQ ID NO: 121106 - DNA, 25 bp, Homo sapien
ccaggacaagttcaggtacttgttg

SEQ ID NO: 121107 - DNA, 25 bp, Homo sapien
tccaggacaagttcaggtacttgtt

SEQ ID NO: 121108 - DNA, 25 bp, Homo sapien
ttccaggacaagttcaggtacttgt

SEQ ID NO: 121109 - DNA, 25 bp, Homo sapien
aaccagggctgtaaagtaggaggca

SEQ ID NO: 121110 - DNA, 25 bp, Homo sapien
tgcctaagttgctgatacaagcctg

SEQ ID NO: 121111 - DNA, 25 bp, Homo sapien
gtactgtgaagctggaattggctca

SEQ ID NO: 121112 - DNA, 25 bp, Homo sapien
tgataaactggagcctagcaagatc

SEQ ID NO: 121113 - DNA, 25 bp, Homo sapien
tgctctcgtgtaatgtggttgccat

SEQ ID NO: 121114 - DNA, 25 bp, Homo sapien
actgcaacgatgctctcgtgtaatg

SEQ ID NO: 121115 - DNA, 25 bp, Homo sapien
caacgatgctctcgtgtaatgtggt

SEQ ID NO: 121116 - DNA, 25 bp, Homo sapien
cgatgctctcgtgtaatgtggttgc

SEQ ID NO: 121117 - DNA, 25 bp, Homo sapien
ggcacagtactttgcaggcctccag

SEQ ID NO: 121118 - DNA, 25 bp, Homo sapien
tccagcaagcccaacaactgatggt

SEQ ID NO: 121119 - DNA, 25 bp, Homo sapien
gatggtttacagctgtcatggttgc

SEQ ID NO: 121120 - DNA, 25 bp, Homo sapien
gaagcatgctatcatggcacagtac

SEQ ID NO: 121121 - DNA, 25 bp, Homo sapien
gaagttctagttccggcatgttaga

SEQ ID NO: 121122 - DNA, 25 bp, Homo sapien
gggcttcactgctaagatgatagca

SEQ ID NO: 121123 - DNA, 25 bp, Homo sapien
tactgatacttggtaacagcagagg

SEQ ID NO: 121124 - DNA, 25 bp, Homo sapien
tagaaagtgcatgccaatgggcttc

SEQ ID NO: 121125 - DNA, 25 bp, Homo sapien
tgccttgcgttgtggaaccccttct

SEQ ID NO: 121126 - DNA, 25 bp, Homo sapien
tgcttttttgccttgcgttgtggaa

SEQ ID NO: 121127 - DNA, 25 bp, Homo sapien
aaatcctgttgtcctaccgagttag

SEQ ID NO: 121128 - DNA, 25 bp, Homo sapien
caaatgtcctgaggacatcagttgc

SEQ ID NO: 121129 - DNA, 25 bp, Homo sapien
tatacttccataattggattatgga

SEQ ID NO: 121130 - DNA, 25 bp, Homo sapien
gagtttgaaatggttaaggtggcag

SEQ ID NO: 121131 - DNA, 25 bp, Homo sapien
gcagacagtatgtcgtgaccaggtt

SEQ ID NO: 121132 - DNA, 25 bp, Homo sapien
gttaaggtggcagacagtatgtcgt

SEQ ID NO: 121133 - DNA, 25 bp, Homo sapien
aaagctgatagttttgactgaaaac

SEQ ID NO: 121134 - DNA, 25 bp, Homo sapien
tgtacttaacgttttgcttagctag

SEQ ID NO: 121135 - DNA, 25 bp, Homo sapien
catgctcaggacgactagtgttatt

SEQ ID NO: 121136 - DNA, 25 bp, Homo sapien
tggaaggtatctgcttaatcacgac

SEQ ID NO: 121137 - DNA, 25 bp, Homo sapien
tgtagagttcggctctcttgtagct

SEQ ID NO: 121138 - DNA, 25 bp, Homo sapien
tgcagctcctatttccgtccttggg

SEQ ID NO: 121139 - DNA, 25 bp, Homo sapien
cttgtagctctcatgcattagtgaa

SEQ ID NO: 121140 - DNA, 25 bp, Homo sapien
tttgctgaaagcacccatgtgatga

SEQ ID NO: 121141 - DNA, 25 bp, Homo sapien
gactctgggtaaatgacataagtaa

SEQ ID NO: 121142 - DNA, 25 bp, Homo sapien
ggacaataaccattgctttgccttc

SEQ ID NO: 121143 - DNA, 25 bp, Homo sapien
tcaagtaatgaacatagaagcaaag

SEQ ID NO: 121144 - DNA, 25 bp, Homo sapien
ttcttctaacacaccaccagggagc

SEQ ID NO: 121145 - DNA, 25 bp, Homo sapien
acagtagctgtcataatgtgttggc

SEQ ID NO: 121146 - DNA, 25 bp, Homo sapien
cataatgttctagatcaggcagcac

SEQ ID NO: 121147 - DNA, 25 bp, Homo sapien
ctgaaatagagcacctgagaaagca

SEQ ID NO: 121148 - DNA, 25 bp, Homo sapien
ttgatgttttaccagaacctgtggg

SEQ ID NO: 121149 - DNA, 25 bp, Homo sapien
ttggttggtactggttcaactcgcg

SEQ ID NO: 121150 - DNA, 25 bp, Homo sapien
tcaactcgcgggtggatttccctgt

SEQ ID NO: 121151 - DNA, 25 bp, Homo sapien
cagtgctggtgatatgtctgctact

SEQ ID NO: 121152 - DNA, 25 bp, Homo sapien
tccctgttggtaataatagtgtgtt

SEQ ID NO: 121153 - DNA, 25 bp, Homo sapien
gaaggggtatagcagctgctttcca

SEQ ID NO: 121154 - DNA, 25 bp, Homo sapien
tccaagtccctacagttggaaagtc

SEQ ID NO: 121155 - DNA, 25 bp, Homo sapien
tccctacagttggaaagtcccgtga

SEQ ID NO: 121156 - DNA, 25 bp, Homo sapien
tacagttggaaagtcccgtgatgct

SEQ ID NO: 121157 - DNA, 25 bp, Homo sapien
taatagctggaactaatggcctcat

SEQ ID NO: 121158 - DNA, 25 bp, Homo sapien
taaggaccctgaagtatggcagtgg

SEQ ID NO: 121159 - DNA, 25 bp, Homo sapien
gaattgatctcttaactttgacggg

SEQ ID NO: 121160 - DNA, 25 bp, Homo sapien
gagatttctagcttgggccattggg

SEQ ID NO: 121161 - DNA, 25 bp, Homo sapien
tcacgtgtcatctaatcattgatag

SEQ ID NO: 121162 - DNA, 25 bp, Homo sapien
catctaatcattgatagagataaaa

SEQ ID NO: 121163 - DNA, 25 bp, Homo sapien
tctatcacgtgtcatctaatcattg

SEQ ID NO: 121164 - DNA, 25 bp, Homo sapien
cgtgtcatctaatcattgatagaga

SEQ ID NO: 121165 - DNA, 25 bp, Homo sapien
cagtttctaaatcttccagcaacaa

SEQ ID NO: 121166 - DNA, 25 bp, Homo sapien
taacagtttctaaatcttccagcaa

SEQ ID NO: 121167 - DNA, 25 bp, Homo sapien
ttaacagtttctaaatcttccagca

SEQ ID NO: 121168 - DNA, 25 bp, Homo sapien
tttctaaatcttccagcaacaagtc

SEQ ID NO: 121169 - DNA, 25 bp, Homo sapien
agctcgagtcctgttgactgactgg

SEQ ID NO: 121170 - DNA, 25 bp, Homo sapien
tttgagctcgagtcctgttgactga

SEQ ID NO: 121171 - DNA, 25 bp, Homo sapien
ctggctttgagctcgagtcctgttg

SEQ ID NO: 121172 - DNA, 25 bp, Homo sapien
tcctgttgactgactggatagtcat

SEQ ID NO: 121173 - DNA, 25 bp, Homo sapien
gtattcaatgccgaaagtaaagcca

SEQ ID NO: 121174 - DNA, 25 bp, Homo sapien
agctgtattcaatgccgaaagtaaa

SEQ ID NO: 121175 - DNA, 25 bp, Homo sapien
ttcaatgccgaaagtaaagccatac

SEQ ID NO: 121176 - DNA, 25 bp, Homo sapien
tgccgaaagtaaagccatactccat

SEQ ID NO: 121177 - DNA, 25 bp, Homo sapien
tagcacaactgtttagcatcaacat

SEQ ID NO: 121178 - DNA, 25 bp, Homo sapien
gcacaactgtttagcatcaacattc

SEQ ID NO: 121179 - DNA, 25 bp, Homo sapien
gatagcacaactgtttagcatcaac

SEQ ID NO: 121180 - DNA, 25 bp, Homo sapien
cacaactgtttagcatcaacattct

SEQ ID NO: 121181 - DNA, 25 bp, Homo sapien
tcctttcctctgctagcgttgttcc

SEQ ID NO: 121182 - DNA, 25 bp, Homo sapien
tctgctagcgttgttccttgtatag

SEQ ID NO: 121183 - DNA, 25 bp, Homo sapien
agaaatttctgtgctagtgcagtta

SEQ ID NO: 121184 - DNA, 25 bp, Homo sapien
tagtgcagttaccaggagcctctct

SEQ ID NO: 121185 - DNA, 25 bp, Homo sapien
caaacgttcctccaatgtataatac

SEQ ID NO: 121186 - DNA, 25 bp, Homo sapien
ggcactccacactgaccaaattcag

SEQ ID NO: 121187 - DNA, 25 bp, Homo sapien
tgtataatactgctctaggcactcc

SEQ ID NO: 121188 - DNA, 25 bp, Homo sapien
tagtccttcgacctatcaacaaacg

SEQ ID NO: 121189 - DNA, 25 bp, Homo sapien
cactttcatctccttagggttgact

SEQ ID NO: 121190 - DNA, 25 bp, Homo sapien
aagcagtcgccttccaccttagaac

SEQ ID NO: 121191 - DNA, 25 bp, Homo sapien
cctttatcagagagggaataagtgt

SEQ ID NO: 121192 - DNA, 25 bp, Homo sapien
cttttttgacctctgcagggatgtt

SEQ ID NO: 121193 - DNA, 25 bp, Homo sapien
agcgggaaagattcctgatgaagcc

SEQ ID NO: 121194 - DNA, 25 bp, Homo sapien
tagaaccattgttgccatggacccc

SEQ ID NO: 121195 - DNA, 25 bp, Homo sapien
gatgaagccaagactgcaaacagga

SEQ ID NO: 121196 - DNA, 25 bp, Homo sapien
tccatgttacagtgtttgatagtcc

SEQ ID NO: 121197 - DNA, 25 bp, Homo sapien
caataagctattgtggctcaggcag

SEQ ID NO: 121198 - DNA, 25 bp, Homo sapien
gagttgtcctgtatatagctagtcc

SEQ ID NO: 121199 - DNA, 25 bp, Homo sapien
acacattcacttgtaagaacccagg

SEQ ID NO: 121200 - DNA, 25 bp, Homo sapien
taggaagtcgttcagggaagcatac

SEQ ID NO: 121201 - DNA, 25 bp, Homo sapien
aactgagtaaccagccatgaattta

SEQ ID NO: 121202 - DNA, 25 bp, Homo sapien
tatttgctgcacaagataacttttg

SEQ ID NO: 121203 - DNA, 25 bp, Homo sapien
caagataacttttgtgcgttaaaag

SEQ ID NO: 121204 - DNA, 25 bp, Homo sapien
gagcttctgatctacacaagcaaac

SEQ ID NO: 121205 - DNA, 25 bp, Homo sapien
tgtggcttcagaggcttatcttcct

SEQ ID NO: 121206 - DNA, 25 bp, Homo sapien
gtcaaactgacatcctttagtagtg

SEQ ID NO: 121207 - DNA, 25 bp, Homo sapien
gggcccattggatgttgataaaaat

SEQ ID NO: 121208 - DNA, 25 bp, Homo sapien
gacatcctttagtagtggtctcaaa

SEQ ID NO: 121209 - DNA, 25 bp, Homo sapien
tacttgcaatctgaggaaacgggta

SEQ ID NO: 121210 - DNA, 25 bp, Homo sapien
tcttattagtgtccagagtattaat

SEQ ID NO: 121211 - DNA, 25 bp, Homo sapien
tgctttttcttattagtgtccagag

SEQ ID NO: 121212 - DNA, 25 bp, Homo sapien
aggaatctcactcttacttgcaatc

SEQ ID NO: 121213 - DNA, 25 bp, Homo sapien
tttgctgtcttcgatctgccatggg

SEQ ID NO: 121214 - DNA, 25 bp, Homo sapien
ctgtcttcgatctgccatgggcaca

SEQ ID NO: 121215 - DNA, 25 bp, Homo sapien
tcaatttgctgtcttcgatctgcca

SEQ ID NO: 121216 - DNA, 25 bp, Homo sapien
ctgccatgggcacaaagtagatcat

SEQ ID NO: 121217 - DNA, 25 bp, Homo sapien
aagatttccataaactgcttagttt

SEQ ID NO: 121218 - DNA, 25 bp, Homo sapien
cttgtaggccctgaactccaaactt

SEQ ID NO: 121219 - DNA, 25 bp, Homo sapien
ctgtggtgcttaagaatgagtgaac

SEQ ID NO: 121220 - DNA, 25 bp, Homo sapien
tgtaggccctgaactccaaactttg

SEQ ID NO: 121221 - DNA, 25 bp, Homo sapien
caaagagacacttggccttcaggtg

SEQ ID NO: 121222 - DNA, 25 bp, Homo sapien
agacacttggccttcaggtgtgggc

SEQ ID NO: 121223 - DNA, 25 bp, Homo sapien
ttacacaaagagacacttggccttc

SEQ ID NO: 121224 - DNA, 25 bp, Homo sapien
acacttggccttcaggtgtgggcca

SEQ ID NO: 121225 - DNA, 25 bp, Homo sapien
tactattaaggattaatgcttcatc

SEQ ID NO: 121226 - DNA, 25 bp, Homo sapien
ccaaacctcaaacttcaaatcattt

SEQ ID NO: 121227 - DNA, 25 bp, Homo sapien
cacttgagtgctgtccttccatata

SEQ ID NO: 121228 - DNA, 25 bp, Homo sapien
aatacacttgagtgctgtccttcca

SEQ ID NO: 121229 - DNA, 25 bp, Homo sapien
tagagacttcacttgtttaatctgg

SEQ ID NO: 121230 - DNA, 25 bp, Homo sapien
gacttcacttgtttaatctggtagt

SEQ ID NO: 121231 - DNA, 25 bp, Homo sapien
catccgtagagacttcacttgttta

SEQ ID NO: 121232 - DNA, 25 bp, Homo sapien
tcagtacatccgtagagacttcact

SEQ ID NO: 121233 - DNA, 25 bp, Homo sapien
cctctttgctgataaccatggggag

SEQ ID NO: 121234 - DNA, 25 bp, Homo sapien
gaggaagtgttctgtgtggccctct

SEQ ID NO: 121235 - DNA, 25 bp, Homo sapien
acatgacggggctctgccagtgaga

SEQ ID NO: 121236 - DNA, 25 bp, Homo sapien
aataagttgcgggtggaagcaagct

SEQ ID NO: 121237 - DNA, 25 bp, Homo sapien
gccatttggcctgttgccttggaga

SEQ ID NO: 121238 - DNA, 25 bp, Homo sapien
catgtcagacactgtagtaagagac

SEQ ID NO: 121239 - DNA, 25 bp, Homo sapien
aattgagtaaaattgttgaatgtct

SEQ ID NO: 121240 - DNA, 25 bp, Homo sapien
ttggcctgttgccttggagaattta

SEQ ID NO: 121241 - DNA, 25 bp, Homo sapien
taatttcagggtatgggcaaacaag

SEQ ID NO: 121242 - DNA, 25 bp, Homo sapien
tctggcacatcaagggcagctccat

SEQ ID NO: 121243 - DNA, 25 bp, Homo sapien
ggaacgctatattctgaccccagct

SEQ ID NO: 121244 - DNA, 25 bp, Homo sapien
tgttacctcatctagtgtgttcagt

SEQ ID NO: 121245 - DNA, 25 bp, Homo sapien
ttaccaccaaatttaacatgtggta

SEQ ID NO: 121246 - DNA, 25 bp, Homo sapien
aatttaacatgtggtaccataatca

SEQ ID NO: 121247 - DNA, 25 bp, Homo sapien
caccaaatttaacatgtggtaccat

SEQ ID NO: 121248 - DNA, 25 bp, Homo sapien
ccaaatttaacatgtggtaccataa

SEQ ID NO: 121249 - DNA, 25 bp, Homo sapien
tgttgagtattggtggtgggtgacc

SEQ ID NO: 121250 - DNA, 25 bp, Homo sapien
catcaggaagggtgtggtttacaag

SEQ ID NO: 121251 - DNA, 25 bp, Homo sapien
cacatcatcaggaagggtgtggttt

SEQ ID NO: 121252 - DNA, 25 bp, Homo sapien
gggtgacccaagacatctccacatc

SEQ ID NO: 121253 - DNA, 25 bp, Homo sapien
tgagcaggaagttgggattaattta

SEQ ID NO: 121254 - DNA, 25 bp, Homo sapien
gagcaggaagttgggattaatttac

SEQ ID NO: 121255 - DNA, 25 bp, Homo sapien
agcaggaagttgggattaatttact

SEQ ID NO: 121256 - DNA, 25 bp, Homo sapien
ctgagcaggaagttgggattaattt

SEQ ID NO: 121257 - DNA, 25 bp, Homo sapien
gaaggctggcttcagtaacactgct

SEQ ID NO: 121258 - DNA, 25 bp, Homo sapien
gctggcttcagtaacactgcttccc

SEQ ID NO: 121259 - DNA, 25 bp, Homo sapien
aggctggcttcagtaacactgcttc

SEQ ID NO: 121260 - DNA, 25 bp, Homo sapien
ggcttcagtaacactgcttccctct

SEQ ID NO: 121261 - DNA, 25 bp, Homo sapien
caaggtatgactgggtcatatttta

SEQ ID NO: 121262 - DNA, 25 bp, Homo sapien
tttccatatagatgagaaacaggat

SEQ ID NO: 121263 - DNA, 25 bp, Homo sapien
ctttgtcatagggtctgattgatct

SEQ ID NO: 121264 - DNA, 25 bp, Homo sapien
ccatatagatgagaaacaggatctt

SEQ ID NO: 121265 - DNA, 25 bp, Homo sapien
tgtgcttgtcacttgccgctccagc

SEQ ID NO: 121266 - DNA, 25 bp, Homo sapien
tttgtgcttgtcacttgccgctcca

SEQ ID NO: 121267 - DNA, 25 bp, Homo sapien
agttgcacatgctgctctgctttgt

SEQ ID NO: 121268 - DNA, 25 bp, Homo sapien
agagcaagttgcacatgctgctctg

SEQ ID NO: 121269 - DNA, 25 bp, Homo sapien
gaacatcgactattggttgatccac

SEQ ID NO: 121270 - DNA, 25 bp, Homo sapien
tattggttgatccactaagttcttt

SEQ ID NO: 121271 - DNA, 25 bp, Homo sapien
cagcaggagaacatcgactattggt

SEQ ID NO: 121272 - DNA, 25 bp, Homo sapien
catcgactattggttgatccactaa

SEQ ID NO: 121273 - DNA, 25 bp, Homo sapien
gcatgatcagaaagactgccaactc

SEQ ID NO: 121274 - DNA, 25 bp, Homo sapien
caactcatcatggagatgggcaagt

SEQ ID NO: 121275 - DNA, 25 bp, Homo sapien
catcatggagatgggcaagttcccc

SEQ ID NO: 121276 - DNA, 25 bp, Homo sapien
gaaagactgccaactcatcatggag

SEQ ID NO: 121277 - DNA, 25 bp, Homo sapien
acatctgtgctatggctgtactggc

SEQ ID NO: 121278 - DNA, 25 bp, Homo sapien
tatcatgttgtagagttctggatgg

SEQ ID NO: 121279 - DNA, 25 bp, Homo sapien
ttttccacctttcatagtacgcttg

SEQ ID NO: 121280 - DNA, 25 bp, Homo sapien
atagtacgcttgactgccacatctg

SEQ ID NO: 121281 - DNA, 25 bp, Homo sapien
tgcctctcagagtacatttgctaga

SEQ ID NO: 121282 - DNA, 25 bp, Homo sapien
tagacactttttcatgcatacggaa

SEQ ID NO: 121283 - DNA, 25 bp, Homo sapien
aaagtgacttcatgggagccagccg

SEQ ID NO: 121284 - DNA, 25 bp, Homo sapien
ttcttgactccagaaggccccttga

SEQ ID NO: 121285 - DNA, 25 bp, Homo sapien
ttgctacactttctgggagatttct

SEQ ID NO: 121286 - DNA, 25 bp, Homo sapien
tcttgcttaaggtctagtttgctta

SEQ ID NO: 121287 - DNA, 25 bp, Homo sapien
ttctaactctctttgtccctaataa

SEQ ID NO: 121288 - DNA, 25 bp, Homo sapien
ctttttgctacactttctgggagat

SEQ ID NO: 121289 - DNA, 25 bp, Homo sapien
ggttgctcagaagatttggtgaagc

SEQ ID NO: 121290 - DNA, 25 bp, Homo sapien
cagaagatttggtgaagccccagat

SEQ ID NO: 121291 - DNA, 25 bp, Homo sapien
tgaagccccagatgtagtggatcat

SEQ ID NO: 121292 - DNA, 25 bp, Homo sapien
cttacagggttgctcagaagatttg

SEQ ID NO: 121293 - DNA, 25 bp, Homo sapien
tgcttaagtaccttctgagtgagtt

SEQ ID NO: 121294 - DNA, 25 bp, Homo sapien
ctgagtgagttttgccttggggagc

SEQ ID NO: 121295 - DNA, 25 bp, Homo sapien
gagtgagttttgccttggggagcag

SEQ ID NO: 121296 - DNA, 25 bp, Homo sapien
gcttaagtaccttctgagtgagttt

SEQ ID NO: 121297 - DNA, 25 bp, Homo sapien
gtcacagccgagtttcttagcttgg

SEQ ID NO: 121298 - DNA, 25 bp, Homo sapien
ttctttccttgtgagtcacagccga

SEQ ID NO: 121299 - DNA, 25 bp, Homo sapien
ccttgtgagtcacagccgagtttct

SEQ ID NO: 121300 - DNA, 25 bp, Homo sapien
tctccagagtgtagcctaggaaaag

SEQ ID NO: 121301 - DNA, 25 bp, Homo sapien
tccgggtatgagtgacagccgacat

SEQ ID NO: 121302 - DNA, 25 bp, Homo sapien
attgccaccttctaagctttttgcc

SEQ ID NO: 121303 - DNA, 25 bp, Homo sapien
taagctttttgccatgctccacctc

SEQ ID NO: 121304 - DNA, 25 bp, Homo sapien
ccacctccgggtatgagtgacagcc

SEQ ID NO: 121305 - DNA, 25 bp, Homo sapien
ggttgctatctcattgtcatgattc

SEQ ID NO: 121306 - DNA, 25 bp, Homo sapien
cattgtcatgattcctcttaaacaa

SEQ ID NO: 121307 - DNA, 25 bp, Homo sapien
ctcattgtcatgattcctcttaaac

SEQ ID NO: 121308 - DNA, 25 bp, Homo sapien
atctcattgtcatgattcctcttaa

SEQ ID NO: 121309 - DNA, 25 bp, Homo sapien
catagatcgtagagcagaaagcctg

SEQ ID NO: 121310 - DNA, 25 bp, Homo sapien
tctgccacctaatacatcagaggta

SEQ ID NO: 121311 - DNA, 25 bp, Homo sapien
tgaaaactttcagcttcaacggtgt

SEQ ID NO: 121312 - DNA, 25 bp, Homo sapien
gacacttttatggttggcagaaacc

SEQ ID NO: 121313 - DNA, 25 bp, Homo sapien
actagacaagtcatcaagagaaggt

SEQ ID NO: 121314 - DNA, 25 bp, Homo sapien
cattggctcaacaatgaaaccaaga

SEQ ID NO: 121315 - DNA, 25 bp, Homo sapien
gaacattctacctgacaaccgcaga

SEQ ID NO: 121316 - DNA, 25 bp, Homo sapien
tggacataaactgtaccctagaaca

SEQ ID NO: 121317 - DNA, 25 bp, Homo sapien
ctgcatcctcatgggctgccacgtg

SEQ ID NO: 121318 - DNA, 25 bp, Homo sapien
tttccgtgacacagcatggccctga

SEQ ID NO: 121319 - DNA, 25 bp, Homo sapien
gacttaaagtgactctctgcatcct

SEQ ID NO: 121320 - DNA, 25 bp, Homo sapien
tcagtctcataatattggctttccg

SEQ ID NO: 121321 - DNA, 25 bp, Homo sapien
tcagtgtgttcagatctttgaaatg

SEQ ID NO: 121322 - DNA, 25 bp, Homo sapien
ttcagtgtgttcagatctttgaaat

SEQ ID NO: 121323 - DNA, 25 bp, Homo sapien
gcagaggtgaagaatgttggcaatt

SEQ ID NO: 121324 - DNA, 25 bp, Homo sapien
tagattcaagataaggctccggaga

SEQ ID NO: 121325 - DNA, 25 bp, Homo sapien
catgcaaataagctgtcttgagtgg

SEQ ID NO: 121326 - DNA, 25 bp, Homo sapien
aaagagcgaataagagccttcactg

SEQ ID NO: 121327 - DNA, 25 bp, Homo sapien
ttgggtgaatctctgcccatctttt

SEQ ID NO: 121328 - DNA, 25 bp, Homo sapien
ctttgggtgaatctctgcccatctt

SEQ ID NO: 121329 - DNA, 25 bp, Homo sapien
tttgggtgaatctctgcccatcttt

SEQ ID NO: 121330 - DNA, 25 bp, Homo sapien
catgtagcccgtcatgggcacttca

SEQ ID NO: 121331 - DNA, 25 bp, Homo sapien
gtagcccgtcatgggcacttcaggc

SEQ ID NO: 121332 - DNA, 25 bp, Homo sapien
tgtagcccgtcatgggcacttcagg

SEQ ID NO: 121333 - DNA, 25 bp, Homo sapien
aacatgtagcccgtcatgggcactt

SEQ ID NO: 121334 - DNA, 25 bp, Homo sapien
aacttctcccaacaggattaagcct

SEQ ID NO: 121335 - DNA, 25 bp, Homo sapien
caacttctcccaacaggattaagcc

SEQ ID NO: 121336 - DNA, 25 bp, Homo sapien
gcaacttctcccaacaggattaagc

SEQ ID NO: 121337 - DNA, 25 bp, Homo sapien
gagtaatactagctgaagggtcagg

SEQ ID NO: 121338 - DNA, 25 bp, Homo sapien
catccagagtaatactagctgaagg

SEQ ID NO: 121339 - DNA, 25 bp, Homo sapien
ccagagtaatactagctgaagggtc

SEQ ID NO: 121340 - DNA, 25 bp, Homo sapien
ctgcaccatccagagtaatactagc

SEQ ID NO: 121341 - DNA, 25 bp, Homo sapien
ctgagcaatatcatagacaatgtac

SEQ ID NO: 121342 - DNA, 25 bp, Homo sapien
tttcagtttcagcagatacttcaga

SEQ ID NO: 121343 - DNA, 25 bp, Homo sapien
cacaaggaagtcttaaaattgaatt

SEQ ID NO: 121344 - DNA, 25 bp, Homo sapien
gaatttcagtttcagcagatacttc

SEQ ID NO: 121345 - DNA, 25 bp, Homo sapien
cagtttcagcagatacttcagattt

SEQ ID NO: 121346 - DNA, 25 bp, Homo sapien
gctgaatttataccagagccatcgg

SEQ ID NO: 121347 - DNA, 25 bp, Homo sapien
agagccatcgggagtgacttggcca

SEQ ID NO: 121348 - DNA, 25 bp, Homo sapien
tataccagagccatcgggagtgact

SEQ ID NO: 121349 - DNA, 25 bp, Homo sapien
gaagggcttcggctgaatttatacc

SEQ ID NO: 121350 - DNA, 25 bp, Homo sapien
ctccagccttttctctatgtcagtt

SEQ ID NO: 121351 - DNA, 25 bp, Homo sapien
agtctatgcggatggaatctctctc

SEQ ID NO: 121352 - DNA, 25 bp, Homo sapien
ttttctctatgtcagttttatctac

SEQ ID NO: 121353 - DNA, 25 bp, Homo sapien
ctagtctatgcggatggaatctctc

SEQ ID NO: 121354 - DNA, 25 bp, Homo sapien
gcagacattctaatggagcttgttt

SEQ ID NO: 121355 - DNA, 25 bp, Homo sapien
ggcagacattctaatggagcttgtt

SEQ ID NO: 121356 - DNA, 25 bp, Homo sapien
tgctctaagtgtccagtctgggtac

SEQ ID NO: 121357 - DNA, 25 bp, Homo sapien
aaactgacaacatctttctcgttca

SEQ ID NO: 121358 - DNA, 25 bp, Homo sapien
cagtctgggtactttaaactgacaa

SEQ ID NO: 121359 - DNA, 25 bp, Homo sapien
ccttatctttgctctaagtgtccag

SEQ ID NO: 121360 - DNA, 25 bp, Homo sapien
tccataacggttagaatttctgaag

SEQ ID NO: 121361 - DNA, 25 bp, Homo sapien
tttctgaagtggaacccaaagtatg

SEQ ID NO: 121362 - DNA, 25 bp, Homo sapien
tgagcccaagatatcacaagcaatt

SEQ ID NO: 121363 - DNA, 25 bp, Homo sapien
gtatgaatatgagcccaagatatca

SEQ ID NO: 121364 - DNA, 25 bp, Homo sapien
tcatttaataccagcttctccctta

SEQ ID NO: 121365 - DNA, 25 bp, Homo sapien
atttaataccagcttctcccttatg

SEQ ID NO: 121366 - DNA, 25 bp, Homo sapien
catttaataccagcttctcccttat

SEQ ID NO: 121367 - DNA, 25 bp, Homo sapien
actatctgccctacacatggtccgc

SEQ ID NO: 121368 - DNA, 25 bp, Homo sapien
gcactatctgccctacacatggtcc

SEQ ID NO: 121369 - DNA, 25 bp, Homo sapien
ctatctgccctacacatggtccgca

SEQ ID NO: 121370 - DNA, 25 bp, Homo sapien
tatctgccctacacatggtccgcat

SEQ ID NO: 121371 - DNA, 25 bp, Homo sapien
gtgtctcctttaccattgagttcga

SEQ ID NO: 121372 - DNA, 25 bp, Homo sapien
tcgatacagacagttgattctggaa

SEQ ID NO: 121373 - DNA, 25 bp, Homo sapien
tcctttaccattgagttcgatacag

SEQ ID NO: 121374 - DNA, 25 bp, Homo sapien
ccattgagttcgatacagacagttg

SEQ ID NO: 121375 - DNA, 25 bp, Homo sapien
tcttcctttcactcctgaagatcca

SEQ ID NO: 121376 - DNA, 25 bp, Homo sapien
aggagttgctcagtgtgttccttct

SEQ ID NO: 121377 - DNA, 25 bp, Homo sapien
ggagttgctcagtgtgttccttctt

SEQ ID NO: 121378 - DNA, 25 bp, Homo sapien
ccttcttcctttcactcctgaagat

SEQ ID NO: 121379 - DNA, 25 bp, Homo sapien
gccaaaacaatgatctgaagagtac

SEQ ID NO: 121380 - DNA, 25 bp, Homo sapien
gataatactatcctttcctgaggga

SEQ ID NO: 121381 - DNA, 25 bp, Homo sapien
taaacctactagttgaagagctggg

SEQ ID NO: 121382 - DNA, 25 bp, Homo sapien
gctgtgcacttctaactgattggcc

SEQ ID NO: 121383 - DNA, 25 bp, Homo sapien
ttagtgcggctgcagtgggaatctc

SEQ ID NO: 121384 - DNA, 25 bp, Homo sapien
gaaggttgcccagtcagtgaacaag

SEQ ID NO: 121385 - DNA, 25 bp, Homo sapien
tagatcagcttggttttagtgcggc

SEQ ID NO: 121386 - DNA, 25 bp, Homo sapien
ccccaagccgcagtgcatagatcag

SEQ ID NO: 121387 - DNA, 25 bp, Homo sapien
tgtctagagagttactaagtgaatc

SEQ ID NO: 121388 - DNA, 25 bp, Homo sapien
tctagagagttactaagtgaatccg

SEQ ID NO: 121389 - DNA, 25 bp, Homo sapien
agagttactaagtgaatccggggag

SEQ ID NO: 121390 - DNA, 25 bp, Homo sapien
tagagagttactaagtgaatccggg

SEQ ID NO: 121391 - DNA, 25 bp, Homo sapien
tttacgagatccaaaacatcaggga

SEQ ID NO: 121392 - DNA, 25 bp, Homo sapien
ctttacgagatccaaaacatcaggg

SEQ ID NO: 121393 - DNA, 25 bp, Homo sapien
atccaaaacatcagggaaagcagca

SEQ ID NO: 121394 - DNA, 25 bp, Homo sapien
tacgagatccaaaacatcagggaaa

SEQ ID NO: 121395 - DNA, 25 bp, Homo sapien
tccaaccaggtgtgcagtttctgaa

SEQ ID NO: 121396 - DNA, 25 bp, Homo sapien
tcctgaaactgccttccaaccaggt

SEQ ID NO: 121397 - DNA, 25 bp, Homo sapien
ctgaaattctaccaatggctttact

SEQ ID NO: 121398 - DNA, 25 bp, Homo sapien
aaactgccttccaaccaggtgtgca

SEQ ID NO: 121399 - DNA, 25 bp, Homo sapien
gattagatactgatgcaggttccgc

SEQ ID NO: 121400 - DNA, 25 bp, Homo sapien
tgttctccagagatacaatcagtag

SEQ ID NO: 121401 - DNA, 25 bp, Homo sapien
tcttagaagcgatagcatggctcca

SEQ ID NO: 121402 - DNA, 25 bp, Homo sapien
ccaagggtacctgcattactcagtg

SEQ ID NO: 121403 - DNA, 25 bp, Homo sapien
cttcagcttggtcagagacagcaaa

SEQ ID NO: 121404 - DNA, 25 bp, Homo sapien
acagcaaaaactctgctaggaaggc

SEQ ID NO: 121405 - DNA, 25 bp, Homo sapien
cttggtcagagacagcaaaaactct

SEQ ID NO: 121406 - DNA, 25 bp, Homo sapien
tcagagacagcaaaaactctgctag

SEQ ID NO: 121407 - DNA, 25 bp, Homo sapien
gaacttggcctctgaatggtgcatc

SEQ ID NO: 121408 - DNA, 25 bp, Homo sapien
aaactgctgtgtggaacttggcctc

SEQ ID NO: 121409 - DNA, 25 bp, Homo sapien
tgaatggtgcatctgtccaacttac

SEQ ID NO: 121410 - DNA, 25 bp, Homo sapien
aaaaactgctgtgtggaacttggcc

SEQ ID NO: 121411 - DNA, 25 bp, Homo sapien
ggggaaaaagccatagagccagatg

SEQ ID NO: 121412 - DNA, 25 bp, Homo sapien
gggaaaaagccatagagccagatgt

SEQ ID NO: 121413 - DNA, 25 bp, Homo sapien
gaggaacttgggacgtggccccaca

SEQ ID NO: 121414 - DNA, 25 bp, Homo sapien
gaacttgggacgtggccccacagct

SEQ ID NO: 121415 - DNA, 25 bp, Homo sapien
tcatgccagaggaacttgggacgtg

SEQ ID NO: 121416 - DNA, 25 bp, Homo sapien
agctcatgccagaggaacttgggac

SEQ ID NO: 121417 - DNA, 25 bp, Homo sapien
agagtgctgacaccatcccatgttt

SEQ ID NO: 121418 - DNA, 25 bp, Homo sapien
gagtgctgacaccatcccatgtttt

SEQ ID NO: 121419 - DNA, 25 bp, Homo sapien
gctgacaccatcccatgttttccag

SEQ ID NO: 121420 - DNA, 25 bp, Homo sapien
gtgctgacaccatcccatgttttcc

SEQ ID NO: 121421 - DNA, 25 bp, Homo sapien
tacaggctgaacttccgtggattgg

SEQ ID NO: 121422 - DNA, 25 bp, Homo sapien
ctgtgctacaggctgaacttccgtg

SEQ ID NO: 121423 - DNA, 25 bp, Homo sapien
gctacaggctgaacttccgtggatt

SEQ ID NO: 121424 - DNA, 25 bp, Homo sapien
ggattggggccaagtcacaacctct

SEQ ID NO: 121425 - DNA, 25 bp, Homo sapien
taaagtcatagggttggtcatcgtc

SEQ ID NO: 121426 - DNA, 25 bp, Homo sapien
ctctagttagtgatatgggtccaaa

SEQ ID NO: 121427 - DNA, 25 bp, Homo sapien
ggtcatcgtctggttgggcaagcat

SEQ ID NO: 121428 - DNA, 25 bp, Homo sapien
gaaatagccatcttatagtcagaca

SEQ ID NO: 121429 - DNA, 25 bp, Homo sapien
cagcttgccgagtgtcaggaaatca

SEQ ID NO: 121430 - DNA, 25 bp, Homo sapien
catacagacatgtccgaggctggga

SEQ ID NO: 121431 - DNA, 25 bp, Homo sapien
tagcctggcaaaagatacggtggaa

SEQ ID NO: 121432 - DNA, 25 bp, Homo sapien
tttccaaagcacatgaagcggcaga

SEQ ID NO: 121433 - DNA, 25 bp, Homo sapien
cttcttctcgtcgttgcccctgcag

SEQ ID NO: 121434 - DNA, 25 bp, Homo sapien
catcagcaggcaggttttccccacg

SEQ ID NO: 121435 - DNA, 25 bp, Homo sapien
gcgtcgttggcgtagctcatcagca

SEQ ID NO: 121436 - DNA, 25 bp, Homo sapien
acagtgggcacgtattcctctggga

SEQ ID NO: 121437 - DNA, 25 bp, Homo sapien
gggtctcgccccctgcatcgtttgt

SEQ ID NO: 121438 - DNA, 25 bp, Homo sapien
cccctgcatcgtttgtctggatgca

SEQ ID NO: 121439 - DNA, 25 bp, Homo sapien
tctgaacttagggtctcgccccctg

SEQ ID NO: 121440 - DNA, 25 bp, Homo sapien
tttgtctggatgcagagagtttccc

SEQ ID NO: 121441 - DNA, 25 bp, Homo sapien
tatgctacgctaagctccctggtta

SEQ ID NO: 121442 - DNA, 25 bp, Homo sapien
ctggcgttgccattcgttttacggg

SEQ ID NO: 121443 - DNA, 25 bp, Homo sapien
gggaaaagtgttaccatacacattg

SEQ ID NO: 121444 - DNA, 25 bp, Homo sapien
tcaagtcctgggttgtatgctacgc

SEQ ID NO: 121445 - DNA, 25 bp, Homo sapien
aaaacctgctgggaaatggatactg

SEQ ID NO: 121446 - DNA, 25 bp, Homo sapien
catgaggtgaatacgcaaagagcgg

SEQ ID NO: 121447 - DNA, 25 bp, Homo sapien
tagaaggaggatttcaaatggccac

SEQ ID NO: 121448 - DNA, 25 bp, Homo sapien
gtaactggcttcctgaatacatggg

SEQ ID NO: 121449 - DNA, 25 bp, Homo sapien
gttcaaccaggtcatataccaggag

SEQ ID NO: 121450 - DNA, 25 bp, Homo sapien
tagattctcacgtgactgcctaagg

SEQ ID NO: 121451 - DNA, 25 bp, Homo sapien
tcattttaaagtaggccagtaggac

SEQ ID NO: 121452 - DNA, 25 bp, Homo sapien
tctaaagtctcagcactcaactgca

SEQ ID NO: 121453 - DNA, 25 bp, Homo sapien
cctggctgtatgcaagtatcgagac

SEQ ID NO: 121454 - DNA, 25 bp, Homo sapien
gacagagccagtattagaaccgggc

SEQ ID NO: 121455 - DNA, 25 bp, Homo sapien
tcttatcacacatgaggcactgttc

SEQ ID NO: 121456 - DNA, 25 bp, Homo sapien
tgctcaaggccacaaagtaaatgac

SEQ ID NO: 121457 - DNA, 25 bp, Homo sapien
gaataatctgagttgagagtctgtt

SEQ ID NO: 121458 - DNA, 25 bp, Homo sapien
ttgagaataatctgagttgagagtc

SEQ ID NO: 121459 - DNA, 25 bp, Homo sapien
ttcagttgagaataatctgagttga

SEQ ID NO: 121460 - DNA, 25 bp, Homo sapien
taatctgagttgagagtctgttgag

SEQ ID NO: 121461 - DNA, 25 bp, Homo sapien
tctaaaggttgttgggacgcgttga

SEQ ID NO: 121462 - DNA, 25 bp, Homo sapien
gctgtgaaagctctaaaggttgttg

SEQ ID NO: 121463 - DNA, 25 bp, Homo sapien
gaagaaatgcaattcttccatggta

SEQ ID NO: 121464 - DNA, 25 bp, Homo sapien
ccatggtaagctgtgaaagctctaa

SEQ ID NO: 121465 - DNA, 25 bp, Homo sapien
tcaatcagctgatagagtaactgga

SEQ ID NO: 121466 - DNA, 25 bp, Homo sapien
tcagctgatagagtaactggatttc

SEQ ID NO: 121467 - DNA, 25 bp, Homo sapien
ctcaatcagctgatagagtaactgg

SEQ ID NO: 121468 - DNA, 25 bp, Homo sapien
aatcagctgatagagtaactggatt

SEQ ID NO: 121469 - DNA, 25 bp, Homo sapien
ttcaaaagaactagaagagtagatt

SEQ ID NO: 121470 - DNA, 25 bp, Homo sapien
ggatataccatttacccagatttaa

SEQ ID NO: 121471 - DNA, 25 bp, Homo sapien
caacacaaagtaatgatggatgttt

SEQ ID NO: 121472 - DNA, 25 bp, Homo sapien
atttaatcattacccattatatgcc

SEQ ID NO: 121473 - DNA, 25 bp, Homo sapien
tacttcccactgagtccatagcact

SEQ ID NO: 121474 - DNA, 25 bp, Homo sapien
ctacttcccactgagtccatagcac

SEQ ID NO: 121475 - DNA, 25 bp, Homo sapien
gagtagggtaattgttaaacatgtc

SEQ ID NO: 121476 - DNA, 25 bp, Homo sapien
gatctgtaacactaaggaagagtca

SEQ ID NO: 121477 - DNA, 25 bp, Homo sapien
ctcccggtaagagaaacactgatac

SEQ ID NO: 121478 - DNA, 25 bp, Homo sapien
tactcaacttgtagatcctgagatg

SEQ ID NO: 121479 - DNA, 25 bp, Homo sapien
tacaaacaacgctgccaagaatgag

SEQ ID NO: 121480 - DNA, 25 bp, Homo sapien
cagtgctgggtgcttggacatgctc

SEQ ID NO: 121481 - DNA, 25 bp, Homo sapien
cagtcccctgttcttagatagttgg

SEQ ID NO: 121482 - DNA, 25 bp, Homo sapien
tatcaaaccttgtatcaactccgca

SEQ ID NO: 121483 - DNA, 25 bp, Homo sapien
tgaatgcgcgtatggcgtggcctcc

SEQ ID NO: 121484 - DNA, 25 bp, Homo sapien
gaaatattcggagaggacttgccat

SEQ ID NO: 121485 - DNA, 25 bp, Homo sapien
gcagcattttgcaagccactctaga

SEQ ID NO: 121486 - DNA, 25 bp, Homo sapien
gacactgaatttttgactccctgct

SEQ ID NO: 121487 - DNA, 25 bp, Homo sapien
gagacaatgctgatccggtcctgtg

SEQ ID NO: 121488 - DNA, 25 bp, Homo sapien
gcactgacagccgagacaatgctga

SEQ ID NO: 121489 - DNA, 25 bp, Homo sapien
gcagttgtcaatttcaggtcctggg

SEQ ID NO: 121490 - DNA, 25 bp, Homo sapien
tcctgtgtgacataaggcagccatt

SEQ ID NO: 121491 - DNA, 25 bp, Homo sapien
gtccatctgtctaccatggcagcct

SEQ ID NO: 121492 - DNA, 25 bp, Homo sapien
tccatctgtctaccatggcagcctg

SEQ ID NO: 121493 - DNA, 25 bp, Homo sapien
catctgtctaccatggcagcctgtg

SEQ ID NO: 121494 - DNA, 25 bp, Homo sapien
ccatctgtctaccatggcagcctgt

SEQ ID NO: 121495 - DNA, 25 bp, Homo sapien
ctggattggtggcccttcagttgag

SEQ ID NO: 121496 - DNA, 25 bp, Homo sapien
tggattggtggcccttcagttgagt

SEQ ID NO: 121497 - DNA, 25 bp, Homo sapien
ggattggtggcccttcagttgagtg

SEQ ID NO: 121498 - DNA, 25 bp, Homo sapien
gattggtggcccttcagttgagtgt

SEQ ID NO: 121499 - DNA, 25 bp, Homo sapien
gcatgggtggctgaaactgcaatct

SEQ ID NO: 121500 - DNA, 25 bp, Homo sapien
gctcagctgcgtaaagtatgacact

SEQ ID NO: 121501 - DNA, 25 bp, Homo sapien
tgacactgtcaaggctagcatgggt

SEQ ID NO: 121502 - DNA, 25 bp, Homo sapien
tctttctcttggaacctgtagatgc

SEQ ID NO: 121503 - DNA, 25 bp, Homo sapien
tgcctgtgtaaagggtttagtctcc

SEQ ID NO: 121504 - DNA, 25 bp, Homo sapien
ccagggcatggctggtaccctcata

SEQ ID NO: 121505 - DNA, 25 bp, Homo sapien
tcaaatcctgaaccatagcactgct

SEQ ID NO: 121506 - DNA, 25 bp, Homo sapien
tttctggcaactcaggaaagcccag

SEQ ID NO: 121507 - DNA, 25 bp, Homo sapien
aaaatgcttgtaaaccattctgatc

SEQ ID NO: 121508 - DNA, 25 bp, Homo sapien
gcagccaaaaatgcttgtaaaccat

SEQ ID NO: 121509 - DNA, 25 bp, Homo sapien
ctgcagccaaaaatgcttgtaaacc

SEQ ID NO: 121510 - DNA, 25 bp, Homo sapien
gccaaaaatgcttgtaaaccattct

SEQ ID NO: 121511 - DNA, 25 bp, Homo sapien
ggtcagtaggttcactggattagca

SEQ ID NO: 121512 - DNA, 25 bp, Homo sapien
ttatgcgttgtcactgaaagataga

SEQ ID NO: 121513 - DNA, 25 bp, Homo sapien
ctggattagcaatctgaggatttga

SEQ ID NO: 121514 - DNA, 25 bp, Homo sapien
gccttgtgcatatttggctcctggg

SEQ ID NO: 121515 - DNA, 25 bp, Homo sapien
cttcccttagcatttcagtcatctc

SEQ ID NO: 121516 - DNA, 25 bp, Homo sapien
ccttagcatttcagtcatctcacaa

SEQ ID NO: 121517 - DNA, 25 bp, Homo sapien
gcatttcagtcatctcacaaaacag

SEQ ID NO: 121518 - DNA, 25 bp, Homo sapien
tagcatttcagtcatctcacaaaac

SEQ ID NO: 121519 - DNA, 25 bp, Homo sapien
ggtttcctggtaaagcatgggcact

SEQ ID NO: 121520 - DNA, 25 bp, Homo sapien
gcagagggtctggacgaagctttct

SEQ ID NO: 121521 - DNA, 25 bp, Homo sapien
tcaatggtaggagcagaaagaccag

SEQ ID NO: 121522 - DNA, 25 bp, Homo sapien
ttcaagagtctaccaggttcctgga

SEQ ID NO: 121523 - DNA, 25 bp, Homo sapien
cttttctcctatggcagctttgatc

SEQ ID NO: 121524 - DNA, 25 bp, Homo sapien
cagctttgatccctgggaatttcac

SEQ ID NO: 121525 - DNA, 25 bp, Homo sapien
tatggcagctttgatccctgggaat

SEQ ID NO: 121526 - DNA, 25 bp, Homo sapien
ttctcctatggcagctttgatccct

SEQ ID NO: 121527 - DNA, 25 bp, Homo sapien
cagtctgtttttcctcgggcctcac

SEQ ID NO: 121528 - DNA, 25 bp, Homo sapien
tacagtccgagcaagtgttgcttgc

SEQ ID NO: 121529 - DNA, 25 bp, Homo sapien
ctgtcccgcggtgtcatacagtccg

SEQ ID NO: 121530 - DNA, 25 bp, Homo sapien
tccgagcaagtgttgcttgcctccc

SEQ ID NO: 121531 - DNA, 25 bp, Homo sapien
ggtgtcatacagtccgagcaagtgt

SEQ ID NO: 121532 - DNA, 25 bp, Homo sapien
gcttttggtcgtcatttaggcagac

SEQ ID NO: 121533 - DNA, 25 bp, Homo sapien
cccatctgcataagcaaatggatct

SEQ ID NO: 121534 - DNA, 25 bp, Homo sapien
ttaggcagacaataaattggcccca

SEQ ID NO: 121535 - DNA, 25 bp, Homo sapien
ccccaaatgatcagaatgggtaata

SEQ ID NO: 121536 - DNA, 25 bp, Homo sapien
taggcaattcaaataaagcgtgggc

SEQ ID NO: 121537 - DNA, 25 bp, Homo sapien
aagcgtgggcaaagaaataacctga

SEQ ID NO: 121538 - DNA, 25 bp, Homo sapien
aagaaattgaaactcgtggtcacat

SEQ ID NO: 121539 - DNA, 25 bp, Homo sapien
tatgaaactgacctatgaatcctga

SEQ ID NO: 121540 - DNA, 25 bp, Homo sapien
ttcttccttccaacacgtaatccat

SEQ ID NO: 121541 - DNA, 25 bp, Homo sapien
tccagttattcagggttgactctca

SEQ ID NO: 121542 - DNA, 25 bp, Homo sapien
aacctccagttattcagggttgact

SEQ ID NO: 121543 - DNA, 25 bp, Homo sapien
cagttattcagggttgactctcatt

SEQ ID NO: 121544 - DNA, 25 bp, Homo sapien
ggtgggccagtttctccaacttgaa

SEQ ID NO: 121545 - DNA, 25 bp, Homo sapien
gttgtcttgtgttattggtgggcca

SEQ ID NO: 121546 - DNA, 25 bp, Homo sapien
tgattaattgttgagggttttagcc

SEQ ID NO: 121547 - DNA, 25 bp, Homo sapien
aagagcatgtgccagctgattaatt

SEQ ID NO: 121548 - DNA, 25 bp, Homo sapien
tatccaagaaattgggctacggcca

SEQ ID NO: 121549 - DNA, 25 bp, Homo sapien
aaaaaggcctagacgaatgcatcgc

SEQ ID NO: 121550 - DNA, 25 bp, Homo sapien
tttggacagactgaacaacccgctg

SEQ ID NO: 121551 - DNA, 25 bp, Homo sapien
ggtagcttaccaaaacaggcatctg

SEQ ID NO: 121552 - DNA, 25 bp, Homo sapien
gaagtaacatgcactcaccctgaga

SEQ ID NO: 121553 - DNA, 25 bp, Homo sapien
aaatagatttggcttacagggctgg

SEQ ID NO: 121554 - DNA, 25 bp, Homo sapien
cactactagggatatgtctcgtaca

SEQ ID NO: 121555 - DNA, 25 bp, Homo sapien
tcgtacaggatgagttggcacaacc

SEQ ID NO: 121556 - DNA, 25 bp, Homo sapien
tgaggggctcggctgatggccttcc

SEQ ID NO: 121557 - DNA, 25 bp, Homo sapien
agacactggtgacagctgagctgct

SEQ ID NO: 121558 - DNA, 25 bp, Homo sapien
cgggacttcagaaatcagggcctgg

SEQ ID NO: 121559 - DNA, 25 bp, Homo sapien
ccattgggggaaagcgggacttcag

SEQ ID NO: 121560 - DNA, 25 bp, Homo sapien
cattggatcagccaatagcaaaggg

SEQ ID NO: 121561 - DNA, 25 bp, Homo sapien
gcagctgtcatgtgggcaaacttct

SEQ ID NO: 121562 - DNA, 25 bp, Homo sapien
tgatccagtaaaagagtccgtcctc

SEQ ID NO: 121563 - DNA, 25 bp, Homo sapien
gttgccattcataaaccctagctgt

SEQ ID NO: 121564 - DNA, 25 bp, Homo sapien
tagtgtgcgtgcatagcatggtgct

SEQ ID NO: 121565 - DNA, 25 bp, Homo sapien
tgggtaagttctccatgcctccctt

SEQ ID NO: 121566 - DNA, 25 bp, Homo sapien
aatgtgggcaccatgtatagtgtgc

SEQ ID NO: 121567 - DNA, 25 bp, Homo sapien
catgggtggtgggtagaaattctct

SEQ ID NO: 121568 - DNA, 25 bp, Homo sapien
gcaaattcttattcagtagcaggac

SEQ ID NO: 121569 - DNA, 25 bp, Homo sapien
agtagcaggactggaatggagccca

SEQ ID NO: 121570 - DNA, 25 bp, Homo sapien
caaattcttattcagtagcaggact

SEQ ID NO: 121571 - DNA, 25 bp, Homo sapien
cttagacactacatatatttgcatc

SEQ ID NO: 121572 - DNA, 25 bp, Homo sapien
cacttcttagacactacatatattt

SEQ ID NO: 121573 - DNA, 25 bp, Homo sapien
aattattttctagatagcacttctt

SEQ ID NO: 121574 - DNA, 25 bp, Homo sapien
cttcttagacactacatatatttgc

SEQ ID NO: 121575 - DNA, 25 bp, Homo sapien
gagtaatttaaccaggacaacagag

SEQ ID NO: 121576 - DNA, 25 bp, Homo sapien
tgtcaagcggctacgagaagtggat

SEQ ID NO: 121577 - DNA, 25 bp, Homo sapien
tattgggagctaaccctgggctaca

SEQ ID NO: 121578 - DNA, 25 bp, Homo sapien
aggctcacacctgggctattgggag

SEQ ID NO: 121579 - DNA, 25 bp, Homo sapien
tactgaatgcgtagcactgttgagg

SEQ ID NO: 121580 - DNA, 25 bp, Homo sapien
ggctcaccgtgctctgtattctgga

SEQ ID NO: 121581 - DNA, 25 bp, Homo sapien
tacgctcttcagtccagcagcatgg

SEQ ID NO: 121582 - DNA, 25 bp, Homo sapien
tctgtggaaaccttagtcctgctgt

SEQ ID NO: 121583 - DNA, 25 bp, Homo sapien
cactggatggcagcaacactgtata

SEQ ID NO: 121584 - DNA, 25 bp, Homo sapien
tctgcttcagattaccactggatgg

SEQ ID NO: 121585 - DNA, 25 bp, Homo sapien
cacaactagattgggtaggaacaaa

SEQ ID NO: 121586 - DNA, 25 bp, Homo sapien
taatagtcggaaaggagtatgcttg

SEQ ID NO: 121587 - DNA, 25 bp, Homo sapien
agctttgtacccttgatcaaaacct

SEQ ID NO: 121588 - DNA, 25 bp, Homo sapien
agacttattcaccctagctaactgc

SEQ ID NO: 121589 - DNA, 25 bp, Homo sapien
ctgcagctttgtacccttgatcaaa

SEQ ID NO: 121590 - DNA, 25 bp, Homo sapien
attcaccctagctaactgcagcttt

SEQ ID NO: 121591 - DNA, 25 bp, Homo sapien
tacagcctgtgtaaggtgtgtccca

SEQ ID NO: 121592 - DNA, 25 bp, Homo sapien
agagtccactacagcgcactgggat

SEQ ID NO: 121593 - DNA, 25 bp, Homo sapien
caaggtcagatttcaggtaagagtc

SEQ ID NO: 121594 - DNA, 25 bp, Homo sapien
tgtgtcccatgtagttccaaggtca

SEQ ID NO: 121595 - DNA, 25 bp, Homo sapien
taagaggcagggtttacgacagaga

SEQ ID NO: 121596 - DNA, 25 bp, Homo sapien
agatcaaaaacacatccgtgttggg

SEQ ID NO: 121597 - DNA, 25 bp, Homo sapien
gagtggcctcagctggttgtagtcc

SEQ ID NO: 121598 - DNA, 25 bp, Homo sapien
ggtttacgacagagaagcagatcaa

SEQ ID NO: 121599 - DNA, 25 bp, Homo sapien
cagtccttgagctcggggacccatt

SEQ ID NO: 121600 - DNA, 25 bp, Homo sapien
ctgggtccctatgaggacataaggc

SEQ ID NO: 121601 - DNA, 25 bp, Homo sapien
tatgaggacataaggcacgtgaggc

SEQ ID NO: 121602 - DNA, 25 bp, Homo sapien
cataaggcacgtgaggcatgcagtc

SEQ ID NO: 121603 - DNA, 25 bp, Homo sapien
caaggtttttgggtcatcacggaga

SEQ ID NO: 121604 - DNA, 25 bp, Homo sapien
agaggtttctctttcatatacagca

SEQ ID NO: 121605 - DNA, 25 bp, Homo sapien
catatacagcaaacgggccaaggtt

SEQ ID NO: 121606 - DNA, 25 bp, Homo sapien
ggtttttgggtcatcacggagatca

SEQ ID NO: 121607 - DNA, 25 bp, Homo sapien
aaaatgaaattcaaatctgactgta

SEQ ID NO: 121608 - DNA, 25 bp, Homo sapien
aaatgaaattcaaatctgactgtac

SEQ ID NO: 121609 - DNA, 25 bp, Homo sapien
atttaaaatgaaattcaaatctgac

SEQ ID NO: 121610 - DNA, 25 bp, Homo sapien
ttaaaatgaaattcaaatctgactg

SEQ ID NO: 121611 - DNA, 25 bp, Homo sapien
caagtatttagaagccatctgggag

SEQ ID NO: 121612 - DNA, 25 bp, Homo sapien
cagggacatttatcagcgatgtaca

SEQ ID NO: 121613 - DNA, 25 bp, Homo sapien
gaaaagccgccatctcaacaagtca

SEQ ID NO: 121614 - DNA, 25 bp, Homo sapien
tctgggagggttcaggattcaagcc

SEQ ID NO: 121615 - DNA, 25 bp, Homo sapien
catgtcaggctttgcctttcgatgg

SEQ ID NO: 121616 - DNA, 25 bp, Homo sapien
cagtgtgcagctgacagcatgtcag

SEQ ID NO: 121617 - DNA, 25 bp, Homo sapien
caggctttgcctttcgatggagcgg

SEQ ID NO: 121618 - DNA, 25 bp, Homo sapien
cagcatgtcaggctttgcctttcga

SEQ ID NO: 121619 - DNA, 25 bp, Homo sapien
gcttcttgtgaaggagacctgcggt

SEQ ID NO: 121620 - DNA, 25 bp, Homo sapien
ttaaaaatcacagaccagggcagac

SEQ ID NO: 121621 - DNA, 25 bp, Homo sapien
ggctaaatggcgagttcctggaaac

SEQ ID NO: 121622 - DNA, 25 bp, Homo sapien
cagggcagaccatatttagcagtca

SEQ ID NO: 121623 - DNA, 25 bp, Homo sapien
aaatgcaaagatctaaaaaattagg

SEQ ID NO: 121624 - DNA, 25 bp, Homo sapien
tcctctcatttgtaggcagaatgtg

SEQ ID NO: 121625 - DNA, 25 bp, Homo sapien
caaagtgtcagcttggttgataaag

SEQ ID NO: 121626 - DNA, 25 bp, Homo sapien
gcagtaaatcctaaaattgacccat

SEQ ID NO: 121627 - DNA, 25 bp, Homo sapien
agaaaagcacagtggtatcaactca

SEQ ID NO: 121628 - DNA, 25 bp, Homo sapien
tatcaactcactgcccagacaagca

SEQ ID NO: 121629 - DNA, 25 bp, Homo sapien
ccagacaagcacttacttctgcctg

SEQ ID NO: 121630 - DNA, 25 bp, Homo sapien
ggtatcaactcactgcccagacaag

SEQ ID NO: 121631 - DNA, 25 bp, Homo sapien
cgctttgagacctttctgagtcaga

SEQ ID NO: 121632 - DNA, 25 bp, Homo sapien
gcttcatcaaaaaccgctttgagac

SEQ ID NO: 121633 - DNA, 25 bp, Homo sapien
gaaaatggtgaggattgcttcatca

SEQ ID NO: 121634 - DNA, 25 bp, Homo sapien
tgaacattccaagtagcactgtgct

SEQ ID NO: 121635 - DNA, 25 bp, Homo sapien
tcagataattgaacagcagctgtga

SEQ ID NO: 121636 - DNA, 25 bp, Homo sapien
cagataattgaacagcagctgtgac

SEQ ID NO: 121637 - DNA, 25 bp, Homo sapien
tggtcgtgccctcctttttggctgg

SEQ ID NO: 121638 - DNA, 25 bp, Homo sapien
ctttctggtcgtgccctcctttttg

SEQ ID NO: 121639 - DNA, 25 bp, Homo sapien
acagagattggctgccattctcatc

SEQ ID NO: 121640 - DNA, 25 bp, Homo sapien
gcttggccacagagattggctgcca

SEQ ID NO: 121641 - DNA, 25 bp, Homo sapien
gtgatggggcaagcctccgtgcaaa

SEQ ID NO: 121642 - DNA, 25 bp, Homo sapien
ggcagtgggctgactagtgtgctgt

SEQ ID NO: 121643 - DNA, 25 bp, Homo sapien
tgggctgactagtgtgctgtgttgg

SEQ ID NO: 121644 - DNA, 25 bp, Homo sapien
gcaagcctccgtgcaaagggagttc

SEQ ID NO: 121645 - DNA, 25 bp, Homo sapien
agcagcggcactgtctgcaatccag

SEQ ID NO: 121646 - DNA, 25 bp, Homo sapien
gtttttgatgcgatcagcagcggca

SEQ ID NO: 121647 - DNA, 25 bp, Homo sapien
cagcattctcagacagcgtgcagta

SEQ ID NO: 121648 - DNA, 25 bp, Homo sapien
tcctatcagcttcacgttcatgagc

SEQ ID NO: 121649 - DNA, 25 bp, Homo sapien
tcaagtaaggccagcaatagaggaa

SEQ ID NO: 121650 - DNA, 25 bp, Homo sapien
catcattgggcacaggattccttac

SEQ ID NO: 121651 - DNA, 25 bp, Homo sapien
tgattccagggcacttataagcaac

SEQ ID NO: 121652 - DNA, 25 bp, Homo sapien
tgtggacctgcaacaattcagatgg

SEQ ID NO: 121653 - DNA, 25 bp, Homo sapien
cctctgcagagttatagttcataca

SEQ ID NO: 121654 - DNA, 25 bp, Homo sapien
tctttagcaattagatgggagagaa

SEQ ID NO: 121655 - DNA, 25 bp, Homo sapien
catttattacaggactaaaagttca

SEQ ID NO: 121656 - DNA, 25 bp, Homo sapien
aggatgaattcataacctctgcaga

SEQ ID NO: 121657 - DNA, 25 bp, Homo sapien
tatttgcctgttgagtgcacacacc

SEQ ID NO: 121658 - DNA, 25 bp, Homo sapien
tcttaagacccctgggagcctgtgc

SEQ ID NO: 121659 - DNA, 25 bp, Homo sapien
tgagtggcccgttagcaagatataa

SEQ ID NO: 121660 - DNA, 25 bp, Homo sapien
cacatcagtgagaaatgagtggccc

SEQ ID NO: 121661 - DNA, 25 bp, Homo sapien
tctccgttgagagagaatgcgcagt

SEQ ID NO: 121662 - DNA, 25 bp, Homo sapien
taatagctggtgacctgtggcgctc

SEQ ID NO: 121663 - DNA, 25 bp, Homo sapien
tactttgcaaggtactgcccacagg

SEQ ID NO: 121664 - DNA, 25 bp, Homo sapien
ggcagcctactcaatgactcctggg

SEQ ID NO: 121665 - DNA, 25 bp, Homo sapien
gagaaatatcacactgacggtgaat

SEQ ID NO: 121666 - DNA, 25 bp, Homo sapien
ttaaatacaatctttctattgagaa

SEQ ID NO: 121667 - DNA, 25 bp, Homo sapien
gcaagtaactatccttccagctatc

SEQ ID NO: 121668 - DNA, 25 bp, Homo sapien
aagtaactatccttccagctatccc

SEQ ID NO: 121669 - DNA, 25 bp, Homo sapien
cacagcatatactgggaggcttgga

SEQ ID NO: 121670 - DNA, 25 bp, Homo sapien
catgaactgttgcaattgggataaa

SEQ ID NO: 121671 - DNA, 25 bp, Homo sapien
tatgtattcacaaagctgccccaaa

SEQ ID NO: 121672 - DNA, 25 bp, Homo sapien
gcagattgtaagaacgccatcccgt

SEQ ID NO: 121673 - DNA, 25 bp, Homo sapien
gagagacaggctaagttgatggttc

SEQ ID NO: 121674 - DNA, 25 bp, Homo sapien
gatgaacttggttgtctccgagacc

SEQ ID NO: 121675 - DNA, 25 bp, Homo sapien
caggccacatcttgagtcacaaggg

SEQ ID NO: 121676 - DNA, 25 bp, Homo sapien
tagcctaaggaacactcaaaaggta

SEQ ID NO: 121677 - DNA, 25 bp, Homo sapien
actgagggatgtatgttctaaactt

SEQ ID NO: 121678 - DNA, 25 bp, Homo sapien
tgagggatgtatgttctaaacttgt

SEQ ID NO: 121679 - DNA, 25 bp, Homo sapien
actgttgcggaactgagggatgtat

SEQ ID NO: 121680 - DNA, 25 bp, Homo sapien
attcaaagagactgttgcggaactg

SEQ ID NO: 121681 - DNA, 25 bp, Homo sapien
agctgcccaactgtgccccgggagt

SEQ ID NO: 121682 - DNA, 25 bp, Homo sapien
tacaacgagaccaaacaggtgactg

SEQ ID NO: 121683 - DNA, 25 bp, Homo sapien
gagaccatctgaggccgctagctgc

SEQ ID NO: 121684 - DNA, 25 bp, Homo sapien
tatcccgtggccatccgctgtgact

SEQ ID NO: 121685 - DNA, 25 bp, Homo sapien
tgggaacctgcgcacctttgtgggc

SEQ ID NO: 121686 - DNA, 25 bp, Homo sapien
tttccctctccggaagagcagcatg

SEQ ID NO: 121687 - DNA, 25 bp, Homo sapien
cactggcaccagttacaggaatctc

SEQ ID NO: 121688 - DNA, 25 bp, Homo sapien
gaaaagcctgagaatgcacttggag

SEQ ID NO: 121689 - DNA, 25 bp, Homo sapien
gggacctttcagagtgcccgatctg

SEQ ID NO: 121690 - DNA, 25 bp, Homo sapien
taccgtggggacctttcagagtgcc

SEQ ID NO: 121691 - DNA, 25 bp, Homo sapien
tctgcatccgaccttctgctaccat

SEQ ID NO: 121692 - DNA, 25 bp, Homo sapien
gagtgcccgatctgcatccgacctt

SEQ ID NO: 121693 - DNA, 25 bp, Homo sapien
gtcagtcaagactatttctatggtt

SEQ ID NO: 121694 - DNA, 25 bp, Homo sapien
ccttgccagggactcggagaaggat

SEQ ID NO: 121695 - DNA, 25 bp, Homo sapien
taaaagtgaactggggacattcaga

SEQ ID NO: 121696 - DNA, 25 bp, Homo sapien
tactcttcatagtgaggcaaggaag

SEQ ID NO: 121697 - DNA, 25 bp, Homo sapien
ccaacatataccggtttaggtgtat

SEQ ID NO: 121698 - DNA, 25 bp, Homo sapien
gccaacatataccggtttaggtgta

SEQ ID NO: 121699 - DNA, 25 bp, Homo sapien
tacatgttgtatgcagcctccagca

SEQ ID NO: 121700 - DNA, 25 bp, Homo sapien
gctacatgttgtatgcagcctccag

SEQ ID NO: 121701 - DNA, 25 bp, Homo sapien
acatgttgtatgcagcctccagcat

SEQ ID NO: 121702 - DNA, 25 bp, Homo sapien
ctacatgttgtatgcagcctccagc

SEQ ID NO: 121703 - DNA, 25 bp, Homo sapien
ttattgcttccgcagactgtaaatc

SEQ ID NO: 121704 - DNA, 25 bp, Homo sapien
ttatcacagagagaaacctctgaag

SEQ ID NO: 121705 - DNA, 25 bp, Homo sapien
gactgtaaatctcagggccgaaggt

SEQ ID NO: 121706 - DNA, 25 bp, Homo sapien
cgaaggtcaccaggcatccttgtgg

SEQ ID NO: 121707 - DNA, 25 bp, Homo sapien
aaaaggtggcaccagacatgatcac

SEQ ID NO: 121708 - DNA, 25 bp, Homo sapien
gcttcttgtgcacgatagcagcagt

SEQ ID NO: 121709 - DNA, 25 bp, Homo sapien
tgagcaaattgtgatctagcggaat

SEQ ID NO: 121710 - DNA, 25 bp, Homo sapien
cttttaattggatgcactgacctgg

SEQ ID NO: 121711 - DNA, 25 bp, Homo sapien
taccatattggtttcagggatagga

SEQ ID NO: 121712 - DNA, 25 bp, Homo sapien
ttagaatgacgctgaggccttaggc

SEQ ID NO: 121713 - DNA, 25 bp, Homo sapien
tctcattgtgaagtatccccagttg

SEQ ID NO: 121714 - DNA, 25 bp, Homo sapien
tgtgggcctagaacaactatgtgag

SEQ ID NO: 121715 - DNA, 25 bp, Homo sapien
ctatgtgacatatttcaggacgtac

SEQ ID NO: 121716 - DNA, 25 bp, Homo sapien
aatctgactgttgcactatgtgaca

SEQ ID NO: 121717 - DNA, 25 bp, Homo sapien
tgacaatgtgacattagtcatgttg

SEQ ID NO: 121718 - DNA, 25 bp, Homo sapien
ttgtgtgcggtgacgcagagtaact

SEQ ID NO: 121719 - DNA, 25 bp, Homo sapien
ggtgaacacttacagctctcctcct

SEQ ID NO: 121720 - DNA, 25 bp, Homo sapien
tgaagaatctctgctcattggaatg

SEQ ID NO: 121721 - DNA, 25 bp, Homo sapien
tgtctaaaattcgtagggcaacttc

SEQ ID NO: 121722 - DNA, 25 bp, Homo sapien
gaggctgccaaagacgaaacaactg

SEQ ID NO: 121723 - DNA, 25 bp, Homo sapien
tacaatataaatatgggcttgtata

SEQ ID NO: 121724 - DNA, 25 bp, Homo sapien
tataaagtagaatacgcagttttat

SEQ ID NO: 121725 - DNA, 25 bp, Homo sapien
tgatcaggtcacagtgtgtacgtaa

SEQ ID NO: 121726 - DNA, 25 bp, Homo sapien
cagtgtgtacgtaagagtcagctaa

SEQ ID NO: 121727 - DNA, 25 bp, Homo sapien
aacatgaacatatgaactattgttg

SEQ ID NO: 121728 - DNA, 25 bp, Homo sapien
acatgaacatatgaactattgttgc

SEQ ID NO: 121729 - DNA, 25 bp, Homo sapien
catgaacatatgaactattgttgct

SEQ ID NO: 121730 - DNA, 25 bp, Homo sapien
agtgagttggtaatcctaaaccatc

SEQ ID NO: 121731 - DNA, 25 bp, Homo sapien
gtgagttggtaatcctaaaccatca

SEQ ID NO: 121732 - DNA, 25 bp, Homo sapien
tattacgtactgaaagatatgtgtt

SEQ ID NO: 121733 - DNA, 25 bp, Homo sapien
aatgcagttgcattattacgtactg

SEQ ID NO: 121734 - DNA, 25 bp, Homo sapien
tatatcaaaggtgcatcgtgaccaa

SEQ ID NO: 121735 - DNA, 25 bp, Homo sapien
tcttgggtaggtaaactgctgataa

SEQ ID NO: 121736 - DNA, 25 bp, Homo sapien
ttttagccggaaaggattcaggata

SEQ ID NO: 121737 - DNA, 25 bp, Homo sapien
gttctatatctcatcacagcgccag

SEQ ID NO: 121738 - DNA, 25 bp, Homo sapien
cagtacctgaccagtattagttgca

SEQ ID NO: 121739 - DNA, 25 bp, Homo sapien
tacaaccatgaaattgatcaccggg

SEQ ID NO: 121740 - DNA, 25 bp, Homo sapien
tcattgaacacacataccagagatg

SEQ ID NO: 121741 - DNA, 25 bp, Homo sapien
tgtcttgaatcctttgaaaacaggc

SEQ ID NO: 121742 - DNA, 25 bp, Homo sapien
gcttgtctttctgctaagctgttaa

SEQ ID NO: 121743 - DNA, 25 bp, Homo sapien
tcctcctctggataacttgactgta

SEQ ID NO: 121744 - DNA, 25 bp, Homo sapien
gactgtcatttccttataagtttgt

SEQ ID NO: 121745 - DNA, 25 bp, Homo sapien
tgtgaacaatcttaaatttagcttg

SEQ ID NO: 121746 - DNA, 25 bp, Homo sapien
tgatctttggtgtagctgcttgcta

SEQ ID NO: 121747 - DNA, 25 bp, Homo sapien
gagaacaatttactataggtcccaa

SEQ ID NO: 121748 - DNA, 25 bp, Homo sapien
gctggtgaggtttctctagtgtgta

SEQ ID NO: 121749 - DNA, 25 bp, Homo sapien
cccaagttaatagagagtagagtca

SEQ ID NO: 121750 - DNA, 25 bp, Homo sapien
tcatttcttcatcggtcagcctgga

SEQ ID NO: 121751 - DNA, 25 bp, Homo sapien
caatgaggaccatcgctggcacata

SEQ ID NO: 121752 - DNA, 25 bp, Homo sapien
caatgtgtatgtccagcaatgagga

SEQ ID NO: 121753 - DNA, 25 bp, Homo sapien
ccctgatgggctccaaaattgttca

SEQ ID NO: 121754 - DNA, 25 bp, Homo sapien
gcacgttgtcgcagaatgatggaga

SEQ ID NO: 121755 - DNA, 25 bp, Homo sapien
tacttaaatgtctaagcctgggagg

SEQ ID NO: 121756 - DNA, 25 bp, Homo sapien
tccgatgagtagaaattgccataaa

SEQ ID NO: 121757 - DNA, 25 bp, Homo sapien
tgtgccacaccatcttatgatccga

SEQ ID NO: 121758 - DNA, 25 bp, Homo sapien
gtttctgcaagtacacacgtgtgct

SEQ ID NO: 121759 - DNA, 25 bp, Homo sapien
tcctgcctccaatgctaagactggg

SEQ ID NO: 121760 - DNA, 25 bp, Homo sapien
aagaatggtaatgagacctgtgccc

SEQ ID NO: 121761 - DNA, 25 bp, Homo sapien
tatttcccgttgttacgtagagagc

SEQ ID NO: 121762 - DNA, 25 bp, Homo sapien
tctgggaaagagataggtagttccc

SEQ ID NO: 121763 - DNA, 25 bp, Homo sapien
ctgtaaagtgagagtagttgtgtta

SEQ ID NO: 121764 - DNA, 25 bp, Homo sapien
tgtgctgcccttaataacaaagtgc

SEQ ID NO: 121765 - DNA, 25 bp, Homo sapien
aaaagaagggctagtccataggcat

SEQ ID NO: 121766 - DNA, 25 bp, Homo sapien
ggaactaatgccactggtgacttaa

SEQ ID NO: 121767 - DNA, 25 bp, Homo sapien
gactatccaccttgttacccaagag

SEQ ID NO: 121768 - DNA, 25 bp, Homo sapien
tgaggcccactgcttagaaaaacgt

SEQ ID NO: 121769 - DNA, 25 bp, Homo sapien
tcttagggcgtctaacaaccatgct

SEQ ID NO: 121770 - DNA, 25 bp, Homo sapien
cattgttattggtatgccccttccc

SEQ ID NO: 121771 - DNA, 25 bp, Homo sapien
gtggctacacctaagatattctgag

SEQ ID NO: 121772 - DNA, 25 bp, Homo sapien
ggttcagatactagctgcagccctt

SEQ ID NO: 121773 - DNA, 25 bp, Homo sapien
tgttggacaaatgacttagcctttc

SEQ ID NO: 121774 - DNA, 25 bp, Homo sapien
gctctaggaattcctcatattcaaa

SEQ ID NO: 121775 - DNA, 25 bp, Homo sapien
tggcacgtaacatcctcaaaagagg

SEQ ID NO: 121776 - DNA, 25 bp, Homo sapien
ttcttgcagctcttttttagtatag

SEQ ID NO: 121777 - DNA, 25 bp, Homo sapien
tagtatagcctgtcaagctctagga

SEQ ID NO: 121778 - DNA, 25 bp, Homo sapien
tcgtataagccctcataactcttca

SEQ ID NO: 121779 - DNA, 25 bp, Homo sapien
ttcttccacggccatcaacttcgta

SEQ ID NO: 121780 - DNA, 25 bp, Homo sapien
tttcttctattcttccacggccatc

SEQ ID NO: 121781 - DNA, 25 bp, Homo sapien
gccatcaacttcgtataagccctca

SEQ ID NO: 121782 - DNA, 25 bp, Homo sapien
caagtttgtacttgatctgtgccat

SEQ ID NO: 121783 - DNA, 25 bp, Homo sapien
gtcctgagtgcatttccagtgaaga

SEQ ID NO: 121784 - DNA, 25 bp, Homo sapien
caactggtatgactgtcctgagtgc

SEQ ID NO: 121785 - DNA, 25 bp, Homo sapien
gatctgtgccatcatacaagaaacc

SEQ ID NO: 121786 - DNA, 25 bp, Homo sapien
ctgcataaaccttgagcaggttcat

SEQ ID NO: 121787 - DNA, 25 bp, Homo sapien
ttctgcataaaccttgagcaggttc

SEQ ID NO: 121788 - DNA, 25 bp, Homo sapien
tctgcataaaccttgagcaggttca

SEQ ID NO: 121789 - DNA, 25 bp, Homo sapien
tcatccttattactgccatagccct

SEQ ID NO: 121790 - DNA, 25 bp, Homo sapien
tgggtagtggagctcaaaccaaaac

SEQ ID NO: 121791 - DNA, 25 bp, Homo sapien
ttctagtttcacagtgaggtggcta

SEQ ID NO: 121792 - DNA, 25 bp, Homo sapien
tagttacagatactctggttgggta

SEQ ID NO: 121793 - DNA, 25 bp, Homo sapien
tgcctctaagtctggtgccctctgc

SEQ ID NO: 121794 - DNA, 25 bp, Homo sapien
gcaggatgaatcttgtcaccctcag

SEQ ID NO: 121795 - DNA, 25 bp, Homo sapien
caccctcaggacttcgagaagggaa

SEQ ID NO: 121796 - DNA, 25 bp, Homo sapien
gggtcctcatggcaagtgaggtgtt

SEQ ID NO: 121797 - DNA, 25 bp, Homo sapien
ggcccccatgcaattctggtagttt

SEQ ID NO: 121798 - DNA, 25 bp, Homo sapien
catcggaacctcttaaataagggct

SEQ ID NO: 121799 - DNA, 25 bp, Homo sapien
gcccccatgcaattctggtagtttc

SEQ ID NO: 121800 - DNA, 25 bp, Homo sapien
acgagaatcgcttgaacctggaggc

SEQ ID NO: 121801 - DNA, 25 bp, Homo sapien
agaagttgcagtgagctgagatcgc

SEQ ID NO: 121802 - DNA, 25 bp, Homo sapien
tcccagctacttgggaggccaaggc

SEQ ID NO: 121803 - DNA, 25 bp, Homo sapien
tgggtgtggtggtgcgtatctgtaa

SEQ ID NO: 121804 - DNA, 25 bp, Homo sapien
tccctagaagtgaggtgaggtctgt

SEQ ID NO: 121805 - DNA, 25 bp, Homo sapien
cctattcgttgatgctcagctggac

SEQ ID NO: 121806 - DNA, 25 bp, Homo sapien
ggtgtatgccacctaagcctcagca

SEQ ID NO: 121807 - DNA, 25 bp, Homo sapien
cctggtcttagtggtggctcttccc

SEQ ID NO: 121808 - DNA, 25 bp, Homo sapien
ctttgaggtggatgtttatgtgctg

SEQ ID NO: 121809 - DNA, 25 bp, Homo sapien
gaggtggatgtttatgtgctgaata

SEQ ID NO: 121810 - DNA, 25 bp, Homo sapien
tttgaggtggatgtttatgtgctga

SEQ ID NO: 121811 - DNA, 25 bp, Homo sapien
tgaggtggatgtttatgtgctgaat

SEQ ID NO: 121812 - DNA, 25 bp, Homo sapien
cagagtgaaagtgcaggttgaggcc

SEQ ID NO: 121813 - DNA, 25 bp, Homo sapien
aatctcatgctgtcactctggctag

SEQ ID NO: 121814 - DNA, 25 bp, Homo sapien
ggacagagtgaaagtgcaggttgag

SEQ ID NO: 121815 - DNA, 25 bp, Homo sapien
gagacaatctcatgctgtcactctg

SEQ ID NO: 121816 - DNA, 25 bp, Homo sapien
ccaccttgggaatgtatgggtttat

SEQ ID NO: 121817 - DNA, 25 bp, Homo sapien
ggtcgcaaagttcctcacagtttag

SEQ ID NO: 121818 - DNA, 25 bp, Homo sapien
tcggaagtccgtcagaaaagccaga

SEQ ID NO: 121819 - DNA, 25 bp, Homo sapien
tcagtagggatatgtcctcagcacc

SEQ ID NO: 121820 - DNA, 25 bp, Homo sapien
tgcagatccagtcttcctccctccc

SEQ ID NO: 121821 - DNA, 25 bp, Homo sapien
ctgcagatccagtcttcctccctcc

SEQ ID NO: 121822 - DNA, 25 bp, Homo sapien
cctccccacgtcgtcgccgccgccg

SEQ ID NO: 121823 - DNA, 25 bp, Homo sapien
gtagcgaaaggtggctctggcagcg

SEQ ID NO: 121824 - DNA, 25 bp, Homo sapien
ctcctccttattctgtccccttctc

SEQ ID NO: 121825 - DNA, 25 bp, Homo sapien
cgcgggtagcgaaaggtggctctgg

SEQ ID NO: 121826 - DNA, 25 bp, Homo sapien
cgggtagcgaaaggtggctctggca

SEQ ID NO: 121827 - DNA, 25 bp, Homo sapien
tgctggccagaaggttcggttgcgc

SEQ ID NO: 121828 - DNA, 25 bp, Homo sapien
gccgcccggtgatattgacaatagg

SEQ ID NO: 121829 - DNA, 25 bp, Homo sapien
gaaaggggcattgactgggacccac

SEQ ID NO: 121830 - DNA, 25 bp, Homo sapien
tgtgccatggactcagccgcccggt

SEQ ID NO: 121831 - DNA, 25 bp, Homo sapien
atgctgtcaggggagtgaaggcgga

SEQ ID NO: 121832 - DNA, 25 bp, Homo sapien
gctgtcaggggagtgaaggcggata

SEQ ID NO: 121833 - DNA, 25 bp, Homo sapien
tgtcaggggagtgaaggcggatact

SEQ ID NO: 121834 - DNA, 25 bp, Homo sapien
tcaggggagtgaaggcggatactgg

SEQ ID NO: 121835 - DNA, 25 bp, Homo sapien
agcttgccccactgccgggcggaag

SEQ ID NO: 121836 - DNA, 25 bp, Homo sapien
ttgccccactgccgggcggaagcgg

SEQ ID NO: 121837 - DNA, 25 bp, Homo sapien
ctcccggaattaaagagctcctctc

SEQ ID NO: 121838 - DNA, 25 bp, Homo sapien
tcccggaattaaagagctcctctca

SEQ ID NO: 121839 - DNA, 25 bp, Homo sapien
cttagacgacccgagcccttggaat

SEQ ID NO: 121840 - DNA, 25 bp, Homo sapien
ggctccgcacagcacggaaagccag

SEQ ID NO: 121841 - DNA, 25 bp, Homo sapien
tggaatcctccggtccaagacgacc

SEQ ID NO: 121842 - DNA, 25 bp, Homo sapien
ctagctgcagggcgggatcaagtct

SEQ ID NO: 121843 - DNA, 25 bp, Homo sapien
tggccgtctgcattcaccaagcatg

SEQ ID NO: 121844 - DNA, 25 bp, Homo sapien
gcaaactgtggcgacagcgttccca

SEQ ID NO: 121845 - DNA, 25 bp, Homo sapien
cattaattaaacgagcgctggcttc

SEQ ID NO: 121846 - DNA, 25 bp, Homo sapien
tctcaaaaaatgtacgtagggtgca

SEQ ID NO: 121847 - DNA, 25 bp, Homo sapien
tggcttgttaactgggtcatcgacc

SEQ ID NO: 121848 - DNA, 25 bp, Homo sapien
ttagaaatgccatcaaacggaacat

SEQ ID NO: 121849 - DNA, 25 bp, Homo sapien
caagtactggagatgactactgcct

SEQ ID NO: 121850 - DNA, 25 bp, Homo sapien
gaaatttacctctacctgcaaagtg

SEQ ID NO: 121851 - DNA, 25 bp, Homo sapien
ctaacggatcctcgcctatgttctg

SEQ ID NO: 121852 - DNA, 25 bp, Homo sapien
ttgaattaacactaacggatcctcg

SEQ ID NO: 121853 - DNA, 25 bp, Homo sapien
taacactaacggatcctcgcctatg

SEQ ID NO: 121854 - DNA, 25 bp, Homo sapien
acggatcctcgcctatgttctggct

SEQ ID NO: 121855 - DNA, 25 bp, Homo sapien
aaagcagcggttccctgaaggtatt

SEQ ID NO: 121856 - DNA, 25 bp, Homo sapien
gaactacagattgtgggagaaagaa

SEQ ID NO: 121857 - DNA, 25 bp, Homo sapien
caagagaactacagattgtgggaga

SEQ ID NO: 121858 - DNA, 25 bp, Homo sapien
ttggaaagcaagagaactacagatt

SEQ ID NO: 121859 - DNA, 25 bp, Homo sapien
tggcagaaaggctcttcttcttgcc

SEQ ID NO: 121860 - DNA, 25 bp, Homo sapien
agaaaggctcttcttcttgccatcc

SEQ ID NO: 121861 - DNA, 25 bp, Homo sapien
aaccacacagggatacggtatggga

SEQ ID NO: 121862 - DNA, 25 bp, Homo sapien
gcagaaaggctcttcttcttgccat

SEQ ID NO: 121863 - DNA, 25 bp, Homo sapien
agtggttagttctcatccacattga

SEQ ID NO: 121864 - DNA, 25 bp, Homo sapien
atccacattgactgtagatttttga

SEQ ID NO: 121865 - DNA, 25 bp, Homo sapien
cattgactgtagatttttgaaaacg

SEQ ID NO: 121866 - DNA, 25 bp, Homo sapien
tgactgtagatttttgaaaacggta

SEQ ID NO: 121867 - DNA, 25 bp, Homo sapien
gcatggccagattaatgtcaaggtt

SEQ ID NO: 121868 - DNA, 25 bp, Homo sapien
agcactctaactcggtccttatcag

SEQ ID NO: 121869 - DNA, 25 bp, Homo sapien
tgtcaaggttcagcactctaactcg

SEQ ID NO: 121870 - DNA, 25 bp, Homo sapien
gcatctattaatgaatacatttgca

SEQ ID NO: 121871 - DNA, 25 bp, Homo sapien
gctgttgttggctgcacctctaagg

SEQ ID NO: 121872 - DNA, 25 bp, Homo sapien
caacagtctgccacctgctgttgtt

SEQ ID NO: 121873 - DNA, 25 bp, Homo sapien
gatctgctcatggagagcaacacca

SEQ ID NO: 121874 - DNA, 25 bp, Homo sapien
taaggccctagatctgctcatggag

SEQ ID NO: 121875 - DNA, 25 bp, Homo sapien
tagaaaccaagcttcaggaggccca

SEQ ID NO: 121876 - DNA, 25 bp, Homo sapien
tatcccagctgttgtgacgccaacg

SEQ ID NO: 121877 - DNA, 25 bp, Homo sapien
tggacgtggcctacctagaaaccaa

SEQ ID NO: 121878 - DNA, 25 bp, Homo sapien
aagcatcggctgttcctggtggcca

SEQ ID NO: 121879 - DNA, 25 bp, Homo sapien
tggtttcccctacgatgttctcctg

SEQ ID NO: 121880 - DNA, 25 bp, Homo sapien
gctctgcccctttaactcctcactc

SEQ ID NO: 121881 - DNA, 25 bp, Homo sapien
agggctctgcccctttaactcctca

SEQ ID NO: 121882 - DNA, 25 bp, Homo sapien
tcccctacgatgttctcctgatagt

SEQ ID NO: 121883 - DNA, 25 bp, Homo sapien
tggaatgtgcaagatgattctttgt

SEQ ID NO: 121884 - DNA, 25 bp, Homo sapien
tctgttggaatgtgcaagatgattc

SEQ ID NO: 121885 - DNA, 25 bp, Homo sapien
atgctgctacagtccgttctttctg

SEQ ID NO: 121886 - DNA, 25 bp, Homo sapien
tgactagccttcagggagggcatgc

SEQ ID NO: 121887 - DNA, 25 bp, Homo sapien
cacattgcatgttattggaggaaca

SEQ ID NO: 121888 - DNA, 25 bp, Homo sapien
cagacacattgcatgttattggagg

SEQ ID NO: 121889 - DNA, 25 bp, Homo sapien
gacacattgcatgttattggaggaa

SEQ ID NO: 121890 - DNA, 25 bp, Homo sapien
acacattgcatgttattggaggaac

SEQ ID NO: 121891 - DNA, 25 bp, Homo sapien
tgctttggactatttgattggtggc

SEQ ID NO: 121892 - DNA, 25 bp, Homo sapien
gggatcttaatcatctggacactga

SEQ ID NO: 121893 - DNA, 25 bp, Homo sapien
caggatgtcagagaagtagttaaca

SEQ ID NO: 121894 - DNA, 25 bp, Homo sapien
gatgaaccagttacacgtttgaaca

SEQ ID NO: 121895 - DNA, 25 bp, Homo sapien
cagactcgtactctgctctagtgtc

SEQ ID NO: 121896 - DNA, 25 bp, Homo sapien
ctcagactcgtactctgctctagtg

SEQ ID NO: 121897 - DNA, 25 bp, Homo sapien
cacctcagactcgtactctgctcta

SEQ ID NO: 121898 - DNA, 25 bp, Homo sapien
ctccacctcagactcgtactctgct

SEQ ID NO: 121899 - DNA, 25 bp, Homo sapien
gaaacttaaacgcttgtcctgccat

SEQ ID NO: 121900 - DNA, 25 bp, Homo sapien
tccaactttcacacgaactggttga

SEQ ID NO: 121901 - DNA, 25 bp, Homo sapien
ttggttacagtttcaacagcactcc

SEQ ID NO: 121902 - DNA, 25 bp, Homo sapien
ttcaacagcactcctttcaaccaat

SEQ ID NO: 121903 - DNA, 25 bp, Homo sapien
cagaacttcggtggaatgggcagct

SEQ ID NO: 121904 - DNA, 25 bp, Homo sapien
caatagtgacttatttcagtttacg

SEQ ID NO: 121905 - DNA, 25 bp, Homo sapien
tacgtactttccaagaacgtcacca

SEQ ID NO: 121906 - DNA, 25 bp, Homo sapien
atgttgatgccatttcaatagtgac

SEQ ID NO: 121907 - DNA, 25 bp, Homo sapien
gagtattcgtgagaattcttgaaac

SEQ ID NO: 121908 - DNA, 25 bp, Homo sapien
gggagtattcgtgagaattcttgaa

SEQ ID NO: 121909 - DNA, 25 bp, Homo sapien
ttgggagtattcgtgagaattcttg

SEQ ID NO: 121910 - DNA, 25 bp, Homo sapien
aatttgggagtattcgtgagaattc

SEQ ID NO: 121911 - DNA, 25 bp, Homo sapien
atgctaatctgtatcgtaccaattt

SEQ ID NO: 121912 - DNA, 25 bp, Homo sapien
catgctaatctgtatcgtaccaatt

SEQ ID NO: 121913 - DNA, 25 bp, Homo sapien
tcatgctaatctgtatcgtaccaat

SEQ ID NO: 121914 - DNA, 25 bp, Homo sapien
gcaatcagttgggataactcactgc

SEQ ID NO: 121915 - DNA, 25 bp, Homo sapien
agtggaacagggagtttgacctgta

SEQ ID NO: 121916 - DNA, 25 bp, Homo sapien
agaggggaagagtggaacagggagt

SEQ ID NO: 121917 - DNA, 25 bp, Homo sapien
ggaagagtggaacagggagtttgac

SEQ ID NO: 121918 - DNA, 25 bp, Homo sapien
cacgcccggctgcctggctactttt

SEQ ID NO: 121919 - DNA, 25 bp, Homo sapien
catctctgtggccttctgattttag

SEQ ID NO: 121920 - DNA, 25 bp, Homo sapien
ctctgtggccttctgattttagtat

SEQ ID NO: 121921 - DNA, 25 bp, Homo sapien
tcatctctgtggccttctgatttta

SEQ ID NO: 121922 - DNA, 25 bp, Homo sapien
tttcatgtcatccgtgtgcaagggc

SEQ ID NO: 121923 - DNA, 25 bp, Homo sapien
gtaaatcagtaccagcggatgcatc

SEQ ID NO: 121924 - DNA, 25 bp, Homo sapien
acgaggaaggcggaatccgccttat

SEQ ID NO: 121925 - DNA, 25 bp, Homo sapien
tcagtaccagcggatgcatccagtc

SEQ ID NO: 121926 - DNA, 25 bp, Homo sapien
cggaatccgccttattcttgccctt

SEQ ID NO: 121927 - DNA, 25 bp, Homo sapien
aaacgagcataagcttgtaatccca

SEQ ID NO: 121928 - DNA, 25 bp, Homo sapien
ttaaaatgctagctaatgaaaagca

SEQ ID NO: 121929 - DNA, 25 bp, Homo sapien
tcgatgatttacacccaatttcgct

SEQ ID NO: 121930 - DNA, 25 bp, Homo sapien
catagcgaatctctgtctacacaaa

SEQ ID NO: 121931 - DNA, 25 bp, Homo sapien
tgcagggcaccgcaaaccatgagga

SEQ ID NO: 121932 - DNA, 25 bp, Homo sapien
gaacatgcagggcaccgcaaaccat

SEQ ID NO: 121933 - DNA, 25 bp, Homo sapien
acatgcagggcaccgcaaaccatga

SEQ ID NO: 121934 - DNA, 25 bp, Homo sapien
agggcaccgcaaaccatgaggaaga

SEQ ID NO: 121935 - DNA, 25 bp, Homo sapien
aatttctctagtaacgaattacaga

SEQ ID NO: 121936 - DNA, 25 bp, Homo sapien
atttctctagtaacgaattacagaa

SEQ ID NO: 121937 - DNA, 25 bp, Homo sapien
cataagttctacagatctgctgagg

SEQ ID NO: 121938 - DNA, 25 bp, Homo sapien
aatcaggatactcattttttagtcc

SEQ ID NO: 121939 - DNA, 25 bp, Homo sapien
ttcaaatagtcctctttgtagttct

SEQ ID NO: 121940 - DNA, 25 bp, Homo sapien
gaaattccactagaaatacccatct

SEQ ID NO: 121941 - DNA, 25 bp, Homo sapien
ggaacccattctctttctcgtacat

SEQ ID NO: 121942 - DNA, 25 bp, Homo sapien
gagggaacccattctctttctcgta

SEQ ID NO: 121943 - DNA, 25 bp, Homo sapien
gggaacccattctctttctcgtaca

SEQ ID NO: 121944 - DNA, 25 bp, Homo sapien
tttgagggaacccattctctttctc

SEQ ID NO: 121945 - DNA, 25 bp, Homo sapien
aagatgctggtgccaaacctgtact

SEQ ID NO: 121946 - DNA, 25 bp, Homo sapien
aaaatgtttgcgttgaattctattc

SEQ ID NO: 121947 - DNA, 25 bp, Homo sapien
tgtgaaaatgtttgcgttgaattct

SEQ ID NO: 121948 - DNA, 25 bp, Homo sapien
gcgttgaattctattctttgtgaag

SEQ ID NO: 121949 - DNA, 25 bp, Homo sapien
caaggcatgtaggaaaatattggta

SEQ ID NO: 121950 - DNA, 25 bp, Homo sapien
tttctgtcctatgacagttctatgc

SEQ ID NO: 121951 - DNA, 25 bp, Homo sapien
tattggtacgttggaaaatgtgaaa

SEQ ID NO: 121952 - DNA, 25 bp, Homo sapien
atttgggcctatgctatcctgttga

SEQ ID NO: 121953 - DNA, 25 bp, Homo sapien
tccactagtgccattgataccaaga

SEQ ID NO: 121954 - DNA, 25 bp, Homo sapien
tcccttttatgatttgtgctcctag

SEQ ID NO: 121955 - DNA, 25 bp, Homo sapien
ttcacagccaacttttccactagtg

SEQ ID NO: 121956 - DNA, 25 bp, Homo sapien
tagtattccacggaaatttttctca

SEQ ID NO: 121957 - DNA, 25 bp, Homo sapien
gattcgcctgcctagtatatgctat

SEQ ID NO: 121958 - DNA, 25 bp, Homo sapien
cagttttcttatggtggcctcccag

SEQ ID NO: 121959 - DNA, 25 bp, Homo sapien
gaaactttgctcactgattcgcctg

SEQ ID NO: 121960 - DNA, 25 bp, Homo sapien
catacttggtgatcagaaactttgc

SEQ ID NO: 121961 - DNA, 25 bp, Homo sapien
tagcatccataggtctgttctttaa

SEQ ID NO: 121962 - DNA, 25 bp, Homo sapien
ttagcatccataggtctgttcttta

SEQ ID NO: 121963 - DNA, 25 bp, Homo sapien
tacttttggcacttttagtactatg

SEQ ID NO: 121964 - DNA, 25 bp, Homo sapien
gactgtttactggaacacattacta

SEQ ID NO: 121965 - DNA, 25 bp, Homo sapien
ctggaaatgtatgagagtatctggt

SEQ ID NO: 121966 - DNA, 25 bp, Homo sapien
taacgtaaaattgcctgtcataaag

SEQ ID NO: 121967 - DNA, 25 bp, Homo sapien
tttgctagtgtaatgacacagtgac

SEQ ID NO: 121968 - DNA, 25 bp, Homo sapien
tgagtcactgcaccctgcctgaatt

SEQ ID NO: 121969 - DNA, 25 bp, Homo sapien
actgcaccctgcctgaattttttta

SEQ ID NO: 121970 - DNA, 25 bp, Homo sapien
tgcaccctgcctgaatttttttaag

SEQ ID NO: 121971 - DNA, 25 bp, Homo sapien
gtcactgcaccctgcctgaattttt

SEQ ID NO: 121972 - DNA, 25 bp, Homo sapien
tgtttgggtcctctactctgtgaat

SEQ ID NO: 121973 - DNA, 25 bp, Homo sapien
gctgtttgggtcctctactctgtga

SEQ ID NO: 121974 - DNA, 25 bp, Homo sapien
agctgtttgggtcctctactctgtg

SEQ ID NO: 121975 - DNA, 25 bp, Homo sapien
ttgggtcctctactctgtgaattag

SEQ ID NO: 121976 - DNA, 25 bp, Homo sapien
ggagctgggcaacgaactcttctac

SEQ ID NO: 121977 - DNA, 25 bp, Homo sapien
tcgtggtcatctgggtgctggtcat

SEQ ID NO: 121978 - DNA, 25 bp, Homo sapien
ggaggtcttctacaactctgagtac

SEQ ID NO: 121979 - DNA, 25 bp, Homo sapien
ccgcccgtggtcaagttggaggtct

SEQ ID NO: 121980 - DNA, 25 bp, Homo sapien
ctgcgagggcggcagccaggggcgc

SEQ ID NO: 121981 - DNA, 25 bp, Homo sapien
gatgagaaagcggaggcgcctctcg

SEQ ID NO: 121982 - DNA, 25 bp, Homo sapien
ggaggcgcctctcgccggagaccct

SEQ ID NO: 121983 - DNA, 25 bp, Homo sapien
ggaggatgagaaagcggaggcgcct

SEQ ID NO: 121984 - DNA, 25 bp, Homo sapien
tgagaaagcggaggcgcctctcgcc

SEQ ID NO: 121985 - DNA, 25 bp, Homo sapien
gccgtctgcaggacccgcagaaagt

SEQ ID NO: 121986 - DNA, 25 bp, Homo sapien
cccgcagaaagtggcccgtttccag

SEQ ID NO: 121987 - DNA, 25 bp, Homo sapien
agctggttggccgtctgcaggaccc

SEQ ID NO: 121988 - DNA, 25 bp, Homo sapien
ggcccgtttccagcggctgtgcggg

SEQ ID NO: 121989 - DNA, 25 bp, Homo sapien
gcggggacagttcggggctgcgccg

SEQ ID NO: 121990 - DNA, 25 bp, Homo sapien
cggcagactccggagggtagagcgc

SEQ ID NO: 121991 - DNA, 25 bp, Homo sapien
agggtagagcgctgtgccggttccg

SEQ ID NO: 121992 - DNA, 25 bp, Homo sapien
ctccggagggtagagcgctgtgccg

SEQ ID NO: 121993 - DNA, 25 bp, Homo sapien
acttctggctgagggaatccggcga

SEQ ID NO: 121994 - DNA, 25 bp, Homo sapien
tccgaacatcagtcgcctgggacag

SEQ ID NO: 121995 - DNA, 25 bp, Homo sapien
tcaccatttggttctgtgccagcag

SEQ ID NO: 121996 - DNA, 25 bp, Homo sapien
caattggcacatggttttccgaaca

SEQ ID NO: 121997 - DNA, 25 bp, Homo sapien
ctggctttacaccttctttgaatat

SEQ ID NO: 121998 - DNA, 25 bp, Homo sapien
gctttacaccttctttgaatatatt

SEQ ID NO: 121999 - DNA, 25 bp, Homo sapien
tgaatatatttgtatctttttctca

SEQ ID NO: 122000 - DNA, 25 bp, Homo sapien
gaatatatttgtatctttttctcat

SEQ ID NO: 122001 - DNA, 25 bp, Homo sapien
cttcttctcctttttcttctgtctc

SEQ ID NO: 122002 - DNA, 25 bp, Homo sapien
ctaacataaaagacttcttctcctt

SEQ ID NO: 122003 - DNA, 25 bp, Homo sapien
gacttcttctcctttttcttctgtc

SEQ ID NO: 122004 - DNA, 25 bp, Homo sapien
aagacttcttctcctttttcttctg

SEQ ID NO: 122005 - DNA, 25 bp, Homo sapien
gtcatctcgatcatcaggagcatat

SEQ ID NO: 122006 - DNA, 25 bp, Homo sapien
agtcatctcgatcatcaggagcata

SEQ ID NO: 122007 - DNA, 25 bp, Homo sapien
tcatctcgatcatcaggagcatatt

SEQ ID NO: 122008 - DNA, 25 bp, Homo sapien
gctgattctcgaacattactttcaa

SEQ ID NO: 122009 - DNA, 25 bp, Homo sapien
ggttcagctgattctcgaacattac

SEQ ID NO: 122010 - DNA, 25 bp, Homo sapien
tctcgaacattactttcaatctgaa

SEQ ID NO: 122011 - DNA, 25 bp, Homo sapien
tcgaacattactttcaatctgaaga

SEQ ID NO: 122012 - DNA, 25 bp, Homo sapien
agttaataggtatctgtaaagttga

SEQ ID NO: 122013 - DNA, 25 bp, Homo sapien
gatgtaatagttaataggtatctgt

SEQ ID NO: 122014 - DNA, 25 bp, Homo sapien
gacgatgtaatagttaataggtatc

SEQ ID NO: 122015 - DNA, 25 bp, Homo sapien
taatagttaataggtatctgtaaag

SEQ ID NO: 122016 - DNA, 25 bp, Homo sapien
ttgtacccaattcagccaacgaaaa

SEQ ID NO: 122017 - DNA, 25 bp, Homo sapien
attcagccaacgaaaatgcaagatg

SEQ ID NO: 122018 - DNA, 25 bp, Homo sapien
caattcagccaacgaaaatgcaaga

SEQ ID NO: 122019 - DNA, 25 bp, Homo sapien
tcagccaacgaaaatgcaagatgtt

SEQ ID NO: 122020 - DNA, 25 bp, Homo sapien
ctttttttgattacaagttgattat

SEQ ID NO: 122021 - DNA, 25 bp, Homo sapien
tttttgattacaagttgattattac

SEQ ID NO: 122022 - DNA, 25 bp, Homo sapien
gcttgccagtgacaacctggaagcg

SEQ ID NO: 122023 - DNA, 25 bp, Homo sapien
catagcacgtttctctgatagttgt

SEQ ID NO: 122024 - DNA, 25 bp, Homo sapien
cagtgacaacctggaagcgggtttt

SEQ ID NO: 122025 - DNA, 25 bp, Homo sapien
tctggtgattgacatgtgtgacaag

SEQ ID NO: 122026 - DNA, 25 bp, Homo sapien
catgttttacccactagttttggca

SEQ ID NO: 122027 - DNA, 25 bp, Homo sapien
gcacatgcaaacaggcccgactaat

SEQ ID NO: 122028 - DNA, 25 bp, Homo sapien
cctggaatttggctggtaagagact

SEQ ID NO: 122029 - DNA, 25 bp, Homo sapien
taattcttatcaatacgggctcaca

SEQ ID NO: 122030 - DNA, 25 bp, Homo sapien
ggaggtcaggtctcaaaagttgtct

SEQ ID NO: 122031 - DNA, 25 bp, Homo sapien
ttatcgacagtagaaatggaactgc

SEQ ID NO: 122032 - DNA, 25 bp, Homo sapien
gcaccttcttagtggcatcactgga

SEQ ID NO: 122033 - DNA, 25 bp, Homo sapien
gacaacttttcaagagctaactcga

SEQ ID NO: 122034 - DNA, 25 bp, Homo sapien
aaccctggtaccatggtatttcagg

SEQ ID NO: 122035 - DNA, 25 bp, Homo sapien
tataagcctggagtagtagttcatg

SEQ ID NO: 122036 - DNA, 25 bp, Homo sapien
gatatgccgcacatggctggtgtcc

SEQ ID NO: 122037 - DNA, 25 bp, Homo sapien
ctgttgtccacaaattccatgtcca

SEQ ID NO: 122038 - DNA, 25 bp, Homo sapien
attgtggataatggagtggctcctg

SEQ ID NO: 122039 - DNA, 25 bp, Homo sapien
agagctggtcatgcccagtaccatg

SEQ ID NO: 122040 - DNA, 25 bp, Homo sapien
tattgggggcgagttccccagatag

SEQ ID NO: 122041 - DNA, 25 bp, Homo sapien
tcacccccggaagcctagctgtaaa

SEQ ID NO: 122042 - DNA, 25 bp, Homo sapien
ggggggcattatggtcctactgata

SEQ ID NO: 122043 - DNA, 25 bp, Homo sapien
tccccagatagtcaactttagttct

SEQ ID NO: 122044 - DNA, 25 bp, Homo sapien
gcatccttggaactgcgtcttgcag

SEQ ID NO: 122045 - DNA, 25 bp, Homo sapien
aactcactgcgaactgcatccttgg

SEQ ID NO: 122046 - DNA, 25 bp, Homo sapien
aggtctgaaaactcactgcgaactg

SEQ ID NO: 122047 - DNA, 25 bp, Homo sapien
gcgtcttgcaggtgccagtttgatt

SEQ ID NO: 122048 - DNA, 25 bp, Homo sapien
taatgcagataactgggttcctcct

SEQ ID NO: 122049 - DNA, 25 bp, Homo sapien
ttgttaatgcagataactgggttcc

SEQ ID NO: 122050 - DNA, 25 bp, Homo sapien
atgcagataactgggttcctccttc

SEQ ID NO: 122051 - DNA, 25 bp, Homo sapien
gttaatgcagataactgggttcctc

SEQ ID NO: 122052 - DNA, 25 bp, Homo sapien
caggagccacaagctccctcaaaaa

SEQ ID NO: 122053 - DNA, 25 bp, Homo sapien
cacccgtagattcctgggtcttgga

SEQ ID NO: 122054 - DNA, 25 bp, Homo sapien
ggtcttctccaacacccgtagattc

SEQ ID NO: 122055 - DNA, 25 bp, Homo sapien
gcgattagctaccagaccatgagca

SEQ ID NO: 122056 - DNA, 25 bp, Homo sapien
tgggcgcagctgagcgcgctccgct

SEQ ID NO: 122057 - DNA, 25 bp, Homo sapien
ctctcgctttttcaggtccggccga

SEQ ID NO: 122058 - DNA, 25 bp, Homo sapien
tggctctctggatcgcgccttttgc

SEQ ID NO: 122059 - DNA, 25 bp, Homo sapien
ggccgaaggctctgggcgcagctga

SEQ ID NO: 122060 - DNA, 25 bp, Homo sapien
aatcaaataaggcgctaatgttccc

SEQ ID NO: 122061 - DNA, 25 bp, Homo sapien
agcagcactgattccatacacagcc

SEQ ID NO: 122062 - DNA, 25 bp, Homo sapien
aataaggcgctaatgttcccagcag

SEQ ID NO: 122063 - DNA, 25 bp, Homo sapien
gttcccagcagcactgattccatac

SEQ ID NO: 122064 - DNA, 25 bp, Homo sapien
tcagacgctccctttcacggaggga

SEQ ID NO: 122065 - DNA, 25 bp, Homo sapien
tccacaaacgcgaatgctacacagg

SEQ ID NO: 122066 - DNA, 25 bp, Homo sapien
gcaggcttccacaaacgcgaatgct

SEQ ID NO: 122067 - DNA, 25 bp, Homo sapien
aacgcgaatgctacacaggacttct

SEQ ID NO: 122068 - DNA, 25 bp, Homo sapien
gactgtcttgtgcaccactatcgcc

SEQ ID NO: 122069 - DNA, 25 bp, Homo sapien
cacccagcacaatacattgtaggta

SEQ ID NO: 122070 - DNA, 25 bp, Homo sapien
ccacctagataagggcaggaatcac

SEQ ID NO: 122071 - DNA, 25 bp, Homo sapien
cacagtggctggtatatgtaggagt

SEQ ID NO: 122072 - DNA, 25 bp, Homo sapien
aaatctcaaagattgtctaatcctc

SEQ ID NO: 122073 - DNA, 25 bp, Homo sapien
tctatgcccatggttcacagtctgg

SEQ ID NO: 122074 - DNA, 25 bp, Homo sapien
tcacagtctggagcatgcatcagaa

SEQ ID NO: 122075 - DNA, 25 bp, Homo sapien
ccatatgcatagacttgaagagctg

SEQ ID NO: 122076 - DNA, 25 bp, Homo sapien
aacagaggaaagattcttactcaac

SEQ ID NO: 122077 - DNA, 25 bp, Homo sapien
gagcaagcttagtaacctattttct

SEQ ID NO: 122078 - DNA, 25 bp, Homo sapien
taaacaaagacgtattaacagagga

SEQ ID NO: 122079 - DNA, 25 bp, Homo sapien
ctacaaaggatattctaacaagagc

SEQ ID NO: 122080 - DNA, 25 bp, Homo sapien
tctcagaaaccatcaccaacagaga

SEQ ID NO: 122081 - DNA, 25 bp, Homo sapien
cttccagttctcagaaaccatcacc

SEQ ID NO: 122082 - DNA, 25 bp, Homo sapien
agttctcagaaaccatcaccaacag

SEQ ID NO: 122083 - DNA, 25 bp, Homo sapien
ttccagttctcagaaaccatcacca

SEQ ID NO: 122084 - DNA, 25 bp, Homo sapien
tactcaggaaaatgttgtggaatgc

SEQ ID NO: 122085 - DNA, 25 bp, Homo sapien
ttagtacctctcttagttggccagc

SEQ ID NO: 122086 - DNA, 25 bp, Homo sapien
tgttctaattgttcaccagcggaga

SEQ ID NO: 122087 - DNA, 25 bp, Homo sapien
tagtagtctgacatctcaagttcct

SEQ ID NO: 122088 - DNA, 25 bp, Homo sapien
ccttagtctcccaacacaggttcat

SEQ ID NO: 122089 - DNA, 25 bp, Homo sapien
accttagtctcccaacacaggttca

SEQ ID NO: 122090 - DNA, 25 bp, Homo sapien
caagtttgccagttaactgcaacag

SEQ ID NO: 122091 - DNA, 25 bp, Homo sapien
tgcatctcatttgttgctaaaccag

SEQ ID NO: 122092 - DNA, 25 bp, Homo sapien
taaatgctgttaggtcacctttcaa

SEQ ID NO: 122093 - DNA, 25 bp, Homo sapien
tttcaaatcaccaacatacctaggg

SEQ ID NO: 122094 - DNA, 25 bp, Homo sapien
gagccacagcgttcagtaggattta

SEQ ID NO: 122095 - DNA, 25 bp, Homo sapien
tcaagtcaccgttcactggaggaaa

SEQ ID NO: 122096 - DNA, 25 bp, Homo sapien
tggctattcccaagagagacaaggc

SEQ ID NO: 122097 - DNA, 25 bp, Homo sapien
cagtgaggaagcaatggtgccaacc

SEQ ID NO: 122098 - DNA, 25 bp, Homo sapien
taacggtcagaattcaagggatgga

SEQ ID NO: 122099 - DNA, 25 bp, Homo sapien
tatttatggtaacggtcagaattca

SEQ ID NO: 122100 - DNA, 25 bp, Homo sapien
gtcagaattcaagggatggagaccc

SEQ ID NO: 122101 - DNA, 25 bp, Homo sapien
gaattcaagggatggagaccctttg

SEQ ID NO: 122102 - DNA, 25 bp, Homo sapien
caaacccaacattctgggaagccaa

SEQ ID NO: 122103 - DNA, 25 bp, Homo sapien
gctcacacctacaaacccaacattc

SEQ ID NO: 122104 - DNA, 25 bp, Homo sapien
tctgctattacacaaggatctacgg

SEQ ID NO: 122105 - DNA, 25 bp, Homo sapien
tgcatcacagagcttgctagaaggc

SEQ ID NO: 122106 - DNA, 25 bp, Homo sapien
caaagcacgaccaataaactggaaa

SEQ ID NO: 122107 - DNA, 25 bp, Homo sapien
gctagaaggctcaaataattcacac

SEQ ID NO: 122108 - DNA, 25 bp, Homo sapien
tctccactgtggtctaccacagggc

SEQ ID NO: 122109 - DNA, 25 bp, Homo sapien
gaaggcttctgtagcagcgctggcc

SEQ ID NO: 122110 - DNA, 25 bp, Homo sapien
taccctcgatactccaggagggaaa

SEQ ID NO: 122111 - DNA, 25 bp, Homo sapien
gcgctggcctgctaagtctagaaat

SEQ ID NO: 122112 - DNA, 25 bp, Homo sapien
gtggacaactccaactgacccaggg

SEQ ID NO: 122113 - DNA, 25 bp, Homo sapien
gaatcgaagctctccttaaggcccc

SEQ ID NO: 122114 - DNA, 25 bp, Homo sapien
ttgacactctcacataggccctaag

SEQ ID NO: 122115 - DNA, 25 bp, Homo sapien
tacaaacacggccaaagaatcgaag

SEQ ID NO: 122116 - DNA, 25 bp, Homo sapien
tctcagagttgtcctaagttgggcc

SEQ ID NO: 122117 - DNA, 25 bp, Homo sapien
tttccagacctaagcacatcaaggg

SEQ ID NO: 122118 - DNA, 25 bp, Homo sapien
gcaccgagtctttctttgaagcgaa

SEQ ID NO: 122119 - DNA, 25 bp, Homo sapien
tggctaaagcggtcactcccaagag

SEQ ID NO: 122120 - DNA, 25 bp, Homo sapien
cagctctggccatttgggagttaaa

SEQ ID NO: 122121 - DNA, 25 bp, Homo sapien
gctgcaacaggcaatgcaagagtgc

SEQ ID NO: 122122 - DNA, 25 bp, Homo sapien
cacacagcgagtagtcaataaatgc

SEQ ID NO: 122123 - DNA, 25 bp, Homo sapien
tctcgatgaccctggtacctaaccg

SEQ ID NO: 122124 - DNA, 25 bp, Homo sapien
caagatgggatatagggtacctcac

SEQ ID NO: 122125 - DNA, 25 bp, Homo sapien
aatgtgcagtttgtatgttccaggc

SEQ ID NO: 122126 - DNA, 25 bp, Homo sapien
taatgcctgcattacatcttgatgg

SEQ ID NO: 122127 - DNA, 25 bp, Homo sapien
caggcactacactgggtagtcagca

SEQ ID NO: 122128 - DNA, 25 bp, Homo sapien
ttttattctaacatgagggcgtgag

SEQ ID NO: 122129 - DNA, 25 bp, Homo sapien
ccagttgagtgcttacgacttgcca

SEQ ID NO: 122130 - DNA, 25 bp, Homo sapien
tataagccttcaagttctgaccgcc

SEQ ID NO: 122131 - DNA, 25 bp, Homo sapien
ccactgaacctaggagggtacagga

SEQ ID NO: 122132 - DNA, 25 bp, Homo sapien
aaatgaccggaattcttagccatgg

SEQ ID NO: 122133 - DNA, 25 bp, Homo sapien
tagccatggaaaactgaattgactt

SEQ ID NO: 122134 - DNA, 25 bp, Homo sapien
catggtagccctagcctataggcca

SEQ ID NO: 122135 - DNA, 25 bp, Homo sapien
taacctcgggtcttcatgagtcaca

SEQ ID NO: 122136 - DNA, 25 bp, Homo sapien
gagtacagtgcacaatttcaactca

SEQ ID NO: 122137 - DNA, 25 bp, Homo sapien
ggagtacagtgcacaatttcaactc

SEQ ID NO: 122138 - DNA, 25 bp, Homo sapien
gactcaatggagattatatcatgtc

SEQ ID NO: 122139 - DNA, 25 bp, Homo sapien
tctttgactcaatggagattatatc

SEQ ID NO: 122140 - DNA, 25 bp, Homo sapien
ttgactcaatggagattatatcatg

SEQ ID NO: 122141 - DNA, 25 bp, Homo sapien
ctcaatggagattatatcatgtcca

SEQ ID NO: 122142 - DNA, 25 bp, Homo sapien
tggagatcgtcgatgccccaggaac

SEQ ID NO: 122143 - DNA, 25 bp, Homo sapien
cctgttcatcttcggtgggaagctc

SEQ ID NO: 122144 - DNA, 25 bp, Homo sapien
cttgcaatgaaatatggagatcgtc

SEQ ID NO: 122145 - DNA, 25 bp, Homo sapien
tgaaatatggagatcgtcgatgccc

SEQ ID NO: 122146 - DNA, 25 bp, Homo sapien
caacaaaggtagaaggtctagtggc

SEQ ID NO: 122147 - DNA, 25 bp, Homo sapien
taaatgtttcttactctacacaaag

SEQ ID NO: 122148 - DNA, 25 bp, Homo sapien
gaaaaggctgatatatacagatact

SEQ ID NO: 122149 - DNA, 25 bp, Homo sapien
tcagaatctatgactttgagtaaca

SEQ ID NO: 122150 - DNA, 25 bp, Homo sapien
gactgaccagtgcacgtatatcaca

SEQ ID NO: 122151 - DNA, 25 bp, Homo sapien
taacaatatggagcttaactttggg

SEQ ID NO: 122152 - DNA, 25 bp, Homo sapien
tcatttcgccgtaaagccttcatct

SEQ ID NO: 122153 - DNA, 25 bp, Homo sapien
tagtattggctttctaccagtcccc

SEQ ID NO: 122154 - DNA, 25 bp, Homo sapien
tcatatttgatgctatcttgcctca

SEQ ID NO: 122155 - DNA, 25 bp, Homo sapien
tgatgctatcttgcctcataaaaac

SEQ ID NO: 122156 - DNA, 25 bp, Homo sapien
tctttctatacctgagaagttctca

SEQ ID NO: 122157 - DNA, 25 bp, Homo sapien
actttcaaatagatcctccacctgc

SEQ ID NO: 122158 - DNA, 25 bp, Homo sapien
tcatagacacacttcactgcctgaa

SEQ ID NO: 122159 - DNA, 25 bp, Homo sapien
cctcttcctaagacttcacatggct

SEQ ID NO: 122160 - DNA, 25 bp, Homo sapien
ttataaggtagaacagagtcttctc

SEQ ID NO: 122161 - DNA, 25 bp, Homo sapien
aagcactattgagcccctaaacatc

SEQ ID NO: 122162 - DNA, 25 bp, Homo sapien
caaatttgccccctcatagctctgg

SEQ ID NO: 122163 - DNA, 25 bp, Homo sapien
tgccccctcatagctctggtatcta

SEQ ID NO: 122164 - DNA, 25 bp, Homo sapien
aatttgccccctcatagctctggta

SEQ ID NO: 122165 - DNA, 25 bp, Homo sapien
tttgccccctcatagctctggtatc

SEQ ID NO: 122166 - DNA, 25 bp, Homo sapien
tgtgagtttatccagcacgtgaagg

SEQ ID NO: 122167 - DNA, 25 bp, Homo sapien
ccaactgtgagtttatccagcacgt

SEQ ID NO: 122168 - DNA, 25 bp, Homo sapien
tgagtttatccagcacgtgaaggct

SEQ ID NO: 122169 - DNA, 25 bp, Homo sapien
ttatccagcacgtgaaggctttctt

SEQ ID NO: 122170 - DNA, 25 bp, Homo sapien
gtgaataggtcggatataactgagg

SEQ ID NO: 122171 - DNA, 25 bp, Homo sapien
aataggtcggatataactgagggag

SEQ ID NO: 122172 - DNA, 25 bp, Homo sapien
tgtctgtgaataggtcggatataac

SEQ ID NO: 122173 - DNA, 25 bp, Homo sapien
taatgtctgtgaataggtcggatat

SEQ ID NO: 122174 - DNA, 25 bp, Homo sapien
ttcttaggaatgtcaaggcatgttc

SEQ ID NO: 122175 - DNA, 25 bp, Homo sapien
gaatgtcaaggcatgttctatattg

SEQ ID NO: 122176 - DNA, 25 bp, Homo sapien
ttgattctacactggaaggtattag

SEQ ID NO: 122177 - DNA, 25 bp, Homo sapien
aggtattagatcctttatcccgagg

SEQ ID NO: 122178 - DNA, 25 bp, Homo sapien
ccaaattaggccaaggataatggat

SEQ ID NO: 122179 - DNA, 25 bp, Homo sapien
catcaatgatatcagtaacatgaat

SEQ ID NO: 122180 - DNA, 25 bp, Homo sapien
gcaggataattgtccaaattaggcc

SEQ ID NO: 122181 - DNA, 25 bp, Homo sapien
tggatgggtttccatcaatgatatc

SEQ ID NO: 122182 - DNA, 25 bp, Homo sapien
tgcaagaaagagtctgggcaagctt

SEQ ID NO: 122183 - DNA, 25 bp, Homo sapien
ggaaggctgattgtaattgcaagaa

SEQ ID NO: 122184 - DNA, 25 bp, Homo sapien
gcttgcactttagagcatttcttag

SEQ ID NO: 122185 - DNA, 25 bp, Homo sapien
gtcaaccacactcacatcatccagg

SEQ ID NO: 122186 - DNA, 25 bp, Homo sapien
ggcatgaatgatggccaaaaaagcc

SEQ ID NO: 122187 - DNA, 25 bp, Homo sapien
tcaattaggtctggtcgcaaggcat

SEQ ID NO: 122188 - DNA, 25 bp, Homo sapien
tgttctgcaattctgaaggcctctc

SEQ ID NO: 122189 - DNA, 25 bp, Homo sapien
ggatctatgcttcacactcttcatg

SEQ ID NO: 122190 - DNA, 25 bp, Homo sapien
cagaggttcagctttaactcagagg

SEQ ID NO: 122191 - DNA, 25 bp, Homo sapien
caagacaggctcaaattattcccaa

SEQ ID NO: 122192 - DNA, 25 bp, Homo sapien
gaatcaatgaccaaccacataggga

SEQ ID NO: 122193 - DNA, 25 bp, Homo sapien
tccaggactaaaatagagtgccact

SEQ ID NO: 122194 - DNA, 25 bp, Homo sapien
ttaaattataatttgatgatgatct

SEQ ID NO: 122195 - DNA, 25 bp, Homo sapien
gttaaattataatttgatgatgatc

SEQ ID NO: 122196 - DNA, 25 bp, Homo sapien
aaattataatttgatgatgatctct

SEQ ID NO: 122197 - DNA, 25 bp, Homo sapien
taaattataatttgatgatgatctc

SEQ ID NO: 122198 - DNA, 25 bp, Homo sapien
gattaagtgacaaatccacagtcac

SEQ ID NO: 122199 - DNA, 25 bp, Homo sapien
catcagctgaagagagttgactgct

SEQ ID NO: 122200 - DNA, 25 bp, Homo sapien
aagggcaggctgtatactagaaacc

SEQ ID NO: 122201 - DNA, 25 bp, Homo sapien
tgctggaactagctgactcacatca

SEQ ID NO: 122202 - DNA, 25 bp, Homo sapien
aatcacaaaagggtgaatgcaatat

SEQ ID NO: 122203 - DNA, 25 bp, Homo sapien
aaatcacaaaagggtgaatgcaata

SEQ ID NO: 122204 - DNA, 25 bp, Homo sapien
aaaatcacaaaagggtgaatgcaat

SEQ ID NO: 122205 - DNA, 25 bp, Homo sapien
taaaatcacaaaagggtgaatgcaa

SEQ ID NO: 122206 - DNA, 25 bp, Homo sapien
ccaggcatataaattctgtaaagtg

SEQ ID NO: 122207 - DNA, 25 bp, Homo sapien
gccaggcatataaattctgtaaagt

SEQ ID NO: 122208 - DNA, 25 bp, Homo sapien
caggcatataaattctgtaaagtgc

SEQ ID NO: 122209 - DNA, 25 bp, Homo sapien
ctggcctcaaacagtcctccaatct

SEQ ID NO: 122210 - DNA, 25 bp, Homo sapien
actcctggcctcaaacagtcctcca

SEQ ID NO: 122211 - DNA, 25 bp, Homo sapien
cctcaaacagtcctccaatctcagc

SEQ ID NO: 122212 - DNA, 25 bp, Homo sapien
tcctggcctcaaacagtcctccaat

SEQ ID NO: 122213 - DNA, 25 bp, Homo sapien
tgcagaaactgtgccacataggtca

SEQ ID NO: 122214 - DNA, 25 bp, Homo sapien
cagaaactgtgccacataggtcatg

SEQ ID NO: 122215 - DNA, 25 bp, Homo sapien
agtcccaggggcatctttggaatac

SEQ ID NO: 122216 - DNA, 25 bp, Homo sapien
tgatggacttttcatcaggatcaac

SEQ ID NO: 122217 - DNA, 25 bp, Homo sapien
ttaaccagcccatagcatctttcac

SEQ ID NO: 122218 - DNA, 25 bp, Homo sapien
cagagttaaccagcccatagcatct

SEQ ID NO: 122219 - DNA, 25 bp, Homo sapien
accagcccatagcatctttcacctt

SEQ ID NO: 122220 - DNA, 25 bp, Homo sapien
tgcagagttaaccagcccatagcat

SEQ ID NO: 122221 - DNA, 25 bp, Homo sapien
cgttttattgacaggacatccaaaa

SEQ ID NO: 122222 - DNA, 25 bp, Homo sapien
tgtaaatgatccttgtccagctcat

SEQ ID NO: 122223 - DNA, 25 bp, Homo sapien
agctcatccagatcccgttttattg

SEQ ID NO: 122224 - DNA, 25 bp, Homo sapien
cattgaatgactccataaaggacag

SEQ ID NO: 122225 - DNA, 25 bp, Homo sapien
gggaggctgacaaatcttcatccat

SEQ ID NO: 122226 - DNA, 25 bp, Homo sapien
gggcaaggcataatttagctttatt

SEQ ID NO: 122227 - DNA, 25 bp, Homo sapien
attttctcttgtatcagagtcacgg

SEQ ID NO: 122228 - DNA, 25 bp, Homo sapien
tcacggcttgagagtgatcctggga

SEQ ID NO: 122229 - DNA, 25 bp, Homo sapien
tcctccaatttgttaggtggtacca

SEQ ID NO: 122230 - DNA, 25 bp, Homo sapien
gtaccaatggcaagtgattttcatc

SEQ ID NO: 122231 - DNA, 25 bp, Homo sapien
caaaggtaaggagaatgttcgaatg

SEQ ID NO: 122232 - DNA, 25 bp, Homo sapien
gtaaggagaatgttcgaatgatgct

SEQ ID NO: 122233 - DNA, 25 bp, Homo sapien
aaaccaagaactaagcacttgtagt

SEQ ID NO: 122234 - DNA, 25 bp, Homo sapien
tccaaatatccaattttgatttcac

SEQ ID NO: 122235 - DNA, 25 bp, Homo sapien
tgtagtaatgaaattctagaagtag

SEQ ID NO: 122236 - DNA, 25 bp, Homo sapien
cagattctctgctcccatatttaat

SEQ ID NO: 122237 - DNA, 25 bp, Homo sapien
aaagaagtatcaagtcgagctagga

SEQ ID NO: 122238 - DNA, 25 bp, Homo sapien
caagtcgagctaggaattctttttc

SEQ ID NO: 122239 - DNA, 25 bp, Homo sapien
atcaagtcgagctaggaattctttt

SEQ ID NO: 122240 - DNA, 25 bp, Homo sapien
tgaaaagaagtatcaagtcgagcta

SEQ ID NO: 122241 - DNA, 25 bp, Homo sapien
gacagtcattccatcagaaagtaac

SEQ ID NO: 122242 - DNA, 25 bp, Homo sapien
tcagaaagtaactgaaccactttac

SEQ ID NO: 122243 - DNA, 25 bp, Homo sapien
gtgacagtcattccatcagaaagta

SEQ ID NO: 122244 - DNA, 25 bp, Homo sapien
aagtgacagtcattccatcagaaag

SEQ ID NO: 122245 - DNA, 25 bp, Homo sapien
tatttgcatattaattgacagcggc

SEQ ID NO: 122246 - DNA, 25 bp, Homo sapien
aagtgaaagcaagaattttcccagg

SEQ ID NO: 122247 - DNA, 25 bp, Homo sapien
ctctgacaatattaaaagtgaaagc

SEQ ID NO: 122248 - DNA, 25 bp, Homo sapien
attgacagcggcaaaataatatgta

SEQ ID NO: 122249 - DNA, 25 bp, Homo sapien
taagtagcccaacatgccagcactt

SEQ ID NO: 122250 - DNA, 25 bp, Homo sapien
tttcaccatcatatactgtttatta

SEQ ID NO: 122251 - DNA, 25 bp, Homo sapien
agtaagcgaaggttttccacataag

SEQ ID NO: 122252 - DNA, 25 bp, Homo sapien
tcaaagcaagcccttagtaagcgaa

SEQ ID NO: 122253 - DNA, 25 bp, Homo sapien
gagctgaaaggtttcaaccaaatgg

SEQ ID NO: 122254 - DNA, 25 bp, Homo sapien
ccacacctctacacataagttacgg

SEQ ID NO: 122255 - DNA, 25 bp, Homo sapien
tgtgtctataagctagccagtacat

SEQ ID NO: 122256 - DNA, 25 bp, Homo sapien
tatctatagccatctgcaacagaga

SEQ ID NO: 122257 - DNA, 25 bp, Homo sapien
gatgaacttacagcagtggtttcca

SEQ ID NO: 122258 - DNA, 25 bp, Homo sapien
tttttcggagagtccctagaccaga

SEQ ID NO: 122259 - DNA, 25 bp, Homo sapien
gaggagtctgccatccctgttggtc

SEQ ID NO: 122260 - DNA, 25 bp, Homo sapien
tcttaagtgctaactggcaaatgcc

SEQ ID NO: 122261 - DNA, 25 bp, Homo sapien
tcagccttctcagttctttagaaat

SEQ ID NO: 122262 - DNA, 25 bp, Homo sapien
tgacttcgactaagaaatttcctgc

SEQ ID NO: 122263 - DNA, 25 bp, Homo sapien
taaagtagcgtgttctagattccac

SEQ ID NO: 122264 - DNA, 25 bp, Homo sapien
actgggctagtgtctcaaagggtac

SEQ ID NO: 122265 - DNA, 25 bp, Homo sapien
tctcttctttagatagaatatttcc

SEQ ID NO: 122266 - DNA, 25 bp, Homo sapien
taattttcaggaagttctactgaca

SEQ ID NO: 122267 - DNA, 25 bp, Homo sapien
ctactgacatatctgttgaaaactc

SEQ ID NO: 122268 - DNA, 25 bp, Homo sapien
agaattgtcaaaagtgggctgatcc

SEQ ID NO: 122269 - DNA, 25 bp, Homo sapien
tccattgaggtgtccacatcatctt

SEQ ID NO: 122270 - DNA, 25 bp, Homo sapien
ctttagccacttttagttgccctgt

SEQ ID NO: 122271 - DNA, 25 bp, Homo sapien
ccattgaggtgtccacatcatcttg

SEQ ID NO: 122272 - DNA, 25 bp, Homo sapien
cattgaggtgtccacatcatcttga

SEQ ID NO: 122273 - DNA, 25 bp, Homo sapien
agaacatgttgaaaggactcctggc

SEQ ID NO: 122274 - DNA, 25 bp, Homo sapien
tctttgcctgaagcccagttgtgag

SEQ ID NO: 122275 - DNA, 25 bp, Homo sapien
tcacttcttgccataagctcatcaa

SEQ ID NO: 122276 - DNA, 25 bp, Homo sapien
caaacatagagcctttggcaataag

SEQ ID NO: 122277 - DNA, 25 bp, Homo sapien
tcttcagcctgatgtccaaatctgg

SEQ ID NO: 122278 - DNA, 25 bp, Homo sapien
taagttcttcaacgctgcaatgagt

SEQ ID NO: 122279 - DNA, 25 bp, Homo sapien
tatatgattcaagttccttctggga

SEQ ID NO: 122280 - DNA, 25 bp, Homo sapien
tggtgaaacgtcagttaagttcttc

SEQ ID NO: 122281 - DNA, 25 bp, Homo sapien
tgaagagagactcctatagggcgcc

SEQ ID NO: 122282 - DNA, 25 bp, Homo sapien
gccccagcgtggttagcaaatccag

SEQ ID NO: 122283 - DNA, 25 bp, Homo sapien
tccagtaggccaaaacagggttgag

SEQ ID NO: 122284 - DNA, 25 bp, Homo sapien
caaacggcgtgagatcaagcagaca

SEQ ID NO: 122285 - DNA, 25 bp, Homo sapien
caaatacttggccagactttttgta

SEQ ID NO: 122286 - DNA, 25 bp, Homo sapien
tggccagactttttgtattagaaat

SEQ ID NO: 122287 - DNA, 25 bp, Homo sapien
agctttcaaatacttggccagactt

SEQ ID NO: 122288 - DNA, 25 bp, Homo sapien
ggcacagacatctctactcttttct

SEQ ID NO: 122289 - DNA, 25 bp, Homo sapien
tttgatgagacccttggtccttcct

SEQ ID NO: 122290 - DNA, 25 bp, Homo sapien
ctcatgttctttgatgagacccttg

SEQ ID NO: 122291 - DNA, 25 bp, Homo sapien
ttaaaatattgtcactaagctttcc

SEQ ID NO: 122292 - DNA, 25 bp, Homo sapien
catataaagacagttcatgatgaag

SEQ ID NO: 122293 - DNA, 25 bp, Homo sapien
cctgatttgctcgttttctcaaaag

SEQ ID NO: 122294 - DNA, 25 bp, Homo sapien
caaaagccaactgtgggtactttag

SEQ ID NO: 122295 - DNA, 25 bp, Homo sapien
tgtcctgacaaaagccaactgtggg

SEQ ID NO: 122296 - DNA, 25 bp, Homo sapien
tgatttgctcgttttctcaaaagct

SEQ ID NO: 122297 - DNA, 25 bp, Homo sapien
gactcttctgtgaaggcagctcttc

SEQ ID NO: 122298 - DNA, 25 bp, Homo sapien
cagtgtcatatgaatctcggaagca

SEQ ID NO: 122299 - DNA, 25 bp, Homo sapien
ggtgattaagctggtacaggcagcc

SEQ ID NO: 122300 - DNA, 25 bp, Homo sapien
gtttttcgacgtgcctcccgctgtg

SEQ ID NO: 122301 - DNA, 25 bp, Homo sapien
gggatcccctcctctattctcagat

SEQ ID NO: 122302 - DNA, 25 bp, Homo sapien
ttgatggctgattatctgattttgc

SEQ ID NO: 122303 - DNA, 25 bp, Homo sapien
ttatctgattttgcaaatggtgcct

SEQ ID NO: 122304 - DNA, 25 bp, Homo sapien
gtggggatcccctcctctattctca

SEQ ID NO: 122305 - DNA, 25 bp, Homo sapien
ggccttaacactgatgccaggctaa

SEQ ID NO: 122306 - DNA, 25 bp, Homo sapien
ttatagatgcactgtaatccttttc

SEQ ID NO: 122307 - DNA, 25 bp, Homo sapien
tctagtaaactatttatagatgcac

SEQ ID NO: 122308 - DNA, 25 bp, Homo sapien
taaacttcatagtgggttccattgc

SEQ ID NO: 122309 - DNA, 25 bp, Homo sapien
ttgttttgcaggtggtgttcaagaa

SEQ ID NO: 122310 - DNA, 25 bp, Homo sapien
ggtgttcaagaatatctctgtatgt

SEQ ID NO: 122311 - DNA, 25 bp, Homo sapien
tgttgttttgcaggtggtgttcaag

SEQ ID NO: 122312 - DNA, 25 bp, Homo sapien
gtgttcaagaatatctctgtatgta

SEQ ID NO: 122313 - DNA, 25 bp, Homo sapien
ttcactagagaaatcagaagtaatc

SEQ ID NO: 122314 - DNA, 25 bp, Homo sapien
tagcctgcagacaagaactactcct

SEQ ID NO: 122315 - DNA, 25 bp, Homo sapien
tcctcttcactagagaaatcagaag

SEQ ID NO: 122316 - DNA, 25 bp, Homo sapien
agatctgtcagtttagcctgcagac

SEQ ID NO: 122317 - DNA, 25 bp, Homo sapien
tgattttctaacttcaatgaaataa

SEQ ID NO: 122318 - DNA, 25 bp, Homo sapien
caaactctttccagcgagcatcagt

SEQ ID NO: 122319 - DNA, 25 bp, Homo sapien
ctggtattaagagtcatctgaagct

SEQ ID NO: 122320 - DNA, 25 bp, Homo sapien
taagagtcatctgaagctctctttc

SEQ ID NO: 122321 - DNA, 25 bp, Homo sapien
tacaggtaacacaagccgcagtgct

SEQ ID NO: 122322 - DNA, 25 bp, Homo sapien
tcagcatcaatgagatgaaatccct

SEQ ID NO: 122323 - DNA, 25 bp, Homo sapien
ccttaggtgttgatagatgcgatca

SEQ ID NO: 122324 - DNA, 25 bp, Homo sapien
tggccattttatggagaggcaggtc

SEQ ID NO: 122325 - DNA, 25 bp, Homo sapien
tgaaaggtctgtaacgggctcagca

SEQ ID NO: 122326 - DNA, 25 bp, Homo sapien
gttttcacaggaggtgtcatcaccc

SEQ ID NO: 122327 - DNA, 25 bp, Homo sapien
aaagttgcctggctcttctaagcgg

SEQ ID NO: 122328 - DNA, 25 bp, Homo sapien
tagctgttctgagagacgccaaaaa

SEQ ID NO: 122329 - DNA, 25 bp, Homo sapien
aacagtaggatccttaagaccaatt

SEQ ID NO: 122330 - DNA, 25 bp, Homo sapien
cagtaggatccttaagaccaatttt

SEQ ID NO: 122331 - DNA, 25 bp, Homo sapien
ggatccttaagaccaattttactga

SEQ ID NO: 122332 - DNA, 25 bp, Homo sapien
caattttactgatttgactctgcac

SEQ ID NO: 122333 - DNA, 25 bp, Homo sapien
taatatcacagcgtggagtctgcca

SEQ ID NO: 122334 - DNA, 25 bp, Homo sapien
tgaaggccctattccaaatgctgga

SEQ ID NO: 122335 - DNA, 25 bp, Homo sapien
gcaggtatacagaaggctgccaacc

SEQ ID NO: 122336 - DNA, 25 bp, Homo sapien
gaattccacaaaagcgactgttgct

SEQ ID NO: 122337 - DNA, 25 bp, Homo sapien
gcatgccgtggtgggataccctaag

SEQ ID NO: 122338 - DNA, 25 bp, Homo sapien
gcatttcagagggaaaggcacactt

SEQ ID NO: 122339 - DNA, 25 bp, Homo sapien
taaagaccctcaagagaccactgag

SEQ ID NO: 122340 - DNA, 25 bp, Homo sapien
gcacacttggctacactgagggctt

SEQ ID NO: 122341 - DNA, 25 bp, Homo sapien
ggtattctcccacaagactactgta

SEQ ID NO: 122342 - DNA, 25 bp, Homo sapien
cattcggtgaccaaggctttggtat

SEQ ID NO: 122343 - DNA, 25 bp, Homo sapien
agtgtggaagagaattagccatttc

SEQ ID NO: 122344 - DNA, 25 bp, Homo sapien
gactactgtattttggcactgttga

SEQ ID NO: 122345 - DNA, 25 bp, Homo sapien
actgtgcctggccttttatatatct

SEQ ID NO: 122346 - DNA, 25 bp, Homo sapien
tcccatgtacgaagcctgcagggag

SEQ ID NO: 122347 - DNA, 25 bp, Homo sapien
ctttcccatgtacgaagcctgcagg

SEQ ID NO: 122348 - DNA, 25 bp, Homo sapien
tcctttcccatgtacgaagcctgca

SEQ ID NO: 122349 - DNA, 25 bp, Homo sapien
tttcccatgtacgaagcctgcaggg

SEQ ID NO: 122350 - DNA, 25 bp, Homo sapien
agccccagcatcaaaacccaaacag

SEQ ID NO: 122351 - DNA, 25 bp, Homo sapien
cccaccatcaacttggtgactgttt

SEQ ID NO: 122352 - DNA, 25 bp, Homo sapien
caaacagaagtgacccaccatcaac

SEQ ID NO: 122353 - DNA, 25 bp, Homo sapien
aacccaaacagaagtgacccaccat

SEQ ID NO: 122354 - DNA, 25 bp, Homo sapien
ccaacaaagcataataccttcttac

SEQ ID NO: 122355 - DNA, 25 bp, Homo sapien
aagtttttagcatcctaaccattgg

SEQ ID NO: 122356 - DNA, 25 bp, Homo sapien
gacaaacagctaagaatcacaattc

SEQ ID NO: 122357 - DNA, 25 bp, Homo sapien
cattggttcaatgttaaccctatac

SEQ ID NO: 122358 - DNA, 25 bp, Homo sapien
aattgtagatttttgcagacctggt

SEQ ID NO: 122359 - DNA, 25 bp, Homo sapien
gacctggtttatcttgtctacaact

SEQ ID NO: 122360 - DNA, 25 bp, Homo sapien
cacaataatattagcctctttttca

SEQ ID NO: 122361 - DNA, 25 bp, Homo sapien
tcaagccatctatccacaataatat

SEQ ID NO: 122362 - DNA, 25 bp, Homo sapien
tctgtccactcatcaatgacatttt

SEQ ID NO: 122363 - DNA, 25 bp, Homo sapien
gctcgaccaagattttcatagtaat

SEQ ID NO: 122364 - DNA, 25 bp, Homo sapien
aagtttgtcccacaaagctagagct

SEQ ID NO: 122365 - DNA, 25 bp, Homo sapien
tcttcagtcaattgatgtaattcca

SEQ ID NO: 122366 - DNA, 25 bp, Homo sapien
tttcactgctttggagcaaaaactg

SEQ ID NO: 122367 - DNA, 25 bp, Homo sapien
ggtatttcactgctttggagcaaaa

SEQ ID NO: 122368 - DNA, 25 bp, Homo sapien
tgcaattcaagaggtatttcactgc

SEQ ID NO: 122369 - DNA, 25 bp, Homo sapien
ctgcaattcaagaggtatttcactg

SEQ ID NO: 122370 - DNA, 25 bp, Homo sapien
gtacatgttccatcttgttcaaaat

SEQ ID NO: 122371 - DNA, 25 bp, Homo sapien
gatcctcccttagctcagcagtgct

SEQ ID NO: 122372 - DNA, 25 bp, Homo sapien
cagtcatcccgatctgggtcttggc

SEQ ID NO: 122373 - DNA, 25 bp, Homo sapien
taagagggattcagtcatcccgatc

SEQ ID NO: 122374 - DNA, 25 bp, Homo sapien
tcttggcttggtcgagatcctccct

SEQ ID NO: 122375 - DNA, 25 bp, Homo sapien
tttcaattcagagagttcaggagtc

SEQ ID NO: 122376 - DNA, 25 bp, Homo sapien
cttagaaaagtgatcttgcaaaaca

SEQ ID NO: 122377 - DNA, 25 bp, Homo sapien
gagtcagacaacctatttgattctc

SEQ ID NO: 122378 - DNA, 25 bp, Homo sapien
gattctcaagtaatatcatactgtg

SEQ ID NO: 122379 - DNA, 25 bp, Homo sapien
ccttaaggttcactttaatgttgct

SEQ ID NO: 122380 - DNA, 25 bp, Homo sapien
ttttgtagcttttgttccacactct

SEQ ID NO: 122381 - DNA, 25 bp, Homo sapien
aatgttgctgaaccagtcattaaag

SEQ ID NO: 122382 - DNA, 25 bp, Homo sapien
ccagtcattaaagttcttgcattga

SEQ ID NO: 122383 - DNA, 25 bp, Homo sapien
gatagtctaccctaaagtgatcaag

SEQ ID NO: 122384 - DNA, 25 bp, Homo sapien
gatcaagattttagggtaccacagg

SEQ ID NO: 122385 - DNA, 25 bp, Homo sapien
ttaccaaagttcgagacccaggctg

SEQ ID NO: 122386 - DNA, 25 bp, Homo sapien
gcaagtctgaatgtggtctctgcca

SEQ ID NO: 122387 - DNA, 25 bp, Homo sapien
tcgagcctggcatatggactccatt

SEQ ID NO: 122388 - DNA, 25 bp, Homo sapien
tgacccacgagccaactgataagct

SEQ ID NO: 122389 - DNA, 25 bp, Homo sapien
taagctccttcacatgtgctttggg

SEQ ID NO: 122390 - DNA, 25 bp, Homo sapien
gtagctgctgcaaggagtcttcaag

SEQ ID NO: 122391 - DNA, 25 bp, Homo sapien
cttgattagtcaaccacttcctcag

SEQ ID NO: 122392 - DNA, 25 bp, Homo sapien
tctttctagctaaagcttggcagaa

SEQ ID NO: 122393 - DNA, 25 bp, Homo sapien
tagctaaagcttggcagaacagctc

SEQ ID NO: 122394 - DNA, 25 bp, Homo sapien
tcaggtttctatggtcatcctggag

SEQ ID NO: 122395 - DNA, 25 bp, Homo sapien
ggtatctatccatcaaacatgttgc

SEQ ID NO: 122396 - DNA, 25 bp, Homo sapien
caaagagttgttcaattgggccaca

SEQ ID NO: 122397 - DNA, 25 bp, Homo sapien
tgtgggtagtaacttatcctcttcc

SEQ ID NO: 122398 - DNA, 25 bp, Homo sapien
catgtgcaagatcattaaagctctg

SEQ ID NO: 122399 - DNA, 25 bp, Homo sapien
taaatggagtgtgttgtcccactgg

SEQ ID NO: 122400 - DNA, 25 bp, Homo sapien
ccccttcaggcttcagcaaaatgat

SEQ ID NO: 122401 - DNA, 25 bp, Homo sapien
taggtaggtgctagctaaatggagt

SEQ ID NO: 122402 - DNA, 25 bp, Homo sapien
gatggtctctattctggcatcccct

SEQ ID NO: 122403 - DNA, 25 bp, Homo sapien
tatgagcattaatctcagatcctcc

SEQ ID NO: 122404 - DNA, 25 bp, Homo sapien
cagaccatgttgtagagcaaagcct

SEQ ID NO: 122405 - DNA, 25 bp, Homo sapien
cctttagcaaggatgtcaaatcttg

SEQ ID NO: 122406 - DNA, 25 bp, Homo sapien
ctgggatttttagtgcactccaaga

SEQ ID NO: 122407 - DNA, 25 bp, Homo sapien
ttccagccaaggctcttcactgaag

SEQ ID NO: 122408 - DNA, 25 bp, Homo sapien
agttgttgaagaagactttcgtgta

SEQ ID NO: 122409 - DNA, 25 bp, Homo sapien
gaagactttcgtgtagatgctttat

SEQ ID NO: 122410 - DNA, 25 bp, Homo sapien
tatttccagccaaggctcttcactg

SEQ ID NO: 122411 - DNA, 25 bp, Homo sapien
tgacgcaaacctggtatgaatcatg

SEQ ID NO: 122412 - DNA, 25 bp, Homo sapien
gaacgtgaccgtccaagttttgcac

SEQ ID NO: 122413 - DNA, 25 bp, Homo sapien
gatccacaggcttatcagaaaaact

SEQ ID NO: 122414 - DNA, 25 bp, Homo sapien
tagtattcaggtctgtgacgcaaac

SEQ ID NO: 122415 - DNA, 25 bp, Homo sapien
tgcagctgattcctgagtagactcc

SEQ ID NO: 122416 - DNA, 25 bp, Homo sapien
ctgccccactgaagatgtattttgc

SEQ ID NO: 122417 - DNA, 25 bp, Homo sapien
tagactcctgcacatcagaagtggc

SEQ ID NO: 122418 - DNA, 25 bp, Homo sapien
tctcctgcttagcagatgcaagcct

SEQ ID NO: 122419 - DNA, 25 bp, Homo sapien
gctaacaattacgtcaatgataagg

SEQ ID NO: 122420 - DNA, 25 bp, Homo sapien
caatgataaggaaatcaaagaagta

SEQ ID NO: 122421 - DNA, 25 bp, Homo sapien
caattacgtcaatgataaggaaatc

SEQ ID NO: 122422 - DNA, 25 bp, Homo sapien
agaaatgctaacaattacgtcaatg

SEQ ID NO: 122423 - DNA, 25 bp, Homo sapien
tcttaaacatcaaattagaaatgct

SEQ ID NO: 122424 - DNA, 25 bp, Homo sapien
taaacatcaaattagaaatgctcag

SEQ ID NO: 122425 - DNA, 25 bp, Homo sapien
ttatctacaaatgccttcttaaaca

SEQ ID NO: 122426 - DNA, 25 bp, Homo sapien
cttccaagatttatctacaaatgcc

SEQ ID NO: 122427 - DNA, 25 bp, Homo sapien
tagacataatttaccccaggattga

SEQ ID NO: 122428 - DNA, 25 bp, Homo sapien
gactccaggctttgttccgggtcac

SEQ ID NO: 122429 - DNA, 25 bp, Homo sapien
ggattgaaaactctccagtaagtag

SEQ ID NO: 122430 - DNA, 25 bp, Homo sapien
actcacccacagctagagctttgca

SEQ ID NO: 122431 - DNA, 25 bp, Homo sapien
agagatcgggtcttctatgctgctc

SEQ ID NO: 122432 - DNA, 25 bp, Homo sapien
tctagagatcgggtcttctatgctg

SEQ ID NO: 122433 - DNA, 25 bp, Homo sapien
gcctgagctactcttcatatgttca

SEQ ID NO: 122434 - DNA, 25 bp, Homo sapien
cacctggcctgagctactcttcata

SEQ ID NO: 122435 - DNA, 25 bp, Homo sapien
aggaataaatcacatcttaggtgga

SEQ ID NO: 122436 - DNA, 25 bp, Homo sapien
gaggaataaatcacatcttaggtgg

SEQ ID NO: 122437 - DNA, 25 bp, Homo sapien
ggaataaatcacatcttaggtggat

SEQ ID NO: 122438 - DNA, 25 bp, Homo sapien
ggaggaataaatcacatcttaggtg

SEQ ID NO: 122439 - DNA, 25 bp, Homo sapien
cattggtcaattgtatactgaagca

SEQ ID NO: 122440 - DNA, 25 bp, Homo sapien
gtgtatgctttagtgttcaccagga

SEQ ID NO: 122441 - DNA, 25 bp, Homo sapien
tatatttgggcactacgaaagatga

SEQ ID NO: 122442 - DNA, 25 bp, Homo sapien
ttcaccaggatacagtgggcagggc

SEQ ID NO: 122443 - DNA, 25 bp, Homo sapien
aaggttgattttgcagctcattgac

SEQ ID NO: 122444 - DNA, 25 bp, Homo sapien
tctaaaggttgattttgcagctcat

SEQ ID NO: 122445 - DNA, 25 bp, Homo sapien
agttgttttgacatagccatttcca

SEQ ID NO: 122446 - DNA, 25 bp, Homo sapien
gcagctcattgactttccgctcatc

SEQ ID NO: 122447 - DNA, 25 bp, Homo sapien
taaatgatgcaatcatgttgtcagt

SEQ ID NO: 122448 - DNA, 25 bp, Homo sapien
gatgcaatcatgttgtcagtgtttt

SEQ ID NO: 122449 - DNA, 25 bp, Homo sapien
tattgtattgcactggataaatgat

SEQ ID NO: 122450 - DNA, 25 bp, Homo sapien
cactggataaatgatgcaatcatgt

SEQ ID NO: 122451 - DNA, 25 bp, Homo sapien
tactttacaagctggaagcacataa

SEQ ID NO: 122452 - DNA, 25 bp, Homo sapien
gagctaccacatccctaatatttaa

SEQ ID NO: 122453 - DNA, 25 bp, Homo sapien
aagagttctgcaatatctaaaggga

SEQ ID NO: 122454 - DNA, 25 bp, Homo sapien
caaattgatcatcaggcaaaggtta

SEQ ID NO: 122455 - DNA, 25 bp, Homo sapien
tgtccaaatgctgtgccgaatatcc

SEQ ID NO: 122456 - DNA, 25 bp, Homo sapien
aataagtgcctgaagcaaattgtcc

SEQ ID NO: 122457 - DNA, 25 bp, Homo sapien
tgttccagtggcttaatggctgctt

SEQ ID NO: 122458 - DNA, 25 bp, Homo sapien
caactgcagcaaggtattcctgaaa

SEQ ID NO: 122459 - DNA, 25 bp, Homo sapien
ggtcagtggtcaaggcaatcatgct

SEQ ID NO: 122460 - DNA, 25 bp, Homo sapien
ccttaactgtagatgttgctgctgc

SEQ ID NO: 122461 - DNA, 25 bp, Homo sapien
tccagatacgttacactgtccagtg

SEQ ID NO: 122462 - DNA, 25 bp, Homo sapien
ggttccctgcccgttcttctggaga

SEQ ID NO: 122463 - DNA, 25 bp, Homo sapien
tgttttagttcagcttccgtggcag

SEQ ID NO: 122464 - DNA, 25 bp, Homo sapien
tattgattccgtaagtcctctaggg

SEQ ID NO: 122465 - DNA, 25 bp, Homo sapien
gaatggagggattaagttcacccaa

SEQ ID NO: 122466 - DNA, 25 bp, Homo sapien
gctgcctagctagaatgccatcatg

SEQ ID NO: 122467 - DNA, 25 bp, Homo sapien
tctgctttccggagagctatcagga

SEQ ID NO: 122468 - DNA, 25 bp, Homo sapien
taagatgcaacacttaatagcggtg

SEQ ID NO: 122469 - DNA, 25 bp, Homo sapien
aaaatttgggcattgagccgtctgc

SEQ ID NO: 122470 - DNA, 25 bp, Homo sapien
agttcattgcgctgtatactgtcag

SEQ ID NO: 122471 - DNA, 25 bp, Homo sapien
cattcttaagttttcgtggtacata

SEQ ID NO: 122472 - DNA, 25 bp, Homo sapien
cgtggtacatagataatatgtctct

SEQ ID NO: 122473 - DNA, 25 bp, Homo sapien
gtcattcttaagttttcgtggtaca

SEQ ID NO: 122474 - DNA, 25 bp, Homo sapien
taagttttcgtggtacatagataat

SEQ ID NO: 122475 - DNA, 25 bp, Homo sapien
gcttcgagggaagtgatgctctcca

SEQ ID NO: 122476 - DNA, 25 bp, Homo sapien
cagtgaggtcctggatgtgtgctac

SEQ ID NO: 122477 - DNA, 25 bp, Homo sapien
tcttgttttcgaagaggcatctcta

SEQ ID NO: 122478 - DNA, 25 bp, Homo sapien
gaaagcttccttcattgctgagttc

SEQ ID NO: 122479 - DNA, 25 bp, Homo sapien
tttgacccattaatgcagcttctgc

SEQ ID NO: 122480 - DNA, 25 bp, Homo sapien
caatcaagaaaagaactgttataaa

SEQ ID NO: 122481 - DNA, 25 bp, Homo sapien
taaaacatctttactcactagacta

SEQ ID NO: 122482 - DNA, 25 bp, Homo sapien
aaaacatcacacattggaataccct

SEQ ID NO: 122483 - DNA, 25 bp, Homo sapien
acatggactgtccaagaactgtctc

SEQ ID NO: 122484 - DNA, 25 bp, Homo sapien
tttgctgaggttagtgtaaatatcc

SEQ ID NO: 122485 - DNA, 25 bp, Homo sapien
taagacagtggcaacgaggacatgg

SEQ ID NO: 122486 - DNA, 25 bp, Homo sapien
tgttccaagcgctctaaagcttctc

SEQ ID NO: 122487 - DNA, 25 bp, Homo sapien
tgtgaagatttctacgcgtcttaac

SEQ ID NO: 122488 - DNA, 25 bp, Homo sapien
tttctacgcgtcttaacaggaccac

SEQ ID NO: 122489 - DNA, 25 bp, Homo sapien
tacgcgtcttaacaggaccacattc

SEQ ID NO: 122490 - DNA, 25 bp, Homo sapien
gatttctacgcgtcttaacaggacc

SEQ ID NO: 122491 - DNA, 25 bp, Homo sapien
gcacctgagtctcaagagtctaagg

SEQ ID NO: 122492 - DNA, 25 bp, Homo sapien
cccacagagccgacacaatcttgag

SEQ ID NO: 122493 - DNA, 25 bp, Homo sapien
agtctaaggatctgtcgtagtttca

SEQ ID NO: 122494 - DNA, 25 bp, Homo sapien
cagcttccagcaaactcagccattt

SEQ ID NO: 122495 - DNA, 25 bp, Homo sapien
ctggatacttctgatgcgctgaaga

SEQ ID NO: 122496 - DNA, 25 bp, Homo sapien
tggcataaacagtctagcagctcag

SEQ ID NO: 122497 - DNA, 25 bp, Homo sapien
gaagaagtagagtcagtaacagctg

SEQ ID NO: 122498 - DNA, 25 bp, Homo sapien
tcttgaaatgctggaacagtttcca

SEQ ID NO: 122499 - DNA, 25 bp, Homo sapien
ctatggatgcagcaaatatcagaag

SEQ ID NO: 122500 - DNA, 25 bp, Homo sapien
gatgcagcaaatatcagaagaggca

SEQ ID NO: 122501 - DNA, 25 bp, Homo sapien
tatggatgcagcaaatatcagaaga

SEQ ID NO: 122502 - DNA, 25 bp, Homo sapien
tggatgcagcaaatatcagaagagg

SEQ ID NO: 122503 - DNA, 25 bp, Homo sapien
ccactgggcttcttctcttaagctg

SEQ ID NO: 122504 - DNA, 25 bp, Homo sapien
tgaaaatgacttagaggtgtgaatg

SEQ ID NO: 122505 - DNA, 25 bp, Homo sapien
tcttctcttaagctgacccattttg

SEQ ID NO: 122506 - DNA, 25 bp, Homo sapien
tggggacagacaatcccactgggct

SEQ ID NO: 122507 - DNA, 25 bp, Homo sapien
tctgacttttctgggtgatcctgga

SEQ ID NO: 122508 - DNA, 25 bp, Homo sapien
tctgggtgatcctggaatgccatat

SEQ ID NO: 122509 - DNA, 25 bp, Homo sapien
gacttttctgggtgatcctggaatg

SEQ ID NO: 122510 - DNA, 25 bp, Homo sapien
cttttctgggtgatcctggaatgcc

SEQ ID NO: 122511 - DNA, 25 bp, Homo sapien
gagagttgcaatactcacgagactg

SEQ ID NO: 122512 - DNA, 25 bp, Homo sapien
gtgatacaagctgattaagccccag

SEQ ID NO: 122513 - DNA, 25 bp, Homo sapien
taagccccagagacactcagtttag

SEQ ID NO: 122514 - DNA, 25 bp, Homo sapien
taattgtatctccattgcagtcctg

SEQ ID NO: 122515 - DNA, 25 bp, Homo sapien
ctttcttaaggatgctttgaagctc

SEQ ID NO: 122516 - DNA, 25 bp, Homo sapien
ccctttcttaaggatgctttgaagc

SEQ ID NO: 122517 - DNA, 25 bp, Homo sapien
tccctttcttaaggatgctttgaag

SEQ ID NO: 122518 - DNA, 25 bp, Homo sapien
tttccctttcttaaggatgctttga

SEQ ID NO: 122519 - DNA, 25 bp, Homo sapien
catttcggaatacttgattcgcagt

SEQ ID NO: 122520 - DNA, 25 bp, Homo sapien
tatggtgtacatttcggaatacttg

SEQ ID NO: 122521 - DNA, 25 bp, Homo sapien
cagggactatggtgtacatttcgga

SEQ ID NO: 122522 - DNA, 25 bp, Homo sapien
aatctctgcagggactatggtgtac

SEQ ID NO: 122523 - DNA, 25 bp, Homo sapien
tctcctcattgcatatgatggtgag

SEQ ID NO: 122524 - DNA, 25 bp, Homo sapien
ttctcctcattgcatatgatggtga

SEQ ID NO: 122525 - DNA, 25 bp, Homo sapien
tggaatgccatagatctaactcgtc

SEQ ID NO: 122526 - DNA, 25 bp, Homo sapien
gggtcctgttcaacaatgtcctgaa

SEQ ID NO: 122527 - DNA, 25 bp, Homo sapien
ccagctcatttagtttggaatgcca

SEQ ID NO: 122528 - DNA, 25 bp, Homo sapien
caactgtgaggttctacactctgct

SEQ ID NO: 122529 - DNA, 25 bp, Homo sapien
ggaccaaacttagtcagatgccttt

SEQ ID NO: 122530 - DNA, 25 bp, Homo sapien
acttagtcagatgccttttactgga

SEQ ID NO: 122531 - DNA, 25 bp, Homo sapien
gagatgcaggaccaaacttagtcag

SEQ ID NO: 122532 - DNA, 25 bp, Homo sapien
gaaagagatgcaggaccaaacttag

SEQ ID NO: 122533 - DNA, 25 bp, Homo sapien
agtgctagcatggtgactcagtgtc

SEQ ID NO: 122534 - DNA, 25 bp, Homo sapien
aagagtcatagtcagcaggattggc

SEQ ID NO: 122535 - DNA, 25 bp, Homo sapien
ggtattttctatccaagcctcagtg

SEQ ID NO: 122536 - DNA, 25 bp, Homo sapien
gattggccagcaaatgactggtatt

SEQ ID NO: 122537 - DNA, 25 bp, Homo sapien
tatatcagcttccttgaatgcaggc

SEQ ID NO: 122538 - DNA, 25 bp, Homo sapien
gaatgcaggccagacttactaattt

SEQ ID NO: 122539 - DNA, 25 bp, Homo sapien
tctaaggtagccctgaatgacccct

SEQ ID NO: 122540 - DNA, 25 bp, Homo sapien
tcataatagcctatggtagcagcct

SEQ ID NO: 122541 - DNA, 25 bp, Homo sapien
taaatatttggtcttggtccacttc

SEQ ID NO: 122542 - DNA, 25 bp, Homo sapien
tcttggtccacttctaaaacacttg

SEQ ID NO: 122543 - DNA, 25 bp, Homo sapien
gtataactgtaacataataagaaac

SEQ ID NO: 122544 - DNA, 25 bp, Homo sapien
actgtaacataataagaaacataaa

SEQ ID NO: 122545 - DNA, 25 bp, Homo sapien
tctgttctgaatcttccaaagccat

SEQ ID NO: 122546 - DNA, 25 bp, Homo sapien
tcagccattcgctgaatctgtggaa

SEQ ID NO: 122547 - DNA, 25 bp, Homo sapien
tacttaactcttgtatggattgggt

SEQ ID NO: 122548 - DNA, 25 bp, Homo sapien
tattgacaggtcttctagatccata

SEQ ID NO: 122549 - DNA, 25 bp, Homo sapien
aatccagaggctggcaaataacaac

SEQ ID NO: 122550 - DNA, 25 bp, Homo sapien
tctgtgcacctactatttaagaagg

SEQ ID NO: 122551 - DNA, 25 bp, Homo sapien
ggtcttactgtagtacccaggcagg

SEQ ID NO: 122552 - DNA, 25 bp, Homo sapien
ccctgaagatacatgagtgtggtgt

SEQ ID NO: 122553 - DNA, 25 bp, Homo sapien
gattttacttcagattcaatagcaa

SEQ ID NO: 122554 - DNA, 25 bp, Homo sapien
tcttttgataataggatagttttga

SEQ ID NO: 122555 - DNA, 25 bp, Homo sapien
catgtttgagatgttcttcaggtga

SEQ ID NO: 122556 - DNA, 25 bp, Homo sapien
cttcagattcaatagcaaccacatc

SEQ ID NO: 122557 - DNA, 25 bp, Homo sapien
aggcagaggtttcattcctgtttgg

SEQ ID NO: 122558 - DNA, 25 bp, Homo sapien
tcttcatgggacgtatattttcaag

SEQ ID NO: 122559 - DNA, 25 bp, Homo sapien
taaaagctgatttgtccgctgaaac

SEQ ID NO: 122560 - DNA, 25 bp, Homo sapien
gacactatctcagcaatggttttct

SEQ ID NO: 122561 - DNA, 25 bp, Homo sapien
gccacttgaaagcatagttaggacc

SEQ ID NO: 122562 - DNA, 25 bp, Homo sapien
ttcacccatttcgtctgtgaagaag

SEQ ID NO: 122563 - DNA, 25 bp, Homo sapien
gaactgcctcttctatttcacccat

SEQ ID NO: 122564 - DNA, 25 bp, Homo sapien
gcatagttaggaccgtggctttctt

SEQ ID NO: 122565 - DNA, 25 bp, Homo sapien
tcagcttggtctggtgacatatgtt

SEQ ID NO: 122566 - DNA, 25 bp, Homo sapien
tcaagggagaactgagctgaataat

SEQ ID NO: 122567 - DNA, 25 bp, Homo sapien
tgtcagcttggtctggtgacatatg

SEQ ID NO: 122568 - DNA, 25 bp, Homo sapien
gagctgaataattatttaagatctg

SEQ ID NO: 122569 - DNA, 25 bp, Homo sapien
ttgtaacatgctccacacgtgactg

SEQ ID NO: 122570 - DNA, 25 bp, Homo sapien
tctagtggccagctacaggactgag

SEQ ID NO: 122571 - DNA, 25 bp, Homo sapien
ggagtctgcacactaaccaacactg

SEQ ID NO: 122572 - DNA, 25 bp, Homo sapien
gaatctctgcgggttgagccaaagc

SEQ ID NO: 122573 - DNA, 25 bp, Homo sapien
agctagtctctggtacggtatagct

SEQ ID NO: 122574 - DNA, 25 bp, Homo sapien
ttggtacaagggctgaagatttttc

SEQ ID NO: 122575 - DNA, 25 bp, Homo sapien
tctctggtacggtatagctcctttc

SEQ ID NO: 122576 - DNA, 25 bp, Homo sapien
cttcctttggtacaagggctgaaga

SEQ ID NO: 122577 - DNA, 25 bp, Homo sapien
tcaagtccaccaacaggtcttcttt

SEQ ID NO: 122578 - DNA, 25 bp, Homo sapien
cagctggcagcctatctctttctac

SEQ ID NO: 122579 - DNA, 25 bp, Homo sapien
tgaaggtttagtacggtggccttca

SEQ ID NO: 122580 - DNA, 25 bp, Homo sapien
gaatctgtttctccatacgttcgat

SEQ ID NO: 122581 - DNA, 25 bp, Homo sapien
tgtacgaagatacttcaaagggagg

SEQ ID NO: 122582 - DNA, 25 bp, Homo sapien
ctgtacgaagatacttcaaagggag

SEQ ID NO: 122583 - DNA, 25 bp, Homo sapien
gtacgaagatacttcaaagggaggc

SEQ ID NO: 122584 - DNA, 25 bp, Homo sapien
gtcttgttattttcatggccccctg

SEQ ID NO: 122585 - DNA, 25 bp, Homo sapien
cctgtgccccttcataaacgattaa

SEQ ID NO: 122586 - DNA, 25 bp, Homo sapien
gaatgtgattcattgatgtgaatgc

SEQ ID NO: 122587 - DNA, 25 bp, Homo sapien
actgggcccttcttgagtctgcaaa

SEQ ID NO: 122588 - DNA, 25 bp, Homo sapien
gccagatatccggagtcagtcaaac

SEQ ID NO: 122589 - DNA, 25 bp, Homo sapien
ctgtctcctggtccgttcagctcct

SEQ ID NO: 122590 - DNA, 25 bp, Homo sapien
tgtctcctggtccgttcagctcctc

SEQ ID NO: 122591 - DNA, 25 bp, Homo sapien
cctgtctcctggtccgttcagctcc

SEQ ID NO: 122592 - DNA, 25 bp, Homo sapien
tcgctcttcacggaactttcttcca

SEQ ID NO: 122593 - DNA, 25 bp, Homo sapien
atcgctcttcacggaactttcttcc

SEQ ID NO: 122594 - DNA, 25 bp, Homo sapien
tgagaccaggagtgccaaacagcat

SEQ ID NO: 122595 - DNA, 25 bp, Homo sapien
tgaagtcactctttttggcccctgg

SEQ ID NO: 122596 - DNA, 25 bp, Homo sapien
tcgtagttctctctgccatgaaggg

SEQ ID NO: 122597 - DNA, 25 bp, Homo sapien
cccgtatgccaacaagagtgtctga

SEQ ID NO: 122598 - DNA, 25 bp, Homo sapien
tgtcatgcttccaaagtgaagacca

SEQ ID NO: 122599 - DNA, 25 bp, Homo sapien
cttccatgtccttgtcatgcttcca

SEQ ID NO: 122600 - DNA, 25 bp, Homo sapien
ctgaacaattgttccagaggatgag

SEQ ID NO: 122601 - DNA, 25 bp, Homo sapien
tgaacaattgttccagaggatgagg

SEQ ID NO: 122602 - DNA, 25 bp, Homo sapien
tcagtgtttagtgagtctggtgtga

SEQ ID NO: 122603 - DNA, 25 bp, Homo sapien
gtgtgaggatttgtgccatggaatt

SEQ ID NO: 122604 - DNA, 25 bp, Homo sapien
attatcagaggtgcttattttccca

SEQ ID NO: 122605 - DNA, 25 bp, Homo sapien
ccttgctcagtgtttagtgagtctg

SEQ ID NO: 122606 - DNA, 25 bp, Homo sapien
gccacgttggcttgttgcagccaca

SEQ ID NO: 122607 - DNA, 25 bp, Homo sapien
gcacctgctgcatgtctgcgtttaa

SEQ ID NO: 122608 - DNA, 25 bp, Homo sapien
cgcgtcagaagagtccagagtgtca

SEQ ID NO: 122609 - DNA, 25 bp, Homo sapien
tgggctccggcctagttttctccac

SEQ ID NO: 122610 - DNA, 25 bp, Homo sapien
gcgcttcagcctcatgttgagtggc

SEQ ID NO: 122611 - DNA, 25 bp, Homo sapien
cctcatgttgagtggctccattatc

SEQ ID NO: 122612 - DNA, 25 bp, Homo sapien
ggcaaccttgtgctcaatctctgtt

SEQ ID NO: 122613 - DNA, 25 bp, Homo sapien
ggccctgatctttgcaagtctctaa

SEQ ID NO: 122614 - DNA, 25 bp, Homo sapien
attcagaaaggttaactggttggag

SEQ ID NO: 122615 - DNA, 25 bp, Homo sapien
aaggttaactggttggagagcttct

SEQ ID NO: 122616 - DNA, 25 bp, Homo sapien
ttcagaaaggttaactggttggaga

SEQ ID NO: 122617 - DNA, 25 bp, Homo sapien
ttcagttacaatggattccaattca

SEQ ID NO: 122618 - DNA, 25 bp, Homo sapien
cttgcagatgattcctgagttgtat

SEQ ID NO: 122619 - DNA, 25 bp, Homo sapien
tcctgagttgtatcgttatcatgtt

SEQ ID NO: 122620 - DNA, 25 bp, Homo sapien
tcgttatcatgttggcaatactggg

SEQ ID NO: 122621 - DNA, 25 bp, Homo sapien
tgttccattggttttaactccagaa

SEQ ID NO: 122622 - DNA, 25 bp, Homo sapien
cacttatctccattttggccctggg

SEQ ID NO: 122623 - DNA, 25 bp, Homo sapien
agttcatgatgcagatattgccact

SEQ ID NO: 122624 - DNA, 25 bp, Homo sapien
gagctttatttttgatgagagttca

SEQ ID NO: 122625 - DNA, 25 bp, Homo sapien
gagtctggaacgtcattttcagggc

SEQ ID NO: 122626 - DNA, 25 bp, Homo sapien
ttgcaccatgtagatacagactgac

SEQ ID NO: 122627 - DNA, 25 bp, Homo sapien
atttgcaccatgtagatacagactg

SEQ ID NO: 122628 - DNA, 25 bp, Homo sapien
tatttgcaccatgtagatacagact

SEQ ID NO: 122629 - DNA, 25 bp, Homo sapien
tttgcaccatgtagatacagactga

SEQ ID NO: 122630 - DNA, 25 bp, Homo sapien
tcttggcgcaggtcttcaagttggg

SEQ ID NO: 122631 - DNA, 25 bp, Homo sapien
taaagttatacatagtcacgctggg

SEQ ID NO: 122632 - DNA, 25 bp, Homo sapien
ctgtgtctgaaggttacttgcttct

SEQ ID NO: 122633 - DNA, 25 bp, Homo sapien
caagttgggtggtataggttttcag

SEQ ID NO: 122634 - DNA, 25 bp, Homo sapien
tgagggtcaggaatagttcaaacaa

SEQ ID NO: 122635 - DNA, 25 bp, Homo sapien
ctcgtagtgcacctgctggccagaa

SEQ ID NO: 122636 - DNA, 25 bp, Homo sapien
caaattgatatatgcttcttctgtc

SEQ ID NO: 122637 - DNA, 25 bp, Homo sapien
tgactgagggtcaggaatagttcaa

SEQ ID NO: 122638 - DNA, 25 bp, Homo sapien
aaggttgtcaaaacattcaaggagc

SEQ ID NO: 122639 - DNA, 25 bp, Homo sapien
caaggagcaagttggtgttctcgcc

SEQ ID NO: 122640 - DNA, 25 bp, Homo sapien
taactgcggttgtaatcgaggccag

SEQ ID NO: 122641 - DNA, 25 bp, Homo sapien
tcgaggccagctttcagggacttgc

SEQ ID NO: 122642 - DNA, 25 bp, Homo sapien
gatttcattcaaagactgttgtaaa

SEQ ID NO: 122643 - DNA, 25 bp, Homo sapien
ctgaagctgttcagcaacactctgc

SEQ ID NO: 122644 - DNA, 25 bp, Homo sapien
tgttcagcaacactctgcccactga

SEQ ID NO: 122645 - DNA, 25 bp, Homo sapien
ttcattcaaagactgttgtaaagat

SEQ ID NO: 122646 - DNA, 25 bp, Homo sapien
ttggccactcggctctcggcgttct

SEQ ID NO: 122647 - DNA, 25 bp, Homo sapien
cccttcatctcttagtttggccact

SEQ ID NO: 122648 - DNA, 25 bp, Homo sapien
cctcctggagtaaagcataaggtaa

SEQ ID NO: 122649 - DNA, 25 bp, Homo sapien
tccagctccactgtatatgcatctg

SEQ ID NO: 122650 - DNA, 25 bp, Homo sapien
ggctcttagcattccccacatactg

SEQ ID NO: 122651 - DNA, 25 bp, Homo sapien
gctggctctcagtgacgaaagggct

SEQ ID NO: 122652 - DNA, 25 bp, Homo sapien
gattttctatttgagcctgtaacgc

SEQ ID NO: 122653 - DNA, 25 bp, Homo sapien
agcctgtaacgccactttacttttg

SEQ ID NO: 122654 - DNA, 25 bp, Homo sapien
tgcagcttcataccacattggcgtg

SEQ ID NO: 122655 - DNA, 25 bp, Homo sapien
tttggcagagtatgcttggatcaac

SEQ ID NO: 122656 - DNA, 25 bp, Homo sapien
gatcaacaacatgtcagcaacaagc

SEQ ID NO: 122657 - DNA, 25 bp, Homo sapien
aagaaggaagtattttggcagagta

SEQ ID NO: 122658 - DNA, 25 bp, Homo sapien
agatataagaatttccaggtccttt

SEQ ID NO: 122659 - DNA, 25 bp, Homo sapien
gtagatataagaatttccaggtcct

SEQ ID NO: 122660 - DNA, 25 bp, Homo sapien
tagatataagaatttccaggtcctt

SEQ ID NO: 122661 - DNA, 25 bp, Homo sapien
tcctctgtttcttccaccaaactca

SEQ ID NO: 122662 - DNA, 25 bp, Homo sapien
tgaaatcctttccactaatctttcc

SEQ ID NO: 122663 - DNA, 25 bp, Homo sapien
aaatgaaatcctttccactaatctt

SEQ ID NO: 122664 - DNA, 25 bp, Homo sapien
aatcctttccactaatctttcctct

SEQ ID NO: 122665 - DNA, 25 bp, Homo sapien
taacagatatggtcacttttggaga

SEQ ID NO: 122666 - DNA, 25 bp, Homo sapien
cagaggactcagatttaccttagag

SEQ ID NO: 122667 - DNA, 25 bp, Homo sapien
caatcacactcatattaggttggct

SEQ ID NO: 122668 - DNA, 25 bp, Homo sapien
tgtatccctagactaacaaagagct

SEQ ID NO: 122669 - DNA, 25 bp, Homo sapien
taataatcaggattgccagtgtctg

SEQ ID NO: 122670 - DNA, 25 bp, Homo sapien
ttgcagagccagtagggtttcctta

SEQ ID NO: 122671 - DNA, 25 bp, Homo sapien
tatccatgagatgcgaatactaggc

SEQ ID NO: 122672 - DNA, 25 bp, Homo sapien
tcatgtggcaaagggcggctgtaac

SEQ ID NO: 122673 - DNA, 25 bp, Homo sapien
aagccgggcgtgttttccaccaatg

SEQ ID NO: 122674 - DNA, 25 bp, Homo sapien
cttcgttcagagtttggtaaagccg

SEQ ID NO: 122675 - DNA, 25 bp, Homo sapien
cagatgcttgagaagagcttgcagc

SEQ ID NO: 122676 - DNA, 25 bp, Homo sapien
ctaattcaggacagctcacagacgc

SEQ ID NO: 122677 - DNA, 25 bp, Homo sapien
gatgttgcttctgattgtatccaag

SEQ ID NO: 122678 - DNA, 25 bp, Homo sapien
tccagtaattcagagtatgctggga

SEQ ID NO: 122679 - DNA, 25 bp, Homo sapien
tccaaccacttggttaactgatccg

SEQ ID NO: 122680 - DNA, 25 bp, Homo sapien
taactgatccgaatctctgttataa

SEQ ID NO: 122681 - DNA, 25 bp, Homo sapien
ggttcccgatactgataacggcagt

SEQ ID NO: 122682 - DNA, 25 bp, Homo sapien
ctgataacggcagtcttcaaggagg

SEQ ID NO: 122683 - DNA, 25 bp, Homo sapien
tggaagttgagttatgagcattgtc

SEQ ID NO: 122684 - DNA, 25 bp, Homo sapien
aactgtgctaaagaagctctcagtg

SEQ ID NO: 122685 - DNA, 25 bp, Homo sapien
taacttgagatgcagaacttggtga

SEQ ID NO: 122686 - DNA, 25 bp, Homo sapien
tctgtgattgctttacgagacggca

SEQ ID NO: 122687 - DNA, 25 bp, Homo sapien
gaagtttgatgctccacattgttca

SEQ ID NO: 122688 - DNA, 25 bp, Homo sapien
acttggtgaatgcacggagtcttca

SEQ ID NO: 122689 - DNA, 25 bp, Homo sapien
actccgttctttcatagcgcttgct

SEQ ID NO: 122690 - DNA, 25 bp, Homo sapien
ttcatagcgcttgctttctacatca

SEQ ID NO: 122691 - DNA, 25 bp, Homo sapien
taatgactggttaacgaagtcaact

SEQ ID NO: 122692 - DNA, 25 bp, Homo sapien
gaagtcaactatccactgtttatag

SEQ ID NO: 122693 - DNA, 25 bp, Homo sapien
ctttctattcagcattccatgtaca

SEQ ID NO: 122694 - DNA, 25 bp, Homo sapien
tattcagcattccatgtacacggtg

SEQ ID NO: 122695 - DNA, 25 bp, Homo sapien
ttctattcagcattccatgtacacg

SEQ ID NO: 122696 - DNA, 25 bp, Homo sapien
tctattcagcattccatgtacacgg

SEQ ID NO: 122697 - DNA, 25 bp, Homo sapien
cactctcagtgatactttctagaag

SEQ ID NO: 122698 - DNA, 25 bp, Homo sapien
gatcacactttcaggtttttgtaaa

SEQ ID NO: 122699 - DNA, 25 bp, Homo sapien
gagatcacactttcaggtttttgta

SEQ ID NO: 122700 - DNA, 25 bp, Homo sapien
ttttcactctcagtgatactttcta

SEQ ID NO: 122701 - DNA, 25 bp, Homo sapien
gatggcgatggcagaggtcctctga

SEQ ID NO: 122702 - DNA, 25 bp, Homo sapien
gcagaggtcctctgaatgggcagca

SEQ ID NO: 122703 - DNA, 25 bp, Homo sapien
atggcagaggtcctctgaatgggca

SEQ ID NO: 122704 - DNA, 25 bp, Homo sapien
cgatggcagaggtcctctgaatggg

SEQ ID NO: 122705 - DNA, 25 bp, Homo sapien
ctgacagtgactattgtaaggccgt

SEQ ID NO: 122706 - DNA, 25 bp, Homo sapien
ggtccggccagactttccagtcctg

SEQ ID NO: 122707 - DNA, 25 bp, Homo sapien
aggccgtcacgcaggaagtgcagaa

SEQ ID NO: 122708 - DNA, 25 bp, Homo sapien
ccgtgacctcctcagtagaaatggg

SEQ ID NO: 122709 - DNA, 25 bp, Homo sapien
tgccagattaccacgtgaggagccc

SEQ ID NO: 122710 - DNA, 25 bp, Homo sapien
tggactggttacaaaggcacccagg

SEQ ID NO: 122711 - DNA, 25 bp, Homo sapien
gagaaacatgagtgcctcgtgggca

SEQ ID NO: 122712 - DNA, 25 bp, Homo sapien
caatgagatttagtcagctgctacc

SEQ ID NO: 122713 - DNA, 25 bp, Homo sapien
taactttgtttcaactcatctagtg

SEQ ID NO: 122714 - DNA, 25 bp, Homo sapien
caactcatctagtgctttggattta

SEQ ID NO: 122715 - DNA, 25 bp, Homo sapien
aattcgggatgctgtatcttctaac

SEQ ID NO: 122716 - DNA, 25 bp, Homo sapien
aataactcatcaattcgggatgctg

SEQ ID NO: 122717 - DNA, 25 bp, Homo sapien
catgtctggcctgcatttatgtctt

SEQ ID NO: 122718 - DNA, 25 bp, Homo sapien
accatgtctggcctgcatttatgtc

SEQ ID NO: 122719 - DNA, 25 bp, Homo sapien
tatattgtatgaatgcagaggtcta

SEQ ID NO: 122720 - DNA, 25 bp, Homo sapien
tttttgtatattgtatgaatgcaga

SEQ ID NO: 122721 - DNA, 25 bp, Homo sapien
gcatagtcttgccttactgctcctt

SEQ ID NO: 122722 - DNA, 25 bp, Homo sapien
tttattatcaagttgtgataaatct

SEQ ID NO: 122723 - DNA, 25 bp, Homo sapien
atagtcttgccttactgctccttcc

SEQ ID NO: 122724 - DNA, 25 bp, Homo sapien
tatcaagttgtgataaatcttcata

SEQ ID NO: 122725 - DNA, 25 bp, Homo sapien
ctgtaaaactgactgcatggaggtt

SEQ ID NO: 122726 - DNA, 25 bp, Homo sapien
aaggtctccaatgataacaccacag

SEQ ID NO: 122727 - DNA, 25 bp, Homo sapien
catagagttgatcataaatcttcca

SEQ ID NO: 122728 - DNA, 25 bp, Homo sapien
tgctgtgttccatgcagtaccagaa

SEQ ID NO: 122729 - DNA, 25 bp, Homo sapien
cctttgagtttgccgataacctcct

SEQ ID NO: 122730 - DNA, 25 bp, Homo sapien
gacctttgagtttgccgataacctc

SEQ ID NO: 122731 - DNA, 25 bp, Homo sapien
gagacctttgagtttgccgataacc

SEQ ID NO: 122732 - DNA, 25 bp, Homo sapien
agacctttgagtttgccgataacct

SEQ ID NO: 122733 - DNA, 25 bp, Homo sapien
gagcattgctataggccttccagag

SEQ ID NO: 122734 - DNA, 25 bp, Homo sapien
ggatctctgccaggttgtttccaga

SEQ ID NO: 122735 - DNA, 25 bp, Homo sapien
agccttgcggcagcttcaccatgag

SEQ ID NO: 122736 - DNA, 25 bp, Homo sapien
caggatctctgccaggttgtttcca

SEQ ID NO: 122737 - DNA, 25 bp, Homo sapien
ggctgacttggccttggttttccaa

SEQ ID NO: 122738 - DNA, 25 bp, Homo sapien
tctgttgggctgacttggccttggt

SEQ ID NO: 122739 - DNA, 25 bp, Homo sapien
catctgttgggctgacttggccttg

SEQ ID NO: 122740 - DNA, 25 bp, Homo sapien
ttgggctgacttggccttggttttc

SEQ ID NO: 122741 - DNA, 25 bp, Homo sapien
tgaagcttttgccttagagatgtaa

SEQ ID NO: 122742 - DNA, 25 bp, Homo sapien
gggtcacactcagttgagacacttg

SEQ ID NO: 122743 - DNA, 25 bp, Homo sapien
aagcttttgccttagagatgtaaca

SEQ ID NO: 122744 - DNA, 25 bp, Homo sapien
tcacactcagttgagacacttgctt

SEQ ID NO: 122745 - DNA, 25 bp, Homo sapien
tgggtgctggactctgcgggttgtg

SEQ ID NO: 122746 - DNA, 25 bp, Homo sapien
tctgcgggttgtgggagtcgatcca

SEQ ID NO: 122747 - DNA, 25 bp, Homo sapien
agcatgtgggtgctggactctgcgg

SEQ ID NO: 122748 - DNA, 25 bp, Homo sapien
ttgtgggagtcgatccaggacactg

SEQ ID NO: 122749 - DNA, 25 bp, Homo sapien
ttctgtgtagcttgttgacagctcc

SEQ ID NO: 122750 - DNA, 25 bp, Homo sapien
agatgtgatactgcaactccatggc

SEQ ID NO: 122751 - DNA, 25 bp, Homo sapien
tgctggtactgagatgtgatactgc

SEQ ID NO: 122752 - DNA, 25 bp, Homo sapien
ccttctgtgtagcttgttgacagct

SEQ ID NO: 122753 - DNA, 25 bp, Homo sapien
tctcttcttcatgcataataagacc

SEQ ID NO: 122754 - DNA, 25 bp, Homo sapien
ttccagccggactccaaaatcctta

SEQ ID NO: 122755 - DNA, 25 bp, Homo sapien
cctgttggtgaagtctatccaaatt

SEQ ID NO: 122756 - DNA, 25 bp, Homo sapien
tcttcatgcataataagacctttta

SEQ ID NO: 122757 - DNA, 25 bp, Homo sapien
cactaagtgggagcttgaggctcac

SEQ ID NO: 122758 - DNA, 25 bp, Homo sapien
catattttgtaacgtcttcacagct

SEQ ID NO: 122759 - DNA, 25 bp, Homo sapien
ggcccgaatccattgccggttcata

SEQ ID NO: 122760 - DNA, 25 bp, Homo sapien
tatcaggtgattgggctgtcagtgc

SEQ ID NO: 122761 - DNA, 25 bp, Homo sapien
attgaaacaacgacagagaagggat

SEQ ID NO: 122762 - DNA, 25 bp, Homo sapien
ccaaaagttggatccacttttcaca

SEQ ID NO: 122763 - DNA, 25 bp, Homo sapien
aggctgttagccacatccactttga

SEQ ID NO: 122764 - DNA, 25 bp, Homo sapien
tatcttctccaaaagttggatccac

SEQ ID NO: 122765 - DNA, 25 bp, Homo sapien
agctcaggaaggctgttagccacat

SEQ ID NO: 122766 - DNA, 25 bp, Homo sapien
ctgggtgacataggaatcagcaatt

SEQ ID NO: 122767 - DNA, 25 bp, Homo sapien
caggagttgtaaggactgggtgaca

SEQ ID NO: 122768 - DNA, 25 bp, Homo sapien
tctctatttctgttgtgtccaggag

SEQ ID NO: 122769 - DNA, 25 bp, Homo sapien
tggtttatagaaacttcagcttcta

SEQ ID NO: 122770 - DNA, 25 bp, Homo sapien
tgccgaacaccctggacagcattct

SEQ ID NO: 122771 - DNA, 25 bp, Homo sapien
accgatccgtcagctttgagaattc

SEQ ID NO: 122772 - DNA, 25 bp, Homo sapien
tggacagcattctgccaccgatccg

SEQ ID NO: 122773 - DNA, 25 bp, Homo sapien
agcccatcaacgtcacccttcctct

SEQ ID NO: 122774 - DNA, 25 bp, Homo sapien
gacttctggtttggtagaggctgaa

SEQ ID NO: 122775 - DNA, 25 bp, Homo sapien
tggcccttcactgcagatagcaggt

SEQ ID NO: 122776 - DNA, 25 bp, Homo sapien
tgaggaagcgaaacaagttctccac

SEQ ID NO: 122777 - DNA, 25 bp, Homo sapien
tccacagaagtagtgaaatcttgcc

SEQ ID NO: 122778 - DNA, 25 bp, Homo sapien
caaaggtgaatgaacatcttgcaaa

SEQ ID NO: 122779 - DNA, 25 bp, Homo sapien
gagagcccacttggatcacatcatc

SEQ ID NO: 122780 - DNA, 25 bp, Homo sapien
ctgcagagagcccacttggatcaca

SEQ ID NO: 122781 - DNA, 25 bp, Homo sapien
caatgaccaccctgtggttctcaca

SEQ ID NO: 122782 - DNA, 25 bp, Homo sapien
caaggttagggcacaggtagttcgc

SEQ ID NO: 122783 - DNA, 25 bp, Homo sapien
ggtagttcgcctcctttgaaaatga

SEQ ID NO: 122784 - DNA, 25 bp, Homo sapien
tcagttgtgagcagtaacttttctc

SEQ ID NO: 122785 - DNA, 25 bp, Homo sapien
tctcctacccacagactctttagtt

SEQ ID NO: 122786 - DNA, 25 bp, Homo sapien
gaactgcttaatcatctctgccagc

SEQ ID NO: 122787 - DNA, 25 bp, Homo sapien
ctctacagtgctctggaactgctta

SEQ ID NO: 122788 - DNA, 25 bp, Homo sapien
ctgcttaatcatctctgccagctgg

SEQ ID NO: 122789 - DNA, 25 bp, Homo sapien
tgctctggaactgcttaatcatctc

SEQ ID NO: 122790 - DNA, 25 bp, Homo sapien
cagctctttttcgttatggaggtcc

SEQ ID NO: 122791 - DNA, 25 bp, Homo sapien
ctctttttcgttatggaggtcctcg

SEQ ID NO: 122792 - DNA, 25 bp, Homo sapien
taatcagctctttttcgttatggag

SEQ ID NO: 122793 - DNA, 25 bp, Homo sapien
tttcgttatggaggtcctcgtgaag

SEQ ID NO: 122794 - DNA, 25 bp, Homo sapien
taagtgattatcttggccacttgtt

SEQ ID NO: 122795 - DNA, 25 bp, Homo sapien
tggccacttgtttggatttcaatac

SEQ ID NO: 122796 - DNA, 25 bp, Homo sapien
tcttggccacttgtttggatttcaa

SEQ ID NO: 122797 - DNA, 25 bp, Homo sapien
ctaagtgattatcttggccacttgt

SEQ ID NO: 122798 - DNA, 25 bp, Homo sapien
catgttatgttagacagatcgggaa

SEQ ID NO: 122799 - DNA, 25 bp, Homo sapien
tctaattccttaagagacgagcatg

SEQ ID NO: 122800 - DNA, 25 bp, Homo sapien
ggagcaaactccaacctactggctt

SEQ ID NO: 122801 - DNA, 25 bp, Homo sapien
agggaacagcttttacaggaatctc

SEQ ID NO: 122802 - DNA, 25 bp, Homo sapien
agaaagacactaatttctggcctaa

SEQ ID NO: 122803 - DNA, 25 bp, Homo sapien
tttgatccccgaaagtcactgaagg

SEQ ID NO: 122804 - DNA, 25 bp, Homo sapien
gaaaaaagatgtagggagaaagaca

SEQ ID NO: 122805 - DNA, 25 bp, Homo sapien
tctggcctaatttgaagtataacac

SEQ ID NO: 122806 - DNA, 25 bp, Homo sapien
tcggaaagtgtacagtcactggata

SEQ ID NO: 122807 - DNA, 25 bp, Homo sapien
aatattgacaatcggaaagtgtaca

SEQ ID NO: 122808 - DNA, 25 bp, Homo sapien
cactggataaggttgagactcctgt

SEQ ID NO: 122809 - DNA, 25 bp, Homo sapien
ccttttcccctctaacactcaccat

SEQ ID NO: 122810 - DNA, 25 bp, Homo sapien
ccttcaactcaagcggctgttgttt

SEQ ID NO: 122811 - DNA, 25 bp, Homo sapien
tgcatttaatcacaagaagggggta

SEQ ID NO: 122812 - DNA, 25 bp, Homo sapien
caactcaagcggctgttgtttccaa

SEQ ID NO: 122813 - DNA, 25 bp, Homo sapien
gcatttaatcacaagaagggggtaa

SEQ ID NO: 122814 - DNA, 25 bp, Homo sapien
tcttccacgagaacgtgccgggtta

SEQ ID NO: 122815 - DNA, 25 bp, Homo sapien
tttcaagttctgagtccagctagcc

SEQ ID NO: 122816 - DNA, 25 bp, Homo sapien
gcaaatgctctatttgctccttcaa

SEQ ID NO: 122817 - DNA, 25 bp, Homo sapien
ggttaagtccgccttcatagtttga

SEQ ID NO: 122818 - DNA, 25 bp, Homo sapien
ttttttcattgaatacaacccatgt

SEQ ID NO: 122819 - DNA, 25 bp, Homo sapien
tcaatctcctgtttacgtatggcca

SEQ ID NO: 122820 - DNA, 25 bp, Homo sapien
tactaatgtccgctgtctgtagaac

SEQ ID NO: 122821 - DNA, 25 bp, Homo sapien
tattgagtctgtcttcaatctcctg

SEQ ID NO: 122822 - DNA, 25 bp, Homo sapien
ctgtaacttgttttcactaaacaag

SEQ ID NO: 122823 - DNA, 25 bp, Homo sapien
aacaagtttatttcttccatgcagt

SEQ ID NO: 122824 - DNA, 25 bp, Homo sapien
taaacaagtttatttcttccatgca

SEQ ID NO: 122825 - DNA, 25 bp, Homo sapien
actaaacaagtttatttcttccatg

SEQ ID NO: 122826 - DNA, 25 bp, Homo sapien
tggccttgatcaactggtcacccat

SEQ ID NO: 122827 - DNA, 25 bp, Homo sapien
caaaaagatgttgccaacgatcgtt

SEQ ID NO: 122828 - DNA, 25 bp, Homo sapien
gcttgtcatcgatctcagctgctct

SEQ ID NO: 122829 - DNA, 25 bp, Homo sapien
ttgatccgatgacatcaaaaagatg

SEQ ID NO: 122830 - DNA, 25 bp, Homo sapien
ctgatctgccatactgaggcaggag

SEQ ID NO: 122831 - DNA, 25 bp, Homo sapien
tctgccatactgaggcaggagcaac

SEQ ID NO: 122832 - DNA, 25 bp, Homo sapien
atactgaggcaggagcaacgggcat

SEQ ID NO: 122833 - DNA, 25 bp, Homo sapien
aggcaggagcaacgggcatggctcc

SEQ ID NO: 122834 - DNA, 25 bp, Homo sapien
ctgaaaaaacatccacctggagttt

SEQ ID NO: 122835 - DNA, 25 bp, Homo sapien
tgaaaaaacatccacctggagtttg

SEQ ID NO: 122836 - DNA, 25 bp, Homo sapien
gcacagctgcacaagtggtcccaag

SEQ ID NO: 122837 - DNA, 25 bp, Homo sapien
cggttcgctgtatgccacgtggcca

SEQ ID NO: 122838 - DNA, 25 bp, Homo sapien
ccaaggccaagtgacggttcgctgt

SEQ ID NO: 122839 - DNA, 25 bp, Homo sapien
acagctgcacaagtggtcccaaggc

SEQ ID NO: 122840 - DNA, 25 bp, Homo sapien
catgtttcataagagtgtagatgtc

SEQ ID NO: 122841 - DNA, 25 bp, Homo sapien
gtttcataagagtgtagatgtcacc

SEQ ID NO: 122842 - DNA, 25 bp, Homo sapien
tgcatgtttcataagagtgtagatg

SEQ ID NO: 122843 - DNA, 25 bp, Homo sapien
cataagagtgtagatgtcaccactg

SEQ ID NO: 122844 - DNA, 25 bp, Homo sapien
gtgactagcagcattgtttggtgtt

SEQ ID NO: 122845 - DNA, 25 bp, Homo sapien
caagtcaacttcgtgactagcagca

SEQ ID NO: 122846 - DNA, 25 bp, Homo sapien
ggcaacctgctaagaccaacgcaag

SEQ ID NO: 122847 - DNA, 25 bp, Homo sapien
agtcccactggatcaggcaacctgc

SEQ ID NO: 122848 - DNA, 25 bp, Homo sapien
ggtctgggaacagcggccacccatt

SEQ ID NO: 122849 - DNA, 25 bp, Homo sapien
tgctggccatcaggccgcttgctca

SEQ ID NO: 122850 - DNA, 25 bp, Homo sapien
catcaggccgcttgctcattatcct

SEQ ID NO: 122851 - DNA, 25 bp, Homo sapien
ccaaccctcaggaaggcatttctgc

SEQ ID NO: 122852 - DNA, 25 bp, Homo sapien
tattgtaaccaaagcgacacagcca

SEQ ID NO: 122853 - DNA, 25 bp, Homo sapien
gagcaagacacaagggacagcagct

SEQ ID NO: 122854 - DNA, 25 bp, Homo sapien
gcatgctgacgctgggaaagaaccc

SEQ ID NO: 122855 - DNA, 25 bp, Homo sapien
gaaagaacccatcccccgatggctg

SEQ ID NO: 122856 - DNA, 25 bp, Homo sapien
agagcatatcagagcccttctgcca

SEQ ID NO: 122857 - DNA, 25 bp, Homo sapien
ttctgccacaaagcagtgtgctgcc

SEQ ID NO: 122858 - DNA, 25 bp, Homo sapien
cctgcacagaccctgaggattcaga

SEQ ID NO: 122859 - DNA, 25 bp, Homo sapien
tcttcataaagaggtggccaaatta

SEQ ID NO: 122860 - DNA, 25 bp, Homo sapien
ctcaattcgagccaaccaggtgcga

SEQ ID NO: 122861 - DNA, 25 bp, Homo sapien
tttgtccaactgctgaataaaagca

SEQ ID NO: 122862 - DNA, 25 bp, Homo sapien
ccaggtgcgaaggttgctcatgttt

SEQ ID NO: 122863 - DNA, 25 bp, Homo sapien
tgctcagcgagcctcttctggatct

SEQ ID NO: 122864 - DNA, 25 bp, Homo sapien
ttgcaagagctcatttctgattgtc

SEQ ID NO: 122865 - DNA, 25 bp, Homo sapien
aagagctcatttctgattgtcccac

SEQ ID NO: 122866 - DNA, 25 bp, Homo sapien
gcaagagctcatttctgattgtccc

SEQ ID NO: 122867 - DNA, 25 bp, Homo sapien
cgtactcttgcaagagctcatttct

SEQ ID NO: 122868 - DNA, 25 bp, Homo sapien
gactccaatgagagacgcattaaaa

SEQ ID NO: 122869 - DNA, 25 bp, Homo sapien
gttcaaagacattcatcctagtgga

SEQ ID NO: 122870 - DNA, 25 bp, Homo sapien
aaagacatgcttaaagttccaaggc

SEQ ID NO: 122871 - DNA, 25 bp, Homo sapien
tgtgttcagtagctgtgactccaat

SEQ ID NO: 122872 - DNA, 25 bp, Homo sapien
taatgttctgtcacacttcggattt

SEQ ID NO: 122873 - DNA, 25 bp, Homo sapien
caaccagattgaaattatgtgccat

SEQ ID NO: 122874 - DNA, 25 bp, Homo sapien
gatactgacagcttccatataatct

SEQ ID NO: 122875 - DNA, 25 bp, Homo sapien
aacagcccctgcaaaatttagccag

SEQ ID NO: 122876 - DNA, 25 bp, Homo sapien
tgcagtaggacgtcacagatgttaa

SEQ ID NO: 122877 - DNA, 25 bp, Homo sapien
tcacactcggtctcatttgcacagg

SEQ ID NO: 122878 - DNA, 25 bp, Homo sapien
tggtctgctggatcgagtcacactc

SEQ ID NO: 122879 - DNA, 25 bp, Homo sapien
cagatgttaaacacggactccaccc

SEQ ID NO: 122880 - DNA, 25 bp, Homo sapien
cttgaataaatcctttgataagcgt

SEQ ID NO: 122881 - DNA, 25 bp, Homo sapien
ttgataagcgttgggccttctctgc

SEQ ID NO: 122882 - DNA, 25 bp, Homo sapien
gggagagacattactccggttacat

SEQ ID NO: 122883 - DNA, 25 bp, Homo sapien
ttctctgccaatacctggcgcattt

SEQ ID NO: 122884 - DNA, 25 bp, Homo sapien
ttaacacaagccatcccctccaagc

SEQ ID NO: 122885 - DNA, 25 bp, Homo sapien
ccctgacacccgcacggtttagtgg

SEQ ID NO: 122886 - DNA, 25 bp, Homo sapien
cctgacacccgcacggtttagtggg

SEQ ID NO: 122887 - DNA, 25 bp, Homo sapien
aagcaacttaacacaagccatcccc

SEQ ID NO: 122888 - DNA, 25 bp, Homo sapien
tacaacacctctgaggaatttgggc

SEQ ID NO: 122889 - DNA, 25 bp, Homo sapien
gagccagtcctcaaagcgagaatag

SEQ ID NO: 122890 - DNA, 25 bp, Homo sapien
cgtcctctcagctgacttgagccag

SEQ ID NO: 122891 - DNA, 25 bp, Homo sapien
tctttggcactcgtgtacaacacct

SEQ ID NO: 122892 - DNA, 25 bp, Homo sapien
catccccaaactgcaatggcagcag

SEQ ID NO: 122893 - DNA, 25 bp, Homo sapien
aagttcattacatagcagctggagt

SEQ ID NO: 122894 - DNA, 25 bp, Homo sapien
tggagtacatcagcaatgtcttgca

SEQ ID NO: 122895 - DNA, 25 bp, Homo sapien
gaagctggctacttagaggaagtca

SEQ ID NO: 122896 - DNA, 25 bp, Homo sapien
gggccagccgccggtactgcttgtt

SEQ ID NO: 122897 - DNA, 25 bp, Homo sapien
gagccgctcatgaatctgccgctga

SEQ ID NO: 122898 - DNA, 25 bp, Homo sapien
ccagctgagtgagccgctcatgaat

SEQ ID NO: 122899 - DNA, 25 bp, Homo sapien
cgtgtctgtgcggttctcccgggcc

SEQ ID NO: 122900 - DNA, 25 bp, Homo sapien
ttgtcccagcgctggttgccctcgt

SEQ ID NO: 122901 - DNA, 25 bp, Homo sapien
gacccgcctctgaaggttgtcccag

SEQ ID NO: 122902 - DNA, 25 bp, Homo sapien
tcccagcgctggttgccctcgtgga

SEQ ID NO: 122903 - DNA, 25 bp, Homo sapien
tgagtctccgcaggacggctgtgac

SEQ ID NO: 122904 - DNA, 25 bp, Homo sapien
cgtatcgtgcgttatgtctcctgga

SEQ ID NO: 122905 - DNA, 25 bp, Homo sapien
ctgctttgtgccacaagcctgccat

SEQ ID NO: 122906 - DNA, 25 bp, Homo sapien
tctcctggaaaatctacacccgagc

SEQ ID NO: 122907 - DNA, 25 bp, Homo sapien
aatctacacccgagccaggtgcaga

SEQ ID NO: 122908 - DNA, 25 bp, Homo sapien
tctgagaagtgctccacgttggtca

SEQ ID NO: 122909 - DNA, 25 bp, Homo sapien
tcggcgtcactctctgagaagtgct

SEQ ID NO: 122910 - DNA, 25 bp, Homo sapien
gcgcatcttgtcatcggcgtcactc

SEQ ID NO: 122911 - DNA, 25 bp, Homo sapien
ttgtcatcggcgtcactctctgaga

SEQ ID NO: 122912 - DNA, 25 bp, Homo sapien
ctggaccgtaaagaacagtatcctt

SEQ ID NO: 122913 - DNA, 25 bp, Homo sapien
actggtgacacccatactcctggac

SEQ ID NO: 122914 - DNA, 25 bp, Homo sapien
catactcctggaccgtaaagaacag

SEQ ID NO: 122915 - DNA, 25 bp, Homo sapien
gacacccatactcctggaccgtaaa

SEQ ID NO: 122916 - DNA, 25 bp, Homo sapien
ttaatgtaatttcctgttggaagcc

SEQ ID NO: 122917 - DNA, 25 bp, Homo sapien
caatgagctgatcaatcttgttggt

SEQ ID NO: 122918 - DNA, 25 bp, Homo sapien
gcacagcatccaggggctcgctctt

SEQ ID NO: 122919 - DNA, 25 bp, Homo sapien
ctggcagtagcggtggagttcctcc

SEQ ID NO: 122920 - DNA, 25 bp, Homo sapien
tgagccgccggtggaaccgggagac

SEQ ID NO: 122921 - DNA, 25 bp, Homo sapien
aaccacagtatccagttgttagaat

SEQ ID NO: 122922 - DNA, 25 bp, Homo sapien
ccacagtatccagttgttagaatta

SEQ ID NO: 122923 - DNA, 25 bp, Homo sapien
accacagtatccagttgttagaatt

SEQ ID NO: 122924 - DNA, 25 bp, Homo sapien
ggagatgacggttcctcgctctctc

SEQ ID NO: 122925 - DNA, 25 bp, Homo sapien
tcgtcctcttcgtgagaggaggagc

SEQ ID NO: 122926 - DNA, 25 bp, Homo sapien
cgtttacgccaagaatcagtctgga

SEQ ID NO: 122927 - DNA, 25 bp, Homo sapien
acagtgcgctgtagtatgggccctc

SEQ ID NO: 122928 - DNA, 25 bp, Homo sapien
tccagccaactcctgactgtccaaa

SEQ ID NO: 122929 - DNA, 25 bp, Homo sapien
caggacactgggtatcaaagggaga

SEQ ID NO: 122930 - DNA, 25 bp, Homo sapien
gtatcaaagggagaagctcagtctg

SEQ ID NO: 122931 - DNA, 25 bp, Homo sapien
tgatgagtctcccagacagccagag

SEQ ID NO: 122932 - DNA, 25 bp, Homo sapien
atgcctcaggattttcagggatttc

SEQ ID NO: 122933 - DNA, 25 bp, Homo sapien
gacgctttcaaagtttttgtggtca

SEQ ID NO: 122934 - DNA, 25 bp, Homo sapien
aagatatgcctcaggattttcaggg

SEQ ID NO: 122935 - DNA, 25 bp, Homo sapien
ggtcattttaagatatgcctcagga

SEQ ID NO: 122936 - DNA, 25 bp, Homo sapien
tctctcctactgaacgggtcacggg

SEQ ID NO: 122937 - DNA, 25 bp, Homo sapien
cactagatgggtacacaacggagca

SEQ ID NO: 122938 - DNA, 25 bp, Homo sapien
ggcccatgccaaaggacttcagtta

SEQ ID NO: 122939 - DNA, 25 bp, Homo sapien
cacgggtgacatggcatcaggttac

SEQ ID NO: 122940 - DNA, 25 bp, Homo sapien
aagggctgtcgggaacatgccacga

SEQ ID NO: 122941 - DNA, 25 bp, Homo sapien
cttgtagtgatgctcgggacaggaa

SEQ ID NO: 122942 - DNA, 25 bp, Homo sapien
ttgcttgtagtgatgctcgggacag

SEQ ID NO: 122943 - DNA, 25 bp, Homo sapien
cacgagtggccatccgaaatggatt

SEQ ID NO: 122944 - DNA, 25 bp, Homo sapien
tggtttataaggggtgctggacgca

SEQ ID NO: 122945 - DNA, 25 bp, Homo sapien
ggtgctggacgcagggggaacaggt

SEQ ID NO: 122946 - DNA, 25 bp, Homo sapien
atagggtggtttataaggggtgctg

SEQ ID NO: 122947 - DNA, 25 bp, Homo sapien
tttataaggggtgctggacgcaggg

SEQ ID NO: 122948 - DNA, 25 bp, Homo sapien
tactcccagtgaagttaagacttac

SEQ ID NO: 122949 - DNA, 25 bp, Homo sapien
ggctgtactcccagtgaagttaaga

SEQ ID NO: 122950 - DNA, 25 bp, Homo sapien
agacataggctgtactcccagtgaa

SEQ ID NO: 122951 - DNA, 25 bp, Homo sapien
cataggctgtactcccagtgaagtt

SEQ ID NO: 122952 - DNA, 25 bp, Homo sapien
cagaggtcagggactgcggtctttc

SEQ ID NO: 122953 - DNA, 25 bp, Homo sapien
gcctagccagagcatgccaagaact

SEQ ID NO: 122954 - DNA, 25 bp, Homo sapien
ttgaaaccggccaggtgaggaacac

SEQ ID NO: 122955 - DNA, 25 bp, Homo sapien
aagggatagccaagccacatgagcc

SEQ ID NO: 122956 - DNA, 25 bp, Homo sapien
tatcttgctaggaatacagtggtgc

SEQ ID NO: 122957 - DNA, 25 bp, Homo sapien
tctgttatcacacagccgattgggc

SEQ ID NO: 122958 - DNA, 25 bp, Homo sapien
cactctgtagaggtggttggcatca

SEQ ID NO: 122959 - DNA, 25 bp, Homo sapien
caatttgttgagcttaccagacggt

SEQ ID NO: 122960 - DNA, 25 bp, Homo sapien
ttctttgccaccatccgtgcctgga

SEQ ID NO: 122961 - DNA, 25 bp, Homo sapien
gccaccatccgtgcctggaggtaat

SEQ ID NO: 122962 - DNA, 25 bp, Homo sapien
ggttgccattcaggactcgcgggcc

SEQ ID NO: 122963 - DNA, 25 bp, Homo sapien
gactgctgctctgtgataccggcca

SEQ ID NO: 122964 - DNA, 25 bp, Homo sapien
ttgccatctttaacatttccagctc

SEQ ID NO: 122965 - DNA, 25 bp, Homo sapien
gcttattgtgaagctcctgtgcttg

SEQ ID NO: 122966 - DNA, 25 bp, Homo sapien
tcagccaagtagtgatggcgctgat

SEQ ID NO: 122967 - DNA, 25 bp, Homo sapien
gatggcgctgatatcagagttcagc

SEQ ID NO: 122968 - DNA, 25 bp, Homo sapien
ggcactgcatgagcgactgtcgtaa

SEQ ID NO: 122969 - DNA, 25 bp, Homo sapien
ctcagctggcggagtctactttgga

SEQ ID NO: 122970 - DNA, 25 bp, Homo sapien
gttgacagagaccactaatgccttg

SEQ ID NO: 122971 - DNA, 25 bp, Homo sapien
gggctctcggtttgcagaaattcct

SEQ ID NO: 122972 - DNA, 25 bp, Homo sapien
cagagcgcggccgtgtcttagagcc

SEQ ID NO: 122973 - DNA, 25 bp, Homo sapien
acaacacatcagagcgcggccgtgt

SEQ ID NO: 122974 - DNA, 25 bp, Homo sapien
aaacaacacatcagagcgcggccgt

SEQ ID NO: 122975 - DNA, 25 bp, Homo sapien
atcagagcgcggccgtgtcttagag

SEQ ID NO: 122976 - DNA, 25 bp, Homo sapien
aaccacagcagcagattttgactca

SEQ ID NO: 122977 - DNA, 25 bp, Homo sapien
accacagcagcagattttgactcaa

SEQ ID NO: 122978 - DNA, 25 bp, Homo sapien
taaccacagcagcagattttgactc

SEQ ID NO: 122979 - DNA, 25 bp, Homo sapien
ctaaccacagcagcagattttgact

SEQ ID NO: 122980 - DNA, 25 bp, Homo sapien
ctccgacactctaggagagcccggg

SEQ ID NO: 122981 - DNA, 25 bp, Homo sapien
cattagttccctccgacactctagg

SEQ ID NO: 122982 - DNA, 25 bp, Homo sapien
gggtctgcctttggatcggtgacat

SEQ ID NO: 122983 - DNA, 25 bp, Homo sapien
tggatcggtgacatgagccttctgc

SEQ ID NO: 122984 - DNA, 25 bp, Homo sapien
ccacatgaggttattagacagtgca

SEQ ID NO: 122985 - DNA, 25 bp, Homo sapien
aaattcagtttcagtcataatagcc

SEQ ID NO: 122986 - DNA, 25 bp, Homo sapien
ttcagtttcagtcataatagccaca

SEQ ID NO: 122987 - DNA, 25 bp, Homo sapien
cagtttcagtcataatagccacatt

SEQ ID NO: 122988 - DNA, 25 bp, Homo sapien
aaacagataaagtgtgtgaaacagt

SEQ ID NO: 122989 - DNA, 25 bp, Homo sapien
tgtgaaacagtgacctgtccaaagg

SEQ ID NO: 122990 - DNA, 25 bp, Homo sapien
tgtgtgaaacagtgacctgtccaaa

SEQ ID NO: 122991 - DNA, 25 bp, Homo sapien
aacagataaagtgtgtgaaacagtg

SEQ ID NO: 122992 - DNA, 25 bp, Homo sapien
gaggttgacgttctaccagctcctt

SEQ ID NO: 122993 - DNA, 25 bp, Homo sapien
gagaaggctgtttgaaatctcctgt

SEQ ID NO: 122994 - DNA, 25 bp, Homo sapien
cagcttcaatacagtcttctccatg

SEQ ID NO: 122995 - DNA, 25 bp, Homo sapien
tctccatgtcccttaatgagaaggc

SEQ ID NO: 122996 - DNA, 25 bp, Homo sapien
ccctgcaaggccattaaatcttggg

SEQ ID NO: 122997 - DNA, 25 bp, Homo sapien
gccattaaatcttgggacacttgct

SEQ ID NO: 122998 - DNA, 25 bp, Homo sapien
ccgtaactgtttgagtttcttctca

SEQ ID NO: 122999 - DNA, 25 bp, Homo sapien
gagtttcttctcaataacatgcacc

SEQ ID NO: 123000 - DNA, 25 bp, Homo sapien
tgtaatacggcaatctttacagtta

SEQ ID NO: 123001 - DNA, 25 bp, Homo sapien
ttagagcattgctacaacactgctg

SEQ ID NO: 123002 - DNA, 25 bp, Homo sapien
cggcaatctttacagttaaaagcta

SEQ ID NO: 123003 - DNA, 25 bp, Homo sapien
cattgctacaacactgctgtcctgt

SEQ ID NO: 123004 - DNA, 25 bp, Homo sapien
tctacctcgtcgaagctgggcaggg

SEQ ID NO: 123005 - DNA, 25 bp, Homo sapien
cccgagtctacctcgtcgaagctgg

SEQ ID NO: 123006 - DNA, 25 bp, Homo sapien
gagtctacctcgtcgaagctgggca

SEQ ID NO: 123007 - DNA, 25 bp, Homo sapien
gagctggcacggatgttgcaggagg

SEQ ID NO: 123008 - DNA, 25 bp, Homo sapien
ctcctcgccttctgtagttctcact

SEQ ID NO: 123009 - DNA, 25 bp, Homo sapien
cctcctcgccttctgtagttctcac

SEQ ID NO: 123010 - DNA, 25 bp, Homo sapien
gggcaaagttgttggcctgagtgca

SEQ ID NO: 123011 - DNA, 25 bp, Homo sapien
gagtgcagctgtagtcttcttcgga

SEQ ID NO: 123012 - DNA, 25 bp, Homo sapien
tggcctgagtgcagctgtagtcttc

SEQ ID NO: 123013 - DNA, 25 bp, Homo sapien
ggaaggagcgctgtggccgtgtgct

SEQ ID NO: 123014 - DNA, 25 bp, Homo sapien
atgtggggggtggcccattggtgta

SEQ ID NO: 123015 - DNA, 25 bp, Homo sapien
tgtggggggtggcccattggtgtac

SEQ ID NO: 123016 - DNA, 25 bp, Homo sapien
ctatgtggggggtggcccattggtg

SEQ ID NO: 123017 - DNA, 25 bp, Homo sapien
tatgtggggggtggcccattggtgt

SEQ ID NO: 123018 - DNA, 25 bp, Homo sapien
ccagaagaagtctgcacaggtcccg

SEQ ID NO: 123019 - DNA, 25 bp, Homo sapien
ccgggaccttgccaacactaagtca

SEQ ID NO: 123020 - DNA, 25 bp, Homo sapien
agcccgtgctgggtaagcccagaag

SEQ ID NO: 123021 - DNA, 25 bp, Homo sapien
caggtggtgtagcactgtggccagc

SEQ ID NO: 123022 - DNA, 25 bp, Homo sapien
caaaaacatccctatcaagtcggta

SEQ ID NO: 123023 - DNA, 25 bp, Homo sapien
gattgtttccatcagctaagggtgc

SEQ ID NO: 123024 - DNA, 25 bp, Homo sapien
taagggtgcctatgagtttctgaac

SEQ ID NO: 123025 - DNA, 25 bp, Homo sapien
cattttggtgtataaccggcagctc

SEQ ID NO: 123026 - DNA, 25 bp, Homo sapien
gagcagtgaccctctaatcaactcg

SEQ ID NO: 123027 - DNA, 25 bp, Homo sapien
aagatggagactcttttgcctgaag

SEQ ID NO: 123028 - DNA, 25 bp, Homo sapien
agtgaccctctaatcaactcggtgg

SEQ ID NO: 123029 - DNA, 25 bp, Homo sapien
cctgaagcaacgatggagcagtgac

SEQ ID NO: 123030 - DNA, 25 bp, Homo sapien
gcatctctacttaagggcagaaaag

SEQ ID NO: 123031 - DNA, 25 bp, Homo sapien
ggcagaaaaggcctctcaaacactc

SEQ ID NO: 123032 - DNA, 25 bp, Homo sapien
ttgtcccgcatctctacttaagggc

SEQ ID NO: 123033 - DNA, 25 bp, Homo sapien
cactgcaactttgacttgtcccgca

SEQ ID NO: 123034 - DNA, 25 bp, Homo sapien
gctcacaaaagtcctggtatccagt

SEQ ID NO: 123035 - DNA, 25 bp, Homo sapien
gaaagggcacctgaacacaaatgct

SEQ ID NO: 123036 - DNA, 25 bp, Homo sapien
tgatgaaaaccagggctagtcttcc

SEQ ID NO: 123037 - DNA, 25 bp, Homo sapien
gaaaatgtcccttgcatgtgggcaa

SEQ ID NO: 123038 - DNA, 25 bp, Homo sapien
cacaggcagtccaagtccagtgctg

SEQ ID NO: 123039 - DNA, 25 bp, Homo sapien
caacctgacatgcacggctgctgtg

SEQ ID NO: 123040 - DNA, 25 bp, Homo sapien
taaaactactcatggcaaagcttgg

SEQ ID NO: 123041 - DNA, 25 bp, Homo sapien
tgcctagcgggccagtattgctcct

SEQ ID NO: 123042 - DNA, 25 bp, Homo sapien
ggaagctggctcacttgctgaacgc

SEQ ID NO: 123043 - DNA, 25 bp, Homo sapien
ttagtctgtctgcattaggccaggc

SEQ ID NO: 123044 - DNA, 25 bp, Homo sapien
gactagatatactcgccacggcaag

SEQ ID NO: 123045 - DNA, 25 bp, Homo sapien
tgaacgccgtgaccgatgctttggt

SEQ ID NO: 123046 - DNA, 25 bp, Homo sapien
gatgtgttcctgcatgcgttgctca

SEQ ID NO: 123047 - DNA, 25 bp, Homo sapien
tactttgctgccattgggatgccac

SEQ ID NO: 123048 - DNA, 25 bp, Homo sapien
tccagatggtggctagaaagtaggt

SEQ ID NO: 123049 - DNA, 25 bp, Homo sapien
tgccactcaagcgagatgcagaggt

SEQ ID NO: 123050 - DNA, 25 bp, Homo sapien
cagtctcatgacagccaagactcag

SEQ ID NO: 123051 - DNA, 25 bp, Homo sapien
tcatgacagccaagactcagcagct

SEQ ID NO: 123052 - DNA, 25 bp, Homo sapien
atcagtctcatgacagccaagactc

SEQ ID NO: 123053 - DNA, 25 bp, Homo sapien
ccatcatcagtctcatgacagccaa

SEQ ID NO: 123054 - DNA, 25 bp, Homo sapien
cattataatgacctttgtgcctctt

SEQ ID NO: 123055 - DNA, 25 bp, Homo sapien
tacttgcccacgaatctttgagaac

SEQ ID NO: 123056 - DNA, 25 bp, Homo sapien
tttcgtgattaaactcttgtgctta

SEQ ID NO: 123057 - DNA, 25 bp, Homo sapien
tgtaatctcatacaaacgtatgtat

SEQ ID NO: 123058 - DNA, 25 bp, Homo sapien
tacactggtcagtctcttcagctaa

SEQ ID NO: 123059 - DNA, 25 bp, Homo sapien
gattgataagtgacacagttacact

SEQ ID NO: 123060 - DNA, 25 bp, Homo sapien
gtctcttcagctaatacccattgtt

SEQ ID NO: 123061 - DNA, 25 bp, Homo sapien
gaagcaacagattgataagtgacac

SEQ ID NO: 123062 - DNA, 25 bp, Homo sapien
tccactgggctaatgtgctcttcac

SEQ ID NO: 123063 - DNA, 25 bp, Homo sapien
aatcgcagcgcaggttgtgttgaca

SEQ ID NO: 123064 - DNA, 25 bp, Homo sapien
taagacatgcgctgtccaatcgcag

SEQ ID NO: 123065 - DNA, 25 bp, Homo sapien
gagccaatgtgcacgttccactggg

SEQ ID NO: 123066 - DNA, 25 bp, Homo sapien
tatgtttcaatctgggatctacctc

SEQ ID NO: 123067 - DNA, 25 bp, Homo sapien
ctttagagtcagactgtgtatgttt

SEQ ID NO: 123068 - DNA, 25 bp, Homo sapien
cctcttatattgtaggtttagacaa

SEQ ID NO: 123069 - DNA, 25 bp, Homo sapien
ctgcaactaatatcagagccaaggg

SEQ ID NO: 123070 - DNA, 25 bp, Homo sapien
ctttcattttcctctggggtttgca

SEQ ID NO: 123071 - DNA, 25 bp, Homo sapien
tttcattttcctctggggtttgcat

SEQ ID NO: 123072 - DNA, 25 bp, Homo sapien
tagggcctgtacatcgtacttcagg

SEQ ID NO: 123073 - DNA, 25 bp, Homo sapien
tacttgtcttcaggtgtggcaggct

SEQ ID NO: 123074 - DNA, 25 bp, Homo sapien
caagtgttcgcttccatacagaggg

SEQ ID NO: 123075 - DNA, 25 bp, Homo sapien
tctgttgccccagaacaggagccag

SEQ ID NO: 123076 - DNA, 25 bp, Homo sapien
ggcaaagcagtagattccctgaagc

SEQ ID NO: 123077 - DNA, 25 bp, Homo sapien
gaaagcaaggagtcccaaattgagg

SEQ ID NO: 123078 - DNA, 25 bp, Homo sapien
ggaattttgggagcttcatttgccc

SEQ ID NO: 123079 - DNA, 25 bp, Homo sapien
aaatcattgctatgggtggcaaagc

SEQ ID NO: 123080 - DNA, 25 bp, Homo sapien
cattaaccttacagagtgcctagct

SEQ ID NO: 123081 - DNA, 25 bp, Homo sapien
gagtaagagcaaagatcatcccctg

SEQ ID NO: 123082 - DNA, 25 bp, Homo sapien
taagttatcgccagaaagcaggagg

SEQ ID NO: 123083 - DNA, 25 bp, Homo sapien
gagaggttcctctaacaccatgagg

SEQ ID NO: 123084 - DNA, 25 bp, Homo sapien
cacagtgcgcctttgtattcggcgg

SEQ ID NO: 123085 - DNA, 25 bp, Homo sapien
tccagccaatcagggagtagagttg

SEQ ID NO: 123086 - DNA, 25 bp, Homo sapien
gaatccggccgtaattccagccaat

SEQ ID NO: 123087 - DNA, 25 bp, Homo sapien
ctggactcgacagcagatgtggaac

SEQ ID NO: 123088 - DNA, 25 bp, Homo sapien
gcatgcgcagttcggaaggacccga

SEQ ID NO: 123089 - DNA, 25 bp, Homo sapien
gcgcagttcggaaggacccgagtcc

SEQ ID NO: 123090 - DNA, 25 bp, Homo sapien
gcgcatgcgcagttcggaaggaccc

SEQ ID NO: 123091 - DNA, 25 bp, Homo sapien
gtggcgcatgcgcagttcggaagga

SEQ ID NO: 123092 - DNA, 25 bp, Homo sapien
ccaacccacgtgcttagggactggc

SEQ ID NO: 123093 - DNA, 25 bp, Homo sapien
gatggacaccaccaatatcgaggtt

SEQ ID NO: 123094 - DNA, 25 bp, Homo sapien
cccacgtgcttagggactggccagg

SEQ ID NO: 123095 - DNA, 25 bp, Homo sapien
ggcctttattagtccgctgcccacg

SEQ ID NO: 123096 - DNA, 25 bp, Homo sapien
gcggagatctccttcccgttcagga

SEQ ID NO: 123097 - DNA, 25 bp, Homo sapien
atctccttcccgttcaggatttctg

SEQ ID NO: 123098 - DNA, 25 bp, Homo sapien
ccgttcaggatttctgctggcgcca

SEQ ID NO: 123099 - DNA, 25 bp, Homo sapien
cgttcaggatttctgctggcgccat

SEQ ID NO: 123100 - DNA, 25 bp, Homo sapien
tacaataatatagctcaaaagaaga

SEQ ID NO: 123101 - DNA, 25 bp, Homo sapien
taactgggattggacctggatagag

SEQ ID NO: 123102 - DNA, 25 bp, Homo sapien
tcaagtcagtattctctacaataat

SEQ ID NO: 123103 - DNA, 25 bp, Homo sapien
tggtgctgggcatagcctaataccc

SEQ ID NO: 123104 - DNA, 25 bp, Homo sapien
gtgtgaaaccaggtacttgctcctt

SEQ ID NO: 123105 - DNA, 25 bp, Homo sapien
gatttttcagtctcgcccttatttg

SEQ ID NO: 123106 - DNA, 25 bp, Homo sapien
gagtgacttgatttttcagtctcgc

SEQ ID NO: 123107 - DNA, 25 bp, Homo sapien
tgctccttcaactgagtgacttgat

SEQ ID NO: 123108 - DNA, 25 bp, Homo sapien
tgaggtcttacatctttaagagtgt

SEQ ID NO: 123109 - DNA, 25 bp, Homo sapien
ataaacaatagcttcttgaggtctt

SEQ ID NO: 123110 - DNA, 25 bp, Homo sapien
cttacatctttaagagtgtaaacgg

SEQ ID NO: 123111 - DNA, 25 bp, Homo sapien
gcttcttgaggtcttacatctttaa

SEQ ID NO: 123112 - DNA, 25 bp, Homo sapien
ggatagaaatttagcaagggattaa

SEQ ID NO: 123113 - DNA, 25 bp, Homo sapien
caagggatagaaatttagcaaggga

SEQ ID NO: 123114 - DNA, 25 bp, Homo sapien
gacattcttgatgaacaagggatag

SEQ ID NO: 123115 - DNA, 25 bp, Homo sapien
tgaacaagggatagaaatttagcaa

SEQ ID NO: 123116 - DNA, 25 bp, Homo sapien
gctgccagtaaggaagccacaactt

SEQ ID NO: 123117 - DNA, 25 bp, Homo sapien
ccagatttgatacattccggaattt

SEQ ID NO: 123118 - DNA, 25 bp, Homo sapien
gacatgtttctaagtctgtataact

SEQ ID NO: 123119 - DNA, 25 bp, Homo sapien
tatacctaccactagttatttagtc

SEQ ID NO: 123120 - DNA, 25 bp, Homo sapien
attagatgcttctcgtaggggcttc

SEQ ID NO: 123121 - DNA, 25 bp, Homo sapien
ttagatgcttctcgtaggggcttcc

SEQ ID NO: 123122 - DNA, 25 bp, Homo sapien
ctgccaaaccccaaacagaaagtag

SEQ ID NO: 123123 - DNA, 25 bp, Homo sapien
ttcccactgccaaaccccaaacaga

SEQ ID NO: 123124 - DNA, 25 bp, Homo sapien
cactgccaaaccccaaacagaaagt

SEQ ID NO: 123125 - DNA, 25 bp, Homo sapien
aacagaaagtagaggatatctgcat

SEQ ID NO: 123126 - DNA, 25 bp, Homo sapien
agccttcagcttcacatttatataa

SEQ ID NO: 123127 - DNA, 25 bp, Homo sapien
catttatataaagattggaatcatc

SEQ ID NO: 123128 - DNA, 25 bp, Homo sapien
cagcagccttcagcttcacatttat

SEQ ID NO: 123129 - DNA, 25 bp, Homo sapien
aaagattggaatcatctctgttgcc

SEQ ID NO: 123130 - DNA, 25 bp, Homo sapien
tgtggttgttcttggtaacttaatg

SEQ ID NO: 123131 - DNA, 25 bp, Homo sapien
ctaaaggtagctgcactaagaaccc

SEQ ID NO: 123132 - DNA, 25 bp, Homo sapien
ggtagctgcactaagaacccatgta

SEQ ID NO: 123133 - DNA, 25 bp, Homo sapien
gtagctgcactaagaacccatgtac

SEQ ID NO: 123134 - DNA, 25 bp, Homo sapien
tctaaaggtagctgcactaagaacc

SEQ ID NO: 123135 - DNA, 25 bp, Homo sapien
tgaggtcacctctagcaagtttccc

SEQ ID NO: 123136 - DNA, 25 bp, Homo sapien
tctagcaagtttcccagcattgatg

SEQ ID NO: 123137 - DNA, 25 bp, Homo sapien
ctctttgatgagttccaagcatccc

SEQ ID NO: 123138 - DNA, 25 bp, Homo sapien
cttaggcgtacaaggaatgaaacag

SEQ ID NO: 123139 - DNA, 25 bp, Homo sapien
catcggggccccaactattttactg

SEQ ID NO: 123140 - DNA, 25 bp, Homo sapien
gccccaactattttactgcgcccaa

SEQ ID NO: 123141 - DNA, 25 bp, Homo sapien
gaagcaagtcatgcatcggggcccc

SEQ ID NO: 123142 - DNA, 25 bp, Homo sapien
agcaagtcatgcatcggggccccaa

SEQ ID NO: 123143 - DNA, 25 bp, Homo sapien
ccacagtcgatgactattgccccag

SEQ ID NO: 123144 - DNA, 25 bp, Homo sapien
attgccccaggtttgatccactccc

SEQ ID NO: 123145 - DNA, 25 bp, Homo sapien
ctattgccccaggtttgatccactc

SEQ ID NO: 123146 - DNA, 25 bp, Homo sapien
tgccccaggtttgatccactcccct

SEQ ID NO: 123147 - DNA, 25 bp, Homo sapien
cgccaggaacaggagtgatgaagct

SEQ ID NO: 123148 - DNA, 25 bp, Homo sapien
gcattgcaactgtcatgggccctac

SEQ ID NO: 123149 - DNA, 25 bp, Homo sapien
attgcaactgtcatgggccctacgc

SEQ ID NO: 123150 - DNA, 25 bp, Homo sapien
atgaagctcgccctctctttggcct

SEQ ID NO: 123151 - DNA, 25 bp, Homo sapien
tccactttcctggcttaaatttctc

SEQ ID NO: 123152 - DNA, 25 bp, Homo sapien
ggttaaggttgttatactgaatcat

SEQ ID NO: 123153 - DNA, 25 bp, Homo sapien
acaggtgtcttgaggttaaggttgt

SEQ ID NO: 123154 - DNA, 25 bp, Homo sapien
ccaggaaacgcttggcactctctac

SEQ ID NO: 123155 - DNA, 25 bp, Homo sapien
cggtttacaagatcgtgatatatca

SEQ ID NO: 123156 - DNA, 25 bp, Homo sapien
ataattctacctcttcagacagcag

SEQ ID NO: 123157 - DNA, 25 bp, Homo sapien
tagtgctgacagcagaactttggcc

SEQ ID NO: 123158 - DNA, 25 bp, Homo sapien
gccagcttaccaatgggcttcggtt

SEQ ID NO: 123159 - DNA, 25 bp, Homo sapien
tagcagatcctagagaatgactcgt

SEQ ID NO: 123160 - DNA, 25 bp, Homo sapien
cagatcctagagaatgactcgtaat

SEQ ID NO: 123161 - DNA, 25 bp, Homo sapien
ctagcagatcctagagaatgactcg

SEQ ID NO: 123162 - DNA, 25 bp, Homo sapien
gcagatcctagagaatgactcgtaa

SEQ ID NO: 123163 - DNA, 25 bp, Homo sapien
tagagatgggcaccaagggcttgca

SEQ ID NO: 123164 - DNA, 25 bp, Homo sapien
tctggtagagatgggcaccaagggc

SEQ ID NO: 123165 - DNA, 25 bp, Homo sapien
gcaccaagggcttgcactagcccga

SEQ ID NO: 123166 - DNA, 25 bp, Homo sapien
gggcaccaagggcttgcactagccc

SEQ ID NO: 123167 - DNA, 25 bp, Homo sapien
ggaatgacctgggagtagccgcctc

SEQ ID NO: 123168 - DNA, 25 bp, Homo sapien
cataggaatgacctgggagtagccg

SEQ ID NO: 123169 - DNA, 25 bp, Homo sapien
ttccataggaatgacctgggagtag

SEQ ID NO: 123170 - DNA, 25 bp, Homo sapien
gacctgggagtagccgcctcctgca

SEQ ID NO: 123171 - DNA, 25 bp, Homo sapien
cgcagcaacgaggttattagctgca

SEQ ID NO: 123172 - DNA, 25 bp, Homo sapien
gcaacgaggttattagctgcagtga

SEQ ID NO: 123173 - DNA, 25 bp, Homo sapien
tggccgcagcaacgaggttattagc

SEQ ID NO: 123174 - DNA, 25 bp, Homo sapien
ccgagcatcaatggccgcagcaacg

SEQ ID NO: 123175 - DNA, 25 bp, Homo sapien
actgatggcaccaaacgattaaaga

SEQ ID NO: 123176 - DNA, 25 bp, Homo sapien
tttggatgtcagagaaccttctcac

SEQ ID NO: 123177 - DNA, 25 bp, Homo sapien
gatggcaccaaacgattaaagagag

SEQ ID NO: 123178 - DNA, 25 bp, Homo sapien
ctttaaccttcggatttggatgtca

SEQ ID NO: 123179 - DNA, 25 bp, Homo sapien
tcaatgtccaatcttgcaaatctgt

SEQ ID NO: 123180 - DNA, 25 bp, Homo sapien
tctttgccaagttatggtttctgga

SEQ ID NO: 123181 - DNA, 25 bp, Homo sapien
cagtgtggtagggtcagtcttttca

SEQ ID NO: 123182 - DNA, 25 bp, Homo sapien
gcaaatctgtttatctcttcatctg

SEQ ID NO: 123183 - DNA, 25 bp, Homo sapien
ccgtgtgtgacccttctccgttgga

SEQ ID NO: 123184 - DNA, 25 bp, Homo sapien
cgtccgtgtgtgacccttctccgtt

SEQ ID NO: 123185 - DNA, 25 bp, Homo sapien
tgtgtgacccttctccgttggagcc

SEQ ID NO: 123186 - DNA, 25 bp, Homo sapien
tgacccttctccgttggagcctgtc

SEQ ID NO: 123187 - DNA, 25 bp, Homo sapien
gatctagtgcctctgaactaatttc

SEQ ID NO: 123188 - DNA, 25 bp, Homo sapien
tatcagtcgtatgagagaggatgga

SEQ ID NO: 123189 - DNA, 25 bp, Homo sapien
cacacctactcacttccattttaaa

SEQ ID NO: 123190 - DNA, 25 bp, Homo sapien
cctggcagtatcagtcgtatgagag

SEQ ID NO: 123191 - DNA, 25 bp, Homo sapien
cttctagagaagtggtgagagccag

SEQ ID NO: 123192 - DNA, 25 bp, Homo sapien
tctcctttcttactggatgccacca

SEQ ID NO: 123193 - DNA, 25 bp, Homo sapien
tgacattctaggcttacccatgtta

SEQ ID NO: 123194 - DNA, 25 bp, Homo sapien
gtgcagcatcaactcccaccagcaa

SEQ ID NO: 123195 - DNA, 25 bp, Homo sapien
cattctaggcttacccatgttagcc

SEQ ID NO: 123196 - DNA, 25 bp, Homo sapien
tctaggcttacccatgttagccatc

SEQ ID NO: 123197 - DNA, 25 bp, Homo sapien
ggcttgattgcgtccttcataagca

SEQ ID NO: 123198 - DNA, 25 bp, Homo sapien
tccagtgtctgcatgagattgggct

SEQ ID NO: 123199 - DNA, 25 bp, Homo sapien
ttcataagcactgtcagtgcaccac

SEQ ID NO: 123200 - DNA, 25 bp, Homo sapien
taagcactgtcagtgcaccactcac

SEQ ID NO: 123201 - DNA, 25 bp, Homo sapien
gtgctttataaccactctgctctga

SEQ ID NO: 123202 - DNA, 25 bp, Homo sapien
gccaccgcgccttgcaagtgtgctt

SEQ ID NO: 123203 - DNA, 25 bp, Homo sapien
cgcgccttgcaagtgtgctttataa

SEQ ID NO: 123204 - DNA, 25 bp, Homo sapien
caagtgtgctttataaccactctgc

SEQ ID NO: 123205 - DNA, 25 bp, Homo sapien
cgatgttggcaaacgggccagcatg

SEQ ID NO: 123206 - DNA, 25 bp, Homo sapien
tggaggaattgccatgtgcgatgtt

SEQ ID NO: 123207 - DNA, 25 bp, Homo sapien
tgccatgtgcgatgttggcaaacgg

SEQ ID NO: 123208 - DNA, 25 bp, Homo sapien
catgtgcgatgttggcaaacgggcc

SEQ ID NO: 123209 - DNA, 25 bp, Homo sapien
cagtaaaaatgccatcccaattccc

SEQ ID NO: 123210 - DNA, 25 bp, Homo sapien
gaggccggaataccggcatttgatg

SEQ ID NO: 123211 - DNA, 25 bp, Homo sapien
ggcagaggccggaataccggcattt

SEQ ID NO: 123212 - DNA, 25 bp, Homo sapien
agcaccaccacgtgggggcagaggc

SEQ ID NO: 123213 - DNA, 25 bp, Homo sapien
ggaataccggcatttgatgttaaaa

SEQ ID NO: 123214 - DNA, 25 bp, Homo sapien
tgtatgtaagccttgggaagaggca

SEQ ID NO: 123215 - DNA, 25 bp, Homo sapien
tcctgtatgtaagccttgggaagag

SEQ ID NO: 123216 - DNA, 25 bp, Homo sapien
ctcctgtatgtaagccttgggaaga

SEQ ID NO: 123217 - DNA, 25 bp, Homo sapien
tgggaagaggcagtccagcagtgac

SEQ ID NO: 123218 - DNA, 25 bp, Homo sapien
tcaaggtgtggtgctttctaggaca

SEQ ID NO: 123219 - DNA, 25 bp, Homo sapien
gacaccctatgtgggacaattctat

SEQ ID NO: 123220 - DNA, 25 bp, Homo sapien
gagaatcaaccactggtctagggca

SEQ ID NO: 123221 - DNA, 25 bp, Homo sapien
gggcagtggcttattgacaccctat

SEQ ID NO: 123222 - DNA, 25 bp, Homo sapien
ttgaatgcattcacggccactacta

SEQ ID NO: 123223 - DNA, 25 bp, Homo sapien
actactactggaattccaaacattc

SEQ ID NO: 123224 - DNA, 25 bp, Homo sapien
gcattcacggccactactactggaa

SEQ ID NO: 123225 - DNA, 25 bp, Homo sapien
ccactactactggaattccaaacat

SEQ ID NO: 123226 - DNA, 25 bp, Homo sapien
tgagtgcacttcacggcatcaaaag

SEQ ID NO: 123227 - DNA, 25 bp, Homo sapien
gagtgcacttcacggcatcaaaagc

SEQ ID NO: 123228 - DNA, 25 bp, Homo sapien
ccagtgagtgcacttcacggcatca

SEQ ID NO: 123229 - DNA, 25 bp, Homo sapien
agtgagtgcacttcacggcatcaaa

SEQ ID NO: 123230 - DNA, 25 bp, Homo sapien
ctttgtgttgagcttcgggaagtaa

SEQ ID NO: 123231 - DNA, 25 bp, Homo sapien
cttcgggaagtaattcaatgtcatc

SEQ ID NO: 123232 - DNA, 25 bp, Homo sapien
gttgagcttcgggaagtaattcaat

SEQ ID NO: 123233 - DNA, 25 bp, Homo sapien
cgggaagtaattcaatgtcatctgc

SEQ ID NO: 123234 - DNA, 25 bp, Homo sapien
gaaaaccagccccaacgctggcgcg

SEQ ID NO: 123235 - DNA, 25 bp, Homo sapien
caacgctggcgcggatgtcgcgaat

SEQ ID NO: 123236 - DNA, 25 bp, Homo sapien
agccccaacgctggcgcggatgtcg

SEQ ID NO: 123237 - DNA, 25 bp, Homo sapien
cgcggatgtcgcgaatgggcagaat

SEQ ID NO: 123238 - DNA, 25 bp, Homo sapien
tccacagcaatcataataggcccga

SEQ ID NO: 123239 - DNA, 25 bp, Homo sapien
tgggcagtgaactctgctcacttgg

SEQ ID NO: 123240 - DNA, 25 bp, Homo sapien
atttgacaccaagatggtccacagc

SEQ ID NO: 123241 - DNA, 25 bp, Homo sapien
tggtttcggcaacacacttcagacg

SEQ ID NO: 123242 - DNA, 25 bp, Homo sapien
tagcaggaggtgtttccaccttcac

SEQ ID NO: 123243 - DNA, 25 bp, Homo sapien
actatcatcttccatgtggtcacaa

SEQ ID NO: 123244 - DNA, 25 bp, Homo sapien
ttccatgtggtcacaagcagtagca

SEQ ID NO: 123245 - DNA, 25 bp, Homo sapien
caagcagtagcaggaggtgtttcca

SEQ ID NO: 123246 - DNA, 25 bp, Homo sapien
aactcagaaactgatccctgccggg

SEQ ID NO: 123247 - DNA, 25 bp, Homo sapien
gagcaaggccatgtctaaaataaac

SEQ ID NO: 123248 - DNA, 25 bp, Homo sapien
gcccaaggcataaagatagaacatc

SEQ ID NO: 123249 - DNA, 25 bp, Homo sapien
gatcatccgattgcctgggcgacag

SEQ ID NO: 123250 - DNA, 25 bp, Homo sapien
ccgggtggggagtccaggcattgtg

SEQ ID NO: 123251 - DNA, 25 bp, Homo sapien
ggtggggagtccaggcattgtgctc

SEQ ID NO: 123252 - DNA, 25 bp, Homo sapien
cgggtggggagtccaggcattgtgc

SEQ ID NO: 123253 - DNA, 25 bp, Homo sapien
tggggagtccaggcattgtgctcat

SEQ ID NO: 123254 - DNA, 25 bp, Homo sapien
ccaaatcaatatcataaaaacaggg

SEQ ID NO: 123255 - DNA, 25 bp, Homo sapien
tcacctgttctgtttcagggtccaa

SEQ ID NO: 123256 - DNA, 25 bp, Homo sapien
tagaataatccattcacctgttctg

SEQ ID NO: 123257 - DNA, 25 bp, Homo sapien
ctgtttcagggtccaaatcaatatc

SEQ ID NO: 123258 - DNA, 25 bp, Homo sapien
gagccctataattcataaataagct

SEQ ID NO: 123259 - DNA, 25 bp, Homo sapien
cagtttgagccctataattcataaa

SEQ ID NO: 123260 - DNA, 25 bp, Homo sapien
ttttatagcgtcagtttgagcccta

SEQ ID NO: 123261 - DNA, 25 bp, Homo sapien
tgtgaatttttatagcgtcagtttg

SEQ ID NO: 123262 - DNA, 25 bp, Homo sapien
tgtcaacctgtgacaagccatgctg

SEQ ID NO: 123263 - DNA, 25 bp, Homo sapien
attcattggttattgccaactctca

SEQ ID NO: 123264 - DNA, 25 bp, Homo sapien
tcaattcattggttattgccaactc

SEQ ID NO: 123265 - DNA, 25 bp, Homo sapien
acagcagttttctcccctacactgt

SEQ ID NO: 123266 - DNA, 25 bp, Homo sapien
catggttatcagaatgccccttcgc

SEQ ID NO: 123267 - DNA, 25 bp, Homo sapien
ggcaaacccttgcacgtctgaaaat

SEQ ID NO: 123268 - DNA, 25 bp, Homo sapien
ttcgctaatgtccaaatgagggttc

SEQ ID NO: 123269 - DNA, 25 bp, Homo sapien
tcttattgccagtaagacgggcgtt

SEQ ID NO: 123270 - DNA, 25 bp, Homo sapien
gctcttctagggcgtgtccataaat

SEQ ID NO: 123271 - DNA, 25 bp, Homo sapien
cagctcttctagggcgtgtccataa

SEQ ID NO: 123272 - DNA, 25 bp, Homo sapien
gcgtgtccataaatggacttgaaaa

SEQ ID NO: 123273 - DNA, 25 bp, Homo sapien
ccataaatggacttgaaaatgatgc

SEQ ID NO: 123274 - DNA, 25 bp, Homo sapien
tgttccttccatactgcaccattac

SEQ ID NO: 123275 - DNA, 25 bp, Homo sapien
caagcactgaaatgtttcctgttcc

SEQ ID NO: 123276 - DNA, 25 bp, Homo sapien
tgtttcctgttccttccatactgca

SEQ ID NO: 123277 - DNA, 25 bp, Homo sapien
tctctaagcaagcactgaaatgttt

SEQ ID NO: 123278 - DNA, 25 bp, Homo sapien
actcccagtgggcctgaatagacac

SEQ ID NO: 123279 - DNA, 25 bp, Homo sapien
tcctaactcccagtgggcctgaata

SEQ ID NO: 123280 - DNA, 25 bp, Homo sapien
ctaactcccagtgggcctgaataga

SEQ ID NO: 123281 - DNA, 25 bp, Homo sapien
aactcccagtgggcctgaatagaca

SEQ ID NO: 123282 - DNA, 25 bp, Homo sapien
aagtaaacagacatgcatgatttat

SEQ ID NO: 123283 - DNA, 25 bp, Homo sapien
taaagtaaacagacatgcatgattt

SEQ ID NO: 123284 - DNA, 25 bp, Homo sapien
ctaaagtaaacagacatgcatgatt

SEQ ID NO: 123285 - DNA, 25 bp, Homo sapien
aaagtaaacagacatgcatgattta

SEQ ID NO: 123286 - DNA, 25 bp, Homo sapien
tttccttttattctgtggaacgtca

SEQ ID NO: 123287 - DNA, 25 bp, Homo sapien
acatcagcagtgtttagcactggcg

SEQ ID NO: 123288 - DNA, 25 bp, Homo sapien
cagtgtttagcactggcgccagtgg

SEQ ID NO: 123289 - DNA, 25 bp, Homo sapien
gaagaacagagatagaagataaaga

SEQ ID NO: 123290 - DNA, 25 bp, Homo sapien
tgggatgcagcatcctctggaagga

SEQ ID NO: 123291 - DNA, 25 bp, Homo sapien
gactgtattacaacattgacatgga

SEQ ID NO: 123292 - DNA, 25 bp, Homo sapien
cgaggtaggtaccaacagtgctcct

SEQ ID NO: 123293 - DNA, 25 bp, Homo sapien
caaggcagcgctatcatttctgtgg

SEQ ID NO: 123294 - DNA, 25 bp, Homo sapien
cagtgctcctatttccatggtgagg

SEQ ID NO: 123295 - DNA, 25 bp, Homo sapien
gaagggcaaattcggacagacttcc

SEQ ID NO: 123296 - DNA, 25 bp, Homo sapien
tgactagaactcaatgccatatgtg

SEQ ID NO: 123297 - DNA, 25 bp, Homo sapien
cagagtcactcacacagagtatagt

SEQ ID NO: 123298 - DNA, 25 bp, Homo sapien
tataaataacatagcgcaccatagt

SEQ ID NO: 123299 - DNA, 25 bp, Homo sapien
gggagcagttgtcttgtcaaaagcc

SEQ ID NO: 123300 - DNA, 25 bp, Homo sapien
cattttggattaccctgcaagtctg

SEQ ID NO: 123301 - DNA, 25 bp, Homo sapien
caattcttgggtattaggcagtgca

SEQ ID NO: 123302 - DNA, 25 bp, Homo sapien
aatttggctgagattacggcagagc

SEQ ID NO: 123303 - DNA, 25 bp, Homo sapien
tgaccttttcctgcgtgttacaaga

SEQ ID NO: 123304 - DNA, 25 bp, Homo sapien
tcttgaagcaaagcatggatgcctt

SEQ ID NO: 123305 - DNA, 25 bp, Homo sapien
tacaagacgtttgagtgaggcccag

SEQ ID NO: 123306 - DNA, 25 bp, Homo sapien
ttgctgctttgaagactctgacctt

SEQ ID NO: 123307 - DNA, 25 bp, Homo sapien
agatcctgggttgacttagcctttg

SEQ ID NO: 123308 - DNA, 25 bp, Homo sapien
tctccagaagttgtgctattgctca

SEQ ID NO: 123309 - DNA, 25 bp, Homo sapien
ctggaattgcaggtaaaggaggaac

SEQ ID NO: 123310 - DNA, 25 bp, Homo sapien
gagatgccttcacttagatcctggg

SEQ ID NO: 123311 - DNA, 25 bp, Homo sapien
tctgaagttctatcctcaaaaccat

SEQ ID NO: 123312 - DNA, 25 bp, Homo sapien
tatcattagcaaaaacccctacttg

SEQ ID NO: 123313 - DNA, 25 bp, Homo sapien
ctgaaattaagaattgcttagggac

SEQ ID NO: 123314 - DNA, 25 bp, Homo sapien
catcagaggccatttcattaaccag

SEQ ID NO: 123315 - DNA, 25 bp, Homo sapien
ttttctgccgtgactctggagagta

SEQ ID NO: 123316 - DNA, 25 bp, Homo sapien
tttttctgccgtgactctggagagt

SEQ ID NO: 123317 - DNA, 25 bp, Homo sapien
ttttttctgccgtgactctggagag

SEQ ID NO: 123318 - DNA, 25 bp, Homo sapien
acaatcactcaatttacacaatggg

SEQ ID NO: 123319 - DNA, 25 bp, Homo sapien
cattgatgagatcagatgcttccct

SEQ ID NO: 123320 - DNA, 25 bp, Homo sapien
aatacacactttgaatcctaacctg

SEQ ID NO: 123321 - DNA, 25 bp, Homo sapien
gaagtgcactctggtattatggcca

SEQ ID NO: 123322 - DNA, 25 bp, Homo sapien
cagattgagaccagttaatttcgga

SEQ ID NO: 123323 - DNA, 25 bp, Homo sapien
cagaaacctcttaagaatgaatgca

SEQ ID NO: 123324 - DNA, 25 bp, Homo sapien
tggccatgtagcacatataatcaga

SEQ ID NO: 123325 - DNA, 25 bp, Homo sapien
aattcactgtaataggatttggcca

SEQ ID NO: 123326 - DNA, 25 bp, Homo sapien
taaaagagattctaagactccgctg

SEQ ID NO: 123327 - DNA, 25 bp, Homo sapien
gactccgctgagtagtagaccaagt

SEQ ID NO: 123328 - DNA, 25 bp, Homo sapien
tagaccaagtaagatcatcacaaac

SEQ ID NO: 123329 - DNA, 25 bp, Homo sapien
cattctctgggttgtaagaagcaaa

SEQ ID NO: 123330 - DNA, 25 bp, Homo sapien
gagttatgcctaatacgtgtgttga

SEQ ID NO: 123331 - DNA, 25 bp, Homo sapien
catgttgcagcattatccatggctc

SEQ ID NO: 123332 - DNA, 25 bp, Homo sapien
taattgctctctctgtgtactcccc

SEQ ID NO: 123333 - DNA, 25 bp, Homo sapien
tgtcactgctccctaggttgagttc

SEQ ID NO: 123334 - DNA, 25 bp, Homo sapien
aatataagtcttagagtttgatgaa

SEQ ID NO: 123335 - DNA, 25 bp, Homo sapien
gtttgatgaaccctagtgattatca

SEQ ID NO: 123336 - DNA, 25 bp, Homo sapien
tagagtttgatgaaccctagtgatt

SEQ ID NO: 123337 - DNA, 25 bp, Homo sapien
aagtcttagagtttgatgaacccta

SEQ ID NO: 123338 - DNA, 25 bp, Homo sapien
gtacaaatggtgtgttcccactgtc

SEQ ID NO: 123339 - DNA, 25 bp, Homo sapien
tcatgtcaaacgtctgaaggaatga

SEQ ID NO: 123340 - DNA, 25 bp, Homo sapien
tgtacaaatggtgtgttcccactgt

SEQ ID NO: 123341 - DNA, 25 bp, Homo sapien
catgtcaaacgtctgaaggaatgac

SEQ ID NO: 123342 - DNA, 25 bp, Homo sapien
cattcttgatgttgtgagtcagata

SEQ ID NO: 123343 - DNA, 25 bp, Homo sapien
tgagattgcacagtcccaaacctgg

SEQ ID NO: 123344 - DNA, 25 bp, Homo sapien
tctaaatagtagatgaggacaggaa

SEQ ID NO: 123345 - DNA, 25 bp, Homo sapien
ccaaacctggatgtcttaaatacaa

SEQ ID NO: 123346 - DNA, 25 bp, Homo sapien
cactttcgtgtgtatcaggcagata

SEQ ID NO: 123347 - DNA, 25 bp, Homo sapien
tattagcgtatcatcagaactcagc

SEQ ID NO: 123348 - DNA, 25 bp, Homo sapien
aaatctcacgcagttgttttctgga

SEQ ID NO: 123349 - DNA, 25 bp, Homo sapien
tccgtaaagtgggtgtaagcaatac

SEQ ID NO: 123350 - DNA, 25 bp, Homo sapien
cgtgccaggcccactcattattctt

SEQ ID NO: 123351 - DNA, 25 bp, Homo sapien
tccttgtatatagctaaagggtgga

SEQ ID NO: 123352 - DNA, 25 bp, Homo sapien
gagttgtacatggttggttggataa

SEQ ID NO: 123353 - DNA, 25 bp, Homo sapien
tctttgacacaggaaatccttgtat

SEQ ID NO: 123354 - DNA, 25 bp, Homo sapien
accccagaactgagggggtgcctgt

SEQ ID NO: 123355 - DNA, 25 bp, Homo sapien
ggtcacgcggttgtttgtggggagc

SEQ ID NO: 123356 - DNA, 25 bp, Homo sapien
tcacgcggttgtttgtggggagcct

SEQ ID NO: 123357 - DNA, 25 bp, Homo sapien
cttcaccccagaactgagggggtgc

SEQ ID NO: 123358 - DNA, 25 bp, Homo sapien
cgcggtcgcctgtttgttgcaacaa

SEQ ID NO: 123359 - DNA, 25 bp, Homo sapien
caagtttctgcgtcgagctccgagg

SEQ ID NO: 123360 - DNA, 25 bp, Homo sapien
cctctcaagggtaggcttgggacct

SEQ ID NO: 123361 - DNA, 25 bp, Homo sapien
cagctggatggaactgggctcctcc

SEQ ID NO: 123362 - DNA, 25 bp, Homo sapien
agctgcggagattttagggagttta

SEQ ID NO: 123363 - DNA, 25 bp, Homo sapien
ccagagctgcggagattttagggag

SEQ ID NO: 123364 - DNA, 25 bp, Homo sapien
taaggcaaatcagccgcgggaaagg

SEQ ID NO: 123365 - DNA, 25 bp, Homo sapien
ttagggagtttaaggcaaatcagcc

SEQ ID NO: 123366 - DNA, 25 bp, Homo sapien
tgactgtgctcatgccctgctaagg

SEQ ID NO: 123367 - DNA, 25 bp, Homo sapien
ttttcctggctagagggcaagtctg

SEQ ID NO: 123368 - DNA, 25 bp, Homo sapien
cacaaggtcaagagcaagtggctgt

SEQ ID NO: 123369 - DNA, 25 bp, Homo sapien
tgtggtattaatggagaaagcctgc

SEQ ID NO: 123370 - DNA, 25 bp, Homo sapien
gaaaaatagcccaccatgatacagt

SEQ ID NO: 123371 - DNA, 25 bp, Homo sapien
gaggctgggcaacaacattaacatg

SEQ ID NO: 123372 - DNA, 25 bp, Homo sapien
taatgtgaacagagaacatgagtcc

SEQ ID NO: 123373 - DNA, 25 bp, Homo sapien
ggacaaacctaaaatagcagcccag

SEQ ID NO: 123374 - DNA, 25 bp, Homo sapien
tacacatggctaaggagtgagaccc

SEQ ID NO: 123375 - DNA, 25 bp, Homo sapien
cagggatatattggcagtggtcttc

SEQ ID NO: 123376 - DNA, 25 bp, Homo sapien
catctgaaaacagcggtcattgacc

SEQ ID NO: 123377 - DNA, 25 bp, Homo sapien
tatgactattagctgaagtgcccct

SEQ ID NO: 123378 - DNA, 25 bp, Homo sapien
caattttttgtttatttcaatcatg

SEQ ID NO: 123379 - DNA, 25 bp, Homo sapien
atgaataaatgtttaaacaggtaag

SEQ ID NO: 123380 - DNA, 25 bp, Homo sapien
tttgaatgaataaatgtttaaacag

SEQ ID NO: 123381 - DNA, 25 bp, Homo sapien
caggtaagttttattttgcttatca

SEQ ID NO: 123382 - DNA, 25 bp, Homo sapien
acccggccagatcctacacatttta

SEQ ID NO: 123383 - DNA, 25 bp, Homo sapien
tcatcctaacgagacagcacagcat

SEQ ID NO: 123384 - DNA, 25 bp, Homo sapien
ttaatccattcatcctaacgagaca

SEQ ID NO: 123385 - DNA, 25 bp, Homo sapien
tccattcatcctaacgagacagcac

SEQ ID NO: 123386 - DNA, 25 bp, Homo sapien
cattcatcctaacgagacagcacag

SEQ ID NO: 123387 - DNA, 25 bp, Homo sapien
ctcttttgcatcaggccaaggcact

SEQ ID NO: 123388 - DNA, 25 bp, Homo sapien
tatccattcatcctaaagagggagc

SEQ ID NO: 123389 - DNA, 25 bp, Homo sapien
caactgtcacttctgaaaggtgtgc

SEQ ID NO: 123390 - DNA, 25 bp, Homo sapien
ccaaggcactggatagctgaggttg

SEQ ID NO: 123391 - DNA, 25 bp, Homo sapien
caaagcgcccactctacagaagaag

SEQ ID NO: 123392 - DNA, 25 bp, Homo sapien
cacaacagtttttaggctgacctag

SEQ ID NO: 123393 - DNA, 25 bp, Homo sapien
tcaacacgtattctgcaaagcgccc

SEQ ID NO: 123394 - DNA, 25 bp, Homo sapien
tcagtcagacggatcacagtgtgaa

SEQ ID NO: 123395 - DNA, 25 bp, Homo sapien
aaaaagttagccagtcgtgatagcg

SEQ ID NO: 123396 - DNA, 25 bp, Homo sapien
cactctggattatataccttcagat

SEQ ID NO: 123397 - DNA, 25 bp, Homo sapien
agaggtaacccctccaaacactctg

SEQ ID NO: 123398 - DNA, 25 bp, Homo sapien
gatttgttgagatgcacatgtacat

SEQ ID NO: 123399 - DNA, 25 bp, Homo sapien
gattaatactaaggagctattgctc

SEQ ID NO: 123400 - DNA, 25 bp, Homo sapien
aactcttggggggaacatgtacact

SEQ ID NO: 123401 - DNA, 25 bp, Homo sapien
catgtacactaaatttgaacagaaa

SEQ ID NO: 123402 - DNA, 25 bp, Homo sapien
ctgtagtgagttgcgtcacgccact

SEQ ID NO: 123403 - DNA, 25 bp, Homo sapien
atcatgatttgtgacttgcatgact

SEQ ID NO: 123404 - DNA, 25 bp, Homo sapien
tatcatgatttgtgacttgcatgac

SEQ ID NO: 123405 - DNA, 25 bp, Homo sapien
tttatcatgatttgtgacttgcatg

SEQ ID NO: 123406 - DNA, 25 bp, Homo sapien
ttatcatgatttgtgacttgcatga

SEQ ID NO: 123407 - DNA, 25 bp, Homo sapien
tgctgaaggacatagctgctgtggc

SEQ ID NO: 123408 - DNA, 25 bp, Homo sapien
gagattcagttgtgcagtactatgc

SEQ ID NO: 123409 - DNA, 25 bp, Homo sapien
actatgctgatggttcatgaaaaac

SEQ ID NO: 123410 - DNA, 25 bp, Homo sapien
ttctaaaataggagctacaggcagc

SEQ ID NO: 123411 - DNA, 25 bp, Homo sapien
atcaaaacattctgcactaattttc

SEQ ID NO: 123412 - DNA, 25 bp, Homo sapien
caaaacattctgcactaattttcat

SEQ ID NO: 123413 - DNA, 25 bp, Homo sapien
actggagggagctgtcataattttt

SEQ ID NO: 123414 - DNA, 25 bp, Homo sapien
tcaaaacattctgcactaattttca

SEQ ID NO: 123415 - DNA, 25 bp, Homo sapien
ttggctctgcacaccacctgttggc

SEQ ID NO: 123416 - DNA, 25 bp, Homo sapien
tcatcagcctctctattatgtggtg

SEQ ID NO: 123417 - DNA, 25 bp, Homo sapien
tatttaccgttgaacttggctctgc

SEQ ID NO: 123418 - DNA, 25 bp, Homo sapien
gccatttcgagccacagtatcttca

SEQ ID NO: 123419 - DNA, 25 bp, Homo sapien
gttagtacaggttagcacatgctca

SEQ ID NO: 123420 - DNA, 25 bp, Homo sapien
cacagctatcacaggtaaaactccg

SEQ ID NO: 123421 - DNA, 25 bp, Homo sapien
taaaactccgcccaaagcgtcttga

SEQ ID NO: 123422 - DNA, 25 bp, Homo sapien
gacacacgttcttttggagtagata

SEQ ID NO: 123423 - DNA, 25 bp, Homo sapien
tgttaaagtctttcagttcatctgt

SEQ ID NO: 123424 - DNA, 25 bp, Homo sapien
cagtggttgaagctgaatcatcagc

SEQ ID NO: 123425 - DNA, 25 bp, Homo sapien
tctcttcgcttgctatttcagactc

SEQ ID NO: 123426 - DNA, 25 bp, Homo sapien
tggctccatcttaataataatcctt

SEQ ID NO: 123427 - DNA, 25 bp, Homo sapien
tatcattgtgcagtcgcaactgacg

SEQ ID NO: 123428 - DNA, 25 bp, Homo sapien
gagatgacaggtcctcctcggttat

SEQ ID NO: 123429 - DNA, 25 bp, Homo sapien
caaaacgctggccacaattaggaca

SEQ ID NO: 123430 - DNA, 25 bp, Homo sapien
aattaggacatcgaaaagggcaggc

SEQ ID NO: 123431 - DNA, 25 bp, Homo sapien
tgagaaatcatatgccgtacatggt

SEQ ID NO: 123432 - DNA, 25 bp, Homo sapien
tttgggaatatctgaaagcagacct

SEQ ID NO: 123433 - DNA, 25 bp, Homo sapien
cagatgaacatccatgtgctgctcc

SEQ ID NO: 123434 - DNA, 25 bp, Homo sapien
gctccaactgttcattatttgggaa

SEQ ID NO: 123435 - DNA, 25 bp, Homo sapien
aagcagacctggcatatagtctcac

SEQ ID NO: 123436 - DNA, 25 bp, Homo sapien
tctgctatcatctaaacattagtac

SEQ ID NO: 123437 - DNA, 25 bp, Homo sapien
catttaatacctaaatgtagatact

SEQ ID NO: 123438 - DNA, 25 bp, Homo sapien
catctaaacattagtacagtagaaa

SEQ ID NO: 123439 - DNA, 25 bp, Homo sapien
caaatcatcttatataatcaattcc

SEQ ID NO: 123440 - DNA, 25 bp, Homo sapien
tagtcattgaatgggtaacaaccac

SEQ ID NO: 123441 - DNA, 25 bp, Homo sapien
aatagtcattgaatgggtaacaacc

SEQ ID NO: 123442 - DNA, 25 bp, Homo sapien
atagtcattgaatgggtaacaacca

SEQ ID NO: 123443 - DNA, 25 bp, Homo sapien
tctttttaggccaagtttgagccca

SEQ ID NO: 123444 - DNA, 25 bp, Homo sapien
aactcactaaaagcaaacgggatag

SEQ ID NO: 123445 - DNA, 25 bp, Homo sapien
cagtgcacctaacttgcctaataag

SEQ ID NO: 123446 - DNA, 25 bp, Homo sapien
ccttaaaggttagattcagtgcacc

SEQ ID NO: 123447 - DNA, 25 bp, Homo sapien
tattagatttatcaatatacatgga

SEQ ID NO: 123448 - DNA, 25 bp, Homo sapien
taattgataagctaacacactttag

SEQ ID NO: 123449 - DNA, 25 bp, Homo sapien
tattcttagagagctattaaagtct

SEQ ID NO: 123450 - DNA, 25 bp, Homo sapien
tcaaagttccagaagtatgtattgt

SEQ ID NO: 123451 - DNA, 25 bp, Homo sapien
taaaatatggcgataaactgcaatt

SEQ ID NO: 123452 - DNA, 25 bp, Homo sapien
cacatgtaattatgtagaccctgtg

SEQ ID NO: 123453 - DNA, 25 bp, Homo sapien
gcaacaactaacaatactactactt

SEQ ID NO: 123454 - DNA, 25 bp, Homo sapien
ccaaatcttagacagtataaaacac

SEQ ID NO: 123455 - DNA, 25 bp, Homo sapien
tgcaagtaattcacattaaaaggca

SEQ ID NO: 123456 - DNA, 25 bp, Homo sapien
agggtactacattgcaagtaattca

SEQ ID NO: 123457 - DNA, 25 bp, Homo sapien
ctttcattatgaaaagggtactaca

SEQ ID NO: 123458 - DNA, 25 bp, Homo sapien
taattaaaatccctttcattatgaa

SEQ ID NO: 123459 - DNA, 25 bp, Homo sapien
gatgaagacgcatttctgagtccta

SEQ ID NO: 123460 - DNA, 25 bp, Homo sapien
gcaagcttgctaaccattcctctgg

SEQ ID NO: 123461 - DNA, 25 bp, Homo sapien
gaagcaacagcaaggaatgacagct

SEQ ID NO: 123462 - DNA, 25 bp, Homo sapien
tgagtcctaatctactgctgccttg

SEQ ID NO: 123463 - DNA, 25 bp, Homo sapien
tctcaattatttaggcatatccttg

SEQ ID NO: 123464 - DNA, 25 bp, Homo sapien
taaaattgttccataggcattctat

SEQ ID NO: 123465 - DNA, 25 bp, Homo sapien
attacaatggctaaactggttttgg

SEQ ID NO: 123466 - DNA, 25 bp, Homo sapien
aagttccttaactactgacttagag

SEQ ID NO: 123467 - DNA, 25 bp, Homo sapien
caaggagcacaatctcataggagct

SEQ ID NO: 123468 - DNA, 25 bp, Homo sapien
tattaagtgagagccctaggatgga

SEQ ID NO: 123469 - DNA, 25 bp, Homo sapien
tatgggcccctcaaaaaggctgaca

SEQ ID NO: 123470 - DNA, 25 bp, Homo sapien
catgggtttccaaatatgggatgca

SEQ ID NO: 123471 - DNA, 25 bp, Homo sapien
tatatagacattgtccacagaatct

SEQ ID NO: 123472 - DNA, 25 bp, Homo sapien
tttggcagacggtagccagatcatt

SEQ ID NO: 123473 - DNA, 25 bp, Homo sapien
ctcccagccagaattagcattaatt

SEQ ID NO: 123474 - DNA, 25 bp, Homo sapien
gctgctattgtcatttagtttatat

SEQ ID NO: 123475 - DNA, 25 bp, Homo sapien
taactgttccttcctcaaataggag

SEQ ID NO: 123476 - DNA, 25 bp, Homo sapien
cttttttggtcagcaattgagatgg

SEQ ID NO: 123477 - DNA, 25 bp, Homo sapien
cattgatatgttcagttcagagcca

SEQ ID NO: 123478 - DNA, 25 bp, Homo sapien
tcccttggccctagacattcctgtg

SEQ ID NO: 123479 - DNA, 25 bp, Homo sapien
tgaaaatgaagcatacacgcacaca

SEQ ID NO: 123480 - DNA, 25 bp, Homo sapien
gcttataagcctcctaatctgccct

SEQ ID NO: 123481 - DNA, 25 bp, Homo sapien
tatttcccgaatgtaactcgtacca

SEQ ID NO: 123482 - DNA, 25 bp, Homo sapien
ttggcactaggccaacacactgtta

SEQ ID NO: 123483 - DNA, 25 bp, Homo sapien
ctccacaggtttagaaggccctatt

SEQ ID NO: 123484 - DNA, 25 bp, Homo sapien
cacaggtttagaaggccctatttca

SEQ ID NO: 123485 - DNA, 25 bp, Homo sapien
tctccacaggtttagaaggccctat

SEQ ID NO: 123486 - DNA, 25 bp, Homo sapien
tatatttgcagtagcctaacaaccc

SEQ ID NO: 123487 - DNA, 25 bp, Homo sapien
aagttatcctactttacagcaaggg

SEQ ID NO: 123488 - DNA, 25 bp, Homo sapien
gatctttgcaactggaactttttgg

SEQ ID NO: 123489 - DNA, 25 bp, Homo sapien
tcaagattgtgactggcatatacag

SEQ ID NO: 123490 - DNA, 25 bp, Homo sapien
aaggcgaaaggcacatggcggcagg

SEQ ID NO: 123491 - DNA, 25 bp, Homo sapien
ggcgaaaggcacatggcggcaggca

SEQ ID NO: 123492 - DNA, 25 bp, Homo sapien
acggcagaaggcgaaaggcacatgg

SEQ ID NO: 123493 - DNA, 25 bp, Homo sapien
agaaggcgaaaggcacatggcggca

SEQ ID NO: 123494 - DNA, 25 bp, Homo sapien
cacattcatctttaacacaggtttc

SEQ ID NO: 123495 - DNA, 25 bp, Homo sapien
acacaggtttctgaaaccacagtag

SEQ ID NO: 123496 - DNA, 25 bp, Homo sapien
accacattcatctttaacacaggtt

SEQ ID NO: 123497 - DNA, 25 bp, Homo sapien
aggtttctgaaaccacagtagcaat

SEQ ID NO: 123498 - DNA, 25 bp, Homo sapien
caagtgctttatccactgctttgag

SEQ ID NO: 123499 - DNA, 25 bp, Homo sapien
tttgtcctgccgctttaaactctgg

SEQ ID NO: 123500 - DNA, 25 bp, Homo sapien
caaaacccacacgttgaaacaccat

SEQ ID NO: 123501 - DNA, 25 bp, Homo sapien
tggaaaacccataatataatcagtc

SEQ ID NO: 123502 - DNA, 25 bp, Homo sapien
ttcccgcgccgcgtgagggcggctg

SEQ ID NO: 123503 - DNA, 25 bp, Homo sapien
gggtgtggcggcgacttgtcctccg

SEQ ID NO: 123504 - DNA, 25 bp, Homo sapien
cggcgacttgtcctccgaggagcct

SEQ ID NO: 123505 - DNA, 25 bp, Homo sapien
ctggcgggacggcagacaggggtgt

SEQ ID NO: 123506 - DNA, 25 bp, Homo sapien
ggagtcaactaacggccacctcgaa

SEQ ID NO: 123507 - DNA, 25 bp, Homo sapien
aatgaggttcctccctgactctcgg

SEQ ID NO: 123508 - DNA, 25 bp, Homo sapien
tcttatagccgcctctgggaactcc

SEQ ID NO: 123509 - DNA, 25 bp, Homo sapien
cacaggcttgcctaggtcggagtga

SEQ ID NO: 123510 - DNA, 25 bp, Homo sapien
ctgaaaggcgagcgacgttaggacg

SEQ ID NO: 123511 - DNA, 25 bp, Homo sapien
taggacgggaaaaccagggagatga

SEQ ID NO: 123512 - DNA, 25 bp, Homo sapien
tgaaaggcgagcgacgttaggacgg

SEQ ID NO: 123513 - DNA, 25 bp, Homo sapien
ttggaagaccccgacgcacgaatag

SEQ ID NO: 123514 - DNA, 25 bp, Homo sapien
agaccccgacgcacgaataggtggt

SEQ ID NO: 123515 - DNA, 25 bp, Homo sapien
cttgccatgttggaagaccccgacg

SEQ ID NO: 123516 - DNA, 25 bp, Homo sapien
caccttgccatgttggaagaccccg

SEQ ID NO: 123517 - DNA, 25 bp, Homo sapien
cgtcgccgatgaggcgctcggtgtc

SEQ ID NO: 123518 - DNA, 25 bp, Homo sapien
ctggttcttggcggcgtcgccgatg

SEQ ID NO: 123519 - DNA, 25 bp, Homo sapien
tcttggcggcgtcgccgatgaggcg

SEQ ID NO: 123520 - DNA, 25 bp, Homo sapien
ggcggcgtcgccgatgaggcgctcg

SEQ ID NO: 123521 - DNA, 25 bp, Homo sapien
tgtttcatatccgactgcactgtgg

SEQ ID NO: 123522 - DNA, 25 bp, Homo sapien
tcatcttcgtgaggaccatggagga

SEQ ID NO: 123523 - DNA, 25 bp, Homo sapien
cgggaccgttatgaccgcgctgtgc

SEQ ID NO: 123524 - DNA, 25 bp, Homo sapien
caatcagcctcttggcgtcgaagat

SEQ ID NO: 123525 - DNA, 25 bp, Homo sapien
tcgaagatgccatcctcgatggtca

SEQ ID NO: 123526 - DNA, 25 bp, Homo sapien
gcacgttcttctcgccgcccgcgca

SEQ ID NO: 123527 - DNA, 25 bp, Homo sapien
agatgagcacgttcttctcgccgcc

SEQ ID NO: 123528 - DNA, 25 bp, Homo sapien
aaagatgagcacgttcttctcgccg

SEQ ID NO: 123529 - DNA, 25 bp, Homo sapien
tggcgtcaatgtcgaaggtaacctc

SEQ ID NO: 123530 - DNA, 25 bp, Homo sapien
ggaatcccggtcaggtcgaacttgc

SEQ ID NO: 123531 - DNA, 25 bp, Homo sapien
cggtaacgttaaggatgccattggc

SEQ ID NO: 123532 - DNA, 25 bp, Homo sapien
tcccgcgaaagaggtcggcattgag

SEQ ID NO: 123533 - DNA, 25 bp, Homo sapien
ctttgtcattggtgatggtgatttt

SEQ ID NO: 123534 - DNA, 25 bp, Homo sapien
ttgtcattggtgatggtgattttgt

SEQ ID NO: 123535 - DNA, 25 bp, Homo sapien
attggtgatggtgattttgttttcc

SEQ ID NO: 123536 - DNA, 25 bp, Homo sapien
gtcattggtgatggtgattttgttt

SEQ ID NO: 123537 - DNA, 25 bp, Homo sapien
gactccagggcgtttttggccgcga

SEQ ID NO: 123538 - DNA, 25 bp, Homo sapien
ggtttcggtcgagccagttgatcac

SEQ ID NO: 123539 - DNA, 25 bp, Homo sapien
tgatcacctcctgacacttgtcgag

SEQ ID NO: 123540 - DNA, 25 bp, Homo sapien
ggtcaatgtcgtccttgctcagacg

SEQ ID NO: 123541 - DNA, 25 bp, Homo sapien
agtccacttcttcgatggtgggtcc

SEQ ID NO: 123542 - DNA, 25 bp, Homo sapien
ttagtccacttcttcgatggtgggt

SEQ ID NO: 123543 - DNA, 25 bp, Homo sapien
tcgatggtgggtcccccggaggctc

SEQ ID NO: 123544 - DNA, 25 bp, Homo sapien
tagtccacttcttcgatggtgggtc

SEQ ID NO: 123545 - DNA, 25 bp, Homo sapien
aatagatctcgtacttggcacaagg

SEQ ID NO: 123546 - DNA, 25 bp, Homo sapien
gaggtttacgctgacttgagtgcaa

SEQ ID NO: 123547 - DNA, 25 bp, Homo sapien
tcaaacaaatctccatgcacgaact

SEQ ID NO: 123548 - DNA, 25 bp, Homo sapien
agtcagcaaacacgcaaaatgcatt

SEQ ID NO: 123549 - DNA, 25 bp, Homo sapien
tgaagcaaacctgcatcatgtggaa

SEQ ID NO: 123550 - DNA, 25 bp, Homo sapien
tatgcctgtagtccatgaaacaccc

SEQ ID NO: 123551 - DNA, 25 bp, Homo sapien
gatgggtccactactaaattgaaga

SEQ ID NO: 123552 - DNA, 25 bp, Homo sapien
cccaaatgaggcttgctaaaaagga

SEQ ID NO: 123553 - DNA, 25 bp, Homo sapien
gttcaaaagcaagaggagcatgcct

SEQ ID NO: 123554 - DNA, 25 bp, Homo sapien
ccttaacagttgagacatacggatg

SEQ ID NO: 123555 - DNA, 25 bp, Homo sapien
tgatttcatctagatagccaggttg

SEQ ID NO: 123556 - DNA, 25 bp, Homo sapien
gagcatgcctcacaacacaaccttt

SEQ ID NO: 123557 - DNA, 25 bp, Homo sapien
caggagaattgcagaggttgcaggg

SEQ ID NO: 123558 - DNA, 25 bp, Homo sapien
ctgcccggggcgcggagcggggcgg

SEQ ID NO: 123559 - DNA, 25 bp, Homo sapien
gcgcggagcggggcggggcgtcgct

SEQ ID NO: 123560 - DNA, 25 bp, Homo sapien
ggcgcggagcggggcggggcgtcgc

SEQ ID NO: 123561 - DNA, 25 bp, Homo sapien
gataccgcccgcaggcgcctgcaca

SEQ ID NO: 123562 - DNA, 25 bp, Homo sapien
cctggaagccatacggcgtcgccga

SEQ ID NO: 123563 - DNA, 25 bp, Homo sapien
cctcgccctggaagccatacggcgt

SEQ ID NO: 123564 - DNA, 25 bp, Homo sapien
gccatacggcgtcgccgaggatacc

SEQ ID NO: 123565 - DNA, 25 bp, Homo sapien
aaccgcttcctcctcgcataaaact

SEQ ID NO: 123566 - DNA, 25 bp, Homo sapien
tcgcataaaactcgggcacccggta

SEQ ID NO: 123567 - DNA, 25 bp, Homo sapien
ggtctgcccacctaaccgcttcctc

SEQ ID NO: 123568 - DNA, 25 bp, Homo sapien
ttcctcctcgcataaaactcgggca

SEQ ID NO: 123569 - DNA, 25 bp, Homo sapien
gagacttccgggctccaacactgag

SEQ ID NO: 123570 - DNA, 25 bp, Homo sapien
tggagacttccgggctccaacactg

SEQ ID NO: 123571 - DNA, 25 bp, Homo sapien
ctggagacttccgggctccaacact

SEQ ID NO: 123572 - DNA, 25 bp, Homo sapien
gacttccgggctccaacactgagcc

SEQ ID NO: 123573 - DNA, 25 bp, Homo sapien
ccacatccctaatcgtaatcccaac

SEQ ID NO: 123574 - DNA, 25 bp, Homo sapien
acatccctaatcgtaatcccaactg

SEQ ID NO: 123575 - DNA, 25 bp, Homo sapien
agtaccacatccctaatcgtaatcc

SEQ ID NO: 123576 - DNA, 25 bp, Homo sapien
tccagtaccacatccctaatcgtaa

SEQ ID NO: 123577 - DNA, 25 bp, Homo sapien
gatgtttcaggagccactggacaga

SEQ ID NO: 123578 - DNA, 25 bp, Homo sapien
tcaggagccactggacagaatcttc

SEQ ID NO: 123579 - DNA, 25 bp, Homo sapien
agccactggacagaatcttctgcgg

SEQ ID NO: 123580 - DNA, 25 bp, Homo sapien
tgagggtgatgtttcaggagccact

SEQ ID NO: 123581 - DNA, 25 bp, Homo sapien
ctccccatgacagtaataaagtcag

SEQ ID NO: 123582 - DNA, 25 bp, Homo sapien
taataaagtcagcttggtactttct

SEQ ID NO: 123583 - DNA, 25 bp, Homo sapien
aataaagtcagcttggtactttctt

SEQ ID NO: 123584 - DNA, 25 bp, Homo sapien
agtaataaagtcagcttggtacttt

SEQ ID NO: 123585 - DNA, 25 bp, Homo sapien
ctgtctgaagctggaccatcagttt

SEQ ID NO: 123586 - DNA, 25 bp, Homo sapien
tgttgacctcgtttctctacagctt

SEQ ID NO: 123587 - DNA, 25 bp, Homo sapien
tgtaatggtgccctgttgacctcgt

SEQ ID NO: 123588 - DNA, 25 bp, Homo sapien
tacagctttagctgacttatcatct

SEQ ID NO: 123589 - DNA, 25 bp, Homo sapien
taacatcatccagtgtaatggtgcc

SEQ ID NO: 123590 - DNA, 25 bp, Homo sapien
tgtaaaagaacagatccgctgcatc

SEQ ID NO: 123591 - DNA, 25 bp, Homo sapien
gaacagatccgctgcatctcagtat

SEQ ID NO: 123592 - DNA, 25 bp, Homo sapien
taaaagaacagatccgctgcatctc

SEQ ID NO: 123593 - DNA, 25 bp, Homo sapien
tgttgtaaaagaacagatccgctgc

SEQ ID NO: 123594 - DNA, 25 bp, Homo sapien
gataagtagtacaataatgccatga

SEQ ID NO: 123595 - DNA, 25 bp, Homo sapien
taagtagtacaataatgccatgagg

SEQ ID NO: 123596 - DNA, 25 bp, Homo sapien
tgggataagtagtacaataatgcca

SEQ ID NO: 123597 - DNA, 25 bp, Homo sapien
aatgggataagtagtacaataatgc

SEQ ID NO: 123598 - DNA, 25 bp, Homo sapien
tacttctgcgccaagtacctctgtg

SEQ ID NO: 123599 - DNA, 25 bp, Homo sapien
tctaattcacttaaaaccaattcca

SEQ ID NO: 123600 - DNA, 25 bp, Homo sapien
tgtgatgcttatccggcacggccaa

SEQ ID NO: 123601 - DNA, 25 bp, Homo sapien
tgtgctgcttctaattcacttaaaa

SEQ ID NO: 123602 - DNA, 25 bp, Homo sapien
ccattcccacctcaagtggacccca

SEQ ID NO: 123603 - DNA, 25 bp, Homo sapien
taaatagataaacacgagtcacggg

SEQ ID NO: 123604 - DNA, 25 bp, Homo sapien
tgttgtacgtattatcacatcgctc

SEQ ID NO: 123605 - DNA, 25 bp, Homo sapien
cgtattatcacatcgctcaggtatt

SEQ ID NO: 123606 - DNA, 25 bp, Homo sapien
tcagcacaaggcaaaccagcaccat

SEQ ID NO: 123607 - DNA, 25 bp, Homo sapien
atcagcacaaggcaaaccagcacca

SEQ ID NO: 123608 - DNA, 25 bp, Homo sapien
caatagactgagaacggcagtgtgc

SEQ ID NO: 123609 - DNA, 25 bp, Homo sapien
tctgatgggcatggacaaacctgag

SEQ ID NO: 123610 - DNA, 25 bp, Homo sapien
taaagttagggtcattatcttggcc

SEQ ID NO: 123611 - DNA, 25 bp, Homo sapien
tatacttggcaagatgcagtggctt

SEQ ID NO: 123612 - DNA, 25 bp, Homo sapien
tttctgtgtatctgatattttctcc

SEQ ID NO: 123613 - DNA, 25 bp, Homo sapien
agtctttctgtgtatctgatatttt

SEQ ID NO: 123614 - DNA, 25 bp, Homo sapien
ctcaaagaacttccagtctttctgt

SEQ ID NO: 123615 - DNA, 25 bp, Homo sapien
gtctttctgtgtatctgatattttc

SEQ ID NO: 123616 - DNA, 25 bp, Homo sapien
taacacagctaagcagacacaaacc

SEQ ID NO: 123617 - DNA, 25 bp, Homo sapien
tatagcatatagcttgttagcaccg

SEQ ID NO: 123618 - DNA, 25 bp, Homo sapien
ggaaaactcttacctgtctgtataa

SEQ ID NO: 123619 - DNA, 25 bp, Homo sapien
atcacgatccttagctgtgaaatgg

SEQ ID NO: 123620 - DNA, 25 bp, Homo sapien
tccaagccacatatgtacagaaagt

SEQ ID NO: 123621 - DNA, 25 bp, Homo sapien
ctgtcaagtgttgacgtcggaagac

SEQ ID NO: 123622 - DNA, 25 bp, Homo sapien
attggtacgaaagagtctccctact

SEQ ID NO: 123623 - DNA, 25 bp, Homo sapien
gacgtcggaagacaatccaagccac

SEQ ID NO: 123624 - DNA, 25 bp, Homo sapien
ctgaacaaaagtcatgcgtttcttt

SEQ ID NO: 123625 - DNA, 25 bp, Homo sapien
cgcctcctgcgaggaatgttgaaca

SEQ ID NO: 123626 - DNA, 25 bp, Homo sapien
tcatcttcacgcctcctgcgaggaa

SEQ ID NO: 123627 - DNA, 25 bp, Homo sapien
tcttcacgcctcctgcgaggaatgt

SEQ ID NO: 123628 - DNA, 25 bp, Homo sapien
taattgctgggcgttttgccatcat

SEQ ID NO: 123629 - DNA, 25 bp, Homo sapien
tctgagagatggcagcagagtagac

SEQ ID NO: 123630 - DNA, 25 bp, Homo sapien
ctggagaacgcatgttgatagcttt

SEQ ID NO: 123631 - DNA, 25 bp, Homo sapien
agacgttttgagctttttctctgag

SEQ ID NO: 123632 - DNA, 25 bp, Homo sapien
ggaatctgacgtctacttgatgata

SEQ ID NO: 123633 - DNA, 25 bp, Homo sapien
catgggcacagagtccagagttccc

SEQ ID NO: 123634 - DNA, 25 bp, Homo sapien
catctcggctgggaatctgacgtct

SEQ ID NO: 123635 - DNA, 25 bp, Homo sapien
gagttcccacatgcttttgcatctc

SEQ ID NO: 123636 - DNA, 25 bp, Homo sapien
ggttgaatagacatcgaggctcccc

SEQ ID NO: 123637 - DNA, 25 bp, Homo sapien
ttagggcatgatgtatgagaggaca

SEQ ID NO: 123638 - DNA, 25 bp, Homo sapien
tgaagcgtatgtgggttgaatagac

SEQ ID NO: 123639 - DNA, 25 bp, Homo sapien
tgaccaagtccagtgtatcctgaat

SEQ ID NO: 123640 - DNA, 25 bp, Homo sapien
aaagtagtttacttgagatatggaa

SEQ ID NO: 123641 - DNA, 25 bp, Homo sapien
gtagtttacttgagatatggaatgt

SEQ ID NO: 123642 - DNA, 25 bp, Homo sapien
agtagtttacttgagatatggaatg

SEQ ID NO: 123643 - DNA, 25 bp, Homo sapien
agtttacttgagatatggaatgtac

SEQ ID NO: 123644 - DNA, 25 bp, Homo sapien
tcccatcgaggaagtgtaacaatcc

SEQ ID NO: 123645 - DNA, 25 bp, Homo sapien
tttttgaatgctcccatcgaggaag

SEQ ID NO: 123646 - DNA, 25 bp, Homo sapien
taaaacttcttagcaatcagatgga

SEQ ID NO: 123647 - DNA, 25 bp, Homo sapien
gacaatataatctcagcttgtatta

SEQ ID NO: 123648 - DNA, 25 bp, Homo sapien
ctcatctacaccctctaaattttta

SEQ ID NO: 123649 - DNA, 25 bp, Homo sapien
catctacaccctctaaatttttagg

SEQ ID NO: 123650 - DNA, 25 bp, Homo sapien
tcatctacaccctctaaatttttag

SEQ ID NO: 123651 - DNA, 25 bp, Homo sapien
ggaggtgggtggcacttctgaaaat

SEQ ID NO: 123652 - DNA, 25 bp, Homo sapien
catcttggcaggtatggggtaaata

SEQ ID NO: 123653 - DNA, 25 bp, Homo sapien
gatggaaactggctccgtcatttga

SEQ ID NO: 123654 - DNA, 25 bp, Homo sapien
ggtatggggtaaatatctgcttcct

SEQ ID NO: 123655 - DNA, 25 bp, Homo sapien
ctggctccgtcatttgattggcttt

SEQ ID NO: 123656 - DNA, 25 bp, Homo sapien
gctgtccaccgcatatgcaacaaat

SEQ ID NO: 123657 - DNA, 25 bp, Homo sapien
tcctgggttgagtattgatctgttc

SEQ ID NO: 123658 - DNA, 25 bp, Homo sapien
aactccatattgctgtgcgtcttct

SEQ ID NO: 123659 - DNA, 25 bp, Homo sapien
aaactgctctgagtttgtaaagctg

SEQ ID NO: 123660 - DNA, 25 bp, Homo sapien
gacggaattcaaatgggtccaagac

SEQ ID NO: 123661 - DNA, 25 bp, Homo sapien
gagaatgacggaattcaaatgggtc

SEQ ID NO: 123662 - DNA, 25 bp, Homo sapien
ctctgcaatccattctgtaaacccc

SEQ ID NO: 123663 - DNA, 25 bp, Homo sapien
ctggcaacaagagaatgacggaatt

SEQ ID NO: 123664 - DNA, 25 bp, Homo sapien
tgctactattgagtgacagtgctga

SEQ ID NO: 123665 - DNA, 25 bp, Homo sapien
cacctttgttgtcttttgctactat

SEQ ID NO: 123666 - DNA, 25 bp, Homo sapien
gactgccacctgacaacctttattg

SEQ ID NO: 123667 - DNA, 25 bp, Homo sapien
taacctggagtaactcttaatcctg

SEQ ID NO: 123668 - DNA, 25 bp, Homo sapien
ctgaaggtgggctgccggacagcct

SEQ ID NO: 123669 - DNA, 25 bp, Homo sapien
tttctttcctcaagtgtcttaggga

SEQ ID NO: 123670 - DNA, 25 bp, Homo sapien
tgccggacagcctcacagagccctg

SEQ ID NO: 123671 - DNA, 25 bp, Homo sapien
ctcaagtgtcttagggaaggtccgg

SEQ ID NO: 123672 - DNA, 25 bp, Homo sapien
ttaacgatcaaaagtatagcttaga

SEQ ID NO: 123673 - DNA, 25 bp, Homo sapien
tagactgtatctccagtgtgggaag

SEQ ID NO: 123674 - DNA, 25 bp, Homo sapien
gagttctatgttgacttctactacg

SEQ ID NO: 123675 - DNA, 25 bp, Homo sapien
cgagccttaggtagagataacttaa

SEQ ID NO: 123676 - DNA, 25 bp, Homo sapien
tcaggcccaatagaggctttgccag

SEQ ID NO: 123677 - DNA, 25 bp, Homo sapien
gcgctggtacccacacgagtaacta

SEQ ID NO: 123678 - DNA, 25 bp, Homo sapien
cgagtaactacaggtggcggctgtt

SEQ ID NO: 123679 - DNA, 25 bp, Homo sapien
ggtttatgcctgcacctccagtagg

SEQ ID NO: 123680 - DNA, 25 bp, Homo sapien
gagcccacgagggcctccaacaggt

SEQ ID NO: 123681 - DNA, 25 bp, Homo sapien
ccagagcccacgagggcctccaaca

SEQ ID NO: 123682 - DNA, 25 bp, Homo sapien
agagcccacgagggcctccaacagg

SEQ ID NO: 123683 - DNA, 25 bp, Homo sapien
gtggcagtgtttctcactccgccag

SEQ ID NO: 123684 - DNA, 25 bp, Homo sapien
catttgcaagctgactgccctaaag

SEQ ID NO: 123685 - DNA, 25 bp, Homo sapien
gacatttgcaagctgactgccctaa

SEQ ID NO: 123686 - DNA, 25 bp, Homo sapien
acatttgcaagctgactgccctaaa

SEQ ID NO: 123687 - DNA, 25 bp, Homo sapien
ctgaggaccagagggcaacacagag

SEQ ID NO: 123688 - DNA, 25 bp, Homo sapien
gaggaccagagggcaacacagagcc

SEQ ID NO: 123689 - DNA, 25 bp, Homo sapien
tgaggaccagagggcaacacagagc

SEQ ID NO: 123690 - DNA, 25 bp, Homo sapien
ttgtatctacaggaccagcaaagct

SEQ ID NO: 123691 - DNA, 25 bp, Homo sapien
ccagccagacccctgactgtggatg

SEQ ID NO: 123692 - DNA, 25 bp, Homo sapien
gcacaggacccacaagccgggtaaa

SEQ ID NO: 123693 - DNA, 25 bp, Homo sapien
aagcccagagataaatggaaagcac

SEQ ID NO: 123694 - DNA, 25 bp, Homo sapien
ccagagctcgggtacagcattgcta

SEQ ID NO: 123695 - DNA, 25 bp, Homo sapien
gcaggaacagtcattaaccatgtaa

SEQ ID NO: 123696 - DNA, 25 bp, Homo sapien
tgtaagctgattcggtgcagctgga

SEQ ID NO: 123697 - DNA, 25 bp, Homo sapien
tacagcattgctacccctggaggag

SEQ ID NO: 123698 - DNA, 25 bp, Homo sapien
cgtctgaagttgtacaagtgagtgc

SEQ ID NO: 123699 - DNA, 25 bp, Homo sapien
agacttcttgccgtctgaagttgta

SEQ ID NO: 123700 - DNA, 25 bp, Homo sapien
ttgccgtctgaagttgtacaagtga

SEQ ID NO: 123701 - DNA, 25 bp, Homo sapien
cttcttgccgtctgaagttgtacaa

SEQ ID NO: 123702 - DNA, 25 bp, Homo sapien
tccactgtcataagggagacgacct

SEQ ID NO: 123703 - DNA, 25 bp, Homo sapien
taagggagacgacctttgatcagct

SEQ ID NO: 123704 - DNA, 25 bp, Homo sapien
tctatgggtccactgtcataaggga

SEQ ID NO: 123705 - DNA, 25 bp, Homo sapien
ccctctctatgggtccactgtcata

SEQ ID NO: 123706 - DNA, 25 bp, Homo sapien
cctcttctatggaaagtatctcacg

SEQ ID NO: 123707 - DNA, 25 bp, Homo sapien
tgattttggagaccccacatcccat

SEQ ID NO: 123708 - DNA, 25 bp, Homo sapien
gaggacccaaagtcacacgtccatg

SEQ ID NO: 123709 - DNA, 25 bp, Homo sapien
tatctcacgctgtgcctgaggaccc

SEQ ID NO: 123710 - DNA, 25 bp, Homo sapien
cagcatttacaacacctgagactag

SEQ ID NO: 123711 - DNA, 25 bp, Homo sapien
tcagtagataaactggcagtagtca

SEQ ID NO: 123712 - DNA, 25 bp, Homo sapien
agacgcctgcctttgatgatctggg

SEQ ID NO: 123713 - DNA, 25 bp, Homo sapien
ggttaatttttacacaggcgtgctg

SEQ ID NO: 123714 - DNA, 25 bp, Homo sapien
ataactcggtccctgtgacgcttta

SEQ ID NO: 123715 - DNA, 25 bp, Homo sapien
tgtgacgctttacagtggtaaatgc

SEQ ID NO: 123716 - DNA, 25 bp, Homo sapien
agtggtaaatgcagacctctgagaa

SEQ ID NO: 123717 - DNA, 25 bp, Homo sapien
tcggtccctgtgacgctttacagtg

SEQ ID NO: 123718 - DNA, 25 bp, Homo sapien
ctaatcctaccagagccggccgtgt

SEQ ID NO: 123719 - DNA, 25 bp, Homo sapien
gtgtccgcttttccaagtcagaaag

SEQ ID NO: 123720 - DNA, 25 bp, Homo sapien
cttgtatggacagggaacaccgggc

SEQ ID NO: 123721 - DNA, 25 bp, Homo sapien
aagtgagtgaccagccgggatcgat

SEQ ID NO: 123722 - DNA, 25 bp, Homo sapien
gaagtcgagcggagccggagctgca

SEQ ID NO: 123723 - DNA, 25 bp, Homo sapien
gcaggaagtcgagcggagccggagc

SEQ ID NO: 123724 - DNA, 25 bp, Homo sapien
cccggcaggaagtcgagcggagccg

SEQ ID NO: 123725 - DNA, 25 bp, Homo sapien
gcttgccagcgcccggcaggaagtc

SEQ ID NO: 123726 - DNA, 25 bp, Homo sapien
gctcgggacgcgcacggcgtgcggg

SEQ ID NO: 123727 - DNA, 25 bp, Homo sapien
tgaaggggctgaggccgccgaccgc

SEQ ID NO: 123728 - DNA, 25 bp, Homo sapien
ggcgcgagtttgaaagtcgctctct

SEQ ID NO: 123729 - DNA, 25 bp, Homo sapien
cctcagctggcccggactcggccag

SEQ ID NO: 123730 - DNA, 25 bp, Homo sapien
ccccagcgtgactgccggcaccgcc

SEQ ID NO: 123731 - DNA, 25 bp, Homo sapien
gccccagcgtgactgccggcaccgc

SEQ ID NO: 123732 - DNA, 25 bp, Homo sapien
ggctggcacgggggccgcgaaggga

SEQ ID NO: 123733 - DNA, 25 bp, Homo sapien
ctggcacgggggccgcgaagggact

SEQ ID NO: 123734 - DNA, 25 bp, Homo sapien
taaggtgaacgcagtgtgggtctcc

SEQ ID NO: 123735 - DNA, 25 bp, Homo sapien
gccaacagattagcgagtgacctcg

SEQ ID NO: 123736 - DNA, 25 bp, Homo sapien
cttgtccaacaaaggatggcccgga

SEQ ID NO: 123737 - DNA, 25 bp, Homo sapien
ggcgccccgaagagtcaaagtagct

SEQ ID NO: 123738 - DNA, 25 bp, Homo sapien
agccaggtctaaaactcaggcataa

SEQ ID NO: 123739 - DNA, 25 bp, Homo sapien
cttccatgctatgcagaagagccag

SEQ ID NO: 123740 - DNA, 25 bp, Homo sapien
taaacccgtgctggactatcaggcc

SEQ ID NO: 123741 - DNA, 25 bp, Homo sapien
ctgccatgccacttctaataaaagg

SEQ ID NO: 123742 - DNA, 25 bp, Homo sapien
atgaagtaggctaatccaaggggcc

SEQ ID NO: 123743 - DNA, 25 bp, Homo sapien
gtaaatgaagtaggctaatccaagg

SEQ ID NO: 123744 - DNA, 25 bp, Homo sapien
cgagtaaatgaagtaggctaatcca

SEQ ID NO: 123745 - DNA, 25 bp, Homo sapien
tgaagtaggctaatccaaggggccc

SEQ ID NO: 123746 - DNA, 25 bp, Homo sapien
gacctctggtttctacttggccaat

SEQ ID NO: 123747 - DNA, 25 bp, Homo sapien
ggacatctgacctctggtttctact

SEQ ID NO: 123748 - DNA, 25 bp, Homo sapien
gaggacatctgacctctggtttcta

SEQ ID NO: 123749 - DNA, 25 bp, Homo sapien
atctgacctctggtttctacttggc

SEQ ID NO: 123750 - DNA, 25 bp, Homo sapien
gtaatcccactttatttatgtggaa

SEQ ID NO: 123751 - DNA, 25 bp, Homo sapien
tgaggaagagcaggcaagtaatccc

SEQ ID NO: 123752 - DNA, 25 bp, Homo sapien
ggcaagtaatcccactttatttatg

SEQ ID NO: 123753 - DNA, 25 bp, Homo sapien
gagcaggcaagtaatcccactttat

SEQ ID NO: 123754 - DNA, 25 bp, Homo sapien
gaagagaacgggcaaggcatacctc

SEQ ID NO: 123755 - DNA, 25 bp, Homo sapien
gatagctgcggatttggtaaggcaa

SEQ ID NO: 123756 - DNA, 25 bp, Homo sapien
ggtcatcccgcaggccgtggccttt

SEQ ID NO: 123757 - DNA, 25 bp, Homo sapien
tcttccagcgtaaacagtgaccgtg

SEQ ID NO: 123758 - DNA, 25 bp, Homo sapien
cggaggctgggggaggggtggacag

SEQ ID NO: 123759 - DNA, 25 bp, Homo sapien
gctctaccagctgacgcttggtttg

SEQ ID NO: 123760 - DNA, 25 bp, Homo sapien
ctgacgcttggtttgatccaaaaca

SEQ ID NO: 123761 - DNA, 25 bp, Homo sapien
taccagctgacgcttggtttgatcc

SEQ ID NO: 123762 - DNA, 25 bp, Homo sapien
cagctgacgcttggtttgatccaaa

SEQ ID NO: 123763 - DNA, 25 bp, Homo sapien
cctgcaaattcgccatctttccggc

SEQ ID NO: 123764 - DNA, 25 bp, Homo sapien
tgcaaattcgccatctttccggcct

SEQ ID NO: 123765 - DNA, 25 bp, Homo sapien
aaattcgccatctttccggcctcat

SEQ ID NO: 123766 - DNA, 25 bp, Homo sapien
ccagccctgcaaattcgccatcttt

SEQ ID NO: 123767 - DNA, 25 bp, Homo sapien
agcagggcccatgtagtctggctgg

SEQ ID NO: 123768 - DNA, 25 bp, Homo sapien
taataaagcgcgagagaaggctccc

SEQ ID NO: 123769 - DNA, 25 bp, Homo sapien
gcagccctgagcaccgtaataaagc

SEQ ID NO: 123770 - DNA, 25 bp, Homo sapien
gtgaccaaggtttctgggccaccca

SEQ ID NO: 123771 - DNA, 25 bp, Homo sapien
cctggattccgagcacagcagactg

SEQ ID NO: 123772 - DNA, 25 bp, Homo sapien
gagcttccctgaatattgcaggtgc

SEQ ID NO: 123773 - DNA, 25 bp, Homo sapien
aggcccctggattccgagcacagca

SEQ ID NO: 123774 - DNA, 25 bp, Homo sapien
agcttccctgaatattgcaggtgca

SEQ ID NO: 123775 - DNA, 25 bp, Homo sapien
ccccaagccaggatgagaactcagg

SEQ ID NO: 123776 - DNA, 25 bp, Homo sapien
ctgaagagcaccactccatactata

SEQ ID NO: 123777 - DNA, 25 bp, Homo sapien
catactataagattcccccaagcca

SEQ ID NO: 123778 - DNA, 25 bp, Homo sapien
caaacacatctcggaagaccctgtc

SEQ ID NO: 123779 - DNA, 25 bp, Homo sapien
aaggattggtcacagccctggctgc

SEQ ID NO: 123780 - DNA, 25 bp, Homo sapien
aagcaaaggattggtcacagccctg

SEQ ID NO: 123781 - DNA, 25 bp, Homo sapien
aaaggattggtcacagccctggctg

SEQ ID NO: 123782 - DNA, 25 bp, Homo sapien
ccacaagcaaaggattggtcacagc

SEQ ID NO: 123783 - DNA, 25 bp, Homo sapien
gtggccagactacttcaggctgcag

SEQ ID NO: 123784 - DNA, 25 bp, Homo sapien
gggtggagtggccagactacttcag

SEQ ID NO: 123785 - DNA, 25 bp, Homo sapien
tggagtggccagactacttcaggct

SEQ ID NO: 123786 - DNA, 25 bp, Homo sapien
gagtggccagactacttcaggctgc

SEQ ID NO: 123787 - DNA, 25 bp, Homo sapien
gctgagccagcattatcccccgact

SEQ ID NO: 123788 - DNA, 25 bp, Homo sapien
cagggctaagccatcagtgagtctc

SEQ ID NO: 123789 - DNA, 25 bp, Homo sapien
gtgagtctctgtaagctccccttgg

SEQ ID NO: 123790 - DNA, 25 bp, Homo sapien
tcagtgagtctctgtaagctcccct

SEQ ID NO: 123791 - DNA, 25 bp, Homo sapien
caacaagacagacagatgaagggtc

SEQ ID NO: 123792 - DNA, 25 bp, Homo sapien
aacaagacagacagatgaagggtca

SEQ ID NO: 123793 - DNA, 25 bp, Homo sapien
gcaacaagacagacagatgaagggt

SEQ ID NO: 123794 - DNA, 25 bp, Homo sapien
ctgcaacaagacagacagatgaagg

SEQ ID NO: 123795 - DNA, 25 bp, Homo sapien
gaggtggacacaggcatcctggcat

SEQ ID NO: 123796 - DNA, 25 bp, Homo sapien
gcagatgccggcttctcagggagcc

SEQ ID NO: 123797 - DNA, 25 bp, Homo sapien
actgcgactgtcacaggaggagccc

SEQ ID NO: 123798 - DNA, 25 bp, Homo sapien
gagcctgccccattcttggcgggag

SEQ ID NO: 123799 - DNA, 25 bp, Homo sapien
tacgtacatgcgctctgtctccacg

SEQ ID NO: 123800 - DNA, 25 bp, Homo sapien
attttctatgttcccaaagagggcg

SEQ ID NO: 123801 - DNA, 25 bp, Homo sapien
aagagggcgctgacctgttctggct

SEQ ID NO: 123802 - DNA, 25 bp, Homo sapien
ctgttcagcgcgtagatattttcta

SEQ ID NO: 123803 - DNA, 25 bp, Homo sapien
cccgggtgtgtcaatgatcttcaag

SEQ ID NO: 123804 - DNA, 25 bp, Homo sapien
atggtgagtgtcaggcccattcaca

SEQ ID NO: 123805 - DNA, 25 bp, Homo sapien
gtgggcctcgcaggcagaacatggt

SEQ ID NO: 123806 - DNA, 25 bp, Homo sapien
cagagatggacaacccttccctgtc

SEQ ID NO: 123807 - DNA, 25 bp, Homo sapien
gcccacatgtcacaggcccatgaga

SEQ ID NO: 123808 - DNA, 25 bp, Homo sapien
ggtgaggggagagcagccactgtac

SEQ ID NO: 123809 - DNA, 25 bp, Homo sapien
ctgggtgaggggagagcagccactg

SEQ ID NO: 123810 - DNA, 25 bp, Homo sapien
gaggggagagcagccactgtaccct

SEQ ID NO: 123811 - DNA, 25 bp, Homo sapien
tgaggggagagcagccactgtaccc

SEQ ID NO: 123812 - DNA, 25 bp, Homo sapien
agccacggggtcactattgcagctg

SEQ ID NO: 123813 - DNA, 25 bp, Homo sapien
acggggtcactattgcagctgtcca

SEQ ID NO: 123814 - DNA, 25 bp, Homo sapien
ccacggggtcactattgcagctgtc

SEQ ID NO: 123815 - DNA, 25 bp, Homo sapien
ggggtcactattgcagctgtccagg

SEQ ID NO: 123816 - DNA, 25 bp, Homo sapien
tgagtgtagatatcaaactcttggc

SEQ ID NO: 123817 - DNA, 25 bp, Homo sapien
taattgttgcaatactgagtgtaga

SEQ ID NO: 123818 - DNA, 25 bp, Homo sapien
gcaatactgagtgtagatatcaaac

SEQ ID NO: 123819 - DNA, 25 bp, Homo sapien
gggtaattgttgcaatactgagtgt

SEQ ID NO: 123820 - DNA, 25 bp, Homo sapien
cttgaggatgcgctggactggcttc

SEQ ID NO: 123821 - DNA, 25 bp, Homo sapien
tgcttgtcccgcatgcattccgtca

SEQ ID NO: 123822 - DNA, 25 bp, Homo sapien
tgcattccgtcagggcggccacgga

SEQ ID NO: 123823 - DNA, 25 bp, Homo sapien
cccaagggcagcgagtgctgtagca

SEQ ID NO: 123824 - DNA, 25 bp, Homo sapien
ccctgccctccccaggccctaggtg

SEQ ID NO: 123825 - DNA, 25 bp, Homo sapien
aggccctgccctccccaggccctag

SEQ ID NO: 123826 - DNA, 25 bp, Homo sapien
agaagatagacgcttaggtgcccct

SEQ ID NO: 123827 - DNA, 25 bp, Homo sapien
cgcagaagatagacgcttaggtgcc

SEQ ID NO: 123828 - DNA, 25 bp, Homo sapien
agatagacgcttaggtgcccctgac

SEQ ID NO: 123829 - DNA, 25 bp, Homo sapien
ctgcgcagaagatagacgcttaggt

SEQ ID NO: 123830 - DNA, 25 bp, Homo sapien
cacaggtcatggtgtcaatggcatc

SEQ ID NO: 123831 - DNA, 25 bp, Homo sapien
ctggagccggaccgcgtgctcatgc

SEQ ID NO: 123832 - DNA, 25 bp, Homo sapien
cttcttcatcaaaatgcttggcaat

SEQ ID NO: 123833 - DNA, 25 bp, Homo sapien
gttgatgtaccaggccacacaggtc

SEQ ID NO: 123834 - DNA, 25 bp, Homo sapien
tgtagacaaagtgatcgccccgctt

SEQ ID NO: 123835 - DNA, 25 bp, Homo sapien
gcgatgcacgcggaatgtgccctcc

SEQ ID NO: 123836 - DNA, 25 bp, Homo sapien
aaaaggtcctttcattgcgcacgcg

SEQ ID NO: 123837 - DNA, 25 bp, Homo sapien
gccccgcttcttggtgataagcagt

SEQ ID NO: 123838 - DNA, 25 bp, Homo sapien
agcccagatcctttgggaaggagag

SEQ ID NO: 123839 - DNA, 25 bp, Homo sapien
gcccagatcctttgggaaggagaga

SEQ ID NO: 123840 - DNA, 25 bp, Homo sapien
gagcccagatcctttgggaaggaga

SEQ ID NO: 123841 - DNA, 25 bp, Homo sapien
gaaaggacagtcaagcacaaggttg

SEQ ID NO: 123842 - DNA, 25 bp, Homo sapien
gcagagggaaaggacagtcaagcac

SEQ ID NO: 123843 - DNA, 25 bp, Homo sapien
gacagtcaagcacaaggttgacagc

SEQ ID NO: 123844 - DNA, 25 bp, Homo sapien
gagggaaaggacagtcaagcacaag

SEQ ID NO: 123845 - DNA, 25 bp, Homo sapien
agtctctggtgctttcgatcagcat

SEQ ID NO: 123846 - DNA, 25 bp, Homo sapien
agcctcttgatgtggtgagtccagt

SEQ ID NO: 123847 - DNA, 25 bp, Homo sapien
gcctcttgatgtggtgagtccagtt

SEQ ID NO: 123848 - DNA, 25 bp, Homo sapien
ccatttccaagatggcttccttggc

SEQ ID NO: 123849 - DNA, 25 bp, Homo sapien
aggaatccatttccaagatggcttc

SEQ ID NO: 123850 - DNA, 25 bp, Homo sapien
aataggaatccatttccaagatggc

SEQ ID NO: 123851 - DNA, 25 bp, Homo sapien
tccatttccaagatggcttccttgg

SEQ ID NO: 123852 - DNA, 25 bp, Homo sapien
gcacattggtggacacctcatcctg

SEQ ID NO: 123853 - DNA, 25 bp, Homo sapien
cgcccctggcgcacattggtggaca

SEQ ID NO: 123854 - DNA, 25 bp, Homo sapien
ggcgcacattggtggacacctcatc

SEQ ID NO: 123855 - DNA, 25 bp, Homo sapien
ccctggcgcacattggtggacacct

SEQ ID NO: 123856 - DNA, 25 bp, Homo sapien
gtgtgagggagaggcctcctgcctc

SEQ ID NO: 123857 - DNA, 25 bp, Homo sapien
aagggtgtgagggagaggcctcctg

SEQ ID NO: 123858 - DNA, 25 bp, Homo sapien
tgggcaagggtgtgagggagaggcc

SEQ ID NO: 123859 - DNA, 25 bp, Homo sapien
gggtgtgagggagaggcctcctgcc

SEQ ID NO: 123860 - DNA, 25 bp, Homo sapien
tgtgtgtccagccccgctctagcct

SEQ ID NO: 123861 - DNA, 25 bp, Homo sapien
tgtccagccccgctctagcctttcc

SEQ ID NO: 123862 - DNA, 25 bp, Homo sapien
ttcccagggtttccgcagaggtgag

SEQ ID NO: 123863 - DNA, 25 bp, Homo sapien
agccctggacactgccgcagacggt

SEQ ID NO: 123864 - DNA, 25 bp, Homo sapien
gcagacacctggcttaagccagacc

SEQ ID NO: 123865 - DNA, 25 bp, Homo sapien
ggacaccactctcagtcactttaga

SEQ ID NO: 123866 - DNA, 25 bp, Homo sapien
ccttgggtatatgtttggcagacac

SEQ ID NO: 123867 - DNA, 25 bp, Homo sapien
aagccagacctgtccttgggccttg

SEQ ID NO: 123868 - DNA, 25 bp, Homo sapien
atggtgtcatcaccgtgtaccccag

SEQ ID NO: 123869 - DNA, 25 bp, Homo sapien
gggacaggatacaaaacacatccat

SEQ ID NO: 123870 - DNA, 25 bp, Homo sapien
ggatacaaaacacatccattaggcc

SEQ ID NO: 123871 - DNA, 25 bp, Homo sapien
catccattaggccaatggtgtcatc

SEQ ID NO: 123872 - DNA, 25 bp, Homo sapien
cgactttctacggcccttaaggctg

SEQ ID NO: 123873 - DNA, 25 bp, Homo sapien
cttaaggctgggcatcacgaagcct

SEQ ID NO: 123874 - DNA, 25 bp, Homo sapien
agagttgcccggctgtacggagagt

SEQ ID NO: 123875 - DNA, 25 bp, Homo sapien
atcacgaagcctcgctgaccgctgg

SEQ ID NO: 123876 - DNA, 25 bp, Homo sapien
cccagctggaaagcagaggtcgcac

SEQ ID NO: 123877 - DNA, 25 bp, Homo sapien
tcccagctggaaagcagaggtcgca

SEQ ID NO: 123878 - DNA, 25 bp, Homo sapien
agcatcccagctggaaagcagaggt

SEQ ID NO: 123879 - DNA, 25 bp, Homo sapien
catcccagctggaaagcagaggtcg

SEQ ID NO: 123880 - DNA, 25 bp, Homo sapien
gacagggaggcgggcccatccatct

SEQ ID NO: 123881 - DNA, 25 bp, Homo sapien
tccaggacccccgctgtgactacca

SEQ ID NO: 123882 - DNA, 25 bp, Homo sapien
tctccaggacccccgctgtgactac

SEQ ID NO: 123883 - DNA, 25 bp, Homo sapien
catctccaggacccccgctgtgact

SEQ ID NO: 123884 - DNA, 25 bp, Homo sapien
tccacagtgtcggcgagcccccttg

SEQ ID NO: 123885 - DNA, 25 bp, Homo sapien
tgccttccacagtgtcggcgagccc

SEQ ID NO: 123886 - DNA, 25 bp, Homo sapien
gccttccacagtgtcggcgagcccc

SEQ ID NO: 123887 - DNA, 25 bp, Homo sapien
acagtgtcggcgagcccccttgcac

SEQ ID NO: 123888 - DNA, 25 bp, Homo sapien
agtcagcgcgggccaggaaactgct

SEQ ID NO: 123889 - DNA, 25 bp, Homo sapien
ctggctgggtcccaagctcacagcg

SEQ ID NO: 123890 - DNA, 25 bp, Homo sapien
gctcacagcgccaccagcccatcac

SEQ ID NO: 123891 - DNA, 25 bp, Homo sapien
aagcatgagcagagtcagcgcgggc

SEQ ID NO: 123892 - DNA, 25 bp, Homo sapien
ctcgttgagttgcctgagcaggtgt

SEQ ID NO: 123893 - DNA, 25 bp, Homo sapien
ctttctcgttgagttgcctgagcag

SEQ ID NO: 123894 - DNA, 25 bp, Homo sapien
tctcgttgagttgcctgagcaggtg

SEQ ID NO: 123895 - DNA, 25 bp, Homo sapien
tttctcgttgagttgcctgagcagg

SEQ ID NO: 123896 - DNA, 25 bp, Homo sapien
ggctctcattgtttccggaggaaag

SEQ ID NO: 123897 - DNA, 25 bp, Homo sapien
gagttccctctacactattctgaca

SEQ ID NO: 123898 - DNA, 25 bp, Homo sapien
cccgctcactgggaatggctggcca

SEQ ID NO: 123899 - DNA, 25 bp, Homo sapien
tcacaccccaggttgtcggctgctt

SEQ ID NO: 123900 - DNA, 25 bp, Homo sapien
tcaggtcctccagagagacctgaaa

SEQ ID NO: 123901 - DNA, 25 bp, Homo sapien
ctgtcaggtcctccagagagacctg

SEQ ID NO: 123902 - DNA, 25 bp, Homo sapien
tgtcaggtcctccagagagacctga

SEQ ID NO: 123903 - DNA, 25 bp, Homo sapien
gtcaggtcctccagagagacctgaa

SEQ ID NO: 123904 - DNA, 25 bp, Homo sapien
cagcccccttctcgttgccttcatg

SEQ ID NO: 123905 - DNA, 25 bp, Homo sapien
agcccccttctcgttgccttcatgc

SEQ ID NO: 123906 - DNA, 25 bp, Homo sapien
gcccccttctcgttgccttcatgcc

SEQ ID NO: 123907 - DNA, 25 bp, Homo sapien
cccagcccccttctcgttgccttca

SEQ ID NO: 123908 - DNA, 25 bp, Homo sapien
tgccagcagtggagggcggccagca

SEQ ID NO: 123909 - DNA, 25 bp, Homo sapien
ttggcccgatagtgccagcagtgga

SEQ ID NO: 123910 - DNA, 25 bp, Homo sapien
aaagtaaagcgttggcccgatagtg

SEQ ID NO: 123911 - DNA, 25 bp, Homo sapien
gcagggagctggcaaagtcggctac

SEQ ID NO: 123912 - DNA, 25 bp, Homo sapien
gtgtgacagcgagcgatggtgttaa

SEQ ID NO: 123913 - DNA, 25 bp, Homo sapien
gggtgtgacagcgagcgatggtgtt

SEQ ID NO: 123914 - DNA, 25 bp, Homo sapien
cagggtgtgacagcgagcgatggtg

SEQ ID NO: 123915 - DNA, 25 bp, Homo sapien
tgacagcgagcgatggtgttaagtg

SEQ ID NO: 123916 - DNA, 25 bp, Homo sapien
attagtgcccagtactggaacagag

SEQ ID NO: 123917 - DNA, 25 bp, Homo sapien
accccacttgtcatgcttgttgggc

SEQ ID NO: 123918 - DNA, 25 bp, Homo sapien
tgttgggcgttatattgattagtgc

SEQ ID NO: 123919 - DNA, 25 bp, Homo sapien
cacttgtcatgcttgttgggcgtta

SEQ ID NO: 123920 - DNA, 25 bp, Homo sapien
gaggtcagtcatcaactccaagaca

SEQ ID NO: 123921 - DNA, 25 bp, Homo sapien
caactggaagctgatcccttctgca

SEQ ID NO: 123922 - DNA, 25 bp, Homo sapien
ctgcagaggtagaggtcagtcatca

SEQ ID NO: 123923 - DNA, 25 bp, Homo sapien
tcaactccaagacaactggaagctg

SEQ ID NO: 123924 - DNA, 25 bp, Homo sapien
ctggcagggaagaaatggactcgaa

SEQ ID NO: 123925 - DNA, 25 bp, Homo sapien
gctcctggagctttcagactccctg

SEQ ID NO: 123926 - DNA, 25 bp, Homo sapien
catgcgcttctcagtactggttgga

SEQ ID NO: 123927 - DNA, 25 bp, Homo sapien
gactcgaagctcatgcgcttctcag

SEQ ID NO: 123928 - DNA, 25 bp, Homo sapien
ggccttaaggtcctcagtgctctca

SEQ ID NO: 123929 - DNA, 25 bp, Homo sapien
cgctgctccgccgagagaagctgct

SEQ ID NO: 123930 - DNA, 25 bp, Homo sapien
gtgtctgaaggcgtctcctcggcac

SEQ ID NO: 123931 - DNA, 25 bp, Homo sapien
gctgacaaatcgctccgcaatgacg

SEQ ID NO: 123932 - DNA, 25 bp, Homo sapien
tcttaatcttgtctagcaacagccg

SEQ ID NO: 123933 - DNA, 25 bp, Homo sapien
tgtctagcaacagccggtctcgggt

SEQ ID NO: 123934 - DNA, 25 bp, Homo sapien
tcttgcaggaagaccggtcaggctc

SEQ ID NO: 123935 - DNA, 25 bp, Homo sapien
tctcgggtggagagtgctgattcct

SEQ ID NO: 123936 - DNA, 25 bp, Homo sapien
gagatggagtttcttaccagtcctt

SEQ ID NO: 123937 - DNA, 25 bp, Homo sapien
tcccggcgacggacgctgaagcctg

SEQ ID NO: 123938 - DNA, 25 bp, Homo sapien
catcatggtgttctgcattttcata

SEQ ID NO: 123939 - DNA, 25 bp, Homo sapien
gcgacggacgctgaagcctgcatca

SEQ ID NO: 123940 - DNA, 25 bp, Homo sapien
tccccactggaggtactggctctgg

SEQ ID NO: 123941 - DNA, 25 bp, Homo sapien
tgggagctcaaacagggcccacgaa

SEQ ID NO: 123942 - DNA, 25 bp, Homo sapien
aagatgggcggaactcagcatctga

SEQ ID NO: 123943 - DNA, 25 bp, Homo sapien
tcatgcaggtcaaagccattggcct

SEQ ID NO: 123944 - DNA, 25 bp, Homo sapien
tccattacgtgggagagctgcacga

SEQ ID NO: 123945 - DNA, 25 bp, Homo sapien
tgttgctcttgatccggaggctgta

SEQ ID NO: 123946 - DNA, 25 bp, Homo sapien
ttgacgcgctcgctcacgtggctgt

SEQ ID NO: 123947 - DNA, 25 bp, Homo sapien
agctggtagaccttgttcttgacgc

SEQ ID NO: 123948 - DNA, 25 bp, Homo sapien
ttgccacctaatggctctccagcct

SEQ ID NO: 123949 - DNA, 25 bp, Homo sapien
cttcctgtagacagggcacagtggg

SEQ ID NO: 123950 - DNA, 25 bp, Homo sapien
cagcctcttcctgtagacagggcac

SEQ ID NO: 123951 - DNA, 25 bp, Homo sapien
ctttgccacctaatggctctccagc

SEQ ID NO: 123952 - DNA, 25 bp, Homo sapien
ccccaggcgaggtggtcctctggct

SEQ ID NO: 123953 - DNA, 25 bp, Homo sapien
gaagaagaaacgctgtggtgacatc

SEQ ID NO: 123954 - DNA, 25 bp, Homo sapien
agacgggttgaagaagaaacgctgt

SEQ ID NO: 123955 - DNA, 25 bp, Homo sapien
agctgctcatagtcaaatagagaca

SEQ ID NO: 123956 - DNA, 25 bp, Homo sapien
gcgtgcctcatcgcgggaggcatac

SEQ ID NO: 123957 - DNA, 25 bp, Homo sapien
gctcggcgtgcctcatcgcgggagg

SEQ ID NO: 123958 - DNA, 25 bp, Homo sapien
ccctgctcggcgtgcctcatcgcgg

SEQ ID NO: 123959 - DNA, 25 bp, Homo sapien
tcggcgtgcctcatcgcgggaggca

SEQ ID NO: 123960 - DNA, 25 bp, Homo sapien
ggtggctctaccatgttctccggca

SEQ ID NO: 123961 - DNA, 25 bp, Homo sapien
gacagaggtggctctaccatgttct

SEQ ID NO: 123962 - DNA, 25 bp, Homo sapien
ctaccatgttctccggcaccgagtg

SEQ ID NO: 123963 - DNA, 25 bp, Homo sapien
ctgcccgacagaggtggctctacca

SEQ ID NO: 123964 - DNA, 25 bp, Homo sapien
ctgcagtgacatacagggtctcgcc

SEQ ID NO: 123965 - DNA, 25 bp, Homo sapien
gtgacatacagggtctcgcctccat

SEQ ID NO: 123966 - DNA, 25 bp, Homo sapien
gtctcgcctccatccggcttgctct

SEQ ID NO: 123967 - DNA, 25 bp, Homo sapien
cagtgacatacagggtctcgcctcc

SEQ ID NO: 123968 - DNA, 25 bp, Homo sapien
ccgccggttgtcctccagggtgagg

SEQ ID NO: 123969 - DNA, 25 bp, Homo sapien
cgccggttgtcctccagggtgaggt

SEQ ID NO: 123970 - DNA, 25 bp, Homo sapien
ggtgagcttggtccctggccactgc

SEQ ID NO: 123971 - DNA, 25 bp, Homo sapien
cggctggcactctgcagactgctgg

SEQ ID NO: 123972 - DNA, 25 bp, Homo sapien
tggaaccctcttccttcggctggca

SEQ ID NO: 123973 - DNA, 25 bp, Homo sapien
cccagcagggccaccggtgagcttg

SEQ ID NO: 123974 - DNA, 25 bp, Homo sapien
tggaacttctctctaaggtttctca

SEQ ID NO: 123975 - DNA, 25 bp, Homo sapien
catggccagccaacgctggaggcct

SEQ ID NO: 123976 - DNA, 25 bp, Homo sapien
gggatggactttccgcccacctgag

SEQ ID NO: 123977 - DNA, 25 bp, Homo sapien
aaattgtctcgagccccagtggatg

SEQ ID NO: 123978 - DNA, 25 bp, Homo sapien
tgcacacgggagcatccttcctgaa

SEQ ID NO: 123979 - DNA, 25 bp, Homo sapien
tgtacatcagcgacaaccacagggt

SEQ ID NO: 123980 - DNA, 25 bp, Homo sapien
cacacatagtgggttggtcagcagt

SEQ ID NO: 123981 - DNA, 25 bp, Homo sapien
tatgatgctgagtaaccacaagggc

SEQ ID NO: 123982 - DNA, 25 bp, Homo sapien
ttccaagcagtgatcagtccaggcc

SEQ ID NO: 123983 - DNA, 25 bp, Homo sapien
gacagctactcctgcacaactggga

SEQ ID NO: 123984 - DNA, 25 bp, Homo sapien
ggtgcgtcacaacactgcctaaggc

SEQ ID NO: 123985 - DNA, 25 bp, Homo sapien
cagagccatgaaggtgtggtacccc

SEQ ID NO: 123986 - DNA, 25 bp, Homo sapien
gacgcagccatgtcttggtatcacc

SEQ ID NO: 123987 - DNA, 25 bp, Homo sapien
aacagtgagctaaccttctacaagg

SEQ ID NO: 123988 - DNA, 25 bp, Homo sapien
ggaacaacctgtactgtgtgctcag

SEQ ID NO: 123989 - DNA, 25 bp, Homo sapien
cttgatttggcattagtggcagggc

SEQ ID NO: 123990 - DNA, 25 bp, Homo sapien
cacgtctttaagctgaggtgaggcc

SEQ ID NO: 123991 - DNA, 25 bp, Homo sapien
aaaacatgttactatgtatcagaac

SEQ ID NO: 123992 - DNA, 25 bp, Homo sapien
gtaatgaaattacatgcagatgatt

SEQ ID NO: 123993 - DNA, 25 bp, Homo sapien
gatttagtgttatgcttagaaacac

SEQ ID NO: 123994 - DNA, 25 bp, Homo sapien
ccataacccagttttagctatctgt

SEQ ID NO: 123995 - DNA, 25 bp, Homo sapien
cagtgcatcttggtgtggcctccac

SEQ ID NO: 123996 - DNA, 25 bp, Homo sapien
tagactcttgatgttgcctgaccag

SEQ ID NO: 123997 - DNA, 25 bp, Homo sapien
agacaggcacggaattcccagagca

SEQ ID NO: 123998 - DNA, 25 bp, Homo sapien
tctgccacaaggcaactgagagttg

SEQ ID NO: 123999 - DNA, 25 bp, Homo sapien
aacctgctttcccctgtaatcctag

SEQ ID NO: 124000 - DNA, 25 bp, Homo sapien
gattaaatctaaacttcttagcctc

SEQ ID NO: 124001 - DNA, 25 bp, Homo sapien
cagtgcttccttttgcctctaggat

SEQ ID NO: 124002 - DNA, 25 bp, Homo sapien
ccttttgcctctaggattaaatcta

SEQ ID NO: 124003 - DNA, 25 bp, Homo sapien
gcctctcattcaaagctttccacat

SEQ ID NO: 124004 - DNA, 25 bp, Homo sapien
cccacaaattcaaattgtataattt

SEQ ID NO: 124005 - DNA, 25 bp, Homo sapien
atttcaggaaatgaccctgccacac

SEQ ID NO: 124006 - DNA, 25 bp, Homo sapien
taaattgatatcttgatgatgttga

SEQ ID NO: 124007 - DNA, 25 bp, Homo sapien
gccttacaaattcatatttcaggaa

SEQ ID NO: 124008 - DNA, 25 bp, Homo sapien
aaggagtaacacaagaaagagactg

SEQ ID NO: 124009 - DNA, 25 bp, Homo sapien
ggagaaggagtaacacaagaaagag

SEQ ID NO: 124010 - DNA, 25 bp, Homo sapien
caagaaagagactgcgccgtgaccc

SEQ ID NO: 124011 - DNA, 25 bp, Homo sapien
aagaaagagactgcgccgtgaccct

SEQ ID NO: 124012 - DNA, 25 bp, Homo sapien
gaggagggaggagccacggagaagc

SEQ ID NO: 124013 - DNA, 25 bp, Homo sapien
gggaggagggaggagccacggagaa

SEQ ID NO: 124014 - DNA, 25 bp, Homo sapien
ggaggagggaggagccacggagaag

SEQ ID NO: 124015 - DNA, 25 bp, Homo sapien
gcttcatgggagatgcccgcttcat

SEQ ID NO: 124016 - DNA, 25 bp, Homo sapien
cgcgcttcatgggagatgcccgctt

SEQ ID NO: 124017 - DNA, 25 bp, Homo sapien
tgctccttcgcgcttcatgggagat

SEQ ID NO: 124018 - DNA, 25 bp, Homo sapien
cttcgcgcttcatgggagatgcccg

SEQ ID NO: 124019 - DNA, 25 bp, Homo sapien
taaaggcatcacctaggctgaggcc

SEQ ID NO: 124020 - DNA, 25 bp, Homo sapien
catgtagctttggttcctggcttgg

SEQ ID NO: 124021 - DNA, 25 bp, Homo sapien
gcaaatcggcgcttctccagaaact

SEQ ID NO: 124022 - DNA, 25 bp, Homo sapien
gagtgtaatctctctatgcagccac

SEQ ID NO: 124023 - DNA, 25 bp, Homo sapien
tgtccctgcactctgaagcacatag

SEQ ID NO: 124024 - DNA, 25 bp, Homo sapien
cactgcatgcaggtcccgaggttaa

SEQ ID NO: 124025 - DNA, 25 bp, Homo sapien
tgtggctggcagacattcctcggat

SEQ ID NO: 124026 - DNA, 25 bp, Homo sapien
gaggttggttgaggacaattccaag

SEQ ID NO: 124027 - DNA, 25 bp, Homo sapien
acagctcctcggctcacagaggcat

SEQ ID NO: 124028 - DNA, 25 bp, Homo sapien
gtgccgcccgctgcgtgttttacag

SEQ ID NO: 124029 - DNA, 25 bp, Homo sapien
acagcttggcatccggcatcccatg

SEQ ID NO: 124030 - DNA, 25 bp, Homo sapien
ttggcatccggcatcccatgtgccg

SEQ ID NO: 124031 - DNA, 25 bp, Homo sapien
tcatgtttcaatagaaaggctcccc

SEQ ID NO: 124032 - DNA, 25 bp, Homo sapien
catctcctagagtccccctaattgt

SEQ ID NO: 124033 - DNA, 25 bp, Homo sapien
cccttttcatactgggagctgccag

SEQ ID NO: 124034 - DNA, 25 bp, Homo sapien
tagagtccccctaattgtcacacag

SEQ ID NO: 124035 - DNA, 25 bp, Homo sapien
agtctctaagctggccgcctgtcat

SEQ ID NO: 124036 - DNA, 25 bp, Homo sapien
gatgactgcctctggcaccttccta

SEQ ID NO: 124037 - DNA, 25 bp, Homo sapien
gttaagtagcaggtagccctgaggc

SEQ ID NO: 124038 - DNA, 25 bp, Homo sapien
cgcctgtcatgaggttaagtagcag

SEQ ID NO: 124039 - DNA, 25 bp, Homo sapien
aaacactttctggagtgattctccc

SEQ ID NO: 124040 - DNA, 25 bp, Homo sapien
actttctggagtgattctcccgctg

SEQ ID NO: 124041 - DNA, 25 bp, Homo sapien
ggagtgattctcccgctgcccccat

SEQ ID NO: 124042 - DNA, 25 bp, Homo sapien
acactttctggagtgattctcccgc

SEQ ID NO: 124043 - DNA, 25 bp, Homo sapien
gtcttccacctcctaagaagagtac

SEQ ID NO: 124044 - DNA, 25 bp, Homo sapien
ctaagaagagtacaaccttccccat

SEQ ID NO: 124045 - DNA, 25 bp, Homo sapien
cagcccacactggacctgtttccct

SEQ ID NO: 124046 - DNA, 25 bp, Homo sapien
gtttccctatcattgactgttgccg

SEQ ID NO: 124047 - DNA, 25 bp, Homo sapien
gagagataaccctctgactgtgttg

SEQ ID NO: 124048 - DNA, 25 bp, Homo sapien
gcaaccagccaccttacagcaggat

SEQ ID NO: 124049 - DNA, 25 bp, Homo sapien
tgctgacatgacatcggccacagag

SEQ ID NO: 124050 - DNA, 25 bp, Homo sapien
gatgctccgaataagtttccccgga

SEQ ID NO: 124051 - DNA, 25 bp, Homo sapien
cacggttccattgtccatgggatgc

SEQ ID NO: 124052 - DNA, 25 bp, Homo sapien
tgccccgactgccacgtgcttgatg

SEQ ID NO: 124053 - DNA, 25 bp, Homo sapien
aatgcacggttccattgtccatggg

SEQ ID NO: 124054 - DNA, 25 bp, Homo sapien
atgggatgccccgactgccacgtgc

SEQ ID NO: 124055 - DNA, 25 bp, Homo sapien
gctgtcgagccgctgctcttctgca

SEQ ID NO: 124056 - DNA, 25 bp, Homo sapien
taagcaggatgaattgctgtcgagc

SEQ ID NO: 124057 - DNA, 25 bp, Homo sapien
gcctgctggtcggcctgctcaggct

SEQ ID NO: 124058 - DNA, 25 bp, Homo sapien
aatcttgtcttgaacgctgggcctg

SEQ ID NO: 124059 - DNA, 25 bp, Homo sapien
cccatgacccccttgactctgatgg

SEQ ID NO: 124060 - DNA, 25 bp, Homo sapien
atgacccccttgactctgatggaat

SEQ ID NO: 124061 - DNA, 25 bp, Homo sapien
catgacccccttgactctgatggaa

SEQ ID NO: 124062 - DNA, 25 bp, Homo sapien
gactctgatggaatgccatctgggc

SEQ ID NO: 124063 - DNA, 25 bp, Homo sapien
tgggccacatcgttaccccatggta

SEQ ID NO: 124064 - DNA, 25 bp, Homo sapien
taatagccagacttggttgggatgg

SEQ ID NO: 124065 - DNA, 25 bp, Homo sapien
tccatcgactggaaaggtcacccat

SEQ ID NO: 124066 - DNA, 25 bp, Homo sapien
cataggtggcatgcttatctgggcc

SEQ ID NO: 124067 - DNA, 25 bp, Homo sapien
taatcttgggactttaagcacccca

SEQ ID NO: 124068 - DNA, 25 bp, Homo sapien
tgcagatgcatggagatccctaagt

SEQ ID NO: 124069 - DNA, 25 bp, Homo sapien
aagtagcaaccatgggtagtaatct

SEQ ID NO: 124070 - DNA, 25 bp, Homo sapien
gcagtcgaccagaatgaccaggata

SEQ ID NO: 124071 - DNA, 25 bp, Homo sapien
tagtaactgcgtgactgctctgcat

SEQ ID NO: 124072 - DNA, 25 bp, Homo sapien
gatgtggttgcctctgcgtgtcttc

SEQ ID NO: 124073 - DNA, 25 bp, Homo sapien
cttgagtagtaactgcgtgactgct

SEQ ID NO: 124074 - DNA, 25 bp, Homo sapien
tgtagacgtgtctcaggcatcacag

SEQ ID NO: 124075 - DNA, 25 bp, Homo sapien
agcagccgccagagcaagactaaag

SEQ ID NO: 124076 - DNA, 25 bp, Homo sapien
gacagcgatggcctttattcaaaga

SEQ ID NO: 124077 - DNA, 25 bp, Homo sapien
tctcccagtcgtggtcctcaggttg

SEQ ID NO: 124078 - DNA, 25 bp, Homo sapien
tactaccggagactaagggttgtga

SEQ ID NO: 124079 - DNA, 25 bp, Homo sapien
gcaagtcgggagtagcagttctctg

SEQ ID NO: 124080 - DNA, 25 bp, Homo sapien
gtcgggagtagcagttctctgcttt

SEQ ID NO: 124081 - DNA, 25 bp, Homo sapien
cgcaagtcgggagtagcagttctct

SEQ ID NO: 124082 - DNA, 25 bp, Homo sapien
gggagtagcagttctctgctttcat

SEQ ID NO: 124083 - DNA, 25 bp, Homo sapien
gaaaattctcccctagatgcccaca

SEQ ID NO: 124084 - DNA, 25 bp, Homo sapien
tgtctgatttgttccgcccattctt

SEQ ID NO: 124085 - DNA, 25 bp, Homo sapien
tcctcttagcctgagacatgatacg

SEQ ID NO: 124086 - DNA, 25 bp, Homo sapien
gacatgatacgacacttggaagagg

SEQ ID NO: 124087 - DNA, 25 bp, Homo sapien
ggagctagcaccaacctgggaaggt

SEQ ID NO: 124088 - DNA, 25 bp, Homo sapien
agcttgaaaggagctagcaccaacc

SEQ ID NO: 124089 - DNA, 25 bp, Homo sapien
ctgagttgacgttctgatccaaagc

SEQ ID NO: 124090 - DNA, 25 bp, Homo sapien
gctggtgtctcatggtagtcagtgc

SEQ ID NO: 124091 - DNA, 25 bp, Homo sapien
cctcttacttccctgttgtgcctgg

SEQ ID NO: 124092 - DNA, 25 bp, Homo sapien
ttccatgcctccacatatgctttcc

SEQ ID NO: 124093 - DNA, 25 bp, Homo sapien
tacttccctgttgtgcctggctcca

SEQ ID NO: 124094 - DNA, 25 bp, Homo sapien
tatgctttcctcttacttccctgtt

SEQ ID NO: 124095 - DNA, 25 bp, Homo sapien
ttggaggccttggcctgccggcatc

SEQ ID NO: 124096 - DNA, 25 bp, Homo sapien
caggaaataataccaagtttctcag

SEQ ID NO: 124097 - DNA, 25 bp, Homo sapien
tcagttttcccctcaatgaagggca

SEQ ID NO: 124098 - DNA, 25 bp, Homo sapien
cccctcaatgaagggcaaggccttg

SEQ ID NO: 124099 - DNA, 25 bp, Homo sapien
tgaaaggcacttgttttccggcgag

SEQ ID NO: 124100 - DNA, 25 bp, Homo sapien
tccagagagccaagtggttccaggt

SEQ ID NO: 124101 - DNA, 25 bp, Homo sapien
tggtaactggcgcattgggcaccct

SEQ ID NO: 124102 - DNA, 25 bp, Homo sapien
tcctcactggttgggaggccctttg

SEQ ID NO: 124103 - DNA, 25 bp, Homo sapien
cagcctggtcaacgtatatgaaaag

SEQ ID NO: 124104 - DNA, 25 bp, Homo sapien
atattttatctaatacggtttctct

SEQ ID NO: 124105 - DNA, 25 bp, Homo sapien
aattaagtcatgttagaacacaagg

SEQ ID NO: 124106 - DNA, 25 bp, Homo sapien
gatgatgaatatttggtgtcttgtg

SEQ ID NO: 124107 - DNA, 25 bp, Homo sapien
tgtgagcctctcagtggcactgagc

SEQ ID NO: 124108 - DNA, 25 bp, Homo sapien
tgagcaggtgtcctaccagagtgcc

SEQ ID NO: 124109 - DNA, 25 bp, Homo sapien
tggtgctgtgatgccagcctcctgc

SEQ ID NO: 124110 - DNA, 25 bp, Homo sapien
cagtgcttccgcagctctgcactgc

SEQ ID NO: 124111 - DNA, 25 bp, Homo sapien
gaacccagcattagcacattgcttt

SEQ ID NO: 124112 - DNA, 25 bp, Homo sapien
tacagaacccagcattagcacattg

SEQ ID NO: 124113 - DNA, 25 bp, Homo sapien
ctacagaacccagcattagcacatt

SEQ ID NO: 124114 - DNA, 25 bp, Homo sapien
ccagcattagcacattgctttcttt

SEQ ID NO: 124115 - DNA, 25 bp, Homo sapien
gctttgtctgcttaagccagcagga

SEQ ID NO: 124116 - DNA, 25 bp, Homo sapien
ctttgtctgcttaagccagcaggag

SEQ ID NO: 124117 - DNA, 25 bp, Homo sapien
tcttggcctttaacatgagcgttgg

SEQ ID NO: 124118 - DNA, 25 bp, Homo sapien
tgtaaaactgaagcgagattcctgg

SEQ ID NO: 124119 - DNA, 25 bp, Homo sapien
aaggatcctccctctcaggtggcag

SEQ ID NO: 124120 - DNA, 25 bp, Homo sapien
gaagaggaacttagcagtgagctcc

SEQ ID NO: 124121 - DNA, 25 bp, Homo sapien
gaacatttcattgccctagggaggg

SEQ ID NO: 124122 - DNA, 25 bp, Homo sapien
tccttgtggcctgtaacagcagctc

SEQ ID NO: 124123 - DNA, 25 bp, Homo sapien
gagtttctgagctccgtaaaccttg

SEQ ID NO: 124124 - DNA, 25 bp, Homo sapien
cctgggaggcgttaatgaatgcaaa

SEQ ID NO: 124125 - DNA, 25 bp, Homo sapien
atggggtctcaccatattgcccagg

SEQ ID NO: 124126 - DNA, 25 bp, Homo sapien
taaatgtttataaagatggggtctc

SEQ ID NO: 124127 - DNA, 25 bp, Homo sapien
gggactatacatgcataccaccatg

SEQ ID NO: 124128 - DNA, 25 bp, Homo sapien
gcatggctaatttttaaatgtttat

SEQ ID NO: 124129 - DNA, 25 bp, Homo sapien
ctcttggaaatgtggacaactgagt

SEQ ID NO: 124130 - DNA, 25 bp, Homo sapien
agtgccccattctggggcaccagga

SEQ ID NO: 124131 - DNA, 25 bp, Homo sapien
tgtggacaactgagtttttactggg

SEQ ID NO: 124132 - DNA, 25 bp, Homo sapien
caactgagtttttactgggactcct

SEQ ID NO: 124133 - DNA, 25 bp, Homo sapien
tctaccagcgtagagtgccttctgc

SEQ ID NO: 124134 - DNA, 25 bp, Homo sapien
cctgcttctaccagcgtagagtgcc

SEQ ID NO: 124135 - DNA, 25 bp, Homo sapien
gccttctgcttgttttgcataagct

SEQ ID NO: 124136 - DNA, 25 bp, Homo sapien
gttttgcataagctgtgtgcctcct

SEQ ID NO: 124137 - DNA, 25 bp, Homo sapien
catctcgaggattactaggtgccat

SEQ ID NO: 124138 - DNA, 25 bp, Homo sapien
ccccatctcgaggattactaggtgc

SEQ ID NO: 124139 - DNA, 25 bp, Homo sapien
caccccatctcgaggattactaggt

SEQ ID NO: 124140 - DNA, 25 bp, Homo sapien
ccatctcgaggattactaggtgcca

SEQ ID NO: 124141 - DNA, 25 bp, Homo sapien
cagcttctagaagctctggaatgtc

SEQ ID NO: 124142 - DNA, 25 bp, Homo sapien
gacaacagtcagcaaactcgatgga

SEQ ID NO: 124143 - DNA, 25 bp, Homo sapien
ggaatgtcatgaatgctagtgatca

SEQ ID NO: 124144 - DNA, 25 bp, Homo sapien
ggccagcgataagcagacaacagtc

SEQ ID NO: 124145 - DNA, 25 bp, Homo sapien
caaagttaggccttgtgagagggac

SEQ ID NO: 124146 - DNA, 25 bp, Homo sapien
gcaggggacaaagttaggccttgtg

SEQ ID NO: 124147 - DNA, 25 bp, Homo sapien
ctgggataaagaagggcaggggaca

SEQ ID NO: 124148 - DNA, 25 bp, Homo sapien
gacaaagttaggccttgtgagaggg

SEQ ID NO: 124149 - DNA, 25 bp, Homo sapien
cggtgagtggagctacgaggcctct

SEQ ID NO: 124150 - DNA, 25 bp, Homo sapien
gatgaactgataagcggaaggccct

SEQ ID NO: 124151 - DNA, 25 bp, Homo sapien
tggtatttaacttccagaggcggtg

SEQ ID NO: 124152 - DNA, 25 bp, Homo sapien
caacaaaactctctgtcatggatgc

SEQ ID NO: 124153 - DNA, 25 bp, Homo sapien
tatacccactctcataaggcagctg

SEQ ID NO: 124154 - DNA, 25 bp, Homo sapien
gagtgcttgctttgaaccactgtgc

SEQ ID NO: 124155 - DNA, 25 bp, Homo sapien
ggcagctgtaccaaaaccgctttag

SEQ ID NO: 124156 - DNA, 25 bp, Homo sapien
taaggtaatagctggacttgaaccc

SEQ ID NO: 124157 - DNA, 25 bp, Homo sapien
gatgtgtagctatggcacccacact

SEQ ID NO: 124158 - DNA, 25 bp, Homo sapien
cattgatgtgtagctatggcaccca

SEQ ID NO: 124159 - DNA, 25 bp, Homo sapien
cctgatcattgatgtgtagctatgg

SEQ ID NO: 124160 - DNA, 25 bp, Homo sapien
ctgaatgtacctgatcattgatgtg

SEQ ID NO: 124161 - DNA, 25 bp, Homo sapien
tacaatgtgcgagctccttgggact

SEQ ID NO: 124162 - DNA, 25 bp, Homo sapien
tgcgcgccgccagctttgcctggtt

SEQ ID NO: 124163 - DNA, 25 bp, Homo sapien
taggttttcgggcagaaacagcgac

SEQ ID NO: 124164 - DNA, 25 bp, Homo sapien
ctggttcgtcctgattacactaggt

SEQ ID NO: 124165 - DNA, 25 bp, Homo sapien
tgtcttctcatccaactttcttggc

SEQ ID NO: 124166 - DNA, 25 bp, Homo sapien
catccaactttcttggctgttctgg

SEQ ID NO: 124167 - DNA, 25 bp, Homo sapien
ggctgttctggagcttcatcagcag

SEQ ID NO: 124168 - DNA, 25 bp, Homo sapien
ggagcttcatcagcagataattcca

SEQ ID NO: 124169 - DNA, 25 bp, Homo sapien
cgacgcagtcaacagggaatgtcct

SEQ ID NO: 124170 - DNA, 25 bp, Homo sapien
ctgagatacggttgccgcatgcgcc

SEQ ID NO: 124171 - DNA, 25 bp, Homo sapien
gactcctgggtattccgtctcggga

SEQ ID NO: 124172 - DNA, 25 bp, Homo sapien
aatgtcctccaacgcttccgggaag

SEQ ID NO: 124173 - DNA, 25 bp, Homo sapien
ccggttgggatattccttctccaca

SEQ ID NO: 124174 - DNA, 25 bp, Homo sapien
agtgcggccgagtccgccccacgta

SEQ ID NO: 124175 - DNA, 25 bp, Homo sapien
tgtgcctaaataccgctactgggtc

SEQ ID NO: 124176 - DNA, 25 bp, Homo sapien
acaggccatccctggtgtgcctaaa

SEQ ID NO: 124177 - DNA, 25 bp, Homo sapien
cgctactgggtcaccgggaccggca

SEQ ID NO: 124178 - DNA, 25 bp, Homo sapien
cccttaggagtaaccactatctcga

SEQ ID NO: 124179 - DNA, 25 bp, Homo sapien
tgatcacaccctaatcccttaggag

SEQ ID NO: 124180 - DNA, 25 bp, Homo sapien
aacactgcttgcacccgggaagact

SEQ ID NO: 124181 - DNA, 25 bp, Homo sapien
tgtacatctgtagaaccaccaccca

SEQ ID NO: 124182 - DNA, 25 bp, Homo sapien
taggtaattgattgaaaagtatact

SEQ ID NO: 124183 - DNA, 25 bp, Homo sapien
aagtggaaggttaggtaattgattg

SEQ ID NO: 124184 - DNA, 25 bp, Homo sapien
tggaaggttaggtaattgattgaaa

SEQ ID NO: 124185 - DNA, 25 bp, Homo sapien
ttttaaatataggcacttataacta

SEQ ID NO: 124186 - DNA, 25 bp, Homo sapien
tccagttgctctatagctacatcaa

SEQ ID NO: 124187 - DNA, 25 bp, Homo sapien
gctacatcaatactaggtactgctt

SEQ ID NO: 124188 - DNA, 25 bp, Homo sapien
cattcagtgacgtaaagtggtatct

SEQ ID NO: 124189 - DNA, 25 bp, Homo sapien
agctatagagattcatgtgcaagtc

SEQ ID NO: 124190 - DNA, 25 bp, Homo sapien
ggatttgtttgtgatcagcataaaa

SEQ ID NO: 124191 - DNA, 25 bp, Homo sapien
taaaatcccgcttactgcacactgc

SEQ ID NO: 124192 - DNA, 25 bp, Homo sapien
tgtttgtgatcagcataaaatcccg

SEQ ID NO: 124193 - DNA, 25 bp, Homo sapien
gatcagcataaaatcccgcttactg

SEQ ID NO: 124194 - DNA, 25 bp, Homo sapien
tcatttagtatagggacaagcagcc

SEQ ID NO: 124195 - DNA, 25 bp, Homo sapien
gaaggtacccaagaaccaggagaca

SEQ ID NO: 124196 - DNA, 25 bp, Homo sapien
tgaaaactcacatggatgaccctaa

SEQ ID NO: 124197 - DNA, 25 bp, Homo sapien
tgactccattctaaaggcctgctgt

SEQ ID NO: 124198 - DNA, 25 bp, Homo sapien
catgtctggctattacatgatgaca

SEQ ID NO: 124199 - DNA, 25 bp, Homo sapien
tactgaatgtatactcatgtctggc

SEQ ID NO: 124200 - DNA, 25 bp, Homo sapien
tatactcatgtctggctattacatg

SEQ ID NO: 124201 - DNA, 25 bp, Homo sapien
tacatgatgacaattcttacacaaa

SEQ ID NO: 124202 - DNA, 25 bp, Homo sapien
ttgaactactgccaggataggatga

SEQ ID NO: 124203 - DNA, 25 bp, Homo sapien
cttgaactactgccaggataggatg

SEQ ID NO: 124204 - DNA, 25 bp, Homo sapien
acttgaactactgccaggataggat

SEQ ID NO: 124205 - DNA, 25 bp, Homo sapien
aacttgaactactgccaggatagga

SEQ ID NO: 124206 - DNA, 25 bp, Homo sapien
ggatacctataataatttatcatgt

SEQ ID NO: 124207 - DNA, 25 bp, Homo sapien
cccacagaggaatagaaagcagtct

SEQ ID NO: 124208 - DNA, 25 bp, Homo sapien
tagcttaactctcttcctctattag

SEQ ID NO: 124209 - DNA, 25 bp, Homo sapien
ttagtccctgttaattctgactcca

SEQ ID NO: 124210 - DNA, 25 bp, Homo sapien
gtgaggctaaacaaatacttgagtt

SEQ ID NO: 124211 - DNA, 25 bp, Homo sapien
tcaggaggggagcttagttgtggca

SEQ ID NO: 124212 - DNA, 25 bp, Homo sapien
acttccactgcttcaacccaccagg

SEQ ID NO: 124213 - DNA, 25 bp, Homo sapien
aaatacttccactgcttcaacccac

SEQ ID NO: 124214 - DNA, 25 bp, Homo sapien
ggagcttagttgtggcagtggaaag

SEQ ID NO: 124215 - DNA, 25 bp, Homo sapien
aatatttaacagtcataaactacag

SEQ ID NO: 124216 - DNA, 25 bp, Homo sapien
tctagaatatttaacagtcataaac

SEQ ID NO: 124217 - DNA, 25 bp, Homo sapien
gagattacaagcactcggcatcacg

SEQ ID NO: 124218 - DNA, 25 bp, Homo sapien
tgagattacaagcactcggcatcac

SEQ ID NO: 124219 - DNA, 25 bp, Homo sapien
agaacaagataaagtgcataattac

SEQ ID NO: 124220 - DNA, 25 bp, Homo sapien
tagaacaagataaagtgcataatta

SEQ ID NO: 124221 - DNA, 25 bp, Homo sapien
ctagaacaagataaagtgcataatt

SEQ ID NO: 124222 - DNA, 25 bp, Homo sapien
tgatagtatcttcggctttgccgca

SEQ ID NO: 124223 - DNA, 25 bp, Homo sapien
tatcttcggctttgccgcataacag

SEQ ID NO: 124224 - DNA, 25 bp, Homo sapien
ctttgccgcataacagacacagcat

SEQ ID NO: 124225 - DNA, 25 bp, Homo sapien
tactgatagtatcttcggctttgcc

SEQ ID NO: 124226 - DNA, 25 bp, Homo sapien
ataagagagtcatttgtcgggggtc

SEQ ID NO: 124227 - DNA, 25 bp, Homo sapien
taagagagtcatttgtcgggggtca

SEQ ID NO: 124228 - DNA, 25 bp, Homo sapien
gaactttagcagaagagctcagctc

SEQ ID NO: 124229 - DNA, 25 bp, Homo sapien
tctgtggcacaagatactctaggct

SEQ ID NO: 124230 - DNA, 25 bp, Homo sapien
tgctaacaaagatgcttcactctgg

SEQ ID NO: 124231 - DNA, 25 bp, Homo sapien
tgtacagttcatatcccagttctag

SEQ ID NO: 124232 - DNA, 25 bp, Homo sapien
gcagagaggcctaaatgccagttta

SEQ ID NO: 124233 - DNA, 25 bp, Homo sapien
gcctttcagagatccttcagttcga

SEQ ID NO: 124234 - DNA, 25 bp, Homo sapien
cctggccagtgctcatgaaactatg

SEQ ID NO: 124235 - DNA, 25 bp, Homo sapien
gaagcattagcaaactcaaggaagg

SEQ ID NO: 124236 - DNA, 25 bp, Homo sapien
atccatgtccctaattcctaatttg

SEQ ID NO: 124237 - DNA, 25 bp, Homo sapien
catgtccctaattcctaatttgaac

SEQ ID NO: 124238 - DNA, 25 bp, Homo sapien
tccctaattcctaatttgaacagaa

SEQ ID NO: 124239 - DNA, 25 bp, Homo sapien
tgtccctaattcctaatttgaacag

SEQ ID NO: 124240 - DNA, 25 bp, Homo sapien
taatgctattcaactcagaggaggg

SEQ ID NO: 124241 - DNA, 25 bp, Homo sapien
gaagtctccttaacaactctcccag

SEQ ID NO: 124242 - DNA, 25 bp, Homo sapien
aaaaaaccagagcttggaacaagtg

SEQ ID NO: 124243 - DNA, 25 bp, Homo sapien
cagagagaatcactaacctgagggc

SEQ ID NO: 124244 - DNA, 25 bp, Homo sapien
gatggcaccttcctaaaccctcatg

SEQ ID NO: 124245 - DNA, 25 bp, Homo sapien
ggagccttaggatgcagcatgcctt

SEQ ID NO: 124246 - DNA, 25 bp, Homo sapien
ctgggccttcacagaatgatggcac

SEQ ID NO: 124247 - DNA, 25 bp, Homo sapien
tccaagacttgggtaagctctgggc

SEQ ID NO: 124248 - DNA, 25 bp, Homo sapien
tggcaccacgcactgaaagactttt

SEQ ID NO: 124249 - DNA, 25 bp, Homo sapien
tgttctccaggacaagtggcaccac

SEQ ID NO: 124250 - DNA, 25 bp, Homo sapien
caaacccgctctgaaaagtcttggg

SEQ ID NO: 124251 - DNA, 25 bp, Homo sapien
gagatggcccttagcagatgtcctg

SEQ ID NO: 124252 - DNA, 25 bp, Homo sapien
gattatttcaaaccaccggtgtggc

SEQ ID NO: 124253 - DNA, 25 bp, Homo sapien
gtgaccacggaagcggcaaacattg

SEQ ID NO: 124254 - DNA, 25 bp, Homo sapien
gaaacacagttatcgagaggatgct

SEQ ID NO: 124255 - DNA, 25 bp, Homo sapien
catctatgagcaggttttaaagcca

SEQ ID NO: 124256 - DNA, 25 bp, Homo sapien
tctgctggcctgtttactcgtcacc

SEQ ID NO: 124257 - DNA, 25 bp, Homo sapien
ggattttagggtgcagctacgctca

SEQ ID NO: 124258 - DNA, 25 bp, Homo sapien
tgggcagtggctccaatctgtggac

SEQ ID NO: 124259 - DNA, 25 bp, Homo sapien
tccctgtgacgggtgaacttcgtgt

SEQ ID NO: 124260 - DNA, 25 bp, Homo sapien
ggttccacccttggatccaggaaga

SEQ ID NO: 124261 - DNA, 25 bp, Homo sapien
cagtgacctgcgaaagtggagcatc

SEQ ID NO: 124262 - DNA, 25 bp, Homo sapien
gagacactggactaacctgtgccct

SEQ ID NO: 124263 - DNA, 25 bp, Homo sapien
cgaactcttcgaaaacctgctggtg

SEQ ID NO: 124264 - DNA, 25 bp, Homo sapien
tttttacgaggatgccatactgcca

SEQ ID NO: 124265 - DNA, 25 bp, Homo sapien
tgtggcactgtgctaaggcaagcgc

SEQ ID NO: 124266 - DNA, 25 bp, Homo sapien
catactgccacaatggatggtgtct

SEQ ID NO: 124267 - DNA, 25 bp, Homo sapien
aagcgcttttaagtgcacgacccca

SEQ ID NO: 124268 - DNA, 25 bp, Homo sapien
gataagttatccactcagtccgtgg

SEQ ID NO: 124269 - DNA, 25 bp, Homo sapien
cccagccaagattggtatttctgag

SEQ ID NO: 124270 - DNA, 25 bp, Homo sapien
tcctctcccttttcagtcaatagcg

SEQ ID NO: 124271 - DNA, 25 bp, Homo sapien
cagtccgtggacctcaagagttttc

SEQ ID NO: 124272 - DNA, 25 bp, Homo sapien
cagcacagataagggaagatgtctc

SEQ ID NO: 124273 - DNA, 25 bp, Homo sapien
ggagaggcatggtcagcaaaacaac

SEQ ID NO: 124274 - DNA, 25 bp, Homo sapien
gctccagggagtacacaaagacgta

SEQ ID NO: 124275 - DNA, 25 bp, Homo sapien
ttaattaacccaccagacgtagctc

SEQ ID NO: 124276 - DNA, 25 bp, Homo sapien
catgagggctctaacatcacgactg

SEQ ID NO: 124277 - DNA, 25 bp, Homo sapien
tctggacttactggaatcatgaacc

SEQ ID NO: 124278 - DNA, 25 bp, Homo sapien
tctgtacccaagaaaggaagtagac

SEQ ID NO: 124279 - DNA, 25 bp, Homo sapien
taagggcgttagtcccatgcatgag

SEQ ID NO: 124280 - DNA, 25 bp, Homo sapien
acaaaatgtattctctgccccttag

SEQ ID NO: 124281 - DNA, 25 bp, Homo sapien
caaatgctttgtcaaccacaaaatg

SEQ ID NO: 124282 - DNA, 25 bp, Homo sapien
accacaaaatgtattctctgcccct

SEQ ID NO: 124283 - DNA, 25 bp, Homo sapien
ttttggaattgcttctttatgcctg

SEQ ID NO: 124284 - DNA, 25 bp, Homo sapien
tcctgggacctgtgcttggtaactg

SEQ ID NO: 124285 - DNA, 25 bp, Homo sapien
cttgggtttcaggtgtattaggttg

SEQ ID NO: 124286 - DNA, 25 bp, Homo sapien
ttaggttgttcctcgttgtggagtc

SEQ ID NO: 124287 - DNA, 25 bp, Homo sapien
acatggcccacacatgctggtttcc

SEQ ID NO: 124288 - DNA, 25 bp, Homo sapien
gggcccactggtatataccaccaca

SEQ ID NO: 124289 - DNA, 25 bp, Homo sapien
ggcttgagactgttaagatgatgag

SEQ ID NO: 124290 - DNA, 25 bp, Homo sapien
tgggcccactggtatataccaccac

SEQ ID NO: 124291 - DNA, 25 bp, Homo sapien
ttgagactgttaagatgatgaggct

SEQ ID NO: 124292 - DNA, 25 bp, Homo sapien
tgaggaatccacgtcagcttgcatt

SEQ ID NO: 124293 - DNA, 25 bp, Homo sapien
tgggcctcggttcctagaaaacatc

SEQ ID NO: 124294 - DNA, 25 bp, Homo sapien
ctgggttggatctgcgctcggtact

SEQ ID NO: 124295 - DNA, 25 bp, Homo sapien
gggatattcttaccacccgggatgc

SEQ ID NO: 124296 - DNA, 25 bp, Homo sapien
ctgttttcactcatacaagccgtat

SEQ ID NO: 124297 - DNA, 25 bp, Homo sapien
ccgtatgtcggaatgaattgtttcc

SEQ ID NO: 124298 - DNA, 25 bp, Homo sapien
tacaagccgtatgtcggaatgaatt

SEQ ID NO: 124299 - DNA, 25 bp, Homo sapien
cttgtgaaactgtgtagtaatacat

SEQ ID NO: 124300 - DNA, 25 bp, Homo sapien
tgcctccagaacaaccaagtttaaa

SEQ ID NO: 124301 - DNA, 25 bp, Homo sapien
gtgatttttaggaaaacgctgctac

SEQ ID NO: 124302 - DNA, 25 bp, Homo sapien
gttgtgatttttaggaaaacgctgc

SEQ ID NO: 124303 - DNA, 25 bp, Homo sapien
tcatcacacttgcctccagaacaac

SEQ ID NO: 124304 - DNA, 25 bp, Homo sapien
tacatccgaatttcatttcagcgag

SEQ ID NO: 124305 - DNA, 25 bp, Homo sapien
caagggtgtctacatccgaatttca

SEQ ID NO: 124306 - DNA, 25 bp, Homo sapien
tgaagcgcaagggtgtctacatccg

SEQ ID NO: 124307 - DNA, 25 bp, Homo sapien
catttcagcgagatggcgtaggacg

SEQ ID NO: 124308 - DNA, 25 bp, Homo sapien
tcgagtgagttactgagatgctgcc

SEQ ID NO: 124309 - DNA, 25 bp, Homo sapien
gagtgagttactgagatgctgccgc

SEQ ID NO: 124310 - DNA, 25 bp, Homo sapien
ccgtctttcgagtgagttactgaga

SEQ ID NO: 124311 - DNA, 25 bp, Homo sapien
gtgagttactgagatgctgccgccc

SEQ ID NO: 124312 - DNA, 25 bp, Homo sapien
gcgagcggatagaggcaaaaagatt

SEQ ID NO: 124313 - DNA, 25 bp, Homo sapien
ttttgaacgcgaatgtctcctcccg

SEQ ID NO: 124314 - DNA, 25 bp, Homo sapien
ctacggcgagcggatagaggcaaaa

SEQ ID NO: 124315 - DNA, 25 bp, Homo sapien
caaaaagattttgaacgcgaatgtc

SEQ ID NO: 124316 - DNA, 25 bp, Homo sapien
tgtaggactctgcttcgttaagcaa

SEQ ID NO: 124317 - DNA, 25 bp, Homo sapien
attgaaactcgagcgggctaaagcg

SEQ ID NO: 124318 - DNA, 25 bp, Homo sapien
gagcagcagacagtgtgtaggactc

SEQ ID NO: 124319 - DNA, 25 bp, Homo sapien
gcaacaacgcgcattgaaactcgag

SEQ ID NO: 124320 - DNA, 25 bp, Homo sapien
tgtttccaccgagtcgtcctgcaac

SEQ ID NO: 124321 - DNA, 25 bp, Homo sapien
taggtgaaagaactcggagaagcca

SEQ ID NO: 124322 - DNA, 25 bp, Homo sapien
gcctcagactgtacagcggctctga

SEQ ID NO: 124323 - DNA, 25 bp, Homo sapien
ctgttctatggacgtgactgtttcc

SEQ ID NO: 124324 - DNA, 25 bp, Homo sapien
ccagaacacatcgcgcgggcgcctc

SEQ ID NO: 124325 - DNA, 25 bp, Homo sapien
gcctcgcccagtcctgccacctcac

SEQ ID NO: 124326 - DNA, 25 bp, Homo sapien
agaacacatcgcgcgggcgcctcgc

SEQ ID NO: 124327 - DNA, 25 bp, Homo sapien
ggcgcctcgcccagtcctgccacct

SEQ ID NO: 124328 - DNA, 25 bp, Homo sapien
ccggagcttcccagaggaaaggcac

SEQ ID NO: 124329 - DNA, 25 bp, Homo sapien
ctgggcgcccggagcttcccagagg

SEQ ID NO: 124330 - DNA, 25 bp, Homo sapien
agcttcccagaggaaaggcaccgcg

SEQ ID NO: 124331 - DNA, 25 bp, Homo sapien
ggagcttcccagaggaaaggcaccg

SEQ ID NO: 124332 - DNA, 25 bp, Homo sapien
aacagagtgggctgtccgacccgca

SEQ ID NO: 124333 - DNA, 25 bp, Homo sapien
gattcttctcgttctttagggcaga

SEQ ID NO: 124334 - DNA, 25 bp, Homo sapien
tcccgaagtactggcagaacagagt

SEQ ID NO: 124335 - DNA, 25 bp, Homo sapien
tgtcctccaggcatagaacacgatt

SEQ ID NO: 124336 - DNA, 25 bp, Homo sapien
caaaaattaaacagatcgtgaaacg

SEQ ID NO: 124337 - DNA, 25 bp, Homo sapien
gtgaaacggcatgacagcagcctgg

SEQ ID NO: 124338 - DNA, 25 bp, Homo sapien
gaaaagtgcactatgcaccccagaa

SEQ ID NO: 124339 - DNA, 25 bp, Homo sapien
tgagggcaggttgggaaaagtgcac

SEQ ID NO: 124340 - DNA, 25 bp, Homo sapien
aacagttccacatagcaaccttggg

SEQ ID NO: 124341 - DNA, 25 bp, Homo sapien
gatttgaaagatactcgcaccagga

SEQ ID NO: 124342 - DNA, 25 bp, Homo sapien
tgtgtccgacacgtagctggtgctc

SEQ ID NO: 124343 - DNA, 25 bp, Homo sapien
gaataaccacgtatcaagcccttgt

SEQ ID NO: 124344 - DNA, 25 bp, Homo sapien
cgtagaaggcgctcaagtatttgct

SEQ ID NO: 124345 - DNA, 25 bp, Homo sapien
taattgactgcctcattggcctaga

SEQ ID NO: 124346 - DNA, 25 bp, Homo sapien
catgtgttgtcaccagagggttccc

SEQ ID NO: 124347 - DNA, 25 bp, Homo sapien
caacttatgccgagtgtctagaaca

SEQ ID NO: 124348 - DNA, 25 bp, Homo sapien
tataaaacagcttgaggcaggtcct

SEQ ID NO: 124349 - DNA, 25 bp, Homo sapien
tcaacctcaggagattcgcgtgcct

SEQ ID NO: 124350 - DNA, 25 bp, Homo sapien
gaagaacgcactgttatcctaggag

SEQ ID NO: 124351 - DNA, 25 bp, Homo sapien
gaacgtaccccatattccacggcag

SEQ ID NO: 124352 - DNA, 25 bp, Homo sapien
cgagggttggttggtatggtctgga

SEQ ID NO: 124353 - DNA, 25 bp, Homo sapien
tgccacaaatgcctattggcgaggg

SEQ ID NO: 124354 - DNA, 25 bp, Homo sapien
tggtatggtctggaacttcacagta

SEQ ID NO: 124355 - DNA, 25 bp, Homo sapien
caaatgcctattggcgagggttggt

SEQ ID NO: 124356 - DNA, 25 bp, Homo sapien
ggtggttgaacttgtaagaactgaa

SEQ ID NO: 124357 - DNA, 25 bp, Homo sapien
ttggtacaaggtggttgaacttgta

SEQ ID NO: 124358 - DNA, 25 bp, Homo sapien
cttggtacaaggtggttgaacttgt

SEQ ID NO: 124359 - DNA, 25 bp, Homo sapien
gggtcttagcatatccaggtaacca

SEQ ID NO: 124360 - DNA, 25 bp, Homo sapien
gctccccgtggttagattcgctcaa

SEQ ID NO: 124361 - DNA, 25 bp, Homo sapien
aacagtattctaccagagggaggag

SEQ ID NO: 124362 - DNA, 25 bp, Homo sapien
cagctcgagtggagaatcgctctaa

SEQ ID NO: 124363 - DNA, 25 bp, Homo sapien
taaacgctgtgatcagccacgggaa

SEQ ID NO: 124364 - DNA, 25 bp, Homo sapien
catctctaagggtttggaggagcca

SEQ ID NO: 124365 - DNA, 25 bp, Homo sapien
gacccgtgatcagctgacttttgga

SEQ ID NO: 124366 - DNA, 25 bp, Homo sapien
gagggattcaggttacacacacaga

SEQ ID NO: 124367 - DNA, 25 bp, Homo sapien
taagtatatcaatggctacaaggaa

SEQ ID NO: 124368 - DNA, 25 bp, Homo sapien
tactactgaggctcaaaagggaggg

SEQ ID NO: 124369 - DNA, 25 bp, Homo sapien
gaatgtgcgatgagtggccctggca

SEQ ID NO: 124370 - DNA, 25 bp, Homo sapien
agcccttcatgtagtctttacctca

SEQ ID NO: 124371 - DNA, 25 bp, Homo sapien
acaggccgggcaaagcacagaggct

SEQ ID NO: 124372 - DNA, 25 bp, Homo sapien
tttaagatggaatgtgccgcccatg

SEQ ID NO: 124373 - DNA, 25 bp, Homo sapien
caagtcagcaatactggctttaaga

SEQ ID NO: 124374 - DNA, 25 bp, Homo sapien
gaggaccgtgttctgcagccagtcg

SEQ ID NO: 124375 - DNA, 25 bp, Homo sapien
cagagaaaagaagctcttgtctgaa

SEQ ID NO: 124376 - DNA, 25 bp, Homo sapien
aaaccagagaaaagaagctcttgtc

SEQ ID NO: 124377 - DNA, 25 bp, Homo sapien
ctaaaccagagaaaagaagctcttg

SEQ ID NO: 124378 - DNA, 25 bp, Homo sapien
tcttgtctgaatgtctctaaagcat

SEQ ID NO: 124379 - DNA, 25 bp, Homo sapien
tcactgactggataaccagcaactt

SEQ ID NO: 124380 - DNA, 25 bp, Homo sapien
ccctgcaatcactgactggataacc

SEQ ID NO: 124381 - DNA, 25 bp, Homo sapien
tgcaatcactgactggataaccagc

SEQ ID NO: 124382 - DNA, 25 bp, Homo sapien
ctgactggataaccagcaacttctc

SEQ ID NO: 124383 - DNA, 25 bp, Homo sapien
tgtcagttgtcgaaggcctcttttc

SEQ ID NO: 124384 - DNA, 25 bp, Homo sapien
gtcagttgtcgaaggcctcttttca

SEQ ID NO: 124385 - DNA, 25 bp, Homo sapien
agagacaggagagaaaacatccctt

SEQ ID NO: 124386 - DNA, 25 bp, Homo sapien
ggagagagacaggagagaaaacatc

SEQ ID NO: 124387 - DNA, 25 bp, Homo sapien
tgggagagagacaggagagaaaaca

SEQ ID NO: 124388 - DNA, 25 bp, Homo sapien
agagagacaggagagaaaacatccc

SEQ ID NO: 124389 - DNA, 25 bp, Homo sapien
ccaagctgtgcaggatccaatagca

SEQ ID NO: 124390 - DNA, 25 bp, Homo sapien
tctgtagccactatctgggggatgg

SEQ ID NO: 124391 - DNA, 25 bp, Homo sapien
tatctgggggatgggttcatctagc

SEQ ID NO: 124392 - DNA, 25 bp, Homo sapien
ctgtgcaggatccaatagcagagcc

SEQ ID NO: 124393 - DNA, 25 bp, Homo sapien
ctcatcccagatgcttcgacctcaa

SEQ ID NO: 124394 - DNA, 25 bp, Homo sapien
catcccagatgcttcgacctcaaga

SEQ ID NO: 124395 - DNA, 25 bp, Homo sapien
gctcagaagtctctcatcccagatg

SEQ ID NO: 124396 - DNA, 25 bp, Homo sapien
ctcagaagtctctcatcccagatgc

SEQ ID NO: 124397 - DNA, 25 bp, Homo sapien
cagcgttcagatccaggctcacaga

SEQ ID NO: 124398 - DNA, 25 bp, Homo sapien
gatccaggctcacagaaatccccat

SEQ ID NO: 124399 - DNA, 25 bp, Homo sapien
tttcatgggtctgcggcctcctcca

SEQ ID NO: 124400 - DNA, 25 bp, Homo sapien
ctccatccagcgttcagatccaggc

SEQ ID NO: 124401 - DNA, 25 bp, Homo sapien
cataacaagtgttttctgcacctag

SEQ ID NO: 124402 - DNA, 25 bp, Homo sapien
gccagtaggctttgttcataacaag

SEQ ID NO: 124403 - DNA, 25 bp, Homo sapien
aataatctatttccttatgggtcag

SEQ ID NO: 124404 - DNA, 25 bp, Homo sapien
tccttatgggtcagagccagtaggc

SEQ ID NO: 124405 - DNA, 25 bp, Homo sapien
taacaacctcgccttgctggctttg

SEQ ID NO: 124406 - DNA, 25 bp, Homo sapien
cagcagtaacaacctcgccttgctg

SEQ ID NO: 124407 - DNA, 25 bp, Homo sapien
gcagtaacaacctcgccttgctggc

SEQ ID NO: 124408 - DNA, 25 bp, Homo sapien
cagtaacaacctcgccttgctggct

SEQ ID NO: 124409 - DNA, 25 bp, Homo sapien
gctgctcacagagtcagacgtgtta

SEQ ID NO: 124410 - DNA, 25 bp, Homo sapien
caagcaccggcaagtctctggatgg

SEQ ID NO: 124411 - DNA, 25 bp, Homo sapien
tctcttgttgattccgggtggcctc

SEQ ID NO: 124412 - DNA, 25 bp, Homo sapien
cacatcaagcttgttctcgtactaa

SEQ ID NO: 124413 - DNA, 25 bp, Homo sapien
gatatcagcgattgcctctcagcct

SEQ ID NO: 124414 - DNA, 25 bp, Homo sapien
agttcccaggtgatagcaatgctcc

SEQ ID NO: 124415 - DNA, 25 bp, Homo sapien
acagaaagttctgctggacaccacc

SEQ ID NO: 124416 - DNA, 25 bp, Homo sapien
caagttcaaagcagggatatcagcg

SEQ ID NO: 124417 - DNA, 25 bp, Homo sapien
tgccctcctctgagtttcgtactta

SEQ ID NO: 124418 - DNA, 25 bp, Homo sapien
tctgagtttcgtacttaagcgcttg

SEQ ID NO: 124419 - DNA, 25 bp, Homo sapien
tttcgtacttaagcgcttgttggtc

SEQ ID NO: 124420 - DNA, 25 bp, Homo sapien
ctctccccaaagggcttaattctct

SEQ ID NO: 124421 - DNA, 25 bp, Homo sapien
ggcaaaaacaaagtcagagagcatt

SEQ ID NO: 124422 - DNA, 25 bp, Homo sapien
aaaaacaaagtcagagagcattcat

SEQ ID NO: 124423 - DNA, 25 bp, Homo sapien
ctaggtacacagccaaagggcaaaa

SEQ ID NO: 124424 - DNA, 25 bp, Homo sapien
ggtacacagccaaagggcaaaaaca

SEQ ID NO: 124425 - DNA, 25 bp, Homo sapien
cctcctcggtgccaatgatgcacaa

SEQ ID NO: 124426 - DNA, 25 bp, Homo sapien
tgactgctgcatatgtgggtgcaag

SEQ ID NO: 124427 - DNA, 25 bp, Homo sapien
caaggtgtggatactgaccgggtcc

SEQ ID NO: 124428 - DNA, 25 bp, Homo sapien
ttaatgatgtcataggcctcctcgg

SEQ ID NO: 124429 - DNA, 25 bp, Homo sapien
tccgacatgcatgagaaaggagccg

SEQ ID NO: 124430 - DNA, 25 bp, Homo sapien
ccgtcaggttgcttcagggagtaca

SEQ ID NO: 124431 - DNA, 25 bp, Homo sapien
ttgcttcagggagtacaaatactga

SEQ ID NO: 124432 - DNA, 25 bp, Homo sapien
catgagaaaggagccgtcaggttgc

SEQ ID NO: 124433 - DNA, 25 bp, Homo sapien
tgatcatgacacctgaggacatctg

SEQ ID NO: 124434 - DNA, 25 bp, Homo sapien
cacatctgaatgattctgacgtgtc

SEQ ID NO: 124435 - DNA, 25 bp, Homo sapien
tcaagtgatcatgacacctgaggac

SEQ ID NO: 124436 - DNA, 25 bp, Homo sapien
cactgacatgtcatcccatgtgtca

SEQ ID NO: 124437 - DNA, 25 bp, Homo sapien
agttgctcacggcatggcttcagtg

SEQ ID NO: 124438 - DNA, 25 bp, Homo sapien
gaacatgacattctattctccctac

SEQ ID NO: 124439 - DNA, 25 bp, Homo sapien
cacacggtcagtcctcctgggtctc

SEQ ID NO: 124440 - DNA, 25 bp, Homo sapien
cctgggtctccaactgagaggtgtg

SEQ ID NO: 124441 - DNA, 25 bp, Homo sapien
tgatgatgttggtcagcgaggctac

SEQ ID NO: 124442 - DNA, 25 bp, Homo sapien
cttgctatccattcagcagtgccct

SEQ ID NO: 124443 - DNA, 25 bp, Homo sapien
tacggaggcagcacagtatgcgctt

SEQ ID NO: 124444 - DNA, 25 bp, Homo sapien
agtgccctcaaagaggtctggagtg

SEQ ID NO: 124445 - DNA, 25 bp, Homo sapien
tggaataacttgtccaagcacaaag

SEQ ID NO: 124446 - DNA, 25 bp, Homo sapien
cagtggaataacttgtccaagcaca

SEQ ID NO: 124447 - DNA, 25 bp, Homo sapien
cacagagcagtggaataacttgtcc

SEQ ID NO: 124448 - DNA, 25 bp, Homo sapien
gagcagtggaataacttgtccaagc

SEQ ID NO: 124449 - DNA, 25 bp, Homo sapien
caggccacagaaggtatagccacca

SEQ ID NO: 124450 - DNA, 25 bp, Homo sapien
atgggcttccatccctggtaccccg

SEQ ID NO: 124451 - DNA, 25 bp, Homo sapien
agaaggtatagccaccatgggcttc

SEQ ID NO: 124452 - DNA, 25 bp, Homo sapien
ctggtaccccgccaatgccaccttc

SEQ ID NO: 124453 - DNA, 25 bp, Homo sapien
ttcaaggaacgttccctcttgagga

SEQ ID NO: 124454 - DNA, 25 bp, Homo sapien
caaggaacgttccctcttgaggatt

SEQ ID NO: 124455 - DNA, 25 bp, Homo sapien
tcaaggaacgttccctcttgaggat

SEQ ID NO: 124456 - DNA, 25 bp, Homo sapien
agttcaaggaacgttccctcttgag

SEQ ID NO: 124457 - DNA, 25 bp, Homo sapien
cagaaggagtagcagccatccacca

SEQ ID NO: 124458 - DNA, 25 bp, Homo sapien
ttgggcgtgcagtgcgcggtggagc

SEQ ID NO: 124459 - DNA, 25 bp, Homo sapien
cagcttgttgcagcggccctgaaat

SEQ ID NO: 124460 - DNA, 25 bp, Homo sapien
gaaatcctccttcaaatcgcatctg

SEQ ID NO: 124461 - DNA, 25 bp, Homo sapien
ccttctcccagccaatgaaaaaagc

SEQ ID NO: 124462 - DNA, 25 bp, Homo sapien
caagagatgccctgtgtctgagaag

SEQ ID NO: 124463 - DNA, 25 bp, Homo sapien
gcaaacatcacctgtaacttcacat

SEQ ID NO: 124464 - DNA, 25 bp, Homo sapien
taggcacccttttccatagacaaag

SEQ ID NO: 124465 - DNA, 25 bp, Homo sapien
ccagtaactaccaagccaagtggaa

SEQ ID NO: 124466 - DNA, 25 bp, Homo sapien
gtctttccacaccataactgatagg

SEQ ID NO: 124467 - DNA, 25 bp, Homo sapien
attccagggtatgtccaaaagaaca

SEQ ID NO: 124468 - DNA, 25 bp, Homo sapien
tacgattatagggtgataactgcac

SEQ ID NO: 124469 - DNA, 25 bp, Homo sapien
tcttctgagatccaatagccaattt

SEQ ID NO: 124470 - DNA, 25 bp, Homo sapien
tgtctgtttggcctaatcttctgag

SEQ ID NO: 124471 - DNA, 25 bp, Homo sapien
tgcatgcctctgattactaattagg

SEQ ID NO: 124472 - DNA, 25 bp, Homo sapien
tgccccttgtctacatcatatgctg

SEQ ID NO: 124473 - DNA, 25 bp, Homo sapien
tttccaaggttgagcactaggtgag

SEQ ID NO: 124474 - DNA, 25 bp, Homo sapien
ggtttccaaggttgagcactaggtg

SEQ ID NO: 124475 - DNA, 25 bp, Homo sapien
agggtttccaaggttgagcactagg

SEQ ID NO: 124476 - DNA, 25 bp, Homo sapien
aagggtttccaaggttgagcactag

SEQ ID NO: 124477 - DNA, 25 bp, Homo sapien
tataaaagtttatggtatcaataac

SEQ ID NO: 124478 - DNA, 25 bp, Homo sapien
ttatgatacagtctataaagagatt

SEQ ID NO: 124479 - DNA, 25 bp, Homo sapien
tatgatacagtctataaagagattg

SEQ ID NO: 124480 - DNA, 25 bp, Homo sapien
agtttatgatacagtctataaagag

SEQ ID NO: 124481 - DNA, 25 bp, Homo sapien
tcttccattcattcttggtacaact

SEQ ID NO: 124482 - DNA, 25 bp, Homo sapien
gtaagggcccggcagatccagccaa

SEQ ID NO: 124483 - DNA, 25 bp, Homo sapien
caagtatcaatgacctaattccact

SEQ ID NO: 124484 - DNA, 25 bp, Homo sapien
cattcttggtacaactgctatcttc

SEQ ID NO: 124485 - DNA, 25 bp, Homo sapien
tggctcatgctaagggcagggtcac

SEQ ID NO: 124486 - DNA, 25 bp, Homo sapien
gtggctcatgctaagggcagggtca

SEQ ID NO: 124487 - DNA, 25 bp, Homo sapien
gctggaggtgccaagatcaatggcc

SEQ ID NO: 124488 - DNA, 25 bp, Homo sapien
tgagtaggcctgaggtgcacgcccc

SEQ ID NO: 124489 - DNA, 25 bp, Homo sapien
acctagcgctatgcaggtgctgaag

SEQ ID NO: 124490 - DNA, 25 bp, Homo sapien
gaaggtgacacctctgctcttgaga

SEQ ID NO: 124491 - DNA, 25 bp, Homo sapien
ctccaggggcagtactaatgataaa

SEQ ID NO: 124492 - DNA, 25 bp, Homo sapien
gatacattgtgggaccaggccttcc

SEQ ID NO: 124493 - DNA, 25 bp, Homo sapien
gataaattgatacacttctctagaa

SEQ ID NO: 124494 - DNA, 25 bp, Homo sapien
ttcctgatacattgtgggaccaggc

SEQ ID NO: 124495 - DNA, 25 bp, Homo sapien
ttttcgggcacacccaggaccacat

SEQ ID NO: 124496 - DNA, 25 bp, Homo sapien
ccgctcaggcagtagcaggtgtggt

SEQ ID NO: 124497 - DNA, 25 bp, Homo sapien
atgcaacatggctccgctgccgaag

SEQ ID NO: 124498 - DNA, 25 bp, Homo sapien
tgctgggctatggacaggccgctca

SEQ ID NO: 124499 - DNA, 25 bp, Homo sapien
tgaataaactggagcaacacatgtg

SEQ ID NO: 124500 - DNA, 25 bp, Homo sapien
tgaacccaatgagacagataccaca

SEQ ID NO: 124501 - DNA, 25 bp, Homo sapien
caagtcacaagctggaagatattca

SEQ ID NO: 124502 - DNA, 25 bp, Homo sapien
tatgaactggcagacaattcgcaga

SEQ ID NO: 124503 - DNA, 25 bp, Homo sapien
tttacaggtgcgaaccaccatatct

SEQ ID NO: 124504 - DNA, 25 bp, Homo sapien
ccagactggagcaaacagagctcac

SEQ ID NO: 124505 - DNA, 25 bp, Homo sapien
cccagactggagcaaacagagctca

SEQ ID NO: 124506 - DNA, 25 bp, Homo sapien
aggtttacaggtgcgaaccaccata

SEQ ID NO: 124507 - DNA, 25 bp, Homo sapien
tgtaaattagacataactctaaccg

SEQ ID NO: 124508 - DNA, 25 bp, Homo sapien
aaaactgtaaattagacataactct

SEQ ID NO: 124509 - DNA, 25 bp, Homo sapien
taaattagacataactctaaccgaa

SEQ ID NO: 124510 - DNA, 25 bp, Homo sapien
actgtaaattagacataactctaac

SEQ ID NO: 124511 - DNA, 25 bp, Homo sapien
gatgtctcatccttaagctcctcaa

SEQ ID NO: 124512 - DNA, 25 bp, Homo sapien
gatcaccttgtctggtccaatgttg

SEQ ID NO: 124513 - DNA, 25 bp, Homo sapien
tagaaagtatgtagtggcctggatc

SEQ ID NO: 124514 - DNA, 25 bp, Homo sapien
tagtcggttgcaggctctgccgatg

SEQ ID NO: 124515 - DNA, 25 bp, Homo sapien
tctctgtgtgatcgtcctggctgga

SEQ ID NO: 124516 - DNA, 25 bp, Homo sapien
gagaaagggctcaatgtgcagcaca

SEQ ID NO: 124517 - DNA, 25 bp, Homo sapien
cagacttattccacccatcggaggg

SEQ ID NO: 124518 - DNA, 25 bp, Homo sapien
tctggtggaagaaagatagaaaccc

SEQ ID NO: 124519 - DNA, 25 bp, Homo sapien
gaagaattgtcttgcaagttaaggc

SEQ ID NO: 124520 - DNA, 25 bp, Homo sapien
aaagtatgttgtacatactgccgaa

SEQ ID NO: 124521 - DNA, 25 bp, Homo sapien
tactgccgaagaattgtcttgcaag

SEQ ID NO: 124522 - DNA, 25 bp, Homo sapien
tcagttcgtgtttgattccattcca

SEQ ID NO: 124523 - DNA, 25 bp, Homo sapien
tacgtagaagctcttggacaacagc

SEQ ID NO: 124524 - DNA, 25 bp, Homo sapien
tcagccagctgtttaagcctgcggc

SEQ ID NO: 124525 - DNA, 25 bp, Homo sapien
gacagattcgcagcacagagtcgct

SEQ ID NO: 124526 - DNA, 25 bp, Homo sapien
tatgtatcgctcctattgaaagacc

SEQ ID NO: 124527 - DNA, 25 bp, Homo sapien
gcaagtagaccctcgaactctgttg

SEQ ID NO: 124528 - DNA, 25 bp, Homo sapien
ggttttgccataggtcccagagtta

SEQ ID NO: 124529 - DNA, 25 bp, Homo sapien
ccagagttagcaagtagaccctcga

SEQ ID NO: 124530 - DNA, 25 bp, Homo sapien
cgaactctgttgtttgagtcttttg

SEQ ID NO: 124531 - DNA, 25 bp, Homo sapien
ccagcctggatgacagagtgagacc

SEQ ID NO: 124532 - DNA, 25 bp, Homo sapien
agctgtgatggcaccgctccagcct

SEQ ID NO: 124533 - DNA, 25 bp, Homo sapien
agtgagctgtgatggcaccgctcca

SEQ ID NO: 124534 - DNA, 25 bp, Homo sapien
tccagcctggatgacagagtgagac

SEQ ID NO: 124535 - DNA, 25 bp, Homo sapien
tcagtcccatcactccaaggagaga

SEQ ID NO: 124536 - DNA, 25 bp, Homo sapien
cacagtttgcgggactcagtcccat

SEQ ID NO: 124537 - DNA, 25 bp, Homo sapien
gagtagctggccactactagcttgg

SEQ ID NO: 124538 - DNA, 25 bp, Homo sapien
tgttgcagagcttagcagagcactc

SEQ ID NO: 124539 - DNA, 25 bp, Homo sapien
tacaggagagtcacactttgtcccc

SEQ ID NO: 124540 - DNA, 25 bp, Homo sapien
cgtagggaccacatcaaagacagct

SEQ ID NO: 124541 - DNA, 25 bp, Homo sapien
tcttctaggctgacaaacgggctca

SEQ ID NO: 124542 - DNA, 25 bp, Homo sapien
tggatgttcctgtcgcaagcgttgc

SEQ ID NO: 124543 - DNA, 25 bp, Homo sapien
catagtggttgagggttcgcgttgt

SEQ ID NO: 124544 - DNA, 25 bp, Homo sapien
gaacgctggagcctcacgtgagtag

SEQ ID NO: 124545 - DNA, 25 bp, Homo sapien
ggcttttacttccacgtccatagtg

SEQ ID NO: 124546 - DNA, 25 bp, Homo sapien
aaactgtctgggctacaacaaactc

SEQ ID NO: 124547 - DNA, 25 bp, Homo sapien
taacatctctgggttaagcaaggtg

SEQ ID NO: 124548 - DNA, 25 bp, Homo sapien
ctctgggttaagcaaggtgcagtgg

SEQ ID NO: 124549 - DNA, 25 bp, Homo sapien
cttggtgtgctggtacatgcctcta

SEQ ID NO: 124550 - DNA, 25 bp, Homo sapien
gcaaaacaccatctcaagaaataca

SEQ ID NO: 124551 - DNA, 25 bp, Homo sapien
tcatctagaactactttggtagggc

SEQ ID NO: 124552 - DNA, 25 bp, Homo sapien
cttgtcatctagaactactttggta

SEQ ID NO: 124553 - DNA, 25 bp, Homo sapien
catctagaactactttggtagggcc

SEQ ID NO: 124554 - DNA, 25 bp, Homo sapien
tgtcatctagaactactttggtagg

SEQ ID NO: 124555 - DNA, 25 bp, Homo sapien
gatttatttcagtctacatactttg

SEQ ID NO: 124556 - DNA, 25 bp, Homo sapien
gatgctatttcaatggtgatttatt

SEQ ID NO: 124557 - DNA, 25 bp, Homo sapien
gaaacattttggaacttcagtggga

SEQ ID NO: 124558 - DNA, 25 bp, Homo sapien
agtgggatgggcaggttcatgttga

SEQ ID NO: 124559 - DNA, 25 bp, Homo sapien
tgttgtttccagtagcaggcttttt

SEQ ID NO: 124560 - DNA, 25 bp, Homo sapien
gttgttgtttccagtagcaggcttt

SEQ ID NO: 124561 - DNA, 25 bp, Homo sapien
cagcagttttggtggcttttgttgt

SEQ ID NO: 124562 - DNA, 25 bp, Homo sapien
ttgttgttgtttccagtagcaggct

SEQ ID NO: 124563 - DNA, 25 bp, Homo sapien
gcattgacttcttactgctgtttcg

SEQ ID NO: 124564 - DNA, 25 bp, Homo sapien
cagctggtttgacccaaacaaggaa

SEQ ID NO: 124565 - DNA, 25 bp, Homo sapien
tgaatctccttctagcattgacttc

SEQ ID NO: 124566 - DNA, 25 bp, Homo sapien
tgtttcgttccatcagctggtttga

SEQ ID NO: 124567 - DNA, 25 bp, Homo sapien
tagcctatggagagtttagacaaga

SEQ ID NO: 124568 - DNA, 25 bp, Homo sapien
cagatgacggcctgtcttgtattcc

SEQ ID NO: 124569 - DNA, 25 bp, Homo sapien
ggttcttcgtggtcatcctttatca

SEQ ID NO: 124570 - DNA, 25 bp, Homo sapien
catcagcggcagaccatgggtgtca

SEQ ID NO: 124571 - DNA, 25 bp, Homo sapien
gaggcaaagctgcacgggatcctga

SEQ ID NO: 124572 - DNA, 25 bp, Homo sapien
ggcaaagctgcacgggatcctgaga

SEQ ID NO: 124573 - DNA, 25 bp, Homo sapien
aagctgcacgggatcctgagagagc

SEQ ID NO: 124574 - DNA, 25 bp, Homo sapien
gccgaggcaaagctgcacgggatcc

SEQ ID NO: 124575 - DNA, 25 bp, Homo sapien
tcagggtcccgaaatcaggatgggt

SEQ ID NO: 124576 - DNA, 25 bp, Homo sapien
caggatgggtgtttcagttgatgca

SEQ ID NO: 124577 - DNA, 25 bp, Homo sapien
ttgtccccaggagcacgatgttcca

SEQ ID NO: 124578 - DNA, 25 bp, Homo sapien
cagttctaggatgccagcttccgca

SEQ ID NO: 124579 - DNA, 25 bp, Homo sapien
tggagccagcagtaaaatggtctgt

SEQ ID NO: 124580 - DNA, 25 bp, Homo sapien
tttgatggagccagcagtaaaatgg

SEQ ID NO: 124581 - DNA, 25 bp, Homo sapien
tcaagggttatctttgatggagcca

SEQ ID NO: 124582 - DNA, 25 bp, Homo sapien
tcttcaagggttatctttgatggag

SEQ ID NO: 124583 - DNA, 25 bp, Homo sapien
taatgtctcgttgacctcagtgtgc

SEQ ID NO: 124584 - DNA, 25 bp, Homo sapien
aatgtctcgttgacctcagtgtgca

SEQ ID NO: 124585 - DNA, 25 bp, Homo sapien
gagttctaatgtctcgttgacctca

SEQ ID NO: 124586 - DNA, 25 bp, Homo sapien
ttctaatgtctcgttgacctcagtg

SEQ ID NO: 124587 - DNA, 25 bp, Homo sapien
ccctccaagagaagtagtacatcgg

SEQ ID NO: 124588 - DNA, 25 bp, Homo sapien
cttcctctcggagtcataaatgttc

SEQ ID NO: 124589 - DNA, 25 bp, Homo sapien
cagagattcctcgactggagacgga

SEQ ID NO: 124590 - DNA, 25 bp, Homo sapien
tctggagatggaccttcccacgtca

SEQ ID NO: 124591 - DNA, 25 bp, Homo sapien
tagccagaattggatacatgcccat

SEQ ID NO: 124592 - DNA, 25 bp, Homo sapien
gccccatggctgagttaggttcctt

SEQ ID NO: 124593 - DNA, 25 bp, Homo sapien
tggctccctttgtggtaatacgacg

SEQ ID NO: 124594 - DNA, 25 bp, Homo sapien
caggtccatctcacggtgggtccag

SEQ ID NO: 124595 - DNA, 25 bp, Homo sapien
cagggctgtggcagatacaagctgc

SEQ ID NO: 124596 - DNA, 25 bp, Homo sapien
agggctgtggcagatacaagctgca

SEQ ID NO: 124597 - DNA, 25 bp, Homo sapien
gggctgtggcagatacaagctgcag

SEQ ID NO: 124598 - DNA, 25 bp, Homo sapien
tcgggatgccgatgaaaaactgagc

SEQ ID NO: 124599 - DNA, 25 bp, Homo sapien
ggttaatcatctgacagcccaacat

SEQ ID NO: 124600 - DNA, 25 bp, Homo sapien
ttaacaaatgctgtcgggatgccga

SEQ ID NO: 124601 - DNA, 25 bp, Homo sapien
gcaagagcccagctcaagatctgag

SEQ ID NO: 124602 - DNA, 25 bp, Homo sapien
cgatatatgttctctaggcccttta

SEQ ID NO: 124603 - DNA, 25 bp, Homo sapien
ttcctttggccacatgtatgcgaat

SEQ ID NO: 124604 - DNA, 25 bp, Homo sapien
tgttcctttggccacatgtatgcga

SEQ ID NO: 124605 - DNA, 25 bp, Homo sapien
cacccgatatatgttctctaggccc

SEQ ID NO: 124606 - DNA, 25 bp, Homo sapien
tgcccttgagcaggccctgatatcc

SEQ ID NO: 124607 - DNA, 25 bp, Homo sapien
catgtgcccttgagcaggccctgat

SEQ ID NO: 124608 - DNA, 25 bp, Homo sapien
gagcaggccctgatatccatttctg

SEQ ID NO: 124609 - DNA, 25 bp, Homo sapien
cttgagcaggccctgatatccattt

SEQ ID NO: 124610 - DNA, 25 bp, Homo sapien
caggactttatgaagtctcgggaaa

SEQ ID NO: 124611 - DNA, 25 bp, Homo sapien
tatctgttcactcccatatcctctt

SEQ ID NO: 124612 - DNA, 25 bp, Homo sapien
ttttatctgttcactcccatatcct

SEQ ID NO: 124613 - DNA, 25 bp, Homo sapien
tcgggaaattgtatactccttcaaa

SEQ ID NO: 124614 - DNA, 25 bp, Homo sapien
aatccttgcccttatactggggcac

SEQ ID NO: 124615 - DNA, 25 bp, Homo sapien
tgatcacagcgcatcttcccctggg

SEQ ID NO: 124616 - DNA, 25 bp, Homo sapien
tcccctgggcataggaggaatcctt

SEQ ID NO: 124617 - DNA, 25 bp, Homo sapien
cttcttacagaaagctcttctggtt

SEQ ID NO: 124618 - DNA, 25 bp, Homo sapien
aatcatctgggtagtttcagccttc

SEQ ID NO: 124619 - DNA, 25 bp, Homo sapien
ccagccttagcacaatcatctgggt

SEQ ID NO: 124620 - DNA, 25 bp, Homo sapien
agccttagcacaatcatctgggtag

SEQ ID NO: 124621 - DNA, 25 bp, Homo sapien
tgggtagtttcagccttcttccaga

SEQ ID NO: 124622 - DNA, 25 bp, Homo sapien
gcaacatattgagcccttaccttta

SEQ ID NO: 124623 - DNA, 25 bp, Homo sapien
gatgtgtacctgtagaccaagctac

SEQ ID NO: 124624 - DNA, 25 bp, Homo sapien
tctgaatggctagcatccccttgga

SEQ ID NO: 124625 - DNA, 25 bp, Homo sapien
tacatgtgcagcttcgttacctgtg

SEQ ID NO: 124626 - DNA, 25 bp, Homo sapien
tttgttagatgcctgacaaatgcca

SEQ ID NO: 124627 - DNA, 25 bp, Homo sapien
tagatgcctgacaaatgccaacgga

SEQ ID NO: 124628 - DNA, 25 bp, Homo sapien
agttgccaagcccatttttgttaga

SEQ ID NO: 124629 - DNA, 25 bp, Homo sapien
ccatttttgttagatgcctgacaaa

SEQ ID NO: 124630 - DNA, 25 bp, Homo sapien
tcctgcaggggaaacgtctgtacag

SEQ ID NO: 124631 - DNA, 25 bp, Homo sapien
cccagtcatgggtagctccaaatat

SEQ ID NO: 124632 - DNA, 25 bp, Homo sapien
gaaacgtctgtacagggcagaaagc

SEQ ID NO: 124633 - DNA, 25 bp, Homo sapien
agtcatgggtagctccaaatattca

SEQ ID NO: 124634 - DNA, 25 bp, Homo sapien
aatggtctgttagtgacacaagcag

SEQ ID NO: 124635 - DNA, 25 bp, Homo sapien
tggtctgttagtgacacaagcagag

SEQ ID NO: 124636 - DNA, 25 bp, Homo sapien
taaatggtctgttagtgacacaagc

SEQ ID NO: 124637 - DNA, 25 bp, Homo sapien
acagcagacccgtgggggatggagt

SEQ ID NO: 124638 - DNA, 25 bp, Homo sapien
gggacaccggcgcttctgctgtcac

SEQ ID NO: 124639 - DNA, 25 bp, Homo sapien
ggggacaccggcgcttctgctgtca

SEQ ID NO: 124640 - DNA, 25 bp, Homo sapien
gaggggacaccggcgcttctgctgt

SEQ ID NO: 124641 - DNA, 25 bp, Homo sapien
ctggaggggacaccggcgcttctgc

SEQ ID NO: 124642 - DNA, 25 bp, Homo sapien
ccttcgatgacgtcgatgggagctt

SEQ ID NO: 124643 - DNA, 25 bp, Homo sapien
tccccttcgatgacgtcgatgggag

SEQ ID NO: 124644 - DNA, 25 bp, Homo sapien
cccttcgatgacgtcgatgggagct

SEQ ID NO: 124645 - DNA, 25 bp, Homo sapien
ctccccttcgatgacgtcgatggga

SEQ ID NO: 124646 - DNA, 25 bp, Homo sapien
gtaaccttcccaaagggcagctcca

SEQ ID NO: 124647 - DNA, 25 bp, Homo sapien
cttcagcatcaggaggttagtaacc

SEQ ID NO: 124648 - DNA, 25 bp, Homo sapien
gcatcaggaggttagtaaccttccc

SEQ ID NO: 124649 - DNA, 25 bp, Homo sapien
tcagcatcaggaggttagtaacctt

SEQ ID NO: 124650 - DNA, 25 bp, Homo sapien
aattcaccatggtgttggcagcctc

SEQ ID NO: 124651 - DNA, 25 bp, Homo sapien
tgttggcagcctcctccgtgctcat

SEQ ID NO: 124652 - DNA, 25 bp, Homo sapien
cgcagcacgggcgtcaccgaggtgt

SEQ ID NO: 124653 - DNA, 25 bp, Homo sapien
cgtcaccgaggtgtagtaattcacc

SEQ ID NO: 124654 - DNA, 25 bp, Homo sapien
tgtcggtcttcagccccttgtggtt

SEQ ID NO: 124655 - DNA, 25 bp, Homo sapien
cccgcgcctggttgggagagctgtc

SEQ ID NO: 124656 - DNA, 25 bp, Homo sapien
gagctgtcggtcttcagccccttgt

SEQ ID NO: 124657 - DNA, 25 bp, Homo sapien
ttgggagagctgtcggtcttcagcc

SEQ ID NO: 124658 - DNA, 25 bp, Homo sapien
cctgcgtctacggctgccgccgggg

SEQ ID NO: 124659 - DNA, 25 bp, Homo sapien
tccctgcgtctacggctgccgccgg

SEQ ID NO: 124660 - DNA, 25 bp, Homo sapien
ccctgcgtctacggctgccgccggg

SEQ ID NO: 124661 - DNA, 25 bp, Homo sapien
ttggagaagtcgatgcacagcgtgt

SEQ ID NO: 124662 - DNA, 25 bp, Homo sapien
gatgaatgtgatggtcttcactgtg

SEQ ID NO: 124663 - DNA, 25 bp, Homo sapien
aggcgttgtaggtgttctgccaatc

SEQ ID NO: 124664 - DNA, 25 bp, Homo sapien
cagcttggtatgctgggcgttctcg

SEQ ID NO: 124665 - DNA, 25 bp, Homo sapien
gcaggtccgggcgtggtagtcgcgg

SEQ ID NO: 124666 - DNA, 25 bp, Homo sapien
ctgaaaggtcgaaggccacggccat

SEQ ID NO: 124667 - DNA, 25 bp, Homo sapien
cagggctccgtggatgttgggaact

SEQ ID NO: 124668 - DNA, 25 bp, Homo sapien
gggcgtggtagtcgcggctcttgtc

SEQ ID NO: 124669 - DNA, 25 bp, Homo sapien
tgtgactctctctgggttgaggccg

SEQ ID NO: 124670 - DNA, 25 bp, Homo sapien
ctctctctgggttgaggccgctgac

SEQ ID NO: 124671 - DNA, 25 bp, Homo sapien
ctttggggtgtgactctctctgggt

SEQ ID NO: 124672 - DNA, 25 bp, Homo sapien
gactctctctgggttgaggccgctg

SEQ ID NO: 124673 - DNA, 25 bp, Homo sapien
ttagtcgggcgtggtggcgcggttg

SEQ ID NO: 124674 - DNA, 25 bp, Homo sapien
agtcgggcgtggtggcgcggttgta

SEQ ID NO: 124675 - DNA, 25 bp, Homo sapien
gagccgagatcacactccagcctgg

SEQ ID NO: 124676 - DNA, 25 bp, Homo sapien
tcgggcgtggtggcgcggttgtaat

SEQ ID NO: 124677 - DNA, 25 bp, Homo sapien
ttgaacgggatcttcacgcgctgca

SEQ ID NO: 124678 - DNA, 25 bp, Homo sapien
ttgtgccagttcaggtggctcatgg

SEQ ID NO: 124679 - DNA, 25 bp, Homo sapien
ctgaaccagagcgttctccttctta

SEQ ID NO: 124680 - DNA, 25 bp, Homo sapien
ggcctggttgccgtccgccatctga

SEQ ID NO: 124681 - DNA, 25 bp, Homo sapien
ggaggagaggaccttgagatcttcc

SEQ ID NO: 124682 - DNA, 25 bp, Homo sapien
aagaacttgaatcctatgactatgc

SEQ ID NO: 124683 - DNA, 25 bp, Homo sapien
tcttcctcggatactgagggcggga

SEQ ID NO: 124684 - DNA, 25 bp, Homo sapien
aacttgaatcctatgactatgcccc

SEQ ID NO: 124685 - DNA, 25 bp, Homo sapien
cggagcgcatttggatcagcgccat

SEQ ID NO: 124686 - DNA, 25 bp, Homo sapien
ctccacggagcgcatttggatcagc

SEQ ID NO: 124687 - DNA, 25 bp, Homo sapien
ctcccagatgtcgtggttgtgtagg

SEQ ID NO: 124688 - DNA, 25 bp, Homo sapien
ttctcccagatgtcgtggttgtgta

SEQ ID NO: 124689 - DNA, 25 bp, Homo sapien
tcagctgctttttaaagtcgctttt

SEQ ID NO: 124690 - DNA, 25 bp, Homo sapien
aagaaaatctctggtcagttaaggt

SEQ ID NO: 124691 - DNA, 25 bp, Homo sapien
aaagaaaatctctggtcagttaagg

SEQ ID NO: 124692 - DNA, 25 bp, Homo sapien
ttcagctgctttttaaagtcgcttt

SEQ ID NO: 124693 - DNA, 25 bp, Homo sapien
tgatgcataattccccaacagaccc

SEQ ID NO: 124694 - DNA, 25 bp, Homo sapien
gagatttcactgactccacagcttt

SEQ ID NO: 124695 - DNA, 25 bp, Homo sapien
tcccagagatttcactgactccaca

SEQ ID NO: 124696 - DNA, 25 bp, Homo sapien
cacagctttcaccaacttttgatgc

SEQ ID NO: 124697 - DNA, 25 bp, Homo sapien
ccagttaccgggcttatcaggaagc

SEQ ID NO: 124698 - DNA, 25 bp, Homo sapien
cttatcaggaagctatccagtgttg

SEQ ID NO: 124699 - DNA, 25 bp, Homo sapien
taccgggcttatcaggaagctatcc

SEQ ID NO: 124700 - DNA, 25 bp, Homo sapien
ccaaaccagttaccgggcttatcag

SEQ ID NO: 124701 - DNA, 25 bp, Homo sapien
gtggctgcagagtcacttacactct

SEQ ID NO: 124702 - DNA, 25 bp, Homo sapien
aagtaccgctaatcttggcctgcat

SEQ ID NO: 124703 - DNA, 25 bp, Homo sapien
cctgtttccttagccacagtggctg

SEQ ID NO: 124704 - DNA, 25 bp, Homo sapien
cattgtttacaagaggagaggcagc

SEQ ID NO: 124705 - DNA, 25 bp, Homo sapien
cggcagcgtgatggactgcagcaat

SEQ ID NO: 124706 - DNA, 25 bp, Homo sapien
ggcatgaagtggtcaaagccaacat

SEQ ID NO: 124707 - DNA, 25 bp, Homo sapien
acgagctggcgacacggcagcgtga

SEQ ID NO: 124708 - DNA, 25 bp, Homo sapien
atgaagtggtcaaagccaacatggg

SEQ ID NO: 124709 - DNA, 25 bp, Homo sapien
tgcttgtggtagtaattggcctggc

SEQ ID NO: 124710 - DNA, 25 bp, Homo sapien
tgacttcagtgcttgtggtagtaat

SEQ ID NO: 124711 - DNA, 25 bp, Homo sapien
caattgtgtctgagtgttttaacgc

SEQ ID NO: 124712 - DNA, 25 bp, Homo sapien
gagtttgtttgaccatgttttgaaa

SEQ ID NO: 124713 - DNA, 25 bp, Homo sapien
tctctctagatccacgggctcctta

SEQ ID NO: 124714 - DNA, 25 bp, Homo sapien
ctttttacctaaatgtggcagggag

SEQ ID NO: 124715 - DNA, 25 bp, Homo sapien
gggctccttattcttcacacgtctg

SEQ ID NO: 124716 - DNA, 25 bp, Homo sapien
ggaggcactcactttatcacactgg

SEQ ID NO: 124717 - DNA, 25 bp, Homo sapien
ttctggaaagcgcatttccccgaag

SEQ ID NO: 124718 - DNA, 25 bp, Homo sapien
gaaagcgcatttccccgaagaccat

SEQ ID NO: 124719 - DNA, 25 bp, Homo sapien
tctggaaagcgcatttccccgaaga

SEQ ID NO: 124720 - DNA, 25 bp, Homo sapien
tggaaagcgcatttccccgaagacc

SEQ ID NO: 124721 - DNA, 25 bp, Homo sapien
cgataaaagtgagggctgcaaatct

SEQ ID NO: 124722 - DNA, 25 bp, Homo sapien
gggctgcaaatctccacagatggct

SEQ ID NO: 124723 - DNA, 25 bp, Homo sapien
cacagatggctttctcgctccctct

SEQ ID NO: 124724 - DNA, 25 bp, Homo sapien
gggaggctttgccgataaaagtgag

SEQ ID NO: 124725 - DNA, 25 bp, Homo sapien
tttttgcctaaatcataatcctggg

SEQ ID NO: 124726 - DNA, 25 bp, Homo sapien
tgcctaaatcataatcctgggcttt

SEQ ID NO: 124727 - DNA, 25 bp, Homo sapien
aaatcataatcctgggctttactat

SEQ ID NO: 124728 - DNA, 25 bp, Homo sapien
tttgcctaaatcataatcctgggct

SEQ ID NO: 124729 - DNA, 25 bp, Homo sapien
gatgacaaacttggttttccaaaca

SEQ ID NO: 124730 - DNA, 25 bp, Homo sapien
tcaacgtgcttcactacagtttgaa

SEQ ID NO: 124731 - DNA, 25 bp, Homo sapien
caacgtgcttcactacagtttgaaa

SEQ ID NO: 124732 - DNA, 25 bp, Homo sapien
gagacacaacagcatatttaggaga

SEQ ID NO: 124733 - DNA, 25 bp, Homo sapien
ctgagaagctgaggtatgagacaca

SEQ ID NO: 124734 - DNA, 25 bp, Homo sapien
cttgctccttgaacaggaggagcaa

SEQ ID NO: 124735 - DNA, 25 bp, Homo sapien
taggagagagatgccgccttgctcc

SEQ ID NO: 124736 - DNA, 25 bp, Homo sapien
ggaatcagctaagttcccagttgca

SEQ ID NO: 124737 - DNA, 25 bp, Homo sapien
cagttgcagctccattgcaggccat

SEQ ID NO: 124738 - DNA, 25 bp, Homo sapien
tcccagttgcagctccattgcaggc

SEQ ID NO: 124739 - DNA, 25 bp, Homo sapien
ctcccaccttggaatcagctaagtt

SEQ ID NO: 124740 - DNA, 25 bp, Homo sapien
catctctggataacctggctgtctc

SEQ ID NO: 124741 - DNA, 25 bp, Homo sapien
ctttcaggttacagatgttccctct

SEQ ID NO: 124742 - DNA, 25 bp, Homo sapien
ctgcatgtctgttgcaggactaagc

SEQ ID NO: 124743 - DNA, 25 bp, Homo sapien
ttgcaggactaagctggcttgagag

SEQ ID NO: 124744 - DNA, 25 bp, Homo sapien
tctgttgcaggactaagctggcttg

SEQ ID NO: 124745 - DNA, 25 bp, Homo sapien
catacccaagctttacaggtcgcca

SEQ ID NO: 124746 - DNA, 25 bp, Homo sapien
gctctactgccttggaaactttcgg

SEQ ID NO: 124747 - DNA, 25 bp, Homo sapien
ttcggtacaaccttggcatctctag

SEQ ID NO: 124748 - DNA, 25 bp, Homo sapien
ggtcgccaacacaccagtcaaagga

SEQ ID NO: 124749 - DNA, 25 bp, Homo sapien
tcaaatgatgataatcgaatgaggc

SEQ ID NO: 124750 - DNA, 25 bp, Homo sapien
gatgataatcgaatgaggctttttt

SEQ ID NO: 124751 - DNA, 25 bp, Homo sapien
ccaaaggaatgacgctggtaacaga

SEQ ID NO: 124752 - DNA, 25 bp, Homo sapien
gtaacagaacgatcatcaaatgatg

SEQ ID NO: 124753 - DNA, 25 bp, Homo sapien
gacgggcagcagagcatgtgtcctt

SEQ ID NO: 124754 - DNA, 25 bp, Homo sapien
cagctcaagctccagattgtttgca

SEQ ID NO: 124755 - DNA, 25 bp, Homo sapien
gctccagattgtttgcatccttctt

SEQ ID NO: 124756 - DNA, 25 bp, Homo sapien
acgggcagcagagcatgtgtccttg

SEQ ID NO: 124757 - DNA, 25 bp, Homo sapien
ttctatccctcacgtgaaactcttc

SEQ ID NO: 124758 - DNA, 25 bp, Homo sapien
cttttctatccctcacgtgaaactc

SEQ ID NO: 124759 - DNA, 25 bp, Homo sapien
tctatccctcacgtgaaactcttca

SEQ ID NO: 124760 - DNA, 25 bp, Homo sapien
tatccctcacgtgaaactcttcata

SEQ ID NO: 124761 - DNA, 25 bp, Homo sapien
aagagttgtagaattacagtgcagc

SEQ ID NO: 124762 - DNA, 25 bp, Homo sapien
gcagcactactgagttaaataataa

SEQ ID NO: 124763 - DNA, 25 bp, Homo sapien
agactctttcatacagctggctcca

SEQ ID NO: 124764 - DNA, 25 bp, Homo sapien
ctggctccattacaacatgtttgcc

SEQ ID NO: 124765 - DNA, 25 bp, Homo sapien
catcatcatacccacttggtagggt

SEQ ID NO: 124766 - DNA, 25 bp, Homo sapien
catacccacttggtagggtgactcc

SEQ ID NO: 124767 - DNA, 25 bp, Homo sapien
cttcatcatcatacccacttggtag

SEQ ID NO: 124768 - DNA, 25 bp, Homo sapien
catcatacccacttggtagggtgac

SEQ ID NO: 124769 - DNA, 25 bp, Homo sapien
tctcaacctctttcttagcagctca

SEQ ID NO: 124770 - DNA, 25 bp, Homo sapien
ctcaacctctttcttagcagctcac

SEQ ID NO: 124771 - DNA, 25 bp, Homo sapien
ttaaagaagatttgcttgaaacaaa

SEQ ID NO: 124772 - DNA, 25 bp, Homo sapien
gttaaagaagatttgcttgaaacaa

SEQ ID NO: 124773 - DNA, 25 bp, Homo sapien
gaaacttgtgacattgactgtccct

SEQ ID NO: 124774 - DNA, 25 bp, Homo sapien
gacatccaagtgaaccaagttgaga

SEQ ID NO: 124775 - DNA, 25 bp, Homo sapien
ccaaaattgggatcaatacattcag

SEQ ID NO: 124776 - DNA, 25 bp, Homo sapien
tgtccctttctctgcgaaacacttt

SEQ ID NO: 124777 - DNA, 25 bp, Homo sapien
aagtcaagtgggcttttggagctca

SEQ ID NO: 124778 - DNA, 25 bp, Homo sapien
tcatctttacaccatgtagcttctc

SEQ ID NO: 124779 - DNA, 25 bp, Homo sapien
caccatgtagcttctcaccaactga

SEQ ID NO: 124780 - DNA, 25 bp, Homo sapien
gttcagcgtcagtcctcatattggt

SEQ ID NO: 124781 - DNA, 25 bp, Homo sapien
gaagatgagcttcccgttccaaact

SEQ ID NO: 124782 - DNA, 25 bp, Homo sapien
ttatcccaaagcaagtagcggcggc

SEQ ID NO: 124783 - DNA, 25 bp, Homo sapien
cacacaaagtagtcgcgggacgagg

SEQ ID NO: 124784 - DNA, 25 bp, Homo sapien
gagcgaaatggtgcccttaagacaa

SEQ ID NO: 124785 - DNA, 25 bp, Homo sapien
catttggccgcttgactgctgcttc

SEQ ID NO: 124786 - DNA, 25 bp, Homo sapien
gggcacccgcactagaggttttgaa

SEQ ID NO: 124787 - DNA, 25 bp, Homo sapien
tgcttccagcgcgatcctacaatgg

SEQ ID NO: 124788 - DNA, 25 bp, Homo sapien
ggagactcagcgaagccctacttta

SEQ ID NO: 124789 - DNA, 25 bp, Homo sapien
atgctactcccgaccgaacggagag

SEQ ID NO: 124790 - DNA, 25 bp, Homo sapien
gagaccgagagcgagctgggtccag

SEQ ID NO: 124791 - DNA, 25 bp, Homo sapien
gcagtcgctgacagcgcgagaccga

SEQ ID NO: 124792 - DNA, 25 bp, Homo sapien
gcttaacggagccttcggcgccact

SEQ ID NO: 124793 - DNA, 25 bp, Homo sapien
tgggcaggtcgcttgagctcagagt

SEQ ID NO: 124794 - DNA, 25 bp, Homo sapien
gcaggtcgcttgagctcagagttcg

SEQ ID NO: 124795 - DNA, 25 bp, Homo sapien
ggtggccgaggtgggcaggtcgctt

SEQ ID NO: 124796 - DNA, 25 bp, Homo sapien
gtggccgaggtgggcaggtcgcttg

SEQ ID NO: 124797 - DNA, 25 bp, Homo sapien
tatggtttctagtaccagctccact

SEQ ID NO: 124798 - DNA, 25 bp, Homo sapien
tctaagctatctcttactaggtaag

SEQ ID NO: 124799 - DNA, 25 bp, Homo sapien
aagagatagaatcaacaggtcaggg

SEQ ID NO: 124800 - DNA, 25 bp, Homo sapien
cataaccattggatattttggctac

SEQ ID NO: 124801 - DNA, 25 bp, Homo sapien
accaaagctttcatcaccccctgcc

SEQ ID NO: 124802 - DNA, 25 bp, Homo sapien
aagctttcatcaccccctgcctgca

SEQ ID NO: 124803 - DNA, 25 bp, Homo sapien
caaagctttcatcaccccctgcctg

SEQ ID NO: 124804 - DNA, 25 bp, Homo sapien
tcatgaccaaagctttcatcacccc

SEQ ID NO: 124805 - DNA, 25 bp, Homo sapien
taagcatgagtttgatggtagctcc

SEQ ID NO: 124806 - DNA, 25 bp, Homo sapien
tgagaacagaacaaacgatcctcct

SEQ ID NO: 124807 - DNA, 25 bp, Homo sapien
caatatgctatagggaatgagaaca

SEQ ID NO: 124808 - DNA, 25 bp, Homo sapien
tctcacaaggatactgcaaggatca

SEQ ID NO: 124809 - DNA, 25 bp, Homo sapien
catgacagtttccagatagtgaaca

SEQ ID NO: 124810 - DNA, 25 bp, Homo sapien
caattagtgtagatctgtgttccct

SEQ ID NO: 124811 - DNA, 25 bp, Homo sapien
actagataaggcctatgaccaccct

SEQ ID NO: 124812 - DNA, 25 bp, Homo sapien
tgttctagacaccattgccaagagg

SEQ ID NO: 124813 - DNA, 25 bp, Homo sapien
aacaaaaagaccattagggtcatgg

SEQ ID NO: 124814 - DNA, 25 bp, Homo sapien
tgtccagttaatcaacaaaggcaaa

SEQ ID NO: 124815 - DNA, 25 bp, Homo sapien
gaatttgtccagttaatcaacaaag

SEQ ID NO: 124816 - DNA, 25 bp, Homo sapien
tggatgtcctctgagcaaaagcagc

SEQ ID NO: 124817 - DNA, 25 bp, Homo sapien
aggcagcccggcaccaggcccaaaa

SEQ ID NO: 124818 - DNA, 25 bp, Homo sapien
cggcaccaggcccaaaaccaggcct

SEQ ID NO: 124819 - DNA, 25 bp, Homo sapien
aaatcaactcatgacttagaacccg

SEQ ID NO: 124820 - DNA, 25 bp, Homo sapien
aaaatcaactcatgacttagaaccc

SEQ ID NO: 124821 - DNA, 25 bp, Homo sapien
cagagcataatactttctcaagacc

SEQ ID NO: 124822 - DNA, 25 bp, Homo sapien
gagtctaaaccatcctacattttct

SEQ ID NO: 124823 - DNA, 25 bp, Homo sapien
tacattttctgagtcagagcataat

SEQ ID NO: 124824 - DNA, 25 bp, Homo sapien
tgtccaggcttagaagctagagtct

SEQ ID NO: 124825 - DNA, 25 bp, Homo sapien
gaagagaggcacccgatatatgttc

SEQ ID NO: 124826 - DNA, 25 bp, Homo sapien
aaagaagagaggcacccgatatatg

SEQ ID NO: 124827 - DNA, 25 bp, Homo sapien
cagtaattcgccaaaaggacgaaca

SEQ ID NO: 124828 - DNA, 25 bp, Homo sapien
gtaattcgccaaaaggacgaacaca

SEQ ID NO: 124829 - DNA, 25 bp, Homo sapien
tctcgaaagaagcaagaggtaaaga

SEQ ID NO: 124830 - DNA, 25 bp, Homo sapien
ttaactttaagaccaataagatatc

SEQ ID NO: 124831 - DNA, 25 bp, Homo sapien
gaacaccaagcaagataaataccaa

SEQ ID NO: 124832 - DNA, 25 bp, Homo sapien
gaatgtctttagtaagaaacaccaa

SEQ ID NO: 124833 - DNA, 25 bp, Homo sapien
gcctgagtctatgctatcacttaga

SEQ ID NO: 124834 - DNA, 25 bp, Homo sapien
tcaacatagaaaacaaaggctgctg

SEQ ID NO: 124835 - DNA, 25 bp, Homo sapien
tcacttagatgattgtccctcctgt

SEQ ID NO: 124836 - DNA, 25 bp, Homo sapien
gctgttgccctcaatctatacttga

SEQ ID NO: 124837 - DNA, 25 bp, Homo sapien
taaaactgtgtaaactgccgtggca

SEQ ID NO: 124838 - DNA, 25 bp, Homo sapien
gctggacccaattcagttctaaaca

SEQ ID NO: 124839 - DNA, 25 bp, Homo sapien
agctcccgcttgtgagaacatatgg

SEQ ID NO: 124840 - DNA, 25 bp, Homo sapien
gagtgtctagaataccaagtttggc

SEQ ID NO: 124841 - DNA, 25 bp, Homo sapien
tctagccccataattcaacttattg

SEQ ID NO: 124842 - DNA, 25 bp, Homo sapien
agccccataattcaacttattgctg

SEQ ID NO: 124843 - DNA, 25 bp, Homo sapien
tcaacttattgctggtcaaaataga

SEQ ID NO: 124844 - DNA, 25 bp, Homo sapien
caacttattgctggtcaaaatagaa

SEQ ID NO: 124845 - DNA, 25 bp, Homo sapien
atctgactcaacagtgggcaaagga

SEQ ID NO: 124846 - DNA, 25 bp, Homo sapien
tctgactcaacagtgggcaaaggac

SEQ ID NO: 124847 - DNA, 25 bp, Homo sapien
aatctgactcaacagtgggcaaagg

SEQ ID NO: 124848 - DNA, 25 bp, Homo sapien
tgtaaagccattccggagagaaaag

SEQ ID NO: 124849 - DNA, 25 bp, Homo sapien
aactcttaagagtagccaatgctcc

SEQ ID NO: 124850 - DNA, 25 bp, Homo sapien
tcgttaagatgtcaactgtccctca

SEQ ID NO: 124851 - DNA, 25 bp, Homo sapien
taggctgacacagaacaccaaggca

SEQ ID NO: 124852 - DNA, 25 bp, Homo sapien
ggttttagccagtgaaatcaggcaa

SEQ ID NO: 124853 - DNA, 25 bp, Homo sapien
aaagctaccagaatgagtacagcag

SEQ ID NO: 124854 - DNA, 25 bp, Homo sapien
tgtctatgcagaaaagccaatgtaa

SEQ ID NO: 124855 - DNA, 25 bp, Homo sapien
cagcccagtaaagtgcatcctgaaa

SEQ ID NO: 124856 - DNA, 25 bp, Homo sapien
attatgaagacaggtattattgctt

SEQ ID NO: 124857 - DNA, 25 bp, Homo sapien
gaatataagaagctgacaaaaccac

SEQ ID NO: 124858 - DNA, 25 bp, Homo sapien
atgacaattatgaagacaggtatta

SEQ ID NO: 124859 - DNA, 25 bp, Homo sapien
tataagaagctgacaaaaccacatg

SEQ ID NO: 124860 - DNA, 25 bp, Homo sapien
ttgagacaggcccatggcgaaacac

SEQ ID NO: 124861 - DNA, 25 bp, Homo sapien
gagccaagtagattaacatggagga

SEQ ID NO: 124862 - DNA, 25 bp, Homo sapien
ggccaggacaccctacaaagtaatg

SEQ ID NO: 124863 - DNA, 25 bp, Homo sapien
tgttcttacagtgacttacagaggc

SEQ ID NO: 124864 - DNA, 25 bp, Homo sapien
agattttcaactcacttccctggag

SEQ ID NO: 124865 - DNA, 25 bp, Homo sapien
tagtgcacaggtgaatagacttctg

SEQ ID NO: 124866 - DNA, 25 bp, Homo sapien
gagtcctggagctcaaagaattgaa

SEQ ID NO: 124867 - DNA, 25 bp, Homo sapien
cctcctggtgatatgtgtaggaagc

SEQ ID NO: 124868 - DNA, 25 bp, Homo sapien
ccaacgccaggaaccagtccatggc

SEQ ID NO: 124869 - DNA, 25 bp, Homo sapien
atccaacgccaggaaccagtccatg

SEQ ID NO: 124870 - DNA, 25 bp, Homo sapien
aatccaacgccaggaaccagtccat

SEQ ID NO: 124871 - DNA, 25 bp, Homo sapien
tccaacgccaggaaccagtccatgg

SEQ ID NO: 124872 - DNA, 25 bp, Homo sapien
caaggtcccccaggcaaaaagaatg

SEQ ID NO: 124873 - DNA, 25 bp, Homo sapien
cagcaaggtcccccaggcaaaaaga

SEQ ID NO: 124874 - DNA, 25 bp, Homo sapien
acagcaaggtcccccaggcaaaaag

SEQ ID NO: 124875 - DNA, 25 bp, Homo sapien
gaatcttggacagttctcggctaga

SEQ ID NO: 124876 - DNA, 25 bp, Homo sapien
taagcgttcaagctttgccagaatc

SEQ ID NO: 124877 - DNA, 25 bp, Homo sapien
gagagattcggccattcgcctcaag

SEQ ID NO: 124878 - DNA, 25 bp, Homo sapien
gatcaggatggtcattatctcgtac

SEQ ID NO: 124879 - DNA, 25 bp, Homo sapien
taagttctagttagactaactcagc

SEQ ID NO: 124880 - DNA, 25 bp, Homo sapien
aatatataggagactttggttttca

SEQ ID NO: 124881 - DNA, 25 bp, Homo sapien
gcaaaataatgatgccactatggag

SEQ ID NO: 124882 - DNA, 25 bp, Homo sapien
tgataatcattctccgcattccaga

SEQ ID NO: 124883 - DNA, 25 bp, Homo sapien
tgccagagggctctaaaacgacatc

SEQ ID NO: 124884 - DNA, 25 bp, Homo sapien
gccagagggctctaaaacgacatcc

SEQ ID NO: 124885 - DNA, 25 bp, Homo sapien
atgccagagggctctaaaacgacat

SEQ ID NO: 124886 - DNA, 25 bp, Homo sapien
gctatgtgcatgattcccaaagtca

SEQ ID NO: 124887 - DNA, 25 bp, Homo sapien
cttttggataggttcagcaagcaca

SEQ ID NO: 124888 - DNA, 25 bp, Homo sapien
tgaacgattcacgaatccagcagca

SEQ ID NO: 124889 - DNA, 25 bp, Homo sapien
aacacagtctgaatgctcagcagtg

SEQ ID NO: 124890 - DNA, 25 bp, Homo sapien
tactgaaccatctgaaccatctttg

SEQ ID NO: 124891 - DNA, 25 bp, Homo sapien
tgtatgccacaatctatccagtgcc

SEQ ID NO: 124892 - DNA, 25 bp, Homo sapien
cagtgcctttcgctaagctttgcaa

SEQ ID NO: 124893 - DNA, 25 bp, Homo sapien
cacaggcacgatcattgggtacaat

SEQ ID NO: 124894 - DNA, 25 bp, Homo sapien
caatctacttttcctacaattgtag

SEQ ID NO: 124895 - DNA, 25 bp, Homo sapien
aatctacttttcctacaattgtaga

SEQ ID NO: 124896 - DNA, 25 bp, Homo sapien
tctacttttcctacaattgtagatc

SEQ ID NO: 124897 - DNA, 25 bp, Homo sapien
cccaatctacttttcctacaattgt

SEQ ID NO: 124898 - DNA, 25 bp, Homo sapien
gattccagtaggttttaactggaca

SEQ ID NO: 124899 - DNA, 25 bp, Homo sapien
catacatggataaactatgaaaaaa

SEQ ID NO: 124900 - DNA, 25 bp, Homo sapien
gtatcatacatggataaactatgaa

SEQ ID NO: 124901 - DNA, 25 bp, Homo sapien
tccagtaggttttaactggacacga

SEQ ID NO: 124902 - DNA, 25 bp, Homo sapien
gattaacataattcggaccacttct

SEQ ID NO: 124903 - DNA, 25 bp, Homo sapien
aacaccgttgcctatcacctactaa

SEQ ID NO: 124904 - DNA, 25 bp, Homo sapien
cttctggcatcatatagtaatacac

SEQ ID NO: 124905 - DNA, 25 bp, Homo sapien
ggttacatagtagttcagctgctaa

SEQ ID NO: 124906 - DNA, 25 bp, Homo sapien
tgaaaattgccataccgccaaatct

SEQ ID NO: 124907 - DNA, 25 bp, Homo sapien
ggccgtaagtcaccgaaacagtgtg

SEQ ID NO: 124908 - DNA, 25 bp, Homo sapien
gatttcaaaccatactatacggccg

SEQ ID NO: 124909 - DNA, 25 bp, Homo sapien
cattcatcgtcctatctgttgcctg

SEQ ID NO: 124910 - DNA, 25 bp, Homo sapien
ctgtagtttagggaagataatgtaa

SEQ ID NO: 124911 - DNA, 25 bp, Homo sapien
agtttagggaagataatgtaaacat

SEQ ID NO: 124912 - DNA, 25 bp, Homo sapien
tgtagtttagggaagataatgtaaa

SEQ ID NO: 124913 - DNA, 25 bp, Homo sapien
tagtttagggaagataatgtaaaca

SEQ ID NO: 124914 - DNA, 25 bp, Homo sapien
aacgcgtactcttcctatagctggc

SEQ ID NO: 124915 - DNA, 25 bp, Homo sapien
gttctttggccttaacaagctgctc

SEQ ID NO: 124916 - DNA, 25 bp, Homo sapien
caagctgctcttctaaaacgcgtac

SEQ ID NO: 124917 - DNA, 25 bp, Homo sapien
tatagctggcccctgatcaataggg

SEQ ID NO: 124918 - DNA, 25 bp, Homo sapien
ttggagttcatttccttctaagttc

SEQ ID NO: 124919 - DNA, 25 bp, Homo sapien
cctcctcaggatttcatgatccttc

SEQ ID NO: 124920 - DNA, 25 bp, Homo sapien
ctttcatgatgtcctaaatccaaaa

SEQ ID NO: 124921 - DNA, 25 bp, Homo sapien
cactctgtaggaaaaaccagagctc

SEQ ID NO: 124922 - DNA, 25 bp, Homo sapien
atggattaacaagtctgtttctcat

SEQ ID NO: 124923 - DNA, 25 bp, Homo sapien
gatggattaacaagtctgtttctca

SEQ ID NO: 124924 - DNA, 25 bp, Homo sapien
tggattaacaagtctgtttctcatt

SEQ ID NO: 124925 - DNA, 25 bp, Homo sapien
tcctcttcacagtagtaggttgtgc

SEQ ID NO: 124926 - DNA, 25 bp, Homo sapien
tgttcactaatgagacagtaattgc

SEQ ID NO: 124927 - DNA, 25 bp, Homo sapien
tagtaggttgtgctaatacaacaat

SEQ ID NO: 124928 - DNA, 25 bp, Homo sapien
tcactaatgagacagtaattgccat

SEQ ID NO: 124929 - DNA, 25 bp, Homo sapien
cctgaagacaccgagtagaatataa

SEQ ID NO: 124930 - DNA, 25 bp, Homo sapien
tcagcaagggaaccatagtgactca

SEQ ID NO: 124931 - DNA, 25 bp, Homo sapien
ggcaaggtaccagcaaaatagtgct

SEQ ID NO: 124932 - DNA, 25 bp, Homo sapien
taataagtgggcatactaaagacct

SEQ ID NO: 124933 - DNA, 25 bp, Homo sapien
gtgaaatatgccctcaacaactgtg

SEQ ID NO: 124934 - DNA, 25 bp, Homo sapien
cagagaatacgtgataatagcccct

SEQ ID NO: 124935 - DNA, 25 bp, Homo sapien
tagtggaacaactttgaacgatgct

SEQ ID NO: 124936 - DNA, 25 bp, Homo sapien
tgagttccatataacaccctgaaga

SEQ ID NO: 124937 - DNA, 25 bp, Homo sapien
taggaggtccagagcacaataatgt

SEQ ID NO: 124938 - DNA, 25 bp, Homo sapien
taaagcattagctggagattccaag

SEQ ID NO: 124939 - DNA, 25 bp, Homo sapien
ggaataatccttacccaggtgtagc

SEQ ID NO: 124940 - DNA, 25 bp, Homo sapien
caaatccagtttgatggtagacagg

SEQ ID NO: 124941 - DNA, 25 bp, Homo sapien
gttattctccgctgaaccagttctg

SEQ ID NO: 124942 - DNA, 25 bp, Homo sapien
tccatctgtctgactgaggtagtat

SEQ ID NO: 124943 - DNA, 25 bp, Homo sapien
ggtagtatagatccgtcattataga

SEQ ID NO: 124944 - DNA, 25 bp, Homo sapien
ctgaagatatgttattctccgctga

SEQ ID NO: 124945 - DNA, 25 bp, Homo sapien
ctccgtctgcaatccaggcacctca

SEQ ID NO: 124946 - DNA, 25 bp, Homo sapien
ggatggtggccgggaagaggcgctc

SEQ ID NO: 124947 - DNA, 25 bp, Homo sapien
ttctcagatggggcagccgggcaga

SEQ ID NO: 124948 - DNA, 25 bp, Homo sapien
tcctagatgggatggtggccgggaa

SEQ ID NO: 124949 - DNA, 25 bp, Homo sapien
tcaacaaagcaaacaagtggggaaa

SEQ ID NO: 124950 - DNA, 25 bp, Homo sapien
gatcttcaacaaagcaaacaagtgg

SEQ ID NO: 124951 - DNA, 25 bp, Homo sapien
cttcaacaaagcaaacaagtgggga

SEQ ID NO: 124952 - DNA, 25 bp, Homo sapien
ttacagccaaaaacttacagccaac

SEQ ID NO: 124953 - DNA, 25 bp, Homo sapien
gaaagagtacaaactgacattctga

SEQ ID NO: 124954 - DNA, 25 bp, Homo sapien
caactggaacctttaaaaccatgca

SEQ ID NO: 124955 - DNA, 25 bp, Homo sapien
ctgaatgacagtaacgacaaatcct

SEQ ID NO: 124956 - DNA, 25 bp, Homo sapien
gacaaatcctaccataacctctggg

SEQ ID NO: 124957 - DNA, 25 bp, Homo sapien
taagtagcactggtagtacagatga

SEQ ID NO: 124958 - DNA, 25 bp, Homo sapien
gacaaaagggtccaccagctcttat

SEQ ID NO: 124959 - DNA, 25 bp, Homo sapien
tcacaggaagtttaagctactagac

SEQ ID NO: 124960 - DNA, 25 bp, Homo sapien
ggaatgacgaaggagcccataggaa

SEQ ID NO: 124961 - DNA, 25 bp, Homo sapien
ggcagaaatatatgctccctaagca

SEQ ID NO: 124962 - DNA, 25 bp, Homo sapien
gaagatgtcccataggtgtaatgga

SEQ ID NO: 124963 - DNA, 25 bp, Homo sapien
gcaacctccaacaaagtgggcagaa

SEQ ID NO: 124964 - DNA, 25 bp, Homo sapien
aaatgtcaggctttctacccatacc

SEQ ID NO: 124965 - DNA, 25 bp, Homo sapien
ctctgtggctgtagcatccattggg

SEQ ID NO: 124966 - DNA, 25 bp, Homo sapien
agtctctgtggctgtagcatccatt

SEQ ID NO: 124967 - DNA, 25 bp, Homo sapien
catccattggggagggctgcaaact

SEQ ID NO: 124968 - DNA, 25 bp, Homo sapien
tgcaaacttgttattgcagctccat

SEQ ID NO: 124969 - DNA, 25 bp, Homo sapien
atggaaacggcggtcagggctttgc

SEQ ID NO: 124970 - DNA, 25 bp, Homo sapien
tggaaacggcggtcagggctttgcc

SEQ ID NO: 124971 - DNA, 25 bp, Homo sapien
gatggaaacggcggtcagggctttg

SEQ ID NO: 124972 - DNA, 25 bp, Homo sapien
gaaacggcggtcagggctttgccca

SEQ ID NO: 124973 - DNA, 25 bp, Homo sapien
gtgttgactttgaaacaatactgat

SEQ ID NO: 124974 - DNA, 25 bp, Homo sapien
tgttgactttgtacctgcaacctca

SEQ ID NO: 124975 - DNA, 25 bp, Homo sapien
tgtgttgactttgtacctgcaacct

SEQ ID NO: 124976 - DNA, 25 bp, Homo sapien
tgactttgtacctgcaacctcactg

SEQ ID NO: 124977 - DNA, 25 bp, Homo sapien
ggaaattccataaatccaatagaaa

SEQ ID NO: 124978 - DNA, 25 bp, Homo sapien
gaaattccataaatccaatagaaag

SEQ ID NO: 124979 - DNA, 25 bp, Homo sapien
tggaaattccataaatccaatagaa

SEQ ID NO: 124980 - DNA, 25 bp, Homo sapien
actgtccactgcccttatcgatttc

SEQ ID NO: 124981 - DNA, 25 bp, Homo sapien
tgttcagggctcttgatccactgtc

SEQ ID NO: 124982 - DNA, 25 bp, Homo sapien
tgtccactgcccttatcgatttcac

SEQ ID NO: 124983 - DNA, 25 bp, Homo sapien
ccactgcccttatcgatttcaccat

SEQ ID NO: 124984 - DNA, 25 bp, Homo sapien
taccactgatcctagttttatacta

SEQ ID NO: 124985 - DNA, 25 bp, Homo sapien
ctcttgtcagttaccactgatccta

SEQ ID NO: 124986 - DNA, 25 bp, Homo sapien
tagttttatactatccagttgatgc

SEQ ID NO: 124987 - DNA, 25 bp, Homo sapien
tcctagttttatactatccagttga

SEQ ID NO: 124988 - DNA, 25 bp, Homo sapien
catgttctatactggctaacttgag

SEQ ID NO: 124989 - DNA, 25 bp, Homo sapien
caactgaatgtggaacatgttctat

SEQ ID NO: 124990 - DNA, 25 bp, Homo sapien
caactctgctttaatttggatgagc

SEQ ID NO: 124991 - DNA, 25 bp, Homo sapien
gacagcaaatgtttagctaacatga

SEQ ID NO: 124992 - DNA, 25 bp, Homo sapien
caagatgagtgttcgctgggtgcca

SEQ ID NO: 124993 - DNA, 25 bp, Homo sapien
gaccacatgatggagctgacagcca

SEQ ID NO: 124994 - DNA, 25 bp, Homo sapien
tgggtgccatatgcaatcatgaagc

SEQ ID NO: 124995 - DNA, 25 bp, Homo sapien
tccaccagtagcatagcgccaattc

SEQ ID NO: 124996 - DNA, 25 bp, Homo sapien
cagtgtccagtggagatgccagatc

SEQ ID NO: 124997 - DNA, 25 bp, Homo sapien
agtggagatgccagatctgtctgtg

SEQ ID NO: 124998 - DNA, 25 bp, Homo sapien
tgaccagtgtccagtggagatgcca

SEQ ID NO: 124999 - DNA, 25 bp, Homo sapien
tccagtggagatgccagatctgtct

SEQ ID NO: 125000 - DNA, 25 bp, Homo sapien
tctgagaagcacttacaggataaac

SEQ ID NO: 125001 - DNA, 25 bp, Homo sapien
ctgagaagcacttacaggataaaca

SEQ ID NO: 125002 - DNA, 25 bp, Homo sapien
caaaaaggccaagctggtggttaca

SEQ ID NO: 125003 - DNA, 25 bp, Homo sapien
gaacaagtgtctcaggctagatttg

SEQ ID NO: 125004 - DNA, 25 bp, Homo sapien
gctttgtgttagaggatgataagaa

SEQ ID NO: 125005 - DNA, 25 bp, Homo sapien
caattccaggcaccagaggcaaact

SEQ ID NO: 125006 - DNA, 25 bp, Homo sapien
ctaagtagctttcaggaaccacagt

SEQ ID NO: 125007 - DNA, 25 bp, Homo sapien
agctttcaggaaccacagttccatg

SEQ ID NO: 125008 - DNA, 25 bp, Homo sapien
accacagttccatgataatgggtgc

SEQ ID NO: 125009 - DNA, 25 bp, Homo sapien
cagttccatgataatgggtgctttc

SEQ ID NO: 125010 - DNA, 25 bp, Homo sapien
ctgtgatgcatccatataatacagt

SEQ ID NO: 125011 - DNA, 25 bp, Homo sapien
gatgcatccatataatacagtacaa

SEQ ID NO: 125012 - DNA, 25 bp, Homo sapien
caccaactaactgttgttaaatgga

SEQ ID NO: 125013 - DNA, 25 bp, Homo sapien
tccagcaccaactaactgttgttaa

SEQ ID NO: 125014 - DNA, 25 bp, Homo sapien
ttgaaacaaacgatcatggaaacac

SEQ ID NO: 125015 - DNA, 25 bp, Homo sapien
ctgtactcagcctcaagtatcttct

SEQ ID NO: 125016 - DNA, 25 bp, Homo sapien
actgtactcagcctcaagtatcttc

SEQ ID NO: 125017 - DNA, 25 bp, Homo sapien
aagacagttttcgattgtctactac

SEQ ID NO: 125018 - DNA, 25 bp, Homo sapien
acccccatgcagtggccgtgtggtg

SEQ ID NO: 125019 - DNA, 25 bp, Homo sapien
gccgtgtggtgcaaagaatctgtgt

SEQ ID NO: 125020 - DNA, 25 bp, Homo sapien
cagttttcgattgtctactacccct

SEQ ID NO: 125021 - DNA, 25 bp, Homo sapien
gaaacatataatcattaccacatgg

SEQ ID NO: 125022 - DNA, 25 bp, Homo sapien
tattgaaacatataatcattaccac

SEQ ID NO: 125023 - DNA, 25 bp, Homo sapien
aatcattaccacatggtattcctta

SEQ ID NO: 125024 - DNA, 25 bp, Homo sapien
catataatcattaccacatggtatt

SEQ ID NO: 125025 - DNA, 25 bp, Homo sapien
tatttgacaaactgagacacccacc

SEQ ID NO: 125026 - DNA, 25 bp, Homo sapien
tgcgaggtcttctggtacagccaag

SEQ ID NO: 125027 - DNA, 25 bp, Homo sapien
tcgtacaagtcgatctgcgaggtct

SEQ ID NO: 125028 - DNA, 25 bp, Homo sapien
tgtctacaatgggaagctcgaccac

SEQ ID NO: 125029 - DNA, 25 bp, Homo sapien
ccttaggatagctctagaacctctg

SEQ ID NO: 125030 - DNA, 25 bp, Homo sapien
actggagacagtaatagagcactac

SEQ ID NO: 125031 - DNA, 25 bp, Homo sapien
actactacatatcacagtttgaggg

SEQ ID NO: 125032 - DNA, 25 bp, Homo sapien
cctctgtcctttggtgggactataa

SEQ ID NO: 125033 - DNA, 25 bp, Homo sapien
tgaagtgggcagaacgaatgattcc

SEQ ID NO: 125034 - DNA, 25 bp, Homo sapien
cctttaggtcacagtatatgggcca

SEQ ID NO: 125035 - DNA, 25 bp, Homo sapien
tgcattccagactataacccagatg

SEQ ID NO: 125036 - DNA, 25 bp, Homo sapien
gaattgttcagtgggctctatagag

SEQ ID NO: 125037 - DNA, 25 bp, Homo sapien
ttttacagcaccgttaagaccagca

SEQ ID NO: 125038 - DNA, 25 bp, Homo sapien
taggtaaatgaaaccgattccagcc

SEQ ID NO: 125039 - DNA, 25 bp, Homo sapien
gccagcttgtagaacttaaaagttg

SEQ ID NO: 125040 - DNA, 25 bp, Homo sapien
gattccagcccttctgttgtgggca

SEQ ID NO: 125041 - DNA, 25 bp, Homo sapien
catgcaccatgtactcttcaatggg

SEQ ID NO: 125042 - DNA, 25 bp, Homo sapien
tgcattctgcgtgcaagaagctgaa

SEQ ID NO: 125043 - DNA, 25 bp, Homo sapien
taataaagaagggtcatctgtggcc

SEQ ID NO: 125044 - DNA, 25 bp, Homo sapien
tgttcccactttgtctgtgcgtctg

SEQ ID NO: 125045 - DNA, 25 bp, Homo sapien
gacatatttgaagtccatcagtggg

SEQ ID NO: 125046 - DNA, 25 bp, Homo sapien
tctggaatgccctgtatattaaatt

SEQ ID NO: 125047 - DNA, 25 bp, Homo sapien
catttaatactgtagttgatgagac

SEQ ID NO: 125048 - DNA, 25 bp, Homo sapien
ctttatcaattcatgaaatagctga

SEQ ID NO: 125049 - DNA, 25 bp, Homo sapien
cactccacgaagtgaattttctgtg

SEQ ID NO: 125050 - DNA, 25 bp, Homo sapien
agagaaaatgtatatccaggatcac

SEQ ID NO: 125051 - DNA, 25 bp, Homo sapien
tctgtgtatcgattgtgcagtccag

SEQ ID NO: 125052 - DNA, 25 bp, Homo sapien
cacactaggaagtctgcctgagaga

SEQ ID NO: 125053 - DNA, 25 bp, Homo sapien
gagcttttgctaactgtcagacatt

SEQ ID NO: 125054 - DNA, 25 bp, Homo sapien
tcatccctagccaggaatgcaggac

SEQ ID NO: 125055 - DNA, 25 bp, Homo sapien
caaagacagtcttgggtaaacctga

SEQ ID NO: 125056 - DNA, 25 bp, Homo sapien
gatatagcataagaccaaagacagt

SEQ ID NO: 125057 - DNA, 25 bp, Homo sapien
ggtttagatttgtgttacctgccca

SEQ ID NO: 125058 - DNA, 25 bp, Homo sapien
catggttaaaaccatcaccccttga

SEQ ID NO: 125059 - DNA, 25 bp, Homo sapien
gagcaatttaggactacccggcagt

SEQ ID NO: 125060 - DNA, 25 bp, Homo sapien
gctgtggtcacagtagtgagttctc

SEQ ID NO: 125061 - DNA, 25 bp, Homo sapien
ggaaatgcatcaccctgattactat

SEQ ID NO: 125062 - DNA, 25 bp, Homo sapien
tggatgacataaactgggcaagcct

SEQ ID NO: 125063 - DNA, 25 bp, Homo sapien
actgacaatcaacaagcactggcaa

SEQ ID NO: 125064 - DNA, 25 bp, Homo sapien
gctacttaaaaggtccctatgtcca

SEQ ID NO: 125065 - DNA, 25 bp, Homo sapien
ctcagaagatggtacaagtcattct

SEQ ID NO: 125066 - DNA, 25 bp, Homo sapien
gaaattgttagtatataaacactct

SEQ ID NO: 125067 - DNA, 25 bp, Homo sapien
taagaggttgaaaagtagtggattc

SEQ ID NO: 125068 - DNA, 25 bp, Homo sapien
tagtcacaagctttcagtccatttg

SEQ ID NO: 125069 - DNA, 25 bp, Homo sapien
aagaatggaagtttgcagaggcatc

SEQ ID NO: 125070 - DNA, 25 bp, Homo sapien
ccccaaaatagtagatgtcatctaa

SEQ ID NO: 125071 - DNA, 25 bp, Homo sapien
tagccatcccaatgatttccagcca

SEQ ID NO: 125072 - DNA, 25 bp, Homo sapien
gcatcaggatgtagtgtttgcataa

SEQ ID NO: 125073 - DNA, 25 bp, Homo sapien
tctcgaactttgtaggagggatata

SEQ ID NO: 125074 - DNA, 25 bp, Homo sapien
tgaccgtttctatcttctctcgaac

SEQ ID NO: 125075 - DNA, 25 bp, Homo sapien
taggagggatataggcccgtccttc

SEQ ID NO: 125076 - DNA, 25 bp, Homo sapien
tctatcttctctcgaactttgtagg

SEQ ID NO: 125077 - DNA, 25 bp, Homo sapien
ctcagcctcaggatatgtggggtac

SEQ ID NO: 125078 - DNA, 25 bp, Homo sapien
tcaacttcctcagagtaaggagctg

SEQ ID NO: 125079 - DNA, 25 bp, Homo sapien
cacacaggtctctcagatataggca

SEQ ID NO: 125080 - DNA, 25 bp, Homo sapien
taaggagctgttccgatcttctcaa

SEQ ID NO: 125081 - DNA, 25 bp, Homo sapien
tgaagcctatgtcagttcccagctg

SEQ ID NO: 125082 - DNA, 25 bp, Homo sapien
ggaggcaggctacatacaataagga

SEQ ID NO: 125083 - DNA, 25 bp, Homo sapien
caggaccctactcacaaaaagcgat

SEQ ID NO: 125084 - DNA, 25 bp, Homo sapien
gatagtcgctcctacagagatgaca

SEQ ID NO: 125085 - DNA, 25 bp, Homo sapien
gatacctggtactctcaaaagcagg

SEQ ID NO: 125086 - DNA, 25 bp, Homo sapien
taatcaaaattacctccgctcagtt

SEQ ID NO: 125087 - DNA, 25 bp, Homo sapien
gatgcgagttgcaaaataactcata

SEQ ID NO: 125088 - DNA, 25 bp, Homo sapien
gggcacaaatcagatccacagttac

SEQ ID NO: 125089 - DNA, 25 bp, Homo sapien
gttccaatgacatgtgagatgcgag

SEQ ID NO: 125090 - DNA, 25 bp, Homo sapien
cactatttgtgtgactccctgaggc

SEQ ID NO: 125091 - DNA, 25 bp, Homo sapien
taacaaataggttgaaggtgtacca

SEQ ID NO: 125092 - DNA, 25 bp, Homo sapien
ttacacttagtacccattggcagag

SEQ ID NO: 125093 - DNA, 25 bp, Homo sapien
gcagagagcaacctgaggtgaccac

SEQ ID NO: 125094 - DNA, 25 bp, Homo sapien
tgccacatatcaccaccggcacacc

SEQ ID NO: 125095 - DNA, 25 bp, Homo sapien
ccacatatcaccaccggcacaccag

SEQ ID NO: 125096 - DNA, 25 bp, Homo sapien
cctgccacatatcaccaccggcaca

SEQ ID NO: 125097 - DNA, 25 bp, Homo sapien
tgtcctgccacatatcaccaccggc

SEQ ID NO: 125098 - DNA, 25 bp, Homo sapien
cctctccatggaatgcagtttgaaa

SEQ ID NO: 125099 - DNA, 25 bp, Homo sapien
ttctgtcctaggtagtgcactggca

SEQ ID NO: 125100 - DNA, 25 bp, Homo sapien
tgcactggcaaaaagcttgatggtg

SEQ ID NO: 125101 - DNA, 25 bp, Homo sapien
tcttctcagatgcttcttgtagcct

SEQ ID NO: 125102 - DNA, 25 bp, Homo sapien
caatgttgaattaaggctgagcagc

SEQ ID NO: 125103 - DNA, 25 bp, Homo sapien
gttgttcccatactctgccagctca

SEQ ID NO: 125104 - DNA, 25 bp, Homo sapien
caggagcagcttaaagaggcctact

SEQ ID NO: 125105 - DNA, 25 bp, Homo sapien
tcatagctccaagtcacaagcaggg

SEQ ID NO: 125106 - DNA, 25 bp, Homo sapien
ttagaggggctcttgtggtatccac

SEQ ID NO: 125107 - DNA, 25 bp, Homo sapien
gagagtgtcaacctttggggcccag

SEQ ID NO: 125108 - DNA, 25 bp, Homo sapien
ctctccctgaggataaagtgcccct

SEQ ID NO: 125109 - DNA, 25 bp, Homo sapien
aggtaaagtgtctcggtctaggaag

SEQ ID NO: 125110 - DNA, 25 bp, Homo sapien
gattagcactcagtatgtctgcccc

SEQ ID NO: 125111 - DNA, 25 bp, Homo sapien
taaggagtacagctgagattagcac

SEQ ID NO: 125112 - DNA, 25 bp, Homo sapien
gaatatgacagcttcctagaggtgg

SEQ ID NO: 125113 - DNA, 25 bp, Homo sapien
gaactacatttctgaggatctctct

SEQ ID NO: 125114 - DNA, 25 bp, Homo sapien
aattaggctaataattgttcccaat

SEQ ID NO: 125115 - DNA, 25 bp, Homo sapien
ggctaataattgttcccaatgccat

SEQ ID NO: 125116 - DNA, 25 bp, Homo sapien
cagacatcaaatctacattgatgta

SEQ ID NO: 125117 - DNA, 25 bp, Homo sapien
caatgccattatctccagtgagtaa

SEQ ID NO: 125118 - DNA, 25 bp, Homo sapien
agtcaccggaggcactgagtttaga

SEQ ID NO: 125119 - DNA, 25 bp, Homo sapien
gaggcactgagtttagaattcacag

SEQ ID NO: 125120 - DNA, 25 bp, Homo sapien
accggaggcactgagtttagaattc

SEQ ID NO: 125121 - DNA, 25 bp, Homo sapien
gtcaccggaggcactgagtttagaa

SEQ ID NO: 125122 - DNA, 25 bp, Homo sapien
ttcttgttggagtggacaacttcca

SEQ ID NO: 125123 - DNA, 25 bp, Homo sapien
aaatctttccacataaactgactgc

SEQ ID NO: 125124 - DNA, 25 bp, Homo sapien
gcctcaacaggctgatagtccaagt

SEQ ID NO: 125125 - DNA, 25 bp, Homo sapien
tatgaggatctgaggacctgcgtga

SEQ ID NO: 125126 - DNA, 25 bp, Homo sapien
tcttgtcttttatgtccttggttgt

SEQ ID NO: 125127 - DNA, 25 bp, Homo sapien
cactatgttaactcttgtgtttaga

SEQ ID NO: 125128 - DNA, 25 bp, Homo sapien
agttgccactatgttaactcttgtg

SEQ ID NO: 125129 - DNA, 25 bp, Homo sapien
ttatgtccttggttgtaagctgcct

SEQ ID NO: 125130 - DNA, 25 bp, Homo sapien
tgaacctcttcttggtgactgcaag

SEQ ID NO: 125131 - DNA, 25 bp, Homo sapien
cagctgctgactactccagagtttt

SEQ ID NO: 125132 - DNA, 25 bp, Homo sapien
gtccacaaggtagaagacacagctg

SEQ ID NO: 125133 - DNA, 25 bp, Homo sapien
tgactgcaagttgctggagaagcat

SEQ ID NO: 125134 - DNA, 25 bp, Homo sapien
tagaaacagcagtcatcaccatgtc

SEQ ID NO: 125135 - DNA, 25 bp, Homo sapien
ggaacacatgtagctgtgagaccac

SEQ ID NO: 125136 - DNA, 25 bp, Homo sapien
ggaacgtcagcgtttcctcagtggc

SEQ ID NO: 125137 - DNA, 25 bp, Homo sapien
agcaccctgctgcaagcacggaaca

SEQ ID NO: 125138 - DNA, 25 bp, Homo sapien
ctctttagcacaggcgctgctaacc

SEQ ID NO: 125139 - DNA, 25 bp, Homo sapien
tccatgaaagccaacgacaaaggca

SEQ ID NO: 125140 - DNA, 25 bp, Homo sapien
cacctcggttggcttctctttagca

SEQ ID NO: 125141 - DNA, 25 bp, Homo sapien
ggcgttggctctccatgaaagccaa

SEQ ID NO: 125142 - DNA, 25 bp, Homo sapien
ttcagagcaagccacgggctccact

SEQ ID NO: 125143 - DNA, 25 bp, Homo sapien
gttcagagcaagccacgggctccac

SEQ ID NO: 125144 - DNA, 25 bp, Homo sapien
tcagagcaagccacgggctccactg

SEQ ID NO: 125145 - DNA, 25 bp, Homo sapien
gaagaaaggaatcacggctactcat

SEQ ID NO: 125146 - DNA, 25 bp, Homo sapien
catggcaaggtgtcaaaatatttgg

SEQ ID NO: 125147 - DNA, 25 bp, Homo sapien
ccctctagaggctactcagagtaat

SEQ ID NO: 125148 - DNA, 25 bp, Homo sapien
catttactggccgtgtatctgcagc

SEQ ID NO: 125149 - DNA, 25 bp, Homo sapien
gatttcctttgctgactgcgggtca

SEQ ID NO: 125150 - DNA, 25 bp, Homo sapien
tcgcctcctcttttagtagctgcaa

SEQ ID NO: 125151 - DNA, 25 bp, Homo sapien
tgaatggaggcaagtagtgtgggta

SEQ ID NO: 125152 - DNA, 25 bp, Homo sapien
ggtagaaggcggtcattgtcttccc

SEQ ID NO: 125153 - DNA, 25 bp, Homo sapien
gcaggtacagcagggcatcctgcat

SEQ ID NO: 125154 - DNA, 25 bp, Homo sapien
ctcctgggccctctctgcacgggca

SEQ ID NO: 125155 - DNA, 25 bp, Homo sapien
agcaggtacagcagggcatcctgca

SEQ ID NO: 125156 - DNA, 25 bp, Homo sapien
ctctgcacgggcagcaggtacagca

SEQ ID NO: 125157 - DNA, 25 bp, Homo sapien
tccaggtacaacttcggacaccaag

SEQ ID NO: 125158 - DNA, 25 bp, Homo sapien
ggtttgccgagctgaacaaggctga

SEQ ID NO: 125159 - DNA, 25 bp, Homo sapien
cgagctgaacaaggctgagtgtaac

SEQ ID NO: 125160 - DNA, 25 bp, Homo sapien
caggtacaacttcggacaccaagtt

SEQ ID NO: 125161 - DNA, 25 bp, Homo sapien
ggagacttttgctggcaacttcaaa

SEQ ID NO: 125162 - DNA, 25 bp, Homo sapien
tgtttctgtaaagatgtctgtccgc

SEQ ID NO: 125163 - DNA, 25 bp, Homo sapien
tcaaattttccctacgactgagctt

SEQ ID NO: 125164 - DNA, 25 bp, Homo sapien
gactgaagaggtggacaaaagctgt

SEQ ID NO: 125165 - DNA, 25 bp, Homo sapien
aaaatgatctccagttgagtgatga

SEQ ID NO: 125166 - DNA, 25 bp, Homo sapien
gaaggaagttgtttcaaaaatgatc

SEQ ID NO: 125167 - DNA, 25 bp, Homo sapien
ctgatgactggtgagatgagaagga

SEQ ID NO: 125168 - DNA, 25 bp, Homo sapien
aatgatctccagttgagtgatgatg

SEQ ID NO: 125169 - DNA, 25 bp, Homo sapien
cccacacgaatctctaacaagtact

SEQ ID NO: 125170 - DNA, 25 bp, Homo sapien
cacacgaatctctaacaagtactcc

SEQ ID NO: 125171 - DNA, 25 bp, Homo sapien
cacgaatctctaacaagtactccac

SEQ ID NO: 125172 - DNA, 25 bp, Homo sapien
gaatctctaacaagtactccacaag

SEQ ID NO: 125173 - DNA, 25 bp, Homo sapien
gagacccagctacagccatccaact

SEQ ID NO: 125174 - DNA, 25 bp, Homo sapien
ttttggccttcagagtgcatgtgtg

SEQ ID NO: 125175 - DNA, 25 bp, Homo sapien
ctgagacccagctacagccatccaa

SEQ ID NO: 125176 - DNA, 25 bp, Homo sapien
ctctgagacccagctacagccatcc

SEQ ID NO: 125177 - DNA, 25 bp, Homo sapien
aaacgtgcagtgttttggtgctgcc

SEQ ID NO: 125178 - DNA, 25 bp, Homo sapien
tcctctttgccatccgccccttgac

SEQ ID NO: 125179 - DNA, 25 bp, Homo sapien
ggctcagcaaccaaaacgtgcagtg

SEQ ID NO: 125180 - DNA, 25 bp, Homo sapien
tcagcaaccaaaacgtgcagtgttt

SEQ ID NO: 125181 - DNA, 25 bp, Homo sapien
gatgtaggatggctggttggtgctg

SEQ ID NO: 125182 - DNA, 25 bp, Homo sapien
tcacatcctatgtgcccaggaggat

SEQ ID NO: 125183 - DNA, 25 bp, Homo sapien
gagactcacagcgtatggtttttag

SEQ ID NO: 125184 - DNA, 25 bp, Homo sapien
tccttgttcccagtgtggatgaagg

SEQ ID NO: 125185 - DNA, 25 bp, Homo sapien
tgcctctgtattttgggttagaact

SEQ ID NO: 125186 - DNA, 25 bp, Homo sapien
tcaccgctgacttttgaacagttgc

SEQ ID NO: 125187 - DNA, 25 bp, Homo sapien
cagcataacaggactcctccctggg

SEQ ID NO: 125188 - DNA, 25 bp, Homo sapien
ttgaggtcagcgagaatgaggtcca

SEQ ID NO: 125189 - DNA, 25 bp, Homo sapien
cagacgttgtaacccaatgccagca

SEQ ID NO: 125190 - DNA, 25 bp, Homo sapien
agcaagatcccgcaaacaacacaga

SEQ ID NO: 125191 - DNA, 25 bp, Homo sapien
tgcagatggacaaggaatcttggaa

SEQ ID NO: 125192 - DNA, 25 bp, Homo sapien
agatggacaaggaatcttggaatcc

SEQ ID NO: 125193 - DNA, 25 bp, Homo sapien
cagatggacaaggaatcttggaatc

SEQ ID NO: 125194 - DNA, 25 bp, Homo sapien
ctgcagatggacaaggaatcttgga

SEQ ID NO: 125195 - DNA, 25 bp, Homo sapien
ctatccgaagtaagttggctttcca

SEQ ID NO: 125196 - DNA, 25 bp, Homo sapien
agttggctttccagcgatgatgcca

SEQ ID NO: 125197 - DNA, 25 bp, Homo sapien
tatccgaagtaagttggctttccag

SEQ ID NO: 125198 - DNA, 25 bp, Homo sapien
tccagcgatgatgccacagtctcct

SEQ ID NO: 125199 - DNA, 25 bp, Homo sapien
gcacacagtgagctctctgttctga

SEQ ID NO: 125200 - DNA, 25 bp, Homo sapien
tcttggcatttacaggcacacagtg

SEQ ID NO: 125201 - DNA, 25 bp, Homo sapien
acagagcaggctccctaacggatgg

SEQ ID NO: 125202 - DNA, 25 bp, Homo sapien
ctgttctgaaacatataggaattcc

SEQ ID NO: 125203 - DNA, 25 bp, Homo sapien
gagccagagggaccagaattgttgc

SEQ ID NO: 125204 - DNA, 25 bp, Homo sapien
gccagaggactgagacttagaggac

SEQ ID NO: 125205 - DNA, 25 bp, Homo sapien
gccggcagccaaggaggcgatgaat

SEQ ID NO: 125206 - DNA, 25 bp, Homo sapien
actgagacttagaggacggacagtg

SEQ ID NO: 125207 - DNA, 25 bp, Homo sapien
ccgccataggcatttgagtagctaa

SEQ ID NO: 125208 - DNA, 25 bp, Homo sapien
gtagctaagcacatcaaagacccct

SEQ ID NO: 125209 - DNA, 25 bp, Homo sapien
tgttgatcagcgaaaccgccatagg

SEQ ID NO: 125210 - DNA, 25 bp, Homo sapien
accaggctctggttaatagtcccac

SEQ ID NO: 125211 - DNA, 25 bp, Homo sapien
atttcaaagggaaaagaagctggtg

SEQ ID NO: 125212 - DNA, 25 bp, Homo sapien
caaagggaaaagaagctggtgacta

SEQ ID NO: 125213 - DNA, 25 bp, Homo sapien
ctcataagatttcaaagggaaaaga

SEQ ID NO: 125214 - DNA, 25 bp, Homo sapien
ttcaaagggaaaagaagctggtgac

SEQ ID NO: 125215 - DNA, 25 bp, Homo sapien
gggactcagaggtacaaagtcagtt

SEQ ID NO: 125216 - DNA, 25 bp, Homo sapien
acaaaacttctgtgaagggactcag

SEQ ID NO: 125217 - DNA, 25 bp, Homo sapien
cgtataagaacacaaaacttctgtg

SEQ ID NO: 125218 - DNA, 25 bp, Homo sapien
tgtccaatggcttcttagaaattat

SEQ ID NO: 125219 - DNA, 25 bp, Homo sapien
tgtgtccaatggcttcttagaaatt

SEQ ID NO: 125220 - DNA, 25 bp, Homo sapien
ccaatggcttcttagaaattatcat

SEQ ID NO: 125221 - DNA, 25 bp, Homo sapien
tccaatggcttcttagaaattatca

SEQ ID NO: 125222 - DNA, 25 bp, Homo sapien
aattctctggcctccgactgttgct

SEQ ID NO: 125223 - DNA, 25 bp, Homo sapien
cttcaagctcctcttctatcagctc

SEQ ID NO: 125224 - DNA, 25 bp, Homo sapien
tcttctatcagctctctggctgggt

SEQ ID NO: 125225 - DNA, 25 bp, Homo sapien
ctgggtgctgggaatctgctgattc

SEQ ID NO: 125226 - DNA, 25 bp, Homo sapien
cagattagaaaggtggctccaggcc

SEQ ID NO: 125227 - DNA, 25 bp, Homo sapien
tgcaggcaaacgctcccagtgcatt

SEQ ID NO: 125228 - DNA, 25 bp, Homo sapien
tccttgggcccagattagaaaggtg

SEQ ID NO: 125229 - DNA, 25 bp, Homo sapien
tgctgtggttggtatgcaggcaaac

SEQ ID NO: 125230 - DNA, 25 bp, Homo sapien
cttgaggggtgaatggaggggctgg

SEQ ID NO: 125231 - DNA, 25 bp, Homo sapien
ttgaggggtgaatggaggggctgga

SEQ ID NO: 125232 - DNA, 25 bp, Homo sapien
ggggtgaatggaggggctggaggac

SEQ ID NO: 125233 - DNA, 25 bp, Homo sapien
gtgaatggaggggctggaggacatg

SEQ ID NO: 125234 - DNA, 25 bp, Homo sapien
ttggcatcaatgaggcttgcctcaa

SEQ ID NO: 125235 - DNA, 25 bp, Homo sapien
gccttggcatcaatgaggcttgcct

SEQ ID NO: 125236 - DNA, 25 bp, Homo sapien
cttggcatcaatgaggcttgcctca

SEQ ID NO: 125237 - DNA, 25 bp, Homo sapien
aagccttggcatcaatgaggcttgc

SEQ ID NO: 125238 - DNA, 25 bp, Homo sapien
tgatcgacattcagtggagacaccg

SEQ ID NO: 125239 - DNA, 25 bp, Homo sapien
gtccagccacggcaaagactctgac

SEQ ID NO: 125240 - DNA, 25 bp, Homo sapien
tgtgagcagccagatgctgtctgac

SEQ ID NO: 125241 - DNA, 25 bp, Homo sapien
gactctgacccaagctgatcgacat

SEQ ID NO: 125242 - DNA, 25 bp, Homo sapien
ccttgtaattcacaccaaaaagaga

SEQ ID NO: 125243 - DNA, 25 bp, Homo sapien
cttgtaattcacaccaaaaagagag

SEQ ID NO: 125244 - DNA, 25 bp, Homo sapien
ttgtaattcacaccaaaaagagaga

SEQ ID NO: 125245 - DNA, 25 bp, Homo sapien
gggcggttcctcagagtggccctac

SEQ ID NO: 125246 - DNA, 25 bp, Homo sapien
agggcggttcctcagagtggcccta

SEQ ID NO: 125247 - DNA, 25 bp, Homo sapien
aaaaagagtgtggggttgtgcagga

SEQ ID NO: 125248 - DNA, 25 bp, Homo sapien
caaaaagagtgtggggttgtgcagg

SEQ ID NO: 125249 - DNA, 25 bp, Homo sapien
tccaaaaagagtgtggggttgtgca

SEQ ID NO: 125250 - DNA, 25 bp, Homo sapien
ctccaaaaagagtgtggggttgtgc

SEQ ID NO: 125251 - DNA, 25 bp, Homo sapien
ctaatgcacacaaagtcccgaaata

SEQ ID NO: 125252 - DNA, 25 bp, Homo sapien
cattgcttttgtagatccccgtggc

SEQ ID NO: 125253 - DNA, 25 bp, Homo sapien
acatagggggctctaggtaagtgcc

SEQ ID NO: 125254 - DNA, 25 bp, Homo sapien
gaaataaagctcagcaaagcagcca

SEQ ID NO: 125255 - DNA, 25 bp, Homo sapien
acatgccgagacactgaagatgctg

SEQ ID NO: 125256 - DNA, 25 bp, Homo sapien
gatgctgcagaaccagcaaggtggc

SEQ ID NO: 125257 - DNA, 25 bp, Homo sapien
aagaggaaacatgccgagacactga

SEQ ID NO: 125258 - DNA, 25 bp, Homo sapien
gctacacctcctaactcttcctgtc

SEQ ID NO: 125259 - DNA, 25 bp, Homo sapien
tcagacagctccaaggccccggctg

SEQ ID NO: 125260 - DNA, 25 bp, Homo sapien
cagtgccacacagccgctgccacct

SEQ ID NO: 125261 - DNA, 25 bp, Homo sapien
gctgccacctctccttagcctccat

SEQ ID NO: 125262 - DNA, 25 bp, Homo sapien
ctgctccagtgccacacagccgctg

SEQ ID NO: 125263 - DNA, 25 bp, Homo sapien
agtcagccctctgcctcctcctcac

SEQ ID NO: 125264 - DNA, 25 bp, Homo sapien
taaattgcaatatttgcagtaagcc

SEQ ID NO: 125265 - DNA, 25 bp, Homo sapien
aattgcaatatttgcagtaagccat

SEQ ID NO: 125266 - DNA, 25 bp, Homo sapien
aaattgcaatatttgcagtaagcca

SEQ ID NO: 125267 - DNA, 25 bp, Homo sapien
ttgcagtaagccattgtaatccctc

SEQ ID NO: 125268 - DNA, 25 bp, Homo sapien
catggtccagtccagataaaggatg

SEQ ID NO: 125269 - DNA, 25 bp, Homo sapien
ccagataaaggatggagtgtattat

SEQ ID NO: 125270 - DNA, 25 bp, Homo sapien
tcttaggtcttgacagccagttcca

SEQ ID NO: 125271 - DNA, 25 bp, Homo sapien
tggtggctatggctaaggtggccag

SEQ ID NO: 125272 - DNA, 25 bp, Homo sapien
cacacttgacctggattgagggcag

SEQ ID NO: 125273 - DNA, 25 bp, Homo sapien
acacttgacctggattgagggcagc

SEQ ID NO: 125274 - DNA, 25 bp, Homo sapien
acacacttgacctggattgagggca

SEQ ID NO: 125275 - DNA, 25 bp, Homo sapien
ctgcagttgctgagtaatgctcctg

SEQ ID NO: 125276 - DNA, 25 bp, Homo sapien
ctggagacatcatcccagcacagca

SEQ ID NO: 125277 - DNA, 25 bp, Homo sapien
gctcccaatcacagctactgctgac

SEQ ID NO: 125278 - DNA, 25 bp, Homo sapien
aggctcccaatcacagctactgctg

SEQ ID NO: 125279 - DNA, 25 bp, Homo sapien
tgaagtcctttaacccgttgctgcc

SEQ ID NO: 125280 - DNA, 25 bp, Homo sapien
ggagattaagcacaggatgagaaca

SEQ ID NO: 125281 - DNA, 25 bp, Homo sapien
ctctggtgattgtctctgaagtcct

SEQ ID NO: 125282 - DNA, 25 bp, Homo sapien
gagaacattcacctatagactctgg

SEQ ID NO: 125283 - DNA, 25 bp, Homo sapien
tccgagtttattcttgcgtctctcc

SEQ ID NO: 125284 - DNA, 25 bp, Homo sapien
ttttccgagtttattcttgcgtctc

SEQ ID NO: 125285 - DNA, 25 bp, Homo sapien
agatataaaagtcttaactagaggt

SEQ ID NO: 125286 - DNA, 25 bp, Homo sapien
gtttctggaacctaaatccctgagc

SEQ ID NO: 125287 - DNA, 25 bp, Homo sapien
gaatttgggtttcagaccctgctgc

SEQ ID NO: 125288 - DNA, 25 bp, Homo sapien
tcttgcttggtgactgagggctttg

SEQ ID NO: 125289 - DNA, 25 bp, Homo sapien
gatggtagacccagcaaaacatttg

SEQ ID NO: 125290 - DNA, 25 bp, Homo sapien
cccagctcgggtcaccatgagagct

SEQ ID NO: 125291 - DNA, 25 bp, Homo sapien
ctccagtgcttggtttccccatgtt

SEQ ID NO: 125292 - DNA, 25 bp, Homo sapien
atacaaagggtgtctatttttccag

SEQ ID NO: 125293 - DNA, 25 bp, Homo sapien
gactcagcccagattatacaaaggg

SEQ ID NO: 125294 - DNA, 25 bp, Homo sapien
cccagattatacaaagggtgtctat

SEQ ID NO: 125295 - DNA, 25 bp, Homo sapien
gctcgcctgcaagggagtgcgtggc

SEQ ID NO: 125296 - DNA, 25 bp, Homo sapien
ggaggttgtcctgctcgtcccacag

SEQ ID NO: 125297 - DNA, 25 bp, Homo sapien
agtgcgtggccttcaaagtttctca

SEQ ID NO: 125298 - DNA, 25 bp, Homo sapien
cctagagtcaacatgggctcgcctg

SEQ ID NO: 125299 - DNA, 25 bp, Homo sapien
agcagttttgatgggtcccaaacta

SEQ ID NO: 125300 - DNA, 25 bp, Homo sapien
agcagtaactaagcacccagcaggc

SEQ ID NO: 125301 - DNA, 25 bp, Homo sapien
caccaacccagatggtgtcaaaagt

SEQ ID NO: 125302 - DNA, 25 bp, Homo sapien
taatttagttgcaagatcctcagca

SEQ ID NO: 125303 - DNA, 25 bp, Homo sapien
tctctgaggataggggatagcccat

SEQ ID NO: 125304 - DNA, 25 bp, Homo sapien
tgtctctgaggataggggatagccc

SEQ ID NO: 125305 - DNA, 25 bp, Homo sapien
agtgtctctgaggataggggatagc

SEQ ID NO: 125306 - DNA, 25 bp, Homo sapien
gtctctgaggataggggatagccca

SEQ ID NO: 125307 - DNA, 25 bp, Homo sapien
caagttgctgttgacccaactgcaa

SEQ ID NO: 125308 - DNA, 25 bp, Homo sapien
ttgctgttgacccaactgcaagggc

SEQ ID NO: 125309 - DNA, 25 bp, Homo sapien
gctgttgacccaactgcaagggctg

SEQ ID NO: 125310 - DNA, 25 bp, Homo sapien
agttgctgttgacccaactgcaagg

SEQ ID NO: 125311 - DNA, 25 bp, Homo sapien
aagggacagagttgagtcaggctgt

SEQ ID NO: 125312 - DNA, 25 bp, Homo sapien
agggacagagttgagtcaggctgtg

SEQ ID NO: 125313 - DNA, 25 bp, Homo sapien
gacagagttgagtcaggctgtgtgt

SEQ ID NO: 125314 - DNA, 25 bp, Homo sapien
ctaagggacagagttgagtcaggct

SEQ ID NO: 125315 - DNA, 25 bp, Homo sapien
gggattcaggtctggccgagctttc

SEQ ID NO: 125316 - DNA, 25 bp, Homo sapien
cataggataggacttggcagaaaca

SEQ ID NO: 125317 - DNA, 25 bp, Homo sapien
ctgtgttatcagtgagaggctggcc

SEQ ID NO: 125318 - DNA, 25 bp, Homo sapien
cagccgcagggagggattcaggtct

SEQ ID NO: 125319 - DNA, 25 bp, Homo sapien
gtccttggggtcattactgtacatg

SEQ ID NO: 125320 - DNA, 25 bp, Homo sapien
actgtacatgtggtaggctttggag

SEQ ID NO: 125321 - DNA, 25 bp, Homo sapien
tttggagtgaatgtcagaagatgga

SEQ ID NO: 125322 - DNA, 25 bp, Homo sapien
gtaggctttggagtgaatgtcagaa

SEQ ID NO: 125323 - DNA, 25 bp, Homo sapien
caccgccatgttgctatcctcttca

SEQ ID NO: 125324 - DNA, 25 bp, Homo sapien
caccccaccgccatgttgctatcct

SEQ ID NO: 125325 - DNA, 25 bp, Homo sapien
gatgcgagggacctccctcttatcc

SEQ ID NO: 125326 - DNA, 25 bp, Homo sapien
gccatgttgctatcctcttcaccac

SEQ ID NO: 125327 - DNA, 25 bp, Homo sapien
tccattccgtcttttcttggtgagc

SEQ ID NO: 125328 - DNA, 25 bp, Homo sapien
gagcctgaagggactagggctacac

SEQ ID NO: 125329 - DNA, 25 bp, Homo sapien
tagatgtcccagaactaagattggt

SEQ ID NO: 125330 - DNA, 25 bp, Homo sapien
ggactagggctacactagatgtccc

SEQ ID NO: 125331 - DNA, 25 bp, Homo sapien
cacactgattgccagcctgttcctt

SEQ ID NO: 125332 - DNA, 25 bp, Homo sapien
tgtgtattcgggaaactggtgaact

SEQ ID NO: 125333 - DNA, 25 bp, Homo sapien
gacataaattatgatgatcacactg

SEQ ID NO: 125334 - DNA, 25 bp, Homo sapien
aactttctgagagtcgaagcaggac

SEQ ID NO: 125335 - DNA, 25 bp, Homo sapien
ttttctcggtcttgtcggaaatgag

SEQ ID NO: 125336 - DNA, 25 bp, Homo sapien
cattttctcggtcttgtcggaaatg

SEQ ID NO: 125337 - DNA, 25 bp, Homo sapien
tcattttctcggtcttgtcggaaat

SEQ ID NO: 125338 - DNA, 25 bp, Homo sapien
tttctcggtcttgtcggaaatgagc

SEQ ID NO: 125339 - DNA, 25 bp, Homo sapien
gactggtaggtactggactcctgca

SEQ ID NO: 125340 - DNA, 25 bp, Homo sapien
tgtggacatttctctcgttggaacc

SEQ ID NO: 125341 - DNA, 25 bp, Homo sapien
ttttgtaactccatgaaaggcacac

SEQ ID NO: 125342 - DNA, 25 bp, Homo sapien
tgtaggagatgctggcggcattccc

SEQ ID NO: 125343 - DNA, 25 bp, Homo sapien
tctcaggaagctgttctttccaggg

SEQ ID NO: 125344 - DNA, 25 bp, Homo sapien
ccttgaataggctcctttagggctt

SEQ ID NO: 125345 - DNA, 25 bp, Homo sapien
tcactcccatggagtcattgccttg

SEQ ID NO: 125346 - DNA, 25 bp, Homo sapien
gcaaagaggcaatctctccaactgt

SEQ ID NO: 125347 - DNA, 25 bp, Homo sapien
taaatgcttgcattttgcccgttga

SEQ ID NO: 125348 - DNA, 25 bp, Homo sapien
agctgaagaccttaaatgcttgcat

SEQ ID NO: 125349 - DNA, 25 bp, Homo sapien
gctgaagaccttaaatgcttgcatt

SEQ ID NO: 125350 - DNA, 25 bp, Homo sapien
gaccttaaatgcttgcattttgccc

SEQ ID NO: 125351 - DNA, 25 bp, Homo sapien
gaacaaggtagaccagtgaggcaga

SEQ ID NO: 125352 - DNA, 25 bp, Homo sapien
gggcttgagtaaatgccggcttacc

SEQ ID NO: 125353 - DNA, 25 bp, Homo sapien
caaagacagcctagagaggacggca

SEQ ID NO: 125354 - DNA, 25 bp, Homo sapien
atcggagagtgctcccgaaggccag

SEQ ID NO: 125355 - DNA, 25 bp, Homo sapien
ggtgagtccgctgtctgctgcctca

SEQ ID NO: 125356 - DNA, 25 bp, Homo sapien
gagtccgctgtctgctgcctcattt

SEQ ID NO: 125357 - DNA, 25 bp, Homo sapien
agggtgagtccgctgtctgctgcct

SEQ ID NO: 125358 - DNA, 25 bp, Homo sapien
ctgagggtgagtccgctgtctgctg

SEQ ID NO: 125359 - DNA, 25 bp, Homo sapien
gctggtggctgattacatcctctgt

SEQ ID NO: 125360 - DNA, 25 bp, Homo sapien
caggccagtccactcacagcaatta

SEQ ID NO: 125361 - DNA, 25 bp, Homo sapien
aagtctggggaatagacaaatccct

SEQ ID NO: 125362 - DNA, 25 bp, Homo sapien
tctctcaagagcaagtttcaggacg

SEQ ID NO: 125363 - DNA, 25 bp, Homo sapien
gagagtggttgccagttggcttatc

SEQ ID NO: 125364 - DNA, 25 bp, Homo sapien
tcagtcgggtcaacaacagtttggg

SEQ ID NO: 125365 - DNA, 25 bp, Homo sapien
gggacttgtcattagccttatggga

SEQ ID NO: 125366 - DNA, 25 bp, Homo sapien
tgatttcaggatccagctcgggact

SEQ ID NO: 125367 - DNA, 25 bp, Homo sapien
tggacagggctccaagaacaaaggt

SEQ ID NO: 125368 - DNA, 25 bp, Homo sapien
ccttggtggacagggctccaagaac

SEQ ID NO: 125369 - DNA, 25 bp, Homo sapien
cagggctccaagaacaaaggtgcag

SEQ ID NO: 125370 - DNA, 25 bp, Homo sapien
ctccaagaacaaaggtgcaggcttt

SEQ ID NO: 125371 - DNA, 25 bp, Homo sapien
gctgacccttcagagctctttcttc

SEQ ID NO: 125372 - DNA, 25 bp, Homo sapien
ctgctgacccttcagagctctttct

SEQ ID NO: 125373 - DNA, 25 bp, Homo sapien
tgctgacccttcagagctctttctt

SEQ ID NO: 125374 - DNA, 25 bp, Homo sapien
cagtgggtgcaatcctattagcagc

SEQ ID NO: 125375 - DNA, 25 bp, Homo sapien
tactggtgagaaaatcatcaggctg

SEQ ID NO: 125376 - DNA, 25 bp, Homo sapien
gatatcccgggaatcctactggtga

SEQ ID NO: 125377 - DNA, 25 bp, Homo sapien
gcttttgtataaactgcccacagtg

SEQ ID NO: 125378 - DNA, 25 bp, Homo sapien
aaatgaagccagcagtagggagact

SEQ ID NO: 125379 - DNA, 25 bp, Homo sapien
gccaaatgaagccagcagtagggag

SEQ ID NO: 125380 - DNA, 25 bp, Homo sapien
atgaagccagcagtagggagactgt

SEQ ID NO: 125381 - DNA, 25 bp, Homo sapien
caaatgaagccagcagtagggagac

SEQ ID NO: 125382 - DNA, 25 bp, Homo sapien
catgtctgtcggcagtgaatcctct

SEQ ID NO: 125383 - DNA, 25 bp, Homo sapien
ggcaacaggcccattaatctttttg

SEQ ID NO: 125384 - DNA, 25 bp, Homo sapien
gaatcctctggcaacaggcccatta

SEQ ID NO: 125385 - DNA, 25 bp, Homo sapien
gcagtgaatcctctggcaacaggcc

SEQ ID NO: 125386 - DNA, 25 bp, Homo sapien
tctgtctgtgtagatactctctccc

SEQ ID NO: 125387 - DNA, 25 bp, Homo sapien
aattctcggattttgtggactagga

SEQ ID NO: 125388 - DNA, 25 bp, Homo sapien
tgtctgacagctgacaattctcgga

SEQ ID NO: 125389 - DNA, 25 bp, Homo sapien
taggagggtatccacacgttcttgc

SEQ ID NO: 125390 - DNA, 25 bp, Homo sapien
gataaggctgcatcactggaacgca

SEQ ID NO: 125391 - DNA, 25 bp, Homo sapien
tgccagggccatatctctgtaatct

SEQ ID NO: 125392 - DNA, 25 bp, Homo sapien
caggaatggctcagtggtgaggata

SEQ ID NO: 125393 - DNA, 25 bp, Homo sapien
gtaatctctgatgccgctcagttgc

SEQ ID NO: 125394 - DNA, 25 bp, Homo sapien
tccccaaacagctctagactgagac

SEQ ID NO: 125395 - DNA, 25 bp, Homo sapien
ccccaaacagctctagactgagaca

SEQ ID NO: 125396 - DNA, 25 bp, Homo sapien
gagtgggagatccttctgtatgctc

SEQ ID NO: 125397 - DNA, 25 bp, Homo sapien
tgtcgtctccgtgatcctcatagct

SEQ ID NO: 125398 - DNA, 25 bp, Homo sapien
ttagaaggaccaaatcaaggagtgg

SEQ ID NO: 125399 - DNA, 25 bp, Homo sapien
gggacaccacaggtcttagaaggac

SEQ ID NO: 125400 - DNA, 25 bp, Homo sapien
acacaagcttcttggagtatccttt

SEQ ID NO: 125401 - DNA, 25 bp, Homo sapien
gatgtgccctagctctcaagtatgg

SEQ ID NO: 125402 - DNA, 25 bp, Homo sapien
gaatcttcagcatcagtacgtacag

SEQ ID NO: 125403 - DNA, 25 bp, Homo sapien
gtatcctttagcagggacatctttg

SEQ ID NO: 125404 - DNA, 25 bp, Homo sapien
cacagccgtgaaacatcatcataga

SEQ ID NO: 125405 - DNA, 25 bp, Homo sapien
cttgcttttacacagccgtgaaaca

SEQ ID NO: 125406 - DNA, 25 bp, Homo sapien
acatcatcatagataagtctttcgc

SEQ ID NO: 125407 - DNA, 25 bp, Homo sapien
tagataagtctttcgctggtgttgt

SEQ ID NO: 125408 - DNA, 25 bp, Homo sapien
gcaacagggattctcaggagcattt

SEQ ID NO: 125409 - DNA, 25 bp, Homo sapien
tcctttatgcgtgcaacagggattc

SEQ ID NO: 125410 - DNA, 25 bp, Homo sapien
tatgcgtgcaacagggattctcagg

SEQ ID NO: 125411 - DNA, 25 bp, Homo sapien
tgattctcttcctttatgcgtgcaa

SEQ ID NO: 125412 - DNA, 25 bp, Homo sapien
ggacaggagtccctgctcctcgtgt

SEQ ID NO: 125413 - DNA, 25 bp, Homo sapien
gtccctgctcctcgtgtactgcaag

SEQ ID NO: 125414 - DNA, 25 bp, Homo sapien
aggagtccctgctcctcgtgtactg

SEQ ID NO: 125415 - DNA, 25 bp, Homo sapien
gctcctcgtgtactgcaagcagggc

SEQ ID NO: 125416 - DNA, 25 bp, Homo sapien
caaatccagcggctgatcattcagc

SEQ ID NO: 125417 - DNA, 25 bp, Homo sapien
aaatccagcggctgatcattcagct

SEQ ID NO: 125418 - DNA, 25 bp, Homo sapien
aatccagcggctgatcattcagctc

SEQ ID NO: 125419 - DNA, 25 bp, Homo sapien
tcaaatccagcggctgatcattcag

SEQ ID NO: 125420 - DNA, 25 bp, Homo sapien
aacttcacaatagatgtgagtcact

SEQ ID NO: 125421 - DNA, 25 bp, Homo sapien
caggacccgagttttcagctctgac

SEQ ID NO: 125422 - DNA, 25 bp, Homo sapien
acaatagatgtgagtcactccagga

SEQ ID NO: 125423 - DNA, 25 bp, Homo sapien
actccaggacccgagttttcagctc

SEQ ID NO: 125424 - DNA, 25 bp, Homo sapien
agtttttggatagcataactctgtg

SEQ ID NO: 125425 - DNA, 25 bp, Homo sapien
ttccctcagagaacacgcccatcct

SEQ ID NO: 125426 - DNA, 25 bp, Homo sapien
tttggatagcataactctgtgcttt

SEQ ID NO: 125427 - DNA, 25 bp, Homo sapien
gatagcataactctgtgcttttttc

SEQ ID NO: 125428 - DNA, 25 bp, Homo sapien
aggtgtttggtgactctgttggctt

SEQ ID NO: 125429 - DNA, 25 bp, Homo sapien
tcatagtcttttttagggttggata

SEQ ID NO: 125430 - DNA, 25 bp, Homo sapien
ggtgtttggtgactctgttggcttc

SEQ ID NO: 125431 - DNA, 25 bp, Homo sapien
ggctgctccttcctcagagttctgg

SEQ ID NO: 125432 - DNA, 25 bp, Homo sapien
gctccttcctcagagttctgggaac

SEQ ID NO: 125433 - DNA, 25 bp, Homo sapien
ctgggctgctccttcctcagagttc

SEQ ID NO: 125434 - DNA, 25 bp, Homo sapien
ctccttcctcagagttctgggaaca

SEQ ID NO: 125435 - DNA, 25 bp, Homo sapien
tgagaacacagattagggctttggg

SEQ ID NO: 125436 - DNA, 25 bp, Homo sapien
cacagtgtgccaatggcgggagtca

SEQ ID NO: 125437 - DNA, 25 bp, Homo sapien
catgaggcaggcgtgcaccttggat

SEQ ID NO: 125438 - DNA, 25 bp, Homo sapien
cctagtgttggcctgaatatccccg

SEQ ID NO: 125439 - DNA, 25 bp, Homo sapien
aatgtttcccactgaggtggccaca

SEQ ID NO: 125440 - DNA, 25 bp, Homo sapien
taccaatgatgtcgaatgtttccca

SEQ ID NO: 125441 - DNA, 25 bp, Homo sapien
ctaataccaatgatgtcgaatgttt

SEQ ID NO: 125442 - DNA, 25 bp, Homo sapien
tgatgtcgaatgtttcccactgagg

SEQ ID NO: 125443 - DNA, 25 bp, Homo sapien
tggtctcttgttgggtctgctggtc

SEQ ID NO: 125444 - DNA, 25 bp, Homo sapien
cctgggagactgacttgcaagagat

SEQ ID NO: 125445 - DNA, 25 bp, Homo sapien
tcaaggatgaccatgagtgaaagtc

SEQ ID NO: 125446 - DNA, 25 bp, Homo sapien
ccttgtgggagacacgtcttctgct

SEQ ID NO: 125447 - DNA, 25 bp, Homo sapien
ttctgagtgtcacggctgatcagcc

SEQ ID NO: 125448 - DNA, 25 bp, Homo sapien
tcaacaagggaatctggaccacgta

SEQ ID NO: 125449 - DNA, 25 bp, Homo sapien
cacgtaagtgtctctctttccagga

SEQ ID NO: 125450 - DNA, 25 bp, Homo sapien
actgctgtcgtaggcactgccggtg

SEQ ID NO: 125451 - DNA, 25 bp, Homo sapien
ccagccaaggagtctgtattgatca

SEQ ID NO: 125452 - DNA, 25 bp, Homo sapien
tgcattggaatccatatttctgaga

SEQ ID NO: 125453 - DNA, 25 bp, Homo sapien
ttggaatccatatttctgagaatcc

SEQ ID NO: 125454 - DNA, 25 bp, Homo sapien
cagccaaggagtctgtattgatcat

SEQ ID NO: 125455 - DNA, 25 bp, Homo sapien
gaatccgtgggccactgatcatctg

SEQ ID NO: 125456 - DNA, 25 bp, Homo sapien
ccgtgggccactgatcatctgtttc

SEQ ID NO: 125457 - DNA, 25 bp, Homo sapien
tccgtgggccactgatcatctgttt

SEQ ID NO: 125458 - DNA, 25 bp, Homo sapien
tggaatccgtgggccactgatcatc

SEQ ID NO: 125459 - DNA, 25 bp, Homo sapien
cttgagaggcttgtgtaagctgtga

SEQ ID NO: 125460 - DNA, 25 bp, Homo sapien
catcatcagcattactgtgcagtag

SEQ ID NO: 125461 - DNA, 25 bp, Homo sapien
tggaagcggctttctgagggcaacc

SEQ ID NO: 125462 - DNA, 25 bp, Homo sapien
gcttgagtgaaaaatggctttggtc

SEQ ID NO: 125463 - DNA, 25 bp, Homo sapien
tgagatctgagcaatgggccatgcc

SEQ ID NO: 125464 - DNA, 25 bp, Homo sapien
ctgagatctgagcaatgggccatgc

SEQ ID NO: 125465 - DNA, 25 bp, Homo sapien
tctgagatctgagcaatgggccatg

SEQ ID NO: 125466 - DNA, 25 bp, Homo sapien
gagatctgagcaatgggccatgcct

SEQ ID NO: 125467 - DNA, 25 bp, Homo sapien
gatcccaaggtaacagtggcagcta

SEQ ID NO: 125468 - DNA, 25 bp, Homo sapien
tctgtgaggactataggcagatccc

SEQ ID NO: 125469 - DNA, 25 bp, Homo sapien
tcttcatgggcaggatttaaccagc

SEQ ID NO: 125470 - DNA, 25 bp, Homo sapien
taatagcctttatctggcagggaaa

SEQ ID NO: 125471 - DNA, 25 bp, Homo sapien
tcccagactcctatgttctatcctg

SEQ ID NO: 125472 - DNA, 25 bp, Homo sapien
gactcccagactcctatgttctatc

SEQ ID NO: 125473 - DNA, 25 bp, Homo sapien
gactcctatgttctatcctgcaagg

SEQ ID NO: 125474 - DNA, 25 bp, Homo sapien
ccagactcctatgttctatcctgca

SEQ ID NO: 125475 - DNA, 25 bp, Homo sapien
agaacatgagtctgatgatgatccc

SEQ ID NO: 125476 - DNA, 25 bp, Homo sapien
ggtgtgttgacttccaatattaaca

SEQ ID NO: 125477 - DNA, 25 bp, Homo sapien
tgatgatgatccctggtgtgttgac

SEQ ID NO: 125478 - DNA, 25 bp, Homo sapien
taaagaacatgagtctgatgatgat

SEQ ID NO: 125479 - DNA, 25 bp, Homo sapien
caggaaagactggagtcttcctgac

SEQ ID NO: 125480 - DNA, 25 bp, Homo sapien
gctgctgactttgatgctagagtta

SEQ ID NO: 125481 - DNA, 25 bp, Homo sapien
gagatgaagtagtcacttcagggca

SEQ ID NO: 125482 - DNA, 25 bp, Homo sapien
tagagttataaactctcccctggtc

SEQ ID NO: 125483 - DNA, 25 bp, Homo sapien
tagtcatagggagatatcgcattcc

SEQ ID NO: 125484 - DNA, 25 bp, Homo sapien
gggctttgaaaagtagggatagtca

SEQ ID NO: 125485 - DNA, 25 bp, Homo sapien
gatatcgcattcctccgatgaccat

SEQ ID NO: 125486 - DNA, 25 bp, Homo sapien
gctgaagtacatggagatactcctg

SEQ ID NO: 125487 - DNA, 25 bp, Homo sapien
tagtgacccgaagctgttttgtcat

SEQ ID NO: 125488 - DNA, 25 bp, Homo sapien
ttagtgacccgaagctgttttgtca

SEQ ID NO: 125489 - DNA, 25 bp, Homo sapien
ttcaccttctatggtggcttctgga

SEQ ID NO: 125490 - DNA, 25 bp, Homo sapien
tatcttcaccttctatggtggcttc

SEQ ID NO: 125491 - DNA, 25 bp, Homo sapien
tcttcaccttctatggtggcttctg

SEQ ID NO: 125492 - DNA, 25 bp, Homo sapien
attatcttcaccttctatggtggct

SEQ ID NO: 125493 - DNA, 25 bp, Homo sapien
aaagtgagaaagcacgtctccttca

SEQ ID NO: 125494 - DNA, 25 bp, Homo sapien
gagaaagcacgtctccttcagttgg

SEQ ID NO: 125495 - DNA, 25 bp, Homo sapien
cagttggaactttataggagatttt

SEQ ID NO: 125496 - DNA, 25 bp, Homo sapien
aaagcacgtctccttcagttggaac

SEQ ID NO: 125497 - DNA, 25 bp, Homo sapien
ggaaatcttgcttattggaagaggg

SEQ ID NO: 125498 - DNA, 25 bp, Homo sapien
cccagtgatgtgtatattataatca

SEQ ID NO: 125499 - DNA, 25 bp, Homo sapien
taagccatctgtgatgatggacacc

SEQ ID NO: 125500 - DNA, 25 bp, Homo sapien
caacattataatgagccaggaaatc

SEQ ID NO: 125501 - DNA, 25 bp, Homo sapien
ctctccggtgacctgaatcccatgc

SEQ ID NO: 125502 - DNA, 25 bp, Homo sapien
tctccggtgacctgaatcccatgcc

SEQ ID NO: 125503 - DNA, 25 bp, Homo sapien
ctgacgtccattctcattcactctg

SEQ ID NO: 125504 - DNA, 25 bp, Homo sapien
ctgctgacgtccattctcattcact

SEQ ID NO: 125505 - DNA, 25 bp, Homo sapien
tctttgctttttagtttcagagccc

SEQ ID NO: 125506 - DNA, 25 bp, Homo sapien
tgctttttagtttcagagccctccc

SEQ ID NO: 125507 - DNA, 25 bp, Homo sapien
aagggcagtggtccaagatttttct

SEQ ID NO: 125508 - DNA, 25 bp, Homo sapien
tctgggccagttgggaaatctttgc

SEQ ID NO: 125509 - DNA, 25 bp, Homo sapien
tgagtgtgacttgcagccatcccct

SEQ ID NO: 125510 - DNA, 25 bp, Homo sapien
gggcattgaaatcttcactgtggcc

SEQ ID NO: 125511 - DNA, 25 bp, Homo sapien
tgtccccatgagtggttaattctga

SEQ ID NO: 125512 - DNA, 25 bp, Homo sapien
cacagttgggcattgaaatcttcac

SEQ ID NO: 125513 - DNA, 25 bp, Homo sapien
cccacaccacagttgggcattgaaa

SEQ ID NO: 125514 - DNA, 25 bp, Homo sapien
ggaatgatgttagcaatccccctct

SEQ ID NO: 125515 - DNA, 25 bp, Homo sapien
ttagcaatccccctctgtgtactgt

SEQ ID NO: 125516 - DNA, 25 bp, Homo sapien
gactctcatgatcaggagatagtat

SEQ ID NO: 125517 - DNA, 25 bp, Homo sapien
tgtctgtgttgaagactctcatgat

SEQ ID NO: 125518 - DNA, 25 bp, Homo sapien
gagatcatccaaacaaggatttcca

SEQ ID NO: 125519 - DNA, 25 bp, Homo sapien
tattgactgagatcatccaaacaag

SEQ ID NO: 125520 - DNA, 25 bp, Homo sapien
tgggttttgaccttgacgatattta

SEQ ID NO: 125521 - DNA, 25 bp, Homo sapien
gacgatatttattgactgagatcat

SEQ ID NO: 125522 - DNA, 25 bp, Homo sapien
gctgctcacgtgtgccctcctccag

SEQ ID NO: 125523 - DNA, 25 bp, Homo sapien
gttctccaagctgctcacgtgtgcc

SEQ ID NO: 125524 - DNA, 25 bp, Homo sapien
ccaagctgctcacgtgtgccctcct

SEQ ID NO: 125525 - DNA, 25 bp, Homo sapien
aagctgctcacgtgtgccctcctcc

SEQ ID NO: 125526 - DNA, 25 bp, Homo sapien
ggtattgggtggtgctctgccacac

SEQ ID NO: 125527 - DNA, 25 bp, Homo sapien
tattgggtggtgctctgccacactc

SEQ ID NO: 125528 - DNA, 25 bp, Homo sapien
gtattgggtggtgctctgccacact

SEQ ID NO: 125529 - DNA, 25 bp, Homo sapien
ttgggtggtgctctgccacactcag

SEQ ID NO: 125530 - DNA, 25 bp, Homo sapien
agcagtgtagcaggcaggcccgcca

SEQ ID NO: 125531 - DNA, 25 bp, Homo sapien
gaaagcgatgccttcagtgccagga

SEQ ID NO: 125532 - DNA, 25 bp, Homo sapien
tgtctaggttcaattagagccccag

SEQ ID NO: 125533 - DNA, 25 bp, Homo sapien
agaagagtgcggatgagaagcaagc

SEQ ID NO: 125534 - DNA, 25 bp, Homo sapien
aaggatagctctggacagccgaagg

SEQ ID NO: 125535 - DNA, 25 bp, Homo sapien
aaataaaggatagctctggacagcc

SEQ ID NO: 125536 - DNA, 25 bp, Homo sapien
cgaaggtgactctgtaaatctctct

SEQ ID NO: 125537 - DNA, 25 bp, Homo sapien
tctggacagccgaaggtgactctgt

SEQ ID NO: 125538 - DNA, 25 bp, Homo sapien
cagctggtctgctcaggttgtagaa

SEQ ID NO: 125539 - DNA, 25 bp, Homo sapien
tagaaaaactccacacaattggcta

SEQ ID NO: 125540 - DNA, 25 bp, Homo sapien
gaaggtggcagctcttgatccaata

SEQ ID NO: 125541 - DNA, 25 bp, Homo sapien
tccaatagtatcgatttgctacagc

SEQ ID NO: 125542 - DNA, 25 bp, Homo sapien
gggattggtttatttcactgctgaa

SEQ ID NO: 125543 - DNA, 25 bp, Homo sapien
ctacagaagggattggtttatttca

SEQ ID NO: 125544 - DNA, 25 bp, Homo sapien
aagggattggtttatttcactgctg

SEQ ID NO: 125545 - DNA, 25 bp, Homo sapien
cagaagggattggtttatttcactg

SEQ ID NO: 125546 - DNA, 25 bp, Homo sapien
ttaagcagaagtcattgctactcac

SEQ ID NO: 125547 - DNA, 25 bp, Homo sapien
tgctactcacaatcattagactaaa

SEQ ID NO: 125548 - DNA, 25 bp, Homo sapien
tcattagactaaatcggtttctggg

SEQ ID NO: 125549 - DNA, 25 bp, Homo sapien
gcagaagtcattgctactcacaatc

SEQ ID NO: 125550 - DNA, 25 bp, Homo sapien
tagcttcttctaagccgtctgtgcc

SEQ ID NO: 125551 - DNA, 25 bp, Homo sapien
tgttgagagggagaaaaatagcttc

SEQ ID NO: 125552 - DNA, 25 bp, Homo sapien
gagaaaaatagcttcttctaagccg

SEQ ID NO: 125553 - DNA, 25 bp, Homo sapien
taagccgtctgtgccacttctgtat

SEQ ID NO: 125554 - DNA, 25 bp, Homo sapien
cctttgtaactcatgtggctgcaaa

SEQ ID NO: 125555 - DNA, 25 bp, Homo sapien
gggcaccctgcacctttgtaactca

SEQ ID NO: 125556 - DNA, 25 bp, Homo sapien
tcttagagtgctctccgggcaccct

SEQ ID NO: 125557 - DNA, 25 bp, Homo sapien
gaatcccatttgcagtacaaagaga

SEQ ID NO: 125558 - DNA, 25 bp, Homo sapien
cagctggtcatttttgtcacactca

SEQ ID NO: 125559 - DNA, 25 bp, Homo sapien
ggtcatttttgtcacactcacaccc

SEQ ID NO: 125560 - DNA, 25 bp, Homo sapien
ctgttgacaatactgtctgtacagt

SEQ ID NO: 125561 - DNA, 25 bp, Homo sapien
caatactgtctgtacagtcacttct

SEQ ID NO: 125562 - DNA, 25 bp, Homo sapien
tctgcagaaccagccttttatgaga

SEQ ID NO: 125563 - DNA, 25 bp, Homo sapien
aatttatgcgttttcagctcagtga

SEQ ID NO: 125564 - DNA, 25 bp, Homo sapien
tatttagtgcataaccacctgtgtg

SEQ ID NO: 125565 - DNA, 25 bp, Homo sapien
cccagggagaaaattgccttctctg

SEQ ID NO: 125566 - DNA, 25 bp, Homo sapien
ggagcacgttgtggctctcctgaca

SEQ ID NO: 125567 - DNA, 25 bp, Homo sapien
gaaagttaagcttgatgtggcctct

SEQ ID NO: 125568 - DNA, 25 bp, Homo sapien
tgtggcctcttggtcactctggagc

SEQ ID NO: 125569 - DNA, 25 bp, Homo sapien
tcagttgacatcagtggcatgggag

SEQ ID NO: 125570 - DNA, 25 bp, Homo sapien
cccaaagagggtggatgctccgcaa

SEQ ID NO: 125571 - DNA, 25 bp, Homo sapien
gatgctccgcaagtgagaaagggaa

SEQ ID NO: 125572 - DNA, 25 bp, Homo sapien
gcttgacagagcctgcaattccatc

SEQ ID NO: 125573 - DNA, 25 bp, Homo sapien
aattccatctaacaccttgacacct

SEQ ID NO: 125574 - DNA, 25 bp, Homo sapien
tgggatctgagtagtaccagctgga

SEQ ID NO: 125575 - DNA, 25 bp, Homo sapien
gaacgcttcaaaaggaatatcaggg

SEQ ID NO: 125576 - DNA, 25 bp, Homo sapien
tcatttgtggtagacttttccttgt

SEQ ID NO: 125577 - DNA, 25 bp, Homo sapien
ccttgttctatagtcaatgggatct

SEQ ID NO: 125578 - DNA, 25 bp, Homo sapien
catagattttcttggttgattgggc

SEQ ID NO: 125579 - DNA, 25 bp, Homo sapien
cccatagattttcttggttgattgg

SEQ ID NO: 125580 - DNA, 25 bp, Homo sapien
ttcttggttgattgggctgtgtttt

SEQ ID NO: 125581 - DNA, 25 bp, Homo sapien
gattttcttggttgattgggctgtg

SEQ ID NO: 125582 - DNA, 25 bp, Homo sapien
tttgcaccctattgattttcctgag

SEQ ID NO: 125583 - DNA, 25 bp, Homo sapien
gcaactgatttgcaccctattgatt

SEQ ID NO: 125584 - DNA, 25 bp, Homo sapien
gcttgagtgcaactgatttgcaccc

SEQ ID NO: 125585 - DNA, 25 bp, Homo sapien
ctgatttgcaccctattgattttcc

SEQ ID NO: 125586 - DNA, 25 bp, Homo sapien
cccagtaaggaatgagggttccaga

SEQ ID NO: 125587 - DNA, 25 bp, Homo sapien
ggaatgagggttccagatgaaaagt

SEQ ID NO: 125588 - DNA, 25 bp, Homo sapien
aaagttccataggtgccagcagacc

SEQ ID NO: 125589 - DNA, 25 bp, Homo sapien
atgaaaagttccataggtgccagca

SEQ ID NO: 125590 - DNA, 25 bp, Homo sapien
gatgcaggacttgacaggcaagtgt

SEQ ID NO: 125591 - DNA, 25 bp, Homo sapien
gaagatgtaactggatgcaggactt

SEQ ID NO: 125592 - DNA, 25 bp, Homo sapien
tgacactaattggtcccttggctgg

SEQ ID NO: 125593 - DNA, 25 bp, Homo sapien
cttggcacaacatgggaactggaca

SEQ ID NO: 125594 - DNA, 25 bp, Homo sapien
tgcaggactctttgctgacacttcc

SEQ ID NO: 125595 - DNA, 25 bp, Homo sapien
gaaaactcagaggatcctgctccca

SEQ ID NO: 125596 - DNA, 25 bp, Homo sapien
gctcccagacaatgttccctcatgt

SEQ ID NO: 125597 - DNA, 25 bp, Homo sapien
tactatcacattcagtaattgcagg

SEQ ID NO: 125598 - DNA, 25 bp, Homo sapien
gaggaagtcatggccatagccaaag

SEQ ID NO: 125599 - DNA, 25 bp, Homo sapien
agaggaagtcatggccatagccaaa

SEQ ID NO: 125600 - DNA, 25 bp, Homo sapien
cctccattataacctgcagctacct

SEQ ID NO: 125601 - DNA, 25 bp, Homo sapien
tccattataacctgcagctacctgg

SEQ ID NO: 125602 - DNA, 25 bp, Homo sapien
ctccattataacctgcagctacctg

SEQ ID NO: 125603 - DNA, 25 bp, Homo sapien
tcctccattataacctgcagctacc

SEQ ID NO: 125604 - DNA, 25 bp, Homo sapien
aaactatggtcaaagatttcttagg

SEQ ID NO: 125605 - DNA, 25 bp, Homo sapien
tttgacatggctaccttgatgcaag

SEQ ID NO: 125606 - DNA, 25 bp, Homo sapien
catggcatggctgcacaaaataatc

SEQ ID NO: 125607 - DNA, 25 bp, Homo sapien
agtctgttaaaggacttcctgggtg

SEQ ID NO: 125608 - DNA, 25 bp, Homo sapien
tgcttctgctcttagctcatctcct

SEQ ID NO: 125609 - DNA, 25 bp, Homo sapien
tctgcttctgctcttagctcatctc

SEQ ID NO: 125610 - DNA, 25 bp, Homo sapien
gctcctctgactattctgttgacca

SEQ ID NO: 125611 - DNA, 25 bp, Homo sapien
catgctcctctgactattctgttga

SEQ ID NO: 125612 - DNA, 25 bp, Homo sapien
tctggctgcccacatgtccagggac

SEQ ID NO: 125613 - DNA, 25 bp, Homo sapien
tggctgcccacatgtccagggactc

SEQ ID NO: 125614 - DNA, 25 bp, Homo sapien
ctctggctgcccacatgtccaggga

SEQ ID NO: 125615 - DNA, 25 bp, Homo sapien
tcctctggctgcccacatgtccagg

SEQ ID NO: 125616 - DNA, 25 bp, Homo sapien
ccagagcagggaggtagtagttcca

SEQ ID NO: 125617 - DNA, 25 bp, Homo sapien
tgcagatattctcttgagcctgtct

SEQ ID NO: 125618 - DNA, 25 bp, Homo sapien
gtagttccaggacatacgtttgcca

SEQ ID NO: 125619 - DNA, 25 bp, Homo sapien
tgcacccgtcttgttttgagtgatg

SEQ ID NO: 125620 - DNA, 25 bp, Homo sapien
atatgaggcttccccaggtcttcca

SEQ ID NO: 125621 - DNA, 25 bp, Homo sapien
aggtcttccagctgattctcagcct

SEQ ID NO: 125622 - DNA, 25 bp, Homo sapien
gtcttccagctgattctcagcctca

SEQ ID NO: 125623 - DNA, 25 bp, Homo sapien
atgaggcttccccaggtcttccagc

SEQ ID NO: 125624 - DNA, 25 bp, Homo sapien
ctttgcaatgcagctctcaccacat

SEQ ID NO: 125625 - DNA, 25 bp, Homo sapien
ctcaccacatggcaacttattctgc

SEQ ID NO: 125626 - DNA, 25 bp, Homo sapien
catggcaacttattctgccgtctcc

SEQ ID NO: 125627 - DNA, 25 bp, Homo sapien
ttgcaatgcagctctcaccacatgg

SEQ ID NO: 125628 - DNA, 25 bp, Homo sapien
ccttgaggccactgtctagctcttc

SEQ ID NO: 125629 - DNA, 25 bp, Homo sapien
ggagaccaccccttgaggccactgt

SEQ ID NO: 125630 - DNA, 25 bp, Homo sapien
acctggagaccaccccttgaggcca

SEQ ID NO: 125631 - DNA, 25 bp, Homo sapien
ctttggggttggcacctggagacca

SEQ ID NO: 125632 - DNA, 25 bp, Homo sapien
atttgtttctcggtcaaccatgaga

SEQ ID NO: 125633 - DNA, 25 bp, Homo sapien
ttttgtccgcaaaatgaagccgtga

SEQ ID NO: 125634 - DNA, 25 bp, Homo sapien
accatgagaccttttgtccgcaaaa

SEQ ID NO: 125635 - DNA, 25 bp, Homo sapien
ccgcaaaatgaagccgtgaaacact

SEQ ID NO: 125636 - DNA, 25 bp, Homo sapien
ttcctggagccttgatggtctctcc

SEQ ID NO: 125637 - DNA, 25 bp, Homo sapien
tcctggagccttgatggtctctcct

SEQ ID NO: 125638 - DNA, 25 bp, Homo sapien
tctttgatgaactgggtggccagcg

SEQ ID NO: 125639 - DNA, 25 bp, Homo sapien
tgctgccacccaggacctcttcttt

SEQ ID NO: 125640 - DNA, 25 bp, Homo sapien
tctctctcatgctccgccccagtgg

SEQ ID NO: 125641 - DNA, 25 bp, Homo sapien
cttttctattggggttgaggcctct

SEQ ID NO: 125642 - DNA, 25 bp, Homo sapien
ttttctattggggttgaggcctctc

SEQ ID NO: 125643 - DNA, 25 bp, Homo sapien
ccgccccagtgggaagcctgcgact

SEQ ID NO: 125644 - DNA, 25 bp, Homo sapien
ggtaaaacatctgttttgaatctga

SEQ ID NO: 125645 - DNA, 25 bp, Homo sapien
atctgaattgtgcccatttcacaga

SEQ ID NO: 125646 - DNA, 25 bp, Homo sapien
ttcctttctcctagcgcagaattgc

SEQ ID NO: 125647 - DNA, 25 bp, Homo sapien
tttctcctagcgcagaattgctcac

SEQ ID NO: 125648 - DNA, 25 bp, Homo sapien
cttttggatgtaattcactcatcag

SEQ ID NO: 125649 - DNA, 25 bp, Homo sapien
atcaggtaaaaaggactatctgttc

SEQ ID NO: 125650 - DNA, 25 bp, Homo sapien
tcaggtaaaaaggactatctgttcc

SEQ ID NO: 125651 - DNA, 25 bp, Homo sapien
gtaattcactcatcaggtaaaaagg

SEQ ID NO: 125652 - DNA, 25 bp, Homo sapien
cagcttcttatcacttaccagtctg

SEQ ID NO: 125653 - DNA, 25 bp, Homo sapien
cacttaccagtctgggcaggcttcc

SEQ ID NO: 125654 - DNA, 25 bp, Homo sapien
tcttatcacttaccagtctgggcag

SEQ ID NO: 125655 - DNA, 25 bp, Homo sapien
caagaagttcgcatagccccactga

SEQ ID NO: 125656 - DNA, 25 bp, Homo sapien
acaaggctggctgaatcaggttgtg

SEQ ID NO: 125657 - DNA, 25 bp, Homo sapien
ggagttacaaggctggctgaatcag

SEQ ID NO: 125658 - DNA, 25 bp, Homo sapien
ttctctggagttacaaggctggctg

SEQ ID NO: 125659 - DNA, 25 bp, Homo sapien
tctggagttacaaggctggctgaat

SEQ ID NO: 125660 - DNA, 25 bp, Homo sapien
tctgtagccaacctgaaccttcata

SEQ ID NO: 125661 - DNA, 25 bp, Homo sapien
taattccaatacgaagtcagctatg

SEQ ID NO: 125662 - DNA, 25 bp, Homo sapien
ggcactttgccttggagaccacata

SEQ ID NO: 125663 - DNA, 25 bp, Homo sapien
aaatgcggtgggaagtttgtctgcc

SEQ ID NO: 125664 - DNA, 25 bp, Homo sapien
ttaaggagagagggatgcctttggg

SEQ ID NO: 125665 - DNA, 25 bp, Homo sapien
gctccccaattctatagggctttaa

SEQ ID NO: 125666 - DNA, 25 bp, Homo sapien
gcccaggataatttctctgctggcc

SEQ ID NO: 125667 - DNA, 25 bp, Homo sapien
ctttggggtgaaagatgaatccaac

SEQ ID NO: 125668 - DNA, 25 bp, Homo sapien
ctgtgtttgtgtaccaggagagtac

SEQ ID NO: 125669 - DNA, 25 bp, Homo sapien
tgtttgtgtaccaggagagtaccaa

SEQ ID NO: 125670 - DNA, 25 bp, Homo sapien
tgtgtaccaggagagtaccaacttc

SEQ ID NO: 125671 - DNA, 25 bp, Homo sapien
tttgtgtaccaggagagtaccaact

SEQ ID NO: 125672 - DNA, 25 bp, Homo sapien
gatatcttcgggcaagggacctatg

SEQ ID NO: 125673 - DNA, 25 bp, Homo sapien
ggcaagggacctatgcagaagcact

SEQ ID NO: 125674 - DNA, 25 bp, Homo sapien
gacactcttggtccgggacccactg

SEQ ID NO: 125675 - DNA, 25 bp, Homo sapien
tgatgttgtactgcgcacatcttgg

SEQ ID NO: 125676 - DNA, 25 bp, Homo sapien
aggcaacaaaccattgtttccaatt

SEQ ID NO: 125677 - DNA, 25 bp, Homo sapien
aaggcaacaaaccattgtttccaat

SEQ ID NO: 125678 - DNA, 25 bp, Homo sapien
gcaacaaaccattgtttccaatttc

SEQ ID NO: 125679 - DNA, 25 bp, Homo sapien
tgctgactaccttttgttggacctc

SEQ ID NO: 125680 - DNA, 25 bp, Homo sapien
cctggttgccctgcaagtggttgcc

SEQ ID NO: 125681 - DNA, 25 bp, Homo sapien
tggttgccaatcctgctgctgacta

SEQ ID NO: 125682 - DNA, 25 bp, Homo sapien
gttcatgccactgaatactgcaaga

SEQ ID NO: 125683 - DNA, 25 bp, Homo sapien
caggtgattgtgagactgagtgttt

SEQ ID NO: 125684 - DNA, 25 bp, Homo sapien
gtctattacactgactgctgttgtg

SEQ ID NO: 125685 - DNA, 25 bp, Homo sapien
ttatgtagcagtctattacactgac

SEQ ID NO: 125686 - DNA, 25 bp, Homo sapien
tgtgagactgagtgtttatgtagca

SEQ ID NO: 125687 - DNA, 25 bp, Homo sapien
taagccgtaagcagctgtgtagtgg

SEQ ID NO: 125688 - DNA, 25 bp, Homo sapien
gttgatgccgttagaaatggttcgc

SEQ ID NO: 125689 - DNA, 25 bp, Homo sapien
tcaaaagtggttcattaagccgtaa

SEQ ID NO: 125690 - DNA, 25 bp, Homo sapien
tgtgtagtggcaccagagacttctg

SEQ ID NO: 125691 - DNA, 25 bp, Homo sapien
tccaatttcgcattaatgttaatga

SEQ ID NO: 125692 - DNA, 25 bp, Homo sapien
ttccaatttcgcattaatgttaatg

SEQ ID NO: 125693 - DNA, 25 bp, Homo sapien
caatttcgcattaatgttaatgatg

SEQ ID NO: 125694 - DNA, 25 bp, Homo sapien
cttccaatttcgcattaatgttaat

SEQ ID NO: 125695 - DNA, 25 bp, Homo sapien
tttgaaaattggcaaatcctgtggc

SEQ ID NO: 125696 - DNA, 25 bp, Homo sapien
caaatcctgtggcaaatggcagcac

SEQ ID NO: 125697 - DNA, 25 bp, Homo sapien
ggagtctcagatttagggaattttg

SEQ ID NO: 125698 - DNA, 25 bp, Homo sapien
tctggagtctcagatttagggaatt

SEQ ID NO: 125699 - DNA, 25 bp, Homo sapien
cagctaaaatctgctgaggtatgag

SEQ ID NO: 125700 - DNA, 25 bp, Homo sapien
taaaatctgctgaggtatgagatga

SEQ ID NO: 125701 - DNA, 25 bp, Homo sapien
atctgctgaggtatgagatgaaaga

SEQ ID NO: 125702 - DNA, 25 bp, Homo sapien
gctaaaatctgctgaggtatgagat

SEQ ID NO: 125703 - DNA, 25 bp, Homo sapien
agctagagcctctggttctctctgt

SEQ ID NO: 125704 - DNA, 25 bp, Homo sapien
tctctactgctaatttttgccccag

SEQ ID NO: 125705 - DNA, 25 bp, Homo sapien
ctttctctactgctaatttttgccc

SEQ ID NO: 125706 - DNA, 25 bp, Homo sapien
ttctctactgctaatttttgcccca

SEQ ID NO: 125707 - DNA, 25 bp, Homo sapien
cagggtaccgagcaaactcctctgg

SEQ ID NO: 125708 - DNA, 25 bp, Homo sapien
cttgccagggtaccgagcaaactcc

SEQ ID NO: 125709 - DNA, 25 bp, Homo sapien
gccagggtaccgagcaaactcctct

SEQ ID NO: 125710 - DNA, 25 bp, Homo sapien
tgacttgccagggtaccgagcaaac

SEQ ID NO: 125711 - DNA, 25 bp, Homo sapien
cagtgccataatcggctgtctccac

SEQ ID NO: 125712 - DNA, 25 bp, Homo sapien
tcctcagtgccataatcggctgtct

SEQ ID NO: 125713 - DNA, 25 bp, Homo sapien
tgccataatcggctgtctccaccat

SEQ ID NO: 125714 - DNA, 25 bp, Homo sapien
tcagtgccataatcggctgtctcca

SEQ ID NO: 125715 - DNA, 25 bp, Homo sapien
ggtagacaatcttgaaagatagaaa

SEQ ID NO: 125716 - DNA, 25 bp, Homo sapien
gaaggtagacaatcttgaaagatag

SEQ ID NO: 125717 - DNA, 25 bp, Homo sapien
ctgaattgaaggtagacaatcttga

SEQ ID NO: 125718 - DNA, 25 bp, Homo sapien
gaattgaaggtagacaatcttgaaa

SEQ ID NO: 125719 - DNA, 25 bp, Homo sapien
ggctgaaggaccgtcagttgaagtc

SEQ ID NO: 125720 - DNA, 25 bp, Homo sapien
aggaccgtcagttgaagtctgagct

SEQ ID NO: 125721 - DNA, 25 bp, Homo sapien
gaaggaccgtcagttgaagtctgag

SEQ ID NO: 125722 - DNA, 25 bp, Homo sapien
tgaaggaccgtcagttgaagtctga

SEQ ID NO: 125723 - DNA, 25 bp, Homo sapien
ttgagcttggattccccaactacac

SEQ ID NO: 125724 - DNA, 25 bp, Homo sapien
gcttggattccccaactacaccaga

SEQ ID NO: 125725 - DNA, 25 bp, Homo sapien
actacaccagagatactcgtacaga

SEQ ID NO: 125726 - DNA, 25 bp, Homo sapien
acaccagagatactcgtacagaggg

SEQ ID NO: 125727 - DNA, 25 bp, Homo sapien
tctaagaataaagaggccttcctga

SEQ ID NO: 125728 - DNA, 25 bp, Homo sapien
tctatccagttaagtcattattttt

SEQ ID NO: 125729 - DNA, 25 bp, Homo sapien
gccttcctgaaaatatgtgcctttt

SEQ ID NO: 125730 - DNA, 25 bp, Homo sapien
ttttttctatccagttaagtcatta

SEQ ID NO: 125731 - DNA, 25 bp, Homo sapien
agatcctgaagagtttgcaccactt

SEQ ID NO: 125732 - DNA, 25 bp, Homo sapien
gatcctgaagagtttgcaccacttg

SEQ ID NO: 125733 - DNA, 25 bp, Homo sapien
tcctgaagagtttgcaccacttgtc

SEQ ID NO: 125734 - DNA, 25 bp, Homo sapien
ctgaagagtttgcaccacttgtcat

SEQ ID NO: 125735 - DNA, 25 bp, Homo sapien
tccaagttagacattaacttttgaa

SEQ ID NO: 125736 - DNA, 25 bp, Homo sapien
taagtcctcattcaattccttcaag

SEQ ID NO: 125737 - DNA, 25 bp, Homo sapien
ttccttcaagtagttgtcatctatt

SEQ ID NO: 125738 - DNA, 25 bp, Homo sapien
gtttttatcttctagaggtttgagc

SEQ ID NO: 125739 - DNA, 25 bp, Homo sapien
ctctgcttccttaaggagctccatg

SEQ ID NO: 125740 - DNA, 25 bp, Homo sapien
tccctgccatgatctgtctcatgat

SEQ ID NO: 125741 - DNA, 25 bp, Homo sapien
cctgccatgatctgtctcatgatct

SEQ ID NO: 125742 - DNA, 25 bp, Homo sapien
gctccatgaccgaggattcctcaca

SEQ ID NO: 125743 - DNA, 25 bp, Homo sapien
ctccatttccttccgaagcatcttg

SEQ ID NO: 125744 - DNA, 25 bp, Homo sapien
tgttccatagcatctccatttcctt

SEQ ID NO: 125745 - DNA, 25 bp, Homo sapien
tccttccgaagcatcttgtttttcc

SEQ ID NO: 125746 - DNA, 25 bp, Homo sapien
cttgttccatagcatctccatttcc

SEQ ID NO: 125747 - DNA, 25 bp, Homo sapien
gaggatgccctactttagatggagc

SEQ ID NO: 125748 - DNA, 25 bp, Homo sapien
ggagctatagatttggacaaagcaa

SEQ ID NO: 125749 - DNA, 25 bp, Homo sapien
gctattgagcacataagcagagtta

SEQ ID NO: 125750 - DNA, 25 bp, Homo sapien
tctactatgttccaagcattgtgct

SEQ ID NO: 125751 - DNA, 25 bp, Homo sapien
tgtggaaagacattttggcaaagct

SEQ ID NO: 125752 - DNA, 25 bp, Homo sapien
gagttgagaatgtaatgagcccttc

SEQ ID NO: 125753 - DNA, 25 bp, Homo sapien
gggcctggcatgaaaagtgtactac

SEQ ID NO: 125754 - DNA, 25 bp, Homo sapien
tgggtcaaggttttggttcctgcca

SEQ ID NO: 125755 - DNA, 25 bp, Homo sapien
gtgctttttgttgatcactaagttc

SEQ ID NO: 125756 - DNA, 25 bp, Homo sapien
tggtgctttttgttgatcactaagt

SEQ ID NO: 125757 - DNA, 25 bp, Homo sapien
tgtggtgctttttgttgatcactaa

SEQ ID NO: 125758 - DNA, 25 bp, Homo sapien
tctgtggtgctttttgttgatcact

SEQ ID NO: 125759 - DNA, 25 bp, Homo sapien
ttttaagtacatgcagtccacttgc

SEQ ID NO: 125760 - DNA, 25 bp, Homo sapien
ctgtgtgacatcgacaatcttgaaa

SEQ ID NO: 125761 - DNA, 25 bp, Homo sapien
tgtgtgacatcgacaatcttgaaat

SEQ ID NO: 125762 - DNA, 25 bp, Homo sapien
gtgtgacatcgacaatcttgaaatt

SEQ ID NO: 125763 - DNA, 25 bp, Homo sapien
tctccagttcactctcagtcttcct

SEQ ID NO: 125764 - DNA, 25 bp, Homo sapien
actttctctgcaaatgatttctcca

SEQ ID NO: 125765 - DNA, 25 bp, Homo sapien
ttcactttctctgcaaatgatttct

SEQ ID NO: 125766 - DNA, 25 bp, Homo sapien
tcttcctaggtgatgagggggattt

SEQ ID NO: 125767 - DNA, 25 bp, Homo sapien
ctgatacttgacccattccattttc

SEQ ID NO: 125768 - DNA, 25 bp, Homo sapien
tcctgatacttgacccattccattt

SEQ ID NO: 125769 - DNA, 25 bp, Homo sapien
ttcctgatacttgacccattccatt

SEQ ID NO: 125770 - DNA, 25 bp, Homo sapien
cctgatacttgacccattccatttt

SEQ ID NO: 125771 - DNA, 25 bp, Homo sapien
agttcttcaaggcttcaattctcag

SEQ ID NO: 125772 - DNA, 25 bp, Homo sapien
tcattggccttctggtagttcttca

SEQ ID NO: 125773 - DNA, 25 bp, Homo sapien
gctcaatcactttgccatgaaaatc

SEQ ID NO: 125774 - DNA, 25 bp, Homo sapien
caaatacagtgataatttcaggtca

SEQ ID NO: 125775 - DNA, 25 bp, Homo sapien
cttctgctttgaagtagcagagtct

SEQ ID NO: 125776 - DNA, 25 bp, Homo sapien
taaccttaggagtatgcttcttcac

SEQ ID NO: 125777 - DNA, 25 bp, Homo sapien
ccacctactgggctaaatgcagagt

SEQ ID NO: 125778 - DNA, 25 bp, Homo sapien
ggttcctgaattaccactctgtgga

SEQ ID NO: 125779 - DNA, 25 bp, Homo sapien
tatagcgtttagatctagaagaggc

SEQ ID NO: 125780 - DNA, 25 bp, Homo sapien
gaatcaaatgtcttaacacaagtta

SEQ ID NO: 125781 - DNA, 25 bp, Homo sapien
cagaatcaaatgtcttaacacaagt

SEQ ID NO: 125782 - DNA, 25 bp, Homo sapien
atcagaatcaaatgtcttaacacaa

SEQ ID NO: 125783 - DNA, 25 bp, Homo sapien
tcaaatgtcttaacacaagttatat

SEQ ID NO: 125784 - DNA, 25 bp, Homo sapien
ccaacgttcaggtttttctcagaag

SEQ ID NO: 125785 - DNA, 25 bp, Homo sapien
gtagtcactctgtccatagttgtaa

SEQ ID NO: 125786 - DNA, 25 bp, Homo sapien
cactctgtccatagttgtaatgccc

SEQ ID NO: 125787 - DNA, 25 bp, Homo sapien
gtcactctgtccatagttgtaatgc

SEQ ID NO: 125788 - DNA, 25 bp, Homo sapien
tagtcactctgtccatagttgtaat

SEQ ID NO: 125789 - DNA, 25 bp, Homo sapien
tatcaagctgacttcctttagttcc

SEQ ID NO: 125790 - DNA, 25 bp, Homo sapien
cagaaaaaagagtctccctcctgta

SEQ ID NO: 125791 - DNA, 25 bp, Homo sapien
ttcagtgcttcatctggcaatgacc

SEQ ID NO: 125792 - DNA, 25 bp, Homo sapien
gcttcatctggcaatgacctcagaa

SEQ ID NO: 125793 - DNA, 25 bp, Homo sapien
ggtgcgagagattttaattaacaca

SEQ ID NO: 125794 - DNA, 25 bp, Homo sapien
ctttaaatctgtccaaagcaaatgg

SEQ ID NO: 125795 - DNA, 25 bp, Homo sapien
ccaaagcaaatggagcgaaagcctg

SEQ ID NO: 125796 - DNA, 25 bp, Homo sapien
aatggctgtgcctagtctttaaatc

SEQ ID NO: 125797 - DNA, 25 bp, Homo sapien
gacgatcctcacgtgcgaaactgag

SEQ ID NO: 125798 - DNA, 25 bp, Homo sapien
tggctactatgacagagaggccgcc

SEQ ID NO: 125799 - DNA, 25 bp, Homo sapien
catgagtggcagaacggtggctact

SEQ ID NO: 125800 - DNA, 25 bp, Homo sapien
tcttgcaaccctcgggaatggccgg

SEQ ID NO: 125801 - DNA, 25 bp, Homo sapien
acccctaggcgtggaactcgtggag

SEQ ID NO: 125802 - DNA, 25 bp, Homo sapien
gaggagtgagagctcgggtgctgag

SEQ ID NO: 125803 - DNA, 25 bp, Homo sapien
ggacaagggcggagctacaccccta

SEQ ID NO: 125804 - DNA, 25 bp, Homo sapien
ctcgggtgctgagtattgggagcgg

SEQ ID NO: 125805 - DNA, 25 bp, Homo sapien
ctcgccgaggagagcgcgacagcta

SEQ ID NO: 125806 - DNA, 25 bp, Homo sapien
gaacgctctgcggagcgcgagaccc

SEQ ID NO: 125807 - DNA, 25 bp, Homo sapien
caagtccggcaagaaggaggcaagc

SEQ ID NO: 125808 - DNA, 25 bp, Homo sapien
caaggcagctagatggcaggactga

SEQ ID NO: 125809 - DNA, 25 bp, Homo sapien
ttcccagcgcagtcaccgcactgac

SEQ ID NO: 125810 - DNA, 25 bp, Homo sapien
agtcaccgcactgacaggagccggg

SEQ ID NO: 125811 - DNA, 25 bp, Homo sapien
gcgcagtcaccgcactgacaggagc

SEQ ID NO: 125812 - DNA, 25 bp, Homo sapien
gacaggagccgggagaaaccggagc

SEQ ID NO: 125813 - DNA, 25 bp, Homo sapien
tgtaaggactccgacacggatttga

SEQ ID NO: 125814 - DNA, 25 bp, Homo sapien
cggatttgatggtcgtggttagtaa

SEQ ID NO: 125815 - DNA, 25 bp, Homo sapien
gtcgtggttagtaaggatcattccc

SEQ ID NO: 125816 - DNA, 25 bp, Homo sapien
gtaaggatcattccctcggtcgcca

SEQ ID NO: 125817 - DNA, 25 bp, Homo sapien
tattaaccaaattcagcgcaacgga

SEQ ID NO: 125818 - DNA, 25 bp, Homo sapien
gccgatcgccgaagtgacggatatt

SEQ ID NO: 125819 - DNA, 25 bp, Homo sapien
tcatcttggaagtcatgccctgcag

SEQ ID NO: 125820 - DNA, 25 bp, Homo sapien
gcagaaacccctacaaatccgcttg

SEQ ID NO: 125821 - DNA, 25 bp, Homo sapien
ccatattagactgtagggacaccag

SEQ ID NO: 125822 - DNA, 25 bp, Homo sapien
gtctgtacaacacctatctgctatg

SEQ ID NO: 125823 - DNA, 25 bp, Homo sapien
taagggctgcatctttcaaagcagt

SEQ ID NO: 125824 - DNA, 25 bp, Homo sapien
tctgctatgtcacttcacaaaggta

SEQ ID NO: 125825 - DNA, 25 bp, Homo sapien
tatttcaaactagaccttaggtcac

SEQ ID NO: 125826 - DNA, 25 bp, Homo sapien
caacataagacagtttcgaacaaag

SEQ ID NO: 125827 - DNA, 25 bp, Homo sapien
tgagcctgctatgtaactggtaaga

SEQ ID NO: 125828 - DNA, 25 bp, Homo sapien
catattccagatatagtgagcctgc

SEQ ID NO: 125829 - DNA, 25 bp, Homo sapien
tggctcactacaatctctgcctcag

SEQ ID NO: 125830 - DNA, 25 bp, Homo sapien
ctacaatctctgcctcaggggttca

SEQ ID NO: 125831 - DNA, 25 bp, Homo sapien
gctcactacaatctctgcctcaggg

SEQ ID NO: 125832 - DNA, 25 bp, Homo sapien
tcactacaatctctgcctcaggggt

SEQ ID NO: 125833 - DNA, 25 bp, Homo sapien
tgatctgagtgttaattgtaagagt

SEQ ID NO: 125834 - DNA, 25 bp, Homo sapien
caggagaagtggatattagttaacc

SEQ ID NO: 125835 - DNA, 25 bp, Homo sapien
ataattacttgggagtgacaggaga

SEQ ID NO: 125836 - DNA, 25 bp, Homo sapien
caggaaagactaatctatgataata

SEQ ID NO: 125837 - DNA, 25 bp, Homo sapien
gacaaagtttaccacctattcatga

SEQ ID NO: 125838 - DNA, 25 bp, Homo sapien
gaagccttggccattgcaataaggg

SEQ ID NO: 125839 - DNA, 25 bp, Homo sapien
tcacagaattaaggatacaaccata

SEQ ID NO: 125840 - DNA, 25 bp, Homo sapien
cccctaagtttaggagtgagactat

SEQ ID NO: 125841 - DNA, 25 bp, Homo sapien
cattagaaagggtacacatgtggat

SEQ ID NO: 125842 - DNA, 25 bp, Homo sapien
tcctggatggtagcaaagaactgta

SEQ ID NO: 125843 - DNA, 25 bp, Homo sapien
taaacacccaaagtatggatgggac

SEQ ID NO: 125844 - DNA, 25 bp, Homo sapien
tgcctcaaagagactggcactacaa

SEQ ID NO: 125845 - DNA, 25 bp, Homo sapien
gggacaaaccgcaaaaaacacatga

SEQ ID NO: 125846 - DNA, 25 bp, Homo sapien
gggctaatctcaaaacctctaaaga

SEQ ID NO: 125847 - DNA, 25 bp, Homo sapien
catgcagtagtctgaaaactagaaa

SEQ ID NO: 125848 - DNA, 25 bp, Homo sapien
gaaatctccctcagtattacagtgc

SEQ ID NO: 125849 - DNA, 25 bp, Homo sapien
gatatgtggagcacgagcagagcca

SEQ ID NO: 125850 - DNA, 25 bp, Homo sapien
gattggcccagacagaaagactcca

SEQ ID NO: 125851 - DNA, 25 bp, Homo sapien
gtaactgacagcactcccataagag

SEQ ID NO: 125852 - DNA, 25 bp, Homo sapien
gccactgtgtattcctgccaaatca

SEQ ID NO: 125853 - DNA, 25 bp, Homo sapien
taagcgtagccagttggagaactct

SEQ ID NO: 125854 - DNA, 25 bp, Homo sapien
tggcaaagcaagaactaagcgtagc

SEQ ID NO: 125855 - DNA, 25 bp, Homo sapien
caataagaaggtttcagtcctgaac

SEQ ID NO: 125856 - DNA, 25 bp, Homo sapien
acattatagtaagcgtgggactacc

SEQ ID NO: 125857 - DNA, 25 bp, Homo sapien
tctgaaccactaagaattgctctga

SEQ ID NO: 125858 - DNA, 25 bp, Homo sapien
cacatttctctgcagatcgatctcc

SEQ ID NO: 125859 - DNA, 25 bp, Homo sapien
tttgttctaacagggagtctagtta

SEQ ID NO: 125860 - DNA, 25 bp, Homo sapien
aacccacttgaacctctattgtgaa

SEQ ID NO: 125861 - DNA, 25 bp, Homo sapien
tgtgtagtaggaggtagacacagga

SEQ ID NO: 125862 - DNA, 25 bp, Homo sapien
gtgtagtaggaggtagacacaggag

SEQ ID NO: 125863 - DNA, 25 bp, Homo sapien
cagggagacatcatgtatgggagaa

SEQ ID NO: 125864 - DNA, 25 bp, Homo sapien
gggtgaaggctatcgacctagaatt

SEQ ID NO: 125865 - DNA, 25 bp, Homo sapien
gaagtttagccaatcccaaacagga

SEQ ID NO: 125866 - DNA, 25 bp, Homo sapien
ctgggaaacaacaacgaaactcttg

SEQ ID NO: 125867 - DNA, 25 bp, Homo sapien
tctttcaaaaggcagcgtgggttgc

SEQ ID NO: 125868 - DNA, 25 bp, Homo sapien
caatttaggcaaatatgtgtccata

SEQ ID NO: 125869 - DNA, 25 bp, Homo sapien
taccatacgccacacattgtgatag

SEQ ID NO: 125870 - DNA, 25 bp, Homo sapien
gggcaatcataggacacattcatta

SEQ ID NO: 125871 - DNA, 25 bp, Homo sapien
caaaactttagttacccatcacata

SEQ ID NO: 125872 - DNA, 25 bp, Homo sapien
agaatacatccccattgctaagcaa

SEQ ID NO: 125873 - DNA, 25 bp, Homo sapien
caaagactgcacatgaaacacataa

SEQ ID NO: 125874 - DNA, 25 bp, Homo sapien
cagataagttagtgttctcctaaga

SEQ ID NO: 125875 - DNA, 25 bp, Homo sapien
taacatagcacattccagggatttc

SEQ ID NO: 125876 - DNA, 25 bp, Homo sapien
gatatcactgagactttggttgaca

SEQ ID NO: 125877 - DNA, 25 bp, Homo sapien
tctgtctaaaataggattcctgtcc

SEQ ID NO: 125878 - DNA, 25 bp, Homo sapien
tgggagagacattgtaggccatatg

SEQ ID NO: 125879 - DNA, 25 bp, Homo sapien
cataactggagacctttgagcttcc

SEQ ID NO: 125880 - DNA, 25 bp, Homo sapien
tagcattgtttcagctgaacataac

SEQ ID NO: 125881 - DNA, 25 bp, Homo sapien
tctaatgatagccataatggagttc

SEQ ID NO: 125882 - DNA, 25 bp, Homo sapien
taacgcttctgagagttttactaag

SEQ ID NO: 125883 - DNA, 25 bp, Homo sapien
agggacaactttatggttcctggtg

SEQ ID NO: 125884 - DNA, 25 bp, Homo sapien
ttctgagggacaactttatggttcc

SEQ ID NO: 125885 - DNA, 25 bp, Homo sapien
cttcatttctgagggacaactttat

SEQ ID NO: 125886 - DNA, 25 bp, Homo sapien
tcatattaccaattaccatcctttt

SEQ ID NO: 125887 - DNA, 25 bp, Homo sapien
tcattcttcagatttattaacattt

SEQ ID NO: 125888 - DNA, 25 bp, Homo sapien
tactaaagtctactacactatattg

SEQ ID NO: 125889 - DNA, 25 bp, Homo sapien
gtctactacactatattgcagtcta

SEQ ID NO: 125890 - DNA, 25 bp, Homo sapien
cattatttaaagaggcatactaaag

SEQ ID NO: 125891 - DNA, 25 bp, Homo sapien
tgtgaaaccatcaagtcctgaactt

SEQ ID NO: 125892 - DNA, 25 bp, Homo sapien
gaggttcagcattagactgttttag

SEQ ID NO: 125893 - DNA, 25 bp, Homo sapien
tggtagttgtacatttccaggatct

SEQ ID NO: 125894 - DNA, 25 bp, Homo sapien
gtggtatctcctgtattgcctactc

SEQ ID NO: 125895 - DNA, 25 bp, Homo sapien
gctggttcctcctcaacttcgtgga

SEQ ID NO: 125896 - DNA, 25 bp, Homo sapien
tctcctacagttctttatagtaatg

SEQ ID NO: 125897 - DNA, 25 bp, Homo sapien
tgaaggtctgctctagtttgctgga

SEQ ID NO: 125898 - DNA, 25 bp, Homo sapien
tgtaggatttctactgagagatcca

SEQ ID NO: 125899 - DNA, 25 bp, Homo sapien
atgaaggctcttgaattttatcgga

SEQ ID NO: 125900 - DNA, 25 bp, Homo sapien
cgttgcttcggtttacataatggat

SEQ ID NO: 125901 - DNA, 25 bp, Homo sapien
catgtggttttcatcgttgcttcgg

SEQ ID NO: 125902 - DNA, 25 bp, Homo sapien
gagtagagatgtttatatcattctc

SEQ ID NO: 125903 - DNA, 25 bp, Homo sapien
gcctctttccacctctttattttgc

SEQ ID NO: 125904 - DNA, 25 bp, Homo sapien
gatgctttgatacctgtagaatggc

SEQ ID NO: 125905 - DNA, 25 bp, Homo sapien
gtggaggtgaaagcaagtgcatctt

SEQ ID NO: 125906 - DNA, 25 bp, Homo sapien
taagaccactggattcactaaatat

SEQ ID NO: 125907 - DNA, 25 bp, Homo sapien
taaagtgcttactctgataggctaa

SEQ ID NO: 125908 - DNA, 25 bp, Homo sapien
aacagaagtatagttgcaaggtaca

SEQ ID NO: 125909 - DNA, 25 bp, Homo sapien
cattccccaagacctaaattaagag

SEQ ID NO: 125910 - DNA, 25 bp, Homo sapien
gattccttcattacaactacaactg

SEQ ID NO: 125911 - DNA, 25 bp, Homo sapien
gaaatcttgttctggtacctcttac

SEQ ID NO: 125912 - DNA, 25 bp, Homo sapien
ggatttaggcggcaatactgtattg

SEQ ID NO: 125913 - DNA, 25 bp, Homo sapien
tacctcttactcgtttgatctggga

SEQ ID NO: 125914 - DNA, 25 bp, Homo sapien
ggctttggagtaagttagacctgaa

SEQ ID NO: 125915 - DNA, 25 bp, Homo sapien
ggtccttgtacttcttccataaagc

SEQ ID NO: 125916 - DNA, 25 bp, Homo sapien
ccttgtacttcttccataaagccat

SEQ ID NO: 125917 - DNA, 25 bp, Homo sapien
taagggtccttgtacttcttccata

SEQ ID NO: 125918 - DNA, 25 bp, Homo sapien
tccttgtacttcttccataaagcca

SEQ ID NO: 125919 - DNA, 25 bp, Homo sapien
tatagtgaccatctcgtaccacggc

SEQ ID NO: 125920 - DNA, 25 bp, Homo sapien
aacaagtgcaggcttgaccagcagc

SEQ ID NO: 125921 - DNA, 25 bp, Homo sapien
taggcatcaacatgagtgacccagc

SEQ ID NO: 125922 - DNA, 25 bp, Homo sapien
aaacaggcacttactctaggcatca

SEQ ID NO: 125923 - DNA, 25 bp, Homo sapien
gaatctgagcacgaaatcataaaag

SEQ ID NO: 125924 - DNA, 25 bp, Homo sapien
atactgtgtgataaggtccttcctg

SEQ ID NO: 125925 - DNA, 25 bp, Homo sapien
tcagtatttgtccacttaggaacca

SEQ ID NO: 125926 - DNA, 25 bp, Homo sapien
ttttgccattaacattagagccctg

SEQ ID NO: 125927 - DNA, 25 bp, Homo sapien
tatcatttttgcaccaccgttacgt

SEQ ID NO: 125928 - DNA, 25 bp, Homo sapien
gactgcttggctgagtggaaactgc

SEQ ID NO: 125929 - DNA, 25 bp, Homo sapien
ctattgatggttggtactactgaca

SEQ ID NO: 125930 - DNA, 25 bp, Homo sapien
tatcctgagaaacccactgtaagtg

SEQ ID NO: 125931 - DNA, 25 bp, Homo sapien
actcatctggataaatgtaattaga

SEQ ID NO: 125932 - DNA, 25 bp, Homo sapien
gatgtaccaacctggagacaggctg

SEQ ID NO: 125933 - DNA, 25 bp, Homo sapien
caggctgagatgttgttgtgatgta

SEQ ID NO: 125934 - DNA, 25 bp, Homo sapien
tatccaggtaatgcttgcttccaga

SEQ ID NO: 125935 - DNA, 25 bp, Homo sapien
gttctcaacaggtcacggactgcta

SEQ ID NO: 125936 - DNA, 25 bp, Homo sapien
ttaaagcgttaccaccagatgcagc

SEQ ID NO: 125937 - DNA, 25 bp, Homo sapien
tctgatctaacagaaggcagggctc

SEQ ID NO: 125938 - DNA, 25 bp, Homo sapien
gcttgacgtcagatgcagcttgcca

SEQ ID NO: 125939 - DNA, 25 bp, Homo sapien
gacttgctgcaacttttaaatcacc

SEQ ID NO: 125940 - DNA, 25 bp, Homo sapien
taagggacctatgatttacaaaatg

SEQ ID NO: 125941 - DNA, 25 bp, Homo sapien
tgagtcagcctaagctttgaagcca

SEQ ID NO: 125942 - DNA, 25 bp, Homo sapien
gattttagctagattatggatgact

SEQ ID NO: 125943 - DNA, 25 bp, Homo sapien
tgctgcatttactcgtccctttcgt

SEQ ID NO: 125944 - DNA, 25 bp, Homo sapien
tgtgaacccacatcctatatccagt

SEQ ID NO: 125945 - DNA, 25 bp, Homo sapien
gtaggttctcttgtatccatgttgc

SEQ ID NO: 125946 - DNA, 25 bp, Homo sapien
ctctgtaagagccacacaccatagc

SEQ ID NO: 125947 - DNA, 25 bp, Homo sapien
ttgctggcccaaacaaccaggtggt

SEQ ID NO: 125948 - DNA, 25 bp, Homo sapien
gcagtctagccacacttttataaag

SEQ ID NO: 125949 - DNA, 25 bp, Homo sapien
tgctctagtccctagtcgccttagg

SEQ ID NO: 125950 - DNA, 25 bp, Homo sapien
tcacccagtcaggaagagtgggatc

SEQ ID NO: 125951 - DNA, 25 bp, Homo sapien
tacttggaattacattatgaacttc

SEQ ID NO: 125952 - DNA, 25 bp, Homo sapien
gttgttttcttcagcgctatcaggt

SEQ ID NO: 125953 - DNA, 25 bp, Homo sapien
tcctgaaatcgaatgttggtctgtc

SEQ ID NO: 125954 - DNA, 25 bp, Homo sapien
tctctattcctgtatgcctgtctta

SEQ ID NO: 125955 - DNA, 25 bp, Homo sapien
gcttgtattcctgtggggacaatcg

SEQ ID NO: 125956 - DNA, 25 bp, Homo sapien
tcacttttggtagggtgtatatgtc

SEQ ID NO: 125957 - DNA, 25 bp, Homo sapien
gggacaatcgtaatatccaccttat

SEQ ID NO: 125958 - DNA, 25 bp, Homo sapien
ttctagttgatacagatagaggtgt

SEQ ID NO: 125959 - DNA, 25 bp, Homo sapien
tatcccactgcggtcttctgcaaga

SEQ ID NO: 125960 - DNA, 25 bp, Homo sapien
acgagatctttgagatttatcccac

SEQ ID NO: 125961 - DNA, 25 bp, Homo sapien
gaaggatcttgtacgagatctttga

SEQ ID NO: 125962 - DNA, 25 bp, Homo sapien
agattcctgaagcaactatcactca

SEQ ID NO: 125963 - DNA, 25 bp, Homo sapien
tccttcggcatagcttcttcattat

SEQ ID NO: 125964 - DNA, 25 bp, Homo sapien
ccttcggcatagcttcttcattatt

SEQ ID NO: 125965 - DNA, 25 bp, Homo sapien
catccttcggcatagcttcttcatt

SEQ ID NO: 125966 - DNA, 25 bp, Homo sapien
aacatccttcggcatagcttcttca

SEQ ID NO: 125967 - DNA, 25 bp, Homo sapien
tcttgatagtgtcattggtccttac

SEQ ID NO: 125968 - DNA, 25 bp, Homo sapien
tacgctattattccaacgggcttcc

SEQ ID NO: 125969 - DNA, 25 bp, Homo sapien
ctttttaaacgctgaagtcccatat

SEQ ID NO: 125970 - DNA, 25 bp, Homo sapien
gctccatagggtcatttatgctcct

SEQ ID NO: 125971 - DNA, 25 bp, Homo sapien
tctgtgacttcattaaggaaagaca

SEQ ID NO: 125972 - DNA, 25 bp, Homo sapien
aaattatgtgccagtctgaggagta

SEQ ID NO: 125973 - DNA, 25 bp, Homo sapien
ccaaggtcaactgtgatctgaaata

SEQ ID NO: 125974 - DNA, 25 bp, Homo sapien
cccagcaatgagaatagagtagtct

SEQ ID NO: 125975 - DNA, 25 bp, Homo sapien
gataatgtgactgcccaaactgaga

SEQ ID NO: 125976 - DNA, 25 bp, Homo sapien
tgaattttggctacagaacgactgc

SEQ ID NO: 125977 - DNA, 25 bp, Homo sapien
tctgaagaaagaggaccgctcctgc

SEQ ID NO: 125978 - DNA, 25 bp, Homo sapien
tctgactgggatgaacagagcagcg

SEQ ID NO: 125979 - DNA, 25 bp, Homo sapien
catcaataaggcaagagtgcagcgg

SEQ ID NO: 125980 - DNA, 25 bp, Homo sapien
tgcaaaattagatatgatggtcagc

SEQ ID NO: 125981 - DNA, 25 bp, Homo sapien
cagctttaagaaactaaggttgact

SEQ ID NO: 125982 - DNA, 25 bp, Homo sapien
gctcaagctatccacttgcgttgga

SEQ ID NO: 125983 - DNA, 25 bp, Homo sapien
cagcaaaactgggtgactatagtca

SEQ ID NO: 125984 - DNA, 25 bp, Homo sapien
gagccaaggaccttaacaaacacat

SEQ ID NO: 125985 - DNA, 25 bp, Homo sapien
tacacagacctactatatgctcaca

SEQ ID NO: 125986 - DNA, 25 bp, Homo sapien
cactgtgaagggaacgaaaagacaa

SEQ ID NO: 125987 - DNA, 25 bp, Homo sapien
attgtggatgaacatcatgctgtgg

SEQ ID NO: 125988 - DNA, 25 bp, Homo sapien
cattgtggatgaacatcatgctgtg

SEQ ID NO: 125989 - DNA, 25 bp, Homo sapien
tgcgaggattatgcttctttttaac

SEQ ID NO: 125990 - DNA, 25 bp, Homo sapien
aacatttagatttacaaaatctgaa

SEQ ID NO: 125991 - DNA, 25 bp, Homo sapien
tttgcgaggattatgcttcttttta

SEQ ID NO: 125992 - DNA, 25 bp, Homo sapien
cgaggattatgcttctttttaacgt

SEQ ID NO: 125993 - DNA, 25 bp, Homo sapien
gaattatccactataagtgctttgc

SEQ ID NO: 125994 - DNA, 25 bp, Homo sapien
tgaattatccactataagtgctttg

SEQ ID NO: 125995 - DNA, 25 bp, Homo sapien
atgaattatccactataagtgcttt

SEQ ID NO: 125996 - DNA, 25 bp, Homo sapien
tattccatagctctctctgtatttg

SEQ ID NO: 125997 - DNA, 25 bp, Homo sapien
cctttgcctgcaaaagaggctcgga

SEQ ID NO: 125998 - DNA, 25 bp, Homo sapien
cctgaactttctgtcgctctttttc

SEQ ID NO: 125999 - DNA, 25 bp, Homo sapien
tccctttgcctgcaaaagaggctcg

SEQ ID NO: 126000 - DNA, 25 bp, Homo sapien
gaactttctgtcgctctttttcttc

SEQ ID NO: 126001 - DNA, 25 bp, Homo sapien
gcagtgcagcataattaagcttcat

SEQ ID NO: 126002 - DNA, 25 bp, Homo sapien
atctatcagtgaaaatttagcactg

SEQ ID NO: 126003 - DNA, 25 bp, Homo sapien
ctatcagtgaaaatttagcactgag

SEQ ID NO: 126004 - DNA, 25 bp, Homo sapien
caaagcagtgcagcataattaagct

SEQ ID NO: 126005 - DNA, 25 bp, Homo sapien
ttctcatccccaacatccacaacta

SEQ ID NO: 126006 - DNA, 25 bp, Homo sapien
tctcatccccaacatccacaactac

SEQ ID NO: 126007 - DNA, 25 bp, Homo sapien
tcagttctcatccccaacatccaca

SEQ ID NO: 126008 - DNA, 25 bp, Homo sapien
agttctcatccccaacatccacaac

SEQ ID NO: 126009 - DNA, 25 bp, Homo sapien
tgaacagatggcgtacccataaatt

SEQ ID NO: 126010 - DNA, 25 bp, Homo sapien
taaagtatgctctaccaggaatcgc

SEQ ID NO: 126011 - DNA, 25 bp, Homo sapien
caggaatcgcaagttaaaactgagt

SEQ ID NO: 126012 - DNA, 25 bp, Homo sapien
tattctccccagtactctggaaggc

SEQ ID NO: 126013 - DNA, 25 bp, Homo sapien
agtctgcccgattgcacttcccaaa

SEQ ID NO: 126014 - DNA, 25 bp, Homo sapien
acacttcatgggacaagtctgcccg

SEQ ID NO: 126015 - DNA, 25 bp, Homo sapien
tacatgccactcagtctgcacagcg

SEQ ID NO: 126016 - DNA, 25 bp, Homo sapien
cccaaagtaggagtagctctgctct

SEQ ID NO: 126017 - DNA, 25 bp, Homo sapien
gtattcaccccaacaaccatggagg

SEQ ID NO: 126018 - DNA, 25 bp, Homo sapien
taaaatgtatgaaagatttctgcca

SEQ ID NO: 126019 - DNA, 25 bp, Homo sapien
tcagaatgctaccaataactcccag

SEQ ID NO: 126020 - DNA, 25 bp, Homo sapien
tttctgccattaccatcagaatgct

SEQ ID NO: 126021 - DNA, 25 bp, Homo sapien
tcatctggtactatcttgtatgctg

SEQ ID NO: 126022 - DNA, 25 bp, Homo sapien
ctggtactatcttgtatgctgatat

SEQ ID NO: 126023 - DNA, 25 bp, Homo sapien
tttcatctggtactatcttgtatgc

SEQ ID NO: 126024 - DNA, 25 bp, Homo sapien
catctggtactatcttgtatgctga

SEQ ID NO: 126025 - DNA, 25 bp, Homo sapien
aaaccagctcgggatagcattggga

SEQ ID NO: 126026 - DNA, 25 bp, Homo sapien
cacccctcaccaagatgctaaatgt

SEQ ID NO: 126027 - DNA, 25 bp, Homo sapien
gataatccactatgcacaccaatgc

SEQ ID NO: 126028 - DNA, 25 bp, Homo sapien
taatgaactacacaggaaagggttc

SEQ ID NO: 126029 - DNA, 25 bp, Homo sapien
agaagtacgaatagcctcacctggc

SEQ ID NO: 126030 - DNA, 25 bp, Homo sapien
gctgccttgttaagtctcactgata

SEQ ID NO: 126031 - DNA, 25 bp, Homo sapien
gggcgcatgctaataccaagggttg

SEQ ID NO: 126032 - DNA, 25 bp, Homo sapien
tgccaggcctcacttacgtgggaaa

SEQ ID NO: 126033 - DNA, 25 bp, Homo sapien
taagactgtaaggtagaagttcagc

SEQ ID NO: 126034 - DNA, 25 bp, Homo sapien
cccatgtcgcaatgtaacacaaggg

SEQ ID NO: 126035 - DNA, 25 bp, Homo sapien
cactctggcaaaagtgaagcactga

SEQ ID NO: 126036 - DNA, 25 bp, Homo sapien
ggacatgtatgttcagcttctgcaa

SEQ ID NO: 126037 - DNA, 25 bp, Homo sapien
tgtagcaagaggcttaccaatttct

SEQ ID NO: 126038 - DNA, 25 bp, Homo sapien
aatagaagatctgtagtaatactcc

SEQ ID NO: 126039 - DNA, 25 bp, Homo sapien
tcatgacattggtgattgtgccctt

SEQ ID NO: 126040 - DNA, 25 bp, Homo sapien
tggaggagattgactaaaactgatg

SEQ ID NO: 126041 - DNA, 25 bp, Homo sapien
tcctgatgggattgtagtaattgat

SEQ ID NO: 126042 - DNA, 25 bp, Homo sapien
cagctcaattcctgatgggattgta

SEQ ID NO: 126043 - DNA, 25 bp, Homo sapien
ccagctgtaatccagctcaattcct

SEQ ID NO: 126044 - DNA, 25 bp, Homo sapien
taatccagctcaattcctgatggga

SEQ ID NO: 126045 - DNA, 25 bp, Homo sapien
tgacatctcgtggtgcaaatcctgt

SEQ ID NO: 126046 - DNA, 25 bp, Homo sapien
ctctggagtgacatctcgtggtgca

SEQ ID NO: 126047 - DNA, 25 bp, Homo sapien
tttcatcacaccaatctatcagggt

SEQ ID NO: 126048 - DNA, 25 bp, Homo sapien
catcacaccaatctatcagggtttc

SEQ ID NO: 126049 - DNA, 25 bp, Homo sapien
caaggaatctctgaataacggcagt

SEQ ID NO: 126050 - DNA, 25 bp, Homo sapien
tgtacttctacttgctgccgccatg

SEQ ID NO: 126051 - DNA, 25 bp, Homo sapien
ggtacctctctagccagtctgaaag

SEQ ID NO: 126052 - DNA, 25 bp, Homo sapien
tatactggctgataggagactcatg

SEQ ID NO: 126053 - DNA, 25 bp, Homo sapien
gggttgcacactaataacaggtgga

SEQ ID NO: 126054 - DNA, 25 bp, Homo sapien
gatctctcgtatccatagggcccca

SEQ ID NO: 126055 - DNA, 25 bp, Homo sapien
cataacgtaagtaccctatgaggca

SEQ ID NO: 126056 - DNA, 25 bp, Homo sapien
ccctctttagtgctactgtgtggaa

SEQ ID NO: 126057 - DNA, 25 bp, Homo sapien
ctacctacctctttgaaagtggatg

SEQ ID NO: 126058 - DNA, 25 bp, Homo sapien
agattactagaaactacctacctct

SEQ ID NO: 126059 - DNA, 25 bp, Homo sapien
actacctacctctttgaaagtggat

SEQ ID NO: 126060 - DNA, 25 bp, Homo sapien
tactagaaactacctacctctttga

SEQ ID NO: 126061 - DNA, 25 bp, Homo sapien
tgggaagatggtcaactaatggtac

SEQ ID NO: 126062 - DNA, 25 bp, Homo sapien
taatggtacttcctgtgtaggtcgg

SEQ ID NO: 126063 - DNA, 25 bp, Homo sapien
tatgtttacaccacggcaaaatggg

SEQ ID NO: 126064 - DNA, 25 bp, Homo sapien
tgcaaacagtttccagcaaggaggt

SEQ ID NO: 126065 - DNA, 25 bp, Homo sapien
aaagtttaggcagccctcaccccat

SEQ ID NO: 126066 - DNA, 25 bp, Homo sapien
gagaaaagggatttctgactcccag

SEQ ID NO: 126067 - DNA, 25 bp, Homo sapien
aaataagaaccagcctgaaccttct

SEQ ID NO: 126068 - DNA, 25 bp, Homo sapien
ctgtacaaactggttcagggaaata

SEQ ID NO: 126069 - DNA, 25 bp, Homo sapien
cacaaaatgggaatgttgggaattt

SEQ ID NO: 126070 - DNA, 25 bp, Homo sapien
ccctttctggagcccacaaaatggg

SEQ ID NO: 126071 - DNA, 25 bp, Homo sapien
tctggagcccacaaaatgggaatgt

SEQ ID NO: 126072 - DNA, 25 bp, Homo sapien
ggagcccacaaaatgggaatgttgg

SEQ ID NO: 126073 - DNA, 25 bp, Homo sapien
tattaatctgaaaatgattggctgg

SEQ ID NO: 126074 - DNA, 25 bp, Homo sapien
aaaatgattggctgggattgaagtc

SEQ ID NO: 126075 - DNA, 25 bp, Homo sapien
ggctgggattgaagtcttcgcttac

SEQ ID NO: 126076 - DNA, 25 bp, Homo sapien
aattattaatctgaaaatgattggc

SEQ ID NO: 126077 - DNA, 25 bp, Homo sapien
gtttttttctagatataatatcata

SEQ ID NO: 126078 - DNA, 25 bp, Homo sapien
tgggacttccagtagtacgctgaat

SEQ ID NO: 126079 - DNA, 25 bp, Homo sapien
gaagtgccgctgaattttatcggag

SEQ ID NO: 126080 - DNA, 25 bp, Homo sapien
gctggcctcgtagagtaagttaagg

SEQ ID NO: 126081 - DNA, 25 bp, Homo sapien
tcgtagagtaagttaaggaggattc

SEQ ID NO: 126082 - DNA, 25 bp, Homo sapien
tgtatctgttgagataatgatgtgt

SEQ ID NO: 126083 - DNA, 25 bp, Homo sapien
cctggtgcttcccgttctattactt

SEQ ID NO: 126084 - DNA, 25 bp, Homo sapien
tggtgcttcccgttctattacttct

SEQ ID NO: 126085 - DNA, 25 bp, Homo sapien
ctggtgcttcccgttctattacttc

SEQ ID NO: 126086 - DNA, 25 bp, Homo sapien
ccctggtgcttcccgttctattact

SEQ ID NO: 126087 - DNA, 25 bp, Homo sapien
catgcccagaggtgtaacattaagt

SEQ ID NO: 126088 - DNA, 25 bp, Homo sapien
cagaggtgtaacattaagtgatccc

SEQ ID NO: 126089 - DNA, 25 bp, Homo sapien
agagagcatgcccagaggtgtaaca

SEQ ID NO: 126090 - DNA, 25 bp, Homo sapien
ggtgtaacattaagtgatcccatca

SEQ ID NO: 126091 - DNA, 25 bp, Homo sapien
ggagcgcagtgcgcatgatcagggc

SEQ ID NO: 126092 - DNA, 25 bp, Homo sapien
gagcgcagtgcgcatgatcagggct

SEQ ID NO: 126093 - DNA, 25 bp, Homo sapien
agcgcagtgcgcatgatcagggctc

SEQ ID NO: 126094 - DNA, 25 bp, Homo sapien
cctttcttgctacctggcaggttaa

SEQ ID NO: 126095 - DNA, 25 bp, Homo sapien
ttatgagcgttttccctctgattcc

SEQ ID NO: 126096 - DNA, 25 bp, Homo sapien
agatcctttcttgctacctggcagg

SEQ ID NO: 126097 - DNA, 25 bp, Homo sapien
ttaattatgagcgttttccctctga

SEQ ID NO: 126098 - DNA, 25 bp, Homo sapien
tctgttgaagcaacaccactgtctt

SEQ ID NO: 126099 - DNA, 25 bp, Homo sapien
tcaatggcatgaggtagagctggca

SEQ ID NO: 126100 - DNA, 25 bp, Homo sapien
gatgaggaactatcttctgttgaag

SEQ ID NO: 126101 - DNA, 25 bp, Homo sapien
tggcatcacgtaaaaggtcaatggc

SEQ ID NO: 126102 - DNA, 25 bp, Homo sapien
cgtgtgccatgacaacagcaggact

SEQ ID NO: 126103 - DNA, 25 bp, Homo sapien
acagcaggactggtgtagaatggat

SEQ ID NO: 126104 - DNA, 25 bp, Homo sapien
gatgggaataattgatgagaccagg

SEQ ID NO: 126105 - DNA, 25 bp, Homo sapien
atgagaccagggatgggctgttcac

SEQ ID NO: 126106 - DNA, 25 bp, Homo sapien
tgccctgagcctagagtgataatgg

SEQ ID NO: 126107 - DNA, 25 bp, Homo sapien
tcagtggcagccaagcggtagctgc

SEQ ID NO: 126108 - DNA, 25 bp, Homo sapien
tcaccagtggtgactaaaaagccct

SEQ ID NO: 126109 - DNA, 25 bp, Homo sapien
ataatggccatagggagagacttct

SEQ ID NO: 126110 - DNA, 25 bp, Homo sapien
ctgtttatatttgtattctgagcag

SEQ ID NO: 126111 - DNA, 25 bp, Homo sapien
tatgggctggaacaacctgtttata

SEQ ID NO: 126112 - DNA, 25 bp, Homo sapien
gaggatagtgtttggtaccttgaaa

SEQ ID NO: 126113 - DNA, 25 bp, Homo sapien
tgtgaactttttatgggctggaaca

SEQ ID NO: 126114 - DNA, 25 bp, Homo sapien
gaattcccatcttagaatcagactg

SEQ ID NO: 126115 - DNA, 25 bp, Homo sapien
taccagttcagccactaagtagttc

SEQ ID NO: 126116 - DNA, 25 bp, Homo sapien
tcagactgcctagacttgaatacca

SEQ ID NO: 126117 - DNA, 25 bp, Homo sapien
caaaatgaggatttacgtaaagagc

SEQ ID NO: 126118 - DNA, 25 bp, Homo sapien
aaacggtcatgcaactggaggcttg

SEQ ID NO: 126119 - DNA, 25 bp, Homo sapien
aacagtgccccttaccagcaggaag

SEQ ID NO: 126120 - DNA, 25 bp, Homo sapien
tacagactggtcaaaggacacgaga

SEQ ID NO: 126121 - DNA, 25 bp, Homo sapien
gaggcttggccgatggtcccttttg

SEQ ID NO: 126122 - DNA, 25 bp, Homo sapien
ggatctccaagtttatcctgggacc

SEQ ID NO: 126123 - DNA, 25 bp, Homo sapien
ttgacttgcagagctcataaaagcc

SEQ ID NO: 126124 - DNA, 25 bp, Homo sapien
gccagtctaaaaggcctatttacaa

SEQ ID NO: 126125 - DNA, 25 bp, Homo sapien
cccagtccctgtatagggttcctga

SEQ ID NO: 126126 - DNA, 25 bp, Homo sapien
tttttgttgctctcaatggtagtaa

SEQ ID NO: 126127 - DNA, 25 bp, Homo sapien
gactatcaagagatcttttttataa

SEQ ID NO: 126128 - DNA, 25 bp, Homo sapien
gaatttttgttgctctcaatggtag

SEQ ID NO: 126129 - DNA, 25 bp, Homo sapien
ttcagaatttttgttgctctcaatg

SEQ ID NO: 126130 - DNA, 25 bp, Homo sapien
caataatcagagtgagtctcccaaa

SEQ ID NO: 126131 - DNA, 25 bp, Homo sapien
taaagctaatttcactggttgggca

SEQ ID NO: 126132 - DNA, 25 bp, Homo sapien
caaaggcttgccatggagtagtgag

SEQ ID NO: 126133 - DNA, 25 bp, Homo sapien
tagtgaggatctaccttgagcaagt

SEQ ID NO: 126134 - DNA, 25 bp, Homo sapien
agccactaactgagaattacaagca

SEQ ID NO: 126135 - DNA, 25 bp, Homo sapien
ccacaaaataggtctcacaaaattt

SEQ ID NO: 126136 - DNA, 25 bp, Homo sapien
gaggatataccatatatattaggcc

SEQ ID NO: 126137 - DNA, 25 bp, Homo sapien
gccacaaaataggtctcacaaaatt

SEQ ID NO: 126138 - DNA, 25 bp, Homo sapien
ttttctgaagtgaacatgaggatat

SEQ ID NO: 126139 - DNA, 25 bp, Homo sapien
attgtggatccagttaatatcagta

SEQ ID NO: 126140 - DNA, 25 bp, Homo sapien
acaatttcattacatagtctagaac

SEQ ID NO: 126141 - DNA, 25 bp, Homo sapien
cattgtggatccagttaatatcagt

SEQ ID NO: 126142 - DNA, 25 bp, Homo sapien
ttcattacatagtctagaacaaatc

SEQ ID NO: 126143 - DNA, 25 bp, Homo sapien
gaacaccacgagaaatgatggagtc

SEQ ID NO: 126144 - DNA, 25 bp, Homo sapien
cacgagaaatgatggagtctggaat

SEQ ID NO: 126145 - DNA, 25 bp, Homo sapien
ctgaacaccacgagaaatgatggag

SEQ ID NO: 126146 - DNA, 25 bp, Homo sapien
accacgagaaatgatggagtctgga

SEQ ID NO: 126147 - DNA, 25 bp, Homo sapien
tagagaggcgagatgtagcctgagc

SEQ ID NO: 126148 - DNA, 25 bp, Homo sapien
atgtagcctgagcacgaggcgattc

SEQ ID NO: 126149 - DNA, 25 bp, Homo sapien
gaagctgtagagaggcgagatgtag

SEQ ID NO: 126150 - DNA, 25 bp, Homo sapien
gcctgagcacgaggcgattctgaag

SEQ ID NO: 126151 - DNA, 25 bp, Homo sapien
catggttatcttcattaggttgtaa

SEQ ID NO: 126152 - DNA, 25 bp, Homo sapien
gattttgttctcactatagctggag

SEQ ID NO: 126153 - DNA, 25 bp, Homo sapien
tatgtactatttgacttaggcacta

SEQ ID NO: 126154 - DNA, 25 bp, Homo sapien
tgaaaatcagcactcatctaagcta

SEQ ID NO: 126155 - DNA, 25 bp, Homo sapien
ccagcccaatttctagcttcaaagc

SEQ ID NO: 126156 - DNA, 25 bp, Homo sapien
gcttcaaagcataaattagaactta

SEQ ID NO: 126157 - DNA, 25 bp, Homo sapien
gatgagcttggtgattatattaatg

SEQ ID NO: 126158 - DNA, 25 bp, Homo sapien
taagagcttccagtacattccagac

SEQ ID NO: 126159 - DNA, 25 bp, Homo sapien
taccggtagtcattggatcagatct

SEQ ID NO: 126160 - DNA, 25 bp, Homo sapien
taatgcttaaccatggtaccggtag

SEQ ID NO: 126161 - DNA, 25 bp, Homo sapien
tcaccagtctagacggcagtggcgt

SEQ ID NO: 126162 - DNA, 25 bp, Homo sapien
ttccctgccctaggattaacctgga

SEQ ID NO: 126163 - DNA, 25 bp, Homo sapien
gatttcaaaaatgagctatccccag

SEQ ID NO: 126164 - DNA, 25 bp, Homo sapien
cttaaatgtccataggagtcaggca

SEQ ID NO: 126165 - DNA, 25 bp, Homo sapien
tgggccagcaatgttgatctgactt

SEQ ID NO: 126166 - DNA, 25 bp, Homo sapien
agtattatatcagtggtgggccagc

SEQ ID NO: 126167 - DNA, 25 bp, Homo sapien
gattcatcatcaggcctgtcagact

SEQ ID NO: 126168 - DNA, 25 bp, Homo sapien
aaactgagctcttaatcactgcctt

SEQ ID NO: 126169 - DNA, 25 bp, Homo sapien
cagaaactataccacttacagtctg

SEQ ID NO: 126170 - DNA, 25 bp, Homo sapien
gggacacttgcatgaacgaaaaaag

SEQ ID NO: 126171 - DNA, 25 bp, Homo sapien
tagggctggtactcaatatgctgtg

SEQ ID NO: 126172 - DNA, 25 bp, Homo sapien
gttataatatggtagcctagggctg

SEQ ID NO: 126173 - DNA, 25 bp, Homo sapien
gattaagagatgactccaaaacctt

SEQ ID NO: 126174 - DNA, 25 bp, Homo sapien
tgtctgccagtaaatcagtcaaatg

SEQ ID NO: 126175 - DNA, 25 bp, Homo sapien
cagtatctggagtagtgttacattt

SEQ ID NO: 126176 - DNA, 25 bp, Homo sapien
tatcttggggacttctgatgaagca

SEQ ID NO: 126177 - DNA, 25 bp, Homo sapien
ggagtagtgttacatttgcatttgg

SEQ ID NO: 126178 - DNA, 25 bp, Homo sapien
ttttggttatcttggggacttctga

SEQ ID NO: 126179 - DNA, 25 bp, Homo sapien
tccaactctactagcaactcctttg

SEQ ID NO: 126180 - DNA, 25 bp, Homo sapien
cctttgctttcatccggccgtctaa

SEQ ID NO: 126181 - DNA, 25 bp, Homo sapien
ctttgctttcatccggccgtctaat

SEQ ID NO: 126182 - DNA, 25 bp, Homo sapien
tttgagggatccaactctactagca

SEQ ID NO: 126183 - DNA, 25 bp, Homo sapien
tttcataaatgggagcatgaagccg

SEQ ID NO: 126184 - DNA, 25 bp, Homo sapien
tttatttcataaatgggagcatgaa

SEQ ID NO: 126185 - DNA, 25 bp, Homo sapien
cataaatgggagcatgaagccgcag

SEQ ID NO: 126186 - DNA, 25 bp, Homo sapien
tatttcataaatgggagcatgaagc

SEQ ID NO: 126187 - DNA, 25 bp, Homo sapien
taccatacagaaatcagcaagtctc

SEQ ID NO: 126188 - DNA, 25 bp, Homo sapien
taaataatggcatgagataacctaa

SEQ ID NO: 126189 - DNA, 25 bp, Homo sapien
tcatgactgattaggaaagagcaca

SEQ ID NO: 126190 - DNA, 25 bp, Homo sapien
cattatatagtagtacaggtgttga

SEQ ID NO: 126191 - DNA, 25 bp, Homo sapien
tcaatagtggtacagggctcttccc

SEQ ID NO: 126192 - DNA, 25 bp, Homo sapien
agtgtttctcagtgaggcttcccaa

SEQ ID NO: 126193 - DNA, 25 bp, Homo sapien
tatcagcacatcaccaatctaagga

SEQ ID NO: 126194 - DNA, 25 bp, Homo sapien
tgatcagcccgcaagtagggaggat

SEQ ID NO: 126195 - DNA, 25 bp, Homo sapien
ttctatacatgttcagaaattacac

SEQ ID NO: 126196 - DNA, 25 bp, Homo sapien
tattgcttagaggtacttttgaaaa

SEQ ID NO: 126197 - DNA, 25 bp, Homo sapien
tatcatagccacttattgcttagag

SEQ ID NO: 126198 - DNA, 25 bp, Homo sapien
atttgtgctaaaaagtatcatagcc

SEQ ID NO: 126199 - DNA, 25 bp, Homo sapien
ctaccatacacgttcacagtattca

SEQ ID NO: 126200 - DNA, 25 bp, Homo sapien
catttttggtattactgaacctctc

SEQ ID NO: 126201 - DNA, 25 bp, Homo sapien
caactattccatttttggtattact

SEQ ID NO: 126202 - DNA, 25 bp, Homo sapien
ccatacacgttcacagtattcatta

SEQ ID NO: 126203 - DNA, 25 bp, Homo sapien
ctcagatacactataggtagatgag

SEQ ID NO: 126204 - DNA, 25 bp, Homo sapien
ctataggtagatgagcacgagggaa

SEQ ID NO: 126205 - DNA, 25 bp, Homo sapien
tagatgagcacgagggaagccgagc

SEQ ID NO: 126206 - DNA, 25 bp, Homo sapien
gatacactataggtagatgagcacg

SEQ ID NO: 126207 - DNA, 25 bp, Homo sapien
tacacactctcatgggaaatggaga

SEQ ID NO: 126208 - DNA, 25 bp, Homo sapien
ttccacattccaacgtgagagccct

SEQ ID NO: 126209 - DNA, 25 bp, Homo sapien
cctgatggatgctgtaggctgtgat

SEQ ID NO: 126210 - DNA, 25 bp, Homo sapien
tgctgtcatagagaaagtaataccc

SEQ ID NO: 126211 - DNA, 25 bp, Homo sapien
cattcatgatgaattagctttgtca

SEQ ID NO: 126212 - DNA, 25 bp, Homo sapien
ctgaaaaattctgtttttacattca

SEQ ID NO: 126213 - DNA, 25 bp, Homo sapien
gtttttacattcatgatgaattagc

SEQ ID NO: 126214 - DNA, 25 bp, Homo sapien
tttacattcatgatgaattagcttt

SEQ ID NO: 126215 - DNA, 25 bp, Homo sapien
aatgtgctaaatctaaatggttacc

SEQ ID NO: 126216 - DNA, 25 bp, Homo sapien
aaatgggtgtttgttatattatctg

SEQ ID NO: 126217 - DNA, 25 bp, Homo sapien
cttatatgagaattctatgcaaagg

SEQ ID NO: 126218 - DNA, 25 bp, Homo sapien
caaaggaaatttgagctttgtcaca

SEQ ID NO: 126219 - DNA, 25 bp, Homo sapien
gaagccagatgtactgtaacaccag

SEQ ID NO: 126220 - DNA, 25 bp, Homo sapien
cacacgaaagcgtagcagtggtcat

SEQ ID NO: 126221 - DNA, 25 bp, Homo sapien
gatcaccgttccctgcgatgtcagg

SEQ ID NO: 126222 - DNA, 25 bp, Homo sapien
tcaatgctgcagtagctacgagccc

SEQ ID NO: 126223 - DNA, 25 bp, Homo sapien
ttaagtcgtagcctctattcctcca

SEQ ID NO: 126224 - DNA, 25 bp, Homo sapien
agtcgtagcctctattcctccagag

SEQ ID NO: 126225 - DNA, 25 bp, Homo sapien
gcctctattcctccagagttcatct

SEQ ID NO: 126226 - DNA, 25 bp, Homo sapien
tcttaagtcgtagcctctattcctc

SEQ ID NO: 126227 - DNA, 25 bp, Homo sapien
cgcaaagcaatgtttgcgaatggaa

SEQ ID NO: 126228 - DNA, 25 bp, Homo sapien
ggctcctttgatcagtaatagttac

SEQ ID NO: 126229 - DNA, 25 bp, Homo sapien
gaaagtggctcctttgatcagtaat

SEQ ID NO: 126230 - DNA, 25 bp, Homo sapien
acagaaggagcccaaacccatagcg

SEQ ID NO: 126231 - DNA, 25 bp, Homo sapien
cagcagcttgccacaaatggatata

SEQ ID NO: 126232 - DNA, 25 bp, Homo sapien
gaaactgtatttaagctccagacct

SEQ ID NO: 126233 - DNA, 25 bp, Homo sapien
aaactgttacattcaaggagcatgg

SEQ ID NO: 126234 - DNA, 25 bp, Homo sapien
gaaacccttatgctttgactcaaat

SEQ ID NO: 126235 - DNA, 25 bp, Homo sapien
gctctgagaatgttctccttgctgc

SEQ ID NO: 126236 - DNA, 25 bp, Homo sapien
tctgagaatgttctccttgctgctg

SEQ ID NO: 126237 - DNA, 25 bp, Homo sapien
ccttgctgctgcacctggactggac

SEQ ID NO: 126238 - DNA, 25 bp, Homo sapien
tggctctgagaatgttctccttgct

SEQ ID NO: 126239 - DNA, 25 bp, Homo sapien
tcaaagtgcaatctaatgcgagact

SEQ ID NO: 126240 - DNA, 25 bp, Homo sapien
cttatgaacgtaccccttacagaga

SEQ ID NO: 126241 - DNA, 25 bp, Homo sapien
caaggaaggttctcataggttgatc

SEQ ID NO: 126242 - DNA, 25 bp, Homo sapien
ggacaccagtcttacaagaaacctg

SEQ ID NO: 126243 - DNA, 25 bp, Homo sapien
cagtgagcagagtgatattatcaga

SEQ ID NO: 126244 - DNA, 25 bp, Homo sapien
tgtatcaagatatcacctgtactcc

SEQ ID NO: 126245 - DNA, 25 bp, Homo sapien
cacaggctgaacaaagtacatcaag

SEQ ID NO: 126246 - DNA, 25 bp, Homo sapien
cacttgtccgataaaacacaggctg

SEQ ID NO: 126247 - DNA, 25 bp, Homo sapien
tggtcaacagtgttcaagttctctg

SEQ ID NO: 126248 - DNA, 25 bp, Homo sapien
gatgtctagtttcagtccactaaga

SEQ ID NO: 126249 - DNA, 25 bp, Homo sapien
tattctcccttcacgcctgtcaatg

SEQ ID NO: 126250 - DNA, 25 bp, Homo sapien
gcctaatatgtggtctatcctacag

SEQ ID NO: 126251 - DNA, 25 bp, Homo sapien
gttgttgccattttactctgctgat

SEQ ID NO: 126252 - DNA, 25 bp, Homo sapien
tagccaccttggtgatatcgacagc

SEQ ID NO: 126253 - DNA, 25 bp, Homo sapien
gacatgcgatgtcttctagccacct

SEQ ID NO: 126254 - DNA, 25 bp, Homo sapien
caagcaccggagtcatctccaggac

SEQ ID NO: 126255 - DNA, 25 bp, Homo sapien
gctttgtccatagatgtcagaggaa

SEQ ID NO: 126256 - DNA, 25 bp, Homo sapien
aaaggcagtttcatggattttactc

SEQ ID NO: 126257 - DNA, 25 bp, Homo sapien
ttaatgttacatgaatcttatttgg

SEQ ID NO: 126258 - DNA, 25 bp, Homo sapien
gaatgatgataactgtaataatggt

SEQ ID NO: 126259 - DNA, 25 bp, Homo sapien
tactctgtatactgttaaggctgaa

SEQ ID NO: 126260 - DNA, 25 bp, Homo sapien
actgataccaataaatatctcaaca

SEQ ID NO: 126261 - DNA, 25 bp, Homo sapien
atgtgacctggaatacatggtgaga

SEQ ID NO: 126262 - DNA, 25 bp, Homo sapien
aaatatctcaacattctacctttaa

SEQ ID NO: 126263 - DNA, 25 bp, Homo sapien
ttttctaaggactgatgttaaggga

SEQ ID NO: 126264 - DNA, 25 bp, Homo sapien
cttaaagtttccttgactagaactg

SEQ ID NO: 126265 - DNA, 25 bp, Homo sapien
ccgcgcccgaccagaacttttcagc

SEQ ID NO: 126266 - DNA, 25 bp, Homo sapien
taataactactaccactcatgttcc

SEQ ID NO: 126267 - DNA, 25 bp, Homo sapien
catgttccctctacccactgctctt

SEQ ID NO: 126268 - DNA, 25 bp, Homo sapien
gaccagaacttttcagccatactac

SEQ ID NO: 126269 - DNA, 25 bp, Homo sapien
acagcatagccatcttttactgatg

SEQ ID NO: 126270 - DNA, 25 bp, Homo sapien
ttgcatatacatcttgagcaaggac

SEQ ID NO: 126271 - DNA, 25 bp, Homo sapien
atatacatcttgagcaaggactcgc

SEQ ID NO: 126272 - DNA, 25 bp, Homo sapien
ctcggacagcatagccatcttttac

SEQ ID NO: 126273 - DNA, 25 bp, Homo sapien
agctgaatgaagtgaatccaagata

SEQ ID NO: 126274 - DNA, 25 bp, Homo sapien
tcagaagtattctaatctagtgaga

SEQ ID NO: 126275 - DNA, 25 bp, Homo sapien
gaatgaagtgaatccaagataatct

SEQ ID NO: 126276 - DNA, 25 bp, Homo sapien
tattctaatctagtgagatcaagct

SEQ ID NO: 126277 - DNA, 25 bp, Homo sapien
taatcaacactgtagaaggaatcaa

SEQ ID NO: 126278 - DNA, 25 bp, Homo sapien
cataggagccattgggaatttggta

SEQ ID NO: 126279 - DNA, 25 bp, Homo sapien
tctggtgtttcatctactgtagctg

SEQ ID NO: 126280 - DNA, 25 bp, Homo sapien
tagctgtttgctctactctggaagt

SEQ ID NO: 126281 - DNA, 25 bp, Homo sapien
taccactggtgcctaattgtgccat

SEQ ID NO: 126282 - DNA, 25 bp, Homo sapien
tgcactgatagaagtggtcctaatt

SEQ ID NO: 126283 - DNA, 25 bp, Homo sapien
tgatagaagtggtcctaattgtacc

SEQ ID NO: 126284 - DNA, 25 bp, Homo sapien
ggtcctaattgtaccactggtgcct

SEQ ID NO: 126285 - DNA, 25 bp, Homo sapien
tccccaatgatgaaacgatctcctg

SEQ ID NO: 126286 - DNA, 25 bp, Homo sapien
tgttcaccagcttgggattccccaa

SEQ ID NO: 126287 - DNA, 25 bp, Homo sapien
atgaaacgatctcctgggccatcag

SEQ ID NO: 126288 - DNA, 25 bp, Homo sapien
cagcttgggattccccaatgatgaa

SEQ ID NO: 126289 - DNA, 25 bp, Homo sapien
ccaaagtccatgaagctgaaatctt

SEQ ID NO: 126290 - DNA, 25 bp, Homo sapien
cagtgcctttcaggcctatcaatct

SEQ ID NO: 126291 - DNA, 25 bp, Homo sapien
ctaatttccactaaactgataggag

SEQ ID NO: 126292 - DNA, 25 bp, Homo sapien
agaaatttagaattagatgcccaaa

SEQ ID NO: 126293 - DNA, 25 bp, Homo sapien
acttgtcctggcattactgtctgag

SEQ ID NO: 126294 - DNA, 25 bp, Homo sapien
gacttgtcctggcattactgtctga

SEQ ID NO: 126295 - DNA, 25 bp, Homo sapien
cttgtcctggcattactgtctgagt

SEQ ID NO: 126296 - DNA, 25 bp, Homo sapien
catctgattccctgataagttcggt

SEQ ID NO: 126297 - DNA, 25 bp, Homo sapien
cacttgtactactgcatcagcaccg

SEQ ID NO: 126298 - DNA, 25 bp, Homo sapien
taagttcggtatcttccacttgtac

SEQ ID NO: 126299 - DNA, 25 bp, Homo sapien
cgcagggtattggagcacctgttgt

SEQ ID NO: 126300 - DNA, 25 bp, Homo sapien
acagtaagacttggtgatgacgtac

SEQ ID NO: 126301 - DNA, 25 bp, Homo sapien
ataatactgccataggaacaacagc

SEQ ID NO: 126302 - DNA, 25 bp, Homo sapien
aaacactgcagaaaatggttgtgac

SEQ ID NO: 126303 - DNA, 25 bp, Homo sapien
acaacagcacagtaagacttggtga

SEQ ID NO: 126304 - DNA, 25 bp, Homo sapien
cttggcctggccgagcttgcaccag

SEQ ID NO: 126305 - DNA, 25 bp, Homo sapien
cgagcttgcaccagaattcgcactt

SEQ ID NO: 126306 - DNA, 25 bp, Homo sapien
tggccgagcttgcaccagaattcgc

SEQ ID NO: 126307 - DNA, 25 bp, Homo sapien
tgcaccagaattcgcacttcaagtt

SEQ ID NO: 126308 - DNA, 25 bp, Homo sapien
cttcgttacaaagggatgttcagca

SEQ ID NO: 126309 - DNA, 25 bp, Homo sapien
taatgataagaggtccacagctggc

SEQ ID NO: 126310 - DNA, 25 bp, Homo sapien
cagctggctagctttgtcaaggaga

SEQ ID NO: 126311 - DNA, 25 bp, Homo sapien
taaccttggtgtgctgccataggga

SEQ ID NO: 126312 - DNA, 25 bp, Homo sapien
gacacctacagttgccagaagacca

SEQ ID NO: 126313 - DNA, 25 bp, Homo sapien
tcattccctgttgacatgactgcaa

SEQ ID NO: 126314 - DNA, 25 bp, Homo sapien
aaacttattaacttcaacctctgtg

SEQ ID NO: 126315 - DNA, 25 bp, Homo sapien
tctgaggggcccatgtgggttcctt

SEQ ID NO: 126316 - DNA, 25 bp, Homo sapien
gattcattgatacttcccacacaga

SEQ ID NO: 126317 - DNA, 25 bp, Homo sapien
caaatggaacttttcacaagaagtg

SEQ ID NO: 126318 - DNA, 25 bp, Homo sapien
taaatatcatgccactagagatgct

SEQ ID NO: 126319 - DNA, 25 bp, Homo sapien
caagaagtgctagccatgatgtcct

SEQ ID NO: 126320 - DNA, 25 bp, Homo sapien
tggtccatgagtgtgctactgttta

SEQ ID NO: 126321 - DNA, 25 bp, Homo sapien
aagaatagttcactgagtcaaccag

SEQ ID NO: 126322 - DNA, 25 bp, Homo sapien
tactgggaagtaagcacatctggaa

SEQ ID NO: 126323 - DNA, 25 bp, Homo sapien
tgactagtgcatatatactgggaag

SEQ ID NO: 126324 - DNA, 25 bp, Homo sapien
catgcccggcctgaaaccatatgta

SEQ ID NO: 126325 - DNA, 25 bp, Homo sapien
tacggcactctttgggttgccaagg

SEQ ID NO: 126326 - DNA, 25 bp, Homo sapien
gctggtccttaacaagctcatacag

SEQ ID NO: 126327 - DNA, 25 bp, Homo sapien
tacatagacatcttgtacggcactc

SEQ ID NO: 126328 - DNA, 25 bp, Homo sapien
tcaccacaggttgcatatctaaatt

SEQ ID NO: 126329 - DNA, 25 bp, Homo sapien
cagaaatcagctattccatgttagc

SEQ ID NO: 126330 - DNA, 25 bp, Homo sapien
tggtcattgcgcactgtaacctctg

SEQ ID NO: 126331 - DNA, 25 bp, Homo sapien
tgcacagtttgttgaaatcaacgaa

SEQ ID NO: 126332 - DNA, 25 bp, Homo sapien
cctacaatacccaagttgatcgtgg

SEQ ID NO: 126333 - DNA, 25 bp, Homo sapien
tgctagaagagttgaacgattgctg

SEQ ID NO: 126334 - DNA, 25 bp, Homo sapien
gatcgtggggtaaccatgttcctga

SEQ ID NO: 126335 - DNA, 25 bp, Homo sapien
gattgctgtctcgaatcttccctgg

SEQ ID NO: 126336 - DNA, 25 bp, Homo sapien
tcatatcatagtttcttcagaggtc

SEQ ID NO: 126337 - DNA, 25 bp, Homo sapien
agctagtgcagaaaactcatcagtg

SEQ ID NO: 126338 - DNA, 25 bp, Homo sapien
tctgggtgtctacttcacgtatgga

SEQ ID NO: 126339 - DNA, 25 bp, Homo sapien
gctgaggacatctattatcatatca

SEQ ID NO: 126340 - DNA, 25 bp, Homo sapien
gatacaccccctgatgtgatgatga

SEQ ID NO: 126341 - DNA, 25 bp, Homo sapien
caaggcattgagtaagtcatctggg

SEQ ID NO: 126342 - DNA, 25 bp, Homo sapien
tgataccctcattcaaggcattgag

SEQ ID NO: 126343 - DNA, 25 bp, Homo sapien
tgacatcagcacgactgataccctc

SEQ ID NO: 126344 - DNA, 25 bp, Homo sapien
ggtgggtgaattggttggctcctgg

SEQ ID NO: 126345 - DNA, 25 bp, Homo sapien
gaaggggagctaagcattcttggta

SEQ ID NO: 126346 - DNA, 25 bp, Homo sapien
aaggaatgcctaatcctccctttct

SEQ ID NO: 126347 - DNA, 25 bp, Homo sapien
tcttggtagatttggaatatatggt

SEQ ID NO: 126348 - DNA, 25 bp, Homo sapien
gagaagtgttctgtccttaccacaa

SEQ ID NO: 126349 - DNA, 25 bp, Homo sapien
tgagcaaatccctggcataactgac

SEQ ID NO: 126350 - DNA, 25 bp, Homo sapien
cacaattgccaagcctatgtatgct

SEQ ID NO: 126351 - DNA, 25 bp, Homo sapien
aattataacaagacacaaaccctgg

SEQ ID NO: 126352 - DNA, 25 bp, Homo sapien
gagatagtaagctccagttgtggct

SEQ ID NO: 126353 - DNA, 25 bp, Homo sapien
tagcatggcccaaaggagcaaagac

SEQ ID NO: 126354 - DNA, 25 bp, Homo sapien
ctctagatgtatccagtgcagacca

SEQ ID NO: 126355 - DNA, 25 bp, Homo sapien
tgatcttagtgctcctagcatggcc

SEQ ID NO: 126356 - DNA, 25 bp, Homo sapien
tttaaaactatcactgtaccatttg

SEQ ID NO: 126357 - DNA, 25 bp, Homo sapien
taagcagcatatgattagctgtttt

SEQ ID NO: 126358 - DNA, 25 bp, Homo sapien
ctggccccacatgatcagtccacct

SEQ ID NO: 126359 - DNA, 25 bp, Homo sapien
ctatacctcccttaggattcatgaa

SEQ ID NO: 126360 - DNA, 25 bp, Homo sapien
tccgtctacattctagcaagactcc

SEQ ID NO: 126361 - DNA, 25 bp, Homo sapien
ttctctccgtctacattctagcaag

SEQ ID NO: 126362 - DNA, 25 bp, Homo sapien
tctttctctccgtctacattctagc

SEQ ID NO: 126363 - DNA, 25 bp, Homo sapien
tcaatctttctctccgtctacattc

SEQ ID NO: 126364 - DNA, 25 bp, Homo sapien
aaatggatctgagcatgaagatcaa

SEQ ID NO: 126365 - DNA, 25 bp, Homo sapien
gcatgaagatcaatgtccagcacct

SEQ ID NO: 126366 - DNA, 25 bp, Homo sapien
cataaaaaccctgccaaaatggatc

SEQ ID NO: 126367 - DNA, 25 bp, Homo sapien
ttcataaaaaccctgccaaaatgga

SEQ ID NO: 126368 - DNA, 25 bp, Homo sapien
tctggttgctgatactccaaatgct

SEQ ID NO: 126369 - DNA, 25 bp, Homo sapien
tgtagatgacgcaataaaaaccgtg

SEQ ID NO: 126370 - DNA, 25 bp, Homo sapien
tggtagatctggttgctgatactcc

SEQ ID NO: 126371 - DNA, 25 bp, Homo sapien
taaaaaccgtgattggtagatctgg

SEQ ID NO: 126372 - DNA, 25 bp, Homo sapien
aataatacagtgacactgacttctt

SEQ ID NO: 126373 - DNA, 25 bp, Homo sapien
gcaataatacagtgacactgacttc

SEQ ID NO: 126374 - DNA, 25 bp, Homo sapien
caataatacagtgacactgacttct

SEQ ID NO: 126375 - DNA, 25 bp, Homo sapien
caccatcaatatccaaagttgcaaa

SEQ ID NO: 126376 - DNA, 25 bp, Homo sapien
tacaccatcaatatccaaagttgca

SEQ ID NO: 126377 - DNA, 25 bp, Homo sapien
tttcttacaccatcaatatccaaag

SEQ ID NO: 126378 - DNA, 25 bp, Homo sapien
tatttttcttacaccatcaatatcc

SEQ ID NO: 126379 - DNA, 25 bp, Homo sapien
gtgaccacagccgatacaggattcc

SEQ ID NO: 126380 - DNA, 25 bp, Homo sapien
gattgcaggtgaccacagccgatac

SEQ ID NO: 126381 - DNA, 25 bp, Homo sapien
ctttgatgatggttggccgaggatc

SEQ ID NO: 126382 - DNA, 25 bp, Homo sapien
tggccgaggatccaagatgccctgc

SEQ ID NO: 126383 - DNA, 25 bp, Homo sapien
tggtttctggtcattagaaagcatt

SEQ ID NO: 126384 - DNA, 25 bp, Homo sapien
ggtttctggtcattagaaagcatta

SEQ ID NO: 126385 - DNA, 25 bp, Homo sapien
tttggtttctggtcattagaaagca

SEQ ID NO: 126386 - DNA, 25 bp, Homo sapien
gtttctggtcattagaaagcattac

SEQ ID NO: 126387 - DNA, 25 bp, Homo sapien
ttaggaaatcatatccctaactgtt

SEQ ID NO: 126388 - DNA, 25 bp, Homo sapien
agttaggaaatcatatccctaactg

SEQ ID NO: 126389 - DNA, 25 bp, Homo sapien
ttattttggacagttaggaaatcat

SEQ ID NO: 126390 - DNA, 25 bp, Homo sapien
aggaaatcatatccctaactgttac

SEQ ID NO: 126391 - DNA, 25 bp, Homo sapien
tgtgcctagcaaggatgacattttc

SEQ ID NO: 126392 - DNA, 25 bp, Homo sapien
tctgcactgacacacagaatggcca

SEQ ID NO: 126393 - DNA, 25 bp, Homo sapien
aacagtatgatttaccaacagcagc

SEQ ID NO: 126394 - DNA, 25 bp, Homo sapien
gccacatcagagtccaacagtatga

SEQ ID NO: 126395 - DNA, 25 bp, Homo sapien
gaatctgtgcacctggtagaactat

SEQ ID NO: 126396 - DNA, 25 bp, Homo sapien
caggtgctttcagggcgagcagtaa

SEQ ID NO: 126397 - DNA, 25 bp, Homo sapien
gacccattatgttcctttggcggtg

SEQ ID NO: 126398 - DNA, 25 bp, Homo sapien
tcagttacgtagtccacagaagttt

SEQ ID NO: 126399 - DNA, 25 bp, Homo sapien
atcgcgacactattcacagcagcaa

SEQ ID NO: 126400 - DNA, 25 bp, Homo sapien
tgtttatcgcgacactattcacagc

SEQ ID NO: 126401 - DNA, 25 bp, Homo sapien
tttatcgcgacactattcacagcag

SEQ ID NO: 126402 - DNA, 25 bp, Homo sapien
tatcgcgacactattcacagcagca

SEQ ID NO: 126403 - DNA, 25 bp, Homo sapien
tctggacgaggatcaagttttacat

SEQ ID NO: 126404 - DNA, 25 bp, Homo sapien
ccaaggtagtggttcttggtgatgc

SEQ ID NO: 126405 - DNA, 25 bp, Homo sapien
tatacaccgatggtattctggacga

SEQ ID NO: 126406 - DNA, 25 bp, Homo sapien
ttggtgatgccaagttagtatacac

SEQ ID NO: 126407 - DNA, 25 bp, Homo sapien
ttcaggtggccatgctattatatcc

SEQ ID NO: 126408 - DNA, 25 bp, Homo sapien
tcaggctgaaatgttatgcgtgtct

SEQ ID NO: 126409 - DNA, 25 bp, Homo sapien
cagaaatgcgggtcttcaagaggag

SEQ ID NO: 126410 - DNA, 25 bp, Homo sapien
tttactgagtgccaaagtactaggc

SEQ ID NO: 126411 - DNA, 25 bp, Homo sapien
caacaatccattggcactgcgcatg

SEQ ID NO: 126412 - DNA, 25 bp, Homo sapien
gtggagctccacgtactgttctgtc

SEQ ID NO: 126413 - DNA, 25 bp, Homo sapien
catagccgtccaatgaccatgacat

SEQ ID NO: 126414 - DNA, 25 bp, Homo sapien
catcagacggctgctcatttgatta

SEQ ID NO: 126415 - DNA, 25 bp, Homo sapien
gaaatccaagtgttgcctacgctag

SEQ ID NO: 126416 - DNA, 25 bp, Homo sapien
ccaaatcgggaaaactagctgtgcc

SEQ ID NO: 126417 - DNA, 25 bp, Homo sapien
ccaagagtactgtgccgtgaggcta

SEQ ID NO: 126418 - DNA, 25 bp, Homo sapien
tatgtggacatgcatcaaagctttc

SEQ ID NO: 126419 - DNA, 25 bp, Homo sapien
ggagccctgaccggaccgctcagga

SEQ ID NO: 126420 - DNA, 25 bp, Homo sapien
ctgaccggaccgctcaggagtgggc

SEQ ID NO: 126421 - DNA, 25 bp, Homo sapien
gccctgaccggaccgctcaggagtg

SEQ ID NO: 126422 - DNA, 25 bp, Homo sapien
tgaccggaccgctcaggagtgggca

SEQ ID NO: 126423 - DNA, 25 bp, Homo sapien
gcagtaagagaagaacggcactggg

SEQ ID NO: 126424 - DNA, 25 bp, Homo sapien
cacttagtaaaagaagcacaggcca

SEQ ID NO: 126425 - DNA, 25 bp, Homo sapien
tgcatcataatcataacgtgctgac

SEQ ID NO: 126426 - DNA, 25 bp, Homo sapien
tgctgacatagtctctgcagtaaga

SEQ ID NO: 126427 - DNA, 25 bp, Homo sapien
aatagcacgtttccactcttttcac

SEQ ID NO: 126428 - DNA, 25 bp, Homo sapien
ggctgaaatagatctctggagatct

SEQ ID NO: 126429 - DNA, 25 bp, Homo sapien
tgtcgactaggaaaataacctccaa

SEQ ID NO: 126430 - DNA, 25 bp, Homo sapien
gagatctcctggatgtcgactagga

SEQ ID NO: 126431 - DNA, 25 bp, Homo sapien
ccaggtgttaagtctctcggctttt

SEQ ID NO: 126432 - DNA, 25 bp, Homo sapien
aaagcagtcaccaggtgttaagtct

SEQ ID NO: 126433 - DNA, 25 bp, Homo sapien
cagtcaccaggtgttaagtctctcg

SEQ ID NO: 126434 - DNA, 25 bp, Homo sapien
aagtctctcggcttttcagcttgtt

SEQ ID NO: 126435 - DNA, 25 bp, Homo sapien
aggccgagccacagtcctctctagg

SEQ ID NO: 126436 - DNA, 25 bp, Homo sapien
gccgagccacagtcctctctaggag

SEQ ID NO: 126437 - DNA, 25 bp, Homo sapien
cgagccacagtcctctctaggagat

SEQ ID NO: 126438 - DNA, 25 bp, Homo sapien
ttaactcacttcagtttgagcttcc

SEQ ID NO: 126439 - DNA, 25 bp, Homo sapien
tgcgcttgcacataaacataaaaaa

SEQ ID NO: 126440 - DNA, 25 bp, Homo sapien
gcgcttgcacataaacataaaaaaa

SEQ ID NO: 126441 - DNA, 25 bp, Homo sapien
tcctcatggtagtcttgctggtgtt

SEQ ID NO: 126442 - DNA, 25 bp, Homo sapien
agatctctcggatcatgggagtgtg

SEQ ID NO: 126443 - DNA, 25 bp, Homo sapien
ctccatccaacatattttgaagatc

SEQ ID NO: 126444 - DNA, 25 bp, Homo sapien
tttgaagatctctcggatcatggga

SEQ ID NO: 126445 - DNA, 25 bp, Homo sapien
aaattgctctctaacatgggaggag

SEQ ID NO: 126446 - DNA, 25 bp, Homo sapien
gctctctaacatgggaggagataca

SEQ ID NO: 126447 - DNA, 25 bp, Homo sapien
ggagatacaaaaggggcatactctc

SEQ ID NO: 126448 - DNA, 25 bp, Homo sapien
ataaaattgctctctaacatgggag

SEQ ID NO: 126449 - DNA, 25 bp, Homo sapien
ccttgtcacccctctgtgaaatcag

SEQ ID NO: 126450 - DNA, 25 bp, Homo sapien
cctcccttgtcacccctctgtgaaa

SEQ ID NO: 126451 - DNA, 25 bp, Homo sapien
tcccttgtcacccctctgtgaaatc

SEQ ID NO: 126452 - DNA, 25 bp, Homo sapien
cttgtcacccctctgtgaaatcagc

SEQ ID NO: 126453 - DNA, 25 bp, Homo sapien
acagtggcatcctggttccgctcgg

SEQ ID NO: 126454 - DNA, 25 bp, Homo sapien
gttccgctcggagatcggcctggta

SEQ ID NO: 126455 - DNA, 25 bp, Homo sapien
ggcatcctggttccgctcggagatc

SEQ ID NO: 126456 - DNA, 25 bp, Homo sapien
tccgctcggagatcggcctggtagc

SEQ ID NO: 126457 - DNA, 25 bp, Homo sapien
gcatgtgggtgttgactactggtcc

SEQ ID NO: 126458 - DNA, 25 bp, Homo sapien
ttggcatgtgggtgttgactactgg

SEQ ID NO: 126459 - DNA, 25 bp, Homo sapien
gtgttgactactggtccagcctgga

SEQ ID NO: 126460 - DNA, 25 bp, Homo sapien
tgggtgttgactactggtccagcct

SEQ ID NO: 126461 - DNA, 25 bp, Homo sapien
tcatagccttggtgctggccagtga

SEQ ID NO: 126462 - DNA, 25 bp, Homo sapien
catagccttggtgctggccagtgac

SEQ ID NO: 126463 - DNA, 25 bp, Homo sapien
aaagtcatagccttggtgctggcca

SEQ ID NO: 126464 - DNA, 25 bp, Homo sapien
agtcatagccttggtgctggccagt

SEQ ID NO: 126465 - DNA, 25 bp, Homo sapien
ttaatggcatagtcagcatcatcct

SEQ ID NO: 126466 - DNA, 25 bp, Homo sapien
aatggcatagtcagcatcatcctca

SEQ ID NO: 126467 - DNA, 25 bp, Homo sapien
taatggcatagtcagcatcatcctc

SEQ ID NO: 126468 - DNA, 25 bp, Homo sapien
cttaatggcatagtcagcatcatcc

SEQ ID NO: 126469 - DNA, 25 bp, Homo sapien
caacttctcatcaatctcagggtcc

SEQ ID NO: 126470 - DNA, 25 bp, Homo sapien
agcaacttctcatcaatctcagggt

SEQ ID NO: 126471 - DNA, 25 bp, Homo sapien
aaaggcgctgaaagtatcataaagc

SEQ ID NO: 126472 - DNA, 25 bp, Homo sapien
gatgaccccaaaggcgctgaaagta

SEQ ID NO: 126473 - DNA, 25 bp, Homo sapien
atagggtggttacagaggtactgcc

SEQ ID NO: 126474 - DNA, 25 bp, Homo sapien
ggtggttacagaggtactgcccatt

SEQ ID NO: 126475 - DNA, 25 bp, Homo sapien
cgaaggcataagatacggtgatagg

SEQ ID NO: 126476 - DNA, 25 bp, Homo sapien
cttggagtccttctcgaaggcataa

SEQ ID NO: 126477 - DNA, 25 bp, Homo sapien
tgccagaagtcgtccagctgctaag

SEQ ID NO: 126478 - DNA, 25 bp, Homo sapien
gctgccagaagtcgtccagctgcta

SEQ ID NO: 126479 - DNA, 25 bp, Homo sapien
gtccagctgctaagccatggcgctc

SEQ ID NO: 126480 - DNA, 25 bp, Homo sapien
gaagtcgtccagctgctaagccatg

SEQ ID NO: 126481 - DNA, 25 bp, Homo sapien
taaaccatgaggtccatggtgtgcc

SEQ ID NO: 126482 - DNA, 25 bp, Homo sapien
cactcctcctggtgggaatgggtga

SEQ ID NO: 126483 - DNA, 25 bp, Homo sapien
tgggagtgtccatgaccaggatgtc

SEQ ID NO: 126484 - DNA, 25 bp, Homo sapien
tctgagacatccctggatggggcac

SEQ ID NO: 126485 - DNA, 25 bp, Homo sapien
ccaggataaggcattccaggtggtg

SEQ ID NO: 126486 - DNA, 25 bp, Homo sapien
tgcccattggaggaggtccaggata

SEQ ID NO: 126487 - DNA, 25 bp, Homo sapien
catgggagatcagaatggaggcctt

SEQ ID NO: 126488 - DNA, 25 bp, Homo sapien
cctgggtgacccatgggagatcaga

SEQ ID NO: 126489 - DNA, 25 bp, Homo sapien
tttgcaaaatactcaggaccaacat

SEQ ID NO: 126490 - DNA, 25 bp, Homo sapien
gctacagcatctctgattggtccaa

SEQ ID NO: 126491 - DNA, 25 bp, Homo sapien
gcaaaatactcaggaccaacataaa

SEQ ID NO: 126492 - DNA, 25 bp, Homo sapien
gcatttgcaaaatactcaggaccaa

SEQ ID NO: 126493 - DNA, 25 bp, Homo sapien
aggaaaaggcgttatatgatgaaat

SEQ ID NO: 126494 - DNA, 25 bp, Homo sapien
aaaacaggaaaaggcgttatatgat

SEQ ID NO: 126495 - DNA, 25 bp, Homo sapien
gatgaaatgtgtggctttgacaacc

SEQ ID NO: 126496 - DNA, 25 bp, Homo sapien
acaggaaaaggcgttatatgatgaa

SEQ ID NO: 126497 - DNA, 25 bp, Homo sapien
cagatgcctacggtcacccagttgg

SEQ ID NO: 126498 - DNA, 25 bp, Homo sapien
aaaacagatgcctacggtcacccag

SEQ ID NO: 126499 - DNA, 25 bp, Homo sapien
cagttggctcggttatgaaggtaaa

SEQ ID NO: 126500 - DNA, 25 bp, Homo sapien
tacggtcacccagttggctcggtta

SEQ ID NO: 126501 - DNA, 25 bp, Homo sapien
tgtcagatgggccagtagcatcaca

SEQ ID NO: 126502 - DNA, 25 bp, Homo sapien
catcacattggggatcttgtgggtg

SEQ ID NO: 126503 - DNA, 25 bp, Homo sapien
gtgagcactagtttctctgcaggag

SEQ ID NO: 126504 - DNA, 25 bp, Homo sapien
ctggtgagcactagtttctctgcag

SEQ ID NO: 126505 - DNA, 25 bp, Homo sapien
tgagggccacccattgagaaaacaa

SEQ ID NO: 126506 - DNA, 25 bp, Homo sapien
gctgtaagtagtaggctcgaccact

SEQ ID NO: 126507 - DNA, 25 bp, Homo sapien
tactttcaggctcatgttctccgca

SEQ ID NO: 126508 - DNA, 25 bp, Homo sapien
gaaagagtcacaaactgcagaggga

SEQ ID NO: 126509 - DNA, 25 bp, Homo sapien
gcctgtacctgcatacatgtacggg

SEQ ID NO: 126510 - DNA, 25 bp, Homo sapien
tgctattcgtaattcctgagagact

SEQ ID NO: 126511 - DNA, 25 bp, Homo sapien
gatggctgtgaacgtggtgacatcc

SEQ ID NO: 126512 - DNA, 25 bp, Homo sapien
ggtgacatccgtcacatccatggag

SEQ ID NO: 126513 - DNA, 25 bp, Homo sapien
accactgtgactcccgagcagtttg

SEQ ID NO: 126514 - DNA, 25 bp, Homo sapien
cttgcttggccctgattaagtcatt

SEQ ID NO: 126515 - DNA, 25 bp, Homo sapien
taatatcagagctgtctgtgacttc

SEQ ID NO: 126516 - DNA, 25 bp, Homo sapien
acttctatgacttctgtgacaattc

SEQ ID NO: 126517 - DNA, 25 bp, Homo sapien
tttgtatcttgtaaacacccaggct

SEQ ID NO: 126518 - DNA, 25 bp, Homo sapien
tgtatcttgtaaacacccaggcttc

SEQ ID NO: 126519 - DNA, 25 bp, Homo sapien
tatcttgtaaacacccaggcttcag

SEQ ID NO: 126520 - DNA, 25 bp, Homo sapien
ttttgtatcttgtaaacacccaggc

SEQ ID NO: 126521 - DNA, 25 bp, Homo sapien
atggtgacatgttttgaggattctt

SEQ ID NO: 126522 - DNA, 25 bp, Homo sapien
tggtgacatgttttgaggattcttt

SEQ ID NO: 126523 - DNA, 25 bp, Homo sapien
cagtgttatgtttgagatggtgaca

SEQ ID NO: 126524 - DNA, 25 bp, Homo sapien
tcaaaagtcagtgttatgtttgaga

SEQ ID NO: 126525 - DNA, 25 bp, Homo sapien
cttcagaggtcttatccttcatctc

SEQ ID NO: 126526 - DNA, 25 bp, Homo sapien
tctactggggtcaaggtagtttgaa

SEQ ID NO: 126527 - DNA, 25 bp, Homo sapien
tgcctcactttctactggggtcaag

SEQ ID NO: 126528 - DNA, 25 bp, Homo sapien
tcactttctactggggtcaaggtag

SEQ ID NO: 126529 - DNA, 25 bp, Homo sapien
tgtcttagaattcctttggcatgtt

SEQ ID NO: 126530 - DNA, 25 bp, Homo sapien
atgtcttagaattcctttggcatgt

SEQ ID NO: 126531 - DNA, 25 bp, Homo sapien
ggttctgttgtttcacgaaatcgac

SEQ ID NO: 126532 - DNA, 25 bp, Homo sapien
gacaaccatttacagtgacactaag

SEQ ID NO: 126533 - DNA, 25 bp, Homo sapien
gacactaagagtgttgttgacacct

SEQ ID NO: 126534 - DNA, 25 bp, Homo sapien
tcgacatactatttcctggttagcc

SEQ ID NO: 126535 - DNA, 25 bp, Homo sapien
tagaagattcctggtgagcctatag

SEQ ID NO: 126536 - DNA, 25 bp, Homo sapien
taggaaaatgtctgtaggtgataac

SEQ ID NO: 126537 - DNA, 25 bp, Homo sapien
gcaattcccacattgaaccattttt

SEQ ID NO: 126538 - DNA, 25 bp, Homo sapien
ttgagctcctagtcctggaagaaag

SEQ ID NO: 126539 - DNA, 25 bp, Homo sapien
tatctattgccagtcactccatagg

SEQ ID NO: 126540 - DNA, 25 bp, Homo sapien
atatagggtttcaaagagacctggg

SEQ ID NO: 126541 - DNA, 25 bp, Homo sapien
tgctgctgagccgtgtaaataaata

SEQ ID NO: 126542 - DNA, 25 bp, Homo sapien
tattcaatctgtaaaagccgtaaaa

SEQ ID NO: 126543 - DNA, 25 bp, Homo sapien
gaagtgtttgattcagttctcaagc

SEQ ID NO: 126544 - DNA, 25 bp, Homo sapien
ctgaagtgtttgattcagttctcaa

SEQ ID NO: 126545 - DNA, 25 bp, Homo sapien
agtgtttgattcagttctcaagctc

SEQ ID NO: 126546 - DNA, 25 bp, Homo sapien
tgaagtgtttgattcagttctcaag

SEQ ID NO: 126547 - DNA, 25 bp, Homo sapien
tacagggtgttaagtgagagtaaaa

SEQ ID NO: 126548 - DNA, 25 bp, Homo sapien
tcttggggtacagggtgttaagtga

SEQ ID NO: 126549 - DNA, 25 bp, Homo sapien
tgtatggaaggggaacaggtgattt

SEQ ID NO: 126550 - DNA, 25 bp, Homo sapien
gggaaagaaatgctaatcaggggaa

SEQ ID NO: 126551 - DNA, 25 bp, Homo sapien
agaatcagagataagcccataattt

SEQ ID NO: 126552 - DNA, 25 bp, Homo sapien
aatcagagataagcccataatttgg

SEQ ID NO: 126553 - DNA, 25 bp, Homo sapien
gagataagcccataatttgggctca

SEQ ID NO: 126554 - DNA, 25 bp, Homo sapien
cagagataagcccataatttgggct

SEQ ID NO: 126555 - DNA, 25 bp, Homo sapien
tttgaggaaattagaaggagatttg

SEQ ID NO: 126556 - DNA, 25 bp, Homo sapien
attagaaggagatttgatatgaggg

SEQ ID NO: 126557 - DNA, 25 bp, Homo sapien
gcagacagatgaggcacaagtttga

SEQ ID NO: 126558 - DNA, 25 bp, Homo sapien
cagatgaggcacaagtttgaggaaa

SEQ ID NO: 126559 - DNA, 25 bp, Homo sapien
ttagtttgtcttacatgtttttcca

SEQ ID NO: 126560 - DNA, 25 bp, Homo sapien
ttacatgtttttccatcaactttgt

SEQ ID NO: 126561 - DNA, 25 bp, Homo sapien
tttgtcttacatgtttttccatcaa

SEQ ID NO: 126562 - DNA, 25 bp, Homo sapien
gtcttacatgtttttccatcaactt

SEQ ID NO: 126563 - DNA, 25 bp, Homo sapien
gttaataaacaaaatgctcagccag

SEQ ID NO: 126564 - DNA, 25 bp, Homo sapien
tgttctcctctggtccattaccttt

SEQ ID NO: 126565 - DNA, 25 bp, Homo sapien
tacagtgtgcatcttggggggccct

SEQ ID NO: 126566 - DNA, 25 bp, Homo sapien
attacctttcacctacagtgtgcat

SEQ ID NO: 126567 - DNA, 25 bp, Homo sapien
aataagagtccaaataactttcaca

SEQ ID NO: 126568 - DNA, 25 bp, Homo sapien
tctaccttttcccatatatcagcaa

SEQ ID NO: 126569 - DNA, 25 bp, Homo sapien
tactgagtcctaagatttggtcata

SEQ ID NO: 126570 - DNA, 25 bp, Homo sapien
ttggtcataagacctacaaacatca

SEQ ID NO: 126571 - DNA, 25 bp, Homo sapien
gagaagtcagttcatttaattcaaa

SEQ ID NO: 126572 - DNA, 25 bp, Homo sapien
gcactgattgtctttccctgagctg

SEQ ID NO: 126573 - DNA, 25 bp, Homo sapien
tgattagtcataggctttatttctg

SEQ ID NO: 126574 - DNA, 25 bp, Homo sapien
ttctgccacgtagaagacactgctt

SEQ ID NO: 126575 - DNA, 25 bp, Homo sapien
taacctctaagcttcactttcacca

SEQ ID NO: 126576 - DNA, 25 bp, Homo sapien
aacctctaagcttcactttcaccac

SEQ ID NO: 126577 - DNA, 25 bp, Homo sapien
ttaacctctaagcttcactttcacc

SEQ ID NO: 126578 - DNA, 25 bp, Homo sapien
ctttaacctctaagcttcactttca

SEQ ID NO: 126579 - DNA, 25 bp, Homo sapien
gtgggccaagagactaggtagatgg

SEQ ID NO: 126580 - DNA, 25 bp, Homo sapien
cctcttggtttcatggaatctctgt

SEQ ID NO: 126581 - DNA, 25 bp, Homo sapien
gactaggtagatggtttttctctag

SEQ ID NO: 126582 - DNA, 25 bp, Homo sapien
gaggaggaggaattccctaggctgt

SEQ ID NO: 126583 - DNA, 25 bp, Homo sapien
cattgtgctataggcactgaaatct

SEQ ID NO: 126584 - DNA, 25 bp, Homo sapien
taatgggctaagcattgtgctatag

SEQ ID NO: 126585 - DNA, 25 bp, Homo sapien
gcattgtgctataggcactgaaatc

SEQ ID NO: 126586 - DNA, 25 bp, Homo sapien
tcactcatttaatgggctaagcatt

SEQ ID NO: 126587 - DNA, 25 bp, Homo sapien
gaacacttgcaaggtttgttaatcg

SEQ ID NO: 126588 - DNA, 25 bp, Homo sapien
catctcgcaatgtcctcaggtcctg

SEQ ID NO: 126589 - DNA, 25 bp, Homo sapien
taatcgacctctccttctatgaggc

SEQ ID NO: 126590 - DNA, 25 bp, Homo sapien
attcttccccattacgctcctctgg

SEQ ID NO: 126591 - DNA, 25 bp, Homo sapien
cagagttacgcagatcagcccgtgc

SEQ ID NO: 126592 - DNA, 25 bp, Homo sapien
tgtgtgcagtgtcccgcagaagact

SEQ ID NO: 126593 - DNA, 25 bp, Homo sapien
tcccagaagtctcccgaagggacag

SEQ ID NO: 126594 - DNA, 25 bp, Homo sapien
ccagaaagcaaggatagcaaggact

SEQ ID NO: 126595 - DNA, 25 bp, Homo sapien
tcctacgcactgcagaagcgacagc

SEQ ID NO: 126596 - DNA, 25 bp, Homo sapien
gagagcgcccgctcattggtcctct

SEQ ID NO: 126597 - DNA, 25 bp, Homo sapien
aactccacttctagaccgcgcgaga

SEQ ID NO: 126598 - DNA, 25 bp, Homo sapien
taaagaatccagaaactcccgactc

SEQ ID NO: 126599 - DNA, 25 bp, Homo sapien
caatgagcagcagaataccagcagc

SEQ ID NO: 126600 - DNA, 25 bp, Homo sapien
tctgacttctaaaggaaagcgttcc

SEQ ID NO: 126601 - DNA, 25 bp, Homo sapien
gaggaacgctgactacattctgact

SEQ ID NO: 126602 - DNA, 25 bp, Homo sapien
caggaactgtttgcgtgtttaagaa

SEQ ID NO: 126603 - DNA, 25 bp, Homo sapien
tggcacttgcagtaggtcccagcta

SEQ ID NO: 126604 - DNA, 25 bp, Homo sapien
ctgccgtgagcagtgctgcgccact

SEQ ID NO: 126605 - DNA, 25 bp, Homo sapien
agtgctgcgccactacactttagcc

SEQ ID NO: 126606 - DNA, 25 bp, Homo sapien
catagtggcacttgcagtaggtccc

SEQ ID NO: 126607 - DNA, 25 bp, Homo sapien
ggcaggctatattacagacaaagca

SEQ ID NO: 126608 - DNA, 25 bp, Homo sapien
tctatcacttataataggactatgg

SEQ ID NO: 126609 - DNA, 25 bp, Homo sapien
aattaattcaactcctttctatcac

SEQ ID NO: 126610 - DNA, 25 bp, Homo sapien
taaaataagtcttaaggcaggctat

SEQ ID NO: 126611 - DNA, 25 bp, Homo sapien
tgtgccattccgagctttttttcat

SEQ ID NO: 126612 - DNA, 25 bp, Homo sapien
ctgatgacatcaaatgtgtgggtct

SEQ ID NO: 126613 - DNA, 25 bp, Homo sapien
tacctggagttacaatcagatccca

SEQ ID NO: 126614 - DNA, 25 bp, Homo sapien
caattctctggacaccgactgggtg

SEQ ID NO: 126615 - DNA, 25 bp, Homo sapien
gcagagtccgtatccttaagaaact

SEQ ID NO: 126616 - DNA, 25 bp, Homo sapien
gaggcagagtccgtatccttaagaa

SEQ ID NO: 126617 - DNA, 25 bp, Homo sapien
tgaggcagagtccgtatccttaaga

SEQ ID NO: 126618 - DNA, 25 bp, Homo sapien
ggcagagtccgtatccttaagaaac

SEQ ID NO: 126619 - DNA, 25 bp, Homo sapien
ttcattcaacaaggcgagtacccac

SEQ ID NO: 126620 - DNA, 25 bp, Homo sapien
attcaacaaggcgagtacccacttg

SEQ ID NO: 126621 - DNA, 25 bp, Homo sapien
tcattcaacaaggcgagtacccact

SEQ ID NO: 126622 - DNA, 25 bp, Homo sapien
tcaacaaggcgagtacccacttggt

SEQ ID NO: 126623 - DNA, 25 bp, Homo sapien
agacaagatcaggcacagtcagggt

SEQ ID NO: 126624 - DNA, 25 bp, Homo sapien
cagtcagggtggtatggccgtagag

SEQ ID NO: 126625 - DNA, 25 bp, Homo sapien
gatcagacaagatcaggcacagtca

SEQ ID NO: 126626 - DNA, 25 bp, Homo sapien
tcagacaagatcaggcacagtcagg

SEQ ID NO: 126627 - DNA, 25 bp, Homo sapien
tgctgtatatggctaataatgaaga

SEQ ID NO: 126628 - DNA, 25 bp, Homo sapien
tggctttgctgtatatggctaataa

SEQ ID NO: 126629 - DNA, 25 bp, Homo sapien
ctgtatatggctaataatgaagaat

SEQ ID NO: 126630 - DNA, 25 bp, Homo sapien
tatggctttgctgtatatggctaat

SEQ ID NO: 126631 - DNA, 25 bp, Homo sapien
gcgtgtcactgcaactggttaattt

SEQ ID NO: 126632 - DNA, 25 bp, Homo sapien
ttacaggggcgtgtcactgcaactg

SEQ ID NO: 126633 - DNA, 25 bp, Homo sapien
tacaggggcgtgtcactgcaactgg

SEQ ID NO: 126634 - DNA, 25 bp, Homo sapien
ggggcgtgtcactgcaactggttaa

SEQ ID NO: 126635 - DNA, 25 bp, Homo sapien
attatgcaaactggaaaagcctttt

SEQ ID NO: 126636 - DNA, 25 bp, Homo sapien
tatgcaaactggaaaagccttttct

SEQ ID NO: 126637 - DNA, 25 bp, Homo sapien
tgcaaactggaaaagccttttctac

SEQ ID NO: 126638 - DNA, 25 bp, Homo sapien
ctggaaaagccttttctactgtcct

SEQ ID NO: 126639 - DNA, 25 bp, Homo sapien
tgagactggagggactgaaatagcc

SEQ ID NO: 126640 - DNA, 25 bp, Homo sapien
gaatccgtaacattgcccagcagaa

SEQ ID NO: 126641 - DNA, 25 bp, Homo sapien
gatggctttcacactacctggagaa

SEQ ID NO: 126642 - DNA, 25 bp, Homo sapien
tcaagacaggtcagcagaaatccaa

SEQ ID NO: 126643 - DNA, 25 bp, Homo sapien
attttggttatctccccaggaatgt

SEQ ID NO: 126644 - DNA, 25 bp, Homo sapien
tatctccccaggaatgttcagtcta

SEQ ID NO: 126645 - DNA, 25 bp, Homo sapien
tttctataacctggtagtaatctgc

SEQ ID NO: 126646 - DNA, 25 bp, Homo sapien
tataacctggtagtaatctgcttta

SEQ ID NO: 126647 - DNA, 25 bp, Homo sapien
tacatctgtgtccatattcactaca

SEQ ID NO: 126648 - DNA, 25 bp, Homo sapien
tatttctcaggcatacataggcagg

SEQ ID NO: 126649 - DNA, 25 bp, Homo sapien
tattcataggattgacagttctgag

SEQ ID NO: 126650 - DNA, 25 bp, Homo sapien
aacaagttggttagagcacaatgcc

SEQ ID NO: 126651 - DNA, 25 bp, Homo sapien
catcttgggtcataatgcaaacagg

SEQ ID NO: 126652 - DNA, 25 bp, Homo sapien
tctcacatcacataataatgctatg

SEQ ID NO: 126653 - DNA, 25 bp, Homo sapien
cttctcacatcacataataatgcta

SEQ ID NO: 126654 - DNA, 25 bp, Homo sapien
caatttttcctataagccaattctc

SEQ ID NO: 126655 - DNA, 25 bp, Homo sapien
aattctcttgattctgtagtataaa

SEQ ID NO: 126656 - DNA, 25 bp, Homo sapien
gcccattcatatgggatgttgtcat

SEQ ID NO: 126657 - DNA, 25 bp, Homo sapien
taacatgcccattcatatgggatgt

SEQ ID NO: 126658 - DNA, 25 bp, Homo sapien
catgcccattcatatgggatgttgt

SEQ ID NO: 126659 - DNA, 25 bp, Homo sapien
ctgtaacatgcccattcatatggga

SEQ ID NO: 126660 - DNA, 25 bp, Homo sapien
attttttacttcgctgtctgattcc

SEQ ID NO: 126661 - DNA, 25 bp, Homo sapien
aacattttttacttcgctgtctgat

SEQ ID NO: 126662 - DNA, 25 bp, Homo sapien
tcaacattttttacttcgctgtctg

SEQ ID NO: 126663 - DNA, 25 bp, Homo sapien
ttttttacttcgctgtctgattcct

SEQ ID NO: 126664 - DNA, 25 bp, Homo sapien
tgtcctcctgttgttgccgaatacg

SEQ ID NO: 126665 - DNA, 25 bp, Homo sapien
aactgtgcacttcgacgtattggca

SEQ ID NO: 126666 - DNA, 25 bp, Homo sapien
tccagggcagtcaacagccatctct

SEQ ID NO: 126667 - DNA, 25 bp, Homo sapien
cacagcataatgaggactttctaag

SEQ ID NO: 126668 - DNA, 25 bp, Homo sapien
ggctttaaatgttagggcccatgca

SEQ ID NO: 126669 - DNA, 25 bp, Homo sapien
taagccacatgcttttagctctatg

SEQ ID NO: 126670 - DNA, 25 bp, Homo sapien
ggcccatgcagaactctttaatatc

SEQ ID NO: 126671 - DNA, 25 bp, Homo sapien
acaatagttatacggcgtttccacg

SEQ ID NO: 126672 - DNA, 25 bp, Homo sapien
cctggcccaaaattacttaactgag

SEQ ID NO: 126673 - DNA, 25 bp, Homo sapien
tcacatatatgatagatggcagtca

SEQ ID NO: 126674 - DNA, 25 bp, Homo sapien
gaaagcccctaatcacaaattccag

SEQ ID NO: 126675 - DNA, 25 bp, Homo sapien
tcctgacactgcttcaaagacaaca

SEQ ID NO: 126676 - DNA, 25 bp, Homo sapien
gcctccaaaggtgctactaatacgg

SEQ ID NO: 126677 - DNA, 25 bp, Homo sapien
ccacaaattttatggactacagagt

SEQ ID NO: 126678 - DNA, 25 bp, Homo sapien
taagaaattagtggttaagatccac

SEQ ID NO: 126679 - DNA, 25 bp, Homo sapien
acgcctgcctgcacaaccttgtgag

SEQ ID NO: 126680 - DNA, 25 bp, Homo sapien
tactaagtaggaggaaattacatca

SEQ ID NO: 126681 - DNA, 25 bp, Homo sapien
gtttccagtacatctacctgtggaa

SEQ ID NO: 126682 - DNA, 25 bp, Homo sapien
caactcttttaacctgtcctcagaa

SEQ ID NO: 126683 - DNA, 25 bp, Homo sapien
cctctaaactgtagggtcaaatatg

SEQ ID NO: 126684 - DNA, 25 bp, Homo sapien
caccacgcgcagccataaagggtac

SEQ ID NO: 126685 - DNA, 25 bp, Homo sapien
accacgcgcagccataaagggtaca

SEQ ID NO: 126686 - DNA, 25 bp, Homo sapien
ctggctagagttcggtggtgtgaac

SEQ ID NO: 126687 - DNA, 25 bp, Homo sapien
cctggctagagttcggtggtgtgaa

SEQ ID NO: 126688 - DNA, 25 bp, Homo sapien
cccagaaatagaacttttagataag

SEQ ID NO: 126689 - DNA, 25 bp, Homo sapien
tctagggaggctttactaatctgca

SEQ ID NO: 126690 - DNA, 25 bp, Homo sapien
tatttgactagtaaggaagttgagg

SEQ ID NO: 126691 - DNA, 25 bp, Homo sapien
tatattctattacatggctaaacca

SEQ ID NO: 126692 - DNA, 25 bp, Homo sapien
ttggatatgtttaagtgaagaaaac

SEQ ID NO: 126693 - DNA, 25 bp, Homo sapien
caaagtatgttggatatgtttaagt

SEQ ID NO: 126694 - DNA, 25 bp, Homo sapien
tatgttggatatgtttaagtgaaga

SEQ ID NO: 126695 - DNA, 25 bp, Homo sapien
ctaccaaagtatgttggatatgttt

SEQ ID NO: 126696 - DNA, 25 bp, Homo sapien
ttgtaaaagcagtgaaatatcctcc

SEQ ID NO: 126697 - DNA, 25 bp, Homo sapien
tcttgagcaagatcttgtgcgttgg

SEQ ID NO: 126698 - DNA, 25 bp, Homo sapien
gtgtactgtgatggcattgtgtatc

SEQ ID NO: 126699 - DNA, 25 bp, Homo sapien
tcttaaatgcattctggaaatcctt

SEQ ID NO: 126700 - DNA, 25 bp, Homo sapien
ttgtagacatcaacaagatgtttag

SEQ ID NO: 126701 - DNA, 25 bp, Homo sapien
cttgtagacatcaacaagatgttta

SEQ ID NO: 126702 - DNA, 25 bp, Homo sapien
ccttgtagacatcaacaagatgttt

SEQ ID NO: 126703 - DNA, 25 bp, Homo sapien
taacagatcaaacactgaacaccag

SEQ ID NO: 126704 - DNA, 25 bp, Homo sapien
gtccagaattgcctacatgtgtgaa

SEQ ID NO: 126705 - DNA, 25 bp, Homo sapien
ggttctgtagctctagatgtcctcc

SEQ ID NO: 126706 - DNA, 25 bp, Homo sapien
tgaacaccagttagcatcagaaaca

SEQ ID NO: 126707 - DNA, 25 bp, Homo sapien
tcaattggagcaattgtgatctgtc

SEQ ID NO: 126708 - DNA, 25 bp, Homo sapien
ttgtatttagcaaaacaaggaccca

SEQ ID NO: 126709 - DNA, 25 bp, Homo sapien
tcatcagctacttctacaacggtgt

SEQ ID NO: 126710 - DNA, 25 bp, Homo sapien
tacaactcaagacgattaaaatgga

SEQ ID NO: 126711 - DNA, 25 bp, Homo sapien
gatctaaccggatatttcacaaaag

SEQ ID NO: 126712 - DNA, 25 bp, Homo sapien
tccttcagaggcaagacccttttgt

SEQ ID NO: 126713 - DNA, 25 bp, Homo sapien
aatatgtggagtattcagcaaagca

SEQ ID NO: 126714 - DNA, 25 bp, Homo sapien
tcttgtccttccttatgatgaactg

SEQ ID NO: 126715 - DNA, 25 bp, Homo sapien
tgtccttccttatgatgaactggct

SEQ ID NO: 126716 - DNA, 25 bp, Homo sapien
gagtattcagcaaagcagttagttc

SEQ ID NO: 126717 - DNA, 25 bp, Homo sapien
tccatggcattttaagtaacagcat

SEQ ID NO: 126718 - DNA, 25 bp, Homo sapien
tgtttcaaagaaatccatggcattt

SEQ ID NO: 126719 - DNA, 25 bp, Homo sapien
aatccatggcattttaagtaacagc

SEQ ID NO: 126720 - DNA, 25 bp, Homo sapien
aaagaaatccatggcattttaagta

SEQ ID NO: 126721 - DNA, 25 bp, Homo sapien
agtttctcctccatactggccaata

SEQ ID NO: 126722 - DNA, 25 bp, Homo sapien
tctgtaatgggctctagctgcattt

SEQ ID NO: 126723 - DNA, 25 bp, Homo sapien
caacggaatatcacgagccttttct

SEQ ID NO: 126724 - DNA, 25 bp, Homo sapien
cagcaaccttatcgtgggccagtaa

SEQ ID NO: 126725 - DNA, 25 bp, Homo sapien
caactagagtaattgtaattagatt

SEQ ID NO: 126726 - DNA, 25 bp, Homo sapien
atttacacaactagagtaattgtaa

SEQ ID NO: 126727 - DNA, 25 bp, Homo sapien
tatttacacaactagagtaattgta

SEQ ID NO: 126728 - DNA, 25 bp, Homo sapien
ctagagtaattgtaattagatttaa

SEQ ID NO: 126729 - DNA, 25 bp, Homo sapien
tgccattaatctctagaacttcatc

SEQ ID NO: 126730 - DNA, 25 bp, Homo sapien
tactatccggctaatgatgacagag

SEQ ID NO: 126731 - DNA, 25 bp, Homo sapien
tccttcatgcaacagaccacttttc

SEQ ID NO: 126732 - DNA, 25 bp, Homo sapien
cattgacatctttcccccgaatttc

SEQ ID NO: 126733 - DNA, 25 bp, Homo sapien
ggaatcaggacaaaagtcaaagtac

SEQ ID NO: 126734 - DNA, 25 bp, Homo sapien
gcggcttgatctgttgactgggaat

SEQ ID NO: 126735 - DNA, 25 bp, Homo sapien
ggcaggaggcggcttgatctgttga

SEQ ID NO: 126736 - DNA, 25 bp, Homo sapien
caggaggcggcttgatctgttgact

SEQ ID NO: 126737 - DNA, 25 bp, Homo sapien
aaccacctggacagtgtacttggga

SEQ ID NO: 126738 - DNA, 25 bp, Homo sapien
tggtgacgccctcaaaatcaaagag

SEQ ID NO: 126739 - DNA, 25 bp, Homo sapien
gatctatattccacttgctcaatgg

SEQ ID NO: 126740 - DNA, 25 bp, Homo sapien
gtactcatgaaggtaaggctatcac

SEQ ID NO: 126741 - DNA, 25 bp, Homo sapien
gatgaattctcatgccgcacctcag

SEQ ID NO: 126742 - DNA, 25 bp, Homo sapien
gctcatcctaaatgcaaagtgccct

SEQ ID NO: 126743 - DNA, 25 bp, Homo sapien
tctgaaagcctacccagtatgttgt

SEQ ID NO: 126744 - DNA, 25 bp, Homo sapien
gtttttgctcagatcacctgcctag

SEQ ID NO: 126745 - DNA, 25 bp, Homo sapien
caagcccggctagaggttgattatc

SEQ ID NO: 126746 - DNA, 25 bp, Homo sapien
aggcctgccaccagtttggatcttc

SEQ ID NO: 126747 - DNA, 25 bp, Homo sapien
gactgatcacatgaagtatatcacc

SEQ ID NO: 126748 - DNA, 25 bp, Homo sapien
gacagacctaactctcgacatggaa

SEQ ID NO: 126749 - DNA, 25 bp, Homo sapien
tcctggatcttacaatggttctagg

SEQ ID NO: 126750 - DNA, 25 bp, Homo sapien
tccaaaacaacatgtgcgcattcat

SEQ ID NO: 126751 - DNA, 25 bp, Homo sapien
caatcccatatgtattattagaata

SEQ ID NO: 126752 - DNA, 25 bp, Homo sapien
tcagtatattcccttgcatgcatta

SEQ ID NO: 126753 - DNA, 25 bp, Homo sapien
gctccttatcttcttctatggtttg

SEQ ID NO: 126754 - DNA, 25 bp, Homo sapien
cttccctttgctgctgaaagctttt

SEQ ID NO: 126755 - DNA, 25 bp, Homo sapien
tggtttgtttcatggcttccctttg

SEQ ID NO: 126756 - DNA, 25 bp, Homo sapien
ctggctccttatcttcttctatggt

SEQ ID NO: 126757 - DNA, 25 bp, Homo sapien
attcttctttgcacaccacagtttt

SEQ ID NO: 126758 - DNA, 25 bp, Homo sapien
tattcttctttgcacaccacagttt

SEQ ID NO: 126759 - DNA, 25 bp, Homo sapien
ttcttctttgcacaccacagttttc

SEQ ID NO: 126760 - DNA, 25 bp, Homo sapien
ccagagctgtcaagtggtaagaaca

SEQ ID NO: 126761 - DNA, 25 bp, Homo sapien
agataactagtagcctgccaagtcc

SEQ ID NO: 126762 - DNA, 25 bp, Homo sapien
ttaggcttgtcaatgctcagcacag

SEQ ID NO: 126763 - DNA, 25 bp, Homo sapien
catcagatgtgaagtcagactccct

SEQ ID NO: 126764 - DNA, 25 bp, Homo sapien
ttctggccacagttctgtggaccaa

SEQ ID NO: 126765 - DNA, 25 bp, Homo sapien
cataggttaagatctcctcgttgtc

SEQ ID NO: 126766 - DNA, 25 bp, Homo sapien
aaagcggtccttttctttgttcatg

SEQ ID NO: 126767 - DNA, 25 bp, Homo sapien
tgttcatgagcctctgacgcaattc

SEQ ID NO: 126768 - DNA, 25 bp, Homo sapien
ttggtctcgcctactccgggttgta

SEQ ID NO: 126769 - DNA, 25 bp, Homo sapien
tcacttgccgtacagaatctatgct

SEQ ID NO: 126770 - DNA, 25 bp, Homo sapien
tatgtctgcctcgaatgcttgccgc

SEQ ID NO: 126771 - DNA, 25 bp, Homo sapien
tgcttgccgcgaaacaaagtggtaa

SEQ ID NO: 126772 - DNA, 25 bp, Homo sapien
cacattggcgtcctaaaattatcat

SEQ ID NO: 126773 - DNA, 25 bp, Homo sapien
tagaaagctaagaggcactagttag

SEQ ID NO: 126774 - DNA, 25 bp, Homo sapien
ttattttcatacaaccaagcattca

SEQ ID NO: 126775 - DNA, 25 bp, Homo sapien
ctcatatcggaatcagaaaagggaa

SEQ ID NO: 126776 - DNA, 25 bp, Homo sapien
ctttggccaataatgcccgaagtct

SEQ ID NO: 126777 - DNA, 25 bp, Homo sapien
tctgaattccggagagtcttcaatg

SEQ ID NO: 126778 - DNA, 25 bp, Homo sapien
gggtgcaatgaagataatatatggt

SEQ ID NO: 126779 - DNA, 25 bp, Homo sapien
tatggtttcaaatctgaattccgga

SEQ ID NO: 126780 - DNA, 25 bp, Homo sapien
acatgattgtacatgtagaaaactc

SEQ ID NO: 126781 - DNA, 25 bp, Homo sapien
acatgtagaaaactccatcgtctca

SEQ ID NO: 126782 - DNA, 25 bp, Homo sapien
tgtacatgtagaaaactccatcgtc

SEQ ID NO: 126783 - DNA, 25 bp, Homo sapien
attgtacatgtagaaaactccatcg

SEQ ID NO: 126784 - DNA, 25 bp, Homo sapien
catattatgaaccatctgggactca

SEQ ID NO: 126785 - DNA, 25 bp, Homo sapien
tgaatatggcacacagaatcctttg

SEQ ID NO: 126786 - DNA, 25 bp, Homo sapien
taattatcaggcacatgggttcaag

SEQ ID NO: 126787 - DNA, 25 bp, Homo sapien
cctttctggttggagcaaggaccta

SEQ ID NO: 126788 - DNA, 25 bp, Homo sapien
gaagataaaaactgtgagataattc

SEQ ID NO: 126789 - DNA, 25 bp, Homo sapien
aagataaaaactgtgagataattcc

SEQ ID NO: 126790 - DNA, 25 bp, Homo sapien
gataaaaactgtgagataattcctt

SEQ ID NO: 126791 - DNA, 25 bp, Homo sapien
cagaagataaaaactgtgagataat

SEQ ID NO: 126792 - DNA, 25 bp, Homo sapien
taacctaagcaattcctgataggct

SEQ ID NO: 126793 - DNA, 25 bp, Homo sapien
tggatggtacccactgaggttcagt

SEQ ID NO: 126794 - DNA, 25 bp, Homo sapien
tcaagatcggaattcacaattgccg

SEQ ID NO: 126795 - DNA, 25 bp, Homo sapien
caattgccgtatcaaagtagtggcc

SEQ ID NO: 126796 - DNA, 25 bp, Homo sapien
caaagtagcttcaacccaaagtggc

SEQ ID NO: 126797 - DNA, 25 bp, Homo sapien
taaaggatgccatgcacaaactgcc

SEQ ID NO: 126798 - DNA, 25 bp, Homo sapien
gaatcccaaaatgaggcaagaaccg

SEQ ID NO: 126799 - DNA, 25 bp, Homo sapien
tgcctaagggaactgtcgtctcact

SEQ ID NO: 126800 - DNA, 25 bp, Homo sapien
taaaagtatggcatggcatcacctc

SEQ ID NO: 126801 - DNA, 25 bp, Homo sapien
caactaggtgtacagcaaggctttt

SEQ ID NO: 126802 - DNA, 25 bp, Homo sapien
taatgctaaaaatcggtgtgacctg

SEQ ID NO: 126803 - DNA, 25 bp, Homo sapien
gaatcttgacagcacatggccctag

SEQ ID NO: 126804 - DNA, 25 bp, Homo sapien
tacagtgtacagtatgacatctcaa

SEQ ID NO: 126805 - DNA, 25 bp, Homo sapien
atgacatctcaaaataacagtgcag

SEQ ID NO: 126806 - DNA, 25 bp, Homo sapien
tacaaagggggattaacaacagatg

SEQ ID NO: 126807 - DNA, 25 bp, Homo sapien
tttacaatacagtgtacagtatgac

SEQ ID NO: 126808 - DNA, 25 bp, Homo sapien
ccttgagtggccgagcaaatagcaa

SEQ ID NO: 126809 - DNA, 25 bp, Homo sapien
tgacctttgggagatgtacagcaga

SEQ ID NO: 126810 - DNA, 25 bp, Homo sapien
tcccaggctgcacataaggtccatt

SEQ ID NO: 126811 - DNA, 25 bp, Homo sapien
ttgacaagtcaaagagcacagctgg

SEQ ID NO: 126812 - DNA, 25 bp, Homo sapien
gattttgcaagcatttaacatctcc

SEQ ID NO: 126813 - DNA, 25 bp, Homo sapien
ccagccagtctaggcagttttaaag

SEQ ID NO: 126814 - DNA, 25 bp, Homo sapien
ttaacatctcctataagatagcagg

SEQ ID NO: 126815 - DNA, 25 bp, Homo sapien
gatagcaggtcttagttatgtgcca

SEQ ID NO: 126816 - DNA, 25 bp, Homo sapien
taatagagagaactcattacctttg

SEQ ID NO: 126817 - DNA, 25 bp, Homo sapien
tgtgcgtaatagagagaactcatta

SEQ ID NO: 126818 - DNA, 25 bp, Homo sapien
gattgtgcgtaatagagagaactca

SEQ ID NO: 126819 - DNA, 25 bp, Homo sapien
gtaactgattgtgcgtaatagagag

SEQ ID NO: 126820 - DNA, 25 bp, Homo sapien
tcaaggcgcgagaaagacataggac

SEQ ID NO: 126821 - DNA, 25 bp, Homo sapien
ttagctaagtaaccttcaaggcgcg

SEQ ID NO: 126822 - DNA, 25 bp, Homo sapien
ggcgctgtgaccaaagacgaaaggt

SEQ ID NO: 126823 - DNA, 25 bp, Homo sapien
cctccgagaacaaggacgaatgtag

SEQ ID NO: 126824 - DNA, 25 bp, Homo sapien
tcctcgcatgcgcaagcgctgaacg

SEQ ID NO: 126825 - DNA, 25 bp, Homo sapien
gcggaacctcctcgcatgcgcaagc

SEQ ID NO: 126826 - DNA, 25 bp, Homo sapien
cgcaagcgctgaacgaatagaggcc

SEQ ID NO: 126827 - DNA, 25 bp, Homo sapien
cgctgaacgaatagaggcccctctt

SEQ ID NO: 126828 - DNA, 25 bp, Homo sapien
cctcctcagcgtgcgcttcgctcac

SEQ ID NO: 126829 - DNA, 25 bp, Homo sapien
tcctcctcagcgtgcgcttcgctca

SEQ ID NO: 126830 - DNA, 25 bp, Homo sapien
gtgtgattcccgcactggagcccag

SEQ ID NO: 126831 - DNA, 25 bp, Homo sapien
agcccagagccgacttcttcaatca

SEQ ID NO: 126832 - DNA, 25 bp, Homo sapien
ctggagcccagagccgacttcttca

SEQ ID NO: 126833 - DNA, 25 bp, Homo sapien
tgattcccgcactggagcccagagc

SEQ ID NO: 126834 - DNA, 25 bp, Homo sapien
ggagccggcgaggaggcccacgaca

SEQ ID NO: 126835 - DNA, 25 bp, Homo sapien
cacggagccggcgaggaggcccacg

SEQ ID NO: 126836 - DNA, 25 bp, Homo sapien
ctacacggagccggcgaggaggccc

SEQ ID NO: 126837 - DNA, 25 bp, Homo sapien
gagccggcgaggaggcccacgacag

SEQ ID NO: 126838 - DNA, 25 bp, Homo sapien
cttcacgagattcctctgctcgaac

SEQ ID NO: 126839 - DNA, 25 bp, Homo sapien
cactttccttcacgagattcctctg

SEQ ID NO: 126840 - DNA, 25 bp, Homo sapien
tttcggcatattgtagaggctgtac

SEQ ID NO: 126841 - DNA, 25 bp, Homo sapien
gaggctgtacaatccactcggccca

SEQ ID NO: 126842 - DNA, 25 bp, Homo sapien
tgagaccgccccatcgtcatggcat

SEQ ID NO: 126843 - DNA, 25 bp, Homo sapien
tgtcacagcgttctcctgagaccgc

SEQ ID NO: 126844 - DNA, 25 bp, Homo sapien
ttacggtgtcacagcgttctcctga

SEQ ID NO: 126845 - DNA, 25 bp, Homo sapien
gagaccgccccatcgtcatggcatt

SEQ ID NO: 126846 - DNA, 25 bp, Homo sapien
ggatctgacattcaccatcactaca

SEQ ID NO: 126847 - DNA, 25 bp, Homo sapien
ttcagcaatggatctgacattcacc

SEQ ID NO: 126848 - DNA, 25 bp, Homo sapien
ccacctcaggaaatttgtgttgata

SEQ ID NO: 126849 - DNA, 25 bp, Homo sapien
taaaatctacaacttagacccggca

SEQ ID NO: 126850 - DNA, 25 bp, Homo sapien
tgttgttgtattccagcaagctgac

SEQ ID NO: 126851 - DNA, 25 bp, Homo sapien
cattcctgccaattcggatgagttt

SEQ ID NO: 126852 - DNA, 25 bp, Homo sapien
gatacgccttctggataattcacta

SEQ ID NO: 126853 - DNA, 25 bp, Homo sapien
agtttgttgatagaacggatacgcc

SEQ ID NO: 126854 - DNA, 25 bp, Homo sapien
gtttcagtagttcagggacaaacca

SEQ ID NO: 126855 - DNA, 25 bp, Homo sapien
tttagcaggcagtcagaatctgaac

SEQ ID NO: 126856 - DNA, 25 bp, Homo sapien
gtctccccagatggtaagcaactga

SEQ ID NO: 126857 - DNA, 25 bp, Homo sapien
tggagtccaccctgtgtttcagtag

SEQ ID NO: 126858 - DNA, 25 bp, Homo sapien
ccccctacctcagccgcccgagaag

SEQ ID NO: 126859 - DNA, 25 bp, Homo sapien
gtgcagcggtgcaatcttggctcac

SEQ ID NO: 126860 - DNA, 25 bp, Homo sapien
gtctggttctatcacccaggttgga

SEQ ID NO: 126861 - DNA, 25 bp, Homo sapien
actgcagcctccgcctcctgggctc

SEQ ID NO: 126862 - DNA, 25 bp, Homo sapien
ttcaaactagccaactgcaagccgt

SEQ ID NO: 126863 - DNA, 25 bp, Homo sapien
catgcctttcttatgcagagcagcc

SEQ ID NO: 126864 - DNA, 25 bp, Homo sapien
tcaagggccaggtattagacaagca

SEQ ID NO: 126865 - DNA, 25 bp, Homo sapien
gagcagccaatctggagcccataaa

SEQ ID NO: 126866 - DNA, 25 bp, Homo sapien
gagtatactaaacaacctatgtgtg

SEQ ID NO: 126867 - DNA, 25 bp, Homo sapien
tgctcaggctgtaatacagcagtgt

SEQ ID NO: 126868 - DNA, 25 bp, Homo sapien
tataaggtctatgtaagcagcacac

SEQ ID NO: 126869 - DNA, 25 bp, Homo sapien
gactgtatttcgaaagtgttcccgc

SEQ ID NO: 126870 - DNA, 25 bp, Homo sapien
caaactggcattccatacactccac

SEQ ID NO: 126871 - DNA, 25 bp, Homo sapien
cccagccaacataaagttatgactg

SEQ ID NO: 126872 - DNA, 25 bp, Homo sapien
cataaagttatgactgttaaaccaa

SEQ ID NO: 126873 - DNA, 25 bp, Homo sapien
ttatgactgttaaaccaaactggca

SEQ ID NO: 126874 - DNA, 25 bp, Homo sapien
tgtcttcacatttgattgcttcctc

SEQ ID NO: 126875 - DNA, 25 bp, Homo sapien
atctcaaacattccgggaggcagag

SEQ ID NO: 126876 - DNA, 25 bp, Homo sapien
taatctcaaacattccgggaggcag

SEQ ID NO: 126877 - DNA, 25 bp, Homo sapien
aatctcaaacattccgggaggcaga

SEQ ID NO: 126878 - DNA, 25 bp, Homo sapien
caggcagtcctctggaataggcttt

SEQ ID NO: 126879 - DNA, 25 bp, Homo sapien
gctgctcatccttggtgtattctaa

SEQ ID NO: 126880 - DNA, 25 bp, Homo sapien
gcttaaatgcatcataggcaccata

SEQ ID NO: 126881 - DNA, 25 bp, Homo sapien
gtattctaacacctcagcaacatga

SEQ ID NO: 126882 - DNA, 25 bp, Homo sapien
ggacgcagtgtttgctccaagagaa

SEQ ID NO: 126883 - DNA, 25 bp, Homo sapien
acacatagccaagtgtggctgttaa

SEQ ID NO: 126884 - DNA, 25 bp, Homo sapien
atagccaagtgtggctgttaaaagc

SEQ ID NO: 126885 - DNA, 25 bp, Homo sapien
gcagaggacgcagtgtttgctccaa

SEQ ID NO: 126886 - DNA, 25 bp, Homo sapien
gctttgcacttacaccccaactgat

SEQ ID NO: 126887 - DNA, 25 bp, Homo sapien
gttaatgaggtcaggaagggcttca

SEQ ID NO: 126888 - DNA, 25 bp, Homo sapien
tgtgggcatcaggacagaaaggtat

SEQ ID NO: 126889 - DNA, 25 bp, Homo sapien
gaccctcctaagtgccacaggacag

SEQ ID NO: 126890 - DNA, 25 bp, Homo sapien
gggtcaagcgcctattaatattatt

SEQ ID NO: 126891 - DNA, 25 bp, Homo sapien
tgctcgaattttgacagcctgtggg

SEQ ID NO: 126892 - DNA, 25 bp, Homo sapien
tattattaatgagtacttcccgttc

SEQ ID NO: 126893 - DNA, 25 bp, Homo sapien
taaactatccaaaatagatgggtct

SEQ ID NO: 126894 - DNA, 25 bp, Homo sapien
aataactgcaacttatctaaaacgg

SEQ ID NO: 126895 - DNA, 25 bp, Homo sapien
aaggaaatcaaacacgtggcagata

SEQ ID NO: 126896 - DNA, 25 bp, Homo sapien
tagaaattgcattaccctttgactc

SEQ ID NO: 126897 - DNA, 25 bp, Homo sapien
tgaatccaacctctctatactgcag

SEQ ID NO: 126898 - DNA, 25 bp, Homo sapien
tgtagaacaattcaaacctgctctt

SEQ ID NO: 126899 - DNA, 25 bp, Homo sapien
ttctgtagaacaattcaaacctgct

SEQ ID NO: 126900 - DNA, 25 bp, Homo sapien
cttaatgggcatgttttctgtagaa

SEQ ID NO: 126901 - DNA, 25 bp, Homo sapien
catcaatgccttcataaccataaca

SEQ ID NO: 126902 - DNA, 25 bp, Homo sapien
caaagatcctatttggtttaggtga

SEQ ID NO: 126903 - DNA, 25 bp, Homo sapien
cacttttgttatgaaatgtgattaa

SEQ ID NO: 126904 - DNA, 25 bp, Homo sapien
gcagggagggagacaactcatgact

SEQ ID NO: 126905 - DNA, 25 bp, Homo sapien
gggagggagacaactcatgactcac

SEQ ID NO: 126906 - DNA, 25 bp, Homo sapien
tcactgcgatactgaatagaaagaa

SEQ ID NO: 126907 - DNA, 25 bp, Homo sapien
caatagtataaacagttcactgcga

SEQ ID NO: 126908 - DNA, 25 bp, Homo sapien
tatcatttccgtgtatctttggtgg

SEQ ID NO: 126909 - DNA, 25 bp, Homo sapien
gatggaagaatccttctgagttaca

SEQ ID NO: 126910 - DNA, 25 bp, Homo sapien
tacagaacccacaactattaggatg

SEQ ID NO: 126911 - DNA, 25 bp, Homo sapien
cacaactattaggatgcttgagatt

SEQ ID NO: 126912 - DNA, 25 bp, Homo sapien
gaatgtacctacagaacccacaact

SEQ ID NO: 126913 - DNA, 25 bp, Homo sapien
aattcatttatgaatgtacctacag

SEQ ID NO: 126914 - DNA, 25 bp, Homo sapien
tagtcattacataccgaggaggagc

SEQ ID NO: 126915 - DNA, 25 bp, Homo sapien
taccgaggaggagctattagattaa

SEQ ID NO: 126916 - DNA, 25 bp, Homo sapien
tccatttgaacattgaacacacccc

SEQ ID NO: 126917 - DNA, 25 bp, Homo sapien
tctccagggttgtcgtagtcattac

SEQ ID NO: 126918 - DNA, 25 bp, Homo sapien
tgtggaagcagaggtataatttcaa

SEQ ID NO: 126919 - DNA, 25 bp, Homo sapien
ctgtggaagcagaggtataatttca

SEQ ID NO: 126920 - DNA, 25 bp, Homo sapien
gtggaagcagaggtataatttcaaa

SEQ ID NO: 126921 - DNA, 25 bp, Homo sapien
acttcggcattttctctttcaagcc

SEQ ID NO: 126922 - DNA, 25 bp, Homo sapien
gcctcgcaagttcagtctcatctgt

SEQ ID NO: 126923 - DNA, 25 bp, Homo sapien
catccacttcggcattttctctttc

SEQ ID NO: 126924 - DNA, 25 bp, Homo sapien
tgcctcgcaagttcagtctcatctg

SEQ ID NO: 126925 - DNA, 25 bp, Homo sapien
tggaaatcacaagcccaattttaga

SEQ ID NO: 126926 - DNA, 25 bp, Homo sapien
tctaggatttacagccaggaagcgc

SEQ ID NO: 126927 - DNA, 25 bp, Homo sapien
gcccctggcaaatctcgtgaggcat

SEQ ID NO: 126928 - DNA, 25 bp, Homo sapien
gggtgccaatctggagacatcagaa

SEQ ID NO: 126929 - DNA, 25 bp, Homo sapien
tataaagaactggagctctaggtgg

SEQ ID NO: 126930 - DNA, 25 bp, Homo sapien
gataaattctctcacacaggttgtc

SEQ ID NO: 126931 - DNA, 25 bp, Homo sapien
tattattccaataaggacgtggtgt

SEQ ID NO: 126932 - DNA, 25 bp, Homo sapien
cattttaaggctttgtcccgctaag

SEQ ID NO: 126933 - DNA, 25 bp, Homo sapien
acacctgactactgtagctgtaact

SEQ ID NO: 126934 - DNA, 25 bp, Homo sapien
aatttatgaagacaagcagaccaaa

SEQ ID NO: 126935 - DNA, 25 bp, Homo sapien
caagcagaccaaagcaactcaagat

SEQ ID NO: 126936 - DNA, 25 bp, Homo sapien
aagcaactcaagattttctacacct

SEQ ID NO: 126937 - DNA, 25 bp, Homo sapien
tctgcgtacaacaaagaagcacctg

SEQ ID NO: 126938 - DNA, 25 bp, Homo sapien
tcagaactgggtgtataccttgtcc

SEQ ID NO: 126939 - DNA, 25 bp, Homo sapien
tggaactgagcaaaaggcccacgtg

SEQ ID NO: 126940 - DNA, 25 bp, Homo sapien
aatcagtgaacaagtctcggcaagg

SEQ ID NO: 126941 - DNA, 25 bp, Homo sapien
ggaaaggctagaacagccattaggc

SEQ ID NO: 126942 - DNA, 25 bp, Homo sapien
cagccattaggcgtcagcatcttga

SEQ ID NO: 126943 - DNA, 25 bp, Homo sapien
ttcatgttacaaacctggaaaggct

SEQ ID NO: 126944 - DNA, 25 bp, Homo sapien
gaacaattacactggccatgccata

SEQ ID NO: 126945 - DNA, 25 bp, Homo sapien
tctttatgaggggtgagccgtgcta

SEQ ID NO: 126946 - DNA, 25 bp, Homo sapien
gggaaaatgtgcagctagtggtgcc

SEQ ID NO: 126947 - DNA, 25 bp, Homo sapien
tatgggaacaccgtggtatgcagga

SEQ ID NO: 126948 - DNA, 25 bp, Homo sapien
tagagacagcgaatcaccacacttg

SEQ ID NO: 126949 - DNA, 25 bp, Homo sapien
gacggcgtgctcaaggagggcttcc

SEQ ID NO: 126950 - DNA, 25 bp, Homo sapien
ggtcaagagggtgagtgcgcgtcga

SEQ ID NO: 126951 - DNA, 25 bp, Homo sapien
ccgccgacgcggctccctagagcgg

SEQ ID NO: 126952 - DNA, 25 bp, Homo sapien
tgcgcgtcgagcttcgggacattgc

SEQ ID NO: 126953 - DNA, 25 bp, Homo sapien
tcctggagtcctgtcggttatgttc

SEQ ID NO: 126954 - DNA, 25 bp, Homo sapien
aatgcgctaagtgcccgggaagcac

SEQ ID NO: 126955 - DNA, 25 bp, Homo sapien
aagcacctggcgaaggacgctgagc

SEQ ID NO: 126956 - DNA, 25 bp, Homo sapien
tgttcaattcgataagcgttcctcg

SEQ ID NO: 126957 - DNA, 25 bp, Homo sapien
gggcacacactgactgtgccaacag

SEQ ID NO: 126958 - DNA, 25 bp, Homo sapien
tgactgtgccaacagcgaagaggca

SEQ ID NO: 126959 - DNA, 25 bp, Homo sapien
agaggcagcagatagtgaaactccc

SEQ ID NO: 126960 - DNA, 25 bp, Homo sapien
caacagcgaagaggcagcagatagt

SEQ ID NO: 126961 - DNA, 25 bp, Homo sapien
agcagccggcagatgataactaata

SEQ ID NO: 126962 - DNA, 25 bp, Homo sapien
ataagagaggctgcacaaagttcac

SEQ ID NO: 126963 - DNA, 25 bp, Homo sapien
gatgtgacactccactcggtcacca

SEQ ID NO: 126964 - DNA, 25 bp, Homo sapien
gtcaccactctgccagttgagaaag

SEQ ID NO: 126965 - DNA, 25 bp, Homo sapien
cgtgatgccattgacaccagttgat

SEQ ID NO: 126966 - DNA, 25 bp, Homo sapien
tccagatcttatccccgtgatgcca

SEQ ID NO: 126967 - DNA, 25 bp, Homo sapien
tccttgtaagatgggcatcaacttc

SEQ ID NO: 126968 - DNA, 25 bp, Homo sapien
ccatcagctctgaggatacctctgt

SEQ ID NO: 126969 - DNA, 25 bp, Homo sapien
tctgaggatacctctgtgtgccttg

SEQ ID NO: 126970 - DNA, 25 bp, Homo sapien
ttttctggccctccttgtaagatgg

SEQ ID NO: 126971 - DNA, 25 bp, Homo sapien
aaggctgcagaagactgggtaccac

SEQ ID NO: 126972 - DNA, 25 bp, Homo sapien
ctcggctgaaccatgcaaggctgca

SEQ ID NO: 126973 - DNA, 25 bp, Homo sapien
agaagactgggtaccacctagaggg

SEQ ID NO: 126974 - DNA, 25 bp, Homo sapien
gggctccctcggctgaaccatgcaa

SEQ ID NO: 126975 - DNA, 25 bp, Homo sapien
caggggagattagggatgagacaaa

SEQ ID NO: 126976 - DNA, 25 bp, Homo sapien
gagattagggatgagacaaaacatc

SEQ ID NO: 126977 - DNA, 25 bp, Homo sapien
ccaagccagggcactggaaaagaca

SEQ ID NO: 126978 - DNA, 25 bp, Homo sapien
gggagattagggatgagacaaaaca

SEQ ID NO: 126979 - DNA, 25 bp, Homo sapien
ggcgacagccagacctaaggaaagg

SEQ ID NO: 126980 - DNA, 25 bp, Homo sapien
tcccgggtacctgagcaggctgatg

SEQ ID NO: 126981 - DNA, 25 bp, Homo sapien
ctatttatacatccctgatgggcag

SEQ ID NO: 126982 - DNA, 25 bp, Homo sapien
ttcagcatgtcagcatcccgggtac

SEQ ID NO: 126983 - DNA, 25 bp, Homo sapien
agtggccagcttgttgatgcctcca

SEQ ID NO: 126984 - DNA, 25 bp, Homo sapien
gcaaatccttgattggcccaccagg

SEQ ID NO: 126985 - DNA, 25 bp, Homo sapien
ttgctgctccagaagttgccttgtg

SEQ ID NO: 126986 - DNA, 25 bp, Homo sapien
gatgcctccataattctcagccaga

SEQ ID NO: 126987 - DNA, 25 bp, Homo sapien
tttcaatccccgtgtgttcggtggc

SEQ ID NO: 126988 - DNA, 25 bp, Homo sapien
caatccccgtgtgttcggtggcgtt

SEQ ID NO: 126989 - DNA, 25 bp, Homo sapien
tggaggtttcaatccccgtgtgttc

SEQ ID NO: 126990 - DNA, 25 bp, Homo sapien
tctggggcccccgtggtgctggatt

SEQ ID NO: 126991 - DNA, 25 bp, Homo sapien
catggaactcatggacaaagagacc

SEQ ID NO: 126992 - DNA, 25 bp, Homo sapien
cacgctctggacctacctgtgggag

SEQ ID NO: 126993 - DNA, 25 bp, Homo sapien
tgaggttgccccatccatgcagcaa

SEQ ID NO: 126994 - DNA, 25 bp, Homo sapien
gggactactcccagttcgactttga

SEQ ID NO: 126995 - DNA, 25 bp, Homo sapien
tgctggcgttcagatgaatccagtg

SEQ ID NO: 126996 - DNA, 25 bp, Homo sapien
tggcgttcagatgaatccagtgaag

SEQ ID NO: 126997 - DNA, 25 bp, Homo sapien
gcgttcagatgaatccagtgaagca

SEQ ID NO: 126998 - DNA, 25 bp, Homo sapien
ctggtgctggcgttcagatgaatcc

SEQ ID NO: 126999 - DNA, 25 bp, Homo sapien
ttcatgtcacaggtctcaggacagt

SEQ ID NO: 127000 - DNA, 25 bp, Homo sapien
cctcctcttcaatccaccctgaatt

SEQ ID NO: 127001 - DNA, 25 bp, Homo sapien
gtcacaggtctcaggacagttttgt

SEQ ID NO: 127002 - DNA, 25 bp, Homo sapien
tcctcctcttcaatccaccctgaat

SEQ ID NO: 127003 - DNA, 25 bp, Homo sapien
tctgaaagccagatccccttcccct

SEQ ID NO: 127004 - DNA, 25 bp, Homo sapien
gagcagccggtgagatgctcttagt

SEQ ID NO: 127005 - DNA, 25 bp, Homo sapien
tgagatgctcttagtgaacagggct

SEQ ID NO: 127006 - DNA, 25 bp, Homo sapien
tcttagtgaacagggctctgaaagc

SEQ ID NO: 127007 - DNA, 25 bp, Homo sapien
ctgtgactgtcagctttgaccctgg

SEQ ID NO: 127008 - DNA, 25 bp, Homo sapien
ggtcctgtgactgtcagctttgacc

SEQ ID NO: 127009 - DNA, 25 bp, Homo sapien
tgtcagctttgaccctggagggcct

SEQ ID NO: 127010 - DNA, 25 bp, Homo sapien
tcctgtgactgtcagctttgaccct

SEQ ID NO: 127011 - DNA, 25 bp, Homo sapien
tctgtgttcggaccgctcctcctga

SEQ ID NO: 127012 - DNA, 25 bp, Homo sapien
gcctttgaatggcgcatgccttggg

SEQ ID NO: 127013 - DNA, 25 bp, Homo sapien
gctcctcctgacatgctggctgttg

SEQ ID NO: 127014 - DNA, 25 bp, Homo sapien
cggtttgcttgggatctgaggcccc

SEQ ID NO: 127015 - DNA, 25 bp, Homo sapien
aattggctgctttcccaacccccag

SEQ ID NO: 127016 - DNA, 25 bp, Homo sapien
gcagggcccgtagcctggtgggatc

SEQ ID NO: 127017 - DNA, 25 bp, Homo sapien
aaggctgttatgtctgtgcagggcc

SEQ ID NO: 127018 - DNA, 25 bp, Homo sapien
gcctgaaggctgttatgtctgtgca

SEQ ID NO: 127019 - DNA, 25 bp, Homo sapien
aacccgcaggctgtgccggcaggat

SEQ ID NO: 127020 - DNA, 25 bp, Homo sapien
ttagttctgacttgtgccgtggatg

SEQ ID NO: 127021 - DNA, 25 bp, Homo sapien
gagctggctgcagtaacccgcaggc

SEQ ID NO: 127022 - DNA, 25 bp, Homo sapien
agttctgacttgtgccgtggatgtg

SEQ ID NO: 127023 - DNA, 25 bp, Homo sapien
acatgccttctgtattgtgcaaacc

SEQ ID NO: 127024 - DNA, 25 bp, Homo sapien
gcagtatctcccctgatgcctggaa

SEQ ID NO: 127025 - DNA, 25 bp, Homo sapien
cttccttgcgtgatgttggacatgc

SEQ ID NO: 127026 - DNA, 25 bp, Homo sapien
tctgtattgtgcaaacccaggccgc

SEQ ID NO: 127027 - DNA, 25 bp, Homo sapien
aaagcggagtcctgttgtcacacca

SEQ ID NO: 127028 - DNA, 25 bp, Homo sapien
tgtcacaccataagagcggtccagg

SEQ ID NO: 127029 - DNA, 25 bp, Homo sapien
tctctaggtggcttggctgtacagg

SEQ ID NO: 127030 - DNA, 25 bp, Homo sapien
cacaggacttcttggactaagttcc

SEQ ID NO: 127031 - DNA, 25 bp, Homo sapien
atttaaacatccttaggtctctctt

SEQ ID NO: 127032 - DNA, 25 bp, Homo sapien
tttaaacatccttaggtctctctta

SEQ ID NO: 127033 - DNA, 25 bp, Homo sapien
cttacgagcattatacctgttgcat

SEQ ID NO: 127034 - DNA, 25 bp, Homo sapien
ttggtgtcacacttacgagcattat

SEQ ID NO: 127035 - DNA, 25 bp, Homo sapien
tgaaaatgcgcatccttctttggtg

SEQ ID NO: 127036 - DNA, 25 bp, Homo sapien
ctcttttgaaaatgcgcatccttct

SEQ ID NO: 127037 - DNA, 25 bp, Homo sapien
gacttgtttttagcccactgacaac

SEQ ID NO: 127038 - DNA, 25 bp, Homo sapien
ttgctgacaataactgccattcttc

SEQ ID NO: 127039 - DNA, 25 bp, Homo sapien
acagggacttgtttttagcccactg

SEQ ID NO: 127040 - DNA, 25 bp, Homo sapien
ttcttcagagcaccgacagggactt

SEQ ID NO: 127041 - DNA, 25 bp, Homo sapien
tctgaggagggtctccgatgatgtt

SEQ ID NO: 127042 - DNA, 25 bp, Homo sapien
tatcggcaactgtatcagatctggc

SEQ ID NO: 127043 - DNA, 25 bp, Homo sapien
tgaggcagcttggtcttatcggcaa

SEQ ID NO: 127044 - DNA, 25 bp, Homo sapien
ggtaagggcagtagagtgaggcagc

SEQ ID NO: 127045 - DNA, 25 bp, Homo sapien
gataggagggcagagtgttcgggca

SEQ ID NO: 127046 - DNA, 25 bp, Homo sapien
agagtgttcgggcactgctcaaggc

SEQ ID NO: 127047 - DNA, 25 bp, Homo sapien
taggagggcagagtgttcgggcact

SEQ ID NO: 127048 - DNA, 25 bp, Homo sapien
agggcagagtgttcgggcactgctc

SEQ ID NO: 127049 - DNA, 25 bp, Homo sapien
cagccgcagattagataggtggtgc

SEQ ID NO: 127050 - DNA, 25 bp, Homo sapien
cccggttcgagatccagccgcagat

SEQ ID NO: 127051 - DNA, 25 bp, Homo sapien
cgcagattagataggtggtgcgccc

SEQ ID NO: 127052 - DNA, 25 bp, Homo sapien
gagatccagccgcagattagatagg

SEQ ID NO: 127053 - DNA, 25 bp, Homo sapien
gcagctccgaccgcggagggcgcgg

SEQ ID NO: 127054 - DNA, 25 bp, Homo sapien
tcctctttgctttcggtttcgaggc

SEQ ID NO: 127055 - DNA, 25 bp, Homo sapien
tggggctgtagcagatcccgcttcc

SEQ ID NO: 127056 - DNA, 25 bp, Homo sapien
agagaggcctttccgccgcccagag

SEQ ID NO: 127057 - DNA, 25 bp, Homo sapien
tgtcagacgcgagcatgtgcagttt

SEQ ID NO: 127058 - DNA, 25 bp, Homo sapien
tccgtactatgggtgagtgccgccg

SEQ ID NO: 127059 - DNA, 25 bp, Homo sapien
tgtgcagtttgcagcgcatccgtac

SEQ ID NO: 127060 - DNA, 25 bp, Homo sapien
gagcgcctgtcagacgcgagcatgt

SEQ ID NO: 127061 - DNA, 25 bp, Homo sapien
ttggggaaactctcagatggcttct

SEQ ID NO: 127062 - DNA, 25 bp, Homo sapien
attggggaaactctcagatggcttc

SEQ ID NO: 127063 - DNA, 25 bp, Homo sapien
ataaggttggtgatggagcagagca

SEQ ID NO: 127064 - DNA, 25 bp, Homo sapien
cacaaaggaatcaggtagagctgac

SEQ ID NO: 127065 - DNA, 25 bp, Homo sapien
agacaggtctcatatataaggttgg

SEQ ID NO: 127066 - DNA, 25 bp, Homo sapien
ggtagagctgacagacaggtctcat

SEQ ID NO: 127067 - DNA, 25 bp, Homo sapien
ggagagtgcgcatttccagaaagga

SEQ ID NO: 127068 - DNA, 25 bp, Homo sapien
taaagtgatgggatacagagctggc

SEQ ID NO: 127069 - DNA, 25 bp, Homo sapien
tagaccgactcccaattgtattagg

SEQ ID NO: 127070 - DNA, 25 bp, Homo sapien
gagatgccgctgcacaaagtccaag

SEQ ID NO: 127071 - DNA, 25 bp, Homo sapien
aacacattgttggtttatctgagaa

SEQ ID NO: 127072 - DNA, 25 bp, Homo sapien
gaatgggaatagaagcaacttcacc

SEQ ID NO: 127073 - DNA, 25 bp, Homo sapien
ggctgctgcggtacaaaacacattg

SEQ ID NO: 127074 - DNA, 25 bp, Homo sapien
cattgcagggcactgcaaacaaatg

SEQ ID NO: 127075 - DNA, 25 bp, Homo sapien
agataaggaattaatggacacttca

SEQ ID NO: 127076 - DNA, 25 bp, Homo sapien
gagataaggaattaatggacacttc

SEQ ID NO: 127077 - DNA, 25 bp, Homo sapien
cctggagataaggaattaatggaca

SEQ ID NO: 127078 - DNA, 25 bp, Homo sapien
tggagataaggaattaatggacact

SEQ ID NO: 127079 - DNA, 25 bp, Homo sapien
ctgcagctgcgggttatacgggcaa

SEQ ID NO: 127080 - DNA, 25 bp, Homo sapien
tctgtattgactggtatgcccttga

SEQ ID NO: 127081 - DNA, 25 bp, Homo sapien
ccagggcggaactgatgtaattaca

SEQ ID NO: 127082 - DNA, 25 bp, Homo sapien
tgcaaaatgctctgtccgctgcagc

SEQ ID NO: 127083 - DNA, 25 bp, Homo sapien
ataggttcttcttgttctgttctcc

SEQ ID NO: 127084 - DNA, 25 bp, Homo sapien
gacataggttcttcttgttctgttc

SEQ ID NO: 127085 - DNA, 25 bp, Homo sapien
cccatctcagcctcatgaacagctg

SEQ ID NO: 127086 - DNA, 25 bp, Homo sapien
gttcttcttgttctgttctccaggc

SEQ ID NO: 127087 - DNA, 25 bp, Homo sapien
ctgtgggaactgtaacgtctggata

SEQ ID NO: 127088 - DNA, 25 bp, Homo sapien
tctccgccaaaggttccagcattct

SEQ ID NO: 127089 - DNA, 25 bp, Homo sapien
ctgcgggacaagaccagaccgtctc

SEQ ID NO: 127090 - DNA, 25 bp, Homo sapien
actgtaacgtctggatatttggaac

SEQ ID NO: 127091 - DNA, 25 bp, Homo sapien
ggagctctccgaggaggccgcacca

SEQ ID NO: 127092 - DNA, 25 bp, Homo sapien
gagcgccccggggatctgcttgacc

SEQ ID NO: 127093 - DNA, 25 bp, Homo sapien
caccagctgccgcaaggggtggcca

SEQ ID NO: 127094 - DNA, 25 bp, Homo sapien
tgcttgaccccaaatagcgggggac

SEQ ID NO: 127095 - DNA, 25 bp, Homo sapien
tcgctgcacaaagcccggccgagcc

SEQ ID NO: 127096 - DNA, 25 bp, Homo sapien
ggtgcccgcgggctcgctgcacaaa

SEQ ID NO: 127097 - DNA, 25 bp, Homo sapien
cggccgagccttgctgcgccccatt

SEQ ID NO: 127098 - DNA, 25 bp, Homo sapien
ccccattcaacgctccgccgggcgc

SEQ ID NO: 127099 - DNA, 25 bp, Homo sapien
tctcccctccccggcagcaggggtc

SEQ ID NO: 127100 - DNA, 25 bp, Homo sapien
ccggttctcccctccccggcagcag

SEQ ID NO: 127101 - DNA, 25 bp, Homo sapien
cccctccccggcagcaggggtcgtg

SEQ ID NO: 127102 - DNA, 25 bp, Homo sapien
cctccccggcagcaggggtcgtggg

SEQ ID NO: 127103 - DNA, 25 bp, Homo sapien
gtccccgccgcgcactgggcacacg

SEQ ID NO: 127104 - DNA, 25 bp, Homo sapien
cgctctcgccggagtcccgggctgc

SEQ ID NO: 127105 - DNA, 25 bp, Homo sapien
gcgcactgggcacacgggcgccctc

SEQ ID NO: 127106 - DNA, 25 bp, Homo sapien
gccgcagccgaccttgcgtcgctct

SEQ ID NO: 127107 - DNA, 25 bp, Homo sapien
tccggatcgtcctctgggcccgagg

SEQ ID NO: 127108 - DNA, 25 bp, Homo sapien
cagcctgacgccctccgccgcggcg

SEQ ID NO: 127109 - DNA, 25 bp, Homo sapien
ctgctccggatcgtcctctgggccc

SEQ ID NO: 127110 - DNA, 25 bp, Homo sapien
ccagcccaccacagcggcgggagcg

SEQ ID NO: 127111 - DNA, 25 bp, Homo sapien
taggagtcgagcctgagccataggg

SEQ ID NO: 127112 - DNA, 25 bp, Homo sapien
ggagtcgagcctgagccatagggtc

SEQ ID NO: 127113 - DNA, 25 bp, Homo sapien
ctaggagtcgagcctgagccatagg

SEQ ID NO: 127114 - DNA, 25 bp, Homo sapien
agtcgagcctgagccatagggtccc

SEQ ID NO: 127115 - DNA, 25 bp, Homo sapien
ctaggacacaatgctctgtgtcatt

SEQ ID NO: 127116 - DNA, 25 bp, Homo sapien
tgctctgtgtcattcggcgcccaac

SEQ ID NO: 127117 - DNA, 25 bp, Homo sapien
ggtggattcatagtaaaagctatgg

SEQ ID NO: 127118 - DNA, 25 bp, Homo sapien
agtaaaagctatggaggagatatcc

SEQ ID NO: 127119 - DNA, 25 bp, Homo sapien
ttggaagagttttatgaggtggatt

SEQ ID NO: 127120 - DNA, 25 bp, Homo sapien
gagaggagtttccttccagatgagg

SEQ ID NO: 127121 - DNA, 25 bp, Homo sapien
cattaggtgactccagactcagagt

SEQ ID NO: 127122 - DNA, 25 bp, Homo sapien
gaagtcattaggtgactccagactc

SEQ ID NO: 127123 - DNA, 25 bp, Homo sapien
cacaggaagtcattaggtgactcca

SEQ ID NO: 127124 - DNA, 25 bp, Homo sapien
aaggtggcacaggaagtcattaggt

SEQ ID NO: 127125 - DNA, 25 bp, Homo sapien
cagtcagtggggatatgccccagag

SEQ ID NO: 127126 - DNA, 25 bp, Homo sapien
cacccgggactgaaatgccacagca

SEQ ID NO: 127127 - DNA, 25 bp, Homo sapien
cacagcagtcagtggggatatgccc

SEQ ID NO: 127128 - DNA, 25 bp, Homo sapien
caacacccgggactgaaatgccaca

SEQ ID NO: 127129 - DNA, 25 bp, Homo sapien
gagaacctagtctcatttggacaga

SEQ ID NO: 127130 - DNA, 25 bp, Homo sapien
gagcctcaggaaaccgcgaaacctg

SEQ ID NO: 127131 - DNA, 25 bp, Homo sapien
tgtgtcccgctccattgtaagttag

SEQ ID NO: 127132 - DNA, 25 bp, Homo sapien
gagaattggtcactgatccccaggg

SEQ ID NO: 127133 - DNA, 25 bp, Homo sapien
taagaaccagcatgcagaaagagga

SEQ ID NO: 127134 - DNA, 25 bp, Homo sapien
ctaagaaccagcatgcagaaagagg

SEQ ID NO: 127135 - DNA, 25 bp, Homo sapien
aaaagataaataagcgtgtgaggaa

SEQ ID NO: 127136 - DNA, 25 bp, Homo sapien
gataaataagcgtgtgaggaagagt

SEQ ID NO: 127137 - DNA, 25 bp, Homo sapien
gatggaatcgacttctggattattc

SEQ ID NO: 127138 - DNA, 25 bp, Homo sapien
gacttctggattattctggggagcc

SEQ ID NO: 127139 - DNA, 25 bp, Homo sapien
gaatcgacttctggattattctggg

SEQ ID NO: 127140 - DNA, 25 bp, Homo sapien
tggaatcgacttctggattattctg

SEQ ID NO: 127141 - DNA, 25 bp, Homo sapien
ccagcagctcccttatcttgctggc

SEQ ID NO: 127142 - DNA, 25 bp, Homo sapien
cctgtaggcggaaccggaaaagctg

SEQ ID NO: 127143 - DNA, 25 bp, Homo sapien
ttctgccagtctacgctggccggcg

SEQ ID NO: 127144 - DNA, 25 bp, Homo sapien
aggcagcgtttctgccagtctacgc

SEQ ID NO: 127145 - DNA, 25 bp, Homo sapien
ataaacctctgcgtgtggagaggca

SEQ ID NO: 127146 - DNA, 25 bp, Homo sapien
gaaagttgactttccgcaactctcc

SEQ ID NO: 127147 - DNA, 25 bp, Homo sapien
ctgccataaacctctgcgtgtggag

SEQ ID NO: 127148 - DNA, 25 bp, Homo sapien
tgaaagttgactttccgcaactctc

SEQ ID NO: 127149 - DNA, 25 bp, Homo sapien
tcattttgcatatggggaaaagcat

SEQ ID NO: 127150 - DNA, 25 bp, Homo sapien
cattttgcatatggggaaaagcatc

SEQ ID NO: 127151 - DNA, 25 bp, Homo sapien
ggaccttgtcattctaacatccagg

SEQ ID NO: 127152 - DNA, 25 bp, Homo sapien
aattttcagccactatctttcatgg

SEQ ID NO: 127153 - DNA, 25 bp, Homo sapien
tttgtgtctgtggatactcactcat

SEQ ID NO: 127154 - DNA, 25 bp, Homo sapien
ccaggtctcaactgctgtatttgta

SEQ ID NO: 127155 - DNA, 25 bp, Homo sapien
cagcccatgtaatgtcccagggcca

SEQ ID NO: 127156 - DNA, 25 bp, Homo sapien
gcagtgagcagcctgcagtcatcag

SEQ ID NO: 127157 - DNA, 25 bp, Homo sapien
agtcatcagcccatgtaatgtccca

SEQ ID NO: 127158 - DNA, 25 bp, Homo sapien
cctacaggatagccagcagtgagca

SEQ ID NO: 127159 - DNA, 25 bp, Homo sapien
tggctgcagcaacctgatgaagtgc

SEQ ID NO: 127160 - DNA, 25 bp, Homo sapien
tgtcctcagctgtcctttcagtgtg

SEQ ID NO: 127161 - DNA, 25 bp, Homo sapien
gacacataagctgccctagaactgg

SEQ ID NO: 127162 - DNA, 25 bp, Homo sapien
gacagggatctactttcaccagctg

SEQ ID NO: 127163 - DNA, 25 bp, Homo sapien
atgaaatactgaacgggaaggccct

SEQ ID NO: 127164 - DNA, 25 bp, Homo sapien
taggttgcacttcagcaggactact

SEQ ID NO: 127165 - DNA, 25 bp, Homo sapien
ggactactgagacctaactaatctg

SEQ ID NO: 127166 - DNA, 25 bp, Homo sapien
tcagaagaaggcataggctttccat

SEQ ID NO: 127167 - DNA, 25 bp, Homo sapien
tatttgatttcttgaatcttaaaga

SEQ ID NO: 127168 - DNA, 25 bp, Homo sapien
gcacctctgcctgtaagggcttcag

SEQ ID NO: 127169 - DNA, 25 bp, Homo sapien
gcttcagggctatcaccttatttga

SEQ ID NO: 127170 - DNA, 25 bp, Homo sapien
cacagtcgagggcacctctgcctgt

SEQ ID NO: 127171 - DNA, 25 bp, Homo sapien
gaaaggggagatgtaggtgccatgt

SEQ ID NO: 127172 - DNA, 25 bp, Homo sapien
gagaaaggggagatgtaggtgccat

SEQ ID NO: 127173 - DNA, 25 bp, Homo sapien
aaggggagatgtaggtgccatgtcc

SEQ ID NO: 127174 - DNA, 25 bp, Homo sapien
gagagaaaggggagatgtaggtgcc

SEQ ID NO: 127175 - DNA, 25 bp, Homo sapien
gctctctgctctgcctccagcagcc

SEQ ID NO: 127176 - DNA, 25 bp, Homo sapien
ctctgctctgcctccagcagcctct

SEQ ID NO: 127177 - DNA, 25 bp, Homo sapien
tgctctgcctccagcagcctctgct

SEQ ID NO: 127178 - DNA, 25 bp, Homo sapien
ctgggtctcagcgttctctgctctc

SEQ ID NO: 127179 - DNA, 25 bp, Homo sapien
tttgttcaggtataacacagtactg

SEQ ID NO: 127180 - DNA, 25 bp, Homo sapien
agtactgctggtgatgtatgtgtcc

SEQ ID NO: 127181 - DNA, 25 bp, Homo sapien
tgtgtccacctgtgtccgtgggaag

SEQ ID NO: 127182 - DNA, 25 bp, Homo sapien
agggccgacggtcattcccctgcat

SEQ ID NO: 127183 - DNA, 25 bp, Homo sapien
catctttgccctttatggctttcag

SEQ ID NO: 127184 - DNA, 25 bp, Homo sapien
cctttatggctttcagcaattcttg

SEQ ID NO: 127185 - DNA, 25 bp, Homo sapien
gatgagctcatctttgccctttatg

SEQ ID NO: 127186 - DNA, 25 bp, Homo sapien
cttggtatttccggtgcaggctccc

SEQ ID NO: 127187 - DNA, 25 bp, Homo sapien
tgccaacttgagtgtcacccattcc

SEQ ID NO: 127188 - DNA, 25 bp, Homo sapien
ccaacttgagtgtcacccattcctt

SEQ ID NO: 127189 - DNA, 25 bp, Homo sapien
tttgccaacttgagtgtcacccatt

SEQ ID NO: 127190 - DNA, 25 bp, Homo sapien
ctttgccaacttgagtgtcacccat

SEQ ID NO: 127191 - DNA, 25 bp, Homo sapien
accaggcgctgattatggcttttca

SEQ ID NO: 127192 - DNA, 25 bp, Homo sapien
ccaggcgctgattatggcttttcag

SEQ ID NO: 127193 - DNA, 25 bp, Homo sapien
cttctagcgcatcttgaagggatcc

SEQ ID NO: 127194 - DNA, 25 bp, Homo sapien
ttctagcgcatcttgaagggatccc

SEQ ID NO: 127195 - DNA, 25 bp, Homo sapien
caaacacacgtactgcacacctgca

SEQ ID NO: 127196 - DNA, 25 bp, Homo sapien
aacacacgtactgcacacctgcaca

SEQ ID NO: 127197 - DNA, 25 bp, Homo sapien
aaacacacgtactgcacacctgcac

SEQ ID NO: 127198 - DNA, 25 bp, Homo sapien
cataggctggattcccggctctgaa

SEQ ID NO: 127199 - DNA, 25 bp, Homo sapien
gcctctactgtttccccagaatgga

SEQ ID NO: 127200 - DNA, 25 bp, Homo sapien
cagaatggaccgtgctggaactaga

SEQ ID NO: 127201 - DNA, 25 bp, Homo sapien
cagcttccgtgaaggagctatctga

SEQ ID NO: 127202 - DNA, 25 bp, Homo sapien
tttggtagggtcagactgctgccag

SEQ ID NO: 127203 - DNA, 25 bp, Homo sapien
tggtagggtcagactgctgccagga

SEQ ID NO: 127204 - DNA, 25 bp, Homo sapien
ctttggtagggtcagactgctgcca

SEQ ID NO: 127205 - DNA, 25 bp, Homo sapien
tagggtcagactgctgccaggacca

SEQ ID NO: 127206 - DNA, 25 bp, Homo sapien
aatgttcaccacacggccaaagtgc

SEQ ID NO: 127207 - DNA, 25 bp, Homo sapien
ggtgtaggtggcttgttacccagct

SEQ ID NO: 127208 - DNA, 25 bp, Homo sapien
tggctgtggtgccttttggccaact

SEQ ID NO: 127209 - DNA, 25 bp, Homo sapien
ggacctagctcgggactccagctca

SEQ ID NO: 127210 - DNA, 25 bp, Homo sapien
caggaaaatggcgtgaaactgggag

SEQ ID NO: 127211 - DNA, 25 bp, Homo sapien
gaaaatggcgtgaaactgggaggca

SEQ ID NO: 127212 - DNA, 25 bp, Homo sapien
ggcaggaaaatggcgtgaaactggg

SEQ ID NO: 127213 - DNA, 25 bp, Homo sapien
ggaaaatggcgtgaaactgggaggc

SEQ ID NO: 127214 - DNA, 25 bp, Homo sapien
tctcagaccgggtaaggtggctctt

SEQ ID NO: 127215 - DNA, 25 bp, Homo sapien
aaatgtcaggtacagggccagacac

SEQ ID NO: 127216 - DNA, 25 bp, Homo sapien
tgcgaagcccttaatacccacatgc

SEQ ID NO: 127217 - DNA, 25 bp, Homo sapien
cagtggtttcctgacctgtaaaagg

SEQ ID NO: 127218 - DNA, 25 bp, Homo sapien
tgattcttgggtccttggggcctag

SEQ ID NO: 127219 - DNA, 25 bp, Homo sapien
ggctgattcttgggtccttggggcc

SEQ ID NO: 127220 - DNA, 25 bp, Homo sapien
gctgattcttgggtccttggggcct

SEQ ID NO: 127221 - DNA, 25 bp, Homo sapien
ctgattcttgggtccttggggccta

SEQ ID NO: 127222 - DNA, 25 bp, Homo sapien
gaagacactgggagaatgcccgtcc

SEQ ID NO: 127223 - DNA, 25 bp, Homo sapien
ggccctgactgctcataaacaaccc

SEQ ID NO: 127224 - DNA, 25 bp, Homo sapien
ctgactgctcataaacaacccacag

SEQ ID NO: 127225 - DNA, 25 bp, Homo sapien
cactgggagaatgcccgtcctgagg

SEQ ID NO: 127226 - DNA, 25 bp, Homo sapien
tatttagcccaacaggactccagca

SEQ ID NO: 127227 - DNA, 25 bp, Homo sapien
ctatttagcccaacaggactccagc

SEQ ID NO: 127228 - DNA, 25 bp, Homo sapien
tggccacagcatagatccggctctc

SEQ ID NO: 127229 - DNA, 25 bp, Homo sapien
cgcagcatgcagtattacttctggg

SEQ ID NO: 127230 - DNA, 25 bp, Homo sapien
atctgagagccgcatgcccgatgtg

SEQ ID NO: 127231 - DNA, 25 bp, Homo sapien
tacttctgggagacatatctgagag

SEQ ID NO: 127232 - DNA, 25 bp, Homo sapien
ccctcgttgtggagatttggtggct

SEQ ID NO: 127233 - DNA, 25 bp, Homo sapien
agttacaaatcatacggctatggga

SEQ ID NO: 127234 - DNA, 25 bp, Homo sapien
caaatcatacggctatgggaccacc

SEQ ID NO: 127235 - DNA, 25 bp, Homo sapien
atacggctatgggaccaccccacag

SEQ ID NO: 127236 - DNA, 25 bp, Homo sapien
tccatgaggcttgcacagtgttcca

SEQ ID NO: 127237 - DNA, 25 bp, Homo sapien
cattttttcctccatgaggcttgca

SEQ ID NO: 127238 - DNA, 25 bp, Homo sapien
tcctccatgaggcttgcacagtgtt

SEQ ID NO: 127239 - DNA, 25 bp, Homo sapien
ttttcctccatgaggcttgcacagt

SEQ ID NO: 127240 - DNA, 25 bp, Homo sapien
tcttgtagaccaggccagagaaaga

SEQ ID NO: 127241 - DNA, 25 bp, Homo sapien
ttcttgtagaccaggccagagaaag

SEQ ID NO: 127242 - DNA, 25 bp, Homo sapien
gtgacattcttgtagaccaggccag

SEQ ID NO: 127243 - DNA, 25 bp, Homo sapien
acattcttgtagaccaggccagaga

SEQ ID NO: 127244 - DNA, 25 bp, Homo sapien
ccccagtcattggatgatgaggcca

SEQ ID NO: 127245 - DNA, 25 bp, Homo sapien
gcagggtcaccatgtgcagaagcct

SEQ ID NO: 127246 - DNA, 25 bp, Homo sapien
caaaatgacacgtgctgggctcagc

SEQ ID NO: 127247 - DNA, 25 bp, Homo sapien
taaagcgggcataggcttaaccttc

SEQ ID NO: 127248 - DNA, 25 bp, Homo sapien
aaggagccccactgccctctgggac

SEQ ID NO: 127249 - DNA, 25 bp, Homo sapien
cagtaattctagaaggagccccact

SEQ ID NO: 127250 - DNA, 25 bp, Homo sapien
ctcagtaattctagaaggagcccca

SEQ ID NO: 127251 - DNA, 25 bp, Homo sapien
agaaggagccccactgccctctggg

SEQ ID NO: 127252 - DNA, 25 bp, Homo sapien
tatttataaatgcatcggaaggcct

SEQ ID NO: 127253 - DNA, 25 bp, Homo sapien
gggacgtcgcaacaatcaatgattg

SEQ ID NO: 127254 - DNA, 25 bp, Homo sapien
cagactaagtgtgccatgcgagctt

SEQ ID NO: 127255 - DNA, 25 bp, Homo sapien
tcgataccaagggtactggacacct

SEQ ID NO: 127256 - DNA, 25 bp, Homo sapien
accgagattcggaaactcgcctgag

SEQ ID NO: 127257 - DNA, 25 bp, Homo sapien
tgcctagtccgctggtcttcctgga

SEQ ID NO: 127258 - DNA, 25 bp, Homo sapien
cagaggactcgtccataaagggcat

SEQ ID NO: 127259 - DNA, 25 bp, Homo sapien
tgagagctgcagtcatcgtcagacc

SEQ ID NO: 127260 - DNA, 25 bp, Homo sapien
gggggatggcgtagtcaccctcgga

SEQ ID NO: 127261 - DNA, 25 bp, Homo sapien
cagtgagcaggcgtccggggggatg

SEQ ID NO: 127262 - DNA, 25 bp, Homo sapien
ggcgtccggggggatggcgtagtca

SEQ ID NO: 127263 - DNA, 25 bp, Homo sapien
gtcaccctcggagctcagtgaggac

SEQ ID NO: 127264 - DNA, 25 bp, Homo sapien
aggatgaggtgcgctgcagtttgtg

SEQ ID NO: 127265 - DNA, 25 bp, Homo sapien
ccgtcggtggagtaggatgaggtgc

SEQ ID NO: 127266 - DNA, 25 bp, Homo sapien
ccaggcccagcccgtcggtggagta

SEQ ID NO: 127267 - DNA, 25 bp, Homo sapien
cgctgcagtttgtgctcaggctctg

SEQ ID NO: 127268 - DNA, 25 bp, Homo sapien
gacttgtagtacataatctgtccct

SEQ ID NO: 127269 - DNA, 25 bp, Homo sapien
gtccctgtctcaggacaaaccagcg

SEQ ID NO: 127270 - DNA, 25 bp, Homo sapien
cccattttcagcaggtagcccgact

SEQ ID NO: 127271 - DNA, 25 bp, Homo sapien
ggtagcccgacttctccagtgactc

SEQ ID NO: 127272 - DNA, 25 bp, Homo sapien
cctcgaacaatttggcagcgggagt

SEQ ID NO: 127273 - DNA, 25 bp, Homo sapien
ctcccctcgaacaatttggcagcgg

SEQ ID NO: 127274 - DNA, 25 bp, Homo sapien
ctgaaacgtctgtgaaccctcccct

SEQ ID NO: 127275 - DNA, 25 bp, Homo sapien
ggccttgaggtttccggatgacatc

SEQ ID NO: 127276 - DNA, 25 bp, Homo sapien
caggctgggtgaatcggccgtcagg

SEQ ID NO: 127277 - DNA, 25 bp, Homo sapien
tggagtactcggatccactcctcca

SEQ ID NO: 127278 - DNA, 25 bp, Homo sapien
agcaggctctggagtactcggatcc

SEQ ID NO: 127279 - DNA, 25 bp, Homo sapien
gtgccaccccgaagcagagctggag

SEQ ID NO: 127280 - DNA, 25 bp, Homo sapien
gaaggaacagaagctgcacacgggc

SEQ ID NO: 127281 - DNA, 25 bp, Homo sapien
cacacgggcgaaggagaatgacata

SEQ ID NO: 127282 - DNA, 25 bp, Homo sapien
ctgcacacgggcgaaggagaatgac

SEQ ID NO: 127283 - DNA, 25 bp, Homo sapien
acagaagctgcacacgggcgaagga

SEQ ID NO: 127284 - DNA, 25 bp, Homo sapien
agcgcaccagaccaccttggagtgg

SEQ ID NO: 127285 - DNA, 25 bp, Homo sapien
gtagaagattttcccaacaagagcg

SEQ ID NO: 127286 - DNA, 25 bp, Homo sapien
ttgtcctcatggctccgatagtagt

SEQ ID NO: 127287 - DNA, 25 bp, Homo sapien
aacaagagcgcaccagaccaccttg

SEQ ID NO: 127288 - DNA, 25 bp, Homo sapien
gaagcaggagagtgggtattgtgag

SEQ ID NO: 127289 - DNA, 25 bp, Homo sapien
catcaggacatagagtggcagtcat

SEQ ID NO: 127290 - DNA, 25 bp, Homo sapien
gagagtgggtattgtgaggaggctg

SEQ ID NO: 127291 - DNA, 25 bp, Homo sapien
gacatagagtggcagtcatgtgctt

SEQ ID NO: 127292 - DNA, 25 bp, Homo sapien
tctcctctctctgaatacataggct

SEQ ID NO: 127293 - DNA, 25 bp, Homo sapien
tgtggacagcagtcttccatgaatg

SEQ ID NO: 127294 - DNA, 25 bp, Homo sapien
ctctgaatacataggctccgtgaag

SEQ ID NO: 127295 - DNA, 25 bp, Homo sapien
ttccatgaatgggagagccagtggg

SEQ ID NO: 127296 - DNA, 25 bp, Homo sapien
tgcagtgggaggaaagcaaccgtct

SEQ ID NO: 127297 - DNA, 25 bp, Homo sapien
tctatgtgcgcatcccgcacaggca

SEQ ID NO: 127298 - DNA, 25 bp, Homo sapien
tccagcctcatagtcctcgtctgag

SEQ ID NO: 127299 - DNA, 25 bp, Homo sapien
gatcgatctacttcctctatgtgcg

SEQ ID NO: 127300 - DNA, 25 bp, Homo sapien
ctgtgaggtggtagagccacgtatc

SEQ ID NO: 127301 - DNA, 25 bp, Homo sapien
gctgctcataggcagtgcccacctt

SEQ ID NO: 127302 - DNA, 25 bp, Homo sapien
ccactgtgaggtggtagagccacgt

SEQ ID NO: 127303 - DNA, 25 bp, Homo sapien
atccatcagttttccaatgagctgc

SEQ ID NO: 127304 - DNA, 25 bp, Homo sapien
tgagcaccctcatataagcatggcc

SEQ ID NO: 127305 - DNA, 25 bp, Homo sapien
tccaaacaggttagtccgatcccaa

SEQ ID NO: 127306 - DNA, 25 bp, Homo sapien
tatgccattaattagttcctcaggg

SEQ ID NO: 127307 - DNA, 25 bp, Homo sapien
gcatggcctttctcgtggaatggca

SEQ ID NO: 127308 - DNA, 25 bp, Homo sapien
aagagcttgagggcctccgtctgca

SEQ ID NO: 127309 - DNA, 25 bp, Homo sapien
cacagcatggggtgcctccagagcg

SEQ ID NO: 127310 - DNA, 25 bp, Homo sapien
ggcgtataggccgtctttgctgtag

SEQ ID NO: 127311 - DNA, 25 bp, Homo sapien
ggtgagggaggcgtataggccgtct

SEQ ID NO: 127312 - DNA, 25 bp, Homo sapien
ccaccggcacgttgatgaagagctg

SEQ ID NO: 127313 - DNA, 25 bp, Homo sapien
cagacctgcagtgcggtctgggcca

SEQ ID NO: 127314 - DNA, 25 bp, Homo sapien
gagttggcagtagatctcactctgc

SEQ ID NO: 127315 - DNA, 25 bp, Homo sapien
acacatggtagtccaccgaggcagc

SEQ ID NO: 127316 - DNA, 25 bp, Homo sapien
cccttgccaatggcttctgtcagct

SEQ ID NO: 127317 - DNA, 25 bp, Homo sapien
gcccttgccaatggcttctgtcagc

SEQ ID NO: 127318 - DNA, 25 bp, Homo sapien
agcccttgccaatggcttctgtcag

SEQ ID NO: 127319 - DNA, 25 bp, Homo sapien
cagcccttgccaatggcttctgtca

SEQ ID NO: 127320 - DNA, 25 bp, Homo sapien
ggaaaagtggagcacacagagcgag

SEQ ID NO: 127321 - DNA, 25 bp, Homo sapien
cacacagagcgaggagctgccagca

SEQ ID NO: 127322 - DNA, 25 bp, Homo sapien
gcaggaaaagtggagcacacagagc

SEQ ID NO: 127323 - DNA, 25 bp, Homo sapien
gcacacagagcgaggagctgccagc

SEQ ID NO: 127324 - DNA, 25 bp, Homo sapien
gagctgctgcttgacataccagagg

SEQ ID NO: 127325 - DNA, 25 bp, Homo sapien
gctgctgcttgacataccagaggaa

SEQ ID NO: 127326 - DNA, 25 bp, Homo sapien
gcttgacataccagaggaagtgatg

SEQ ID NO: 127327 - DNA, 25 bp, Homo sapien
gctgcttgacataccagaggaagtg

SEQ ID NO: 127328 - DNA, 25 bp, Homo sapien
taggtggcatactggccagtttcac

SEQ ID NO: 127329 - DNA, 25 bp, Homo sapien
tggacaccacttccatgcgcgatgg

SEQ ID NO: 127330 - DNA, 25 bp, Homo sapien
tggtaagtcccgttggtaaagtgca

SEQ ID NO: 127331 - DNA, 25 bp, Homo sapien
tccactgcccgctggcagtaggtgg

SEQ ID NO: 127332 - DNA, 25 bp, Homo sapien
gccgctggaggaactcatcaaccgt

SEQ ID NO: 127333 - DNA, 25 bp, Homo sapien
gatcgtccgtgaagagggcaaagcc

SEQ ID NO: 127334 - DNA, 25 bp, Homo sapien
tggaagagccgtcaaaaccaaccac

SEQ ID NO: 127335 - DNA, 25 bp, Homo sapien
tctcatgcctatctcctggttcagc

SEQ ID NO: 127336 - DNA, 25 bp, Homo sapien
tataggagcaccataaggacctgcc

SEQ ID NO: 127337 - DNA, 25 bp, Homo sapien
ttaaagacaagcaaacactggagcc

SEQ ID NO: 127338 - DNA, 25 bp, Homo sapien
ccctggacagggtgagcaataaagc

SEQ ID NO: 127339 - DNA, 25 bp, Homo sapien
cccagagggctaccatgtaacaaag

SEQ ID NO: 127340 - DNA, 25 bp, Homo sapien
cttgtacatcagcttcacgacgcgt

SEQ ID NO: 127341 - DNA, 25 bp, Homo sapien
ccctcagactttccggggtgcagct

SEQ ID NO: 127342 - DNA, 25 bp, Homo sapien
tacatcagcttcacgacgcgtgtcc

SEQ ID NO: 127343 - DNA, 25 bp, Homo sapien
gactttccggggtgcagctccttca

SEQ ID NO: 127344 - DNA, 25 bp, Homo sapien
ggtttcacagagtatcagcagcaga

SEQ ID NO: 127345 - DNA, 25 bp, Homo sapien
agtgttatatctgtgggtccctccc

SEQ ID NO: 127346 - DNA, 25 bp, Homo sapien
ccccgtctggataggctgtctagtc

SEQ ID NO: 127347 - DNA, 25 bp, Homo sapien
agtggcagcccttgtgtttggcccc

SEQ ID NO: 127348 - DNA, 25 bp, Homo sapien
tattgcctccagaaacatataaccg

SEQ ID NO: 127349 - DNA, 25 bp, Homo sapien
tgctgatctcataccaacaggaggg

SEQ ID NO: 127350 - DNA, 25 bp, Homo sapien
actatttgcctggagacatactgag

SEQ ID NO: 127351 - DNA, 25 bp, Homo sapien
aagagactactggaaactatttgcc

SEQ ID NO: 127352 - DNA, 25 bp, Homo sapien
tttgacttgactgcgaaagtacagc

SEQ ID NO: 127353 - DNA, 25 bp, Homo sapien
ggagcagccgttctcggtccgtctc

SEQ ID NO: 127354 - DNA, 25 bp, Homo sapien
gtccgtctcccctttgacttgactg

SEQ ID NO: 127355 - DNA, 25 bp, Homo sapien
tttgagaggcaaggagcagccgttc

SEQ ID NO: 127356 - DNA, 25 bp, Homo sapien
gggtggaacctgtctaggacctgct

SEQ ID NO: 127357 - DNA, 25 bp, Homo sapien
cctgtctaggacctgctggagaaga

SEQ ID NO: 127358 - DNA, 25 bp, Homo sapien
gggccccatgtctatagcgcctggg

SEQ ID NO: 127359 - DNA, 25 bp, Homo sapien
cagcgggggccccatgtctatagcg

SEQ ID NO: 127360 - DNA, 25 bp, Homo sapien
caggtagatgcggatgcactcagga

SEQ ID NO: 127361 - DNA, 25 bp, Homo sapien
aggccatttcctggccacggtcagg

SEQ ID NO: 127362 - DNA, 25 bp, Homo sapien
tcaggaggggagcatccttgcaatg

SEQ ID NO: 127363 - DNA, 25 bp, Homo sapien
tgcccattttgtggtcaacatatct

SEQ ID NO: 127364 - DNA, 25 bp, Homo sapien
ttttcctaagctcccagaccaagtg

SEQ ID NO: 127365 - DNA, 25 bp, Homo sapien
tataacctcaaacaaccagcactgg

SEQ ID NO: 127366 - DNA, 25 bp, Homo sapien
tctctcttaacccaaagggaggcag

SEQ ID NO: 127367 - DNA, 25 bp, Homo sapien
ccagcactggacatagtaggagctc

SEQ ID NO: 127368 - DNA, 25 bp, Homo sapien
tggccacctactaaccatctcaaag

SEQ ID NO: 127369 - DNA, 25 bp, Homo sapien
tgcttgtgacaggagacccttggcc

SEQ ID NO: 127370 - DNA, 25 bp, Homo sapien
agaaagaaggcacatccagggatct

SEQ ID NO: 127371 - DNA, 25 bp, Homo sapien
tgtacagtgtatgcaggaaatagac

SEQ ID NO: 127372 - DNA, 25 bp, Homo sapien
acagcaatccacaccagagcgttct

SEQ ID NO: 127373 - DNA, 25 bp, Homo sapien
tcctcattcacagcaatccacacca

SEQ ID NO: 127374 - DNA, 25 bp, Homo sapien
aggatgctgacgccatcctcattca

SEQ ID NO: 127375 - DNA, 25 bp, Homo sapien
caggatgctgacgccatcctcattc

SEQ ID NO: 127376 - DNA, 25 bp, Homo sapien
ctgtggaaaggaaccagtcagttgt

SEQ ID NO: 127377 - DNA, 25 bp, Homo sapien
tccacctgtcccctgagctaggaac

SEQ ID NO: 127378 - DNA, 25 bp, Homo sapien
taatcacaagcatgaagtcatccct

SEQ ID NO: 127379 - DNA, 25 bp, Homo sapien
gcagccatccggaagatcaacttct

SEQ ID NO: 127380 - DNA, 25 bp, Homo sapien
tccctgcagccaccaaacgttgtca

SEQ ID NO: 127381 - DNA, 25 bp, Homo sapien
tcttgtctgggatagatctaatcac

SEQ ID NO: 127382 - DNA, 25 bp, Homo sapien
gaagagaagagcacgtaagcaccca

SEQ ID NO: 127383 - DNA, 25 bp, Homo sapien
cagggtttccagttaatcacacggg

SEQ ID NO: 127384 - DNA, 25 bp, Homo sapien
ttgatacggagatgcaacaccacct

SEQ ID NO: 127385 - DNA, 25 bp, Homo sapien
caacaattttatctgggcagggccc

SEQ ID NO: 127386 - DNA, 25 bp, Homo sapien
ggaatcataactgtgctgttcagag

SEQ ID NO: 127387 - DNA, 25 bp, Homo sapien
tcctgttggtctggagatcctctca

SEQ ID NO: 127388 - DNA, 25 bp, Homo sapien
gatcctctcagatgcacagtgccct

SEQ ID NO: 127389 - DNA, 25 bp, Homo sapien
ctgtgctgttcagaggcccagtggt

SEQ ID NO: 127390 - DNA, 25 bp, Homo sapien
agatgtgaaggaattgaactagcct

SEQ ID NO: 127391 - DNA, 25 bp, Homo sapien
tggctttcttacttattagctctta

SEQ ID NO: 127392 - DNA, 25 bp, Homo sapien
gatgtgaaggaattgaactagcctt

SEQ ID NO: 127393 - DNA, 25 bp, Homo sapien
tattagctcttatgctgagttcctg

SEQ ID NO: 127394 - DNA, 25 bp, Homo sapien
gaagaaaagaactgtcgtccatcca

SEQ ID NO: 127395 - DNA, 25 bp, Homo sapien
tcacagcaacgttggccccttggta

SEQ ID NO: 127396 - DNA, 25 bp, Homo sapien
gtgcaatggttcatatagctggcca

SEQ ID NO: 127397 - DNA, 25 bp, Homo sapien
gccccttggtagcacaggaaacaga

SEQ ID NO: 127398 - DNA, 25 bp, Homo sapien
tggtgttggggaatcgggtaggaga

SEQ ID NO: 127399 - DNA, 25 bp, Homo sapien
ggcactagtggtgttggggaatcgg

SEQ ID NO: 127400 - DNA, 25 bp, Homo sapien
aaatccagaggcactagtggtgttg

SEQ ID NO: 127401 - DNA, 25 bp, Homo sapien
aatccagaggcactagtggtgttgg

SEQ ID NO: 127402 - DNA, 25 bp, Homo sapien
gagtaccagtgcagaaagccttaac

SEQ ID NO: 127403 - DNA, 25 bp, Homo sapien
tgttatcctgcaaagactgccccag

SEQ ID NO: 127404 - DNA, 25 bp, Homo sapien
gttagacccgtcacagtagtatcat

SEQ ID NO: 127405 - DNA, 25 bp, Homo sapien
acattgcgtggtactgggtttggcc

SEQ ID NO: 127406 - DNA, 25 bp, Homo sapien
gagtgcatttgcttggtcttttaca

SEQ ID NO: 127407 - DNA, 25 bp, Homo sapien
tttggtggtcttacagcagcaaaaa

SEQ ID NO: 127408 - DNA, 25 bp, Homo sapien
tcaaggagcatatccaggcccacat

SEQ ID NO: 127409 - DNA, 25 bp, Homo sapien
ggaaacaaatgatggcccactacag

SEQ ID NO: 127410 - DNA, 25 bp, Homo sapien
actcttaggctagggcaaatgtcac

SEQ ID NO: 127411 - DNA, 25 bp, Homo sapien
caacctgtctagaggagactgtcta

SEQ ID NO: 127412 - DNA, 25 bp, Homo sapien
taaggctgccttagagctaggaaat

SEQ ID NO: 127413 - DNA, 25 bp, Homo sapien
aaaggcttggttttgggtgctactg

SEQ ID NO: 127414 - DNA, 25 bp, Homo sapien
gataaactagttctggcctcgcagt

SEQ ID NO: 127415 - DNA, 25 bp, Homo sapien
gattgaccccaaattcagtgtgaac

SEQ ID NO: 127416 - DNA, 25 bp, Homo sapien
tctcagctagatccccaagttgtgg

SEQ ID NO: 127417 - DNA, 25 bp, Homo sapien
tccttattggccttagagataccca

SEQ ID NO: 127418 - DNA, 25 bp, Homo sapien
tagtgcatcttagagccatagagca

SEQ ID NO: 127419 - DNA, 25 bp, Homo sapien
gcaggtgactggaaatctaactcag

SEQ ID NO: 127420 - DNA, 25 bp, Homo sapien
gggagaccttaagaattttgacaca

SEQ ID NO: 127421 - DNA, 25 bp, Homo sapien
gaaatgtcctacaaaagacgagtct

SEQ ID NO: 127422 - DNA, 25 bp, Homo sapien
ttgactccgcatttctcccctttgg

SEQ ID NO: 127423 - DNA, 25 bp, Homo sapien
tgattgaagtatacaggagctgcca

SEQ ID NO: 127424 - DNA, 25 bp, Homo sapien
gccccggctggactgcttgattgaa

SEQ ID NO: 127425 - DNA, 25 bp, Homo sapien
cctttggaattcagagtgccaagcc

SEQ ID NO: 127426 - DNA, 25 bp, Homo sapien
ttatgtatacagttaaccctgcctc

SEQ ID NO: 127427 - DNA, 25 bp, Homo sapien
gtatacagttaaccctgcctcactg

SEQ ID NO: 127428 - DNA, 25 bp, Homo sapien
gatcgggctccagagattggacaac

SEQ ID NO: 127429 - DNA, 25 bp, Homo sapien
tttctagtgtttaagatcgggctcc

SEQ ID NO: 127430 - DNA, 25 bp, Homo sapien
gcactatatacagatggttcccaac

SEQ ID NO: 127431 - DNA, 25 bp, Homo sapien
tagtatctgctacactgtgctaagc

SEQ ID NO: 127432 - DNA, 25 bp, Homo sapien
gatgatgcggaaacaatacaaagtc

SEQ ID NO: 127433 - DNA, 25 bp, Homo sapien
tatgagatttaccacacgttactgt

SEQ ID NO: 127434 - DNA, 25 bp, Homo sapien
taaacctcatgatgaagggaacgtc

SEQ ID NO: 127435 - DNA, 25 bp, Homo sapien
gaagtcataaggtaggagggctcca

SEQ ID NO: 127436 - DNA, 25 bp, Homo sapien
gattccggctcttgtcatcttactg

SEQ ID NO: 127437 - DNA, 25 bp, Homo sapien
ttactgctgacacccttagtgtgcc

SEQ ID NO: 127438 - DNA, 25 bp, Homo sapien
tgtcagttaatttacaggcctctaa

SEQ ID NO: 127439 - DNA, 25 bp, Homo sapien
tgtactacacaacaccccagtaggt

SEQ ID NO: 127440 - DNA, 25 bp, Homo sapien
caaaggccctactggatacctctat

SEQ ID NO: 127441 - DNA, 25 bp, Homo sapien
gagtgctcaactctggcagctccct

SEQ ID NO: 127442 - DNA, 25 bp, Homo sapien
acacaaacggcccttgactagccat

SEQ ID NO: 127443 - DNA, 25 bp, Homo sapien
agaagcaggacacaaacggcccttg

SEQ ID NO: 127444 - DNA, 25 bp, Homo sapien
tgccccgccgctggcaaccctcgaa

SEQ ID NO: 127445 - DNA, 25 bp, Homo sapien
cgctggcaaccctcgaagcagccac

SEQ ID NO: 127446 - DNA, 25 bp, Homo sapien
cattgtacatgggtttggtggtcct

SEQ ID NO: 127447 - DNA, 25 bp, Homo sapien
gcatcttatggatgacggccgccat

SEQ ID NO: 127448 - DNA, 25 bp, Homo sapien
cgttcacactcaccatcaggtacgg

SEQ ID NO: 127449 - DNA, 25 bp, Homo sapien
ccatcagtggcgttagtctagagct

SEQ ID NO: 127450 - DNA, 25 bp, Homo sapien
gctgcctcaggtatgtgagaataat

SEQ ID NO: 127451 - DNA, 25 bp, Homo sapien
tgcctcaggtatgtgagaataatct

SEQ ID NO: 127452 - DNA, 25 bp, Homo sapien
gggctgcctcaggtatgtgagaata

SEQ ID NO: 127453 - DNA, 25 bp, Homo sapien
cctgtttcccaaatactccccagat

SEQ ID NO: 127454 - DNA, 25 bp, Homo sapien
tggcagtgtttatgggtaacacatg

SEQ ID NO: 127455 - DNA, 25 bp, Homo sapien
acaggctgtaatggttagatgatgg

SEQ ID NO: 127456 - DNA, 25 bp, Homo sapien
tgaacctctgtttggcaatctttga

SEQ ID NO: 127457 - DNA, 25 bp, Homo sapien
tctgaacctctgtttggcaatcttt

SEQ ID NO: 127458 - DNA, 25 bp, Homo sapien
caaggcgccacagtgattgcaaagc

SEQ ID NO: 127459 - DNA, 25 bp, Homo sapien
ccaaagcaaggcgccacagtgattg

SEQ ID NO: 127460 - DNA, 25 bp, Homo sapien
cagtgattgcaaagcggtagtgatt

SEQ ID NO: 127461 - DNA, 25 bp, Homo sapien
gccacagtgattgcaaagcggtagt

SEQ ID NO: 127462 - DNA, 25 bp, Homo sapien
catcaaagttttacctgacactaga

SEQ ID NO: 127463 - DNA, 25 bp, Homo sapien
tttcatcaaagttttacctgacact

SEQ ID NO: 127464 - DNA, 25 bp, Homo sapien
tcatcaaagttttacctgacactag

SEQ ID NO: 127465 - DNA, 25 bp, Homo sapien
ttcatcaaagttttacctgacacta

SEQ ID NO: 127466 - DNA, 25 bp, Homo sapien
taccctgttagtgcatagctctagg

SEQ ID NO: 127467 - DNA, 25 bp, Homo sapien
acagagttgcctagggcccatccgg

SEQ ID NO: 127468 - DNA, 25 bp, Homo sapien
tcctttaatcatgtggctgccaaca

SEQ ID NO: 127469 - DNA, 25 bp, Homo sapien
tctaggaccccttctcaggttcaaa

SEQ ID NO: 127470 - DNA, 25 bp, Homo sapien
gcacacaaaatacatacgatggcat

SEQ ID NO: 127471 - DNA, 25 bp, Homo sapien
tcgtaacgggccttgtctgcccttg

SEQ ID NO: 127472 - DNA, 25 bp, Homo sapien
gccttgtctgcccttgccatagctt

SEQ ID NO: 127473 - DNA, 25 bp, Homo sapien
cgggccttgtctgcccttgccatag

SEQ ID NO: 127474 - DNA, 25 bp, Homo sapien
caaggtacagtatggaggctattaa

SEQ ID NO: 127475 - DNA, 25 bp, Homo sapien
ttttgggccacacgcagaacagaac

SEQ ID NO: 127476 - DNA, 25 bp, Homo sapien
agtttcttcgccgaatcaccaatgg

SEQ ID NO: 127477 - DNA, 25 bp, Homo sapien
tcagcctcaacaactccctttttgg

SEQ ID NO: 127478 - DNA, 25 bp, Homo sapien
cgctgacgccagaaggccaatatcc

SEQ ID NO: 127479 - DNA, 25 bp, Homo sapien
tgccgctgacgccagaaggccaata

SEQ ID NO: 127480 - DNA, 25 bp, Homo sapien
ctgacgccagaaggccaatatccgg

SEQ ID NO: 127481 - DNA, 25 bp, Homo sapien
gcccctgccgctgacgccagaaggc

SEQ ID NO: 127482 - DNA, 25 bp, Homo sapien
ggacgtgccttcgatgacgtcaccc

SEQ ID NO: 127483 - DNA, 25 bp, Homo sapien
aaggctgggacgtgccttcgatgac

SEQ ID NO: 127484 - DNA, 25 bp, Homo sapien
tgacgtcaccccactctggcctgtg

SEQ ID NO: 127485 - DNA, 25 bp, Homo sapien
ccaccgctctgcaaggctgggacgt

SEQ ID NO: 127486 - DNA, 25 bp, Homo sapien
ttggaagccgggagtgagcgccacc

SEQ ID NO: 127487 - DNA, 25 bp, Homo sapien
accgcccgccgctgctcttacctac

SEQ ID NO: 127488 - DNA, 25 bp, Homo sapien
tgctcttacctacccgcgccagcgt

SEQ ID NO: 127489 - DNA, 25 bp, Homo sapien
aaggcagaggctccgcgcggttgga

SEQ ID NO: 127490 - DNA, 25 bp, Homo sapien
ctggaggagacgcgagaggctgccc

SEQ ID NO: 127491 - DNA, 25 bp, Homo sapien
tcttcaggatggaatgcactcgcgt

SEQ ID NO: 127492 - DNA, 25 bp, Homo sapien
tgcccttgtgagaacggggctccta

SEQ ID NO: 127493 - DNA, 25 bp, Homo sapien
gggctcctatcacagccacggagtg

SEQ ID NO: 127494 - DNA, 25 bp, Homo sapien
gccacggagtggacggatttcttca

SEQ ID NO: 127495 - DNA, 25 bp, Homo sapien
gatcctgcccggcggttccaggtgc

SEQ ID NO: 127496 - DNA, 25 bp, Homo sapien
tagggggcggaggatcctgcccggc

SEQ ID NO: 127497 - DNA, 25 bp, Homo sapien
cggaggatcctgcccggcggttcca

SEQ ID NO: 127498 - DNA, 25 bp, Homo sapien
ggcggaggatcctgcccggcggttc

SEQ ID NO: 127499 - DNA, 25 bp, Homo sapien
ttatggcagcgggaccatgctccac

SEQ ID NO: 127500 - DNA, 25 bp, Homo sapien
ggagagccttttcatcaagccagct

SEQ ID NO: 127501 - DNA, 25 bp, Homo sapien
gccagcttctcttatggcagcggga

SEQ ID NO: 127502 - DNA, 25 bp, Homo sapien
aaactggagagccttttcatcaagc

SEQ ID NO: 127503 - DNA, 25 bp, Homo sapien
gccttgtgaatggacaattttagga

SEQ ID NO: 127504 - DNA, 25 bp, Homo sapien
gggatggtctatgaggagtatcacc

SEQ ID NO: 127505 - DNA, 25 bp, Homo sapien
caggctatcggttgtccaggctaca

SEQ ID NO: 127506 - DNA, 25 bp, Homo sapien
ttttgcagtaactgccagcctcctg

SEQ ID NO: 127507 - DNA, 25 bp, Homo sapien
gcactgccgagtgttagttacccaa

SEQ ID NO: 127508 - DNA, 25 bp, Homo sapien
cacaattaattaccgaaaggacagg

SEQ ID NO: 127509 - DNA, 25 bp, Homo sapien
gacaacagctagagggctacctaag

SEQ ID NO: 127510 - DNA, 25 bp, Homo sapien
tgcaatgatggcctacgaagccaca

SEQ ID NO: 127511 - DNA, 25 bp, Homo sapien
tgctatgaaccagatgtacaaaggg

SEQ ID NO: 127512 - DNA, 25 bp, Homo sapien
gcccagcccagtgctaattgctatg

SEQ ID NO: 127513 - DNA, 25 bp, Homo sapien
tatggtgcagacttcaaggaggtca

SEQ ID NO: 127514 - DNA, 25 bp, Homo sapien
taagtagcagatcattttcagagaa

SEQ ID NO: 127515 - DNA, 25 bp, Homo sapien
cagccaaagaaccatgtgtcttgag

SEQ ID NO: 127516 - DNA, 25 bp, Homo sapien
caaagaaccatgtgtcttgagatat

SEQ ID NO: 127517 - DNA, 25 bp, Homo sapien
acaagatttcgccattttaccgagg

SEQ ID NO: 127518 - DNA, 25 bp, Homo sapien
agatttcgccattttaccgaggctg

SEQ ID NO: 127519 - DNA, 25 bp, Homo sapien
tatttcagggctagtgagtaaatcc

SEQ ID NO: 127520 - DNA, 25 bp, Homo sapien
cttctatttcagggctagtgagtaa

SEQ ID NO: 127521 - DNA, 25 bp, Homo sapien
tctatttcagggctagtgagtaaat

SEQ ID NO: 127522 - DNA, 25 bp, Homo sapien
acttctatttcagggctagtgagta

SEQ ID NO: 127523 - DNA, 25 bp, Homo sapien
ccagccttaaagctatttctttatc

SEQ ID NO: 127524 - DNA, 25 bp, Homo sapien
caggaagaacgaactcaactctata

SEQ ID NO: 127525 - DNA, 25 bp, Homo sapien
tattcaggaagaacgaactcaactc

SEQ ID NO: 127526 - DNA, 25 bp, Homo sapien
cagtttcagtgccaggtaaggactt

SEQ ID NO: 127527 - DNA, 25 bp, Homo sapien
aggtaaggacttgggacaatgagtc

SEQ ID NO: 127528 - DNA, 25 bp, Homo sapien
cattacaggtgctagaagggttact

SEQ ID NO: 127529 - DNA, 25 bp, Homo sapien
caaaagcttctagacagtggacact

SEQ ID NO: 127530 - DNA, 25 bp, Homo sapien
gatttcagtcgctaattcaggccac

SEQ ID NO: 127531 - DNA, 25 bp, Homo sapien
gacactggaaggactactgcttaac

SEQ ID NO: 127532 - DNA, 25 bp, Homo sapien
tcagccagttcctggttggcaagac

SEQ ID NO: 127533 - DNA, 25 bp, Homo sapien
tatcaggttgttgtagagatcatct

SEQ ID NO: 127534 - DNA, 25 bp, Homo sapien
tgagcgtggattcactatcaggttg

SEQ ID NO: 127535 - DNA, 25 bp, Homo sapien
cagctgtagccatctgacacagctc

SEQ ID NO: 127536 - DNA, 25 bp, Homo sapien
tatctgtccctacatgcttccagca

SEQ ID NO: 127537 - DNA, 25 bp, Homo sapien
cagcacctcagggaaaataatcacc

SEQ ID NO: 127538 - DNA, 25 bp, Homo sapien
gcttccagcagtaaatgataaaacc

SEQ ID NO: 127539 - DNA, 25 bp, Homo sapien
aataatcaccagaagagtcacactg

SEQ ID NO: 127540 - DNA, 25 bp, Homo sapien
aaagaacaagtataatcttgaaggc

SEQ ID NO: 127541 - DNA, 25 bp, Homo sapien
ttgaaggccctctgcttggcaaaca

SEQ ID NO: 127542 - DNA, 25 bp, Homo sapien
acaagtataatcttgaaggccctct

SEQ ID NO: 127543 - DNA, 25 bp, Homo sapien
ctgcaaagaacaagtataatcttga

SEQ ID NO: 127544 - DNA, 25 bp, Homo sapien
tggccactaatggtaccgattgcca

SEQ ID NO: 127545 - DNA, 25 bp, Homo sapien
ggcagtgtcgggcatggccactaat

SEQ ID NO: 127546 - DNA, 25 bp, Homo sapien
aaatgaaactggctgtccatggaga

SEQ ID NO: 127547 - DNA, 25 bp, Homo sapien
cagcatgggcatcaacccagacaac

SEQ ID NO: 127548 - DNA, 25 bp, Homo sapien
cacccacagggtaagtttagagcaa

SEQ ID NO: 127549 - DNA, 25 bp, Homo sapien
gatcattatcatgtgcgtccgtggg

SEQ ID NO: 127550 - DNA, 25 bp, Homo sapien
tttagagcaacacaggacacacttg

SEQ ID NO: 127551 - DNA, 25 bp, Homo sapien
cgtccgtgggtatgcaatctgcttt

SEQ ID NO: 127552 - DNA, 25 bp, Homo sapien
tatacacaatacttgcagaagagat

SEQ ID NO: 127553 - DNA, 25 bp, Homo sapien
caggaaaatcctgggagttgtggta

SEQ ID NO: 127554 - DNA, 25 bp, Homo sapien
tctcagaccaatatacacaatactt

SEQ ID NO: 127555 - DNA, 25 bp, Homo sapien
gaagagatacaaggtttgatccagg

SEQ ID NO: 127556 - DNA, 25 bp, Homo sapien
tagaccaagttaagcatcagccttt

SEQ ID NO: 127557 - DNA, 25 bp, Homo sapien
tagaacataattggctaggacaggc

SEQ ID NO: 127558 - DNA, 25 bp, Homo sapien
tgtagtgacctgcaatagaccaagt

SEQ ID NO: 127559 - DNA, 25 bp, Homo sapien
ggaggagtccttagtttaaagagca

SEQ ID NO: 127560 - DNA, 25 bp, Homo sapien
agtcgatcaatatctctcatggaaa

SEQ ID NO: 127561 - DNA, 25 bp, Homo sapien
cttctggataccaagtcgatcaata

SEQ ID NO: 127562 - DNA, 25 bp, Homo sapien
tactggatatcatagttctttaaaa

SEQ ID NO: 127563 - DNA, 25 bp, Homo sapien
tcagcagatcaaatgttcgttccat

SEQ ID NO: 127564 - DNA, 25 bp, Homo sapien
tatttcctcagcaatatacatgcct

SEQ ID NO: 127565 - DNA, 25 bp, Homo sapien
gccagtgtagggtcaaatgcatcaa

SEQ ID NO: 127566 - DNA, 25 bp, Homo sapien
ctggagccagtgtagggtcaaatgc

SEQ ID NO: 127567 - DNA, 25 bp, Homo sapien
cgataggttagtcccccgacaacag

SEQ ID NO: 127568 - DNA, 25 bp, Homo sapien
ggctctagtacaagacctaccctac

SEQ ID NO: 127569 - DNA, 25 bp, Homo sapien
caagagatcagctttagctccaaat

SEQ ID NO: 127570 - DNA, 25 bp, Homo sapien
cccaagatattgtccagtttgcaga

SEQ ID NO: 127571 - DNA, 25 bp, Homo sapien
gccagtcttgataacgtagaattca

SEQ ID NO: 127572 - DNA, 25 bp, Homo sapien
cagaagaacctatccagacctgcta

SEQ ID NO: 127573 - DNA, 25 bp, Homo sapien
gcaagtggaagggaagcttaaacca

SEQ ID NO: 127574 - DNA, 25 bp, Homo sapien
catagttgagtgtacagtgccaaac

SEQ ID NO: 127575 - DNA, 25 bp, Homo sapien
gatgtgctgaatgccatcatgtccg

SEQ ID NO: 127576 - DNA, 25 bp, Homo sapien
cttgtgtcaaagttctcggtagtgt

SEQ ID NO: 127577 - DNA, 25 bp, Homo sapien
aacttgtgtcaaagttctcggtagt

SEQ ID NO: 127578 - DNA, 25 bp, Homo sapien
tgtcaaagttctcggtagtgttcct

SEQ ID NO: 127579 - DNA, 25 bp, Homo sapien
caaagttctcggtagtgttcctttg

SEQ ID NO: 127580 - DNA, 25 bp, Homo sapien
gtacttgatcaagagaaaattcagc

SEQ ID NO: 127581 - DNA, 25 bp, Homo sapien
tatctgtatctgttagagcaccaca

SEQ ID NO: 127582 - DNA, 25 bp, Homo sapien
ggcaggttccacatctaacaacatc

SEQ ID NO: 127583 - DNA, 25 bp, Homo sapien
gactgacccagtgtcttgtacttga

SEQ ID NO: 127584 - DNA, 25 bp, Homo sapien
tcttgtctgaccaaagcttgaagca

SEQ ID NO: 127585 - DNA, 25 bp, Homo sapien
tcatctggtgaactgggagtaggaa

SEQ ID NO: 127586 - DNA, 25 bp, Homo sapien
gaagcaatcacatctactgccaggt

SEQ ID NO: 127587 - DNA, 25 bp, Homo sapien
tgccaggttagctgtagtcttcgcc

SEQ ID NO: 127588 - DNA, 25 bp, Homo sapien
taaggcagtattgacccagacaacc

SEQ ID NO: 127589 - DNA, 25 bp, Homo sapien
cattatcatcttactggagctcgcc

SEQ ID NO: 127590 - DNA, 25 bp, Homo sapien
tcaaggatgcactgtatagccaggc

SEQ ID NO: 127591 - DNA, 25 bp, Homo sapien
cctgctaagtggctgtgtgatcaaa

SEQ ID NO: 127592 - DNA, 25 bp, Homo sapien
gcagttgacgcatagtccctgtata

SEQ ID NO: 127593 - DNA, 25 bp, Homo sapien
tgtatactcagtaccacccagcaga

SEQ ID NO: 127594 - DNA, 25 bp, Homo sapien
tttatataatctcagccccgtgcgg

SEQ ID NO: 127595 - DNA, 25 bp, Homo sapien
tcataaagcacctcagcagttgacg

SEQ ID NO: 127596 - DNA, 25 bp, Homo sapien
ctagactgtgggaactatcttcttc

SEQ ID NO: 127597 - DNA, 25 bp, Homo sapien
cctgtatttgctacccgagagcaga

SEQ ID NO: 127598 - DNA, 25 bp, Homo sapien
ccaaaattctggtcgctgctagtac

SEQ ID NO: 127599 - DNA, 25 bp, Homo sapien
tagtactccgcagaaatagttggcc

SEQ ID NO: 127600 - DNA, 25 bp, Homo sapien
gggaatacaggtgggcgccaccaca

SEQ ID NO: 127601 - DNA, 25 bp, Homo sapien
ctgtttttttgtattttcagtagag

SEQ ID NO: 127602 - DNA, 25 bp, Homo sapien
cctggctgtttttttgtattttcag

SEQ ID NO: 127603 - DNA, 25 bp, Homo sapien
tccatgaagacctacaaggggtgcc

SEQ ID NO: 127604 - DNA, 25 bp, Homo sapien
ccctgcgcgctttggaaggaagatt

SEQ ID NO: 127605 - DNA, 25 bp, Homo sapien
gaagctgcacgagatcttccgcggc

SEQ ID NO: 127606 - DNA, 25 bp, Homo sapien
ccgcctcctcggagcatttcgagaa

SEQ ID NO: 127607 - DNA, 25 bp, Homo sapien
gcggctccggaagagcctcgtcctg

SEQ ID NO: 127608 - DNA, 25 bp, Homo sapien
ggcggtcgccgttatggccactggg

SEQ ID NO: 127609 - DNA, 25 bp, Homo sapien
tgggcggcggtggtgcggcggtcgc

SEQ ID NO: 127610 - DNA, 25 bp, Homo sapien
ctgggcggctgaccgccgggctagg

SEQ ID NO: 127611 - DNA, 25 bp, Homo sapien
aaggtgggcgttccggctcgagagg

SEQ ID NO: 127612 - DNA, 25 bp, Homo sapien
gctggagaaggtgggcgttccggct

SEQ ID NO: 127613 - DNA, 25 bp, Homo sapien
ttcgcgccggcgctccagcaatcac

SEQ ID NO: 127614 - DNA, 25 bp, Homo sapien
tccagcaatcactggctggagaagg

SEQ ID NO: 127615 - DNA, 25 bp, Homo sapien
cggcacttctcgggttccgcgactg

SEQ ID NO: 127616 - DNA, 25 bp, Homo sapien
ggcgcggcaccgctccctcaggagt

SEQ ID NO: 127617 - DNA, 25 bp, Homo sapien
ggccgcgcagtctcccgacttctcg

SEQ ID NO: 127618 - DNA, 25 bp, Homo sapien
ctcaggagtcgcctaggccgcgcag

SEQ ID NO: 127619 - DNA, 25 bp, Homo sapien
atcccccggcgtgcactgcagcgcc

SEQ ID NO: 127620 - DNA, 25 bp, Homo sapien
tcccccggcgtgcactgcagcgccc

SEQ ID NO: 127621 - DNA, 25 bp, Homo sapien
gcgcgaccccgggacgagacgctct

SEQ ID NO: 127622 - DNA, 25 bp, Homo sapien
cgggacgagacgctctcgtccgagc

SEQ ID NO: 127623 - DNA, 25 bp, Homo sapien
gaccccgggacgagacgctctcgtc

SEQ ID NO: 127624 - DNA, 25 bp, Homo sapien
cccgggacgagacgctctcgtccga

SEQ ID NO: 127625 - DNA, 25 bp, Homo sapien
caaagcgcgatgacagtgaggacga

SEQ ID NO: 127626 - DNA, 25 bp, Homo sapien
tcagggtggcaaagcaaagcgcgat

SEQ ID NO: 127627 - DNA, 25 bp, Homo sapien
tcaagacgcgaaacgaggaattcgg

SEQ ID NO: 127628 - DNA, 25 bp, Homo sapien
acgcgaaacgaggaattcgggtcag

SEQ ID NO: 127629 - DNA, 25 bp, Homo sapien
gacaagatctcgctccacttgggag

SEQ ID NO: 127630 - DNA, 25 bp, Homo sapien
aggagaattactcgggcctagcagc

SEQ ID NO: 127631 - DNA, 25 bp, Homo sapien
gatgagacctaatgaagccaggccc

SEQ ID NO: 127632 - DNA, 25 bp, Homo sapien
cagctagagtatttcgaggtcatcc

SEQ ID NO: 127633 - DNA, 25 bp, Homo sapien
ttcccatcacttgtttggagtgtgc

SEQ ID NO: 127634 - DNA, 25 bp, Homo sapien
tgccaaaggaagtctaaggaattag

SEQ ID NO: 127635 - DNA, 25 bp, Homo sapien
tatcaaaagtaatgctgccaaagga

SEQ ID NO: 127636 - DNA, 25 bp, Homo sapien
aaggaattagtagtgttcccatcac

SEQ ID NO: 127637 - DNA, 25 bp, Homo sapien
gaagaccctcatatgacctgcacag

SEQ ID NO: 127638 - DNA, 25 bp, Homo sapien
accagtcttcacttcaagagggcca

SEQ ID NO: 127639 - DNA, 25 bp, Homo sapien
ggagcaaaccagtgccatccagtct

SEQ ID NO: 127640 - DNA, 25 bp, Homo sapien
gcctgcttggtgtccagttaaaact

SEQ ID NO: 127641 - DNA, 25 bp, Homo sapien
gctattgccgaaacaaagtagaatg

SEQ ID NO: 127642 - DNA, 25 bp, Homo sapien
tgctctcttcaaactatattgaggg

SEQ ID NO: 127643 - DNA, 25 bp, Homo sapien
acaaacctggctctgtacatgttgc

SEQ ID NO: 127644 - DNA, 25 bp, Homo sapien
gaaggaaatcaggttgctattgccg

SEQ ID NO: 127645 - DNA, 25 bp, Homo sapien
ctctagggaggaagcattggatctc

SEQ ID NO: 127646 - DNA, 25 bp, Homo sapien
gagcgaatgccagctatctttagtg

SEQ ID NO: 127647 - DNA, 25 bp, Homo sapien
cattgctgctagagtgagcgaatgc

SEQ ID NO: 127648 - DNA, 25 bp, Homo sapien
caggctaagaagtgtcagagtggca

SEQ ID NO: 127649 - DNA, 25 bp, Homo sapien
tgctgatctgaaactagtactatgc

SEQ ID NO: 127650 - DNA, 25 bp, Homo sapien
tataatgccagctcaaaaacagagc

SEQ ID NO: 127651 - DNA, 25 bp, Homo sapien
tatgctctacatataatggaccctt

SEQ ID NO: 127652 - DNA, 25 bp, Homo sapien
ctttcatatgttggctgacaggagc

SEQ ID NO: 127653 - DNA, 25 bp, Homo sapien
tggctgcgccccaaatcaggtctgt

SEQ ID NO: 127654 - DNA, 25 bp, Homo sapien
gatagatcaatcagcccaaggctgg

SEQ ID NO: 127655 - DNA, 25 bp, Homo sapien
tatgagctctatcctgccttgcgag

SEQ ID NO: 127656 - DNA, 25 bp, Homo sapien
tcttcaatgggatatggcccgacgc

SEQ ID NO: 127657 - DNA, 25 bp, Homo sapien
cagacgccaacatctgatctccagg

SEQ ID NO: 127658 - DNA, 25 bp, Homo sapien
tctccaggagaaacagtgcggtaac

SEQ ID NO: 127659 - DNA, 25 bp, Homo sapien
taatccgcctttcatttcccagacg

SEQ ID NO: 127660 - DNA, 25 bp, Homo sapien
aactgtcagacttcggaccgctcct

SEQ ID NO: 127661 - DNA, 25 bp, Homo sapien
tagaaaaatcatgatagttgccacc

SEQ ID NO: 127662 - DNA, 25 bp, Homo sapien
tagttgccaccataattcaagatag

SEQ ID NO: 127663 - DNA, 25 bp, Homo sapien
tctattatcaatgaacactcaaaca

SEQ ID NO: 127664 - DNA, 25 bp, Homo sapien
cttcaaggacttattgcttcctctt

SEQ ID NO: 127665 - DNA, 25 bp, Homo sapien
cagacagatattgattggttaaaac

SEQ ID NO: 127666 - DNA, 25 bp, Homo sapien
caaatggaaattatgcaaaaggacc

SEQ ID NO: 127667 - DNA, 25 bp, Homo sapien
tattagttcattggaacccgtgtct

SEQ ID NO: 127668 - DNA, 25 bp, Homo sapien
tgggtacaattaaggaatcacagac

SEQ ID NO: 127669 - DNA, 25 bp, Homo sapien
agtcctggccactcaggaagctgag

SEQ ID NO: 127670 - DNA, 25 bp, Homo sapien
cctggccactcaggaagctgagaag

SEQ ID NO: 127671 - DNA, 25 bp, Homo sapien
ggccactcaggaagctgagaaggga

SEQ ID NO: 127672 - DNA, 25 bp, Homo sapien
ctgtagtcctggccactcaggaagc

SEQ ID NO: 127673 - DNA, 25 bp, Homo sapien
cccagaacgtctaggctaaagggat

SEQ ID NO: 127674 - DNA, 25 bp, Homo sapien
tgattggcacaatacactacaagcc

SEQ ID NO: 127675 - DNA, 25 bp, Homo sapien
tatcttgcgactgatcagcgcctgt

SEQ ID NO: 127676 - DNA, 25 bp, Homo sapien
gctgttcataggcactatcttgcga

SEQ ID NO: 127677 - DNA, 25 bp, Homo sapien
gagaacatatattggtgtccctcct

SEQ ID NO: 127678 - DNA, 25 bp, Homo sapien
acatatattggtgtccctcctcttt

SEQ ID NO: 127679 - DNA, 25 bp, Homo sapien
gaacatatattggtgtccctcctct

SEQ ID NO: 127680 - DNA, 25 bp, Homo sapien
ttggagaataactggaagacggcag

SEQ ID NO: 127681 - DNA, 25 bp, Homo sapien
gatgtctgcaacataacctttcttg

SEQ ID NO: 127682 - DNA, 25 bp, Homo sapien
ctgcaacataacctttcttgtagat

SEQ ID NO: 127683 - DNA, 25 bp, Homo sapien
gtctgcaacataacctttcttgtag

SEQ ID NO: 127684 - DNA, 25 bp, Homo sapien
atgtctgcaacataacctttcttgt

SEQ ID NO: 127685 - DNA, 25 bp, Homo sapien
gcacaggtttgcctctgcaatcttg

SEQ ID NO: 127686 - DNA, 25 bp, Homo sapien
acttatatcccatttcagtccctaa

SEQ ID NO: 127687 - DNA, 25 bp, Homo sapien
taaggcctgggcttattggccctct

SEQ ID NO: 127688 - DNA, 25 bp, Homo sapien
accacagtgcaggtgtaaggcctgg

SEQ ID NO: 127689 - DNA, 25 bp, Homo sapien
caagaacactgttgataggctcttc

SEQ ID NO: 127690 - DNA, 25 bp, Homo sapien
ttatcttggcccttagactgcttaa

SEQ ID NO: 127691 - DNA, 25 bp, Homo sapien
caggaagttatcttggcccttagac

SEQ ID NO: 127692 - DNA, 25 bp, Homo sapien
agaacactgttgataggctcttcca

SEQ ID NO: 127693 - DNA, 25 bp, Homo sapien
taggttccaagcaacttaggcttct

SEQ ID NO: 127694 - DNA, 25 bp, Homo sapien
ttttttaacggctattatgctatga

SEQ ID NO: 127695 - DNA, 25 bp, Homo sapien
agggaataggttccaagcaacttag

SEQ ID NO: 127696 - DNA, 25 bp, Homo sapien
attttttaacggctattatgctatg

SEQ ID NO: 127697 - DNA, 25 bp, Homo sapien
caggacaaggacagataaagaaatg

SEQ ID NO: 127698 - DNA, 25 bp, Homo sapien
tcaagggcttacagcaatcggtgaa

SEQ ID NO: 127699 - DNA, 25 bp, Homo sapien
aaagaaatgcctcttagacaaaatg

SEQ ID NO: 127700 - DNA, 25 bp, Homo sapien
gaagtcataggcatccaacatcagg

SEQ ID NO: 127701 - DNA, 25 bp, Homo sapien
gaagatattagaaggaccataaggc

SEQ ID NO: 127702 - DNA, 25 bp, Homo sapien
aagatattagaaggaccataaggca

SEQ ID NO: 127703 - DNA, 25 bp, Homo sapien
agatattagaaggaccataaggcat

SEQ ID NO: 127704 - DNA, 25 bp, Homo sapien
aagcagagagtccttaagaacagca

SEQ ID NO: 127705 - DNA, 25 bp, Homo sapien
agtccttaagaacagcatacagtcc

SEQ ID NO: 127706 - DNA, 25 bp, Homo sapien
cttagcttgagcttgtccaggaagc

SEQ ID NO: 127707 - DNA, 25 bp, Homo sapien
ttagcttgagcttgtccaggaagca

SEQ ID NO: 127708 - DNA, 25 bp, Homo sapien
taaatccaagagctgtcagagcaca

SEQ ID NO: 127709 - DNA, 25 bp, Homo sapien
ctatttaaatccaagagctgtcaga

SEQ ID NO: 127710 - DNA, 25 bp, Homo sapien
aagagctgtcagagcacagcctgct

SEQ ID NO: 127711 - DNA, 25 bp, Homo sapien
caagagctgtcagagcacagcctgc

SEQ ID NO: 127712 - DNA, 25 bp, Homo sapien
cgttccaacttctgtagctgctgtt

SEQ ID NO: 127713 - DNA, 25 bp, Homo sapien
tgctcctctccgtcctgggtgctga

SEQ ID NO: 127714 - DNA, 25 bp, Homo sapien
ctccagcttcaaccccagctctggc

SEQ ID NO: 127715 - DNA, 25 bp, Homo sapien
tcctctccgtcctgggtgctgagca

SEQ ID NO: 127716 - DNA, 25 bp, Homo sapien
catatacaggaacgagaagaaggag

SEQ ID NO: 127717 - DNA, 25 bp, Homo sapien
gaagaaggaggtgagcagtcccaag

SEQ ID NO: 127718 - DNA, 25 bp, Homo sapien
aggaggtgagcagtcccaaggtgac

SEQ ID NO: 127719 - DNA, 25 bp, Homo sapien
agaaggaggtgagcagtcccaaggt

SEQ ID NO: 127720 - DNA, 25 bp, Homo sapien
tcagcagctgagaaccggcttccag

SEQ ID NO: 127721 - DNA, 25 bp, Homo sapien
gcttttcctgccctgactttctcct

SEQ ID NO: 127722 - DNA, 25 bp, Homo sapien
ctgagaaccggcttccagtgcaggt

SEQ ID NO: 127723 - DNA, 25 bp, Homo sapien
ctgcccggccgcagatgcttccttc

SEQ ID NO: 127724 - DNA, 25 bp, Homo sapien
gggaaacaagagcatcacgtaccat

SEQ ID NO: 127725 - DNA, 25 bp, Homo sapien
tttgttctacacactccaccagcaa

SEQ ID NO: 127726 - DNA, 25 bp, Homo sapien
tggcgccagtgatcaccactacctt

SEQ ID NO: 127727 - DNA, 25 bp, Homo sapien
tctccttgccaatgcccgtgttggc

SEQ ID NO: 127728 - DNA, 25 bp, Homo sapien
gttctacacactccaccagcaaaga

SEQ ID NO: 127729 - DNA, 25 bp, Homo sapien
tctgcaggcaatatagactcgggct

SEQ ID NO: 127730 - DNA, 25 bp, Homo sapien
gataggtccaatttccgcaccagca

SEQ ID NO: 127731 - DNA, 25 bp, Homo sapien
cctcagcaaaggctcggatagattt

SEQ ID NO: 127732 - DNA, 25 bp, Homo sapien
cactcggatttcactggcagcagac

SEQ ID NO: 127733 - DNA, 25 bp, Homo sapien
tcaaagccatcagctgtcttggaat

SEQ ID NO: 127734 - DNA, 25 bp, Homo sapien
cattactcccgcattgttgatcaga

SEQ ID NO: 127735 - DNA, 25 bp, Homo sapien
gggtttcaaagccatcagctgtctt

SEQ ID NO: 127736 - DNA, 25 bp, Homo sapien
gtcttggaatatggacacatcatta

SEQ ID NO: 127737 - DNA, 25 bp, Homo sapien
tggcaagccttgtactgccactgcc

SEQ ID NO: 127738 - DNA, 25 bp, Homo sapien
catcatgtagatgtgacccctccag

SEQ ID NO: 127739 - DNA, 25 bp, Homo sapien
atgcctgcataaccccaggtctggc

SEQ ID NO: 127740 - DNA, 25 bp, Homo sapien
ctccgtggaccaacccatggcttgg

SEQ ID NO: 127741 - DNA, 25 bp, Homo sapien
tcacgagtaaaaagcacattggcca

SEQ ID NO: 127742 - DNA, 25 bp, Homo sapien
taggcaaaacccctgctgtagcgct

SEQ ID NO: 127743 - DNA, 25 bp, Homo sapien
gcttctcgctctggaggtcgtggaa

SEQ ID NO: 127744 - DNA, 25 bp, Homo sapien
ccagcttgctgtggcaataggcaaa

SEQ ID NO: 127745 - DNA, 25 bp, Homo sapien
tgtgccagggccatacaacatgctt

SEQ ID NO: 127746 - DNA, 25 bp, Homo sapien
caagatatccctggtgcggtcacta

SEQ ID NO: 127747 - DNA, 25 bp, Homo sapien
ggtgcagggccaaggtctgaactct

SEQ ID NO: 127748 - DNA, 25 bp, Homo sapien
cctaaggttatacctggcagggtgc

SEQ ID NO: 127749 - DNA, 25 bp, Homo sapien
cctcccgtgccgtcttgacaaaggg

SEQ ID NO: 127750 - DNA, 25 bp, Homo sapien
agtgccggaccagctcagagcggac

SEQ ID NO: 127751 - DNA, 25 bp, Homo sapien
tcagccagggcgcagtgcaggctgg

SEQ ID NO: 127752 - DNA, 25 bp, Homo sapien
ggtgcactgcgtaggtggtgacccc

SEQ ID NO: 127753 - DNA, 25 bp, Homo sapien
tccttaacaaagcaacggcattctg

SEQ ID NO: 127754 - DNA, 25 bp, Homo sapien
tggcataaccaacagcgacagtctt

SEQ ID NO: 127755 - DNA, 25 bp, Homo sapien
ttttcatggaaaagcggcacacgag

SEQ ID NO: 127756 - DNA, 25 bp, Homo sapien
tggtggagagaaccgcattgccttc

SEQ ID NO: 127757 - DNA, 25 bp, Homo sapien
tggcacagctctagagccagattgc

SEQ ID NO: 127758 - DNA, 25 bp, Homo sapien
caaaaatctggtatgcactgtacac

SEQ ID NO: 127759 - DNA, 25 bp, Homo sapien
gattgccagggcgtaaatcccagat

SEQ ID NO: 127760 - DNA, 25 bp, Homo sapien
aatcccagatctaccacttataagc

SEQ ID NO: 127761 - DNA, 25 bp, Homo sapien
tgacattccataggcgctcagctgt

SEQ ID NO: 127762 - DNA, 25 bp, Homo sapien
tcctagaagctcacagctgacattc

SEQ ID NO: 127763 - DNA, 25 bp, Homo sapien
ccataggcgctcagctgttttgtta

SEQ ID NO: 127764 - DNA, 25 bp, Homo sapien
tatttcgggcccttggagacaccca

SEQ ID NO: 127765 - DNA, 25 bp, Homo sapien
tgtcaggtgtgcaaacattcccaga

SEQ ID NO: 127766 - DNA, 25 bp, Homo sapien
taggtgtccacaactcatgccataa

SEQ ID NO: 127767 - DNA, 25 bp, Homo sapien
tcccagaagggtcaagaggatcaga

SEQ ID NO: 127768 - DNA, 25 bp, Homo sapien
tctaaataggccagggttagccagg

SEQ ID NO: 127769 - DNA, 25 bp, Homo sapien
tgtaagtgcatctaataatctggga

SEQ ID NO: 127770 - DNA, 25 bp, Homo sapien
gctcagcttcccgatatttggtgtc

SEQ ID NO: 127771 - DNA, 25 bp, Homo sapien
gctgttggttgtaagtgcatctaat

SEQ ID NO: 127772 - DNA, 25 bp, Homo sapien
tctgggatatgatggaaactttcag

SEQ ID NO: 127773 - DNA, 25 bp, Homo sapien
gctgtgtctcgtgggagcacctgaa

SEQ ID NO: 127774 - DNA, 25 bp, Homo sapien
cctgaacaccacgagaaatgatgga

SEQ ID NO: 127775 - DNA, 25 bp, Homo sapien
gtgggagcacctgaacaccacgaga

SEQ ID NO: 127776 - DNA, 25 bp, Homo sapien
ctgaaggagtagtgctgagggaggc

SEQ ID NO: 127777 - DNA, 25 bp, Homo sapien
gaaattgaaggagctcaaggcagac

SEQ ID NO: 127778 - DNA, 25 bp, Homo sapien
aatgttccataataacttggagaaa

SEQ ID NO: 127779 - DNA, 25 bp, Homo sapien
cagactttaatttcactctgccacc

SEQ ID NO: 127780 - DNA, 25 bp, Homo sapien
cttggagaaattggctgagatgtac

SEQ ID NO: 127781 - DNA, 25 bp, Homo sapien
tataattatgatccttggaggagga

SEQ ID NO: 127782 - DNA, 25 bp, Homo sapien
ttctaatactcaaatccagaggaat

SEQ ID NO: 127783 - DNA, 25 bp, Homo sapien
gctaggagtcccatgatattttacc

SEQ ID NO: 127784 - DNA, 25 bp, Homo sapien
tattttttgacctggatacagacag

SEQ ID NO: 127785 - DNA, 25 bp, Homo sapien
tgagcactggagagtcctcgtccac

SEQ ID NO: 127786 - DNA, 25 bp, Homo sapien
tagtctaggtcttgggtgagcactg

SEQ ID NO: 127787 - DNA, 25 bp, Homo sapien
ttgtcactgggaacggaatagactt

SEQ ID NO: 127788 - DNA, 25 bp, Homo sapien
tgttccctgctcatcgtacactgct

SEQ ID NO: 127789 - DNA, 25 bp, Homo sapien
tcacccttgaagtccagataggcct

SEQ ID NO: 127790 - DNA, 25 bp, Homo sapien
gtcacccttgaagtccagataggcc

SEQ ID NO: 127791 - DNA, 25 bp, Homo sapien
ttgcaccgctctggcgtcaatagct

SEQ ID NO: 127792 - DNA, 25 bp, Homo sapien
caaaggccttataggattgcaccgc

SEQ ID NO: 127793 - DNA, 25 bp, Homo sapien
ttataggattgcaccgctctggcgt

SEQ ID NO: 127794 - DNA, 25 bp, Homo sapien
ttgacaaaggccttataggattgca

SEQ ID NO: 127795 - DNA, 25 bp, Homo sapien
tgcagtactttgcttccatctgagc

SEQ ID NO: 127796 - DNA, 25 bp, Homo sapien
gcagtactttgcttccatctgagcc

SEQ ID NO: 127797 - DNA, 25 bp, Homo sapien
ctaacagacaacgcacatcacagaa

SEQ ID NO: 127798 - DNA, 25 bp, Homo sapien
tctaacagacaacgcacatcacaga

SEQ ID NO: 127799 - DNA, 25 bp, Homo sapien
agacaacgcacatcacagaaaacaa

SEQ ID NO: 127800 - DNA, 25 bp, Homo sapien
acagacaacgcacatcacagaaaac

SEQ ID NO: 127801 - DNA, 25 bp, Homo sapien
acaggcgtgatccaccgctctcggc

SEQ ID NO: 127802 - DNA, 25 bp, Homo sapien
attacaggcgtgatccaccgctctc

SEQ ID NO: 127803 - DNA, 25 bp, Homo sapien
gattacaggcgtgatccaccgctct

SEQ ID NO: 127804 - DNA, 25 bp, Homo sapien
tacaggcgtgatccaccgctctcgg

SEQ ID NO: 127805 - DNA, 25 bp, Homo sapien
ggtctgcagcatccaactttcaagt

SEQ ID NO: 127806 - DNA, 25 bp, Homo sapien
cgcggaaaacgccgcaaagcaacaa

SEQ ID NO: 127807 - DNA, 25 bp, Homo sapien
tccccgcggaaaacgccgcaaagca

SEQ ID NO: 127808 - DNA, 25 bp, Homo sapien
tgcagcatccaactttcaagtttcc

SEQ ID NO: 127809 - DNA, 25 bp, Homo sapien
atccagggaccggactccagattcc

SEQ ID NO: 127810 - DNA, 25 bp, Homo sapien
ccaacaccacctgaagtgggagagt

SEQ ID NO: 127811 - DNA, 25 bp, Homo sapien
aagatgggcagcaacaggcggaaac

SEQ ID NO: 127812 - DNA, 25 bp, Homo sapien
gagctttttccaacaatgagcagct

SEQ ID NO: 127813 - DNA, 25 bp, Homo sapien
gagcccttattacgtgccacactgt

SEQ ID NO: 127814 - DNA, 25 bp, Homo sapien
caaaggcttcggatattttacctca

SEQ ID NO: 127815 - DNA, 25 bp, Homo sapien
ggtaactagttgagaaacttgggca

SEQ ID NO: 127816 - DNA, 25 bp, Homo sapien
caactgtttaggaacaatattagct

SEQ ID NO: 127817 - DNA, 25 bp, Homo sapien
aattcctgcggtgtatgtgtgcgcg

SEQ ID NO: 127818 - DNA, 25 bp, Homo sapien
tattggtaggtcacgcatcctgtct

SEQ ID NO: 127819 - DNA, 25 bp, Homo sapien
tgtgtgcgcgaaagcacgtatgtgt

SEQ ID NO: 127820 - DNA, 25 bp, Homo sapien
ggagacggtcaaccctggagaatga

SEQ ID NO: 127821 - DNA, 25 bp, Homo sapien
ttttacagtcatatgaatttactac

SEQ ID NO: 127822 - DNA, 25 bp, Homo sapien
tatccttcctggcagttacttcacc

SEQ ID NO: 127823 - DNA, 25 bp, Homo sapien
atccttcctggcagttacttcacct

SEQ ID NO: 127824 - DNA, 25 bp, Homo sapien
ccagatccagcaaagaaaagaagaa

SEQ ID NO: 127825 - DNA, 25 bp, Homo sapien
tccagatccagcaaagaaaagaaga

SEQ ID NO: 127826 - DNA, 25 bp, Homo sapien
cagatccagcaaagaaaagaagaac

SEQ ID NO: 127827 - DNA, 25 bp, Homo sapien
agatccagcaaagaaaagaagaacc

SEQ ID NO: 127828 - DNA, 25 bp, Homo sapien
caggtaaggatctgatgtctactca

SEQ ID NO: 127829 - DNA, 25 bp, Homo sapien
ctgatgtctactcagacggtcacac

SEQ ID NO: 127830 - DNA, 25 bp, Homo sapien
ctgacaggtaaggatctgatgtcta

SEQ ID NO: 127831 - DNA, 25 bp, Homo sapien
tgtctactcagacggtcacacagct

SEQ ID NO: 127832 - DNA, 25 bp, Homo sapien
tcataagctccagtggggaaagaca

SEQ ID NO: 127833 - DNA, 25 bp, Homo sapien
ctcagaccagtcaccttcataagct

SEQ ID NO: 127834 - DNA, 25 bp, Homo sapien
atagaagttcatggacacctcgata

SEQ ID NO: 127835 - DNA, 25 bp, Homo sapien
ggacacctcgataactcagaccagt

SEQ ID NO: 127836 - DNA, 25 bp, Homo sapien
cgtttgcatctttggggcacaggcc

SEQ ID NO: 127837 - DNA, 25 bp, Homo sapien
atctttggggcacaggccctgctga

SEQ ID NO: 127838 - DNA, 25 bp, Homo sapien
gtttgcatctttggggcacaggccc

SEQ ID NO: 127839 - DNA, 25 bp, Homo sapien
tgcatctttggggcacaggccctgc

SEQ ID NO: 127840 - DNA, 25 bp, Homo sapien
caaagcagaaagggtagtagataag

SEQ ID NO: 127841 - DNA, 25 bp, Homo sapien
ccaaagcagaaagggtagtagataa

SEQ ID NO: 127842 - DNA, 25 bp, Homo sapien
aaagcagaaagggtagtagataaga

SEQ ID NO: 127843 - DNA, 25 bp, Homo sapien
aagcagaaagggtagtagataagaa

SEQ ID NO: 127844 - DNA, 25 bp, Homo sapien
ctctgtgagggatccacaagccaca

SEQ ID NO: 127845 - DNA, 25 bp, Homo sapien
tctgtgagggatccacaagccacac

SEQ ID NO: 127846 - DNA, 25 bp, Homo sapien
ttcagagaggtggccagaatgcttt

SEQ ID NO: 127847 - DNA, 25 bp, Homo sapien
tcagagaggtggccagaatgctttc

SEQ ID NO: 127848 - DNA, 25 bp, Homo sapien
cagagaggtggccagaatgctttcc

SEQ ID NO: 127849 - DNA, 25 bp, Homo sapien
tgaatagcacttctctacttccact

SEQ ID NO: 127850 - DNA, 25 bp, Homo sapien
ttaagaatgaatagcacttctctac

SEQ ID NO: 127851 - DNA, 25 bp, Homo sapien
gattcagtgacattcacgtaagtca

SEQ ID NO: 127852 - DNA, 25 bp, Homo sapien
atatgtaagcatacacagattcagt

SEQ ID NO: 127853 - DNA, 25 bp, Homo sapien
cacgggcccttcatggagtttgctc

SEQ ID NO: 127854 - DNA, 25 bp, Homo sapien
ggtctggccgcggatcccacacaga

SEQ ID NO: 127855 - DNA, 25 bp, Homo sapien
ccacactcgctagctcatgcctggt

SEQ ID NO: 127856 - DNA, 25 bp, Homo sapien
agtggctggccggatcccacactcg

SEQ ID NO: 127857 - DNA, 25 bp, Homo sapien
taacagtgttgcattgattggttgg

SEQ ID NO: 127858 - DNA, 25 bp, Homo sapien
cattacctttaccttgaagaaatga

SEQ ID NO: 127859 - DNA, 25 bp, Homo sapien
gcttggtgtttaatctgcaatgcag

SEQ ID NO: 127860 - DNA, 25 bp, Homo sapien
gcagattacatagtcacttgtcata

SEQ ID NO: 127861 - DNA, 25 bp, Homo sapien
ctctgcatctgaattggcactagtt

SEQ ID NO: 127862 - DNA, 25 bp, Homo sapien
tctgaattggcactagttatgtacc

SEQ ID NO: 127863 - DNA, 25 bp, Homo sapien
gaattggcactagttatgtaccatc

SEQ ID NO: 127864 - DNA, 25 bp, Homo sapien
tgcatctgaattggcactagttatg

SEQ ID NO: 127865 - DNA, 25 bp, Homo sapien
aactgagtttttccacaacctggtg

SEQ ID NO: 127866 - DNA, 25 bp, Homo sapien
tgagtttttccacaacctggtggac

SEQ ID NO: 127867 - DNA, 25 bp, Homo sapien
cattatacaaaactgagtttttcca

SEQ ID NO: 127868 - DNA, 25 bp, Homo sapien
caaaactgagtttttccacaacctg

SEQ ID NO: 127869 - DNA, 25 bp, Homo sapien
tgttggtgggtaatgtagccaaaat

SEQ ID NO: 127870 - DNA, 25 bp, Homo sapien
aatgtacaccacagctccttctaat

SEQ ID NO: 127871 - DNA, 25 bp, Homo sapien
ctttcagcactaaatgcagactctg

SEQ ID NO: 127872 - DNA, 25 bp, Homo sapien
gcagactctgtgtcaatgtacacca

SEQ ID NO: 127873 - DNA, 25 bp, Homo sapien
tccatgtatgtaaacctatccaagt

SEQ ID NO: 127874 - DNA, 25 bp, Homo sapien
tgaatctgaagttcatgggaaagct

SEQ ID NO: 127875 - DNA, 25 bp, Homo sapien
tccaagttccatgtcattacgcaaa

SEQ ID NO: 127876 - DNA, 25 bp, Homo sapien
tcagatatcaataggagttacagcc

SEQ ID NO: 127877 - DNA, 25 bp, Homo sapien
tcattagcaacaagaactgaacagc

SEQ ID NO: 127878 - DNA, 25 bp, Homo sapien
ggaaccagattgagagtacctagct

SEQ ID NO: 127879 - DNA, 25 bp, Homo sapien
gaagtcagctaaaaatctctggcac

SEQ ID NO: 127880 - DNA, 25 bp, Homo sapien
gaatgcccagttgattaggaaccag

SEQ ID NO: 127881 - DNA, 25 bp, Homo sapien
tcatcacaggtgagttcccgataaa

SEQ ID NO: 127882 - DNA, 25 bp, Homo sapien
cagtgttaaaatatctgggaaaacg

SEQ ID NO: 127883 - DNA, 25 bp, Homo sapien
atatctgggaaaacgggattctgct

SEQ ID NO: 127884 - DNA, 25 bp, Homo sapien
gagttcccgataaagatgaacttta

SEQ ID NO: 127885 - DNA, 25 bp, Homo sapien
gaattccttgattctcctaagataa

SEQ ID NO: 127886 - DNA, 25 bp, Homo sapien
gattctcctaagataatgttaacgc

SEQ ID NO: 127887 - DNA, 25 bp, Homo sapien
gtgtagtttcagaattccttgattc

SEQ ID NO: 127888 - DNA, 25 bp, Homo sapien
taagataatgttaacgctccaattc

SEQ ID NO: 127889 - DNA, 25 bp, Homo sapien
accacagaagcaacagagtcaagaa

SEQ ID NO: 127890 - DNA, 25 bp, Homo sapien
aacagagtcaagaatcacaagttta

SEQ ID NO: 127891 - DNA, 25 bp, Homo sapien
cagaagcaacagagtcaagaatcac

SEQ ID NO: 127892 - DNA, 25 bp, Homo sapien
agcaacagagtcaagaatcacaagt

SEQ ID NO: 127893 - DNA, 25 bp, Homo sapien
gagattgccttgaagttgtgcatca

SEQ ID NO: 127894 - DNA, 25 bp, Homo sapien
ggatgcctctcttgccaagaacttg

SEQ ID NO: 127895 - DNA, 25 bp, Homo sapien
tttctttgagattgccttgaagttg

SEQ ID NO: 127896 - DNA, 25 bp, Homo sapien
ccttgaagttgtgcatcaaactcct

SEQ ID NO: 127897 - DNA, 25 bp, Homo sapien
gcacacacaaagagtaaacaatgag

SEQ ID NO: 127898 - DNA, 25 bp, Homo sapien
gatgatggcgatgtttgctatagca

SEQ ID NO: 127899 - DNA, 25 bp, Homo sapien
actgcagtgtgagaaatgtgataca

SEQ ID NO: 127900 - DNA, 25 bp, Homo sapien
gctatagcaattagactgtactacc

SEQ ID NO: 127901 - DNA, 25 bp, Homo sapien
gcagataccataatccacggatgct

SEQ ID NO: 127902 - DNA, 25 bp, Homo sapien
agcagtgcccctttctcacttggga

SEQ ID NO: 127903 - DNA, 25 bp, Homo sapien
tgcacggaattaagtcaagcaacag

SEQ ID NO: 127904 - DNA, 25 bp, Homo sapien
gcattcatgcgcacataagggccaa

SEQ ID NO: 127905 - DNA, 25 bp, Homo sapien
cctatgttgagtgtcctggagcaaa

SEQ ID NO: 127906 - DNA, 25 bp, Homo sapien
caggtcacttttcggattcattgtc

SEQ ID NO: 127907 - DNA, 25 bp, Homo sapien
caaactggcagctaaaagatctctc

SEQ ID NO: 127908 - DNA, 25 bp, Homo sapien
gatctctcattctacccactgtttg

SEQ ID NO: 127909 - DNA, 25 bp, Homo sapien
aatattagttatccacagtgctagg

SEQ ID NO: 127910 - DNA, 25 bp, Homo sapien
ctaaatattagttatccacagtgct

SEQ ID NO: 127911 - DNA, 25 bp, Homo sapien
tattagttatccacagtgctaggtc

SEQ ID NO: 127912 - DNA, 25 bp, Homo sapien
aaatattagttatccacagtgctag

SEQ ID NO: 127913 - DNA, 25 bp, Homo sapien
ttagtctagactgtgagtttcaggg

SEQ ID NO: 127914 - DNA, 25 bp, Homo sapien
agtctagactgtgagtttcagggac

SEQ ID NO: 127915 - DNA, 25 bp, Homo sapien
tagtctagactgtgagtttcaggga

SEQ ID NO: 127916 - DNA, 25 bp, Homo sapien
gctgaattaacccttgcctgcataa

SEQ ID NO: 127917 - DNA, 25 bp, Homo sapien
tatttagattgtagtccccagatcc

SEQ ID NO: 127918 - DNA, 25 bp, Homo sapien
tattgagggtcagtcactaggcatg

SEQ ID NO: 127919 - DNA, 25 bp, Homo sapien
ggatatgagtaacccatgctagctg

SEQ ID NO: 127920 - DNA, 25 bp, Homo sapien
tctgtgtgtgtgagaagatgaggtc

SEQ ID NO: 127921 - DNA, 25 bp, Homo sapien
tgttgcacagtctggtctctagctc

SEQ ID NO: 127922 - DNA, 25 bp, Homo sapien
tgtgtgtgtgagaagatgaggtctt

SEQ ID NO: 127923 - DNA, 25 bp, Homo sapien
tctctagctcctggccaagtgatcc

SEQ ID NO: 127924 - DNA, 25 bp, Homo sapien
tggctatcctcagttgtagaagaag

SEQ ID NO: 127925 - DNA, 25 bp, Homo sapien
caggtaacactgtccagaactcgat

SEQ ID NO: 127926 - DNA, 25 bp, Homo sapien
cagtatctgccacaaacacctaatt

SEQ ID NO: 127927 - DNA, 25 bp, Homo sapien
cctagaagcggtaagattctgaaac

SEQ ID NO: 127928 - DNA, 25 bp, Homo sapien
catttgtaatacttggaattgcttc

SEQ ID NO: 127929 - DNA, 25 bp, Homo sapien
tttctgctatcatgttttttgttga

SEQ ID NO: 127930 - DNA, 25 bp, Homo sapien
gaattgcttccctaatcctgtctaa

SEQ ID NO: 127931 - DNA, 25 bp, Homo sapien
gtctaaatctcatctatttttccca

SEQ ID NO: 127932 - DNA, 25 bp, Homo sapien
cactagaccgtgctctttgatggca

SEQ ID NO: 127933 - DNA, 25 bp, Homo sapien
tggcaggatccacgtcttatttacc

SEQ ID NO: 127934 - DNA, 25 bp, Homo sapien
tgtggccacactactctctatgaaa

SEQ ID NO: 127935 - DNA, 25 bp, Homo sapien
tctgctagcatactgctgtggccac

SEQ ID NO: 127936 - DNA, 25 bp, Homo sapien
ggctatattcgtatacgcagctgca

SEQ ID NO: 127937 - DNA, 25 bp, Homo sapien
tccactgtgtatgccttggcctaca

SEQ ID NO: 127938 - DNA, 25 bp, Homo sapien
gcaagggacctcttaatgttggcta

SEQ ID NO: 127939 - DNA, 25 bp, Homo sapien
tgaaacagcattattgcaagggacc

SEQ ID NO: 127940 - DNA, 25 bp, Homo sapien
aataaatggataaccccactcattc

SEQ ID NO: 127941 - DNA, 25 bp, Homo sapien
caataaatggataaccccactcatt

SEQ ID NO: 127942 - DNA, 25 bp, Homo sapien
acaataaatggataaccccactcat

SEQ ID NO: 127943 - DNA, 25 bp, Homo sapien
ataaatggataaccccactcattcc

SEQ ID NO: 127944 - DNA, 25 bp, Homo sapien
gtgaagatatctgcaagaaggacac

SEQ ID NO: 127945 - DNA, 25 bp, Homo sapien
aggacacactggcaacttgatccaa

SEQ ID NO: 127946 - DNA, 25 bp, Homo sapien
tcatacagattgcaaggtgaagata

SEQ ID NO: 127947 - DNA, 25 bp, Homo sapien
cttgatccaaagctggacgcttgct

SEQ ID NO: 127948 - DNA, 25 bp, Homo sapien
tataagatgaagtcctcggcaggcc

SEQ ID NO: 127949 - DNA, 25 bp, Homo sapien
ttataagatgaagtcctcggcaggc

SEQ ID NO: 127950 - DNA, 25 bp, Homo sapien
tgaagtcctcggcaggccctagatc

SEQ ID NO: 127951 - DNA, 25 bp, Homo sapien
gatgaagtcctcggcaggccctaga

SEQ ID NO: 127952 - DNA, 25 bp, Homo sapien
gacataataagctgagttctggaca

SEQ ID NO: 127953 - DNA, 25 bp, Homo sapien
gaacttatatctctgactgaccagt

SEQ ID NO: 127954 - DNA, 25 bp, Homo sapien
tctggacagagtacatggaacctta

SEQ ID NO: 127955 - DNA, 25 bp, Homo sapien
gaaccttatgggacacaaacaggag

SEQ ID NO: 127956 - DNA, 25 bp, Homo sapien
tggaagatttggcaggctttgtaac

SEQ ID NO: 127957 - DNA, 25 bp, Homo sapien
tcatgaaactatagactccgtaatc

SEQ ID NO: 127958 - DNA, 25 bp, Homo sapien
taatcttctatgaccatttcgagag

SEQ ID NO: 127959 - DNA, 25 bp, Homo sapien
ttcgagagaaacaacacctatttag

SEQ ID NO: 127960 - DNA, 25 bp, Homo sapien
gatggatatagatggccagcccaca

SEQ ID NO: 127961 - DNA, 25 bp, Homo sapien
tccacccacatgctagtatctgagc

SEQ ID NO: 127962 - DNA, 25 bp, Homo sapien
tgtcaactccagagccaaccgttaa

SEQ ID NO: 127963 - DNA, 25 bp, Homo sapien
taacccacgtgtcacaataggaacc

SEQ ID NO: 127964 - DNA, 25 bp, Homo sapien
cattaaaatgggagctaaggacaca

SEQ ID NO: 127965 - DNA, 25 bp, Homo sapien
cagggcacagcactagacatgttac

SEQ ID NO: 127966 - DNA, 25 bp, Homo sapien
gaaagctaaacatgccttacaggaa

SEQ ID NO: 127967 - DNA, 25 bp, Homo sapien
taagcacgtgttaagttcagggcac

SEQ ID NO: 127968 - DNA, 25 bp, Homo sapien
tgtatcactcacattattgcaatag

SEQ ID NO: 127969 - DNA, 25 bp, Homo sapien
tatcactcacattattgcaatagtt

SEQ ID NO: 127970 - DNA, 25 bp, Homo sapien
tattgtgatggtctgacacggaacc

SEQ ID NO: 127971 - DNA, 25 bp, Homo sapien
atgtatcactcacattattgcaata

SEQ ID NO: 127972 - DNA, 25 bp, Homo sapien
ggaataagtttagaccacaggatgc

SEQ ID NO: 127973 - DNA, 25 bp, Homo sapien
tacttccggccagtttttcagagga

SEQ ID NO: 127974 - DNA, 25 bp, Homo sapien
gaaagcagctatagcatctgtcctt

SEQ ID NO: 127975 - DNA, 25 bp, Homo sapien
tcattaatattgcagaaacgcttca

SEQ ID NO: 127976 - DNA, 25 bp, Homo sapien
gatacgatattactagcccacagaa

SEQ ID NO: 127977 - DNA, 25 bp, Homo sapien
ggccaatgagagtcacaactggtta

SEQ ID NO: 127978 - DNA, 25 bp, Homo sapien
cattaggtgctaagtgataagaacc

SEQ ID NO: 127979 - DNA, 25 bp, Homo sapien
tgccaaggagaccaacagaaatttg

SEQ ID NO: 127980 - DNA, 25 bp, Homo sapien
ctgcacctccttcacactgtctctt

SEQ ID NO: 127981 - DNA, 25 bp, Homo sapien
gaatgtccttggaacccatctaaca

SEQ ID NO: 127982 - DNA, 25 bp, Homo sapien
cacgttttacacctttgagcccttg

SEQ ID NO: 127983 - DNA, 25 bp, Homo sapien
tctatcctatgtgtattctaacggg

SEQ ID NO: 127984 - DNA, 25 bp, Homo sapien
aagtgtatttacagccttccccacg

SEQ ID NO: 127985 - DNA, 25 bp, Homo sapien
aataatgaatgctcctaaattacgt

SEQ ID NO: 127986 - DNA, 25 bp, Homo sapien
cctaaattacgtattccaatcaatg

SEQ ID NO: 127987 - DNA, 25 bp, Homo sapien
attcacattcagaatagtacaggtc

SEQ ID NO: 127988 - DNA, 25 bp, Homo sapien
cagaatagtacaggtctctatctta

SEQ ID NO: 127989 - DNA, 25 bp, Homo sapien
cagagatgcgtctgaggcccaaaga

SEQ ID NO: 127990 - DNA, 25 bp, Homo sapien
cctgaagcagtcatccactcaatta

SEQ ID NO: 127991 - DNA, 25 bp, Homo sapien
catggcacacacaagtctatgactc

SEQ ID NO: 127992 - DNA, 25 bp, Homo sapien
gaatcagactttgaacttaggctta

SEQ ID NO: 127993 - DNA, 25 bp, Homo sapien
gctgcaaggtagaatggaaacagag

SEQ ID NO: 127994 - DNA, 25 bp, Homo sapien
acagcaaaagtgagaagcagatggc

SEQ ID NO: 127995 - DNA, 25 bp, Homo sapien
ggtagaatggaaacagaggcctcat

SEQ ID NO: 127996 - DNA, 25 bp, Homo sapien
aattacgagcaacaacagcaaaagt

SEQ ID NO: 127997 - DNA, 25 bp, Homo sapien
aatatttctttaagtcctggtgtgg

SEQ ID NO: 127998 - DNA, 25 bp, Homo sapien
gcatggtggcatccctgctacttgg

SEQ ID NO: 127999 - DNA, 25 bp, Homo sapien
tttctttaagtcctggtgtggtggc

SEQ ID NO: 128000 - DNA, 25 bp, Homo sapien
tgcacctagccccacaaatatttct

SEQ ID NO: 128001 - DNA, 25 bp, Homo sapien
gaaatatgtttgatactagcaatat

SEQ ID NO: 128002 - DNA, 25 bp, Homo sapien
tgaaaatggatatgatattgccact

SEQ ID NO: 128003 - DNA, 25 bp, Homo sapien
acatacattatgtgtgggatagaga

SEQ ID NO: 128004 - DNA, 25 bp, Homo sapien
agtgattgtgatctcctgagggaaa

SEQ ID NO: 128005 - DNA, 25 bp, Homo sapien
gcccatattcataattgacagacta

SEQ ID NO: 128006 - DNA, 25 bp, Homo sapien
caaaattagacaaaaacaatcctca

SEQ ID NO: 128007 - DNA, 25 bp, Homo sapien
aaatgaccatcttacccaaagcaat

SEQ ID NO: 128008 - DNA, 25 bp, Homo sapien
cagattcagtgtgatccccctcaaa

SEQ ID NO: 128009 - DNA, 25 bp, Homo sapien
caaaatgctcgagtatcagcctgct

SEQ ID NO: 128010 - DNA, 25 bp, Homo sapien
tgcaaacatgatatcctttcctata

SEQ ID NO: 128011 - DNA, 25 bp, Homo sapien
gaaccatcttctccctaattctaac

SEQ ID NO: 128012 - DNA, 25 bp, Homo sapien
gaaaattgtacatggactttagagg

SEQ ID NO: 128013 - DNA, 25 bp, Homo sapien
gcagctattaaaaaagtgagatcat

SEQ ID NO: 128014 - DNA, 25 bp, Homo sapien
cagctattaaaaaagtgagatcatg

SEQ ID NO: 128015 - DNA, 25 bp, Homo sapien
gaggtttcatcatgttggtcaggct

SEQ ID NO: 128016 - DNA, 25 bp, Homo sapien
ctccaccacctgggttccagtggtt

SEQ ID NO: 128017 - DNA, 25 bp, Homo sapien
tgaggtttcatcatgttggtcaggc

SEQ ID NO: 128018 - DNA, 25 bp, Homo sapien
caccacctgggttccagtggttctc

SEQ ID NO: 128019 - DNA, 25 bp, Homo sapien
gataatcatactcctcaattcaggg

SEQ ID NO: 128020 - DNA, 25 bp, Homo sapien
tctgtccaaggcctctgttggctta

SEQ ID NO: 128021 - DNA, 25 bp, Homo sapien
aaatggcaatatgctatgaatagcc

SEQ ID NO: 128022 - DNA, 25 bp, Homo sapien
caaaaacttaattgtctggcatctg

SEQ ID NO: 128023 - DNA, 25 bp, Homo sapien
taaaagctaagaaggcatgaccaga

SEQ ID NO: 128024 - DNA, 25 bp, Homo sapien
gaactactcagtctgccttgtggca

SEQ ID NO: 128025 - DNA, 25 bp, Homo sapien
cataaaaaataacccgagcctgctc

SEQ ID NO: 128026 - DNA, 25 bp, Homo sapien
tggcaggtgtatacaagcacttaaa

SEQ ID NO: 128027 - DNA, 25 bp, Homo sapien
gcagggcagataccaagggaactaa

SEQ ID NO: 128028 - DNA, 25 bp, Homo sapien
catgaaattgaagggagggaagtac

SEQ ID NO: 128029 - DNA, 25 bp, Homo sapien
tatgcaggctgtaattaggcgtaaa

SEQ ID NO: 128030 - DNA, 25 bp, Homo sapien
ggaagtacaaaatccatatctggca

SEQ ID NO: 128031 - DNA, 25 bp, Homo sapien
tataacctaggtcaaacgtcaaaga

SEQ ID NO: 128032 - DNA, 25 bp, Homo sapien
cctgtgttgattaagagaaagcccc

SEQ ID NO: 128033 - DNA, 25 bp, Homo sapien
tattcagggaatgttggataccatc

SEQ ID NO: 128034 - DNA, 25 bp, Homo sapien
caacttaactggaagggtgccctgc

SEQ ID NO: 128035 - DNA, 25 bp, Homo sapien
ttcagtagcctggaccttctgtagc

SEQ ID NO: 128036 - DNA, 25 bp, Homo sapien
ggaagggtattgacaccgatggctc

SEQ ID NO: 128037 - DNA, 25 bp, Homo sapien
tgacacaagattcccgcactttgag

SEQ ID NO: 128038 - DNA, 25 bp, Homo sapien
gaatgcaatcataaaagcagtttga

SEQ ID NO: 128039 - DNA, 25 bp, Homo sapien
gtcactttggtcatcatcattatcc

SEQ ID NO: 128040 - DNA, 25 bp, Homo sapien
tcaatggtataagtacccttgtcac

SEQ ID NO: 128041 - DNA, 25 bp, Homo sapien
ccacttcctcactgttgggattctc

SEQ ID NO: 128042 - DNA, 25 bp, Homo sapien
actgttgggattctctaactcaatg

SEQ ID NO: 128043 - DNA, 25 bp, Homo sapien
aaattcacataccactgactgcatg

SEQ ID NO: 128044 - DNA, 25 bp, Homo sapien
aacatctcatgctgactctccaata

SEQ ID NO: 128045 - DNA, 25 bp, Homo sapien
gaaactcaggtaaattcagaatatc

SEQ ID NO: 128046 - DNA, 25 bp, Homo sapien
tcacaaagcatgttggtcttactgt

SEQ ID NO: 128047 - DNA, 25 bp, Homo sapien
aacgactgcgtgtgcttttccattg

SEQ ID NO: 128048 - DNA, 25 bp, Homo sapien
acagccccttgatgagccagcagag

SEQ ID NO: 128049 - DNA, 25 bp, Homo sapien
ttatgaacgactgcgtgtgcttttc

SEQ ID NO: 128050 - DNA, 25 bp, Homo sapien
agccccttgatgagccagcagagtc

SEQ ID NO: 128051 - DNA, 25 bp, Homo sapien
ggcactgagaattacacagccagct

SEQ ID NO: 128052 - DNA, 25 bp, Homo sapien
cagggcactgagaattacacagcca

SEQ ID NO: 128053 - DNA, 25 bp, Homo sapien
aacacagggcactgagaattacaca

SEQ ID NO: 128054 - DNA, 25 bp, Homo sapien
cactgagaattacacagccagctac

SEQ ID NO: 128055 - DNA, 25 bp, Homo sapien
ccatgcttctatagatgaccaacat

SEQ ID NO: 128056 - DNA, 25 bp, Homo sapien
cttgcgatttgatcttgtccatgct

SEQ ID NO: 128057 - DNA, 25 bp, Homo sapien
ttgtccatgcttctatagatgacca

SEQ ID NO: 128058 - DNA, 25 bp, Homo sapien
tccatgcttctatagatgaccaaca

SEQ ID NO: 128059 - DNA, 25 bp, Homo sapien
ctcctgtgcatgcttgtaagtatta

SEQ ID NO: 128060 - DNA, 25 bp, Homo sapien
gcttggcttggatttaatcttaatg

SEQ ID NO: 128061 - DNA, 25 bp, Homo sapien
agatttggacatgttgcgttttgga

SEQ ID NO: 128062 - DNA, 25 bp, Homo sapien
ggaatgtaaccactcccaaagcact

SEQ ID NO: 128063 - DNA, 25 bp, Homo sapien
cacccattaccacatgaagtaacaa

SEQ ID NO: 128064 - DNA, 25 bp, Homo sapien
catcattaggagtggaaaactctgg

SEQ ID NO: 128065 - DNA, 25 bp, Homo sapien
aactctgggaataacaacctgagcc

SEQ ID NO: 128066 - DNA, 25 bp, Homo sapien
agtaacaacatcattaggagtggaa

SEQ ID NO: 128067 - DNA, 25 bp, Homo sapien
gattagcacataagtgtggacaaag

SEQ ID NO: 128068 - DNA, 25 bp, Homo sapien
ggagattagcacataagtgtggaca

SEQ ID NO: 128069 - DNA, 25 bp, Homo sapien
ccattttcatgtttggccgctggcc

SEQ ID NO: 128070 - DNA, 25 bp, Homo sapien
attttcatgtttggccgctggccca

SEQ ID NO: 128071 - DNA, 25 bp, Homo sapien
gagagagacaattttcctgtgtggt

SEQ ID NO: 128072 - DNA, 25 bp, Homo sapien
gaaatgaagctttcagctgtctgct

SEQ ID NO: 128073 - DNA, 25 bp, Homo sapien
acagcctgaagggtttggcaagcac

SEQ ID NO: 128074 - DNA, 25 bp, Homo sapien
aaataagagctagccaaagttctgg

SEQ ID NO: 128075 - DNA, 25 bp, Homo sapien
cagaaagcaacaggcagagtatagt

SEQ ID NO: 128076 - DNA, 25 bp, Homo sapien
agaaagcaacaggcagagtatagtg

SEQ ID NO: 128077 - DNA, 25 bp, Homo sapien
atacccttccaccaatgccaaccac

SEQ ID NO: 128078 - DNA, 25 bp, Homo sapien
aatacccttccaccaatgccaacca

SEQ ID NO: 128079 - DNA, 25 bp, Homo sapien
aaatggccaggttaatgtgtcagaa

SEQ ID NO: 128080 - DNA, 25 bp, Homo sapien
caattattaggtccatgaagagctc

SEQ ID NO: 128081 - DNA, 25 bp, Homo sapien
cccatagacaggtccttacaggtaa

SEQ ID NO: 128082 - DNA, 25 bp, Homo sapien
gctgtgttgtaatctccttccgtaa

SEQ ID NO: 128083 - DNA, 25 bp, Homo sapien
aggccactctttagttggttcagct

SEQ ID NO: 128084 - DNA, 25 bp, Homo sapien
ataaggccactctttagttggttca

SEQ ID NO: 128085 - DNA, 25 bp, Homo sapien
gccactctttagttggttcagctta

SEQ ID NO: 128086 - DNA, 25 bp, Homo sapien
ggccactctttagttggttcagctt

SEQ ID NO: 128087 - DNA, 25 bp, Homo sapien
catgacctgccttgctaagcctggt

SEQ ID NO: 128088 - DNA, 25 bp, Homo sapien
gctaagcctggttcttgtcatggct

SEQ ID NO: 128089 - DNA, 25 bp, Homo sapien
gctattatgccctcaatttcatgaa

SEQ ID NO: 128090 - DNA, 25 bp, Homo sapien
aatgtactcgctgaacatgacctgc

SEQ ID NO: 128091 - DNA, 25 bp, Homo sapien
gcacctccactagagtctgaacatg

SEQ ID NO: 128092 - DNA, 25 bp, Homo sapien
cagttgatggtacactggaaacatc

SEQ ID NO: 128093 - DNA, 25 bp, Homo sapien
ctgaacatgcagagtaagaactact

SEQ ID NO: 128094 - DNA, 25 bp, Homo sapien
cagaaagtggaacttcctagcacct

SEQ ID NO: 128095 - DNA, 25 bp, Homo sapien
ctcataagtggacttaagctccagc

SEQ ID NO: 128096 - DNA, 25 bp, Homo sapien
tatattttctcctcataagtggact

SEQ ID NO: 128097 - DNA, 25 bp, Homo sapien
gcttttagactcttgacttacacca

SEQ ID NO: 128098 - DNA, 25 bp, Homo sapien
ccagtgtggctagaaagaagcaggc

SEQ ID NO: 128099 - DNA, 25 bp, Homo sapien
cagactccaaattccttagctttta

SEQ ID NO: 128100 - DNA, 25 bp, Homo sapien
gaagcaggcagaagttggacttgac

SEQ ID NO: 128101 - DNA, 25 bp, Homo sapien
gagccactacgcccggccttaccca

SEQ ID NO: 128102 - DNA, 25 bp, Homo sapien
agccactacgcccggccttacccag

SEQ ID NO: 128103 - DNA, 25 bp, Homo sapien
taaggtcaaggaatagcaaatcaac

SEQ ID NO: 128104 - DNA, 25 bp, Homo sapien
ggtttttagagatatggcccaggtc

SEQ ID NO: 128105 - DNA, 25 bp, Homo sapien
gttgccacttactgatcaaaagcca

SEQ ID NO: 128106 - DNA, 25 bp, Homo sapien
tgcttgccaccaagtacatacttcg

SEQ ID NO: 128107 - DNA, 25 bp, Homo sapien
gctgtcatgcggttaattctccgca

SEQ ID NO: 128108 - DNA, 25 bp, Homo sapien
tgaaatctgagcagaattcatctct

SEQ ID NO: 128109 - DNA, 25 bp, Homo sapien
tcctttgtgtcttctgcctgagagc

SEQ ID NO: 128110 - DNA, 25 bp, Homo sapien
tctgctgctgtcatgcggttaattc

SEQ ID NO: 128111 - DNA, 25 bp, Homo sapien
agtcttgcaatgtgaaggatgacaa

SEQ ID NO: 128112 - DNA, 25 bp, Homo sapien
tcaagtcttgcaatgtgaaggatga

SEQ ID NO: 128113 - DNA, 25 bp, Homo sapien
caagtcttgcaatgtgaaggatgac

SEQ ID NO: 128114 - DNA, 25 bp, Homo sapien
cattttgagttgcaagtcttcaagt

SEQ ID NO: 128115 - DNA, 25 bp, Homo sapien
tccttcacacaggaactgccctcct

SEQ ID NO: 128116 - DNA, 25 bp, Homo sapien
tcctgcaaacaacagttgtccaggg

SEQ ID NO: 128117 - DNA, 25 bp, Homo sapien
gtcgagaagtcaggtgcacccctgg

SEQ ID NO: 128118 - DNA, 25 bp, Homo sapien
agggccttacctgactctgagagtg

SEQ ID NO: 128119 - DNA, 25 bp, Homo sapien
agataagacataagtaagaaagtaa

SEQ ID NO: 128120 - DNA, 25 bp, Homo sapien
tatattgtccctacagtgttttctg

SEQ ID NO: 128121 - DNA, 25 bp, Homo sapien
taggttggtataacaatgttcctcc

SEQ ID NO: 128122 - DNA, 25 bp, Homo sapien
taattcagtggtatctaaaaagcaa

SEQ ID NO: 128123 - DNA, 25 bp, Homo sapien
aaagccagaagtgactccaaacctt

SEQ ID NO: 128124 - DNA, 25 bp, Homo sapien
gccagaagtgactccaaaccttgga

SEQ ID NO: 128125 - DNA, 25 bp, Homo sapien
ggaggatacttatgtcaatcttttg

SEQ ID NO: 128126 - DNA, 25 bp, Homo sapien
aaccttggaggatacttatgtcaat

SEQ ID NO: 128127 - DNA, 25 bp, Homo sapien
caagagttccatgggtggtccaaga

SEQ ID NO: 128128 - DNA, 25 bp, Homo sapien
tatgaagctaggtctcaaaggtgcc

SEQ ID NO: 128129 - DNA, 25 bp, Homo sapien
aaaacatgttagcttgaccagtgag

SEQ ID NO: 128130 - DNA, 25 bp, Homo sapien
cacagcgggtcaatgccaggctaaa

SEQ ID NO: 128131 - DNA, 25 bp, Homo sapien
acaatggcaaattcctgtcataatg

SEQ ID NO: 128132 - DNA, 25 bp, Homo sapien
tgcttcttagcacgtactattctaa

SEQ ID NO: 128133 - DNA, 25 bp, Homo sapien
ttctacaacatataagacattgaca

SEQ ID NO: 128134 - DNA, 25 bp, Homo sapien
tcttctataatgtcacacttttact

SEQ ID NO: 128135 - DNA, 25 bp, Homo sapien
tgacgaatcccaaactagagccagg

SEQ ID NO: 128136 - DNA, 25 bp, Homo sapien
gaaatgaggaaggtggcctagccca

SEQ ID NO: 128137 - DNA, 25 bp, Homo sapien
gccttgtagggaatgtagctgaacc

SEQ ID NO: 128138 - DNA, 25 bp, Homo sapien
cagggtgactgaccaactgaacagg

SEQ ID NO: 128139 - DNA, 25 bp, Homo sapien
agacacatctgagctagttagtgtt

SEQ ID NO: 128140 - DNA, 25 bp, Homo sapien
catctgagctagttagtgttacggc

SEQ ID NO: 128141 - DNA, 25 bp, Homo sapien
tgagctagttagtgttacggcattc

SEQ ID NO: 128142 - DNA, 25 bp, Homo sapien
tagttagtgttacggcattctttaa

SEQ ID NO: 128143 - DNA, 25 bp, Homo sapien
gaaggcttgttgtatctcattcatt

SEQ ID NO: 128144 - DNA, 25 bp, Homo sapien
cctgaaggcttgttgtatctcattc

SEQ ID NO: 128145 - DNA, 25 bp, Homo sapien
agccctgaaggcttgttgtatctca

SEQ ID NO: 128146 - DNA, 25 bp, Homo sapien
gccctgaaggcttgttgtatctcat

SEQ ID NO: 128147 - DNA, 25 bp, Homo sapien
tcagtgtgtgatgtttagttcaggg

SEQ ID NO: 128148 - DNA, 25 bp, Homo sapien
cagtgtgtgatgtttagttcagggt

SEQ ID NO: 128149 - DNA, 25 bp, Homo sapien
gtgtgtgatgtttagttcagggttt

SEQ ID NO: 128150 - DNA, 25 bp, Homo sapien
aggataccatacagtgctctcttcc

SEQ ID NO: 128151 - DNA, 25 bp, Homo sapien
ttcatgacccactgccacacaaagg

SEQ ID NO: 128152 - DNA, 25 bp, Homo sapien
aaaggcgagggtgccagcaccaatg

SEQ ID NO: 128153 - DNA, 25 bp, Homo sapien
tgtgtccgccctctgctagcagagt

SEQ ID NO: 128154 - DNA, 25 bp, Homo sapien
aatgggcacatccatcccaatctgc

SEQ ID NO: 128155 - DNA, 25 bp, Homo sapien
taatataagttatgaggctgcactg

SEQ ID NO: 128156 - DNA, 25 bp, Homo sapien
tgtcaatgactccaaacagcagggc

SEQ ID NO: 128157 - DNA, 25 bp, Homo sapien
gagctcaataaactgacactgaagg

SEQ ID NO: 128158 - DNA, 25 bp, Homo sapien
tatacagcttgtgtccatgaaggtg

SEQ ID NO: 128159 - DNA, 25 bp, Homo sapien
agtcataacggacactggtgttttt

SEQ ID NO: 128160 - DNA, 25 bp, Homo sapien
tcagtcataacggacactggtgttt

SEQ ID NO: 128161 - DNA, 25 bp, Homo sapien
cagtcataacggacactggtgtttt

SEQ ID NO: 128162 - DNA, 25 bp, Homo sapien
tgtcaactctttttgtttatctctg

SEQ ID NO: 128163 - DNA, 25 bp, Homo sapien
tattattaactctttctgtcaactc

SEQ ID NO: 128164 - DNA, 25 bp, Homo sapien
tgacaaatcttgctttcaacttctt

SEQ ID NO: 128165 - DNA, 25 bp, Homo sapien
tatgtttatctttgacaaatcttgc

SEQ ID NO: 128166 - DNA, 25 bp, Homo sapien
gcagaatccacttcagcaaactcaa

SEQ ID NO: 128167 - DNA, 25 bp, Homo sapien
cttccaacccaccaccagtttcact

SEQ ID NO: 128168 - DNA, 25 bp, Homo sapien
ttggcagaatccacttcagcaaact

SEQ ID NO: 128169 - DNA, 25 bp, Homo sapien
aaactcaatctcttccaacccacca

SEQ ID NO: 128170 - DNA, 25 bp, Homo sapien
cccctataagacaaaggtcatccac

SEQ ID NO: 128171 - DNA, 25 bp, Homo sapien
tataagacaaaggtcatccacaaac

SEQ ID NO: 128172 - DNA, 25 bp, Homo sapien
gacaaaggtcatccacaaacagcca

SEQ ID NO: 128173 - DNA, 25 bp, Homo sapien
agacaaaggtcatccacaaacagcc

SEQ ID NO: 128174 - DNA, 25 bp, Homo sapien
gatgtgaacagacattttgccagga

SEQ ID NO: 128175 - DNA, 25 bp, Homo sapien
cattttgccaggaatccgtaactcc

SEQ ID NO: 128176 - DNA, 25 bp, Homo sapien
gaacagacattttgccaggaatccg

SEQ ID NO: 128177 - DNA, 25 bp, Homo sapien
caggaatccgtaactcccactatta

SEQ ID NO: 128178 - DNA, 25 bp, Homo sapien
ttgtaacacgcttaaaatattcatg

SEQ ID NO: 128179 - DNA, 25 bp, Homo sapien
ttgtgttctttgtaacacgcttaaa

SEQ ID NO: 128180 - DNA, 25 bp, Homo sapien
catgaaggcacagcttttgtgttct

SEQ ID NO: 128181 - DNA, 25 bp, Homo sapien
ccatgaaggcacagcttttgtgttc

SEQ ID NO: 128182 - DNA, 25 bp, Homo sapien
aaaagtgggacctgctccccgacat

SEQ ID NO: 128183 - DNA, 25 bp, Homo sapien
cctgagtactccataagctttgtac

SEQ ID NO: 128184 - DNA, 25 bp, Homo sapien
ccagtactacctcggagggctttga

SEQ ID NO: 128185 - DNA, 25 bp, Homo sapien
catcttttcaagtgcagctaaaagt

SEQ ID NO: 128186 - DNA, 25 bp, Homo sapien
ctgtggcaagatgtagcctttgaaa

SEQ ID NO: 128187 - DNA, 25 bp, Homo sapien
tgtggcaagatgtagcctttgaaat

SEQ ID NO: 128188 - DNA, 25 bp, Homo sapien
ctgtccaaatgggaaacgtgaggct

SEQ ID NO: 128189 - DNA, 25 bp, Homo sapien
acactgtccaaatgggaaacgtgag

SEQ ID NO: 128190 - DNA, 25 bp, Homo sapien
ctactgccagatgccaaacaggttt

SEQ ID NO: 128191 - DNA, 25 bp, Homo sapien
caggtttttagtctctgatactggc

SEQ ID NO: 128192 - DNA, 25 bp, Homo sapien
ttcagacagggacaaatcatcagct

SEQ ID NO: 128193 - DNA, 25 bp, Homo sapien
cagggctccactcagatgggttgta

SEQ ID NO: 128194 - DNA, 25 bp, Homo sapien
ttgtaatctgattcgtcaagataac

SEQ ID NO: 128195 - DNA, 25 bp, Homo sapien
gctccactcagatgggttgtaatct

SEQ ID NO: 128196 - DNA, 25 bp, Homo sapien
gctctatgtcagtgtcaagtttcag

SEQ ID NO: 128197 - DNA, 25 bp, Homo sapien
tatgtcagtgtcaagtttcagcctc

SEQ ID NO: 128198 - DNA, 25 bp, Homo sapien
gtggggctctatgtcagtgtcaagt

SEQ ID NO: 128199 - DNA, 25 bp, Homo sapien
atgtcagtgtcaagtttcagcctct

SEQ ID NO: 128200 - DNA, 25 bp, Homo sapien
ggaggaatgctcgatgattcaggtt

SEQ ID NO: 128201 - DNA, 25 bp, Homo sapien
gatgattcaggttttcagcctcgct

SEQ ID NO: 128202 - DNA, 25 bp, Homo sapien
cagcctcgctgataggggttatgat

SEQ ID NO: 128203 - DNA, 25 bp, Homo sapien
ggggttatgatgatgtatccctgaa

SEQ ID NO: 128204 - DNA, 25 bp, Homo sapien
gatttgtcccaaccattctgagctg

SEQ ID NO: 128205 - DNA, 25 bp, Homo sapien
tgatttgtcccaaccattctgagct

SEQ ID NO: 128206 - DNA, 25 bp, Homo sapien
cctgcagtaaatccagagcagatcc

SEQ ID NO: 128207 - DNA, 25 bp, Homo sapien
acatcctgcagtaaatccagagcag

SEQ ID NO: 128208 - DNA, 25 bp, Homo sapien
tcctgcagtaaatccagagcagatc

SEQ ID NO: 128209 - DNA, 25 bp, Homo sapien
caaacatcctgcagtaaatccagag

SEQ ID NO: 128210 - DNA, 25 bp, Homo sapien
gcaactgtctgagattagcagggag

SEQ ID NO: 128211 - DNA, 25 bp, Homo sapien
tcatagcaactgtctgagattagca

SEQ ID NO: 128212 - DNA, 25 bp, Homo sapien
ctgagattagcagggagccacattt

SEQ ID NO: 128213 - DNA, 25 bp, Homo sapien
tgtctgagattagcagggagccaca

SEQ ID NO: 128214 - DNA, 25 bp, Homo sapien
gcagagttatagatagcctgacacc

SEQ ID NO: 128215 - DNA, 25 bp, Homo sapien
agagccctcatagttccatttagta

SEQ ID NO: 128216 - DNA, 25 bp, Homo sapien
tgacaccatttctaactgttaggcg

SEQ ID NO: 128217 - DNA, 25 bp, Homo sapien
gagttatagatagcctgacaccatt

SEQ ID NO: 128218 - DNA, 25 bp, Homo sapien
gcaggaattctagggttccaaccag

SEQ ID NO: 128219 - DNA, 25 bp, Homo sapien
tcacaatgactcaacgggatgtagg

SEQ ID NO: 128220 - DNA, 25 bp, Homo sapien
gataccgttcttatggcctcctgaa

SEQ ID NO: 128221 - DNA, 25 bp, Homo sapien
aatttgaactataccaagtggtggg

SEQ ID NO: 128222 - DNA, 25 bp, Homo sapien
ctgagagagctgttcagcttgggct

SEQ ID NO: 128223 - DNA, 25 bp, Homo sapien
ttcagcttgggcttgttctaattca

SEQ ID NO: 128224 - DNA, 25 bp, Homo sapien
tcagatgacttcctctgagagagct

SEQ ID NO: 128225 - DNA, 25 bp, Homo sapien
tctaattcatgtctagaattaatca

SEQ ID NO: 128226 - DNA, 25 bp, Homo sapien
tcagctgcttgaaaccgaaataatg

SEQ ID NO: 128227 - DNA, 25 bp, Homo sapien
tactttgctaacaatggctgctccc

SEQ ID NO: 128228 - DNA, 25 bp, Homo sapien
ttgcatcaatagaccaaatggcctt

SEQ ID NO: 128229 - DNA, 25 bp, Homo sapien
taattcaccaggtataagcagttgc

SEQ ID NO: 128230 - DNA, 25 bp, Homo sapien
tctttggggcccaagttaggaggca

SEQ ID NO: 128231 - DNA, 25 bp, Homo sapien
cattcagctgctgtacccctctttg

SEQ ID NO: 128232 - DNA, 25 bp, Homo sapien
agctgctgtacccctctttggggcc

SEQ ID NO: 128233 - DNA, 25 bp, Homo sapien
gccacagcccaagagaatgacattc

SEQ ID NO: 128234 - DNA, 25 bp, Homo sapien
tcttgggccaggttacagcagccta

SEQ ID NO: 128235 - DNA, 25 bp, Homo sapien
ttgatacaggcaaagcagagccttg

SEQ ID NO: 128236 - DNA, 25 bp, Homo sapien
taaagcatgcataacagacagagtg

SEQ ID NO: 128237 - DNA, 25 bp, Homo sapien
cctaaggctactcaggtgcagtgac

SEQ ID NO: 128238 - DNA, 25 bp, Homo sapien
tggttggattctcacatgctcagct

SEQ ID NO: 128239 - DNA, 25 bp, Homo sapien
taacgggttgtatgaccaaggtagc

SEQ ID NO: 128240 - DNA, 25 bp, Homo sapien
gaaggctcggccaaattcttatggt

SEQ ID NO: 128241 - DNA, 25 bp, Homo sapien
tagtgaccctagcttacagaggctc

SEQ ID NO: 128242 - DNA, 25 bp, Homo sapien
cagaagcacaacctaggcatggcag

SEQ ID NO: 128243 - DNA, 25 bp, Homo sapien
tattaatgctgaatatggtgactca

SEQ ID NO: 128244 - DNA, 25 bp, Homo sapien
taacgtagcctagcatcatgttaga

SEQ ID NO: 128245 - DNA, 25 bp, Homo sapien
ggtgactcagtttttaatgccaggc

SEQ ID NO: 128246 - DNA, 25 bp, Homo sapien
atccattgaaaccacaataatgcca

SEQ ID NO: 128247 - DNA, 25 bp, Homo sapien
cattgaaaccacaataatgccaaca

SEQ ID NO: 128248 - DNA, 25 bp, Homo sapien
tccattgaaaccacaataatgccaa

SEQ ID NO: 128249 - DNA, 25 bp, Homo sapien
ccattgaaaccacaataatgccaac

SEQ ID NO: 128250 - DNA, 25 bp, Homo sapien
ccaggttgagaaatgtcaggctaga

SEQ ID NO: 128251 - DNA, 25 bp, Homo sapien
aaaacgccaatagcgcccaggttga

SEQ ID NO: 128252 - DNA, 25 bp, Homo sapien
tcaggctagataaaccaactggcca

SEQ ID NO: 128253 - DNA, 25 bp, Homo sapien
taaatggcctttgtctcagaatgtg

SEQ ID NO: 128254 - DNA, 25 bp, Homo sapien
taagggtcagctgcttttcatggga

SEQ ID NO: 128255 - DNA, 25 bp, Homo sapien
gtcttggttggagggaccatcctgt

SEQ ID NO: 128256 - DNA, 25 bp, Homo sapien
ggatgcttagcattgtccctgggta

SEQ ID NO: 128257 - DNA, 25 bp, Homo sapien
tgggaagtaactagtcacaacctcc

SEQ ID NO: 128258 - DNA, 25 bp, Homo sapien
caaacttccaagatggtcagcctga

SEQ ID NO: 128259 - DNA, 25 bp, Homo sapien
tcgtcgtgctgtgtaactctgtcca

SEQ ID NO: 128260 - DNA, 25 bp, Homo sapien
tgtaaggcgaaaatctatcccactg

SEQ ID NO: 128261 - DNA, 25 bp, Homo sapien
tcttttggaagaatgagcgaagtcc

SEQ ID NO: 128262 - DNA, 25 bp, Homo sapien
tcagaaagtaccgtaagggtcatca

SEQ ID NO: 128263 - DNA, 25 bp, Homo sapien
taggtccagaagtaagactgccctt

SEQ ID NO: 128264 - DNA, 25 bp, Homo sapien
aaagtaccgtaagggtcatcactgg

SEQ ID NO: 128265 - DNA, 25 bp, Homo sapien
tcatcactggatgctcgtaatgcta

SEQ ID NO: 128266 - DNA, 25 bp, Homo sapien
cggcgtgggctgtgttgtaatcaac

SEQ ID NO: 128267 - DNA, 25 bp, Homo sapien
ttttctcggcgtgggctgtgttgta

SEQ ID NO: 128268 - DNA, 25 bp, Homo sapien
agggcaggattttctcggcgtgggc

SEQ ID NO: 128269 - DNA, 25 bp, Homo sapien
ctgtgttgtaatcaacaggtctgca

SEQ ID NO: 128270 - DNA, 25 bp, Homo sapien
cagcttgtaaagctgttctgctgac

SEQ ID NO: 128271 - DNA, 25 bp, Homo sapien
tcagcttgtaaagctgttctgctga

SEQ ID NO: 128272 - DNA, 25 bp, Homo sapien
tatgagaatagaggacaagcacact

SEQ ID NO: 128273 - DNA, 25 bp, Homo sapien
tgaaactccgggctgaatccgacat

SEQ ID NO: 128274 - DNA, 25 bp, Homo sapien
cataacacagcctcagtatgagaat

SEQ ID NO: 128275 - DNA, 25 bp, Homo sapien
gggatagaagatgcccaaggcttta

SEQ ID NO: 128276 - DNA, 25 bp, Homo sapien
tgcaggggacggacctctgttccca

SEQ ID NO: 128277 - DNA, 25 bp, Homo sapien
caacattgtccagagaggtgaaagg

SEQ ID NO: 128278 - DNA, 25 bp, Homo sapien
ggggatgccgacagatcttgctgtt

SEQ ID NO: 128279 - DNA, 25 bp, Homo sapien
tgctgtttcccattgatgcctgaat

SEQ ID NO: 128280 - DNA, 25 bp, Homo sapien
cactgggtatatccctgagtgctgg

SEQ ID NO: 128281 - DNA, 25 bp, Homo sapien
gcagcaggcggataccagagttgaa

SEQ ID NO: 128282 - DNA, 25 bp, Homo sapien
tgagtgctggaaaaaacatcaccct

SEQ ID NO: 128283 - DNA, 25 bp, Homo sapien
tcaccctcagaagtgtgcattcagc

SEQ ID NO: 128284 - DNA, 25 bp, Homo sapien
gcaggaccctgcagttctatttctg

SEQ ID NO: 128285 - DNA, 25 bp, Homo sapien
aggaccctgcagttctatttctgac

SEQ ID NO: 128286 - DNA, 25 bp, Homo sapien
gaccctgcagttctatttctgactc

SEQ ID NO: 128287 - DNA, 25 bp, Homo sapien
agcaggaccctgcagttctatttct

SEQ ID NO: 128288 - DNA, 25 bp, Homo sapien
catatctcttgtcctcacgtcctga

SEQ ID NO: 128289 - DNA, 25 bp, Homo sapien
cctgaagcacattccatgtaatgca

SEQ ID NO: 128290 - DNA, 25 bp, Homo sapien
gcattctcgttcatatctcttgtcc

SEQ ID NO: 128291 - DNA, 25 bp, Homo sapien
cactggaactgcattctcgttcata

SEQ ID NO: 128292 - DNA, 25 bp, Homo sapien
catggcatggctccactttgaaaag

SEQ ID NO: 128293 - DNA, 25 bp, Homo sapien
cagctctagctgttgtcatgtggca

SEQ ID NO: 128294 - DNA, 25 bp, Homo sapien
gcagtgtctgctctacatggcatgg

SEQ ID NO: 128295 - DNA, 25 bp, Homo sapien
tgagttcgagaattcatccaggatc

SEQ ID NO: 128296 - DNA, 25 bp, Homo sapien
tattggcaatgtctaactcgcagtg

SEQ ID NO: 128297 - DNA, 25 bp, Homo sapien
tgtcagcagttgataaagcttcccc

SEQ ID NO: 128298 - DNA, 25 bp, Homo sapien
tacattagtaaagaggccaagtgct

SEQ ID NO: 128299 - DNA, 25 bp, Homo sapien
ggtctactaactgcacatggcctta

SEQ ID NO: 128300 - DNA, 25 bp, Homo sapien
ctagtgcggctatcacacagctgga

SEQ ID NO: 128301 - DNA, 25 bp, Homo sapien
gatcagccgggtattcacactgtga

SEQ ID NO: 128302 - DNA, 25 bp, Homo sapien
ctctctgaatcaaggtactggagga

SEQ ID NO: 128303 - DNA, 25 bp, Homo sapien
caggtatttcctagtgcggctatca

SEQ ID NO: 128304 - DNA, 25 bp, Homo sapien
ctttaggccctaatagctgctgctg

SEQ ID NO: 128305 - DNA, 25 bp, Homo sapien
cattttcagaagacgctcagattgc

SEQ ID NO: 128306 - DNA, 25 bp, Homo sapien
ggctcaggacagacaatgcggccag

SEQ ID NO: 128307 - DNA, 25 bp, Homo sapien
ccttcatagtcagagaatactgtca

SEQ ID NO: 128308 - DNA, 25 bp, Homo sapien
taagaccacaggaaagactcaggga

SEQ ID NO: 128309 - DNA, 25 bp, Homo sapien
tgtcccagaggtcttactaccctag

SEQ ID NO: 128310 - DNA, 25 bp, Homo sapien
ccttcgcttcgtatggcttctatgg

SEQ ID NO: 128311 - DNA, 25 bp, Homo sapien
ggaatcactaagcacaccctctgct

SEQ ID NO: 128312 - DNA, 25 bp, Homo sapien
gcgtcctgccgagaatcactgattt

SEQ ID NO: 128313 - DNA, 25 bp, Homo sapien
tcctttagagtcaaagcagttactg

SEQ ID NO: 128314 - DNA, 25 bp, Homo sapien
gccttgtaacagtacctcagtatta

SEQ ID NO: 128315 - DNA, 25 bp, Homo sapien
tttggacctcgagggcaggaactag

SEQ ID NO: 128316 - DNA, 25 bp, Homo sapien
gctcttactgcaagtccggtttaca

SEQ ID NO: 128317 - DNA, 25 bp, Homo sapien
tccagccctcgctagaaggcacttt

SEQ ID NO: 128318 - DNA, 25 bp, Homo sapien
ttgttacaaggcaaaacccagcctg

SEQ ID NO: 128319 - DNA, 25 bp, Homo sapien
gaatctccagcgcaactagttacac

SEQ ID NO: 128320 - DNA, 25 bp, Homo sapien
cggcgtagcatctcacagcagggat

SEQ ID NO: 128321 - DNA, 25 bp, Homo sapien
gccagaagacgaatgctccaagctg

SEQ ID NO: 128322 - DNA, 25 bp, Homo sapien
tgataagctttcaaatctcacacac

SEQ ID NO: 128323 - DNA, 25 bp, Homo sapien
gccacaggctcaggcggcgtagcat

SEQ ID NO: 128324 - DNA, 25 bp, Homo sapien
tggcaagcacgtgctctttggcaaa

SEQ ID NO: 128325 - DNA, 25 bp, Homo sapien
gcacgaatattgtggaggcatggag

SEQ ID NO: 128326 - DNA, 25 bp, Homo sapien
gaaggcacgaatattgtggaggcat

SEQ ID NO: 128327 - DNA, 25 bp, Homo sapien
aagcacgtgctctttggcaaagtga

SEQ ID NO: 128328 - DNA, 25 bp, Homo sapien
ctacacggagaaatttgaaaatgag

SEQ ID NO: 128329 - DNA, 25 bp, Homo sapien
tgaaaatgagaacttcatcctaaag

SEQ ID NO: 128330 - DNA, 25 bp, Homo sapien
aatgagaacttcatcctaaagcata

SEQ ID NO: 128331 - DNA, 25 bp, Homo sapien
aaaatgagaacttcatcctaaagca

SEQ ID NO: 128332 - DNA, 25 bp, Homo sapien
catgttctttgaatttgccgtcgac

SEQ ID NO: 128333 - DNA, 25 bp, Homo sapien
ttctttgaatttgccgtcgacagcg

SEQ ID NO: 128334 - DNA, 25 bp, Homo sapien
tgactgtgaagtcaccataatggca

SEQ ID NO: 128335 - DNA, 25 bp, Homo sapien
gggtggtgactgtgaagtcaccata

SEQ ID NO: 128336 - DNA, 25 bp, Homo sapien
cacatccctgttacatcatgcttgg

SEQ ID NO: 128337 - DNA, 25 bp, Homo sapien
tatagtaaaaagatgccaggaactc

SEQ ID NO: 128338 - DNA, 25 bp, Homo sapien
tttctttagtctcacaggaacccat

SEQ ID NO: 128339 - DNA, 25 bp, Homo sapien
tgcttggaccacacgggactttctt

SEQ ID NO: 128340 - DNA, 25 bp, Homo sapien
aaatctcttgtttggttgctacatt

SEQ ID NO: 128341 - DNA, 25 bp, Homo sapien
aaaatctcttgtttggttgctacat

SEQ ID NO: 128342 - DNA, 25 bp, Homo sapien
aaaaatctcttgtttggttgctaca

SEQ ID NO: 128343 - DNA, 25 bp, Homo sapien
ccagaagcttcagccgatttctcca

SEQ ID NO: 128344 - DNA, 25 bp, Homo sapien
agaagcttcagccgatttctccagc

SEQ ID NO: 128345 - DNA, 25 bp, Homo sapien
ttccagaagcttcagccgatttctc

SEQ ID NO: 128346 - DNA, 25 bp, Homo sapien
tccagaagcttcagccgatttctcc

SEQ ID NO: 128347 - DNA, 25 bp, Homo sapien
gaagaaccaggccttcctccttgat

SEQ ID NO: 128348 - DNA, 25 bp, Homo sapien
tgtagacaaatgaggtgaagggagc

SEQ ID NO: 128349 - DNA, 25 bp, Homo sapien
tcctccttgatggtgtagacaaatg

SEQ ID NO: 128350 - DNA, 25 bp, Homo sapien
gaaccaggccttcctccttgatggt

SEQ ID NO: 128351 - DNA, 25 bp, Homo sapien
gggcagcactgagcataagcttaaa

SEQ ID NO: 128352 - DNA, 25 bp, Homo sapien
taattaccactagcaatgggcagca

SEQ ID NO: 128353 - DNA, 25 bp, Homo sapien
ggtaaatatcactggccaatgcatc

SEQ ID NO: 128354 - DNA, 25 bp, Homo sapien
tgattctgtctggagctagcttcta

SEQ ID NO: 128355 - DNA, 25 bp, Homo sapien
agaatcattgcccacttcatgccat

SEQ ID NO: 128356 - DNA, 25 bp, Homo sapien
cacactggtgtcagaatcattgccc

SEQ ID NO: 128357 - DNA, 25 bp, Homo sapien
cattgcccacttcatgccataggat

SEQ ID NO: 128358 - DNA, 25 bp, Homo sapien
atcattgcccacttcatgccatagg

SEQ ID NO: 128359 - DNA, 25 bp, Homo sapien
taagagccaaaggtcgtagttctca

SEQ ID NO: 128360 - DNA, 25 bp, Homo sapien
gcataagtcaaaggctaagagccaa

SEQ ID NO: 128361 - DNA, 25 bp, Homo sapien
caaggaacttggatagcataagtca

SEQ ID NO: 128362 - DNA, 25 bp, Homo sapien
tagttctcaccccaaatttcgtgga

SEQ ID NO: 128363 - DNA, 25 bp, Homo sapien
cagttttcaaagtcttgaatcaagg

SEQ ID NO: 128364 - DNA, 25 bp, Homo sapien
ccaccaatgggttgcgacagttttc

SEQ ID NO: 128365 - DNA, 25 bp, Homo sapien
tgctggttgtgattcatcaatttca

SEQ ID NO: 128366 - DNA, 25 bp, Homo sapien
aaacaatatgtgtgatataatctga

SEQ ID NO: 128367 - DNA, 25 bp, Homo sapien
tctcctaggaggatcggacaaagct

SEQ ID NO: 128368 - DNA, 25 bp, Homo sapien
caaggctgttagagatcccgcagga

SEQ ID NO: 128369 - DNA, 25 bp, Homo sapien
cagtgcagctcctcatgtaagaaaa

SEQ ID NO: 128370 - DNA, 25 bp, Homo sapien
tacttggccttgactgatggtacct

SEQ ID NO: 128371 - DNA, 25 bp, Homo sapien
gcatcctaatccttgagaaccggtg

SEQ ID NO: 128372 - DNA, 25 bp, Homo sapien
caatagcatggaccggctccttcaa

SEQ ID NO: 128373 - DNA, 25 bp, Homo sapien
tggagctggtaaatcgaattctgcc

SEQ ID NO: 128374 - DNA, 25 bp, Homo sapien
tattataaaatctccgggctagcag

SEQ ID NO: 128375 - DNA, 25 bp, Homo sapien
cttgagcatcactctaagaggctag

SEQ ID NO: 128376 - DNA, 25 bp, Homo sapien
taagaggctagccaaactgctgagc

SEQ ID NO: 128377 - DNA, 25 bp, Homo sapien
cactctaagaggctagccaaactgc

SEQ ID NO: 128378 - DNA, 25 bp, Homo sapien
tagtgggcactgagacttgcatggt

SEQ ID NO: 128379 - DNA, 25 bp, Homo sapien
gtgggcacacaccattaaagctgat

SEQ ID NO: 128380 - DNA, 25 bp, Homo sapien
ggcacacaccattaaagctgattcc

SEQ ID NO: 128381 - DNA, 25 bp, Homo sapien
tgggcacacaccattaaagctgatt

SEQ ID NO: 128382 - DNA, 25 bp, Homo sapien
tgtgggcacacaccattaaagctga

SEQ ID NO: 128383 - DNA, 25 bp, Homo sapien
ggccttgagtcccagctgtgttctg

SEQ ID NO: 128384 - DNA, 25 bp, Homo sapien
ctgcagcgccagcaacacagcccag

SEQ ID NO: 128385 - DNA, 25 bp, Homo sapien
agcccagctgctttcaatgacagaa

SEQ ID NO: 128386 - DNA, 25 bp, Homo sapien
cagaatctttattcttggccttgag

SEQ ID NO: 128387 - DNA, 25 bp, Homo sapien
gacaaactttccgaggctgcagtgg

SEQ ID NO: 128388 - DNA, 25 bp, Homo sapien
ctgggaggtcccacactaagaggca

SEQ ID NO: 128389 - DNA, 25 bp, Homo sapien
gggtcactttgagtccagcagcata

SEQ ID NO: 128390 - DNA, 25 bp, Homo sapien
aaggagagcgccttggcctagacaa

SEQ ID NO: 128391 - DNA, 25 bp, Homo sapien
gaagtatctcaacagaggctcatga

SEQ ID NO: 128392 - DNA, 25 bp, Homo sapien
gaagactgcctatggaaagatgaca

SEQ ID NO: 128393 - DNA, 25 bp, Homo sapien
gagtgcagtgcatccctaaagaagg

SEQ ID NO: 128394 - DNA, 25 bp, Homo sapien
ttaacgattatacgaggctgcagag

SEQ ID NO: 128395 - DNA, 25 bp, Homo sapien
tatatctcttgacccctgagcacca

SEQ ID NO: 128396 - DNA, 25 bp, Homo sapien
ttatatctcttgacccctgagcacc

SEQ ID NO: 128397 - DNA, 25 bp, Homo sapien
ggccttgcaaaccagagatccagaa

SEQ ID NO: 128398 - DNA, 25 bp, Homo sapien
cgcagccctggcttgactaaggata

SEQ ID NO: 128399 - DNA, 25 bp, Homo sapien
ctttcatacgtattgcccacagagc

SEQ ID NO: 128400 - DNA, 25 bp, Homo sapien
tccagaaacacagcggaagtgtggg

SEQ ID NO: 128401 - DNA, 25 bp, Homo sapien
tgttgacatcccatggcggcaaagc

SEQ ID NO: 128402 - DNA, 25 bp, Homo sapien
cttcttccaagcagtacggtcctgt

SEQ ID NO: 128403 - DNA, 25 bp, Homo sapien
ttccctgctaggtctgaaatcgcta

SEQ ID NO: 128404 - DNA, 25 bp, Homo sapien
gaaatcgctagctcaatggtttagg

SEQ ID NO: 128405 - DNA, 25 bp, Homo sapien
tctgcagggctatacacaatatacc

SEQ ID NO: 128406 - DNA, 25 bp, Homo sapien
cagtgaattctgagcccatcgacct

SEQ ID NO: 128407 - DNA, 25 bp, Homo sapien
tctcggctggatctgaacctgtcag

SEQ ID NO: 128408 - DNA, 25 bp, Homo sapien
catacatgctccacttctcggctgg

SEQ ID NO: 128409 - DNA, 25 bp, Homo sapien
gcctcatctttgtatcaactttcaa

SEQ ID NO: 128410 - DNA, 25 bp, Homo sapien
tatgttattgacacaaagataggtc

SEQ ID NO: 128411 - DNA, 25 bp, Homo sapien
gattaactccggaggggcacagaga

SEQ ID NO: 128412 - DNA, 25 bp, Homo sapien
caaagataggtcgttgttgattaac

SEQ ID NO: 128413 - DNA, 25 bp, Homo sapien
tataggaacaacagccaaatatttg

SEQ ID NO: 128414 - DNA, 25 bp, Homo sapien
ttttataggaacaacagccaaatat

SEQ ID NO: 128415 - DNA, 25 bp, Homo sapien
aacaacagccaaatatttgtcataa

SEQ ID NO: 128416 - DNA, 25 bp, Homo sapien
tcctttttataggaacaacagccaa

SEQ ID NO: 128417 - DNA, 25 bp, Homo sapien
catcatgatatctagttgccacgga

SEQ ID NO: 128418 - DNA, 25 bp, Homo sapien
gtcagtgccatggtatcaaatcagc

SEQ ID NO: 128419 - DNA, 25 bp, Homo sapien
gcagagaacgatgggtgtttcacca

SEQ ID NO: 128420 - DNA, 25 bp, Homo sapien
taagctgagtctacacagtagcaac

SEQ ID NO: 128421 - DNA, 25 bp, Homo sapien
agtactgatgcacgctacaccatgg

SEQ ID NO: 128422 - DNA, 25 bp, Homo sapien
tactgatgcacgctacaccatggag

SEQ ID NO: 128423 - DNA, 25 bp, Homo sapien
gaagtactgatgcacgctacaccat

SEQ ID NO: 128424 - DNA, 25 bp, Homo sapien
ctgatgcacgctacaccatggagga

SEQ ID NO: 128425 - DNA, 25 bp, Homo sapien
ccttattcaaccatagagatccatg

SEQ ID NO: 128426 - DNA, 25 bp, Homo sapien
tgtgtcataggaaagacattgccca

SEQ ID NO: 128427 - DNA, 25 bp, Homo sapien
aaacatcattctctcagtgctgaaa

SEQ ID NO: 128428 - DNA, 25 bp, Homo sapien
gctctctgacccctgttgtctattt

SEQ ID NO: 128429 - DNA, 25 bp, Homo sapien
gggtgggtgaggggctcactcctct

SEQ ID NO: 128430 - DNA, 25 bp, Homo sapien
tggggtgggtgaggggctcactcct

SEQ ID NO: 128431 - DNA, 25 bp, Homo sapien
gggtgaggggctcactcctctccat

SEQ ID NO: 128432 - DNA, 25 bp, Homo sapien
gtgggtgaggggctcactcctctcc

SEQ ID NO: 128433 - DNA, 25 bp, Homo sapien
taggctgcacgttgccctttggttt

SEQ ID NO: 128434 - DNA, 25 bp, Homo sapien
caggagcggtcaggagagcatcctt

SEQ ID NO: 128435 - DNA, 25 bp, Homo sapien
tcagtctgatagcatagtctcttcc

SEQ ID NO: 128436 - DNA, 25 bp, Homo sapien
aagggcaacaggagcggtcaggaga

SEQ ID NO: 128437 - DNA, 25 bp, Homo sapien
gaggcagtgttcagtccgtctgttc

SEQ ID NO: 128438 - DNA, 25 bp, Homo sapien
tagaagtgcgccttggaagccagga

SEQ ID NO: 128439 - DNA, 25 bp, Homo sapien
tttgtttccgaaaggtaggcactca

SEQ ID NO: 128440 - DNA, 25 bp, Homo sapien
aattaagcttccgatgcttagaagg

SEQ ID NO: 128441 - DNA, 25 bp, Homo sapien
tcggcacccttgtgactgagcaaac

SEQ ID NO: 128442 - DNA, 25 bp, Homo sapien
gtggtccagctcaggcttcggcacc

SEQ ID NO: 128443 - DNA, 25 bp, Homo sapien
gactgagcaaactcattgatgtaca

SEQ ID NO: 128444 - DNA, 25 bp, Homo sapien
tcaggcttcggcacccttgtgactg

SEQ ID NO: 128445 - DNA, 25 bp, Homo sapien
gcaggtctgcagttcacaaattagg

SEQ ID NO: 128446 - DNA, 25 bp, Homo sapien
gttatggaccccttgctgaaacgcc

SEQ ID NO: 128447 - DNA, 25 bp, Homo sapien
ctgctgcccatgtttggtgtggcac

SEQ ID NO: 128448 - DNA, 25 bp, Homo sapien
tgtggcactaagagttatggacccc

SEQ ID NO: 128449 - DNA, 25 bp, Homo sapien
cacgaccacttgacaacccagtgaa

SEQ ID NO: 128450 - DNA, 25 bp, Homo sapien
gtgtgccacacgaccacttgacaac

SEQ ID NO: 128451 - DNA, 25 bp, Homo sapien
gaagggctcagggtagtatgtcttc

SEQ ID NO: 128452 - DNA, 25 bp, Homo sapien
agggctcagggtagtatgtcttcat

SEQ ID NO: 128453 - DNA, 25 bp, Homo sapien
aggagattacaaattgtgtgtccca

SEQ ID NO: 128454 - DNA, 25 bp, Homo sapien
tgatgaaaggattttgacgcgccac

SEQ ID NO: 128455 - DNA, 25 bp, Homo sapien
ttgacgcgccactgaaattctcttt

SEQ ID NO: 128456 - DNA, 25 bp, Homo sapien
ccttgctgaaggcctcgggacggca

SEQ ID NO: 128457 - DNA, 25 bp, Homo sapien
gcctcgggacggcagctgatggctg

SEQ ID NO: 128458 - DNA, 25 bp, Homo sapien
tgcatgagcaaaagatctattcaga

SEQ ID NO: 128459 - DNA, 25 bp, Homo sapien
gaggctgggtttccttcgcatactt

SEQ ID NO: 128460 - DNA, 25 bp, Homo sapien
tctattaagccggacagtcaagaga

SEQ ID NO: 128461 - DNA, 25 bp, Homo sapien
tattcagagtacaagccagataact

SEQ ID NO: 128462 - DNA, 25 bp, Homo sapien
gatcctgctgacctggagaaggatg

SEQ ID NO: 128463 - DNA, 25 bp, Homo sapien
gatgaaaaggctgagtgtcggggac

SEQ ID NO: 128464 - DNA, 25 bp, Homo sapien
acctggagaaggatgaaaaggctga

SEQ ID NO: 128465 - DNA, 25 bp, Homo sapien
aaggatgaaaaggctgagtgtcggg

SEQ ID NO: 128466 - DNA, 25 bp, Homo sapien
tagtaagaacctgaaccagagcctc

SEQ ID NO: 128467 - DNA, 25 bp, Homo sapien
taatacggtcacatgtcgcttaacg

SEQ ID NO: 128468 - DNA, 25 bp, Homo sapien
tatgtggcaaagcacgaacaagctg

SEQ ID NO: 128469 - DNA, 25 bp, Homo sapien
aactgaggcgctatgatggtaacca

SEQ ID NO: 128470 - DNA, 25 bp, Homo sapien
ttatttgtgtggtttggcctaagtg

SEQ ID NO: 128471 - DNA, 25 bp, Homo sapien
ctaagtgggtcttttgaaaatagct

SEQ ID NO: 128472 - DNA, 25 bp, Homo sapien
tggtttagaacctatagattgatgt

SEQ ID NO: 128473 - DNA, 25 bp, Homo sapien
tatcctcctccctgaacaaggcaag

SEQ ID NO: 128474 - DNA, 25 bp, Homo sapien
tgtttttaggggcatataggttcat

SEQ ID NO: 128475 - DNA, 25 bp, Homo sapien
tcaaggttatgtttttaggggcata

SEQ ID NO: 128476 - DNA, 25 bp, Homo sapien
taggggcatataggttcatgaatat

SEQ ID NO: 128477 - DNA, 25 bp, Homo sapien
ttttaggggcatataggttcatgaa

SEQ ID NO: 128478 - DNA, 25 bp, Homo sapien
ctgcgactggctgggtctcaatttt

SEQ ID NO: 128479 - DNA, 25 bp, Homo sapien
cactgcgactggctgggtctcaatt

SEQ ID NO: 128480 - DNA, 25 bp, Homo sapien
ccactgcgactggctgggtctcaat

SEQ ID NO: 128481 - DNA, 25 bp, Homo sapien
actgcgactggctgggtctcaattt

SEQ ID NO: 128482 - DNA, 25 bp, Homo sapien
cccctggaggttaacgtgcaaagct

SEQ ID NO: 128483 - DNA, 25 bp, Homo sapien
gacccctctggaaacccagtgaatg

SEQ ID NO: 128484 - DNA, 25 bp, Homo sapien
gtaaagagcctattttggcagcctg

SEQ ID NO: 128485 - DNA, 25 bp, Homo sapien
tgacagttgcaaccgaacaagcaga

SEQ ID NO: 128486 - DNA, 25 bp, Homo sapien
tttataggccctaaaggagacactg

SEQ ID NO: 128487 - DNA, 25 bp, Homo sapien
cctgccaggtttataggccctaaag

SEQ ID NO: 128488 - DNA, 25 bp, Homo sapien
ttataggccctaaaggagacactga

SEQ ID NO: 128489 - DNA, 25 bp, Homo sapien
tgccaggtttataggccctaaagga

SEQ ID NO: 128490 - DNA, 25 bp, Homo sapien
agcacagaaatgctcttctgaggac

SEQ ID NO: 128491 - DNA, 25 bp, Homo sapien
gatgccagcacagaaatgctcttct

SEQ ID NO: 128492 - DNA, 25 bp, Homo sapien
cgtggatgccagcacagaaatgctc

SEQ ID NO: 128493 - DNA, 25 bp, Homo sapien
gccagcacagaaatgctcttctgag

SEQ ID NO: 128494 - DNA, 25 bp, Homo sapien
aatcacgagggctccttccactgtt

SEQ ID NO: 128495 - DNA, 25 bp, Homo sapien
cttccactgtttcagccagaggggc

SEQ ID NO: 128496 - DNA, 25 bp, Homo sapien
tcttcaatcacgagggctccttcca

SEQ ID NO: 128497 - DNA, 25 bp, Homo sapien
gtggtcttcaatcacgagggctcct

SEQ ID NO: 128498 - DNA, 25 bp, Homo sapien
tggaactcccctgacatatttattg

SEQ ID NO: 128499 - DNA, 25 bp, Homo sapien
acaagttttcttcggccatattaca

SEQ ID NO: 128500 - DNA, 25 bp, Homo sapien
tgcatgtaacaagaagtcaagccaa

SEQ ID NO: 128501 - DNA, 25 bp, Homo sapien
tattagctaatgacagtatgaagcc

SEQ ID NO: 128502 - DNA, 25 bp, Homo sapien
tggctgtttttgcactacaatgata

SEQ ID NO: 128503 - DNA, 25 bp, Homo sapien
taagggaatcagacatcttacgaag

SEQ ID NO: 128504 - DNA, 25 bp, Homo sapien
gcagtagtagaagagtgacaggttc

SEQ ID NO: 128505 - DNA, 25 bp, Homo sapien
gcttgaaatatttacgactggcctt

SEQ ID NO: 128506 - DNA, 25 bp, Homo sapien
catttaatcttgtacccaaccgaag

SEQ ID NO: 128507 - DNA, 25 bp, Homo sapien
gaagtaagccatttaatcttgtacc

SEQ ID NO: 128508 - DNA, 25 bp, Homo sapien
tttagataaatcttagaagtaagcc

SEQ ID NO: 128509 - DNA, 25 bp, Homo sapien
ttttttccaccagcaacataatgat

SEQ ID NO: 128510 - DNA, 25 bp, Homo sapien
tcacttggaaacagatacgattggc

SEQ ID NO: 128511 - DNA, 25 bp, Homo sapien
gcttgctgcgtcagatcacttggaa

SEQ ID NO: 128512 - DNA, 25 bp, Homo sapien
tcagtgttgccaacccaacaattct

SEQ ID NO: 128513 - DNA, 25 bp, Homo sapien
aaggaaatacaatctgcttgctgcg

SEQ ID NO: 128514 - DNA, 25 bp, Homo sapien
ctgccccaggtactcataataatgt

SEQ ID NO: 128515 - DNA, 25 bp, Homo sapien
gcctgcaggtctgggtgctttcgtt

SEQ ID NO: 128516 - DNA, 25 bp, Homo sapien
cagtgacttcattcctaaaaaaggc

SEQ ID NO: 128517 - DNA, 25 bp, Homo sapien
cattcctaaaaaaggcctgcaggtc

SEQ ID NO: 128518 - DNA, 25 bp, Homo sapien
tgacttcattcctaaaaaaggcctg

SEQ ID NO: 128519 - DNA, 25 bp, Homo sapien
tgaggttcttcagaccataaccgga

SEQ ID NO: 128520 - DNA, 25 bp, Homo sapien
tcttcagaccataaccggatttggt

SEQ ID NO: 128521 - DNA, 25 bp, Homo sapien
cggatttggtccaaaccaatgacgt

SEQ ID NO: 128522 - DNA, 25 bp, Homo sapien
ccaatgacgtttcgctgcaatgcat

SEQ ID NO: 128523 - DNA, 25 bp, Homo sapien
agatcagaagcaggcacttcttggg

SEQ ID NO: 128524 - DNA, 25 bp, Homo sapien
tggagatcagaagcaggcacttctt

SEQ ID NO: 128525 - DNA, 25 bp, Homo sapien
agaagcaggcacttcttgggaaggg

SEQ ID NO: 128526 - DNA, 25 bp, Homo sapien
cagaagcaggcacttcttgggaagg

SEQ ID NO: 128527 - DNA, 25 bp, Homo sapien
acttccttaagagccagtgtgggtt

SEQ ID NO: 128528 - DNA, 25 bp, Homo sapien
tcttcccctgtgatatcagcttcat

SEQ ID NO: 128529 - DNA, 25 bp, Homo sapien
ccacttccttaagagccagtgtggg

SEQ ID NO: 128530 - DNA, 25 bp, Homo sapien
ttcttcccctgtgatatcagcttca

SEQ ID NO: 128531 - DNA, 25 bp, Homo sapien
gggtagcctgggctgaactccacct

SEQ ID NO: 128532 - DNA, 25 bp, Homo sapien
tccacctgatggctttaggagccat

SEQ ID NO: 128533 - DNA, 25 bp, Homo sapien
agcctgggctgaactccacctgatg

SEQ ID NO: 128534 - DNA, 25 bp, Homo sapien
gtagcctgggctgaactccacctga

SEQ ID NO: 128535 - DNA, 25 bp, Homo sapien
gttgtaagcgttgcctcttcagaac

SEQ ID NO: 128536 - DNA, 25 bp, Homo sapien
aatttgatgcgttgtaagcgttgcc

SEQ ID NO: 128537 - DNA, 25 bp, Homo sapien
tggagagaaaatttgatgcgttgta

SEQ ID NO: 128538 - DNA, 25 bp, Homo sapien
gatgcgttgtaagcgttgcctcttc

SEQ ID NO: 128539 - DNA, 25 bp, Homo sapien
ggtgatgagggcaccagggggatga

SEQ ID NO: 128540 - DNA, 25 bp, Homo sapien
ctggtgatgagggcaccagggggat

SEQ ID NO: 128541 - DNA, 25 bp, Homo sapien
atgagggcaccagggggatgaatag

SEQ ID NO: 128542 - DNA, 25 bp, Homo sapien
tgatgagggcaccagggggatgaat

SEQ ID NO: 128543 - DNA, 25 bp, Homo sapien
gtgatgtctgtaccataccctggat

SEQ ID NO: 128544 - DNA, 25 bp, Homo sapien
tgtgatgtctgtaccataccctgga

SEQ ID NO: 128545 - DNA, 25 bp, Homo sapien
aaggtgcttgaaggcacacaagaaa

SEQ ID NO: 128546 - DNA, 25 bp, Homo sapien
ggcacacaagaaatggctggttcta

SEQ ID NO: 128547 - DNA, 25 bp, Homo sapien
agaaggtgcttgaaggcacacaaga

SEQ ID NO: 128548 - DNA, 25 bp, Homo sapien
cacacaagaaatggctggttctaat

SEQ ID NO: 128549 - DNA, 25 bp, Homo sapien
caaacaccgggcagagcaaatgcta

SEQ ID NO: 128550 - DNA, 25 bp, Homo sapien
ccaaactgatgagggcctagccttc

SEQ ID NO: 128551 - DNA, 25 bp, Homo sapien
caggccctctagtgcggccagctgt

SEQ ID NO: 128552 - DNA, 25 bp, Homo sapien
cagctgttccgaaacaggtttggga

SEQ ID NO: 128553 - DNA, 25 bp, Homo sapien
ggccataagtaagggatcgtgaagc

SEQ ID NO: 128554 - DNA, 25 bp, Homo sapien
ttaaggctatgggtgctggtcgtgg

SEQ ID NO: 128555 - DNA, 25 bp, Homo sapien
ggatcgtgaagcttctccaacccca

SEQ ID NO: 128556 - DNA, 25 bp, Homo sapien
gctgatgaactctgtggccataagt

SEQ ID NO: 128557 - DNA, 25 bp, Homo sapien
aatggcacagccaagggtgttcttc

SEQ ID NO: 128558 - DNA, 25 bp, Homo sapien
tggcacagccaagggtgttcttctt

SEQ ID NO: 128559 - DNA, 25 bp, Homo sapien
acaataatggcacagccaagggtgt

SEQ ID NO: 128560 - DNA, 25 bp, Homo sapien
acagccaagggtgttcttcttgtgg

SEQ ID NO: 128561 - DNA, 25 bp, Homo sapien
tgaactgacatggttgtacccagca

SEQ ID NO: 128562 - DNA, 25 bp, Homo sapien
gcaatgggaaatgggcacattaacc

SEQ ID NO: 128563 - DNA, 25 bp, Homo sapien
gccctgacgacactgattttagctc

SEQ ID NO: 128564 - DNA, 25 bp, Homo sapien
tagctcagtgagatccattttggac

SEQ ID NO: 128565 - DNA, 25 bp, Homo sapien
tcctggcccaacgtaatcacaaggg

SEQ ID NO: 128566 - DNA, 25 bp, Homo sapien
tagttagctaaccttaaaacaggca

SEQ ID NO: 128567 - DNA, 25 bp, Homo sapien
gaggacctgagccaaggagattctc

SEQ ID NO: 128568 - DNA, 25 bp, Homo sapien
tcaaaggtgtccacggcctatttcc

SEQ ID NO: 128569 - DNA, 25 bp, Homo sapien
aggcaggtctgcaatggtaacaatc

SEQ ID NO: 128570 - DNA, 25 bp, Homo sapien
gcaggcaggtctgcaatggtaacaa

SEQ ID NO: 128571 - DNA, 25 bp, Homo sapien
ctcattccccaaagcctcaaggtcc

SEQ ID NO: 128572 - DNA, 25 bp, Homo sapien
tcattccccaaagcctcaaggtcct

SEQ ID NO: 128573 - DNA, 25 bp, Homo sapien
tgaactcagaacgtgcaaacctagt

SEQ ID NO: 128574 - DNA, 25 bp, Homo sapien
tcttgtgttctgacagaccctggcc

SEQ ID NO: 128575 - DNA, 25 bp, Homo sapien
cagtggcttggctctagttatccta

SEQ ID NO: 128576 - DNA, 25 bp, Homo sapien
ggaatctcagcaaaccacaaacgga

SEQ ID NO: 128577 - DNA, 25 bp, Homo sapien
ctgcccacctcagcctcccaaagtg

SEQ ID NO: 128578 - DNA, 25 bp, Homo sapien
cacgcccagccaatagaaaaggggt

SEQ ID NO: 128579 - DNA, 25 bp, Homo sapien
tgcccacctcagcctcccaaagtgc

SEQ ID NO: 128580 - DNA, 25 bp, Homo sapien
ccacgcccagccaatagaaaagggg

SEQ ID NO: 128581 - DNA, 25 bp, Homo sapien
atctattccttccaacttggtctcc

SEQ ID NO: 128582 - DNA, 25 bp, Homo sapien
gtgatctattccttccaacttggtc

SEQ ID NO: 128583 - DNA, 25 bp, Homo sapien
tgatctattccttccaacttggtct

SEQ ID NO: 128584 - DNA, 25 bp, Homo sapien
gatctattccttccaacttggtctc

SEQ ID NO: 128585 - DNA, 25 bp, Homo sapien
tcccgtcctctacagcatctgttgt

SEQ ID NO: 128586 - DNA, 25 bp, Homo sapien
ccacaatggttggacgaattatact

SEQ ID NO: 128587 - DNA, 25 bp, Homo sapien
attcctatttctcccgtcctctaca

SEQ ID NO: 128588 - DNA, 25 bp, Homo sapien
tggacgaattatactcccatcaaca

SEQ ID NO: 128589 - DNA, 25 bp, Homo sapien
tgttaaaaacccaacatcagccttg

SEQ ID NO: 128590 - DNA, 25 bp, Homo sapien
ccttgggtagcaaaggctggcggag

SEQ ID NO: 128591 - DNA, 25 bp, Homo sapien
atggcctctcccacaagctgacggg

SEQ ID NO: 128592 - DNA, 25 bp, Homo sapien
tggcggaggcctgcttcggtgcagc

SEQ ID NO: 128593 - DNA, 25 bp, Homo sapien
gagcccagttcagttcagcttgggt

SEQ ID NO: 128594 - DNA, 25 bp, Homo sapien
cccagttcagttcagcttgggtgac

SEQ ID NO: 128595 - DNA, 25 bp, Homo sapien
tttctggagcccagttcagttcagc

SEQ ID NO: 128596 - DNA, 25 bp, Homo sapien
gaggatttctggagcccagttcagt

SEQ ID NO: 128597 - DNA, 25 bp, Homo sapien
taatctactcaagctaggagtggcc

SEQ ID NO: 128598 - DNA, 25 bp, Homo sapien
ggtaaacctgtagaagcaactggaa

SEQ ID NO: 128599 - DNA, 25 bp, Homo sapien
cattggtcatttgatgggccagaca

SEQ ID NO: 128600 - DNA, 25 bp, Homo sapien
gagaataaacgttccagcgctccta

SEQ ID NO: 128601 - DNA, 25 bp, Homo sapien
caaggtttataattgtcctccatga

SEQ ID NO: 128602 - DNA, 25 bp, Homo sapien
aaggtttataattgtcctccatgaa

SEQ ID NO: 128603 - DNA, 25 bp, Homo sapien
cttctaggacccccttggagatgct

SEQ ID NO: 128604 - DNA, 25 bp, Homo sapien
cccttctaggacccccttggagatg

SEQ ID NO: 128605 - DNA, 25 bp, Homo sapien
tggaagagaccacctagcaatctgg

SEQ ID NO: 128606 - DNA, 25 bp, Homo sapien
cccacggttcctctacttgcaatga

SEQ ID NO: 128607 - DNA, 25 bp, Homo sapien
gcaatgagtttcctaaacagggcag

SEQ ID NO: 128608 - DNA, 25 bp, Homo sapien
gagtcagatggcctgagtctgcaac

SEQ ID NO: 128609 - DNA, 25 bp, Homo sapien
cctgggacctgcaagtgaagcctaa

SEQ ID NO: 128610 - DNA, 25 bp, Homo sapien
cagaaaatcagagggccgctgctta

SEQ ID NO: 128611 - DNA, 25 bp, Homo sapien
cactgagctgattgatgaaggacac

SEQ ID NO: 128612 - DNA, 25 bp, Homo sapien
tgaagcctaatctttcgggagcccc

SEQ ID NO: 128613 - DNA, 25 bp, Homo sapien
tcccaaacagcattgtatcggcctc

SEQ ID NO: 128614 - DNA, 25 bp, Homo sapien
gcatgctggcccaatgccagagttt

SEQ ID NO: 128615 - DNA, 25 bp, Homo sapien
tctccagtgattacatgacgggccc

SEQ ID NO: 128616 - DNA, 25 bp, Homo sapien
tgccagagtttaattaggccctaaa

SEQ ID NO: 128617 - DNA, 25 bp, Homo sapien
tcagttaagcagtacacactcccag

SEQ ID NO: 128618 - DNA, 25 bp, Homo sapien
taagcagtacacactcccagtctag

SEQ ID NO: 128619 - DNA, 25 bp, Homo sapien
gtacacactcccagtctagagttta

SEQ ID NO: 128620 - DNA, 25 bp, Homo sapien
ggatcagttaagcagtacacactcc

SEQ ID NO: 128621 - DNA, 25 bp, Homo sapien
tgatccacaaagccctctactgtgg

SEQ ID NO: 128622 - DNA, 25 bp, Homo sapien
tggccccagcgggtgctgatgtagg

SEQ ID NO: 128623 - DNA, 25 bp, Homo sapien
caggactgcacctgccaatgccgag

SEQ ID NO: 128624 - DNA, 25 bp, Homo sapien
gctgatgtagggaccgttaacctaa

SEQ ID NO: 128625 - DNA, 25 bp, Homo sapien
gattgggacaagaaggttgttttca

SEQ ID NO: 128626 - DNA, 25 bp, Homo sapien
tctcaggattgggacaagaaggttg

SEQ ID NO: 128627 - DNA, 25 bp, Homo sapien
tctttcgaaaggatactctcaggat

SEQ ID NO: 128628 - DNA, 25 bp, Homo sapien
aaggatactctcaggattgggacaa

SEQ ID NO: 128629 - DNA, 25 bp, Homo sapien
tggctagaaagtgccacgggctcct

SEQ ID NO: 128630 - DNA, 25 bp, Homo sapien
ttgcctttcggcctggctcttcttt

SEQ ID NO: 128631 - DNA, 25 bp, Homo sapien
cagcagacctaggtgtcctttctca

SEQ ID NO: 128632 - DNA, 25 bp, Homo sapien
tctcagaacctttggcctcatacca

SEQ ID NO: 128633 - DNA, 25 bp, Homo sapien
gagtcaggccacagctagactggaa

SEQ ID NO: 128634 - DNA, 25 bp, Homo sapien
ccatttgagactgcctgtgcgactg

SEQ ID NO: 128635 - DNA, 25 bp, Homo sapien
tatatggtacctttcctcctaggag

SEQ ID NO: 128636 - DNA, 25 bp, Homo sapien
gactggaaagcaaacgtggacctga

SEQ ID NO: 128637 - DNA, 25 bp, Homo sapien
ttttctgtcccaagttgtgtagaat

SEQ ID NO: 128638 - DNA, 25 bp, Homo sapien
tgtcccaagttgtgtagaatgcagt

SEQ ID NO: 128639 - DNA, 25 bp, Homo sapien
tgtagaatgcagtgtagagcacttt

SEQ ID NO: 128640 - DNA, 25 bp, Homo sapien
gaatgcagtgtagagcacttttaaa

SEQ ID NO: 128641 - DNA, 25 bp, Homo sapien
tttcctgcagtatgagttctttaaa

SEQ ID NO: 128642 - DNA, 25 bp, Homo sapien
taaagtctattgctaacttgcactc

SEQ ID NO: 128643 - DNA, 25 bp, Homo sapien
tctattgctaacttgcactcatagg

SEQ ID NO: 128644 - DNA, 25 bp, Homo sapien
gagttctttaaagtctattgctaac

SEQ ID NO: 128645 - DNA, 25 bp, Homo sapien
accatagccccctttagactgggca

SEQ ID NO: 128646 - DNA, 25 bp, Homo sapien
cccctttagactgggcatatgggca

SEQ ID NO: 128647 - DNA, 25 bp, Homo sapien
tagactgggcatatgggcagataac

SEQ ID NO: 128648 - DNA, 25 bp, Homo sapien
ggcatatgggcagataacaaaggat

SEQ ID NO: 128649 - DNA, 25 bp, Homo sapien
ttggtttgcgctggaacgccacgct

SEQ ID NO: 128650 - DNA, 25 bp, Homo sapien
tttggaaacgggctgtacactgctg

SEQ ID NO: 128651 - DNA, 25 bp, Homo sapien
caactaagcgtctggcttcgcgggt

SEQ ID NO: 128652 - DNA, 25 bp, Homo sapien
tacagcgatggcctgataagcaact

SEQ ID NO: 128653 - DNA, 25 bp, Homo sapien
agtggaatctgatcattatcttggg

SEQ ID NO: 128654 - DNA, 25 bp, Homo sapien
cattatcttgggataaacattccaa

SEQ ID NO: 128655 - DNA, 25 bp, Homo sapien
taaacattccaaatggaaggtgagt

SEQ ID NO: 128656 - DNA, 25 bp, Homo sapien
cctaagtggaatctgatcattatct

SEQ ID NO: 128657 - DNA, 25 bp, Homo sapien
tgagaaaccagatatgcaaatgtgc

SEQ ID NO: 128658 - DNA, 25 bp, Homo sapien
ccagatatgcaaatgtgccaaaatt

SEQ ID NO: 128659 - DNA, 25 bp, Homo sapien
ctgttctggattgagaaaccagata

SEQ ID NO: 128660 - DNA, 25 bp, Homo sapien
tagtctgttctggattgagaaacca

SEQ ID NO: 128661 - DNA, 25 bp, Homo sapien
aggcctgattacaactgctcacgat

SEQ ID NO: 128662 - DNA, 25 bp, Homo sapien
ggcctgattacaactgctcacgatc

SEQ ID NO: 128663 - DNA, 25 bp, Homo sapien
tgattacaactgctcacgatcctca

SEQ ID NO: 128664 - DNA, 25 bp, Homo sapien
cctgattacaactgctcacgatcct

SEQ ID NO: 128665 - DNA, 25 bp, Homo sapien
aagggtcggcctggtctgtggaagt

SEQ ID NO: 128666 - DNA, 25 bp, Homo sapien
ccggagccccatgctgatttccttt

SEQ ID NO: 128667 - DNA, 25 bp, Homo sapien
gcagggcccacggacggttccaatc

SEQ ID NO: 128668 - DNA, 25 bp, Homo sapien
tccactgttccaccaagccccggag

SEQ ID NO: 128669 - DNA, 25 bp, Homo sapien
cagttatcatgggtgccccttggac

SEQ ID NO: 128670 - DNA, 25 bp, Homo sapien
tcagggtgcaatctggtcatcacag

SEQ ID NO: 128671 - DNA, 25 bp, Homo sapien
cagaagagacccttatccttggagg

SEQ ID NO: 128672 - DNA, 25 bp, Homo sapien
ccaggatggatggtttgcccagtta

SEQ ID NO: 128673 - DNA, 25 bp, Homo sapien
ccaactgtcctgtgggattctagga

SEQ ID NO: 128674 - DNA, 25 bp, Homo sapien
tcacctggagttgtaaagtgaacat

SEQ ID NO: 128675 - DNA, 25 bp, Homo sapien
gcgtttatggtcttgtttgcctgct

SEQ ID NO: 128676 - DNA, 25 bp, Homo sapien
gattctaggactatcaagggactgt

SEQ ID NO: 128677 - DNA, 25 bp, Homo sapien
tatgctgctgcgtgactaatggagc

SEQ ID NO: 128678 - DNA, 25 bp, Homo sapien
aaaataacaggcatattttgggcga

SEQ ID NO: 128679 - DNA, 25 bp, Homo sapien
tcctttgtgacaggatatgctgctg

SEQ ID NO: 128680 - DNA, 25 bp, Homo sapien
tattttgggcgattactcaactggg

SEQ ID NO: 128681 - DNA, 25 bp, Homo sapien
gacgctagaactgtaccctttcaga

SEQ ID NO: 128682 - DNA, 25 bp, Homo sapien
taaacagtgcgaggcttggattcct

SEQ ID NO: 128683 - DNA, 25 bp, Homo sapien
tccctagcgtagatctgatggtgcc

SEQ ID NO: 128684 - DNA, 25 bp, Homo sapien
tgctgacagggtagcgtttcccaaa

SEQ ID NO: 128685 - DNA, 25 bp, Homo sapien
gccagtgcaattgccgagtcaaagg

SEQ ID NO: 128686 - DNA, 25 bp, Homo sapien
cattgctgctatgaggatccttaga

SEQ ID NO: 128687 - DNA, 25 bp, Homo sapien
ccttagacatatgcctggagccgta

SEQ ID NO: 128688 - DNA, 25 bp, Homo sapien
gttgctctgggaaccaaccagctcc

SEQ ID NO: 128689 - DNA, 25 bp, Homo sapien
gagcagatgtagtactgacttcccc

SEQ ID NO: 128690 - DNA, 25 bp, Homo sapien
cttggtgatgtcctcattggccttt

SEQ ID NO: 128691 - DNA, 25 bp, Homo sapien
agagcagatgtagtactgacttccc

SEQ ID NO: 128692 - DNA, 25 bp, Homo sapien
cctgtgtgttctgcaccgtcagttt

SEQ ID NO: 128693 - DNA, 25 bp, Homo sapien
tctgcaccgtcagtttcactgggat

SEQ ID NO: 128694 - DNA, 25 bp, Homo sapien
gcaccgtcagtttcactgggatcct

SEQ ID NO: 128695 - DNA, 25 bp, Homo sapien
tgttctgcaccgtcagtttcactgg

SEQ ID NO: 128696 - DNA, 25 bp, Homo sapien
ggtggttcctcaagggctttcatga

SEQ ID NO: 128697 - DNA, 25 bp, Homo sapien
acaaatgatatttccactgtactta

SEQ ID NO: 128698 - DNA, 25 bp, Homo sapien
tggtggttcctcaagggctttcatg

SEQ ID NO: 128699 - DNA, 25 bp, Homo sapien
ctgtgatgtcgtgagggtggcgcca

SEQ ID NO: 128700 - DNA, 25 bp, Homo sapien
acccgcaccactatcaaagccatct

SEQ ID NO: 128701 - DNA, 25 bp, Homo sapien
tggcgccatcaacactacagcccac

SEQ ID NO: 128702 - DNA, 25 bp, Homo sapien
tgtagcccttaactagctggccact

SEQ ID NO: 128703 - DNA, 25 bp, Homo sapien
acaacaacaaaccatgtgccatggt

SEQ ID NO: 128704 - DNA, 25 bp, Homo sapien
caacaacaaaccatgtgccatggtg

SEQ ID NO: 128705 - DNA, 25 bp, Homo sapien
aacaacaaaccatgtgccatggtgg

SEQ ID NO: 128706 - DNA, 25 bp, Homo sapien
tacacatctatgtactgtaacacta

SEQ ID NO: 128707 - DNA, 25 bp, Homo sapien
cttatcaatggaaacgaacttcttc

SEQ ID NO: 128708 - DNA, 25 bp, Homo sapien
gtactgtaacactacttatcaatgg

SEQ ID NO: 128709 - DNA, 25 bp, Homo sapien
gcccagaactgggaacaactcaaat

SEQ ID NO: 128710 - DNA, 25 bp, Homo sapien
gatggtgcctcttgatgcatcctca

SEQ ID NO: 128711 - DNA, 25 bp, Homo sapien
tggcaacagggaccaacagctccct

SEQ ID NO: 128712 - DNA, 25 bp, Homo sapien
atcctcacatggcaacagggaccaa

SEQ ID NO: 128713 - DNA, 25 bp, Homo sapien
acctctgttgtaagggtgctaatcc

SEQ ID NO: 128714 - DNA, 25 bp, Homo sapien
cctggctccgatgggtgggtctcat

SEQ ID NO: 128715 - DNA, 25 bp, Homo sapien
gaagatagaatagtgtaaaccgaca

SEQ ID NO: 128716 - DNA, 25 bp, Homo sapien
tggcgagggtcatcaccgtgaagta

SEQ ID NO: 128717 - DNA, 25 bp, Homo sapien
caaacccctatctggtatagcagag

SEQ ID NO: 128718 - DNA, 25 bp, Homo sapien
taactgtcagtgcctttgtctgcat

SEQ ID NO: 128719 - DNA, 25 bp, Homo sapien
aacagactgttgtaagttcctcggg

SEQ ID NO: 128720 - DNA, 25 bp, Homo sapien
atttggtgcctgagttcacaatctc

SEQ ID NO: 128721 - DNA, 25 bp, Homo sapien
ctctgtaaaacagactgttgtaagt

SEQ ID NO: 128722 - DNA, 25 bp, Homo sapien
tggatttggtgcctgagttcacaat

SEQ ID NO: 128723 - DNA, 25 bp, Homo sapien
ctggaggagggcagaaatcctgaga

SEQ ID NO: 128724 - DNA, 25 bp, Homo sapien
gagggcagaaatcctgagatactgg

SEQ ID NO: 128725 - DNA, 25 bp, Homo sapien
gaggagggcagaaatcctgagatac

SEQ ID NO: 128726 - DNA, 25 bp, Homo sapien
ggagggcagaaatcctgagatactg

SEQ ID NO: 128727 - DNA, 25 bp, Homo sapien
gcccacccggctgactacatccttg

SEQ ID NO: 128728 - DNA, 25 bp, Homo sapien
tgactacatccttgccacttggctt

SEQ ID NO: 128729 - DNA, 25 bp, Homo sapien
cggctgactacatccttgccacttg

SEQ ID NO: 128730 - DNA, 25 bp, Homo sapien
acatggacaccattccaccggctct

SEQ ID NO: 128731 - DNA, 25 bp, Homo sapien
ttcctgacgctggaaaaacaaattc

SEQ ID NO: 128732 - DNA, 25 bp, Homo sapien
tgacagctgcagaggggcccctctt

SEQ ID NO: 128733 - DNA, 25 bp, Homo sapien
ccttcctgacgctggaaaaacaaat

SEQ ID NO: 128734 - DNA, 25 bp, Homo sapien
ctgcttagccagccaattgctagct

SEQ ID NO: 128735 - DNA, 25 bp, Homo sapien
tgggtgttcatgacacgcatgcgcc

SEQ ID NO: 128736 - DNA, 25 bp, Homo sapien
gcacctgggtgttcatgacacgcat

SEQ ID NO: 128737 - DNA, 25 bp, Homo sapien
gtgttcatgacacgcatgcgccctc

SEQ ID NO: 128738 - DNA, 25 bp, Homo sapien
tccagcacctgggtgttcatgacac

SEQ ID NO: 128739 - DNA, 25 bp, Homo sapien
tcaggagccgaatggatctggctct

SEQ ID NO: 128740 - DNA, 25 bp, Homo sapien
tttagcaccttggttcatgaattct

SEQ ID NO: 128741 - DNA, 25 bp, Homo sapien
gccgaatggatctggctctttagca

SEQ ID NO: 128742 - DNA, 25 bp, Homo sapien
tggatctggctctttagcaccttgg

SEQ ID NO: 128743 - DNA, 25 bp, Homo sapien
cagtgggcacaaatggactctgcaa

SEQ ID NO: 128744 - DNA, 25 bp, Homo sapien
tgaaagctggtaggctgggaccacc

SEQ ID NO: 128745 - DNA, 25 bp, Homo sapien
gacccagaagttgatgactcacagc

SEQ ID NO: 128746 - DNA, 25 bp, Homo sapien
gtttccacatctctcgaatgcgagg

SEQ ID NO: 128747 - DNA, 25 bp, Homo sapien
aagaccttaagaagtgctttgttgc

SEQ ID NO: 128748 - DNA, 25 bp, Homo sapien
caaacgtgtaatttatgaccggaca

SEQ ID NO: 128749 - DNA, 25 bp, Homo sapien
catcctatccaaggtcaaacgtgta

SEQ ID NO: 128750 - DNA, 25 bp, Homo sapien
tagcagagcaggacgctaaagacct

SEQ ID NO: 128751 - DNA, 25 bp, Homo sapien
cttgtgtgaatggatctctgtagga

SEQ ID NO: 128752 - DNA, 25 bp, Homo sapien
acgtatctttgagcccttgtgtgaa

SEQ ID NO: 128753 - DNA, 25 bp, Homo sapien
ttaaactgttgcgtagtataccaca

SEQ ID NO: 128754 - DNA, 25 bp, Homo sapien
gggcttcttttcacgtcagttcatg

SEQ ID NO: 128755 - DNA, 25 bp, Homo sapien
tgcaaggcaagattgtgaggacgct

SEQ ID NO: 128756 - DNA, 25 bp, Homo sapien
tgaggacgctcggtaaattgccaag

SEQ ID NO: 128757 - DNA, 25 bp, Homo sapien
gaccaaggtccgtaacgtgtgcaag

SEQ ID NO: 128758 - DNA, 25 bp, Homo sapien
cgtgtgcaagcctcccctggagaaa

SEQ ID NO: 128759 - DNA, 25 bp, Homo sapien
agggcaaggatggctggccgcaggg

SEQ ID NO: 128760 - DNA, 25 bp, Homo sapien
gcaaggaagcagggagacacagtaa

SEQ ID NO: 128761 - DNA, 25 bp, Homo sapien
ggcaaggaagcagggagacacagta

SEQ ID NO: 128762 - DNA, 25 bp, Homo sapien
gaagccatgaaaggtctggaatttg

SEQ ID NO: 128763 - DNA, 25 bp, Homo sapien
tgaagaagccatgaaaggtctggaa

SEQ ID NO: 128764 - DNA, 25 bp, Homo sapien
ttggtaggatgggtcaccaaactgg

SEQ ID NO: 128765 - DNA, 25 bp, Homo sapien
aaagcagagcttggtaggatgggtc

SEQ ID NO: 128766 - DNA, 25 bp, Homo sapien
caggactctcagtgcagagaggcag

SEQ ID NO: 128767 - DNA, 25 bp, Homo sapien
cctgagatctactatgtgtctgtgg

SEQ ID NO: 128768 - DNA, 25 bp, Homo sapien
taacagttatgtgccagccaccatg

SEQ ID NO: 128769 - DNA, 25 bp, Homo sapien
tgcagctatgactatgacacagtcc

SEQ ID NO: 128770 - DNA, 25 bp, Homo sapien
cccacatagggccagtgtcttagca

SEQ ID NO: 128771 - DNA, 25 bp, Homo sapien
cccagtgttgagtcagggaacttgg

SEQ ID NO: 128772 - DNA, 25 bp, Homo sapien
ccgccaaccaccgactctgggtggt

SEQ ID NO: 128773 - DNA, 25 bp, Homo sapien
tgggtgcccagtgttgagtcaggga

SEQ ID NO: 128774 - DNA, 25 bp, Homo sapien
gagcatgaaatgagacagccacggg

SEQ ID NO: 128775 - DNA, 25 bp, Homo sapien
agcatgaaatgagacagccacggga

SEQ ID NO: 128776 - DNA, 25 bp, Homo sapien
agagcatgaaatgagacagccacgg

SEQ ID NO: 128777 - DNA, 25 bp, Homo sapien
ccctggagctgtgtatcttggtgtc

SEQ ID NO: 128778 - DNA, 25 bp, Homo sapien
tgtgtatcttggtgtccctgcatca

SEQ ID NO: 128779 - DNA, 25 bp, Homo sapien
ctccctggagctgtgtatcttggtg

SEQ ID NO: 128780 - DNA, 25 bp, Homo sapien
gagctgtgtatcttggtgtccctgc

SEQ ID NO: 128781 - DNA, 25 bp, Homo sapien
aaacaatgtgcccacacttgaatgg

SEQ ID NO: 128782 - DNA, 25 bp, Homo sapien
gaaaccccttcagcagcgtatggtg

SEQ ID NO: 128783 - DNA, 25 bp, Homo sapien
tgcccacacttgaatggaaacccct

SEQ ID NO: 128784 - DNA, 25 bp, Homo sapien
tgacacctgcaacccaaacaatgtg

SEQ ID NO: 128785 - DNA, 25 bp, Homo sapien
tgttttctgagagatactgtccatt

SEQ ID NO: 128786 - DNA, 25 bp, Homo sapien
catcggtgttccctcttttggtgcc

SEQ ID NO: 128787 - DNA, 25 bp, Homo sapien
cattatgattaaactgcattctagc

SEQ ID NO: 128788 - DNA, 25 bp, Homo sapien
ggttgctggcatcggtgttccctct

SEQ ID NO: 128789 - DNA, 25 bp, Homo sapien
gcagctttatagtctgcttgaaact

SEQ ID NO: 128790 - DNA, 25 bp, Homo sapien
taggggcctgcaccaggtctgccat

SEQ ID NO: 128791 - DNA, 25 bp, Homo sapien
ttgaaggctgggtttaggggcctgc

SEQ ID NO: 128792 - DNA, 25 bp, Homo sapien
gaaggctgggtttaggggcctgcac

SEQ ID NO: 128793 - DNA, 25 bp, Homo sapien
gtttaggggcctgcaccaggtctgc

SEQ ID NO: 128794 - DNA, 25 bp, Homo sapien
gcctcttccgaaggtctgcagcaga

SEQ ID NO: 128795 - DNA, 25 bp, Homo sapien
ctcaactcatttccctggtcatcag

SEQ ID NO: 128796 - DNA, 25 bp, Homo sapien
tctgcagcagacattgggcaggcca

SEQ ID NO: 128797 - DNA, 25 bp, Homo sapien
tgagactcgaagacctacctctact

SEQ ID NO: 128798 - DNA, 25 bp, Homo sapien
atggtggagctggttttacttggtt

SEQ ID NO: 128799 - DNA, 25 bp, Homo sapien
gtttgactttgccagtaaggttctc

SEQ ID NO: 128800 - DNA, 25 bp, Homo sapien
aggttctccccttgtataccttgca

SEQ ID NO: 128801 - DNA, 25 bp, Homo sapien
gttctccccttgtataccttgcaag

SEQ ID NO: 128802 - DNA, 25 bp, Homo sapien
taaagttccccagttcatatgtgac

SEQ ID NO: 128803 - DNA, 25 bp, Homo sapien
ccttggaagagttgttgccagacca

SEQ ID NO: 128804 - DNA, 25 bp, Homo sapien
gaataccgtaggtctatccttagag

SEQ ID NO: 128805 - DNA, 25 bp, Homo sapien
gactacattacctcttcagcgccag

SEQ ID NO: 128806 - DNA, 25 bp, Homo sapien
tgtccgagtcccctcacatgtttga

SEQ ID NO: 128807 - DNA, 25 bp, Homo sapien
tcaggattctctctcggaccaggag

SEQ ID NO: 128808 - DNA, 25 bp, Homo sapien
catctcagatgactaagccagggta

SEQ ID NO: 128809 - DNA, 25 bp, Homo sapien
gaccttggacaactcaagacgcctg

SEQ ID NO: 128810 - DNA, 25 bp, Homo sapien
ccccaagtacaagacggagctgtgc

SEQ ID NO: 128811 - DNA, 25 bp, Homo sapien
acaccatcggcttttgcccctacgg

SEQ ID NO: 128812 - DNA, 25 bp, Homo sapien
ccgcctccagcatagctttagcttt

SEQ ID NO: 128813 - DNA, 25 bp, Homo sapien
tcatccacaacgctgaagagcgccg

SEQ ID NO: 128814 - DNA, 25 bp, Homo sapien
ggaagtttcaaggagaccgccagct

SEQ ID NO: 128815 - DNA, 25 bp, Homo sapien
gcaaaaagagaaagtcgagcccgcc

SEQ ID NO: 128816 - DNA, 25 bp, Homo sapien
taaaatcctaggcttgaacattctg

SEQ ID NO: 128817 - DNA, 25 bp, Homo sapien
cgcgtgcggcgcactaaattgtgcc

SEQ ID NO: 128818 - DNA, 25 bp, Homo sapien
cacccacttgggaaaggaacgagca

SEQ ID NO: 128819 - DNA, 25 bp, Homo sapien
taaccttgtggtttcaacgcgcact

SEQ ID NO: 128820 - DNA, 25 bp, Homo sapien
ccccgctgggatcacgtaggttcgt

SEQ ID NO: 128821 - DNA, 25 bp, Homo sapien
gaggagacaaatgaaagccgacccc

SEQ ID NO: 128822 - DNA, 25 bp, Homo sapien
aaatccactttgtagccattctggg

SEQ ID NO: 128823 - DNA, 25 bp, Homo sapien
aaacaactcgggagcgagcgggcta

SEQ ID NO: 128824 - DNA, 25 bp, Homo sapien
tggaaaagccgaggaaattcgagga

SEQ ID NO: 128825 - DNA, 25 bp, Homo sapien
gagcttcgcgaaccctcgggagtta

SEQ ID NO: 128826 - DNA, 25 bp, Homo sapien
tcggttatctaattgactgctgtgg

SEQ ID NO: 128827 - DNA, 25 bp, Homo sapien
ccatcagtcacttggtagccatctc

SEQ ID NO: 128828 - DNA, 25 bp, Homo sapien
cagtgtacccacaccatatctgcta

SEQ ID NO: 128829 - DNA, 25 bp, Homo sapien
tggcaatttggagagaacaaagcag

SEQ ID NO: 128830 - DNA, 25 bp, Homo sapien
gccccaagggtgtcctgcaaagtaa

SEQ ID NO: 128831 - DNA, 25 bp, Homo sapien
aattcattaccactagacttgtcct

SEQ ID NO: 128832 - DNA, 25 bp, Homo sapien
tcaaacaagaatcctgtatctggaa

SEQ ID NO: 128833 - DNA, 25 bp, Homo sapien
cagtagatagtaacttgaaaccata

SEQ ID NO: 128834 - DNA, 25 bp, Homo sapien
aaactggcacttgggttcccatggg

SEQ ID NO: 128835 - DNA, 25 bp, Homo sapien
aactggcacttgggttcccatgggc

SEQ ID NO: 128836 - DNA, 25 bp, Homo sapien
cttccttggtgacccagccaaggaa

SEQ ID NO: 128837 - DNA, 25 bp, Homo sapien
gggcactgtgcacggtacttcccca

SEQ ID NO: 128838 - DNA, 25 bp, Homo sapien
cagacaagagcaggccctggtttgg

SEQ ID NO: 128839 - DNA, 25 bp, Homo sapien
tggtcagacaagagcaggccctggt

SEQ ID NO: 128840 - DNA, 25 bp, Homo sapien
cagttggtgggagaaactcagcact

SEQ ID NO: 128841 - DNA, 25 bp, Homo sapien
tgtggcaaagacccgtcctctctca

SEQ ID NO: 128842 - DNA, 25 bp, Homo sapien
ctctggcaagtgtggttgagggctg

SEQ ID NO: 128843 - DNA, 25 bp, Homo sapien
ttgagggctgtttccataggcacac

SEQ ID NO: 128844 - DNA, 25 bp, Homo sapien
ttatcttttctaggctctgtgctga

SEQ ID NO: 128845 - DNA, 25 bp, Homo sapien
catcttcatcaatgcacagtgttcc

SEQ ID NO: 128846 - DNA, 25 bp, Homo sapien
gagccacggcggcagaagaggtctt

SEQ ID NO: 128847 - DNA, 25 bp, Homo sapien
ggtcttgggcgcctgaagattctcc

SEQ ID NO: 128848 - DNA, 25 bp, Homo sapien
gaggaggccacagccggcaggcaga

SEQ ID NO: 128849 - DNA, 25 bp, Homo sapien
agaagaggtcttgggcgcctgaaga

SEQ ID NO: 128850 - DNA, 25 bp, Homo sapien
acagggctcctgctcaaattctcca

SEQ ID NO: 128851 - DNA, 25 bp, Homo sapien
cacagggctcctgctcaaattctcc

SEQ ID NO: 128852 - DNA, 25 bp, Homo sapien
gcacagggctcctgctcaaattctc

SEQ ID NO: 128853 - DNA, 25 bp, Homo sapien
ccggccggggcagagcgccaaggag

SEQ ID NO: 128854 - DNA, 25 bp, Homo sapien
ggccggggcagagcgccaaggaggg

SEQ ID NO: 128855 - DNA, 25 bp, Homo sapien
cggccggggcagagcgccaaggagg

SEQ ID NO: 128856 - DNA, 25 bp, Homo sapien
gaggacgggaacgaagccgtagcga

SEQ ID NO: 128857 - DNA, 25 bp, Homo sapien
tgtgcacgtctggatggcctcgggc

SEQ ID NO: 128858 - DNA, 25 bp, Homo sapien
gctcgccggccccttgcgttccgag

SEQ ID NO: 128859 - DNA, 25 bp, Homo sapien
aacgaagccgtagcgagaacctcgc

SEQ ID NO: 128860 - DNA, 25 bp, Homo sapien
gggcccagacgtgttgttcggcgag

SEQ ID NO: 128861 - DNA, 25 bp, Homo sapien
ttcaaatgtagcaaagggcagagag

SEQ ID NO: 128862 - DNA, 25 bp, Homo sapien
agagagggtggacacgtcacccaga

SEQ ID NO: 128863 - DNA, 25 bp, Homo sapien
cccagacgtgttgttcggcgagctg

SEQ ID NO: 128864 - DNA, 25 bp, Homo sapien
ttgaagaaagccatgctaaagggct

SEQ ID NO: 128865 - DNA, 25 bp, Homo sapien
gaccttctgatgtagatctatcact

SEQ ID NO: 128866 - DNA, 25 bp, Homo sapien
tcttccatcttgcaatgaccttctg

SEQ ID NO: 128867 - DNA, 25 bp, Homo sapien
ggttagttgcacaacgcttccagac

SEQ ID NO: 128868 - DNA, 25 bp, Homo sapien
ttgccacgaggcctgttacatgctg

SEQ ID NO: 128869 - DNA, 25 bp, Homo sapien
aggcctgttacatgctggcagcttt

SEQ ID NO: 128870 - DNA, 25 bp, Homo sapien
cttgccacgaggcctgttacatgct

SEQ ID NO: 128871 - DNA, 25 bp, Homo sapien
acgaggcctgttacatgctggcagc

SEQ ID NO: 128872 - DNA, 25 bp, Homo sapien
gaggaccgaaatgacacactgaatt

SEQ ID NO: 128873 - DNA, 25 bp, Homo sapien
cctggagaattatccaggacccaca

SEQ ID NO: 128874 - DNA, 25 bp, Homo sapien
tggagaattatccaggacccacaga

SEQ ID NO: 128875 - DNA, 25 bp, Homo sapien
ctggagaattatccaggacccacag

SEQ ID NO: 128876 - DNA, 25 bp, Homo sapien
ggagaattatccaggacccacagac

SEQ ID NO: 128877 - DNA, 25 bp, Homo sapien
gcgtgtctggagaatattgggtact

SEQ ID NO: 128878 - DNA, 25 bp, Homo sapien
aacatgcaggggtctgcaagggcaa

SEQ ID NO: 128879 - DNA, 25 bp, Homo sapien
ccagggagggcgtgtctggagaata

SEQ ID NO: 128880 - DNA, 25 bp, Homo sapien
aatattgggtactccgggttgcgag

SEQ ID NO: 128881 - DNA, 25 bp, Homo sapien
tagcactgtcgcagtgtccactcat

SEQ ID NO: 128882 - DNA, 25 bp, Homo sapien
catgggtactaatactcgtggagcc

SEQ ID NO: 128883 - DNA, 25 bp, Homo sapien
cgtggagccataagtaaaagccaca

SEQ ID NO: 128884 - DNA, 25 bp, Homo sapien
cgcagtgtccactcatcatgggtac

SEQ ID NO: 128885 - DNA, 25 bp, Homo sapien
tgaagttgacgtcactgaccacaga

SEQ ID NO: 128886 - DNA, 25 bp, Homo sapien
gaagtgcatagtgttggctctcacg

SEQ ID NO: 128887 - DNA, 25 bp, Homo sapien
ccacagagttgaggagaagtgcata

SEQ ID NO: 128888 - DNA, 25 bp, Homo sapien
tctcacgaagtggtttgggctggct

SEQ ID NO: 128889 - DNA, 25 bp, Homo sapien
ttttgtccctgggaagcccgctgaa

SEQ ID NO: 128890 - DNA, 25 bp, Homo sapien
aaacccagacaactgagagaccctt

SEQ ID NO: 128891 - DNA, 25 bp, Homo sapien
ctgggaagcccgctgaaaacccaga

SEQ ID NO: 128892 - DNA, 25 bp, Homo sapien
gaaaacccagacaactgagagaccc

SEQ ID NO: 128893 - DNA, 25 bp, Homo sapien
cattaaactcttgtgcacgtaagcc

SEQ ID NO: 128894 - DNA, 25 bp, Homo sapien
taaactcttgtgcacgtaagcctct

SEQ ID NO: 128895 - DNA, 25 bp, Homo sapien
gctgaaattcggactccaaaaactc

SEQ ID NO: 128896 - DNA, 25 bp, Homo sapien
tttccatccagctgaaattcggact

SEQ ID NO: 128897 - DNA, 25 bp, Homo sapien
tcggccagccctgtcagggggaggc

SEQ ID NO: 128898 - DNA, 25 bp, Homo sapien
aatttcaagctcctgtcggccagcc

SEQ ID NO: 128899 - DNA, 25 bp, Homo sapien
gccagccctgtcagggggaggccac

SEQ ID NO: 128900 - DNA, 25 bp, Homo sapien
gccctgtcagggggaggccacaaac

SEQ ID NO: 128901 - DNA, 25 bp, Homo sapien
cactttgtcatcccagcaccaccac

SEQ ID NO: 128902 - DNA, 25 bp, Homo sapien
actttgtcatcccagcaccaccacc

SEQ ID NO: 128903 - DNA, 25 bp, Homo sapien
ctcgaaggccttcgggatcctttga

SEQ ID NO: 128904 - DNA, 25 bp, Homo sapien
actcgaaggccttcgggatcctttg

SEQ ID NO: 128905 - DNA, 25 bp, Homo sapien
gtcccgctctagacctttgagatgg

SEQ ID NO: 128906 - DNA, 25 bp, Homo sapien
agtgacttcacctggaagtcccgct

SEQ ID NO: 128907 - DNA, 25 bp, Homo sapien
ttcacctggaagtcccgctctagac

SEQ ID NO: 128908 - DNA, 25 bp, Homo sapien
tggaagtcccgctctagacctttga

SEQ ID NO: 128909 - DNA, 25 bp, Homo sapien
gacaaagaaggtctttgaaaccagc

SEQ ID NO: 128910 - DNA, 25 bp, Homo sapien
acaaagaaggtctttgaaaccagct

SEQ ID NO: 128911 - DNA, 25 bp, Homo sapien
tacaggacaaagaaggtctttgaaa

SEQ ID NO: 128912 - DNA, 25 bp, Homo sapien
ctacaggacaaagaaggtctttgaa

SEQ ID NO: 128913 - DNA, 25 bp, Homo sapien
caaaaggcacattggtgcatgtgtg

SEQ ID NO: 128914 - DNA, 25 bp, Homo sapien
gggtactcttgtcaaaaggcacatt

SEQ ID NO: 128915 - DNA, 25 bp, Homo sapien
ttttaaatcccctcagaggtgtgac

SEQ ID NO: 128916 - DNA, 25 bp, Homo sapien
gactagtctctttatcagcacacac

SEQ ID NO: 128917 - DNA, 25 bp, Homo sapien
ctttctgtctgggaacctcataaca

SEQ ID NO: 128918 - DNA, 25 bp, Homo sapien
cagtgaagccatatggtgtttgctg

SEQ ID NO: 128919 - DNA, 25 bp, Homo sapien
cattattgtacaactgttcctacca

SEQ ID NO: 128920 - DNA, 25 bp, Homo sapien
ggtattccgtacactcacattattg

SEQ ID NO: 128921 - DNA, 25 bp, Homo sapien
tcgctcaccttggcctcccaaagtg

SEQ ID NO: 128922 - DNA, 25 bp, Homo sapien
cgctcaccttggcctcccaaagtgc

SEQ ID NO: 128923 - DNA, 25 bp, Homo sapien
ctgggataacaggcacccaggctaa

SEQ ID NO: 128924 - DNA, 25 bp, Homo sapien
ataacaggcacccaggctaattttt

SEQ ID NO: 128925 - DNA, 25 bp, Homo sapien
ttttgattcctagcgtggggcatgg

SEQ ID NO: 128926 - DNA, 25 bp, Homo sapien
agaagtagagctctggagtcttttg

SEQ ID NO: 128927 - DNA, 25 bp, Homo sapien
tccctctagaagtagagctctggag

SEQ ID NO: 128928 - DNA, 25 bp, Homo sapien
gagtcttttgattcctagcgtgggg

SEQ ID NO: 128929 - DNA, 25 bp, Homo sapien
caacccaagcatttggatgtgggac

SEQ ID NO: 128930 - DNA, 25 bp, Homo sapien
actacacccggctggtcatggaaca

SEQ ID NO: 128931 - DNA, 25 bp, Homo sapien
tcatggaacagcatacagttttgcc

SEQ ID NO: 128932 - DNA, 25 bp, Homo sapien
gaagggttacatcctattccaagtc

SEQ ID NO: 128933 - DNA, 25 bp, Homo sapien
ggcagcttcaattcccgtaacagtt

SEQ ID NO: 128934 - DNA, 25 bp, Homo sapien
gcttcaattcccgtaacagttcctc

SEQ ID NO: 128935 - DNA, 25 bp, Homo sapien
ttgtcatcttgattaggcctaatcg

SEQ ID NO: 128936 - DNA, 25 bp, Homo sapien
gattaggcctaatcggcagcttcaa

SEQ ID NO: 128937 - DNA, 25 bp, Homo sapien
aacataggctttgtcaaagcccctt

SEQ ID NO: 128938 - DNA, 25 bp, Homo sapien
tggccaaggacaacataggctttgt

SEQ ID NO: 128939 - DNA, 25 bp, Homo sapien
ttgcccaggacttcacccggccagg

SEQ ID NO: 128940 - DNA, 25 bp, Homo sapien
ttcttgcccaggacttcacccggcc

SEQ ID NO: 128941 - DNA, 25 bp, Homo sapien
gaaggaggaggcatacaagagcgag

SEQ ID NO: 128942 - DNA, 25 bp, Homo sapien
gtcctaccactcttaaaggcatcag

SEQ ID NO: 128943 - DNA, 25 bp, Homo sapien
cctggagtacatcagaggtgagtac

SEQ ID NO: 128944 - DNA, 25 bp, Homo sapien
ttctgggattgcttggcgttggcac

SEQ ID NO: 128945 - DNA, 25 bp, Homo sapien
tgctgctccctgcttgctgatacct

SEQ ID NO: 128946 - DNA, 25 bp, Homo sapien
tcttcccacgcttctggaaatggaa

SEQ ID NO: 128947 - DNA, 25 bp, Homo sapien
caaggtgttggcgagctgctcagcc

SEQ ID NO: 128948 - DNA, 25 bp, Homo sapien
aaccgggctggccataccaaggtgt

SEQ ID NO: 128949 - DNA, 25 bp, Homo sapien
gggtcaggacagcagaccgttttat

SEQ ID NO: 128950 - DNA, 25 bp, Homo sapien
tgggttggaagctgtaaccccgaca

SEQ ID NO: 128951 - DNA, 25 bp, Homo sapien
ggatccctacttagccacggagctg

SEQ ID NO: 128952 - DNA, 25 bp, Homo sapien
cgacatgggcttgcgctacgtcctg

SEQ ID NO: 128953 - DNA, 25 bp, Homo sapien
cccgagggcgagctagaagagttcc

SEQ ID NO: 128954 - DNA, 25 bp, Homo sapien
gaaggtagttttggtcgcagcagcc

SEQ ID NO: 128955 - DNA, 25 bp, Homo sapien
tctgagagcagttcgctggcgagaa

SEQ ID NO: 128956 - DNA, 25 bp, Homo sapien
cggcggtggagtcgtgaaattccca

SEQ ID NO: 128957 - DNA, 25 bp, Homo sapien
gaaccgggatcccatagaggagcct

SEQ ID NO: 128958 - DNA, 25 bp, Homo sapien
tgtttgtcaggcataaggttaccgg

SEQ ID NO: 128959 - DNA, 25 bp, Homo sapien
ggcattagcgcgtttagactctcct

SEQ ID NO: 128960 - DNA, 25 bp, Homo sapien
taccggattggcctgtgaagtccag

SEQ ID NO: 128961 - DNA, 25 bp, Homo sapien
tgtgtggttgacgaatgatgcagcc

SEQ ID NO: 128962 - DNA, 25 bp, Homo sapien
tttagagccacagtttagaagcggt

SEQ ID NO: 128963 - DNA, 25 bp, Homo sapien
taccctctgtgttaggtttagagcc

SEQ ID NO: 128964 - DNA, 25 bp, Homo sapien
tccatgggtggctttcaggtatcca

SEQ ID NO: 128965 - DNA, 25 bp, Homo sapien
ctctaacagcagcacctggattttg

SEQ ID NO: 128966 - DNA, 25 bp, Homo sapien
acagcagcacctggattttgctcat

SEQ ID NO: 128967 - DNA, 25 bp, Homo sapien
ctctctaacagcagcacctggattt

SEQ ID NO: 128968 - DNA, 25 bp, Homo sapien
taacagcagcacctggattttgctc

SEQ ID NO: 128969 - DNA, 25 bp, Homo sapien
ggtcagggactgtgtcagtcactag

SEQ ID NO: 128970 - DNA, 25 bp, Homo sapien
gtgtgccactatcctgcaagctcca

SEQ ID NO: 128971 - DNA, 25 bp, Homo sapien
tgtgtgccactatcctgcaagctcc

SEQ ID NO: 128972 - DNA, 25 bp, Homo sapien
ctgtgtgccactatcctgcaagctc

SEQ ID NO: 128973 - DNA, 25 bp, Homo sapien
gggactcttacgacaacatgcagca

SEQ ID NO: 128974 - DNA, 25 bp, Homo sapien
cagcatgactccagcggggactctt

SEQ ID NO: 128975 - DNA, 25 bp, Homo sapien
gcagtagcaaggaactgaatatggt

SEQ ID NO: 128976 - DNA, 25 bp, Homo sapien
tacgacaacatgcagcagtagcaag

SEQ ID NO: 128977 - DNA, 25 bp, Homo sapien
ctcattgattcctggaatttggtgc

SEQ ID NO: 128978 - DNA, 25 bp, Homo sapien
tcattgattcctggaatttggtgcc

SEQ ID NO: 128979 - DNA, 25 bp, Homo sapien
attgattcctggaatttggtgccaa

SEQ ID NO: 128980 - DNA, 25 bp, Homo sapien
cattgattcctggaatttggtgcca

SEQ ID NO: 128981 - DNA, 25 bp, Homo sapien
tcccttgggaactagctacttggta

SEQ ID NO: 128982 - DNA, 25 bp, Homo sapien
cctaggctcagcttaccgggtgata

SEQ ID NO: 128983 - DNA, 25 bp, Homo sapien
aattgaggccccaactttgatggca

SEQ ID NO: 128984 - DNA, 25 bp, Homo sapien
gacttctcaaaggacaatcggatac

SEQ ID NO: 128985 - DNA, 25 bp, Homo sapien
gtaaatgctggttttataagcccaa

SEQ ID NO: 128986 - DNA, 25 bp, Homo sapien
gatttgtctttgactattcacagat

SEQ ID NO: 128987 - DNA, 25 bp, Homo sapien
tttgtaatcagattggttctatgat

SEQ ID NO: 128988 - DNA, 25 bp, Homo sapien
gctggttttataagcccaagtcatt

SEQ ID NO: 128989 - DNA, 25 bp, Homo sapien
cgaacgctgactagtgtggcctcac

SEQ ID NO: 128990 - DNA, 25 bp, Homo sapien
cagtcactcggttatctatgaaggg

SEQ ID NO: 128991 - DNA, 25 bp, Homo sapien
tgctagacaactaggagcccagctg

SEQ ID NO: 128992 - DNA, 25 bp, Homo sapien
ggaatgaccagatatcttgttggca

SEQ ID NO: 128993 - DNA, 25 bp, Homo sapien
tgtttgcaaattgagcagtgctgca

SEQ ID NO: 128994 - DNA, 25 bp, Homo sapien
ttgtgctgccagtgagttgtagatt

SEQ ID NO: 128995 - DNA, 25 bp, Homo sapien
cagtgctgcaacatgtactgtatga

SEQ ID NO: 128996 - DNA, 25 bp, Homo sapien
gagaggtttagcacttaagatcaga

SEQ ID NO: 128997 - DNA, 25 bp, Homo sapien
cctttctagtgagacgtgagcgtag

SEQ ID NO: 128998 - DNA, 25 bp, Homo sapien
gccgcgcaaggctctgtggaagtaa

SEQ ID NO: 128999 - DNA, 25 bp, Homo sapien
tcttgtgtacgcacaatggcacgtg

SEQ ID NO: 129000 - DNA, 25 bp, Homo sapien
gcacgtgtgcgcttattgtctcata

SEQ ID NO: 129001 - DNA, 25 bp, Homo sapien
cgtgataactcgtccctgacaggga

SEQ ID NO: 129002 - DNA, 25 bp, Homo sapien
ccacagatagtagcagggctgttca

SEQ ID NO: 129003 - DNA, 25 bp, Homo sapien
tgtgccaaccacaacaatggacgct

SEQ ID NO: 129004 - DNA, 25 bp, Homo sapien
gagcctcgaaaccatctgtgccaac

SEQ ID NO: 129005 - DNA, 25 bp, Homo sapien
gaattttcatgactactctagtagg

SEQ ID NO: 129006 - DNA, 25 bp, Homo sapien
ccaccattctacttcgtgtctgaat

SEQ ID NO: 129007 - DNA, 25 bp, Homo sapien
atgtgatgtcctcagagttgatcca

SEQ ID NO: 129008 - DNA, 25 bp, Homo sapien
aaactctctgcccactaaacatcaa

SEQ ID NO: 129009 - DNA, 25 bp, Homo sapien
tcagaatgtggccaacttttaacct

SEQ ID NO: 129010 - DNA, 25 bp, Homo sapien
tgcactggcctcaggttaaccctac

SEQ ID NO: 129011 - DNA, 25 bp, Homo sapien
cttccacgctgatctaattgtagtc

SEQ ID NO: 129012 - DNA, 25 bp, Homo sapien
tcagtaaatagcttgccctcttgga

SEQ ID NO: 129013 - DNA, 25 bp, Homo sapien
tagaccacggggccagacagtacag

SEQ ID NO: 129014 - DNA, 25 bp, Homo sapien
gtccaagcagtgtctagaccacggg

SEQ ID NO: 129015 - DNA, 25 bp, Homo sapien
cctgtccaagcagtgtctagaccac

SEQ ID NO: 129016 - DNA, 25 bp, Homo sapien
agaccacggggccagacagtacagc

SEQ ID NO: 129017 - DNA, 25 bp, Homo sapien
cactgccgcagtttgaggttccact

SEQ ID NO: 129018 - DNA, 25 bp, Homo sapien
actgccgcagtttgaggttccactt

SEQ ID NO: 129019 - DNA, 25 bp, Homo sapien
ccactgccgcagtttgaggttccac

SEQ ID NO: 129020 - DNA, 25 bp, Homo sapien
tccactgccgcagtttgaggttcca

SEQ ID NO: 129021 - DNA, 25 bp, Homo sapien
cacatctgtattttgagtttcggac

SEQ ID NO: 129022 - DNA, 25 bp, Homo sapien
gagcatctgataagcccacattcat

SEQ ID NO: 129023 - DNA, 25 bp, Homo sapien
ttgtatcagactcagcatcattcac

SEQ ID NO: 129024 - DNA, 25 bp, Homo sapien
ttttttgtatcagactcagcatcat

SEQ ID NO: 129025 - DNA, 25 bp, Homo sapien
gacggtttttgtagctgcaagaaga

SEQ ID NO: 129026 - DNA, 25 bp, Homo sapien
ttaccactgacggtttttgtagctg

SEQ ID NO: 129027 - DNA, 25 bp, Homo sapien
cactgacggtttttgtagctgcaag

SEQ ID NO: 129028 - DNA, 25 bp, Homo sapien
ggtttttgtagctgcaagaagatcc

SEQ ID NO: 129029 - DNA, 25 bp, Homo sapien
acgtggtgactcattagctccttaa

SEQ ID NO: 129030 - DNA, 25 bp, Homo sapien
ggtatgcacgtggtgactcattagc

SEQ ID NO: 129031 - DNA, 25 bp, Homo sapien
aataaggacccctgttccattcctg

SEQ ID NO: 129032 - DNA, 25 bp, Homo sapien
cccataggtatgcacgtggtgactc

SEQ ID NO: 129033 - DNA, 25 bp, Homo sapien
tcagcttcatcgataaccagacact

SEQ ID NO: 129034 - DNA, 25 bp, Homo sapien
ctcaacatccaagatacgatcagct

SEQ ID NO: 129035 - DNA, 25 bp, Homo sapien
gcagacagcctggtgtgaccacagt

SEQ ID NO: 129036 - DNA, 25 bp, Homo sapien
ccctgggatattctgcatatggtcc

SEQ ID NO: 129037 - DNA, 25 bp, Homo sapien
ggtggcagaaaagagcatcgtctgt

SEQ ID NO: 129038 - DNA, 25 bp, Homo sapien
tgggtggcagaaaagagcatcgtct

SEQ ID NO: 129039 - DNA, 25 bp, Homo sapien
gcagaaaagagcatcgtctgtctac

SEQ ID NO: 129040 - DNA, 25 bp, Homo sapien
tggcagaaaagagcatcgtctgtct

SEQ ID NO: 129041 - DNA, 25 bp, Homo sapien
tctcttgctgccacatctgtacaca

SEQ ID NO: 129042 - DNA, 25 bp, Homo sapien
gtagaaggaatctcttttcagaagg

SEQ ID NO: 129043 - DNA, 25 bp, Homo sapien
tgcattagctttatcgtcatcaaca

SEQ ID NO: 129044 - DNA, 25 bp, Homo sapien
cagttgacttcagtaatgtccagtt

SEQ ID NO: 129045 - DNA, 25 bp, Homo sapien
aatggaaccttggatcatttcaggt

SEQ ID NO: 129046 - DNA, 25 bp, Homo sapien
tggaaccttggatcatttcaggtag

SEQ ID NO: 129047 - DNA, 25 bp, Homo sapien
gaaccttggatcatttcaggtagtg

SEQ ID NO: 129048 - DNA, 25 bp, Homo sapien
aaccttggatcatttcaggtagtga

SEQ ID NO: 129049 - DNA, 25 bp, Homo sapien
tgaggcaaatttaagttattaaaca

SEQ ID NO: 129050 - DNA, 25 bp, Homo sapien
ctgcctgcggttggatgtttgcttg

SEQ ID NO: 129051 - DNA, 25 bp, Homo sapien
agagaactgcctgcggttggatgtt

SEQ ID NO: 129052 - DNA, 25 bp, Homo sapien
accactgcctactcgctttttctgc

SEQ ID NO: 129053 - DNA, 25 bp, Homo sapien
aaatccaccactgcctactcgcttt

SEQ ID NO: 129054 - DNA, 25 bp, Homo sapien
aaacagtaacatacatttgtatgta

SEQ ID NO: 129055 - DNA, 25 bp, Homo sapien
cagtgttcagtgcttgcaaccgaat

SEQ ID NO: 129056 - DNA, 25 bp, Homo sapien
tgttcagtgcttgcaaccgaattca

SEQ ID NO: 129057 - DNA, 25 bp, Homo sapien
ttcagtgcttgcaaccgaattcaat

SEQ ID NO: 129058 - DNA, 25 bp, Homo sapien
aaatgacccaagttctatagtctag

SEQ ID NO: 129059 - DNA, 25 bp, Homo sapien
ataaaaatgacccaagttctatagt

SEQ ID NO: 129060 - DNA, 25 bp, Homo sapien
tagtctagttaatgtatcttcctat

SEQ ID NO: 129061 - DNA, 25 bp, Homo sapien
gacccaagttctatagtctagttaa

SEQ ID NO: 129062 - DNA, 25 bp, Homo sapien
cccgaactcgtacgggcgctggcct

SEQ ID NO: 129063 - DNA, 25 bp, Homo sapien
actccagccgcattttccccgaact

SEQ ID NO: 129064 - DNA, 25 bp, Homo sapien
cggccactcggattgttacgcgcat

SEQ ID NO: 129065 - DNA, 25 bp, Homo sapien
cgggaggaaggcgagccaaagcccg

SEQ ID NO: 129066 - DNA, 25 bp, Homo sapien
gcagggccggactgcccaaggcaga

SEQ ID NO: 129067 - DNA, 25 bp, Homo sapien
cgggcagggccggactgcccaaggc

SEQ ID NO: 129068 - DNA, 25 bp, Homo sapien
ctcgggcagggccggactgcccaag

SEQ ID NO: 129069 - DNA, 25 bp, Homo sapien
gggcagggccggactgcccaaggca

SEQ ID NO: 129070 - DNA, 25 bp, Homo sapien
tcttccatgttcagccgatcttttt

SEQ ID NO: 129071 - DNA, 25 bp, Homo sapien
ttccatgttcagccgatcttttttt

SEQ ID NO: 129072 - DNA, 25 bp, Homo sapien
cttccatgttcagccgatctttttt

SEQ ID NO: 129073 - DNA, 25 bp, Homo sapien
ctcttccatgttcagccgatctttt

SEQ ID NO: 129074 - DNA, 25 bp, Homo sapien
tatttgttattagtacgattaatcg

SEQ ID NO: 129075 - DNA, 25 bp, Homo sapien
tttgttattagtacgattaatcgta

SEQ ID NO: 129076 - DNA, 25 bp, Homo sapien
attagtacgattaatcgtattgtca

SEQ ID NO: 129077 - DNA, 25 bp, Homo sapien
gttattagtacgattaatcgtattg

SEQ ID NO: 129078 - DNA, 25 bp, Homo sapien
taataaagctggtatactgctacta

SEQ ID NO: 129079 - DNA, 25 bp, Homo sapien
agtaccacatagtttcctatttagg

SEQ ID NO: 129080 - DNA, 25 bp, Homo sapien
taagtaccacatagtttcctattta

SEQ ID NO: 129081 - DNA, 25 bp, Homo sapien
gctactaatttttaggtggtgatta

SEQ ID NO: 129082 - DNA, 25 bp, Homo sapien
aacacttcaggtgggtccatacaat

SEQ ID NO: 129083 - DNA, 25 bp, Homo sapien
cttctctggaacacttcaggtgggt

SEQ ID NO: 129084 - DNA, 25 bp, Homo sapien
tctggaacacttcaggtgggtccat

SEQ ID NO: 129085 - DNA, 25 bp, Homo sapien
ggaacacttcaggtgggtccataca

SEQ ID NO: 129086 - DNA, 25 bp, Homo sapien
gaagggggccaaaatggccataaga

SEQ ID NO: 129087 - DNA, 25 bp, Homo sapien
ctttgtcagttccatgtgaccccat

SEQ ID NO: 129088 - DNA, 25 bp, Homo sapien
agggggccaaaatggccataagagt

SEQ ID NO: 129089 - DNA, 25 bp, Homo sapien
tctttgtcagttccatgtgacccca

SEQ ID NO: 129090 - DNA, 25 bp, Homo sapien
atattaggggctctcttgccacgtg

SEQ ID NO: 129091 - DNA, 25 bp, Homo sapien
tatattaggggctctcttgccacgt

SEQ ID NO: 129092 - DNA, 25 bp, Homo sapien
atttatattaggggctctcttgcca

SEQ ID NO: 129093 - DNA, 25 bp, Homo sapien
ttatattaggggctctcttgccacg

SEQ ID NO: 129094 - DNA, 25 bp, Homo sapien
agggtagaggatggacagctgacat

SEQ ID NO: 129095 - DNA, 25 bp, Homo sapien
ggtggagggtagaggatggacagct

SEQ ID NO: 129096 - DNA, 25 bp, Homo sapien
gagggtagaggatggacagctgaca

SEQ ID NO: 129097 - DNA, 25 bp, Homo sapien
tggagggtagaggatggacagctga

SEQ ID NO: 129098 - DNA, 25 bp, Homo sapien
gattttgcatccaggtttgcaagag

SEQ ID NO: 129099 - DNA, 25 bp, Homo sapien
ggattttgcatccaggtttgcaaga

SEQ ID NO: 129100 - DNA, 25 bp, Homo sapien
attttgcatccaggtttgcaagagg

SEQ ID NO: 129101 - DNA, 25 bp, Homo sapien
tttgcatccaggtttgcaagaggaa

SEQ ID NO: 129102 - DNA, 25 bp, Homo sapien
caaagtctatgtcattctctaatcc

SEQ ID NO: 129103 - DNA, 25 bp, Homo sapien
ttgatccagcggattctttggagga

SEQ ID NO: 129104 - DNA, 25 bp, Homo sapien
atcttccacaggtaaggttcagcaa

SEQ ID NO: 129105 - DNA, 25 bp, Homo sapien
tctctaatccttttgatccagcgga

SEQ ID NO: 129106 - DNA, 25 bp, Homo sapien
gcgggctcacgttaaagacctggaa

SEQ ID NO: 129107 - DNA, 25 bp, Homo sapien
tgcagcgggctcacgttaaagacct

SEQ ID NO: 129108 - DNA, 25 bp, Homo sapien
ctgctgtctcggactgggccgcaca

SEQ ID NO: 129109 - DNA, 25 bp, Homo sapien
gcacacctgcagcgggctcacgtta

SEQ ID NO: 129110 - DNA, 25 bp, Homo sapien
gacccctcttagtctgcactggaag

SEQ ID NO: 129111 - DNA, 25 bp, Homo sapien
tgtcacccccgtacacggtaatatc

SEQ ID NO: 129112 - DNA, 25 bp, Homo sapien
agggccaactcgctccgggacagcg

SEQ ID NO: 129113 - DNA, 25 bp, Homo sapien
gggtgctgaaccgccccgccgtgtg

SEQ ID NO: 129114 - DNA, 25 bp, Homo sapien
caggggtgaggccctccttgcgcac

SEQ ID NO: 129115 - DNA, 25 bp, Homo sapien
cctttttagctgactgggacacgca

SEQ ID NO: 129116 - DNA, 25 bp, Homo sapien
acagcagctgttgccgcgtcgaacc

SEQ ID NO: 129117 - DNA, 25 bp, Homo sapien
ggacacgcagcctcgaaggtctggt

SEQ ID NO: 129118 - DNA, 25 bp, Homo sapien
agcgcccgaggagctaccaggtgcc

SEQ ID NO: 129119 - DNA, 25 bp, Homo sapien
ggagcagatgtcaattttgtaataa

SEQ ID NO: 129120 - DNA, 25 bp, Homo sapien
taaggttcttagttttgatccatcc

SEQ ID NO: 129121 - DNA, 25 bp, Homo sapien
ggaatcatatcaaaagcttatcggg

SEQ ID NO: 129122 - DNA, 25 bp, Homo sapien
ccatcccagggatgtgaaaagccaa

SEQ ID NO: 129123 - DNA, 25 bp, Homo sapien
ccaacccgcacttcctaattcctat

SEQ ID NO: 129124 - DNA, 25 bp, Homo sapien
caacccgcacttcctaattcctatg

SEQ ID NO: 129125 - DNA, 25 bp, Homo sapien
gcacatgacagcaccccaactaata

SEQ ID NO: 129126 - DNA, 25 bp, Homo sapien
gcacacacaagtacatgaatggctt

SEQ ID NO: 129127 - DNA, 25 bp, Homo sapien
aaagagtcgaaaggcacaatctgcc

SEQ ID NO: 129128 - DNA, 25 bp, Homo sapien
caatctgccttcgaaaaattcatga

SEQ ID NO: 129129 - DNA, 25 bp, Homo sapien
tgagacacggtctaactgatgcagg

SEQ ID NO: 129130 - DNA, 25 bp, Homo sapien
ccagcagctggatcctatattaatg

SEQ ID NO: 129131 - DNA, 25 bp, Homo sapien
tgcacagacccaagtttgttaatgt

SEQ ID NO: 129132 - DNA, 25 bp, Homo sapien
tacgcaatacttgaagccaggcatg

SEQ ID NO: 129133 - DNA, 25 bp, Homo sapien
cctcatctgcgaaacaggaaggaca

SEQ ID NO: 129134 - DNA, 25 bp, Homo sapien
tagctgtaggaacttagccaatttg

SEQ ID NO: 129135 - DNA, 25 bp, Homo sapien
taggaacttagccaatttgccaaac

SEQ ID NO: 129136 - DNA, 25 bp, Homo sapien
agccaatttgccaaacttctctaag

SEQ ID NO: 129137 - DNA, 25 bp, Homo sapien
tgcagtatatggtagacaacacaag

SEQ ID NO: 129138 - DNA, 25 bp, Homo sapien
tcaaatagcgtaggcttaaatccag

SEQ ID NO: 129139 - DNA, 25 bp, Homo sapien
cctggctaaatatcaacggctacct

SEQ ID NO: 129140 - DNA, 25 bp, Homo sapien
ggcaatcccacttgacaaaacacag

SEQ ID NO: 129141 - DNA, 25 bp, Homo sapien
tcaagcagatacaaggcccaagttc

SEQ ID NO: 129142 - DNA, 25 bp, Homo sapien
ccccacataggaaacatacaggact

SEQ ID NO: 129143 - DNA, 25 bp, Homo sapien
tacaggactaccatggaagatcagt

SEQ ID NO: 129144 - DNA, 25 bp, Homo sapien
tacacttctctatggctcaagcaga

SEQ ID NO: 129145 - DNA, 25 bp, Homo sapien
tttagaaaagcatatcactaatccc

SEQ ID NO: 129146 - DNA, 25 bp, Homo sapien
tactctttagaaaagcatatcacta

SEQ ID NO: 129147 - DNA, 25 bp, Homo sapien
gacttttctactctttagaaaagca

SEQ ID NO: 129148 - DNA, 25 bp, Homo sapien
gaaaagcatatcactaatcccacaa

SEQ ID NO: 129149 - DNA, 25 bp, Homo sapien
ctgtcaaagccactaagttctgtct

SEQ ID NO: 129150 - DNA, 25 bp, Homo sapien
ccacacccagaagggtagtcactgt

SEQ ID NO: 129151 - DNA, 25 bp, Homo sapien
aagccactaagttctgtctagacat

SEQ ID NO: 129152 - DNA, 25 bp, Homo sapien
agccacacccagaagggtagtcact

SEQ ID NO: 129153 - DNA, 25 bp, Homo sapien
ttcggcggcgctggatgcctttcca

SEQ ID NO: 129154 - DNA, 25 bp, Homo sapien
tccttcggcggcgctggatgccttt

SEQ ID NO: 129155 - DNA, 25 bp, Homo sapien
cttcggcggcgctggatgcctttcc

SEQ ID NO: 129156 - DNA, 25 bp, Homo sapien
cggcggcgctggatgcctttccaga

SEQ ID NO: 129157 - DNA, 25 bp, Homo sapien
tgctgtggctgttgggtcacaggac

SEQ ID NO: 129158 - DNA, 25 bp, Homo sapien
ctgtggctgttgggtcacaggactc

SEQ ID NO: 129159 - DNA, 25 bp, Homo sapien
agggggcagctctctactgcccagc

SEQ ID NO: 129160 - DNA, 25 bp, Homo sapien
gcagctctctactgcccagcacttt

SEQ ID NO: 129161 - DNA, 25 bp, Homo sapien
ccactcacagtcaattccaagtact

SEQ ID NO: 129162 - DNA, 25 bp, Homo sapien
gggctcgatttgatcccactctgcc

SEQ ID NO: 129163 - DNA, 25 bp, Homo sapien
ccttccacgaggatctgggggcact

SEQ ID NO: 129164 - DNA, 25 bp, Homo sapien
tgctttaaggatccgttccttccac

SEQ ID NO: 129165 - DNA, 25 bp, Homo sapien
gactgtccaaggtcccagttggaaa

SEQ ID NO: 129166 - DNA, 25 bp, Homo sapien
acttgactgtccaaggtcccagttg

SEQ ID NO: 129167 - DNA, 25 bp, Homo sapien
ttgactgtccaaggtcccagttgga

SEQ ID NO: 129168 - DNA, 25 bp, Homo sapien
cttgactgtccaaggtcccagttgg

SEQ ID NO: 129169 - DNA, 25 bp, Homo sapien
tcacactgtgctgaatcctttatgg

SEQ ID NO: 129170 - DNA, 25 bp, Homo sapien
ctgaatcctttatgggggtgatcta

SEQ ID NO: 129171 - DNA, 25 bp, Homo sapien
cacactgtgctgaatcctttatggg

SEQ ID NO: 129172 - DNA, 25 bp, Homo sapien
cctttatgggggtgatctatttgaa

SEQ ID NO: 129173 - DNA, 25 bp, Homo sapien
cctgttgtatgaagctagcataact

SEQ ID NO: 129174 - DNA, 25 bp, Homo sapien
tccttgcctgaagtgtgatcctcct

SEQ ID NO: 129175 - DNA, 25 bp, Homo sapien
tcaccagtagattctaactaaacat

SEQ ID NO: 129176 - DNA, 25 bp, Homo sapien
atcaaagcctgacaacggccaagca

SEQ ID NO: 129177 - DNA, 25 bp, Homo sapien
aaagtaatggaagagagcgtgctga

SEQ ID NO: 129178 - DNA, 25 bp, Homo sapien
tgggcctgcagtgccacagttgcat

SEQ ID NO: 129179 - DNA, 25 bp, Homo sapien
ccacagttgcatacaaagtaatgga

SEQ ID NO: 129180 - DNA, 25 bp, Homo sapien
gagcgtgctgatttaaggaatttat

SEQ ID NO: 129181 - DNA, 25 bp, Homo sapien
caaaatgtcaatagcggggaggctg

SEQ ID NO: 129182 - DNA, 25 bp, Homo sapien
ttgtagaagtgacagagggctggct

SEQ ID NO: 129183 - DNA, 25 bp, Homo sapien
gagggctggctttgccttccaaatt

SEQ ID NO: 129184 - DNA, 25 bp, Homo sapien
tgtagaagtgacagagggctggctt

SEQ ID NO: 129185 - DNA, 25 bp, Homo sapien
ggctggctttgccttccaaatttac

SEQ ID NO: 129186 - DNA, 25 bp, Homo sapien
taacaacgaggccataatcctgcag

SEQ ID NO: 129187 - DNA, 25 bp, Homo sapien
cttggtagtgtttttcctccacaga

SEQ ID NO: 129188 - DNA, 25 bp, Homo sapien
tctgccgcatggctaggtatcggag

SEQ ID NO: 129189 - DNA, 25 bp, Homo sapien
tttcaaaatggtgccatctgccaaa

SEQ ID NO: 129190 - DNA, 25 bp, Homo sapien
tggctaaaatatttgtcccgcagct

SEQ ID NO: 129191 - DNA, 25 bp, Homo sapien
catctacaaatctggctaaaatatt

SEQ ID NO: 129192 - DNA, 25 bp, Homo sapien
tataggaatcccagcattcatacaa

SEQ ID NO: 129193 - DNA, 25 bp, Homo sapien
tgtcccgcagctataggaatcccag

SEQ ID NO: 129194 - DNA, 25 bp, Homo sapien
taaagggcacatatgctacccagcc

SEQ ID NO: 129195 - DNA, 25 bp, Homo sapien
tgtagcttacagagatccctcagta

SEQ ID NO: 129196 - DNA, 25 bp, Homo sapien
ccatctagaactgtagactcagtgt

SEQ ID NO: 129197 - DNA, 25 bp, Homo sapien
gggaccaccagcttttagcctgtag

SEQ ID NO: 129198 - DNA, 25 bp, Homo sapien
taagcccattacagagcaaattgtt

SEQ ID NO: 129199 - DNA, 25 bp, Homo sapien
aagcccattacagagcaaattgttt

SEQ ID NO: 129200 - DNA, 25 bp, Homo sapien
ctaagcccattacagagcaaattgt

SEQ ID NO: 129201 - DNA, 25 bp, Homo sapien
gcaacgaagtagaagggacttgtca

SEQ ID NO: 129202 - DNA, 25 bp, Homo sapien
ctgcaacgaagtagaagggacttgt

SEQ ID NO: 129203 - DNA, 25 bp, Homo sapien
aaaacagtctcagcgagggacttca

SEQ ID NO: 129204 - DNA, 25 bp, Homo sapien
ttcaaaacagtctcagcgagggact

SEQ ID NO: 129205 - DNA, 25 bp, Homo sapien
tcctctgtgagagtctcagcatccc

SEQ ID NO: 129206 - DNA, 25 bp, Homo sapien
ctgtgagagtctcagcatcccagtt

SEQ ID NO: 129207 - DNA, 25 bp, Homo sapien
ctggtcctctgtgagagtctcagca

SEQ ID NO: 129208 - DNA, 25 bp, Homo sapien
tgtgagagtctcagcatcccagttg

SEQ ID NO: 129209 - DNA, 25 bp, Homo sapien
aatgtactccaccaaggcaagaaag

SEQ ID NO: 129210 - DNA, 25 bp, Homo sapien
taagtgacctgacgtgtgtctgaac

SEQ ID NO: 129211 - DNA, 25 bp, Homo sapien
ggagctgcaagagtactaaaccgta

SEQ ID NO: 129212 - DNA, 25 bp, Homo sapien
ccaggctgatggtaaatgcaaattc

SEQ ID NO: 129213 - DNA, 25 bp, Homo sapien
aagagaaaagtcagagatcagtgga

SEQ ID NO: 129214 - DNA, 25 bp, Homo sapien
gagaaaagtcagagatcagtggaat

SEQ ID NO: 129215 - DNA, 25 bp, Homo sapien
ctgaagagaaaagtcagagatcagt

SEQ ID NO: 129216 - DNA, 25 bp, Homo sapien
gaagagaaaagtcagagatcagtgg

SEQ ID NO: 129217 - DNA, 25 bp, Homo sapien
gaaagggtatccaagaagatgaaga

SEQ ID NO: 129218 - DNA, 25 bp, Homo sapien
gctcattcctttgcttcgaaatggg

SEQ ID NO: 129219 - DNA, 25 bp, Homo sapien
catcccatccatcttagacttctta

SEQ ID NO: 129220 - DNA, 25 bp, Homo sapien
atgggatgtcgaccacaccctggca

SEQ ID NO: 129221 - DNA, 25 bp, Homo sapien
tgttgcttccccattaacctcttct

SEQ ID NO: 129222 - DNA, 25 bp, Homo sapien
caatgcctttgtccaggtaccactg

SEQ ID NO: 129223 - DNA, 25 bp, Homo sapien
ttcttctatcacaagtgcagagggg

SEQ ID NO: 129224 - DNA, 25 bp, Homo sapien
cttctatcacaagtgcagaggggct

SEQ ID NO: 129225 - DNA, 25 bp, Homo sapien
gcagttatcataaagaggtgatttt

SEQ ID NO: 129226 - DNA, 25 bp, Homo sapien
tcaaaccgtagcttcaccacaaagg

SEQ ID NO: 129227 - DNA, 25 bp, Homo sapien
ctccaggagattcgggccttcctgc

SEQ ID NO: 129228 - DNA, 25 bp, Homo sapien
gaatgtaggagtctctcttgccaca

SEQ ID NO: 129229 - DNA, 25 bp, Homo sapien
ttaaccatcaagtaatagtctccag

SEQ ID NO: 129230 - DNA, 25 bp, Homo sapien
gaagtgcttccggtactcatgtgga

SEQ ID NO: 129231 - DNA, 25 bp, Homo sapien
acatcgtgggagttgtggtccttca

SEQ ID NO: 129232 - DNA, 25 bp, Homo sapien
taggcaggctctccgcgttgagcag

SEQ ID NO: 129233 - DNA, 25 bp, Homo sapien
aaaactctctgagtgcttgcagcag

SEQ ID NO: 129234 - DNA, 25 bp, Homo sapien
attccacaattcctgtgctttgtac

SEQ ID NO: 129235 - DNA, 25 bp, Homo sapien
aaccacacatagaattggccctcca

SEQ ID NO: 129236 - DNA, 25 bp, Homo sapien
tataaagtcggagacacaaaaccac

SEQ ID NO: 129237 - DNA, 25 bp, Homo sapien
caggtgagataggaaccatgaattc

SEQ ID NO: 129238 - DNA, 25 bp, Homo sapien
tcagtgagccgataccctggagtgc

SEQ ID NO: 129239 - DNA, 25 bp, Homo sapien
tgataatggatgaagaatgctggtc

SEQ ID NO: 129240 - DNA, 25 bp, Homo sapien
gttctgagctctactgacaggaagg

SEQ ID NO: 129241 - DNA, 25 bp, Homo sapien
ccaggattacccagtgaccagttca

SEQ ID NO: 129242 - DNA, 25 bp, Homo sapien
gactcgcaatcccaacagaaggtat

SEQ ID NO: 129243 - DNA, 25 bp, Homo sapien
aagtgtctgagggaaacaagcgcag

SEQ ID NO: 129244 - DNA, 25 bp, Homo sapien
gaaacaagcgcaggatggcctcaca

SEQ ID NO: 129245 - DNA, 25 bp, Homo sapien
gctgcgcgccaagggtaactgggga

SEQ ID NO: 129246 - DNA, 25 bp, Homo sapien
tgtctgagggaaacaagcgcaggat

SEQ ID NO: 129247 - DNA, 25 bp, Homo sapien
tgcaccaccttcagcccgtgaggaa

SEQ ID NO: 129248 - DNA, 25 bp, Homo sapien
gatcttccccgaatttccggagcag

SEQ ID NO: 129249 - DNA, 25 bp, Homo sapien
tggagtccaggaagtgctgacgcca

SEQ ID NO: 129250 - DNA, 25 bp, Homo sapien
tccggagcagcttctgatggttgtg

SEQ ID NO: 129251 - DNA, 25 bp, Homo sapien
cagcccctgttagagataaaccgag

SEQ ID NO: 129252 - DNA, 25 bp, Homo sapien
ggaccgatatactggacagcccctg

SEQ ID NO: 129253 - DNA, 25 bp, Homo sapien
tagagtaaacatcaccaacttgggc

SEQ ID NO: 129254 - DNA, 25 bp, Homo sapien
caaccacatgagttacgggagagca

SEQ ID NO: 129255 - DNA, 25 bp, Homo sapien
gaaatcttgtgtgacgcagtctggc

SEQ ID NO: 129256 - DNA, 25 bp, Homo sapien
tcatgggctgctactgatggccgat

SEQ ID NO: 129257 - DNA, 25 bp, Homo sapien
gaatgcacattcctcaaagtggctg

SEQ ID NO: 129258 - DNA, 25 bp, Homo sapien
cagagaggcccttgctgtgacactg

SEQ ID NO: 129259 - DNA, 25 bp, Homo sapien
tctatgctgaaatgccgagaggatg

SEQ ID NO: 129260 - DNA, 25 bp, Homo sapien
ctgaaatgccgagaggatgaggcaa

SEQ ID NO: 129261 - DNA, 25 bp, Homo sapien
cttttggttaagcattccatggctg

SEQ ID NO: 129262 - DNA, 25 bp, Homo sapien
ggctgaaacgcaactctatgctgaa

SEQ ID NO: 129263 - DNA, 25 bp, Homo sapien
catcattagaataggtgcttcacaa

SEQ ID NO: 129264 - DNA, 25 bp, Homo sapien
cacagtccttgtggacaaataagcc

SEQ ID NO: 129265 - DNA, 25 bp, Homo sapien
gcaataaccaaatccactagatgtg

SEQ ID NO: 129266 - DNA, 25 bp, Homo sapien
tatattctgccttactgaacagtgt

SEQ ID NO: 129267 - DNA, 25 bp, Homo sapien
gaagtagtcctactcaggctgcagt

SEQ ID NO: 129268 - DNA, 25 bp, Homo sapien
gaggatgaacttcgtggtacagaac

SEQ ID NO: 129269 - DNA, 25 bp, Homo sapien
gaacttttgaaccagctgacagata

SEQ ID NO: 129270 - DNA, 25 bp, Homo sapien
caaaacgtttctgcataaatgccct

SEQ ID NO: 129271 - DNA, 25 bp, Homo sapien
agctgtcgagctgtgtagggattcc

SEQ ID NO: 129272 - DNA, 25 bp, Homo sapien
gtgctccagtaagggactggcccca

SEQ ID NO: 129273 - DNA, 25 bp, Homo sapien
gtcgagctgtgtagggattccattc

SEQ ID NO: 129274 - DNA, 25 bp, Homo sapien
cagagtgctccagtaagggactggc

SEQ ID NO: 129275 - DNA, 25 bp, Homo sapien
cagctgtttgttttcgctcgcgcct

SEQ ID NO: 129276 - DNA, 25 bp, Homo sapien
tgtttgttttcgctcgcgcctagct

SEQ ID NO: 129277 - DNA, 25 bp, Homo sapien
tttcgctcgcgcctagctgctcagt

SEQ ID NO: 129278 - DNA, 25 bp, Homo sapien
tttgttttcgctcgcgcctagctgc

SEQ ID NO: 129279 - DNA, 25 bp, Homo sapien
aggtgggggactgggccggcgtgct

SEQ ID NO: 129280 - DNA, 25 bp, Homo sapien
ggtgggcagacgggcgccccaggtg

SEQ ID NO: 129281 - DNA, 25 bp, Homo sapien
tgggcagacgggcgccccaggtggg

SEQ ID NO: 129282 - DNA, 25 bp, Homo sapien
ccaggtgggggactgggccggcgtg

SEQ ID NO: 129283 - DNA, 25 bp, Homo sapien
cgatggcattggcgcggatcttcct

SEQ ID NO: 129284 - DNA, 25 bp, Homo sapien
gcgtgggctcggttgtcctgccata

SEQ ID NO: 129285 - DNA, 25 bp, Homo sapien
taagtagtagaaagtgcccaggatc

SEQ ID NO: 129286 - DNA, 25 bp, Homo sapien
ctacggtcaggatggcgatggcatt

SEQ ID NO: 129287 - DNA, 25 bp, Homo sapien
cgggatggtgcggtcctcgcggagc

SEQ ID NO: 129288 - DNA, 25 bp, Homo sapien
gagcgggatggtgcggtcctcgcgg

SEQ ID NO: 129289 - DNA, 25 bp, Homo sapien
gggatggtgcggtcctcgcggagct

SEQ ID NO: 129290 - DNA, 25 bp, Homo sapien
aatgagcgggatggtgcggtcctcg

SEQ ID NO: 129291 - DNA, 25 bp, Homo sapien
gagaactgaggtcttttgccaacag

SEQ ID NO: 129292 - DNA, 25 bp, Homo sapien
taagatgcattactacgaaggcctc

SEQ ID NO: 129293 - DNA, 25 bp, Homo sapien
tgtggagacccacgtggagaactga

SEQ ID NO: 129294 - DNA, 25 bp, Homo sapien
gagcaaccctctaaaacgcggatta

SEQ ID NO: 129295 - DNA, 25 bp, Homo sapien
caacaggaggcaatttcagaatgag

SEQ ID NO: 129296 - DNA, 25 bp, Homo sapien
caggaggcaatttcagaatgagtgt

SEQ ID NO: 129297 - DNA, 25 bp, Homo sapien
gtgttgtttctttaatgaccctcat

SEQ ID NO: 129298 - DNA, 25 bp, Homo sapien
ggcaatttcagaatgagtgttgttt

SEQ ID NO: 129299 - DNA, 25 bp, Homo sapien
gggaagataaggaggaggtccagcc

SEQ ID NO: 129300 - DNA, 25 bp, Homo sapien
aggaggtccagccctgagaagttga

SEQ ID NO: 129301 - DNA, 25 bp, Homo sapien
ccagccctgagaagttgagtctagt

SEQ ID NO: 129302 - DNA, 25 bp, Homo sapien
agataaggaggaggtccagccctga

SEQ ID NO: 129303 - DNA, 25 bp, Homo sapien
ctgctggcattgaagtggtggctct

SEQ ID NO: 129304 - DNA, 25 bp, Homo sapien
gagacaggtgcattgatctctctct

SEQ ID NO: 129305 - DNA, 25 bp, Homo sapien
agctcctgagacaggtgcattgatc

SEQ ID NO: 129306 - DNA, 25 bp, Homo sapien
tgatgggcccactcgcctctggagt

SEQ ID NO: 129307 - DNA, 25 bp, Homo sapien
gtgagttaactggaagttacagccc

SEQ ID NO: 129308 - DNA, 25 bp, Homo sapien
aagttacagccctggagctgacacg

SEQ ID NO: 129309 - DNA, 25 bp, Homo sapien
tctgcacacgccacacggggtgagt

SEQ ID NO: 129310 - DNA, 25 bp, Homo sapien
actggaagttacagccctggagctg

SEQ ID NO: 129311 - DNA, 25 bp, Homo sapien
tgctgtggcaaccaggcagccagcc

SEQ ID NO: 129312 - DNA, 25 bp, Homo sapien
ttgctgtggcaaccaggcagccagc

SEQ ID NO: 129313 - DNA, 25 bp, Homo sapien
ccaaattgtccagttgttctcagca

SEQ ID NO: 129314 - DNA, 25 bp, Homo sapien
aaggcctcggccttgggtgatgtcc

SEQ ID NO: 129315 - DNA, 25 bp, Homo sapien
gggccctagatatggacacctgtcc

SEQ ID NO: 129316 - DNA, 25 bp, Homo sapien
actgcacgtgctgaaatcgggccct

SEQ ID NO: 129317 - DNA, 25 bp, Homo sapien
gggtgccaagaatacgcaatgatga

SEQ ID NO: 129318 - DNA, 25 bp, Homo sapien
caacagtatggaattggcatagaca

SEQ ID NO: 129319 - DNA, 25 bp, Homo sapien
gaactgggcccctatcttatgctat

SEQ ID NO: 129320 - DNA, 25 bp, Homo sapien
gcaatgatttcgtggacatgacatc

SEQ ID NO: 129321 - DNA, 25 bp, Homo sapien
tagctttggatccgggagggacaga

SEQ ID NO: 129322 - DNA, 25 bp, Homo sapien
gctttggatccgggagggacagaga

SEQ ID NO: 129323 - DNA, 25 bp, Homo sapien
agctttggatccgggagggacagag

SEQ ID NO: 129324 - DNA, 25 bp, Homo sapien
ctttggatccgggagggacagagat

SEQ ID NO: 129325 - DNA, 25 bp, Homo sapien
ccgccaagtgcatgagctaggcaga

SEQ ID NO: 129326 - DNA, 25 bp, Homo sapien
gtgcatgagctaggcagatgcgcat

SEQ ID NO: 129327 - DNA, 25 bp, Homo sapien
tgtgagttcccctggtagttcccgc

SEQ ID NO: 129328 - DNA, 25 bp, Homo sapien
tagttcccgccaagtgcatgagcta

SEQ ID NO: 129329 - DNA, 25 bp, Homo sapien
aaaaggattgagctcattactgtca

SEQ ID NO: 129330 - DNA, 25 bp, Homo sapien
gagtgaaactcagggataaatacat

SEQ ID NO: 129331 - DNA, 25 bp, Homo sapien
tgtaacatctgagggccgaggtacc

SEQ ID NO: 129332 - DNA, 25 bp, Homo sapien
cgaggtaccgtccggagtagcttag

SEQ ID NO: 129333 - DNA, 25 bp, Homo sapien
gctgtagcccagagtatggggggaa

SEQ ID NO: 129334 - DNA, 25 bp, Homo sapien
agagtatggggggaagactgggcat

SEQ ID NO: 129335 - DNA, 25 bp, Homo sapien
tgtagcccagagtatggggggaaga

SEQ ID NO: 129336 - DNA, 25 bp, Homo sapien
agcccagagtatggggggaagactg

SEQ ID NO: 129337 - DNA, 25 bp, Homo sapien
ggctaggccaaggcatcaggcccgc

SEQ ID NO: 129338 - DNA, 25 bp, Homo sapien
aaggctaggccaaggcatcaggccc

SEQ ID NO: 129339 - DNA, 25 bp, Homo sapien
taaggctaggccaaggcatcaggcc

SEQ ID NO: 129340 - DNA, 25 bp, Homo sapien
ctaaggctaggccaaggcatcaggc

SEQ ID NO: 129341 - DNA, 25 bp, Homo sapien
tgcttggccgacaggtaggccttct

SEQ ID NO: 129342 - DNA, 25 bp, Homo sapien
tccagctggttgaaggcgtgctgtc

SEQ ID NO: 129343 - DNA, 25 bp, Homo sapien
taatggcgggtgtcccggatgggcc

SEQ ID NO: 129344 - DNA, 25 bp, Homo sapien
cggatgggccggtctgggctcagct

SEQ ID NO: 129345 - DNA, 25 bp, Homo sapien
tctcaccttgcacaggccaccaagc

SEQ ID NO: 129346 - DNA, 25 bp, Homo sapien
tgagtggtttctggaggctgacagt

SEQ ID NO: 129347 - DNA, 25 bp, Homo sapien
caagcaccctggacttcaggcatgc

SEQ ID NO: 129348 - DNA, 25 bp, Homo sapien
agtggtttctggaggctgacagtgc

SEQ ID NO: 129349 - DNA, 25 bp, Homo sapien
tgtccttgccgcgaagcaggagtac

SEQ ID NO: 129350 - DNA, 25 bp, Homo sapien
cctggtggtgtccttgccgcgaagc

SEQ ID NO: 129351 - DNA, 25 bp, Homo sapien
ctggtggtgtccttgccgcgaagca

SEQ ID NO: 129352 - DNA, 25 bp, Homo sapien
gccgcgaagcaggagtactgcctta

SEQ ID NO: 129353 - DNA, 25 bp, Homo sapien
ctgaggcggttcagagtcaggtaag

SEQ ID NO: 129354 - DNA, 25 bp, Homo sapien
ggtggaacgggcctcattgtggaag

SEQ ID NO: 129355 - DNA, 25 bp, Homo sapien
tgcgcagcagggtggaacgggcctc

SEQ ID NO: 129356 - DNA, 25 bp, Homo sapien
agcagggtggaacgggcctcattgt

SEQ ID NO: 129357 - DNA, 25 bp, Homo sapien
tcactgtgcgcagcagggtggaacg

SEQ ID NO: 129358 - DNA, 25 bp, Homo sapien
cctggatcaagttggcaggagttcg

SEQ ID NO: 129359 - DNA, 25 bp, Homo sapien
tgatctcctggatcaagttggcagg

SEQ ID NO: 129360 - DNA, 25 bp, Homo sapien
tcaagttggcaggagttcggttcag

SEQ ID NO: 129361 - DNA, 25 bp, Homo sapien
actaaaatgatctcctggatcaagt

SEQ ID NO: 129362 - DNA, 25 bp, Homo sapien
gcagaaaggtgtctgcgatggtcag

SEQ ID NO: 129363 - DNA, 25 bp, Homo sapien
cagaaaggtgtctgcgatggtcagg

SEQ ID NO: 129364 - DNA, 25 bp, Homo sapien
gaaaggtgtctgcgatggtcaggac

SEQ ID NO: 129365 - DNA, 25 bp, Homo sapien
gaggggtcctagaaaagacaggatc

SEQ ID NO: 129366 - DNA, 25 bp, Homo sapien
gatcctggtcaggagtagacagtct

SEQ ID NO: 129367 - DNA, 25 bp, Homo sapien
cttcccgccgatcattgcgcaggca

SEQ ID NO: 129368 - DNA, 25 bp, Homo sapien
ccgatcattgcgcaggcacttgacc

SEQ ID NO: 129369 - DNA, 25 bp, Homo sapien
atcctggtcaggagtagacagtctt

SEQ ID NO: 129370 - DNA, 25 bp, Homo sapien
cagcccgccagccagccaaaagccc

SEQ ID NO: 129371 - DNA, 25 bp, Homo sapien
ccatcaatctccactccaaaagtgt

SEQ ID NO: 129372 - DNA, 25 bp, Homo sapien
agcccgccagccagccaaaagccca

SEQ ID NO: 129373 - DNA, 25 bp, Homo sapien
ccaaaagcccatcaatctccactcc

SEQ ID NO: 129374 - DNA, 25 bp, Homo sapien
ctcggtgttcacttcgcagtggcta

SEQ ID NO: 129375 - DNA, 25 bp, Homo sapien
atgggcggcagccactcggtgttca

SEQ ID NO: 129376 - DNA, 25 bp, Homo sapien
tcacttcgcagtggctatccagaaa

SEQ ID NO: 129377 - DNA, 25 bp, Homo sapien
gtgagaacggtagctgcagccacgt

SEQ ID NO: 129378 - DNA, 25 bp, Homo sapien
tgcccagcttcaaatactgtcccat

SEQ ID NO: 129379 - DNA, 25 bp, Homo sapien
cataggcctcggtgccaggaacgta

SEQ ID NO: 129380 - DNA, 25 bp, Homo sapien
aatactgtcccataggcctcggtgc

SEQ ID NO: 129381 - DNA, 25 bp, Homo sapien
caggaacgtagtggctgagtcccca

SEQ ID NO: 129382 - DNA, 25 bp, Homo sapien
ctcatccttttctgccatctgtcca

SEQ ID NO: 129383 - DNA, 25 bp, Homo sapien
tctgccatctgtccaaatcctccct

SEQ ID NO: 129384 - DNA, 25 bp, Homo sapien
gccatctgtccaaatcctccctgtt

SEQ ID NO: 129385 - DNA, 25 bp, Homo sapien
tcatccttttctgccatctgtccaa

SEQ ID NO: 129386 - DNA, 25 bp, Homo sapien
tgttcaaactttcgcagaactgcca

SEQ ID NO: 129387 - DNA, 25 bp, Homo sapien
tttacccattcgtcagttgataggc

SEQ ID NO: 129388 - DNA, 25 bp, Homo sapien
tacacctagcagctccactgctggg

SEQ ID NO: 129389 - DNA, 25 bp, Homo sapien
catttctctcgggtctacacctagc

SEQ ID NO: 129390 - DNA, 25 bp, Homo sapien
tgggggacacggaacagagcctctt

SEQ ID NO: 129391 - DNA, 25 bp, Homo sapien
catgggggacacggaacagagcctc

SEQ ID NO: 129392 - DNA, 25 bp, Homo sapien
ttgtctggaacttggaatccagctc

SEQ ID NO: 129393 - DNA, 25 bp, Homo sapien
tcttgtctggaacttggaatccagc

SEQ ID NO: 129394 - DNA, 25 bp, Homo sapien
ataatgttgattttgctggcctctt

SEQ ID NO: 129395 - DNA, 25 bp, Homo sapien
tgttgattttgctggcctctttttt

SEQ ID NO: 129396 - DNA, 25 bp, Homo sapien
gggtggtagattatgtcatatacca

SEQ ID NO: 129397 - DNA, 25 bp, Homo sapien
tggtagattatgtcatataccacat

SEQ ID NO: 129398 - DNA, 25 bp, Homo sapien
catcaatgatgggactcaccacgcg

SEQ ID NO: 129399 - DNA, 25 bp, Homo sapien
aatgatgggactcaccacgcgggtg

SEQ ID NO: 129400 - DNA, 25 bp, Homo sapien
atgatgggactcaccacgcgggtgt

SEQ ID NO: 129401 - DNA, 25 bp, Homo sapien
tcaatgatgggactcaccacgcggg

SEQ ID NO: 129402 - DNA, 25 bp, Homo sapien
ttgaaatgcaggctccagtcgaacc

SEQ ID NO: 129403 - DNA, 25 bp, Homo sapien
tggtggggtctgtccgggtcatctt

SEQ ID NO: 129404 - DNA, 25 bp, Homo sapien
tggggtctgtccgggtcatcttctg

SEQ ID NO: 129405 - DNA, 25 bp, Homo sapien
ccacttgaaatgcaggctccagtcg

SEQ ID NO: 129406 - DNA, 25 bp, Homo sapien
taaaccaggacttgtcgatcacgaa

SEQ ID NO: 129407 - DNA, 25 bp, Homo sapien
aaaccaggacttgtcgatcacgaag

SEQ ID NO: 129408 - DNA, 25 bp, Homo sapien
ggttaaaccaggacttgtcgatcac

SEQ ID NO: 129409 - DNA, 25 bp, Homo sapien
agtggttaaaccaggacttgtcgat

SEQ ID NO: 129410 - DNA, 25 bp, Homo sapien
ccagctggttttgagtcgggatcag

SEQ ID NO: 129411 - DNA, 25 bp, Homo sapien
gcaagttacaaagctgggggagtcc

SEQ ID NO: 129412 - DNA, 25 bp, Homo sapien
tcgggatcaggcctgttgcaagccc

SEQ ID NO: 129413 - DNA, 25 bp, Homo sapien
atccctgctcctaacgtctcagaga

SEQ ID NO: 129414 - DNA, 25 bp, Homo sapien
gcatagctggtcaggaccctcccag

SEQ ID NO: 129415 - DNA, 25 bp, Homo sapien
tggcatagctggtcaggaccctccc

SEQ ID NO: 129416 - DNA, 25 bp, Homo sapien
gtggcatagctggtcaggaccctcc

SEQ ID NO: 129417 - DNA, 25 bp, Homo sapien
tagctggtcaggaccctcccagtaa

SEQ ID NO: 129418 - DNA, 25 bp, Homo sapien
tatacacatgatccccgtggcccat

SEQ ID NO: 129419 - DNA, 25 bp, Homo sapien
atatacacatgatccccgtggccca

SEQ ID NO: 129420 - DNA, 25 bp, Homo sapien
tgatccccgtggcccattccaggaa

SEQ ID NO: 129421 - DNA, 25 bp, Homo sapien
acatgatccccgtggcccattccag

SEQ ID NO: 129422 - DNA, 25 bp, Homo sapien
tgtaggggtgccgtttcctgaagac

SEQ ID NO: 129423 - DNA, 25 bp, Homo sapien
ggggacgatctccagactgccacca

SEQ ID NO: 129424 - DNA, 25 bp, Homo sapien
gtaggggtgccgtttcctgaagaca

SEQ ID NO: 129425 - DNA, 25 bp, Homo sapien
gcaggggacgatctccagactgcca

SEQ ID NO: 129426 - DNA, 25 bp, Homo sapien
tcccttgagactagtgcaccctgta

SEQ ID NO: 129427 - DNA, 25 bp, Homo sapien
ctcccttgagactagtgcaccctgt

SEQ ID NO: 129428 - DNA, 25 bp, Homo sapien
cccttgagactagtgcaccctgtag

SEQ ID NO: 129429 - DNA, 25 bp, Homo sapien
tctcccttgagactagtgcaccctg

SEQ ID NO: 129430 - DNA, 25 bp, Homo sapien
cacacttctgcagtgcgcttagtat

SEQ ID NO: 129431 - DNA, 25 bp, Homo sapien
atccacacttctgcagtgcgcttag

SEQ ID NO: 129432 - DNA, 25 bp, Homo sapien
tccacacttctgcagtgcgcttagt

SEQ ID NO: 129433 - DNA, 25 bp, Homo sapien
cacttctgcagtgcgcttagtattc

SEQ ID NO: 129434 - DNA, 25 bp, Homo sapien
gagctctgggtagacgttctccagg

SEQ ID NO: 129435 - DNA, 25 bp, Homo sapien
cggaaggacttgcagttcatcttct

SEQ ID NO: 129436 - DNA, 25 bp, Homo sapien
tcctctgctctatccgcgtagccac

SEQ ID NO: 129437 - DNA, 25 bp, Homo sapien
gctctgggtagacgttctccaggta

SEQ ID NO: 129438 - DNA, 25 bp, Homo sapien
gctgcgggttcttggcagaccctct

SEQ ID NO: 129439 - DNA, 25 bp, Homo sapien
aatgatgccggggagtgcttccttc

SEQ ID NO: 129440 - DNA, 25 bp, Homo sapien
ctgagattctaagcagttcaccccc

SEQ ID NO: 129441 - DNA, 25 bp, Homo sapien
ttcaccccctgcttaatgatgccgg

SEQ ID NO: 129442 - DNA, 25 bp, Homo sapien
ctgcttgccttctctagggttgcac

SEQ ID NO: 129443 - DNA, 25 bp, Homo sapien
ctgctggatgaggtggtcactgaac

SEQ ID NO: 129444 - DNA, 25 bp, Homo sapien
ggatgaggtggtcactgaacagcca

SEQ ID NO: 129445 - DNA, 25 bp, Homo sapien
gttgcacatctgcagtatgactggg

SEQ ID NO: 129446 - DNA, 25 bp, Homo sapien
caatcaggggctctcctgccaaggt

SEQ ID NO: 129447 - DNA, 25 bp, Homo sapien
caaggtctgccaccctgaggcatgg

SEQ ID NO: 129448 - DNA, 25 bp, Homo sapien
gaggcatggcccctcgggctgctgg

SEQ ID NO: 129449 - DNA, 25 bp, Homo sapien
ctgggccagaggcaaggagactcac

SEQ ID NO: 129450 - DNA, 25 bp, Homo sapien
ttctttagattcagcgagcctcagc

SEQ ID NO: 129451 - DNA, 25 bp, Homo sapien
caaaagcgcttaaagtgtcccacag

SEQ ID NO: 129452 - DNA, 25 bp, Homo sapien
tacaggaaacccagctagccttgga

SEQ ID NO: 129453 - DNA, 25 bp, Homo sapien
cacaggagcctctcggatacaggaa

SEQ ID NO: 129454 - DNA, 25 bp, Homo sapien
catgtaggccaaacctccagcaatg

SEQ ID NO: 129455 - DNA, 25 bp, Homo sapien
aggccaaacctccagcaatgcccag

SEQ ID NO: 129456 - DNA, 25 bp, Homo sapien
ctcatgtaggccaaacctccagcaa

SEQ ID NO: 129457 - DNA, 25 bp, Homo sapien
tgtaggccaaacctccagcaatgcc

SEQ ID NO: 129458 - DNA, 25 bp, Homo sapien
ggacgtgatgggtagggctgagacc

SEQ ID NO: 129459 - DNA, 25 bp, Homo sapien
ttcatgctcttctagtccttgacat

SEQ ID NO: 129460 - DNA, 25 bp, Homo sapien
ccagctgcagggatagggctagggc

SEQ ID NO: 129461 - DNA, 25 bp, Homo sapien
atggcccccgcagagagcctaaagg

SEQ ID NO: 129462 - DNA, 25 bp, Homo sapien
tgagggcagttggtggacagggagc

SEQ ID NO: 129463 - DNA, 25 bp, Homo sapien
agggcagttggtggacagggagcag

SEQ ID NO: 129464 - DNA, 25 bp, Homo sapien
gagggcagttggtggacagggagca

SEQ ID NO: 129465 - DNA, 25 bp, Homo sapien
ctgagggcagttggtggacagggag

SEQ ID NO: 129466 - DNA, 25 bp, Homo sapien
attagaggcaggagtgcttgtgacc

SEQ ID NO: 129467 - DNA, 25 bp, Homo sapien
tcttcgattagaggcaggagtgctt

SEQ ID NO: 129468 - DNA, 25 bp, Homo sapien
ttcgattagaggcaggagtgcttgt

SEQ ID NO: 129469 - DNA, 25 bp, Homo sapien
tgtcttcgattagaggcaggagtgc

SEQ ID NO: 129470 - DNA, 25 bp, Homo sapien
tatttgcctcccattgcaaccacct

SEQ ID NO: 129471 - DNA, 25 bp, Homo sapien
gagtgttgcttggaacatttatgag

SEQ ID NO: 129472 - DNA, 25 bp, Homo sapien
taatagtaagataggtctagtttgg

SEQ ID NO: 129473 - DNA, 25 bp, Homo sapien
aacattacggaagtgcctgggtgga

SEQ ID NO: 129474 - DNA, 25 bp, Homo sapien
ctggaggtctcgcatcacagagtca

SEQ ID NO: 129475 - DNA, 25 bp, Homo sapien
aggtctcgcatcacagagtcatgca

SEQ ID NO: 129476 - DNA, 25 bp, Homo sapien
ttgtagggatgaagtgtggggccag

SEQ ID NO: 129477 - DNA, 25 bp, Homo sapien
ggaggtctcgcatcacagagtcatg

SEQ ID NO: 129478 - DNA, 25 bp, Homo sapien
tccctgtaggcacttgagcttgtca

SEQ ID NO: 129479 - DNA, 25 bp, Homo sapien
gagcttgtcagtcctggcctaggta

SEQ ID NO: 129480 - DNA, 25 bp, Homo sapien
caatttagcttggttgccacgtgca

SEQ ID NO: 129481 - DNA, 25 bp, Homo sapien
tagctagaacgtctcacctcaagtg

SEQ ID NO: 129482 - DNA, 25 bp, Homo sapien
atcctcttgcctcagcctctgagta

SEQ ID NO: 129483 - DNA, 25 bp, Homo sapien
tagctaggactacacctgcatgcca

SEQ ID NO: 129484 - DNA, 25 bp, Homo sapien
cctcttgcctcagcctctgagtagc

SEQ ID NO: 129485 - DNA, 25 bp, Homo sapien
gtagctaggactacacctgcatgcc

SEQ ID NO: 129486 - DNA, 25 bp, Homo sapien
tgggcgtcagcctgacacttgctgg

SEQ ID NO: 129487 - DNA, 25 bp, Homo sapien
actgactgaatgctggatgaaagat

SEQ ID NO: 129488 - DNA, 25 bp, Homo sapien
ctgggcctgggcgtcagcctgacac

SEQ ID NO: 129489 - DNA, 25 bp, Homo sapien
gaatgctggatgaaagatccttttc

SEQ ID NO: 129490 - DNA, 25 bp, Homo sapien
ttggcatctctgacaggtcaccggg

SEQ ID NO: 129491 - DNA, 25 bp, Homo sapien
tccggtcccgaagtctcatgcaaaa

SEQ ID NO: 129492 - DNA, 25 bp, Homo sapien
tcatgacccaaaagacccctgtgtg

SEQ ID NO: 129493 - DNA, 25 bp, Homo sapien
tctgtccttgctttctccgggcaac

SEQ ID NO: 129494 - DNA, 25 bp, Homo sapien
tcattaatgcccgagagagaggtct

SEQ ID NO: 129495 - DNA, 25 bp, Homo sapien
gtctcagcctgacacatggccaaat

SEQ ID NO: 129496 - DNA, 25 bp, Homo sapien
cgtcctttcagtgggtcctggcggc

SEQ ID NO: 129497 - DNA, 25 bp, Homo sapien
cacccatgatgctgtattgacagag

SEQ ID NO: 129498 - DNA, 25 bp, Homo sapien
tagctgacccttcaagaaaatccct

SEQ ID NO: 129499 - DNA, 25 bp, Homo sapien
ggtaggtatatctgccccaggctgg

SEQ ID NO: 129500 - DNA, 25 bp, Homo sapien
tgaactctatgggtatgtggatcct

SEQ ID NO: 129501 - DNA, 25 bp, Homo sapien
gatccttggcctatgaaagacaggg

SEQ ID NO: 129502 - DNA, 25 bp, Homo sapien
cacctggctgcggaagaaacatcac

SEQ ID NO: 129503 - DNA, 25 bp, Homo sapien
gaaacatcacgacagaggacaggca

SEQ ID NO: 129504 - DNA, 25 bp, Homo sapien
gcttcaatccagagcagaggttcag

SEQ ID NO: 129505 - DNA, 25 bp, Homo sapien
cccaaaggtccatgcccgagtgtgg

SEQ ID NO: 129506 - DNA, 25 bp, Homo sapien
caaggacagctagtggcacatgctt

SEQ ID NO: 129507 - DNA, 25 bp, Homo sapien
aacagaacagggctgcgttgccaca

SEQ ID NO: 129508 - DNA, 25 bp, Homo sapien
tgtgtgtttcataaagacgaggtcc

SEQ ID NO: 129509 - DNA, 25 bp, Homo sapien
caaaggaccggctgataagtgcaga

SEQ ID NO: 129510 - DNA, 25 bp, Homo sapien
ctggttttggtccaaggcctgccct

SEQ ID NO: 129511 - DNA, 25 bp, Homo sapien
tgttggcccccaccagagcagtcag

SEQ ID NO: 129512 - DNA, 25 bp, Homo sapien
ttgcagtagggccacctgttggccc

SEQ ID NO: 129513 - DNA, 25 bp, Homo sapien
cgagcaagctaccaggtgcaggaca

SEQ ID NO: 129514 - DNA, 25 bp, Homo sapien
gtcagaagttctgggtaactccaga

SEQ ID NO: 129515 - DNA, 25 bp, Homo sapien
agaagttctgggtaactccagatca

SEQ ID NO: 129516 - DNA, 25 bp, Homo sapien
ggtcagaagttctgggtaactccag

SEQ ID NO: 129517 - DNA, 25 bp, Homo sapien
cagaagttctgggtaactccagatc

SEQ ID NO: 129518 - DNA, 25 bp, Homo sapien
tattcaagagctcagtcaggcgcag

SEQ ID NO: 129519 - DNA, 25 bp, Homo sapien
gatgctttgcgatcaggcttcacaa

SEQ ID NO: 129520 - DNA, 25 bp, Homo sapien
tatgagtaccccatttaacaggtaa

SEQ ID NO: 129521 - DNA, 25 bp, Homo sapien
tcctttacggctatgagtaccccat

SEQ ID NO: 129522 - DNA, 25 bp, Homo sapien
tgtgacctgatttaaccttagcatc

SEQ ID NO: 129523 - DNA, 25 bp, Homo sapien
cttccactcaggaacgaagtaggtg

SEQ ID NO: 129524 - DNA, 25 bp, Homo sapien
cactcaggaacgaagtaggtgctgg

SEQ ID NO: 129525 - DNA, 25 bp, Homo sapien
cgaagtaggtgctgggactccccag

SEQ ID NO: 129526 - DNA, 25 bp, Homo sapien
ccaccatgtctgagctgcaaagtct

SEQ ID NO: 129527 - DNA, 25 bp, Homo sapien
gtgttgttgataatatctgtgggtc

SEQ ID NO: 129528 - DNA, 25 bp, Homo sapien
tttacttcagctcattgacaaatgt

SEQ ID NO: 129529 - DNA, 25 bp, Homo sapien
caggttgcccagctaggaagggaaa

SEQ ID NO: 129530 - DNA, 25 bp, Homo sapien
gaaagttcaagtaactagctgcagg

SEQ ID NO: 129531 - DNA, 25 bp, Homo sapien
aatcttgttcaacttccggcacttc

SEQ ID NO: 129532 - DNA, 25 bp, Homo sapien
gattctctaataggctgtccttggc

SEQ ID NO: 129533 - DNA, 25 bp, Homo sapien
ccggcacttcttgattctctaatag

SEQ ID NO: 129534 - DNA, 25 bp, Homo sapien
gaagttacccctgtatcttagtgga

SEQ ID NO: 129535 - DNA, 25 bp, Homo sapien
caaaacttccactacagcacgctgt

SEQ ID NO: 129536 - DNA, 25 bp, Homo sapien
caattatttcccagcctgttgggcc

SEQ ID NO: 129537 - DNA, 25 bp, Homo sapien
gggtttccgattgaacaagatcctc

SEQ ID NO: 129538 - DNA, 25 bp, Homo sapien
tgccgacgaaggagcacgtagatct

SEQ ID NO: 129539 - DNA, 25 bp, Homo sapien
tagatatgaacagttgaaggactgg

SEQ ID NO: 129540 - DNA, 25 bp, Homo sapien
cttgaagaagggttagtatgtgaat

SEQ ID NO: 129541 - DNA, 25 bp, Homo sapien
acaggattactatgatacaaaactt

SEQ ID NO: 129542 - DNA, 25 bp, Homo sapien
aagttttgtatcatagtaatcctgt

SEQ ID NO: 129543 - DNA, 25 bp, Homo sapien
attcacatactaacccttcttcaag

SEQ ID NO: 129544 - DNA, 25 bp, Homo sapien
acagcgtgctgtagtggaagttttg

SEQ ID NO: 129545 - DNA, 25 bp, Homo sapien
gaggatcttgttcaatcggaaaccc

SEQ ID NO: 129546 - DNA, 25 bp, Homo sapien
gatctacgtgctccttcgtcggcag

SEQ ID NO: 129547 - DNA, 25 bp, Homo sapien
ccaacaggctgggaaataattgtgt

SEQ ID NO: 129548 - DNA, 25 bp, Homo sapien
aagagaagatctacgtgctccttcg

SEQ ID NO: 129549 - DNA, 25 bp, Homo sapien
ggagctagcaaatggtagacccagg

SEQ ID NO: 129550 - DNA, 25 bp, Homo sapien
tgtgctcagcaagcacttgatcctc

SEQ ID NO: 129551 - DNA, 25 bp, Homo sapien
cctcacaaggagtcttatgaactag

SEQ ID NO: 129552 - DNA, 25 bp, Homo sapien
gagtaagtatgacatcccaaaagcg

SEQ ID NO: 129553 - DNA, 25 bp, Homo sapien
tcccaagacaagtaaaacatgatcc

SEQ ID NO: 129554 - DNA, 25 bp, Homo sapien
taaagtttagcaatacaaagctgcc

SEQ ID NO: 129555 - DNA, 25 bp, Homo sapien
gcatgttcttaaatttgccaggagt

SEQ ID NO: 129556 - DNA, 25 bp, Homo sapien
cataagactccttgtgaggatcaag

SEQ ID NO: 129557 - DNA, 25 bp, Homo sapien
cattattagatatgcagcaactccc

SEQ ID NO: 129558 - DNA, 25 bp, Homo sapien
gaggatcaagtgcttgctgagcaca

SEQ ID NO: 129559 - DNA, 25 bp, Homo sapien
tgggtctaccatttgctagctccct

SEQ ID NO: 129560 - DNA, 25 bp, Homo sapien
gacgcttttgggatgtcatacttac

SEQ ID NO: 129561 - DNA, 25 bp, Homo sapien
atgaaatcaaacaactgactgatgt

SEQ ID NO: 129562 - DNA, 25 bp, Homo sapien
ccaggcagctgaggtctgccagatc

SEQ ID NO: 129563 - DNA, 25 bp, Homo sapien
caggcagctgaggtctgccagatca

SEQ ID NO: 129564 - DNA, 25 bp, Homo sapien
gatgaaatcaaacaactgactgatg

SEQ ID NO: 129565 - DNA, 25 bp, Homo sapien
aggcagctgaggtctgccagatcat

SEQ ID NO: 129566 - DNA, 25 bp, Homo sapien
atgatctggcagacctcagctgcct

SEQ ID NO: 129567 - DNA, 25 bp, Homo sapien
tgatctggcagacctcagctgcctg

SEQ ID NO: 129568 - DNA, 25 bp, Homo sapien
acatcagtcagttgtttgatttcat

SEQ ID NO: 129569 - DNA, 25 bp, Homo sapien
gatctggcagacctcagctgcctgg

SEQ ID NO: 129570 - DNA, 25 bp, Homo sapien
catcagtcagttgtttgatttcatc

SEQ ID NO: 129571 - DNA, 25 bp, Homo sapien
cgccgccgttacacgagcttaacta

SEQ ID NO: 129572 - DNA, 25 bp, Homo sapien
tcagccatcttcgataaaggcaaaa

SEQ ID NO: 129573 - DNA, 25 bp, Homo sapien
gagcttaactacaacgccgctaaca

SEQ ID NO: 129574 - DNA, 25 bp, Homo sapien
ccgccggaagtcgtcgaaagtgcaa

SEQ ID NO: 129575 - DNA, 25 bp, Homo sapien
tcgaaagtgcaacgcaaaagagcct

SEQ ID NO: 129576 - DNA, 25 bp, Homo sapien
taacagccaatcctcgcgagaggag

SEQ ID NO: 129577 - DNA, 25 bp, Homo sapien
tagttaagctcgtgtaacggcggcg

SEQ ID NO: 129578 - DNA, 25 bp, Homo sapien
cctctcgcgaggattggctgttagc

SEQ ID NO: 129579 - DNA, 25 bp, Homo sapien
ttgcactttcgacgacttccggcgg

SEQ ID NO: 129580 - DNA, 25 bp, Homo sapien
cctttatcgaagatggctgaaacag

SEQ ID NO: 129581 - DNA, 25 bp, Homo sapien
tgttagcggcgttgtagttaagctc

SEQ ID NO: 129582 - DNA, 25 bp, Homo sapien
aggctcttttgcgttgcactttcga

SEQ ID NO: 129583 - DNA, 25 bp, Homo sapien
cattagccctactcaaaaatggcgg

SEQ ID NO: 129584 - DNA, 25 bp, Homo sapien
tgcctcgtgaacacatctgctggtg

SEQ ID NO: 129585 - DNA, 25 bp, Homo sapien
gacccatcgttagagacctgcagga

SEQ ID NO: 129586 - DNA, 25 bp, Homo sapien
ccggtcgagtgcagtaccatgggca

SEQ ID NO: 129587 - DNA, 25 bp, Homo sapien
ccatggcagctgtagtatcggcgac

SEQ ID NO: 129588 - DNA, 25 bp, Homo sapien
caacgtaagtatcctgggccggagg

SEQ ID NO: 129589 - DNA, 25 bp, Homo sapien
caccagcagatgtgttcacgaggca

SEQ ID NO: 129590 - DNA, 25 bp, Homo sapien
gcttacagcaatctaaggtcccagg

SEQ ID NO: 129591 - DNA, 25 bp, Homo sapien
tcctgcaggtctctaacgatgggtc

SEQ ID NO: 129592 - DNA, 25 bp, Homo sapien
gagtcgccgatactacagctgccat

SEQ ID NO: 129593 - DNA, 25 bp, Homo sapien
tgtctgatgtcactgtctataccgg

SEQ ID NO: 129594 - DNA, 25 bp, Homo sapien
gcgggtaagtgactcaagcgaacct

SEQ ID NO: 129595 - DNA, 25 bp, Homo sapien
tacgtggccggaatcattcccttgg

SEQ ID NO: 129596 - DNA, 25 bp, Homo sapien
tggccggaatcattcccttggctgt

SEQ ID NO: 129597 - DNA, 25 bp, Homo sapien
tgggatgttacgtggccggaatcat

SEQ ID NO: 129598 - DNA, 25 bp, Homo sapien
ctctggctatgttggtgggatgtta

SEQ ID NO: 129599 - DNA, 25 bp, Homo sapien
tcccttggctgttaatttctcagag

SEQ ID NO: 129600 - DNA, 25 bp, Homo sapien
tttcatctccattagcctgctgtct

SEQ ID NO: 129601 - DNA, 25 bp, Homo sapien
gacagcaggctaatggagatgaaat

SEQ ID NO: 129602 - DNA, 25 bp, Homo sapien
ctctgagaaattaacagccaaggga

SEQ ID NO: 129603 - DNA, 25 bp, Homo sapien
aatgattccggccacgtaacatccc

SEQ ID NO: 129604 - DNA, 25 bp, Homo sapien
caagggaatgattccggccacgtaa

SEQ ID NO: 129605 - DNA, 25 bp, Homo sapien
acagccaagggaatgattccggcca

SEQ ID NO: 129606 - DNA, 25 bp, Homo sapien
gtaacatcccaccaacatagccaga

SEQ ID NO: 129607 - DNA, 25 bp, Homo sapien
ttgctgttttaatacatgaaaaatg

SEQ ID NO: 129608 - DNA, 25 bp, Homo sapien
tacatgaaaaatgtggcattataac

SEQ ID NO: 129609 - DNA, 25 bp, Homo sapien
aaaaatgtggcattataactcaaac

SEQ ID NO: 129610 - DNA, 25 bp, Homo sapien
catgaaaaatgtggcattataactc

SEQ ID NO: 129611 - DNA, 25 bp, Homo sapien
aggaatacctataaaagcataaaag

SEQ ID NO: 129612 - DNA, 25 bp, Homo sapien
tgactaagagagaaccgtaaagaat

SEQ ID NO: 129613 - DNA, 25 bp, Homo sapien
cgtaaagaatataatagcagggccg

SEQ ID NO: 129614 - DNA, 25 bp, Homo sapien
gatgaggaattgactaagagagaac

SEQ ID NO: 129615 - DNA, 25 bp, Homo sapien
tacaagcaggacaagaattcttccc

SEQ ID NO: 129616 - DNA, 25 bp, Homo sapien
taaacaactgcactttgacgttgtg

SEQ ID NO: 129617 - DNA, 25 bp, Homo sapien
tctactaagtgattctaaacaactg

SEQ ID NO: 129618 - DNA, 25 bp, Homo sapien
tgttaaaatcaacgtagaacctgac

SEQ ID NO: 129619 - DNA, 25 bp, Homo sapien
agcacccaaaacagtcaccagcttc

SEQ ID NO: 129620 - DNA, 25 bp, Homo sapien
aatatcttcataaagggcatgtact

SEQ ID NO: 129621 - DNA, 25 bp, Homo sapien
aaagggcatgtactccttcaggcac

SEQ ID NO: 129622 - DNA, 25 bp, Homo sapien
atatcttcataaagggcatgtactc

SEQ ID NO: 129623 - DNA, 25 bp, Homo sapien
ttcataaagggcatgtactccttca

SEQ ID NO: 129624 - DNA, 25 bp, Homo sapien
attcttgtttctatcttagcagaat

SEQ ID NO: 129625 - DNA, 25 bp, Homo sapien
tcttgtttctatcttagcagaattc

SEQ ID NO: 129626 - DNA, 25 bp, Homo sapien
tattcttgtttctatcttagcagaa

SEQ ID NO: 129627 - DNA, 25 bp, Homo sapien
gactctgatcaagcatttctgggca

SEQ ID NO: 129628 - DNA, 25 bp, Homo sapien
tattcatagtcacccaaaccaggaa

SEQ ID NO: 129629 - DNA, 25 bp, Homo sapien
tcaggatcgttggtaaagccatgtt

SEQ ID NO: 129630 - DNA, 25 bp, Homo sapien
gccagtgacctttgctcttaaccga

SEQ ID NO: 129631 - DNA, 25 bp, Homo sapien
gagccatggctgacaatagcagttt

SEQ ID NO: 129632 - DNA, 25 bp, Homo sapien
tccacagaagaacgaaaccataggc

SEQ ID NO: 129633 - DNA, 25 bp, Homo sapien
gggataatctacattgagccatggc

SEQ ID NO: 129634 - DNA, 25 bp, Homo sapien
taaagtgctgcattacccaacaatc

SEQ ID NO: 129635 - DNA, 25 bp, Homo sapien
ctccttcaacttaaagttcatgatg

SEQ ID NO: 129636 - DNA, 25 bp, Homo sapien
tgtaatccagccaatcattaactcc

SEQ ID NO: 129637 - DNA, 25 bp, Homo sapien
aaatgtcttctgcctttggcatgca

SEQ ID NO: 129638 - DNA, 25 bp, Homo sapien
actttttatattgtaatccagccaa

SEQ ID NO: 129639 - DNA, 25 bp, Homo sapien
gctgctttgtctgatgcaatcacat

SEQ ID NO: 129640 - DNA, 25 bp, Homo sapien
gctcatgttcatggacaactgattt

SEQ ID NO: 129641 - DNA, 25 bp, Homo sapien
gaaacaccaatataggcatgcagct

SEQ ID NO: 129642 - DNA, 25 bp, Homo sapien
cagtagaatgcacatgggagttacc

SEQ ID NO: 129643 - DNA, 25 bp, Homo sapien
tgctcaacttatcccacatgtggcc

SEQ ID NO: 129644 - DNA, 25 bp, Homo sapien
ggtgctcaacttatcccacatgtgg

SEQ ID NO: 129645 - DNA, 25 bp, Homo sapien
tatgttggtgctcaacttatcccac

SEQ ID NO: 129646 - DNA, 25 bp, Homo sapien
gttggtgctcaacttatcccacatg

SEQ ID NO: 129647 - DNA, 25 bp, Homo sapien
acatctgctgctcactggtggtgtt

SEQ ID NO: 129648 - DNA, 25 bp, Homo sapien
tctagaggtgcaggatgtacatctg

SEQ ID NO: 129649 - DNA, 25 bp, Homo sapien
tgtgtgtatgtccttaagactacgg

SEQ ID NO: 129650 - DNA, 25 bp, Homo sapien
tctccgggtatcacatctagaggtg

SEQ ID NO: 129651 - DNA, 25 bp, Homo sapien
tgaaactgacaagaatcacaagaaa

SEQ ID NO: 129652 - DNA, 25 bp, Homo sapien
ccatgctcagcctacgttaaattga

SEQ ID NO: 129653 - DNA, 25 bp, Homo sapien
caactgtgtgatacagccagagtcc

SEQ ID NO: 129654 - DNA, 25 bp, Homo sapien
cacccaacagtgcttctcatttgct

SEQ ID NO: 129655 - DNA, 25 bp, Homo sapien
attgtgactggcctgacaatcacca

SEQ ID NO: 129656 - DNA, 25 bp, Homo sapien
tgcagcctcgaactgaaatgattct

SEQ ID NO: 129657 - DNA, 25 bp, Homo sapien
gacaatcaccatatatatctttaga

SEQ ID NO: 129658 - DNA, 25 bp, Homo sapien
caccatatatatctttagaatcagg

SEQ ID NO: 129659 - DNA, 25 bp, Homo sapien
gaaagacagcgttaagctatgtgag

SEQ ID NO: 129660 - DNA, 25 bp, Homo sapien
gagaaagacagcgttaagctatgtg

SEQ ID NO: 129661 - DNA, 25 bp, Homo sapien
gacagcgttaagctatgtgagacag

SEQ ID NO: 129662 - DNA, 25 bp, Homo sapien
cagcgttaagctatgtgagacagaa

SEQ ID NO: 129663 - DNA, 25 bp, Homo sapien
aattgctagaccttgctgcttctgg

SEQ ID NO: 129664 - DNA, 25 bp, Homo sapien
attttggaattgctagaccttgctg

SEQ ID NO: 129665 - DNA, 25 bp, Homo sapien
tggaattgctagaccttgctgcttc

SEQ ID NO: 129666 - DNA, 25 bp, Homo sapien
tttggaattgctagaccttgctgct

SEQ ID NO: 129667 - DNA, 25 bp, Homo sapien
tgacactgagcacaccaagcttgtg

SEQ ID NO: 129668 - DNA, 25 bp, Homo sapien
gagcattcaatgaggacggtccctg

SEQ ID NO: 129669 - DNA, 25 bp, Homo sapien
tcccctgtgcgatagaaaacaaaga

SEQ ID NO: 129670 - DNA, 25 bp, Homo sapien
tataaacactaaggtctcccctgtg

SEQ ID NO: 129671 - DNA, 25 bp, Homo sapien
ctatatttggaaacaaggaaacata

SEQ ID NO: 129672 - DNA, 25 bp, Homo sapien
tatatttggaaacaaggaaacataa

SEQ ID NO: 129673 - DNA, 25 bp, Homo sapien
aacacaattaactggacactggtct

SEQ ID NO: 129674 - DNA, 25 bp, Homo sapien
gattgccacaaacacaattaactgg

SEQ ID NO: 129675 - DNA, 25 bp, Homo sapien
tgtagcatgattgccacaaacacaa

SEQ ID NO: 129676 - DNA, 25 bp, Homo sapien
cttatgtagcatgattgccacaaac

SEQ ID NO: 129677 - DNA, 25 bp, Homo sapien
taaaaaatcatctcttattatcatt

SEQ ID NO: 129678 - DNA, 25 bp, Homo sapien
gaaataaaaaatcatctcttattat

SEQ ID NO: 129679 - DNA, 25 bp, Homo sapien
ctggaaataaaaaatcatctcttat

SEQ ID NO: 129680 - DNA, 25 bp, Homo sapien
aaaaaatcatctcttattatcattc

SEQ ID NO: 129681 - DNA, 25 bp, Homo sapien
tcagtcctaagtatgtcaccatgga

SEQ ID NO: 129682 - DNA, 25 bp, Homo sapien
gctctaagccagcatgcatcaagaa

SEQ ID NO: 129683 - DNA, 25 bp, Homo sapien
gcaagtgctttctgattcgattccg

SEQ ID NO: 129684 - DNA, 25 bp, Homo sapien
tcaagaaggaaaccagtccaaaagc

SEQ ID NO: 129685 - DNA, 25 bp, Homo sapien
agacactggtttagatagctgggaa

SEQ ID NO: 129686 - DNA, 25 bp, Homo sapien
gagatcataaattctaagagatcac

SEQ ID NO: 129687 - DNA, 25 bp, Homo sapien
tggaaaaattcaatctaagagatca

SEQ ID NO: 129688 - DNA, 25 bp, Homo sapien
gaagaggacgcattggaattaagat

SEQ ID NO: 129689 - DNA, 25 bp, Homo sapien
aggacatcccatagatgcagcaagt

SEQ ID NO: 129690 - DNA, 25 bp, Homo sapien
cagcaccttcctgtcaaaaggttaa

SEQ ID NO: 129691 - DNA, 25 bp, Homo sapien
gcagcaagtaactccatgtctccag

SEQ ID NO: 129692 - DNA, 25 bp, Homo sapien
tgtctccagaattatcagcaccttc

SEQ ID NO: 129693 - DNA, 25 bp, Homo sapien
ctcccgtggcatcgggcttgtggct

SEQ ID NO: 129694 - DNA, 25 bp, Homo sapien
tgagagggatgaggcaacccagaac

SEQ ID NO: 129695 - DNA, 25 bp, Homo sapien
gcttgtggctgtgccctattccgcc

SEQ ID NO: 129696 - DNA, 25 bp, Homo sapien
gcaacataaagaaatgtcccggcag

SEQ ID NO: 129697 - DNA, 25 bp, Homo sapien
cactggatggcaaacggccctggac

SEQ ID NO: 129698 - DNA, 25 bp, Homo sapien
tagagatgcgcaaggtgagacaaga

SEQ ID NO: 129699 - DNA, 25 bp, Homo sapien
tagctgtcacgtgccggctgttctc

SEQ ID NO: 129700 - DNA, 25 bp, Homo sapien
tcccctctggactctaggaatacat

SEQ ID NO: 129701 - DNA, 25 bp, Homo sapien
tatgaccttccatcaacgcatgtgg

SEQ ID NO: 129702 - DNA, 25 bp, Homo sapien
gaggcacgtgccaaaggagctgttt

SEQ ID NO: 129703 - DNA, 25 bp, Homo sapien
tcaatggataaagtagcagagcctc

SEQ ID NO: 129704 - DNA, 25 bp, Homo sapien
tattttaagggctcaacaaagcggc

SEQ ID NO: 129705 - DNA, 25 bp, Homo sapien
caagaagtgaacacggacatggcct

SEQ ID NO: 129706 - DNA, 25 bp, Homo sapien
ttcctccagtcaagaaggcctgtgc

SEQ ID NO: 129707 - DNA, 25 bp, Homo sapien
tgagtagttctcgaggcagcagctt

SEQ ID NO: 129708 - DNA, 25 bp, Homo sapien
tctgagagctaagagggccctgaaa

SEQ ID NO: 129709 - DNA, 25 bp, Homo sapien
gaaaaaccaggcagtgacacttaga

SEQ ID NO: 129710 - DNA, 25 bp, Homo sapien
aataccagaacagggctcacttggc

SEQ ID NO: 129711 - DNA, 25 bp, Homo sapien
tatccctaccaaggaaacggagtca

SEQ ID NO: 129712 - DNA, 25 bp, Homo sapien
tcaattgcgtctctttggtagccaa

SEQ ID NO: 129713 - DNA, 25 bp, Homo sapien
gggcttaatacactccgatgctggt

SEQ ID NO: 129714 - DNA, 25 bp, Homo sapien
tgttcagtccctagctaccatgtgt

SEQ ID NO: 129715 - DNA, 25 bp, Homo sapien
tgtgctgctgtcatacggttcctgt

SEQ ID NO: 129716 - DNA, 25 bp, Homo sapien
cactgttccagctattgaaccaggg

SEQ ID NO: 129717 - DNA, 25 bp, Homo sapien
attttcatgcttcaatgctgggagg

SEQ ID NO: 129718 - DNA, 25 bp, Homo sapien
caatagcttttggtaggttcacaga

SEQ ID NO: 129719 - DNA, 25 bp, Homo sapien
tcaggagaacgtccctggtcagagt

SEQ ID NO: 129720 - DNA, 25 bp, Homo sapien
ttgcagccagctagtcagaagaaag

SEQ ID NO: 129721 - DNA, 25 bp, Homo sapien
tcttcttgaacaagccaagtaagct

SEQ ID NO: 129722 - DNA, 25 bp, Homo sapien
gtgctctagctatttgctgtgcctg

SEQ ID NO: 129723 - DNA, 25 bp, Homo sapien
ccaagtaagctctaatgttaggacc

SEQ ID NO: 129724 - DNA, 25 bp, Homo sapien
taatgttaggacctgtgctctagct

SEQ ID NO: 129725 - DNA, 25 bp, Homo sapien
catgcagtctggtaaactgcttttc

SEQ ID NO: 129726 - DNA, 25 bp, Homo sapien
acatgcagtctggtaaactgctttt

SEQ ID NO: 129727 - DNA, 25 bp, Homo sapien
cgcctctggaagtcggattgcaaca

SEQ ID NO: 129728 - DNA, 25 bp, Homo sapien
tttacaaatggttagcccgagagcc

SEQ ID NO: 129729 - DNA, 25 bp, Homo sapien
gcatttggatgtgtgacgcccacta

SEQ ID NO: 129730 - DNA, 25 bp, Homo sapien
tttgaatgtaatgcctaaaggcgca

SEQ ID NO: 129731 - DNA, 25 bp, Homo sapien
gctgcagcatcaaagcgcgctgggc

SEQ ID NO: 129732 - DNA, 25 bp, Homo sapien
ctccggattgcagagggccgggcgg

SEQ ID NO: 129733 - DNA, 25 bp, Homo sapien
gcgtcccagcgagcagagaagcaga

SEQ ID NO: 129734 - DNA, 25 bp, Homo sapien
cgctgggcactggacgcggcaccaa

SEQ ID NO: 129735 - DNA, 25 bp, Homo sapien
ttggccgacggcctgccgaaaggcc

SEQ ID NO: 129736 - DNA, 25 bp, Homo sapien
atatccagggcgtccgagtcagcct

SEQ ID NO: 129737 - DNA, 25 bp, Homo sapien
accgagttggacttggacgtgaaca

SEQ ID NO: 129738 - DNA, 25 bp, Homo sapien
gctgcactttggtgctgatatccag

SEQ ID NO: 129739 - DNA, 25 bp, Homo sapien
ggagcccacagggacaccagctcag

SEQ ID NO: 129740 - DNA, 25 bp, Homo sapien
cccacagggacaccagctcagccat

SEQ ID NO: 129741 - DNA, 25 bp, Homo sapien
atgggagcccacagggacaccagct

SEQ ID NO: 129742 - DNA, 25 bp, Homo sapien
agcccacagggacaccagctcagcc

SEQ ID NO: 129743 - DNA, 25 bp, Homo sapien
caaagctctttttttcgctctcaga

SEQ ID NO: 129744 - DNA, 25 bp, Homo sapien
tctcagagtagtaaagcagaaagct

SEQ ID NO: 129745 - DNA, 25 bp, Homo sapien
aagtatttattggtttcaaagctct

SEQ ID NO: 129746 - DNA, 25 bp, Homo sapien
gtaaagcagaaagctctctttgatg

SEQ ID NO: 129747 - DNA, 25 bp, Homo sapien
ggcccctggacaaagccagttcctg

SEQ ID NO: 129748 - DNA, 25 bp, Homo sapien
ggccagagcaagagcgcagtcccct

SEQ ID NO: 129749 - DNA, 25 bp, Homo sapien
tctccagactctctgctaggccaga

SEQ ID NO: 129750 - DNA, 25 bp, Homo sapien
ccccaggatggaagctagaccctgg

SEQ ID NO: 129751 - DNA, 25 bp, Homo sapien
gcatagggcatgctaggctcttcct

SEQ ID NO: 129752 - DNA, 25 bp, Homo sapien
atcttcatggcatagggcatgctag

SEQ ID NO: 129753 - DNA, 25 bp, Homo sapien
catggcatagggcatgctaggctct

SEQ ID NO: 129754 - DNA, 25 bp, Homo sapien
cttcatggcatagggcatgctaggc

SEQ ID NO: 129755 - DNA, 25 bp, Homo sapien
aggctggtctgctcctgcggagccc

SEQ ID NO: 129756 - DNA, 25 bp, Homo sapien
aggaagaggagccatgcgcatgcct

SEQ ID NO: 129757 - DNA, 25 bp, Homo sapien
gctggtctgctcctgcggagcccag

SEQ ID NO: 129758 - DNA, 25 bp, Homo sapien
agccatgcgcatgcctgagaggcag

SEQ ID NO: 129759 - DNA, 25 bp, Homo sapien
cactgggtctgctcaaactccgact

SEQ ID NO: 129760 - DNA, 25 bp, Homo sapien
tgggtctgctcaaactccgactcag

SEQ ID NO: 129761 - DNA, 25 bp, Homo sapien
gctcaaactccgactcagcagcaag

SEQ ID NO: 129762 - DNA, 25 bp, Homo sapien
cgactcagcagcaagcaagatgttc

SEQ ID NO: 129763 - DNA, 25 bp, Homo sapien
caccagcacggatcagttacagtag

SEQ ID NO: 129764 - DNA, 25 bp, Homo sapien
tgccacagagcacacggtcggtgtt

SEQ ID NO: 129765 - DNA, 25 bp, Homo sapien
caagagttggagacaaatggtaccc

SEQ ID NO: 129766 - DNA, 25 bp, Homo sapien
gatgctctaaaacctggcctgtctg

SEQ ID NO: 129767 - DNA, 25 bp, Homo sapien
cctgcttttccttagccaactgcag

SEQ ID NO: 129768 - DNA, 25 bp, Homo sapien
tgcttttccttagccaactgcagcc

SEQ ID NO: 129769 - DNA, 25 bp, Homo sapien
gcttttccttagccaactgcagccc

SEQ ID NO: 129770 - DNA, 25 bp, Homo sapien
tcctgcttttccttagccaactgca

SEQ ID NO: 129771 - DNA, 25 bp, Homo sapien
ctggtccccaagtgctgctaccatt

SEQ ID NO: 129772 - DNA, 25 bp, Homo sapien
gtccccaagtgctgctaccattagg

SEQ ID NO: 129773 - DNA, 25 bp, Homo sapien
aagcccctggctatagcccctggtc

SEQ ID NO: 129774 - DNA, 25 bp, Homo sapien
tgctgcatcctttaccaagcccctg

SEQ ID NO: 129775 - DNA, 25 bp, Homo sapien
gtgcatgtttaccaacctgtcaggg

SEQ ID NO: 129776 - DNA, 25 bp, Homo sapien
gatgcgtagtgtaccaggaagccct

SEQ ID NO: 129777 - DNA, 25 bp, Homo sapien
tatggagcccttactgcatgtctgg

SEQ ID NO: 129778 - DNA, 25 bp, Homo sapien
caaatgatgaagctggatccagagc

SEQ ID NO: 129779 - DNA, 25 bp, Homo sapien
agcaggcataggggagcaagtgctg

SEQ ID NO: 129780 - DNA, 25 bp, Homo sapien
caggcataggggagcaagtgctggg

SEQ ID NO: 129781 - DNA, 25 bp, Homo sapien
ctgaagcaggcataggggagcaagt

SEQ ID NO: 129782 - DNA, 25 bp, Homo sapien
gaagcaggcataggggagcaagtgc

SEQ ID NO: 129783 - DNA, 25 bp, Homo sapien
cttccacctgcactaatgtctggct

SEQ ID NO: 129784 - DNA, 25 bp, Homo sapien
gcactaatgtctggctagtaaggag

SEQ ID NO: 129785 - DNA, 25 bp, Homo sapien
ctggctagtaaggagggcagaacct

SEQ ID NO: 129786 - DNA, 25 bp, Homo sapien
tagtaaggagggcagaacctaggaa

SEQ ID NO: 129787 - DNA, 25 bp, Homo sapien
tttcctagggttatgaggggcctca

SEQ ID NO: 129788 - DNA, 25 bp, Homo sapien
tgcctgaggtggtcgctgtcacccc

SEQ ID NO: 129789 - DNA, 25 bp, Homo sapien
tatgaggggcctcatccttggaagt

SEQ ID NO: 129790 - DNA, 25 bp, Homo sapien
ctggtgcctgaggtggtcgctgtca

SEQ ID NO: 129791 - DNA, 25 bp, Homo sapien
aggcagagttcttcggtctcttcca

SEQ ID NO: 129792 - DNA, 25 bp, Homo sapien
tcttcggtctcttccatcagtttgt

SEQ ID NO: 129793 - DNA, 25 bp, Homo sapien
gagttcttcggtctcttccatcagt

SEQ ID NO: 129794 - DNA, 25 bp, Homo sapien
tctgaaggcagagttcttcggtctc

SEQ ID NO: 129795 - DNA, 25 bp, Homo sapien
tccctagtgctagaaacgtgagcca

SEQ ID NO: 129796 - DNA, 25 bp, Homo sapien
gagccattacaccacggctgctgag

SEQ ID NO: 129797 - DNA, 25 bp, Homo sapien
caacaagttacagcaagtcccaagc

SEQ ID NO: 129798 - DNA, 25 bp, Homo sapien
gagggcattatagctcccgtgaaca

SEQ ID NO: 129799 - DNA, 25 bp, Homo sapien
agagaagagtcacaggcagcaaagg

SEQ ID NO: 129800 - DNA, 25 bp, Homo sapien
agaagagtcacaggcagcaaaggaa

SEQ ID NO: 129801 - DNA, 25 bp, Homo sapien
gaggaagagaagagtcacaggcagc

SEQ ID NO: 129802 - DNA, 25 bp, Homo sapien
ggaagagaagagtcacaggcagcaa

SEQ ID NO: 129803 - DNA, 25 bp, Homo sapien
cagcacctggttaaggcgctcaagc

SEQ ID NO: 129804 - DNA, 25 bp, Homo sapien
tccagcacctggttaaggcgctcaa

SEQ ID NO: 129805 - DNA, 25 bp, Homo sapien
gcacctggttaaggcgctcaagctc

SEQ ID NO: 129806 - DNA, 25 bp, Homo sapien
ctccagcacctggttaaggcgctca

SEQ ID NO: 129807 - DNA, 25 bp, Homo sapien
ttctcttgttctacacccttaaggc

SEQ ID NO: 129808 - DNA, 25 bp, Homo sapien
ctcttgttctacacccttaaggcat

SEQ ID NO: 129809 - DNA, 25 bp, Homo sapien
tccgtgaggtgcctcagttcctttt

SEQ ID NO: 129810 - DNA, 25 bp, Homo sapien
tgctgcaaggactccgtgaggtgcc

SEQ ID NO: 129811 - DNA, 25 bp, Homo sapien
gccagtgtctgcaggtggttctcgt

SEQ ID NO: 129812 - DNA, 25 bp, Homo sapien
cagtgtctgcaggtggttctcgttc

SEQ ID NO: 129813 - DNA, 25 bp, Homo sapien
tctcctctaagagctgctgcatctt

SEQ ID NO: 129814 - DNA, 25 bp, Homo sapien
gttgctatggaggcccccactggga

SEQ ID NO: 129815 - DNA, 25 bp, Homo sapien
ctgggactggctggagtagaactca

SEQ ID NO: 129816 - DNA, 25 bp, Homo sapien
cttctccttattccgcaccttggaa

SEQ ID NO: 129817 - DNA, 25 bp, Homo sapien
tgttccaggcttcgcaaggcccctt

SEQ ID NO: 129818 - DNA, 25 bp, Homo sapien
aggtccatgcggaccttcacctcag

SEQ ID NO: 129819 - DNA, 25 bp, Homo sapien
ggagacgcctctccaggtccatgcg

SEQ ID NO: 129820 - DNA, 25 bp, Homo sapien
acggagttcttcatgatcacaggca

SEQ ID NO: 129821 - DNA, 25 bp, Homo sapien
tcttgatgcggcgagtggctgcctt

SEQ ID NO: 129822 - DNA, 25 bp, Homo sapien
cggcattccggatgcactcctcaaa

SEQ ID NO: 129823 - DNA, 25 bp, Homo sapien
tgccttatggatgtacacggagttc

SEQ ID NO: 129824 - DNA, 25 bp, Homo sapien
ctgctgagccgcttggccacctcct

SEQ ID NO: 129825 - DNA, 25 bp, Homo sapien
gggaggtcatgaaggactgggacgg

SEQ ID NO: 129826 - DNA, 25 bp, Homo sapien
gtcatgaaggactgggacggcttca

SEQ ID NO: 129827 - DNA, 25 bp, Homo sapien
atgtggtagatggattcccggaagc

SEQ ID NO: 129828 - DNA, 25 bp, Homo sapien
cagatgtgcatgtgttcttagaggc

SEQ ID NO: 129829 - DNA, 25 bp, Homo sapien
cacagaataggttgtgggctcccag

SEQ ID NO: 129830 - DNA, 25 bp, Homo sapien
tcggccagcctagcagcagatgtgc

SEQ ID NO: 129831 - DNA, 25 bp, Homo sapien
gcactttttgctgggacttgccccg

SEQ ID NO: 129832 - DNA, 25 bp, Homo sapien
cctgaggcatggaaaatacagggtg

SEQ ID NO: 129833 - DNA, 25 bp, Homo sapien
gaaaagcactgctacagtttgaatg

SEQ ID NO: 129834 - DNA, 25 bp, Homo sapien
aacacttatggattgttcagttggc

SEQ ID NO: 129835 - DNA, 25 bp, Homo sapien
ctaggtacatagtgagcttttaacg

SEQ ID NO: 129836 - DNA, 25 bp, Homo sapien
gagacttgagcaagttttgttccac

SEQ ID NO: 129837 - DNA, 25 bp, Homo sapien
ggggcttacaaaggtcaaatcagat

SEQ ID NO: 129838 - DNA, 25 bp, Homo sapien
cagtgagcatgagcaagaccgccat

SEQ ID NO: 129839 - DNA, 25 bp, Homo sapien
gcagtgagcatgagcaagaccgcca

SEQ ID NO: 129840 - DNA, 25 bp, Homo sapien
tcaaacaaggggcttacaaaggtca

SEQ ID NO: 129841 - DNA, 25 bp, Homo sapien
aggccttatgcttaatgccaaacag

SEQ ID NO: 129842 - DNA, 25 bp, Homo sapien
ggcggccgtgtctcgcccaccctgg

SEQ ID NO: 129843 - DNA, 25 bp, Homo sapien
tgaaggaaggcggccgtgtctcgcc

SEQ ID NO: 129844 - DNA, 25 bp, Homo sapien
aggccacacgcgtgtcccagcgtgg

SEQ ID NO: 129845 - DNA, 25 bp, Homo sapien
ctggcaaggccacacgcgtgtccca

SEQ ID NO: 129846 - DNA, 25 bp, Homo sapien
acctggaggcctgcaaccaatggtg

SEQ ID NO: 129847 - DNA, 25 bp, Homo sapien
gaggcctgcaaccaatggtgtctct

SEQ ID NO: 129848 - DNA, 25 bp, Homo sapien
ggcgttctcgctgttgattatcccg

SEQ ID NO: 129849 - DNA, 25 bp, Homo sapien
tggagcccgcaaggctttgtctgtg

SEQ ID NO: 129850 - DNA, 25 bp, Homo sapien
cacaaattcctgcagacgactgacg

SEQ ID NO: 129851 - DNA, 25 bp, Homo sapien
aaattcctgcagacgactgacgctg

SEQ ID NO: 129852 - DNA, 25 bp, Homo sapien
agacgactgacgctgcgtgccacct

SEQ ID NO: 129853 - DNA, 25 bp, Homo sapien
tcctgcagacgactgacgctgcgtg

SEQ ID NO: 129854 - DNA, 25 bp, Homo sapien
ccaggcgtcactggcagaatggtgt

SEQ ID NO: 129855 - DNA, 25 bp, Homo sapien
gatgccatgggagatccaggcgtca

SEQ ID NO: 129856 - DNA, 25 bp, Homo sapien
gagatccaggcgtcactggcagaat

SEQ ID NO: 129857 - DNA, 25 bp, Homo sapien
ccatgggagatccaggcgtcactgg

SEQ ID NO: 129858 - DNA, 25 bp, Homo sapien
aagctgcagcaatgccgggccgagc

SEQ ID NO: 129859 - DNA, 25 bp, Homo sapien
ggagcggcgcgccaagctgcagcaa

SEQ ID NO: 129860 - DNA, 25 bp, Homo sapien
gggccgagcgcgagcgcatcatgcg

SEQ ID NO: 129861 - DNA, 25 bp, Homo sapien
catcatgcgcgaggagaagcggcgt

SEQ ID NO: 129862 - DNA, 25 bp, Homo sapien
aggcccatctgtagcctttctagag

SEQ ID NO: 129863 - DNA, 25 bp, Homo sapien
gtagcctttctagaggcaccgaatg

SEQ ID NO: 129864 - DNA, 25 bp, Homo sapien
cagcaggcccatctgtagcctttct

SEQ ID NO: 129865 - DNA, 25 bp, Homo sapien
tctagaggcaccgaatgttcagttt

SEQ ID NO: 129866 - DNA, 25 bp, Homo sapien
tgctctcgatccacaggcaacatct

SEQ ID NO: 129867 - DNA, 25 bp, Homo sapien
ttgttcaggctcaagaccttgcgcc

SEQ ID NO: 129868 - DNA, 25 bp, Homo sapien
caaagagctgcagcgtttatgtggc

SEQ ID NO: 129869 - DNA, 25 bp, Homo sapien
tcccagccctagtcagcaaagagct

SEQ ID NO: 129870 - DNA, 25 bp, Homo sapien
ggccaatttccagcacaaatcttaa

SEQ ID NO: 129871 - DNA, 25 bp, Homo sapien
ttaatattctgctctaaatctaggt

SEQ ID NO: 129872 - DNA, 25 bp, Homo sapien
tccagcacaaatcttaatattctgc

SEQ ID NO: 129873 - DNA, 25 bp, Homo sapien
tctgctctaaatctaggtgctggaa

SEQ ID NO: 129874 - DNA, 25 bp, Homo sapien
caaggactgtagtatcctgtgctgt

SEQ ID NO: 129875 - DNA, 25 bp, Homo sapien
atcagcaaggactgtagtatcctgt

SEQ ID NO: 129876 - DNA, 25 bp, Homo sapien
actgtagtatcctgtgctgtccaca

SEQ ID NO: 129877 - DNA, 25 bp, Homo sapien
acagtccggcccaaatgctctccat

SEQ ID NO: 129878 - DNA, 25 bp, Homo sapien
cggtcgccggcttcggagaatagaa

SEQ ID NO: 129879 - DNA, 25 bp, Homo sapien
tgacccagctgtaccgcgcgggcgg

SEQ ID NO: 129880 - DNA, 25 bp, Homo sapien
cttcggagaatagaacgcggcggta

SEQ ID NO: 129881 - DNA, 25 bp, Homo sapien
ccggcttcggagaatagaacgcggc

SEQ ID NO: 129882 - DNA, 25 bp, Homo sapien
ctcacagcttccacgccgccgcttg

SEQ ID NO: 129883 - DNA, 25 bp, Homo sapien
cgtgcccttgtctagctcgctctgg

SEQ ID NO: 129884 - DNA, 25 bp, Homo sapien
gcgcccgcagtcttctcgggtctag

SEQ ID NO: 129885 - DNA, 25 bp, Homo sapien
ttctcgggtctaggcgaggccccgc

SEQ ID NO: 129886 - DNA, 25 bp, Homo sapien
ctcgcggccgggtgacagcgggccg

SEQ ID NO: 129887 - DNA, 25 bp, Homo sapien
cagcgtcactcctgggcggtgcgcg

SEQ ID NO: 129888 - DNA, 25 bp, Homo sapien
gggctccggccagcgtcactcctgg

SEQ ID NO: 129889 - DNA, 25 bp, Homo sapien
ggccgggtgacagcgggccggcgca

SEQ ID NO: 129890 - DNA, 25 bp, Homo sapien
gcgggtcaccaagttcccggccgca

SEQ ID NO: 129891 - DNA, 25 bp, Homo sapien
tgcccgggcagcgacgcgggacggc

SEQ ID NO: 129892 - DNA, 25 bp, Homo sapien
tggctcttccggtgctgcccgggca

SEQ ID NO: 129893 - DNA, 25 bp, Homo sapien
tcctctgcacccatcggcacggcgt

SEQ ID NO: 129894 - DNA, 25 bp, Homo sapien
tactatggagctcgtgagaaacctg

SEQ ID NO: 129895 - DNA, 25 bp, Homo sapien
gagtgaacagatcttgacgcgcaag

SEQ ID NO: 129896 - DNA, 25 bp, Homo sapien
tctgctgcgaaaacctaagccttgt

SEQ ID NO: 129897 - DNA, 25 bp, Homo sapien
ggacagtccacccaaaggttcctga

SEQ ID NO: 129898 - DNA, 25 bp, Homo sapien
tgcaaggtccaccagtggagcgact

SEQ ID NO: 129899 - DNA, 25 bp, Homo sapien
tcccaagccttgacagtagtacagt

SEQ ID NO: 129900 - DNA, 25 bp, Homo sapien
tacagttggcctttcacggctgaag

SEQ ID NO: 129901 - DNA, 25 bp, Homo sapien
gagagagcaaatggaggcaccctgc

SEQ ID NO: 129902 - DNA, 25 bp, Homo sapien
ttcctgctgtcgctgtatccagtac

SEQ ID NO: 129903 - DNA, 25 bp, Homo sapien
ggagactacatcacaggcaacacca

SEQ ID NO: 129904 - DNA, 25 bp, Homo sapien
gggagggagactacatcacaggcaa

SEQ ID NO: 129905 - DNA, 25 bp, Homo sapien
agggagactacatcacaggcaacac

SEQ ID NO: 129906 - DNA, 25 bp, Homo sapien
agccagggagggagactacatcaca

SEQ ID NO: 129907 - DNA, 25 bp, Homo sapien
aacactggcgacagtaacagggaac

SEQ ID NO: 129908 - DNA, 25 bp, Homo sapien
tgccgtctgcaaacccactgagaat

SEQ ID NO: 129909 - DNA, 25 bp, Homo sapien
ttccctcaaatcaaggaaggaggct

SEQ ID NO: 129910 - DNA, 25 bp, Homo sapien
ttttaaggatctactaacactggcg

SEQ ID NO: 129911 - DNA, 25 bp, Homo sapien
cttcaaacagtttgcatagactgct

SEQ ID NO: 129912 - DNA, 25 bp, Homo sapien
aggaagaattggataaacaggctct

SEQ ID NO: 129913 - DNA, 25 bp, Homo sapien
tgcagttaccttttacaagcctccg

SEQ ID NO: 129914 - DNA, 25 bp, Homo sapien
attaagcaaaatcaccttgtaccct

SEQ ID NO: 129915 - DNA, 25 bp, Homo sapien
ctaggtgggattgtagagaaatagg

SEQ ID NO: 129916 - DNA, 25 bp, Homo sapien
taggtgggattgtagagaaataggg

SEQ ID NO: 129917 - DNA, 25 bp, Homo sapien
gctaggtgggattgtagagaaatag

SEQ ID NO: 129918 - DNA, 25 bp, Homo sapien
gcgtctgtcaactctcaccaatggt

SEQ ID NO: 129919 - DNA, 25 bp, Homo sapien
gattcagggcaatatccgcaacacc

SEQ ID NO: 129920 - DNA, 25 bp, Homo sapien
gaatttaggcactatcgcgtctgtc

SEQ ID NO: 129921 - DNA, 25 bp, Homo sapien
tcaaacaaactgcataacctaggag

SEQ ID NO: 129922 - DNA, 25 bp, Homo sapien
aatatgaaccacgacaccctgctgg

SEQ ID NO: 129923 - DNA, 25 bp, Homo sapien
gaattggacttaatgactcactgcc

SEQ ID NO: 129924 - DNA, 25 bp, Homo sapien
acaaagaggtgatcacaccgggagg

SEQ ID NO: 129925 - DNA, 25 bp, Homo sapien
ccgggagggaaaagcactagactag

SEQ ID NO: 129926 - DNA, 25 bp, Homo sapien
accgtaccaggccaggtggcatttt

SEQ ID NO: 129927 - DNA, 25 bp, Homo sapien
ttaaaagttaagcaggcacagccta

SEQ ID NO: 129928 - DNA, 25 bp, Homo sapien
tacacagcacagagatttaaaagtt

SEQ ID NO: 129929 - DNA, 25 bp, Homo sapien
acagcctaaacacaactacaccgat

SEQ ID NO: 129930 - DNA, 25 bp, Homo sapien
cacagaaagctataccaacaccaaa

SEQ ID NO: 129931 - DNA, 25 bp, Homo sapien
agttcagatgtgttgcctgaaaacc

SEQ ID NO: 129932 - DNA, 25 bp, Homo sapien
cataagcccgtaaggtcaaggctgc

SEQ ID NO: 129933 - DNA, 25 bp, Homo sapien
gccgcgatggtaccactacactcta

SEQ ID NO: 129934 - DNA, 25 bp, Homo sapien
tttactgggtacttaactatgtgcc

SEQ ID NO: 129935 - DNA, 25 bp, Homo sapien
tgctaacccaacatctagccttagg

SEQ ID NO: 129936 - DNA, 25 bp, Homo sapien
aggtaaagttacactcactgcctcc

SEQ ID NO: 129937 - DNA, 25 bp, Homo sapien
tagccttaggacaagtcacccacta

SEQ ID NO: 129938 - DNA, 25 bp, Homo sapien
gaagcctccgtggtttgctgccacc

SEQ ID NO: 129939 - DNA, 25 bp, Homo sapien
ctgagcttcacatccgcagtcctgg

SEQ ID NO: 129940 - DNA, 25 bp, Homo sapien
tccagaccggccatgttctgctgag

SEQ ID NO: 129941 - DNA, 25 bp, Homo sapien
gtctgcacatccgagaagcctccgt

SEQ ID NO: 129942 - DNA, 25 bp, Homo sapien
cagtgaggactccagcagcagagat

SEQ ID NO: 129943 - DNA, 25 bp, Homo sapien
gaggatgagcagacgcgggtggtgt

SEQ ID NO: 129944 - DNA, 25 bp, Homo sapien
agtgaggactccagcagcagagatg

SEQ ID NO: 129945 - DNA, 25 bp, Homo sapien
acaggccatccaggttgaaagcggg

SEQ ID NO: 129946 - DNA, 25 bp, Homo sapien
acagaaacaagagggctgcctttcc

SEQ ID NO: 129947 - DNA, 25 bp, Homo sapien
gggcattcctggccaacttgaacag

SEQ ID NO: 129948 - DNA, 25 bp, Homo sapien
tcattcctgggcattcctggccaac

SEQ ID NO: 129949 - DNA, 25 bp, Homo sapien
tccgactcatccctgagaggaaaag

SEQ ID NO: 129950 - DNA, 25 bp, Homo sapien
cggagaggagaaccgtgttctagca

SEQ ID NO: 129951 - DNA, 25 bp, Homo sapien
tgttctagcagggtgaacctggcaa

SEQ ID NO: 129952 - DNA, 25 bp, Homo sapien
gccagcggatgacaaggtctggtta

SEQ ID NO: 129953 - DNA, 25 bp, Homo sapien
gaaacagcctggaaggccagcggat

SEQ ID NO: 129954 - DNA, 25 bp, Homo sapien
agaggacagcaatctgcacgtgctt

SEQ ID NO: 129955 - DNA, 25 bp, Homo sapien
tggaagcaattcttgcaagagtgtc

SEQ ID NO: 129956 - DNA, 25 bp, Homo sapien
agcaatctgcacgtgcttgcctgcc

SEQ ID NO: 129957 - DNA, 25 bp, Homo sapien
gcccatccctggtggaagcaattct

SEQ ID NO: 129958 - DNA, 25 bp, Homo sapien
cagaagaatcctaaagtcggccggg

SEQ ID NO: 129959 - DNA, 25 bp, Homo sapien
tccagaagaatcctaaagtcggccg

SEQ ID NO: 129960 - DNA, 25 bp, Homo sapien
gaatcctaaagtcggccgggagctg

SEQ ID NO: 129961 - DNA, 25 bp, Homo sapien
aaaatccagaagaatcctaaagtcg

SEQ ID NO: 129962 - DNA, 25 bp, Homo sapien
caagcagggtgcaaaggatcactag

SEQ ID NO: 129963 - DNA, 25 bp, Homo sapien
ggaagcaagtccgtctccaagcagg

SEQ ID NO: 129964 - DNA, 25 bp, Homo sapien
gatcactagcggaaggaacactcca

SEQ ID NO: 129965 - DNA, 25 bp, Homo sapien
cggaggccacggcaaacactgaggt

SEQ ID NO: 129966 - DNA, 25 bp, Homo sapien
aggcttttcctgaattaaactgcct

SEQ ID NO: 129967 - DNA, 25 bp, Homo sapien
ctgaattaaactgcctttcctcggc

SEQ ID NO: 129968 - DNA, 25 bp, Homo sapien
gaagaggaaaagaggcttttcctga

SEQ ID NO: 129969 - DNA, 25 bp, Homo sapien
aagaggcttttcctgaattaaactg

SEQ ID NO: 129970 - DNA, 25 bp, Homo sapien
ctgagggacgtagagttcgagaaac

SEQ ID NO: 129971 - DNA, 25 bp, Homo sapien
gaactaggattcaaaccagcgtgtc

SEQ ID NO: 129972 - DNA, 25 bp, Homo sapien
gatctcagtgtagacttctctccct

SEQ ID NO: 129973 - DNA, 25 bp, Homo sapien
tccaccagagtgaaagagaacactt

SEQ ID NO: 129974 - DNA, 25 bp, Homo sapien
caagctttagatttcgattccatag

SEQ ID NO: 129975 - DNA, 25 bp, Homo sapien
gattccataggtttgggcttcaagc

SEQ ID NO: 129976 - DNA, 25 bp, Homo sapien
ttatcacatttagaagtccaagctt

SEQ ID NO: 129977 - DNA, 25 bp, Homo sapien
gaaacttgtgtttgatcttgcatac

SEQ ID NO: 129978 - DNA, 25 bp, Homo sapien
tgacacttcctggtacacatcagag

SEQ ID NO: 129979 - DNA, 25 bp, Homo sapien
ttagcactgtgatgcagaacctggc

SEQ ID NO: 129980 - DNA, 25 bp, Homo sapien
gacctgaagaatacaccaagcacct

SEQ ID NO: 129981 - DNA, 25 bp, Homo sapien
aactggcctgagcaggacactcggg

SEQ ID NO: 129982 - DNA, 25 bp, Homo sapien
tagggtagtatgcaaggaccagacc

SEQ ID NO: 129983 - DNA, 25 bp, Homo sapien
tagagtttcaaacctgggagcccac

SEQ ID NO: 129984 - DNA, 25 bp, Homo sapien
tctagtttcacttttggcgagccag

SEQ ID NO: 129985 - DNA, 25 bp, Homo sapien
tacaaaaggtgaggacggaactgcc

SEQ ID NO: 129986 - DNA, 25 bp, Homo sapien
gtcaaattcaatctgaagaacagca

SEQ ID NO: 129987 - DNA, 25 bp, Homo sapien
cggggtcaaattcaatctgaagaac

SEQ ID NO: 129988 - DNA, 25 bp, Homo sapien
gctgaaaacggggtcaaattcaatc

SEQ ID NO: 129989 - DNA, 25 bp, Homo sapien
gaaaacggggtcaaattcaatctga

SEQ ID NO: 129990 - DNA, 25 bp, Homo sapien
ttgagtttagccaccatcctgctgg

SEQ ID NO: 129991 - DNA, 25 bp, Homo sapien
agtgcctgagctacctgaaagttgc

SEQ ID NO: 129992 - DNA, 25 bp, Homo sapien
ccccaggtaggtgtgaacttaagca

SEQ ID NO: 129993 - DNA, 25 bp, Homo sapien
gaagcctccctagacagacatcagg

SEQ ID NO: 129994 - DNA, 25 bp, Homo sapien
cctctctcttggtttgagtattgcc

SEQ ID NO: 129995 - DNA, 25 bp, Homo sapien
tcttggtttgagtattgcctttcca

SEQ ID NO: 129996 - DNA, 25 bp, Homo sapien
gtatccccgagtctgaggtagtcat

SEQ ID NO: 129997 - DNA, 25 bp, Homo sapien
gtagtcatataggaaccaaaactcc

SEQ ID NO: 129998 - DNA, 25 bp, Homo sapien
ttcaccataataacgggagcagctg

SEQ ID NO: 129999 - DNA, 25 bp, Homo sapien
tctgcaacactaagggcatgagaac

SEQ ID NO: 130000 - DNA, 25 bp, Homo sapien
agctgactgaccaaacagtttctgc

SEQ ID NO: 130001 - DNA, 25 bp, Homo sapien
gacctctatgatatcaaaacccagg

SEQ ID NO: 130002 - DNA, 25 bp, Homo sapien
aacagaaatggttggaatgatgcac

SEQ ID NO: 130003 - DNA, 25 bp, Homo sapien
gatgcacatcaacttaggatactgg

SEQ ID NO: 130004 - DNA, 25 bp, Homo sapien
taggaatacaggtttaagtatccaa

SEQ ID NO: 130005 - DNA, 25 bp, Homo sapien
aacaccaaatgcactgcacattttt

SEQ ID NO: 130006 - DNA, 25 bp, Homo sapien
taaaagaaatgtactaacatagcca

SEQ ID NO: 130007 - DNA, 25 bp, Homo sapien
caattatactgttacatatcatcac

SEQ ID NO: 130008 - DNA, 25 bp, Homo sapien
gatccatcagtgagagaatggttat

SEQ ID NO: 130009 - DNA, 25 bp, Homo sapien
caatggaatgctatactgcaggtaa

SEQ ID NO: 130010 - DNA, 25 bp, Homo sapien
caagttaccgctgcagcacatgcgg

SEQ ID NO: 130011 - DNA, 25 bp, Homo sapien
cagagtacaggttgttcccatgaca

SEQ ID NO: 130012 - DNA, 25 bp, Homo sapien
tcacgactgctcaagaggttctttc

SEQ ID NO: 130013 - DNA, 25 bp, Homo sapien
tttttctcttcacaactgagcaggg

SEQ ID NO: 130014 - DNA, 25 bp, Homo sapien
attataagaaagtcaactcagaaag

SEQ ID NO: 130015 - DNA, 25 bp, Homo sapien
tataagaaagtcaactcagaaagcc

SEQ ID NO: 130016 - DNA, 25 bp, Homo sapien
tttagagacaatcttggacaacata

SEQ ID NO: 130017 - DNA, 25 bp, Homo sapien
ttggacaacataacctgggcatttt

SEQ ID NO: 130018 - DNA, 25 bp, Homo sapien
gggtcacaggtcctctatgcacaag

SEQ ID NO: 130019 - DNA, 25 bp, Homo sapien
aatgggtcccattgtgcctgcatgc

SEQ ID NO: 130020 - DNA, 25 bp, Homo sapien
cagatggcctatccctggaggactg

SEQ ID NO: 130021 - DNA, 25 bp, Homo sapien
gcatgcatgagctctcacgtccagg

SEQ ID NO: 130022 - DNA, 25 bp, Homo sapien
aaactattttccaatgggctggatg

SEQ ID NO: 130023 - DNA, 25 bp, Homo sapien
gaagaaaacggaaaatccattgcga

SEQ ID NO: 130024 - DNA, 25 bp, Homo sapien
actattttccaatgggctggatgtg

SEQ ID NO: 130025 - DNA, 25 bp, Homo sapien
ccattgcgagttttccagtgcagat

SEQ ID NO: 130026 - DNA, 25 bp, Homo sapien
tcttacaagctttctctttgaatcc

SEQ ID NO: 130027 - DNA, 25 bp, Homo sapien
ctctgctcctcttacaagctttctc

SEQ ID NO: 130028 - DNA, 25 bp, Homo sapien
gctcctggaagatccctctgctcct

SEQ ID NO: 130029 - DNA, 25 bp, Homo sapien
cgtgctcctggaagatccctctgct

SEQ ID NO: 130030 - DNA, 25 bp, Homo sapien
tctgttttgaacaatcttaaatcac

SEQ ID NO: 130031 - DNA, 25 bp, Homo sapien
aaatgaccaccacgggaaaagcagt

SEQ ID NO: 130032 - DNA, 25 bp, Homo sapien
tcttgtgcgggatgagattctctgt

SEQ ID NO: 130033 - DNA, 25 bp, Homo sapien
gcagtttgccatgccttcttggttt

SEQ ID NO: 130034 - DNA, 25 bp, Homo sapien
ggtaacagaaatccactgaggcaat

SEQ ID NO: 130035 - DNA, 25 bp, Homo sapien
cactgggttatcactgccaaagcct

SEQ ID NO: 130036 - DNA, 25 bp, Homo sapien
cactgctactcacaaaggcctagac

SEQ ID NO: 130037 - DNA, 25 bp, Homo sapien
tgtgacctggaattagagggctacc

SEQ ID NO: 130038 - DNA, 25 bp, Homo sapien
attccaggttcgcagaaggaagctc

SEQ ID NO: 130039 - DNA, 25 bp, Homo sapien
gcaccaggatcattctctgacaatt

SEQ ID NO: 130040 - DNA, 25 bp, Homo sapien
ctgacaattccaggttcgcagaagg

SEQ ID NO: 130041 - DNA, 25 bp, Homo sapien
ctgtgcaccaggatcattctctgac

SEQ ID NO: 130042 - DNA, 25 bp, Homo sapien
cacacaagtccaatgtgctgggaag

SEQ ID NO: 130043 - DNA, 25 bp, Homo sapien
gagctgctgattctaaagccactcc

SEQ ID NO: 130044 - DNA, 25 bp, Homo sapien
ccacacacaagtccaatgtgctggg

SEQ ID NO: 130045 - DNA, 25 bp, Homo sapien
ggaagagctgctgattctaaagcca

SEQ ID NO: 130046 - DNA, 25 bp, Homo sapien
gcataattaatgctgagcaccccat

SEQ ID NO: 130047 - DNA, 25 bp, Homo sapien
ccgtggcataattaatgctgagcac

SEQ ID NO: 130048 - DNA, 25 bp, Homo sapien
tggcataattaatgctgagcacccc

SEQ ID NO: 130049 - DNA, 25 bp, Homo sapien
taattaatgctgagcaccccatggc

SEQ ID NO: 130050 - DNA, 25 bp, Homo sapien
cttggactgtgtctaattggttcat

SEQ ID NO: 130051 - DNA, 25 bp, Homo sapien
tccttggactgtgtctaattggttc

SEQ ID NO: 130052 - DNA, 25 bp, Homo sapien
tctccttggactgtgtctaattggt

SEQ ID NO: 130053 - DNA, 25 bp, Homo sapien
ctctccttggactgtgtctaattgg

SEQ ID NO: 130054 - DNA, 25 bp, Homo sapien
tcaacatgtagccttcagcacacag

SEQ ID NO: 130055 - DNA, 25 bp, Homo sapien
caggtatttgtaatcgcccttcaac

SEQ ID NO: 130056 - DNA, 25 bp, Homo sapien
cacacaggtattcgatgacactgcc

SEQ ID NO: 130057 - DNA, 25 bp, Homo sapien
tagccaccattctctggctccggtg

SEQ ID NO: 130058 - DNA, 25 bp, Homo sapien
aagatggttatatgacacactttcc

SEQ ID NO: 130059 - DNA, 25 bp, Homo sapien
cacactttcctgcaagcaggtggat

SEQ ID NO: 130060 - DNA, 25 bp, Homo sapien
tgggttaaacatgctctggtcttga

SEQ ID NO: 130061 - DNA, 25 bp, Homo sapien
gggtgtcatgggttaaacatgctct

SEQ ID NO: 130062 - DNA, 25 bp, Homo sapien
ccaagtgatgtgtgggtgtctttat

SEQ ID NO: 130063 - DNA, 25 bp, Homo sapien
ccccaagtgatgtgtgggtgtcttt

SEQ ID NO: 130064 - DNA, 25 bp, Homo sapien
gaccccaagtgatgtgtgggtgtct

SEQ ID NO: 130065 - DNA, 25 bp, Homo sapien
gggaccccaagtgatgtgtgggtgt

SEQ ID NO: 130066 - DNA, 25 bp, Homo sapien
gagaatgagcgccacggagctggca

SEQ ID NO: 130067 - DNA, 25 bp, Homo sapien
aatgagcgccacggagctggcagta

SEQ ID NO: 130068 - DNA, 25 bp, Homo sapien
cgccacggagctggcagtagaagcc

SEQ ID NO: 130069 - DNA, 25 bp, Homo sapien
cgaggaggagaatgagcgccacgga

SEQ ID NO: 130070 - DNA, 25 bp, Homo sapien
catctgtgtactcctctgacgtgag

SEQ ID NO: 130071 - DNA, 25 bp, Homo sapien
tgatggtagtgcaacctggactcca

SEQ ID NO: 130072 - DNA, 25 bp, Homo sapien
tatacagcctcctcgtatgatggta

SEQ ID NO: 130073 - DNA, 25 bp, Homo sapien
catcacagtctctgaggcccgagag

SEQ ID NO: 130074 - DNA, 25 bp, Homo sapien
ttcatgttcagcttggaccactcac

SEQ ID NO: 130075 - DNA, 25 bp, Homo sapien
taattcatgttcagcttggaccact

SEQ ID NO: 130076 - DNA, 25 bp, Homo sapien
ctaataattcatgttcagcttggac

SEQ ID NO: 130077 - DNA, 25 bp, Homo sapien
aataattcatgttcagcttggacca

SEQ ID NO: 130078 - DNA, 25 bp, Homo sapien
tcatgcttctttcaacagtggaata

SEQ ID NO: 130079 - DNA, 25 bp, Homo sapien
catgcttctttcaacagtggaatat

SEQ ID NO: 130080 - DNA, 25 bp, Homo sapien
ctgagagaacctcgcagagaggaaa

SEQ ID NO: 130081 - DNA, 25 bp, Homo sapien
caggcagatggcgagaatcttcctt

SEQ ID NO: 130082 - DNA, 25 bp, Homo sapien
ttccagcaaggtgggcctatagggc

SEQ ID NO: 130083 - DNA, 25 bp, Homo sapien
cagggtgctcaatcccacagggaga

SEQ ID NO: 130084 - DNA, 25 bp, Homo sapien
ggagggtttgatccagcacattcaa

SEQ ID NO: 130085 - DNA, 25 bp, Homo sapien
ctaaggcttgtggacagcaacaagt

SEQ ID NO: 130086 - DNA, 25 bp, Homo sapien
taaggactgtccctattccgagagc

SEQ ID NO: 130087 - DNA, 25 bp, Homo sapien
aatgccctagaggtgagcccggtaa

SEQ ID NO: 130088 - DNA, 25 bp, Homo sapien
tcagccaaggaaatatgccaccagg

SEQ ID NO: 130089 - DNA, 25 bp, Homo sapien
gaaactctcaactcaacagggccag

SEQ ID NO: 130090 - DNA, 25 bp, Homo sapien
tgttgaatcagctgcgcattgtggc

SEQ ID NO: 130091 - DNA, 25 bp, Homo sapien
cagatctggagttactgcaggccaa

SEQ ID NO: 130092 - DNA, 25 bp, Homo sapien
cagatattaagacactgggctgtga

SEQ ID NO: 130093 - DNA, 25 bp, Homo sapien
caaagtcagggttaatcagaatgcc

SEQ ID NO: 130094 - DNA, 25 bp, Homo sapien
tgagccctgctgacacgcttcatct

SEQ ID NO: 130095 - DNA, 25 bp, Homo sapien
tacttactcccacagaaaactctgc

SEQ ID NO: 130096 - DNA, 25 bp, Homo sapien
aaactctgctatggggaagtccatg

SEQ ID NO: 130097 - DNA, 25 bp, Homo sapien
ctgctgacacgcttcatctgcaata

SEQ ID NO: 130098 - DNA, 25 bp, Homo sapien
gttgagccatagtcttgtcgcatac

SEQ ID NO: 130099 - DNA, 25 bp, Homo sapien
cccacgctgggtgcatttgtgttga

SEQ ID NO: 130100 - DNA, 25 bp, Homo sapien
tccctaaaagtctctggaccccagc

SEQ ID NO: 130101 - DNA, 25 bp, Homo sapien
tgctcaaggccctcaagaggccaac

SEQ ID NO: 130102 - DNA, 25 bp, Homo sapien
agccggcccggcttcgtgggatcct

SEQ ID NO: 130103 - DNA, 25 bp, Homo sapien
attcgacactagatggcgccagcgg

SEQ ID NO: 130104 - DNA, 25 bp, Homo sapien
cagagggaggaaatcggaccctccg

SEQ ID NO: 130105 - DNA, 25 bp, Homo sapien
cgggccgagaccacaaatccaaggt

SEQ ID NO: 130106 - DNA, 25 bp, Homo sapien
tgaattaagcaaacatgcgccctgt

SEQ ID NO: 130107 - DNA, 25 bp, Homo sapien
gcaaagctaacccagacatgctgag

SEQ ID NO: 130108 - DNA, 25 bp, Homo sapien
tgatttgatataggacaggctggca

SEQ ID NO: 130109 - DNA, 25 bp, Homo sapien
gcttgcaaacaagactgggctgagg

SEQ ID NO: 130110 - DNA, 25 bp, Homo sapien
catcctggctaacgtggcaaaaccc

SEQ ID NO: 130111 - DNA, 25 bp, Homo sapien
accatcctggctaacgtggcaaaac

SEQ ID NO: 130112 - DNA, 25 bp, Homo sapien
ctcaggagggcgagacaggagaatc

SEQ ID NO: 130113 - DNA, 25 bp, Homo sapien
atcgcttgaacccgggaggcggagg

SEQ ID NO: 130114 - DNA, 25 bp, Homo sapien
gatttctgcatgtccgtcactctgg

SEQ ID NO: 130115 - DNA, 25 bp, Homo sapien
taagtccttggcgttcggttcatca

SEQ ID NO: 130116 - DNA, 25 bp, Homo sapien
tctcctgagaaaagtggcaaccctt

SEQ ID NO: 130117 - DNA, 25 bp, Homo sapien
taaatttgccctcaaagcagggagc

SEQ ID NO: 130118 - DNA, 25 bp, Homo sapien
gacggggtctttggcggctgagacc

SEQ ID NO: 130119 - DNA, 25 bp, Homo sapien
gtctttggcggctgagacccagaca

SEQ ID NO: 130120 - DNA, 25 bp, Homo sapien
gggtctttggcggctgagacccaga

SEQ ID NO: 130121 - DNA, 25 bp, Homo sapien
cggacggggtctttggcggctgaga

SEQ ID NO: 130122 - DNA, 25 bp, Homo sapien
gaatcaactgcgctcattagacgcc

SEQ ID NO: 130123 - DNA, 25 bp, Homo sapien
tgaagaagcctcgatccgagaaggc

SEQ ID NO: 130124 - DNA, 25 bp, Homo sapien
cgctcacgatctgagcggccatgaa

SEQ ID NO: 130125 - DNA, 25 bp, Homo sapien
ttagacgccatcctccgcaaagaga

SEQ ID NO: 130126 - DNA, 25 bp, Homo sapien
tgaagacattaagactggcagggac

SEQ ID NO: 130127 - DNA, 25 bp, Homo sapien
gacgggcgcacaaccgctgtgtaaa

SEQ ID NO: 130128 - DNA, 25 bp, Homo sapien
catctgccgcagttaggaaaggccg

SEQ ID NO: 130129 - DNA, 25 bp, Homo sapien
tatgccaaaagggagacgtgcccca

SEQ ID NO: 130130 - DNA, 25 bp, Homo sapien
ccttgaagaatctttccacgtcctt

SEQ ID NO: 130131 - DNA, 25 bp, Homo sapien
tccctggccgctggatttagtctcc

SEQ ID NO: 130132 - DNA, 25 bp, Homo sapien
ttatccgtccatatcccttgaagaa

SEQ ID NO: 130133 - DNA, 25 bp, Homo sapien
cgatgaatacccgacagccactcat

SEQ ID NO: 130134 - DNA, 25 bp, Homo sapien
caacacattaagagcactgaaatca

SEQ ID NO: 130135 - DNA, 25 bp, Homo sapien
tggctttagaagagtattctacaac

SEQ ID NO: 130136 - DNA, 25 bp, Homo sapien
aaaatgtaagcataagactcttaac

SEQ ID NO: 130137 - DNA, 25 bp, Homo sapien
cataagactcttaacattggcttta

SEQ ID NO: 130138 - DNA, 25 bp, Homo sapien
tttccatcaagctcatacacagcat

SEQ ID NO: 130139 - DNA, 25 bp, Homo sapien
tcttttccatcaagctcatacacag

SEQ ID NO: 130140 - DNA, 25 bp, Homo sapien
cagcatcatctgcatcccttggatc

SEQ ID NO: 130141 - DNA, 25 bp, Homo sapien
ccatcaagctcatacacagcatcat

SEQ ID NO: 130142 - DNA, 25 bp, Homo sapien
tctccgttacacacttaagctacat

SEQ ID NO: 130143 - DNA, 25 bp, Homo sapien
aaaatctccgttacacacttaagct

SEQ ID NO: 130144 - DNA, 25 bp, Homo sapien
cgttacacacttaagctacataaat

SEQ ID NO: 130145 - DNA, 25 bp, Homo sapien
cacacttaagctacataaatctact

SEQ ID NO: 130146 - DNA, 25 bp, Homo sapien
gaccgagccctagcatgttcaatag

SEQ ID NO: 130147 - DNA, 25 bp, Homo sapien
gaggtctgcgactactaaaacggtc

SEQ ID NO: 130148 - DNA, 25 bp, Homo sapien
cgtctatcatttcgaggtctgcgac

SEQ ID NO: 130149 - DNA, 25 bp, Homo sapien
ggtcagagtatcgtcctctacctct

SEQ ID NO: 130150 - DNA, 25 bp, Homo sapien
aatgcagccatccacccttcacata

SEQ ID NO: 130151 - DNA, 25 bp, Homo sapien
atgcagccatccacccttcacatac

SEQ ID NO: 130152 - DNA, 25 bp, Homo sapien
caatgcagccatccacccttcacat

SEQ ID NO: 130153 - DNA, 25 bp, Homo sapien
tcaatgcagccatccacccttcaca

SEQ ID NO: 130154 - DNA, 25 bp, Homo sapien
cagcacttgtgttcaactgtgggca

SEQ ID NO: 130155 - DNA, 25 bp, Homo sapien
tgaatcttaaatgctacccctacaa

SEQ ID NO: 130156 - DNA, 25 bp, Homo sapien
gaacagattatacggcaggacccaa

SEQ ID NO: 130157 - DNA, 25 bp, Homo sapien
gcaagttcaagccatcagatatcac

SEQ ID NO: 130158 - DNA, 25 bp, Homo sapien
agctgactcttgaggataaattctc

SEQ ID NO: 130159 - DNA, 25 bp, Homo sapien
aattctcaactataagacgattttc

SEQ ID NO: 130160 - DNA, 25 bp, Homo sapien
gactcttgaggataaattctcaact

SEQ ID NO: 130161 - DNA, 25 bp, Homo sapien
caactataagacgattttctgttct

SEQ ID NO: 130162 - DNA, 25 bp, Homo sapien
tacaacattagctacccattaactt

SEQ ID NO: 130163 - DNA, 25 bp, Homo sapien
catttgatcactaatattaaagttc

SEQ ID NO: 130164 - DNA, 25 bp, Homo sapien
ataactcaaaactgtatttcaacaa

SEQ ID NO: 130165 - DNA, 25 bp, Homo sapien
ttgatcactaatattaaagttcaaa

SEQ ID NO: 130166 - DNA, 25 bp, Homo sapien
tcgtcataaggccaacgacacagac

SEQ ID NO: 130167 - DNA, 25 bp, Homo sapien
ctcgtcataaggccaacgacacaga

SEQ ID NO: 130168 - DNA, 25 bp, Homo sapien
caaacacagatctagaggtggccaa

SEQ ID NO: 130169 - DNA, 25 bp, Homo sapien
caacgattaggataacccacaggca

SEQ ID NO: 130170 - DNA, 25 bp, Homo sapien
ccaagagtgaccaagacaacgatta

SEQ ID NO: 130171 - DNA, 25 bp, Homo sapien
gataacgtctagaccggcaaacaca

SEQ ID NO: 130172 - DNA, 25 bp, Homo sapien
acgctctgggatcgctgcaacctgg

SEQ ID NO: 130173 - DNA, 25 bp, Homo sapien
gatcacgttatcaacgctctgggat

SEQ ID NO: 130174 - DNA, 25 bp, Homo sapien
gctgcaacctggcacttcaaggaag

SEQ ID NO: 130175 - DNA, 25 bp, Homo sapien
aacctggcacttcaaggaagtgcac

SEQ ID NO: 130176 - DNA, 25 bp, Homo sapien
caggattccaacgaccacctaattt

SEQ ID NO: 130177 - DNA, 25 bp, Homo sapien
tcgaccggacctcttattcggaagc

SEQ ID NO: 130178 - DNA, 25 bp, Homo sapien
ggaagcgttacaggaagacaggtct

SEQ ID NO: 130179 - DNA, 25 bp, Homo sapien
caaggaccactttactgcgatcagg

SEQ ID NO: 130180 - DNA, 25 bp, Homo sapien
gactattggcggatgcagacatgtt

SEQ ID NO: 130181 - DNA, 25 bp, Homo sapien
ctattagcggactattggcggatgc

SEQ ID NO: 130182 - DNA, 25 bp, Homo sapien
tgcagacatgttctactcgagcagt

SEQ ID NO: 130183 - DNA, 25 bp, Homo sapien
agacatgttctactcgagcagttac

SEQ ID NO: 130184 - DNA, 25 bp, Homo sapien
aaggacactacccaatcgatggaag

SEQ ID NO: 130185 - DNA, 25 bp, Homo sapien
taatcggtcggagaaaccttcatga

SEQ ID NO: 130186 - DNA, 25 bp, Homo sapien
tggaagcctttaatcgcacagccct

SEQ ID NO: 130187 - DNA, 25 bp, Homo sapien
gacatatgcccgactggctcttcgc

SEQ ID NO: 130188 - DNA, 25 bp, Homo sapien
tccctaggctagtcaagcagcaaac

SEQ ID NO: 130189 - DNA, 25 bp, Homo sapien
tatttccctaggctagtcaagcagc

SEQ ID NO: 130190 - DNA, 25 bp, Homo sapien
tttccctaggctagtcaagcagcaa

SEQ ID NO: 130191 - DNA, 25 bp, Homo sapien
ttatttccctaggctagtcaagcag

SEQ ID NO: 130192 - DNA, 25 bp, Homo sapien
aaaattatctatgtcagggcacgga

SEQ ID NO: 130193 - DNA, 25 bp, Homo sapien
caagactactgaaagagaagatgtt

SEQ ID NO: 130194 - DNA, 25 bp, Homo sapien
cagttattttgtgccccatatgtca

SEQ ID NO: 130195 - DNA, 25 bp, Homo sapien
ggtagtattagtctatgctgagctc

SEQ ID NO: 130196 - DNA, 25 bp, Homo sapien
ccttcatttaatttaggtcggtgtg

SEQ ID NO: 130197 - DNA, 25 bp, Homo sapien
catttaatttaggtcggtgtgcatc

SEQ ID NO: 130198 - DNA, 25 bp, Homo sapien
ggtcggtgtgcatccgcaaacgtta

SEQ ID NO: 130199 - DNA, 25 bp, Homo sapien
tgtgcatccgcaaacgttacttccc

SEQ ID NO: 130200 - DNA, 25 bp, Homo sapien
tgcacacagcagtctaggtaagtcg

SEQ ID NO: 130201 - DNA, 25 bp, Homo sapien
cctatgcaccgtgggatgcttagca

SEQ ID NO: 130202 - DNA, 25 bp, Homo sapien
gatgcctagcccctactgactacat

SEQ ID NO: 130203 - DNA, 25 bp, Homo sapien
tggataacacagcattaaaagagca

SEQ ID NO: 130204 - DNA, 25 bp, Homo sapien
ccttttgctgccttcaattaatttt

SEQ ID NO: 130205 - DNA, 25 bp, Homo sapien
aaagaaatcagcctagataagactc

SEQ ID NO: 130206 - DNA, 25 bp, Homo sapien
gaaatcagcctagataagactctac

SEQ ID NO: 130207 - DNA, 25 bp, Homo sapien
tcagcctagataagactctacaaca

SEQ ID NO: 130208 - DNA, 25 bp, Homo sapien
tagataagactctacaacaaaccca

SEQ ID NO: 130209 - DNA, 25 bp, Homo sapien
gatttgcgactacgggaacgggatc

SEQ ID NO: 130210 - DNA, 25 bp, Homo sapien
tctggtccgggatcgagacctgctt

SEQ ID NO: 130211 - DNA, 25 bp, Homo sapien
tcctgcttcttgaccggctgtaaga

SEQ ID NO: 130212 - DNA, 25 bp, Homo sapien
cttctggtccgggatcgagacctgc

SEQ ID NO: 130213 - DNA, 25 bp, Homo sapien
tggagacttagatctacttgaagaa

SEQ ID NO: 130214 - DNA, 25 bp, Homo sapien
tagatctacttgaagaaccacgttt

SEQ ID NO: 130215 - DNA, 25 bp, Homo sapien
gctcttctcaggcacgggagaccta

SEQ ID NO: 130216 - DNA, 25 bp, Homo sapien
tgaagaaccacgtttctggctcttc

SEQ ID NO: 130217 - DNA, 25 bp, Homo sapien
atctggaccttgatcgggaccggga

SEQ ID NO: 130218 - DNA, 25 bp, Homo sapien
actgatctggaccttgatcgggacc

SEQ ID NO: 130219 - DNA, 25 bp, Homo sapien
tgatctggaccttgatcgggaccgg

SEQ ID NO: 130220 - DNA, 25 bp, Homo sapien
tctggaccttgatcgggaccgggac

SEQ ID NO: 130221 - DNA, 25 bp, Homo sapien
caagtatggtttgggaatttttgtg

SEQ ID NO: 130222 - DNA, 25 bp, Homo sapien
agaatttttagcaagtatggtttgg

SEQ ID NO: 130223 - DNA, 25 bp, Homo sapien
cagaatttttagcaagtatggtttg

SEQ ID NO: 130224 - DNA, 25 bp, Homo sapien
agcaagtatggtttgggaatttttg

SEQ ID NO: 130225 - DNA, 25 bp, Homo sapien
ccttggtggtccacatctacaaaga

SEQ ID NO: 130226 - DNA, 25 bp, Homo sapien
acatctacaaagatatccagcccaa

SEQ ID NO: 130227 - DNA, 25 bp, Homo sapien
ggtggtccacatctacaaagatatc

SEQ ID NO: 130228 - DNA, 25 bp, Homo sapien
ggtccacatctacaaagatatccag

SEQ ID NO: 130229 - DNA, 25 bp, Homo sapien
tatacacaaactatatacttcagac

SEQ ID NO: 130230 - DNA, 25 bp, Homo sapien
gagctctgtcaatatacacaaacta

SEQ ID NO: 130231 - DNA, 25 bp, Homo sapien
tacacaaactatatacttcagacat

SEQ ID NO: 130232 - DNA, 25 bp, Homo sapien
tttagttataaaagagctctgtcaa

SEQ ID NO: 130233 - DNA, 25 bp, Homo sapien
taaggcattaaactaattctgaatt

SEQ ID NO: 130234 - DNA, 25 bp, Homo sapien
tatgtacaagcaaatttagagctct

SEQ ID NO: 130235 - DNA, 25 bp, Homo sapien
taagtgtccaaagctattaattagt

SEQ ID NO: 130236 - DNA, 25 bp, Homo sapien
cctttatgtacaagcaaatttagag

SEQ ID NO: 130237 - DNA, 25 bp, Homo sapien
agcagctgttaaagagtggaggaca

SEQ ID NO: 130238 - DNA, 25 bp, Homo sapien
cagctgttaaagagtggaggacacc

SEQ ID NO: 130239 - DNA, 25 bp, Homo sapien
gctgttaaagagtggaggacaccct

SEQ ID NO: 130240 - DNA, 25 bp, Homo sapien
tgttaaagagtggaggacacccttg

SEQ ID NO: 130241 - DNA, 25 bp, Homo sapien
ctgcacccggccattctttggttaa

SEQ ID NO: 130242 - DNA, 25 bp, Homo sapien
tgcacccggccattctttggttaaa

SEQ ID NO: 130243 - DNA, 25 bp, Homo sapien
actgcacccggccattctttggtta

SEQ ID NO: 130244 - DNA, 25 bp, Homo sapien
caaagcgggcgaatgcaggaataaa

SEQ ID NO: 130245 - DNA, 25 bp, Homo sapien
cttatatccctgtcggcagactcgg

SEQ ID NO: 130246 - DNA, 25 bp, Homo sapien
aggaataaaagacaaaagcgtatat

SEQ ID NO: 130247 - DNA, 25 bp, Homo sapien
ccttgaagtccctgttctgcggcgc

SEQ ID NO: 130248 - DNA, 25 bp, Homo sapien
actgaactctgagtggaaaaaactg

SEQ ID NO: 130249 - DNA, 25 bp, Homo sapien
tagattcagcctgctaccccgcata

SEQ ID NO: 130250 - DNA, 25 bp, Homo sapien
cctgctaccccgcataataatgaga

SEQ ID NO: 130251 - DNA, 25 bp, Homo sapien
agtacagtacgaactgaactctgag

SEQ ID NO: 130252 - DNA, 25 bp, Homo sapien
gacgttccaggtctgaataagggcc

SEQ ID NO: 130253 - DNA, 25 bp, Homo sapien
tttagtggcctatgcgcactgctga

SEQ ID NO: 130254 - DNA, 25 bp, Homo sapien
gcagacaagcaagttcgcgccaagt

SEQ ID NO: 130255 - DNA, 25 bp, Homo sapien
gaaagaaactgtgcatagggttcct

SEQ ID NO: 130256 - DNA, 25 bp, Homo sapien
gaaaagtacatgactgcccatccgg

SEQ ID NO: 130257 - DNA, 25 bp, Homo sapien
catgctgtaagtaagtctcagcccc

SEQ ID NO: 130258 - DNA, 25 bp, Homo sapien
gatattactgatacatcagttcccg

SEQ ID NO: 130259 - DNA, 25 bp, Homo sapien
ctcagccccataaactgatagctat

SEQ ID NO: 130260 - DNA, 25 bp, Homo sapien
ccaaaaatgtgaagtaaataaggct

SEQ ID NO: 130261 - DNA, 25 bp, Homo sapien
catgtgttgtaatgttcaatgtgcc

SEQ ID NO: 130262 - DNA, 25 bp, Homo sapien
aatgtgcctgctctacaatgccttg

SEQ ID NO: 130263 - DNA, 25 bp, Homo sapien
ttccatgtgaatgtgactggctacg

SEQ ID NO: 130264 - DNA, 25 bp, Homo sapien
tcatgactgtggtcggccttctctc

SEQ ID NO: 130265 - DNA, 25 bp, Homo sapien
tcacaccagagggaccggacccatg

SEQ ID NO: 130266 - DNA, 25 bp, Homo sapien
ttgatggtccatccaactttacaga

SEQ ID NO: 130267 - DNA, 25 bp, Homo sapien
tttcccattgatggtccatccaact

SEQ ID NO: 130268 - DNA, 25 bp, Homo sapien
caaaagagatagtgtgaagggaagt

SEQ ID NO: 130269 - DNA, 25 bp, Homo sapien
ctttggctctctgtatatcctcctt

SEQ ID NO: 130270 - DNA, 25 bp, Homo sapien
gtcccatgggcctttggctctctgt

SEQ ID NO: 130271 - DNA, 25 bp, Homo sapien
tatagactcagtggaatgttggtca

SEQ ID NO: 130272 - DNA, 25 bp, Homo sapien
ggacaagggacctgaccttgtacac

SEQ ID NO: 130273 - DNA, 25 bp, Homo sapien
tagtggacaagggacctgaccttgt

SEQ ID NO: 130274 - DNA, 25 bp, Homo sapien
tgaccttgtacacagccttccgtat

SEQ ID NO: 130275 - DNA, 25 bp, Homo sapien
gaccttgtacacagccttccgtatt

SEQ ID NO: 130276 - DNA, 25 bp, Homo sapien
tgccttgggttccagcatgcggatg

SEQ ID NO: 130277 - DNA, 25 bp, Homo sapien
cacacctctattacttgtagtcaag

SEQ ID NO: 130278 - DNA, 25 bp, Homo sapien
tataaccagtcctctgttgacagat

SEQ ID NO: 130279 - DNA, 25 bp, Homo sapien
tacctgatacacagacgtgcatcac

SEQ ID NO: 130280 - DNA, 25 bp, Homo sapien
gcaggtgctacatcttgaaggttga

SEQ ID NO: 130281 - DNA, 25 bp, Homo sapien
ggagctttgatcaacagagacaccc

SEQ ID NO: 130282 - DNA, 25 bp, Homo sapien
tgaagccagaggtacaggaaaggcc

SEQ ID NO: 130283 - DNA, 25 bp, Homo sapien
gacacccaggctgcatatttaggga

SEQ ID NO: 130284 - DNA, 25 bp, Homo sapien
cctggctgcgcccccagagacccag

SEQ ID NO: 130285 - DNA, 25 bp, Homo sapien
ccctggctgcgcccccagagaccca

SEQ ID NO: 130286 - DNA, 25 bp, Homo sapien
tccctggctgcgcccccagagaccc

SEQ ID NO: 130287 - DNA, 25 bp, Homo sapien
tctgagtcacagcagcctccgcgcc

SEQ ID NO: 130288 - DNA, 25 bp, Homo sapien
tctattctgagtcacagcagcctcc

SEQ ID NO: 130289 - DNA, 25 bp, Homo sapien
tgagtcacagcagcctccgcgccac

SEQ ID NO: 130290 - DNA, 25 bp, Homo sapien
cttctattctgagtcacagcagcct

SEQ ID NO: 130291 - DNA, 25 bp, Homo sapien
gcctttttgggagaagccttcagga

SEQ ID NO: 130292 - DNA, 25 bp, Homo sapien
ggagcctttttgggagaagccttca

SEQ ID NO: 130293 - DNA, 25 bp, Homo sapien
tttttgggagaagccttcaggacac

SEQ ID NO: 130294 - DNA, 25 bp, Homo sapien
gagcctttttgggagaagccttcag

SEQ ID NO: 130295 - DNA, 25 bp, Homo sapien
aaacagaaactagaagcctgcgcac

SEQ ID NO: 130296 - DNA, 25 bp, Homo sapien
tcaaacagaaactagaagcctgcgc

SEQ ID NO: 130297 - DNA, 25 bp, Homo sapien
caaacagaaactagaagcctgcgca

SEQ ID NO: 130298 - DNA, 25 bp, Homo sapien
caaagccaatataagcaatgccttg

SEQ ID NO: 130299 - DNA, 25 bp, Homo sapien
caatgccttgcactgaggtatacaa

SEQ ID NO: 130300 - DNA, 25 bp, Homo sapien
ctggtcagcactgccgacttgtgaa

SEQ ID NO: 130301 - DNA, 25 bp, Homo sapien
cgacttgtgaactaagcaaagccaa

SEQ ID NO: 130302 - DNA, 25 bp, Homo sapien
tggggactgcgggagtgtggtttct

SEQ ID NO: 130303 - DNA, 25 bp, Homo sapien
tgaagcaaacttgggggttaattgc

SEQ ID NO: 130304 - DNA, 25 bp, Homo sapien
attgcatggcatcgggccccagctt

SEQ ID NO: 130305 - DNA, 25 bp, Homo sapien
gggttaattgcatggcatcgggccc

SEQ ID NO: 130306 - DNA, 25 bp, Homo sapien
tggggatcctcagtttttctcttac

SEQ ID NO: 130307 - DNA, 25 bp, Homo sapien
ttagtgcttggggatcctcagtttt

SEQ ID NO: 130308 - DNA, 25 bp, Homo sapien
agtgcttggggatcctcagtttttc

SEQ ID NO: 130309 - DNA, 25 bp, Homo sapien
gcttggggatcctcagtttttctct

SEQ ID NO: 130310 - DNA, 25 bp, Homo sapien
gagacaaatatgactcctccccatg

SEQ ID NO: 130311 - DNA, 25 bp, Homo sapien
tgtgaaggtcacaagcaccaaggga

SEQ ID NO: 130312 - DNA, 25 bp, Homo sapien
gttgatcactgtcagccatggagaa

SEQ ID NO: 130313 - DNA, 25 bp, Homo sapien
ccatggagaagcgtaagagacaaat

SEQ ID NO: 130314 - DNA, 25 bp, Homo sapien
aaaatccatcagtttgtaagtgaag

SEQ ID NO: 130315 - DNA, 25 bp, Homo sapien
tttgtaagtgaagggtcagtaagca

SEQ ID NO: 130316 - DNA, 25 bp, Homo sapien
tccatcagtttgtaagtgaagggtc

SEQ ID NO: 130317 - DNA, 25 bp, Homo sapien
cagtttgtaagtgaagggtcagtaa

SEQ ID NO: 130318 - DNA, 25 bp, Homo sapien
caaggtgaactgagactggtgagct

SEQ ID NO: 130319 - DNA, 25 bp, Homo sapien
tccagtctcaaatcccatagggttg

SEQ ID NO: 130320 - DNA, 25 bp, Homo sapien
tactccatgagattgtgacttgcct

SEQ ID NO: 130321 - DNA, 25 bp, Homo sapien
tggacgttcctctgtgctaattggg

SEQ ID NO: 130322 - DNA, 25 bp, Homo sapien
gggacacagtcatgaaccgcgcagg

SEQ ID NO: 130323 - DNA, 25 bp, Homo sapien
tgtgctctgcgcgcggcgctagctc

SEQ ID NO: 130324 - DNA, 25 bp, Homo sapien
cacagtcatgaaccgcgcaggaggg

SEQ ID NO: 130325 - DNA, 25 bp, Homo sapien
gctggagcgcgagcgtgtgctctgc

SEQ ID NO: 130326 - DNA, 25 bp, Homo sapien
ccttccttcgctcggggccctcgcg

SEQ ID NO: 130327 - DNA, 25 bp, Homo sapien
cagccggcagcgagcggggttcgcg

SEQ ID NO: 130328 - DNA, 25 bp, Homo sapien
ccgtggtcctgcggcgggggctcgc

SEQ ID NO: 130329 - DNA, 25 bp, Homo sapien
ggtcctgcggcgggggctcgcagag

SEQ ID NO: 130330 - DNA, 25 bp, Homo sapien
gcagcaagtggggcgtgagcaggcg

SEQ ID NO: 130331 - DNA, 25 bp, Homo sapien
gggcctgtggtgcggtggccgcgag

SEQ ID NO: 130332 - DNA, 25 bp, Homo sapien
cggtggccgcgagcaggggacagct

SEQ ID NO: 130333 - DNA, 25 bp, Homo sapien
cagcaagtggggcgtgagcaggcgg

SEQ ID NO: 130334 - DNA, 25 bp, Homo sapien
tcagaaactccaatcagaccaaggt

SEQ ID NO: 130335 - DNA, 25 bp, Homo sapien
tctgtcctgtgcacagaattggcag

SEQ ID NO: 130336 - DNA, 25 bp, Homo sapien
agagacccctgaacattgcgcaact

SEQ ID NO: 130337 - DNA, 25 bp, Homo sapien
aattggcaggtttcatgtcgttcag

SEQ ID NO: 130338 - DNA, 25 bp, Homo sapien
cgtttaatagtacatgtttcaaggc

SEQ ID NO: 130339 - DNA, 25 bp, Homo sapien
accactaggtcgtttaatagtacat

SEQ ID NO: 130340 - DNA, 25 bp, Homo sapien
taggtcgtttaatagtacatgtttc

SEQ ID NO: 130341 - DNA, 25 bp, Homo sapien
taatagtacatgtttcaaggcagtg

SEQ ID NO: 130342 - DNA, 25 bp, Homo sapien
ctcgtatcgccaagcgcaaaaaggc

SEQ ID NO: 130343 - DNA, 25 bp, Homo sapien
tcgtatcgccaagcgcaaaaaggca

SEQ ID NO: 130344 - DNA, 25 bp, Homo sapien
cctggcgggatggtgtgtggttaca

SEQ ID NO: 130345 - DNA, 25 bp, Homo sapien
cagttctgaaagagacctggcggga

SEQ ID NO: 130346 - DNA, 25 bp, Homo sapien
tccaggaagtcatgctaacagcaag

SEQ ID NO: 130347 - DNA, 25 bp, Homo sapien
ggcccaagccaccttatctggaaat

SEQ ID NO: 130348 - DNA, 25 bp, Homo sapien
tctgaggaacgggatggcaaagcca

SEQ ID NO: 130349 - DNA, 25 bp, Homo sapien
ctttggactgccagaacaggcggat

SEQ ID NO: 130350 - DNA, 25 bp, Homo sapien
cagctcgggttctgaggaacgggat

SEQ ID NO: 130351 - DNA, 25 bp, Homo sapien
ctgttggagggttgaggaacagctc

SEQ ID NO: 130352 - DNA, 25 bp, Homo sapien
cgattaaagggcttttcacgctgct

SEQ ID NO: 130353 - DNA, 25 bp, Homo sapien
tctgttgttttagccaggagaggcc

SEQ ID NO: 130354 - DNA, 25 bp, Homo sapien
tgacagcagcatgcccgattaaagg

SEQ ID NO: 130355 - DNA, 25 bp, Homo sapien
cacttctgttgttttagccaggaga

SEQ ID NO: 130356 - DNA, 25 bp, Homo sapien
cagaggggggctccgtgaagatgga

SEQ ID NO: 130357 - DNA, 25 bp, Homo sapien
ctgaatttacacaggtgcaaagaag

SEQ ID NO: 130358 - DNA, 25 bp, Homo sapien
cccactatcaaattcgtcatctgca

SEQ ID NO: 130359 - DNA, 25 bp, Homo sapien
tccacatccctatatctgccagctc

SEQ ID NO: 130360 - DNA, 25 bp, Homo sapien
cctatatctgccagctcgctctcac

SEQ ID NO: 130361 - DNA, 25 bp, Homo sapien
cactatcaaattcgtcatctgcatt

SEQ ID NO: 130362 - DNA, 25 bp, Homo sapien
caccatctgcaaaactggactttgg

SEQ ID NO: 130363 - DNA, 25 bp, Homo sapien
tctgcaaaactggactttggccttc

SEQ ID NO: 130364 - DNA, 25 bp, Homo sapien
ctggactttggccttcttctctggg

SEQ ID NO: 130365 - DNA, 25 bp, Homo sapien
aaactggactttggccttcttctct

SEQ ID NO: 130366 - DNA, 25 bp, Homo sapien
aacacccactatggtccactgtggc

SEQ ID NO: 130367 - DNA, 25 bp, Homo sapien
cccagaacacccactatggtccact

SEQ ID NO: 130368 - DNA, 25 bp, Homo sapien
agaacacccactatggtccactgtg

SEQ ID NO: 130369 - DNA, 25 bp, Homo sapien
ctgtaatgagcccccagaacaccca

SEQ ID NO: 130370 - DNA, 25 bp, Homo sapien
tccaattccggggtaaatgctgctg

SEQ ID NO: 130371 - DNA, 25 bp, Homo sapien
tggaatgtgcttccacctgatgaac

SEQ ID NO: 130372 - DNA, 25 bp, Homo sapien
ggactgtgcacacgccggccccttt

SEQ ID NO: 130373 - DNA, 25 bp, Homo sapien
ccacctgatgaactccaattccggg

SEQ ID NO: 130374 - DNA, 25 bp, Homo sapien
gagactctagattgatgagcctgaa

SEQ ID NO: 130375 - DNA, 25 bp, Homo sapien
aactctgacaatttaacggccaatg

SEQ ID NO: 130376 - DNA, 25 bp, Homo sapien
gattagcactctagtttttcgggca

SEQ ID NO: 130377 - DNA, 25 bp, Homo sapien
taactcgggcagtatctgagactct

SEQ ID NO: 130378 - DNA, 25 bp, Homo sapien
acttctgcattgcacgtgggcagag

SEQ ID NO: 130379 - DNA, 25 bp, Homo sapien
cttctgcattgcacgtgggcagagg

SEQ ID NO: 130380 - DNA, 25 bp, Homo sapien
gtgggtcacggtcacttattagaaa

SEQ ID NO: 130381 - DNA, 25 bp, Homo sapien
tttgcatctacctcgatgcaccacg

SEQ ID NO: 130382 - DNA, 25 bp, Homo sapien
gcacttggctcgctggtactcacac

SEQ ID NO: 130383 - DNA, 25 bp, Homo sapien
gtcgggtctcggcacttggctcgct

SEQ ID NO: 130384 - DNA, 25 bp, Homo sapien
acgcccagggtcgggtctcggcact

SEQ ID NO: 130385 - DNA, 25 bp, Homo sapien
tcctcgccacactctgggacaaaca

SEQ ID NO: 130386 - DNA, 25 bp, Homo sapien
agggcttgagcccgctccaggcgac

SEQ ID NO: 130387 - DNA, 25 bp, Homo sapien
ttgagcccgctccaggcgacacttg

SEQ ID NO: 130388 - DNA, 25 bp, Homo sapien
aaaggagccatcctcgccacactct

SEQ ID NO: 130389 - DNA, 25 bp, Homo sapien
ccaagaggattgtccgaggcctcac

SEQ ID NO: 130390 - DNA, 25 bp, Homo sapien
ccctctgcctcggtccaggaaagag

SEQ ID NO: 130391 - DNA, 25 bp, Homo sapien
gaaagagcccaagaggattgtccga

SEQ ID NO: 130392 - DNA, 25 bp, Homo sapien
ttcccagaaagtgaaggcgccaagc

SEQ ID NO: 130393 - DNA, 25 bp, Homo sapien
accatagtacactttgtgctcaaag

SEQ ID NO: 130394 - DNA, 25 bp, Homo sapien
ccatagtacactttgtgctcaaaga

SEQ ID NO: 130395 - DNA, 25 bp, Homo sapien
ttcactctcctaccaatcacccttg

SEQ ID NO: 130396 - DNA, 25 bp, Homo sapien
cacccttgctttcctaggaaaccag

SEQ ID NO: 130397 - DNA, 25 bp, Homo sapien
tgttctctccaatttgatacactga

SEQ ID NO: 130398 - DNA, 25 bp, Homo sapien
tccaatttgatacactgatgaatga

SEQ ID NO: 130399 - DNA, 25 bp, Homo sapien
catggccaaggtaggcctctgtctc

SEQ ID NO: 130400 - DNA, 25 bp, Homo sapien
agggcccttgactcccatggccaag

SEQ ID NO: 130401 - DNA, 25 bp, Homo sapien
tccatcgcccgaggctgtgtctctg

SEQ ID NO: 130402 - DNA, 25 bp, Homo sapien
tgtgccctcaagtccatcgcccgag

SEQ ID NO: 130403 - DNA, 25 bp, Homo sapien
cagtcagtgaacagcactgggtaca

SEQ ID NO: 130404 - DNA, 25 bp, Homo sapien
ggtccagtcagtgaacagcactggg

SEQ ID NO: 130405 - DNA, 25 bp, Homo sapien
gtctctcatgggtggtccagtcagt

SEQ ID NO: 130406 - DNA, 25 bp, Homo sapien
ctctcatgggtggtccagtcagtga

SEQ ID NO: 130407 - DNA, 25 bp, Homo sapien
atgggcttcccatccggggtgacac

SEQ ID NO: 130408 - DNA, 25 bp, Homo sapien
catccggggtgacacaccagcagta

SEQ ID NO: 130409 - DNA, 25 bp, Homo sapien
cagcagtacccagtgtaagtatggc

SEQ ID NO: 130410 - DNA, 25 bp, Homo sapien
accagcagtacccagtgtaagtatg

SEQ ID NO: 130411 - DNA, 25 bp, Homo sapien
acacccccatctccccaacttctca

SEQ ID NO: 130412 - DNA, 25 bp, Homo sapien
cacccccatctccccaacttctcac

SEQ ID NO: 130413 - DNA, 25 bp, Homo sapien
tacacccccatctccccaacttctc

SEQ ID NO: 130414 - DNA, 25 bp, Homo sapien
ctggctcaagggcttgtcggtgact

SEQ ID NO: 130415 - DNA, 25 bp, Homo sapien
tcctgagttaccctggctcaagggc

SEQ ID NO: 130416 - DNA, 25 bp, Homo sapien
ctcaagggcttgtcggtgactgaac

SEQ ID NO: 130417 - DNA, 25 bp, Homo sapien
tccttcctgagttaccctggctcaa

SEQ ID NO: 130418 - DNA, 25 bp, Homo sapien
ctgatgagcatgtagtttccaaggc

SEQ ID NO: 130419 - DNA, 25 bp, Homo sapien
gtgtgcaggacaagcctgtgaactt

SEQ ID NO: 130420 - DNA, 25 bp, Homo sapien
gtgtgtgcaggacaagcctgtgaac

SEQ ID NO: 130421 - DNA, 25 bp, Homo sapien
tgtgtgcaggacaagcctgtgaact

SEQ ID NO: 130422 - DNA, 25 bp, Homo sapien
tgtgcaggacaagcctgtgaacttc

SEQ ID NO: 130423 - DNA, 25 bp, Homo sapien
tgcattcagagtgggtgacttcgcc

SEQ ID NO: 130424 - DNA, 25 bp, Homo sapien
cagggaaagagcagtagcccatctg

SEQ ID NO: 130425 - DNA, 25 bp, Homo sapien
catcttcttggagcacctgcatttg

SEQ ID NO: 130426 - DNA, 25 bp, Homo sapien
cagggctttaccttggtctccctgc

SEQ ID NO: 130427 - DNA, 25 bp, Homo sapien
cagcttcctggacaggtgtggcttc

SEQ ID NO: 130428 - DNA, 25 bp, Homo sapien
cttcaggtgtggcgtcctacaggtg

SEQ ID NO: 130429 - DNA, 25 bp, Homo sapien
agcttcctggacaggtgtggcttca

SEQ ID NO: 130430 - DNA, 25 bp, Homo sapien
tacaggtggcccgaacctgctcttc

SEQ ID NO: 130431 - DNA, 25 bp, Homo sapien
tgtgaatgcacatgtgcaccgtccc

SEQ ID NO: 130432 - DNA, 25 bp, Homo sapien
tgtagcatccataaaacacatgtga

SEQ ID NO: 130433 - DNA, 25 bp, Homo sapien
tttcagagctaaaggggctgtttgg

SEQ ID NO: 130434 - DNA, 25 bp, Homo sapien
tctgatattcctctgtagcatccat

SEQ ID NO: 130435 - DNA, 25 bp, Homo sapien
aagttggcaacaacctgtagaccca

SEQ ID NO: 130436 - DNA, 25 bp, Homo sapien
tgagtgacaaggtctccaagttggc

SEQ ID NO: 130437 - DNA, 25 bp, Homo sapien
ggatgtttgccagccattgcctctg

SEQ ID NO: 130438 - DNA, 25 bp, Homo sapien
ttacttggagcacatactatggaac

SEQ ID NO: 130439 - DNA, 25 bp, Homo sapien
gagatcagctacagattcagcctcc

SEQ ID NO: 130440 - DNA, 25 bp, Homo sapien
agatcagctacagattcagcctccc

SEQ ID NO: 130441 - DNA, 25 bp, Homo sapien
tgatggcaatgctaagagatcagct

SEQ ID NO: 130442 - DNA, 25 bp, Homo sapien
ggcaatgctaagagatcagctacag

SEQ ID NO: 130443 - DNA, 25 bp, Homo sapien
cttctccaagaaaagccatgtgagc

SEQ ID NO: 130444 - DNA, 25 bp, Homo sapien
gaatcagagagaatccttctccaag

SEQ ID NO: 130445 - DNA, 25 bp, Homo sapien
tgtttcagcaggcacagaatcagag

SEQ ID NO: 130446 - DNA, 25 bp, Homo sapien
aagccaacagcatggaggtcgtcag

SEQ ID NO: 130447 - DNA, 25 bp, Homo sapien
ggcttggtggaggcggctcggagaa

SEQ ID NO: 130448 - DNA, 25 bp, Homo sapien
caggcttggtggaggcggctcggag

SEQ ID NO: 130449 - DNA, 25 bp, Homo sapien
gcggctcggagaaccagaaagcaaa

SEQ ID NO: 130450 - DNA, 25 bp, Homo sapien
ggcggctcggagaaccagaaagcaa

SEQ ID NO: 130451 - DNA, 25 bp, Homo sapien
caaaggcactagtcagagggctcag

SEQ ID NO: 130452 - DNA, 25 bp, Homo sapien
acactggaacttaggccgggagcag

SEQ ID NO: 130453 - DNA, 25 bp, Homo sapien
tactgttatactcatccctgggtcc

SEQ ID NO: 130454 - DNA, 25 bp, Homo sapien
tcattggcctgacaagctctgagcc

SEQ ID NO: 130455 - DNA, 25 bp, Homo sapien
tttgtttggtctgtggatgtccaat

SEQ ID NO: 130456 - DNA, 25 bp, Homo sapien
aacagcactttttgcagagcaaatt

SEQ ID NO: 130457 - DNA, 25 bp, Homo sapien
aagtctacgatccattttgaattca

SEQ ID NO: 130458 - DNA, 25 bp, Homo sapien
cctatgttggatagacggtttgcaa

SEQ ID NO: 130459 - DNA, 25 bp, Homo sapien
catttgtgtgtatcgttctctgcaa

SEQ ID NO: 130460 - DNA, 25 bp, Homo sapien
tatccacgtgtagactcaggtaacc

SEQ ID NO: 130461 - DNA, 25 bp, Homo sapien
tcagcctagaactattccatcagca

SEQ ID NO: 130462 - DNA, 25 bp, Homo sapien
caatatacaaccttttgaaatgggc

SEQ ID NO: 130463 - DNA, 25 bp, Homo sapien
ctttttgcaggcagttctcacatcc

SEQ ID NO: 130464 - DNA, 25 bp, Homo sapien
aaagctgcctttttgcaggcagttc

SEQ ID NO: 130465 - DNA, 25 bp, Homo sapien
gctgcctttttgcaggcagttctca

SEQ ID NO: 130466 - DNA, 25 bp, Homo sapien
tgcctttttgcaggcagttctcaca

SEQ ID NO: 130467 - DNA, 25 bp, Homo sapien
ctggcgaggagagataaatgccagg

SEQ ID NO: 130468 - DNA, 25 bp, Homo sapien
cgatgacaccgttcaaagcctcctc

SEQ ID NO: 130469 - DNA, 25 bp, Homo sapien
atgacaccgttcaaagcctcctctg

SEQ ID NO: 130470 - DNA, 25 bp, Homo sapien
cccccgatgacaccgttcaaagcct

SEQ ID NO: 130471 - DNA, 25 bp, Homo sapien
cccgatgacaccgttcaaagcctcc

SEQ ID NO: 130472 - DNA, 25 bp, Homo sapien
catctaggagaataaaaacatgccc

SEQ ID NO: 130473 - DNA, 25 bp, Homo sapien
gctggtgagaatgtacaactgggca

SEQ ID NO: 130474 - DNA, 25 bp, Homo sapien
caagatacttctaaacagccactag

SEQ ID NO: 130475 - DNA, 25 bp, Homo sapien
catgtatagaaatattcactgcagc

SEQ ID NO: 130476 - DNA, 25 bp, Homo sapien
aagcccatgaggcataaagccactt

SEQ ID NO: 130477 - DNA, 25 bp, Homo sapien
ccatgaggcataaagccacttgcag

SEQ ID NO: 130478 - DNA, 25 bp, Homo sapien
cttgcagggaaggaatcttcctgca

SEQ ID NO: 130479 - DNA, 25 bp, Homo sapien
aatcttcctgcagggtagggtcact

SEQ ID NO: 130480 - DNA, 25 bp, Homo sapien
tgcccttttgcaggtcaaggacctc

SEQ ID NO: 130481 - DNA, 25 bp, Homo sapien
caaagaaggtctgcactcaaggagg

SEQ ID NO: 130482 - DNA, 25 bp, Homo sapien
tctctggagcaagacaactgaaaac

SEQ ID NO: 130483 - DNA, 25 bp, Homo sapien
catcatccagatgaaaatcttggac

SEQ ID NO: 130484 - DNA, 25 bp, Homo sapien
tgaattgagggttaaaaagaatcga

SEQ ID NO: 130485 - DNA, 25 bp, Homo sapien
ctgaattgagggttaaaaagaatcg

SEQ ID NO: 130486 - DNA, 25 bp, Homo sapien
gtgggtgtcggcttagacccgtcat

SEQ ID NO: 130487 - DNA, 25 bp, Homo sapien
cgtgggtgtcggcttagacccgtca

SEQ ID NO: 130488 - DNA, 25 bp, Homo sapien
tccatcgaacaccggctgggtctcc

SEQ ID NO: 130489 - DNA, 25 bp, Homo sapien
catctccatcgaacaccggctgggt

SEQ ID NO: 130490 - DNA, 25 bp, Homo sapien
tctccatcgaacaccggctgggtct

SEQ ID NO: 130491 - DNA, 25 bp, Homo sapien
catcgaacaccggctgggtctccat

SEQ ID NO: 130492 - DNA, 25 bp, Homo sapien
gcctggaacactcagactcctcccc

SEQ ID NO: 130493 - DNA, 25 bp, Homo sapien
ttttcccagaccatggtgatctctt

SEQ ID NO: 130494 - DNA, 25 bp, Homo sapien
tggctcttcacaaaagcttttccca

SEQ ID NO: 130495 - DNA, 25 bp, Homo sapien
caccactttcaagatccagctcaag

SEQ ID NO: 130496 - DNA, 25 bp, Homo sapien
acttcccataagtgagctgattgca

SEQ ID NO: 130497 - DNA, 25 bp, Homo sapien
gatattgcacatttcaatcctcctc

SEQ ID NO: 130498 - DNA, 25 bp, Homo sapien
tttgtggatcacagagacatctaca

SEQ ID NO: 130499 - DNA, 25 bp, Homo sapien
tagacatgaacatacaaaacttccc

SEQ ID NO: 130500 - DNA, 25 bp, Homo sapien
tgggcaaagagactatgtgagtgga

SEQ ID NO: 130501 - DNA, 25 bp, Homo sapien
ctcagacttcttaatagtcattttt

SEQ ID NO: 130502 - DNA, 25 bp, Homo sapien
gcaaagagactatgtgagtggaagt

SEQ ID NO: 130503 - DNA, 25 bp, Homo sapien
ggcaaagagactatgtgagtggaag

SEQ ID NO: 130504 - DNA, 25 bp, Homo sapien
gaatttcttatgttggtgttgttca

SEQ ID NO: 130505 - DNA, 25 bp, Homo sapien
caagtgtttaatccatagagttggg

SEQ ID NO: 130506 - DNA, 25 bp, Homo sapien
ggagtccttgatcaccaagtgttta

SEQ ID NO: 130507 - DNA, 25 bp, Homo sapien
tcagtttggagtccttgatcaccaa

SEQ ID NO: 130508 - DNA, 25 bp, Homo sapien
ggccagggtctagggcctccttgag

SEQ ID NO: 130509 - DNA, 25 bp, Homo sapien
ttgaggcccttgatcagatcatgga

SEQ ID NO: 130510 - DNA, 25 bp, Homo sapien
agggccagggtctagggcctccttg

SEQ ID NO: 130511 - DNA, 25 bp, Homo sapien
tccttgaggcccttgatcagatcat

SEQ ID NO: 130512 - DNA, 25 bp, Homo sapien
catggtctgaagtggtgaccgcttc

SEQ ID NO: 130513 - DNA, 25 bp, Homo sapien
gcttccttcccacgcagagactgag

SEQ ID NO: 130514 - DNA, 25 bp, Homo sapien
ctgaagtggtgaccgcttccttccc

SEQ ID NO: 130515 - DNA, 25 bp, Homo sapien
tccttcccacgcagagactgagttc

SEQ ID NO: 130516 - DNA, 25 bp, Homo sapien
tcccaagttcactcagccaggagag

SEQ ID NO: 130517 - DNA, 25 bp, Homo sapien
tgtgccaggcaatagactaagggct

SEQ ID NO: 130518 - DNA, 25 bp, Homo sapien
cagtatctgcaagtccaggtgcctc

SEQ ID NO: 130519 - DNA, 25 bp, Homo sapien
taatagcactaaccctctgtgaaga

SEQ ID NO: 130520 - DNA, 25 bp, Homo sapien
gaacttggtatcagcaacctggaga

SEQ ID NO: 130521 - DNA, 25 bp, Homo sapien
aaggaacttggtatcagcaacctgg

SEQ ID NO: 130522 - DNA, 25 bp, Homo sapien
ggaacttggtatcagcaacctggag

SEQ ID NO: 130523 - DNA, 25 bp, Homo sapien
agcaaggaacttggtatcagcaacc

SEQ ID NO: 130524 - DNA, 25 bp, Homo sapien
gacagagcgtggtgccctgtgtcca

SEQ ID NO: 130525 - DNA, 25 bp, Homo sapien
tgagacagagcgtggtgccctgtgt

SEQ ID NO: 130526 - DNA, 25 bp, Homo sapien
ggctgagacagagcgtggtgccctg

SEQ ID NO: 130527 - DNA, 25 bp, Homo sapien
ccggctgagacagagcgtggtgccc

SEQ ID NO: 130528 - DNA, 25 bp, Homo sapien
ctcacggggattctgctgggcctct

SEQ ID NO: 130529 - DNA, 25 bp, Homo sapien
tgcctctcctggtcacacgaataga

SEQ ID NO: 130530 - DNA, 25 bp, Homo sapien
tgacaataccctcacggggattctg

SEQ ID NO: 130531 - DNA, 25 bp, Homo sapien
tgcactggcttatagagtcccccag

SEQ ID NO: 130532 - DNA, 25 bp, Homo sapien
ggcagcgggcgccctgtgtccacca

SEQ ID NO: 130533 - DNA, 25 bp, Homo sapien
agcgggcgccctgtgtccaccagca

SEQ ID NO: 130534 - DNA, 25 bp, Homo sapien
cgggcgccctgtgtccaccagcaca

SEQ ID NO: 130535 - DNA, 25 bp, Homo sapien
tgtggaggtcccaggcagcgggcgc

SEQ ID NO: 130536 - DNA, 25 bp, Homo sapien
agtcttggccctggcgtcgctctca

SEQ ID NO: 130537 - DNA, 25 bp, Homo sapien
tccttgaaggggtcatccgcctctg

SEQ ID NO: 130538 - DNA, 25 bp, Homo sapien
tctgtagtcttggccctggcgtcgc

SEQ ID NO: 130539 - DNA, 25 bp, Homo sapien
gggtcatccgcctctgtagtcttgg

SEQ ID NO: 130540 - DNA, 25 bp, Homo sapien
gttaatggcctgaaccatgtcagtg

SEQ ID NO: 130541 - DNA, 25 bp, Homo sapien
tgtcagtggtgagagcatccagtag

SEQ ID NO: 130542 - DNA, 25 bp, Homo sapien
gcatccagtaggctggtgataaact

SEQ ID NO: 130543 - DNA, 25 bp, Homo sapien
tgagttaatggcctgaaccatgtca

SEQ ID NO: 130544 - DNA, 25 bp, Homo sapien
ctgagctgtatttggctatatgagt

SEQ ID NO: 130545 - DNA, 25 bp, Homo sapien
cttggaattctcaggatgccaaaaa

SEQ ID NO: 130546 - DNA, 25 bp, Homo sapien
ctgtatttggctatatgagtgtcca

SEQ ID NO: 130547 - DNA, 25 bp, Homo sapien
agctgtatttggctatatgagtgtc

SEQ ID NO: 130548 - DNA, 25 bp, Homo sapien
tgttgaaccctgtcttcatctttct

SEQ ID NO: 130549 - DNA, 25 bp, Homo sapien
gctcccgtctgtgggcctgttgaac

SEQ ID NO: 130550 - DNA, 25 bp, Homo sapien
tctctatctcggagactgagcagct

SEQ ID NO: 130551 - DNA, 25 bp, Homo sapien
atgtgctgtcctctctatctcggag

SEQ ID NO: 130552 - DNA, 25 bp, Homo sapien
taacatcaaggccaacaatactgcc

SEQ ID NO: 130553 - DNA, 25 bp, Homo sapien
caagtaacatcaaggccaacaatac

SEQ ID NO: 130554 - DNA, 25 bp, Homo sapien
aacacaagtaacatcaaggccaaca

SEQ ID NO: 130555 - DNA, 25 bp, Homo sapien
caaggccaacaatactgccttttca

SEQ ID NO: 130556 - DNA, 25 bp, Homo sapien
gcccatctgcgtcccccacctgcgg

SEQ ID NO: 130557 - DNA, 25 bp, Homo sapien
ggcccatctgcgtcccccacctgcg

SEQ ID NO: 130558 - DNA, 25 bp, Homo sapien
tccatcaaacaagagggacaactgg

SEQ ID NO: 130559 - DNA, 25 bp, Homo sapien
agggacaactggccagggtctgtct

SEQ ID NO: 130560 - DNA, 25 bp, Homo sapien
catcaaacaagagggacaactggcc

SEQ ID NO: 130561 - DNA, 25 bp, Homo sapien
gctcctccatcaaacaagagggaca

SEQ ID NO: 130562 - DNA, 25 bp, Homo sapien
tccccaagtgagactgtttccctgg

SEQ ID NO: 130563 - DNA, 25 bp, Homo sapien
gtccccaagtgagactgtttccctg

SEQ ID NO: 130564 - DNA, 25 bp, Homo sapien
cccaagtgagactgtttccctggcc

SEQ ID NO: 130565 - DNA, 25 bp, Homo sapien
ccccaagtgagactgtttccctggc

SEQ ID NO: 130566 - DNA, 25 bp, Homo sapien
attcactgttaagacggcccctgca

SEQ ID NO: 130567 - DNA, 25 bp, Homo sapien
aattttgttggaattctattggtgc

SEQ ID NO: 130568 - DNA, 25 bp, Homo sapien
cggcccctgcagtgcataccagctg

SEQ ID NO: 130569 - DNA, 25 bp, Homo sapien
ttggaattctattggtgcaggtagg

SEQ ID NO: 130570 - DNA, 25 bp, Homo sapien
tgcggacaagctgctcattacacgt

SEQ ID NO: 130571 - DNA, 25 bp, Homo sapien
ttacacgtaaacatgtgccctgtgg

SEQ ID NO: 130572 - DNA, 25 bp, Homo sapien
tgagcatccactgtacgcccagtgc

SEQ ID NO: 130573 - DNA, 25 bp, Homo sapien
catgtgccctgtggtggactgactg

SEQ ID NO: 130574 - DNA, 25 bp, Homo sapien
catgatgggtgctcaagacaaattg

SEQ ID NO: 130575 - DNA, 25 bp, Homo sapien
ttgctgaataaaccagagctggaat

SEQ ID NO: 130576 - DNA, 25 bp, Homo sapien
tgggtgctcaagacaaattggcttg

SEQ ID NO: 130577 - DNA, 25 bp, Homo sapien
aattggcttgatctaatttgctgaa

SEQ ID NO: 130578 - DNA, 25 bp, Homo sapien
cttgcaggaaccatcagccctggta

SEQ ID NO: 130579 - DNA, 25 bp, Homo sapien
tgcaggaaccatcagccctggtatg

SEQ ID NO: 130580 - DNA, 25 bp, Homo sapien
ttgcaggaaccatcagccctggtat

SEQ ID NO: 130581 - DNA, 25 bp, Homo sapien
gcaggaaccatcagccctggtatga

SEQ ID NO: 130582 - DNA, 25 bp, Homo sapien
ccccaccgcagagaacaccaatcag

SEQ ID NO: 130583 - DNA, 25 bp, Homo sapien
acaaacacccccaccgcagagaaca

SEQ ID NO: 130584 - DNA, 25 bp, Homo sapien
catggacaaacacccccaccgcaga

SEQ ID NO: 130585 - DNA, 25 bp, Homo sapien
caccgcagagaacaccaatcaggat

SEQ ID NO: 130586 - DNA, 25 bp, Homo sapien
aagggcttcatctcccgcttgttaa

SEQ ID NO: 130587 - DNA, 25 bp, Homo sapien
tgtccagctggctgaaataccagtg

SEQ ID NO: 130588 - DNA, 25 bp, Homo sapien
tcacagtagtcggtgaaacgccggg

SEQ ID NO: 130589 - DNA, 25 bp, Homo sapien
gcagcccttcagctcaggcagtgaa

SEQ ID NO: 130590 - DNA, 25 bp, Homo sapien
gacacgggatggatgaccgacgcat

SEQ ID NO: 130591 - DNA, 25 bp, Homo sapien
gcaccgcacgacacgggatggatga

SEQ ID NO: 130592 - DNA, 25 bp, Homo sapien
gcccctgcacaccattgaccacagg

SEQ ID NO: 130593 - DNA, 25 bp, Homo sapien
gatgaccgacgcataggctctgctc

SEQ ID NO: 130594 - DNA, 25 bp, Homo sapien
ctagcatgcaagcccctcgcagccc

SEQ ID NO: 130595 - DNA, 25 bp, Homo sapien
agcatgcaagcccctcgcagcccac

SEQ ID NO: 130596 - DNA, 25 bp, Homo sapien
tagcatgcaagcccctcgcagccca

SEQ ID NO: 130597 - DNA, 25 bp, Homo sapien
gggaaactgccaaggctaccacctg

SEQ ID NO: 130598 - DNA, 25 bp, Homo sapien
tattaaaagtgcaaacatggtgggc

SEQ ID NO: 130599 - DNA, 25 bp, Homo sapien
caacgctgaaggttaggtgtctggt

SEQ ID NO: 130600 - DNA, 25 bp, Homo sapien
aaccctctaaaagttgtcagtagca

SEQ ID NO: 130601 - DNA, 25 bp, Homo sapien
acttatgttacacgggatgtggcag

SEQ ID NO: 130602 - DNA, 25 bp, Homo sapien
tatagtcctcccaccagaaaagaac

SEQ ID NO: 130603 - DNA, 25 bp, Homo sapien
gactatgtgtccagagtgcccacca

SEQ ID NO: 130604 - DNA, 25 bp, Homo sapien
gaaaagaactcgtggagtccgcagt

SEQ ID NO: 130605 - DNA, 25 bp, Homo sapien
gcagtacaattgcaggactcccgtc

SEQ ID NO: 130606 - DNA, 25 bp, Homo sapien
gagggtcactaagatactggtgcac

SEQ ID NO: 130607 - DNA, 25 bp, Homo sapien
aagagtttccctgttggcaccgcac

SEQ ID NO: 130608 - DNA, 25 bp, Homo sapien
ttcgagtgacgtaatgcaaatcctt

SEQ ID NO: 130609 - DNA, 25 bp, Homo sapien
tggataatttgctccgagggtcact

SEQ ID NO: 130610 - DNA, 25 bp, Homo sapien
ggtcacacccaatctgcccctggca

SEQ ID NO: 130611 - DNA, 25 bp, Homo sapien
cctggcactgagacagctgcgtctc

SEQ ID NO: 130612 - DNA, 25 bp, Homo sapien
ccctggcactgagacagctgcgtct

SEQ ID NO: 130613 - DNA, 25 bp, Homo sapien
agtggagaggtcacacccaatctgc

SEQ ID NO: 130614 - DNA, 25 bp, Homo sapien
tccgcggaagatgcctgtgatgcct

SEQ ID NO: 130615 - DNA, 25 bp, Homo sapien
gcctggaagcccataagaaaacttg

SEQ ID NO: 130616 - DNA, 25 bp, Homo sapien
cttctggaattagcttaaagcctgg

SEQ ID NO: 130617 - DNA, 25 bp, Homo sapien
cctgtagctgggttatcacccctgc

SEQ ID NO: 130618 - DNA, 25 bp, Homo sapien
gaggggaccagtccagggctaccca

SEQ ID NO: 130619 - DNA, 25 bp, Homo sapien
aaggccacttgaataggcacagcac

SEQ ID NO: 130620 - DNA, 25 bp, Homo sapien
ggaaggggcgctaagggccacttgc

SEQ ID NO: 130621 - DNA, 25 bp, Homo sapien
agggctacccaacctccctcactgc

SEQ ID NO: 130622 - DNA, 25 bp, Homo sapien
atgtcgggttggaatacaagatgag

SEQ ID NO: 130623 - DNA, 25 bp, Homo sapien
agggacagtgcttgtggtgccaacg

SEQ ID NO: 130624 - DNA, 25 bp, Homo sapien
tcccgagaaggttgtgctcctccca

SEQ ID NO: 130625 - DNA, 25 bp, Homo sapien
tggtgccaacgccttccagacccgg

SEQ ID NO: 130626 - DNA, 25 bp, Homo sapien
tgtcccgagaaggttgtgctcctcc

SEQ ID NO: 130627 - DNA, 25 bp, Homo sapien
agtcattcctgagataacctctagg

SEQ ID NO: 130628 - DNA, 25 bp, Homo sapien
tcagctccggcacgttgagttctct

SEQ ID NO: 130629 - DNA, 25 bp, Homo sapien
agtgtctcgtgcaaggcccactcag

SEQ ID NO: 130630 - DNA, 25 bp, Homo sapien
gataacctctaggactttctccagg

SEQ ID NO: 130631 - DNA, 25 bp, Homo sapien
gggagatctcgaagatccaaacatc

SEQ ID NO: 130632 - DNA, 25 bp, Homo sapien
aacatctacaggcaggcgccgtctc

SEQ ID NO: 130633 - DNA, 25 bp, Homo sapien
cacctacacacacgatcctgtggga

SEQ ID NO: 130634 - DNA, 25 bp, Homo sapien
cgatcctgtgggagacaagatgcct

SEQ ID NO: 130635 - DNA, 25 bp, Homo sapien
gggatggctgaggcggtcatttcca

SEQ ID NO: 130636 - DNA, 25 bp, Homo sapien
ggcagagtgtggcacaaggaatctg

SEQ ID NO: 130637 - DNA, 25 bp, Homo sapien
gaaggttcccaaggggatggctgag

SEQ ID NO: 130638 - DNA, 25 bp, Homo sapien
cagagtgtggcacaaggaatctgga

SEQ ID NO: 130639 - DNA, 25 bp, Homo sapien
acccagagttccactttatgagttt

SEQ ID NO: 130640 - DNA, 25 bp, Homo sapien
ccaaacccagagttccactttatga

SEQ ID NO: 130641 - DNA, 25 bp, Homo sapien
tgagctgctcatgaccagcccaaac

SEQ ID NO: 130642 - DNA, 25 bp, Homo sapien
ccagcccaaacccagagttccactt

SEQ ID NO: 130643 - DNA, 25 bp, Homo sapien
ttcttactaagcgaggcacttcccc

SEQ ID NO: 130644 - DNA, 25 bp, Homo sapien
cattcttactaagcgaggcacttcc

SEQ ID NO: 130645 - DNA, 25 bp, Homo sapien
cttactaagcgaggcacttcccctg

SEQ ID NO: 130646 - DNA, 25 bp, Homo sapien
ctccattcttactaagcgaggcact

SEQ ID NO: 130647 - DNA, 25 bp, Homo sapien
ggaaggaggtttctgtatcagaaag

SEQ ID NO: 130648 - DNA, 25 bp, Homo sapien
gaaggaggtttctgtatcagaaagg

SEQ ID NO: 130649 - DNA, 25 bp, Homo sapien
aaggaggtttctgtatcagaaaggc

SEQ ID NO: 130650 - DNA, 25 bp, Homo sapien
aggaggtttctgtatcagaaaggca

SEQ ID NO: 130651 - DNA, 25 bp, Homo sapien
tctcacactcaggtgccaatgtgtc

SEQ ID NO: 130652 - DNA, 25 bp, Homo sapien
aacctggactttgcgaagttggaag

SEQ ID NO: 130653 - DNA, 25 bp, Homo sapien
tgtcagacccagtatattctaagca

SEQ ID NO: 130654 - DNA, 25 bp, Homo sapien
ctttgcgaagttggaagatgtaagt

SEQ ID NO: 130655 - DNA, 25 bp, Homo sapien
tgcccacggatctttaggctttctg

SEQ ID NO: 130656 - DNA, 25 bp, Homo sapien
gacataagatgtcatcacgaaactg

SEQ ID NO: 130657 - DNA, 25 bp, Homo sapien
ggctttctgcattgacataaataca

SEQ ID NO: 130658 - DNA, 25 bp, Homo sapien
tgtcatcacgaaactgcccacggat

SEQ ID NO: 130659 - DNA, 25 bp, Homo sapien
caggcctaggacttctcctaagaga

SEQ ID NO: 130660 - DNA, 25 bp, Homo sapien
agaggcagcatcaggacctaagccc

SEQ ID NO: 130661 - DNA, 25 bp, Homo sapien
tagaggcctattgctacatcaaggg

SEQ ID NO: 130662 - DNA, 25 bp, Homo sapien
caaacaatggaggaatcaccgactt

SEQ ID NO: 130663 - DNA, 25 bp, Homo sapien
caaggactacaggattcccctagga

SEQ ID NO: 130664 - DNA, 25 bp, Homo sapien
aattccccagctagagacaaaagac

SEQ ID NO: 130665 - DNA, 25 bp, Homo sapien
aaactgttcaacatgagaagggacc

SEQ ID NO: 130666 - DNA, 25 bp, Homo sapien
aatggactcatcagccaaagtggaa

SEQ ID NO: 130667 - DNA, 25 bp, Homo sapien
gatggaatgcacaggtaaatctcct

SEQ ID NO: 130668 - DNA, 25 bp, Homo sapien
cttggagagtaccagccaggaacag

SEQ ID NO: 130669 - DNA, 25 bp, Homo sapien
gatcctcaccgctgagctccatctt

SEQ ID NO: 130670 - DNA, 25 bp, Homo sapien
tgcatctcctgatggaatgcacagg

SEQ ID NO: 130671 - DNA, 25 bp, Homo sapien
ttttgtattctcaatgacctgctcc

SEQ ID NO: 130672 - DNA, 25 bp, Homo sapien
tcttttgtattctcaatgacctgct

SEQ ID NO: 130673 - DNA, 25 bp, Homo sapien
ttgtattctcaatgacctgctccat

SEQ ID NO: 130674 - DNA, 25 bp, Homo sapien
tttgtattctcaatgacctgctcca

SEQ ID NO: 130675 - DNA, 25 bp, Homo sapien
tcagcatgcccaacttgaaagtgtc

SEQ ID NO: 130676 - DNA, 25 bp, Homo sapien
ttgtgtctaagtcccaaatctgtgt

SEQ ID NO: 130677 - DNA, 25 bp, Homo sapien
cctcatatctagtcattctccaagt

SEQ ID NO: 130678 - DNA, 25 bp, Homo sapien
gtttcctggctctgttccctcatat

SEQ ID NO: 130679 - DNA, 25 bp, Homo sapien
ttggtaaaatttcctgcgtatacaa

SEQ ID NO: 130680 - DNA, 25 bp, Homo sapien
tcctgcgtatacaaatcttggtcct

SEQ ID NO: 130681 - DNA, 25 bp, Homo sapien
gcgtatacaaatcttggtcctctgc

SEQ ID NO: 130682 - DNA, 25 bp, Homo sapien
tttcctgcgtatacaaatcttggtc

SEQ ID NO: 130683 - DNA, 25 bp, Homo sapien
tgataatacccagaccttaaggagc

SEQ ID NO: 130684 - DNA, 25 bp, Homo sapien
tcagaattgggaaggctcaccccag

SEQ ID NO: 130685 - DNA, 25 bp, Homo sapien
ggcatgaatataccccaaaccaggg

SEQ ID NO: 130686 - DNA, 25 bp, Homo sapien
tcatgtgtttatcaaagccggccca

SEQ ID NO: 130687 - DNA, 25 bp, Homo sapien
tgcacaaactagtgggagcctggga

SEQ ID NO: 130688 - DNA, 25 bp, Homo sapien
gaagctgctggaagctacttatgca

SEQ ID NO: 130689 - DNA, 25 bp, Homo sapien
aactcatgagctagggcaggtacca

SEQ ID NO: 130690 - DNA, 25 bp, Homo sapien
tgtccggctagcagtcaacattggg

SEQ ID NO: 130691 - DNA, 25 bp, Homo sapien
tatgtgctagttcccacaggtaggt

SEQ ID NO: 130692 - DNA, 25 bp, Homo sapien
gtgctagttcccacaggtaggtggc

SEQ ID NO: 130693 - DNA, 25 bp, Homo sapien
tgtgctagttcccacaggtaggtgg

SEQ ID NO: 130694 - DNA, 25 bp, Homo sapien
ctatgtgctagttcccacaggtagg

SEQ ID NO: 130695 - DNA, 25 bp, Homo sapien
tgttctataccaggcagctacccaa

SEQ ID NO: 130696 - DNA, 25 bp, Homo sapien
taagacgtcgtaatgatgggaactg

SEQ ID NO: 130697 - DNA, 25 bp, Homo sapien
aatgtccccatgctgggaaggagta

SEQ ID NO: 130698 - DNA, 25 bp, Homo sapien
gattgtgcatgcaagtttcttccag

SEQ ID NO: 130699 - DNA, 25 bp, Homo sapien
ttcaaggttatgcacctgagccagg

SEQ ID NO: 130700 - DNA, 25 bp, Homo sapien
tagccactttgcaatactgctgctg

SEQ ID NO: 130701 - DNA, 25 bp, Homo sapien
gcagccctggcagatgggaattatt

SEQ ID NO: 130702 - DNA, 25 bp, Homo sapien
ctcagagggtaagcagctagttcaa

SEQ ID NO: 130703 - DNA, 25 bp, Homo sapien
gaaagctctttgctgatctgtcaat

SEQ ID NO: 130704 - DNA, 25 bp, Homo sapien
gcacccttgtagagccaatacttag

SEQ ID NO: 130705 - DNA, 25 bp, Homo sapien
gatgtggcgtctgatttctacagga

SEQ ID NO: 130706 - DNA, 25 bp, Homo sapien
ttaggatagtctcaggccaacagcc

SEQ ID NO: 130707 - DNA, 25 bp, Homo sapien
tgcacctctgtctcatttccctctc

SEQ ID NO: 130708 - DNA, 25 bp, Homo sapien
ccctctctcttcagatgatttttca

SEQ ID NO: 130709 - DNA, 25 bp, Homo sapien
tctctctgcacctctgtctcatttc

SEQ ID NO: 130710 - DNA, 25 bp, Homo sapien
tccctctctcttcagatgatttttc

SEQ ID NO: 130711 - DNA, 25 bp, Homo sapien
ttgccagtaccttcctgtcttttcc

SEQ ID NO: 130712 - DNA, 25 bp, Homo sapien
agttgccagtaccttcctgtctttt

SEQ ID NO: 130713 - DNA, 25 bp, Homo sapien
aacaggccttaacaggtgctgaaaa

SEQ ID NO: 130714 - DNA, 25 bp, Homo sapien
ggccttaacaggtgctgaaaacagg

SEQ ID NO: 130715 - DNA, 25 bp, Homo sapien
tgggtgctgtgacaattggacatga

SEQ ID NO: 130716 - DNA, 25 bp, Homo sapien
ctgggtgctgtgacaattggacatg

SEQ ID NO: 130717 - DNA, 25 bp, Homo sapien
tctcctctaaatgcattctctgttg

SEQ ID NO: 130718 - DNA, 25 bp, Homo sapien
ctctcctctaaatgcattctctgtt

SEQ ID NO: 130719 - DNA, 25 bp, Homo sapien
gcctctcctctaaatgcattctctg

SEQ ID NO: 130720 - DNA, 25 bp, Homo sapien
ctctaaatgcattctctgttgtgtt

SEQ ID NO: 130721 - DNA, 25 bp, Homo sapien
ttaagatgctgctgaccaggacagc

SEQ ID NO: 130722 - DNA, 25 bp, Homo sapien
ccatggaagcctcattaaatctgca

SEQ ID NO: 130723 - DNA, 25 bp, Homo sapien
tagcccatgcagttgcgtaatgaga

SEQ ID NO: 130724 - DNA, 25 bp, Homo sapien
cagtttgggtttgatcacggctgcc

SEQ ID NO: 130725 - DNA, 25 bp, Homo sapien
gctcagactggtgcttttgcacttc

SEQ ID NO: 130726 - DNA, 25 bp, Homo sapien
gtgctcagactggtgcttttgcact

SEQ ID NO: 130727 - DNA, 25 bp, Homo sapien
tcctgaacttgtaacctgtgctcag

SEQ ID NO: 130728 - DNA, 25 bp, Homo sapien
cctctaaaccacttgtgggatcctg

SEQ ID NO: 130729 - DNA, 25 bp, Homo sapien
tgactggtccacatctttctcacct

SEQ ID NO: 130730 - DNA, 25 bp, Homo sapien
atgactggtccacatctttctcacc

SEQ ID NO: 130731 - DNA, 25 bp, Homo sapien
tgactgcctagtacgtcccctcaat

SEQ ID NO: 130732 - DNA, 25 bp, Homo sapien
ctagtacgtcccctcaatgactggt

SEQ ID NO: 130733 - DNA, 25 bp, Homo sapien
tagactgtcagggttgtgtggcaag

SEQ ID NO: 130734 - DNA, 25 bp, Homo sapien
agactgtcagggttgtgtggcaagg

SEQ ID NO: 130735 - DNA, 25 bp, Homo sapien
ctagactgtcagggttgtgtggcaa

SEQ ID NO: 130736 - DNA, 25 bp, Homo sapien
cattcccgcatccaggctttgagat

SEQ ID NO: 130737 - DNA, 25 bp, Homo sapien
gtgaaacctgtgaattgtctccacc

SEQ ID NO: 130738 - DNA, 25 bp, Homo sapien
tcattcccgcatccaggctttgaga

SEQ ID NO: 130739 - DNA, 25 bp, Homo sapien
gaattgtctccaccgcaaatcctgc

SEQ ID NO: 130740 - DNA, 25 bp, Homo sapien
ctttagcactttatcagaagaaggg

SEQ ID NO: 130741 - DNA, 25 bp, Homo sapien
tacactgttttgcacaagtagccag

SEQ ID NO: 130742 - DNA, 25 bp, Homo sapien
gcacaagtagccagtaatgaaaagg

SEQ ID NO: 130743 - DNA, 25 bp, Homo sapien
aaaaggctgctctccggaatcatct

SEQ ID NO: 130744 - DNA, 25 bp, Homo sapien
cacacatgaaggcataccactgctt

SEQ ID NO: 130745 - DNA, 25 bp, Homo sapien
ttaatgacatactgttgtacctgag

SEQ ID NO: 130746 - DNA, 25 bp, Homo sapien
ccttccagccggtatattaatgaca

SEQ ID NO: 130747 - DNA, 25 bp, Homo sapien
tactgttgtacctgagaaccaatga

SEQ ID NO: 130748 - DNA, 25 bp, Homo sapien
tcctccatggggcatagagtggaga

SEQ ID NO: 130749 - DNA, 25 bp, Homo sapien
ttccaaggccatgactcagaatgac

SEQ ID NO: 130750 - DNA, 25 bp, Homo sapien
gagatgcttcttcaaataccccttc

SEQ ID NO: 130751 - DNA, 25 bp, Homo sapien
atgactggcgtagggagcctggacc

SEQ ID NO: 130752 - DNA, 25 bp, Homo sapien
ctagtctcccagttcaatagtgtcc

SEQ ID NO: 130753 - DNA, 25 bp, Homo sapien
agtctcccagttcaatagtgtccac

SEQ ID NO: 130754 - DNA, 25 bp, Homo sapien
ttgggtggcactgctgtgagaaaca

SEQ ID NO: 130755 - DNA, 25 bp, Homo sapien
aatttgggtggcactgctgtgagaa

SEQ ID NO: 130756 - DNA, 25 bp, Homo sapien
tggctaagcgccatccatgcaatat

SEQ ID NO: 130757 - DNA, 25 bp, Homo sapien
tattactacccatcgtacagaggag

SEQ ID NO: 130758 - DNA, 25 bp, Homo sapien
gaaacatctgcgagtgggctgagaa

SEQ ID NO: 130759 - DNA, 25 bp, Homo sapien
gaaatcacaggttcttatgagcagg

SEQ ID NO: 130760 - DNA, 25 bp, Homo sapien
cagagtaaatgagccatttacagcc

SEQ ID NO: 130761 - DNA, 25 bp, Homo sapien
tcctcttgccagagtaaatgagcca

SEQ ID NO: 130762 - DNA, 25 bp, Homo sapien
ccatttacagccagggcgccaagat

SEQ ID NO: 130763 - DNA, 25 bp, Homo sapien
tcttgccagagtaaatgagccattt

SEQ ID NO: 130764 - DNA, 25 bp, Homo sapien
agcaggtcaccgcagccagagccca

SEQ ID NO: 130765 - DNA, 25 bp, Homo sapien
gcaggtcaccgcagccagagcccac

SEQ ID NO: 130766 - DNA, 25 bp, Homo sapien
gtgtcaggaccatttgtccagcctg

SEQ ID NO: 130767 - DNA, 25 bp, Homo sapien
gtccagcctgttgagtgaaggtcat

SEQ ID NO: 130768 - DNA, 25 bp, Homo sapien
ggtgtcaggaccatttgtccagcct

SEQ ID NO: 130769 - DNA, 25 bp, Homo sapien
ttgagtgaaggtcattctgcctaaa

SEQ ID NO: 130770 - DNA, 25 bp, Homo sapien
tgaaggaggaggtggctgcagagct

SEQ ID NO: 130771 - DNA, 25 bp, Homo sapien
agtgaaggaggaggtggctgcagag

SEQ ID NO: 130772 - DNA, 25 bp, Homo sapien
aggaggaggtggctgcagagcttac

SEQ ID NO: 130773 - DNA, 25 bp, Homo sapien
gaaggaggaggtggctgcagagctt

SEQ ID NO: 130774 - DNA, 25 bp, Homo sapien
cttgttctgaataggatattacccc

SEQ ID NO: 130775 - DNA, 25 bp, Homo sapien
gcagcctcaatgcaccttgttctga

SEQ ID NO: 130776 - DNA, 25 bp, Homo sapien
atttgctgtggtccgtgcacggaat

SEQ ID NO: 130777 - DNA, 25 bp, Homo sapien
tgtcaaaagacctcctcagtatcag

SEQ ID NO: 130778 - DNA, 25 bp, Homo sapien
ctgagcaggtggtacaaataagcat

SEQ ID NO: 130779 - DNA, 25 bp, Homo sapien
tctgagcaggtggtacaaataagca

SEQ ID NO: 130780 - DNA, 25 bp, Homo sapien
ggagaaagcatggaatttctgctga

SEQ ID NO: 130781 - DNA, 25 bp, Homo sapien
cctctgagcaggtggtacaaataag

SEQ ID NO: 130782 - DNA, 25 bp, Homo sapien
tgtgagcagggacactcccgtctct

SEQ ID NO: 130783 - DNA, 25 bp, Homo sapien
ccaagggttacactgtcagtgtgag

SEQ ID NO: 130784 - DNA, 25 bp, Homo sapien
tacactgtcagtgtgagcagggaca

SEQ ID NO: 130785 - DNA, 25 bp, Homo sapien
gagcagggacactcccgtctctgct

SEQ ID NO: 130786 - DNA, 25 bp, Homo sapien
gagcaggaagaaaccactggttcaa

SEQ ID NO: 130787 - DNA, 25 bp, Homo sapien
atgaatggtgcagtaggcagagcca

SEQ ID NO: 130788 - DNA, 25 bp, Homo sapien
aaagaagcatctgtcacatcgaagc

SEQ ID NO: 130789 - DNA, 25 bp, Homo sapien
gattcaatctgcttgattccgatga

SEQ ID NO: 130790 - DNA, 25 bp, Homo sapien
tcccattgggtttctgatcagccca

SEQ ID NO: 130791 - DNA, 25 bp, Homo sapien
acatgaattggttgaatggtcaccc

SEQ ID NO: 130792 - DNA, 25 bp, Homo sapien
ccaacttgggtctcacccttctgat

SEQ ID NO: 130793 - DNA, 25 bp, Homo sapien
cagactgtctgggagagattggaaa

SEQ ID NO: 130794 - DNA, 25 bp, Homo sapien
tgaacgatcatagtcagtctgagat

SEQ ID NO: 130795 - DNA, 25 bp, Homo sapien
atctgaacgatcatagtcagtctga

SEQ ID NO: 130796 - DNA, 25 bp, Homo sapien
cagtctgagattctgaaggtttgaa

SEQ ID NO: 130797 - DNA, 25 bp, Homo sapien
catagtcagtctgagattctgaagg

SEQ ID NO: 130798 - DNA, 25 bp, Homo sapien
ccaaaccattctcctagggatgagt

SEQ ID NO: 130799 - DNA, 25 bp, Homo sapien
caaaaccagcaggttattggagctg

SEQ ID NO: 130800 - DNA, 25 bp, Homo sapien
tgacagccgtgtaacagctcagagc

SEQ ID NO: 130801 - DNA, 25 bp, Homo sapien
gctcagatcagcaatgggtgcacaa

SEQ ID NO: 130802 - DNA, 25 bp, Homo sapien
ctgctgctctcaaatctccactagc

SEQ ID NO: 130803 - DNA, 25 bp, Homo sapien
gctgctctcaaatctccactagctg

SEQ ID NO: 130804 - DNA, 25 bp, Homo sapien
tgctgctctcaaatctccactagct

SEQ ID NO: 130805 - DNA, 25 bp, Homo sapien
tgctctcaaatctccactagctgtt

SEQ ID NO: 130806 - DNA, 25 bp, Homo sapien
aaggccaacctaagggcagccaagc

SEQ ID NO: 130807 - DNA, 25 bp, Homo sapien
gctgaagatgtcaaggccaacctaa

SEQ ID NO: 130808 - DNA, 25 bp, Homo sapien
agatgtcaaggccaacctaagggca

SEQ ID NO: 130809 - DNA, 25 bp, Homo sapien
aggccaacctaagggcagccaagct

SEQ ID NO: 130810 - DNA, 25 bp, Homo sapien
tctttgccatacagatctgtctgcc

SEQ ID NO: 130811 - DNA, 25 bp, Homo sapien
gtcctgcactgctctttgccataca

SEQ ID NO: 130812 - DNA, 25 bp, Homo sapien
tcatggctaaatcccttggtctttc

SEQ ID NO: 130813 - DNA, 25 bp, Homo sapien
ttctcatggctaaatcccttggtct

SEQ ID NO: 130814 - DNA, 25 bp, Homo sapien
ttcatcaccagcaactaccgacaga

SEQ ID NO: 130815 - DNA, 25 bp, Homo sapien
gcaactaccgacagatgatgctttg

SEQ ID NO: 130816 - DNA, 25 bp, Homo sapien
gacagatgatgctttggccggctgc

SEQ ID NO: 130817 - DNA, 25 bp, Homo sapien
caccagcaactaccgacagatgatg

SEQ ID NO: 130818 - DNA, 25 bp, Homo sapien
aggcaccccctctttatcctaggag

SEQ ID NO: 130819 - DNA, 25 bp, Homo sapien
tctttatcctaggagctgcaaactt

SEQ ID NO: 130820 - DNA, 25 bp, Homo sapien
tttatcctaggagctgcaaacttga

SEQ ID NO: 130821 - DNA, 25 bp, Homo sapien
tatcctaggagctgcaaacttgatg

SEQ ID NO: 130822 - DNA, 25 bp, Homo sapien
cctgccagggatagaatgacagtac

SEQ ID NO: 130823 - DNA, 25 bp, Homo sapien
ggatagaatgacagtactcctgagg

SEQ ID NO: 130824 - DNA, 25 bp, Homo sapien
ttcatgcctgccagggatagaatga

SEQ ID NO: 130825 - DNA, 25 bp, Homo sapien
cagggatagaatgacagtactcctg

SEQ ID NO: 130826 - DNA, 25 bp, Homo sapien
tacactatttgggtactgagtcact

SEQ ID NO: 130827 - DNA, 25 bp, Homo sapien
taatcttccgtcgttttcaggtaca

SEQ ID NO: 130828 - DNA, 25 bp, Homo sapien
ttttctctgatctatcctctccagg

SEQ ID NO: 130829 - DNA, 25 bp, Homo sapien
tctccaggacactagcgtcagaaga

SEQ ID NO: 130830 - DNA, 25 bp, Homo sapien
aaacattcttagtgaatgatgcttg

SEQ ID NO: 130831 - DNA, 25 bp, Homo sapien
ttgtggcacatatctcaaggctacc

SEQ ID NO: 130832 - DNA, 25 bp, Homo sapien
gaatgatgcttgtggcacatatctc

SEQ ID NO: 130833 - DNA, 25 bp, Homo sapien
gatgcttgtggcacatatctcaagg

SEQ ID NO: 130834 - DNA, 25 bp, Homo sapien
tggttattcccttgactagactgag

SEQ ID NO: 130835 - DNA, 25 bp, Homo sapien
gatgtggtatggtccttgctaggcc

SEQ ID NO: 130836 - DNA, 25 bp, Homo sapien
tgtcccacagttacaggaagtccta

SEQ ID NO: 130837 - DNA, 25 bp, Homo sapien
ctagactgaggaacactctaaggcc

SEQ ID NO: 130838 - DNA, 25 bp, Homo sapien
tccatctcttatctgaagtgtcttt

SEQ ID NO: 130839 - DNA, 25 bp, Homo sapien
gttccatctcttatctgaagtgtct

SEQ ID NO: 130840 - DNA, 25 bp, Homo sapien
ggtaaactgccccagttccatctct

SEQ ID NO: 130841 - DNA, 25 bp, Homo sapien
tttggtaaactgccccagttccatc

SEQ ID NO: 130842 - DNA, 25 bp, Homo sapien
taggaccaaaagctgtgctcctgcc

SEQ ID NO: 130843 - DNA, 25 bp, Homo sapien
gaggacctcgaagtccaaaagaatg

SEQ ID NO: 130844 - DNA, 25 bp, Homo sapien
caaataactagacaggagaggacct

SEQ ID NO: 130845 - DNA, 25 bp, Homo sapien
tgaaaccaaacagtgtgagcttcgt

SEQ ID NO: 130846 - DNA, 25 bp, Homo sapien
tgagctgagctcttgtttacctcga

SEQ ID NO: 130847 - DNA, 25 bp, Homo sapien
acttgcagcggcgtgtgattaatct

SEQ ID NO: 130848 - DNA, 25 bp, Homo sapien
cctggcgacccggtgacttgcagcg

SEQ ID NO: 130849 - DNA, 25 bp, Homo sapien
ttacctcgattttcaaatatagctg

SEQ ID NO: 130850 - DNA, 25 bp, Homo sapien
ctccgaacgcattcggcggttaggt

SEQ ID NO: 130851 - DNA, 25 bp, Homo sapien
acgcattcggcggttaggtctcccg

SEQ ID NO: 130852 - DNA, 25 bp, Homo sapien
ctcccgggcagaagaattaaaactg

SEQ ID NO: 130853 - DNA, 25 bp, Homo sapien
atttatcagaaacgcagactgcagc

SEQ ID NO: 130854 - DNA, 25 bp, Homo sapien
caccgccgcgggtcgggagctgcag

SEQ ID NO: 130855 - DNA, 25 bp, Homo sapien
atctcgggactccaccgccgcgggt

SEQ ID NO: 130856 - DNA, 25 bp, Homo sapien
cccaatctcgggactccaccgccgc

SEQ ID NO: 130857 - DNA, 25 bp, Homo sapien
accgccgcgggtcgggagctgcagc

SEQ ID NO: 130858 - DNA, 25 bp, Homo sapien
atgagccgctgcgaccggtgaggcg

SEQ ID NO: 130859 - DNA, 25 bp, Homo sapien
ccgcgggggcgatgagccgctgcga

SEQ ID NO: 130860 - DNA, 25 bp, Homo sapien
tgacatgccccggacgcggctgcgg

SEQ ID NO: 130861 - DNA, 25 bp, Homo sapien
gctgcgaccggtgaggcgccgggcg

SEQ ID NO: 130862 - DNA, 25 bp, Homo sapien
ccagggaaagcccaggcgacgcgac

SEQ ID NO: 130863 - DNA, 25 bp, Homo sapien
gaggcttggagattggctttttgat

SEQ ID NO: 130864 - DNA, 25 bp, Homo sapien
tctcccgcggtgacagcgtgcaagg

SEQ ID NO: 130865 - DNA, 25 bp, Homo sapien
tcttccggcagcttaatgggcaaag

SEQ ID NO: 130866 - DNA, 25 bp, Homo sapien
gtttgacttgggttgagaaaatgac

SEQ ID NO: 130867 - DNA, 25 bp, Homo sapien
cacaaactgttgtttgacttgggtt

SEQ ID NO: 130868 - DNA, 25 bp, Homo sapien
caagcgtctctcacaaactgttgtt

SEQ ID NO: 130869 - DNA, 25 bp, Homo sapien
ccaagcgtctctcacaaactgttgt

SEQ ID NO: 130870 - DNA, 25 bp, Homo sapien
cctgtgggaagagcggatgagtata

SEQ ID NO: 130871 - DNA, 25 bp, Homo sapien
tctatgtcttgactgaggttgttgc

SEQ ID NO: 130872 - DNA, 25 bp, Homo sapien
gatacctgtaactttatctccatta

SEQ ID NO: 130873 - DNA, 25 bp, Homo sapien
gttgctctacatgtatgtacttgta

SEQ ID NO: 130874 - DNA, 25 bp, Homo sapien
agctctgccgacagcgttggttgaa

SEQ ID NO: 130875 - DNA, 25 bp, Homo sapien
agcgttggttgaacatgctttggca

SEQ ID NO: 130876 - DNA, 25 bp, Homo sapien
tctgccgacagcgttggttgaacat

SEQ ID NO: 130877 - DNA, 25 bp, Homo sapien
gccgacagcgttggttgaacatgct

SEQ ID NO: 130878 - DNA, 25 bp, Homo sapien
gtagcttctcgggtcctgagtttct

SEQ ID NO: 130879 - DNA, 25 bp, Homo sapien
gtgactgggctgaatcctgtagctt

SEQ ID NO: 130880 - DNA, 25 bp, Homo sapien
cttgaaaatgaggtttgtggctctt

SEQ ID NO: 130881 - DNA, 25 bp, Homo sapien
tgatgttacacagcttactttccat

SEQ ID NO: 130882 - DNA, 25 bp, Homo sapien
gctgtgttcttctaacccaagtgtg

SEQ ID NO: 130883 - DNA, 25 bp, Homo sapien
gttcttctaacccaagtgtgcctcc

SEQ ID NO: 130884 - DNA, 25 bp, Homo sapien
gaagaggagccctgaattttatgcc

SEQ ID NO: 130885 - DNA, 25 bp, Homo sapien
ctgctgtgttcttctaacccaagtg

SEQ ID NO: 130886 - DNA, 25 bp, Homo sapien
ccatgaccatgaggacattcaaagg

SEQ ID NO: 130887 - DNA, 25 bp, Homo sapien
tcaaagggatggaagatctttgctc

SEQ ID NO: 130888 - DNA, 25 bp, Homo sapien
cactgtgcatggccgttgcatcatt

SEQ ID NO: 130889 - DNA, 25 bp, Homo sapien
ctgtgcatggccgttgcatcatttt

SEQ ID NO: 130890 - DNA, 25 bp, Homo sapien
gcatggccgttgcatcattttttca

SEQ ID NO: 130891 - DNA, 25 bp, Homo sapien
gcctgtgctcatgtttgtgtctttg

SEQ ID NO: 130892 - DNA, 25 bp, Homo sapien
ttttcatcaagtagtgcatttctca

SEQ ID NO: 130893 - DNA, 25 bp, Homo sapien
catcttgggaaggagcatatctttc

SEQ ID NO: 130894 - DNA, 25 bp, Homo sapien
gaaggagcatatctttcaaaagttg

SEQ ID NO: 130895 - DNA, 25 bp, Homo sapien
ttattttcatcaagtagtgcatttc

SEQ ID NO: 130896 - DNA, 25 bp, Homo sapien
taaagattggccaaaggacactgtg

SEQ ID NO: 130897 - DNA, 25 bp, Homo sapien
gacatagaaccaacataggtgccca

SEQ ID NO: 130898 - DNA, 25 bp, Homo sapien
ccggttagccgtgacagtagatttc

SEQ ID NO: 130899 - DNA, 25 bp, Homo sapien
gaaatcatgcctttgcggtaactta

SEQ ID NO: 130900 - DNA, 25 bp, Homo sapien
caatagacctgggacaagagtgccc

SEQ ID NO: 130901 - DNA, 25 bp, Homo sapien
agagagcacctgtcaaggggtcctg

SEQ ID NO: 130902 - DNA, 25 bp, Homo sapien
gtgggtcatgaaaacaatagacctg

SEQ ID NO: 130903 - DNA, 25 bp, Homo sapien
tcatgaaaacaatagacctgggaca

SEQ ID NO: 130904 - DNA, 25 bp, Homo sapien
cacaatttctgaggaagtgaagcgc

SEQ ID NO: 130905 - DNA, 25 bp, Homo sapien
gatcacaatttctgaggaagtgaag

SEQ ID NO: 130906 - DNA, 25 bp, Homo sapien
gagctggtctggcatctcaactcca

SEQ ID NO: 130907 - DNA, 25 bp, Homo sapien
atttctgaggaagtgaagcgccatc

SEQ ID NO: 130908 - DNA, 25 bp, Homo sapien
cttgagcttcatgtgaatcacgtgt

SEQ ID NO: 130909 - DNA, 25 bp, Homo sapien
tgagcttcatgtgaatcacgtgtct

SEQ ID NO: 130910 - DNA, 25 bp, Homo sapien
cagtctcgtgggacaaaagggtagt

SEQ ID NO: 130911 - DNA, 25 bp, Homo sapien
gagcttcatgtgaatcacgtgtctt

SEQ ID NO: 130912 - DNA, 25 bp, Homo sapien
tcttgatctatctcttccccttcag

SEQ ID NO: 130913 - DNA, 25 bp, Homo sapien
tcttacatctactgacctctcctgg

SEQ ID NO: 130914 - DNA, 25 bp, Homo sapien
ttccccttcagtcttacatctactg

SEQ ID NO: 130915 - DNA, 25 bp, Homo sapien
ggtctttcttctgacacaagcagag

SEQ ID NO: 130916 - DNA, 25 bp, Homo sapien
ctgcatgaataatccattagtaact

SEQ ID NO: 130917 - DNA, 25 bp, Homo sapien
tccattagtaactgtgtagtgaagt

SEQ ID NO: 130918 - DNA, 25 bp, Homo sapien
ccattagtaactgtgtagtgaagtt

SEQ ID NO: 130919 - DNA, 25 bp, Homo sapien
gttctgcatgaataatccattagta

SEQ ID NO: 130920 - DNA, 25 bp, Homo sapien
catgtggaatttgtgaaaaccattc

SEQ ID NO: 130921 - DNA, 25 bp, Homo sapien
tcatgtggaatttgtgaaaaccatt

SEQ ID NO: 130922 - DNA, 25 bp, Homo sapien
tgtggaatttgtgaaaaccattcat

SEQ ID NO: 130923 - DNA, 25 bp, Homo sapien
ggaatttgtgaaaaccattcataat

SEQ ID NO: 130924 - DNA, 25 bp, Homo sapien
attgctccccagttggggttgcata

SEQ ID NO: 130925 - DNA, 25 bp, Homo sapien
catattccgtcaaagctggcataac

SEQ ID NO: 130926 - DNA, 25 bp, Homo sapien
tattccgtcaaagctggcataacac

SEQ ID NO: 130927 - DNA, 25 bp, Homo sapien
gggttgcatattccgtcaaagctgg

SEQ ID NO: 130928 - DNA, 25 bp, Homo sapien
ctacgtatggaaaattaggtatgga

SEQ ID NO: 130929 - DNA, 25 bp, Homo sapien
tacgtatggaaaattaggtatggaa

SEQ ID NO: 130930 - DNA, 25 bp, Homo sapien
aattaggtatggaaaatttggagca

SEQ ID NO: 130931 - DNA, 25 bp, Homo sapien
cctgtattgcaaacactgccaagag

SEQ ID NO: 130932 - DNA, 25 bp, Homo sapien
gaggtctcacaacatctatcactgg

SEQ ID NO: 130933 - DNA, 25 bp, Homo sapien
aatctttaagggagccacagtcaca

SEQ ID NO: 130934 - DNA, 25 bp, Homo sapien
tacaaacagatactgctgaacatgg

SEQ ID NO: 130935 - DNA, 25 bp, Homo sapien
aaaaagggcttgacactgcatatca

SEQ ID NO: 130936 - DNA, 25 bp, Homo sapien
tagcacgctggggaaccgtctttca

SEQ ID NO: 130937 - DNA, 25 bp, Homo sapien
cgtctttcacttggtagccaaaaag

SEQ ID NO: 130938 - DNA, 25 bp, Homo sapien
tgacactgcatatcacggtcactgc

SEQ ID NO: 130939 - DNA, 25 bp, Homo sapien
ctcgccgtagaataaccccacagtt

SEQ ID NO: 130940 - DNA, 25 bp, Homo sapien
aatgtggctgacaccgctacagtgc

SEQ ID NO: 130941 - DNA, 25 bp, Homo sapien
gacaccgctacagtgcaacattcca

SEQ ID NO: 130942 - DNA, 25 bp, Homo sapien
ccgggaatgtggctgacaccgctac

SEQ ID NO: 130943 - DNA, 25 bp, Homo sapien
taaaaggtgatgtaaccgtcagagt

SEQ ID NO: 130944 - DNA, 25 bp, Homo sapien
cccagtaagtgtcaacgtgattttc

SEQ ID NO: 130945 - DNA, 25 bp, Homo sapien
tgtgggcttccattagtatttactc

SEQ ID NO: 130946 - DNA, 25 bp, Homo sapien
aaagtagtgctcagtttatattcgc

SEQ ID NO: 130947 - DNA, 25 bp, Homo sapien
tctctccgggtccaggaagggctgt

SEQ ID NO: 130948 - DNA, 25 bp, Homo sapien
tcgagggggccacctcccaggccac

SEQ ID NO: 130949 - DNA, 25 bp, Homo sapien
ctcgagggggccacctcccaggcca

SEQ ID NO: 130950 - DNA, 25 bp, Homo sapien
aacgaggctcctgagctacagttgg

SEQ ID NO: 130951 - DNA, 25 bp, Homo sapien
agaacgaggctcctgagctacagtt

SEQ ID NO: 130952 - DNA, 25 bp, Homo sapien
gaacgaggctcctgagctacagttg

SEQ ID NO: 130953 - DNA, 25 bp, Homo sapien
agagcgatcagctccggcccgctga

SEQ ID NO: 130954 - DNA, 25 bp, Homo sapien
tgagagcgatcagctccggcccgct

SEQ ID NO: 130955 - DNA, 25 bp, Homo sapien
gagcgatcagctccggcccgctgag

SEQ ID NO: 130956 - DNA, 25 bp, Homo sapien
agtgagagcgatcagctccggcccg

SEQ ID NO: 130957 - DNA, 25 bp, Homo sapien
accaacactgtttcattgtcaacac

SEQ ID NO: 130958 - DNA, 25 bp, Homo sapien
cccgagaaggctatggacaatgggt

SEQ ID NO: 130959 - DNA, 25 bp, Homo sapien
gtttgcaaaccaacactgtttcatt

SEQ ID NO: 130960 - DNA, 25 bp, Homo sapien
ccactctgccccgagaaggctatgg

SEQ ID NO: 130961 - DNA, 25 bp, Homo sapien
ctgcctttggttacttgggacatgt

SEQ ID NO: 130962 - DNA, 25 bp, Homo sapien
cttttgtgggagagttcaatgtgag

SEQ ID NO: 130963 - DNA, 25 bp, Homo sapien
tcttttgtgggagagttcaatgtga

SEQ ID NO: 130964 - DNA, 25 bp, Homo sapien
tttttgggcctgatgcacgtacaag

SEQ ID NO: 130965 - DNA, 25 bp, Homo sapien
tgttgatcacagtcagaggtgaaat

SEQ ID NO: 130966 - DNA, 25 bp, Homo sapien
tgaaattaagtttttgggcctgatg

SEQ ID NO: 130967 - DNA, 25 bp, Homo sapien
atatgttgatcacagtcagaggtga

SEQ ID NO: 130968 - DNA, 25 bp, Homo sapien
acgctacttgcaccttgcgaaataa

SEQ ID NO: 130969 - DNA, 25 bp, Homo sapien
cgctacttgcaccttgcgaaataag

SEQ ID NO: 130970 - DNA, 25 bp, Homo sapien
cacgctacttgcaccttgcgaaata

SEQ ID NO: 130971 - DNA, 25 bp, Homo sapien
tacagcttatagaggtagcgtggac

SEQ ID NO: 130972 - DNA, 25 bp, Homo sapien
tcttccttccgaggttcggatgtgt

SEQ ID NO: 130973 - DNA, 25 bp, Homo sapien
gcttatagaggtagcgtggacccaa

SEQ ID NO: 130974 - DNA, 25 bp, Homo sapien
ttcttccttccgaggttcggatgtg

SEQ ID NO: 130975 - DNA, 25 bp, Homo sapien
gaatctagattgtactcaagagtct

SEQ ID NO: 130976 - DNA, 25 bp, Homo sapien
tgaacacaaatgtagctttctgagt

SEQ ID NO: 130977 - DNA, 25 bp, Homo sapien
ttcctagaatttgcctttgctgaca

SEQ ID NO: 130978 - DNA, 25 bp, Homo sapien
cttgaccctctattactttgtccat

SEQ ID NO: 130979 - DNA, 25 bp, Homo sapien
cactgcttcccttaccaatgcttgt

SEQ ID NO: 130980 - DNA, 25 bp, Homo sapien
actgcttcccttaccaatgcttgtt

SEQ ID NO: 130981 - DNA, 25 bp, Homo sapien
tattttggcattacatctttctcac

SEQ ID NO: 130982 - DNA, 25 bp, Homo sapien
ttattttggcattacatctttctca

SEQ ID NO: 130983 - DNA, 25 bp, Homo sapien
tgtggccctgactctacattctgaa

SEQ ID NO: 130984 - DNA, 25 bp, Homo sapien
cctttttcattatccttgttggcca

SEQ ID NO: 130985 - DNA, 25 bp, Homo sapien
ttccattattctctgtggccctgac

SEQ ID NO: 130986 - DNA, 25 bp, Homo sapien
ctacattctgaaaagttattccttt

SEQ ID NO: 130987 - DNA, 25 bp, Homo sapien
ctctgcattggattacgagacaatg

SEQ ID NO: 130988 - DNA, 25 bp, Homo sapien
tggattacgagacaatggaagaatt

SEQ ID NO: 130989 - DNA, 25 bp, Homo sapien
ggaagaattggaccttatcttgaaa

SEQ ID NO: 130990 - DNA, 25 bp, Homo sapien
tacgagacaatggaagaattggacc

SEQ ID NO: 130991 - DNA, 25 bp, Homo sapien
gacacaacttattgagccactgacc

SEQ ID NO: 130992 - DNA, 25 bp, Homo sapien
tatgtataaacatggcataactccc

SEQ ID NO: 130993 - DNA, 25 bp, Homo sapien
tatctgcggatttgatggtgcttga

SEQ ID NO: 130994 - DNA, 25 bp, Homo sapien
gcattattgagtctacctatgtata

SEQ ID NO: 130995 - DNA, 25 bp, Homo sapien
tgtgccctcatgtagcagaagagat

SEQ ID NO: 130996 - DNA, 25 bp, Homo sapien
gaagtctttaatcccagtcacaagg

SEQ ID NO: 130997 - DNA, 25 bp, Homo sapien
gattcagtgtctcgtgaaagctgct

SEQ ID NO: 130998 - DNA, 25 bp, Homo sapien
acattctcaagccatagtagtagca

SEQ ID NO: 130999 - DNA, 25 bp, Homo sapien
ccatttcgattgacagagatccact

SEQ ID NO: 131000 - DNA, 25 bp, Homo sapien
cagaagtgaaactggagtttaggtg

SEQ ID NO: 131001 - DNA, 25 bp, Homo sapien
catttcgattgacagagatccactt

SEQ ID NO: 131002 - DNA, 25 bp, Homo sapien
gccatttcgattgacagagatccac

SEQ ID NO: 131003 - DNA, 25 bp, Homo sapien
gctctgctaggttgaggcatgcatt

SEQ ID NO: 131004 - DNA, 25 bp, Homo sapien
tgacttgaaccaaagctctccttca

SEQ ID NO: 131005 - DNA, 25 bp, Homo sapien
atttgacttgaaccaaagctctcct

SEQ ID NO: 131006 - DNA, 25 bp, Homo sapien
caagtatctctttggctctgctagg

SEQ ID NO: 131007 - DNA, 25 bp, Homo sapien
ggtagccatgtgcaaagctggagca

SEQ ID NO: 131008 - DNA, 25 bp, Homo sapien
ctctgaagggaatggtgagctattt

SEQ ID NO: 131009 - DNA, 25 bp, Homo sapien
gcagatcataggctttgttggccat

SEQ ID NO: 131010 - DNA, 25 bp, Homo sapien
gggaacatatcaggcaagtaggact

SEQ ID NO: 131011 - DNA, 25 bp, Homo sapien
tgagaggacggtattttagcaagca

SEQ ID NO: 131012 - DNA, 25 bp, Homo sapien
gaaaaagatccctgacttcatgggc

SEQ ID NO: 131013 - DNA, 25 bp, Homo sapien
tcacagacagatatagacgttaagc

SEQ ID NO: 131014 - DNA, 25 bp, Homo sapien
gtgctcagggtaggcctcattgaga

SEQ ID NO: 131015 - DNA, 25 bp, Homo sapien
ttcagcagccgatttgatcaaatgg

SEQ ID NO: 131016 - DNA, 25 bp, Homo sapien
cgcataagcttcagcagccgatttg

SEQ ID NO: 131017 - DNA, 25 bp, Homo sapien
acatgatgcacgcataagcttcagc

SEQ ID NO: 131018 - DNA, 25 bp, Homo sapien
agatcagtaagtaaaacaaacttct

SEQ ID NO: 131019 - DNA, 25 bp, Homo sapien
caagattgaggatgcatgcccatga

SEQ ID NO: 131020 - DNA, 25 bp, Homo sapien
agattgaggatgcatgcccatgaca

SEQ ID NO: 131021 - DNA, 25 bp, Homo sapien
acagatggttgcatttcttctgagt

SEQ ID NO: 131022 - DNA, 25 bp, Homo sapien
tgccaagattgaggatgcatgccca

SEQ ID NO: 131023 - DNA, 25 bp, Homo sapien
tccctagaatgaggaactctaccat

SEQ ID NO: 131024 - DNA, 25 bp, Homo sapien
caggcttggcctgggtccataatcc

SEQ ID NO: 131025 - DNA, 25 bp, Homo sapien
ccataatccctagaatgaggaactc

SEQ ID NO: 131026 - DNA, 25 bp, Homo sapien
taatccctagaatgaggaactctac

SEQ ID NO: 131027 - DNA, 25 bp, Homo sapien
gggcatatttactcccatgcaccga

SEQ ID NO: 131028 - DNA, 25 bp, Homo sapien
gatacgatgtcaaatagcattgccc

SEQ ID NO: 131029 - DNA, 25 bp, Homo sapien
gatgtcaaatagcattgccctggac

SEQ ID NO: 131030 - DNA, 25 bp, Homo sapien
catgcaccgaggatacgatgtcaaa

SEQ ID NO: 131031 - DNA, 25 bp, Homo sapien
ctacaggaatggcattaggatatgg

SEQ ID NO: 131032 - DNA, 25 bp, Homo sapien
tacaggaatggcattaggatatggt

SEQ ID NO: 131033 - DNA, 25 bp, Homo sapien
caggaatggcattaggatatggtaa

SEQ ID NO: 131034 - DNA, 25 bp, Homo sapien
ggaatggcattaggatatggtaaga

SEQ ID NO: 131035 - DNA, 25 bp, Homo sapien
tttctctaactgtacaacagaaggt

SEQ ID NO: 131036 - DNA, 25 bp, Homo sapien
tcatggagtataaagggtagaactg

SEQ ID NO: 131037 - DNA, 25 bp, Homo sapien
caagttgtcgcctccttctggactt

SEQ ID NO: 131038 - DNA, 25 bp, Homo sapien
tttgcggagacgtagccaagttgtc

SEQ ID NO: 131039 - DNA, 25 bp, Homo sapien
cagaatctacaaagaacttaaattt

SEQ ID NO: 131040 - DNA, 25 bp, Homo sapien
cacctgacaaagggctaatatccag

SEQ ID NO: 131041 - DNA, 25 bp, Homo sapien
tgcgagaatatttttgcaatctatc

SEQ ID NO: 131042 - DNA, 25 bp, Homo sapien
catttatccagccaacaaacatgaa

SEQ ID NO: 131043 - DNA, 25 bp, Homo sapien
gaaaaagtatacaacgtgcaagaac

SEQ ID NO: 131044 - DNA, 25 bp, Homo sapien
tcagacaaatcagactttagagcac

SEQ ID NO: 131045 - DNA, 25 bp, Homo sapien
tgatgaggtcatcaacagagtggac

SEQ ID NO: 131046 - DNA, 25 bp, Homo sapien
caagagaacagtgactttgatgagg

SEQ ID NO: 131047 - DNA, 25 bp, Homo sapien
tttctcctcctagtcaaaatttgta

SEQ ID NO: 131048 - DNA, 25 bp, Homo sapien
gctgagttctagttgcctaaagtct

SEQ ID NO: 131049 - DNA, 25 bp, Homo sapien
gcctttatcagcttctaccttctgg

SEQ ID NO: 131050 - DNA, 25 bp, Homo sapien
tgccataaaatcataaatccactcc

SEQ ID NO: 131051 - DNA, 25 bp, Homo sapien
tacttcccagctattccatctgtgg

SEQ ID NO: 131052 - DNA, 25 bp, Homo sapien
ccaggcccatggaaacttggatatg

SEQ ID NO: 131053 - DNA, 25 bp, Homo sapien
gatgaaagtaacaatgttggccacg

SEQ ID NO: 131054 - DNA, 25 bp, Homo sapien
gtggaaaggaaattccaggcccatg

SEQ ID NO: 131055 - DNA, 25 bp, Homo sapien
caaatacaggtatagggtgacgatt

SEQ ID NO: 131056 - DNA, 25 bp, Homo sapien
tacttactaaggaagatcgcatagc

SEQ ID NO: 131057 - DNA, 25 bp, Homo sapien
tggttggttatagctaggcatctgc

SEQ ID NO: 131058 - DNA, 25 bp, Homo sapien
ggaattacagagacatccctgggca

SEQ ID NO: 131059 - DNA, 25 bp, Homo sapien
tgggcattattgcctgagctccacc

SEQ ID NO: 131060 - DNA, 25 bp, Homo sapien
ccacggactggtactggtttgtggc

SEQ ID NO: 131061 - DNA, 25 bp, Homo sapien
gagcagtaggtgagtgggcattatt

SEQ ID NO: 131062 - DNA, 25 bp, Homo sapien
taggaggtgagcagtaggtgagtgg

SEQ ID NO: 131063 - DNA, 25 bp, Homo sapien
gttgatgtgtagagtggtggagcaa

SEQ ID NO: 131064 - DNA, 25 bp, Homo sapien
tgatgtgtagagtggtggagcaaac

SEQ ID NO: 131065 - DNA, 25 bp, Homo sapien
gtgtagagtggtggagcaaactcct

SEQ ID NO: 131066 - DNA, 25 bp, Homo sapien
atgtgtagagtggtggagcaaactc

SEQ ID NO: 131067 - DNA, 25 bp, Homo sapien
ggcgagagctaaagtgtgttgtcaa

SEQ ID NO: 131068 - DNA, 25 bp, Homo sapien
tcaagtgatagcaaacactcggtcc

SEQ ID NO: 131069 - DNA, 25 bp, Homo sapien
tatctgcagtaatctgggcttctta

SEQ ID NO: 131070 - DNA, 25 bp, Homo sapien
gaaccagattcttaactgccacaga

SEQ ID NO: 131071 - DNA, 25 bp, Homo sapien
gaatgaatggatactatggaatgcc

SEQ ID NO: 131072 - DNA, 25 bp, Homo sapien
gaaaggctttatacactacatacgg

SEQ ID NO: 131073 - DNA, 25 bp, Homo sapien
catttctagcttggacagtctggta

SEQ ID NO: 131074 - DNA, 25 bp, Homo sapien
cagtgatctcgataaggtgggaacc

SEQ ID NO: 131075 - DNA, 25 bp, Homo sapien
cttccttgggaaattattgtggcct

SEQ ID NO: 131076 - DNA, 25 bp, Homo sapien
cctgggtgcctatatcgacaaagag

SEQ ID NO: 131077 - DNA, 25 bp, Homo sapien
gccttataagaggacgttcagtctc

SEQ ID NO: 131078 - DNA, 25 bp, Homo sapien
gaaagctactttgtggtgtctaggt

SEQ ID NO: 131079 - DNA, 25 bp, Homo sapien
ccatatttatggtgctggtgccagt

SEQ ID NO: 131080 - DNA, 25 bp, Homo sapien
tttcatgagataccggcaacaactt

SEQ ID NO: 131081 - DNA, 25 bp, Homo sapien
tgagataccggcaacaactttgaaa

SEQ ID NO: 131082 - DNA, 25 bp, Homo sapien
ctgggctttcatgagataccggcaa

SEQ ID NO: 131083 - DNA, 25 bp, Homo sapien
gatagatgttctcttattgtctata

SEQ ID NO: 131084 - DNA, 25 bp, Homo sapien
ggatagatgttctcttattgtctat

SEQ ID NO: 131085 - DNA, 25 bp, Homo sapien
gatgttctcttattgtctatattat

SEQ ID NO: 131086 - DNA, 25 bp, Homo sapien
tctcttattgtctatattatacatc

SEQ ID NO: 131087 - DNA, 25 bp, Homo sapien
cgcttcggggtgcttagagaaaata

SEQ ID NO: 131088 - DNA, 25 bp, Homo sapien
caacctagaggtttcgtgcaacgct

SEQ ID NO: 131089 - DNA, 25 bp, Homo sapien
gcgggcaggccacaacctagaggtt

SEQ ID NO: 131090 - DNA, 25 bp, Homo sapien
tagaggtttcgtgcaacgcttcggg

SEQ ID NO: 131091 - DNA, 25 bp, Homo sapien
tgctgaaaccgaaaccgctgtgctg

SEQ ID NO: 131092 - DNA, 25 bp, Homo sapien
cttttccgggtctcgaggctgctga

SEQ ID NO: 131093 - DNA, 25 bp, Homo sapien
gcgcagcgccgagattgattcacct

SEQ ID NO: 131094 - DNA, 25 bp, Homo sapien
aatccattggcggtaggaaccacga

SEQ ID NO: 131095 - DNA, 25 bp, Homo sapien
attttatgtacttggaaggatgacc

SEQ ID NO: 131096 - DNA, 25 bp, Homo sapien
taggactctataggccttctactca

SEQ ID NO: 131097 - DNA, 25 bp, Homo sapien
tctttctggttcgatatctgtgacc

SEQ ID NO: 131098 - DNA, 25 bp, Homo sapien
tggcccaggttcaatcccggcttag

SEQ ID NO: 131099 - DNA, 25 bp, Homo sapien
aagaaacagtagtttccatggccat

SEQ ID NO: 131100 - DNA, 25 bp, Homo sapien
agaagaaacagtagtttccatggcc

SEQ ID NO: 131101 - DNA, 25 bp, Homo sapien
tcagaagaaacagtagtttccatgg

SEQ ID NO: 131102 - DNA, 25 bp, Homo sapien
catcagaagaaacagtagtttccat

SEQ ID NO: 131103 - DNA, 25 bp, Homo sapien
cacagcccacaacatgaacaccaaa

SEQ ID NO: 131104 - DNA, 25 bp, Homo sapien
ctccacagcccacaacatgaacacc

SEQ ID NO: 131105 - DNA, 25 bp, Homo sapien
tccacagcccacaacatgaacacca

SEQ ID NO: 131106 - DNA, 25 bp, Homo sapien
acagcccacaacatgaacaccaaat

SEQ ID NO: 131107 - DNA, 25 bp, Homo sapien
ttgagaaactccatcctcagaagtc

SEQ ID NO: 131108 - DNA, 25 bp, Homo sapien
tccatcctcagaagtcacatgcacc

SEQ ID NO: 131109 - DNA, 25 bp, Homo sapien
cgtattgaacctgagctttaataga

SEQ ID NO: 131110 - DNA, 25 bp, Homo sapien
gagaaactccatcctcagaagtcac

SEQ ID NO: 131111 - DNA, 25 bp, Homo sapien
cttcccttgtgctttctggagtctt

SEQ ID NO: 131112 - DNA, 25 bp, Homo sapien
ttcccttgtgctttctggagtcttc

SEQ ID NO: 131113 - DNA, 25 bp, Homo sapien
tagggtgactctatatatcaaattg

SEQ ID NO: 131114 - DNA, 25 bp, Homo sapien
cagagttagatcagaactgcagtgc

SEQ ID NO: 131115 - DNA, 25 bp, Homo sapien
taacttcattagactgaaagattct

SEQ ID NO: 131116 - DNA, 25 bp, Homo sapien
tgactgcagggtttatgattttcgt

SEQ ID NO: 131117 - DNA, 25 bp, Homo sapien
ccatctgtccagagcagaagaggac

SEQ ID NO: 131118 - DNA, 25 bp, Homo sapien
tatgaagctgtcgttatggagccat

SEQ ID NO: 131119 - DNA, 25 bp, Homo sapien
ctctaagctgctcaggatgcagggc

SEQ ID NO: 131120 - DNA, 25 bp, Homo sapien
agggctgaccctgtggatctgtgtc

SEQ ID NO: 131121 - DNA, 25 bp, Homo sapien
gactctgatgtacacgagggtccca

SEQ ID NO: 131122 - DNA, 25 bp, Homo sapien
atgtacacgagggtcccatccactg

SEQ ID NO: 131123 - DNA, 25 bp, Homo sapien
tgacagtagccggaaatagacaaaa

SEQ ID NO: 131124 - DNA, 25 bp, Homo sapien
aagagtgactctgatgtacacgagg

SEQ ID NO: 131125 - DNA, 25 bp, Homo sapien
catctgggatgaagagctgatcctc

SEQ ID NO: 131126 - DNA, 25 bp, Homo sapien
ccatgatagtaacagtcatctggga

SEQ ID NO: 131127 - DNA, 25 bp, Homo sapien
cagagtgcctgatgggttcaatttc

SEQ ID NO: 131128 - DNA, 25 bp, Homo sapien
cctccacgtaaccatgatagtaaca

SEQ ID NO: 131129 - DNA, 25 bp, Homo sapien
aaatacatcctcttgcacctttgag

SEQ ID NO: 131130 - DNA, 25 bp, Homo sapien
cctttgagatgttgctttgagagta

SEQ ID NO: 131131 - DNA, 25 bp, Homo sapien
caactgttggcgtgctacttccttc

SEQ ID NO: 131132 - DNA, 25 bp, Homo sapien
atgcatgagtccaccagtcaccagc

SEQ ID NO: 131133 - DNA, 25 bp, Homo sapien
atcatgctgtagctgggaaagactg

SEQ ID NO: 131134 - DNA, 25 bp, Homo sapien
tttccattgagagaaatcgttcagg

SEQ ID NO: 131135 - DNA, 25 bp, Homo sapien
cattgagagaaatcgttcaggacct

SEQ ID NO: 131136 - DNA, 25 bp, Homo sapien
gtttccattgagagaaatcgttcag

SEQ ID NO: 131137 - DNA, 25 bp, Homo sapien
ggtcttcataaaatcagcgtaactg

SEQ ID NO: 131138 - DNA, 25 bp, Homo sapien
tgcagacatgatccctggtttaagg

SEQ ID NO: 131139 - DNA, 25 bp, Homo sapien
tatgacctaactcatgggccacagt

SEQ ID NO: 131140 - DNA, 25 bp, Homo sapien
gaatttctctgctggcactctaaaa

SEQ ID NO: 131141 - DNA, 25 bp, Homo sapien
caacagacaacaggcgtcttgttca

SEQ ID NO: 131142 - DNA, 25 bp, Homo sapien
gttcaacagacaacaggcgtcttgt

SEQ ID NO: 131143 - DNA, 25 bp, Homo sapien
cagttcaacagacaacaggcgtctt

SEQ ID NO: 131144 - DNA, 25 bp, Homo sapien
gtgcagttcaacagacaacaggcgt

SEQ ID NO: 131145 - DNA, 25 bp, Homo sapien
cagcaggtgacaccattgatatgag

SEQ ID NO: 131146 - DNA, 25 bp, Homo sapien
ggtgacaccattgatatgagtgtgc

SEQ ID NO: 131147 - DNA, 25 bp, Homo sapien
gcaggtgacaccattgatatgagtg

SEQ ID NO: 131148 - DNA, 25 bp, Homo sapien
gacaccattgatatgagtgtgctgc

SEQ ID NO: 131149 - DNA, 25 bp, Homo sapien
atgcagatctttcctgggccacaca

SEQ ID NO: 131150 - DNA, 25 bp, Homo sapien
cagtggcagtgatgtttgttattgc

SEQ ID NO: 131151 - DNA, 25 bp, Homo sapien
gatgcagatctttcctgggccacac

SEQ ID NO: 131152 - DNA, 25 bp, Homo sapien
tgggccacacacagtaccatctttc

SEQ ID NO: 131153 - DNA, 25 bp, Homo sapien
tcagcggcaaaaaaactcctctctt

SEQ ID NO: 131154 - DNA, 25 bp, Homo sapien
cacaatcagcggcaaaaaaactcct

SEQ ID NO: 131155 - DNA, 25 bp, Homo sapien
cagtaaacaggaaagtcaaaacaga

SEQ ID NO: 131156 - DNA, 25 bp, Homo sapien
agaagcccgacagtaaacaggaaag

SEQ ID NO: 131157 - DNA, 25 bp, Homo sapien
gtgtactaatgcatggaatattaag

SEQ ID NO: 131158 - DNA, 25 bp, Homo sapien
gtttctactgccaagagactaaagt

SEQ ID NO: 131159 - DNA, 25 bp, Homo sapien
actaatgcatggaatattaagttag

SEQ ID NO: 131160 - DNA, 25 bp, Homo sapien
gtactaatgcatggaatattaagtt

SEQ ID NO: 131161 - DNA, 25 bp, Homo sapien
gataacaatctgtttatacttaaca

SEQ ID NO: 131162 - DNA, 25 bp, Homo sapien
ttggtatgtgaagcaagcaaatgct

SEQ ID NO: 131163 - DNA, 25 bp, Homo sapien
agcaagatcaggagatttcatcaga

SEQ ID NO: 131164 - DNA, 25 bp, Homo sapien
taagtcatctctatgcacaagaaac

SEQ ID NO: 131165 - DNA, 25 bp, Homo sapien
ggtgtcagccacattcccggtggag

SEQ ID NO: 131166 - DNA, 25 bp, Homo sapien
gatagtggccctctacctgacaaac

SEQ ID NO: 131167 - DNA, 25 bp, Homo sapien
ccagggagctactgtcttaaacgca

SEQ ID NO: 131168 - DNA, 25 bp, Homo sapien
aatgttgcactgtagcggtgtcagc

SEQ ID NO: 131169 - DNA, 25 bp, Homo sapien
gccatgataatattctgtgtattat

SEQ ID NO: 131170 - DNA, 25 bp, Homo sapien
ggccatgataatattctgtgtatta

SEQ ID NO: 131171 - DNA, 25 bp, Homo sapien
gcaatcaacattgagtagtaactaa

SEQ ID NO: 131172 - DNA, 25 bp, Homo sapien
ttgggtcaatagggcagttcactgc

SEQ ID NO: 131173 - DNA, 25 bp, Homo sapien
ctaattgtgatgtcattacatgcca

SEQ ID NO: 131174 - DNA, 25 bp, Homo sapien
ggcagttcactgcaatcaacattga

SEQ ID NO: 131175 - DNA, 25 bp, Homo sapien
aaatgctcttcggaggagggagccc

SEQ ID NO: 131176 - DNA, 25 bp, Homo sapien
tggagactagagtcggaaaatgctc

SEQ ID NO: 131177 - DNA, 25 bp, Homo sapien
gcagctgccttctggaaagacttgg

SEQ ID NO: 131178 - DNA, 25 bp, Homo sapien
tgcctcgtgggtttgttggccgcca

SEQ ID NO: 131179 - DNA, 25 bp, Homo sapien
gcagggaccaggagcgtctcccgaa

SEQ ID NO: 131180 - DNA, 25 bp, Homo sapien
gggcagagcgccagtagggcctggt

SEQ ID NO: 131181 - DNA, 25 bp, Homo sapien
tagggcctggtttgtgcgccgctgg

SEQ ID NO: 131182 - DNA, 25 bp, Homo sapien
agcaggagagcgtcctgctgcagcc

SEQ ID NO: 131183 - DNA, 25 bp, Homo sapien
cagacttgttgaaggccccacttcg

SEQ ID NO: 131184 - DNA, 25 bp, Homo sapien
ttgaaggccccacttcgcctgggaa

SEQ ID NO: 131185 - DNA, 25 bp, Homo sapien
tgttgaaggccccacttcgcctggg

SEQ ID NO: 131186 - DNA, 25 bp, Homo sapien
cccacttcgcctgggaaaattctgg

SEQ ID NO: 131187 - DNA, 25 bp, Homo sapien
tgctttctccgaatgcattccccag

SEQ ID NO: 131188 - DNA, 25 bp, Homo sapien
gtgggaagaacctctgctgtgtctg

SEQ ID NO: 131189 - DNA, 25 bp, Homo sapien
cattcgagtaaaccccatgcagcat

SEQ ID NO: 131190 - DNA, 25 bp, Homo sapien
gcagcatgggcttactttgagtagg

SEQ ID NO: 131191 - DNA, 25 bp, Homo sapien
gactagcactaagcccttctggtag

SEQ ID NO: 131192 - DNA, 25 bp, Homo sapien
tattgaacatatgagcggacacact

SEQ ID NO: 131193 - DNA, 25 bp, Homo sapien
ggtacgttggttgtggatagcctct

SEQ ID NO: 131194 - DNA, 25 bp, Homo sapien
gacacactatttcctgtgggattga

SEQ ID NO: 131195 - DNA, 25 bp, Homo sapien
tactttgacattgggtgcaggtata

SEQ ID NO: 131196 - DNA, 25 bp, Homo sapien
aatatgggtactttgacattgggtg

SEQ ID NO: 131197 - DNA, 25 bp, Homo sapien
tctctgaagtctactagtatttgtt

SEQ ID NO: 131198 - DNA, 25 bp, Homo sapien
cattgggtgcaggtatagttaggat

SEQ ID NO: 131199 - DNA, 25 bp, Homo sapien
taggccttttcaactgacagggtca

SEQ ID NO: 131200 - DNA, 25 bp, Homo sapien
aaattgaactttgctagtaccccag

SEQ ID NO: 131201 - DNA, 25 bp, Homo sapien
gaaatcaagatctgcgtgctgggta

SEQ ID NO: 131202 - DNA, 25 bp, Homo sapien
ctcatttcaacgctggagccaggca

SEQ ID NO: 131203 - DNA, 25 bp, Homo sapien
gtaggaagtctgcaaagtccctagg

SEQ ID NO: 131204 - DNA, 25 bp, Homo sapien
tcttattctgtgtgtagatacttct

SEQ ID NO: 131205 - DNA, 25 bp, Homo sapien
agcattgattggctccatctggtga

SEQ ID NO: 131206 - DNA, 25 bp, Homo sapien
tcaccaataccattaccctataaat

SEQ ID NO: 131207 - DNA, 25 bp, Homo sapien
tgttctagagtctcccattgtagtt

SEQ ID NO: 131208 - DNA, 25 bp, Homo sapien
ccattgtggtagtgattgtggtagt

SEQ ID NO: 131209 - DNA, 25 bp, Homo sapien
ttgtggtagtgaaaagatgaattgg

SEQ ID NO: 131210 - DNA, 25 bp, Homo sapien
tgcccgtgggcggtgggttgaacag

SEQ ID NO: 131211 - DNA, 25 bp, Homo sapien
gagatgacagagcttaatcaagtga

SEQ ID NO: 131212 - DNA, 25 bp, Homo sapien
ttgcttgcagagtgaaggacctgac

SEQ ID NO: 131213 - DNA, 25 bp, Homo sapien
aaacatgggagacagtgtcatcgga

SEQ ID NO: 131214 - DNA, 25 bp, Homo sapien
gaatgtcgtagagcatttaacttgg

SEQ ID NO: 131215 - DNA, 25 bp, Homo sapien
taaaggtttagccacattcatactt

SEQ ID NO: 131216 - DNA, 25 bp, Homo sapien
tagccacattcatacttatatcatc

SEQ ID NO: 131217 - DNA, 25 bp, Homo sapien
ttatatcatcatattcctgagccat

SEQ ID NO: 131218 - DNA, 25 bp, Homo sapien
tcttttaaaggtttagccacattca

SEQ ID NO: 131219 - DNA, 25 bp, Homo sapien
tttcacatcagtccactgagttaat

SEQ ID NO: 131220 - DNA, 25 bp, Homo sapien
ttttcacatcagtccactgagttaa

SEQ ID NO: 131221 - DNA, 25 bp, Homo sapien
ttcacatcagtccactgagttaatt

SEQ ID NO: 131222 - DNA, 25 bp, Homo sapien
tttttcacatcagtccactgagtta

SEQ ID NO: 131223 - DNA, 25 bp, Homo sapien
ccagagcctccggtgcctgtataga

SEQ ID NO: 131224 - DNA, 25 bp, Homo sapien
agagcctccggtgcctgtatagacg

SEQ ID NO: 131225 - DNA, 25 bp, Homo sapien
gaaccagagcctccggtgcctgtat

SEQ ID NO: 131226 - DNA, 25 bp, Homo sapien
cctccggtgcctgtatagacgctgg

SEQ ID NO: 131227 - DNA, 25 bp, Homo sapien
aagctgccctggaaaccggtggagc

SEQ ID NO: 131228 - DNA, 25 bp, Homo sapien
cccaagctgccctggaaaccggtgg

SEQ ID NO: 131229 - DNA, 25 bp, Homo sapien
caagctgccctggaaaccggtggag

SEQ ID NO: 131230 - DNA, 25 bp, Homo sapien
ctgccctggaaaccggtggagcggg

SEQ ID NO: 131231 - DNA, 25 bp, Homo sapien
tgctagaaccctggccatcccatgg

SEQ ID NO: 131232 - DNA, 25 bp, Homo sapien
tggccatcccatggccaggctcctg

SEQ ID NO: 131233 - DNA, 25 bp, Homo sapien
ctgctagaaccctggccatcccatg

SEQ ID NO: 131234 - DNA, 25 bp, Homo sapien
ccatcccatggccaggctcctgtac

SEQ ID NO: 131235 - DNA, 25 bp, Homo sapien
aggtcaggcattgaaccagggtagg

SEQ ID NO: 131236 - DNA, 25 bp, Homo sapien
ggaggtcaggcattgaaccagggta

SEQ ID NO: 131237 - DNA, 25 bp, Homo sapien
aaccagggtaggttcaggctttgca

SEQ ID NO: 131238 - DNA, 25 bp, Homo sapien
taggaggtcaggcattgaaccaggg

SEQ ID NO: 131239 - DNA, 25 bp, Homo sapien
tctagcctctggttctcggtctcca

SEQ ID NO: 131240 - DNA, 25 bp, Homo sapien
tggattttgctctctagcctctggt

SEQ ID NO: 131241 - DNA, 25 bp, Homo sapien
tgctctccacagactgatacatggc

SEQ ID NO: 131242 - DNA, 25 bp, Homo sapien
tcatacttgactctatcagcagcaa

SEQ ID NO: 131243 - DNA, 25 bp, Homo sapien
gtatctaccttcatcgtcaacccag

SEQ ID NO: 131244 - DNA, 25 bp, Homo sapien
gatttgggggtatctaccttcatcg

SEQ ID NO: 131245 - DNA, 25 bp, Homo sapien
tctgtagctgaagccgagtgacact

SEQ ID NO: 131246 - DNA, 25 bp, Homo sapien
gagccagctcttcgtattaggatgt

SEQ ID NO: 131247 - DNA, 25 bp, Homo sapien
agcgtcaccttagcaaccccaacct

SEQ ID NO: 131248 - DNA, 25 bp, Homo sapien
cgtcaccttagcaaccccaaccttg

SEQ ID NO: 131249 - DNA, 25 bp, Homo sapien
gagcgtcaccttagcaaccccaacc

SEQ ID NO: 131250 - DNA, 25 bp, Homo sapien
tcaccttagcaaccccaaccttggc

SEQ ID NO: 131251 - DNA, 25 bp, Homo sapien
ctggtgctgcctctctgccccggcc

SEQ ID NO: 131252 - DNA, 25 bp, Homo sapien
tgcctctctgccccggcctgtgcca

SEQ ID NO: 131253 - DNA, 25 bp, Homo sapien
cagctccaactccaggtacagcagg

SEQ ID NO: 131254 - DNA, 25 bp, Homo sapien
gtgctgcctctctgccccggcctgt

SEQ ID NO: 131255 - DNA, 25 bp, Homo sapien
ctggcgggtggggtcttttggatgg

SEQ ID NO: 131256 - DNA, 25 bp, Homo sapien
ggcgtcaccaagattgaagtcctgg

SEQ ID NO: 131257 - DNA, 25 bp, Homo sapien
gctgtcttccagcaggcggcggtag

SEQ ID NO: 131258 - DNA, 25 bp, Homo sapien
tttgcatggagttgctgctgtccag

SEQ ID NO: 131259 - DNA, 25 bp, Homo sapien
taatgtctcagaattttgatgttgt

SEQ ID NO: 131260 - DNA, 25 bp, Homo sapien
gtctcagaattttgatgttgttggt

SEQ ID NO: 131261 - DNA, 25 bp, Homo sapien
cttaatgtctcagaattttgatgtt

SEQ ID NO: 131262 - DNA, 25 bp, Homo sapien
atgtctcagaattttgatgttgttg

SEQ ID NO: 131263 - DNA, 25 bp, Homo sapien
gaatcgagtacatccttttgcatgc

SEQ ID NO: 131264 - DNA, 25 bp, Homo sapien
tatagatctttggatgtctgtgttc

SEQ ID NO: 131265 - DNA, 25 bp, Homo sapien
ttttgcatgctcaagagcccattct

SEQ ID NO: 131266 - DNA, 25 bp, Homo sapien
attcggaagcaacagcggcagtccc

SEQ ID NO: 131267 - DNA, 25 bp, Homo sapien
taaacgctctcggaattatggcggc

SEQ ID NO: 131268 - DNA, 25 bp, Homo sapien
cggcggtggatatccgaggtatact

SEQ ID NO: 131269 - DNA, 25 bp, Homo sapien
tactttgcgccggaaagagaacctg

SEQ ID NO: 131270 - DNA, 25 bp, Homo sapien
gagaacctgtaaacgctctcggaat

SEQ ID NO: 131271 - DNA, 25 bp, Homo sapien
gatcttccttgggatgcttctcttt

SEQ ID NO: 131272 - DNA, 25 bp, Homo sapien
gtattgagttggcagtcaaggatct

SEQ ID NO: 131273 - DNA, 25 bp, Homo sapien
aggatcttccttgggatgcttctct

SEQ ID NO: 131274 - DNA, 25 bp, Homo sapien
tctcctccagaattaaccaagcatc

SEQ ID NO: 131275 - DNA, 25 bp, Homo sapien
caatagcattccaagtttccaggta

SEQ ID NO: 131276 - DNA, 25 bp, Homo sapien
gatgcagaggagaagcccgattcaa

SEQ ID NO: 131277 - DNA, 25 bp, Homo sapien
ggtagaaccatgtccaaagacctag

SEQ ID NO: 131278 - DNA, 25 bp, Homo sapien
tgataacatagacgaaaactgcagc

SEQ ID NO: 131279 - DNA, 25 bp, Homo sapien
tagtgcagacatccagtgggcttca

SEQ ID NO: 131280 - DNA, 25 bp, Homo sapien
agtgcagacatccagtgggcttcag

SEQ ID NO: 131281 - DNA, 25 bp, Homo sapien
gtgggcttcaggcactacagcctag

SEQ ID NO: 131282 - DNA, 25 bp, Homo sapien
tctcctttcttgttctctctcaaat

SEQ ID NO: 131283 - DNA, 25 bp, Homo sapien
tttcttgttctctctcaaatgtcat

SEQ ID NO: 131284 - DNA, 25 bp, Homo sapien
tcctttcttgttctctctcaaatgt

SEQ ID NO: 131285 - DNA, 25 bp, Homo sapien
ctttcttgttctctctcaaatgtca

SEQ ID NO: 131286 - DNA, 25 bp, Homo sapien
gggaattatcatcccatcacatgct

SEQ ID NO: 131287 - DNA, 25 bp, Homo sapien
tgcaagttcatcattgggaattatc

SEQ ID NO: 131288 - DNA, 25 bp, Homo sapien
tccctgcaagttcatcattgggaat

SEQ ID NO: 131289 - DNA, 25 bp, Homo sapien
ccatcacatgctccggtgcatgtaa

SEQ ID NO: 131290 - DNA, 25 bp, Homo sapien
cagaaatggaaagattctgaagttc

SEQ ID NO: 131291 - DNA, 25 bp, Homo sapien
aatggaaagattctgaagttctctc

SEQ ID NO: 131292 - DNA, 25 bp, Homo sapien
gaaatggaaagattctgaagttctc

SEQ ID NO: 131293 - DNA, 25 bp, Homo sapien
tcagaaatggaaagattctgaagtt

SEQ ID NO: 131294 - DNA, 25 bp, Homo sapien
ccctgtgaaaactgtggaatatgcg

SEQ ID NO: 131295 - DNA, 25 bp, Homo sapien
ggatagctctggttgccctgtgaaa

SEQ ID NO: 131296 - DNA, 25 bp, Homo sapien
tcatggagctcctgcatatggccag

SEQ ID NO: 131297 - DNA, 25 bp, Homo sapien
gcagattctgctagtgctccaacag

SEQ ID NO: 131298 - DNA, 25 bp, Homo sapien
cgggactagcgctgcggggggaccg

SEQ ID NO: 131299 - DNA, 25 bp, Homo sapien
ccctccgcaacctgcgggtggcggg

SEQ ID NO: 131300 - DNA, 25 bp, Homo sapien
ctagcgctgcggggggaccgtggcc

SEQ ID NO: 131301 - DNA, 25 bp, Homo sapien
gcgggcccgggactagcgctgcggg

SEQ ID NO: 131302 - DNA, 25 bp, Homo sapien
ccgcggcggtctggcgccccgcact

SEQ ID NO: 131303 - DNA, 25 bp, Homo sapien
gcctcgcaggcttcgtggcggccgt

SEQ ID NO: 131304 - DNA, 25 bp, Homo sapien
ggccccgcgcctcgcaggcttcgtg

SEQ ID NO: 131305 - DNA, 25 bp, Homo sapien
aggcttcgtggcggccgtgacaccc

SEQ ID NO: 131306 - DNA, 25 bp, Homo sapien
cggcgcctggtgcgcgccgcgatct

SEQ ID NO: 131307 - DNA, 25 bp, Homo sapien
ggcgcctggtgcgcgccgcgatctg

SEQ ID NO: 131308 - DNA, 25 bp, Homo sapien
ctggtgcgcgccgcgatctgcccgc

SEQ ID NO: 131309 - DNA, 25 bp, Homo sapien
cgcctggtgcgcgccgcgatctgcc

SEQ ID NO: 131310 - DNA, 25 bp, Homo sapien
cttttgaactcgtgcgctcgtcgga

SEQ ID NO: 131311 - DNA, 25 bp, Homo sapien
gctgttgtaacagtcgatctcgatg

SEQ ID NO: 131312 - DNA, 25 bp, Homo sapien
aacgcccggtggtatttgcctatgg

SEQ ID NO: 131313 - DNA, 25 bp, Homo sapien
agcactgcgccccttggcttttgaa

SEQ ID NO: 131314 - DNA, 25 bp, Homo sapien
aaaggcgaggaccaatcctggtgct

SEQ ID NO: 131315 - DNA, 25 bp, Homo sapien
aaggcgaggaccaatcctggtgctc

SEQ ID NO: 131316 - DNA, 25 bp, Homo sapien
aaaaggcgaggaccaatcctggtgc

SEQ ID NO: 131317 - DNA, 25 bp, Homo sapien
gaaaaggcgaggaccaatcctggtg

SEQ ID NO: 131318 - DNA, 25 bp, Homo sapien
gctgaaggcatggtgtcaaactccc

SEQ ID NO: 131319 - DNA, 25 bp, Homo sapien
tgctgaaggcatggtgtcaaactcc

SEQ ID NO: 131320 - DNA, 25 bp, Homo sapien
ctggcctaatatagctggcattgcc

SEQ ID NO: 131321 - DNA, 25 bp, Homo sapien
cctggcctaatatagctggcattgc

SEQ ID NO: 131322 - DNA, 25 bp, Homo sapien
tcctggcctaatatagctggcattg

SEQ ID NO: 131323 - DNA, 25 bp, Homo sapien
ggcctaatatagctggcattgccag

SEQ ID NO: 131324 - DNA, 25 bp, Homo sapien
tccccatagccttctttgctgcatt

SEQ ID NO: 131325 - DNA, 25 bp, Homo sapien
tctttccctatattttcctctgtct

SEQ ID NO: 131326 - DNA, 25 bp, Homo sapien
ttgcttcccgtgtttccccatagcc

SEQ ID NO: 131327 - DNA, 25 bp, Homo sapien
ccgtgtttccccatagccttctttg

SEQ ID NO: 131328 - DNA, 25 bp, Homo sapien
ttggttgtcatgcaaacagagtgag

SEQ ID NO: 131329 - DNA, 25 bp, Homo sapien
gcaacaggaagtcgagtggcccctt

SEQ ID NO: 131330 - DNA, 25 bp, Homo sapien
gccccttggttgtcatgcaaacaga

SEQ ID NO: 131331 - DNA, 25 bp, Homo sapien
gttgtcatgcaaacagagtgagcag

SEQ ID NO: 131332 - DNA, 25 bp, Homo sapien
tcctgtagggcttaagtgtgagacc

SEQ ID NO: 131333 - DNA, 25 bp, Homo sapien
ggctgacatgacacgtttctggttt

SEQ ID NO: 131334 - DNA, 25 bp, Homo sapien
gaaacttcctatgtaaccctccaga

SEQ ID NO: 131335 - DNA, 25 bp, Homo sapien
gtgtgagaccctaattgtgctaaac

SEQ ID NO: 131336 - DNA, 25 bp, Homo sapien
acatttgcaaggtagagccgttcat

SEQ ID NO: 131337 - DNA, 25 bp, Homo sapien
tcaatgtaagtggcatccaggaggc

SEQ ID NO: 131338 - DNA, 25 bp, Homo sapien
cctgattgtcgagaagtgtttctcc

SEQ ID NO: 131339 - DNA, 25 bp, Homo sapien
aaggtagagccgttcatctgggaga

SEQ ID NO: 131340 - DNA, 25 bp, Homo sapien
ggagcctgtgctggtgcttatacag

SEQ ID NO: 131341 - DNA, 25 bp, Homo sapien
gtcggagcctgtgctggtgcttata

SEQ ID NO: 131342 - DNA, 25 bp, Homo sapien
gttgtcggagcctgtgctggtgctt

SEQ ID NO: 131343 - DNA, 25 bp, Homo sapien
cggagcctgtgctggtgcttataca

SEQ ID NO: 131344 - DNA, 25 bp, Homo sapien
aagctgatgctacaagcccccctcc

SEQ ID NO: 131345 - DNA, 25 bp, Homo sapien
acccaggactacaatcttctggtgc

SEQ ID NO: 131346 - DNA, 25 bp, Homo sapien
aatcttctggtgcaccagggggtcc

SEQ ID NO: 131347 - DNA, 25 bp, Homo sapien
tcttgttcacccaggactacaatct

SEQ ID NO: 131348 - DNA, 25 bp, Homo sapien
gccaagtcaacagaagcaacaggct

SEQ ID NO: 131349 - DNA, 25 bp, Homo sapien
tgtcaggtttcactggctgcagggc

SEQ ID NO: 131350 - DNA, 25 bp, Homo sapien
ctgcagggcagaaagccaagtcaac

SEQ ID NO: 131351 - DNA, 25 bp, Homo sapien
ctgtcaggtttcactggctgcaggg

SEQ ID NO: 131352 - DNA, 25 bp, Homo sapien
ctcgttcatagtttaccagctcagc

SEQ ID NO: 131353 - DNA, 25 bp, Homo sapien
tgctttgtcatagtccccaaggtgg

SEQ ID NO: 131354 - DNA, 25 bp, Homo sapien
cacaccagaccggtaaagggccttg

SEQ ID NO: 131355 - DNA, 25 bp, Homo sapien
ggcaatattccttgactcgttcata

SEQ ID NO: 131356 - DNA, 25 bp, Homo sapien
acagacacatcccactgcgcccagc

SEQ ID NO: 131357 - DNA, 25 bp, Homo sapien
caggtttctaaccttcatgatctca

SEQ ID NO: 131358 - DNA, 25 bp, Homo sapien
tgccaggtttctaaccttcatgatc

SEQ ID NO: 131359 - DNA, 25 bp, Homo sapien
cagacacatcccactgcgcccagct

SEQ ID NO: 131360 - DNA, 25 bp, Homo sapien
gggagcatcggctgagtttcatctc

SEQ ID NO: 131361 - DNA, 25 bp, Homo sapien
tggatataccgaatcacgttggtgt

SEQ ID NO: 131362 - DNA, 25 bp, Homo sapien
atctccgtcagctggatataccgaa

SEQ ID NO: 131363 - DNA, 25 bp, Homo sapien
tttctctctgggagcatcggctgag

SEQ ID NO: 131364 - DNA, 25 bp, Homo sapien
agtccccggtcaggcgtgggcgcag

SEQ ID NO: 131365 - DNA, 25 bp, Homo sapien
tcaggcgtgggcgcagctctggagc

SEQ ID NO: 131366 - DNA, 25 bp, Homo sapien
gcctggaagtccccggtcaggcgtg

SEQ ID NO: 131367 - DNA, 25 bp, Homo sapien
tggaagtccccggtcaggcgtgggc

SEQ ID NO: 131368 - DNA, 25 bp, Homo sapien
tgggcgacctaccagattccaaatt

SEQ ID NO: 131369 - DNA, 25 bp, Homo sapien
atgtctccattgtctgggcgaccta

SEQ ID NO: 131370 - DNA, 25 bp, Homo sapien
cattgtctgggcgacctaccagatt

SEQ ID NO: 131371 - DNA, 25 bp, Homo sapien
tctccattgtctgggcgacctacca

SEQ ID NO: 131372 - DNA, 25 bp, Homo sapien
gcactggccaaagtcaaagccacaa

SEQ ID NO: 131373 - DNA, 25 bp, Homo sapien
aagtcaggcccctctcagtcgctga

SEQ ID NO: 131374 - DNA, 25 bp, Homo sapien
gcccatgagactcctctccagctgt

SEQ ID NO: 131375 - DNA, 25 bp, Homo sapien
agtcaaagccacaacagcatcccag

SEQ ID NO: 131376 - DNA, 25 bp, Homo sapien
tgtctgccactggacaaacggccaa

SEQ ID NO: 131377 - DNA, 25 bp, Homo sapien
tgcctgtgggatggtacacttgcca

SEQ ID NO: 131378 - DNA, 25 bp, Homo sapien
tatgtgtggtcaccagagggcactg

SEQ ID NO: 131379 - DNA, 25 bp, Homo sapien
tctaacagttgcctcgagatgctct

SEQ ID NO: 131380 - DNA, 25 bp, Homo sapien
cacaatgatgggcaaacaatatgcc

SEQ ID NO: 131381 - DNA, 25 bp, Homo sapien
tagcataacgagcacagacatcagg

SEQ ID NO: 131382 - DNA, 25 bp, Homo sapien
tccttgaagactgagacgacatccc

SEQ ID NO: 131383 - DNA, 25 bp, Homo sapien
caatatgccctcagtaagtgtttct

SEQ ID NO: 131384 - DNA, 25 bp, Homo sapien
ctctaggtgagtaatggcaggcccc

SEQ ID NO: 131385 - DNA, 25 bp, Homo sapien
gaaacagggtactctctaggatcca

SEQ ID NO: 131386 - DNA, 25 bp, Homo sapien
gagtccatcgcaaaagtccaggcag

SEQ ID NO: 131387 - DNA, 25 bp, Homo sapien
taggtcagcagtgacatccgcaacg

SEQ ID NO: 131388 - DNA, 25 bp, Homo sapien
ctccaagtacttgtcctgcttgagc

SEQ ID NO: 131389 - DNA, 25 bp, Homo sapien
ggttcccttccttctacagtgcaga

SEQ ID NO: 131390 - DNA, 25 bp, Homo sapien
ggtgaacgtgcaagtattagcagcc

SEQ ID NO: 131391 - DNA, 25 bp, Homo sapien
gcttgagcagagagtaacccaaggg

SEQ ID NO: 131392 - DNA, 25 bp, Homo sapien
ctgaggcatgtgatgaggataccaa

SEQ ID NO: 131393 - DNA, 25 bp, Homo sapien
tgggcaatggctgttctatttcccg

SEQ ID NO: 131394 - DNA, 25 bp, Homo sapien
gcaattgccgtctccttgcagctca

SEQ ID NO: 131395 - DNA, 25 bp, Homo sapien
catgtgatgaggataccaagggcac

SEQ ID NO: 131396 - DNA, 25 bp, Homo sapien
cacatttgcctaggtaaaagctcaa

SEQ ID NO: 131397 - DNA, 25 bp, Homo sapien
ctctgaacacccatactaacacccc

SEQ ID NO: 131398 - DNA, 25 bp, Homo sapien
aagctcaaaatttcccctctgaaca

SEQ ID NO: 131399 - DNA, 25 bp, Homo sapien
atactcttatcccacatttgcctag

SEQ ID NO: 131400 - DNA, 25 bp, Homo sapien
ccaaggagtgagtcaacagaatgag

SEQ ID NO: 131401 - DNA, 25 bp, Homo sapien
agcagtttcgtttccttgttcctag

SEQ ID NO: 131402 - DNA, 25 bp, Homo sapien
caccagcagtttcgtttccttgttc

SEQ ID NO: 131403 - DNA, 25 bp, Homo sapien
acagaatgaggagcgcgggaaggcg

SEQ ID NO: 131404 - DNA, 25 bp, Homo sapien
tggtctccgaaagtcacatcttctt

SEQ ID NO: 131405 - DNA, 25 bp, Homo sapien
cagccatggctactggagtcaggaa

SEQ ID NO: 131406 - DNA, 25 bp, Homo sapien
gctctgaagctctcaagaagcatga

SEQ ID NO: 131407 - DNA, 25 bp, Homo sapien
ctttcaatttagtgacctgacggtg

SEQ ID NO: 131408 - DNA, 25 bp, Homo sapien
ggaaaatgtactggcgtgaaaggag

SEQ ID NO: 131409 - DNA, 25 bp, Homo sapien
gaaatgagacagtgcgatctgctgg

SEQ ID NO: 131410 - DNA, 25 bp, Homo sapien
aaggaggggaaatgagacagtgcga

SEQ ID NO: 131411 - DNA, 25 bp, Homo sapien
gggaaaatgtactggcgtgaaagga

SEQ ID NO: 131412 - DNA, 25 bp, Homo sapien
ttgaagaaaccccattcctcatctc

SEQ ID NO: 131413 - DNA, 25 bp, Homo sapien
tgaatattgaagaaaccccattcct

SEQ ID NO: 131414 - DNA, 25 bp, Homo sapien
aatattgaagaaaccccattcctca

SEQ ID NO: 131415 - DNA, 25 bp, Homo sapien
cctgaatattgaagaaaccccattc

SEQ ID NO: 131416 - DNA, 25 bp, Homo sapien
tctttccaggatctgcctcctccat

SEQ ID NO: 131417 - DNA, 25 bp, Homo sapien
ctctttccaggatctgcctcctcca

SEQ ID NO: 131418 - DNA, 25 bp, Homo sapien
cctctttccaggatctgcctcctcc

SEQ ID NO: 131419 - DNA, 25 bp, Homo sapien
ccctgctggcagaagcacttgtgtt

SEQ ID NO: 131420 - DNA, 25 bp, Homo sapien
cagatgtgctctgaaccctgctggc

SEQ ID NO: 131421 - DNA, 25 bp, Homo sapien
aggtcctcggtagccctgttgaaag

SEQ ID NO: 131422 - DNA, 25 bp, Homo sapien
tccttgtccctggtctatgtctgtc

SEQ ID NO: 131423 - DNA, 25 bp, Homo sapien
actcagggaatttccgacatgaggg

SEQ ID NO: 131424 - DNA, 25 bp, Homo sapien
aaactttgaccagtgtgtaggattg

SEQ ID NO: 131425 - DNA, 25 bp, Homo sapien
aatttccgacatgagggaagaggaa

SEQ ID NO: 131426 - DNA, 25 bp, Homo sapien
cagtgtgtaggattgttatagagac

SEQ ID NO: 131427 - DNA, 25 bp, Homo sapien
taagcaatggttcctgctcataaac

SEQ ID NO: 131428 - DNA, 25 bp, Homo sapien
cttaagcaatggttcctgctcataa

SEQ ID NO: 131429 - DNA, 25 bp, Homo sapien
tccctcatgattctgcttgatggtg

SEQ ID NO: 131430 - DNA, 25 bp, Homo sapien
cctcatgattctgcttgatggtgag

SEQ ID NO: 131431 - DNA, 25 bp, Homo sapien
gactccaggggtttgaagcacacag

SEQ ID NO: 131432 - DNA, 25 bp, Homo sapien
gtttgaagcacacaggagctggaca

SEQ ID NO: 131433 - DNA, 25 bp, Homo sapien
tccaggggtttgaagcacacaggag

SEQ ID NO: 131434 - DNA, 25 bp, Homo sapien
tttgaagcacacaggagctggacat

SEQ ID NO: 131435 - DNA, 25 bp, Homo sapien
tcgcacgtctcagctgacatccttg

SEQ ID NO: 131436 - DNA, 25 bp, Homo sapien
cgtctcagctgacatccttgatgct

SEQ ID NO: 131437 - DNA, 25 bp, Homo sapien
tgactggacttgaaccctcgcacgt

SEQ ID NO: 131438 - DNA, 25 bp, Homo sapien
ttgaaccctcgcacgtctcagctga

SEQ ID NO: 131439 - DNA, 25 bp, Homo sapien
tctcttatggacttcctctcagact

SEQ ID NO: 131440 - DNA, 25 bp, Homo sapien
caggccaggtgagtctcttatggac

SEQ ID NO: 131441 - DNA, 25 bp, Homo sapien
caggtgagtctcttatggacttcct

SEQ ID NO: 131442 - DNA, 25 bp, Homo sapien
tgagtctcttatggacttcctctca

SEQ ID NO: 131443 - DNA, 25 bp, Homo sapien
tcaggctactgttgctcagggacac

SEQ ID NO: 131444 - DNA, 25 bp, Homo sapien
gacatgtgtcatggtcactaagccc

SEQ ID NO: 131445 - DNA, 25 bp, Homo sapien
actggatggctgtgaatggtacacc

SEQ ID NO: 131446 - DNA, 25 bp, Homo sapien
gataccccaaggacatctagacctg

SEQ ID NO: 131447 - DNA, 25 bp, Homo sapien
ttgccttgagggaacttgccttttc

SEQ ID NO: 131448 - DNA, 25 bp, Homo sapien
agttgagagtgtggctctcatcacc

SEQ ID NO: 131449 - DNA, 25 bp, Homo sapien
tgccttgagggaacttgccttttct

SEQ ID NO: 131450 - DNA, 25 bp, Homo sapien
tcatctatacaggatgaatcgctga

SEQ ID NO: 131451 - DNA, 25 bp, Homo sapien
gggctatccaaaggtgctactgtga

SEQ ID NO: 131452 - DNA, 25 bp, Homo sapien
cagtggctttctattcgctcaggtt

SEQ ID NO: 131453 - DNA, 25 bp, Homo sapien
gctactgtgagcatccatgaagaag

SEQ ID NO: 131454 - DNA, 25 bp, Homo sapien
tatagtagtagcaggtctcagtggc

SEQ ID NO: 131455 - DNA, 25 bp, Homo sapien
aaaccatgctgcctatacacagtgc

SEQ ID NO: 131456 - DNA, 25 bp, Homo sapien
gcacatctgtatatccttggctcca

SEQ ID NO: 131457 - DNA, 25 bp, Homo sapien
ccattgagtgagaggttgagtgcca

SEQ ID NO: 131458 - DNA, 25 bp, Homo sapien
gccattgtggtaggttgcagccatc

SEQ ID NO: 131459 - DNA, 25 bp, Homo sapien
tgtatacaactccagggccgctaga

SEQ ID NO: 131460 - DNA, 25 bp, Homo sapien
cagagtagcaagtagcccaagcagt

SEQ ID NO: 131461 - DNA, 25 bp, Homo sapien
tcttgagcgccactgttggaacaca

SEQ ID NO: 131462 - DNA, 25 bp, Homo sapien
tggaacgtcctagaacaggcatgga

SEQ ID NO: 131463 - DNA, 25 bp, Homo sapien
ggaagagtcttatcaacagccgctc

SEQ ID NO: 131464 - DNA, 25 bp, Homo sapien
gcagatttccagcacaagttcacgg

SEQ ID NO: 131465 - DNA, 25 bp, Homo sapien
cgccttcgagccatccagtgtgaga

SEQ ID NO: 131466 - DNA, 25 bp, Homo sapien
gcaggcctcccctaccatggataaa

SEQ ID NO: 131467 - DNA, 25 bp, Homo sapien
cagggacgtatgcttggatggcacc

SEQ ID NO: 131468 - DNA, 25 bp, Homo sapien
accaagatgagtgcggcagggacgt

SEQ ID NO: 131469 - DNA, 25 bp, Homo sapien
gacgtatgcttggatggcacccgaa

SEQ ID NO: 131470 - DNA, 25 bp, Homo sapien
atggcacccgaagtcatccgggcct

SEQ ID NO: 131471 - DNA, 25 bp, Homo sapien
gattctgaagatcactgattttggc

SEQ ID NO: 131472 - DNA, 25 bp, Homo sapien
caacaagattctgaagatcactgat

SEQ ID NO: 131473 - DNA, 25 bp, Homo sapien
ctgattttggcctggctcgggaatg

SEQ ID NO: 131474 - DNA, 25 bp, Homo sapien
gcctggctcgggaatggcaccgaac

SEQ ID NO: 131475 - DNA, 25 bp, Homo sapien
gggccaccgttgctgctggcgtctc

SEQ ID NO: 131476 - DNA, 25 bp, Homo sapien
tctgctgacaatgcggaagctgctg

SEQ ID NO: 131477 - DNA, 25 bp, Homo sapien
tgtgccagtggaacccggtgcagct

SEQ ID NO: 131478 - DNA, 25 bp, Homo sapien
ctgtagttactgtggcagggactct

SEQ ID NO: 131479 - DNA, 25 bp, Homo sapien
taagtccccaaggagccaattctct

SEQ ID NO: 131480 - DNA, 25 bp, Homo sapien
tccccaaggagccaattctctccac

SEQ ID NO: 131481 - DNA, 25 bp, Homo sapien
ctaagtccccaaggagccaattctc

SEQ ID NO: 131482 - DNA, 25 bp, Homo sapien
agtccccaaggagccaattctctcc

SEQ ID NO: 131483 - DNA, 25 bp, Homo sapien
tgttgacaaaaccatcgagcatctg

SEQ ID NO: 131484 - DNA, 25 bp, Homo sapien
cgagcatctgataggcttcctcttt

SEQ ID NO: 131485 - DNA, 25 bp, Homo sapien
tatctggtatgtagctgggtacttc

SEQ ID NO: 131486 - DNA, 25 bp, Homo sapien
gtatgacggagatctggcagctctt

SEQ ID NO: 131487 - DNA, 25 bp, Homo sapien
ctggggtgaagtgcaggtcacagag

SEQ ID NO: 131488 - DNA, 25 bp, Homo sapien
aagtgcaggtcacagagcctggaat

SEQ ID NO: 131489 - DNA, 25 bp, Homo sapien
aggtcacagagcctggaatgttttc

SEQ ID NO: 131490 - DNA, 25 bp, Homo sapien
gggtgaagtgcaggtcacagagcct

SEQ ID NO: 131491 - DNA, 25 bp, Homo sapien
tggcaactcccagtgtttcgagcct

SEQ ID NO: 131492 - DNA, 25 bp, Homo sapien
gtgattcataggaaactttaattgg

SEQ ID NO: 131493 - DNA, 25 bp, Homo sapien
tccagggctattaaggacttgtggt

SEQ ID NO: 131494 - DNA, 25 bp, Homo sapien
ggttgggacttccttgcctgcaagg

SEQ ID NO: 131495 - DNA, 25 bp, Homo sapien
gagccctcatttaggatgtgaaccc

SEQ ID NO: 131496 - DNA, 25 bp, Homo sapien
tttaggatgtgaaccctctcttctt

SEQ ID NO: 131497 - DNA, 25 bp, Homo sapien
tagagccctcatttaggatgtgaac

SEQ ID NO: 131498 - DNA, 25 bp, Homo sapien
cctcatttaggatgtgaaccctctc

SEQ ID NO: 131499 - DNA, 25 bp, Homo sapien
accttgtttcgatgatgtagctcag

SEQ ID NO: 131500 - DNA, 25 bp, Homo sapien
tcttcaccttgtttcgatgatgtag

SEQ ID NO: 131501 - DNA, 25 bp, Homo sapien
caccttgtttcgatgatgtagctca

SEQ ID NO: 131502 - DNA, 25 bp, Homo sapien
ttcaccttgtttcgatgatgtagct

SEQ ID NO: 131503 - DNA, 25 bp, Homo sapien
cacagtttgcgggtggtctgtggca

SEQ ID NO: 131504 - DNA, 25 bp, Homo sapien
acagtttgcgggtggtctgtggcac

SEQ ID NO: 131505 - DNA, 25 bp, Homo sapien
gtcctgcacgcatggtagagcccat

SEQ ID NO: 131506 - DNA, 25 bp, Homo sapien
tctcatggctggtgagtttgctggc

SEQ ID NO: 131507 - DNA, 25 bp, Homo sapien
gatcccagtctctagtgtcgtcctg

SEQ ID NO: 131508 - DNA, 25 bp, Homo sapien
taagccctggagtatacctggacca

SEQ ID NO: 131509 - DNA, 25 bp, Homo sapien
gattggctgctcctgttggaactgg

SEQ ID NO: 131510 - DNA, 25 bp, Homo sapien
cactgtagccagttgccggctgcta

SEQ ID NO: 131511 - DNA, 25 bp, Homo sapien
tggaggtccatgtagcatctccctc

SEQ ID NO: 131512 - DNA, 25 bp, Homo sapien
ggtgctgtcgggtctactcccagtc

SEQ ID NO: 131513 - DNA, 25 bp, Homo sapien
tagtcagtgctaagtcatcatttga

SEQ ID NO: 131514 - DNA, 25 bp, Homo sapien
tctggtagcccatcacatatccttg

SEQ ID NO: 131515 - DNA, 25 bp, Homo sapien
tctgcctgtccaacccttccgcagt

SEQ ID NO: 131516 - DNA, 25 bp, Homo sapien
cacatatccttgctgtagtcagtgc

SEQ ID NO: 131517 - DNA, 25 bp, Homo sapien
ttaaatggtgagttggtagaagctc

SEQ ID NO: 131518 - DNA, 25 bp, Homo sapien
agcagggctaggaatacgcttcttt

SEQ ID NO: 131519 - DNA, 25 bp, Homo sapien
taaatggtgagttggtagaagctcc

SEQ ID NO: 131520 - DNA, 25 bp, Homo sapien
ggaatacgcttcttttctgtggtag

SEQ ID NO: 131521 - DNA, 25 bp, Homo sapien
ggatgaagaacaccggtgctgctca

SEQ ID NO: 131522 - DNA, 25 bp, Homo sapien
tcccaatgggcctaaaaggcttcaa

SEQ ID NO: 131523 - DNA, 25 bp, Homo sapien
tctaggtcggactaaggcagagcca

SEQ ID NO: 131524 - DNA, 25 bp, Homo sapien
ggcgaagctgatccctctaggtcgg

SEQ ID NO: 131525 - DNA, 25 bp, Homo sapien
caaaacgcagggtatagcaaagcat

SEQ ID NO: 131526 - DNA, 25 bp, Homo sapien
gacttcgccacgatccaaggtgtaa

SEQ ID NO: 131527 - DNA, 25 bp, Homo sapien
tggaagtcaacgttgccacgacagg

SEQ ID NO: 131528 - DNA, 25 bp, Homo sapien
caaagcatataggaagaggtcgtcc

SEQ ID NO: 131529 - DNA, 25 bp, Homo sapien
tatgaggacacaggatatcttccag

SEQ ID NO: 131530 - DNA, 25 bp, Homo sapien
tattgatgagcgaaccacagaatgt

SEQ ID NO: 131531 - DNA, 25 bp, Homo sapien
gaagttgggctagatccttcagcac

SEQ ID NO: 131532 - DNA, 25 bp, Homo sapien
catgtctattcctaccactgaaggg

SEQ ID NO: 131533 - DNA, 25 bp, Homo sapien
gtatagcaaacactgttcactacag

SEQ ID NO: 131534 - DNA, 25 bp, Homo sapien
tggaatgtggtatagcaaacactgt

SEQ ID NO: 131535 - DNA, 25 bp, Homo sapien
gaatgtggtatagcaaacactgttc

SEQ ID NO: 131536 - DNA, 25 bp, Homo sapien
tgtggtatagcaaacactgttcact

SEQ ID NO: 131537 - DNA, 25 bp, Homo sapien
caatagtctatgatgcctgccctct

SEQ ID NO: 131538 - DNA, 25 bp, Homo sapien
tagattcaaactcagtcagaagcca

SEQ ID NO: 131539 - DNA, 25 bp, Homo sapien
gcagggttaacttgcctaatggcac

SEQ ID NO: 131540 - DNA, 25 bp, Homo sapien
tcattaactaagtcacggtttaggc

SEQ ID NO: 131541 - DNA, 25 bp, Homo sapien
tcaagacttgtctgggtctgactcc

SEQ ID NO: 131542 - DNA, 25 bp, Homo sapien
aaatgcaacttgctctccagagatg

SEQ ID NO: 131543 - DNA, 25 bp, Homo sapien
gatgcaacattctaaacagccaccc

SEQ ID NO: 131544 - DNA, 25 bp, Homo sapien
ggtgaaaggcctcccacagtcatga

SEQ ID NO: 131545 - DNA, 25 bp, Homo sapien
gattattttcccagtcatttcatgt

SEQ ID NO: 131546 - DNA, 25 bp, Homo sapien
tgttcttcaaaaaccccgatgatag

SEQ ID NO: 131547 - DNA, 25 bp, Homo sapien
gtccttgcagactcagcatggttgt

SEQ ID NO: 131548 - DNA, 25 bp, Homo sapien
tcctggacggaaaggcttggacgaa

SEQ ID NO: 131549 - DNA, 25 bp, Homo sapien
tgtatgcactgtggcgtggttaaat

SEQ ID NO: 131550 - DNA, 25 bp, Homo sapien
taactatattgaccatggtgtacaa

SEQ ID NO: 131551 - DNA, 25 bp, Homo sapien
gatctgttccataagagagtgagag

SEQ ID NO: 131552 - DNA, 25 bp, Homo sapien
ccacttagctcagaaatagctgtta

SEQ ID NO: 131553 - DNA, 25 bp, Homo sapien
agccgcgagtgaccgcagctccgat

SEQ ID NO: 131554 - DNA, 25 bp, Homo sapien
gccacggccccgaagccgcgagtga

SEQ ID NO: 131555 - DNA, 25 bp, Homo sapien
cagaggcgcggaagctgtgcgcggg

SEQ ID NO: 131556 - DNA, 25 bp, Homo sapien
aggcctgcccgagcgtgggagccga

SEQ ID NO: 131557 - DNA, 25 bp, Homo sapien
gactccttgtatttatgctgcagag

SEQ ID NO: 131558 - DNA, 25 bp, Homo sapien
ggctgttcctctgttcacctccatt

SEQ ID NO: 131559 - DNA, 25 bp, Homo sapien
gggcatcaatcaagaagtctctgtg

SEQ ID NO: 131560 - DNA, 25 bp, Homo sapien
tgaagtcacaggctttcaagattct

SEQ ID NO: 131561 - DNA, 25 bp, Homo sapien
aggccagagtgacatatggtggtgc

SEQ ID NO: 131562 - DNA, 25 bp, Homo sapien
ccagagtgacatatggtggtgcact

SEQ ID NO: 131563 - DNA, 25 bp, Homo sapien
gccagagtgacatatggtggtgcac

SEQ ID NO: 131564 - DNA, 25 bp, Homo sapien
cagagtgacatatggtggtgcactc

SEQ ID NO: 131565 - DNA, 25 bp, Homo sapien
taagcacttctcgtgggtgtctccg

SEQ ID NO: 131566 - DNA, 25 bp, Homo sapien
gactctgggccaaatcttatctaag

SEQ ID NO: 131567 - DNA, 25 bp, Homo sapien
tagtgaagcgcgttttagacatcgc

SEQ ID NO: 131568 - DNA, 25 bp, Homo sapien
cacagtgtccttgatcagagcatga

SEQ ID NO: 131569 - DNA, 25 bp, Homo sapien
tgcatcctgtcatctctatggaagg

SEQ ID NO: 131570 - DNA, 25 bp, Homo sapien
atgcatcctgtcatctctatggaag

SEQ ID NO: 131571 - DNA, 25 bp, Homo sapien
ttactggtactgtttgaagaggcct

SEQ ID NO: 131572 - DNA, 25 bp, Homo sapien
ttctatgtatgcattactggtactg

SEQ ID NO: 131573 - DNA, 25 bp, Homo sapien
gactccacccagactggtaatctgg

SEQ ID NO: 131574 - DNA, 25 bp, Homo sapien
gcactccatggatcaactgactcca

SEQ ID NO: 131575 - DNA, 25 bp, Homo sapien
caagcaagaaaactcacttgactcc

SEQ ID NO: 131576 - DNA, 25 bp, Homo sapien
tggtttagtgaccacacagcctcca

SEQ ID NO: 131577 - DNA, 25 bp, Homo sapien
atcttctggaaacgcctgccttgct

SEQ ID NO: 131578 - DNA, 25 bp, Homo sapien
caagatcttctggaaacgcctgcct

SEQ ID NO: 131579 - DNA, 25 bp, Homo sapien
tctggaaacgcctgccttgctcctg

SEQ ID NO: 131580 - DNA, 25 bp, Homo sapien
agatcttctggaaacgcctgccttg

SEQ ID NO: 131581 - DNA, 25 bp, Homo sapien
tcttctcaaatagattataaacact

SEQ ID NO: 131582 - DNA, 25 bp, Homo sapien
taggatcaacttaggccctagagta

SEQ ID NO: 131583 - DNA, 25 bp, Homo sapien
tgtgatttggtgattagcccggcta

SEQ ID NO: 131584 - DNA, 25 bp, Homo sapien
gagaatgtaaaaagctttagaggta

SEQ ID NO: 131585 - DNA, 25 bp, Homo sapien
gtgctcactagtggctccactacca

SEQ ID NO: 131586 - DNA, 25 bp, Homo sapien
ttataagtgctcactagtggctcca

SEQ ID NO: 131587 - DNA, 25 bp, Homo sapien
ctgcagaactgagaggctcaactat

SEQ ID NO: 131588 - DNA, 25 bp, Homo sapien
gcagaactgagaggctcaactattc

SEQ ID NO: 131589 - DNA, 25 bp, Homo sapien
tctggaggatatggaaccggcagca

SEQ ID NO: 131590 - DNA, 25 bp, Homo sapien
acccagctggcgtgataaacgttca

SEQ ID NO: 131591 - DNA, 25 bp, Homo sapien
gataaacgttcagccagaatgcagt

SEQ ID NO: 131592 - DNA, 25 bp, Homo sapien
tacatccgtggaatcggaggccaac

SEQ ID NO: 131593 - DNA, 25 bp, Homo sapien
agagaaagaggcccggcgccaggga

SEQ ID NO: 131594 - DNA, 25 bp, Homo sapien
aggagaccggccttctgagagccgc

SEQ ID NO: 131595 - DNA, 25 bp, Homo sapien
cccggcgccagggagcgaccgagag

SEQ ID NO: 131596 - DNA, 25 bp, Homo sapien
tcttgtctcctaacacccggagccg

SEQ ID NO: 131597 - DNA, 25 bp, Homo sapien
ggcgcttcggcggtcgctggtgctg

SEQ ID NO: 131598 - DNA, 25 bp, Homo sapien
tccgggtgagcgagccggcgcttcg

SEQ ID NO: 131599 - DNA, 25 bp, Homo sapien
tatccacctccggagctccgggtga

SEQ ID NO: 131600 - DNA, 25 bp, Homo sapien
cacctccggagctccgggtgagcga

SEQ ID NO: 131601 - DNA, 25 bp, Homo sapien
cggcctcggtcgccggagcctgcag

SEQ ID NO: 131602 - DNA, 25 bp, Homo sapien
cctcggtcgccggagcctgcagctg

SEQ ID NO: 131603 - DNA, 25 bp, Homo sapien
ctcggcctcggtcgccggagcctgc

SEQ ID NO: 131604 - DNA, 25 bp, Homo sapien
gcctcggtcgccggagcctgcagct

SEQ ID NO: 131605 - DNA, 25 bp, Homo sapien
cccggcgccgccgccgtcgccgccg

SEQ ID NO: 131606 - DNA, 25 bp, Homo sapien
cacccggcgccgccgccgtcgccgc

SEQ ID NO: 131607 - DNA, 25 bp, Homo sapien
ccacccggcgccgccgccgtcgccg

SEQ ID NO: 131608 - DNA, 25 bp, Homo sapien
ccctgtcggaggatctgcagcgtct

SEQ ID NO: 131609 - DNA, 25 bp, Homo sapien
tggtgcgggtcgtagtaccagcccc

SEQ ID NO: 131610 - DNA, 25 bp, Homo sapien
caggtagaggtgcagcgcgttcacg

SEQ ID NO: 131611 - DNA, 25 bp, Homo sapien
tgcagcgcgttcacgaaggtggcct

SEQ ID NO: 131612 - DNA, 25 bp, Homo sapien
ccagccagattccccgttatctccc

SEQ ID NO: 131613 - DNA, 25 bp, Homo sapien
cagattccccgttatctccccgctc

SEQ ID NO: 131614 - DNA, 25 bp, Homo sapien
gaaccaagccaaacaaatctgctga

SEQ ID NO: 131615 - DNA, 25 bp, Homo sapien
aagcaccacggccaccggccacggg

SEQ ID NO: 131616 - DNA, 25 bp, Homo sapien
tctacaattcttctggacatagaag

SEQ ID NO: 131617 - DNA, 25 bp, Homo sapien
tgaaaattttgtgacagcctgagga

SEQ ID NO: 131618 - DNA, 25 bp, Homo sapien
gtaattaacccgttcattaatgatg

SEQ ID NO: 131619 - DNA, 25 bp, Homo sapien
cccgttcattaatgatgtcatattc

SEQ ID NO: 131620 - DNA, 25 bp, Homo sapien
tcatttaactcagataacagaagga

SEQ ID NO: 131621 - DNA, 25 bp, Homo sapien
taactcagataacagaaggaggcac

SEQ ID NO: 131622 - DNA, 25 bp, Homo sapien
gataacagaaggaggcactcagtct

SEQ ID NO: 131623 - DNA, 25 bp, Homo sapien
ctcagataacagaaggaggcactca

SEQ ID NO: 131624 - DNA, 25 bp, Homo sapien
tgccaaaaaattcttagcccctcca

SEQ ID NO: 131625 - DNA, 25 bp, Homo sapien
taaggatataactagatggagatgg

SEQ ID NO: 131626 - DNA, 25 bp, Homo sapien
tctgagttttggatcccggaataca

SEQ ID NO: 131627 - DNA, 25 bp, Homo sapien
gaaggagagccaagattaaggatat

SEQ ID NO: 131628 - DNA, 25 bp, Homo sapien
agctctgagttttggatcccggaat

SEQ ID NO: 131629 - DNA, 25 bp, Homo sapien
cagccaattggcagcaagtgcttct

SEQ ID NO: 131630 - DNA, 25 bp, Homo sapien
tttacattccttgaaacatgcagcc

SEQ ID NO: 131631 - DNA, 25 bp, Homo sapien
ttcatattgaactggaatgggcagg

SEQ ID NO: 131632 - DNA, 25 bp, Homo sapien
tattcataagggctacagtacaaat

SEQ ID NO: 131633 - DNA, 25 bp, Homo sapien
ctccttgtactagatgtttttcctc

SEQ ID NO: 131634 - DNA, 25 bp, Homo sapien
tctccttgtactagatgtttttcct

SEQ ID NO: 131635 - DNA, 25 bp, Homo sapien
atctccttgtactagatgtttttcc

SEQ ID NO: 131636 - DNA, 25 bp, Homo sapien
tccttgtactagatgtttttcctca

SEQ ID NO: 131637 - DNA, 25 bp, Homo sapien
ttctgtggactggacgacagcagcc

SEQ ID NO: 131638 - DNA, 25 bp, Homo sapien
gatgttttccataagggctccacca

SEQ ID NO: 131639 - DNA, 25 bp, Homo sapien
tctgcatgggatgggtccaacccca

SEQ ID NO: 131640 - DNA, 25 bp, Homo sapien
tacagctctgttaggccatgcccag

SEQ ID NO: 131641 - DNA, 25 bp, Homo sapien
tgaaaacagcagctatcacaggaca

SEQ ID NO: 131642 - DNA, 25 bp, Homo sapien
aaacagcagctatcacaggacaata

SEQ ID NO: 131643 - DNA, 25 bp, Homo sapien
gctatcacaggacaataaactgcta

SEQ ID NO: 131644 - DNA, 25 bp, Homo sapien
gaacaatgaaaacagcagctatcac

SEQ ID NO: 131645 - DNA, 25 bp, Homo sapien
gcagtcctatctacaacttctccag

SEQ ID NO: 131646 - DNA, 25 bp, Homo sapien
cgctgatccgtgaactcatttgcag

SEQ ID NO: 131647 - DNA, 25 bp, Homo sapien
tctcctggttgaacagttgccttgt

SEQ ID NO: 131648 - DNA, 25 bp, Homo sapien
tcaagtgctctgtgtagtcgatagt

SEQ ID NO: 131649 - DNA, 25 bp, Homo sapien
taaggactttcatacactaccggtg

SEQ ID NO: 131650 - DNA, 25 bp, Homo sapien
aaatgccctataaaccagcttacat

SEQ ID NO: 131651 - DNA, 25 bp, Homo sapien
cccaaatcaatagctaagtgaatgg

SEQ ID NO: 131652 - DNA, 25 bp, Homo sapien
taaaattgaacatgaaaatgcccta

SEQ ID NO: 131653 - DNA, 25 bp, Homo sapien
gcacagtgataggatctagatacac

SEQ ID NO: 131654 - DNA, 25 bp, Homo sapien
tgagagccacaatgtaccacgcaca

SEQ ID NO: 131655 - DNA, 25 bp, Homo sapien
taaccatgtgctacatatcatagcc

SEQ ID NO: 131656 - DNA, 25 bp, Homo sapien
gatcatatagacaagggaacatcat

SEQ ID NO: 131657 - DNA, 25 bp, Homo sapien
tataaccacatcactacttgaaaat

SEQ ID NO: 131658 - DNA, 25 bp, Homo sapien
aggtaaacaacgatcattcttcatt

SEQ ID NO: 131659 - DNA, 25 bp, Homo sapien
tactaaatatgttacgatacgtgcc

SEQ ID NO: 131660 - DNA, 25 bp, Homo sapien
tacaagtctgatacttggaactatt

SEQ ID NO: 131661 - DNA, 25 bp, Homo sapien
gttgcttggatctagaccggcataa

SEQ ID NO: 131662 - DNA, 25 bp, Homo sapien
tctagaccggcataagaatttctgg

SEQ ID NO: 131663 - DNA, 25 bp, Homo sapien
tggcctctcggatgaactcagacat

SEQ ID NO: 131664 - DNA, 25 bp, Homo sapien
gaatttctggaactgcaaccaactg

SEQ ID NO: 131665 - DNA, 25 bp, Homo sapien
gctgttccaagacgcgaggaaccag

SEQ ID NO: 131666 - DNA, 25 bp, Homo sapien
caagacgcgaggaaccagatccaat

SEQ ID NO: 131667 - DNA, 25 bp, Homo sapien
ttccaagacgcgaggaaccagatcc

SEQ ID NO: 131668 - DNA, 25 bp, Homo sapien
gctgctgttccaagacgcgaggaac

SEQ ID NO: 131669 - DNA, 25 bp, Homo sapien
gactagaactttggcccagacttaa

SEQ ID NO: 131670 - DNA, 25 bp, Homo sapien
ttacaaagactagaactttggccca

SEQ ID NO: 131671 - DNA, 25 bp, Homo sapien
ccagacttaaactgatatcatcaga

SEQ ID NO: 131672 - DNA, 25 bp, Homo sapien
tttggcccagacttaaactgatatc

SEQ ID NO: 131673 - DNA, 25 bp, Homo sapien
tacaaattaactctggtcaccacag

SEQ ID NO: 131674 - DNA, 25 bp, Homo sapien
tgttataaacttctgccaaattgta

SEQ ID NO: 131675 - DNA, 25 bp, Homo sapien
ggtcaccacagtatatgacatcatg

SEQ ID NO: 131676 - DNA, 25 bp, Homo sapien
tcatggtaaagtataacgttcttac

SEQ ID NO: 131677 - DNA, 25 bp, Homo sapien
gattattatctagttgttgagacac

SEQ ID NO: 131678 - DNA, 25 bp, Homo sapien
caccacagccagttgattcaccttt

SEQ ID NO: 131679 - DNA, 25 bp, Homo sapien
gacactgtaatggtctcatattaca

SEQ ID NO: 131680 - DNA, 25 bp, Homo sapien
ggtggcactaccacaacttattgct

SEQ ID NO: 131681 - DNA, 25 bp, Homo sapien
gatttgaattataggactgtcactt

SEQ ID NO: 131682 - DNA, 25 bp, Homo sapien
gagaataataacagtgccaacttca

SEQ ID NO: 131683 - DNA, 25 bp, Homo sapien
tatagtgaagattaactgggtaaat

SEQ ID NO: 131684 - DNA, 25 bp, Homo sapien
gccaacttcaaacgtttatagtgaa

SEQ ID NO: 131685 - DNA, 25 bp, Homo sapien
ccatattaatagtagagaagccaca

SEQ ID NO: 131686 - DNA, 25 bp, Homo sapien
tacagtatatgttgatcgctaccag

SEQ ID NO: 131687 - DNA, 25 bp, Homo sapien
tatttccagtacttaaaacagtgcc

SEQ ID NO: 131688 - DNA, 25 bp, Homo sapien
aaacagtgccaagagtactcgacaa

SEQ ID NO: 131689 - DNA, 25 bp, Homo sapien
catggggacggtctgaagttctgat

SEQ ID NO: 131690 - DNA, 25 bp, Homo sapien
atattcccatggggacggtctgaag

SEQ ID NO: 131691 - DNA, 25 bp, Homo sapien
tcccatggggacggtctgaagttct

SEQ ID NO: 131692 - DNA, 25 bp, Homo sapien
tattcccatggggacggtctgaagt

SEQ ID NO: 131693 - DNA, 25 bp, Homo sapien
tatccagttttctatccccatgaca

SEQ ID NO: 131694 - DNA, 25 bp, Homo sapien
tccctctttgtaaatcttatccagt

SEQ ID NO: 131695 - DNA, 25 bp, Homo sapien
cgcacccagctagaacttttcactt

SEQ ID NO: 131696 - DNA, 25 bp, Homo sapien
gaaatacctgtaactagttcctcta

SEQ ID NO: 131697 - DNA, 25 bp, Homo sapien
tggagacaagacgaaagagcttccg

SEQ ID NO: 131698 - DNA, 25 bp, Homo sapien
acagtactgttagtgtcccggtccg

SEQ ID NO: 131699 - DNA, 25 bp, Homo sapien
gagaagctacttctgtgtcacaggc

SEQ ID NO: 131700 - DNA, 25 bp, Homo sapien
cagagctagaagtccgtggtacacc

SEQ ID NO: 131701 - DNA, 25 bp, Homo sapien
tccatagcaatcttttcactgctag

SEQ ID NO: 131702 - DNA, 25 bp, Homo sapien
ttttcactgctagtccttttgtcac

SEQ ID NO: 131703 - DNA, 25 bp, Homo sapien
gttggtactcgcttccatagcaatc

SEQ ID NO: 131704 - DNA, 25 bp, Homo sapien
cccactgttggtactcgcttccata

SEQ ID NO: 131705 - DNA, 25 bp, Homo sapien
tgactgtctctaactgggaagcccg

SEQ ID NO: 131706 - DNA, 25 bp, Homo sapien
ggcttggtaccagaaacacctcgaa

SEQ ID NO: 131707 - DNA, 25 bp, Homo sapien
gagcactgtatctgccctcaggaga

SEQ ID NO: 131708 - DNA, 25 bp, Homo sapien
tagaagatttaggtcgaacatcccc

SEQ ID NO: 131709 - DNA, 25 bp, Homo sapien
gaaggatttgggataaaagcagtac

SEQ ID NO: 131710 - DNA, 25 bp, Homo sapien
gcagtacgtaatcatacagaacagg

SEQ ID NO: 131711 - DNA, 25 bp, Homo sapien
tgtttcagccaaaatagcagagtaa

SEQ ID NO: 131712 - DNA, 25 bp, Homo sapien
tacaggtcaatccaactacatcaag

SEQ ID NO: 131713 - DNA, 25 bp, Homo sapien
ggttactccctgcattgtgccggcg

SEQ ID NO: 131714 - DNA, 25 bp, Homo sapien
ggtgatccgatgagcaatgtaggag

SEQ ID NO: 131715 - DNA, 25 bp, Homo sapien
gccgtactgcctggcgcctaaatgt

SEQ ID NO: 131716 - DNA, 25 bp, Homo sapien
cctaaatgtgctgcgttcacggcga

SEQ ID NO: 131717 - DNA, 25 bp, Homo sapien
caacctaccatgcacttaacagcag

SEQ ID NO: 131718 - DNA, 25 bp, Homo sapien
aaatggtacttttgggacacagagg

SEQ ID NO: 131719 - DNA, 25 bp, Homo sapien
cattccgagatattccagaggtgcc

SEQ ID NO: 131720 - DNA, 25 bp, Homo sapien
cagaggtgcctcgttaaagacaaag

SEQ ID NO: 131721 - DNA, 25 bp, Homo sapien
gcgggactggactttgacctgggct

SEQ ID NO: 131722 - DNA, 25 bp, Homo sapien
ggcgggactggactttgacctgggc

SEQ ID NO: 131723 - DNA, 25 bp, Homo sapien
cagcagatgcattgtcatgtgatgc

SEQ ID NO: 131724 - DNA, 25 bp, Homo sapien
aagttcatcgtgcaaactgctaccg

SEQ ID NO: 131725 - DNA, 25 bp, Homo sapien
gctaccgcctacagcagatgcattg

SEQ ID NO: 131726 - DNA, 25 bp, Homo sapien
gatgcttctaagtggacactcccat

SEQ ID NO: 131727 - DNA, 25 bp, Homo sapien
aaagtttttgtatcatcaagattac

SEQ ID NO: 131728 - DNA, 25 bp, Homo sapien
catcatctgctgcattaaagttttt

SEQ ID NO: 131729 - DNA, 25 bp, Homo sapien
caattcttgtgacttagccttttga

SEQ ID NO: 131730 - DNA, 25 bp, Homo sapien
taagccacttataattcaaattcta

SEQ ID NO: 131731 - DNA, 25 bp, Homo sapien
aattctaaaattaatcatgattaac

SEQ ID NO: 131732 - DNA, 25 bp, Homo sapien
tcttgtgacttagccttttgagtaa

SEQ ID NO: 131733 - DNA, 25 bp, Homo sapien
gcttatgtaatggacattcagcaca

SEQ ID NO: 131734 - DNA, 25 bp, Homo sapien
tatattccccttgaccgataattcc

SEQ ID NO: 131735 - DNA, 25 bp, Homo sapien
tcaaagccccaaaaatgtatattcc

SEQ ID NO: 131736 - DNA, 25 bp, Homo sapien
ttgtaatatttgtggcgatcctccc

SEQ ID NO: 131737 - DNA, 25 bp, Homo sapien
aaaatcctcaccatacaaaacgaag

SEQ ID NO: 131738 - DNA, 25 bp, Homo sapien
caaaacgaagttgagtacatcaaga

SEQ ID NO: 131739 - DNA, 25 bp, Homo sapien
catttgcctagagccatgaatggtg

SEQ ID NO: 131740 - DNA, 25 bp, Homo sapien
tgaatgggattctctaacttaccct

SEQ ID NO: 131741 - DNA, 25 bp, Homo sapien
tactaatatgactaagagtttacag

SEQ ID NO: 131742 - DNA, 25 bp, Homo sapien
cagagtgtgcaataagggcttttta

SEQ ID NO: 131743 - DNA, 25 bp, Homo sapien
taaaaggactccataatgtactaat

SEQ ID NO: 131744 - DNA, 25 bp, Homo sapien
tttcccatgcctacaatgcagagtg

SEQ ID NO: 131745 - DNA, 25 bp, Homo sapien
gccaccagtctcatacagcgtagaa

SEQ ID NO: 131746 - DNA, 25 bp, Homo sapien
tcatacagcgtagaagagaacttac

SEQ ID NO: 131747 - DNA, 25 bp, Homo sapien
ttcacaagtgacatatcacagccac

SEQ ID NO: 131748 - DNA, 25 bp, Homo sapien
gctggttcaaaattcacaagtgaca

SEQ ID NO: 131749 - DNA, 25 bp, Homo sapien
gaactggatacatgagaatctgtgt

SEQ ID NO: 131750 - DNA, 25 bp, Homo sapien
taaaatcgaactgaggtagaactgg

SEQ ID NO: 131751 - DNA, 25 bp, Homo sapien
catcatgtggataaaatcgaactga

SEQ ID NO: 131752 - DNA, 25 bp, Homo sapien
tcgaactgaggtagaactggataca

SEQ ID NO: 131753 - DNA, 25 bp, Homo sapien
gcattttgctatctcaaggttccca

SEQ ID NO: 131754 - DNA, 25 bp, Homo sapien
cagtttccaggaatacactatagcc

SEQ ID NO: 131755 - DNA, 25 bp, Homo sapien
tactgtgaatcgttagtggcttctc

SEQ ID NO: 131756 - DNA, 25 bp, Homo sapien
gagccccactgcattggatctgatg

SEQ ID NO: 131757 - DNA, 25 bp, Homo sapien
gtcagcattgaaaggcttaaaatat

SEQ ID NO: 131758 - DNA, 25 bp, Homo sapien
acagttactcaattagcttatcagt

SEQ ID NO: 131759 - DNA, 25 bp, Homo sapien
tatcagttatctaagccctttaatt

SEQ ID NO: 131760 - DNA, 25 bp, Homo sapien
tcagcattgaaaggcttaaaatatc

SEQ ID NO: 131761 - DNA, 25 bp, Homo sapien
gtcaaagttaatgccaatccacagc

SEQ ID NO: 131762 - DNA, 25 bp, Homo sapien
tctgttgggccgtaagtagctgcca

SEQ ID NO: 131763 - DNA, 25 bp, Homo sapien
caagtcagggcttagatcaatgtcc

SEQ ID NO: 131764 - DNA, 25 bp, Homo sapien
taggatccaaaagcgataatagtgt

SEQ ID NO: 131765 - DNA, 25 bp, Homo sapien
gacatgtactattcccagtgctgtg

SEQ ID NO: 131766 - DNA, 25 bp, Homo sapien
caaggtgactcaatgcagatctcta

SEQ ID NO: 131767 - DNA, 25 bp, Homo sapien
tgtcctgtggactctaactgccata

SEQ ID NO: 131768 - DNA, 25 bp, Homo sapien
cataaatgtctccaatctggctggt

SEQ ID NO: 131769 - DNA, 25 bp, Homo sapien
ccatttgtccaatgttgaacttatt

SEQ ID NO: 131770 - DNA, 25 bp, Homo sapien
taatagatgtaagacaattaaggtc

SEQ ID NO: 131771 - DNA, 25 bp, Homo sapien
taagcacacacctctgcgtccatct

SEQ ID NO: 131772 - DNA, 25 bp, Homo sapien
cacaaggtaaggctacaagttcttt

SEQ ID NO: 131773 - DNA, 25 bp, Homo sapien
taacacattttccaggatctcacga

SEQ ID NO: 131774 - DNA, 25 bp, Homo sapien
attgacagctggctatgacgaggca

SEQ ID NO: 131775 - DNA, 25 bp, Homo sapien
caaaaaggccacgagaatagccagg

SEQ ID NO: 131776 - DNA, 25 bp, Homo sapien
agccaggatgacagctaacacattt

SEQ ID NO: 131777 - DNA, 25 bp, Homo sapien
tgtctgggagaagaagaatctggtt

SEQ ID NO: 131778 - DNA, 25 bp, Homo sapien
tctgggagaagaagaatctggttga

SEQ ID NO: 131779 - DNA, 25 bp, Homo sapien
atgtctgggagaagaagaatctggt

SEQ ID NO: 131780 - DNA, 25 bp, Homo sapien
gggagaagaagaatctggttgaaca

SEQ ID NO: 131781 - DNA, 25 bp, Homo sapien
taaatccctggctgatataaacacc

SEQ ID NO: 131782 - DNA, 25 bp, Homo sapien
tgtaggcaatgatacgattatgacc

SEQ ID NO: 131783 - DNA, 25 bp, Homo sapien
gagccaaataagaccgcaacatatg

SEQ ID NO: 131784 - DNA, 25 bp, Homo sapien
gaaataaactggtctactgtaggca

SEQ ID NO: 131785 - DNA, 25 bp, Homo sapien
ctgaggcaggagaccaatgaaaaac

SEQ ID NO: 131786 - DNA, 25 bp, Homo sapien
tgaggcaggagaccaatgaaaaaca

SEQ ID NO: 131787 - DNA, 25 bp, Homo sapien
tatccaattgttcacaaaggtacat

SEQ ID NO: 131788 - DNA, 25 bp, Homo sapien
aatatccaattgttcacaaaggtac

SEQ ID NO: 131789 - DNA, 25 bp, Homo sapien
gttcacaaaggtacattacaaatgt

SEQ ID NO: 131790 - DNA, 25 bp, Homo sapien
caattgttcacaaaggtacattaca

SEQ ID NO: 131791 - DNA, 25 bp, Homo sapien
tctctaaagtagcagacttgactat

SEQ ID NO: 131792 - DNA, 25 bp, Homo sapien
tatgtaggctccatgtaaattcact

SEQ ID NO: 131793 - DNA, 25 bp, Homo sapien
tcactagaacttttagttgcagaca

SEQ ID NO: 131794 - DNA, 25 bp, Homo sapien
ttctcagtcttcaatcacttaatgt

SEQ ID NO: 131795 - DNA, 25 bp, Homo sapien
aactgtaaagtgctgcaagcaggct

SEQ ID NO: 131796 - DNA, 25 bp, Homo sapien
aatccatacaataaggctactgcaa

SEQ ID NO: 131797 - DNA, 25 bp, Homo sapien
gctactgcaacaatgctacagataa

SEQ ID NO: 131798 - DNA, 25 bp, Homo sapien
aagtgctgcaagcaggcttgtagtg

SEQ ID NO: 131799 - DNA, 25 bp, Homo sapien
taatattaacctacgactactgcag

SEQ ID NO: 131800 - DNA, 25 bp, Homo sapien
tacccttataccagatgagcctagt

SEQ ID NO: 131801 - DNA, 25 bp, Homo sapien
aaattaatgctaagcgataccaggg

SEQ ID NO: 131802 - DNA, 25 bp, Homo sapien
gaaagttcataaggctcatccagat

SEQ ID NO: 131803 - DNA, 25 bp, Homo sapien
gctgagatggtaagacactgccact

SEQ ID NO: 131804 - DNA, 25 bp, Homo sapien
cactgccactaataaaccacaaaaa

SEQ ID NO: 131805 - DNA, 25 bp, Homo sapien
ggagaaaagtactggaatatgctgg

SEQ ID NO: 131806 - DNA, 25 bp, Homo sapien
gatggatcactgctttgtcggctga

SEQ ID NO: 131807 - DNA, 25 bp, Homo sapien
ttttacttcagatagagggtcttct

SEQ ID NO: 131808 - DNA, 25 bp, Homo sapien
tttttcaggcagtggatcttttact

SEQ ID NO: 131809 - DNA, 25 bp, Homo sapien
tctaagtttttcaggcagtggatct

SEQ ID NO: 131810 - DNA, 25 bp, Homo sapien
cttttacttcagatagagggtcttc

SEQ ID NO: 131811 - DNA, 25 bp, Homo sapien
tatctagttctgcatgccgtataac

SEQ ID NO: 131812 - DNA, 25 bp, Homo sapien
tctagatttcttacacataataatt

SEQ ID NO: 131813 - DNA, 25 bp, Homo sapien
gcatgccgtataacatattgcaata

SEQ ID NO: 131814 - DNA, 25 bp, Homo sapien
gaaattgaacaacgtatctagttct

SEQ ID NO: 131815 - DNA, 25 bp, Homo sapien
tacagcacaccaattacaatgcata

SEQ ID NO: 131816 - DNA, 25 bp, Homo sapien
tgaagactgtgcttacatgaatagc

SEQ ID NO: 131817 - DNA, 25 bp, Homo sapien
gcttacatgaatagcaaaatacagc

SEQ ID NO: 131818 - DNA, 25 bp, Homo sapien
taccaggtcagactgtaatcgctca

SEQ ID NO: 131819 - DNA, 25 bp, Homo sapien
cgattaatagcgcaaaaattcagag

SEQ ID NO: 131820 - DNA, 25 bp, Homo sapien
taaatgcctccatcaaaaaagtaga

SEQ ID NO: 131821 - DNA, 25 bp, Homo sapien
ctcctgaatgaacactgggtcaatg

SEQ ID NO: 131822 - DNA, 25 bp, Homo sapien
aaagttatcttctcagaccatgatg

SEQ ID NO: 131823 - DNA, 25 bp, Homo sapien
catactgattatactctagtgtctt

SEQ ID NO: 131824 - DNA, 25 bp, Homo sapien
ctagtgtctttagcagaggatgaga

SEQ ID NO: 131825 - DNA, 25 bp, Homo sapien
caaagccaaccaatgtatacaacac

SEQ ID NO: 131826 - DNA, 25 bp, Homo sapien
tgagagaaacagtgccatggtagct

SEQ ID NO: 131827 - DNA, 25 bp, Homo sapien
gaaaatagcatcacctggctttagg

SEQ ID NO: 131828 - DNA, 25 bp, Homo sapien
agatcattagattgctctttccacc

SEQ ID NO: 131829 - DNA, 25 bp, Homo sapien
gagctctgagatacttacaaatttg

SEQ ID NO: 131830 - DNA, 25 bp, Homo sapien
gaattcacatacttaagagcagctt

SEQ ID NO: 131831 - DNA, 25 bp, Homo sapien
cagtttctttggactagcaattgtc

SEQ ID NO: 131832 - DNA, 25 bp, Homo sapien
tgagaacaatcaatggatagattat

SEQ ID NO: 131833 - DNA, 25 bp, Homo sapien
tggactagcaattgtctctgcactg

SEQ ID NO: 131834 - DNA, 25 bp, Homo sapien
gaagccacacatgaagtttctcaaa

SEQ ID NO: 131835 - DNA, 25 bp, Homo sapien
tatgtagggctgctaaaagaggatc

SEQ ID NO: 131836 - DNA, 25 bp, Homo sapien
gatccaacagcatggtctctgaaaa

SEQ ID NO: 131837 - DNA, 25 bp, Homo sapien
ggatcgtagcaacttcaaaccagca

SEQ ID NO: 131838 - DNA, 25 bp, Homo sapien
cagcacagtaaagatgactgtaaca

SEQ ID NO: 131839 - DNA, 25 bp, Homo sapien
cagaaccccatgtgatctgccatgg

SEQ ID NO: 131840 - DNA, 25 bp, Homo sapien
ggcactgcaaaaggctgagcaaaag

SEQ ID NO: 131841 - DNA, 25 bp, Homo sapien
gagcaaaagcatggaaagcagaacc

SEQ ID NO: 131842 - DNA, 25 bp, Homo sapien
gccatggggcaatataggtatacac

SEQ ID NO: 131843 - DNA, 25 bp, Homo sapien
cacaggtcggacatatgaagtgatg

SEQ ID NO: 131844 - DNA, 25 bp, Homo sapien
gatgaatattgcacttcccagaaag

SEQ ID NO: 131845 - DNA, 25 bp, Homo sapien
tcccagaaaggggttcagtggagta

SEQ ID NO: 131846 - DNA, 25 bp, Homo sapien
tggagtagagaagaaggccgagaca

SEQ ID NO: 131847 - DNA, 25 bp, Homo sapien
ggtatttgaatgatccactcgtttt

SEQ ID NO: 131848 - DNA, 25 bp, Homo sapien
tggatttctatcaagctgggaagcc

SEQ ID NO: 131849 - DNA, 25 bp, Homo sapien
aatctggtatttgaatgatccactc

SEQ ID NO: 131850 - DNA, 25 bp, Homo sapien
ctggatttctatcaagctgggaagc

SEQ ID NO: 131851 - DNA, 25 bp, Homo sapien
ctgtagggatctagttaaatgctca

SEQ ID NO: 131852 - DNA, 25 bp, Homo sapien
tgtagggatctagttaaatgctcat

SEQ ID NO: 131853 - DNA, 25 bp, Homo sapien
aaatgctcataaaagatggaattca

SEQ ID NO: 131854 - DNA, 25 bp, Homo sapien
gtagggatctagttaaatgctcata

SEQ ID NO: 131855 - DNA, 25 bp, Homo sapien
tagtagcaaatcaccacagaggctg

SEQ ID NO: 131856 - DNA, 25 bp, Homo sapien
ctagtagcaaatcaccacagaggct

SEQ ID NO: 131857 - DNA, 25 bp, Homo sapien
agtagcaaatcaccacagaggctgt

SEQ ID NO: 131858 - DNA, 25 bp, Homo sapien
aagtgaccagaccattgcctatctc

SEQ ID NO: 131859 - DNA, 25 bp, Homo sapien
gcattgagatagtcagaggcaagga

SEQ ID NO: 131860 - DNA, 25 bp, Homo sapien
agtccccgcagctgaaaagtgacca

SEQ ID NO: 131861 - DNA, 25 bp, Homo sapien
tgcctatctctataaggtgtactaa

SEQ ID NO: 131862 - DNA, 25 bp, Homo sapien
tttatatgcagtggaaaaccaagca

SEQ ID NO: 131863 - DNA, 25 bp, Homo sapien
ggatcatgttttactacagtgacct

SEQ ID NO: 131864 - DNA, 25 bp, Homo sapien
tactgcagtggtctgaacccaacat

SEQ ID NO: 131865 - DNA, 25 bp, Homo sapien
gacttgctttactgcgatacttact

SEQ ID NO: 131866 - DNA, 25 bp, Homo sapien
gctgtttagcacagctacagagtgc

SEQ ID NO: 131867 - DNA, 25 bp, Homo sapien
tgagagaaactgataccatgacacc

SEQ ID NO: 131868 - DNA, 25 bp, Homo sapien
tggtggtacgatgaaagataaggct

SEQ ID NO: 131869 - DNA, 25 bp, Homo sapien
gctctttagcactctatagccctca

SEQ ID NO: 131870 - DNA, 25 bp, Homo sapien
caaagacttgaagcatagaagcagc

SEQ ID NO: 131871 - DNA, 25 bp, Homo sapien
tcagtgatgctataaccctccagaa

SEQ ID NO: 131872 - DNA, 25 bp, Homo sapien
aagtggtgagtactttccgaagatc

SEQ ID NO: 131873 - DNA, 25 bp, Homo sapien
cacttcccgttgttgacagtaggta

SEQ ID NO: 131874 - DNA, 25 bp, Homo sapien
tcgggtccacatcgacataattgcg

SEQ ID NO: 131875 - DNA, 25 bp, Homo sapien
tctccctagatatgcctgccagtcg

SEQ ID NO: 131876 - DNA, 25 bp, Homo sapien
tatccagttgaggtaaatcacacag

SEQ ID NO: 131877 - DNA, 25 bp, Homo sapien
tagccactcctctagcttagacgag

SEQ ID NO: 131878 - DNA, 25 bp, Homo sapien
caaagagttataaatgaaataaact

SEQ ID NO: 131879 - DNA, 25 bp, Homo sapien
gagttataaatgaaataaactctac

SEQ ID NO: 131880 - DNA, 25 bp, Homo sapien
tcaaagagttataaatgaaataaac

SEQ ID NO: 131881 - DNA, 25 bp, Homo sapien
aagagttataaatgaaataaactct

SEQ ID NO: 131882 - DNA, 25 bp, Homo sapien
catctgtacatacgacactggtggt

SEQ ID NO: 131883 - DNA, 25 bp, Homo sapien
tagaccatgacgaaggcaccagttg

SEQ ID NO: 131884 - DNA, 25 bp, Homo sapien
gaagatggtcggtatgcacctccta

SEQ ID NO: 131885 - DNA, 25 bp, Homo sapien
gcaccagttgtcaaggtagctcaca

SEQ ID NO: 131886 - DNA, 25 bp, Homo sapien
atatactactctgctcagtatatac

SEQ ID NO: 131887 - DNA, 25 bp, Homo sapien
tatactactctgctcagtatatact

SEQ ID NO: 131888 - DNA, 25 bp, Homo sapien
tttatccaactcactatcccttctt

SEQ ID NO: 131889 - DNA, 25 bp, Homo sapien
ggttattttatccaactcactatcc

SEQ ID NO: 131890 - DNA, 25 bp, Homo sapien
cagattgaagaatctcaatgaactt

SEQ ID NO: 131891 - DNA, 25 bp, Homo sapien
atttcttagtcctttatagtttgtg

SEQ ID NO: 131892 - DNA, 25 bp, Homo sapien
gattgaagaatctcaatgaacttca

SEQ ID NO: 131893 - DNA, 25 bp, Homo sapien
atatttcttagtcctttatagtttg

SEQ ID NO: 131894 - DNA, 25 bp, Homo sapien
ccctccaccataggaatccaatttg

SEQ ID NO: 131895 - DNA, 25 bp, Homo sapien
caccataggaatccaatttgatgca

SEQ ID NO: 131896 - DNA, 25 bp, Homo sapien
taggaatccaatttgatgcagtctc

SEQ ID NO: 131897 - DNA, 25 bp, Homo sapien
cataggaatccaatttgatgcagtc

SEQ ID NO: 131898 - DNA, 25 bp, Homo sapien
ctcgaatggcgtgcctctcatggtt

SEQ ID NO: 131899 - DNA, 25 bp, Homo sapien
ccctcgaatggcgtgcctctcatgg

SEQ ID NO: 131900 - DNA, 25 bp, Homo sapien
ctcccctcgaatggcgtgcctctca

SEQ ID NO: 131901 - DNA, 25 bp, Homo sapien
tcccctcgaatggcgtgcctctcat

SEQ ID NO: 131902 - DNA, 25 bp, Homo sapien
ctgtctgaggagcatcagattgcat

SEQ ID NO: 131903 - DNA, 25 bp, Homo sapien
tgtctgaggagcatcagattgcata

SEQ ID NO: 131904 - DNA, 25 bp, Homo sapien
gtctgaggagcatcagattgcatac

SEQ ID NO: 131905 - DNA, 25 bp, Homo sapien
gggatgaatctttgtccacatccac

SEQ ID NO: 131906 - DNA, 25 bp, Homo sapien
aacagagagtcactagggatgaatc

SEQ ID NO: 131907 - DNA, 25 bp, Homo sapien
gatgggatgcagtccccaaagctct

SEQ ID NO: 131908 - DNA, 25 bp, Homo sapien
aacacagagtccataacagagagtc

SEQ ID NO: 131909 - DNA, 25 bp, Homo sapien
tataaataccctggacaaagactgc

SEQ ID NO: 131910 - DNA, 25 bp, Homo sapien
cattatcagtggctacccacacgtg

SEQ ID NO: 131911 - DNA, 25 bp, Homo sapien
tataaaccactgtaatagtgagtcc

SEQ ID NO: 131912 - DNA, 25 bp, Homo sapien
gacagctcacctatgttcaagaaga

SEQ ID NO: 131913 - DNA, 25 bp, Homo sapien
aaatctcctttaaatagggcatgca

SEQ ID NO: 131914 - DNA, 25 bp, Homo sapien
tagggcatgcaatccatagaggaat

SEQ ID NO: 131915 - DNA, 25 bp, Homo sapien
gaattgaagaaatacggaaatctcc

SEQ ID NO: 131916 - DNA, 25 bp, Homo sapien
ttaatggacatacggatcccaggga

SEQ ID NO: 131917 - DNA, 25 bp, Homo sapien
tgtgttgggccagaatataaagtaa

SEQ ID NO: 131918 - DNA, 25 bp, Homo sapien
tataaatgttgtcagtccaggctaa

SEQ ID NO: 131919 - DNA, 25 bp, Homo sapien
gagtgtgctatatccaagtgtgttg

SEQ ID NO: 131920 - DNA, 25 bp, Homo sapien
tccaggctaatgatgggagtgtgct

SEQ ID NO: 131921 - DNA, 25 bp, Homo sapien
acacaatttactggaaaggcgaact

SEQ ID NO: 131922 - DNA, 25 bp, Homo sapien
caacagaaggtgactacgaaattac

SEQ ID NO: 131923 - DNA, 25 bp, Homo sapien
gccacacggcgttttaagcatactc

SEQ ID NO: 131924 - DNA, 25 bp, Homo sapien
acagagatgattagtgccacacggc

SEQ ID NO: 131925 - DNA, 25 bp, Homo sapien
tatcgtaccctgatctggaggctga

SEQ ID NO: 131926 - DNA, 25 bp, Homo sapien
ttagtgcccatatcacagaagggtc

SEQ ID NO: 131927 - DNA, 25 bp, Homo sapien
ctttataggtaaagacagtcccgat

SEQ ID NO: 131928 - DNA, 25 bp, Homo sapien
gaatttgtccaagagccacaccttg

SEQ ID NO: 131929 - DNA, 25 bp, Homo sapien
gtgtacatgtaggacaatatgcaat

SEQ ID NO: 131930 - DNA, 25 bp, Homo sapien
tacatgtaggacaatatgcaatagt

SEQ ID NO: 131931 - DNA, 25 bp, Homo sapien
gcaatagtaaatactgcacagatca

SEQ ID NO: 131932 - DNA, 25 bp, Homo sapien
catgtaggacaatatgcaatagtaa

SEQ ID NO: 131933 - DNA, 25 bp, Homo sapien
tcctagtcctagagaagttggtaaa

SEQ ID NO: 131934 - DNA, 25 bp, Homo sapien
cattaacagggacaggacatatact

SEQ ID NO: 131935 - DNA, 25 bp, Homo sapien
gatacagctcaaagctagcagctct

SEQ ID NO: 131936 - DNA, 25 bp, Homo sapien
tgcctctcacctagttaagatacag

SEQ ID NO: 131937 - DNA, 25 bp, Homo sapien
catgggctattacgaggttcttctc

SEQ ID NO: 131938 - DNA, 25 bp, Homo sapien
tatggcttcatagagcacagtaggg

SEQ ID NO: 131939 - DNA, 25 bp, Homo sapien
catccatgacatgccgcagagcaag

SEQ ID NO: 131940 - DNA, 25 bp, Homo sapien
gagttggcaagtactgcactccgcc

SEQ ID NO: 131941 - DNA, 25 bp, Homo sapien
gaagttcctgatatttcccaagctg

SEQ ID NO: 131942 - DNA, 25 bp, Homo sapien
tgccaggttgacactatgaagttcc

SEQ ID NO: 131943 - DNA, 25 bp, Homo sapien
tacgtagaaaaacaagctcctgctg

SEQ ID NO: 131944 - DNA, 25 bp, Homo sapien
gatgctacctctctctgggttacgg

SEQ ID NO: 131945 - DNA, 25 bp, Homo sapien
tgttaccagtgcaggaagtcccacc

SEQ ID NO: 131946 - DNA, 25 bp, Homo sapien
tgttacatccagctccgcaaccttt

SEQ ID NO: 131947 - DNA, 25 bp, Homo sapien
ggatttccaatgcttccctgggtca

SEQ ID NO: 131948 - DNA, 25 bp, Homo sapien
gaatcttcaatattgccaccactgt

SEQ ID NO: 131949 - DNA, 25 bp, Homo sapien
cagcctctatggctaagaagctaac

SEQ ID NO: 131950 - DNA, 25 bp, Homo sapien
ttatacacatatactaaccagcctc

SEQ ID NO: 131951 - DNA, 25 bp, Homo sapien
acatatactaaccagcctctatggc

SEQ ID NO: 131952 - DNA, 25 bp, Homo sapien
tactaaccagcctctatggctaaga

SEQ ID NO: 131953 - DNA, 25 bp, Homo sapien
gacaaggcacaaacccagtggtgga

SEQ ID NO: 131954 - DNA, 25 bp, Homo sapien
tatctgactagtagaagagcgccga

SEQ ID NO: 131955 - DNA, 25 bp, Homo sapien
tttggttcaccatcgacagtcggga

SEQ ID NO: 131956 - DNA, 25 bp, Homo sapien
cacgagagtgtgatgtttgcaggct

SEQ ID NO: 131957 - DNA, 25 bp, Homo sapien
ggactctgtaaatcacttctgcctt

SEQ ID NO: 131958 - DNA, 25 bp, Homo sapien
tgttggcaggacttaaggtgttgcc

SEQ ID NO: 131959 - DNA, 25 bp, Homo sapien
ttggactctgtaaatcacttctgcc

SEQ ID NO: 131960 - DNA, 25 bp, Homo sapien
cctttctggagtgtgaattgttggc

SEQ ID NO: 131961 - DNA, 25 bp, Homo sapien
agcttttaaccggattccttcatca

SEQ ID NO: 131962 - DNA, 25 bp, Homo sapien
gccactgtagctctttccttttaga

SEQ ID NO: 131963 - DNA, 25 bp, Homo sapien
ccggattccttcatcaggccactgt

SEQ ID NO: 131964 - DNA, 25 bp, Homo sapien
ggccactgtagctctttccttttag

SEQ ID NO: 131965 - DNA, 25 bp, Homo sapien
ctctgctgcaaggcacccatcggtg

SEQ ID NO: 131966 - DNA, 25 bp, Homo sapien
tgctgcaaggcacccatcggtgaat

SEQ ID NO: 131967 - DNA, 25 bp, Homo sapien
ctgctgcaaggcacccatcggtgaa

SEQ ID NO: 131968 - DNA, 25 bp, Homo sapien
ctgcaaggcacccatcggtgaatca

SEQ ID NO: 131969 - DNA, 25 bp, Homo sapien
aatctggaccagaagcactgccttg

SEQ ID NO: 131970 - DNA, 25 bp, Homo sapien
caagttctagtaccccagtttcaat

SEQ ID NO: 131971 - DNA, 25 bp, Homo sapien
agtaccccagtttcaattacagtca

SEQ ID NO: 131972 - DNA, 25 bp, Homo sapien
gccttgtcgatgtgggatctggtac

SEQ ID NO: 131973 - DNA, 25 bp, Homo sapien
tggaattgagagggaaaaagaaatg

SEQ ID NO: 131974 - DNA, 25 bp, Homo sapien
gaaatgtctttataataaacactgg

SEQ ID NO: 131975 - DNA, 25 bp, Homo sapien
tgagagggaaaaagaaatgtcttta

SEQ ID NO: 131976 - DNA, 25 bp, Homo sapien
aagaaatgtctttataataaacact

SEQ ID NO: 131977 - DNA, 25 bp, Homo sapien
ggcaaaggagaggtgcttaaccaag

SEQ ID NO: 131978 - DNA, 25 bp, Homo sapien
gagaggtgcttaaccaagctcattc

SEQ ID NO: 131979 - DNA, 25 bp, Homo sapien
tcagtcgctcccacataggatcaaa

SEQ ID NO: 131980 - DNA, 25 bp, Homo sapien
cattctattttcagtcgctcccaca

SEQ ID NO: 131981 - DNA, 25 bp, Homo sapien
agctttatttggggatggagacagt

SEQ ID NO: 131982 - DNA, 25 bp, Homo sapien
cagctttatttggggatggagacag

SEQ ID NO: 131983 - DNA, 25 bp, Homo sapien
tttcagctttatttggggatggaga

SEQ ID NO: 131984 - DNA, 25 bp, Homo sapien
gatggctgctcctaaatgctcagag

SEQ ID NO: 131985 - DNA, 25 bp, Homo sapien
gaccgatccgctgactattggctct

SEQ ID NO: 131986 - DNA, 25 bp, Homo sapien
tacttgactaactgaactgcatgtg

SEQ ID NO: 131987 - DNA, 25 bp, Homo sapien
cagtggtgttcacaagaccgatccg

SEQ ID NO: 131988 - DNA, 25 bp, Homo sapien
tgactatactgggtgaaacaaaatg

SEQ ID NO: 131989 - DNA, 25 bp, Homo sapien
tgcagaacataatgacggtatcaca

SEQ ID NO: 131990 - DNA, 25 bp, Homo sapien
tcaacacaaggcacattaggttctg

SEQ ID NO: 131991 - DNA, 25 bp, Homo sapien
cagtagccactaggtacatgtagct

SEQ ID NO: 131992 - DNA, 25 bp, Homo sapien
aggacaactttagacactgggtgaa

SEQ ID NO: 131993 - DNA, 25 bp, Homo sapien
gaatcttcagcttaaaaggcccagt

SEQ ID NO: 131994 - DNA, 25 bp, Homo sapien
ggatgaatgactcacaacagcaatc

SEQ ID NO: 131995 - DNA, 25 bp, Homo sapien
taaaaagagagttcacaccaaggta

SEQ ID NO: 131996 - DNA, 25 bp, Homo sapien
aatactttccagagcccatgatcag

SEQ ID NO: 131997 - DNA, 25 bp, Homo sapien
tctagttccaccaaagaatgtaagg

SEQ ID NO: 131998 - DNA, 25 bp, Homo sapien
gacggcctgggtgcatatcaatcaa

SEQ ID NO: 131999 - DNA, 25 bp, Homo sapien
aacccaagagtcatctggagcagcc

SEQ ID NO: 132000 - DNA, 25 bp, Homo sapien
ttcctcagtgttttatccactgtca

SEQ ID NO: 132001 - DNA, 25 bp, Homo sapien
ttatccactgtcaatactgtatttt

SEQ ID NO: 132002 - DNA, 25 bp, Homo sapien
atccactgtcaatactgtatttttg

SEQ ID NO: 132003 - DNA, 25 bp, Homo sapien
tatccactgtcaatactgtattttt

SEQ ID NO: 132004 - DNA, 25 bp, Homo sapien
gtcgaactcccgacatctagtgatc

SEQ ID NO: 132005 - DNA, 25 bp, Homo sapien
ggtgtcgaactcccgacatctagtg

SEQ ID NO: 132006 - DNA, 25 bp, Homo sapien
ctggtgtcgaactcccgacatctag

SEQ ID NO: 132007 - DNA, 25 bp, Homo sapien
tgtcgaactcccgacatctagtgat

SEQ ID NO: 132008 - DNA, 25 bp, Homo sapien
catagatgtgtgcacgagaaacggc

SEQ ID NO: 132009 - DNA, 25 bp, Homo sapien
gcaaactcgtggcttaaacaggtcc

SEQ ID NO: 132010 - DNA, 25 bp, Homo sapien
aaacggccagttgccagtagtgtgc

SEQ ID NO: 132011 - DNA, 25 bp, Homo sapien
ttaaacaggtcccaagagcctttca

SEQ ID NO: 132012 - DNA, 25 bp, Homo sapien
gtggcaaatgcgcagaagtatagtc

SEQ ID NO: 132013 - DNA, 25 bp, Homo sapien
taacccaggacgcaaacgatcgttg

SEQ ID NO: 132014 - DNA, 25 bp, Homo sapien
agcggtcccctctgtgcggatggaa

SEQ ID NO: 132015 - DNA, 25 bp, Homo sapien
agacgctaggcgtccttcgctgcag

SEQ ID NO: 132016 - DNA, 25 bp, Homo sapien
ggcatattagaacgccagacgctag

SEQ ID NO: 132017 - DNA, 25 bp, Homo sapien
tcactctgcccacaagactgctgaa

SEQ ID NO: 132018 - DNA, 25 bp, Homo sapien
tcaggttgtcagcagcatctatccc

SEQ ID NO: 132019 - DNA, 25 bp, Homo sapien
gactgctgaacactgttaatttcag

SEQ ID NO: 132020 - DNA, 25 bp, Homo sapien
gagccatagggtggattctttttca

SEQ ID NO: 132021 - DNA, 25 bp, Homo sapien
gatctccacactcccgtcccgccac

SEQ ID NO: 132022 - DNA, 25 bp, Homo sapien
ggatctccacactcccgtcccgcca

SEQ ID NO: 132023 - DNA, 25 bp, Homo sapien
ccactctggatctccacactcccgt

SEQ ID NO: 132024 - DNA, 25 bp, Homo sapien
tctccacactcccgtcccgccaccc

SEQ ID NO: 132025 - DNA, 25 bp, Homo sapien
tgccagccccagagggactgagcag

SEQ ID NO: 132026 - DNA, 25 bp, Homo sapien
ccagccccagagggactgagcagga

SEQ ID NO: 132027 - DNA, 25 bp, Homo sapien
ctgccagccccagagggactgagca

SEQ ID NO: 132028 - DNA, 25 bp, Homo sapien
cagccccagagggactgagcaggaa

SEQ ID NO: 132029 - DNA, 25 bp, Homo sapien
acagagccccaggacggtggtggat

SEQ ID NO: 132030 - DNA, 25 bp, Homo sapien
tgcctgccaagcacaggtgttctgt

SEQ ID NO: 132031 - DNA, 25 bp, Homo sapien
ccctcaatgttattcttgcctgcca

SEQ ID NO: 132032 - DNA, 25 bp, Homo sapien
ggatgctgccgccttcggaatatgg

SEQ ID NO: 132033 - DNA, 25 bp, Homo sapien
ttgggcctggtctatccaggcagag

SEQ ID NO: 132034 - DNA, 25 bp, Homo sapien
cgcatcttgggcctggtctatccag

SEQ ID NO: 132035 - DNA, 25 bp, Homo sapien
catcttgggcctggtctatccaggc

SEQ ID NO: 132036 - DNA, 25 bp, Homo sapien
ctacgcatcttgggcctggtctatc

SEQ ID NO: 132037 - DNA, 25 bp, Homo sapien
tattgcaaagagcaagtgtgaaagg

SEQ ID NO: 132038 - DNA, 25 bp, Homo sapien
caaagagcaagtgtgaaaggggacc

SEQ ID NO: 132039 - DNA, 25 bp, Homo sapien
gcaagtgtgaaaggggacccgagcg

SEQ ID NO: 132040 - DNA, 25 bp, Homo sapien
gagcaagtgtgaaaggggacccgag

SEQ ID NO: 132041 - DNA, 25 bp, Homo sapien
gggagcctggacaaattcccattga

SEQ ID NO: 132042 - DNA, 25 bp, Homo sapien
gctcatgtgtgtgccgtggtcctac

SEQ ID NO: 132043 - DNA, 25 bp, Homo sapien
acttcggttgtggttgccgatggca

SEQ ID NO: 132044 - DNA, 25 bp, Homo sapien
gatgctcaggaaactcttgactcag

SEQ ID NO: 132045 - DNA, 25 bp, Homo sapien
actccgagcctcacttgtatcagaa

SEQ ID NO: 132046 - DNA, 25 bp, Homo sapien
tgtatcagaacttctggtgccatag

SEQ ID NO: 132047 - DNA, 25 bp, Homo sapien
cttcttttggtcactccgagcctca

SEQ ID NO: 132048 - DNA, 25 bp, Homo sapien
tccttcatgggtgatcccccttgct

SEQ ID NO: 132049 - DNA, 25 bp, Homo sapien
agccccagctcaggaggtgggaggt

SEQ ID NO: 132050 - DNA, 25 bp, Homo sapien
aggtgggaggtggtcagggtaagtg

SEQ ID NO: 132051 - DNA, 25 bp, Homo sapien
agacccagccccagctcaggaggtg

SEQ ID NO: 132052 - DNA, 25 bp, Homo sapien
ctcaggaggtgggaggtggtcaggg

SEQ ID NO: 132053 - DNA, 25 bp, Homo sapien
gcttcatgaatggctgactcagtgt

SEQ ID NO: 132054 - DNA, 25 bp, Homo sapien
cttcatgaatggctgactcagtgtc

SEQ ID NO: 132055 - DNA, 25 bp, Homo sapien
ttcatgaatggctgactcagtgtcc

SEQ ID NO: 132056 - DNA, 25 bp, Homo sapien
agcttcatgaatggctgactcagtg

SEQ ID NO: 132057 - DNA, 25 bp, Homo sapien
ttcaccatgataccggagccagcgt

SEQ ID NO: 132058 - DNA, 25 bp, Homo sapien
ttggcgttcaccatgataccggagc

SEQ ID NO: 132059 - DNA, 25 bp, Homo sapien
gcgttcaccatgataccggagccag

SEQ ID NO: 132060 - DNA, 25 bp, Homo sapien
cttggcgttcaccatgataccggag

SEQ ID NO: 132061 - DNA, 25 bp, Homo sapien
tgtactccacttgtgtgactcccgg

SEQ ID NO: 132062 - DNA, 25 bp, Homo sapien
cccgggctttcctttgggatctcat

SEQ ID NO: 132063 - DNA, 25 bp, Homo sapien
tcatctagtcggcatcagctgttcc

SEQ ID NO: 132064 - DNA, 25 bp, Homo sapien
ctttgggatctcatgcggctgctct

SEQ ID NO: 132065 - DNA, 25 bp, Homo sapien
ttgggatggcaagctaggacacaca

SEQ ID NO: 132066 - DNA, 25 bp, Homo sapien
acaaggagcagacaggatattcact

SEQ ID NO: 132067 - DNA, 25 bp, Homo sapien
gatggagttagagcactgcgttcac

SEQ ID NO: 132068 - DNA, 25 bp, Homo sapien
cttaatggaaagtggaagatggagt

SEQ ID NO: 132069 - DNA, 25 bp, Homo sapien
agcttccatctggagactggcgtgt

SEQ ID NO: 132070 - DNA, 25 bp, Homo sapien
gcttccatctggagactggcgtgta

SEQ ID NO: 132071 - DNA, 25 bp, Homo sapien
cttccatctggagactggcgtgtac

SEQ ID NO: 132072 - DNA, 25 bp, Homo sapien
catttgccagaggtagcttcctgca

SEQ ID NO: 132073 - DNA, 25 bp, Homo sapien
gatcccacgggagagatgtggccac

SEQ ID NO: 132074 - DNA, 25 bp, Homo sapien
gagagatgtggccacgaactcccat

SEQ ID NO: 132075 - DNA, 25 bp, Homo sapien
ccacatttgccagaggtagcttcct

SEQ ID NO: 132076 - DNA, 25 bp, Homo sapien
gcctggtcctcatttcagtagcaaa

SEQ ID NO: 132077 - DNA, 25 bp, Homo sapien
tggtcctcatttcagtagcaaagcc

SEQ ID NO: 132078 - DNA, 25 bp, Homo sapien
tgcagattgattccgtggggctggg

SEQ ID NO: 132079 - DNA, 25 bp, Homo sapien
gctggggctgatcccttgttgagac

SEQ ID NO: 132080 - DNA, 25 bp, Homo sapien
tgtagggcacatggaatgatcctcc

SEQ ID NO: 132081 - DNA, 25 bp, Homo sapien
tggtgtagggcacatggaatgatcc

SEQ ID NO: 132082 - DNA, 25 bp, Homo sapien
ggtgtagggcacatggaatgatcct

SEQ ID NO: 132083 - DNA, 25 bp, Homo sapien
ctggtgtagggcacatggaatgatc

SEQ ID NO: 132084 - DNA, 25 bp, Homo sapien
caaacagctcgggaacatccaaagc

SEQ ID NO: 132085 - DNA, 25 bp, Homo sapien
aaagcttctaggttgacccatggat

SEQ ID NO: 132086 - DNA, 25 bp, Homo sapien
tcgggaacatccaaagcttctaggt

SEQ ID NO: 132087 - DNA, 25 bp, Homo sapien
tggatctatggcctgcattttttcc

SEQ ID NO: 132088 - DNA, 25 bp, Homo sapien
aaacaggggccagagattgcagtca

SEQ ID NO: 132089 - DNA, 25 bp, Homo sapien
ctagagcttggaccacgtgagagtg

SEQ ID NO: 132090 - DNA, 25 bp, Homo sapien
cctgagtctagagcttggaccacgt

SEQ ID NO: 132091 - DNA, 25 bp, Homo sapien
agcatccctgagtctagagcttgga

SEQ ID NO: 132092 - DNA, 25 bp, Homo sapien
gctgcacttggctctagatgtctga

SEQ ID NO: 132093 - DNA, 25 bp, Homo sapien
cttctttcacggggagggagctggg

SEQ ID NO: 132094 - DNA, 25 bp, Homo sapien
ggagctgggaaagggagctgtggcc

SEQ ID NO: 132095 - DNA, 25 bp, Homo sapien
tgtggcctctccaaaggctgcactt

SEQ ID NO: 132096 - DNA, 25 bp, Homo sapien
gaaggcgttctgattccagcgtcct

SEQ ID NO: 132097 - DNA, 25 bp, Homo sapien
caccactaccagagatatgctttca

SEQ ID NO: 132098 - DNA, 25 bp, Homo sapien
catctttcttagagggaaggcgttc

SEQ ID NO: 132099 - DNA, 25 bp, Homo sapien
accaacagtagtgcctggtaatcca

SEQ ID NO: 132100 - DNA, 25 bp, Homo sapien
catcgtgctcactaagtgccaaaga

SEQ ID NO: 132101 - DNA, 25 bp, Homo sapien
cccgagccccagaactgcaaactgg

SEQ ID NO: 132102 - DNA, 25 bp, Homo sapien
ggagggagcgggtggagtccatcgt

SEQ ID NO: 132103 - DNA, 25 bp, Homo sapien
ggagtccatcgtgctcactaagtgc

SEQ ID NO: 132104 - DNA, 25 bp, Homo sapien
actgtgagacgtcattcccattgga

SEQ ID NO: 132105 - DNA, 25 bp, Homo sapien
tgtgagtggccagtctgaccatcat

SEQ ID NO: 132106 - DNA, 25 bp, Homo sapien
tctcacactgtgagacgtcattccc

SEQ ID NO: 132107 - DNA, 25 bp, Homo sapien
agacacagaagctcttgactcaagg

SEQ ID NO: 132108 - DNA, 25 bp, Homo sapien
aactgcagaacttcctgctttcctg

SEQ ID NO: 132109 - DNA, 25 bp, Homo sapien
cttcctgctgcagttagctgagcca

SEQ ID NO: 132110 - DNA, 25 bp, Homo sapien
ttcctgctgcagttagctgagccat

SEQ ID NO: 132111 - DNA, 25 bp, Homo sapien
ctgatgctaactgcagaacttcctg

SEQ ID NO: 132112 - DNA, 25 bp, Homo sapien
accatcggacttcatgacgcaaggg

SEQ ID NO: 132113 - DNA, 25 bp, Homo sapien
tccctggttgttgggattcacaggc

SEQ ID NO: 132114 - DNA, 25 bp, Homo sapien
aaagtggcgcgctccctggttgttg

SEQ ID NO: 132115 - DNA, 25 bp, Homo sapien
gctgcctctcaaaggagtattgcct

SEQ ID NO: 132116 - DNA, 25 bp, Homo sapien
tgaagcgcatcccagtaaatggtgg

SEQ ID NO: 132117 - DNA, 25 bp, Homo sapien
caacctatgggatggtgagcggctc

SEQ ID NO: 132118 - DNA, 25 bp, Homo sapien
cagaccataggtagaggctcagcct

SEQ ID NO: 132119 - DNA, 25 bp, Homo sapien
aaaattgacatctcaggccgggtac

SEQ ID NO: 132120 - DNA, 25 bp, Homo sapien
cacagcccagattggcagtcatcaa

SEQ ID NO: 132121 - DNA, 25 bp, Homo sapien
cggctgcccctctcgttttatgctg

SEQ ID NO: 132122 - DNA, 25 bp, Homo sapien
tctccaaattgctcacacagctggc

SEQ ID NO: 132123 - DNA, 25 bp, Homo sapien
agtcttccctcagggtgcggatgaa

SEQ ID NO: 132124 - DNA, 25 bp, Homo sapien
ggccttgtcctctccaaagttagga

SEQ ID NO: 132125 - DNA, 25 bp, Homo sapien
gagtggctcagtaggaagagtttga

SEQ ID NO: 132126 - DNA, 25 bp, Homo sapien
tagggtgggactgacagggccttgt

SEQ ID NO: 132127 - DNA, 25 bp, Homo sapien
gcttctggttgctgggagtggctca

SEQ ID NO: 132128 - DNA, 25 bp, Homo sapien
aggtcgtcccaaggagtgttccgtg

SEQ ID NO: 132129 - DNA, 25 bp, Homo sapien
tcagatacactgactgctgccgtgg

SEQ ID NO: 132130 - DNA, 25 bp, Homo sapien
tcacaaaatggcgagcaagtggcgt

SEQ ID NO: 132131 - DNA, 25 bp, Homo sapien
gcaggtctcctgataagtgtccagc

SEQ ID NO: 132132 - DNA, 25 bp, Homo sapien
catgggttgcagattggccaggtct

SEQ ID NO: 132133 - DNA, 25 bp, Homo sapien
tcatctccccagtaaagacagcact

SEQ ID NO: 132134 - DNA, 25 bp, Homo sapien
ggtctaaggcgctgacaagaaacat

SEQ ID NO: 132135 - DNA, 25 bp, Homo sapien
caccatctagtgataagtccatgag

SEQ ID NO: 132136 - DNA, 25 bp, Homo sapien
aaaatgactgaagagccacgctcta

SEQ ID NO: 132137 - DNA, 25 bp, Homo sapien
ccacgctctaaggatgctgtcatca

SEQ ID NO: 132138 - DNA, 25 bp, Homo sapien
gactggtcagctggaatcaccatca

SEQ ID NO: 132139 - DNA, 25 bp, Homo sapien
gccctgacaggccagtttagttaga

SEQ ID NO: 132140 - DNA, 25 bp, Homo sapien
tcaatctgagtctttacatgtaagg

SEQ ID NO: 132141 - DNA, 25 bp, Homo sapien
catgtaaggtctgtctcttgtagac

SEQ ID NO: 132142 - DNA, 25 bp, Homo sapien
tgtacacgagtgacatgactatttg

SEQ ID NO: 132143 - DNA, 25 bp, Homo sapien
tgtttttgggctacaaatatgcatc

SEQ ID NO: 132144 - DNA, 25 bp, Homo sapien
taggatcatgaaggaagagcacagc

SEQ ID NO: 132145 - DNA, 25 bp, Homo sapien
cattcacgtatcatcttcttgggag

SEQ ID NO: 132146 - DNA, 25 bp, Homo sapien
gaatgttaggatcatgaaggaagag

SEQ ID NO: 132147 - DNA, 25 bp, Homo sapien
gaagagcacagcattcacgtatcat

SEQ ID NO: 132148 - DNA, 25 bp, Homo sapien
gctgaactcttctgggacttgggac

SEQ ID NO: 132149 - DNA, 25 bp, Homo sapien
tcctatagtgtagaggcaaagccag

SEQ ID NO: 132150 - DNA, 25 bp, Homo sapien
ggtattcagacttacatggcagggc

SEQ ID NO: 132151 - DNA, 25 bp, Homo sapien
taaggaccaggctcagtgtaagacg

SEQ ID NO: 132152 - DNA, 25 bp, Homo sapien
cctcctgttatctggtactggctgt

SEQ ID NO: 132153 - DNA, 25 bp, Homo sapien
gacttctgagcaattttcacagaca

SEQ ID NO: 132154 - DNA, 25 bp, Homo sapien
gagtggatcttgatcattgcttctg

SEQ ID NO: 132155 - DNA, 25 bp, Homo sapien
tgactggcgctgctagagtggatct

SEQ ID NO: 132156 - DNA, 25 bp, Homo sapien
aaagcaccttgatattaggaagcct

SEQ ID NO: 132157 - DNA, 25 bp, Homo sapien
gcaccttgatattaggaagcctttg

SEQ ID NO: 132158 - DNA, 25 bp, Homo sapien
ccttgatattaggaagcctttgtga

SEQ ID NO: 132159 - DNA, 25 bp, Homo sapien
ctcagaaagcaccttgatattagga

SEQ ID NO: 132160 - DNA, 25 bp, Homo sapien
tctggttgctatgacgacggcaaag

SEQ ID NO: 132161 - DNA, 25 bp, Homo sapien
ctcgcgagagaagcggcggctgggc

SEQ ID NO: 132162 - DNA, 25 bp, Homo sapien
tatgacgacggcaaagccctggatt

SEQ ID NO: 132163 - DNA, 25 bp, Homo sapien
ccctgcaggcggaggaagtggaaaa

SEQ ID NO: 132164 - DNA, 25 bp, Homo sapien
gccgcgcgtcccgggcgcgtccgcc

SEQ ID NO: 132165 - DNA, 25 bp, Homo sapien
ccgcgcgtcccgggcgcgtccgccg

SEQ ID NO: 132166 - DNA, 25 bp, Homo sapien
agctcagcggggtggacgcaaccgc

SEQ ID NO: 132167 - DNA, 25 bp, Homo sapien
ctcccgcagagacgcctgcccagta

SEQ ID NO: 132168 - DNA, 25 bp, Homo sapien
gcccagtagttgtgcagattcgggt

SEQ ID NO: 132169 - DNA, 25 bp, Homo sapien
gcgaccagctcagcggggtggacgc

SEQ ID NO: 132170 - DNA, 25 bp, Homo sapien
gaatgctgcctctaaactacccgtc

SEQ ID NO: 132171 - DNA, 25 bp, Homo sapien
tggaacctgatgaaagtcgacacct

SEQ ID NO: 132172 - DNA, 25 bp, Homo sapien
cacaggtagtatgcatttcagcgaa

SEQ ID NO: 132173 - DNA, 25 bp, Homo sapien
tgaaatttgcatcacatcgctggct

SEQ ID NO: 132174 - DNA, 25 bp, Homo sapien
agtactaagccctaccacaaggagg

SEQ ID NO: 132175 - DNA, 25 bp, Homo sapien
aacatcgggttaatcatcttgccag

SEQ ID NO: 132176 - DNA, 25 bp, Homo sapien
tacctacctgaggagaaatcacatg

SEQ ID NO: 132177 - DNA, 25 bp, Homo sapien
gagggcttgtcagtaaacatcgggt

SEQ ID NO: 132178 - DNA, 25 bp, Homo sapien
tcttatgcaaaccacgcctgagtct

SEQ ID NO: 132179 - DNA, 25 bp, Homo sapien
agcctacaataggaagaaatgaggg

SEQ ID NO: 132180 - DNA, 25 bp, Homo sapien
gacctcaggtaacatcaaatttttc

SEQ ID NO: 132181 - DNA, 25 bp, Homo sapien
gaaagctagacaagttatttagcct

SEQ ID NO: 132182 - DNA, 25 bp, Homo sapien
gtagttactacgatgactctcaagc

SEQ ID NO: 132183 - DNA, 25 bp, Homo sapien
caagctttactacaactacacatgt

SEQ ID NO: 132184 - DNA, 25 bp, Homo sapien
cttagagcttggctacttcaaaaac

SEQ ID NO: 132185 - DNA, 25 bp, Homo sapien
tgcttaggaaaacttagagcttggc

SEQ ID NO: 132186 - DNA, 25 bp, Homo sapien
cctggtttgcagcaccctgacttta

SEQ ID NO: 132187 - DNA, 25 bp, Homo sapien
taagtatctgttattcatggagccc

SEQ ID NO: 132188 - DNA, 25 bp, Homo sapien
ggctccttcagaacggtgttatgta

SEQ ID NO: 132189 - DNA, 25 bp, Homo sapien
taggttccaccaaccagacatacca

SEQ ID NO: 132190 - DNA, 25 bp, Homo sapien
gcattatttatcaaggtcatcctgt

SEQ ID NO: 132191 - DNA, 25 bp, Homo sapien
aaataaactttgaggctgccttctg

SEQ ID NO: 132192 - DNA, 25 bp, Homo sapien
tttcatcagtagagacagaccattt

SEQ ID NO: 132193 - DNA, 25 bp, Homo sapien
tctatagaatagatactgcagagcc

SEQ ID NO: 132194 - DNA, 25 bp, Homo sapien
taggaggctcgcttgaggccagtac

SEQ ID NO: 132195 - DNA, 25 bp, Homo sapien
cgcttgaggccagtactgggcaaca

SEQ ID NO: 132196 - DNA, 25 bp, Homo sapien
tcgcttgaggccagtactgggcaac

SEQ ID NO: 132197 - DNA, 25 bp, Homo sapien
aggctcgcttgaggccagtactggg

SEQ ID NO: 132198 - DNA, 25 bp, Homo sapien
tcaagcccacaagaggagtctcagt

SEQ ID NO: 132199 - DNA, 25 bp, Homo sapien
tggagcaaagcagagcaatcatagc

SEQ ID NO: 132200 - DNA, 25 bp, Homo sapien
gactacaggcaagtcctactgcgcc

SEQ ID NO: 132201 - DNA, 25 bp, Homo sapien
gaatcctagtgtggtctacagcagg

SEQ ID NO: 132202 - DNA, 25 bp, Homo sapien
agctactatgttcccttctctaagg

SEQ ID NO: 132203 - DNA, 25 bp, Homo sapien
cctgggcaagttactactcggtggc

SEQ ID NO: 132204 - DNA, 25 bp, Homo sapien
aaaggcatgagctccatcatcagac

SEQ ID NO: 132205 - DNA, 25 bp, Homo sapien
ggagatcctgacaccttaagcaaga

SEQ ID NO: 132206 - DNA, 25 bp, Homo sapien
tgagacatgactgggatctgaactg

SEQ ID NO: 132207 - DNA, 25 bp, Homo sapien
ggctgcctgaacaaaagaaagtctg

SEQ ID NO: 132208 - DNA, 25 bp, Homo sapien
gagcttaacttagcctgcaggcagt

SEQ ID NO: 132209 - DNA, 25 bp, Homo sapien
ttaaaagtagaacacaaactctgcc

SEQ ID NO: 132210 - DNA, 25 bp, Homo sapien
tatcaacattcactaggtgaaccgc

SEQ ID NO: 132211 - DNA, 25 bp, Homo sapien
tcactcaaacccaaagtatcaacat

SEQ ID NO: 132212 - DNA, 25 bp, Homo sapien
atcaacattcactaggtgaaccgct

SEQ ID NO: 132213 - DNA, 25 bp, Homo sapien
gtatcaacattcactaggtgaaccg

SEQ ID NO: 132214 - DNA, 25 bp, Homo sapien
gcatttgtcttagaagccatcaagt

SEQ ID NO: 132215 - DNA, 25 bp, Homo sapien
cgtaatctgacaagaatttagcatt

SEQ ID NO: 132216 - DNA, 25 bp, Homo sapien
tgcgtaatctgacaagaatttagca

SEQ ID NO: 132217 - DNA, 25 bp, Homo sapien
caagtgatatgcactccaacagaag

SEQ ID NO: 132218 - DNA, 25 bp, Homo sapien
ttggtcttaaactcccgacctcatg

SEQ ID NO: 132219 - DNA, 25 bp, Homo sapien
gtctcagcctgtcacctaggctgca

SEQ ID NO: 132220 - DNA, 25 bp, Homo sapien
gtgcagtggtgcaatcttggcttac

SEQ ID NO: 132221 - DNA, 25 bp, Homo sapien
ggtttcaacatcttagccaggttgg

SEQ ID NO: 132222 - DNA, 25 bp, Homo sapien
tacagtaactcgaagcagcaagcgg

SEQ ID NO: 132223 - DNA, 25 bp, Homo sapien
cagaaggtttggcagtccaggtaga

SEQ ID NO: 132224 - DNA, 25 bp, Homo sapien
tcagtgtacacaggaactacccaaa

SEQ ID NO: 132225 - DNA, 25 bp, Homo sapien
tgctcgtaccccaaagcaccagaag

SEQ ID NO: 132226 - DNA, 25 bp, Homo sapien
gttagtagtatatcttgcttttgag

SEQ ID NO: 132227 - DNA, 25 bp, Homo sapien
agttagtagtatatcttgcttttga

SEQ ID NO: 132228 - DNA, 25 bp, Homo sapien
tttcaaagttagtagtatatcttgc

SEQ ID NO: 132229 - DNA, 25 bp, Homo sapien
caaagttagtagtatatcttgcttt

SEQ ID NO: 132230 - DNA, 25 bp, Homo sapien
tctaagaatgacagtttgagtgaca

SEQ ID NO: 132231 - DNA, 25 bp, Homo sapien
aatgtgactttggaactaatccacc

SEQ ID NO: 132232 - DNA, 25 bp, Homo sapien
tttcctccctgcaatgtgactttgg

SEQ ID NO: 132233 - DNA, 25 bp, Homo sapien
tggccaaatagcaggtcttctaaga

SEQ ID NO: 132234 - DNA, 25 bp, Homo sapien
tggcctcacggtagtatacagaact

SEQ ID NO: 132235 - DNA, 25 bp, Homo sapien
gtaaacctcataccacactatcagt

SEQ ID NO: 132236 - DNA, 25 bp, Homo sapien
ggtagctgtatgacacagaagctaa

SEQ ID NO: 132237 - DNA, 25 bp, Homo sapien
ggtgcctgctcaaaactgtcatgtt

SEQ ID NO: 132238 - DNA, 25 bp, Homo sapien
ttcttccacaacaaattacatgaaa

SEQ ID NO: 132239 - DNA, 25 bp, Homo sapien
aaaatgtcctcattcaatcgttaag

SEQ ID NO: 132240 - DNA, 25 bp, Homo sapien
gaaaactattaaagtgacacaggac

SEQ ID NO: 132241 - DNA, 25 bp, Homo sapien
tcataaaacagtatgcgcaatatga

SEQ ID NO: 132242 - DNA, 25 bp, Homo sapien
ctacttaagtggctgaggcaccccg

SEQ ID NO: 132243 - DNA, 25 bp, Homo sapien
gtggctgaggcaccccgaaatacct

SEQ ID NO: 132244 - DNA, 25 bp, Homo sapien
tgcaacaagtcgagatcatgctact

SEQ ID NO: 132245 - DNA, 25 bp, Homo sapien
ggttgcaacaagtcgagatcatgct

SEQ ID NO: 132246 - DNA, 25 bp, Homo sapien
ccaagagggaggcaagtaagctgca

SEQ ID NO: 132247 - DNA, 25 bp, Homo sapien
ccacaggtgagctcttggaaaggct

SEQ ID NO: 132248 - DNA, 25 bp, Homo sapien
tcctgggttagagtgatgacagctc

SEQ ID NO: 132249 - DNA, 25 bp, Homo sapien
atgagagcatgacccaaaacccagg

SEQ ID NO: 132250 - DNA, 25 bp, Homo sapien
aaatgagttaatagggagtggcttc

SEQ ID NO: 132251 - DNA, 25 bp, Homo sapien
agggcaaggcctgtatatgactgac

SEQ ID NO: 132252 - DNA, 25 bp, Homo sapien
catatactatggtagagggttttaa

SEQ ID NO: 132253 - DNA, 25 bp, Homo sapien
gaatagatgtagacacttctctcac

SEQ ID NO: 132254 - DNA, 25 bp, Homo sapien
agctatcctccccgctcagcctcct

SEQ ID NO: 132255 - DNA, 25 bp, Homo sapien
aagctatcctccccgctcagcctcc

SEQ ID NO: 132256 - DNA, 25 bp, Homo sapien
ctacagcttataactcctgggttta

SEQ ID NO: 132257 - DNA, 25 bp, Homo sapien
atagagcactacagcttataactcc

SEQ ID NO: 132258 - DNA, 25 bp, Homo sapien
cactcccaggaaatgctgaacttag

SEQ ID NO: 132259 - DNA, 25 bp, Homo sapien
cccactcccaggaaatgctgaactt

SEQ ID NO: 132260 - DNA, 25 bp, Homo sapien
ccaggtgctccattatctgaacaaa

SEQ ID NO: 132261 - DNA, 25 bp, Homo sapien
tattaaaatcacataacttccaggt

SEQ ID NO: 132262 - DNA, 25 bp, Homo sapien
cctagaggcatccctgtcaccagat

SEQ ID NO: 132263 - DNA, 25 bp, Homo sapien
gccttgtgactaatgttagctgtat

SEQ ID NO: 132264 - DNA, 25 bp, Homo sapien
tttgaaccccagggctcaagtagtc

SEQ ID NO: 132265 - DNA, 25 bp, Homo sapien
cctggcctgcaatatatttcttatc

SEQ ID NO: 132266 - DNA, 25 bp, Homo sapien
ttacaagcaggtgcctggcctgcaa

SEQ ID NO: 132267 - DNA, 25 bp, Homo sapien
tatttcttatctactaacttattaa

SEQ ID NO: 132268 - DNA, 25 bp, Homo sapien
aaataacataagatctccccagagg

SEQ ID NO: 132269 - DNA, 25 bp, Homo sapien
ctagcagagatcagtttaaaaacct

SEQ ID NO: 132270 - DNA, 25 bp, Homo sapien
tatgacacagaagggtctagagatt

SEQ ID NO: 132271 - DNA, 25 bp, Homo sapien
ttcttgaggtcaaagcactagtcct

SEQ ID NO: 132272 - DNA, 25 bp, Homo sapien
cagttaacactataatgattttctg

SEQ ID NO: 132273 - DNA, 25 bp, Homo sapien
acagttaacactataatgattttct

SEQ ID NO: 132274 - DNA, 25 bp, Homo sapien
agttaacactataatgattttctga

SEQ ID NO: 132275 - DNA, 25 bp, Homo sapien
agtcgcagccttgttctacacttaa

SEQ ID NO: 132276 - DNA, 25 bp, Homo sapien
caccaaagtcgcagccttgttctac

SEQ ID NO: 132277 - DNA, 25 bp, Homo sapien
atgcacaccaaagtcgcagccttgt

SEQ ID NO: 132278 - DNA, 25 bp, Homo sapien
gttctacacttaatatcactggttt

SEQ ID NO: 132279 - DNA, 25 bp, Homo sapien
gcacaacgcctagtggacctatttg

SEQ ID NO: 132280 - DNA, 25 bp, Homo sapien
ctagtgcttgaagtggatgctgttt

SEQ ID NO: 132281 - DNA, 25 bp, Homo sapien
cctatttggatttcggaggcaacac

SEQ ID NO: 132282 - DNA, 25 bp, Homo sapien
cagcagatccactagtgcttgaagt

SEQ ID NO: 132283 - DNA, 25 bp, Homo sapien
gaaagggtactatgaacctggccag

SEQ ID NO: 132284 - DNA, 25 bp, Homo sapien
caatccgcctgtcttcaagtgagtc

SEQ ID NO: 132285 - DNA, 25 bp, Homo sapien
tacacaaatacagagcagcctggga

SEQ ID NO: 132286 - DNA, 25 bp, Homo sapien
gcacaatttgcagtgtgggcaacac

SEQ ID NO: 132287 - DNA, 25 bp, Homo sapien
gtcaacattcacttgaacgacaaag

SEQ ID NO: 132288 - DNA, 25 bp, Homo sapien
tgaacgacaaagaatccaacggtgc

SEQ ID NO: 132289 - DNA, 25 bp, Homo sapien
cgacaaagaatccaacggtgcattt

SEQ ID NO: 132290 - DNA, 25 bp, Homo sapien
tcacttgaacgacaaagaatccaac

SEQ ID NO: 132291 - DNA, 25 bp, Homo sapien
agttatgtttggcaggttggtcctg

SEQ ID NO: 132292 - DNA, 25 bp, Homo sapien
catgcccagtcaagatttgaatcca

SEQ ID NO: 132293 - DNA, 25 bp, Homo sapien
taaacctctaggcatgacattgtct

SEQ ID NO: 132294 - DNA, 25 bp, Homo sapien
cagtctggtgccagaggtatgcact

SEQ ID NO: 132295 - DNA, 25 bp, Homo sapien
tgcaactgattataggagaagtccc

SEQ ID NO: 132296 - DNA, 25 bp, Homo sapien
gttactctacgaaagtcattgacag

SEQ ID NO: 132297 - DNA, 25 bp, Homo sapien
aacagtatctatctccatttgggta

SEQ ID NO: 132298 - DNA, 25 bp, Homo sapien
ctgtctgccttagagggtctagaac

SEQ ID NO: 132299 - DNA, 25 bp, Homo sapien
cataaagcttttgacctctaggagg

SEQ ID NO: 132300 - DNA, 25 bp, Homo sapien
tgacaggacaaacacataacaggta

SEQ ID NO: 132301 - DNA, 25 bp, Homo sapien
tactgcacttcacagcatgtagagt

SEQ ID NO: 132302 - DNA, 25 bp, Homo sapien
gaaaacagtgttgccctctcacatc

SEQ ID NO: 132303 - DNA, 25 bp, Homo sapien
ttcttttgcaaacgtgtccgtatca

SEQ ID NO: 132304 - DNA, 25 bp, Homo sapien
cgtgtccgtatcaggatctactata

SEQ ID NO: 132305 - DNA, 25 bp, Homo sapien
gcaagctattgctgctaactttgct

SEQ ID NO: 132306 - DNA, 25 bp, Homo sapien
tacagcaagctattgctgctaactt

SEQ ID NO: 132307 - DNA, 25 bp, Homo sapien
tacaaacacaagaggccctgaactg

SEQ ID NO: 132308 - DNA, 25 bp, Homo sapien
tgggcatccatgcacttcgcaggag

SEQ ID NO: 132309 - DNA, 25 bp, Homo sapien
aggtggtccctgaagagtgctctca

SEQ ID NO: 132310 - DNA, 25 bp, Homo sapien
catgagagtctagacggaggctgcc

SEQ ID NO: 132311 - DNA, 25 bp, Homo sapien
tcttggcccgaaatgcaagcagtca

SEQ ID NO: 132312 - DNA, 25 bp, Homo sapien
caatccaaggcaattccaaggtggt

SEQ ID NO: 132313 - DNA, 25 bp, Homo sapien
caacagtcacatatactctgaggga

SEQ ID NO: 132314 - DNA, 25 bp, Homo sapien
ggagctctgatctcaagatgtagga

SEQ ID NO: 132315 - DNA, 25 bp, Homo sapien
tccacacactttgactgagagagat

SEQ ID NO: 132316 - DNA, 25 bp, Homo sapien
tggtccccggcacagatttaatgag

SEQ ID NO: 132317 - DNA, 25 bp, Homo sapien
gctacttataccacactgacttggg

SEQ ID NO: 132318 - DNA, 25 bp, Homo sapien
ggtaatcgctaaacccagcacttga

SEQ ID NO: 132319 - DNA, 25 bp, Homo sapien
ttgaagaagcctcaaagcactggga

SEQ ID NO: 132320 - DNA, 25 bp, Homo sapien
gcagctgtgaacaaggagccatcct

SEQ ID NO: 132321 - DNA, 25 bp, Homo sapien
tgtacatgtcactaacaaggtctgc

SEQ ID NO: 132322 - DNA, 25 bp, Homo sapien
gaaagtgaatatagcagatgtgccc

SEQ ID NO: 132323 - DNA, 25 bp, Homo sapien
cctgatttaggcagtctccagagga

SEQ ID NO: 132324 - DNA, 25 bp, Homo sapien
gactgggtcccaagttacaagcaca

SEQ ID NO: 132325 - DNA, 25 bp, Homo sapien
gtactttatgcgtggcctgagacaa

SEQ ID NO: 132326 - DNA, 25 bp, Homo sapien
cagagtctaaaacagagcgatgtgc

SEQ ID NO: 132327 - DNA, 25 bp, Homo sapien
gcccagagagacaattgatgatcag

SEQ ID NO: 132328 - DNA, 25 bp, Homo sapien
gccgcccagagagacaattgatgat

SEQ ID NO: 132329 - DNA, 25 bp, Homo sapien
tggccgcccagagagacaattgatg

SEQ ID NO: 132330 - DNA, 25 bp, Homo sapien
gtggccgcccagagagacaattgat

SEQ ID NO: 132331 - DNA, 25 bp, Homo sapien
ctttttatcaagtactgttgccctg

SEQ ID NO: 132332 - DNA, 25 bp, Homo sapien
tcaagtactgttgccctggactgct

SEQ ID NO: 132333 - DNA, 25 bp, Homo sapien
tttatcaagtactgttgccctggac

SEQ ID NO: 132334 - DNA, 25 bp, Homo sapien
agtactgttgccctggactgctatt

SEQ ID NO: 132335 - DNA, 25 bp, Homo sapien
gacaacgtccacaccaataaggtat

SEQ ID NO: 132336 - DNA, 25 bp, Homo sapien
ttgtgccatggctaccgaaatttag

SEQ ID NO: 132337 - DNA, 25 bp, Homo sapien
tggctaccgaaatttagacaacgtc

SEQ ID NO: 132338 - DNA, 25 bp, Homo sapien
taccgaaatttagacaacgtccaca

SEQ ID NO: 132339 - DNA, 25 bp, Homo sapien
taatccgtgcattttgcgaggccca

SEQ ID NO: 132340 - DNA, 25 bp, Homo sapien
attgttaagttacgtgaagctgccg

SEQ ID NO: 132341 - DNA, 25 bp, Homo sapien
gatggcaaggcaacagacagaagaa

SEQ ID NO: 132342 - DNA, 25 bp, Homo sapien
gagatcttagcacagaattccttag

SEQ ID NO: 132343 - DNA, 25 bp, Homo sapien
tagggctgtgaataggtaactgaaa

SEQ ID NO: 132344 - DNA, 25 bp, Homo sapien
tgagagctgtgcaagaaaaccaacc

SEQ ID NO: 132345 - DNA, 25 bp, Homo sapien
gagatcatgttgtaacttggtaaga

SEQ ID NO: 132346 - DNA, 25 bp, Homo sapien
taatagaatcagcagcccaaggata

SEQ ID NO: 132347 - DNA, 25 bp, Homo sapien
tggagtgtgcactgactgtcctcca

SEQ ID NO: 132348 - DNA, 25 bp, Homo sapien
gcaggaaggactgtagagagcatcc

SEQ ID NO: 132349 - DNA, 25 bp, Homo sapien
ccacatggctttataaaggtcacag

SEQ ID NO: 132350 - DNA, 25 bp, Homo sapien
caggaaaaacaatgcggctctctgc

SEQ ID NO: 132351 - DNA, 25 bp, Homo sapien
tcagaggaactagctgctgacagca

SEQ ID NO: 132352 - DNA, 25 bp, Homo sapien
tggatggcatcgtcccactggatga

SEQ ID NO: 132353 - DNA, 25 bp, Homo sapien
cagtctcacaacagaggcaggatca

SEQ ID NO: 132354 - DNA, 25 bp, Homo sapien
tcagataatgtcttgcacagaggca

SEQ ID NO: 132355 - DNA, 25 bp, Homo sapien
aaaattctgttctaacaagagtcag

SEQ ID NO: 132356 - DNA, 25 bp, Homo sapien
cttttcactgtatatttgagtactt

SEQ ID NO: 132357 - DNA, 25 bp, Homo sapien
gcccagccagcatgaataagttctg

SEQ ID NO: 132358 - DNA, 25 bp, Homo sapien
gattaatgcgttacagcttggcttt

SEQ ID NO: 132359 - DNA, 25 bp, Homo sapien
agcagttgggactactgtcgtgtgc

SEQ ID NO: 132360 - DNA, 25 bp, Homo sapien
atactaaataccacatttactttct

SEQ ID NO: 132361 - DNA, 25 bp, Homo sapien
tgttgattcaaagttgataactaca

SEQ ID NO: 132362 - DNA, 25 bp, Homo sapien
cgtgtgccacctgcgctcagctggt

SEQ ID NO: 132363 - DNA, 25 bp, Homo sapien
tatttaactggaaactgctacacga

SEQ ID NO: 132364 - DNA, 25 bp, Homo sapien
ttgagtaacactggcatagggcttg

SEQ ID NO: 132365 - DNA, 25 bp, Homo sapien
gaatccctcagtaaagccattcaag

SEQ ID NO: 132366 - DNA, 25 bp, Homo sapien
aaattcatgcccctctctctggtga

SEQ ID NO: 132367 - DNA, 25 bp, Homo sapien
aatgttctattcattggacactggg

SEQ ID NO: 132368 - DNA, 25 bp, Homo sapien
tggaccttcacaactttcagttgag

SEQ ID NO: 132369 - DNA, 25 bp, Homo sapien
cactcagtggaccttcacaactttc

SEQ ID NO: 132370 - DNA, 25 bp, Homo sapien
tactggagtagtctttgtgttgttc

SEQ ID NO: 132371 - DNA, 25 bp, Homo sapien
accattggcaggtaagccagaaaat

SEQ ID NO: 132372 - DNA, 25 bp, Homo sapien
cactctttctcttgaggtcccaaac

SEQ ID NO: 132373 - DNA, 25 bp, Homo sapien
catagttgttgaaagcaggagggat

SEQ ID NO: 132374 - DNA, 25 bp, Homo sapien
tgtgcagctgtagacatccactctt

SEQ ID NO: 132375 - DNA, 25 bp, Homo sapien
aatatgttgaactaagaaaaattct

SEQ ID NO: 132376 - DNA, 25 bp, Homo sapien
gacatgtcgctagagataatggata

SEQ ID NO: 132377 - DNA, 25 bp, Homo sapien
ctttgacagaacacaagcacaagaa

SEQ ID NO: 132378 - DNA, 25 bp, Homo sapien
tggaataccagtaaccactgttaac

SEQ ID NO: 132379 - DNA, 25 bp, Homo sapien
ttctaacaccagaactgctgccaag

SEQ ID NO: 132380 - DNA, 25 bp, Homo sapien
gaactgctgccaagaaaaagtgagg

SEQ ID NO: 132381 - DNA, 25 bp, Homo sapien
aactgctgccaagaaaaagtgagga

SEQ ID NO: 132382 - DNA, 25 bp, Homo sapien
cttctaacaccagaactgctgccaa

SEQ ID NO: 132383 - DNA, 25 bp, Homo sapien
tcatggttccgaaaatagaggccct

SEQ ID NO: 132384 - DNA, 25 bp, Homo sapien
tattctttttacagcatcccttggg

SEQ ID NO: 132385 - DNA, 25 bp, Homo sapien
aatcctcaaggagatagcctctctg

SEQ ID NO: 132386 - DNA, 25 bp, Homo sapien
tgaatgcaccgggttctcgtgagac

SEQ ID NO: 132387 - DNA, 25 bp, Homo sapien
tagaatcgactatttaaaatcccag

SEQ ID NO: 132388 - DNA, 25 bp, Homo sapien
tagtgggtttgaccttctcacccca

SEQ ID NO: 132389 - DNA, 25 bp, Homo sapien
taaactaatccacaatagaatcgac

SEQ ID NO: 132390 - DNA, 25 bp, Homo sapien
taatacagcattaaagggagagaca

SEQ ID NO: 132391 - DNA, 25 bp, Homo sapien
caagggatctaagacagcaggactc

SEQ ID NO: 132392 - DNA, 25 bp, Homo sapien
gactgtaccgttatctctgagcata

SEQ ID NO: 132393 - DNA, 25 bp, Homo sapien
gactctgtcacccatttcgtttcct

SEQ ID NO: 132394 - DNA, 25 bp, Homo sapien
aaatacagactgcatatggttcctc

SEQ ID NO: 132395 - DNA, 25 bp, Homo sapien
tgttagcatccttccaggtgacggg

SEQ ID NO: 132396 - DNA, 25 bp, Homo sapien
ggtgacgggcatggaaacaaacttc

SEQ ID NO: 132397 - DNA, 25 bp, Homo sapien
aaatcacggctctgacaccggagga

SEQ ID NO: 132398 - DNA, 25 bp, Homo sapien
gataattaagcatctccctagtcgg

SEQ ID NO: 132399 - DNA, 25 bp, Homo sapien
tctttgcttcactttaacagagggc

SEQ ID NO: 132400 - DNA, 25 bp, Homo sapien
tactactgagattctgtggttgcca

SEQ ID NO: 132401 - DNA, 25 bp, Homo sapien
tgcagcaaggaccatcatatctgtg

SEQ ID NO: 132402 - DNA, 25 bp, Homo sapien
tgtgcacttcccttttggagaatgg

SEQ ID NO: 132403 - DNA, 25 bp, Homo sapien
tggaggacaggctatcaaggcaact

SEQ ID NO: 132404 - DNA, 25 bp, Homo sapien
taagctgccattttgggaccggaag

SEQ ID NO: 132405 - DNA, 25 bp, Homo sapien
ggaagcgccgcatgtagaaatcatc

SEQ ID NO: 132406 - DNA, 25 bp, Homo sapien
gatatcactgttgcttcgctggcgt

SEQ ID NO: 132407 - DNA, 25 bp, Homo sapien
ctgtgctgcccattggggagctaaa

SEQ ID NO: 132408 - DNA, 25 bp, Homo sapien
ggtcctctgtgctgcccattgggga

SEQ ID NO: 132409 - DNA, 25 bp, Homo sapien
tgtgctgcccattggggagctaaaa

SEQ ID NO: 132410 - DNA, 25 bp, Homo sapien
tgctgcccattggggagctaaaact

SEQ ID NO: 132411 - DNA, 25 bp, Homo sapien
tctcattccgaaaatatggacagct

SEQ ID NO: 132412 - DNA, 25 bp, Homo sapien
tagtatgcacccagatctacgtgtt

SEQ ID NO: 132413 - DNA, 25 bp, Homo sapien
gggtagactcaaaggaggcactttc

SEQ ID NO: 132414 - DNA, 25 bp, Homo sapien
tgcaatgggaactaagggtagactc

SEQ ID NO: 132415 - DNA, 25 bp, Homo sapien
ttaggctggctgtgaattaatgcag

SEQ ID NO: 132416 - DNA, 25 bp, Homo sapien
tgaattaatgcagcatagaaatcat

SEQ ID NO: 132417 - DNA, 25 bp, Homo sapien
cttcaaagcatgcttaggctggctg

SEQ ID NO: 132418 - DNA, 25 bp, Homo sapien
agcatgcttaggctggctgtgaatt

SEQ ID NO: 132419 - DNA, 25 bp, Homo sapien
cacagacctgtctgtaatgtcattt

SEQ ID NO: 132420 - DNA, 25 bp, Homo sapien
cacacagacctgtctgtaatgtcat

SEQ ID NO: 132421 - DNA, 25 bp, Homo sapien
acacagacctgtctgtaatgtcatt

SEQ ID NO: 132422 - DNA, 25 bp, Homo sapien
acagacctgtctgtaatgtcatttc

SEQ ID NO: 132423 - DNA, 25 bp, Homo sapien
ggaagtctctaacaggtagccagaa

SEQ ID NO: 132424 - DNA, 25 bp, Homo sapien
ggcagaagtcactaccgctaacaag

SEQ ID NO: 132425 - DNA, 25 bp, Homo sapien
ccagaaattcagttaaggcagaagt

SEQ ID NO: 132426 - DNA, 25 bp, Homo sapien
tacctccttaccagggatattgcag

SEQ ID NO: 132427 - DNA, 25 bp, Homo sapien
aatgatataatgcagcaaagcaaag

SEQ ID NO: 132428 - DNA, 25 bp, Homo sapien
agcaatcaccatattagaatgatat

SEQ ID NO: 132429 - DNA, 25 bp, Homo sapien
taaagaagccatttcagatgcaaac

SEQ ID NO: 132430 - DNA, 25 bp, Homo sapien
gaaacttcttgaaatagctgtccaa

SEQ ID NO: 132431 - DNA, 25 bp, Homo sapien
tccttacgacctgtcagaactaaag

SEQ ID NO: 132432 - DNA, 25 bp, Homo sapien
gactcaggtaccttgatgaccctct

SEQ ID NO: 132433 - DNA, 25 bp, Homo sapien
acagatcaacagtagatgcatcaga

SEQ ID NO: 132434 - DNA, 25 bp, Homo sapien
cctcagaggatattgtaccgctgca

SEQ ID NO: 132435 - DNA, 25 bp, Homo sapien
cagtagatgcatcagagtgtgagtc

SEQ ID NO: 132436 - DNA, 25 bp, Homo sapien
tattgtaccgctgcagcacagatca

SEQ ID NO: 132437 - DNA, 25 bp, Homo sapien
cttccttgcctaagagaaggcttgt

SEQ ID NO: 132438 - DNA, 25 bp, Homo sapien
gctacatttgtgcacacttccttgc

SEQ ID NO: 132439 - DNA, 25 bp, Homo sapien
acacttccttgcctaagagaaggct

SEQ ID NO: 132440 - DNA, 25 bp, Homo sapien
ggctacatttgtgcacacttccttg

SEQ ID NO: 132441 - DNA, 25 bp, Homo sapien
tgttacattctgctcagtatttaag

SEQ ID NO: 132442 - DNA, 25 bp, Homo sapien
ttacattctgctcagtatttaaggt

SEQ ID NO: 132443 - DNA, 25 bp, Homo sapien
gttacattctgctcagtatttaagg

SEQ ID NO: 132444 - DNA, 25 bp, Homo sapien
ttttcccttcgaatgctcacagcca

SEQ ID NO: 132445 - DNA, 25 bp, Homo sapien
ttattcggtagttgtacggagatcc

SEQ ID NO: 132446 - DNA, 25 bp, Homo sapien
ctggaccaagattctcatcagcccc

SEQ ID NO: 132447 - DNA, 25 bp, Homo sapien
tcatctggtttttcccttcgaatgc

SEQ ID NO: 132448 - DNA, 25 bp, Homo sapien
caatgggtcccaaagatagtggaag

SEQ ID NO: 132449 - DNA, 25 bp, Homo sapien
tcttgggcgaagacatgagctcagc

SEQ ID NO: 132450 - DNA, 25 bp, Homo sapien
tcaagttggcttggcgctttccagt

SEQ ID NO: 132451 - DNA, 25 bp, Homo sapien
tttccagtagccctaagcaggatac

SEQ ID NO: 132452 - DNA, 25 bp, Homo sapien
acaggtgctgtggtgaggcttctgg

SEQ ID NO: 132453 - DNA, 25 bp, Homo sapien
caagagagacaggtgctgtggtgag

SEQ ID NO: 132454 - DNA, 25 bp, Homo sapien
agacaggtgctgtggtgaggcttct

SEQ ID NO: 132455 - DNA, 25 bp, Homo sapien
ggtgctgtggtgaggcttctgggat

SEQ ID NO: 132456 - DNA, 25 bp, Homo sapien
tgaccttgggtgtgttgaaggccaa

SEQ ID NO: 132457 - DNA, 25 bp, Homo sapien
tcgagtgcttggctgtcgacggaat

SEQ ID NO: 132458 - DNA, 25 bp, Homo sapien
tgtcgacggaatggcgtcctccagg

SEQ ID NO: 132459 - DNA, 25 bp, Homo sapien
tggacattgagctcaggaaccacgt

SEQ ID NO: 132460 - DNA, 25 bp, Homo sapien
tggcttgtacctccatgctctttgt

SEQ ID NO: 132461 - DNA, 25 bp, Homo sapien
ttgtacctccatgctctttgtttgc

SEQ ID NO: 132462 - DNA, 25 bp, Homo sapien
ctccatgctctttgtttgcaattct

SEQ ID NO: 132463 - DNA, 25 bp, Homo sapien
gacttgtccccactggcttgtacct

SEQ ID NO: 132464 - DNA, 25 bp, Homo sapien
tgtgcttctgtccttccgagtctcg

SEQ ID NO: 132465 - DNA, 25 bp, Homo sapien
cactcctgctcagcgggattccttg

SEQ ID NO: 132466 - DNA, 25 bp, Homo sapien
tgctgcctcatgaacgcactgtgtg

SEQ ID NO: 132467 - DNA, 25 bp, Homo sapien
tattgttctgagtatggaccaccca

SEQ ID NO: 132468 - DNA, 25 bp, Homo sapien
tatacctaggattgctgtcttcttg

SEQ ID NO: 132469 - DNA, 25 bp, Homo sapien
aatcaccaactataattgtgtattt

SEQ ID NO: 132470 - DNA, 25 bp, Homo sapien
tttacagctctgtttgatgcacata

SEQ ID NO: 132471 - DNA, 25 bp, Homo sapien
tgtgaagttctatgtctttgctgat

SEQ ID NO: 132472 - DNA, 25 bp, Homo sapien
agcatttcatactgtcaatttcccc

SEQ ID NO: 132473 - DNA, 25 bp, Homo sapien
taaggttatgagcttagattactgg

SEQ ID NO: 132474 - DNA, 25 bp, Homo sapien
tcagcctgctttaattgcatcccac

SEQ ID NO: 132475 - DNA, 25 bp, Homo sapien
ttgtcttttctaacgcagcatttca

SEQ ID NO: 132476 - DNA, 25 bp, Homo sapien
cacacagtcttgactactggagcta

SEQ ID NO: 132477 - DNA, 25 bp, Homo sapien
tatgttaacgctctcaatttgtgaa

SEQ ID NO: 132478 - DNA, 25 bp, Homo sapien
gtctatctttccagcaatgccacac

SEQ ID NO: 132479 - DNA, 25 bp, Homo sapien
tattctgttccaccgatccacatgt

SEQ ID NO: 132480 - DNA, 25 bp, Homo sapien
aaagctggtgcaatcttagggttca

SEQ ID NO: 132481 - DNA, 25 bp, Homo sapien
tagtctaaggataattctgccccac

SEQ ID NO: 132482 - DNA, 25 bp, Homo sapien
gaaactattcgcaccagaggtagac

SEQ ID NO: 132483 - DNA, 25 bp, Homo sapien
tctgcgaattctagcctccctggac

SEQ ID NO: 132484 - DNA, 25 bp, Homo sapien
gggtatggtggcatgggcttgcagt

SEQ ID NO: 132485 - DNA, 25 bp, Homo sapien
caaatgactgctgtatgaaattaca

SEQ ID NO: 132486 - DNA, 25 bp, Homo sapien
agccatgattacatgattgtgccac

SEQ ID NO: 132487 - DNA, 25 bp, Homo sapien
tgagccatgattacatgattgtgcc

SEQ ID NO: 132488 - DNA, 25 bp, Homo sapien
ctcatcttccctggtatcatggcca

SEQ ID NO: 132489 - DNA, 25 bp, Homo sapien
ccctggtatcatggccagaaagcgg

SEQ ID NO: 132490 - DNA, 25 bp, Homo sapien
atcttccctggtatcatggccagaa

SEQ ID NO: 132491 - DNA, 25 bp, Homo sapien
ttccctggtatcatggccagaaagc

SEQ ID NO: 132492 - DNA, 25 bp, Homo sapien
ggtaatacgatgcatataaatatag

SEQ ID NO: 132493 - DNA, 25 bp, Homo sapien
tataggcagatccactttgtcccag

SEQ ID NO: 132494 - DNA, 25 bp, Homo sapien
catataaatataggcagatccactt

SEQ ID NO: 132495 - DNA, 25 bp, Homo sapien
agatccactttgtcccagtcaaatg

SEQ ID NO: 132496 - DNA, 25 bp, Homo sapien
atgcctactttctgctggtagttca

SEQ ID NO: 132497 - DNA, 25 bp, Homo sapien
tgcctactttctgctggtagttcag

SEQ ID NO: 132498 - DNA, 25 bp, Homo sapien
gatgcctactttctgctggtagttc

SEQ ID NO: 132499 - DNA, 25 bp, Homo sapien
tcaaatcctttgagccgaactcgct

SEQ ID NO: 132500 - DNA, 25 bp, Homo sapien
cgaactcgctctcccaatagttgaa

SEQ ID NO: 132501 - DNA, 25 bp, Homo sapien
gggccagctgactcattgttgtaca

SEQ ID NO: 132502 - DNA, 25 bp, Homo sapien
caagctgtgctcgatacttctcaaa

SEQ ID NO: 132503 - DNA, 25 bp, Homo sapien
gcagcatggtagaaacatggaacat

SEQ ID NO: 132504 - DNA, 25 bp, Homo sapien
tacagagaatgggttccagtggagt

SEQ ID NO: 132505 - DNA, 25 bp, Homo sapien
aatctttgtatgttgtgtacagaga

SEQ ID NO: 132506 - DNA, 25 bp, Homo sapien
ttgttgttgggtgtgtatggcagca

SEQ ID NO: 132507 - DNA, 25 bp, Homo sapien
gcaacactaaattctggtttaagat

SEQ ID NO: 132508 - DNA, 25 bp, Homo sapien
caggtgcaacactaaattctggttt

SEQ ID NO: 132509 - DNA, 25 bp, Homo sapien
ctgctgtgacaggtgcaacactaaa

SEQ ID NO: 132510 - DNA, 25 bp, Homo sapien
tgtgacaggtgcaacactaaattct

SEQ ID NO: 132511 - DNA, 25 bp, Homo sapien
cacggattgtgcaccctgacgatga

SEQ ID NO: 132512 - DNA, 25 bp, Homo sapien
gtgctccaggctcttggaaaacaat

SEQ ID NO: 132513 - DNA, 25 bp, Homo sapien
ctgacgatgacgaaaacgtgctgga

SEQ ID NO: 132514 - DNA, 25 bp, Homo sapien
catttccaatgtgccgcttcctcag

SEQ ID NO: 132515 - DNA, 25 bp, Homo sapien
caaatggccccagattgctatgctt

SEQ ID NO: 132516 - DNA, 25 bp, Homo sapien
taggcactatccatggtttcgggca

SEQ ID NO: 132517 - DNA, 25 bp, Homo sapien
aatcttctctatcaactgggatcag

SEQ ID NO: 132518 - DNA, 25 bp, Homo sapien
ccccaacagataaggaggaactact

SEQ ID NO: 132519 - DNA, 25 bp, Homo sapien
tgactgaagcacacaatagttcccc

SEQ ID NO: 132520 - DNA, 25 bp, Homo sapien
tgaggttgtattcttccattatgag

SEQ ID NO: 132521 - DNA, 25 bp, Homo sapien
tgtgtttccacagtgaagccctcag

SEQ ID NO: 132522 - DNA, 25 bp, Homo sapien
gcaacttacttgttgaagaaatggg

SEQ ID NO: 132523 - DNA, 25 bp, Homo sapien
catcaaatagtgtgtcaatgttcca

SEQ ID NO: 132524 - DNA, 25 bp, Homo sapien
taagtggatgtcaagcaacttccca

SEQ ID NO: 132525 - DNA, 25 bp, Homo sapien
ctctgagaggagtaacacatatttc

SEQ ID NO: 132526 - DNA, 25 bp, Homo sapien
taccgggtatggaaacctctctgag

SEQ ID NO: 132527 - DNA, 25 bp, Homo sapien
gaacagtggcaaccaacactccatt

SEQ ID NO: 132528 - DNA, 25 bp, Homo sapien
tgtgaactgcctgacttgaacgctg

SEQ ID NO: 132529 - DNA, 25 bp, Homo sapien
taagtggaatcctgtaagaatccag

SEQ ID NO: 132530 - DNA, 25 bp, Homo sapien
gctacatgctcagaagatgccatgg

SEQ ID NO: 132531 - DNA, 25 bp, Homo sapien
cactttcgccaaaaggaagtccctg

SEQ ID NO: 132532 - DNA, 25 bp, Homo sapien
ggaagtccctgaacacatttgactt

SEQ ID NO: 132533 - DNA, 25 bp, Homo sapien
cacatttgacttagggaaagtgacc

SEQ ID NO: 132534 - DNA, 25 bp, Homo sapien
ttctgcattaatcactttcgccaaa

SEQ ID NO: 132535 - DNA, 25 bp, Homo sapien
gagagatgaacggaaacttgccaga

SEQ ID NO: 132536 - DNA, 25 bp, Homo sapien
tattcctggcgggtccgagttgcca

SEQ ID NO: 132537 - DNA, 25 bp, Homo sapien
cattggagatccctaaaaggcagtc

SEQ ID NO: 132538 - DNA, 25 bp, Homo sapien
gccttgttgtagtcttcagcccgga

SEQ ID NO: 132539 - DNA, 25 bp, Homo sapien
tgttctcaggaggtcgatcatctgc

SEQ ID NO: 132540 - DNA, 25 bp, Homo sapien
tgcctgccaggcataaccgtagggc

SEQ ID NO: 132541 - DNA, 25 bp, Homo sapien
ccctcatagttgacatggaagccaa

SEQ ID NO: 132542 - DNA, 25 bp, Homo sapien
tgtcctagcccatttcttcgcagag

SEQ ID NO: 132543 - DNA, 25 bp, Homo sapien
cccacagctgtctcctcagacctac

SEQ ID NO: 132544 - DNA, 25 bp, Homo sapien
gggagcttcgtcctgagtcagactc

SEQ ID NO: 132545 - DNA, 25 bp, Homo sapien
tgtcaccacacactgaaagggagct

SEQ ID NO: 132546 - DNA, 25 bp, Homo sapien
cagcatcacatgtaacctattgttc

SEQ ID NO: 132547 - DNA, 25 bp, Homo sapien
tactccactacctgctaagagatgt

SEQ ID NO: 132548 - DNA, 25 bp, Homo sapien
ggaaaattcttaagatagatattac

SEQ ID NO: 132549 - DNA, 25 bp, Homo sapien
gaagagaataagagcatcatggaac

SEQ ID NO: 132550 - DNA, 25 bp, Homo sapien
tggaaaagactaggaaccaaaatgc

SEQ ID NO: 132551 - DNA, 25 bp, Homo sapien
caaaccctagcacatgcagatacag

SEQ ID NO: 132552 - DNA, 25 bp, Homo sapien
tgcagatacagttaggaaagcagct

SEQ ID NO: 132553 - DNA, 25 bp, Homo sapien
gctatttccaatttcgatgtctgta

SEQ ID NO: 132554 - DNA, 25 bp, Homo sapien
ccaggatcaggcctcttatccatct

SEQ ID NO: 132555 - DNA, 25 bp, Homo sapien
tgtactgttgtctcatcccacccac

SEQ ID NO: 132556 - DNA, 25 bp, Homo sapien
ttatccatctttctagtaacagcta

SEQ ID NO: 132557 - DNA, 25 bp, Homo sapien
agaaggagcaatggcgtctgctgcc

SEQ ID NO: 132558 - DNA, 25 bp, Homo sapien
gttggaaagtgccacttttggagca

SEQ ID NO: 132559 - DNA, 25 bp, Homo sapien
tggagcatgtgctcagaaggagcaa

SEQ ID NO: 132560 - DNA, 25 bp, Homo sapien
cacttttggagcatgtgctcagaag

SEQ ID NO: 132561 - DNA, 25 bp, Homo sapien
caaaagggtatacaagcagcttcac

SEQ ID NO: 132562 - DNA, 25 bp, Homo sapien
tccaaaagggtatacaagcagcttc

SEQ ID NO: 132563 - DNA, 25 bp, Homo sapien
cgccaatgcatacagtgactgagct

SEQ ID NO: 132564 - DNA, 25 bp, Homo sapien
acacacccgccaatgcatacagtga

SEQ ID NO: 132565 - DNA, 25 bp, Homo sapien
tccaaaagggtgaacgagcagcttc

SEQ ID NO: 132566 - DNA, 25 bp, Homo sapien
gtgtatgagcagcttcacaacccgc

SEQ ID NO: 132567 - DNA, 25 bp, Homo sapien
actgcacatcgtgactgggctccaa

SEQ ID NO: 132568 - DNA, 25 bp, Homo sapien
tctgaaagggtgtatgagcagcttc

SEQ ID NO: 132569 - DNA, 25 bp, Homo sapien
caatcccaactttttgagtgcgaga

SEQ ID NO: 132570 - DNA, 25 bp, Homo sapien
ccagactactgagacctgaggagga

SEQ ID NO: 132571 - DNA, 25 bp, Homo sapien
tctcaatggaagcaagcggcttcac

SEQ ID NO: 132572 - DNA, 25 bp, Homo sapien
ggagaaacacaatggatactgcttt

SEQ ID NO: 132573 - DNA, 25 bp, Homo sapien
catgcggtaggtttcagagcaactc

SEQ ID NO: 132574 - DNA, 25 bp, Homo sapien
gaaacttgaattcgtatgaaacacc

SEQ ID NO: 132575 - DNA, 25 bp, Homo sapien
cactggagatgcttcgagggatgtt

SEQ ID NO: 132576 - DNA, 25 bp, Homo sapien
ttttccagcattcagccgcgaggtc

SEQ ID NO: 132577 - DNA, 25 bp, Homo sapien
taagggttttcacaacaacattctg

SEQ ID NO: 132578 - DNA, 25 bp, Homo sapien
ttggcttccacatggaccctccctt

SEQ ID NO: 132579 - DNA, 25 bp, Homo sapien
cagacttctccccaggtctaagggt

SEQ ID NO: 132580 - DNA, 25 bp, Homo sapien
gggttttcacaacaacattctgaga

SEQ ID NO: 132581 - DNA, 25 bp, Homo sapien
tagattagaatctcctcaaatccca

SEQ ID NO: 132582 - DNA, 25 bp, Homo sapien
aacatcatagctttgaattcataga

SEQ ID NO: 132583 - DNA, 25 bp, Homo sapien
attcatagattagaatctcctcaaa

SEQ ID NO: 132584 - DNA, 25 bp, Homo sapien
catcatagctttgaattcatagatt

SEQ ID NO: 132585 - DNA, 25 bp, Homo sapien
tcagtccaagtgtcccgacaggtct

SEQ ID NO: 132586 - DNA, 25 bp, Homo sapien
aagtgtcccgacaggtctctcaact

SEQ ID NO: 132587 - DNA, 25 bp, Homo sapien
gggtcagtccaagtgtcccgacagg

SEQ ID NO: 132588 - DNA, 25 bp, Homo sapien
tccaagtgtcccgacaggtctctca

SEQ ID NO: 132589 - DNA, 25 bp, Homo sapien
gcaagtcatgtgtctagtcaagcta

SEQ ID NO: 132590 - DNA, 25 bp, Homo sapien
gcagatctgacttgagagcccaggt

SEQ ID NO: 132591 - DNA, 25 bp, Homo sapien
caaagttttgacgtcttgagacaga

SEQ ID NO: 132592 - DNA, 25 bp, Homo sapien
ccaaattaatccatgcccaagaggc

SEQ ID NO: 132593 - DNA, 25 bp, Homo sapien
cgacactgggatcttgctaaagcca

SEQ ID NO: 132594 - DNA, 25 bp, Homo sapien
gatgagaccgtcacatagatgtccg

SEQ ID NO: 132595 - DNA, 25 bp, Homo sapien
cagaaccagtatcactggatgaaga

SEQ ID NO: 132596 - DNA, 25 bp, Homo sapien
aagacaagttgctaggagagttccg

SEQ ID NO: 132597 - DNA, 25 bp, Homo sapien
tatgccagagtataagggataccca

SEQ ID NO: 132598 - DNA, 25 bp, Homo sapien
gatacccagtcctgaagagctaaga

SEQ ID NO: 132599 - DNA, 25 bp, Homo sapien
tgatcaaggactctgcctcatgagg

SEQ ID NO: 132600 - DNA, 25 bp, Homo sapien
tagcctatcaagtatatgggaccac

SEQ ID NO: 132601 - DNA, 25 bp, Homo sapien
ctatcatttagatcatgtagaaacc

SEQ ID NO: 132602 - DNA, 25 bp, Homo sapien
caaatggtatactgtggaggtttgt

SEQ ID NO: 132603 - DNA, 25 bp, Homo sapien
gttcagacttactcacagccaaaag

SEQ ID NO: 132604 - DNA, 25 bp, Homo sapien
taagccctcgtacagccaagttcag

SEQ ID NO: 132605 - DNA, 25 bp, Homo sapien
acttctttgccagctaggcgtggat

SEQ ID NO: 132606 - DNA, 25 bp, Homo sapien
ggcgtggattttccgctgccaccaa

SEQ ID NO: 132607 - DNA, 25 bp, Homo sapien
caatatctgactgggtgttctgcct

SEQ ID NO: 132608 - DNA, 25 bp, Homo sapien
tgttctgcctgtcaatggaggctgg

SEQ ID NO: 132609 - DNA, 25 bp, Homo sapien
ctgtatattcatgctgctcgaggac

SEQ ID NO: 132610 - DNA, 25 bp, Homo sapien
gaaatcctgaggtcctctataactg

SEQ ID NO: 132611 - DNA, 25 bp, Homo sapien
aaagaattgaaatcctgaggtcctc

SEQ ID NO: 132612 - DNA, 25 bp, Homo sapien
tgctgctcgaggacaaaagaattga

SEQ ID NO: 132613 - DNA, 25 bp, Homo sapien
catggatgcaatcacgtgttactta

SEQ ID NO: 132614 - DNA, 25 bp, Homo sapien
cattcattgccaagtgtggctaacc

SEQ ID NO: 132615 - DNA, 25 bp, Homo sapien
ggctaacctagcttggtctacatta

SEQ ID NO: 132616 - DNA, 25 bp, Homo sapien
cattacctagacaggcatggatgca

SEQ ID NO: 132617 - DNA, 25 bp, Homo sapien
taggacattatggtgcaggcactaa

SEQ ID NO: 132618 - DNA, 25 bp, Homo sapien
ttcagttcactgaccagcaaactct

SEQ ID NO: 132619 - DNA, 25 bp, Homo sapien
gatggcttgccattgcatctttcag

SEQ ID NO: 132620 - DNA, 25 bp, Homo sapien
taagcagaaacaagcacatggtgac

SEQ ID NO: 132621 - DNA, 25 bp, Homo sapien
tgtttggagacaaatgaaccactgg

SEQ ID NO: 132622 - DNA, 25 bp, Homo sapien
ggctctctcggaaagctggcagtac

SEQ ID NO: 132623 - DNA, 25 bp, Homo sapien
tggatcctgccgcattaatctccca

SEQ ID NO: 132624 - DNA, 25 bp, Homo sapien
aaagctggcagtacctttgatactg

SEQ ID NO: 132625 - DNA, 25 bp, Homo sapien
tatgggcacttgacgcattgctgga

SEQ ID NO: 132626 - DNA, 25 bp, Homo sapien
gaagactctgttttccggtccaggc

SEQ ID NO: 132627 - DNA, 25 bp, Homo sapien
tgtctccaaagtccgatctgccatg

SEQ ID NO: 132628 - DNA, 25 bp, Homo sapien
gagttcggattctgtgcggtcccca

SEQ ID NO: 132629 - DNA, 25 bp, Homo sapien
gattttggactaactgaggaggtcc

SEQ ID NO: 132630 - DNA, 25 bp, Homo sapien
taagctccaacaccagaaacagcat

SEQ ID NO: 132631 - DNA, 25 bp, Homo sapien
gaggaggtccttgattgccacacaa

SEQ ID NO: 132632 - DNA, 25 bp, Homo sapien
gaaacagcattggtcagcaggtcta

SEQ ID NO: 132633 - DNA, 25 bp, Homo sapien
gggcacagtgagtgctccttcccca

SEQ ID NO: 132634 - DNA, 25 bp, Homo sapien
caaggggcacagtgagtgctccttc

SEQ ID NO: 132635 - DNA, 25 bp, Homo sapien
atccaaggccaaggggcacagtgag

SEQ ID NO: 132636 - DNA, 25 bp, Homo sapien
aggggcacagtgagtgctccttccc

SEQ ID NO: 132637 - DNA, 25 bp, Homo sapien
atgaagctcttctttaggtgaactc

SEQ ID NO: 132638 - DNA, 25 bp, Homo sapien
aggagaaggatggtgcgagctgtga

SEQ ID NO: 132639 - DNA, 25 bp, Homo sapien
tttaggtgaactccgggcactggtg

SEQ ID NO: 132640 - DNA, 25 bp, Homo sapien
tcttctttaggtgaactccgggcac

SEQ ID NO: 132641 - DNA, 25 bp, Homo sapien
gtgtccataaatcccacggagttta

SEQ ID NO: 132642 - DNA, 25 bp, Homo sapien
tttctcgtgtccataaatcccacgg

SEQ ID NO: 132643 - DNA, 25 bp, Homo sapien
caatcaggtacttgctagtagcgcc

SEQ ID NO: 132644 - DNA, 25 bp, Homo sapien
ccatccaatcaggtacttgctagta

SEQ ID NO: 132645 - DNA, 25 bp, Homo sapien
gagatgcccggaggtctctggttga

SEQ ID NO: 132646 - DNA, 25 bp, Homo sapien
ctctggttgaggcacgcagcctggt

SEQ ID NO: 132647 - DNA, 25 bp, Homo sapien
tctgtgattcaggagttgggctttc

SEQ ID NO: 132648 - DNA, 25 bp, Homo sapien
tttcattgccatcgctctgatgacg

SEQ ID NO: 132649 - DNA, 25 bp, Homo sapien
aggcctcctcaacgggagcgacttg

SEQ ID NO: 132650 - DNA, 25 bp, Homo sapien
tcctaaggtgtaagaaggcctcctc

SEQ ID NO: 132651 - DNA, 25 bp, Homo sapien
tgtaaatgctctcgtccgacagtgt

SEQ ID NO: 132652 - DNA, 25 bp, Homo sapien
cgtgctactgaagaggacgtcgttg

SEQ ID NO: 132653 - DNA, 25 bp, Homo sapien
ggcataggctgcctgcgggtctcct

SEQ ID NO: 132654 - DNA, 25 bp, Homo sapien
caggttggaccaatccaagtctgca

SEQ ID NO: 132655 - DNA, 25 bp, Homo sapien
gcatctaccaggttggaccaatcca

SEQ ID NO: 132656 - DNA, 25 bp, Homo sapien
tggcagcatctaccaggttggacca

SEQ ID NO: 132657 - DNA, 25 bp, Homo sapien
aaagcgagcacacggccagcaggct

SEQ ID NO: 132658 - DNA, 25 bp, Homo sapien
gctggcaaggagacaatgcagacag

SEQ ID NO: 132659 - DNA, 25 bp, Homo sapien
ggagacaatgcagacagacaacgcg

SEQ ID NO: 132660 - DNA, 25 bp, Homo sapien
tggcaaggagacaatgcagacagac

SEQ ID NO: 132661 - DNA, 25 bp, Homo sapien
ttacagcaggcaagatcagcaccag

SEQ ID NO: 132662 - DNA, 25 bp, Homo sapien
gcaggcaagatcagcaccagtctga

SEQ ID NO: 132663 - DNA, 25 bp, Homo sapien
cagcaggcaagatcagcaccagtct

SEQ ID NO: 132664 - DNA, 25 bp, Homo sapien
caggcaagatcagcaccagtctgag

SEQ ID NO: 132665 - DNA, 25 bp, Homo sapien
atgcagcactcaaggggcgatggtt

SEQ ID NO: 132666 - DNA, 25 bp, Homo sapien
cactcaaggggcgatggttttcatc

SEQ ID NO: 132667 - DNA, 25 bp, Homo sapien
tcaaggggcgatggttttcatcact

SEQ ID NO: 132668 - DNA, 25 bp, Homo sapien
tagcagcaaaaaatgaggctctctg

SEQ ID NO: 132669 - DNA, 25 bp, Homo sapien
ggtgcagagtactgcccttgcactg

SEQ ID NO: 132670 - DNA, 25 bp, Homo sapien
tggcagatgtgacacaaggtgcaga

SEQ ID NO: 132671 - DNA, 25 bp, Homo sapien
gcttcactcagctactccgtgtggc

SEQ ID NO: 132672 - DNA, 25 bp, Homo sapien
aagtgtctagccctgcagtgatcag

SEQ ID NO: 132673 - DNA, 25 bp, Homo sapien
aatgttccatacctgactgatggga

SEQ ID NO: 132674 - DNA, 25 bp, Homo sapien
actaaatgttccatacctgactgat

SEQ ID NO: 132675 - DNA, 25 bp, Homo sapien
tctgcaacaagaagtgcttactaaa

SEQ ID NO: 132676 - DNA, 25 bp, Homo sapien
acacataaatctagcaacctcacca

SEQ ID NO: 132677 - DNA, 25 bp, Homo sapien
cacaagaggtactttctggcagata

SEQ ID NO: 132678 - DNA, 25 bp, Homo sapien
caattgcagctaaggtatcatgcct

SEQ ID NO: 132679 - DNA, 25 bp, Homo sapien
ggatctctctagtgggctttgacag

SEQ ID NO: 132680 - DNA, 25 bp, Homo sapien
aattactcagtatggcgacccaatg

SEQ ID NO: 132681 - DNA, 25 bp, Homo sapien
cttcttcaaatcttcccgaagcatc

SEQ ID NO: 132682 - DNA, 25 bp, Homo sapien
tccagctggtccactttagaagcca

SEQ ID NO: 132683 - DNA, 25 bp, Homo sapien
aatcttcccgaagcatcttcagcat

SEQ ID NO: 132684 - DNA, 25 bp, Homo sapien
tcttcagcataccttccagctggtc

SEQ ID NO: 132685 - DNA, 25 bp, Homo sapien
gctaagacactctaagctcagggag

SEQ ID NO: 132686 - DNA, 25 bp, Homo sapien
caaccctgcaggattagctctaagt

SEQ ID NO: 132687 - DNA, 25 bp, Homo sapien
gcagggcttctagagagattcaacc

SEQ ID NO: 132688 - DNA, 25 bp, Homo sapien
tctgagtaatagctatggacccgtt

SEQ ID NO: 132689 - DNA, 25 bp, Homo sapien
cgcctgaaggtgagctttgtcttct

SEQ ID NO: 132690 - DNA, 25 bp, Homo sapien
cctgaaggtgagctttgtcttcttt

SEQ ID NO: 132691 - DNA, 25 bp, Homo sapien
tccgcctgaaggtgagctttgtctt

SEQ ID NO: 132692 - DNA, 25 bp, Homo sapien
ctccgcctgaaggtgagctttgtct

SEQ ID NO: 132693 - DNA, 25 bp, Homo sapien
tgtagcctcaggttgtcctctcgca

SEQ ID NO: 132694 - DNA, 25 bp, Homo sapien
tcatgtctatggtgttgaagaccca

SEQ ID NO: 132695 - DNA, 25 bp, Homo sapien
cagcttgtccgaggcgttctgggac

SEQ ID NO: 132696 - DNA, 25 bp, Homo sapien
aggttgtcctctcgcaggtgctgca

SEQ ID NO: 132697 - DNA, 25 bp, Homo sapien
caggtgatgattgttgatctgcaac

SEQ ID NO: 132698 - DNA, 25 bp, Homo sapien
gaataagggctgcaggacactcact

SEQ ID NO: 132699 - DNA, 25 bp, Homo sapien
ttttctacaaaaggcaggtgatgat

SEQ ID NO: 132700 - DNA, 25 bp, Homo sapien
ttgtgttgtgcactccccgaaaggg

SEQ ID NO: 132701 - DNA, 25 bp, Homo sapien
tgagggaacttccaatcagatgccg

SEQ ID NO: 132702 - DNA, 25 bp, Homo sapien
taaatatttaactccggtcctgctg

SEQ ID NO: 132703 - DNA, 25 bp, Homo sapien
tgttcccttagaccagagttgccac

SEQ ID NO: 132704 - DNA, 25 bp, Homo sapien
tcatgcacgagtcattcaagggagg

SEQ ID NO: 132705 - DNA, 25 bp, Homo sapien
gaatcatcattagtgttaacaaagc

SEQ ID NO: 132706 - DNA, 25 bp, Homo sapien
aaaaattcggatgcaaggagggtca

SEQ ID NO: 132707 - DNA, 25 bp, Homo sapien
caatgagttattgggtggtctttca

SEQ ID NO: 132708 - DNA, 25 bp, Homo sapien
caaacctcaagcaataataccaaag

SEQ ID NO: 132709 - DNA, 25 bp, Homo sapien
agtacctttaggtgaccaggcagag

SEQ ID NO: 132710 - DNA, 25 bp, Homo sapien
acccagtctcaaggtgcagaaggca

SEQ ID NO: 132711 - DNA, 25 bp, Homo sapien
tgaagctgacaggtctcccaaggct

SEQ ID NO: 132712 - DNA, 25 bp, Homo sapien
tctgtcaagttgaggatttgggctc

SEQ ID NO: 132713 - DNA, 25 bp, Homo sapien
gtgctgagcgccccaagttcctcgt

SEQ ID NO: 132714 - DNA, 25 bp, Homo sapien
gggtctctgtgctgagcgccccaag

SEQ ID NO: 132715 - DNA, 25 bp, Homo sapien
cacaggaaaaggtatgggggtctct

SEQ ID NO: 132716 - DNA, 25 bp, Homo sapien
tctctgtgctgagcgccccaagttc

SEQ ID NO: 132717 - DNA, 25 bp, Homo sapien
cattgggattcttttgccattaaca

SEQ ID NO: 132718 - DNA, 25 bp, Homo sapien
tgggaacttgcatgtcgcctcttcc

SEQ ID NO: 132719 - DNA, 25 bp, Homo sapien
ttcccctcggccctcagaacgctta

SEQ ID NO: 132720 - DNA, 25 bp, Homo sapien
tcttcctctccgtgggaacttgcat

SEQ ID NO: 132721 - DNA, 25 bp, Homo sapien
ctggcctcgcatcagatcgcctgag

SEQ ID NO: 132722 - DNA, 25 bp, Homo sapien
acagcactgccgcttctgccatctg

SEQ ID NO: 132723 - DNA, 25 bp, Homo sapien
ttctgcggactgtccctgccggagg

SEQ ID NO: 132724 - DNA, 25 bp, Homo sapien
gcctcgcatcagatcgcctgagggc

SEQ ID NO: 132725 - DNA, 25 bp, Homo sapien
gcgaggggagcccacggtctgggga

SEQ ID NO: 132726 - DNA, 25 bp, Homo sapien
agcgaggggagcccacggtctgggg

SEQ ID NO: 132727 - DNA, 25 bp, Homo sapien
aaatttgtttgagtcgtggcacgtt

SEQ ID NO: 132728 - DNA, 25 bp, Homo sapien
gagtcgtggcacgtttctccagctc

SEQ ID NO: 132729 - DNA, 25 bp, Homo sapien
tcagaatccaccacggaagtaaatt

SEQ ID NO: 132730 - DNA, 25 bp, Homo sapien
aaaaatcagaatccaccacggaagt

SEQ ID NO: 132731 - DNA, 25 bp, Homo sapien
tatgagggtggtaggttggaccaca

SEQ ID NO: 132732 - DNA, 25 bp, Homo sapien
tggtaggttggaccacagaaagaaa

SEQ ID NO: 132733 - DNA, 25 bp, Homo sapien
gagggtggtaggttggaccacagaa

SEQ ID NO: 132734 - DNA, 25 bp, Homo sapien
ctggaaatatgagggtggtaggttg

SEQ ID NO: 132735 - DNA, 25 bp, Homo sapien
gagaaactcgtatgatattgtaagg

SEQ ID NO: 132736 - DNA, 25 bp, Homo sapien
tgatgtgctggtagagaaactcgta

SEQ ID NO: 132737 - DNA, 25 bp, Homo sapien
tcgtatgatattgtaagggcttttt

SEQ ID NO: 132738 - DNA, 25 bp, Homo sapien
ccgttaactctgctgtctggcttct

SEQ ID NO: 132739 - DNA, 25 bp, Homo sapien
gaaatcacgaaagtggttttgaaca

SEQ ID NO: 132740 - DNA, 25 bp, Homo sapien
ttgcatgtgttattagggaaatcac

SEQ ID NO: 132741 - DNA, 25 bp, Homo sapien
taaaatatgatgacaacgtttaaac

SEQ ID NO: 132742 - DNA, 25 bp, Homo sapien
tatgatgacaacgtttaaacttgta

SEQ ID NO: 132743 - DNA, 25 bp, Homo sapien
tagatcttgcaggaacccagcgctc

SEQ ID NO: 132744 - DNA, 25 bp, Homo sapien
cgtctagatcttgcaggaacccagc

SEQ ID NO: 132745 - DNA, 25 bp, Homo sapien
gtctagatcttgcaggaacccagcg

SEQ ID NO: 132746 - DNA, 25 bp, Homo sapien
cacctcttctcttcggtcatcagct

SEQ ID NO: 132747 - DNA, 25 bp, Homo sapien
gctgctgggttcaaagctggcccca

SEQ ID NO: 132748 - DNA, 25 bp, Homo sapien
gctcatctttattgtgctctctggg

SEQ ID NO: 132749 - DNA, 25 bp, Homo sapien
tctgaggcacccagtaaagctcatc

SEQ ID NO: 132750 - DNA, 25 bp, Homo sapien
gaggcacccagtaaagctcatcttt

SEQ ID NO: 132751 - DNA, 25 bp, Homo sapien
gagtcatggcagttacagcaccagg

SEQ ID NO: 132752 - DNA, 25 bp, Homo sapien
gtattgaagccagttttcctcccag

SEQ ID NO: 132753 - DNA, 25 bp, Homo sapien
tgaacaaacttagggccggagtcat

SEQ ID NO: 132754 - DNA, 25 bp, Homo sapien
agaacaaacgtctgactgatgccga

SEQ ID NO: 132755 - DNA, 25 bp, Homo sapien
ttcctgaacttaaagaggatctgtc

SEQ ID NO: 132756 - DNA, 25 bp, Homo sapien
gtaccagatggaccagaagtacatg

SEQ ID NO: 132757 - DNA, 25 bp, Homo sapien
catctatgaggctcacagagtacca

SEQ ID NO: 132758 - DNA, 25 bp, Homo sapien
ctgaacttaaagaggatctgtcccc

SEQ ID NO: 132759 - DNA, 25 bp, Homo sapien
tcaagtacatcctgcaggtttggct

SEQ ID NO: 132760 - DNA, 25 bp, Homo sapien
agtacatcctgcaggtttggctgcc

SEQ ID NO: 132761 - DNA, 25 bp, Homo sapien
tacatcctgcaggtttggctgcctg

SEQ ID NO: 132762 - DNA, 25 bp, Homo sapien
cttctcaagtacatcctgcaggttt

SEQ ID NO: 132763 - DNA, 25 bp, Homo sapien
catccagtaaggctgctcctacggc

SEQ ID NO: 132764 - DNA, 25 bp, Homo sapien
atccagtaaggctgctcctacggca

SEQ ID NO: 132765 - DNA, 25 bp, Homo sapien
gcctcagtggttacaagtacgttgc

SEQ ID NO: 132766 - DNA, 25 bp, Homo sapien
cctgtggcaattcccctggggcctt

SEQ ID NO: 132767 - DNA, 25 bp, Homo sapien
tagcaattcccctggggcaaatccc

SEQ ID NO: 132768 - DNA, 25 bp, Homo sapien
agtacgttgctacaggaagagacac

SEQ ID NO: 132769 - DNA, 25 bp, Homo sapien
tttggcatcctattcccaacatgaa

SEQ ID NO: 132770 - DNA, 25 bp, Homo sapien
ctggggtttggcatcctattcccaa

SEQ ID NO: 132771 - DNA, 25 bp, Homo sapien
ggggtttggcatcctattcccaaca

SEQ ID NO: 132772 - DNA, 25 bp, Homo sapien
ggtttggcatcctattcccaacatg

SEQ ID NO: 132773 - DNA, 25 bp, Homo sapien
gttaaggtaggacagaggtgcaggt

SEQ ID NO: 132774 - DNA, 25 bp, Homo sapien
taataggataggttaaggtaggaca

SEQ ID NO: 132775 - DNA, 25 bp, Homo sapien
ataggataggttaaggtaggacaga

SEQ ID NO: 132776 - DNA, 25 bp, Homo sapien
taggttaaggtaggacagaggtgca

SEQ ID NO: 132777 - DNA, 25 bp, Homo sapien
tactagcctgccagagcaactgagc

SEQ ID NO: 132778 - DNA, 25 bp, Homo sapien
agagcaactgagcaagtccagaagc

SEQ ID NO: 132779 - DNA, 25 bp, Homo sapien
agatactagcctgccagagcaactg

SEQ ID NO: 132780 - DNA, 25 bp, Homo sapien
cagagcaactgagcaagtccagaag

SEQ ID NO: 132781 - DNA, 25 bp, Homo sapien
gttcagcaagctgcagtcctagctg

SEQ ID NO: 132782 - DNA, 25 bp, Homo sapien
tgcagtacactgttcagcaagctgc

SEQ ID NO: 132783 - DNA, 25 bp, Homo sapien
tgttcagcaagctgcagtcctagct

SEQ ID NO: 132784 - DNA, 25 bp, Homo sapien
gtacactgttcagcaagctgcagtc

SEQ ID NO: 132785 - DNA, 25 bp, Homo sapien
tactgcatatacttgattccaaacc

SEQ ID NO: 132786 - DNA, 25 bp, Homo sapien
aaggtgcgcattcttctcgggtcca

SEQ ID NO: 132787 - DNA, 25 bp, Homo sapien
atcgaaggccactactgcatatact

SEQ ID NO: 132788 - DNA, 25 bp, Homo sapien
caggagcacaaaggtgcgcattctt

SEQ ID NO: 132789 - DNA, 25 bp, Homo sapien
tcagcaacctgtaccagtcctttct

SEQ ID NO: 132790 - DNA, 25 bp, Homo sapien
tctggtccatctgaagtaggtattt

SEQ ID NO: 132791 - DNA, 25 bp, Homo sapien
catctgaagtaggtattttgtttac

SEQ ID NO: 132792 - DNA, 25 bp, Homo sapien
caaggttgtcttcagcaacctgtac

SEQ ID NO: 132793 - DNA, 25 bp, Homo sapien
catagtttgttgtatttcaacgtgg

SEQ ID NO: 132794 - DNA, 25 bp, Homo sapien
caacgtgggaatcttcacgtgtccc

SEQ ID NO: 132795 - DNA, 25 bp, Homo sapien
gccatgaatccagtccgggtataaa

SEQ ID NO: 132796 - DNA, 25 bp, Homo sapien
cacgtgtcccatcttttgccatgaa

SEQ ID NO: 132797 - DNA, 25 bp, Homo sapien
caagtggtcgtaggtcccaaggaca

SEQ ID NO: 132798 - DNA, 25 bp, Homo sapien
ggtgctgtatatggcatcccaaggc

SEQ ID NO: 132799 - DNA, 25 bp, Homo sapien
taggcaccctagaatatctcacagt

SEQ ID NO: 132800 - DNA, 25 bp, Homo sapien
tcacagtagagttgtggctccccat

SEQ ID NO: 132801 - DNA, 25 bp, Homo sapien
tgatcacttgttggtataatgcaga

SEQ ID NO: 132802 - DNA, 25 bp, Homo sapien
ttcttctggcagacaagtgatcact

SEQ ID NO: 132803 - DNA, 25 bp, Homo sapien
gcagataagaaacctacttgctcat

SEQ ID NO: 132804 - DNA, 25 bp, Homo sapien
tcatggtagtcacattggagctggg

SEQ ID NO: 132805 - DNA, 25 bp, Homo sapien
tccctttttgtaaacatcgggatca

SEQ ID NO: 132806 - DNA, 25 bp, Homo sapien
ttttgtaaacatcgggatcagcata

SEQ ID NO: 132807 - DNA, 25 bp, Homo sapien
taaacatcgggatcagcatattgca

SEQ ID NO: 132808 - DNA, 25 bp, Homo sapien
catggttgagaacccaggtaagggt

SEQ ID NO: 132809 - DNA, 25 bp, Homo sapien
cagtttagaaacctatggaccatag

SEQ ID NO: 132810 - DNA, 25 bp, Homo sapien
agctaagagaaaccaagtaattgcc

SEQ ID NO: 132811 - DNA, 25 bp, Homo sapien
tgctcacaccatatgacaggtcggc

SEQ ID NO: 132812 - DNA, 25 bp, Homo sapien
tatacctgccatgtaccagcattgt

SEQ ID NO: 132813 - DNA, 25 bp, Homo sapien
tatgactggcctgggatgtcaacgg

SEQ ID NO: 132814 - DNA, 25 bp, Homo sapien
cttatgactggcctgggatgtcaac

SEQ ID NO: 132815 - DNA, 25 bp, Homo sapien
tggcctgggatgtcaacggggagcc

SEQ ID NO: 132816 - DNA, 25 bp, Homo sapien
gcctgggatgtcaacggggagccat

SEQ ID NO: 132817 - DNA, 25 bp, Homo sapien
gagagttattattggcacattcctg

SEQ ID NO: 132818 - DNA, 25 bp, Homo sapien
tattattggcacattcctgaatttt

SEQ ID NO: 132819 - DNA, 25 bp, Homo sapien
agagttattattggcacattcctga

SEQ ID NO: 132820 - DNA, 25 bp, Homo sapien
agttattattggcacattcctgaat

SEQ ID NO: 132821 - DNA, 25 bp, Homo sapien
cagctggtgctttggaaatccagcc

SEQ ID NO: 132822 - DNA, 25 bp, Homo sapien
tcagcagctggtgctttggaaatcc

SEQ ID NO: 132823 - DNA, 25 bp, Homo sapien
agctggtgctttggaaatccagccc

SEQ ID NO: 132824 - DNA, 25 bp, Homo sapien
agcagctggtgctttggaaatccag

SEQ ID NO: 132825 - DNA, 25 bp, Homo sapien
aagctttgccggctgggatttttgc

SEQ ID NO: 132826 - DNA, 25 bp, Homo sapien
tgatggtgtcaaacctaatgtttcc

SEQ ID NO: 132827 - DNA, 25 bp, Homo sapien
gctgttccgcttcatcacacttgaa

SEQ ID NO: 132828 - DNA, 25 bp, Homo sapien
tccatgggagcctattgtcaattat

SEQ ID NO: 132829 - DNA, 25 bp, Homo sapien
tggcgtagctctcaaaacgggtgat

SEQ ID NO: 132830 - DNA, 25 bp, Homo sapien
caattacttattaagggcacactgc

SEQ ID NO: 132831 - DNA, 25 bp, Homo sapien
taatgtgattcagcccaatactttg

SEQ ID NO: 132832 - DNA, 25 bp, Homo sapien
cattatcaagtgaggagttgcagga

SEQ ID NO: 132833 - DNA, 25 bp, Homo sapien
gcgatattgttcctaacctcgtcat

SEQ ID NO: 132834 - DNA, 25 bp, Homo sapien
acgggacaccgcgaccgtcagcgat

SEQ ID NO: 132835 - DNA, 25 bp, Homo sapien
gaccgtcagcgatattgttcctaac

SEQ ID NO: 132836 - DNA, 25 bp, Homo sapien
tgacgtgttgctggcgccctctaaa

SEQ ID NO: 132837 - DNA, 25 bp, Homo sapien
ttagcaaccaaagaattgccttgac

SEQ ID NO: 132838 - DNA, 25 bp, Homo sapien
gctcagcgagcgaagagcgaagccc

SEQ ID NO: 132839 - DNA, 25 bp, Homo sapien
cttgcgccaggttcatgataaagct

SEQ ID NO: 132840 - DNA, 25 bp, Homo sapien
tctttccgagtttccgtggtggcga

SEQ ID NO: 132841 - DNA, 25 bp, Homo sapien
cacacacacacgggcacctgtcacg

SEQ ID NO: 132842 - DNA, 25 bp, Homo sapien
gacacacacacacgggcacctgtca

SEQ ID NO: 132843 - DNA, 25 bp, Homo sapien
agacacacacacacgggcacctgtc

SEQ ID NO: 132844 - DNA, 25 bp, Homo sapien
acacacacacacgggcacctgtcac

SEQ ID NO: 132845 - DNA, 25 bp, Homo sapien
gtcggtgtgcgcttcacacccagaa

SEQ ID NO: 132846 - DNA, 25 bp, Homo sapien
tgcgatcacaacatcggaagactgg

SEQ ID NO: 132847 - DNA, 25 bp, Homo sapien
gccagcttgcctaaccacttatgta

SEQ ID NO: 132848 - DNA, 25 bp, Homo sapien
gaagtatctaaaagcgccatcctct

SEQ ID NO: 132849 - DNA, 25 bp, Homo sapien
tattgatcagaactcacctcccaag

SEQ ID NO: 132850 - DNA, 25 bp, Homo sapien
cagaaagtttcccaccatagtccca

SEQ ID NO: 132851 - DNA, 25 bp, Homo sapien
tatgtaagagccgtgttgtcaacac

SEQ ID NO: 132852 - DNA, 25 bp, Homo sapien
cattgataatcccaagccgacgaga

SEQ ID NO: 132853 - DNA, 25 bp, Homo sapien
gaacatttgtatagtgagcctggca

SEQ ID NO: 132854 - DNA, 25 bp, Homo sapien
ggaggagtgcccttgtgcataagaa

SEQ ID NO: 132855 - DNA, 25 bp, Homo sapien
cactttaccctttagccacagggag

SEQ ID NO: 132856 - DNA, 25 bp, Homo sapien
ctctctgactgaaaggcattgaaca

SEQ ID NO: 132857 - DNA, 25 bp, Homo sapien
tttgatccccggatccttgagccat

SEQ ID NO: 132858 - DNA, 25 bp, Homo sapien
tttgcagtaaacgatcatgtttgga

SEQ ID NO: 132859 - DNA, 25 bp, Homo sapien
tgctctttgatccccggatccttga

SEQ ID NO: 132860 - DNA, 25 bp, Homo sapien
aacgatcatgtttggagaactctcc

SEQ ID NO: 132861 - DNA, 25 bp, Homo sapien
gagatattcattacggaccacattg

SEQ ID NO: 132862 - DNA, 25 bp, Homo sapien
aaagcccatgttcctaccagcctgg

SEQ ID NO: 132863 - DNA, 25 bp, Homo sapien
cctatgtccaagctaaccagttccg

SEQ ID NO: 132864 - DNA, 25 bp, Homo sapien
gagcctccgctctatcttgataaca

SEQ ID NO: 132865 - DNA, 25 bp, Homo sapien
tttctccaaaatcctgccaataggg

SEQ ID NO: 132866 - DNA, 25 bp, Homo sapien
tagggaatttacagccattcaggtt

SEQ ID NO: 132867 - DNA, 25 bp, Homo sapien
taaccataccctagaatgtcagtag

SEQ ID NO: 132868 - DNA, 25 bp, Homo sapien
taacaagagtgatcaactgcctgcc

SEQ ID NO: 132869 - DNA, 25 bp, Homo sapien
aggaggaataatcaaacttacagcc

SEQ ID NO: 132870 - DNA, 25 bp, Homo sapien
gaaacaatgaaagccaagagacaat

SEQ ID NO: 132871 - DNA, 25 bp, Homo sapien
aaaacagattacattcgaaggagga

SEQ ID NO: 132872 - DNA, 25 bp, Homo sapien
taaaataaccgacaatctagaattc

SEQ ID NO: 132873 - DNA, 25 bp, Homo sapien
gcaaggcaggccaactttcagattc

SEQ ID NO: 132874 - DNA, 25 bp, Homo sapien
tagcaaggcaggccaactttcagat

SEQ ID NO: 132875 - DNA, 25 bp, Homo sapien
aaggcaggccaactttcagattcag

SEQ ID NO: 132876 - DNA, 25 bp, Homo sapien
tctagcaaggcaggccaactttcag

SEQ ID NO: 132877 - DNA, 25 bp, Homo sapien
tggagtcaggtaaggtttcctccag

SEQ ID NO: 132878 - DNA, 25 bp, Homo sapien
tgttcaaaagtgtcatactgacaga

SEQ ID NO: 132879 - DNA, 25 bp, Homo sapien
gactttgttacagcaccttagcaaa

SEQ ID NO: 132880 - DNA, 25 bp, Homo sapien
caggtccatttcatacgtagaggta

SEQ ID NO: 132881 - DNA, 25 bp, Homo sapien
aatacccaatgtttgaacctcagag

SEQ ID NO: 132882 - DNA, 25 bp, Homo sapien
tgttacatgatgtggacagccgcca

SEQ ID NO: 132883 - DNA, 25 bp, Homo sapien
gataaaggatatgtctcaggaacgc

SEQ ID NO: 132884 - DNA, 25 bp, Homo sapien
tacaatatcctagggagacaaacag

SEQ ID NO: 132885 - DNA, 25 bp, Homo sapien
tttggtgactctgttatcaggccac

SEQ ID NO: 132886 - DNA, 25 bp, Homo sapien
aacatcccgtcttgctggctgtaag

SEQ ID NO: 132887 - DNA, 25 bp, Homo sapien
tgcccagaaggctgtgagaactcag

SEQ ID NO: 132888 - DNA, 25 bp, Homo sapien
gactgagagggacatggtaaccata

SEQ ID NO: 132889 - DNA, 25 bp, Homo sapien
cccctgatttattggaaggtgacat

SEQ ID NO: 132890 - DNA, 25 bp, Homo sapien
tttaacagtgccaacaactagcaag

SEQ ID NO: 132891 - DNA, 25 bp, Homo sapien
gcacacactcaaatacacctttaga

SEQ ID NO: 132892 - DNA, 25 bp, Homo sapien
gaagtgtgccacaggaatgagtatg

SEQ ID NO: 132893 - DNA, 25 bp, Homo sapien
tcgggaaacagtcatcggaggcttt

SEQ ID NO: 132894 - DNA, 25 bp, Homo sapien
gaacctaattcaagggaatgccatg

SEQ ID NO: 132895 - DNA, 25 bp, Homo sapien
gaaagatccatcaggcccaagtata

SEQ ID NO: 132896 - DNA, 25 bp, Homo sapien
tcatctgctgaaccggaaggagact

SEQ ID NO: 132897 - DNA, 25 bp, Homo sapien
gcaatgttggtattagtgtttcccc

SEQ ID NO: 132898 - DNA, 25 bp, Homo sapien
tataggagccattagatgattaact

SEQ ID NO: 132899 - DNA, 25 bp, Homo sapien
gaatagagaggttcacaactagccc

SEQ ID NO: 132900 - DNA, 25 bp, Homo sapien
tggcttacttgacaagagaaatacc

SEQ ID NO: 132901 - DNA, 25 bp, Homo sapien
aatgttctgttcaattttcccctga

SEQ ID NO: 132902 - DNA, 25 bp, Homo sapien
cctgaggaaggcttgaattaggaag

SEQ ID NO: 132903 - DNA, 25 bp, Homo sapien
tactccaggaccaggtctcattcca

SEQ ID NO: 132904 - DNA, 25 bp, Homo sapien
tgcctgtcattcatctttccaaata

SEQ ID NO: 132905 - DNA, 25 bp, Homo sapien
gacacaactgtgcaaaagagataaa

SEQ ID NO: 132906 - DNA, 25 bp, Homo sapien
gaagacacaactgtgcaaaagagat

SEQ ID NO: 132907 - DNA, 25 bp, Homo sapien
cgaagacacaactgtgcaaaagaga

SEQ ID NO: 132908 - DNA, 25 bp, Homo sapien
aaaggaagcctattccagtcttctg

SEQ ID NO: 132909 - DNA, 25 bp, Homo sapien
gctttgtaaatccaatatcagtgtc

SEQ ID NO: 132910 - DNA, 25 bp, Homo sapien
tgcccacacaaaactgcaaggttgg

SEQ ID NO: 132911 - DNA, 25 bp, Homo sapien
agcacagcggcagtccccaaacgaa

SEQ ID NO: 132912 - DNA, 25 bp, Homo sapien
tccccaaacgaaaacaatgagtgtg

SEQ ID NO: 132913 - DNA, 25 bp, Homo sapien
tgcagttcaaatgtgaacacgcaga

SEQ ID NO: 132914 - DNA, 25 bp, Homo sapien
tgtgaacacgcagaacatatcctcg

SEQ ID NO: 132915 - DNA, 25 bp, Homo sapien
gaacatatcctcgaaatatccaagg

SEQ ID NO: 132916 - DNA, 25 bp, Homo sapien
cctcgaaatatccaaggcagtctgg

SEQ ID NO: 132917 - DNA, 25 bp, Homo sapien
ttatttcctgctactggatgtaatt

SEQ ID NO: 132918 - DNA, 25 bp, Homo sapien
taattggtactcaggaattccacaa

SEQ ID NO: 132919 - DNA, 25 bp, Homo sapien
attggtactcaggaattccacaaac

SEQ ID NO: 132920 - DNA, 25 bp, Homo sapien
gctactggatgtaattggtactcag

SEQ ID NO: 132921 - DNA, 25 bp, Homo sapien
atttgtccaagcattggtcctggtg

SEQ ID NO: 132922 - DNA, 25 bp, Homo sapien
tatttgtccaagcattggtcctggt

SEQ ID NO: 132923 - DNA, 25 bp, Homo sapien
cagagtagaccatcgtctggagctg

SEQ ID NO: 132924 - DNA, 25 bp, Homo sapien
agttggaaactccagagtagaccat

SEQ ID NO: 132925 - DNA, 25 bp, Homo sapien
gagctgtcaccgtgctcagtgtgca

SEQ ID NO: 132926 - DNA, 25 bp, Homo sapien
gaccatcgtctggagctgtcaccgt

SEQ ID NO: 132927 - DNA, 25 bp, Homo sapien
gaccttgacttgtggctcgaagccc

SEQ ID NO: 132928 - DNA, 25 bp, Homo sapien
tgtattccaaaaggtggcagtttcc

SEQ ID NO: 132929 - DNA, 25 bp, Homo sapien
tatcaaagcccatgttaaggacaag

SEQ ID NO: 132930 - DNA, 25 bp, Homo sapien
cgagagacttgcaccattttgctaa

SEQ ID NO: 132931 - DNA, 25 bp, Homo sapien
ctttctctgtctactgatgggatct

SEQ ID NO: 132932 - DNA, 25 bp, Homo sapien
gtctactgatgggatctcagtgcat

SEQ ID NO: 132933 - DNA, 25 bp, Homo sapien
ttctttctctgtctactgatgggat

SEQ ID NO: 132934 - DNA, 25 bp, Homo sapien
tctctgtctactgatgggatctcag

SEQ ID NO: 132935 - DNA, 25 bp, Homo sapien
taggttaagtctagtgtacagctat

SEQ ID NO: 132936 - DNA, 25 bp, Homo sapien
aatttttagagactatacatggcag

SEQ ID NO: 132937 - DNA, 25 bp, Homo sapien
tgatacagcatatcttcaaaataaa

SEQ ID NO: 132938 - DNA, 25 bp, Homo sapien
tgttgacatagagacaagtttactg

SEQ ID NO: 132939 - DNA, 25 bp, Homo sapien
ggaaacaagtagatccagaaagagg

SEQ ID NO: 132940 - DNA, 25 bp, Homo sapien
tggaaacaagtagatccagaaagag

SEQ ID NO: 132941 - DNA, 25 bp, Homo sapien
ctggaaacaagtagatccagaaaga

SEQ ID NO: 132942 - DNA, 25 bp, Homo sapien
gaaacaagtagatccagaaagaggc

SEQ ID NO: 132943 - DNA, 25 bp, Homo sapien
gattccgactgctggtctgccctgt

SEQ ID NO: 132944 - DNA, 25 bp, Homo sapien
ttcagtccatgtgtcagaataagcc

SEQ ID NO: 132945 - DNA, 25 bp, Homo sapien
taagacactaagcagggaagattcc

SEQ ID NO: 132946 - DNA, 25 bp, Homo sapien
catgtgtcagaataagccttgtcta

SEQ ID NO: 132947 - DNA, 25 bp, Homo sapien
gagcacagtgattcctccacctttg

SEQ ID NO: 132948 - DNA, 25 bp, Homo sapien
tgtcaggccaaggtgtagaactgtc

SEQ ID NO: 132949 - DNA, 25 bp, Homo sapien
tgctagaatcatcccatctttcagg

SEQ ID NO: 132950 - DNA, 25 bp, Homo sapien
cctctggtatagttaattgagcgaa

SEQ ID NO: 132951 - DNA, 25 bp, Homo sapien
gaaacccctcaatggacaagttagc

SEQ ID NO: 132952 - DNA, 25 bp, Homo sapien
ttatgtatacataggccaggcccag

SEQ ID NO: 132953 - DNA, 25 bp, Homo sapien
aataaccagtgttggcaaggctctg

SEQ ID NO: 132954 - DNA, 25 bp, Homo sapien
ttttaaactcagctggcatgatggc

SEQ ID NO: 132955 - DNA, 25 bp, Homo sapien
aaaactcagaggtgtttctatacac

SEQ ID NO: 132956 - DNA, 25 bp, Homo sapien
ctacccaaagggatctaaagatgca

SEQ ID NO: 132957 - DNA, 25 bp, Homo sapien
tgctctggcatgtctcatatttcat

SEQ ID NO: 132958 - DNA, 25 bp, Homo sapien
tagtatatctgccaccttaaacatt

SEQ ID NO: 132959 - DNA, 25 bp, Homo sapien
gattacctgatgttggcctacttcc

SEQ ID NO: 132960 - DNA, 25 bp, Homo sapien
aaggttttccccatgcatattggca

SEQ ID NO: 132961 - DNA, 25 bp, Homo sapien
caaggaattgaagggtgaaccagtc

SEQ ID NO: 132962 - DNA, 25 bp, Homo sapien
gatcatcaggaaacgaatacacaat

SEQ ID NO: 132963 - DNA, 25 bp, Homo sapien
tctgatgtgctatatttacctgatg

SEQ ID NO: 132964 - DNA, 25 bp, Homo sapien
caccctggtgtagggatggcaattg

SEQ ID NO: 132965 - DNA, 25 bp, Homo sapien
tacctgatgtcttacaacgtgtctt

SEQ ID NO: 132966 - DNA, 25 bp, Homo sapien
gtcagcccacttgggagttggcacc

SEQ ID NO: 132967 - DNA, 25 bp, Homo sapien
gtgcataaggtgacttgtaaaggtg

SEQ ID NO: 132968 - DNA, 25 bp, Homo sapien
ctgaggatcccttttgagtgcgcac

SEQ ID NO: 132969 - DNA, 25 bp, Homo sapien
tgaagcttccttgaggtacgtaccc

SEQ ID NO: 132970 - DNA, 25 bp, Homo sapien
gagtgcgcactgaatggccatttga

SEQ ID NO: 132971 - DNA, 25 bp, Homo sapien
caaatggtctgaatgctcctctgag

SEQ ID NO: 132972 - DNA, 25 bp, Homo sapien
ggttagtatagacccctaagaggca

SEQ ID NO: 132973 - DNA, 25 bp, Homo sapien
cctagctaagctggaactgtgtttc

SEQ ID NO: 132974 - DNA, 25 bp, Homo sapien
cttagtgagactaggtgtggttgac

SEQ ID NO: 132975 - DNA, 25 bp, Homo sapien
cacatgacaaatgggcttagtgaga

SEQ ID NO: 132976 - DNA, 25 bp, Homo sapien
taccactagcacaaaaggcccatgg

SEQ ID NO: 132977 - DNA, 25 bp, Homo sapien
ggcccatggaaaactattggtgaat

SEQ ID NO: 132978 - DNA, 25 bp, Homo sapien
gtgaatgtctcttatgaccagtggg

SEQ ID NO: 132979 - DNA, 25 bp, Homo sapien
cagttttgcccatgatctacgtcca

SEQ ID NO: 132980 - DNA, 25 bp, Homo sapien
aactgtgcttcttgatttctaccaa

SEQ ID NO: 132981 - DNA, 25 bp, Homo sapien
tgcctttcctactttaggacgattc

SEQ ID NO: 132982 - DNA, 25 bp, Homo sapien
ggacgattctttcttaattcctgca

SEQ ID NO: 132983 - DNA, 25 bp, Homo sapien
taccaacttcatcaaatcttgcctt

SEQ ID NO: 132984 - DNA, 25 bp, Homo sapien
ggaaacagcacagatgtcattcaaa

SEQ ID NO: 132985 - DNA, 25 bp, Homo sapien
taaatgctaacgctagaactctgtg

SEQ ID NO: 132986 - DNA, 25 bp, Homo sapien
ggtctatccataccacagaacgcta

SEQ ID NO: 132987 - DNA, 25 bp, Homo sapien
gaacaagcccttgatacgtgcaaca

SEQ ID NO: 132988 - DNA, 25 bp, Homo sapien
cataaggaacatggctacccaaggt

SEQ ID NO: 132989 - DNA, 25 bp, Homo sapien
ggctattaaagagtgcaccaggcaa

SEQ ID NO: 132990 - DNA, 25 bp, Homo sapien
gacaggctcaaggagtcaccagcat

SEQ ID NO: 132991 - DNA, 25 bp, Homo sapien
ttagagagctccagatattacccgg

SEQ ID NO: 132992 - DNA, 25 bp, Homo sapien
gacagatgagattcctctactatac

SEQ ID NO: 132993 - DNA, 25 bp, Homo sapien
tactatacatctcctgtcatttacc

SEQ ID NO: 132994 - DNA, 25 bp, Homo sapien
ggagccctttatccctagacagatg

SEQ ID NO: 132995 - DNA, 25 bp, Homo sapien
gatggaaccagtacgctccaacctg

SEQ ID NO: 132996 - DNA, 25 bp, Homo sapien
caaggacccagatgttagctaaact

SEQ ID NO: 132997 - DNA, 25 bp, Homo sapien
gaaggtcacaagaatgtccccagta

SEQ ID NO: 132998 - DNA, 25 bp, Homo sapien
tattacagagctgaaccaagtggtc

SEQ ID NO: 132999 - DNA, 25 bp, Homo sapien
tactaccctctggagcaaactgatg

SEQ ID NO: 133000 - DNA, 25 bp, Homo sapien
ggtgatttgtgagaccgtggtgcat

SEQ ID NO: 133001 - DNA, 25 bp, Homo sapien
gtgatttgtgagaccgtggtgcatc

SEQ ID NO: 133002 - DNA, 25 bp, Homo sapien
tggtgatttgtgagaccgtggtgca

SEQ ID NO: 133003 - DNA, 25 bp, Homo sapien
tgatttgtgagaccgtggtgcatcc

SEQ ID NO: 133004 - DNA, 25 bp, Homo sapien
tccaccctgactggttgctgaagcc

SEQ ID NO: 133005 - DNA, 25 bp, Homo sapien
ctccaccctgactggttgctgaagc

SEQ ID NO: 133006 - DNA, 25 bp, Homo sapien
gaatgattccgagcaaaaacactga

SEQ ID NO: 133007 - DNA, 25 bp, Homo sapien
tgcagaataaacacatgtccacaga

SEQ ID NO: 133008 - DNA, 25 bp, Homo sapien
aacaggaccattttggattacagag

SEQ ID NO: 133009 - DNA, 25 bp, Homo sapien
tattttcagaaaacgacgtgctggc

SEQ ID NO: 133010 - DNA, 25 bp, Homo sapien
tgtgcaaatcagtgacctcacccat

SEQ ID NO: 133011 - DNA, 25 bp, Homo sapien
agtgacctcacccattcactggagt

SEQ ID NO: 133012 - DNA, 25 bp, Homo sapien
ggaattgtgcaaatcagtgacctca

SEQ ID NO: 133013 - DNA, 25 bp, Homo sapien
gcagttttcacctcttaatcttgct

SEQ ID NO: 133014 - DNA, 25 bp, Homo sapien
tcatcctaaaccactgtgttccagg

SEQ ID NO: 133015 - DNA, 25 bp, Homo sapien
gactagagcgttcatttgtgcactg

SEQ ID NO: 133016 - DNA, 25 bp, Homo sapien
taatggagcctcactgactagagcg

SEQ ID NO: 133017 - DNA, 25 bp, Homo sapien
tgttccaggatagtttacaatctcc

SEQ ID NO: 133018 - DNA, 25 bp, Homo sapien
ggattgtctcctatatgtgggcaaa

SEQ ID NO: 133019 - DNA, 25 bp, Homo sapien
gtgcatggctatgcgctcagcaggc

SEQ ID NO: 133020 - DNA, 25 bp, Homo sapien
acagcaagtctgcaggtcctaccct

SEQ ID NO: 133021 - DNA, 25 bp, Homo sapien
taccctcagcaaactcaaggagcaa

SEQ ID NO: 133022 - DNA, 25 bp, Homo sapien
tgctctcatgtgaaccaagttttca

SEQ ID NO: 133023 - DNA, 25 bp, Homo sapien
gaaacttgctgctgagctcatctaa

SEQ ID NO: 133024 - DNA, 25 bp, Homo sapien
tcacttgactttcggtatggacaga

SEQ ID NO: 133025 - DNA, 25 bp, Homo sapien
catctaaaatagtgggagcacttct

SEQ ID NO: 133026 - DNA, 25 bp, Homo sapien
tattcaataaatatttgcgagagca

SEQ ID NO: 133027 - DNA, 25 bp, Homo sapien
ttattcaataaatatttgcgagagc

SEQ ID NO: 133028 - DNA, 25 bp, Homo sapien
gggcacactgtaaggcaccatgcat

SEQ ID NO: 133029 - DNA, 25 bp, Homo sapien
gagatcctcacgtcaactccaaggg

SEQ ID NO: 133030 - DNA, 25 bp, Homo sapien
aggcctggacgaagcttatctaaca

SEQ ID NO: 133031 - DNA, 25 bp, Homo sapien
aacaatgactgaagggaatacccaa

SEQ ID NO: 133032 - DNA, 25 bp, Homo sapien
agggcctggtgttgctaagtagcca

SEQ ID NO: 133033 - DNA, 25 bp, Homo sapien
tttccactgcccgtgaagggcctgg

SEQ ID NO: 133034 - DNA, 25 bp, Homo sapien
gtagccaccaatgggcctcttcctg

SEQ ID NO: 133035 - DNA, 25 bp, Homo sapien
tgttgctaagtagccaccaatgggc

SEQ ID NO: 133036 - DNA, 25 bp, Homo sapien
gtgtagcttctatcttcccatccag

SEQ ID NO: 133037 - DNA, 25 bp, Homo sapien
tgctcagaaaccacaatccagttgg

SEQ ID NO: 133038 - DNA, 25 bp, Homo sapien
gagtttgtgatacgaagaaaggcct

SEQ ID NO: 133039 - DNA, 25 bp, Homo sapien
cacactcattgtgaagtctaacgag

SEQ ID NO: 133040 - DNA, 25 bp, Homo sapien
cagacaccgtggaatgtttctagtg

SEQ ID NO: 133041 - DNA, 25 bp, Homo sapien
gctatattaaatggcatggccgcag

SEQ ID NO: 133042 - DNA, 25 bp, Homo sapien
ttctagtggactggaaattggcgtc

SEQ ID NO: 133043 - DNA, 25 bp, Homo sapien
atggccgcagtaagacagacaccgt

SEQ ID NO: 133044 - DNA, 25 bp, Homo sapien
ggactaggtagtatcacagggctta

SEQ ID NO: 133045 - DNA, 25 bp, Homo sapien
gaagccagtgggtcaacaatcgtta

SEQ ID NO: 133046 - DNA, 25 bp, Homo sapien
tatagctgggttgcctgtaggaagc

SEQ ID NO: 133047 - DNA, 25 bp, Homo sapien
aagattgtctgatccttccctgagg

SEQ ID NO: 133048 - DNA, 25 bp, Homo sapien
cattcaagtcagttagaaaactatc

SEQ ID NO: 133049 - DNA, 25 bp, Homo sapien
ttcaagtcagttagaaaactatcac

SEQ ID NO: 133050 - DNA, 25 bp, Homo sapien
attcaagtcagttagaaaactatca

SEQ ID NO: 133051 - DNA, 25 bp, Homo sapien
tgttaacccagtaattgcctgagtg

SEQ ID NO: 133052 - DNA, 25 bp, Homo sapien
catatttcagaggattactgcaggc

SEQ ID NO: 133053 - DNA, 25 bp, Homo sapien
gcaacttctaacaccactggcaaaa

SEQ ID NO: 133054 - DNA, 25 bp, Homo sapien
aatgagcctgctttaatgtgatcca

SEQ ID NO: 133055 - DNA, 25 bp, Homo sapien
tattgatagcttttgcaaacggatg

SEQ ID NO: 133056 - DNA, 25 bp, Homo sapien
tgatagcttttgcaaacggatgcag

SEQ ID NO: 133057 - DNA, 25 bp, Homo sapien
attgatagcttttgcaaacggatgc

SEQ ID NO: 133058 - DNA, 25 bp, Homo sapien
tttattgatagcttttgcaaacgga

SEQ ID NO: 133059 - DNA, 25 bp, Homo sapien
ttgcatgcacattccggaggaaatt

SEQ ID NO: 133060 - DNA, 25 bp, Homo sapien
ttcttttgcagctaggcacatttgc

SEQ ID NO: 133061 - DNA, 25 bp, Homo sapien
gcagctaggcacatttgcatgcaca

SEQ ID NO: 133062 - DNA, 25 bp, Homo sapien
tttgcagctaggcacatttgcatgc

SEQ ID NO: 133063 - DNA, 25 bp, Homo sapien
aatacatgctgtagaccctctcctt

SEQ ID NO: 133064 - DNA, 25 bp, Homo sapien
tatgggcagacatgtacccagcagc

SEQ ID NO: 133065 - DNA, 25 bp, Homo sapien
caaaaagtgataaggtagcatgagc

SEQ ID NO: 133066 - DNA, 25 bp, Homo sapien
gcagcacaccctcactaatggttag

SEQ ID NO: 133067 - DNA, 25 bp, Homo sapien
caacttttgatgccctagttcaagc

SEQ ID NO: 133068 - DNA, 25 bp, Homo sapien
actgcaacttttgatgccctagttc

SEQ ID NO: 133069 - DNA, 25 bp, Homo sapien
gcaacttttgatgccctagttcaag

SEQ ID NO: 133070 - DNA, 25 bp, Homo sapien
tgcaacttttgatgccctagttcaa

SEQ ID NO: 133071 - DNA, 25 bp, Homo sapien
catggactgggctaaataagtactt

SEQ ID NO: 133072 - DNA, 25 bp, Homo sapien
tcctttactttcatggactgggcta

SEQ ID NO: 133073 - DNA, 25 bp, Homo sapien
gccccatcctcctatcaaaggacac

SEQ ID NO: 133074 - DNA, 25 bp, Homo sapien
gctaaataagtacttgggccacata

SEQ ID NO: 133075 - DNA, 25 bp, Homo sapien
tttcaaacacccgaataatctgtaa

SEQ ID NO: 133076 - DNA, 25 bp, Homo sapien
cacccgaataatctgtaaagcccct

SEQ ID NO: 133077 - DNA, 25 bp, Homo sapien
tcaaacacccgaataatctgtaaag

SEQ ID NO: 133078 - DNA, 25 bp, Homo sapien
caaacacccgaataatctgtaaagc

SEQ ID NO: 133079 - DNA, 25 bp, Homo sapien
gggacagctctctggaggacaatct

SEQ ID NO: 133080 - DNA, 25 bp, Homo sapien
ctccttcaaggggacagctctctgg

SEQ ID NO: 133081 - DNA, 25 bp, Homo sapien
tcaaggggacagctctctggaggac

SEQ ID NO: 133082 - DNA, 25 bp, Homo sapien
gctctctggaggacaatcttcctca

SEQ ID NO: 133083 - DNA, 25 bp, Homo sapien
aaactgccatctgctaggtgtgaag

SEQ ID NO: 133084 - DNA, 25 bp, Homo sapien
tgtgaagctatcgaaaacatgccgg

SEQ ID NO: 133085 - DNA, 25 bp, Homo sapien
gaagagggctggcagaaggtcagaa

SEQ ID NO: 133086 - DNA, 25 bp, Homo sapien
aaaacatgccgggaagtcttttgag

SEQ ID NO: 133087 - DNA, 25 bp, Homo sapien
gattcaaaccttgttgcccttggca

SEQ ID NO: 133088 - DNA, 25 bp, Homo sapien
aacaattcaacccagccatgaaggg

SEQ ID NO: 133089 - DNA, 25 bp, Homo sapien
ccttggcacagagttgacagctaca

SEQ ID NO: 133090 - DNA, 25 bp, Homo sapien
ccctagattctgcatagtgagtgaa

SEQ ID NO: 133091 - DNA, 25 bp, Homo sapien
taattccatcgttcacttgccttgg

SEQ ID NO: 133092 - DNA, 25 bp, Homo sapien
gcgaaatggagcgttgtgatacacc

SEQ ID NO: 133093 - DNA, 25 bp, Homo sapien
acttctggctgtgtgtgatcagcga

SEQ ID NO: 133094 - DNA, 25 bp, Homo sapien
tgtccttggcagtgagagaagcgac

SEQ ID NO: 133095 - DNA, 25 bp, Homo sapien
ccagtctgtagatgtgggctaaggc

SEQ ID NO: 133096 - DNA, 25 bp, Homo sapien
ggcactttcccagtctacatctctg

SEQ ID NO: 133097 - DNA, 25 bp, Homo sapien
tgttggaattgctcccaccacctac

SEQ ID NO: 133098 - DNA, 25 bp, Homo sapien
cacctactcccagtctgtagatgtg

SEQ ID NO: 133099 - DNA, 25 bp, Homo sapien
catcagaggagatatgagttttgta

SEQ ID NO: 133100 - DNA, 25 bp, Homo sapien
tatgagttttgtatgggtttccaat

SEQ ID NO: 133101 - DNA, 25 bp, Homo sapien
cagaggagatatgagttttgtatgg

SEQ ID NO: 133102 - DNA, 25 bp, Homo sapien
aacatcagaggagatatgagttttg

SEQ ID NO: 133103 - DNA, 25 bp, Homo sapien
tattgcattgcattacctgtataac

SEQ ID NO: 133104 - DNA, 25 bp, Homo sapien
tgacctcaggtacccggactacaat

SEQ ID NO: 133105 - DNA, 25 bp, Homo sapien
catctttatgttaaacagagtatgc

SEQ ID NO: 133106 - DNA, 25 bp, Homo sapien
gaactttagaatctacccctgtaga

SEQ ID NO: 133107 - DNA, 25 bp, Homo sapien
tccttgtgttgcctgagacccagca

SEQ ID NO: 133108 - DNA, 25 bp, Homo sapien
gatttttaatgctgcctccgaacac

SEQ ID NO: 133109 - DNA, 25 bp, Homo sapien
ccttttttggtttcatgtctcatgc

SEQ ID NO: 133110 - DNA, 25 bp, Homo sapien
tgagacccagcagcaaagatccctt

SEQ ID NO: 133111 - DNA, 25 bp, Homo sapien
ttcatattctctgttactgaagttc

SEQ ID NO: 133112 - DNA, 25 bp, Homo sapien
acataactttctggagggaagattc

SEQ ID NO: 133113 - DNA, 25 bp, Homo sapien
gaacataactttctggagggaagat

SEQ ID NO: 133114 - DNA, 25 bp, Homo sapien
ggaacataactttctggagggaaga

SEQ ID NO: 133115 - DNA, 25 bp, Homo sapien
ctcttgtctctgctttgacccgtga

SEQ ID NO: 133116 - DNA, 25 bp, Homo sapien
gcagatagcatcagaagccagacag

SEQ ID NO: 133117 - DNA, 25 bp, Homo sapien
agaaatgacccggagaggccctcac

SEQ ID NO: 133118 - DNA, 25 bp, Homo sapien
cagaacatgtctctgcactaagagg

SEQ ID NO: 133119 - DNA, 25 bp, Homo sapien
ctgatgggcacaccccctgtcttgt

SEQ ID NO: 133120 - DNA, 25 bp, Homo sapien
gcatctttgtaatgatgtcttcaat

SEQ ID NO: 133121 - DNA, 25 bp, Homo sapien
tcttgcatctttgtaatgatgtctt

SEQ ID NO: 133122 - DNA, 25 bp, Homo sapien
tgcatctttgtaatgatgtcttcaa

SEQ ID NO: 133123 - DNA, 25 bp, Homo sapien
ttaccaacaccttgcaaggagggtg

SEQ ID NO: 133124 - DNA, 25 bp, Homo sapien
ccaacaccttgcaaggagggtgtta

SEQ ID NO: 133125 - DNA, 25 bp, Homo sapien
caacaccttgcaaggagggtgttac

SEQ ID NO: 133126 - DNA, 25 bp, Homo sapien
taccaacaccttgcaaggagggtgt

SEQ ID NO: 133127 - DNA, 25 bp, Homo sapien
gcttaaacttccatccacttcatgg

SEQ ID NO: 133128 - DNA, 25 bp, Homo sapien
aattccctcatatttaaaacctctg

SEQ ID NO: 133129 - DNA, 25 bp, Homo sapien
catctgagcagggtagatgggttac

SEQ ID NO: 133130 - DNA, 25 bp, Homo sapien
tctgacggcagtccatctgagcagg

SEQ ID NO: 133131 - DNA, 25 bp, Homo sapien
cacatcttgagagtgaggcactgac

SEQ ID NO: 133132 - DNA, 25 bp, Homo sapien
aatagaggcctccaacttttagatc

SEQ ID NO: 133133 - DNA, 25 bp, Homo sapien
cagggctattgtcagttaccactca

SEQ ID NO: 133134 - DNA, 25 bp, Homo sapien
actgactgccctttgtactggacta

SEQ ID NO: 133135 - DNA, 25 bp, Homo sapien
ggatgcactgggacatgctcatgca

SEQ ID NO: 133136 - DNA, 25 bp, Homo sapien
cttggatgcactgggacatgctcat

SEQ ID NO: 133137 - DNA, 25 bp, Homo sapien
acagagtcttggatgcactgggaca

SEQ ID NO: 133138 - DNA, 25 bp, Homo sapien
gacagagtcttggatgcactgggac

SEQ ID NO: 133139 - DNA, 25 bp, Homo sapien
cctcttcatcccagcaatacctgtg

SEQ ID NO: 133140 - DNA, 25 bp, Homo sapien
catttcgaacccacaggtgaaccaa

SEQ ID NO: 133141 - DNA, 25 bp, Homo sapien
atcccaacatttcgaacccacaggt

SEQ ID NO: 133142 - DNA, 25 bp, Homo sapien
acccacaggtgaaccaacaggcatt

SEQ ID NO: 133143 - DNA, 25 bp, Homo sapien
cattctgcccaggatatgtctatca

SEQ ID NO: 133144 - DNA, 25 bp, Homo sapien
tggcaggcattctgcccaggatatg

SEQ ID NO: 133145 - DNA, 25 bp, Homo sapien
gctgggcaaagctgcacaatctggc

SEQ ID NO: 133146 - DNA, 25 bp, Homo sapien
atgacagctgggcaaagctgcacaa

SEQ ID NO: 133147 - DNA, 25 bp, Homo sapien
gaaacagcttttaaggacaacaaga

SEQ ID NO: 133148 - DNA, 25 bp, Homo sapien
ttggctgtgctacaaatgtttttgg

SEQ ID NO: 133149 - DNA, 25 bp, Homo sapien
gagtcacaccttatttaaaccacaa

SEQ ID NO: 133150 - DNA, 25 bp, Homo sapien
cttccatcagtattggctgtgctac

SEQ ID NO: 133151 - DNA, 25 bp, Homo sapien
gtccactgcagtttcccagttcctt

SEQ ID NO: 133152 - DNA, 25 bp, Homo sapien
ccactgcagtttcccagttccttct

SEQ ID NO: 133153 - DNA, 25 bp, Homo sapien
tgtccactgcagtttcccagttcct

SEQ ID NO: 133154 - DNA, 25 bp, Homo sapien
gatgtccactgcagtttcccagttc

SEQ ID NO: 133155 - DNA, 25 bp, Homo sapien
tgtatagaattccatgctgcgaccg

SEQ ID NO: 133156 - DNA, 25 bp, Homo sapien
aaatccatagtcactgttgctccag

SEQ ID NO: 133157 - DNA, 25 bp, Homo sapien
catgctgcgaccgatgatacagtga

SEQ ID NO: 133158 - DNA, 25 bp, Homo sapien
catccagcgattttagtgtatagaa

SEQ ID NO: 133159 - DNA, 25 bp, Homo sapien
gaggaacatacaggatagatcgctg

SEQ ID NO: 133160 - DNA, 25 bp, Homo sapien
tgccatcagtgataagctcaaatgt

SEQ ID NO: 133161 - DNA, 25 bp, Homo sapien
ctgtggctgcaactgatggtagaat

SEQ ID NO: 133162 - DNA, 25 bp, Homo sapien
cgctgtagaaaatcctgagccaatg

SEQ ID NO: 133163 - DNA, 25 bp, Homo sapien
aatggcccatgaacttttccatatt

SEQ ID NO: 133164 - DNA, 25 bp, Homo sapien
ctatttgccttttggtgtgggctgc

SEQ ID NO: 133165 - DNA, 25 bp, Homo sapien
cacaaactctggcaaatggcccatg

SEQ ID NO: 133166 - DNA, 25 bp, Homo sapien
atttgccttttggtgtgggctgccc

SEQ ID NO: 133167 - DNA, 25 bp, Homo sapien
aaacaatcctcctgcattgtcttcc

SEQ ID NO: 133168 - DNA, 25 bp, Homo sapien
gagacaaagcctcactatgttgtcc

SEQ ID NO: 133169 - DNA, 25 bp, Homo sapien
tgcctggccataattttgattttga

SEQ ID NO: 133170 - DNA, 25 bp, Homo sapien
ccatgcctggccataattttgattt

SEQ ID NO: 133171 - DNA, 25 bp, Homo sapien
taaaagtaccatacaggtctgagac

SEQ ID NO: 133172 - DNA, 25 bp, Homo sapien
ttcaataactattctcatgtgtgga

SEQ ID NO: 133173 - DNA, 25 bp, Homo sapien
actccaagtggccacaccgagtgac

SEQ ID NO: 133174 - DNA, 25 bp, Homo sapien
ttttccatcaccatgccccagtgtt

SEQ ID NO: 133175 - DNA, 25 bp, Homo sapien
gcagagaaggtggcatcaggggttt

SEQ ID NO: 133176 - DNA, 25 bp, Homo sapien
cacataatggttggcagcagagaag

SEQ ID NO: 133177 - DNA, 25 bp, Homo sapien
agagaaggtggcatcaggggtttcc

SEQ ID NO: 133178 - DNA, 25 bp, Homo sapien
cataatggttggcagcagagaaggt

SEQ ID NO: 133179 - DNA, 25 bp, Homo sapien
agaaataggaacacttttacactgt

SEQ ID NO: 133180 - DNA, 25 bp, Homo sapien
tggcaatcattaaaaagtcaggaaa

SEQ ID NO: 133181 - DNA, 25 bp, Homo sapien
caacaggtgctggagaggatgtgga

SEQ ID NO: 133182 - DNA, 25 bp, Homo sapien
accatccatcccacaccagttagaa

SEQ ID NO: 133183 - DNA, 25 bp, Homo sapien
cagcaacagtgacagggacggtaat

SEQ ID NO: 133184 - DNA, 25 bp, Homo sapien
agcagcaacagtgacagggacggta

SEQ ID NO: 133185 - DNA, 25 bp, Homo sapien
gcaacagtgacagggacggtaatca

SEQ ID NO: 133186 - DNA, 25 bp, Homo sapien
caacagtgacagggacggtaatcat

SEQ ID NO: 133187 - DNA, 25 bp, Homo sapien
ggcaaggaggtgcaagtcatgtctt

SEQ ID NO: 133188 - DNA, 25 bp, Homo sapien
aggcaaggaggtgcaagtcatgtct

SEQ ID NO: 133189 - DNA, 25 bp, Homo sapien
cctgctgaactggacctgagctttc

SEQ ID NO: 133190 - DNA, 25 bp, Homo sapien
agtctcttgggctggcctgctgaac

SEQ ID NO: 133191 - DNA, 25 bp, Homo sapien
tccccaatcttggacaaggacgagg

SEQ ID NO: 133192 - DNA, 25 bp, Homo sapien
cctgagtacatagggctctcccagt

SEQ ID NO: 133193 - DNA, 25 bp, Homo sapien
ccaccctcaaaggagagtccttgat

SEQ ID NO: 133194 - DNA, 25 bp, Homo sapien
cctcaaaggagagtccttgatcagc

SEQ ID NO: 133195 - DNA, 25 bp, Homo sapien
gatcagccataacattcttgggctt

SEQ ID NO: 133196 - DNA, 25 bp, Homo sapien
cttttgtgaatgtgaatcggggaga

SEQ ID NO: 133197 - DNA, 25 bp, Homo sapien
gacacagaagacaagtgaccaatat

SEQ ID NO: 133198 - DNA, 25 bp, Homo sapien
agaaaatcccaaataccaagaccag

SEQ ID NO: 133199 - DNA, 25 bp, Homo sapien
gacaagtgaccaatatcccctaaat

SEQ ID NO: 133200 - DNA, 25 bp, Homo sapien
tgagaaaatcccaaataccaagacc

SEQ ID NO: 133201 - DNA, 25 bp, Homo sapien
gctggctgccattagactgtatttg

SEQ ID NO: 133202 - DNA, 25 bp, Homo sapien
ctgttctaccgcctgaaggaggtgg

SEQ ID NO: 133203 - DNA, 25 bp, Homo sapien
gctactcttagaaacatggtcctgg

SEQ ID NO: 133204 - DNA, 25 bp, Homo sapien
ggtagcatgtggcttatttcccagg

SEQ ID NO: 133205 - DNA, 25 bp, Homo sapien
cttgccagtcaagttgcgtgtggtc

SEQ ID NO: 133206 - DNA, 25 bp, Homo sapien
aacacctcttgccagtcaagttgcg

SEQ ID NO: 133207 - DNA, 25 bp, Homo sapien
ttgcgtgtggtcattggacggttca

SEQ ID NO: 133208 - DNA, 25 bp, Homo sapien
tcaagttgcgtgtggtcattggacg

SEQ ID NO: 133209 - DNA, 25 bp, Homo sapien
caggcggagtatgggaaattctttg

SEQ ID NO: 133210 - DNA, 25 bp, Homo sapien
cattcttaccaaaccaagaaacagg

SEQ ID NO: 133211 - DNA, 25 bp, Homo sapien
tttcgttacttaggtaaatgtgtgc

SEQ ID NO: 133212 - DNA, 25 bp, Homo sapien
gacaggtgatccagaaaacaggcgg

SEQ ID NO: 133213 - DNA, 25 bp, Homo sapien
ctgattctccggggagtaagatgta

SEQ ID NO: 133214 - DNA, 25 bp, Homo sapien
gattctccggggagtaagatgtaga

SEQ ID NO: 133215 - DNA, 25 bp, Homo sapien
attctccggggagtaagatgtagac

SEQ ID NO: 133216 - DNA, 25 bp, Homo sapien
tgattctccggggagtaagatgtag

SEQ ID NO: 133217 - DNA, 25 bp, Homo sapien
ctatgaccaagtcagatagacagct

SEQ ID NO: 133218 - DNA, 25 bp, Homo sapien
cagactccctgaagtatcttgtgca

SEQ ID NO: 133219 - DNA, 25 bp, Homo sapien
tatcttgtgcaacttaggagcaggg

SEQ ID NO: 133220 - DNA, 25 bp, Homo sapien
ttcaagccccagatcccagtgtgct

SEQ ID NO: 133221 - DNA, 25 bp, Homo sapien
gatgtcctggttactgcaatctaca

SEQ ID NO: 133222 - DNA, 25 bp, Homo sapien
taaagcatttatcgagctcctactg

SEQ ID NO: 133223 - DNA, 25 bp, Homo sapien
tagcgatagccttgtagagctaagc

SEQ ID NO: 133224 - DNA, 25 bp, Homo sapien
tacacctgagcctttgcacccatgt

SEQ ID NO: 133225 - DNA, 25 bp, Homo sapien
agtgaccaagctgcactgccctggt

SEQ ID NO: 133226 - DNA, 25 bp, Homo sapien
ggaaggagtgatgaccacaaaacag

SEQ ID NO: 133227 - DNA, 25 bp, Homo sapien
ctcagtgcctggtcggctgcaagag

SEQ ID NO: 133228 - DNA, 25 bp, Homo sapien
tgacaggaggaagtcaaaggcttgt

SEQ ID NO: 133229 - DNA, 25 bp, Homo sapien
ttggtgtgcagaacgatggtgcacc

SEQ ID NO: 133230 - DNA, 25 bp, Homo sapien
gtgtgcagaacgatggtgcaccatc

SEQ ID NO: 133231 - DNA, 25 bp, Homo sapien
tgctttgggcgcggcaaaaaacacc

SEQ ID NO: 133232 - DNA, 25 bp, Homo sapien
cagccagctgctttgggcgcggcaa

SEQ ID NO: 133233 - DNA, 25 bp, Homo sapien
cttcccagaatgcaacagtctccat

SEQ ID NO: 133234 - DNA, 25 bp, Homo sapien
ggtgctctggttgcatccatcccaa

SEQ ID NO: 133235 - DNA, 25 bp, Homo sapien
gaaagcaaaataggtgccctcaccc

SEQ ID NO: 133236 - DNA, 25 bp, Homo sapien
caggatgcgcatttcccggaagtga

SEQ ID NO: 133237 - DNA, 25 bp, Homo sapien
gacttgatccattggattttcacat

SEQ ID NO: 133238 - DNA, 25 bp, Homo sapien
caaggttatgacttgatccattgga

SEQ ID NO: 133239 - DNA, 25 bp, Homo sapien
ttatgacttgatccattggattttc

SEQ ID NO: 133240 - DNA, 25 bp, Homo sapien
tcttcagtcaaggttatgacttgat

SEQ ID NO: 133241 - DNA, 25 bp, Homo sapien
gagcctcagagcgaccctttataga

SEQ ID NO: 133242 - DNA, 25 bp, Homo sapien
tcaatcccgaggctcaatagtgtgc

SEQ ID NO: 133243 - DNA, 25 bp, Homo sapien
tatagactctgacagggctgtccac

SEQ ID NO: 133244 - DNA, 25 bp, Homo sapien
tccatgctgaattaacgctgttgag

SEQ ID NO: 133245 - DNA, 25 bp, Homo sapien
tgatgcaggatgagcttatattcat

SEQ ID NO: 133246 - DNA, 25 bp, Homo sapien
atgatgcaggatgagcttatattca

SEQ ID NO: 133247 - DNA, 25 bp, Homo sapien
ctgggtcctcaatggaaaggttctt

SEQ ID NO: 133248 - DNA, 25 bp, Homo sapien
tcttcataagccactgcacaatgtc

SEQ ID NO: 133249 - DNA, 25 bp, Homo sapien
agtcccatcaggaatgagaagggtg

SEQ ID NO: 133250 - DNA, 25 bp, Homo sapien
tcatcatccccagcagtaagaatgc

SEQ ID NO: 133251 - DNA, 25 bp, Homo sapien
cagtgcgttccccaatatgacagtc

SEQ ID NO: 133252 - DNA, 25 bp, Homo sapien
tcgctgcccatagagacgtaggact

SEQ ID NO: 133253 - DNA, 25 bp, Homo sapien
ccttcatggtgagaacatggtctga

SEQ ID NO: 133254 - DNA, 25 bp, Homo sapien
catggtgagaacatggtctgagatt

SEQ ID NO: 133255 - DNA, 25 bp, Homo sapien
cctgggcagcgataaggctccccaa

SEQ ID NO: 133256 - DNA, 25 bp, Homo sapien
catccttcatggtgagaacatggtc

SEQ ID NO: 133257 - DNA, 25 bp, Homo sapien
ccagcagttcgaaggccagaagtac

SEQ ID NO: 133258 - DNA, 25 bp, Homo sapien
ttttcaggttcccagcagttcgaag

SEQ ID NO: 133259 - DNA, 25 bp, Homo sapien
ttcaggttcccagcagttcgaaggc

SEQ ID NO: 133260 - DNA, 25 bp, Homo sapien
gttcccagcagttcgaaggccagaa

SEQ ID NO: 133261 - DNA, 25 bp, Homo sapien
gcagcaaggatgcatgcaaaggggc

SEQ ID NO: 133262 - DNA, 25 bp, Homo sapien
agtcagcagcaaggatgcatgcaaa

SEQ ID NO: 133263 - DNA, 25 bp, Homo sapien
ctgagtcagcagcaaggatgcatgc

SEQ ID NO: 133264 - DNA, 25 bp, Homo sapien
cagcaaggatgcatgcaaaggggca

SEQ ID NO: 133265 - DNA, 25 bp, Homo sapien
ctcattgagtgtcccagtcccaagg

SEQ ID NO: 133266 - DNA, 25 bp, Homo sapien
tctcattgagtgtcccagtcccaag

SEQ ID NO: 133267 - DNA, 25 bp, Homo sapien
tcattgagtgtcccagtcccaagga

SEQ ID NO: 133268 - DNA, 25 bp, Homo sapien
tcttcctggatccacttatcacatt

SEQ ID NO: 133269 - DNA, 25 bp, Homo sapien
ggatccacttatcacattggttagg

SEQ ID NO: 133270 - DNA, 25 bp, Homo sapien
cacagtgtcagagggcccacagtgg

SEQ ID NO: 133271 - DNA, 25 bp, Homo sapien
tcacattggttagggtgcagcacag

SEQ ID NO: 133272 - DNA, 25 bp, Homo sapien
tatgagcggtcaaatgcagctctca

SEQ ID NO: 133273 - DNA, 25 bp, Homo sapien
ttatgagcggtcaaatgcagctctc

SEQ ID NO: 133274 - DNA, 25 bp, Homo sapien
taatgtccctgtgcctaaagtcaca

SEQ ID NO: 133275 - DNA, 25 bp, Homo sapien
tgtccaaatgggtaagcggggtcaa

SEQ ID NO: 133276 - DNA, 25 bp, Homo sapien
aggaatcttttcaccacaatgagga

SEQ ID NO: 133277 - DNA, 25 bp, Homo sapien
gtcacagggtcacatgctactagct

SEQ ID NO: 133278 - DNA, 25 bp, Homo sapien
tgctttgacaatgctgccctggaca

SEQ ID NO: 133279 - DNA, 25 bp, Homo sapien
gctttgacaatgctgccctggacag

SEQ ID NO: 133280 - DNA, 25 bp, Homo sapien
tttccaatgaaccaagcagctatag

SEQ ID NO: 133281 - DNA, 25 bp, Homo sapien
tctatcacaaagtacctccttcagt

SEQ ID NO: 133282 - DNA, 25 bp, Homo sapien
gataaaggggtgtccgatctatcac

SEQ ID NO: 133283 - DNA, 25 bp, Homo sapien
agcagctatagtgcttcactgtgtc

SEQ ID NO: 133284 - DNA, 25 bp, Homo sapien
tccagagccaagtggaacaatccag

SEQ ID NO: 133285 - DNA, 25 bp, Homo sapien
gccaagtggaacaatccagggaaaa

SEQ ID NO: 133286 - DNA, 25 bp, Homo sapien
aaacagtagatgaatggcataaata

SEQ ID NO: 133287 - DNA, 25 bp, Homo sapien
caacagaatgatcaagagggagggc

SEQ ID NO: 133288 - DNA, 25 bp, Homo sapien
cagttccagccttgctttattttgc

SEQ ID NO: 133289 - DNA, 25 bp, Homo sapien
tgcttcataatctgccagttccagc

SEQ ID NO: 133290 - DNA, 25 bp, Homo sapien
gttccagccttgctttattttgcat

SEQ ID NO: 133291 - DNA, 25 bp, Homo sapien
gccagttccagccttgctttatttt

SEQ ID NO: 133292 - DNA, 25 bp, Homo sapien
ggtgggtgggtctgaagatgctgtt

SEQ ID NO: 133293 - DNA, 25 bp, Homo sapien
aaggattctctgctccccttaatgt

SEQ ID NO: 133294 - DNA, 25 bp, Homo sapien
gaagatgctgttaatgctggactat

SEQ ID NO: 133295 - DNA, 25 bp, Homo sapien
aaaagcaggaagggctttggcggtg

SEQ ID NO: 133296 - DNA, 25 bp, Homo sapien
gaaaattgtctgtggttattgggga

SEQ ID NO: 133297 - DNA, 25 bp, Homo sapien
gttgctgaaaatcgggaaaattgtc

SEQ ID NO: 133298 - DNA, 25 bp, Homo sapien
tattggggaattaacgagtctttgc

SEQ ID NO: 133299 - DNA, 25 bp, Homo sapien
aattaacgagtctttgccacctgct

SEQ ID NO: 133300 - DNA, 25 bp, Homo sapien
ggtgttttacaagaatgcaactcac

SEQ ID NO: 133301 - DNA, 25 bp, Homo sapien
ctctatggttcacctgattcctctc

SEQ ID NO: 133302 - DNA, 25 bp, Homo sapien
cttctgcttgcataaagatgaattc

SEQ ID NO: 133303 - DNA, 25 bp, Homo sapien
tgcttctgcttgcataaagatgaat

SEQ ID NO: 133304 - DNA, 25 bp, Homo sapien
acttcctcgcaaaggccctctggag

SEQ ID NO: 133305 - DNA, 25 bp, Homo sapien
ggccctctggagtcttgctaagttt

SEQ ID NO: 133306 - DNA, 25 bp, Homo sapien
tctgaaaaggtctctatcaagttca

SEQ ID NO: 133307 - DNA, 25 bp, Homo sapien
ctctgaaaaggtctctatcaagttc

SEQ ID NO: 133308 - DNA, 25 bp, Homo sapien
tagaatgagacaagatccaggaggc

SEQ ID NO: 133309 - DNA, 25 bp, Homo sapien
ctagaatgagacaagatccaggagg

SEQ ID NO: 133310 - DNA, 25 bp, Homo sapien
agaatgagacaagatccaggaggca

SEQ ID NO: 133311 - DNA, 25 bp, Homo sapien
tggctttctaaaggcagaataatgg

SEQ ID NO: 133312 - DNA, 25 bp, Homo sapien
catctggctttctaaaggcagaata

SEQ ID NO: 133313 - DNA, 25 bp, Homo sapien
accatctggctttctaaaggcagaa

SEQ ID NO: 133314 - DNA, 25 bp, Homo sapien
tctggctttctaaaggcagaataat

SEQ ID NO: 133315 - DNA, 25 bp, Homo sapien
ccaaaaggctcgttcttgactatcc

SEQ ID NO: 133316 - DNA, 25 bp, Homo sapien
acatcccaaaaggctcgttcttgac

SEQ ID NO: 133317 - DNA, 25 bp, Homo sapien
caaaaggctcgttcttgactatcca

SEQ ID NO: 133318 - DNA, 25 bp, Homo sapien
tcccaaaaggctcgttcttgactat

SEQ ID NO: 133319 - DNA, 25 bp, Homo sapien
ttgaacaaggtgacgtcctgccttt

SEQ ID NO: 133320 - DNA, 25 bp, Homo sapien
aattgaacaaggtgacgtcctgcct

SEQ ID NO: 133321 - DNA, 25 bp, Homo sapien
tgaacaaggtgacgtcctgcctttt

SEQ ID NO: 133322 - DNA, 25 bp, Homo sapien
aacaaggtgacgtcctgcctttttg

SEQ ID NO: 133323 - DNA, 25 bp, Homo sapien
caaacgtcgacattttcggatatcc

SEQ ID NO: 133324 - DNA, 25 bp, Homo sapien
ttttcggatatccatttctgttgtg

SEQ ID NO: 133325 - DNA, 25 bp, Homo sapien
tcggatatccatttctgttgtgttc

SEQ ID NO: 133326 - DNA, 25 bp, Homo sapien
gtggattcttcaaacgtcgacattt

SEQ ID NO: 133327 - DNA, 25 bp, Homo sapien
tcctgattggttggctgagtacatg

SEQ ID NO: 133328 - DNA, 25 bp, Homo sapien
gctgagtacatgcaccgggctctgt

SEQ ID NO: 133329 - DNA, 25 bp, Homo sapien
actcttcagtcacgccatacacgga

SEQ ID NO: 133330 - DNA, 25 bp, Homo sapien
gcctgggactcttcagtcacgccat

SEQ ID NO: 133331 - DNA, 25 bp, Homo sapien
gaactcaaagcttgctcaatcttca

SEQ ID NO: 133332 - DNA, 25 bp, Homo sapien
tcagagttgaacatttgaaagggtt

SEQ ID NO: 133333 - DNA, 25 bp, Homo sapien
gcttgctcaatcttcagagttgaac

SEQ ID NO: 133334 - DNA, 25 bp, Homo sapien
ttccaggaactcaaagcttgctcaa

SEQ ID NO: 133335 - DNA, 25 bp, Homo sapien
ttataaggactgtgtgacatgagcc

SEQ ID NO: 133336 - DNA, 25 bp, Homo sapien
tacgcccttttctagtaactgctgg

SEQ ID NO: 133337 - DNA, 25 bp, Homo sapien
ttacagcagttaccccaaggcatgg

SEQ ID NO: 133338 - DNA, 25 bp, Homo sapien
taaagtagaccatcctgagctggtg

SEQ ID NO: 133339 - DNA, 25 bp, Homo sapien
cgatctgtgcgttcaaaaatgttat

SEQ ID NO: 133340 - DNA, 25 bp, Homo sapien
gtctgtcgatctgtgcgttcaaaaa

SEQ ID NO: 133341 - DNA, 25 bp, Homo sapien
ttttcaaacaatgtctgtcgatctg

SEQ ID NO: 133342 - DNA, 25 bp, Homo sapien
caatgtctgtcgatctgtgcgttca

SEQ ID NO: 133343 - DNA, 25 bp, Homo sapien
gattacggtacttagaaccactgga

SEQ ID NO: 133344 - DNA, 25 bp, Homo sapien
ctaaattgcaaaccctaaagagctc

SEQ ID NO: 133345 - DNA, 25 bp, Homo sapien
cctcaaagtatactaggacagccat

SEQ ID NO: 133346 - DNA, 25 bp, Homo sapien
catgagcattgctagcacaccgacc

SEQ ID NO: 133347 - DNA, 25 bp, Homo sapien
tgtggatgtgcgtgcccacctgaga

SEQ ID NO: 133348 - DNA, 25 bp, Homo sapien
tttatctccagctaacacgcgtctc

SEQ ID NO: 133349 - DNA, 25 bp, Homo sapien
tctaatgaaaaaccctcgtgtcgca

SEQ ID NO: 133350 - DNA, 25 bp, Homo sapien
ctgagagagctcagcctgcatctct

SEQ ID NO: 133351 - DNA, 25 bp, Homo sapien
acgagttgtactgaggtgccccaga

SEQ ID NO: 133352 - DNA, 25 bp, Homo sapien
agccagcagcagaaaaccgaaatcc

SEQ ID NO: 133353 - DNA, 25 bp, Homo sapien
gtgacgagttgtactgaggtgcccc

SEQ ID NO: 133354 - DNA, 25 bp, Homo sapien
cagaaaaccgaaatcctgttcaggg

SEQ ID NO: 133355 - DNA, 25 bp, Homo sapien
tgattctttacctgaaccttggtgc

SEQ ID NO: 133356 - DNA, 25 bp, Homo sapien
catttttgcactgttgcagccatga

SEQ ID NO: 133357 - DNA, 25 bp, Homo sapien
tatatatcttttcctcacttgattc

SEQ ID NO: 133358 - DNA, 25 bp, Homo sapien
gattctttacctgaaccttggtgca

SEQ ID NO: 133359 - DNA, 25 bp, Homo sapien
tcagctggtgttatcaaagggtcat

SEQ ID NO: 133360 - DNA, 25 bp, Homo sapien
catattgttccgtgtaggcaattaa

SEQ ID NO: 133361 - DNA, 25 bp, Homo sapien
tgtcccacaaagcaacgtcatcgct

SEQ ID NO: 133362 - DNA, 25 bp, Homo sapien
cgtcatcgctgatccaagggttgga

SEQ ID NO: 133363 - DNA, 25 bp, Homo sapien
atatctcatcgaaagagaagcccca

SEQ ID NO: 133364 - DNA, 25 bp, Homo sapien
tggtccttcaatatctcatcgaaag

SEQ ID NO: 133365 - DNA, 25 bp, Homo sapien
caggaatcgtagaaactggtcccgc

SEQ ID NO: 133366 - DNA, 25 bp, Homo sapien
tctttttactcgctgttggctgggc

SEQ ID NO: 133367 - DNA, 25 bp, Homo sapien
gaggttttctgaactgaattcggac

SEQ ID NO: 133368 - DNA, 25 bp, Homo sapien
tgaggttttctgaactgaattcgga

SEQ ID NO: 133369 - DNA, 25 bp, Homo sapien
ctgaggttttctgaactgaattcgg

SEQ ID NO: 133370 - DNA, 25 bp, Homo sapien
taaagggggcctctataccgctcca

SEQ ID NO: 133371 - DNA, 25 bp, Homo sapien
aaagggggcctctataccgctccat

SEQ ID NO: 133372 - DNA, 25 bp, Homo sapien
gggatgtcaacttctattacatcat

SEQ ID NO: 133373 - DNA, 25 bp, Homo sapien
cagaagacactgatcaaaggggatg

SEQ ID NO: 133374 - DNA, 25 bp, Homo sapien
atccagggtgacactttggggctcc

SEQ ID NO: 133375 - DNA, 25 bp, Homo sapien
attgttccttaaaggatccagggtg

SEQ ID NO: 133376 - DNA, 25 bp, Homo sapien
tcaacaaacagctgtctgtgggtcc

SEQ ID NO: 133377 - DNA, 25 bp, Homo sapien
ggtccactcggtgcaaagggagcct

SEQ ID NO: 133378 - DNA, 25 bp, Homo sapien
aggccaagaaactgagcggagctcc

SEQ ID NO: 133379 - DNA, 25 bp, Homo sapien
gacagaagccatgagcattcccaag

SEQ ID NO: 133380 - DNA, 25 bp, Homo sapien
ttcagccgacactgtgtggaactcg

SEQ ID NO: 133381 - DNA, 25 bp, Homo sapien
ccgacactgtgtggaactcggatca

SEQ ID NO: 133382 - DNA, 25 bp, Homo sapien
gacactgtgtggaactcggatcatc

SEQ ID NO: 133383 - DNA, 25 bp, Homo sapien
ctcccttcagccgacactgtgtgga

SEQ ID NO: 133384 - DNA, 25 bp, Homo sapien
agcagaagggccgttgtgactggca

SEQ ID NO: 133385 - DNA, 25 bp, Homo sapien
caggccacaaggactaatatctggg

SEQ ID NO: 133386 - DNA, 25 bp, Homo sapien
cccctggtctctgccaattgtcata

SEQ ID NO: 133387 - DNA, 25 bp, Homo sapien
gactggcaggccacaaggactaata

SEQ ID NO: 133388 - DNA, 25 bp, Homo sapien
tcaaatccatccatcctgcactgag

SEQ ID NO: 133389 - DNA, 25 bp, Homo sapien
gcggcagggagtgaaatgccagcag

SEQ ID NO: 133390 - DNA, 25 bp, Homo sapien
atcaaatccatccatcctgcactga

SEQ ID NO: 133391 - DNA, 25 bp, Homo sapien
ggcagcggcagggagtgaaatgcca

SEQ ID NO: 133392 - DNA, 25 bp, Homo sapien
agccccttgaagctttggaagcttc

SEQ ID NO: 133393 - DNA, 25 bp, Homo sapien
ggttagtgttggccatcttcgagcc

SEQ ID NO: 133394 - DNA, 25 bp, Homo sapien
acatctgctgcccatgggaagcccc

SEQ ID NO: 133395 - DNA, 25 bp, Homo sapien
tgagctgggaactcagagcccaggc

SEQ ID NO: 133396 - DNA, 25 bp, Homo sapien
gtgagaggaaagcagtcgtgtttct

SEQ ID NO: 133397 - DNA, 25 bp, Homo sapien
ttcccctacctcattgttcaggtgg

SEQ ID NO: 133398 - DNA, 25 bp, Homo sapien
gctgttcccctacctcattgttcag

SEQ ID NO: 133399 - DNA, 25 bp, Homo sapien
aggtgggcccttgactcttgagctg

SEQ ID NO: 133400 - DNA, 25 bp, Homo sapien
tgacagccacaagtcctgggtgctc

SEQ ID NO: 133401 - DNA, 25 bp, Homo sapien
gaaatgctttcaggtcctgtgaggg

SEQ ID NO: 133402 - DNA, 25 bp, Homo sapien
ctggcccagtgtgatccctcggatt

SEQ ID NO: 133403 - DNA, 25 bp, Homo sapien
tgtgatccctcggattccagccttc

SEQ ID NO: 133404 - DNA, 25 bp, Homo sapien
agtggatggagggatatgtggcatg

SEQ ID NO: 133405 - DNA, 25 bp, Homo sapien
atggagggatatgtggcatggctct

SEQ ID NO: 133406 - DNA, 25 bp, Homo sapien
tggatggagggatatgtggcatggc

SEQ ID NO: 133407 - DNA, 25 bp, Homo sapien
tgagtggatggagggatatgtggca

SEQ ID NO: 133408 - DNA, 25 bp, Homo sapien
cccaaggcagccttgcagcaggatc

SEQ ID NO: 133409 - DNA, 25 bp, Homo sapien
gctggttccgagagcagcgggaatc

SEQ ID NO: 133410 - DNA, 25 bp, Homo sapien
cagtgagtaagagagtaggtcctgt

SEQ ID NO: 133411 - DNA, 25 bp, Homo sapien
cagcaggatccaggtctgggtgtca

SEQ ID NO: 133412 - DNA, 25 bp, Homo sapien
cctccatctttgacattttgactgg

SEQ ID NO: 133413 - DNA, 25 bp, Homo sapien
tcttaagatcttggacagccagcca

SEQ ID NO: 133414 - DNA, 25 bp, Homo sapien
tgccagatttcttctaccctcttgg

SEQ ID NO: 133415 - DNA, 25 bp, Homo sapien
gactggttatctcatagctgtgaga

SEQ ID NO: 133416 - DNA, 25 bp, Homo sapien
aattatatgaaattggatttcactg

SEQ ID NO: 133417 - DNA, 25 bp, Homo sapien
aaaattatatgaaattggatttcac

SEQ ID NO: 133418 - DNA, 25 bp, Homo sapien
aaattatatgaaattggatttcact

SEQ ID NO: 133419 - DNA, 25 bp, Homo sapien
gaatcttggccagcaagcgaggaca

SEQ ID NO: 133420 - DNA, 25 bp, Homo sapien
tcagcactaacaatccagggacagt

SEQ ID NO: 133421 - DNA, 25 bp, Homo sapien
tctgaactgcacctactttgctggg

SEQ ID NO: 133422 - DNA, 25 bp, Homo sapien
tttagcacagggtcacaaactacag

SEQ ID NO: 133423 - DNA, 25 bp, Homo sapien
tattaaagcatatgaccactgcagg

SEQ ID NO: 133424 - DNA, 25 bp, Homo sapien
aaaacccattggagagaggctgcac

SEQ ID NO: 133425 - DNA, 25 bp, Homo sapien
aatgctgggcccacgataacagggt

SEQ ID NO: 133426 - DNA, 25 bp, Homo sapien
ggctctaacaatgcgtgtggtcaaa

SEQ ID NO: 133427 - DNA, 25 bp, Homo sapien
ggtggggcatcttagcaggtaccac

SEQ ID NO: 133428 - DNA, 25 bp, Homo sapien
cagggtggggcatcttagcaggtac

SEQ ID NO: 133429 - DNA, 25 bp, Homo sapien
gggcatcttagcaggtaccacaggt

SEQ ID NO: 133430 - DNA, 25 bp, Homo sapien
gcatcttagcaggtaccacaggtca

SEQ ID NO: 133431 - DNA, 25 bp, Homo sapien
gtgatgcaggaacttataaaaggta

SEQ ID NO: 133432 - DNA, 25 bp, Homo sapien
ctgctcccatgaaataactttcaaa

SEQ ID NO: 133433 - DNA, 25 bp, Homo sapien
tctgctcccatgaaataactttcaa

SEQ ID NO: 133434 - DNA, 25 bp, Homo sapien
tgtgatgcaggaacttataaaaggt

SEQ ID NO: 133435 - DNA, 25 bp, Homo sapien
cttttcttcagcacggttcttgcag

SEQ ID NO: 133436 - DNA, 25 bp, Homo sapien
agtggtgaggacttgaagtggatca

SEQ ID NO: 133437 - DNA, 25 bp, Homo sapien
caaatcctggtaagcatttgaccgg

SEQ ID NO: 133438 - DNA, 25 bp, Homo sapien
catttgaccggaggaagcgggcata

SEQ ID NO: 133439 - DNA, 25 bp, Homo sapien
tggtaagcatttgaccggaggaagc

SEQ ID NO: 133440 - DNA, 25 bp, Homo sapien
cagcagcaaatcctggtaagcattt

SEQ ID NO: 133441 - DNA, 25 bp, Homo sapien
accagtgagagagctgccccaaccc

SEQ ID NO: 133442 - DNA, 25 bp, Homo sapien
tgaccagtgagagagctgccccaac

SEQ ID NO: 133443 - DNA, 25 bp, Homo sapien
cagtgagagagctgccccaaccctg

SEQ ID NO: 133444 - DNA, 25 bp, Homo sapien
agtgagagagctgccccaaccctgg

SEQ ID NO: 133445 - DNA, 25 bp, Homo sapien
gggcccctgcacctcaaatccatga

SEQ ID NO: 133446 - DNA, 25 bp, Homo sapien
atccatgactccatgggctgcaagg

SEQ ID NO: 133447 - DNA, 25 bp, Homo sapien
cctgcacctcaaatccatgactcca

SEQ ID NO: 133448 - DNA, 25 bp, Homo sapien
ccatgactccatgggctgcaaggaa

SEQ ID NO: 133449 - DNA, 25 bp, Homo sapien
ctgacaactgggataccccagaagt

SEQ ID NO: 133450 - DNA, 25 bp, Homo sapien
ccagagagctgctgacaactgggat

SEQ ID NO: 133451 - DNA, 25 bp, Homo sapien
ggatgcaggaaacccagagagctgc

SEQ ID NO: 133452 - DNA, 25 bp, Homo sapien
acaactgggataccccagaagtcct

SEQ ID NO: 133453 - DNA, 25 bp, Homo sapien
cctccagcaggggaatcgacaggag

SEQ ID NO: 133454 - DNA, 25 bp, Homo sapien
ggggaatcgacaggaggccaggctc

SEQ ID NO: 133455 - DNA, 25 bp, Homo sapien
catgtatgagggtgtcggcctcctc

SEQ ID NO: 133456 - DNA, 25 bp, Homo sapien
aaaggagcccctccattggcatcct

SEQ ID NO: 133457 - DNA, 25 bp, Homo sapien
tgggctggagttatcaaaagttcct

SEQ ID NO: 133458 - DNA, 25 bp, Homo sapien
tctgggctggagttatcaaaagttc

SEQ ID NO: 133459 - DNA, 25 bp, Homo sapien
tgagatctgggctggagttatcaaa

SEQ ID NO: 133460 - DNA, 25 bp, Homo sapien
agatctgggctggagttatcaaaag

SEQ ID NO: 133461 - DNA, 25 bp, Homo sapien
cacactgcgagtgaacttttctagg

SEQ ID NO: 133462 - DNA, 25 bp, Homo sapien
cactgcgagtgaacttttctaggga

SEQ ID NO: 133463 - DNA, 25 bp, Homo sapien
actgcgagtgaacttttctagggaa

SEQ ID NO: 133464 - DNA, 25 bp, Homo sapien
ctgcgagtgaacttttctagggaag

SEQ ID NO: 133465 - DNA, 25 bp, Homo sapien
ctgagggaagaaaaccgactgaact

SEQ ID NO: 133466 - DNA, 25 bp, Homo sapien
gctgagggaagaaaaccgactgaac

SEQ ID NO: 133467 - DNA, 25 bp, Homo sapien
aggctgggcgatcaagggtgcacct

SEQ ID NO: 133468 - DNA, 25 bp, Homo sapien
gaacagatgatcaaatgcccaggcc

SEQ ID NO: 133469 - DNA, 25 bp, Homo sapien
ctgaggctgggcgatcaagggtgca

SEQ ID NO: 133470 - DNA, 25 bp, Homo sapien
gagggagccgcttgctcttttttgc

SEQ ID NO: 133471 - DNA, 25 bp, Homo sapien
gtatagttcgatggcttctccctga

SEQ ID NO: 133472 - DNA, 25 bp, Homo sapien
ttcgatgagctatggttctgagcca

SEQ ID NO: 133473 - DNA, 25 bp, Homo sapien
ccagggttcacagagggaaattttg

SEQ ID NO: 133474 - DNA, 25 bp, Homo sapien
gcctacacagcaacattagctcgcg

SEQ ID NO: 133475 - DNA, 25 bp, Homo sapien
gaatctgaagcccatctttacccag

SEQ ID NO: 133476 - DNA, 25 bp, Homo sapien
tgttagaatcaaggcctgaggaggc

SEQ ID NO: 133477 - DNA, 25 bp, Homo sapien
gactcatgcagaggcgactaacaca

SEQ ID NO: 133478 - DNA, 25 bp, Homo sapien
ggacaccgcagggattcagctactt

SEQ ID NO: 133479 - DNA, 25 bp, Homo sapien
gttcatggtacaggatgggccccgt

SEQ ID NO: 133480 - DNA, 25 bp, Homo sapien
caaagcagccatgaagatagaccag

SEQ ID NO: 133481 - DNA, 25 bp, Homo sapien
tcctcaacagaggtggaacaaaggc

SEQ ID NO: 133482 - DNA, 25 bp, Homo sapien
caaaggcaagtcaatatcaatgggc

SEQ ID NO: 133483 - DNA, 25 bp, Homo sapien
aggaaagcctgtcgcagagatgcca

SEQ ID NO: 133484 - DNA, 25 bp, Homo sapien
gaggtggatgaacgcctggtcctcc

SEQ ID NO: 133485 - DNA, 25 bp, Homo sapien
taaacttcgatgctctcttaggagg

SEQ ID NO: 133486 - DNA, 25 bp, Homo sapien
gcaccttggcaaagctaaacttcga

SEQ ID NO: 133487 - DNA, 25 bp, Homo sapien
ctccggcgactcaccgtggacgagt

SEQ ID NO: 133488 - DNA, 25 bp, Homo sapien
accgtggacgagtgaaccctgaaca

SEQ ID NO: 133489 - DNA, 25 bp, Homo sapien
gactcaccgtggacgagtgaaccct

SEQ ID NO: 133490 - DNA, 25 bp, Homo sapien
acgagtgaaccctgaacaactgagc

SEQ ID NO: 133491 - DNA, 25 bp, Homo sapien
ttggctgcttttggcggacaggttg

SEQ ID NO: 133492 - DNA, 25 bp, Homo sapien
tttggctgcttttggcggacaggtt

SEQ ID NO: 133493 - DNA, 25 bp, Homo sapien
caggttgaaccatcagcgggaacag

SEQ ID NO: 133494 - DNA, 25 bp, Homo sapien
ggacaggttgaaccatcagcgggaa

SEQ ID NO: 133495 - DNA, 25 bp, Homo sapien
tgccccacatgtccagaaggtgagt

SEQ ID NO: 133496 - DNA, 25 bp, Homo sapien
gccccacatgtccagaaggtgagtc

SEQ ID NO: 133497 - DNA, 25 bp, Homo sapien
cgggccctgattgccccacatgtcc

SEQ ID NO: 133498 - DNA, 25 bp, Homo sapien
agggaaagccaggagcagctgcctc

SEQ ID NO: 133499 - DNA, 25 bp, Homo sapien
gaaagccaggagcagctgcctccac

SEQ ID NO: 133500 - DNA, 25 bp, Homo sapien
gggaaagccaggagcagctgcctcc

SEQ ID NO: 133501 - DNA, 25 bp, Homo sapien
cagggaaagccaggagcagctgcct

SEQ ID NO: 133502 - DNA, 25 bp, Homo sapien
ccttgctagagactggcagggtacg

SEQ ID NO: 133503 - DNA, 25 bp, Homo sapien
tcacttgactgcttggcacattggg

SEQ ID NO: 133504 - DNA, 25 bp, Homo sapien
gatctgaatcagtggctgtaaacac

SEQ ID NO: 133505 - DNA, 25 bp, Homo sapien
gcagggtacgcgatttggatctgaa

SEQ ID NO: 133506 - DNA, 25 bp, Homo sapien
tagatccctgcttggcatacacaca

SEQ ID NO: 133507 - DNA, 25 bp, Homo sapien
atagatccctgcttggcatacacac

SEQ ID NO: 133508 - DNA, 25 bp, Homo sapien
acaagtgacaagcatgccgagaccc

SEQ ID NO: 133509 - DNA, 25 bp, Homo sapien
cccatgtggctgcacgaggatggca

SEQ ID NO: 133510 - DNA, 25 bp, Homo sapien
ggcactggggtctgactgcacaagt

SEQ ID NO: 133511 - DNA, 25 bp, Homo sapien
catcagccgcttgtaaagtgagagc

SEQ ID NO: 133512 - DNA, 25 bp, Homo sapien
ccttgaccgtgacattggcagtgct

SEQ ID NO: 133513 - DNA, 25 bp, Homo sapien
gtgctgtcgccttgccagactcctg

SEQ ID NO: 133514 - DNA, 25 bp, Homo sapien
tggcagtgctgtcgccttgccagac

SEQ ID NO: 133515 - DNA, 25 bp, Homo sapien
ggtctcctctccttgaccgtgacat

SEQ ID NO: 133516 - DNA, 25 bp, Homo sapien
ccactaagcaaacacccaagggtct

SEQ ID NO: 133517 - DNA, 25 bp, Homo sapien
caggctattcctacctatggacagg

SEQ ID NO: 133518 - DNA, 25 bp, Homo sapien
gaagcatcccctgttgtttccacca

SEQ ID NO: 133519 - DNA, 25 bp, Homo sapien
tcccatttagccacactgcaggagg

SEQ ID NO: 133520 - DNA, 25 bp, Homo sapien
ttgtgctgctaacaggccacatatg

SEQ ID NO: 133521 - DNA, 25 bp, Homo sapien
cttgtgctgctaacaggccacatat

SEQ ID NO: 133522 - DNA, 25 bp, Homo sapien
cccttcttgtgctgctaacaggcca

SEQ ID NO: 133523 - DNA, 25 bp, Homo sapien
tcccagctgcgggaaatgctttcca

SEQ ID NO: 133524 - DNA, 25 bp, Homo sapien
tcccctgccatgaagacgctgaata

SEQ ID NO: 133525 - DNA, 25 bp, Homo sapien
gactgcctttccagcggacatagac

SEQ ID NO: 133526 - DNA, 25 bp, Homo sapien
ggacatagacggattaatacaccct

SEQ ID NO: 133527 - DNA, 25 bp, Homo sapien
ttttaggaaaggctacaaatgccat

SEQ ID NO: 133528 - DNA, 25 bp, Homo sapien
gaaaggctacaaatgccatcctgta

SEQ ID NO: 133529 - DNA, 25 bp, Homo sapien
ggaaaggctacaaatgccatcctgt

SEQ ID NO: 133530 - DNA, 25 bp, Homo sapien
ttaggaaaggctacaaatgccatcc

SEQ ID NO: 133531 - DNA, 25 bp, Homo sapien
tatgggacggtcagccacgagcagc

SEQ ID NO: 133532 - DNA, 25 bp, Homo sapien
aaaggcagtctggttggtatgggac

SEQ ID NO: 133533 - DNA, 25 bp, Homo sapien
gacctctcagaaacacagtcctgct

SEQ ID NO: 133534 - DNA, 25 bp, Homo sapien
tggagcaagatgcacttcactgtgc

SEQ ID NO: 133535 - DNA, 25 bp, Homo sapien
ttgatggaatggcacgggtagctca

SEQ ID NO: 133536 - DNA, 25 bp, Homo sapien
cctgatctcccatgggcctgtttga

SEQ ID NO: 133537 - DNA, 25 bp, Homo sapien
gggtagctcatggaccctctctcct

SEQ ID NO: 133538 - DNA, 25 bp, Homo sapien
catgggcctgtttgatggaatggca

SEQ ID NO: 133539 - DNA, 25 bp, Homo sapien
ttaatcaaaaaagagacgttcactg

SEQ ID NO: 133540 - DNA, 25 bp, Homo sapien
taataaatggtacattcatgaatac

SEQ ID NO: 133541 - DNA, 25 bp, Homo sapien
cagtggtataaagactcaggctgtg

SEQ ID NO: 133542 - DNA, 25 bp, Homo sapien
gacccctaccttctcatgtacagtg

SEQ ID NO: 133543 - DNA, 25 bp, Homo sapien
gctcagagagtagccctgggggtca

SEQ ID NO: 133544 - DNA, 25 bp, Homo sapien
gccctgggggtcagattggggcata

SEQ ID NO: 133545 - DNA, 25 bp, Homo sapien
tgtggctcagagagtagccctgggg

SEQ ID NO: 133546 - DNA, 25 bp, Homo sapien
gagagtagccctgggggtcagattg

SEQ ID NO: 133547 - DNA, 25 bp, Homo sapien
catcttgatggctaggagcctggaa

SEQ ID NO: 133548 - DNA, 25 bp, Homo sapien
tgtggccatcttgatggctaggagc

SEQ ID NO: 133549 - DNA, 25 bp, Homo sapien
ccaccctccgctctgattaatcatt

SEQ ID NO: 133550 - DNA, 25 bp, Homo sapien
gaaggtggtcatggaatcctttgtt

SEQ ID NO: 133551 - DNA, 25 bp, Homo sapien
tgagacatttggcaaagtgtaatcc

SEQ ID NO: 133552 - DNA, 25 bp, Homo sapien
gctcagtgctgggttcactaacacc

SEQ ID NO: 133553 - DNA, 25 bp, Homo sapien
gggctcagtgctgggttcactaaca

SEQ ID NO: 133554 - DNA, 25 bp, Homo sapien
gtagaatttgggatccttcaatttc

SEQ ID NO: 133555 - DNA, 25 bp, Homo sapien
aaagctttgcataccgacaaagtgc

SEQ ID NO: 133556 - DNA, 25 bp, Homo sapien
ggatcatggtgccaggaaaccgcag

SEQ ID NO: 133557 - DNA, 25 bp, Homo sapien
cctcagtgttggtcagttgggaatg

SEQ ID NO: 133558 - DNA, 25 bp, Homo sapien
cagtgattaagaactgagctgcaga

SEQ ID NO: 133559 - DNA, 25 bp, Homo sapien
tacatagtgtgtgcccgttctccag

SEQ ID NO: 133560 - DNA, 25 bp, Homo sapien
gcaatttttaatgccggcgggctgc

SEQ ID NO: 133561 - DNA, 25 bp, Homo sapien
tattgacagtgggtcagcgacacca

SEQ ID NO: 133562 - DNA, 25 bp, Homo sapien
ccagaggcagagtttgatgacccca

SEQ ID NO: 133563 - DNA, 25 bp, Homo sapien
tgcatcaggcccgtgaggcgcttgc

SEQ ID NO: 133564 - DNA, 25 bp, Homo sapien
gcatcaggcccgtgaggcgcttgcc

SEQ ID NO: 133565 - DNA, 25 bp, Homo sapien
atcaggcccgtgaggcgcttgcccg

SEQ ID NO: 133566 - DNA, 25 bp, Homo sapien
gactgcatcaggcccgtgaggcgct

SEQ ID NO: 133567 - DNA, 25 bp, Homo sapien
cttcacagtgaccaagtctcctcgt

SEQ ID NO: 133568 - DNA, 25 bp, Homo sapien
tcctcgtaaggaaactctgtccgca

SEQ ID NO: 133569 - DNA, 25 bp, Homo sapien
cagtgaccaagtctcctcgtaagga

SEQ ID NO: 133570 - DNA, 25 bp, Homo sapien
tctgtccgcagatgtggagcgccgc

SEQ ID NO: 133571 - DNA, 25 bp, Homo sapien
ctccccaccatcgcccttcattgcc

SEQ ID NO: 133572 - DNA, 25 bp, Homo sapien
tccccaccatcgcccttcattgccc

SEQ ID NO: 133573 - DNA, 25 bp, Homo sapien
gctgtaaacaggagcctccaccggg

SEQ ID NO: 133574 - DNA, 25 bp, Homo sapien
tgtaaacaggagcctccaccgggcc

SEQ ID NO: 133575 - DNA, 25 bp, Homo sapien
ctgtaaacaggagcctccaccgggc

SEQ ID NO: 133576 - DNA, 25 bp, Homo sapien
tcagggcctcttagcgagtggagtg

SEQ ID NO: 133577 - DNA, 25 bp, Homo sapien
tagcgagtggagtgttggaatacaa

SEQ ID NO: 133578 - DNA, 25 bp, Homo sapien
cttagcgagtggagtgttggaatac

SEQ ID NO: 133579 - DNA, 25 bp, Homo sapien
cctcttagcgagtggagtgttggaa

SEQ ID NO: 133580 - DNA, 25 bp, Homo sapien
ctcaagtgatagtcgtgacaggaac

SEQ ID NO: 133581 - DNA, 25 bp, Homo sapien
tgacaggaaccccacgacgtgttct

SEQ ID NO: 133582 - DNA, 25 bp, Homo sapien
gatgtgctctcggtccactcatgcc

SEQ ID NO: 133583 - DNA, 25 bp, Homo sapien
actcatgcctcttgaatttgccaga

SEQ ID NO: 133584 - DNA, 25 bp, Homo sapien
ccttgagacatgtgacgggacctga

SEQ ID NO: 133585 - DNA, 25 bp, Homo sapien
tacaacagtgcttcctcgaacgctg

SEQ ID NO: 133586 - DNA, 25 bp, Homo sapien
tggtcagcagaatccccgcagctgt

SEQ ID NO: 133587 - DNA, 25 bp, Homo sapien
gacctctccgaacgctgatctcaaa

SEQ ID NO: 133588 - DNA, 25 bp, Homo sapien
gcctggtcccttcgtagcatactct

SEQ ID NO: 133589 - DNA, 25 bp, Homo sapien
gctgggccttcagataaagactggg

SEQ ID NO: 133590 - DNA, 25 bp, Homo sapien
acctactgcgtatcaggcacctgac

SEQ ID NO: 133591 - DNA, 25 bp, Homo sapien
tcaaaggagggtagtcatagcaagt

SEQ ID NO: 133592 - DNA, 25 bp, Homo sapien
aaagatgggtcactggggagcaccc

SEQ ID NO: 133593 - DNA, 25 bp, Homo sapien
tggaaagatgggtcactggggagca

SEQ ID NO: 133594 - DNA, 25 bp, Homo sapien
gctgtgtggaagcagacatagacag

SEQ ID NO: 133595 - DNA, 25 bp, Homo sapien
aagcagacatagacaggacttggag

SEQ ID NO: 133596 - DNA, 25 bp, Homo sapien
aagactcctaatgcccgcgatggca

SEQ ID NO: 133597 - DNA, 25 bp, Homo sapien
aaggatacaacataacgaagactcc

SEQ ID NO: 133598 - DNA, 25 bp, Homo sapien
acataacgaagactcctaatgcccg

SEQ ID NO: 133599 - DNA, 25 bp, Homo sapien
gatacaacataacgaagactcctaa

SEQ ID NO: 133600 - DNA, 25 bp, Homo sapien
ggaacaccctttgccctatgcctag

SEQ ID NO: 133601 - DNA, 25 bp, Homo sapien
tactcatcaagtggttagtgcctcc

SEQ ID NO: 133602 - DNA, 25 bp, Homo sapien
tcaaaagaccccataacttggaatg

SEQ ID NO: 133603 - DNA, 25 bp, Homo sapien
ggtttccactgtacctccaagagag

SEQ ID NO: 133604 - DNA, 25 bp, Homo sapien
ggtgagaccagtcagaaggagaagg

SEQ ID NO: 133605 - DNA, 25 bp, Homo sapien
tccacctggctctggtcagatcctc

SEQ ID NO: 133606 - DNA, 25 bp, Homo sapien
acctggctctggtcagatcctctgg

SEQ ID NO: 133607 - DNA, 25 bp, Homo sapien
ccagggtgagaccagtcagaaggag

SEQ ID NO: 133608 - DNA, 25 bp, Homo sapien
tggatgtccccagaggtgcttgtaa

SEQ ID NO: 133609 - DNA, 25 bp, Homo sapien
ggatgtccccagaggtgcttgtaag

SEQ ID NO: 133610 - DNA, 25 bp, Homo sapien
atgtccccagaggtgcttgtaagcc

SEQ ID NO: 133611 - DNA, 25 bp, Homo sapien
gatgtccccagaggtgcttgtaagc

SEQ ID NO: 133612 - DNA, 25 bp, Homo sapien
ggacgtttatatgtgccagcctaca

SEQ ID NO: 133613 - DNA, 25 bp, Homo sapien
tgcaactcagagtcgcaagaggtcc

SEQ ID NO: 133614 - DNA, 25 bp, Homo sapien
tggaccttggataggcagcctcgtt

SEQ ID NO: 133615 - DNA, 25 bp, Homo sapien
tgaagtctccctagctccgttgtgc

SEQ ID NO: 133616 - DNA, 25 bp, Homo sapien
tcagcgtcctgttggtgaggtagtt

SEQ ID NO: 133617 - DNA, 25 bp, Homo sapien
gtgaggtagtttgaaatcccaggaa

SEQ ID NO: 133618 - DNA, 25 bp, Homo sapien
ttccacaatcaccaagggggccagt

SEQ ID NO: 133619 - DNA, 25 bp, Homo sapien
aggctcctggttcagcgtcctgttg

SEQ ID NO: 133620 - DNA, 25 bp, Homo sapien
tatggttacacgagcacaggcctct

SEQ ID NO: 133621 - DNA, 25 bp, Homo sapien
tccaatacattctgcagggcccaaa

SEQ ID NO: 133622 - DNA, 25 bp, Homo sapien
tagacccgggccctttattgctaca

SEQ ID NO: 133623 - DNA, 25 bp, Homo sapien
catgcactaagaggaggccattccg

SEQ ID NO: 133624 - DNA, 25 bp, Homo sapien
agtccaatgccccagagatctggtt

SEQ ID NO: 133625 - DNA, 25 bp, Homo sapien
gatgagtccaatgccccagagatct

SEQ ID NO: 133626 - DNA, 25 bp, Homo sapien
tccaatgccccagagatctggtttt

SEQ ID NO: 133627 - DNA, 25 bp, Homo sapien
caggatgagtccaatgccccagaga

SEQ ID NO: 133628 - DNA, 25 bp, Homo sapien
tgagaaggcaggcgcagcttgggtt

SEQ ID NO: 133629 - DNA, 25 bp, Homo sapien
ctgagaaggcaggcgcagcttgggt

SEQ ID NO: 133630 - DNA, 25 bp, Homo sapien
agaaggcaggcgcagcttgggttcc

SEQ ID NO: 133631 - DNA, 25 bp, Homo sapien
gagaaggcaggcgcagcttgggttc

SEQ ID NO: 133632 - DNA, 25 bp, Homo sapien
cagcaacagcccgataagcaaagat

SEQ ID NO: 133633 - DNA, 25 bp, Homo sapien
gtcagggtagagtgcatgcacagca

SEQ ID NO: 133634 - DNA, 25 bp, Homo sapien
aagattctggaactaagccagatgg

SEQ ID NO: 133635 - DNA, 25 bp, Homo sapien
agcagagccctgctcgtggcggtca

SEQ ID NO: 133636 - DNA, 25 bp, Homo sapien
gtggctacacccgacaccccaggcc

SEQ ID NO: 133637 - DNA, 25 bp, Homo sapien
cgctgaagggctgtgtacagggaac

SEQ ID NO: 133638 - DNA, 25 bp, Homo sapien
gggcagatccagtaacccccattgt

SEQ ID NO: 133639 - DNA, 25 bp, Homo sapien
taacccccattgtgggcgctgaagg

SEQ ID NO: 133640 - DNA, 25 bp, Homo sapien
ggaagagcgtaccagagagctctgt

SEQ ID NO: 133641 - DNA, 25 bp, Homo sapien
aggaggagaaccgagcccacacttc

SEQ ID NO: 133642 - DNA, 25 bp, Homo sapien
gcccacacttcaagcgaggaagagc

SEQ ID NO: 133643 - DNA, 25 bp, Homo sapien
cgaggaagagcgtaccagagagctc

SEQ ID NO: 133644 - DNA, 25 bp, Homo sapien
tgggcatgtctggatagctaatagc

SEQ ID NO: 133645 - DNA, 25 bp, Homo sapien
gagcgagaggaagatccactaatcc

SEQ ID NO: 133646 - DNA, 25 bp, Homo sapien
cacctctgctttgtgcctgaccggg

SEQ ID NO: 133647 - DNA, 25 bp, Homo sapien
catgcttccgcagtagagcgagagg

SEQ ID NO: 133648 - DNA, 25 bp, Homo sapien
atctactggctccacacagtttctc

SEQ ID NO: 133649 - DNA, 25 bp, Homo sapien
gctctggtatctactggctccacac

SEQ ID NO: 133650 - DNA, 25 bp, Homo sapien
atcctcaacacccacctctcccttt

SEQ ID NO: 133651 - DNA, 25 bp, Homo sapien
aaatcctcaacacccacctctccct

SEQ ID NO: 133652 - DNA, 25 bp, Homo sapien
ccacctgtatgacattttgccagca

SEQ ID NO: 133653 - DNA, 25 bp, Homo sapien
gccagcattgcattgaacacatctg

SEQ ID NO: 133654 - DNA, 25 bp, Homo sapien
cagatccaaactggcaccatatggg

SEQ ID NO: 133655 - DNA, 25 bp, Homo sapien
catctgccagcttataaaagagacc

SEQ ID NO: 133656 - DNA, 25 bp, Homo sapien
agcagacagctctggacccagtgca

SEQ ID NO: 133657 - DNA, 25 bp, Homo sapien
tctggacccagtgcaggaagccggc

SEQ ID NO: 133658 - DNA, 25 bp, Homo sapien
tgtgtccccatgagcagacagctct

SEQ ID NO: 133659 - DNA, 25 bp, Homo sapien
caggaagccggcgggtgtcctccat

SEQ ID NO: 133660 - DNA, 25 bp, Homo sapien
gaagcaaagtggagtagaatccatc

SEQ ID NO: 133661 - DNA, 25 bp, Homo sapien
tgggatgtcaaagctgcaggatttg

SEQ ID NO: 133662 - DNA, 25 bp, Homo sapien
ccctgttgttggaagcttttgggat

SEQ ID NO: 133663 - DNA, 25 bp, Homo sapien
tgtgaagcaaagtggagtagaatcc

SEQ ID NO: 133664 - DNA, 25 bp, Homo sapien
caggccaacgagtttgtggaagttc

SEQ ID NO: 133665 - DNA, 25 bp, Homo sapien
ccaactcttcgaaggagctgcagca

SEQ ID NO: 133666 - DNA, 25 bp, Homo sapien
tgaggcaagcttcccaactcttcga

SEQ ID NO: 133667 - DNA, 25 bp, Homo sapien
aagtgtttggtgttggaacagagtt

SEQ ID NO: 133668 - DNA, 25 bp, Homo sapien
ggatgactctggttacatttgcttg

SEQ ID NO: 133669 - DNA, 25 bp, Homo sapien
actttttctgcacgggatgactctg

SEQ ID NO: 133670 - DNA, 25 bp, Homo sapien
gcaactttttctgcacgggatgact

SEQ ID NO: 133671 - DNA, 25 bp, Homo sapien
tctgcacgggatgactctggttaca

SEQ ID NO: 133672 - DNA, 25 bp, Homo sapien
tgtccatactgcgaggcatccctca

SEQ ID NO: 133673 - DNA, 25 bp, Homo sapien
ggtgtccatactgcgaggcatccct

SEQ ID NO: 133674 - DNA, 25 bp, Homo sapien
tggtgtccatactgcgaggcatccc

SEQ ID NO: 133675 - DNA, 25 bp, Homo sapien
gtccatactgcgaggcatccctcac

SEQ ID NO: 133676 - DNA, 25 bp, Homo sapien
gcatatgacacattcagcaaaatcg

SEQ ID NO: 133677 - DNA, 25 bp, Homo sapien
atatgacacattcagcaaaatcggg

SEQ ID NO: 133678 - DNA, 25 bp, Homo sapien
ctgaggatgcatatgacacattcag

SEQ ID NO: 133679 - DNA, 25 bp, Homo sapien
aggatgcatatgacacattcagcaa

SEQ ID NO: 133680 - DNA, 25 bp, Homo sapien
taaaccacacatacgggttgcttaa

SEQ ID NO: 133681 - DNA, 25 bp, Homo sapien
tccaggatacaaagattcacgttca

SEQ ID NO: 133682 - DNA, 25 bp, Homo sapien
tagaaaaatacactgaaccggtgta

SEQ ID NO: 133683 - DNA, 25 bp, Homo sapien
gaaccggtgtatttagttccagtga

SEQ ID NO: 133684 - DNA, 25 bp, Homo sapien
gctgaggcttctgccagaattttcc

SEQ ID NO: 133685 - DNA, 25 bp, Homo sapien
ccaggacaggtgtggatggaagctg

SEQ ID NO: 133686 - DNA, 25 bp, Homo sapien
gagagccgttccaggaacatgaacc

SEQ ID NO: 133687 - DNA, 25 bp, Homo sapien
agaattttcccgagagccgttccag

SEQ ID NO: 133688 - DNA, 25 bp, Homo sapien
aggtattgttcgtgtactttcccag

SEQ ID NO: 133689 - DNA, 25 bp, Homo sapien
caggtattgttcgtgtactttccca

SEQ ID NO: 133690 - DNA, 25 bp, Homo sapien
cttccccaggtattgttcgtgtact

SEQ ID NO: 133691 - DNA, 25 bp, Homo sapien
tgacaggggcaccacgaagggtcct

SEQ ID NO: 133692 - DNA, 25 bp, Homo sapien
ttctgctggaagtgacaggggcacc

SEQ ID NO: 133693 - DNA, 25 bp, Homo sapien
cagagcaggctctgtcgcttagatc

SEQ ID NO: 133694 - DNA, 25 bp, Homo sapien
ctgtgctgagtgggttagattcggg

SEQ ID NO: 133695 - DNA, 25 bp, Homo sapien
cattgttaatgctcgttctgtgata

SEQ ID NO: 133696 - DNA, 25 bp, Homo sapien
ctgggcctgcttcccttcgctggga

SEQ ID NO: 133697 - DNA, 25 bp, Homo sapien
cccttctccagcatggaaagctctg

SEQ ID NO: 133698 - DNA, 25 bp, Homo sapien
gagcctcattaaagtgttctccggg

SEQ ID NO: 133699 - DNA, 25 bp, Homo sapien
ccatctagaagccagctgagtcatt

SEQ ID NO: 133700 - DNA, 25 bp, Homo sapien
tctggtgcaggacccatctagaagc

SEQ ID NO: 133701 - DNA, 25 bp, Homo sapien
acctctggtgcaggacccatctaga

SEQ ID NO: 133702 - DNA, 25 bp, Homo sapien
atctagaagccagctgagtcattgc

SEQ ID NO: 133703 - DNA, 25 bp, Homo sapien
gaagccactgcaacattttatcccc

SEQ ID NO: 133704 - DNA, 25 bp, Homo sapien
ctgcagatacgaagcaaacctggga

SEQ ID NO: 133705 - DNA, 25 bp, Homo sapien
gggaagccactgcaacattttatcc

SEQ ID NO: 133706 - DNA, 25 bp, Homo sapien
cagatacgaagcaaacctgggattg

SEQ ID NO: 133707 - DNA, 25 bp, Homo sapien
gatgccctctagttgagtcagagac

SEQ ID NO: 133708 - DNA, 25 bp, Homo sapien
tgctccacgaggaagctcaggcctg

SEQ ID NO: 133709 - DNA, 25 bp, Homo sapien
gctgctccacgaggaagctcaggcc

SEQ ID NO: 133710 - DNA, 25 bp, Homo sapien
caggccttggatgccctctagttga

SEQ ID NO: 133711 - DNA, 25 bp, Homo sapien
aagctcaatttctctgacagccaag

SEQ ID NO: 133712 - DNA, 25 bp, Homo sapien
gcctccatttgtgaacgctgggatt

SEQ ID NO: 133713 - DNA, 25 bp, Homo sapien
ggtcatctccccgttgccaagtggg

SEQ ID NO: 133714 - DNA, 25 bp, Homo sapien
gccaagacatggagcatctctgcta

SEQ ID NO: 133715 - DNA, 25 bp, Homo sapien
aagcctgtgggcaacgttcttttga

SEQ ID NO: 133716 - DNA, 25 bp, Homo sapien
ttttgagccaagacttctctgaatg

SEQ ID NO: 133717 - DNA, 25 bp, Homo sapien
ctctgaatggccctgctggtggaag

SEQ ID NO: 133718 - DNA, 25 bp, Homo sapien
aggcctctgacttggaccctttcca

SEQ ID NO: 133719 - DNA, 25 bp, Homo sapien
agaggcagaaaatgacccccacagt

SEQ ID NO: 133720 - DNA, 25 bp, Homo sapien
caactggcagggcctgatcagaggc

SEQ ID NO: 133721 - DNA, 25 bp, Homo sapien
gcagggcctgatcagaggcagaaaa

SEQ ID NO: 133722 - DNA, 25 bp, Homo sapien
aggtgcaactggcagggcctgatca

SEQ ID NO: 133723 - DNA, 25 bp, Homo sapien
cactggatgcccttggatgacagca

SEQ ID NO: 133724 - DNA, 25 bp, Homo sapien
agcatcctcagcattaaaactggtg

SEQ ID NO: 133725 - DNA, 25 bp, Homo sapien
aaactggtgaactgatgaagtcacc

SEQ ID NO: 133726 - DNA, 25 bp, Homo sapien
ctcagcctagttgctttaatctgct

SEQ ID NO: 133727 - DNA, 25 bp, Homo sapien
ttcaacatgtagttgaagaagccta

SEQ ID NO: 133728 - DNA, 25 bp, Homo sapien
cgtgcacattttcaacatgtagttg

SEQ ID NO: 133729 - DNA, 25 bp, Homo sapien
cccgtgcacattttcaacatgtagt

SEQ ID NO: 133730 - DNA, 25 bp, Homo sapien
tagttgaagaagcctaaattaggta

SEQ ID NO: 133731 - DNA, 25 bp, Homo sapien
ccgtggtcagaaggtgggctccata

SEQ ID NO: 133732 - DNA, 25 bp, Homo sapien
cagcttgccatagagtctaactggt

SEQ ID NO: 133733 - DNA, 25 bp, Homo sapien
gagtctgcttatgattctctgccag

SEQ ID NO: 133734 - DNA, 25 bp, Homo sapien
tttctgagcattcccagggtttggg

SEQ ID NO: 133735 - DNA, 25 bp, Homo sapien
cttttagcaggcttccattcctggg

SEQ ID NO: 133736 - DNA, 25 bp, Homo sapien
caggatgccgcaagtcccaggcctg

SEQ ID NO: 133737 - DNA, 25 bp, Homo sapien
ggtgtcccttttagcaggcttccat

SEQ ID NO: 133738 - DNA, 25 bp, Homo sapien
aggatgccgcaagtcccaggcctgg

SEQ ID NO: 133739 - DNA, 25 bp, Homo sapien
gcgaggtaggaagccggaagcctgg

SEQ ID NO: 133740 - DNA, 25 bp, Homo sapien
ctgccccagggcgaggtaggaagcc

SEQ ID NO: 133741 - DNA, 25 bp, Homo sapien
ggcgaggtaggaagccggaagcctg

SEQ ID NO: 133742 - DNA, 25 bp, Homo sapien
ccagggcgaggtaggaagccggaag

SEQ ID NO: 133743 - DNA, 25 bp, Homo sapien
ttgtacagcgtggtctcacccaacc

SEQ ID NO: 133744 - DNA, 25 bp, Homo sapien
tgggccttgtacagcgtggtctcac

SEQ ID NO: 133745 - DNA, 25 bp, Homo sapien
tggtctcacccaacccttgcaaact

SEQ ID NO: 133746 - DNA, 25 bp, Homo sapien
gcacctgggccttgtacagcgtggt

SEQ ID NO: 133747 - DNA, 25 bp, Homo sapien
ctgaggccgaaagaggtgcagccat

SEQ ID NO: 133748 - DNA, 25 bp, Homo sapien
cttgtcggtaggctcctcgctggcc

SEQ ID NO: 133749 - DNA, 25 bp, Homo sapien
ttgtcggtaggctcctcgctggccc

SEQ ID NO: 133750 - DNA, 25 bp, Homo sapien
tgccaatccgatgctgacagagcag

SEQ ID NO: 133751 - DNA, 25 bp, Homo sapien
tcatccactcggaaacatgtagtta

SEQ ID NO: 133752 - DNA, 25 bp, Homo sapien
gttaccatagatggttagctctggg

SEQ ID NO: 133753 - DNA, 25 bp, Homo sapien
ggttgccaatccgatgctgacagag

SEQ ID NO: 133754 - DNA, 25 bp, Homo sapien
cgttttggccgatgggatgtatctc

SEQ ID NO: 133755 - DNA, 25 bp, Homo sapien
tctggctgagctggcggaagtgggc

SEQ ID NO: 133756 - DNA, 25 bp, Homo sapien
gacggcgggtgttctaacatggccc

SEQ ID NO: 133757 - DNA, 25 bp, Homo sapien
tggtgggagccaaggaagacggcgg

SEQ ID NO: 133758 - DNA, 25 bp, Homo sapien
ataactgaacacaaacaaactgatg

SEQ ID NO: 133759 - DNA, 25 bp, Homo sapien
agttaagcgcaattttgtgaagaca

SEQ ID NO: 133760 - DNA, 25 bp, Homo sapien
gggaatggcctcagtttgtgcaata

SEQ ID NO: 133761 - DNA, 25 bp, Homo sapien
ttctttgattgtctgtgagaaagta

SEQ ID NO: 133762 - DNA, 25 bp, Homo sapien
gctgaagttcaaggcgctggacaca

SEQ ID NO: 133763 - DNA, 25 bp, Homo sapien
tacaccacctgggaattgaccatcc

SEQ ID NO: 133764 - DNA, 25 bp, Homo sapien
actgacctgccctattcctggctga

SEQ ID NO: 133765 - DNA, 25 bp, Homo sapien
tctggcccagtagcaactgacctgc

SEQ ID NO: 133766 - DNA, 25 bp, Homo sapien
aattctgccagttgtctcactagtg

SEQ ID NO: 133767 - DNA, 25 bp, Homo sapien
gccagttgtctcactagtgtccttt

SEQ ID NO: 133768 - DNA, 25 bp, Homo sapien
ctgccagttgtctcactagtgtcct

SEQ ID NO: 133769 - DNA, 25 bp, Homo sapien
ttctgccagttgtctcactagtgtc

SEQ ID NO: 133770 - DNA, 25 bp, Homo sapien
tattctgtgccccacggagtttgcg

SEQ ID NO: 133771 - DNA, 25 bp, Homo sapien
tatcctgtttagaggcaagccgccc

SEQ ID NO: 133772 - DNA, 25 bp, Homo sapien
taagcagaacgtcatgggctcagca

SEQ ID NO: 133773 - DNA, 25 bp, Homo sapien
ggcagttgctaaacccacggaacag

SEQ ID NO: 133774 - DNA, 25 bp, Homo sapien
tgccctgaatgagatttgacaactg

SEQ ID NO: 133775 - DNA, 25 bp, Homo sapien
tgaactttctggagtaaccgatacc

SEQ ID NO: 133776 - DNA, 25 bp, Homo sapien
tctggagtaaccgatacctgggcat

SEQ ID NO: 133777 - DNA, 25 bp, Homo sapien
gatttgacaactgaactttctggag

SEQ ID NO: 133778 - DNA, 25 bp, Homo sapien
catgaacaagaagagtgggcggcct

SEQ ID NO: 133779 - DNA, 25 bp, Homo sapien
cgggtgcccgtagaccaggaatgct

SEQ ID NO: 133780 - DNA, 25 bp, Homo sapien
tcctgcgcagactgtggacgctctg

SEQ ID NO: 133781 - DNA, 25 bp, Homo sapien
cctgaagagctggtgtcctgcgcag

SEQ ID NO: 133782 - DNA, 25 bp, Homo sapien
gctgagagtagttcacttgaccagt

SEQ ID NO: 133783 - DNA, 25 bp, Homo sapien
tatctcctaaacaagagcactgttc

SEQ ID NO: 133784 - DNA, 25 bp, Homo sapien
cccacagggctgattgtttagggct

SEQ ID NO: 133785 - DNA, 25 bp, Homo sapien
tgttcccaatggcaaggtccaggca

SEQ ID NO: 133786 - DNA, 25 bp, Homo sapien
tatgggaccctgattaacgttagcc

SEQ ID NO: 133787 - DNA, 25 bp, Homo sapien
gatttgtaccgtatgggaccctgat

SEQ ID NO: 133788 - DNA, 25 bp, Homo sapien
ttaacgttagccagtgaataatgaa

SEQ ID NO: 133789 - DNA, 25 bp, Homo sapien
tttttcagatttgtaccgtatggga

SEQ ID NO: 133790 - DNA, 25 bp, Homo sapien
ttggacaggaactctgtatggccaa

SEQ ID NO: 133791 - DNA, 25 bp, Homo sapien
gacaggaactctgtatggccaacag

SEQ ID NO: 133792 - DNA, 25 bp, Homo sapien
actctgtatggccaacaggatgctg

SEQ ID NO: 133793 - DNA, 25 bp, Homo sapien
ggaactctgtatggccaacaggatg

SEQ ID NO: 133794 - DNA, 25 bp, Homo sapien
caggcacaccacagcggagatccga

SEQ ID NO: 133795 - DNA, 25 bp, Homo sapien
agtggcaggcacaccacagcggaga

SEQ ID NO: 133796 - DNA, 25 bp, Homo sapien
ggcaggcacaccacagcggagatcc

SEQ ID NO: 133797 - DNA, 25 bp, Homo sapien
gtggcaggcacaccacagcggagat

SEQ ID NO: 133798 - DNA, 25 bp, Homo sapien
tctgctcaggatgtgaggccatgct

SEQ ID NO: 133799 - DNA, 25 bp, Homo sapien
aacccagacgagtggctgttgccga

SEQ ID NO: 133800 - DNA, 25 bp, Homo sapien
tccctaggatgcttgggacgcagct

SEQ ID NO: 133801 - DNA, 25 bp, Homo sapien
catgcttttgtgcacgtgccaagga

SEQ ID NO: 133802 - DNA, 25 bp, Homo sapien
ctgccggagcccaggattccggttg

SEQ ID NO: 133803 - DNA, 25 bp, Homo sapien
tgaagtcataacaggtggcaagagc

SEQ ID NO: 133804 - DNA, 25 bp, Homo sapien
gagcccaggattccggttgccatgg

SEQ ID NO: 133805 - DNA, 25 bp, Homo sapien
agtcataacaggtggcaagagcgga

SEQ ID NO: 133806 - DNA, 25 bp, Homo sapien
gacctgagttgctattagtggccaa

SEQ ID NO: 133807 - DNA, 25 bp, Homo sapien
tggccaaggagaaccagcctgaatg

SEQ ID NO: 133808 - DNA, 25 bp, Homo sapien
agttctctgccgtcgagggctctga

SEQ ID NO: 133809 - DNA, 25 bp, Homo sapien
catatattcacggtgtcctcagagc

SEQ ID NO: 133810 - DNA, 25 bp, Homo sapien
tgcagcagtagcgaccttttgactt

SEQ ID NO: 133811 - DNA, 25 bp, Homo sapien
cccatggctcatcccgcgcctggtg

SEQ ID NO: 133812 - DNA, 25 bp, Homo sapien
cagtagcgaccttttgactttggtc

SEQ ID NO: 133813 - DNA, 25 bp, Homo sapien
ggtcctcctgctgtcgcttgctcta

SEQ ID NO: 133814 - DNA, 25 bp, Homo sapien
gtcacctggacagaacctgaacagc

SEQ ID NO: 133815 - DNA, 25 bp, Homo sapien
tgtcacctggacagaacctgaacag

SEQ ID NO: 133816 - DNA, 25 bp, Homo sapien
ttgtcacctggacagaacctgaaca

SEQ ID NO: 133817 - DNA, 25 bp, Homo sapien
ggatgctttaactccatggcgttca

SEQ ID NO: 133818 - DNA, 25 bp, Homo sapien
caaggatgctttaactccatggcgt

SEQ ID NO: 133819 - DNA, 25 bp, Homo sapien
gatgctttaactccatggcgttcat

SEQ ID NO: 133820 - DNA, 25 bp, Homo sapien
aggatgctttaactccatggcgttc

SEQ ID NO: 133821 - DNA, 25 bp, Homo sapien
ctttatcccgatctgagtttgtatc

SEQ ID NO: 133822 - DNA, 25 bp, Homo sapien
ctcctgggctttatcccgatctgag

SEQ ID NO: 133823 - DNA, 25 bp, Homo sapien
tggcttttggaagtacctcctgggc

SEQ ID NO: 133824 - DNA, 25 bp, Homo sapien
gcaggtggcttttggaagtacctcc

SEQ ID NO: 133825 - DNA, 25 bp, Homo sapien
gtgtctccatccaaaggaattcagc

SEQ ID NO: 133826 - DNA, 25 bp, Homo sapien
taaaataagcatcaagggtggcctg

SEQ ID NO: 133827 - DNA, 25 bp, Homo sapien
acggcagctgccaatcgtgcagggt

SEQ ID NO: 133828 - DNA, 25 bp, Homo sapien
aaagaaggtatgaagccacgggacg

SEQ ID NO: 133829 - DNA, 25 bp, Homo sapien
gtatttaattgaggggacagtgagc

SEQ ID NO: 133830 - DNA, 25 bp, Homo sapien
tgtgcaggagatagcacactgccgg

SEQ ID NO: 133831 - DNA, 25 bp, Homo sapien
agaaaggctgatattgtgcaggaga

SEQ ID NO: 133832 - DNA, 25 bp, Homo sapien
actgccggggcggtatttaattgag

SEQ ID NO: 133833 - DNA, 25 bp, Homo sapien
ccagaaacttgatttgtggagcggg

SEQ ID NO: 133834 - DNA, 25 bp, Homo sapien
aataacgcggccttcaggctcactg

SEQ ID NO: 133835 - DNA, 25 bp, Homo sapien
catcactcagttgtcttgcaggtcc

SEQ ID NO: 133836 - DNA, 25 bp, Homo sapien
gctgcagtggaaaagccaataacgc

SEQ ID NO: 133837 - DNA, 25 bp, Homo sapien
caccctacagatgtgcgtcttcagc

SEQ ID NO: 133838 - DNA, 25 bp, Homo sapien
tgttgcctcccttctagaaacccag

SEQ ID NO: 133839 - DNA, 25 bp, Homo sapien
gtgtggccgcttcaccctgttgcct

SEQ ID NO: 133840 - DNA, 25 bp, Homo sapien
cagaatagggtctagggtctcttcc

SEQ ID NO: 133841 - DNA, 25 bp, Homo sapien
ctaagaagtagcatcaagtccaggt

SEQ ID NO: 133842 - DNA, 25 bp, Homo sapien
agaagtagcatcaagtccaggtggc

SEQ ID NO: 133843 - DNA, 25 bp, Homo sapien
ccaggtggctcaaagagcagcggac

SEQ ID NO: 133844 - DNA, 25 bp, Homo sapien
tatctccttacttatgccctgtcca

SEQ ID NO: 133845 - DNA, 25 bp, Homo sapien
tattcttggttgacttagggcccca

SEQ ID NO: 133846 - DNA, 25 bp, Homo sapien
tacaggtccccttgtcgtttgcgca

SEQ ID NO: 133847 - DNA, 25 bp, Homo sapien
cgtctgggagaccttctgaacatcc

SEQ ID NO: 133848 - DNA, 25 bp, Homo sapien
acattagggctttgtccgtctggga

SEQ ID NO: 133849 - DNA, 25 bp, Homo sapien
gaggcctgacggcaggctttctgga

SEQ ID NO: 133850 - DNA, 25 bp, Homo sapien
gccaccgtcgattgcccttctctgt

SEQ ID NO: 133851 - DNA, 25 bp, Homo sapien
gagcaggggccaccgtcgattgccc

SEQ ID NO: 133852 - DNA, 25 bp, Homo sapien
ctttcttggctctgtccgcatgcgt

SEQ ID NO: 133853 - DNA, 25 bp, Homo sapien
gcttgcatcacacactgtctcctga

SEQ ID NO: 133854 - DNA, 25 bp, Homo sapien
ccatggctttgtttcgggactctca

SEQ ID NO: 133855 - DNA, 25 bp, Homo sapien
acccctctttctgcaaagtgcttgc

SEQ ID NO: 133856 - DNA, 25 bp, Homo sapien
gtgacgtttgcttctctcgatgccc

SEQ ID NO: 133857 - DNA, 25 bp, Homo sapien
cacccatctcgccagggtctgcagt

SEQ ID NO: 133858 - DNA, 25 bp, Homo sapien
gaggatgcagagcttcgccatagga

SEQ ID NO: 133859 - DNA, 25 bp, Homo sapien
gcagtgaaacagtcgaggctggacc

SEQ ID NO: 133860 - DNA, 25 bp, Homo sapien
cactcctaatgatcttcacttgccg

SEQ ID NO: 133861 - DNA, 25 bp, Homo sapien
tttggacaagcgactgcctggctgg

SEQ ID NO: 133862 - DNA, 25 bp, Homo sapien
gacagagctagggagcccacgggag

SEQ ID NO: 133863 - DNA, 25 bp, Homo sapien
agtttagggcgtgcagacagagcta

SEQ ID NO: 133864 - DNA, 25 bp, Homo sapien
ctggctcctgagtttagggcgtgca

SEQ ID NO: 133865 - DNA, 25 bp, Homo sapien
aacctcagtgtgtgctctcctcttc

SEQ ID NO: 133866 - DNA, 25 bp, Homo sapien
tgcaccccagcttactcgcctgccg

SEQ ID NO: 133867 - DNA, 25 bp, Homo sapien
gcctgccaacctcagtgtgtgctct

SEQ ID NO: 133868 - DNA, 25 bp, Homo sapien
ccgcagtcaccacttccttgggcct

SEQ ID NO: 133869 - DNA, 25 bp, Homo sapien
tgtgacagtaagtatgggccggtcc

SEQ ID NO: 133870 - DNA, 25 bp, Homo sapien
cgtctgtgacagtaagtatgggccg

SEQ ID NO: 133871 - DNA, 25 bp, Homo sapien
gacagtaagtatgggccggtcccac

SEQ ID NO: 133872 - DNA, 25 bp, Homo sapien
cttacgtctgtgacagtaagtatgg

SEQ ID NO: 133873 - DNA, 25 bp, Homo sapien
aggcaggaggcctgtcagtgcccgg

SEQ ID NO: 133874 - DNA, 25 bp, Homo sapien
ctgagggtgaccaccctcggcagtg

SEQ ID NO: 133875 - DNA, 25 bp, Homo sapien
tgccagcacctacagatccttcttg

SEQ ID NO: 133876 - DNA, 25 bp, Homo sapien
cagggctgcaggctacatgtcaagc

SEQ ID NO: 133877 - DNA, 25 bp, Homo sapien
tggctatcttggctcgtctcttctt

SEQ ID NO: 133878 - DNA, 25 bp, Homo sapien
ctcatcacttagcaagattttggct

SEQ ID NO: 133879 - DNA, 25 bp, Homo sapien
gttataatacctactatctagtccc

SEQ ID NO: 133880 - DNA, 25 bp, Homo sapien
gatgctccagcctgtcgcatgtggg

SEQ ID NO: 133881 - DNA, 25 bp, Homo sapien
gcaggacagtggcacggctgctgct

SEQ ID NO: 133882 - DNA, 25 bp, Homo sapien
cttgggctggccgaggaggtgggct

SEQ ID NO: 133883 - DNA, 25 bp, Homo sapien
gagtgtccacggtcatgttttgcag

SEQ ID NO: 133884 - DNA, 25 bp, Homo sapien
ttcctgtccgtctcaggaaaggagc

SEQ ID NO: 133885 - DNA, 25 bp, Homo sapien
gtccccagaatgaacacttaccaag

SEQ ID NO: 133886 - DNA, 25 bp, Homo sapien
tgtaatgacgagatccaggacacag

SEQ ID NO: 133887 - DNA, 25 bp, Homo sapien
gacacagtgtagtcctcctgcatcc

SEQ ID NO: 133888 - DNA, 25 bp, Homo sapien
gagggcttgagcttcgcttgttcca

SEQ ID NO: 133889 - DNA, 25 bp, Homo sapien
cacactgggtcattggaagtggcct

SEQ ID NO: 133890 - DNA, 25 bp, Homo sapien
ctctggagatttgggccacactggg

SEQ ID NO: 133891 - DNA, 25 bp, Homo sapien
tggacctggctccatcgagacacag

SEQ ID NO: 133892 - DNA, 25 bp, Homo sapien
gaagtggcctctgctaactggacct

SEQ ID NO: 133893 - DNA, 25 bp, Homo sapien
ggagctggcattgttatttgttatt

SEQ ID NO: 133894 - DNA, 25 bp, Homo sapien
gaaaatcacgttgaatttgccagca

SEQ ID NO: 133895 - DNA, 25 bp, Homo sapien
tttgttattaggctcccacatctgg

SEQ ID NO: 133896 - DNA, 25 bp, Homo sapien
gactgctgggcaggtccaatgaaaa

SEQ ID NO: 133897 - DNA, 25 bp, Homo sapien
cctggtggggtggtatccagtattc

SEQ ID NO: 133898 - DNA, 25 bp, Homo sapien
cagtgttcacataatgccttgactt

SEQ ID NO: 133899 - DNA, 25 bp, Homo sapien
tcacataatgccttgacttcgccat

SEQ ID NO: 133900 - DNA, 25 bp, Homo sapien
tgttcacataatgccttgacttcgc

SEQ ID NO: 133901 - DNA, 25 bp, Homo sapien
ctctttctggtaacccccatgccct

SEQ ID NO: 133902 - DNA, 25 bp, Homo sapien
ctgccgacttctcactctttctggt

SEQ ID NO: 133903 - DNA, 25 bp, Homo sapien
cccccatgcccttcaccggtgccat

SEQ ID NO: 133904 - DNA, 25 bp, Homo sapien
tcactctttctggtaacccccatgc

SEQ ID NO: 133905 - DNA, 25 bp, Homo sapien
gtgattggagtggtgcttttgcatc

SEQ ID NO: 133906 - DNA, 25 bp, Homo sapien
agcccgtggaggacccctggacgct

SEQ ID NO: 133907 - DNA, 25 bp, Homo sapien
gtggaggacccctggacgctgtccc

SEQ ID NO: 133908 - DNA, 25 bp, Homo sapien
tgcttttgcatcatgtaggttggct

SEQ ID NO: 133909 - DNA, 25 bp, Homo sapien
tactggtctcctatattggacgagg

SEQ ID NO: 133910 - DNA, 25 bp, Homo sapien
tgaggcagactaagaggtttctacc

SEQ ID NO: 133911 - DNA, 25 bp, Homo sapien
ggaatgtttctagagtctgcccagt

SEQ ID NO: 133912 - DNA, 25 bp, Homo sapien
ggtttctaccagaaggaacttgagc

SEQ ID NO: 133913 - DNA, 25 bp, Homo sapien
caggttttaggtgtcgaagagtcaa

SEQ ID NO: 133914 - DNA, 25 bp, Homo sapien
ggtctccggcgggtgtatcttgaac

SEQ ID NO: 133915 - DNA, 25 bp, Homo sapien
cacagcagacctggaggccatgtaa

SEQ ID NO: 133916 - DNA, 25 bp, Homo sapien
tatcttgaacacaacgcacaggttt

SEQ ID NO: 133917 - DNA, 25 bp, Homo sapien
ttggttccacggctgcaggctttac

SEQ ID NO: 133918 - DNA, 25 bp, Homo sapien
cttggcgagagcttggttccacggc

SEQ ID NO: 133919 - DNA, 25 bp, Homo sapien
gcaggctttaccctccagatcagct

SEQ ID NO: 133920 - DNA, 25 bp, Homo sapien
gctttaccctccagatcagctgtgt

SEQ ID NO: 133921 - DNA, 25 bp, Homo sapien
ttgcaatgggcaccatgattaactc

SEQ ID NO: 133922 - DNA, 25 bp, Homo sapien
gttgcaatgggcaccatgattaact

SEQ ID NO: 133923 - DNA, 25 bp, Homo sapien
tctcgtttcagaacaggaatcttaa

SEQ ID NO: 133924 - DNA, 25 bp, Homo sapien
tcttctgcaggtgtcatgtgaaaag

SEQ ID NO: 133925 - DNA, 25 bp, Homo sapien
tgtggtcccaggagctttaatacct

SEQ ID NO: 133926 - DNA, 25 bp, Homo sapien
ccaggtcttggaattggacgtcaca

SEQ ID NO: 133927 - DNA, 25 bp, Homo sapien
tttgaagagagagagaatcccatca

SEQ ID NO: 133928 - DNA, 25 bp, Homo sapien
ctttgaagagagagagaatcccatc

SEQ ID NO: 133929 - DNA, 25 bp, Homo sapien
acctcttagcttctgcgtctccaaa

SEQ ID NO: 133930 - DNA, 25 bp, Homo sapien
ttgaaagcgtcttttgaggattaat

SEQ ID NO: 133931 - DNA, 25 bp, Homo sapien
gcgtctccaaaagggataatgttct

SEQ ID NO: 133932 - DNA, 25 bp, Homo sapien
gcttctgcgtctccaaaagggataa

SEQ ID NO: 133933 - DNA, 25 bp, Homo sapien
tttattgccaatcatggcgacaggc

SEQ ID NO: 133934 - DNA, 25 bp, Homo sapien
tacacacggctgtacttaggcctcc

SEQ ID NO: 133935 - DNA, 25 bp, Homo sapien
cagactcagtgtggcaaattgcatc

SEQ ID NO: 133936 - DNA, 25 bp, Homo sapien
tgtcttaactctggtgcccggctgg

SEQ ID NO: 133937 - DNA, 25 bp, Homo sapien
agcacaatattaaaggtcgaataaa

SEQ ID NO: 133938 - DNA, 25 bp, Homo sapien
tcagagcacaatattaaaggtcgaa

SEQ ID NO: 133939 - DNA, 25 bp, Homo sapien
cagagcacaatattaaaggtcgaat

SEQ ID NO: 133940 - DNA, 25 bp, Homo sapien
gagcacaatattaaaggtcgaataa

SEQ ID NO: 133941 - DNA, 25 bp, Homo sapien
tcatccggggactgcacaagtctta

SEQ ID NO: 133942 - DNA, 25 bp, Homo sapien
catattccatatcaaagtctcattc

SEQ ID NO: 133943 - DNA, 25 bp, Homo sapien
tctttcaagtcctatgtagtctggg

SEQ ID NO: 133944 - DNA, 25 bp, Homo sapien
gtagtctgggctctgatcatccggg

SEQ ID NO: 133945 - DNA, 25 bp, Homo sapien
aggagaagcacaccgtctcacactg

SEQ ID NO: 133946 - DNA, 25 bp, Homo sapien
caggagaagcacaccgtctcacact

SEQ ID NO: 133947 - DNA, 25 bp, Homo sapien
ggagaagcacaccgtctcacactgg

SEQ ID NO: 133948 - DNA, 25 bp, Homo sapien
accaggagaagcacaccgtctcaca

SEQ ID NO: 133949 - DNA, 25 bp, Homo sapien
tggcatccagtgacgccatccgtgt

SEQ ID NO: 133950 - DNA, 25 bp, Homo sapien
acgccatccgtgtgacagtcgagaa

SEQ ID NO: 133951 - DNA, 25 bp, Homo sapien
agcctgagatcttgtggcatccagt

SEQ ID NO: 133952 - DNA, 25 bp, Homo sapien
gacagtcgagaagattttcagtggc

SEQ ID NO: 133953 - DNA, 25 bp, Homo sapien
attcactatttacgtctttctcctt

SEQ ID NO: 133954 - DNA, 25 bp, Homo sapien
tcactatttacgtctttctcctttc

SEQ ID NO: 133955 - DNA, 25 bp, Homo sapien
cattcactatttacgtctttctcct

SEQ ID NO: 133956 - DNA, 25 bp, Homo sapien
tcattcactatttacgtctttctcc

SEQ ID NO: 133957 - DNA, 25 bp, Homo sapien
tataacttttgtatgtcctccaaat

SEQ ID NO: 133958 - DNA, 25 bp, Homo sapien
gagataccagcgtatcattataact

SEQ ID NO: 133959 - DNA, 25 bp, Homo sapien
ttctctcttgtattgagagagatag

SEQ ID NO: 133960 - DNA, 25 bp, Homo sapien
agagagatagagataccagcgtatc

SEQ ID NO: 133961 - DNA, 25 bp, Homo sapien
ccatgggctctagggtaagaacctc

SEQ ID NO: 133962 - DNA, 25 bp, Homo sapien
ggcaggcggtttgattgtcctccac

SEQ ID NO: 133963 - DNA, 25 bp, Homo sapien
taagaacctcagtgtgagagacgtg

SEQ ID NO: 133964 - DNA, 25 bp, Homo sapien
tgtccctgggcgcacttgatgcaca

SEQ ID NO: 133965 - DNA, 25 bp, Homo sapien
ggtgtgggtggcatctgttaagcaa

SEQ ID NO: 133966 - DNA, 25 bp, Homo sapien
cttcctgctgctttatgcgtcttta

SEQ ID NO: 133967 - DNA, 25 bp, Homo sapien
tggcatctgttaagcaacttcttgg

SEQ ID NO: 133968 - DNA, 25 bp, Homo sapien
gctttatgcgtctttaggtgtgggt

SEQ ID NO: 133969 - DNA, 25 bp, Homo sapien
tcagtggaactgttaagccgccaag

SEQ ID NO: 133970 - DNA, 25 bp, Homo sapien
ggtggcctcggaaaactagtgtcgc

SEQ ID NO: 133971 - DNA, 25 bp, Homo sapien
gagaatcggacgtgtttgcgccagc

SEQ ID NO: 133972 - DNA, 25 bp, Homo sapien
cagctcgtcgcccatcagaaatagg

SEQ ID NO: 133973 - DNA, 25 bp, Homo sapien
caaaccttccggagttggagcaccg

SEQ ID NO: 133974 - DNA, 25 bp, Homo sapien
tgcactacgtaaggaaagccctggc

SEQ ID NO: 133975 - DNA, 25 bp, Homo sapien
gaatattaaaaagcggcaggaccca

SEQ ID NO: 133976 - DNA, 25 bp, Homo sapien
tatctaagtagtgaaaggtgacgcc

SEQ ID NO: 133977 - DNA, 25 bp, Homo sapien
gaggtccttttgcaactatacaggc

SEQ ID NO: 133978 - DNA, 25 bp, Homo sapien
tgcaactatacaggccagagttcat

SEQ ID NO: 133979 - DNA, 25 bp, Homo sapien
tatacaggccagagttcattgcccg

SEQ ID NO: 133980 - DNA, 25 bp, Homo sapien
gccagagttcattgcccgaggctgt

SEQ ID NO: 133981 - DNA, 25 bp, Homo sapien
tagtgtacaaagctggttccatggc

SEQ ID NO: 133982 - DNA, 25 bp, Homo sapien
aagctgggcattatagtgtacaaag

SEQ ID NO: 133983 - DNA, 25 bp, Homo sapien
tacaaagctggttccatggcttcta

SEQ ID NO: 133984 - DNA, 25 bp, Homo sapien
acaaagctgggcattatagtgtaca

SEQ ID NO: 133985 - DNA, 25 bp, Homo sapien
tgtagcagccgatagggctatagcg

SEQ ID NO: 133986 - DNA, 25 bp, Homo sapien
gatgcgttttggtgttgtagcagcc

SEQ ID NO: 133987 - DNA, 25 bp, Homo sapien
tatagcggccgttctttccttctca

SEQ ID NO: 133988 - DNA, 25 bp, Homo sapien
gaaagaccaaggtgtagcgtcagcc

SEQ ID NO: 133989 - DNA, 25 bp, Homo sapien
ctactctgccagcgacttttattca

SEQ ID NO: 133990 - DNA, 25 bp, Homo sapien
cccatgtcgtcttctactctgccag

SEQ ID NO: 133991 - DNA, 25 bp, Homo sapien
tactctgccagcgacttttattcat

SEQ ID NO: 133992 - DNA, 25 bp, Homo sapien
tcttctcccatgtcgtcttctactc

SEQ ID NO: 133993 - DNA, 25 bp, Homo sapien
caacagcagttacaaggctaggtga

SEQ ID NO: 133994 - DNA, 25 bp, Homo sapien
taaatccacaagtagcttctgaggg

SEQ ID NO: 133995 - DNA, 25 bp, Homo sapien
ataagaattttaccagctgggctca

SEQ ID NO: 133996 - DNA, 25 bp, Homo sapien
acactgggatagagctgcggctaaa

SEQ ID NO: 133997 - DNA, 25 bp, Homo sapien
acacagctgtgttaacttgcagccc

SEQ ID NO: 133998 - DNA, 25 bp, Homo sapien
gttgacacacagctgtgttaacttg

SEQ ID NO: 133999 - DNA, 25 bp, Homo sapien
tgacacacagctgtgttaacttgca

SEQ ID NO: 134000 - DNA, 25 bp, Homo sapien
ctgttgacacacagctgtgttaact

SEQ ID NO: 134001 - DNA, 25 bp, Homo sapien
tgccagacgaggttgacggagactc

SEQ ID NO: 134002 - DNA, 25 bp, Homo sapien
cccagctgtgccagacgaggttgac

SEQ ID NO: 134003 - DNA, 25 bp, Homo sapien
cgtcatcaccgtggccggaatcgtg

SEQ ID NO: 134004 - DNA, 25 bp, Homo sapien
tgacggagactcgtcatcaccgtgg

SEQ ID NO: 134005 - DNA, 25 bp, Homo sapien
tcagggggttgcagttgttatgtcc

SEQ ID NO: 134006 - DNA, 25 bp, Homo sapien
agcggaagtagcgtttcttttcagg

SEQ ID NO: 134007 - DNA, 25 bp, Homo sapien
ggagcaagcggaagtagcgtttctt

SEQ ID NO: 134008 - DNA, 25 bp, Homo sapien
tgcagttgttatgtccagggagcaa

SEQ ID NO: 134009 - DNA, 25 bp, Homo sapien
ttcctggagcagccgcagtctcttg

SEQ ID NO: 134010 - DNA, 25 bp, Homo sapien
ctttttccgtctgtcttcttcctgg

SEQ ID NO: 134011 - DNA, 25 bp, Homo sapien
gcagccgcagtctcttgctctccat

SEQ ID NO: 134012 - DNA, 25 bp, Homo sapien
tttccgtctgtcttcttcctggagc

SEQ ID NO: 134013 - DNA, 25 bp, Homo sapien
taattggtgacgttgagaaaaccca

SEQ ID NO: 134014 - DNA, 25 bp, Homo sapien
ttggtgacgttgagaaaacccagct

SEQ ID NO: 134015 - DNA, 25 bp, Homo sapien
aattggtgacgttgagaaaacccag

SEQ ID NO: 134016 - DNA, 25 bp, Homo sapien
attggtgacgttgagaaaacccagc

SEQ ID NO: 134017 - DNA, 25 bp, Homo sapien
atgctgaagctgacatccatgaaga

SEQ ID NO: 134018 - DNA, 25 bp, Homo sapien
gtgggggcatggatgctgaagctga

SEQ ID NO: 134019 - DNA, 25 bp, Homo sapien
tgggggcatggatgctgaagctgac

SEQ ID NO: 134020 - DNA, 25 bp, Homo sapien
ggggcatggatgctgaagctgacat

SEQ ID NO: 134021 - DNA, 25 bp, Homo sapien
gctgagacgcagctcgtgggctaaa

SEQ ID NO: 134022 - DNA, 25 bp, Homo sapien
ttgccaaggcggagggatccatgct

SEQ ID NO: 134023 - DNA, 25 bp, Homo sapien
cagctgagacgcagctcgtgggcta

SEQ ID NO: 134024 - DNA, 25 bp, Homo sapien
gatccatgcttcgaatctggacctt

SEQ ID NO: 134025 - DNA, 25 bp, Homo sapien
aacgctaagccacaaagtgtccaga

SEQ ID NO: 134026 - DNA, 25 bp, Homo sapien
taaagttcagtagtcaaggtgtggc

SEQ ID NO: 134027 - DNA, 25 bp, Homo sapien
gctgggtccagactctgacgttaaa

SEQ ID NO: 134028 - DNA, 25 bp, Homo sapien
cagcaggcaggttaaaatcgtacaa

SEQ ID NO: 134029 - DNA, 25 bp, Homo sapien
atggaagggccctgctgtggcggtc

SEQ ID NO: 134030 - DNA, 25 bp, Homo sapien
ggaagggccctgctgtggcggtctc

SEQ ID NO: 134031 - DNA, 25 bp, Homo sapien
tggaagggccctgctgtggcggtct

SEQ ID NO: 134032 - DNA, 25 bp, Homo sapien
gtagaggttttcgtgcatgaacacc

SEQ ID NO: 134033 - DNA, 25 bp, Homo sapien
gtgcatgaacaccttgagcgtaggg

SEQ ID NO: 134034 - DNA, 25 bp, Homo sapien
gagcgtaggggtcttcagactttgc

SEQ ID NO: 134035 - DNA, 25 bp, Homo sapien
ttggtgaagtagaggttttcgtgca

SEQ ID NO: 134036 - DNA, 25 bp, Homo sapien
gcgaggcccagcacaccgaattcac

SEQ ID NO: 134037 - DNA, 25 bp, Homo sapien
atccaagtgattcagcgaggcccag

SEQ ID NO: 134038 - DNA, 25 bp, Homo sapien
tgggaatccaagtgattcagcgagg

SEQ ID NO: 134039 - DNA, 25 bp, Homo sapien
agaatgtgggaatccaagtgattca

SEQ ID NO: 134040 - DNA, 25 bp, Homo sapien
aaacctcttcctctgccaaaggata

SEQ ID NO: 134041 - DNA, 25 bp, Homo sapien
aacctcttcctctgccaaaggatac

SEQ ID NO: 134042 - DNA, 25 bp, Homo sapien
caaacctcttcctctgccaaaggat

SEQ ID NO: 134043 - DNA, 25 bp, Homo sapien
ccaggtccaacgtcagggtgtggcc

SEQ ID NO: 134044 - DNA, 25 bp, Homo sapien
tactaccgtgctctcagcaaagtgg

SEQ ID NO: 134045 - DNA, 25 bp, Homo sapien
gagtcaagtcttgtgccatatcaac

SEQ ID NO: 134046 - DNA, 25 bp, Homo sapien
gaatactgggtctgtgtagtgaacc

SEQ ID NO: 134047 - DNA, 25 bp, Homo sapien
gtggctctgcttgctctccgggaag

SEQ ID NO: 134048 - DNA, 25 bp, Homo sapien
gtaaatgagaacaccaccaccaaat

SEQ ID NO: 134049 - DNA, 25 bp, Homo sapien
caccaccaaataaacttattttgct

SEQ ID NO: 134050 - DNA, 25 bp, Homo sapien
aaatgagaacaccaccaccaaataa

SEQ ID NO: 134051 - DNA, 25 bp, Homo sapien
ctgtaaatgagaacaccaccaccaa

SEQ ID NO: 134052 - DNA, 25 bp, Homo sapien
ctccaggatataccaggtgctgaaa

SEQ ID NO: 134053 - DNA, 25 bp, Homo sapien
caaattaagtatctccaggatatac

SEQ ID NO: 134054 - DNA, 25 bp, Homo sapien
ttaagtatctccaggatataccagg

SEQ ID NO: 134055 - DNA, 25 bp, Homo sapien
ctgggtagtaagctccaaattaagt

SEQ ID NO: 134056 - DNA, 25 bp, Homo sapien
tggtcagactcgtctcgaacacccg

SEQ ID NO: 134057 - DNA, 25 bp, Homo sapien
tctccaagttggtcagactcgtctc

SEQ ID NO: 134058 - DNA, 25 bp, Homo sapien
actcgtctcgaacacccgacctcac

SEQ ID NO: 134059 - DNA, 25 bp, Homo sapien
tccaagttggtcagactcgtctcga

SEQ ID NO: 134060 - DNA, 25 bp, Homo sapien
tggagtctctgcgagtcccatgagg

SEQ ID NO: 134061 - DNA, 25 bp, Homo sapien
ctctgcgagtcccatgaggcatagc

SEQ ID NO: 134062 - DNA, 25 bp, Homo sapien
ggagcagggtggcacagcctggagt

SEQ ID NO: 134063 - DNA, 25 bp, Homo sapien
gactattgacgaacagtgatgctgg

SEQ ID NO: 134064 - DNA, 25 bp, Homo sapien
taaacttttgcattgatagaacgta

SEQ ID NO: 134065 - DNA, 25 bp, Homo sapien
atcacaaactaaatatagccatgta

SEQ ID NO: 134066 - DNA, 25 bp, Homo sapien
catgtacccaccacccaggttaaga

SEQ ID NO: 134067 - DNA, 25 bp, Homo sapien
gatagaacgtacagattgtaaggat

SEQ ID NO: 134068 - DNA, 25 bp, Homo sapien
ctcaaacgattatcctgccttggcc

SEQ ID NO: 134069 - DNA, 25 bp, Homo sapien
agggtcttgttcttttgcccagtct

SEQ ID NO: 134070 - DNA, 25 bp, Homo sapien
cgtgatcatggctcaatgcatcctc

SEQ ID NO: 134071 - DNA, 25 bp, Homo sapien
gggctcaaacgattatcctgccttg

SEQ ID NO: 134072 - DNA, 25 bp, Homo sapien
tactgaagcagttatttgcttggat

SEQ ID NO: 134073 - DNA, 25 bp, Homo sapien
gcagttatttgcttggatattcagg

SEQ ID NO: 134074 - DNA, 25 bp, Homo sapien
tatttgcttggatattcagggacca

SEQ ID NO: 134075 - DNA, 25 bp, Homo sapien
gaagcagttatttgcttggatattc

SEQ ID NO: 134076 - DNA, 25 bp, Homo sapien
tggtcccaaaggactgccggtgtcc

SEQ ID NO: 134077 - DNA, 25 bp, Homo sapien
acgttggtcaacaggacccgccgag

SEQ ID NO: 134078 - DNA, 25 bp, Homo sapien
tgccggtgtcccgtcaccacgttgg

SEQ ID NO: 134079 - DNA, 25 bp, Homo sapien
agacatcactgttggtcccaaagga

SEQ ID NO: 134080 - DNA, 25 bp, Homo sapien
ggctatcatgacatccctctgaggc

SEQ ID NO: 134081 - DNA, 25 bp, Homo sapien
tgattagacacgtgctggtcagggt

SEQ ID NO: 134082 - DNA, 25 bp, Homo sapien
gcctctgggtcagacggtgtgatta

SEQ ID NO: 134083 - DNA, 25 bp, Homo sapien
tggaaagagggactgctcagtgcct

SEQ ID NO: 134084 - DNA, 25 bp, Homo sapien
catcttggaggatccgcacagaggt

SEQ ID NO: 134085 - DNA, 25 bp, Homo sapien
tggcaaagatttccccagagcggca

SEQ ID NO: 134086 - DNA, 25 bp, Homo sapien
caggtattgctcatcttggaggatc

SEQ ID NO: 134087 - DNA, 25 bp, Homo sapien
tgaatcatgaaacaggcgggtggcc

SEQ ID NO: 134088 - DNA, 25 bp, Homo sapien
tactgccttacgcacttcgtggtcc

SEQ ID NO: 134089 - DNA, 25 bp, Homo sapien
tacgcacttcgtggtcctcaggtcc

SEQ ID NO: 134090 - DNA, 25 bp, Homo sapien
ttcgtactgccttacgcacttcgtg

SEQ ID NO: 134091 - DNA, 25 bp, Homo sapien
gccttacgcacttcgtggtcctcag

SEQ ID NO: 134092 - DNA, 25 bp, Homo sapien
gccttgggcagtcatggatttcaca

SEQ ID NO: 134093 - DNA, 25 bp, Homo sapien
ggcttagtggccagatagctgctcc

SEQ ID NO: 134094 - DNA, 25 bp, Homo sapien
ctgctgaagttgctgggatcgcccc

SEQ ID NO: 134095 - DNA, 25 bp, Homo sapien
tacactactggagaccttcagcagg

SEQ ID NO: 134096 - DNA, 25 bp, Homo sapien
cagccgcgacgagaaggccacactg

SEQ ID NO: 134097 - DNA, 25 bp, Homo sapien
acactgggaatgtcggccttggagg

SEQ ID NO: 134098 - DNA, 25 bp, Homo sapien
aatgtcggccttggaggcagggtac

SEQ ID NO: 134099 - DNA, 25 bp, Homo sapien
tatggttctcagtaggcgggcatcg

SEQ ID NO: 134100 - DNA, 25 bp, Homo sapien
gaataaacatctcacgaactgtcgc

SEQ ID NO: 134101 - DNA, 25 bp, Homo sapien
cagaatcccggagatctgctgctga

SEQ ID NO: 134102 - DNA, 25 bp, Homo sapien
acgccgggcccttgaatctgacatt

SEQ ID NO: 134103 - DNA, 25 bp, Homo sapien
tcatcactgggcttcttcaatgggc

SEQ ID NO: 134104 - DNA, 25 bp, Homo sapien
gaggatgcattctactatccagcca

SEQ ID NO: 134105 - DNA, 25 bp, Homo sapien
atgtggaggatgcattctactatcc

SEQ ID NO: 134106 - DNA, 25 bp, Homo sapien
tgtggaggatgcattctactatcca

SEQ ID NO: 134107 - DNA, 25 bp, Homo sapien
tggaggatgcattctactatccagc

SEQ ID NO: 134108 - DNA, 25 bp, Homo sapien
tgccaaccaggtgtagtcactgcat

SEQ ID NO: 134109 - DNA, 25 bp, Homo sapien
ctctccaaagacagacgtgctccga

SEQ ID NO: 134110 - DNA, 25 bp, Homo sapien
tgtaaaataacattgagagttcacc

SEQ ID NO: 134111 - DNA, 25 bp, Homo sapien
gaccagtttgacatcagcattgtag

SEQ ID NO: 134112 - DNA, 25 bp, Homo sapien
tgatctgcagtcaaatgctctaccc

SEQ ID NO: 134113 - DNA, 25 bp, Homo sapien
tcaaatgctctacccctgagctata

SEQ ID NO: 134114 - DNA, 25 bp, Homo sapien
tgaaccggggacctcttgatctgca

SEQ ID NO: 134115 - DNA, 25 bp, Homo sapien
gatttgaaccggggacctcttgatc

SEQ ID NO: 134116 - DNA, 25 bp, Homo sapien
tcgtgaacactaaagcccatagggt

SEQ ID NO: 134117 - DNA, 25 bp, Homo sapien
tggaacccacaatcgtagtctgtaa

SEQ ID NO: 134118 - DNA, 25 bp, Homo sapien
tactttggaaatcgtcacatactcg

SEQ ID NO: 134119 - DNA, 25 bp, Homo sapien
tttgcagctatgtttgcattttcca

SEQ ID NO: 134120 - DNA, 25 bp, Homo sapien
accatcgcactgtagagtttctccc

SEQ ID NO: 134121 - DNA, 25 bp, Homo sapien
ccttctatcaccatcgcactgtaga

SEQ ID NO: 134122 - DNA, 25 bp, Homo sapien
tcagaagcccagcattgcccggcac

SEQ ID NO: 134123 - DNA, 25 bp, Homo sapien
catttccaggtaaggtcaatatctt

SEQ ID NO: 134124 - DNA, 25 bp, Homo sapien
tgtctccactcggctttcccaaaag

SEQ ID NO: 134125 - DNA, 25 bp, Homo sapien
agctcctcaatcgaagcatctgcct

SEQ ID NO: 134126 - DNA, 25 bp, Homo sapien
gagtgtcgcactaggattttcattg

SEQ ID NO: 134127 - DNA, 25 bp, Homo sapien
gagggtcagaggtcgggtcttcggc

SEQ ID NO: 134128 - DNA, 25 bp, Homo sapien
gttcttaactcagcctgcggtgcgg

SEQ ID NO: 134129 - DNA, 25 bp, Homo sapien
acttcatggctcagtcggtgtccga

SEQ ID NO: 134130 - DNA, 25 bp, Homo sapien
ttctgaaggacaacaacaatgctgc

SEQ ID NO: 134131 - DNA, 25 bp, Homo sapien
ggaagcctgcgttttcatttcagac

SEQ ID NO: 134132 - DNA, 25 bp, Homo sapien
taaagccaccgttcagcctaggagt

SEQ ID NO: 134133 - DNA, 25 bp, Homo sapien
gatcctataggtaccataaaactga

SEQ ID NO: 134134 - DNA, 25 bp, Homo sapien
tgtcctcgctgggtgattcctaaag

SEQ ID NO: 134135 - DNA, 25 bp, Homo sapien
aagtgattatccctgagggacttat

SEQ ID NO: 134136 - DNA, 25 bp, Homo sapien
gcgaggaagtcagtgtagtgcccaa

SEQ ID NO: 134137 - DNA, 25 bp, Homo sapien
ctcctgagatcgggcagattgcttg

SEQ ID NO: 134138 - DNA, 25 bp, Homo sapien
cctgtttcaggcctgctatgagaga

SEQ ID NO: 134139 - DNA, 25 bp, Homo sapien
caataagctagcagagtgtttcctg

SEQ ID NO: 134140 - DNA, 25 bp, Homo sapien
tcttccgaggtggtaagcgtcacca

SEQ ID NO: 134141 - DNA, 25 bp, Homo sapien
gcgtcaccaagctttctgcgattaa

SEQ ID NO: 134142 - DNA, 25 bp, Homo sapien
gtcttggatgtcctacctcaggcca

SEQ ID NO: 134143 - DNA, 25 bp, Homo sapien
ggacactgagcactgtaaactgtaa

SEQ ID NO: 134144 - DNA, 25 bp, Homo sapien
gctactagagaataacaccacccgt

SEQ ID NO: 134145 - DNA, 25 bp, Homo sapien
tgaaggtcagttggcttgtgcccca

SEQ ID NO: 134146 - DNA, 25 bp, Homo sapien
cagagaagctcatccaggaccggtt

SEQ ID NO: 134147 - DNA, 25 bp, Homo sapien
cactacaagggaacgaggacttaca

SEQ ID NO: 134148 - DNA, 25 bp, Homo sapien
tctttaagaagacccatcgtgtggc

SEQ ID NO: 134149 - DNA, 25 bp, Homo sapien
gcttggcggcctcacttgtttacag

SEQ ID NO: 134150 - DNA, 25 bp, Homo sapien
tgttgctcagaatactgggacttga

SEQ ID NO: 134151 - DNA, 25 bp, Homo sapien
tacagtcccagaatagtgttgctca

SEQ ID NO: 134152 - DNA, 25 bp, Homo sapien
gagccgactgaatcttacgactacg

SEQ ID NO: 134153 - DNA, 25 bp, Homo sapien
gaatcttacgactacgggacgccat

SEQ ID NO: 134154 - DNA, 25 bp, Homo sapien
tgattggagccgactgaatcttacg

SEQ ID NO: 134155 - DNA, 25 bp, Homo sapien
catgtttgattggagccgactgaat

SEQ ID NO: 134156 - DNA, 25 bp, Homo sapien
tactgccttcgcgaccttctgggat

SEQ ID NO: 134157 - DNA, 25 bp, Homo sapien
ctgggatccaggttacgagtgcgct

SEQ ID NO: 134158 - DNA, 25 bp, Homo sapien
gccgctgaggaaacggtactgcctt

SEQ ID NO: 134159 - DNA, 25 bp, Homo sapien
cgagtgcgctccactggttcgagat

SEQ ID NO: 134160 - DNA, 25 bp, Homo sapien
tgcactccaacctgaacgacagagt

SEQ ID NO: 134161 - DNA, 25 bp, Homo sapien
cactccaacctgaacgacagagtaa

SEQ ID NO: 134162 - DNA, 25 bp, Homo sapien
ctgcactccaacctgaacgacagag

SEQ ID NO: 134163 - DNA, 25 bp, Homo sapien
ctccaacctgaacgacagagtaaga

SEQ ID NO: 134164 - DNA, 25 bp, Homo sapien
gttctgtctgtgaacgaggtaaagt

SEQ ID NO: 134165 - DNA, 25 bp, Homo sapien
cctgataatacagctggtagtctga

SEQ ID NO: 134166 - DNA, 25 bp, Homo sapien
tggtagtctgaataagtctcagatc

SEQ ID NO: 134167 - DNA, 25 bp, Homo sapien
tacagctggtagtctgaataagtct

SEQ ID NO: 134168 - DNA, 25 bp, Homo sapien
ttgttccttcctgataatacagctg

SEQ ID NO: 134169 - DNA, 25 bp, Homo sapien
atcagtgccaaagaattggtcatct

SEQ ID NO: 134170 - DNA, 25 bp, Homo sapien
tacaacatgcggcacactgacaata

SEQ ID NO: 134171 - DNA, 25 bp, Homo sapien
catcagtgccaaagaattggtcatc

SEQ ID NO: 134172 - DNA, 25 bp, Homo sapien
acaacatgcggcacactgacaatac

SEQ ID NO: 134173 - DNA, 25 bp, Homo sapien
gattcccatgggagggcgattcaaa

SEQ ID NO: 134174 - DNA, 25 bp, Homo sapien
aggtacaggtggaggaaatcctgga

SEQ ID NO: 134175 - DNA, 25 bp, Homo sapien
tgggatccctggtgggagtgctggg

SEQ ID NO: 134176 - DNA, 25 bp, Homo sapien
tgctgggattcccatgggagggcga

SEQ ID NO: 134177 - DNA, 25 bp, Homo sapien
gctcattggtacaggaatcattggg

SEQ ID NO: 134178 - DNA, 25 bp, Homo sapien
gccataatgctcattggtacaggaa

SEQ ID NO: 134179 - DNA, 25 bp, Homo sapien
ggagcaggagccataatgctcattg

SEQ ID NO: 134180 - DNA, 25 bp, Homo sapien
caggagccataatgctcattggtac

SEQ ID NO: 134181 - DNA, 25 bp, Homo sapien
tttcttgcgcccaaatgctttccaa

SEQ ID NO: 134182 - DNA, 25 bp, Homo sapien
tctgaagctttctcggaaatgttgc

SEQ ID NO: 134183 - DNA, 25 bp, Homo sapien
cagtggtagtaggaccacaattttc

SEQ ID NO: 134184 - DNA, 25 bp, Homo sapien
tttagcctttaagcctggatgatcc

SEQ ID NO: 134185 - DNA, 25 bp, Homo sapien
cttgcaaaggactaggatgacaacc

SEQ ID NO: 134186 - DNA, 25 bp, Homo sapien
cacctttgctgcaggactgaaattt

SEQ ID NO: 134187 - DNA, 25 bp, Homo sapien
cacaggtgaaatgttatgccacaat

SEQ ID NO: 134188 - DNA, 25 bp, Homo sapien
gattatgtcgcagaatgtccttgct

SEQ ID NO: 134189 - DNA, 25 bp, Homo sapien
ctcttccagctcaaaaccaaaccac

SEQ ID NO: 134190 - DNA, 25 bp, Homo sapien
gctttccggaagcaccttgtactct

SEQ ID NO: 134191 - DNA, 25 bp, Homo sapien
tgaagctttccggaagcaccttgta

SEQ ID NO: 134192 - DNA, 25 bp, Homo sapien
ccggaagcaccttgtactctcttcc

SEQ ID NO: 134193 - DNA, 25 bp, Homo sapien
gcaaataaggaaaaaaatgacatac

SEQ ID NO: 134194 - DNA, 25 bp, Homo sapien
cagcaaataaggaaaaaaatgacat

SEQ ID NO: 134195 - DNA, 25 bp, Homo sapien
tcagcaaataaggaaaaaaatgaca

SEQ ID NO: 134196 - DNA, 25 bp, Homo sapien
ttcagcaaataaggaaaaaaatgac

SEQ ID NO: 134197 - DNA, 25 bp, Homo sapien
cacggagggtagattctggctcctt

SEQ ID NO: 134198 - DNA, 25 bp, Homo sapien
agtgcacggagggtagattctggct

SEQ ID NO: 134199 - DNA, 25 bp, Homo sapien
agattctggctccttgtactcacag

SEQ ID NO: 134200 - DNA, 25 bp, Homo sapien
gagggtagattctggctccttgtac

SEQ ID NO: 134201 - DNA, 25 bp, Homo sapien
taacgagtagctttttctctccaat

SEQ ID NO: 134202 - DNA, 25 bp, Homo sapien
gcatcaactttaacgagtagctttt

SEQ ID NO: 134203 - DNA, 25 bp, Homo sapien
ctttgtctttgcatcaactttaacg

SEQ ID NO: 134204 - DNA, 25 bp, Homo sapien
ctttgcatcaactttaacgagtagc

SEQ ID NO: 134205 - DNA, 25 bp, Homo sapien
cccattagaagctttcttctttgct

SEQ ID NO: 134206 - DNA, 25 bp, Homo sapien
ccattagaagctttcttctttgctt

SEQ ID NO: 134207 - DNA, 25 bp, Homo sapien
cattagaagctttcttctttgcttt

SEQ ID NO: 134208 - DNA, 25 bp, Homo sapien
gtctgtaccagtgctttctctggca

SEQ ID NO: 134209 - DNA, 25 bp, Homo sapien
ggcaagttaaccttgtccagcctcc

SEQ ID NO: 134210 - DNA, 25 bp, Homo sapien
tctgtttggaatagtctgtaccagt

SEQ ID NO: 134211 - DNA, 25 bp, Homo sapien
tacaaagctgccttaatgaattagc

SEQ ID NO: 134212 - DNA, 25 bp, Homo sapien
tgtctgacagaaactaagggcaggc

SEQ ID NO: 134213 - DNA, 25 bp, Homo sapien
gctttatatgggaacagaggactta

SEQ ID NO: 134214 - DNA, 25 bp, Homo sapien
gaggtacaagattaaagagacacag

SEQ ID NO: 134215 - DNA, 25 bp, Homo sapien
caacagggagcttggataggcaaca

SEQ ID NO: 134216 - DNA, 25 bp, Homo sapien
acaccaccccacactcgagcctggg

SEQ ID NO: 134217 - DNA, 25 bp, Homo sapien
tgttgagtaatattgacacttaagg

SEQ ID NO: 134218 - DNA, 25 bp, Homo sapien
gacttcaagtaccaccgggcaagaa

SEQ ID NO: 134219 - DNA, 25 bp, Homo sapien
gccaaagggcactcagaaatacaca

SEQ ID NO: 134220 - DNA, 25 bp, Homo sapien
gaaatacacatataacagttggaac

SEQ ID NO: 134221 - DNA, 25 bp, Homo sapien
catgctcatgtgcatacatgcctgg

SEQ ID NO: 134222 - DNA, 25 bp, Homo sapien
tctattcaaggtgagtttcatgcct

SEQ ID NO: 134223 - DNA, 25 bp, Homo sapien
gctacaatagttgtgcatgccccaa

SEQ ID NO: 134224 - DNA, 25 bp, Homo sapien
gatacatacaagaaccatgctcatg

SEQ ID NO: 134225 - DNA, 25 bp, Homo sapien
tctacgagtgcttataatgcaggaa

SEQ ID NO: 134226 - DNA, 25 bp, Homo sapien
caggactagcacactatacgacaca

SEQ ID NO: 134227 - DNA, 25 bp, Homo sapien
gactgttttgctcaataggtacaca

SEQ ID NO: 134228 - DNA, 25 bp, Homo sapien
gttaattgtgatagctaccactcag

SEQ ID NO: 134229 - DNA, 25 bp, Homo sapien
tcatccaaggcttcttcatcgtcat

SEQ ID NO: 134230 - DNA, 25 bp, Homo sapien
tcacgaattaaaacttcaatagccc

SEQ ID NO: 134231 - DNA, 25 bp, Homo sapien
cttcatcgtcattagtgacagtttc

SEQ ID NO: 134232 - DNA, 25 bp, Homo sapien
tcatctgatctctcctctttgtttc

SEQ ID NO: 134233 - DNA, 25 bp, Homo sapien
ttcttcctggggtgagaatcagatt

SEQ ID NO: 134234 - DNA, 25 bp, Homo sapien
tcctgtgagggggcatttagctcac

SEQ ID NO: 134235 - DNA, 25 bp, Homo sapien
tcagattcctgtgagggggcattta

SEQ ID NO: 134236 - DNA, 25 bp, Homo sapien
agattcctgtgagggggcatttagc

SEQ ID NO: 134237 - DNA, 25 bp, Homo sapien
cttagtgatgagtggataagggatc

SEQ ID NO: 134238 - DNA, 25 bp, Homo sapien
gatgagtggataagggatcagtggg

SEQ ID NO: 134239 - DNA, 25 bp, Homo sapien
ttagtgatgagtggataagggatca

SEQ ID NO: 134240 - DNA, 25 bp, Homo sapien
agtgatgagtggataagggatcagt

SEQ ID NO: 134241 - DNA, 25 bp, Homo sapien
tttgctgatctctcgagatatcagg

SEQ ID NO: 134242 - DNA, 25 bp, Homo sapien
tgatctctcgagatatcaggtctct

SEQ ID NO: 134243 - DNA, 25 bp, Homo sapien
tgaatttgctgatctctcgagatat

SEQ ID NO: 134244 - DNA, 25 bp, Homo sapien
tcgagatatcaggtctcttttgtct

SEQ ID NO: 134245 - DNA, 25 bp, Homo sapien
gtctggtaaccactgacctactgtt

SEQ ID NO: 134246 - DNA, 25 bp, Homo sapien
taagcacaacatgtcaaggaccact

SEQ ID NO: 134247 - DNA, 25 bp, Homo sapien
gactgcagaatagtcagtaactgaa

SEQ ID NO: 134248 - DNA, 25 bp, Homo sapien
gaatttacagttcttccatgcatct

SEQ ID NO: 134249 - DNA, 25 bp, Homo sapien
tacttacatcctattccttgttact

SEQ ID NO: 134250 - DNA, 25 bp, Homo sapien
aaaacagaagctcatacttacatcc

SEQ ID NO: 134251 - DNA, 25 bp, Homo sapien
ctgagggggcatccataaatataat

SEQ ID NO: 134252 - DNA, 25 bp, Homo sapien
tcttgcattagtcaccatatgatct

SEQ ID NO: 134253 - DNA, 25 bp, Homo sapien
tcagtctatcagtaagaaccagcaa

SEQ ID NO: 134254 - DNA, 25 bp, Homo sapien
ttcaacaccagcgaacattcacaga

SEQ ID NO: 134255 - DNA, 25 bp, Homo sapien
gcattgcaccgttcaaaagcatcat

SEQ ID NO: 134256 - DNA, 25 bp, Homo sapien
gagagaagcttcaaataggcaaaac

SEQ ID NO: 134257 - DNA, 25 bp, Homo sapien
ctgggcatctggatagtaagtgttc

SEQ ID NO: 134258 - DNA, 25 bp, Homo sapien
attatgtttgtgctcttagacacat

SEQ ID NO: 134259 - DNA, 25 bp, Homo sapien
tggatagtaagtgttcagcagcact

SEQ ID NO: 134260 - DNA, 25 bp, Homo sapien
aattttgggagaattatgtttgtgc

SEQ ID NO: 134261 - DNA, 25 bp, Homo sapien
catttttaagcttactcggtcctga

SEQ ID NO: 134262 - DNA, 25 bp, Homo sapien
gtaaaatgcctaacagattcccaaa

SEQ ID NO: 134263 - DNA, 25 bp, Homo sapien
cacacaaccatataccatttttaag

SEQ ID NO: 134264 - DNA, 25 bp, Homo sapien
taatttaccaataacatgacagggt

SEQ ID NO: 134265 - DNA, 25 bp, Homo sapien
taggacatggatcgccaacactgga

SEQ ID NO: 134266 - DNA, 25 bp, Homo sapien
gctgtgccagtctatatcgaagtag

SEQ ID NO: 134267 - DNA, 25 bp, Homo sapien
catccttggaaggaacgattgtgca

SEQ ID NO: 134268 - DNA, 25 bp, Homo sapien
tcatccgtgctgtaaatggacgccc

SEQ ID NO: 134269 - DNA, 25 bp, Homo sapien
ccttattacgatctgagctcctttc

SEQ ID NO: 134270 - DNA, 25 bp, Homo sapien
gatctctctctcgatcccgatctcg

SEQ ID NO: 134271 - DNA, 25 bp, Homo sapien
tctctctcttttgtccggtcacggt

SEQ ID NO: 134272 - DNA, 25 bp, Homo sapien
gctcctttctctatcccggtcacga

SEQ ID NO: 134273 - DNA, 25 bp, Homo sapien
tctctcgctcccgttctcgttctcg

SEQ ID NO: 134274 - DNA, 25 bp, Homo sapien
ccgctctcgttccctttcacgatct

SEQ ID NO: 134275 - DNA, 25 bp, Homo sapien
ctctctcgctcccgttctcgttctc

SEQ ID NO: 134276 - DNA, 25 bp, Homo sapien
aagttttcttcgttcgtatgcatct

SEQ ID NO: 134277 - DNA, 25 bp, Homo sapien
agttttcttcgttcgtatgcatctt

SEQ ID NO: 134278 - DNA, 25 bp, Homo sapien
tctttcgttctctgatttcccaatt

SEQ ID NO: 134279 - DNA, 25 bp, Homo sapien
ttctttcgttctctgatttcccaat

SEQ ID NO: 134280 - DNA, 25 bp, Homo sapien
ctttcgttctctgatttcccaattc

SEQ ID NO: 134281 - DNA, 25 bp, Homo sapien
tttcgttctctgatttcccaattct

SEQ ID NO: 134282 - DNA, 25 bp, Homo sapien
ctctaagaaaagtctgaatgaggac

SEQ ID NO: 134283 - DNA, 25 bp, Homo sapien
taagaaaagtctgaatgaggacgca

SEQ ID NO: 134284 - DNA, 25 bp, Homo sapien
ctaagaaaagtctgaatgaggacgc

SEQ ID NO: 134285 - DNA, 25 bp, Homo sapien
aagaaaagtctgaatgaggacgcat

SEQ ID NO: 134286 - DNA, 25 bp, Homo sapien
aataaacttgttgggctagcctggg

SEQ ID NO: 134287 - DNA, 25 bp, Homo sapien
aaccaagagtaagagggagacttat

SEQ ID NO: 134288 - DNA, 25 bp, Homo sapien
aacatggccgtttcaataaatgaaa

SEQ ID NO: 134289 - DNA, 25 bp, Homo sapien
gcagctatctctctacagttgtaca

SEQ ID NO: 134290 - DNA, 25 bp, Homo sapien
taatatttggggtcatctctatcat

SEQ ID NO: 134291 - DNA, 25 bp, Homo sapien
gggtcatctctatcatcatcatagt

SEQ ID NO: 134292 - DNA, 25 bp, Homo sapien
tttggggtcatctctatcatcatca

SEQ ID NO: 134293 - DNA, 25 bp, Homo sapien
tcatcatagtcttctaagaattctt

SEQ ID NO: 134294 - DNA, 25 bp, Homo sapien
cagagattcgttgtaacttgctata

SEQ ID NO: 134295 - DNA, 25 bp, Homo sapien
agagacgggaggtcaaattgctaga

SEQ ID NO: 134296 - DNA, 25 bp, Homo sapien
gagtagtttgaaaatgccatgggaa

SEQ ID NO: 134297 - DNA, 25 bp, Homo sapien
taaaaattggacctagcacacaggt

SEQ ID NO: 134298 - DNA, 25 bp, Homo sapien
acattacaacctgcatgctaagagg

SEQ ID NO: 134299 - DNA, 25 bp, Homo sapien
gaagtaaacatgacatctccaacag

SEQ ID NO: 134300 - DNA, 25 bp, Homo sapien
aaaggcttcatttaatactccgatc

SEQ ID NO: 134301 - DNA, 25 bp, Homo sapien
tgtatctacggaacacaccagagtg

SEQ ID NO: 134302 - DNA, 25 bp, Homo sapien
ttctctatcacgcaaccttttctga

SEQ ID NO: 134303 - DNA, 25 bp, Homo sapien
ctctatcacgcaaccttttctgaag

SEQ ID NO: 134304 - DNA, 25 bp, Homo sapien
ttttctctatcacgcaaccttttct

SEQ ID NO: 134305 - DNA, 25 bp, Homo sapien
ttccttttctctatcacgcaacctt

SEQ ID NO: 134306 - DNA, 25 bp, Homo sapien
aactctacaccattcaacttgattt

SEQ ID NO: 134307 - DNA, 25 bp, Homo sapien
tacaccattcaacttgatttttgtt

SEQ ID NO: 134308 - DNA, 25 bp, Homo sapien
tctacaccattcaacttgatttttg

SEQ ID NO: 134309 - DNA, 25 bp, Homo sapien
actctacaccattcaacttgatttt

SEQ ID NO: 134310 - DNA, 25 bp, Homo sapien
ctttatttgtggctgcctgcgcctc

SEQ ID NO: 134311 - DNA, 25 bp, Homo sapien
atttgtggctgcctgcgcctctcag

SEQ ID NO: 134312 - DNA, 25 bp, Homo sapien
tttgtggctgcctgcgcctctcagc

SEQ ID NO: 134313 - DNA, 25 bp, Homo sapien
ttatttgtggctgcctgcgcctctc

SEQ ID NO: 134314 - DNA, 25 bp, Homo sapien
gctgatgggcctcagagtaggtttc

SEQ ID NO: 134315 - DNA, 25 bp, Homo sapien
tctggtgagttttcatgaggaataa

SEQ ID NO: 134316 - DNA, 25 bp, Homo sapien
taataataccacagggagactcatc

SEQ ID NO: 134317 - DNA, 25 bp, Homo sapien
tttggcctatgctcctcaggttgct

SEQ ID NO: 134318 - DNA, 25 bp, Homo sapien
caggagtgttaggtgttgcattgcc

SEQ ID NO: 134319 - DNA, 25 bp, Homo sapien
tctacctaaccaagcacaaatataa

SEQ ID NO: 134320 - DNA, 25 bp, Homo sapien
ctatgaaaacaatcgtgagctagaa

SEQ ID NO: 134321 - DNA, 25 bp, Homo sapien
aacaatcgtgagctagaaaggcatt

SEQ ID NO: 134322 - DNA, 25 bp, Homo sapien
tgaaaacaatcgtgagctagaaagg

SEQ ID NO: 134323 - DNA, 25 bp, Homo sapien
ttcttctcagaactcgaggcagctg

SEQ ID NO: 134324 - DNA, 25 bp, Homo sapien
tttcacttcttctcagaactcgagg

SEQ ID NO: 134325 - DNA, 25 bp, Homo sapien
gaggcagctgcagatataggagcac

SEQ ID NO: 134326 - DNA, 25 bp, Homo sapien
gctgcagatataggagcactagtaa

SEQ ID NO: 134327 - DNA, 25 bp, Homo sapien
ccatccctcaaaagcaatgcaaaat

SEQ ID NO: 134328 - DNA, 25 bp, Homo sapien
aaaacactctcttagcaagatgact

SEQ ID NO: 134329 - DNA, 25 bp, Homo sapien
tgtttcattttataacccaccatcc

SEQ ID NO: 134330 - DNA, 25 bp, Homo sapien
ttagagaaagatcccaactgtaaaa

SEQ ID NO: 134331 - DNA, 25 bp, Homo sapien
caatgagactcttaatgtgtttacg

SEQ ID NO: 134332 - DNA, 25 bp, Homo sapien
gataagcgaagagctcaggtttggc

SEQ ID NO: 134333 - DNA, 25 bp, Homo sapien
caggtttggctgtagggattttctc

SEQ ID NO: 134334 - DNA, 25 bp, Homo sapien
gaatccacaatagaccaatccaggg

SEQ ID NO: 134335 - DNA, 25 bp, Homo sapien
tcttattaatccatggtctaattcg

SEQ ID NO: 134336 - DNA, 25 bp, Homo sapien
gcttcttcttcacctatatattcta

SEQ ID NO: 134337 - DNA, 25 bp, Homo sapien
tcaactaatgtagcttcttcttcac

SEQ ID NO: 134338 - DNA, 25 bp, Homo sapien
ggtctaattcgacgttccatcagta

SEQ ID NO: 134339 - DNA, 25 bp, Homo sapien
tgctctggggtgaactatgagccat

SEQ ID NO: 134340 - DNA, 25 bp, Homo sapien
aaatgctctggggtgaactatgagc

SEQ ID NO: 134341 - DNA, 25 bp, Homo sapien
ctctggggtgaactatgagccataa

SEQ ID NO: 134342 - DNA, 25 bp, Homo sapien
tctggggtgaactatgagccataac

SEQ ID NO: 134343 - DNA, 25 bp, Homo sapien
tgaaaaaacatgaacgaagagaggg

SEQ ID NO: 134344 - DNA, 25 bp, Homo sapien
cattgtgctgggcatagggaaaaca

SEQ ID NO: 134345 - DNA, 25 bp, Homo sapien
tccttgtgatgcttaacctaactgc

SEQ ID NO: 134346 - DNA, 25 bp, Homo sapien
cacacacacgtatcagttcctgtag

SEQ ID NO: 134347 - DNA, 25 bp, Homo sapien
agagaagcaatcatcaacatctgcc

SEQ ID NO: 134348 - DNA, 25 bp, Homo sapien
cacatgtaagagaagcaatcatcaa

SEQ ID NO: 134349 - DNA, 25 bp, Homo sapien
tgtaagagaagcaatcatcaacatc

SEQ ID NO: 134350 - DNA, 25 bp, Homo sapien
aacacatgtaagagaagcaatcatc

SEQ ID NO: 134351 - DNA, 25 bp, Homo sapien
atatcaataatctccacattttgac

SEQ ID NO: 134352 - DNA, 25 bp, Homo sapien
tatatcaataatctccacattttga

SEQ ID NO: 134353 - DNA, 25 bp, Homo sapien
cagatgactttacaaccaagggagt

SEQ ID NO: 134354 - DNA, 25 bp, Homo sapien
cacagggcaacaacaaattagagga

SEQ ID NO: 134355 - DNA, 25 bp, Homo sapien
tatcagataggctgtgtacagtagc

SEQ ID NO: 134356 - DNA, 25 bp, Homo sapien
gtagctgcggcttataaaacatacc

SEQ ID NO: 134357 - DNA, 25 bp, Homo sapien
gacacgagaacaccatgctctggga

SEQ ID NO: 134358 - DNA, 25 bp, Homo sapien
catttcaggttggaacagtaccact

SEQ ID NO: 134359 - DNA, 25 bp, Homo sapien
caaaccacattgctcacgacacgag

SEQ ID NO: 134360 - DNA, 25 bp, Homo sapien
tacaaattgccgagcagaataccta

SEQ ID NO: 134361 - DNA, 25 bp, Homo sapien
tcaggtaattttactccctggtgaa

SEQ ID NO: 134362 - DNA, 25 bp, Homo sapien
ttcaggtaattttactccctggtga

SEQ ID NO: 134363 - DNA, 25 bp, Homo sapien
cataatggaaccacatcagggttcg

SEQ ID NO: 134364 - DNA, 25 bp, Homo sapien
aataagtactcagacatgggaacag

SEQ ID NO: 134365 - DNA, 25 bp, Homo sapien
aaaatccagtaatccaaagctcaca

SEQ ID NO: 134366 - DNA, 25 bp, Homo sapien
acagtgttttcaaatgtcctctcca

SEQ ID NO: 134367 - DNA, 25 bp, Homo sapien
tctgaaagaatatgagtccccagga

SEQ ID NO: 134368 - DNA, 25 bp, Homo sapien
ttctgaaagaatatgagtccccagg

SEQ ID NO: 134369 - DNA, 25 bp, Homo sapien
gacacaataaactcctcgaacaagg

SEQ ID NO: 134370 - DNA, 25 bp, Homo sapien
taagtacagttgacagagcaggaga

SEQ ID NO: 134371 - DNA, 25 bp, Homo sapien
agtacagagtacatctccccaaagg

SEQ ID NO: 134372 - DNA, 25 bp, Homo sapien
taaactggcattaagcgattaacag

SEQ ID NO: 134373 - DNA, 25 bp, Homo sapien
aagactggttcttaagatgttcacg

SEQ ID NO: 134374 - DNA, 25 bp, Homo sapien
ttcttaagatgttcacgctttggcc

SEQ ID NO: 134375 - DNA, 25 bp, Homo sapien
ttttgccagatcaagactggttctt

SEQ ID NO: 134376 - DNA, 25 bp, Homo sapien
gatgttcacgctttggccaggcaag

SEQ ID NO: 134377 - DNA, 25 bp, Homo sapien
gcttacacttacatagtttacaggg

SEQ ID NO: 134378 - DNA, 25 bp, Homo sapien
gatagtgtctagttcaaattggctc

SEQ ID NO: 134379 - DNA, 25 bp, Homo sapien
tcatggcagattaatacctgaaaca

SEQ ID NO: 134380 - DNA, 25 bp, Homo sapien
gaaacagcacgcttcacaaaataat

SEQ ID NO: 134381 - DNA, 25 bp, Homo sapien
tttaatttcgccttcatgactcaag

SEQ ID NO: 134382 - DNA, 25 bp, Homo sapien
gattgttatattagtagctcctggg

SEQ ID NO: 134383 - DNA, 25 bp, Homo sapien
ctgggtttggtatgtatctccctgt

SEQ ID NO: 134384 - DNA, 25 bp, Homo sapien
ttgacagctagactgtttctttgcc

SEQ ID NO: 134385 - DNA, 25 bp, Homo sapien
tgtttctagaaattatcttctttac

SEQ ID NO: 134386 - DNA, 25 bp, Homo sapien
ttgtttctagaaattatcttcttta

SEQ ID NO: 134387 - DNA, 25 bp, Homo sapien
gcgatggccatcctaaatttaacac

SEQ ID NO: 134388 - DNA, 25 bp, Homo sapien
ttctcccggcatacaagcgatggcc

SEQ ID NO: 134389 - DNA, 25 bp, Homo sapien
gggtacctatttgcgaaccagctgc

SEQ ID NO: 134390 - DNA, 25 bp, Homo sapien
gctgaggacgaaagcccctatataa

SEQ ID NO: 134391 - DNA, 25 bp, Homo sapien
tctggcgtcgttggcggccggccca

SEQ ID NO: 134392 - DNA, 25 bp, Homo sapien
ggctctggcgtcgttggcggccggc

SEQ ID NO: 134393 - DNA, 25 bp, Homo sapien
ttccggctctggcgtcgttggcggc

SEQ ID NO: 134394 - DNA, 25 bp, Homo sapien
ccggctctggcgtcgttggcggccg

SEQ ID NO: 134395 - DNA, 25 bp, Homo sapien
gaccagccgctgttttgtttccgat

SEQ ID NO: 134396 - DNA, 25 bp, Homo sapien
ccgcggctcgtagctcaggttcctt

SEQ ID NO: 134397 - DNA, 25 bp, Homo sapien
aggttccttccagaccagccgctgt

SEQ ID NO: 134398 - DNA, 25 bp, Homo sapien
tgtttccgatgtgaaaccgcggacc

SEQ ID NO: 134399 - DNA, 25 bp, Homo sapien
ggccgcccatgtccgcggtgccttc

SEQ ID NO: 134400 - DNA, 25 bp, Homo sapien
ttcctggcttgcccggactccccat

SEQ ID NO: 134401 - DNA, 25 bp, Homo sapien
tggcttgcccggactccccatcacg

SEQ ID NO: 134402 - DNA, 25 bp, Homo sapien
catgtccgcggtgccttcctggctt

SEQ ID NO: 134403 - DNA, 25 bp, Homo sapien
gcgccctgagacgtcttcgagcaaa

SEQ ID NO: 134404 - DNA, 25 bp, Homo sapien
taatatgcctaaagcagagctgacc

SEQ ID NO: 134405 - DNA, 25 bp, Homo sapien
gaacaagaggcgtgcggacttcgcc

SEQ ID NO: 134406 - DNA, 25 bp, Homo sapien
gcaaacagcatttccggaccaaggc

SEQ ID NO: 134407 - DNA, 25 bp, Homo sapien
gaccctgcgctgtggtggttctcca

SEQ ID NO: 134408 - DNA, 25 bp, Homo sapien
tgttccttctgctacaccaggccta

SEQ ID NO: 134409 - DNA, 25 bp, Homo sapien
gagaatgtctctgccatgttctaaa

SEQ ID NO: 134410 - DNA, 25 bp, Homo sapien
cccctcgttgcaagtgttcctaagt

SEQ ID NO: 134411 - DNA, 25 bp, Homo sapien
gaaaataaagacgataactaggcca

SEQ ID NO: 134412 - DNA, 25 bp, Homo sapien
gaagttatataatgcccctacaggg

SEQ ID NO: 134413 - DNA, 25 bp, Homo sapien
ttagaatcgcaagtccagaatccct

SEQ ID NO: 134414 - DNA, 25 bp, Homo sapien
gccctgagtgagaatacatgctctg

SEQ ID NO: 134415 - DNA, 25 bp, Homo sapien
cttagcagatgtggcataaccagac

SEQ ID NO: 134416 - DNA, 25 bp, Homo sapien
gctggtgccttgagaaaagcttatc

SEQ ID NO: 134417 - DNA, 25 bp, Homo sapien
cctgggccccagaataaggcataca

SEQ ID NO: 134418 - DNA, 25 bp, Homo sapien
gcctggccaagggaggaatacacct

SEQ ID NO: 134419 - DNA, 25 bp, Homo sapien
cattgtcagctagcatgagatcagc

SEQ ID NO: 134420 - DNA, 25 bp, Homo sapien
ctagcatgagatcagcgaaatgcaa

SEQ ID NO: 134421 - DNA, 25 bp, Homo sapien
tcagctagcatgagatcagcgaaat

SEQ ID NO: 134422 - DNA, 25 bp, Homo sapien
ttcagcccattgtcagctagcatga

SEQ ID NO: 134423 - DNA, 25 bp, Homo sapien
ggatttcaccaggtcatccattgtt

SEQ ID NO: 134424 - DNA, 25 bp, Homo sapien
tagcaataagtagaaccgcctgaga

SEQ ID NO: 134425 - DNA, 25 bp, Homo sapien
tataagaccaatttgtaaaccagga

SEQ ID NO: 134426 - DNA, 25 bp, Homo sapien
tactataagctcaaggtagacctct

SEQ ID NO: 134427 - DNA, 25 bp, Homo sapien
ctccaggccaagctgtctaaggacc

SEQ ID NO: 134428 - DNA, 25 bp, Homo sapien
tctaaggaccgcaaaggctgttgtc

SEQ ID NO: 134429 - DNA, 25 bp, Homo sapien
gaccgcaaaggctgttgtcacttgc

SEQ ID NO: 134430 - DNA, 25 bp, Homo sapien
caagctgtctaaggaccgcaaaggc

SEQ ID NO: 134431 - DNA, 25 bp, Homo sapien
tagattacattaagcagaaacaaac

SEQ ID NO: 134432 - DNA, 25 bp, Homo sapien
taaaaaacactttcatagattacat

SEQ ID NO: 134433 - DNA, 25 bp, Homo sapien
ctttgtgcactacaattatactgtt

SEQ ID NO: 134434 - DNA, 25 bp, Homo sapien
acagaactttgtgcactacaattat

SEQ ID NO: 134435 - DNA, 25 bp, Homo sapien
tgtatagaaatactgtttcacagaa

SEQ ID NO: 134436 - DNA, 25 bp, Homo sapien
ctgtatagaaatactgtttcacaga

SEQ ID NO: 134437 - DNA, 25 bp, Homo sapien
acagaaaacaaagcctcttgaggtt

SEQ ID NO: 134438 - DNA, 25 bp, Homo sapien
ttcacagaaaacaaagcctcttgag

SEQ ID NO: 134439 - DNA, 25 bp, Homo sapien
gacatctgtgcattctggaagtagg

SEQ ID NO: 134440 - DNA, 25 bp, Homo sapien
ggtggttgtcctcagacatctgtgc

SEQ ID NO: 134441 - DNA, 25 bp, Homo sapien
acaacggtgcaggtaactctgtcat

SEQ ID NO: 134442 - DNA, 25 bp, Homo sapien
tgcattctggaagtaggacaacggt

SEQ ID NO: 134443 - DNA, 25 bp, Homo sapien
cactaaaaggaactgttaggtaatg

SEQ ID NO: 134444 - DNA, 25 bp, Homo sapien
acacttatccttgcattgtacaatc

SEQ ID NO: 134445 - DNA, 25 bp, Homo sapien
aaggaactgttaggtaatgaataca

SEQ ID NO: 134446 - DNA, 25 bp, Homo sapien
cttagaacttctacacttatccttg

SEQ ID NO: 134447 - DNA, 25 bp, Homo sapien
gattatttgatgtagctcctgtttg

SEQ ID NO: 134448 - DNA, 25 bp, Homo sapien
gaagcctttctctacgttgatctgg

SEQ ID NO: 134449 - DNA, 25 bp, Homo sapien
cccgctcagggctggttcatctgga

SEQ ID NO: 134450 - DNA, 25 bp, Homo sapien
tgactatcgaatgtaaggaagcctt

SEQ ID NO: 134451 - DNA, 25 bp, Homo sapien
tgtatttccgacaatcagctgcttg

SEQ ID NO: 134452 - DNA, 25 bp, Homo sapien
tgagactggataattcccttgaccc

SEQ ID NO: 134453 - DNA, 25 bp, Homo sapien
tattgcacgatggaagtggttctca

SEQ ID NO: 134454 - DNA, 25 bp, Homo sapien
tcaaaccccttgcaagaggcagtgt

SEQ ID NO: 134455 - DNA, 25 bp, Homo sapien
ccaaggctccgtctgtcgttgtgct

SEQ ID NO: 134456 - DNA, 25 bp, Homo sapien
gactgacttaatggtagccacgacc

SEQ ID NO: 134457 - DNA, 25 bp, Homo sapien
catccttccgggtataaaagctgac

SEQ ID NO: 134458 - DNA, 25 bp, Homo sapien
gcatgatcacatgcttggcgccata

SEQ ID NO: 134459 - DNA, 25 bp, Homo sapien
cattcagaattgagtgcagggctct

SEQ ID NO: 134460 - DNA, 25 bp, Homo sapien
caatgacactgatcatgatggcagc

SEQ ID NO: 134461 - DNA, 25 bp, Homo sapien
gctctctggcccacagtctcggtat

SEQ ID NO: 134462 - DNA, 25 bp, Homo sapien
caccaggaggatagtcatgacaaca

SEQ ID NO: 134463 - DNA, 25 bp, Homo sapien
ttttgagacaatggcctaaaaaggc

SEQ ID NO: 134464 - DNA, 25 bp, Homo sapien
ttcctagatcagttaagttactgtg

SEQ ID NO: 134465 - DNA, 25 bp, Homo sapien
tctgagcctggcattacacatgcac

SEQ ID NO: 134466 - DNA, 25 bp, Homo sapien
tgtgacaagaatacccaaccataag

SEQ ID NO: 134467 - DNA, 25 bp, Homo sapien
aacccctgacctcggccaggtatgg

SEQ ID NO: 134468 - DNA, 25 bp, Homo sapien
cccctgacctcggccaggtatggtg

SEQ ID NO: 134469 - DNA, 25 bp, Homo sapien
ccctgacctcggccaggtatggtgg

SEQ ID NO: 134470 - DNA, 25 bp, Homo sapien
caaacccctgacctcggccaggtat

SEQ ID NO: 134471 - DNA, 25 bp, Homo sapien
caacaatagagatgatataataagc

SEQ ID NO: 134472 - DNA, 25 bp, Homo sapien
caatagagatgatataataagccag

SEQ ID NO: 134473 - DNA, 25 bp, Homo sapien
cagcaacaatagagatgatataata

SEQ ID NO: 134474 - DNA, 25 bp, Homo sapien
atagagatgatataataagccaggc

SEQ ID NO: 134475 - DNA, 25 bp, Homo sapien
tctgccacttgagctgagaaaaagg

SEQ ID NO: 134476 - DNA, 25 bp, Homo sapien
agaatttccccattaatccactggg

SEQ ID NO: 134477 - DNA, 25 bp, Homo sapien
tctctttgacagactagatccactt

SEQ ID NO: 134478 - DNA, 25 bp, Homo sapien
gatgcacagacttctactagaagac

SEQ ID NO: 134479 - DNA, 25 bp, Homo sapien
gagtgcaacagtaatgtagtccaca

SEQ ID NO: 134480 - DNA, 25 bp, Homo sapien
caccaaaattccagatcaggagtgc

SEQ ID NO: 134481 - DNA, 25 bp, Homo sapien
gtagtccacagcaacgttataggtt

SEQ ID NO: 134482 - DNA, 25 bp, Homo sapien
tccacagcaacgttataggttttaa

SEQ ID NO: 134483 - DNA, 25 bp, Homo sapien
tgctggagtcgaagtggacctttcc

SEQ ID NO: 134484 - DNA, 25 bp, Homo sapien
tcataatgagatatgcctgctggag

SEQ ID NO: 134485 - DNA, 25 bp, Homo sapien
gagtcgaagtggacctttccagtga

SEQ ID NO: 134486 - DNA, 25 bp, Homo sapien
tatgcctgctggagtcgaagtggac

SEQ ID NO: 134487 - DNA, 25 bp, Homo sapien
agatgagccacgcagtccattcagg

SEQ ID NO: 134488 - DNA, 25 bp, Homo sapien
agggaggtacttgataaacaccagg

SEQ ID NO: 134489 - DNA, 25 bp, Homo sapien
acagccaagatgagccacgcagtcc

SEQ ID NO: 134490 - DNA, 25 bp, Homo sapien
tccattcagggaggtacttgataaa

SEQ ID NO: 134491 - DNA, 25 bp, Homo sapien
tctgccacattcagtactatttcag

SEQ ID NO: 134492 - DNA, 25 bp, Homo sapien
tcccttaaagaattgctaaatgata

SEQ ID NO: 134493 - DNA, 25 bp, Homo sapien
tatttcagttttatgatacactctc

SEQ ID NO: 134494 - DNA, 25 bp, Homo sapien
tcaacttgtttgattctgccacatt

SEQ ID NO: 134495 - DNA, 25 bp, Homo sapien
cacaaatattcaggtctcagaacat

SEQ ID NO: 134496 - DNA, 25 bp, Homo sapien
tgtggtgctgaaaagtagcttattt

SEQ ID NO: 134497 - DNA, 25 bp, Homo sapien
gaaacaacatgcctgttattcctgt

SEQ ID NO: 134498 - DNA, 25 bp, Homo sapien
caccatttctttcgatcaactgcac

SEQ ID NO: 134499 - DNA, 25 bp, Homo sapien
catacgaagtggacctttcggacac

SEQ ID NO: 134500 - DNA, 25 bp, Homo sapien
ctggaaaaagcgtttcatttctctc

SEQ ID NO: 134501 - DNA, 25 bp, Homo sapien
tctcctgagctgtttcaaccagcat

SEQ ID NO: 134502 - DNA, 25 bp, Homo sapien
tttcggacacaaaacagccactaaa

SEQ ID NO: 134503 - DNA, 25 bp, Homo sapien
tggacacacaaagtatgcatagaca

SEQ ID NO: 134504 - DNA, 25 bp, Homo sapien
aaatcgccagtcttcctaatgctgc

SEQ ID NO: 134505 - DNA, 25 bp, Homo sapien
gcatagacaacaacaagccatcatt

SEQ ID NO: 134506 - DNA, 25 bp, Homo sapien
ctaatgctgccttaagactgttcaa

SEQ ID NO: 134507 - DNA, 25 bp, Homo sapien
ttgagcttccgggtctccttctgcc

SEQ ID NO: 134508 - DNA, 25 bp, Homo sapien
tctgcattatacttggaatttttgg

SEQ ID NO: 134509 - DNA, 25 bp, Homo sapien
ttggatactctcctttgagcttccg

SEQ ID NO: 134510 - DNA, 25 bp, Homo sapien
tccttctgccatattcaccaaccac

SEQ ID NO: 134511 - DNA, 25 bp, Homo sapien
gggcattatcatagttctcaagaga

SEQ ID NO: 134512 - DNA, 25 bp, Homo sapien
gttagcttataacagtgaccctgaa

SEQ ID NO: 134513 - DNA, 25 bp, Homo sapien
taatgggaggtgtcttaacctagga

SEQ ID NO: 134514 - DNA, 25 bp, Homo sapien
taacctaggatgctttgactgtatt

SEQ ID NO: 134515 - DNA, 25 bp, Homo sapien
tagagaaagccaagcatagccagct

SEQ ID NO: 134516 - DNA, 25 bp, Homo sapien
tggctagcaaagtcacaccctaagg

SEQ ID NO: 134517 - DNA, 25 bp, Homo sapien
tgagcaaatctcaggaaaaggtgcc

SEQ ID NO: 134518 - DNA, 25 bp, Homo sapien
taaggatcccgtgagagtctaacat

SEQ ID NO: 134519 - DNA, 25 bp, Homo sapien
gtgggcctgcaggcaccctttggca

SEQ ID NO: 134520 - DNA, 25 bp, Homo sapien
tgggcctgcaggcaccctttggcat

SEQ ID NO: 134521 - DNA, 25 bp, Homo sapien
catgggagctatagacagcaggttg

SEQ ID NO: 134522 - DNA, 25 bp, Homo sapien
cgtgggcctgcaggcaccctttggc

SEQ ID NO: 134523 - DNA, 25 bp, Homo sapien
tagaactacagctgtcatgaccacg

SEQ ID NO: 134524 - DNA, 25 bp, Homo sapien
gaagttgggctacttgaaaacatcc

SEQ ID NO: 134525 - DNA, 25 bp, Homo sapien
caggccttcctgtcacgtgaaagaa

SEQ ID NO: 134526 - DNA, 25 bp, Homo sapien
taaaagtggcttcattctggagggt

SEQ ID NO: 134527 - DNA, 25 bp, Homo sapien
ccattcctcactgaacccgccatca

SEQ ID NO: 134528 - DNA, 25 bp, Homo sapien
actgaacccgccatcatcattctct

SEQ ID NO: 134529 - DNA, 25 bp, Homo sapien
cactgaacccgccatcatcattctc

SEQ ID NO: 134530 - DNA, 25 bp, Homo sapien
ttcctcactgaacccgccatcatca

SEQ ID NO: 134531 - DNA, 25 bp, Homo sapien
ctctgggtcttcaccagcgaggata

SEQ ID NO: 134532 - DNA, 25 bp, Homo sapien
cctggacagcagctcgtgactcagg

SEQ ID NO: 134533 - DNA, 25 bp, Homo sapien
tcgtgactcaggtgtagagcgatga

SEQ ID NO: 134534 - DNA, 25 bp, Homo sapien
tctgggtcttcaccagcgaggatac

SEQ ID NO: 134535 - DNA, 25 bp, Homo sapien
gcagatacgtctacttttccaggag

SEQ ID NO: 134536 - DNA, 25 bp, Homo sapien
taatgttcctaagaagccctaagtg

SEQ ID NO: 134537 - DNA, 25 bp, Homo sapien
agagatgactgagccctaaccaaag

SEQ ID NO: 134538 - DNA, 25 bp, Homo sapien
tactgtggtaactgagggcagaaca

SEQ ID NO: 134539 - DNA, 25 bp, Homo sapien
tatggctacgaaacaggctatggtt

SEQ ID NO: 134540 - DNA, 25 bp, Homo sapien
ggctatggttgtgttccagtctcca

SEQ ID NO: 134541 - DNA, 25 bp, Homo sapien
ccagtctccactggctgttgctgag

SEQ ID NO: 134542 - DNA, 25 bp, Homo sapien
gctgaggctttaccaaccagaacac

SEQ ID NO: 134543 - DNA, 25 bp, Homo sapien
aaattgatggaatgctaattggtcc

SEQ ID NO: 134544 - DNA, 25 bp, Homo sapien
ctggcaatgctttcttgaaaatggc

SEQ ID NO: 134545 - DNA, 25 bp, Homo sapien
ggagtaataatgtaaggcacaaacc

SEQ ID NO: 134546 - DNA, 25 bp, Homo sapien
ataaaaggctgtacaagataatctg

SEQ ID NO: 134547 - DNA, 25 bp, Homo sapien
tgactttgttagatgtggacacagg

SEQ ID NO: 134548 - DNA, 25 bp, Homo sapien
agtccaatagtgcaaggtggtcagg

SEQ ID NO: 134549 - DNA, 25 bp, Homo sapien
gctgcaaaagtccagccgggaatct

SEQ ID NO: 134550 - DNA, 25 bp, Homo sapien
caaaatcgttttctataggcacctc

SEQ ID NO: 134551 - DNA, 25 bp, Homo sapien
tgacctcgtccctcaaatctggtag

SEQ ID NO: 134552 - DNA, 25 bp, Homo sapien
ggtagtttctgcaccgagggacaca

SEQ ID NO: 134553 - DNA, 25 bp, Homo sapien
agtgaaatcgtcctgtgaccacgcg

SEQ ID NO: 134554 - DNA, 25 bp, Homo sapien
tgaccacgcgtcaagctgctgatgg

SEQ ID NO: 134555 - DNA, 25 bp, Homo sapien
gaaatggcaatcacagacggtaatg

SEQ ID NO: 134556 - DNA, 25 bp, Homo sapien
tcagtgcttgagaagaagaattgcc

SEQ ID NO: 134557 - DNA, 25 bp, Homo sapien
gggctgacagcaccgattcataaca

SEQ ID NO: 134558 - DNA, 25 bp, Homo sapien
taatgggaccatctgctaccacgac

SEQ ID NO: 134559 - DNA, 25 bp, Homo sapien
tctgatcagcatagctaagggctct

SEQ ID NO: 134560 - DNA, 25 bp, Homo sapien
taaagaaggttatgccccacaagcc

SEQ ID NO: 134561 - DNA, 25 bp, Homo sapien
actgtatccccttcgctgctggagg

SEQ ID NO: 134562 - DNA, 25 bp, Homo sapien
cacccatttgtggagctgacgagaa

SEQ ID NO: 134563 - DNA, 25 bp, Homo sapien
aatacatacactgtctgaggccacg

SEQ ID NO: 134564 - DNA, 25 bp, Homo sapien
tacaaagcagtgtccacagaagcag

SEQ ID NO: 134565 - DNA, 25 bp, Homo sapien
tcccgtgtgagtgaaggcacatcct

SEQ ID NO: 134566 - DNA, 25 bp, Homo sapien
tatgatagtttccagcccaagggca

SEQ ID NO: 134567 - DNA, 25 bp, Homo sapien
gccagagtctgcagacaagggcggg

SEQ ID NO: 134568 - DNA, 25 bp, Homo sapien
atcagggtgacccatccatttccct

SEQ ID NO: 134569 - DNA, 25 bp, Homo sapien
gaggcatcagggtgacccatccatt

SEQ ID NO: 134570 - DNA, 25 bp, Homo sapien
ggcatcagggtgacccatccatttc

SEQ ID NO: 134571 - DNA, 25 bp, Homo sapien
gaaaggttgtgagactgcgctacca

SEQ ID NO: 134572 - DNA, 25 bp, Homo sapien
cagagaactctccacctaaggctgc

SEQ ID NO: 134573 - DNA, 25 bp, Homo sapien
gagatgggcgtgtgatagctacaca

SEQ ID NO: 134574 - DNA, 25 bp, Homo sapien
aaggcccactcagacgaagattcgg

SEQ ID NO: 134575 - DNA, 25 bp, Homo sapien
gccaaacgtgtttcagaattgagaa

SEQ ID NO: 134576 - DNA, 25 bp, Homo sapien
tcagaaactcttgaggccaaacgtg

SEQ ID NO: 134577 - DNA, 25 bp, Homo sapien
ttccaggctttagaagtgactaaac

SEQ ID NO: 134578 - DNA, 25 bp, Homo sapien
ttatataatactcccagcaggctgg

SEQ ID NO: 134579 - DNA, 25 bp, Homo sapien
gacattgagagacagcctgtgtctc

SEQ ID NO: 134580 - DNA, 25 bp, Homo sapien
gttctcagcccagacattgagagac

SEQ ID NO: 134581 - DNA, 25 bp, Homo sapien
acagcctgtgtctcgggccaaagac

SEQ ID NO: 134582 - DNA, 25 bp, Homo sapien
ttctcagcccagacattgagagaca

SEQ ID NO: 134583 - DNA, 25 bp, Homo sapien
cacgctgactcggatcccggaaagg

SEQ ID NO: 134584 - DNA, 25 bp, Homo sapien
aggcccacgctgactcggatcccgg

SEQ ID NO: 134585 - DNA, 25 bp, Homo sapien
gctgactcggatcccggaaagggca

SEQ ID NO: 134586 - DNA, 25 bp, Homo sapien
gggcaccgggatgcgggagaggctg

SEQ ID NO: 134587 - DNA, 25 bp, Homo sapien
cgctccgtcggtgcccgcccaggcc

SEQ ID NO: 134588 - DNA, 25 bp, Homo sapien
ctgtcttcgctggcgccgggaggct

SEQ ID NO: 134589 - DNA, 25 bp, Homo sapien
cagggccgctccgtcggtgcccgcc

SEQ ID NO: 134590 - DNA, 25 bp, Homo sapien
caagcccgcgaggtcggccgggccg

SEQ ID NO: 134591 - DNA, 25 bp, Homo sapien
gctactccgagggccgtggaagctc

SEQ ID NO: 134592 - DNA, 25 bp, Homo sapien
cttcaactccaaggccagtccgggt

SEQ ID NO: 134593 - DNA, 25 bp, Homo sapien
ggtgggcgccctcaacgtgttgttc

SEQ ID NO: 134594 - DNA, 25 bp, Homo sapien
tccgggtctggtcacggggctactc

SEQ ID NO: 134595 - DNA, 25 bp, Homo sapien
agccctgaaagtgcagtgcagtgtg

SEQ ID NO: 134596 - DNA, 25 bp, Homo sapien
taaccaacgtgtgtatgcagtgcag

SEQ ID NO: 134597 - DNA, 25 bp, Homo sapien
agtacagtgtagtgtgctcagggca

SEQ ID NO: 134598 - DNA, 25 bp, Homo sapien
cacagggaagctccataagcagcct

SEQ ID NO: 134599 - DNA, 25 bp, Homo sapien
cagcggcacgagcaggagcagccgc

SEQ ID NO: 134600 - DNA, 25 bp, Homo sapien
ggacccgggcgctggagccagcagc

SEQ ID NO: 134601 - DNA, 25 bp, Homo sapien
gcagcggcacgagcaggagcagccg

SEQ ID NO: 134602 - DNA, 25 bp, Homo sapien
cgaggacccgggcgctggagccagc

SEQ ID NO: 134603 - DNA, 25 bp, Homo sapien
cgactcccctgcaggttcctccggg

SEQ ID NO: 134604 - DNA, 25 bp, Homo sapien
ttcctggggacgttgcctgcgggcc

SEQ ID NO: 134605 - DNA, 25 bp, Homo sapien
ccctttcctggggacgttgcctgcg

SEQ ID NO: 134606 - DNA, 25 bp, Homo sapien
tggggacgttgcctgcgggcccgcg

SEQ ID NO: 134607 - DNA, 25 bp, Homo sapien
gggcgctcccggaagctgacacccc

SEQ ID NO: 134608 - DNA, 25 bp, Homo sapien
tcactctgccgcctcaccttgggag

SEQ ID NO: 134609 - DNA, 25 bp, Homo sapien
ccaggtgtcactctgccgcctcacc

SEQ ID NO: 134610 - DNA, 25 bp, Homo sapien
tctgggagtagcaggggcgctcccg

SEQ ID NO: 134611 - DNA, 25 bp, Homo sapien
gagcggtggctccgggcggggccca

SEQ ID NO: 134612 - DNA, 25 bp, Homo sapien
ctccgtgcgacaagagcggtggctc

SEQ ID NO: 134613 - DNA, 25 bp, Homo sapien
tccgtgcgacaagagcggtggctcc

SEQ ID NO: 134614 - DNA, 25 bp, Homo sapien
gcccctggaactccgctccgtcgaa

SEQ ID NO: 134615 - DNA, 25 bp, Homo sapien
tagtagggcagccaccgataccgcc

SEQ ID NO: 134616 - DNA, 25 bp, Homo sapien
actccgcgcactgctcggcccggaa

SEQ ID NO: 134617 - DNA, 25 bp, Homo sapien
agtagggcagccaccgataccgccg

SEQ ID NO: 134618 - DNA, 25 bp, Homo sapien
catggccataacaggctactcttta

SEQ ID NO: 134619 - DNA, 25 bp, Homo sapien
tgcatggccataacaggctactctt

SEQ ID NO: 134620 - DNA, 25 bp, Homo sapien
actgtgcatggccataacaggctac

SEQ ID NO: 134621 - DNA, 25 bp, Homo sapien
tgtgcatggccataacaggctactc

SEQ ID NO: 134622 - DNA, 25 bp, Homo sapien
gcagttcagttcacacttgtttggg

SEQ ID NO: 134623 - DNA, 25 bp, Homo sapien
cacagcctccctgtgcttgtagtag

SEQ ID NO: 134624 - DNA, 25 bp, Homo sapien
ctgtgcttgtagtagaagttctccc

SEQ ID NO: 134625 - DNA, 25 bp, Homo sapien
ccacacagacatccctcttgccagg

SEQ ID NO: 134626 - DNA, 25 bp, Homo sapien
ggctcgcagggcgtcccatcaacca

SEQ ID NO: 134627 - DNA, 25 bp, Homo sapien
gtccagctcgtgatcacagccgaca

SEQ ID NO: 134628 - DNA, 25 bp, Homo sapien
gacgagtccagctcgtgatcacagc

SEQ ID NO: 134629 - DNA, 25 bp, Homo sapien
ttagcgtcaaaggtgcctgcgacgg

SEQ ID NO: 134630 - DNA, 25 bp, Homo sapien
ctcggctgaggtcattagcgtcaaa

SEQ ID NO: 134631 - DNA, 25 bp, Homo sapien
ctggtggcacccatgggaactatga

SEQ ID NO: 134632 - DNA, 25 bp, Homo sapien
tggcacccatgggaactatgaggat

SEQ ID NO: 134633 - DNA, 25 bp, Homo sapien
cacccatgggaactatgaggatctg

SEQ ID NO: 134634 - DNA, 25 bp, Homo sapien
catgggaactatgaggatctggttg

SEQ ID NO: 134635 - DNA, 25 bp, Homo sapien
gccccgggcatggagtcgctcaggg

SEQ ID NO: 134636 - DNA, 25 bp, Homo sapien
tagtattccccacgaacattcttca

SEQ ID NO: 134637 - DNA, 25 bp, Homo sapien
cagcaccccgctcgtaatgcaggat

SEQ ID NO: 134638 - DNA, 25 bp, Homo sapien
cagtgcccattgaggtagtattccc

SEQ ID NO: 134639 - DNA, 25 bp, Homo sapien
tcatagtgcacaccggggttgggct

SEQ ID NO: 134640 - DNA, 25 bp, Homo sapien
gcaggtggtactcatagtgcacacc

SEQ ID NO: 134641 - DNA, 25 bp, Homo sapien
ggtggtactcatagtgcacaccggg

SEQ ID NO: 134642 - DNA, 25 bp, Homo sapien
ctccgccacactccgcgctgcagtc

SEQ ID NO: 134643 - DNA, 25 bp, Homo sapien
agattgcaggaacgccggtcagctg

SEQ ID NO: 134644 - DNA, 25 bp, Homo sapien
tggtctccgggcaagggtgaagatt

SEQ ID NO: 134645 - DNA, 25 bp, Homo sapien
taggcctcatggtcgatggtgcaga

SEQ ID NO: 134646 - DNA, 25 bp, Homo sapien
cctcatggtcgatggtgcagaacac

SEQ ID NO: 134647 - DNA, 25 bp, Homo sapien
gggccccagcaaggcgccacgctcc

SEQ ID NO: 134648 - DNA, 25 bp, Homo sapien
ctccaggccggtgcaggtaagaggt

SEQ ID NO: 134649 - DNA, 25 bp, Homo sapien
tccaggccggtgcaggtaagaggtc

SEQ ID NO: 134650 - DNA, 25 bp, Homo sapien
caaggcgccacgctccaggccggtg

SEQ ID NO: 134651 - DNA, 25 bp, Homo sapien
gatgccggccccgtcagacgagatg

SEQ ID NO: 134652 - DNA, 25 bp, Homo sapien
ggctgcacagcgctgcaggttacag

SEQ ID NO: 134653 - DNA, 25 bp, Homo sapien
tcagacgagatgcagtacacggagc

SEQ ID NO: 134654 - DNA, 25 bp, Homo sapien
ctgcaggttacaggcctgaatggca

SEQ ID NO: 134655 - DNA, 25 bp, Homo sapien
tgctgctacccaggtccagcaccag

SEQ ID NO: 134656 - DNA, 25 bp, Homo sapien
tccctgctgctacccaggtccagca

SEQ ID NO: 134657 - DNA, 25 bp, Homo sapien
cttccctgctgctacccaggtccag

SEQ ID NO: 134658 - DNA, 25 bp, Homo sapien
cccttccctgctgctacccaggtcc

SEQ ID NO: 134659 - DNA, 25 bp, Homo sapien
gacgccaacgccacaactgacagaa

SEQ ID NO: 134660 - DNA, 25 bp, Homo sapien
gctcagtcagaggtggccggtcttc

SEQ ID NO: 134661 - DNA, 25 bp, Homo sapien
gtcttccaaggagcacgctgcggta

SEQ ID NO: 134662 - DNA, 25 bp, Homo sapien
agggggcagtcctcatgcacacagg

SEQ ID NO: 134663 - DNA, 25 bp, Homo sapien
gggacccacatggagagaggcaggg

SEQ ID NO: 134664 - DNA, 25 bp, Homo sapien
ggacccacatggagagaggcagggg

SEQ ID NO: 134665 - DNA, 25 bp, Homo sapien
gggcggggacccacatggagagagg

SEQ ID NO: 134666 - DNA, 25 bp, Homo sapien
ctgggggcggggacccacatggaga

SEQ ID NO: 134667 - DNA, 25 bp, Homo sapien
agagagagagatgctgagggcgagg

SEQ ID NO: 134668 - DNA, 25 bp, Homo sapien
tgaggcccacgagtgggagagagag

SEQ ID NO: 134669 - DNA, 25 bp, Homo sapien
ctgaggcccacgagtgggagagaga

SEQ ID NO: 134670 - DNA, 25 bp, Homo sapien
gggagagagagagatgctgagggcg

SEQ ID NO: 134671 - DNA, 25 bp, Homo sapien
agatgacagggctgcgtgttacaag

SEQ ID NO: 134672 - DNA, 25 bp, Homo sapien
gctgcgtgttacaaggctccacatc

SEQ ID NO: 134673 - DNA, 25 bp, Homo sapien
ggctgggcggcccaatggcacagat

SEQ ID NO: 134674 - DNA, 25 bp, Homo sapien
acagatgacctgtcgcctccgagtg

SEQ ID NO: 134675 - DNA, 25 bp, Homo sapien
tggatcggaacccaagcctgctgtt

SEQ ID NO: 134676 - DNA, 25 bp, Homo sapien
taagggtcccacagaaatgacagca

SEQ ID NO: 134677 - DNA, 25 bp, Homo sapien
ccatcacgagtgagtcaaggccaaa

SEQ ID NO: 134678 - DNA, 25 bp, Homo sapien
ttatagtgggtaggtctgacaagcc

SEQ ID NO: 134679 - DNA, 25 bp, Homo sapien
tgtgcacgtgttatgatcccagcca

SEQ ID NO: 134680 - DNA, 25 bp, Homo sapien
gataatgagcgaagcacgggctccc

SEQ ID NO: 134681 - DNA, 25 bp, Homo sapien
taatgcgctaaataccaccaacctg

SEQ ID NO: 134682 - DNA, 25 bp, Homo sapien
taaaaaattggactgatgaaaggca

SEQ ID NO: 134683 - DNA, 25 bp, Homo sapien
aggggtgtgcacatcctgcatgctg

SEQ ID NO: 134684 - DNA, 25 bp, Homo sapien
ggtgtgcacatcctgcatgctgggg

SEQ ID NO: 134685 - DNA, 25 bp, Homo sapien
gcaggggtgtgcacatcctgcatgc

SEQ ID NO: 134686 - DNA, 25 bp, Homo sapien
gggtgtgcacatcctgcatgctggg

SEQ ID NO: 134687 - DNA, 25 bp, Homo sapien
gtgggggacgggaccaggctctcac

SEQ ID NO: 134688 - DNA, 25 bp, Homo sapien
agtgggggacgggaccaggctctca

SEQ ID NO: 134689 - DNA, 25 bp, Homo sapien
gggctctgagtgggggacgggacca

SEQ ID NO: 134690 - DNA, 25 bp, Homo sapien
ggctgaggggtgttcctgggctgcc

SEQ ID NO: 134691 - DNA, 25 bp, Homo sapien
ctggctgaggggtgttcctgggctg

SEQ ID NO: 134692 - DNA, 25 bp, Homo sapien
gctgaggggtgttcctgggctgccc

SEQ ID NO: 134693 - DNA, 25 bp, Homo sapien
ctgaggggtgttcctgggctgccca

SEQ ID NO: 134694 - DNA, 25 bp, Homo sapien
gggctgacaggtgggtgccttggtc

SEQ ID NO: 134695 - DNA, 25 bp, Homo sapien
gcccagggctgacaggtgggtgcct

SEQ ID NO: 134696 - DNA, 25 bp, Homo sapien
ccagggctgacaggtgggtgccttg

SEQ ID NO: 134697 - DNA, 25 bp, Homo sapien
tgacaggtgggtgccttggtcgccc

SEQ ID NO: 134698 - DNA, 25 bp, Homo sapien
agtcgtggggccctgagcccgaccg

SEQ ID NO: 134699 - DNA, 25 bp, Homo sapien
cgagagatgccgtgtggccatcggg

SEQ ID NO: 134700 - DNA, 25 bp, Homo sapien
tgtgtctgcagtcgtggggccctga

SEQ ID NO: 134701 - DNA, 25 bp, Homo sapien
ccactgaggcccgagagatgccgtg

SEQ ID NO: 134702 - DNA, 25 bp, Homo sapien
ctgctctgctgacagggggccccag

SEQ ID NO: 134703 - DNA, 25 bp, Homo sapien
tgctctgctgacagggggccccagg

SEQ ID NO: 134704 - DNA, 25 bp, Homo sapien
gcaggagtgggatgactcggaccca

SEQ ID NO: 134705 - DNA, 25 bp, Homo sapien
tgggatgactcggacccattccata

SEQ ID NO: 134706 - DNA, 25 bp, Homo sapien
tgactcggacccattccataaggcg

SEQ ID NO: 134707 - DNA, 25 bp, Homo sapien
cccattccataaggcgggagtggcc

SEQ ID NO: 134708 - DNA, 25 bp, Homo sapien
gtgctgtcaccaccatacgactttg

SEQ ID NO: 134709 - DNA, 25 bp, Homo sapien
ccaccatacgactttgtgcagccag

SEQ ID NO: 134710 - DNA, 25 bp, Homo sapien
gtgatggggcccctcagcgacagat

SEQ ID NO: 134711 - DNA, 25 bp, Homo sapien
catacgactttgtgcagccagcgtg

SEQ ID NO: 134712 - DNA, 25 bp, Homo sapien
tggatctggccattgttggggactc

SEQ ID NO: 134713 - DNA, 25 bp, Homo sapien
aaacccatgattgggaagtgggcag

SEQ ID NO: 134714 - DNA, 25 bp, Homo sapien
ggaggaaacccatgattgggaagtg

SEQ ID NO: 134715 - DNA, 25 bp, Homo sapien
atctggccattgttggggactctgg

SEQ ID NO: 134716 - DNA, 25 bp, Homo sapien
agccttccccaagaggaccggctgc

SEQ ID NO: 134717 - DNA, 25 bp, Homo sapien
cagtggccacgttgtcatagcaaca

SEQ ID NO: 134718 - DNA, 25 bp, Homo sapien
cactcactgggctcattctgctggg

SEQ ID NO: 134719 - DNA, 25 bp, Homo sapien
tgggagccccggcactcactgggct

SEQ ID NO: 134720 - DNA, 25 bp, Homo sapien
tgggtgtgatataagtcactgaggt

SEQ ID NO: 134721 - DNA, 25 bp, Homo sapien
gaggtgcccagtactaaagctgcac

SEQ ID NO: 134722 - DNA, 25 bp, Homo sapien
aagcatgtctacacccctgtctggg

SEQ ID NO: 134723 - DNA, 25 bp, Homo sapien
ctcagcctccgactcaggaagcagg

SEQ ID NO: 134724 - DNA, 25 bp, Homo sapien
gaagcggttacattggcccacagag

SEQ ID NO: 134725 - DNA, 25 bp, Homo sapien
cttgctccgaggcaaagttattggc

SEQ ID NO: 134726 - DNA, 25 bp, Homo sapien
tggcagctgctcatgcactcttgct

SEQ ID NO: 134727 - DNA, 25 bp, Homo sapien
acagaggcaacgaagtaccagcggg

SEQ ID NO: 134728 - DNA, 25 bp, Homo sapien
agaagccccaggctggggacgacgg

SEQ ID NO: 134729 - DNA, 25 bp, Homo sapien
ttccagaagccccaggctggggacg

SEQ ID NO: 134730 - DNA, 25 bp, Homo sapien
catccgtgtgggtgctccttccaga

SEQ ID NO: 134731 - DNA, 25 bp, Homo sapien
ccaggctggggacgacggggcccat

SEQ ID NO: 134732 - DNA, 25 bp, Homo sapien
tggtgatccggcatctccacccagt

SEQ ID NO: 134733 - DNA, 25 bp, Homo sapien
ccagagaccaccagaaggccagggc

SEQ ID NO: 134734 - DNA, 25 bp, Homo sapien
aggctgttggtcttgccgccagaga

SEQ ID NO: 134735 - DNA, 25 bp, Homo sapien
gctgtggaagggtggcgctggtgat

SEQ ID NO: 134736 - DNA, 25 bp, Homo sapien
ttgaccagaacccacacctgtgagg

SEQ ID NO: 134737 - DNA, 25 bp, Homo sapien
caacaaggtaggtgcaaagcccaag

SEQ ID NO: 134738 - DNA, 25 bp, Homo sapien
tagaatgatggcaacaaggcccacc

SEQ ID NO: 134739 - DNA, 25 bp, Homo sapien
tggcgagatctgatggagaaccccg

SEQ ID NO: 134740 - DNA, 25 bp, Homo sapien
tgcctgcaccaacgagggctccaca

SEQ ID NO: 134741 - DNA, 25 bp, Homo sapien
gaggagatgggctggccatctttct

SEQ ID NO: 134742 - DNA, 25 bp, Homo sapien
agtgtcgtctgagcaggagagccgc

SEQ ID NO: 134743 - DNA, 25 bp, Homo sapien
gagagccgcaccaactgccccaggg

SEQ ID NO: 134744 - DNA, 25 bp, Homo sapien
acacacacctgtcagagggggtagg

SEQ ID NO: 134745 - DNA, 25 bp, Homo sapien
cacacacctgtcagagggggtaggg

SEQ ID NO: 134746 - DNA, 25 bp, Homo sapien
tcggggggccgtcacacacacctgt

SEQ ID NO: 134747 - DNA, 25 bp, Homo sapien
tgatgcgaagttggatcttctggga

SEQ ID NO: 134748 - DNA, 25 bp, Homo sapien
acagctgtaggtgcccgcgtcctct

SEQ ID NO: 134749 - DNA, 25 bp, Homo sapien
cttctgggagtcgcggcctggccgg

SEQ ID NO: 134750 - DNA, 25 bp, Homo sapien
ggtggatgatcagggatccgtcgaa

SEQ ID NO: 134751 - DNA, 25 bp, Homo sapien
tggtggatggggtggggacagagac

SEQ ID NO: 134752 - DNA, 25 bp, Homo sapien
ggagaaatgagggccacagggtggt

SEQ ID NO: 134753 - DNA, 25 bp, Homo sapien
agaaatgagggccacagggtggtcc

SEQ ID NO: 134754 - DNA, 25 bp, Homo sapien
gagaaatgagggccacagggtggtc

SEQ ID NO: 134755 - DNA, 25 bp, Homo sapien
tcatgaggccaggagaaacaaggtg

SEQ ID NO: 134756 - DNA, 25 bp, Homo sapien
gtcatgaggccaggagaaacaaggt

SEQ ID NO: 134757 - DNA, 25 bp, Homo sapien
tgaggccaggagaaacaaggtgtga

SEQ ID NO: 134758 - DNA, 25 bp, Homo sapien
ctgtcatgaggccaggagaaacaag

SEQ ID NO: 134759 - DNA, 25 bp, Homo sapien
gcagcccccgcttggccaaagtcct

SEQ ID NO: 134760 - DNA, 25 bp, Homo sapien
cctgggctgagggaagcggctcagc

SEQ ID NO: 134761 - DNA, 25 bp, Homo sapien
ccccgcttggccaaagtcctgagct

SEQ ID NO: 134762 - DNA, 25 bp, Homo sapien
ctgagggaagcggctcagctcagcc

SEQ ID NO: 134763 - DNA, 25 bp, Homo sapien
atccggatccgctggcctggactgg

SEQ ID NO: 134764 - DNA, 25 bp, Homo sapien
atctctctgccactcgatggctggg

SEQ ID NO: 134765 - DNA, 25 bp, Homo sapien
ggaagccttcggcacggcaggtcat

SEQ ID NO: 134766 - DNA, 25 bp, Homo sapien
acggcaggtcatccggatccgctgg

SEQ ID NO: 134767 - DNA, 25 bp, Homo sapien
cccattgaaagcgacacaggtgtag

SEQ ID NO: 134768 - DNA, 25 bp, Homo sapien
tcggctaatgaccagggagccatca

SEQ ID NO: 134769 - DNA, 25 bp, Homo sapien
tggacccatcgctggtctcggtcct

SEQ ID NO: 134770 - DNA, 25 bp, Homo sapien
tcttctacagccactcggctaatga

SEQ ID NO: 134771 - DNA, 25 bp, Homo sapien
gaccacctgatgttcacactttctc

SEQ ID NO: 134772 - DNA, 25 bp, Homo sapien
taccacacacaatagcctggccgta

SEQ ID NO: 134773 - DNA, 25 bp, Homo sapien
gccgtatcaccctctggcactgtca

SEQ ID NO: 134774 - DNA, 25 bp, Homo sapien
tctggcactgtcacagtagggggca

SEQ ID NO: 134775 - DNA, 25 bp, Homo sapien
caagttgtaaatgagcagcgtgcca

SEQ ID NO: 134776 - DNA, 25 bp, Homo sapien
tggtgagaccaccttcacctcggtg

SEQ ID NO: 134777 - DNA, 25 bp, Homo sapien
tcacctcggtgctgcggctgactgc

SEQ ID NO: 134778 - DNA, 25 bp, Homo sapien
cctggtaggcactgcacgtgtagga

SEQ ID NO: 134779 - DNA, 25 bp, Homo sapien
ctggtcgacgcagtccctgccaggg

SEQ ID NO: 134780 - DNA, 25 bp, Homo sapien
atactcattgccacaaagctgggcc

SEQ ID NO: 134781 - DNA, 25 bp, Homo sapien
cagcagaagctggagtaatactcat

SEQ ID NO: 134782 - DNA, 25 bp, Homo sapien
cagctctggctggtcgacgcagtcc

SEQ ID NO: 134783 - DNA, 25 bp, Homo sapien
cagaagataactccctttgccagcc

SEQ ID NO: 134784 - DNA, 25 bp, Homo sapien
tatgtcagagatgcaaacactgctg

SEQ ID NO: 134785 - DNA, 25 bp, Homo sapien
agccctatgaactattttggactgg

SEQ ID NO: 134786 - DNA, 25 bp, Homo sapien
tgccgttgaggctaaacactgggtg

SEQ ID NO: 134787 - DNA, 25 bp, Homo sapien
gatttagagctgactgatgcactgc

SEQ ID NO: 134788 - DNA, 25 bp, Homo sapien
ttaagtggaaccctgacagctagct

SEQ ID NO: 134789 - DNA, 25 bp, Homo sapien
tcaggagggcttcaaggtccaacat

SEQ ID NO: 134790 - DNA, 25 bp, Homo sapien
catctcgacgtaaggagcgtttcca

SEQ ID NO: 134791 - DNA, 25 bp, Homo sapien
tgatgtgtttataccaataggccaa

SEQ ID NO: 134792 - DNA, 25 bp, Homo sapien
gttagctgctagctaacctcaaact

SEQ ID NO: 134793 - DNA, 25 bp, Homo sapien
caaacttaccttctgatgtgtttat

SEQ ID NO: 134794 - DNA, 25 bp, Homo sapien
actagttagctgctagctaacctca

SEQ ID NO: 134795 - DNA, 25 bp, Homo sapien
cccttgacagttgcagcctcttgac

SEQ ID NO: 134796 - DNA, 25 bp, Homo sapien
cgttggccttacaatcaaatgtaag

SEQ ID NO: 134797 - DNA, 25 bp, Homo sapien
cccttttggtgagaacatccccttg

SEQ ID NO: 134798 - DNA, 25 bp, Homo sapien
tcggataacaataagagagctcatc

SEQ ID NO: 134799 - DNA, 25 bp, Homo sapien
gtagcacattgcaacaacaatcatg

SEQ ID NO: 134800 - DNA, 25 bp, Homo sapien
gaccaatacagtcactaggttgtag

SEQ ID NO: 134801 - DNA, 25 bp, Homo sapien
gctgcagacaggatccctagcttgt

SEQ ID NO: 134802 - DNA, 25 bp, Homo sapien
gagttgtaagtaatcttgccaaagg

SEQ ID NO: 134803 - DNA, 25 bp, Homo sapien
tcagcagacaggcatacagaggttc

SEQ ID NO: 134804 - DNA, 25 bp, Homo sapien
tatccagcccctaatgtgcctgtgg

SEQ ID NO: 134805 - DNA, 25 bp, Homo sapien
acctcaacggttctgcagctttcaa

SEQ ID NO: 134806 - DNA, 25 bp, Homo sapien
tcactacgaggcaagcagtgctacc

SEQ ID NO: 134807 - DNA, 25 bp, Homo sapien
tatagtacccgttacattctgctga

SEQ ID NO: 134808 - DNA, 25 bp, Homo sapien
cagcctacaaggcactaagtgtgca

SEQ ID NO: 134809 - DNA, 25 bp, Homo sapien
aaattgcccaaatcttacagacagg

SEQ ID NO: 134810 - DNA, 25 bp, Homo sapien
cacattgcttgccacattgtggtag

SEQ ID NO: 134811 - DNA, 25 bp, Homo sapien
cacaaatttgatacaatagatgata

SEQ ID NO: 134812 - DNA, 25 bp, Homo sapien
caccgctcgtggcctatttttgttc

SEQ ID NO: 134813 - DNA, 25 bp, Homo sapien
tgatagactatccttttaccatgtt

SEQ ID NO: 134814 - DNA, 25 bp, Homo sapien
tagctgattacaaacacagaccacc

SEQ ID NO: 134815 - DNA, 25 bp, Homo sapien
gcagtagtgtgatcttgcttggctc

SEQ ID NO: 134816 - DNA, 25 bp, Homo sapien
ccaagcaattctcctgccacagcct

SEQ ID NO: 134817 - DNA, 25 bp, Homo sapien
actgcaacctctgcctcctgggtcc

SEQ ID NO: 134818 - DNA, 25 bp, Homo sapien
ccacagcctccagagcagctgggac

SEQ ID NO: 134819 - DNA, 25 bp, Homo sapien
ttgtgtacatattgttatggctgct

SEQ ID NO: 134820 - DNA, 25 bp, Homo sapien
gattgtgattgtatcagatgtcgca

SEQ ID NO: 134821 - DNA, 25 bp, Homo sapien
aactatggcccactactgtatttgt

SEQ ID NO: 134822 - DNA, 25 bp, Homo sapien
gggacacagttccaacaggtctaat

SEQ ID NO: 134823 - DNA, 25 bp, Homo sapien
cagtgaaaggaaagaacgagttcgg

SEQ ID NO: 134824 - DNA, 25 bp, Homo sapien
gaatgttccatagatctgatagccc

SEQ ID NO: 134825 - DNA, 25 bp, Homo sapien
tttgctggtatggtgggctgccaca

SEQ ID NO: 134826 - DNA, 25 bp, Homo sapien
tgttatgcgatagaacacatcccag

SEQ ID NO: 134827 - DNA, 25 bp, Homo sapien
tgttacagttaacatcttaccctaa

SEQ ID NO: 134828 - DNA, 25 bp, Homo sapien
taagactaggattaaactgttacag

SEQ ID NO: 134829 - DNA, 25 bp, Homo sapien
tgttgcccatccagaggtataaatt

SEQ ID NO: 134830 - DNA, 25 bp, Homo sapien
ggccagatattatcctaaaggtact

SEQ ID NO: 134831 - DNA, 25 bp, Homo sapien
ttttgaatagtcaaccaactttaca

SEQ ID NO: 134832 - DNA, 25 bp, Homo sapien
aattgttaattggtttattccactg

SEQ ID NO: 134833 - DNA, 25 bp, Homo sapien
catgcctagccgagatgattatgat

SEQ ID NO: 134834 - DNA, 25 bp, Homo sapien
taaactcagcttagtactcatcatg

SEQ ID NO: 134835 - DNA, 25 bp, Homo sapien
acctcaagtaggctccggagtctgt

SEQ ID NO: 134836 - DNA, 25 bp, Homo sapien
gggtttggtgtccaaatgctttgat

SEQ ID NO: 134837 - DNA, 25 bp, Homo sapien
aattcgctaggataatgacttccag

SEQ ID NO: 134838 - DNA, 25 bp, Homo sapien
gtgtccaaatgctttgatcacccag

SEQ ID NO: 134839 - DNA, 25 bp, Homo sapien
caaaaaactccttgggatcctcaat

SEQ ID NO: 134840 - DNA, 25 bp, Homo sapien
taggaaacttaatctagtgcttctc

SEQ ID NO: 134841 - DNA, 25 bp, Homo sapien
tcaagagttctaagccgagtattaa

SEQ ID NO: 134842 - DNA, 25 bp, Homo sapien
gctattcaagttaccacacaatgga

SEQ ID NO: 134843 - DNA, 25 bp, Homo sapien
taaatcacaacatgccactcttctc

SEQ ID NO: 134844 - DNA, 25 bp, Homo sapien
gaaatgctgatcatgcagaaaaatt

SEQ ID NO: 134845 - DNA, 25 bp, Homo sapien
aaaggaaatgctgatcatgcagaaa

SEQ ID NO: 134846 - DNA, 25 bp, Homo sapien
ggaaatgctgatcatgcagaaaaat

SEQ ID NO: 134847 - DNA, 25 bp, Homo sapien
aaggaaatgctgatcatgcagaaaa

SEQ ID NO: 134848 - DNA, 25 bp, Homo sapien
catttttggagggtgctaatgaaaa

SEQ ID NO: 134849 - DNA, 25 bp, Homo sapien
atatttgattagacttatacttaag

SEQ ID NO: 134850 - DNA, 25 bp, Homo sapien
atacttaagtcatttttggagggtg

SEQ ID NO: 134851 - DNA, 25 bp, Homo sapien
attgcttattaattctggaagtttt

SEQ ID NO: 134852 - DNA, 25 bp, Homo sapien
gatgggcaagggctaaatcgtttca

SEQ ID NO: 134853 - DNA, 25 bp, Homo sapien
aactatgtatggcttagagaccttg

SEQ ID NO: 134854 - DNA, 25 bp, Homo sapien
tcaaggacagctactttgaggaagt

SEQ ID NO: 134855 - DNA, 25 bp, Homo sapien
tatgaggattctgccttcatgcagc

SEQ ID NO: 134856 - DNA, 25 bp, Homo sapien
taaagtctgtgtgtggtaattaaca

SEQ ID NO: 134857 - DNA, 25 bp, Homo sapien
tctgtgtgtggtaattaacaatgtc

SEQ ID NO: 134858 - DNA, 25 bp, Homo sapien
tatttaaagtctgtgtgtggtaatt

SEQ ID NO: 134859 - DNA, 25 bp, Homo sapien
tgtgtggtaattaacaatgtctgga

SEQ ID NO: 134860 - DNA, 25 bp, Homo sapien
aagcctttacaagacctattgttat

SEQ ID NO: 134861 - DNA, 25 bp, Homo sapien
catgtaaggtgttttcactagtaac

SEQ ID NO: 134862 - DNA, 25 bp, Homo sapien
gtgttttgttggtatttagctctcc

SEQ ID NO: 134863 - DNA, 25 bp, Homo sapien
gctctccttttaacacagttgttaa

SEQ ID NO: 134864 - DNA, 25 bp, Homo sapien
ccacttctgatttggtgtcattatt

SEQ ID NO: 134865 - DNA, 25 bp, Homo sapien
tccacttctgatttggtgtcattat

SEQ ID NO: 134866 - DNA, 25 bp, Homo sapien
ctccacttctgatttggtgtcatta

SEQ ID NO: 134867 - DNA, 25 bp, Homo sapien
tgggcgacaaagcgagactttgttt

SEQ ID NO: 134868 - DNA, 25 bp, Homo sapien
ggcgacaaagcgagactttgttttg

SEQ ID NO: 134869 - DNA, 25 bp, Homo sapien
ctgggcgacaaagcgagactttgtt

SEQ ID NO: 134870 - DNA, 25 bp, Homo sapien
gagaacttaagggaatctgaggcag

SEQ ID NO: 134871 - DNA, 25 bp, Homo sapien
cactgtaccgtaaagcattgtttgt

SEQ ID NO: 134872 - DNA, 25 bp, Homo sapien
gcctgagtatacacagacatattga

SEQ ID NO: 134873 - DNA, 25 bp, Homo sapien
tgtgttatgcctctgactctggaac

SEQ ID NO: 134874 - DNA, 25 bp, Homo sapien
cggccactgtgtgaggagtaggtat

SEQ ID NO: 134875 - DNA, 25 bp, Homo sapien
tagcgcgctgaccggcggccactgt

SEQ ID NO: 134876 - DNA, 25 bp, Homo sapien
aggtcccttgggacgtccagctgct

SEQ ID NO: 134877 - DNA, 25 bp, Homo sapien
cagctgctccggtctagcgcgctga

SEQ ID NO: 134878 - DNA, 25 bp, Homo sapien
agccatgcaacaggaagctgcagac

SEQ ID NO: 134879 - DNA, 25 bp, Homo sapien
acagccagccatgcaacaggaagct

SEQ ID NO: 134880 - DNA, 25 bp, Homo sapien
acagataccatctgcaggacctcca

SEQ ID NO: 134881 - DNA, 25 bp, Homo sapien
cccagactccagtgttcttgttttc

SEQ ID NO: 134882 - DNA, 25 bp, Homo sapien
ctgggaggatttccaggtggcagca

SEQ ID NO: 134883 - DNA, 25 bp, Homo sapien
aagcagcgtggcacttcccggtggt

SEQ ID NO: 134884 - DNA, 25 bp, Homo sapien
cagcttgaaagggtgaaaacacctt

SEQ ID NO: 134885 - DNA, 25 bp, Homo sapien
aatgaaggtatgctccttggttggc

SEQ ID NO: 134886 - DNA, 25 bp, Homo sapien
tagtctccctttgtttagccagtgc

SEQ ID NO: 134887 - DNA, 25 bp, Homo sapien
tctgtcccaactgagcttgagatga

SEQ ID NO: 134888 - DNA, 25 bp, Homo sapien
agatctgtcccaactgagcttgaga

SEQ ID NO: 134889 - DNA, 25 bp, Homo sapien
tcccaactgagcttgagatgactgt

SEQ ID NO: 134890 - DNA, 25 bp, Homo sapien
tgtcccaactgagcttgagatgact

SEQ ID NO: 134891 - DNA, 25 bp, Homo sapien
ctgatgaagtaagctgccacgttgt

SEQ ID NO: 134892 - DNA, 25 bp, Homo sapien
acgttgtgagatgctcaacgaagag

SEQ ID NO: 134893 - DNA, 25 bp, Homo sapien
tgctcaacgaagaggcccatgaggc

SEQ ID NO: 134894 - DNA, 25 bp, Homo sapien
tgcttgcttgcactgatgaagtaag

SEQ ID NO: 134895 - DNA, 25 bp, Homo sapien
acgaaagactgtgccttctgttttg

SEQ ID NO: 134896 - DNA, 25 bp, Homo sapien
taactcacaggatgtggcaacagtg

SEQ ID NO: 134897 - DNA, 25 bp, Homo sapien
ttctaactcacaggatgtggcaaca

SEQ ID NO: 134898 - DNA, 25 bp, Homo sapien
atgggatgtcacatctgtgattgga

SEQ ID NO: 134899 - DNA, 25 bp, Homo sapien
aatgatcctcttgctggtctttaca

SEQ ID NO: 134900 - DNA, 25 bp, Homo sapien
attattatcttagagtaggctgctt

SEQ ID NO: 134901 - DNA, 25 bp, Homo sapien
tacataacatatgctggcccgaatt

SEQ ID NO: 134902 - DNA, 25 bp, Homo sapien
gaaaaccagccattatatagtcaat

SEQ ID NO: 134903 - DNA, 25 bp, Homo sapien
ctaaggcatttccttgtaagggtag

SEQ ID NO: 134904 - DNA, 25 bp, Homo sapien
aagtggaaggtgtaattattgcaga

SEQ ID NO: 134905 - DNA, 25 bp, Homo sapien
ggtctaattctccatgcccttggga

SEQ ID NO: 134906 - DNA, 25 bp, Homo sapien
atccttcttatcagctgctccaatg

SEQ ID NO: 134907 - DNA, 25 bp, Homo sapien
tctatttgagcaacaacatccttct

SEQ ID NO: 134908 - DNA, 25 bp, Homo sapien
gcgcagacccttgatggggaaatct

SEQ ID NO: 134909 - DNA, 25 bp, Homo sapien
cccttgatggggaaatctgtctcag

SEQ ID NO: 134910 - DNA, 25 bp, Homo sapien
ttgatggggaaatctgtctcagagg

SEQ ID NO: 134911 - DNA, 25 bp, Homo sapien
tcagcgcagacccttgatggggaaa

SEQ ID NO: 134912 - DNA, 25 bp, Homo sapien
caatgtggaagccatgtcacgggac

SEQ ID NO: 134913 - DNA, 25 bp, Homo sapien
tacccttgggaaacaactctgcagt

SEQ ID NO: 134914 - DNA, 25 bp, Homo sapien
catgagacacgtttggcatatgcac

SEQ ID NO: 134915 - DNA, 25 bp, Homo sapien
ttgccatggatgagtaaagacccag

SEQ ID NO: 134916 - DNA, 25 bp, Homo sapien
attaaagaataatctctgggcatgg

SEQ ID NO: 134917 - DNA, 25 bp, Homo sapien
attaattaaagaataatctctgggc

SEQ ID NO: 134918 - DNA, 25 bp, Homo sapien
cctggtgttaggcttttgagattaa

SEQ ID NO: 134919 - DNA, 25 bp, Homo sapien
gagtaggctgagagagactaccctg

SEQ ID NO: 134920 - DNA, 25 bp, Homo sapien
gttcctgaatgcagcggctgcggtg

SEQ ID NO: 134921 - DNA, 25 bp, Homo sapien
tcattcttctattcggcccctcccg

SEQ ID NO: 134922 - DNA, 25 bp, Homo sapien
gggcgaagctaaagcggttcctgaa

SEQ ID NO: 134923 - DNA, 25 bp, Homo sapien
gttggccacgcccatcattcttcta

SEQ ID NO: 134924 - DNA, 25 bp, Homo sapien
ctaggcagcgtctgcgtcctcagcg

SEQ ID NO: 134925 - DNA, 25 bp, Homo sapien
tatcttcctggacctcaagggcagg

SEQ ID NO: 134926 - DNA, 25 bp, Homo sapien
gggatacaacacttcgcagctgctt

SEQ ID NO: 134927 - DNA, 25 bp, Homo sapien
tcctccgagttctcgctaggcagcg

SEQ ID NO: 134928 - DNA, 25 bp, Homo sapien
cccaggtcgtcggccgtcgactcca

SEQ ID NO: 134929 - DNA, 25 bp, Homo sapien
ccaggtcgtcggccgtcgactccac

SEQ ID NO: 134930 - DNA, 25 bp, Homo sapien
agcgcgtcccccaggtcgtcggccg

SEQ ID NO: 134931 - DNA, 25 bp, Homo sapien
gtagcgcgtcccccaggtcgtcggc

SEQ ID NO: 134932 - DNA, 25 bp, Homo sapien
gcgtccgggacgccgccaccgccgc

SEQ ID NO: 134933 - DNA, 25 bp, Homo sapien
tgcgtccgggacgccgccaccgccg

SEQ ID NO: 134934 - DNA, 25 bp, Homo sapien
ctgcgtccgggacgccgccaccgcc

SEQ ID NO: 134935 - DNA, 25 bp, Homo sapien
ctgcgggccccaggtggccgtatgg

SEQ ID NO: 134936 - DNA, 25 bp, Homo sapien
gccccaggtggccgtatggctctcg

SEQ ID NO: 134937 - DNA, 25 bp, Homo sapien
ccaggtggccgtatggctctcgccg

SEQ ID NO: 134938 - DNA, 25 bp, Homo sapien
gcgggccccaggtggccgtatggct

SEQ ID NO: 134939 - DNA, 25 bp, Homo sapien
ccgctaagtgttgcgcggtgcacag

SEQ ID NO: 134940 - DNA, 25 bp, Homo sapien
acagcagggccgaggtctccaccac

SEQ ID NO: 134941 - DNA, 25 bp, Homo sapien
atgcggttcagctcggccaagacgc

SEQ ID NO: 134942 - DNA, 25 bp, Homo sapien
ccggacgactggacggccgctaagt

SEQ ID NO: 134943 - DNA, 25 bp, Homo sapien
gcatcaacaggagcaaagtgtccca

SEQ ID NO: 134944 - DNA, 25 bp, Homo sapien
ccagcgaattggaagcccgtaaaca

SEQ ID NO: 134945 - DNA, 25 bp, Homo sapien
gcatcgaatccaggtcagcggtaga

SEQ ID NO: 134946 - DNA, 25 bp, Homo sapien
cacacagtagtagagaaagcctgcg

SEQ ID NO: 134947 - DNA, 25 bp, Homo sapien
tgtgtaatagagaaacaaatggccc

SEQ ID NO: 134948 - DNA, 25 bp, Homo sapien
gtgtaatagagaaacaaatggcccc

SEQ ID NO: 134949 - DNA, 25 bp, Homo sapien
ctgtgtaatagagaaacaaatggcc

SEQ ID NO: 134950 - DNA, 25 bp, Homo sapien
ggttcttccagatgatacacacggg

SEQ ID NO: 134951 - DNA, 25 bp, Homo sapien
taatttagggctagaggcatcttag

SEQ ID NO: 134952 - DNA, 25 bp, Homo sapien
tatcatacaacgtggttgccaagga

SEQ ID NO: 134953 - DNA, 25 bp, Homo sapien
taagaaccaagcaacagttccatgg

SEQ ID NO: 134954 - DNA, 25 bp, Homo sapien
gaacgacatggtcagtgttacccag

SEQ ID NO: 134955 - DNA, 25 bp, Homo sapien
tacccagtacactgaagcctgaagg

SEQ ID NO: 134956 - DNA, 25 bp, Homo sapien
gacccgcccatgaaaaagaactcag

SEQ ID NO: 134957 - DNA, 25 bp, Homo sapien
taacaaacaggatactgaccccgac

SEQ ID NO: 134958 - DNA, 25 bp, Homo sapien
ggaagaaccggattgtggcctgcca

SEQ ID NO: 134959 - DNA, 25 bp, Homo sapien
gaagccaatgcttctcagtgcactg

SEQ ID NO: 134960 - DNA, 25 bp, Homo sapien
gatacacaccatgcttgctgtggag

SEQ ID NO: 134961 - DNA, 25 bp, Homo sapien
tcccggatcagtggaaatgtctgct

SEQ ID NO: 134962 - DNA, 25 bp, Homo sapien
ggaagtcacaatagttagctgagag

SEQ ID NO: 134963 - DNA, 25 bp, Homo sapien
taattagataaaatgcagccggttg

SEQ ID NO: 134964 - DNA, 25 bp, Homo sapien
caatctcaagcataagtaaacgtag

SEQ ID NO: 134965 - DNA, 25 bp, Homo sapien
cagccggttgggttgacaatctcaa

SEQ ID NO: 134966 - DNA, 25 bp, Homo sapien
caatatctaaccctaaccaggtggt

SEQ ID NO: 134967 - DNA, 25 bp, Homo sapien
tcactgcggctcagtcatagagtgg

SEQ ID NO: 134968 - DNA, 25 bp, Homo sapien
catagagtggcaccatgagacagta

SEQ ID NO: 134969 - DNA, 25 bp, Homo sapien
tacttgtgagggtacatggatcatc

SEQ ID NO: 134970 - DNA, 25 bp, Homo sapien
ttcaaatcgcctgagagaagtcggg

SEQ ID NO: 134971 - DNA, 25 bp, Homo sapien
cattttaactccttgagcagaggga

SEQ ID NO: 134972 - DNA, 25 bp, Homo sapien
gattatcataaagggtgcgcagcct

SEQ ID NO: 134973 - DNA, 25 bp, Homo sapien
gaggtggttccacagctcctagttg

SEQ ID NO: 134974 - DNA, 25 bp, Homo sapien
taagcaatggtcaccttcaagggat

SEQ ID NO: 134975 - DNA, 25 bp, Homo sapien
caccagattggtgcaaagagagacc

SEQ ID NO: 134976 - DNA, 25 bp, Homo sapien
gaagtccagatcatccaccagattg

SEQ ID NO: 134977 - DNA, 25 bp, Homo sapien
taaatcggtacaacaagcagctatc

SEQ ID NO: 134978 - DNA, 25 bp, Homo sapien
tcacgtgtataggagctgagcttaa

SEQ ID NO: 134979 - DNA, 25 bp, Homo sapien
tcctttagtagccaggcaggacagc

SEQ ID NO: 134980 - DNA, 25 bp, Homo sapien
gccatgccgcctctaagagtacgaa

SEQ ID NO: 134981 - DNA, 25 bp, Homo sapien
taaaaaagggttatgctggagcacc

SEQ ID NO: 134982 - DNA, 25 bp, Homo sapien
caccttctctagatgtgaacctgga

SEQ ID NO: 134983 - DNA, 25 bp, Homo sapien
tgcccagcattccttatagccagta

SEQ ID NO: 134984 - DNA, 25 bp, Homo sapien
catccagatatgctgggtcggccac

SEQ ID NO: 134985 - DNA, 25 bp, Homo sapien
tgccaatcccgaaaagaagctgaag

SEQ ID NO: 134986 - DNA, 25 bp, Homo sapien
caagcagaggttacatgccaggaca

SEQ ID NO: 134987 - DNA, 25 bp, Homo sapien
taaacttgggtatgacctggtggcc

SEQ ID NO: 134988 - DNA, 25 bp, Homo sapien
ggagaaccctgaatgccatgctgaa

SEQ ID NO: 134989 - DNA, 25 bp, Homo sapien
aaaagcagtcatccctcacacggag

SEQ ID NO: 134990 - DNA, 25 bp, Homo sapien
gctttgcagaccagtacagtattgg

SEQ ID NO: 134991 - DNA, 25 bp, Homo sapien
gtattggatcctgcccaaggcctgt

SEQ ID NO: 134992 - DNA, 25 bp, Homo sapien
ggaagggtgacatgagcactcccat

SEQ ID NO: 134993 - DNA, 25 bp, Homo sapien
cacagatggcagtgcactgggtcac

SEQ ID NO: 134994 - DNA, 25 bp, Homo sapien
tctttacccgtatctattccaggcg

SEQ ID NO: 134995 - DNA, 25 bp, Homo sapien
caagccaggttaagcagctgttccc

SEQ ID NO: 134996 - DNA, 25 bp, Homo sapien
taggcctcacttgcaggctactgaa

SEQ ID NO: 134997 - DNA, 25 bp, Homo sapien
caaatcaaggcattagaccaggtca

SEQ ID NO: 134998 - DNA, 25 bp, Homo sapien
ccaaggaaggtttaagatgcagaac

SEQ ID NO: 134999 - DNA, 25 bp, Homo sapien
taggtgtcaaaagggtcagtactac

SEQ ID NO: 135000 - DNA, 25 bp, Homo sapien
tgaggactgccttgtaggaggccat

SEQ ID NO: 135001 - DNA, 25 bp, Homo sapien
aaatcaggacattaggcctggtgca

SEQ ID NO: 135002 - DNA, 25 bp, Homo sapien
taaacccttgtggtgggagaatatg

SEQ ID NO: 135003 - DNA, 25 bp, Homo sapien
gcctgccagagctatgtggtcatgt

SEQ ID NO: 135004 - DNA, 25 bp, Homo sapien
gcctggtaatctgacgcctgccaga

SEQ ID NO: 135005 - DNA, 25 bp, Homo sapien
gaaaagtcaacggacagcttctact

SEQ ID NO: 135006 - DNA, 25 bp, Homo sapien
tgaggctgggttgcagtagtgccat

SEQ ID NO: 135007 - DNA, 25 bp, Homo sapien
ctcctgccttagcagggttataata

SEQ ID NO: 135008 - DNA, 25 bp, Homo sapien
cctcctgccttagcagggttataat

SEQ ID NO: 135009 - DNA, 25 bp, Homo sapien
tcgggctgccgtcgcaggctaaacg

SEQ ID NO: 135010 - DNA, 25 bp, Homo sapien
acccctgcaactctgcccaactctt

SEQ ID NO: 135011 - DNA, 25 bp, Homo sapien
tgggccaggactggttcgtcccggc

SEQ ID NO: 135012 - DNA, 25 bp, Homo sapien
acctccactttatgttggaaagcaa

SEQ ID NO: 135013 - DNA, 25 bp, Homo sapien
cgagcaggaacccaaataatccggc

SEQ ID NO: 135014 - DNA, 25 bp, Homo sapien
gcaggaacccaaataatccggccaa

SEQ ID NO: 135015 - DNA, 25 bp, Homo sapien
ccgagcaggaacccaaataatccgg

SEQ ID NO: 135016 - DNA, 25 bp, Homo sapien
gagcaggaacccaaataatccggcc

SEQ ID NO: 135017 - DNA, 25 bp, Homo sapien
aggaagtagcgctcgtgccgcaccc

SEQ ID NO: 135018 - DNA, 25 bp, Homo sapien
gaagtagcgctcgtgccgcacccgg

SEQ ID NO: 135019 - DNA, 25 bp, Homo sapien
cgcgcttcaccagccgcaccaaggg

SEQ ID NO: 135020 - DNA, 25 bp, Homo sapien
ttcaccagccgcaccaagggtttct

SEQ ID NO: 135021 - DNA, 25 bp, Homo sapien
agaggggaacaattagcggaggtga

SEQ ID NO: 135022 - DNA, 25 bp, Homo sapien
agtggaaagcgcaggaacagggatg

SEQ ID NO: 135023 - DNA, 25 bp, Homo sapien
ggaacaattagcggaggtgagtcac

SEQ ID NO: 135024 - DNA, 25 bp, Homo sapien
tggaaagcgcaggaacagggatggg

SEQ ID NO: 135025 - DNA, 25 bp, Homo sapien
ctctcctggaatggtaacaggacgg

SEQ ID NO: 135026 - DNA, 25 bp, Homo sapien
tcctggaatggtaacaggacggaga

SEQ ID NO: 135027 - DNA, 25 bp, Homo sapien
ctggaatggtaacaggacggagatc

SEQ ID NO: 135028 - DNA, 25 bp, Homo sapien
ctgctctcctggaatggtaacagga

SEQ ID NO: 135029 - DNA, 25 bp, Homo sapien
agggaccgcgtgctggcagcttcca

SEQ ID NO: 135030 - DNA, 25 bp, Homo sapien
cagcttccagacggcatcctgtggg

SEQ ID NO: 135031 - DNA, 25 bp, Homo sapien
tcctggtctggaagcagtacctcac

SEQ ID NO: 135032 - DNA, 25 bp, Homo sapien
atcctgtggggcttcagccgccgct

SEQ ID NO: 135033 - DNA, 25 bp, Homo sapien
taatgctagcttctaaaagtgggcc

SEQ ID NO: 135034 - DNA, 25 bp, Homo sapien
tatgttgactccttctagcagtgag

SEQ ID NO: 135035 - DNA, 25 bp, Homo sapien
tataaggaatatgcctcctggtgca

SEQ ID NO: 135036 - DNA, 25 bp, Homo sapien
taagacaaattgttgcccagagcag

SEQ ID NO: 135037 - DNA, 25 bp, Homo sapien
gacccagcaatcccactcctaggta

SEQ ID NO: 135038 - DNA, 25 bp, Homo sapien
cccagcaatcccactcctaggtatc

SEQ ID NO: 135039 - DNA, 25 bp, Homo sapien
cagcaatcccactcctaggtatcta

SEQ ID NO: 135040 - DNA, 25 bp, Homo sapien
agcaatcccactcctaggtatctac

SEQ ID NO: 135041 - DNA, 25 bp, Homo sapien
gttccgaacatgtccacaatgccag

SEQ ID NO: 135042 - DNA, 25 bp, Homo sapien
cagttccgaacatgtccacaatgcc

SEQ ID NO: 135043 - DNA, 25 bp, Homo sapien
ccgaacatgtccacaatgccaggaa

SEQ ID NO: 135044 - DNA, 25 bp, Homo sapien
tccagttccgaacatgtccacaatg

SEQ ID NO: 135045 - DNA, 25 bp, Homo sapien
agcccataaatctgagagaagaact

SEQ ID NO: 135046 - DNA, 25 bp, Homo sapien
atagcccataaatctgagagaagaa

SEQ ID NO: 135047 - DNA, 25 bp, Homo sapien
tagcccataaatctgagagaagaac

SEQ ID NO: 135048 - DNA, 25 bp, Homo sapien
catagcccataaatctgagagaaga

SEQ ID NO: 135049 - DNA, 25 bp, Homo sapien
tggtcaggtccttccaaagggctgt

SEQ ID NO: 135050 - DNA, 25 bp, Homo sapien
gcgatttctgttgacgcccacaggg

SEQ ID NO: 135051 - DNA, 25 bp, Homo sapien
cacagagccgttgatgacgacagca

SEQ ID NO: 135052 - DNA, 25 bp, Homo sapien
agcagccgtgatgcccttcaggaaa

SEQ ID NO: 135053 - DNA, 25 bp, Homo sapien
cttccagttgtggtcatcctgacct

SEQ ID NO: 135054 - DNA, 25 bp, Homo sapien
ttccagttgtggtcatcctgaccta

SEQ ID NO: 135055 - DNA, 25 bp, Homo sapien
caggcctcattagcatagaactcac

SEQ ID NO: 135056 - DNA, 25 bp, Homo sapien
taaggaggctcaatatagtgccctg

SEQ ID NO: 135057 - DNA, 25 bp, Homo sapien
tgagccatggcatgagccctgggct

SEQ ID NO: 135058 - DNA, 25 bp, Homo sapien
ccatgggcctgcaagcgtttacagg

SEQ ID NO: 135059 - DNA, 25 bp, Homo sapien
ttttgatgggattgtcccctcgtgg

SEQ ID NO: 135060 - DNA, 25 bp, Homo sapien
tttgatgggattgtcccctcgtggc

SEQ ID NO: 135061 - DNA, 25 bp, Homo sapien
ttgatgggattgtcccctcgtggcc

SEQ ID NO: 135062 - DNA, 25 bp, Homo sapien
atacacacactaaatgtggcagatg

SEQ ID NO: 135063 - DNA, 25 bp, Homo sapien
tacacacactaaatgtggcagatgt

SEQ ID NO: 135064 - DNA, 25 bp, Homo sapien
tagtattaaactgctccattctaaa

SEQ ID NO: 135065 - DNA, 25 bp, Homo sapien
agaagatactgatactaaggcttat

SEQ ID NO: 135066 - DNA, 25 bp, Homo sapien
agatactgatactaaggcttattgc

SEQ ID NO: 135067 - DNA, 25 bp, Homo sapien
tactgatactaaggcttattgcttt

SEQ ID NO: 135068 - DNA, 25 bp, Homo sapien
gctgactgcacactcttggactcca

SEQ ID NO: 135069 - DNA, 25 bp, Homo sapien
gctcatccatatatttacagcatat

SEQ ID NO: 135070 - DNA, 25 bp, Homo sapien
cacctcacctggatactttttaagt

SEQ ID NO: 135071 - DNA, 25 bp, Homo sapien
cactctccccaggaattttgctctg

SEQ ID NO: 135072 - DNA, 25 bp, Homo sapien
actgcagtctcaacacccaggtgca

SEQ ID NO: 135073 - DNA, 25 bp, Homo sapien
agtgggtacaaagatcgtatgcttc

SEQ ID NO: 135074 - DNA, 25 bp, Homo sapien
agaaccactgacaaaggtccaacaa

SEQ ID NO: 135075 - DNA, 25 bp, Homo sapien
cactgacaaaggtccaacaaagatc

SEQ ID NO: 135076 - DNA, 25 bp, Homo sapien
gagtgggtacaaagatcgtatgctt

SEQ ID NO: 135077 - DNA, 25 bp, Homo sapien
gaactctcaggaagtaagaaggcaa

SEQ ID NO: 135078 - DNA, 25 bp, Homo sapien
tgttcagatgcgtccggaatgtgtt

SEQ ID NO: 135079 - DNA, 25 bp, Homo sapien
ccgacttcaagagtaaagccacaga

SEQ ID NO: 135080 - DNA, 25 bp, Homo sapien
aatgcagtatggacccaaagaagga

SEQ ID NO: 135081 - DNA, 25 bp, Homo sapien
ggagtacagcggcagtttaccatca

SEQ ID NO: 135082 - DNA, 25 bp, Homo sapien
ggagctccccatgcatcgcgctttt

SEQ ID NO: 135083 - DNA, 25 bp, Homo sapien
tacctcaaaggactaccggagctcc

SEQ ID NO: 135084 - DNA, 25 bp, Homo sapien
tttcatcacttaagctttaggcccc

SEQ ID NO: 135085 - DNA, 25 bp, Homo sapien
tcctgatggcgaagaggaatgcaga

SEQ ID NO: 135086 - DNA, 25 bp, Homo sapien
caaaatctgcaccatggtgttttgc

SEQ ID NO: 135087 - DNA, 25 bp, Homo sapien
tcacactcattactaatcttagggc

SEQ ID NO: 135088 - DNA, 25 bp, Homo sapien
gttcttaaagaaccaggcagctagc

SEQ ID NO: 135089 - DNA, 25 bp, Homo sapien
atgggggtggggagaaagaagcttg

SEQ ID NO: 135090 - DNA, 25 bp, Homo sapien
ggggagaaagaagcttgttagacat

SEQ ID NO: 135091 - DNA, 25 bp, Homo sapien
ggtggggagaaagaagcttgttaga

SEQ ID NO: 135092 - DNA, 25 bp, Homo sapien
tggggagaaagaagcttgttagaca

SEQ ID NO: 135093 - DNA, 25 bp, Homo sapien
ttcaggctccattggtacagccggg

SEQ ID NO: 135094 - DNA, 25 bp, Homo sapien
cagccgggacgctcgaaggacagca

SEQ ID NO: 135095 - DNA, 25 bp, Homo sapien
caggctccattggtacagccgggac

SEQ ID NO: 135096 - DNA, 25 bp, Homo sapien
ctccattggtacagccgggacgctc

SEQ ID NO: 135097 - DNA, 25 bp, Homo sapien
gagcaggaaccctaatgatctgacc

SEQ ID NO: 135098 - DNA, 25 bp, Homo sapien
caggaaccctaatgatctgaccaac

SEQ ID NO: 135099 - DNA, 25 bp, Homo sapien
ccgagcaggaaccctaatgatctga

SEQ ID NO: 135100 - DNA, 25 bp, Homo sapien
gcaggaaccctaatgatctgaccaa

SEQ ID NO: 135101 - DNA, 25 bp, Homo sapien
gctaggccgcgcacggcgattcgca

SEQ ID NO: 135102 - DNA, 25 bp, Homo sapien
tgggcctggaaaagcgcgcccttct

SEQ ID NO: 135103 - DNA, 25 bp, Homo sapien
tcggcgcggtagcgcgcgtgggcct

SEQ ID NO: 135104 - DNA, 25 bp, Homo sapien
atgggctcaagccccgcgaagctgc

SEQ ID NO: 135105 - DNA, 25 bp, Homo sapien
gccgcaccaaaggtttctcgggctc

SEQ ID NO: 135106 - DNA, 25 bp, Homo sapien
accagccgcaccaaaggtttctcgg

SEQ ID NO: 135107 - DNA, 25 bp, Homo sapien
caccaaaggtttctcgggctccaag

SEQ ID NO: 135108 - DNA, 25 bp, Homo sapien
ttcaccagccgcaccaaaggtttct

SEQ ID NO: 135109 - DNA, 25 bp, Homo sapien
agtagcgctcgtgccgcgtctggca

SEQ ID NO: 135110 - DNA, 25 bp, Homo sapien
tagcgctcgtgccgcgtctggcaca

SEQ ID NO: 135111 - DNA, 25 bp, Homo sapien
gaagtagcgctcgtgccgcgtctgg

SEQ ID NO: 135112 - DNA, 25 bp, Homo sapien
agcgctcgtgccgcgtctggcacag

SEQ ID NO: 135113 - DNA, 25 bp, Homo sapien
ggtcctgccatgcatagggacgcgg

SEQ ID NO: 135114 - DNA, 25 bp, Homo sapien
ctgctctcctggaatggtaacaggg

SEQ ID NO: 135115 - DNA, 25 bp, Homo sapien
ctgccatgcatagggacgcggctgc

SEQ ID NO: 135116 - DNA, 25 bp, Homo sapien
tcctgccatgcatagggacgcggct

SEQ ID NO: 135117 - DNA, 25 bp, Homo sapien
tgaagcacatgcaaaacaccgaggt

SEQ ID NO: 135118 - DNA, 25 bp, Homo sapien
aaaacaccgaggtcttcacactgca

SEQ ID NO: 135119 - DNA, 25 bp, Homo sapien
tggtggataaagtggcccacgggtg

SEQ ID NO: 135120 - DNA, 25 bp, Homo sapien
ccccggaggaccttgcaagagatga

SEQ ID NO: 135121 - DNA, 25 bp, Homo sapien
ccgaacatgtccacaatcccaggaa

SEQ ID NO: 135122 - DNA, 25 bp, Homo sapien
gggatgactgagcaagtagttcatg

SEQ ID NO: 135123 - DNA, 25 bp, Homo sapien
tccagttccgaacatgtccacaatc

SEQ ID NO: 135124 - DNA, 25 bp, Homo sapien
agttccgaacatgtccacaatccca

SEQ ID NO: 135125 - DNA, 25 bp, Homo sapien
agtggaatatggtgagttgtgtcca

SEQ ID NO: 135126 - DNA, 25 bp, Homo sapien
cagtggaatatggtgagttgtgtcc

SEQ ID NO: 135127 - DNA, 25 bp, Homo sapien
tggaatatggtgagttgtgtccacc

SEQ ID NO: 135128 - DNA, 25 bp, Homo sapien
aacagtggaatatggtgagttgtgt

SEQ ID NO: 135129 - DNA, 25 bp, Homo sapien
cagggtctcgcccttgtagtgtaag

SEQ ID NO: 135130 - DNA, 25 bp, Homo sapien
ggggcagggtctcgcccttgtagtg

SEQ ID NO: 135131 - DNA, 25 bp, Homo sapien
ggcagggtctcgcccttgtagtgta

SEQ ID NO: 135132 - DNA, 25 bp, Homo sapien
agggtctcgcccttgtagtgtaagg

SEQ ID NO: 135133 - DNA, 25 bp, Homo sapien
cgtttacaggcctcattagcataga

SEQ ID NO: 135134 - DNA, 25 bp, Homo sapien
taaggaggctcaatatagtgccctg

SEQ ID NO: 135135 - DNA, 25 bp, Homo sapien
ttagcatagaactcactcttccagt

SEQ ID NO: 135136 - DNA, 25 bp, Homo sapien
ccatgggcctgcaagcgtttacagg

SEQ ID NO: 135137 - DNA, 25 bp, Homo sapien
tcccctccccagataataggactgc

SEQ ID NO: 135138 - DNA, 25 bp, Homo sapien
cacctgagccatggcatgagccctg

SEQ ID NO: 135139 - DNA, 25 bp, Homo sapien
tgagccatggcatgagccctgggct

SEQ ID NO: 135140 - DNA, 25 bp, Homo sapien
aaagtctggagttgtttccaagcat

SEQ ID NO: 135141 - DNA, 25 bp, Homo sapien
ttttgatgggattgtcccctcgtgg

SEQ ID NO: 135142 - DNA, 25 bp, Homo sapien
tttgatgggattgtcccctcgtggc

SEQ ID NO: 135143 - DNA, 25 bp, Homo sapien
ttgatgggattgtcccctcgtggcc

SEQ ID NO: 135144 - DNA, 25 bp, Homo sapien
tacacacactaaatgtggcagatgt

SEQ ID NO: 135145 - DNA, 25 bp, Homo sapien
atacacacactaaatgtggcagatg

SEQ ID NO: 135146 - DNA, 25 bp, Homo sapien
atgcaccaccaatgtctggctattt

SEQ ID NO: 135147 - DNA, 25 bp, Homo sapien
caagcaatccactggccttggtctc

SEQ ID NO: 135148 - DNA, 25 bp, Homo sapien
gctcaagcaatccactggccttggt

SEQ ID NO: 135149 - DNA, 25 bp, Homo sapien
gcaatccactggccttggtctccca

SEQ ID NO: 135150 - DNA, 25 bp, Homo sapien
agtttcattgctacgcaggacctga

SEQ ID NO: 135151 - DNA, 25 bp, Homo sapien
gagactggcagtagggagactccct

SEQ ID NO: 135152 - DNA, 25 bp, Homo sapien
tctatgtgactctggagcaacaggc

SEQ ID NO: 135153 - DNA, 25 bp, Homo sapien
tgacaatgcgaatgctgaggctcac

SEQ ID NO: 135154 - DNA, 25 bp, Homo sapien
catgacggtactgatggctttttga

SEQ ID NO: 135155 - DNA, 25 bp, Homo sapien
gaacttcacatgacggtactgatgg

SEQ ID NO: 135156 - DNA, 25 bp, Homo sapien
ctgacaatgagtgtaacggaggaac

SEQ ID NO: 135157 - DNA, 25 bp, Homo sapien
tgtaacggaggaacttcacatgacg

SEQ ID NO: 135158 - DNA, 25 bp, Homo sapien
tccggactcgtctgaggcaaaagta

SEQ ID NO: 135159 - DNA, 25 bp, Homo sapien
caagcgcgccgaatgtccggacggc

SEQ ID NO: 135160 - DNA, 25 bp, Homo sapien
tcttcagggtcgtctccttgggccc

SEQ ID NO: 135161 - DNA, 25 bp, Homo sapien
ctggtgccggaagctgccggtggct

SEQ ID NO: 135162 - DNA, 25 bp, Homo sapien
aatgcgcaccggctcgttccagcag

SEQ ID NO: 135163 - DNA, 25 bp, Homo sapien
ggcccgctcgcaccgactggcgccg

SEQ ID NO: 135164 - DNA, 25 bp, Homo sapien
ccgcgcacggcaatgcgcaccggct

SEQ ID NO: 135165 - DNA, 25 bp, Homo sapien
tcaggaagcgccaaaaaggcttctc

SEQ ID NO: 135166 - DNA, 25 bp, Homo sapien
tgtcatcattctgccttagacaagt

SEQ ID NO: 135167 - DNA, 25 bp, Homo sapien
caagtcaggctgatgcctgtagaaa

SEQ ID NO: 135168 - DNA, 25 bp, Homo sapien
tctgccttagacaagtcaggctgat

SEQ ID NO: 135169 - DNA, 25 bp, Homo sapien
gccttagacaagtcaggctgatgcc

SEQ ID NO: 135170 - DNA, 25 bp, Homo sapien
agcaaggaggctggctcgatattcc

SEQ ID NO: 135171 - DNA, 25 bp, Homo sapien
gcaaggaggctggctcgatattcca

SEQ ID NO: 135172 - DNA, 25 bp, Homo sapien
caaggaggctggctcgatattccaa

SEQ ID NO: 135173 - DNA, 25 bp, Homo sapien
cgaagtactccagggatatgttgtc

SEQ ID NO: 135174 - DNA, 25 bp, Homo sapien
tcttcgaagtactccagggatatgt

SEQ ID NO: 135175 - DNA, 25 bp, Homo sapien
ggcttcttcgaagtactccagggat

SEQ ID NO: 135176 - DNA, 25 bp, Homo sapien
agtactccagggatatgttgtccat

SEQ ID NO: 135177 - DNA, 25 bp, Homo sapien
ggggatgttgaagcatgtagcatac

SEQ ID NO: 135178 - DNA, 25 bp, Homo sapien
ctggggatgttgaagcatgtagcat

SEQ ID NO: 135179 - DNA, 25 bp, Homo sapien
tggggatgttgaagcatgtagcata

SEQ ID NO: 135180 - DNA, 25 bp, Homo sapien
gcattccttatatccacaatgtcca

SEQ ID NO: 135181 - DNA, 25 bp, Homo sapien
gggcccctgggccttctctattgga

SEQ ID NO: 135182 - DNA, 25 bp, Homo sapien
ggttcttgtaccctcctacgagagc

SEQ ID NO: 135183 - DNA, 25 bp, Homo sapien
cccctgggccttctctattggaatc

SEQ ID NO: 135184 - DNA, 25 bp, Homo sapien
taaggaggctcgatgtaatgcccag

SEQ ID NO: 135185 - DNA, 25 bp, Homo sapien
ggctcgatgtaatgcccagtcccag

SEQ ID NO: 135186 - DNA, 25 bp, Homo sapien
gaagtaaggaggctcgatgtaatgc

SEQ ID NO: 135187 - DNA, 25 bp, Homo sapien
gaggctcgatgtaatgcccagtccc

SEQ ID NO: 135188 - DNA, 25 bp, Homo sapien
ggctccccaccccatataacatgtt

SEQ ID NO: 135189 - DNA, 25 bp, Homo sapien
cagaagaaggctagaatttgcttcc

SEQ ID NO: 135190 - DNA, 25 bp, Homo sapien
atcttcctgggccttagaatgagcc

SEQ ID NO: 135191 - DNA, 25 bp, Homo sapien
ccaggtgtttgcagaagaaggctag

SEQ ID NO: 135192 - DNA, 25 bp, Homo sapien
tacaatttagggacagctgttttct

SEQ ID NO: 135193 - DNA, 25 bp, Homo sapien
caatttagggacagctgttttctgg

SEQ ID NO: 135194 - DNA, 25 bp, Homo sapien
atttagggacagctgttttctgggt

SEQ ID NO: 135195 - DNA, 25 bp, Homo sapien
ttacaatttagggacagctgttttc

SEQ ID NO: 135196 - DNA, 25 bp, Homo sapien
caggagacatctgattcacataggg

SEQ ID NO: 135197 - DNA, 25 bp, Homo sapien
catagggttactgaacactagaatc

SEQ ID NO: 135198 - DNA, 25 bp, Homo sapien
tgaatctctcatgtcaacaacagac

SEQ ID NO: 135199 - DNA, 25 bp, Homo sapien
cactagaatctgatcttgaatctct

SEQ ID NO: 135200 - DNA, 25 bp, Homo sapien
tagatcgtagtaattcacccttgga

SEQ ID NO: 135201 - DNA, 25 bp, Homo sapien
taccctgctactgatggttgaacag

SEQ ID NO: 135202 - DNA, 25 bp, Homo sapien
cacccttggaagagagtacagactt

SEQ ID NO: 135203 - DNA, 25 bp, Homo sapien
gcaatcgtcccatctgagtctcgag

SEQ ID NO: 135204 - DNA, 25 bp, Homo sapien
gacagaagcctaagaatcattggaa

SEQ ID NO: 135205 - DNA, 25 bp, Homo sapien
agaatgacagaagcctaagaatcat

SEQ ID NO: 135206 - DNA, 25 bp, Homo sapien
aatgacagaagcctaagaatcattg

SEQ ID NO: 135207 - DNA, 25 bp, Homo sapien
cagaagcctaagaatcattggaaac

SEQ ID NO: 135208 - DNA, 25 bp, Homo sapien
agttctggcagtaagcaagtggcac

SEQ ID NO: 135209 - DNA, 25 bp, Homo sapien
ccattttgggttgtatgcatacaga

SEQ ID NO: 135210 - DNA, 25 bp, Homo sapien
aaatctaatcactggcagagtccat

SEQ ID NO: 135211 - DNA, 25 bp, Homo sapien
gttgtatgcatacagagttctggca

SEQ ID NO: 135212 - DNA, 25 bp, Homo sapien
ttgccgagcgctggaaagtagtcga

SEQ ID NO: 135213 - DNA, 25 bp, Homo sapien
caatctgggtagaacaggggcgacc

SEQ ID NO: 135214 - DNA, 25 bp, Homo sapien
tccgcggagtcagtgggcgggcctg

SEQ ID NO: 135215 - DNA, 25 bp, Homo sapien
gagggcggagcccttaacactactc

SEQ ID NO: 135216 - DNA, 25 bp, Homo sapien
aggccgcgcactgcgatgcgcagcg

SEQ ID NO: 135217 - DNA, 25 bp, Homo sapien
gatgcgcagcggctcgtcccagcag

SEQ ID NO: 135218 - DNA, 25 bp, Homo sapien
tggagccccgcgaagctgcctccca

SEQ ID NO: 135219 - DNA, 25 bp, Homo sapien
ggctttctcgggctccaacgcccac

SEQ ID NO: 135220 - DNA, 25 bp, Homo sapien
cgcccgggctcggtgtcgtggccgt

SEQ ID NO: 135221 - DNA, 25 bp, Homo sapien
gcccgggctcggtgtcgtggccgtc

SEQ ID NO: 135222 - DNA, 25 bp, Homo sapien
ccgcccgggctcggtgtcgtggccg

SEQ ID NO: 135223 - DNA, 25 bp, Homo sapien
agaaagtcgcgcttgttctgcgcca

SEQ ID NO: 135224 - DNA, 25 bp, Homo sapien
gtcgcgcttgttctgcgccaggcac

SEQ ID NO: 135225 - DNA, 25 bp, Homo sapien
aagtcgcgcttgttctgcgccaggc

SEQ ID NO: 135226 - DNA, 25 bp, Homo sapien
aaagtcgcgcttgttctgcgccagg

SEQ ID NO: 135227 - DNA, 25 bp, Homo sapien
cctgctgctcccaaacagatcaatg

SEQ ID NO: 135228 - DNA, 25 bp, Homo sapien
gcaaaaccatgtccggccaggaggc

SEQ ID NO: 135229 - DNA, 25 bp, Homo sapien
cagcaaaaccatgtccggccaggag

SEQ ID NO: 135230 - DNA, 25 bp, Homo sapien
aggctggccctgtattcacaaaggc

SEQ ID NO: 135231 - DNA, 25 bp, Homo sapien
cagatcttcggggaggtcttcaaat

SEQ ID NO: 135232 - DNA, 25 bp, Homo sapien
ctttggatgctgcagcataaagtcc

SEQ ID NO: 135233 - DNA, 25 bp, Homo sapien
tgctgcagcataaagtccacggctt

SEQ ID NO: 135234 - DNA, 25 bp, Homo sapien
gatgtacatcattcagatcttcggg

SEQ ID NO: 135235 - DNA, 25 bp, Homo sapien
gaagcgcaatactaggacctttcac

SEQ ID NO: 135236 - DNA, 25 bp, Homo sapien
gcattgataagtacagtggctgtga

SEQ ID NO: 135237 - DNA, 25 bp, Homo sapien
ggctgtgatgcccttcaagaaagaa

SEQ ID NO: 135238 - DNA, 25 bp, Homo sapien
atccaagaagcgcaatactaggacc

SEQ ID NO: 135239 - DNA, 25 bp, Homo sapien
aacagcgtgcacagaagctctagaa

SEQ ID NO: 135240 - DNA, 25 bp, Homo sapien
tattgcctcacccaaaacagcgtgc

SEQ ID NO: 135241 - DNA, 25 bp, Homo sapien
ttgctccaagtgtccataaaagtga

SEQ ID NO: 135242 - DNA, 25 bp, Homo sapien
aataaacaagaagggcacctgcgcc

SEQ ID NO: 135243 - DNA, 25 bp, Homo sapien
gcctttgagtgagcctttggctcac

SEQ ID NO: 135244 - DNA, 25 bp, Homo sapien
tgtgcctttgagtgagcctttggct

SEQ ID NO: 135245 - DNA, 25 bp, Homo sapien
tgcctttgagtgagcctttggctca

SEQ ID NO: 135246 - DNA, 25 bp, Homo sapien
ctgtgcctttgagtgagcctttggc

SEQ ID NO: 135247 - DNA, 25 bp, Homo sapien
gtttgaatttgctgccaggcatcta

SEQ ID NO: 135248 - DNA, 25 bp, Homo sapien
tgacagattttttaccattgagatg

SEQ ID NO: 135249 - DNA, 25 bp, Homo sapien
gagatgtttatggaagaaagtttga

SEQ ID NO: 135250 - DNA, 25 bp, Homo sapien
gcttgacagattttttaccattgag

SEQ ID NO: 135251 - DNA, 25 bp, Homo sapien
taatggtatctggtctgtggctaca

SEQ ID NO: 135252 - DNA, 25 bp, Homo sapien
tggtatctggtctgtggctacaatg

SEQ ID NO: 135253 - DNA, 25 bp, Homo sapien
ttaatggtatctggtctgtggctac

SEQ ID NO: 135254 - DNA, 25 bp, Homo sapien
aatggtatctggtctgtggctacaa

SEQ ID NO: 135255 - DNA, 25 bp, Homo sapien
gaaggcactagagccaagtggtcag

SEQ ID NO: 135256 - DNA, 25 bp, Homo sapien
tagctctcccactaaccaggcatgt

SEQ ID NO: 135257 - DNA, 25 bp, Homo sapien
ggttgtgaagctacatcatgtgacc

SEQ ID NO: 135258 - DNA, 25 bp, Homo sapien
tggccttggactgacttagctctcc

SEQ ID NO: 135259 - DNA, 25 bp, Homo sapien
tggtggcagcgacccgttcttctgg

SEQ ID NO: 135260 - DNA, 25 bp, Homo sapien
taatgtgggaggctgtctgtgcacc

SEQ ID NO: 135261 - DNA, 25 bp, Homo sapien
tgggatgccctttgcggccactaga

SEQ ID NO: 135262 - DNA, 25 bp, Homo sapien
caggccaggtggtctcagttatacc

SEQ ID NO: 135263 - DNA, 25 bp, Homo sapien
gggacatagctacatggttcctgat

SEQ ID NO: 135264 - DNA, 25 bp, Homo sapien
tgtgggggacatagctacatggttc

SEQ ID NO: 135265 - DNA, 25 bp, Homo sapien
gacatagctacatggttcctgatat

SEQ ID NO: 135266 - DNA, 25 bp, Homo sapien
tagctacatggttcctgatatgcat

SEQ ID NO: 135267 - DNA, 25 bp, Homo sapien
tcaggttctttggagagatcgccac

SEQ ID NO: 135268 - DNA, 25 bp, Homo sapien
catcatgaaagccacagagccgaag

SEQ ID NO: 135269 - DNA, 25 bp, Homo sapien
caaggacactgttttggtcccacgg

SEQ ID NO: 135270 - DNA, 25 bp, Homo sapien
tggtatccatagtcaaccactggct

SEQ ID NO: 135271 - DNA, 25 bp, Homo sapien
cacagcactgagttttattagggat

SEQ ID NO: 135272 - DNA, 25 bp, Homo sapien
tgacctccgccaaggtcgaggcggc

SEQ ID NO: 135273 - DNA, 25 bp, Homo sapien
tcgcggctttgacctccgccaaggt

SEQ ID NO: 135274 - DNA, 25 bp, Homo sapien
ggactgtcgcggctttgacctccgc

SEQ ID NO: 135275 - DNA, 25 bp, Homo sapien
gtccgggactgtcgcggctttgacc

SEQ ID NO: 135276 - DNA, 25 bp, Homo sapien
aaaggacgatgtggatatcggcctc

SEQ ID NO: 135277 - DNA, 25 bp, Homo sapien
gacgatgtggatatcggcctccagg

SEQ ID NO: 135278 - DNA, 25 bp, Homo sapien
ggagaaaaaggacgatgtggatatc

SEQ ID NO: 135279 - DNA, 25 bp, Homo sapien
cgatgtggatatcggcctccaggcc

SEQ ID NO: 135280 - DNA, 25 bp, Homo sapien
gcattcgactgaggcgtggatcctt

SEQ ID NO: 135281 - DNA, 25 bp, Homo sapien
gtggatccttcgaagcggccggcat

SEQ ID NO: 135282 - DNA, 25 bp, Homo sapien
tccacctcgtagtgggcaagggagt

SEQ ID NO: 135283 - DNA, 25 bp, Homo sapien
tcatatccaggcacttgtcggccag

SEQ ID NO: 135284 - DNA, 25 bp, Homo sapien
gcagcggcgttaggtggatggtcac

SEQ ID NO: 135285 - DNA, 25 bp, Homo sapien
gccggactcagcggcgccgcctgct

SEQ ID NO: 135286 - DNA, 25 bp, Homo sapien
tgctgcagcggcgttaggtggatgg

SEQ ID NO: 135287 - DNA, 25 bp, Homo sapien
ccgcctgctgcagcggcgttaggtg

SEQ ID NO: 135288 - DNA, 25 bp, Homo sapien
aggcggccggctcgcaggcgcgcgg

SEQ ID NO: 135289 - DNA, 25 bp, Homo sapien
caggcggccggctcgcaggcgcgcg

SEQ ID NO: 135290 - DNA, 25 bp, Homo sapien
gcggccggctcgcaggcgcgcggcg

SEQ ID NO: 135291 - DNA, 25 bp, Homo sapien
gcaggcggccggctcgcaggcgcgc

SEQ ID NO: 135292 - DNA, 25 bp, Homo sapien
tcaggcactctgcggaaaagggccc

SEQ ID NO: 135293 - DNA, 25 bp, Homo sapien
gcactctgcggaaaagggcccccgc

SEQ ID NO: 135294 - DNA, 25 bp, Homo sapien
caggcactctgcggaaaagggcccc

SEQ ID NO: 135295 - DNA, 25 bp, Homo sapien
aatgtttggacctttgacctgcaga

SEQ ID NO: 135296 - DNA, 25 bp, Homo sapien
ggtcacgaccacagctatatttggg

SEQ ID NO: 135297 - DNA, 25 bp, Homo sapien
gcctgagccaatcactgcaatgttt

SEQ ID NO: 135298 - DNA, 25 bp, Homo sapien
gaaaatgccaactctgaccctttgc

SEQ ID NO: 135299 - DNA, 25 bp, Homo sapien
cattccggcggttgctactgtcact

SEQ ID NO: 135300 - DNA, 25 bp, Homo sapien
acttctcggcgctctcggcggaagc

SEQ ID NO: 135301 - DNA, 25 bp, Homo sapien
actgctctggttgctagggcccgcg

SEQ ID NO: 135302 - DNA, 25 bp, Homo sapien
gggtcagtgcgcgtgcgcacttctc

SEQ ID NO: 135303 - DNA, 25 bp, Homo sapien
gatttgaaaatcctagatacaatat

SEQ ID NO: 135304 - DNA, 25 bp, Homo sapien
ttcaacatggatttgaaaatcctag

SEQ ID NO: 135305 - DNA, 25 bp, Homo sapien
catggatttgaaaatcctagataca

SEQ ID NO: 135306 - DNA, 25 bp, Homo sapien
caacatggatttgaaaatcctagat

SEQ ID NO: 135307 - DNA, 25 bp, Homo sapien
atcaaccaatcagctcacttgactc

SEQ ID NO: 135308 - DNA, 25 bp, Homo sapien
cttgactcaaccaatcaaggcccag

SEQ ID NO: 135309 - DNA, 25 bp, Homo sapien
caatcagctcacttgactcaaccaa

SEQ ID NO: 135310 - DNA, 25 bp, Homo sapien
gctcacttgactcaaccaatcaagg

SEQ ID NO: 135311 - DNA, 25 bp, Homo sapien
attagccttggcttctaccattaaa

SEQ ID NO: 135312 - DNA, 25 bp, Homo sapien
gcaataactattagccttggcttct

SEQ ID NO: 135313 - DNA, 25 bp, Homo sapien
tcaagcaataactattagccttggc

SEQ ID NO: 135314 - DNA, 25 bp, Homo sapien
taactattagccttggcttctacca

SEQ ID NO: 135315 - DNA, 25 bp, Homo sapien
ctcgctaaggcttctttgattgttg

SEQ ID NO: 135316 - DNA, 25 bp, Homo sapien
ccatctcgctaaggcttctttgatt

SEQ ID NO: 135317 - DNA, 25 bp, Homo sapien
atctcgctaaggcttctttgattgt

SEQ ID NO: 135318 - DNA, 25 bp, Homo sapien
tcgctaaggcttctttgattgttgt

SEQ ID NO: 135319 - DNA, 25 bp, Homo sapien
gaatctgggcataaagttttatctc

SEQ ID NO: 135320 - DNA, 25 bp, Homo sapien
ggaatctgggcataaagttttatct

SEQ ID NO: 135321 - DNA, 25 bp, Homo sapien
gggaatctgggcataaagttttatc

SEQ ID NO: 135322 - DNA, 25 bp, Homo sapien
atctgggcataaagttttatctctt

SEQ ID NO: 135323 - DNA, 25 bp, Homo sapien
caagcatggacaaggatgcatccat

SEQ ID NO: 135324 - DNA, 25 bp, Homo sapien
tagcaagcatggacaaggatgcatc

SEQ ID NO: 135325 - DNA, 25 bp, Homo sapien
tcgcaattagcaagcatggacaagg

SEQ ID NO: 135326 - DNA, 25 bp, Homo sapien
aattagcaagcatggacaaggatgc

SEQ ID NO: 135327 - DNA, 25 bp, Homo sapien
gcagtttgtagacagtgaaagcttc

SEQ ID NO: 135328 - DNA, 25 bp, Homo sapien
caccttagataatgagaccagtgac

SEQ ID NO: 135329 - DNA, 25 bp, Homo sapien
ttttcaaactatgggtcatgagcct

SEQ ID NO: 135330 - DNA, 25 bp, Homo sapien
tgaggcaatgaactaggataacacc

SEQ ID NO: 135331 - DNA, 25 bp, Homo sapien
catgagcctaaattaataggttgtg

SEQ ID NO: 135332 - DNA, 25 bp, Homo sapien
tgctgcagactcactctcctgagct

SEQ ID NO: 135333 - DNA, 25 bp, Homo sapien
cttcctaaagataatatcctcaagt

SEQ ID NO: 135334 - DNA, 25 bp, Homo sapien
tctttatgttgtttcttcctaaaga

SEQ ID NO: 135335 - DNA, 25 bp, Homo sapien
cagtccatttaagttctttatgttg

SEQ ID NO: 135336 - DNA, 25 bp, Homo sapien
ttgtttcttcctaaagataatatcc

SEQ ID NO: 135337 - DNA, 25 bp, Homo sapien
actgtttctgtactgggcaggatgg

SEQ ID NO: 135338 - DNA, 25 bp, Homo sapien
tttctgtactgggcaggatggtcat

SEQ ID NO: 135339 - DNA, 25 bp, Homo sapien
cactgtttctgtactgggcaggatg

SEQ ID NO: 135340 - DNA, 25 bp, Homo sapien
tgtttctgtactgggcaggatggtc

SEQ ID NO: 135341 - DNA, 25 bp, Homo sapien
ttttccatctaaggctcagaaactg

SEQ ID NO: 135342 - DNA, 25 bp, Homo sapien
caagtgatagttcagccagatagca

SEQ ID NO: 135343 - DNA, 25 bp, Homo sapien
ccttctaagtgccagattaccggca

SEQ ID NO: 135344 - DNA, 25 bp, Homo sapien
tcagaaactggacagaaggctaaat

SEQ ID NO: 135345 - DNA, 25 bp, Homo sapien
aactcttccttctctgactgctcca

SEQ ID NO: 135346 - DNA, 25 bp, Homo sapien
tctgaactcttccttctctgactgc

SEQ ID NO: 135347 - DNA, 25 bp, Homo sapien
taatctgaactcttccttctctgac

SEQ ID NO: 135348 - DNA, 25 bp, Homo sapien
tgaactcttccttctctgactgctc

SEQ ID NO: 135349 - DNA, 25 bp, Homo sapien
attatgtggatccctttcaacttct

SEQ ID NO: 135350 - DNA, 25 bp, Homo sapien
ttttaccaggttattagacatgtag

SEQ ID NO: 135351 - DNA, 25 bp, Homo sapien
caggttattagacatgtagagaatc

SEQ ID NO: 135352 - DNA, 25 bp, Homo sapien
tattagacatgtagagaatcttcaa

SEQ ID NO: 135353 - DNA, 25 bp, Homo sapien
tcttcgaggcatggcagttctgcca

SEQ ID NO: 135354 - DNA, 25 bp, Homo sapien
gggattgcctacaaacaccaggtct

SEQ ID NO: 135355 - DNA, 25 bp, Homo sapien
agctttttcagtttgggcactctct

SEQ ID NO: 135356 - DNA, 25 bp, Homo sapien
tcttcaatccagttattctcagcag

SEQ ID NO: 135357 - DNA, 25 bp, Homo sapien
tattcaagttctacattggtggttc

SEQ ID NO: 135358 - DNA, 25 bp, Homo sapien
gatccctcagttttgcttatgagca

SEQ ID NO: 135359 - DNA, 25 bp, Homo sapien
gccttgccaagatgataagacccca

SEQ ID NO: 135360 - DNA, 25 bp, Homo sapien
tgaagtcaatacatggtccaaaagg

SEQ ID NO: 135361 - DNA, 25 bp, Homo sapien
tcatcccctttaattactggagtac

SEQ ID NO: 135362 - DNA, 25 bp, Homo sapien
cctcatcccctttaattactggagt

SEQ ID NO: 135363 - DNA, 25 bp, Homo sapien
cttcctcatcccctttaattactgg

SEQ ID NO: 135364 - DNA, 25 bp, Homo sapien
tcctcatcccctttaattactggag

SEQ ID NO: 135365 - DNA, 25 bp, Homo sapien
gctacacagtacgtaactgagactg

SEQ ID NO: 135366 - DNA, 25 bp, Homo sapien
taactgagactgaagacaaaaatcg

SEQ ID NO: 135367 - DNA, 25 bp, Homo sapien
gatatataaggttggcattaccagt

SEQ ID NO: 135368 - DNA, 25 bp, Homo sapien
cttttgtcccatacagaatctttaa

SEQ ID NO: 135369 - DNA, 25 bp, Homo sapien
caaaatgtgtgcttaaggcgaggtc

SEQ ID NO: 135370 - DNA, 25 bp, Homo sapien
aattgtacagagacagaccttcagg

SEQ ID NO: 135371 - DNA, 25 bp, Homo sapien
gactgtacacaatgactcaagtggc

SEQ ID NO: 135372 - DNA, 25 bp, Homo sapien
acaatttggcagagggcccctgact

SEQ ID NO: 135373 - DNA, 25 bp, Homo sapien
ctttgaatgcataaaccagctagag

SEQ ID NO: 135374 - DNA, 25 bp, Homo sapien
ggctcattgcctatggttcataaaa

SEQ ID NO: 135375 - DNA, 25 bp, Homo sapien
cttgcctactgaaggaagtgcaaac

SEQ ID NO: 135376 - DNA, 25 bp, Homo sapien
ccagctagagtagaataaggtttct

SEQ ID NO: 135377 - DNA, 25 bp, Homo sapien
attgagaaacaaggagaaagagaac

SEQ ID NO: 135378 - DNA, 25 bp, Homo sapien
agtcattgagaaacaaggagaaaga

SEQ ID NO: 135379 - DNA, 25 bp, Homo sapien
tcattgagaaacaaggagaaagaga

SEQ ID NO: 135380 - DNA, 25 bp, Homo sapien
tgagaaacaaggagaaagagaacca

SEQ ID NO: 135381 - DNA, 25 bp, Homo sapien
aatagttccaaggttgatcctctgg

SEQ ID NO: 135382 - DNA, 25 bp, Homo sapien
aataaatggaccctggacacaagtg

SEQ ID NO: 135383 - DNA, 25 bp, Homo sapien
taaggcctgtctaggtaatacagcc

SEQ ID NO: 135384 - DNA, 25 bp, Homo sapien
tataacaattcaagtggcacatggc

SEQ ID NO: 135385 - DNA, 25 bp, Homo sapien
gtagacatggggtttcaccacgttg

SEQ ID NO: 135386 - DNA, 25 bp, Homo sapien
tatctttttatatttttggtagaca

SEQ ID NO: 135387 - DNA, 25 bp, Homo sapien
tagacatggggtttcaccacgttgg

SEQ ID NO: 135388 - DNA, 25 bp, Homo sapien
accacgcccggctatctttttatat

SEQ ID NO: 135389 - DNA, 25 bp, Homo sapien
gatgctcgtaatcatgactgccagc

SEQ ID NO: 135390 - DNA, 25 bp, Homo sapien
caagtgcaggctagatatttaccca

SEQ ID NO: 135391 - DNA, 25 bp, Homo sapien
ggtaccctactgatcacagaggcaa

SEQ ID NO: 135392 - DNA, 25 bp, Homo sapien
ccagtcttttgatgggagtgatccc

SEQ ID NO: 135393 - DNA, 25 bp, Homo sapien
gtttagtggaggacagcagcaagaa

SEQ ID NO: 135394 - DNA, 25 bp, Homo sapien
tcaattcagggcctatcagctaact

SEQ ID NO: 135395 - DNA, 25 bp, Homo sapien
ccttctggtaatcaggtgaggacta

SEQ ID NO: 135396 - DNA, 25 bp, Homo sapien
gaagtagaaactacactacagccct

SEQ ID NO: 135397 - DNA, 25 bp, Homo sapien
gacagttatcacctaagattctgac

SEQ ID NO: 135398 - DNA, 25 bp, Homo sapien
gaggatcctaaatgtccatcctttg

SEQ ID NO: 135399 - DNA, 25 bp, Homo sapien
tcagaggtctgacagttatcaccta

SEQ ID NO: 135400 - DNA, 25 bp, Homo sapien
taaatcaatgtgaggatcctaaatg

SEQ ID NO: 135401 - DNA, 25 bp, Homo sapien
taaagggttggttggacacagcgct

SEQ ID NO: 135402 - DNA, 25 bp, Homo sapien
taaaattgtgccagcgagcaccgtg

SEQ ID NO: 135403 - DNA, 25 bp, Homo sapien
gaaaaacacgcgaacctatgacact

SEQ ID NO: 135404 - DNA, 25 bp, Homo sapien
caccgtgaacgactgcaatgcaagc

SEQ ID NO: 135405 - DNA, 25 bp, Homo sapien
gagcacactaatgaggtcctagagg

SEQ ID NO: 135406 - DNA, 25 bp, Homo sapien
gaggccccgccgctgatgttattcg

SEQ ID NO: 135407 - DNA, 25 bp, Homo sapien
tctgaacacttatcagaacccggga

SEQ ID NO: 135408 - DNA, 25 bp, Homo sapien
taaccactgccgaatgcctgaaggc

SEQ ID NO: 135409 - DNA, 25 bp, Homo sapien
tgagaaaatggcgatgacactgttg

SEQ ID NO: 135410 - DNA, 25 bp, Homo sapien
ggctccgagtgcacctacggactga

SEQ ID NO: 135411 - DNA, 25 bp, Homo sapien
ggagcacggtgagccacagtctgtt

SEQ ID NO: 135412 - DNA, 25 bp, Homo sapien
cagagaagggcgagatcaggactct

SEQ ID NO: 135413 - DNA, 25 bp, Homo sapien
cagcagtaacgtcgcggcgggttgc

SEQ ID NO: 135414 - DNA, 25 bp, Homo sapien
tccactgcagcagtaacgtcgcggc

SEQ ID NO: 135415 - DNA, 25 bp, Homo sapien
tgcagcagtaacgtcgcggcgggtt

SEQ ID NO: 135416 - DNA, 25 bp, Homo sapien
cactgcagcagtaacgtcgcggcgg

SEQ ID NO: 135417 - DNA, 25 bp, Homo sapien
gagcaggcgtgcctcgcgccggctg

SEQ ID NO: 135418 - DNA, 25 bp, Homo sapien
tgccatggagacgcccgagcagctc

SEQ ID NO: 135419 - DNA, 25 bp, Homo sapien
atggagacgcccgagcagctccgcc

SEQ ID NO: 135420 - DNA, 25 bp, Homo sapien
ccggctgggacaccgttgccatgga

SEQ ID NO: 135421 - DNA, 25 bp, Homo sapien
ggaatacaacacatactcaagcctc

SEQ ID NO: 135422 - DNA, 25 bp, Homo sapien
gcattcagctaagggcgggaaactg

SEQ ID NO: 135423 - DNA, 25 bp, Homo sapien
gactggcaagcctaactccataggt

SEQ ID NO: 135424 - DNA, 25 bp, Homo sapien
caggaacagccttgacagtctgtaa

SEQ ID NO: 135425 - DNA, 25 bp, Homo sapien
tgaatgcgcgtatgacaggtcaacg

SEQ ID NO: 135426 - DNA, 25 bp, Homo sapien
tagtatggttctacaggaccccagc

SEQ ID NO: 135427 - DNA, 25 bp, Homo sapien
tttaacatcctctcagggaccaggg

SEQ ID NO: 135428 - DNA, 25 bp, Homo sapien
tcagaggcccgagtgcatttatccc

SEQ ID NO: 135429 - DNA, 25 bp, Homo sapien
cctgcagtctctaggcctgtctgag

SEQ ID NO: 135430 - DNA, 25 bp, Homo sapien
gggctagcgttcttgtccaaagcac

SEQ ID NO: 135431 - DNA, 25 bp, Homo sapien
caagctcacccactttggagcagca

SEQ ID NO: 135432 - DNA, 25 bp, Homo sapien
taggcccgagagagcttttgacaag

SEQ ID NO: 135433 - DNA, 25 bp, Homo sapien
catttggtctgtcggaagctgtcct

SEQ ID NO: 135434 - DNA, 25 bp, Homo sapien
ttttccctgcgaaacaaatgagaca

SEQ ID NO: 135435 - DNA, 25 bp, Homo sapien
tttatttatgaaggccctgggagca

SEQ ID NO: 135436 - DNA, 25 bp, Homo sapien
tgctttcctggaccgggagagtccc

SEQ ID NO: 135437 - DNA, 25 bp, Homo sapien
tgatcatgtggggccttaagaagac

SEQ ID NO: 135438 - DNA, 25 bp, Homo sapien
gcaaaggagtgttttgatcatgtgg

SEQ ID NO: 135439 - DNA, 25 bp, Homo sapien
ttgcttgaacttggaggttcaactc

SEQ ID NO: 135440 - DNA, 25 bp, Homo sapien
ttgaacttggaggttcaactccttg

SEQ ID NO: 135441 - DNA, 25 bp, Homo sapien
cgcaggccccgcctcatctccttct

SEQ ID NO: 135442 - DNA, 25 bp, Homo sapien
tgggcagaagcaggcttgtcctgga

SEQ ID NO: 135443 - DNA, 25 bp, Homo sapien
aggccccgcctcatctccttctgag

SEQ ID NO: 135444 - DNA, 25 bp, Homo sapien
cagaagcaggcttgtcctggagccg

SEQ ID NO: 135445 - DNA, 25 bp, Homo sapien
tacagctgtgggtaagcccctgtaa

SEQ ID NO: 135446 - DNA, 25 bp, Homo sapien
agctgtgggtaagcccctgtaagac

SEQ ID NO: 135447 - DNA, 25 bp, Homo sapien
catacagctgtgggtaagcccctgt

SEQ ID NO: 135448 - DNA, 25 bp, Homo sapien
cagctgtgggtaagcccctgtaaga

SEQ ID NO: 135449 - DNA, 25 bp, Homo sapien
atatctgtgtctagaaaatccttgc

SEQ ID NO: 135450 - DNA, 25 bp, Homo sapien
tatctgatatctgtgtctagaaaat

SEQ ID NO: 135451 - DNA, 25 bp, Homo sapien
tgagaagggatatctgatatctgtg

SEQ ID NO: 135452 - DNA, 25 bp, Homo sapien
ctgccaaaggttcaggcaggggtaa

SEQ ID NO: 135453 - DNA, 25 bp, Homo sapien
tgtgggtctggtcaaggattggttg

SEQ ID NO: 135454 - DNA, 25 bp, Homo sapien
ctgaaagcctgctaggtcccaggcc

SEQ ID NO: 135455 - DNA, 25 bp, Homo sapien
aacttcctgaaagcctgctaggtcc

SEQ ID NO: 135456 - DNA, 25 bp, Homo sapien
ctggtcaaggattggttgctgcaga

SEQ ID NO: 135457 - DNA, 25 bp, Homo sapien
tacactggcctttgtgtgaagtccc

SEQ ID NO: 135458 - DNA, 25 bp, Homo sapien
taccgagtctggctatagctggaga

SEQ ID NO: 135459 - DNA, 25 bp, Homo sapien
gacacttgtgggagtcagatccacg

SEQ ID NO: 135460 - DNA, 25 bp, Homo sapien
gcagttccaggccatttaccgagtc

SEQ ID NO: 135461 - DNA, 25 bp, Homo sapien
tatcccagcttcccatggacaccct

SEQ ID NO: 135462 - DNA, 25 bp, Homo sapien
tcccagcttcccatggacaccctgt

SEQ ID NO: 135463 - DNA, 25 bp, Homo sapien
cagcttcccatggacaccctgtggg

SEQ ID NO: 135464 - DNA, 25 bp, Homo sapien
ccagcttcccatggacaccctgtgg

SEQ ID NO: 135465 - DNA, 25 bp, Homo sapien
gctgagtctcctgcggaggaagcct

SEQ ID NO: 135466 - DNA, 25 bp, Homo sapien
tctcctgcggaggaagcctaaacct

SEQ ID NO: 135467 - DNA, 25 bp, Homo sapien
gctgcctgtgactcttcgtggcctt

SEQ ID NO: 135468 - DNA, 25 bp, Homo sapien
ggaagcctaaacctgcctgcttcta

SEQ ID NO: 135469 - DNA, 25 bp, Homo sapien
tcatgttgtctccaggccctgctgc

SEQ ID NO: 135470 - DNA, 25 bp, Homo sapien
ttgtctccaggccctgctgctccca

SEQ ID NO: 135471 - DNA, 25 bp, Homo sapien
ctccaggccctgctgctcccaggct

SEQ ID NO: 135472 - DNA, 25 bp, Homo sapien
gtctccaggccctgctgctcccagg

SEQ ID NO: 135473 - DNA, 25 bp, Homo sapien
gcttggcccaggtcccagagagtct

SEQ ID NO: 135474 - DNA, 25 bp, Homo sapien
gctggatgctctgctgtgcccgcat

SEQ ID NO: 135475 - DNA, 25 bp, Homo sapien
gggcccatcattccagctggcttgg

SEQ ID NO: 135476 - DNA, 25 bp, Homo sapien
cagagagtctggttggtgtgtactt

SEQ ID NO: 135477 - DNA, 25 bp, Homo sapien
cagttcctggcacagatcctcctcc

SEQ ID NO: 135478 - DNA, 25 bp, Homo sapien
gataacttgcaaccccgagacggca

SEQ ID NO: 135479 - DNA, 25 bp, Homo sapien
gacggcatgtgagctggcagttcct

SEQ ID NO: 135480 - DNA, 25 bp, Homo sapien
ggtaaggcccccatagctcagaaat

SEQ ID NO: 135481 - DNA, 25 bp, Homo sapien
ggaacacagcctcgtgctgtggcca

SEQ ID NO: 135482 - DNA, 25 bp, Homo sapien
tcctggaacacagcctcgtgctgtg

SEQ ID NO: 135483 - DNA, 25 bp, Homo sapien
cagggagctttcgtggtgagagcat

SEQ ID NO: 135484 - DNA, 25 bp, Homo sapien
cagccgcagggagctttcgtggtga

SEQ ID NO: 135485 - DNA, 25 bp, Homo sapien
tgtacttgtcatgtgttgggcccag

SEQ ID NO: 135486 - DNA, 25 bp, Homo sapien
tagggatctgctagcctgggcactt

SEQ ID NO: 135487 - DNA, 25 bp, Homo sapien
aaaaatgtcagtccaccgtgggtga

SEQ ID NO: 135488 - DNA, 25 bp, Homo sapien
cagtggccgcattctgttggaggaa

SEQ ID NO: 135489 - DNA, 25 bp, Homo sapien
tggagtcccggaggcgaccgaaggc

SEQ ID NO: 135490 - DNA, 25 bp, Homo sapien
gtggctgctcgcacggcgggttgca

SEQ ID NO: 135491 - DNA, 25 bp, Homo sapien
tttaaaatcgggagtgcgtgcaggc

SEQ ID NO: 135492 - DNA, 25 bp, Homo sapien
tcgcgaggcggacggcacgggtgcg

SEQ ID NO: 135493 - DNA, 25 bp, Homo sapien
agacgtctctcccagagtgacagca

SEQ ID NO: 135494 - DNA, 25 bp, Homo sapien
ttgtttagccatgtgggctgaggct

SEQ ID NO: 135495 - DNA, 25 bp, Homo sapien
tgatagccaacacttataaaagact

SEQ ID NO: 135496 - DNA, 25 bp, Homo sapien
ctactgaagagaggtgtgatcactc

SEQ ID NO: 135497 - DNA, 25 bp, Homo sapien
tgggaaaggtgcctaacagtctagc

SEQ ID NO: 135498 - DNA, 25 bp, Homo sapien
taactcgggttcacagcgtggactc

SEQ ID NO: 135499 - DNA, 25 bp, Homo sapien
tgtctttatcagctaccggcactgc

SEQ ID NO: 135500 - DNA, 25 bp, Homo sapien
cagtgagcacgtgaggctttgagcc

SEQ ID NO: 135501 - DNA, 25 bp, Homo sapien
tcacacctgcgttttcatggaacca

SEQ ID NO: 135502 - DNA, 25 bp, Homo sapien
gcactatggtaggagtcaccacagg

SEQ ID NO: 135503 - DNA, 25 bp, Homo sapien
gaaggtcctggttagctggatcacc

SEQ ID NO: 135504 - DNA, 25 bp, Homo sapien
gaatttacagagactaaaagtgccc

SEQ ID NO: 135505 - DNA, 25 bp, Homo sapien
ggatcacctgaccaggactgccata

SEQ ID NO: 135506 - DNA, 25 bp, Homo sapien
tgagagcaggggactccagcgcggg

SEQ ID NO: 135507 - DNA, 25 bp, Homo sapien
cccggatcgcacttcggcgcggaaa

SEQ ID NO: 135508 - DNA, 25 bp, Homo sapien
acttcggcgcggaaacgacgcggct

SEQ ID NO: 135509 - DNA, 25 bp, Homo sapien
gggtgcaggctaggcggccggcagc

SEQ ID NO: 135510 - DNA, 25 bp, Homo sapien
tgacgagggacatcatgcagacttt

SEQ ID NO: 135511 - DNA, 25 bp, Homo sapien
tataacccgtagaaatgacgaggga

SEQ ID NO: 135512 - DNA, 25 bp, Homo sapien
cacttttgaccggtgatgaaacaca

SEQ ID NO: 135513 - DNA, 25 bp, Homo sapien
gatacgtggtaaacgtcttgctcac

SEQ ID NO: 135514 - DNA, 25 bp, Homo sapien
aagtgtcaggccttcacacatttac

SEQ ID NO: 135515 - DNA, 25 bp, Homo sapien
tatgtgtaagtgtcaggccttcaca

SEQ ID NO: 135516 - DNA, 25 bp, Homo sapien
aaaaagcaatgtatgtgtaagtgtc

SEQ ID NO: 135517 - DNA, 25 bp, Homo sapien
caatgtatgtgtaagtgtcaggcct

SEQ ID NO: 135518 - DNA, 25 bp, Homo sapien
acatcctccacttggtgccctggta

SEQ ID NO: 135519 - DNA, 25 bp, Homo sapien
ctggaggcagagatcattggcaggg

SEQ ID NO: 135520 - DNA, 25 bp, Homo sapien
acttggtgccctggtactccagcaa

SEQ ID NO: 135521 - DNA, 25 bp, Homo sapien
gcagggggcgcatcttagaggctgt

SEQ ID NO: 135522 - DNA, 25 bp, Homo sapien
cactgtttgggccaagccctcaggg

SEQ ID NO: 135523 - DNA, 25 bp, Homo sapien
ctccacagccactgtttgggccaag

SEQ ID NO: 135524 - DNA, 25 bp, Homo sapien
tccacagccactgtttgggccaagc

SEQ ID NO: 135525 - DNA, 25 bp, Homo sapien
tgtttgggccaagccctcagggatc

SEQ ID NO: 135526 - DNA, 25 bp, Homo sapien
gagcctagtgtctctggagggaaaa

SEQ ID NO: 135527 - DNA, 25 bp, Homo sapien
cagaaacggcctctacaattgctgg

SEQ ID NO: 135528 - DNA, 25 bp, Homo sapien
caattgctggcttgtactggattga

SEQ ID NO: 135529 - DNA, 25 bp, Homo sapien
tcatagcaaccggatgacggcatgg

SEQ ID NO: 135530 - DNA, 25 bp, Homo sapien
ggctaacaagtgagcctgccgcagt

SEQ ID NO: 135531 - DNA, 25 bp, Homo sapien
tacatgagtagtttccccttgacct

SEQ ID NO: 135532 - DNA, 25 bp, Homo sapien
tgcctaggtggctttaaggatcaca

SEQ ID NO: 135533 - DNA, 25 bp, Homo sapien
caaacttccggatatctcagccctg

SEQ ID NO: 135534 - DNA, 25 bp, Homo sapien
atctcacacatgaaagtgaaaagcc

SEQ ID NO: 135535 - DNA, 25 bp, Homo sapien
gctgacaatataacaaggtttgagt

SEQ ID NO: 135536 - DNA, 25 bp, Homo sapien
acaatataacaaggtttgagtgagg

SEQ ID NO: 135537 - DNA, 25 bp, Homo sapien
aagtgaaaagccaatcgtcatgctt

SEQ ID NO: 135538 - DNA, 25 bp, Homo sapien
ccctgcaaaccctcgttgaaaggag

SEQ ID NO: 135539 - DNA, 25 bp, Homo sapien
gccctgcaaaccctcgttgaaagga

SEQ ID NO: 135540 - DNA, 25 bp, Homo sapien
tcttctgggatgggaagtcctgagt

SEQ ID NO: 135541 - DNA, 25 bp, Homo sapien
atcttctgggatgggaagtcctgag

SEQ ID NO: 135542 - DNA, 25 bp, Homo sapien
cttctgggatgggaagtcctgagtg

SEQ ID NO: 135543 - DNA, 25 bp, Homo sapien
tatcttctgggatgggaagtcctga

SEQ ID NO: 135544 - DNA, 25 bp, Homo sapien
agcaggtcttgacaggaacccaaag

SEQ ID NO: 135545 - DNA, 25 bp, Homo sapien
gtcttgacaggaacccaaagctgct

SEQ ID NO: 135546 - DNA, 25 bp, Homo sapien
ctgctctggaatactggcctgtggc

SEQ ID NO: 135547 - DNA, 25 bp, Homo sapien
gctctggaatactggcctgtggctg

SEQ ID NO: 135548 - DNA, 25 bp, Homo sapien
gttgcaaacccttaacatcgtccca

SEQ ID NO: 135549 - DNA, 25 bp, Homo sapien
ggtgaagtgactatgcaagtccaca

SEQ ID NO: 135550 - DNA, 25 bp, Homo sapien
gatgccaaaatgaacactactgtca

SEQ ID NO: 135551 - DNA, 25 bp, Homo sapien
tccacacagttggtttagtagcagg

SEQ ID NO: 135552 - DNA, 25 bp, Homo sapien
catgatggcacacgcttgtaattcc

SEQ ID NO: 135553 - DNA, 25 bp, Homo sapien
agggtgcagtgagcctaaatcatgc

SEQ ID NO: 135554 - DNA, 25 bp, Homo sapien
gaatcgcttgaaccagggaggtgga

SEQ ID NO: 135555 - DNA, 25 bp, Homo sapien
agctactcaggaggctgaggcagga

SEQ ID NO: 135556 - DNA, 25 bp, Homo sapien
ttttacgatggcagaggtagaccca

SEQ ID NO: 135557 - DNA, 25 bp, Homo sapien
tgaagagctcgattgtggaaatgca

SEQ ID NO: 135558 - DNA, 25 bp, Homo sapien
aagtaccccaacactaatggtcagg

SEQ ID NO: 135559 - DNA, 25 bp, Homo sapien
cattttgagagctttagacagcgac

SEQ ID NO: 135560 - DNA, 25 bp, Homo sapien
ttgccctgtgcaaatagatggataa

SEQ ID NO: 135561 - DNA, 25 bp, Homo sapien
aagaatgtgtctgcggaaatgtaaa

SEQ ID NO: 135562 - DNA, 25 bp, Homo sapien
gggtggcttagactaagaatgtgtc

SEQ ID NO: 135563 - DNA, 25 bp, Homo sapien
taactgactaaacatggtgatgggc

SEQ ID NO: 135564 - DNA, 25 bp, Homo sapien
taccatacatatccaatgcccaagg

SEQ ID NO: 135565 - DNA, 25 bp, Homo sapien
caaacatcttggcagacaatggctc

SEQ ID NO: 135566 - DNA, 25 bp, Homo sapien
cctcaggatttaggtcacaggagat

SEQ ID NO: 135567 - DNA, 25 bp, Homo sapien
gagatggtcctgctttaaaccacca

SEQ ID NO: 135568 - DNA, 25 bp, Homo sapien
ccaggtccttaggagaatgtaggag

SEQ ID NO: 135569 - DNA, 25 bp, Homo sapien
cacttgaggctagggcacctgtaat

SEQ ID NO: 135570 - DNA, 25 bp, Homo sapien
tgtaggaggtttgcgatagaaatgc

SEQ ID NO: 135571 - DNA, 25 bp, Homo sapien
gatggattaacaagaaaagggagat

SEQ ID NO: 135572 - DNA, 25 bp, Homo sapien
cagtgtgggctgatttctcaatttc

SEQ ID NO: 135573 - DNA, 25 bp, Homo sapien
gggctgatttctcaatttcattcat

SEQ ID NO: 135574 - DNA, 25 bp, Homo sapien
gtgggctgatttctcaatttcattc

SEQ ID NO: 135575 - DNA, 25 bp, Homo sapien
gtgtgggctgatttctcaatttcat

SEQ ID NO: 135576 - DNA, 25 bp, Homo sapien
tgtggagcccgggtgaacgaaatct

SEQ ID NO: 135577 - DNA, 25 bp, Homo sapien
cccgggtgaacgaaatctcgcgtga

SEQ ID NO: 135578 - DNA, 25 bp, Homo sapien
ggctgtactgcacgaccccagctcg

SEQ ID NO: 135579 - DNA, 25 bp, Homo sapien
ctcgcgtgatttgccggaaagaggc

SEQ ID NO: 135580 - DNA, 25 bp, Homo sapien
ggggcccgaagcagcttcgggagcc

SEQ ID NO: 135581 - DNA, 25 bp, Homo sapien
tggggcccgaagcagcttcgggagc

SEQ ID NO: 135582 - DNA, 25 bp, Homo sapien
gggcccgaagcagcttcgggagcca

SEQ ID NO: 135583 - DNA, 25 bp, Homo sapien
aataacgccagtgtccccggtagct

SEQ ID NO: 135584 - DNA, 25 bp, Homo sapien
cctatctcagtgttgcgggcaataa

SEQ ID NO: 135585 - DNA, 25 bp, Homo sapien
gaggacgcctagaagtcaccctggt

SEQ ID NO: 135586 - DNA, 25 bp, Homo sapien
tctgtttctcgagcattccctatct

SEQ ID NO: 135587 - DNA, 25 bp, Homo sapien
ttcatcttcaagcacaccatcatga

SEQ ID NO: 135588 - DNA, 25 bp, Homo sapien
cctagtggggcaagatgtttttggt

SEQ ID NO: 135589 - DNA, 25 bp, Homo sapien
catgattaagcctcctatggctcga

SEQ ID NO: 135590 - DNA, 25 bp, Homo sapien
cctatggctcgattaaaagaaaaca

SEQ ID NO: 135591 - DNA, 25 bp, Homo sapien
ttttaaatcacaagatttgaagtat

SEQ ID NO: 135592 - DNA, 25 bp, Homo sapien
aatcacaagatttgaagtattcaac

SEQ ID NO: 135593 - DNA, 25 bp, Homo sapien
tttttaaatcacaagatttgaagta

SEQ ID NO: 135594 - DNA, 25 bp, Homo sapien
tgctctggttgggcagtggtttcac

SEQ ID NO: 135595 - DNA, 25 bp, Homo sapien
gcagtggtttcacaagatttctgta

SEQ ID NO: 135596 - DNA, 25 bp, Homo sapien
ggttgggcagtggtttcacaagatt

SEQ ID NO: 135597 - DNA, 25 bp, Homo sapien
ctctggttgggcagtggtttcacaa

SEQ ID NO: 135598 - DNA, 25 bp, Homo sapien
tcaataccactctttgaacaatcat

SEQ ID NO: 135599 - DNA, 25 bp, Homo sapien
caggtcgagaattcaataccactct

SEQ ID NO: 135600 - DNA, 25 bp, Homo sapien
tatgatgcagtttacatgtcagcac

SEQ ID NO: 135601 - DNA, 25 bp, Homo sapien
caacaaatgcctggataagttatca

SEQ ID NO: 135602 - DNA, 25 bp, Homo sapien
gagttgttcattcatcgcaaataca

SEQ ID NO: 135603 - DNA, 25 bp, Homo sapien
gcagcagtgacccaaatctctcagg

SEQ ID NO: 135604 - DNA, 25 bp, Homo sapien
taaggatccacagaaagataaagag

SEQ ID NO: 135605 - DNA, 25 bp, Homo sapien
cattcggaaattctctgccactgga

SEQ ID NO: 135606 - DNA, 25 bp, Homo sapien
ggtaaatagacttcttccattcgga

SEQ ID NO: 135607 - DNA, 25 bp, Homo sapien
gagttctaacttgtacttgtccttc

SEQ ID NO: 135608 - DNA, 25 bp, Homo sapien
ctgaggtgacagttgcaaagctctg

SEQ ID NO: 135609 - DNA, 25 bp, Homo sapien
gccagggccaatagaaagaagtcac

SEQ ID NO: 135610 - DNA, 25 bp, Homo sapien
caacgacttgagatagctgccaagg

SEQ ID NO: 135611 - DNA, 25 bp, Homo sapien
gaagtcacaaaatcgcctttagtca

SEQ ID NO: 135612 - DNA, 25 bp, Homo sapien
ccaaggtgttatataatcagtgcca

SEQ ID NO: 135613 - DNA, 25 bp, Homo sapien
gaaaatatgaaaggtgtccatccac

SEQ ID NO: 135614 - DNA, 25 bp, Homo sapien
ctgtatcccaatcaaggaagtcaaa

SEQ ID NO: 135615 - DNA, 25 bp, Homo sapien
tcccaatcaaggaagtcaaaccagg

SEQ ID NO: 135616 - DNA, 25 bp, Homo sapien
tatcccaatcaaggaagtcaaacca

SEQ ID NO: 135617 - DNA, 25 bp, Homo sapien
caatcaaggaagtcaaaccaggcat

SEQ ID NO: 135618 - DNA, 25 bp, Homo sapien
gatccagcagttatatgaccttttt

SEQ ID NO: 135619 - DNA, 25 bp, Homo sapien
tagatccagcagttatatgaccttt

SEQ ID NO: 135620 - DNA, 25 bp, Homo sapien
tattagatccagcagttatatgacc

SEQ ID NO: 135621 - DNA, 25 bp, Homo sapien
tgtcttattagatccagcagttata

SEQ ID NO: 135622 - DNA, 25 bp, Homo sapien
ggcacctgcggccccactgacaacc

SEQ ID NO: 135623 - DNA, 25 bp, Homo sapien
cacctgcggccccactgacaaccat

SEQ ID NO: 135624 - DNA, 25 bp, Homo sapien
gccacagatccacaggcacctgcgg

SEQ ID NO: 135625 - DNA, 25 bp, Homo sapien
gcccagccacagatccacaggcacc

SEQ ID NO: 135626 - DNA, 25 bp, Homo sapien
tcacggagttgttcagccacatacg

SEQ ID NO: 135627 - DNA, 25 bp, Homo sapien
gatatcgctagcctgggaaaagacc

SEQ ID NO: 135628 - DNA, 25 bp, Homo sapien
taatcagacccaaaacatcacgtgc

SEQ ID NO: 135629 - DNA, 25 bp, Homo sapien
caacttatgatagggatatgtccca

SEQ ID NO: 135630 - DNA, 25 bp, Homo sapien
ctgatgttaccaccaacattgtcaa

SEQ ID NO: 135631 - DNA, 25 bp, Homo sapien
ttgcagcatcaaagcccagttctga

SEQ ID NO: 135632 - DNA, 25 bp, Homo sapien
ctgggcatgattcacggagctgttc

SEQ ID NO: 135633 - DNA, 25 bp, Homo sapien
tatcactgtatcactgatgttacca

SEQ ID NO: 135634 - DNA, 25 bp, Homo sapien
aatggaagtaggtatcagcaagctc

SEQ ID NO: 135635 - DNA, 25 bp, Homo sapien
cagcaagctcttttgtatcacttaa

SEQ ID NO: 135636 - DNA, 25 bp, Homo sapien
gagttagggatcagtgcttcagcat

SEQ ID NO: 135637 - DNA, 25 bp, Homo sapien
taatcctttctgtcaactagttcga

SEQ ID NO: 135638 - DNA, 25 bp, Homo sapien
gggaggataaggcacatctttgttg

SEQ ID NO: 135639 - DNA, 25 bp, Homo sapien
tgttgtactgagaaatttgaccaca

SEQ ID NO: 135640 - DNA, 25 bp, Homo sapien
ctttctttctggattgcctctatag

SEQ ID NO: 135641 - DNA, 25 bp, Homo sapien
tttctggattgcctctatagcaggg

SEQ ID NO: 135642 - DNA, 25 bp, Homo sapien
tgtagaatgccaggctcaaatttgt

SEQ ID NO: 135643 - DNA, 25 bp, Homo sapien
gctgtagaatgccaggctcaaattt

SEQ ID NO: 135644 - DNA, 25 bp, Homo sapien
cagctgtagaatgccaggctcaaat

SEQ ID NO: 135645 - DNA, 25 bp, Homo sapien
tagaatgccaggctcaaatttgtct

SEQ ID NO: 135646 - DNA, 25 bp, Homo sapien
ctcccatgttttccaacccatttat

SEQ ID NO: 135647 - DNA, 25 bp, Homo sapien
tataataagtctacattcatcttac

SEQ ID NO: 135648 - DNA, 25 bp, Homo sapien
atataataagtctacattcatctta

SEQ ID NO: 135649 - DNA, 25 bp, Homo sapien
cctgtcatcatggactggaatgcag

SEQ ID NO: 135650 - DNA, 25 bp, Homo sapien
tcctgtcatcatggactggaatgca

SEQ ID NO: 135651 - DNA, 25 bp, Homo sapien
ctcctgtcatcatggactggaatgc

SEQ ID NO: 135652 - DNA, 25 bp, Homo sapien
aaatgcaaactatctgctttccaat

SEQ ID NO: 135653 - DNA, 25 bp, Homo sapien
gaaatgcaaactatctgctttccaa

SEQ ID NO: 135654 - DNA, 25 bp, Homo sapien
ctgaaatgcaaactatctgctttcc

SEQ ID NO: 135655 - DNA, 25 bp, Homo sapien
tgaaatgcaaactatctgctttcca

SEQ ID NO: 135656 - DNA, 25 bp, Homo sapien
tttacaaagtgcctctcaagcgttc

SEQ ID NO: 135657 - DNA, 25 bp, Homo sapien
atcagatcatgtaaaacgtttccag

SEQ ID NO: 135658 - DNA, 25 bp, Homo sapien
aatgattgtatcaaataccctatgc

SEQ ID NO: 135659 - DNA, 25 bp, Homo sapien
aaaacctattgtgtatgatccatta

SEQ ID NO: 135660 - DNA, 25 bp, Homo sapien
gatcctctggagtaaatcttgtcaa

SEQ ID NO: 135661 - DNA, 25 bp, Homo sapien
tggcaaatacaaagagatgatcctc

SEQ ID NO: 135662 - DNA, 25 bp, Homo sapien
tacaggcttgagacatcaggcccgg

SEQ ID NO: 135663 - DNA, 25 bp, Homo sapien
ttacaacttgacagtatgtgcctgc

SEQ ID NO: 135664 - DNA, 25 bp, Homo sapien
caggcccgcgacgcagggctccgcc

SEQ ID NO: 135665 - DNA, 25 bp, Homo sapien
ccaggcccgcgacgcagggctccgc

SEQ ID NO: 135666 - DNA, 25 bp, Homo sapien
ggcccgcgacgcagggctccgcccc

SEQ ID NO: 135667 - DNA, 25 bp, Homo sapien
aggcccgcgacgcagggctccgccc

SEQ ID NO: 135668 - DNA, 25 bp, Homo sapien
acacccactcgctcgcctcagtgtc

SEQ ID NO: 135669 - DNA, 25 bp, Homo sapien
cacccactcgctcgcctcagtgtcg

SEQ ID NO: 135670 - DNA, 25 bp, Homo sapien
cacacccactcgctcgcctcagtgt

SEQ ID NO: 135671 - DNA, 25 bp, Homo sapien
cccactcgctcgcctcagtgtcgtg

SEQ ID NO: 135672 - DNA, 25 bp, Homo sapien
ctcgagcgcgggacaggaagtttgg

SEQ ID NO: 135673 - DNA, 25 bp, Homo sapien
tccacacacagcgtcttccggctcc

SEQ ID NO: 135674 - DNA, 25 bp, Homo sapien
acacagcgtcttccggctcccgccg

SEQ ID NO: 135675 - DNA, 25 bp, Homo sapien
gtcagtcggtcccgaattccgtcca

SEQ ID NO: 135676 - DNA, 25 bp, Homo sapien
gaattccgtccacacacagcgtctt

SEQ ID NO: 135677 - DNA, 25 bp, Homo sapien
ggccaaagccgcagggcttcagact

SEQ ID NO: 135678 - DNA, 25 bp, Homo sapien
gccgagtaggcagctgtcccttttc

SEQ ID NO: 135679 - DNA, 25 bp, Homo sapien
ggagcaagaacatcgcccctaaaaa

SEQ ID NO: 135680 - DNA, 25 bp, Homo sapien
ccccaaaaccaagcaaaggagcaag

SEQ ID NO: 135681 - DNA, 25 bp, Homo sapien
gctaggtatctccacatgtatatcc

SEQ ID NO: 135682 - DNA, 25 bp, Homo sapien
cacatgtatatccaacagcatctca

SEQ ID NO: 135683 - DNA, 25 bp, Homo sapien
taactgcttgctaggtatctccaca

SEQ ID NO: 135684 - DNA, 25 bp, Homo sapien
catttctaactgcttgctaggtatc

SEQ ID NO: 135685 - DNA, 25 bp, Homo sapien
tcccgtaagatgttgtactaggtgg

SEQ ID NO: 135686 - DNA, 25 bp, Homo sapien
gaaatactatgctcttcccgtaaga

SEQ ID NO: 135687 - DNA, 25 bp, Homo sapien
tatgctcttcccgtaagatgttgta

SEQ ID NO: 135688 - DNA, 25 bp, Homo sapien
gtactaggtgggtaatcaatgtaac

SEQ ID NO: 135689 - DNA, 25 bp, Homo sapien
ctattcaggggacaagttcaaattt

SEQ ID NO: 135690 - DNA, 25 bp, Homo sapien
aagttcaaatttaattcagagccaa

SEQ ID NO: 135691 - DNA, 25 bp, Homo sapien
aaatttaattcagagccaatgatac

SEQ ID NO: 135692 - DNA, 25 bp, Homo sapien
tcaaatttaattcagagccaatgat

SEQ ID NO: 135693 - DNA, 25 bp, Homo sapien
ctggtttggattctaactcatctga

SEQ ID NO: 135694 - DNA, 25 bp, Homo sapien
ctctggtttggattctaactcatct

SEQ ID NO: 135695 - DNA, 25 bp, Homo sapien
ggtttggattctaactcatctgata

SEQ ID NO: 135696 - DNA, 25 bp, Homo sapien
gtttggattctaactcatctgataa

SEQ ID NO: 135697 - DNA, 25 bp, Homo sapien
ccctgtcccaatgggatggacgtat

SEQ ID NO: 135698 - DNA, 25 bp, Homo sapien
gcttctgattctacaagcccctgtc

SEQ ID NO: 135699 - DNA, 25 bp, Homo sapien
cattctgaggcttcagtcacgggaa

SEQ ID NO: 135700 - DNA, 25 bp, Homo sapien
aacattagccgactgcattctgagg

SEQ ID NO: 135701 - DNA, 25 bp, Homo sapien
cactgcagcctgactttccatcctc

SEQ ID NO: 135702 - DNA, 25 bp, Homo sapien
catcctcttctctccatggaacagg

SEQ ID NO: 135703 - DNA, 25 bp, Homo sapien
tcctcttctctccatggaacaggtt

SEQ ID NO: 135704 - DNA, 25 bp, Homo sapien
ctgcagcctgactttccatcctctt

SEQ ID NO: 135705 - DNA, 25 bp, Homo sapien
gaacttccatacggtttccataatg

SEQ ID NO: 135706 - DNA, 25 bp, Homo sapien
ttggaggagttagaatgatttgtag

SEQ ID NO: 135707 - DNA, 25 bp, Homo sapien
ggagttagaatgatttgtagtatca

SEQ ID NO: 135708 - DNA, 25 bp, Homo sapien
gagttagaatgatttgtagtatcat

SEQ ID NO: 135709 - DNA, 25 bp, Homo sapien
tggaggagttagaatgatttgtagt

SEQ ID NO: 135710 - DNA, 25 bp, Homo sapien
tgtacagtctgagctctcgtctcct

SEQ ID NO: 135711 - DNA, 25 bp, Homo sapien
taaaagaagtgctatcacttggctg

SEQ ID NO: 135712 - DNA, 25 bp, Homo sapien
tgcaacaagctagaagactctgaag

SEQ ID NO: 135713 - DNA, 25 bp, Homo sapien
cacttggctgtagatcttgcaacaa

SEQ ID NO: 135714 - DNA, 25 bp, Homo sapien
tgccagttgtgcacgagtagcagca

SEQ ID NO: 135715 - DNA, 25 bp, Homo sapien
catggaatgctactgtctgtgctct

SEQ ID NO: 135716 - DNA, 25 bp, Homo sapien
cactaagtgctcagctgaagagccc

SEQ ID NO: 135717 - DNA, 25 bp, Homo sapien
tgaacccggaggaaccatggaatgc

SEQ ID NO: 135718 - DNA, 25 bp, Homo sapien
cacaaatctggcatgaccaagttat

SEQ ID NO: 135719 - DNA, 25 bp, Homo sapien
gcattaccaaaatctctttgcacag

SEQ ID NO: 135720 - DNA, 25 bp, Homo sapien
tggcaaggaaaatgccgacgggcct

SEQ ID NO: 135721 - DNA, 25 bp, Homo sapien
cagaatactagttggttttgaacac

SEQ ID NO: 135722 - DNA, 25 bp, Homo sapien
gctggccatacaaatgtccggtcac

SEQ ID NO: 135723 - DNA, 25 bp, Homo sapien
cgatgagtcttgaggtggtatttaa

SEQ ID NO: 135724 - DNA, 25 bp, Homo sapien
cacaaccttcaactgtacacttgag

SEQ ID NO: 135725 - DNA, 25 bp, Homo sapien
cagaatcttttgactgcccatcacc

SEQ ID NO: 135726 - DNA, 25 bp, Homo sapien
tgcaggacagatgaaggagcggtca

SEQ ID NO: 135727 - DNA, 25 bp, Homo sapien
caggacagatgaaggagcggtcatt

SEQ ID NO: 135728 - DNA, 25 bp, Homo sapien
ctgcaggacagatgaaggagcggtc

SEQ ID NO: 135729 - DNA, 25 bp, Homo sapien
aggacagatgaaggagcggtcattt

SEQ ID NO: 135730 - DNA, 25 bp, Homo sapien
tgtagtaaactgcttaccacagcca

SEQ ID NO: 135731 - DNA, 25 bp, Homo sapien
tcagcctctgcagcacatagaagct

SEQ ID NO: 135732 - DNA, 25 bp, Homo sapien
tcttcaggtttccagctgtagtaaa

SEQ ID NO: 135733 - DNA, 25 bp, Homo sapien
cagactcatggcacataaagggctt

SEQ ID NO: 135734 - DNA, 25 bp, Homo sapien
accctgccccatttagtgcctagaa

SEQ ID NO: 135735 - DNA, 25 bp, Homo sapien
tacagctctccctgcaggttaggct

SEQ ID NO: 135736 - DNA, 25 bp, Homo sapien
gatattaacatactgtgtgacccag

SEQ ID NO: 135737 - DNA, 25 bp, Homo sapien
gcccaaaatcataactgcgcagtgt

SEQ ID NO: 135738 - DNA, 25 bp, Homo sapien
aacggccacatccttgggcttcaca

SEQ ID NO: 135739 - DNA, 25 bp, Homo sapien
gaacggccacatccttgggcttcac

SEQ ID NO: 135740 - DNA, 25 bp, Homo sapien
gttttcggaggctagaatactcagc

SEQ ID NO: 135741 - DNA, 25 bp, Homo sapien
ctgagtgaaccaccagatgttttcg

SEQ ID NO: 135742 - DNA, 25 bp, Homo sapien
cagatgttttcggaggctagaatac

SEQ ID NO: 135743 - DNA, 25 bp, Homo sapien
gaaccaccagatgttttcggaggct

SEQ ID NO: 135744 - DNA, 25 bp, Homo sapien
tagttgtctttatatcacccccaca

SEQ ID NO: 135745 - DNA, 25 bp, Homo sapien
tctatctttatagtgaacagtttgt

SEQ ID NO: 135746 - DNA, 25 bp, Homo sapien
aagggccttgatttctgattctgtc

SEQ ID NO: 135747 - DNA, 25 bp, Homo sapien
gatgatgagaagctttctatcttta

SEQ ID NO: 135748 - DNA, 25 bp, Homo sapien
gacttctggttgagaggatgagata

SEQ ID NO: 135749 - DNA, 25 bp, Homo sapien
ctgacttctggttgagaggatgaga

SEQ ID NO: 135750 - DNA, 25 bp, Homo sapien
ttctggttgagaggatgagatatat

SEQ ID NO: 135751 - DNA, 25 bp, Homo sapien
cttctggttgagaggatgagatata

SEQ ID NO: 135752 - DNA, 25 bp, Homo sapien
tctaacaagatacaggcttttccct

SEQ ID NO: 135753 - DNA, 25 bp, Homo sapien
caggttgtacctccagtaggctcca

SEQ ID NO: 135754 - DNA, 25 bp, Homo sapien
ggagcagacttcttgaccagactga

SEQ ID NO: 135755 - DNA, 25 bp, Homo sapien
aagccaagttctcatcaggttgtac

SEQ ID NO: 135756 - DNA, 25 bp, Homo sapien
tagtaggctaatctcagcagggttt

SEQ ID NO: 135757 - DNA, 25 bp, Homo sapien
ttttagtaggctaatctcagcaggg

SEQ ID NO: 135758 - DNA, 25 bp, Homo sapien
tttagtaggctaatctcagcagggt

SEQ ID NO: 135759 - DNA, 25 bp, Homo sapien
taggctaatctcagcagggtttcac

SEQ ID NO: 135760 - DNA, 25 bp, Homo sapien
gcagtagcttgctttcctcataagt

SEQ ID NO: 135761 - DNA, 25 bp, Homo sapien
gtagcttgctttcctcataagtaac

SEQ ID NO: 135762 - DNA, 25 bp, Homo sapien
attgtttataactctccaacttcct

SEQ ID NO: 135763 - DNA, 25 bp, Homo sapien
gctttcctcataagtaactttccag

SEQ ID NO: 135764 - DNA, 25 bp, Homo sapien
catagggaaccttataatacaggga

SEQ ID NO: 135765 - DNA, 25 bp, Homo sapien
tagggaaccttataatacagggatc

SEQ ID NO: 135766 - DNA, 25 bp, Homo sapien
ggttcatagggaaccttataataca

SEQ ID NO: 135767 - DNA, 25 bp, Homo sapien
ttcatagggaaccttataatacagg

SEQ ID NO: 135768 - DNA, 25 bp, Homo sapien
gagtcgcacagtacagaagaattcc

SEQ ID NO: 135769 - DNA, 25 bp, Homo sapien
aaatagccctacttgatattagtgg

SEQ ID NO: 135770 - DNA, 25 bp, Homo sapien
ttgcctatgcaaatgatcaaatagc

SEQ ID NO: 135771 - DNA, 25 bp, Homo sapien
tattagtggaagagtccaactaaag

SEQ ID NO: 135772 - DNA, 25 bp, Homo sapien
tgccaacgatgacaacctaacagca

SEQ ID NO: 135773 - DNA, 25 bp, Homo sapien
ttccaactataaggaaccaggactc

SEQ ID NO: 135774 - DNA, 25 bp, Homo sapien
gggcacatggcacccagactgtggt

SEQ ID NO: 135775 - DNA, 25 bp, Homo sapien
gaggctataacaagacaaatgggtc

SEQ ID NO: 135776 - DNA, 25 bp, Homo sapien
gtttcattgagccaagatcgtggac

SEQ ID NO: 135777 - DNA, 25 bp, Homo sapien
attgagccaagatcgtggaccactg

SEQ ID NO: 135778 - DNA, 25 bp, Homo sapien
tcattgagccaagatcgtggaccac

SEQ ID NO: 135779 - DNA, 25 bp, Homo sapien
tttcattgagccaagatcgtggacc

SEQ ID NO: 135780 - DNA, 25 bp, Homo sapien
gtgttcctaatatccccttgtcata

SEQ ID NO: 135781 - DNA, 25 bp, Homo sapien
tcacactggtggctcttacaacata

SEQ ID NO: 135782 - DNA, 25 bp, Homo sapien
tagggtcatcaacattcacactggt

SEQ ID NO: 135783 - DNA, 25 bp, Homo sapien
ataatctaaattgtcctctatgtct

SEQ ID NO: 135784 - DNA, 25 bp, Homo sapien
gacaggaagagaatgaactcaagac

SEQ ID NO: 135785 - DNA, 25 bp, Homo sapien
aaaggacaggaagagaatgaactca

SEQ ID NO: 135786 - DNA, 25 bp, Homo sapien
acaaggaagccaaaaggacaggaag

SEQ ID NO: 135787 - DNA, 25 bp, Homo sapien
aaggacaggaagagaatgaactcaa

SEQ ID NO: 135788 - DNA, 25 bp, Homo sapien
aggtgatgctttctcatatgcacat

SEQ ID NO: 135789 - DNA, 25 bp, Homo sapien
tctcatatgcacattcctgcttcca

SEQ ID NO: 135790 - DNA, 25 bp, Homo sapien
acagacttggcactgatgaggcttc

SEQ ID NO: 135791 - DNA, 25 bp, Homo sapien
ccacagacttggcactgatgaggct

SEQ ID NO: 135792 - DNA, 25 bp, Homo sapien
tagtacagcgttccactatgcccac

SEQ ID NO: 135793 - DNA, 25 bp, Homo sapien
agaagtagtacagcgttccactatg

SEQ ID NO: 135794 - DNA, 25 bp, Homo sapien
aagtagtacagcgttccactatgcc

SEQ ID NO: 135795 - DNA, 25 bp, Homo sapien
ctagaagtagtacagcgttccacta

SEQ ID NO: 135796 - DNA, 25 bp, Homo sapien
tctctttcattactagaagttaacc

SEQ ID NO: 135797 - DNA, 25 bp, Homo sapien
ctgcacagagaataggttgtgagag

SEQ ID NO: 135798 - DNA, 25 bp, Homo sapien
tgtgagagacatacagcaatcaagg

SEQ ID NO: 135799 - DNA, 25 bp, Homo sapien
gaataggttgtgagagacatacagc

SEQ ID NO: 135800 - DNA, 25 bp, Homo sapien
tcatcaactcccaggatagaattgg

SEQ ID NO: 135801 - DNA, 25 bp, Homo sapien
aaactactgcccattagtggctcag

SEQ ID NO: 135802 - DNA, 25 bp, Homo sapien
gggctgggaattcatagacaccagg

SEQ ID NO: 135803 - DNA, 25 bp, Homo sapien
catagacaccaggtttttactgggt

SEQ ID NO: 135804 - DNA, 25 bp, Homo sapien
ttttgaaggtatggagaaattgctt

SEQ ID NO: 135805 - DNA, 25 bp, Homo sapien
cagaagatatggcttttgaaggtat

SEQ ID NO: 135806 - DNA, 25 bp, Homo sapien
gaaatttctataccagagaggagca

SEQ ID NO: 135807 - DNA, 25 bp, Homo sapien
tatatctcctctgtaaaacctggtt

SEQ ID NO: 135808 - DNA, 25 bp, Homo sapien
gttctttcccatatatatgtaagct

SEQ ID NO: 135809 - DNA, 25 bp, Homo sapien
ttcccatatatatgtaagctttcac

SEQ ID NO: 135810 - DNA, 25 bp, Homo sapien
ccatatatatgtaagctttcacttc

SEQ ID NO: 135811 - DNA, 25 bp, Homo sapien
tatatgtaagctttcacttctcaac

SEQ ID NO: 135812 - DNA, 25 bp, Homo sapien
gaacgtggggatccttcagcaagca

SEQ ID NO: 135813 - DNA, 25 bp, Homo sapien
gatttactgcagttaagacagaaac

SEQ ID NO: 135814 - DNA, 25 bp, Homo sapien
gtgatgtgtcacatcaggcactgaa

SEQ ID NO: 135815 - DNA, 25 bp, Homo sapien
cttcatatgattgcctccctgactg

SEQ ID NO: 135816 - DNA, 25 bp, Homo sapien
attccccacatgaattgtcacagaa

SEQ ID NO: 135817 - DNA, 25 bp, Homo sapien
cattccccacatgaattgtcacaga

SEQ ID NO: 135818 - DNA, 25 bp, Homo sapien
ttccccacatgaattgtcacagaaa

SEQ ID NO: 135819 - DNA, 25 bp, Homo sapien
cgtgggtttatcatactagtctctc

SEQ ID NO: 135820 - DNA, 25 bp, Homo sapien
tcagccgtaacttcgacttcgacgt

SEQ ID NO: 135821 - DNA, 25 bp, Homo sapien
tatcatactagtctctctctcactg

SEQ ID NO: 135822 - DNA, 25 bp, Homo sapien
cttcgacttcgacgtgggtttatca

SEQ ID NO: 135823 - DNA, 25 bp, Homo sapien
ttgaaatactccatcataaacagca

SEQ ID NO: 135824 - DNA, 25 bp, Homo sapien
atgcctacaatttgctttgaaatac

SEQ ID NO: 135825 - DNA, 25 bp, Homo sapien
tgttagaggcatatactgaaatata

SEQ ID NO: 135826 - DNA, 25 bp, Homo sapien
acaagaacagtataaagttaattgt

SEQ ID NO: 135827 - DNA, 25 bp, Homo sapien
cctgggcaacatagcaagactccac

SEQ ID NO: 135828 - DNA, 25 bp, Homo sapien
agaaccgcttgaattcgggaggtag

SEQ ID NO: 135829 - DNA, 25 bp, Homo sapien
aggcagaagaaccgcttgaattcgg

SEQ ID NO: 135830 - DNA, 25 bp, Homo sapien
cagaagaaccgcttgaattcgggag

SEQ ID NO: 135831 - DNA, 25 bp, Homo sapien
tcagttaaatctccttggtttagta

SEQ ID NO: 135832 - DNA, 25 bp, Homo sapien
tgttcccagtatacgcattttgaga

SEQ ID NO: 135833 - DNA, 25 bp, Homo sapien
tcttactcaggttgctaaagggaga

SEQ ID NO: 135834 - DNA, 25 bp, Homo sapien
tctggttctgttgtgggctaaggca

SEQ ID NO: 135835 - DNA, 25 bp, Homo sapien
gatagagttgctcttccaggagtca

SEQ ID NO: 135836 - DNA, 25 bp, Homo sapien
aagcaaagtgaccaagtagaagtgt

SEQ ID NO: 135837 - DNA, 25 bp, Homo sapien
tgaaatccctcttaacatgctactg

SEQ ID NO: 135838 - DNA, 25 bp, Homo sapien
tcttaacatgctactgtatgttcca

SEQ ID NO: 135839 - DNA, 25 bp, Homo sapien
gtataggacaagatagtacctcagc

SEQ ID NO: 135840 - DNA, 25 bp, Homo sapien
ttaaaggaaaacctgaatctctgca

SEQ ID NO: 135841 - DNA, 25 bp, Homo sapien
ggaaaacctgaatctctgcatcatg

SEQ ID NO: 135842 - DNA, 25 bp, Homo sapien
aaacctgaatctctgcatcatgtaa

SEQ ID NO: 135843 - DNA, 25 bp, Homo sapien
cctgaatctctgcatcatgtaattt

SEQ ID NO: 135844 - DNA, 25 bp, Homo sapien
ggatggatcggaggctgccctggaa

SEQ ID NO: 135845 - DNA, 25 bp, Homo sapien
aaccagacgccaaagctagaaaggg

SEQ ID NO: 135846 - DNA, 25 bp, Homo sapien
tctgtccagctgaaatgaccgtggg

SEQ ID NO: 135847 - DNA, 25 bp, Homo sapien
cctggaagccaaccagacgccaaag

SEQ ID NO: 135848 - DNA, 25 bp, Homo sapien
aggcccacctacgtagtgcgtccgg

SEQ ID NO: 135849 - DNA, 25 bp, Homo sapien
gtcgcactcagaactcccgcaggcc

SEQ ID NO: 135850 - DNA, 25 bp, Homo sapien
cctgcgccgtcgcactcagaactcc

SEQ ID NO: 135851 - DNA, 25 bp, Homo sapien
cctacgtagtgcgtccggagcagag

SEQ ID NO: 135852 - DNA, 25 bp, Homo sapien
tgtggggagctgcacgcacagcccc

SEQ ID NO: 135853 - DNA, 25 bp, Homo sapien
atcggctgacaagccgggccgccat

SEQ ID NO: 135854 - DNA, 25 bp, Homo sapien
ctgttgaggcgccggaccacctgcg

SEQ ID NO: 135855 - DNA, 25 bp, Homo sapien
gccaggacaccagcgggccgctgtg

SEQ ID NO: 135856 - DNA, 25 bp, Homo sapien
ctccacccgacaccaccacgtcata

SEQ ID NO: 135857 - DNA, 25 bp, Homo sapien
acccgacaccaccacgtcatacacg

SEQ ID NO: 135858 - DNA, 25 bp, Homo sapien
gacaccaccacgtcatacacggtgt

SEQ ID NO: 135859 - DNA, 25 bp, Homo sapien
ccgacaccaccacgtcatacacggt

SEQ ID NO: 135860 - DNA, 25 bp, Homo sapien
tctttgggcaagtcgtgctagggct

SEQ ID NO: 135861 - DNA, 25 bp, Homo sapien
caagtcgtgctagggctctcacggc

SEQ ID NO: 135862 - DNA, 25 bp, Homo sapien
gtgctagggctctcacggctctcat

SEQ ID NO: 135863 - DNA, 25 bp, Homo sapien
acggctctcatcgtgcctccgcggc

SEQ ID NO: 135864 - DNA, 25 bp, Homo sapien
tggacctgcttcgagcaacaggatt

SEQ ID NO: 135865 - DNA, 25 bp, Homo sapien
cagtactttctttggacctgcttcg

SEQ ID NO: 135866 - DNA, 25 bp, Homo sapien
cctgttgctgtaagtttctgacaat

SEQ ID NO: 135867 - DNA, 25 bp, Homo sapien
gcaacaggattttcttgtcatgaaa

SEQ ID NO: 135868 - DNA, 25 bp, Homo sapien
cagagccaggggaaatggagctgac

SEQ ID NO: 135869 - DNA, 25 bp, Homo sapien
gcagagccaggggaaatggagctga

SEQ ID NO: 135870 - DNA, 25 bp, Homo sapien
tactgagaagcgttgcagagccagg

SEQ ID NO: 135871 - DNA, 25 bp, Homo sapien
gttgcagagccaggggaaatggagc

SEQ ID NO: 135872 - DNA, 25 bp, Homo sapien
tctagcagacctaatgacaatttgc

SEQ ID NO: 135873 - DNA, 25 bp, Homo sapien
tggtctgagggaaacatctagcaga

SEQ ID NO: 135874 - DNA, 25 bp, Homo sapien
gaaaccaatggacaaagtccttggc

SEQ ID NO: 135875 - DNA, 25 bp, Homo sapien
gccaggtagtagtaagcattatgaa

SEQ ID NO: 135876 - DNA, 25 bp, Homo sapien
atctcatgttgcagatatggtccca

SEQ ID NO: 135877 - DNA, 25 bp, Homo sapien
gcattcgccgaaaggctctgtatct

SEQ ID NO: 135878 - DNA, 25 bp, Homo sapien
ctgcattcgccgaaaggctctgtat

SEQ ID NO: 135879 - DNA, 25 bp, Homo sapien
tctgtatctcatgttgcagatatgg

SEQ ID NO: 135880 - DNA, 25 bp, Homo sapien
aatcacaatttgtcagcctctctgg

SEQ ID NO: 135881 - DNA, 25 bp, Homo sapien
cacttcctcggactgaatgtgaacc

SEQ ID NO: 135882 - DNA, 25 bp, Homo sapien
tccgatatcttaagacagaccaaga

SEQ ID NO: 135883 - DNA, 25 bp, Homo sapien
gagggaaacatcactccaatcagaa

SEQ ID NO: 135884 - DNA, 25 bp, Homo sapien
tcaaacattatcagggcctctgagc

SEQ ID NO: 135885 - DNA, 25 bp, Homo sapien
gatgacatcattctccacgatatag

SEQ ID NO: 135886 - DNA, 25 bp, Homo sapien
cacagcctccaactgcttagtgaga

SEQ ID NO: 135887 - DNA, 25 bp, Homo sapien
ttctccacgatatagcccatgtcat

SEQ ID NO: 135888 - DNA, 25 bp, Homo sapien
gcacccggccatcagaggatttctt

SEQ ID NO: 135889 - DNA, 25 bp, Homo sapien
ttccagtaagtcctaagcagttcac

SEQ ID NO: 135890 - DNA, 25 bp, Homo sapien
tcacttcccaatgaatgcaaggtgg

SEQ ID NO: 135891 - DNA, 25 bp, Homo sapien
tccagcaccgtgaaataatcatcag

SEQ ID NO: 135892 - DNA, 25 bp, Homo sapien
tgcaaccactactacaatgagatac

SEQ ID NO: 135893 - DNA, 25 bp, Homo sapien
gggaaagtgaaattgtatagcctct

SEQ ID NO: 135894 - DNA, 25 bp, Homo sapien
cccttatagactggtgggaaagtga

SEQ ID NO: 135895 - DNA, 25 bp, Homo sapien
ttgtatagcctcttcagaaaagttt

SEQ ID NO: 135896 - DNA, 25 bp, Homo sapien
taagctcgctgtagaagtctggaca

SEQ ID NO: 135897 - DNA, 25 bp, Homo sapien
cagtcatactgtcaacaaagcgatt

SEQ ID NO: 135898 - DNA, 25 bp, Homo sapien
cacacaagtgtgatcatatgaccca

SEQ ID NO: 135899 - DNA, 25 bp, Homo sapien
ccagacaatttcctatgcatgtaca

SEQ ID NO: 135900 - DNA, 25 bp, Homo sapien
ctggagtcggccataggaaatggac

SEQ ID NO: 135901 - DNA, 25 bp, Homo sapien
tcacctagggtaatatgaacccaag

SEQ ID NO: 135902 - DNA, 25 bp, Homo sapien
tgctcctgtagagaaccgtcactcg

SEQ ID NO: 135903 - DNA, 25 bp, Homo sapien
gacaaggccaggtatagcgaatggc

SEQ ID NO: 135904 - DNA, 25 bp, Homo sapien
aagacccctagcaaaataagaatct

SEQ ID NO: 135905 - DNA, 25 bp, Homo sapien
gaatggctaccatgcaaaaagggaa

SEQ ID NO: 135906 - DNA, 25 bp, Homo sapien
ctaagacggcccatgagattgctcc

SEQ ID NO: 135907 - DNA, 25 bp, Homo sapien
taaatcgaaaaccagagtccctaga

SEQ ID NO: 135908 - DNA, 25 bp, Homo sapien
tgtggcaggataattccatcaggcc

SEQ ID NO: 135909 - DNA, 25 bp, Homo sapien
caacagcctgccgtactccggagtt

SEQ ID NO: 135910 - DNA, 25 bp, Homo sapien
ggtcatagttccagctcacattctg

SEQ ID NO: 135911 - DNA, 25 bp, Homo sapien
tactccggagttgtgaccatctgca

SEQ ID NO: 135912 - DNA, 25 bp, Homo sapien
gagtagccacaacagcagactggtc

SEQ ID NO: 135913 - DNA, 25 bp, Homo sapien
ttctctgtgaagtacctagtgccta

SEQ ID NO: 135914 - DNA, 25 bp, Homo sapien
gtacctagtgcctatgaataaagtc

SEQ ID NO: 135915 - DNA, 25 bp, Homo sapien
gaaaagtttctctgtgaagtaccta

SEQ ID NO: 135916 - DNA, 25 bp, Homo sapien
acctagtgcctatgaataaagtccc

SEQ ID NO: 135917 - DNA, 25 bp, Homo sapien
gccaggctacgttgttttctgtggc

SEQ ID NO: 135918 - DNA, 25 bp, Homo sapien
ggaagaaatctctgccaggctacgt

SEQ ID NO: 135919 - DNA, 25 bp, Homo sapien
agcagagcaataggcccagagggaa

SEQ ID NO: 135920 - DNA, 25 bp, Homo sapien
cagagggaagaaatctctgccaggc

SEQ ID NO: 135921 - DNA, 25 bp, Homo sapien
aaaccaaggaactcaaggtgtctga

SEQ ID NO: 135922 - DNA, 25 bp, Homo sapien
tcatgggacgtggaccaaaccaagg

SEQ ID NO: 135923 - DNA, 25 bp, Homo sapien
tcatccatgctaactagctctgctg

SEQ ID NO: 135924 - DNA, 25 bp, Homo sapien
aaaggcagagttaacggcatccaca

SEQ ID NO: 135925 - DNA, 25 bp, Homo sapien
tgcactgcagaggacctagacctgt

SEQ ID NO: 135926 - DNA, 25 bp, Homo sapien
ccagcctggcaaggatccgtttcaa

SEQ ID NO: 135927 - DNA, 25 bp, Homo sapien
tgatcttgacaagtgataagcccct

SEQ ID NO: 135928 - DNA, 25 bp, Homo sapien
ccaaactgtacatgagctggcccct

SEQ ID NO: 135929 - DNA, 25 bp, Homo sapien
tgaagtccgtgtggtcagcatcact

SEQ ID NO: 135930 - DNA, 25 bp, Homo sapien
cagaactcggcttttggcatccacc

SEQ ID NO: 135931 - DNA, 25 bp, Homo sapien
caccagctgtgtcgatgaagtccgt

SEQ ID NO: 135932 - DNA, 25 bp, Homo sapien
gacagcatactgcagcatggcacca

SEQ ID NO: 135933 - DNA, 25 bp, Homo sapien
gtggccctgctctgttatcgtctta

SEQ ID NO: 135934 - DNA, 25 bp, Homo sapien
agtggccctgctctgttatcgtctt

SEQ ID NO: 135935 - DNA, 25 bp, Homo sapien
tggccctgctctgttatcgtcttac

SEQ ID NO: 135936 - DNA, 25 bp, Homo sapien
gaaggctgccgtactgaggtgatgg

SEQ ID NO: 135937 - DNA, 25 bp, Homo sapien
ccctgtcctgcaagcggatggactc

SEQ ID NO: 135938 - DNA, 25 bp, Homo sapien
tcctgcaagcggatggactctgtgg

SEQ ID NO: 135939 - DNA, 25 bp, Homo sapien
ggtgatgggccaagctggagatatc

SEQ ID NO: 135940 - DNA, 25 bp, Homo sapien
tactgtgggccctgatcttgcctaa

SEQ ID NO: 135941 - DNA, 25 bp, Homo sapien
tacttccccatagtatctgaatcct

SEQ ID NO: 135942 - DNA, 25 bp, Homo sapien
ttccatctcctagcaagccagatat

SEQ ID NO: 135943 - DNA, 25 bp, Homo sapien
tcttgcctaactatatgacctctgg

SEQ ID NO: 135944 - DNA, 25 bp, Homo sapien
atttgtggcctgcaagccccacgtc

SEQ ID NO: 135945 - DNA, 25 bp, Homo sapien
gcactggtagaatagagccttttta

SEQ ID NO: 135946 - DNA, 25 bp, Homo sapien
gagtggagacactgcatttgtggcc

SEQ ID NO: 135947 - DNA, 25 bp, Homo sapien
ctttttagtaagtctgtagcagcca

SEQ ID NO: 135948 - DNA, 25 bp, Homo sapien
ttgcttagatgtgggccgtaacacc

SEQ ID NO: 135949 - DNA, 25 bp, Homo sapien
tcaaagaaattaagagctgtgggcc

SEQ ID NO: 135950 - DNA, 25 bp, Homo sapien
cccagtctgagtaacaatgatgtga

SEQ ID NO: 135951 - DNA, 25 bp, Homo sapien
tgtaacccttgggaaggcaaacaca

SEQ ID NO: 135952 - DNA, 25 bp, Homo sapien
gataataatcacgtaggtattcttc

SEQ ID NO: 135953 - DNA, 25 bp, Homo sapien
atcacgtaggtattcttcccaagtg

SEQ ID NO: 135954 - DNA, 25 bp, Homo sapien
tgtagataataatcacgtaggtatt

SEQ ID NO: 135955 - DNA, 25 bp, Homo sapien
tacatatacacacgttttagagaca

SEQ ID NO: 135956 - DNA, 25 bp, Homo sapien
acgtaatctttctttaggagaggag

SEQ ID NO: 135957 - DNA, 25 bp, Homo sapien
caacgtaatctttctttaggagagg

SEQ ID NO: 135958 - DNA, 25 bp, Homo sapien
catcaacgtaatctttctttaggag

SEQ ID NO: 135959 - DNA, 25 bp, Homo sapien
ttcatcaacgtaatctttctttagg

SEQ ID NO: 135960 - DNA, 25 bp, Homo sapien
tgtataaatttatgaccaacattaa

SEQ ID NO: 135961 - DNA, 25 bp, Homo sapien
agtctaattcttacctctatcaaaa

SEQ ID NO: 135962 - DNA, 25 bp, Homo sapien
aaaatgcatcgagtctaattcttac

SEQ ID NO: 135963 - DNA, 25 bp, Homo sapien
ctaacaaaaatgcatcgagtctaat

SEQ ID NO: 135964 - DNA, 25 bp, Homo sapien
tcctgaggtcttcggatctgtgcaa

SEQ ID NO: 135965 - DNA, 25 bp, Homo sapien
taatcggtttcccttgtgatctggt

SEQ ID NO: 135966 - DNA, 25 bp, Homo sapien
tagcattaatgagacctggttttcc

SEQ ID NO: 135967 - DNA, 25 bp, Homo sapien
ttattaaaccgacagtggtgtccca

SEQ ID NO: 135968 - DNA, 25 bp, Homo sapien
ttgtactcagtgcagaattccctag

SEQ ID NO: 135969 - DNA, 25 bp, Homo sapien
aggacatggcctggtacgtgacaga

SEQ ID NO: 135970 - DNA, 25 bp, Homo sapien
tttgtcaacaaaagtagggtgccag

SEQ ID NO: 135971 - DNA, 25 bp, Homo sapien
ggatgttaagtatgcctggccctca

SEQ ID NO: 135972 - DNA, 25 bp, Homo sapien
gagtccttccgagttgacattcacc

SEQ ID NO: 135973 - DNA, 25 bp, Homo sapien
aacaagagtccttccgagttgacat

SEQ ID NO: 135974 - DNA, 25 bp, Homo sapien
tctgctgcaacaagagtccttccga

SEQ ID NO: 135975 - DNA, 25 bp, Homo sapien
ccttccgagttgacattcacctgca

SEQ ID NO: 135976 - DNA, 25 bp, Homo sapien
tcccaacaaggccaagtgacctaag

SEQ ID NO: 135977 - DNA, 25 bp, Homo sapien
cgtatctaccatcccacacttgagg

SEQ ID NO: 135978 - DNA, 25 bp, Homo sapien
tgacctaagttaggccacagggcta

SEQ ID NO: 135979 - DNA, 25 bp, Homo sapien
cacagggctagcaagcaagtcttct

SEQ ID NO: 135980 - DNA, 25 bp, Homo sapien
acattcgctttttcctccacttagc

SEQ ID NO: 135981 - DNA, 25 bp, Homo sapien
gtgcttcagactgcacattcgcttt

SEQ ID NO: 135982 - DNA, 25 bp, Homo sapien
tgcttcagactgcacattcgctttt

SEQ ID NO: 135983 - DNA, 25 bp, Homo sapien
tttcctccacttagctctcatgatg

SEQ ID NO: 135984 - DNA, 25 bp, Homo sapien
cgtatggttgttatactcggccaca

SEQ ID NO: 135985 - DNA, 25 bp, Homo sapien
cagcagaagagatgatttatcgtat

SEQ ID NO: 135986 - DNA, 25 bp, Homo sapien
gaccaacatgggcagttttggttat

SEQ ID NO: 135987 - DNA, 25 bp, Homo sapien
catgggcagttttggttatgagcaa

SEQ ID NO: 135988 - DNA, 25 bp, Homo sapien
taggtcctgtgtggccgatacttcc

SEQ ID NO: 135989 - DNA, 25 bp, Homo sapien
tccatttgctaataccggtccgcag

SEQ ID NO: 135990 - DNA, 25 bp, Homo sapien
taggcagtcgaggactttcccgagg

SEQ ID NO: 135991 - DNA, 25 bp, Homo sapien
tgaaatcccgaatacacctctgaaa

SEQ ID NO: 135992 - DNA, 25 bp, Homo sapien
ggcactgccttactcctttgggttg

SEQ ID NO: 135993 - DNA, 25 bp, Homo sapien
cactgccttactcctttgggttgca

SEQ ID NO: 135994 - DNA, 25 bp, Homo sapien
ccggcactgccttactcctttgggt

SEQ ID NO: 135995 - DNA, 25 bp, Homo sapien
cgctcccggcactgccttactcctt

SEQ ID NO: 135996 - DNA, 25 bp, Homo sapien
tagcgcttcgtcctgcggcctgggt

SEQ ID NO: 135997 - DNA, 25 bp, Homo sapien
gatcctctacgtggggcccgggctc

SEQ ID NO: 135998 - DNA, 25 bp, Homo sapien
cctgggtgtgtcaggagtcgctgcg

SEQ ID NO: 135999 - DNA, 25 bp, Homo sapien
cgcgcgcgcggtgagtgtgcgagtg

SEQ ID NO: 136000 - DNA, 25 bp, Homo sapien
caagggaaccgggacgccgagctgg

SEQ ID NO: 136001 - DNA, 25 bp, Homo sapien
ccaagggaaccgggacgccgagctg

SEQ ID NO: 136002 - DNA, 25 bp, Homo sapien
ccaggggctccgctgtcgtagttgc

SEQ ID NO: 136003 - DNA, 25 bp, Homo sapien
cgctgtcgtagttgcccagccgcgg

SEQ ID NO: 136004 - DNA, 25 bp, Homo sapien
gctgtcgtagttgcccagccgcggc

SEQ ID NO: 136005 - DNA, 25 bp, Homo sapien
ggctccgctgtcgtagttgcccagc

SEQ ID NO: 136006 - DNA, 25 bp, Homo sapien
tgctcttgcctttctttttgtcctt

SEQ ID NO: 136007 - DNA, 25 bp, Homo sapien
cgtgtctttgcctttgctcttgcct

SEQ ID NO: 136008 - DNA, 25 bp, Homo sapien
cctttgctcttgcctttctttttgt

SEQ ID NO: 136009 - DNA, 25 bp, Homo sapien
tttgctcttgcctttctttttgtcc

SEQ ID NO: 136010 - DNA, 25 bp, Homo sapien
gtagcaatctagcagcaactccagg

SEQ ID NO: 136011 - DNA, 25 bp, Homo sapien
tatgactccaacgtgtccagaaacc

SEQ ID NO: 136012 - DNA, 25 bp, Homo sapien
ccatatatggtgttgttgctggaca

SEQ ID NO: 136013 - DNA, 25 bp, Homo sapien
agagatctctgaaaaggcccaagga

SEQ ID NO: 136014 - DNA, 25 bp, Homo sapien
ttctcaaacaatgggtcatggaaaa

SEQ ID NO: 136015 - DNA, 25 bp, Homo sapien
tctaggaatgtgataagcccttggc

SEQ ID NO: 136016 - DNA, 25 bp, Homo sapien
catggaaaatccaaggaataaggtc

SEQ ID NO: 136017 - DNA, 25 bp, Homo sapien
taagggctagactaactgtgcagtt

SEQ ID NO: 136018 - DNA, 25 bp, Homo sapien
ctttctggcatgatttaggcactag

SEQ ID NO: 136019 - DNA, 25 bp, Homo sapien
tacatgtggacctttctatactgcc

SEQ ID NO: 136020 - DNA, 25 bp, Homo sapien
ccccttatatatggtaggtaccatg

SEQ ID NO: 136021 - DNA, 25 bp, Homo sapien
tcaaattaaggccagctccattccc

SEQ ID NO: 136022 - DNA, 25 bp, Homo sapien
gcttcttcaggtaacttaatactga

SEQ ID NO: 136023 - DNA, 25 bp, Homo sapien
gccagtatccgtgaagtatcacgat

SEQ ID NO: 136024 - DNA, 25 bp, Homo sapien
tatcacgatacttaatcctagagag

SEQ ID NO: 136025 - DNA, 25 bp, Homo sapien
ttactttttgccagtatccgtgaag

SEQ ID NO: 136026 - DNA, 25 bp, Homo sapien
ggcacatgcagccatgcccggttaa

SEQ ID NO: 136027 - DNA, 25 bp, Homo sapien
cacctcagcctcccaaagtggtggg

SEQ ID NO: 136028 - DNA, 25 bp, Homo sapien
ataggcacatgcagccatgcccggt

SEQ ID NO: 136029 - DNA, 25 bp, Homo sapien
acctcagcctcccaaagtggtggga

SEQ ID NO: 136030 - DNA, 25 bp, Homo sapien
ccaccgcccccagtctctctctttt

SEQ ID NO: 136031 - DNA, 25 bp, Homo sapien
agccaccgcccccagtctctctctt

SEQ ID NO: 136032 - DNA, 25 bp, Homo sapien
aaactgctgacctcagtaatccacc

SEQ ID NO: 136033 - DNA, 25 bp, Homo sapien
tgagccaccgcccccagtctctctc

SEQ ID NO: 136034 - DNA, 25 bp, Homo sapien
taaggttgtgtctgcccactttctc

SEQ ID NO: 136035 - DNA, 25 bp, Homo sapien
ggttgggcttagctgatgcttcttc

SEQ ID NO: 136036 - DNA, 25 bp, Homo sapien
tacaacccttgatcatgcgttgcat

SEQ ID NO: 136037 - DNA, 25 bp, Homo sapien
tatctgtcatgtgtcttagtcccct

SEQ ID NO: 136038 - DNA, 25 bp, Homo sapien
ttgtttcatttaattgctgtttcag

SEQ ID NO: 136039 - DNA, 25 bp, Homo sapien
tttcctttgtttcatttaattgctg

SEQ ID NO: 136040 - DNA, 25 bp, Homo sapien
caatttatccttctcctcttgggct

SEQ ID NO: 136041 - DNA, 25 bp, Homo sapien
tttcatttaattgctgtttcagttt

SEQ ID NO: 136042 - DNA, 25 bp, Homo sapien
caactatccatcaaaaagggactgc

SEQ ID NO: 136043 - DNA, 25 bp, Homo sapien
acaacccaactatccatcaaaaagg

SEQ ID NO: 136044 - DNA, 25 bp, Homo sapien
ctatccatcaaaaagggactgctat

SEQ ID NO: 136045 - DNA, 25 bp, Homo sapien
cccaactatccatcaaaaagggact

SEQ ID NO: 136046 - DNA, 25 bp, Homo sapien
tctgtgtgaatcatgccaatttctt

SEQ ID NO: 136047 - DNA, 25 bp, Homo sapien
ttgatggaactgtccctctagttca

SEQ ID NO: 136048 - DNA, 25 bp, Homo sapien
cttctggaattgtcttactgctttc

SEQ ID NO: 136049 - DNA, 25 bp, Homo sapien
ctttcagctctgtgtgaatcatgcc

SEQ ID NO: 136050 - DNA, 25 bp, Homo sapien
ctcctgatgtatccgctctgtgttt

SEQ ID NO: 136051 - DNA, 25 bp, Homo sapien
taagagtctcctgatgtatccgctc

SEQ ID NO: 136052 - DNA, 25 bp, Homo sapien
agtcttctaagagtctcctgatgta

SEQ ID NO: 136053 - DNA, 25 bp, Homo sapien
agtctcctgatgtatccgctctgtg

SEQ ID NO: 136054 - DNA, 25 bp, Homo sapien
cttctattaagataccaaatggaag

SEQ ID NO: 136055 - DNA, 25 bp, Homo sapien
taagataccaaatggaaggctgatg

SEQ ID NO: 136056 - DNA, 25 bp, Homo sapien
tattaagataccaaatggaaggctg

SEQ ID NO: 136057 - DNA, 25 bp, Homo sapien
ataccaaatggaaggctgatgtttc

SEQ ID NO: 136058 - DNA, 25 bp, Homo sapien
attttccctcattgtattgtgctat

SEQ ID NO: 136059 - DNA, 25 bp, Homo sapien
tattttccctcattgtattgtgcta

SEQ ID NO: 136060 - DNA, 25 bp, Homo sapien
aatagcctcatggtgggctctctct

SEQ ID NO: 136061 - DNA, 25 bp, Homo sapien
caatagcctcatggtgggctctctc

SEQ ID NO: 136062 - DNA, 25 bp, Homo sapien
acaatagcctcatggtgggctctct

SEQ ID NO: 136063 - DNA, 25 bp, Homo sapien
atttcttccagcatcgttcaattgc

SEQ ID NO: 136064 - DNA, 25 bp, Homo sapien
taaaagtaaagtatgactctcttgc

SEQ ID NO: 136065 - DNA, 25 bp, Homo sapien
taaagtatgactctcttgcaacttc

SEQ ID NO: 136066 - DNA, 25 bp, Homo sapien
aagtaaagtatgactctcttgcaac

SEQ ID NO: 136067 - DNA, 25 bp, Homo sapien
gtaaaagtaaagtatgactctcttg

SEQ ID NO: 136068 - DNA, 25 bp, Homo sapien
tattctaaggtagtagaggataagg

SEQ ID NO: 136069 - DNA, 25 bp, Homo sapien
aaaaagtgcatcatccagacagatg

SEQ ID NO: 136070 - DNA, 25 bp, Homo sapien
ctttataagttgagtctaatgcttc

SEQ ID NO: 136071 - DNA, 25 bp, Homo sapien
aatggtctcattgtccttatatatc

SEQ ID NO: 136072 - DNA, 25 bp, Homo sapien
tgatgtcaggactgttactcaccgc

SEQ ID NO: 136073 - DNA, 25 bp, Homo sapien
ttactcaccgctaaatgtattccta

SEQ ID NO: 136074 - DNA, 25 bp, Homo sapien
ttcctaagtgactcagggaccaact

SEQ ID NO: 136075 - DNA, 25 bp, Homo sapien
tattcctaagtgactcagggaccaa

SEQ ID NO: 136076 - DNA, 25 bp, Homo sapien
taaggaagctgagtgtctattaact

SEQ ID NO: 136077 - DNA, 25 bp, Homo sapien
ggaatggttagagctccagcagcgc

SEQ ID NO: 136078 - DNA, 25 bp, Homo sapien
aggtgagtttgaggatgtaagccaa

SEQ ID NO: 136079 - DNA, 25 bp, Homo sapien
tgttgcagagcaaagttaaggaagc

SEQ ID NO: 136080 - DNA, 25 bp, Homo sapien
cttttccttaaccaacagatcattg

SEQ ID NO: 136081 - DNA, 25 bp, Homo sapien
tccttaaccaacagatcattgatct

SEQ ID NO: 136082 - DNA, 25 bp, Homo sapien
ccttaaccaacagatcattgatctc

SEQ ID NO: 136083 - DNA, 25 bp, Homo sapien
taactcagagcagtctccaagttta

SEQ ID NO: 136084 - DNA, 25 bp, Homo sapien
gagcagtctccaagtttactacctt

SEQ ID NO: 136085 - DNA, 25 bp, Homo sapien
tcttctgaagggtttggatttgtga

SEQ ID NO: 136086 - DNA, 25 bp, Homo sapien
caagtttactaccttcttctgaagg

SEQ ID NO: 136087 - DNA, 25 bp, Homo sapien
tctgttgcttcacttggtgcagagc

SEQ ID NO: 136088 - DNA, 25 bp, Homo sapien
ggccagcttcttcacacgattcatt

SEQ ID NO: 136089 - DNA, 25 bp, Homo sapien
tctcatccagtatgttcttggccag

SEQ ID NO: 136090 - DNA, 25 bp, Homo sapien
catttttcggcctccagaagatcct

SEQ ID NO: 136091 - DNA, 25 bp, Homo sapien
tatttagagacacagacaaagggaa

SEQ ID NO: 136092 - DNA, 25 bp, Homo sapien
ttagagacacagacaaagggaacaa

SEQ ID NO: 136093 - DNA, 25 bp, Homo sapien
gagacacagacaaagggaacaagaa

SEQ ID NO: 136094 - DNA, 25 bp, Homo sapien
tttagagacacagacaaagggaaca

SEQ ID NO: 136095 - DNA, 25 bp, Homo sapien
ttgcaaagagcaatcgcaatacttt

SEQ ID NO: 136096 - DNA, 25 bp, Homo sapien
aagagcaatcgcaatactttttcct

SEQ ID NO: 136097 - DNA, 25 bp, Homo sapien
ctgctcccaggtcaaatctccaata

SEQ ID NO: 136098 - DNA, 25 bp, Homo sapien
caggtcaaatctccaatatccacat

SEQ ID NO: 136099 - DNA, 25 bp, Homo sapien
cccttcaagtatttatcccttgtgt

SEQ ID NO: 136100 - DNA, 25 bp, Homo sapien
ttaaaatgtataactggccaggggc

SEQ ID NO: 136101 - DNA, 25 bp, Homo sapien
tgtgggtgatagtaggtatacgtat

SEQ ID NO: 136102 - DNA, 25 bp, Homo sapien
tgaggcagtgtctcctcatgccttc

SEQ ID NO: 136103 - DNA, 25 bp, Homo sapien
tctggaactggaggcctagaactct

SEQ ID NO: 136104 - DNA, 25 bp, Homo sapien
ctggaggcctagaactctggttgta

SEQ ID NO: 136105 - DNA, 25 bp, Homo sapien
aacatagtctggaactggaggccta

SEQ ID NO: 136106 - DNA, 25 bp, Homo sapien
aggcctagaactctggttgtatttc

SEQ ID NO: 136107 - DNA, 25 bp, Homo sapien
aatagtgggtagcaccacttcacca

SEQ ID NO: 136108 - DNA, 25 bp, Homo sapien
cacttcaccagaagagtctgatatt

SEQ ID NO: 136109 - DNA, 25 bp, Homo sapien
tgaggttcttttggaatagtgggta

SEQ ID NO: 136110 - DNA, 25 bp, Homo sapien
cttcaccagaagagtctgatattgc

SEQ ID NO: 136111 - DNA, 25 bp, Homo sapien
tattactcattccactgatccctga

SEQ ID NO: 136112 - DNA, 25 bp, Homo sapien
catttgtacggatattgctttaaaa

SEQ ID NO: 136113 - DNA, 25 bp, Homo sapien
tgaagtctctcaactagtagagaaa

SEQ ID NO: 136114 - DNA, 25 bp, Homo sapien
gagaaaataaccgtgatttagcaag

SEQ ID NO: 136115 - DNA, 25 bp, Homo sapien
tcctctaggttgtaatgactctgac

SEQ ID NO: 136116 - DNA, 25 bp, Homo sapien
tctaggttgtaatgactctgacttc

SEQ ID NO: 136117 - DNA, 25 bp, Homo sapien
ttgtcctctaggttgtaatgactct

SEQ ID NO: 136118 - DNA, 25 bp, Homo sapien
taggttgtaatgactctgacttccc

SEQ ID NO: 136119 - DNA, 25 bp, Homo sapien
tcttatcacagctggcaactggtag

SEQ ID NO: 136120 - DNA, 25 bp, Homo sapien
tccaatccaacaactataggctggg

SEQ ID NO: 136121 - DNA, 25 bp, Homo sapien
tcagttatattcatgtgatcgcggc

SEQ ID NO: 136122 - DNA, 25 bp, Homo sapien
tgatcgcggctaaaaagtcagtatt

SEQ ID NO: 136123 - DNA, 25 bp, Homo sapien
gcttattactaccacctggctggat

SEQ ID NO: 136124 - DNA, 25 bp, Homo sapien
gaccttgaaaatgttgtgtaccctg

SEQ ID NO: 136125 - DNA, 25 bp, Homo sapien
accctgtggatttgaggcttattac

SEQ ID NO: 136126 - DNA, 25 bp, Homo sapien
gcgtccttaccagtcactttgatag

SEQ ID NO: 136127 - DNA, 25 bp, Homo sapien
actgggcctaagaaatttcgaagct

SEQ ID NO: 136128 - DNA, 25 bp, Homo sapien
tcttctgccattagttcaactgcct

SEQ ID NO: 136129 - DNA, 25 bp, Homo sapien
caaccatgaaaatgggtaagacacc

SEQ ID NO: 136130 - DNA, 25 bp, Homo sapien
ttttaggcccagaaatcaaggattg

SEQ ID NO: 136131 - DNA, 25 bp, Homo sapien
tagcgctacctaaatgccactggga

SEQ ID NO: 136132 - DNA, 25 bp, Homo sapien
ggagagacctcctgcaaagttttct

SEQ ID NO: 136133 - DNA, 25 bp, Homo sapien
gacagaaataactcaccgcttttgg

SEQ ID NO: 136134 - DNA, 25 bp, Homo sapien
ggttgatcctcaaacatagcgctac

SEQ ID NO: 136135 - DNA, 25 bp, Homo sapien
gcctactatataatagctgggggca

SEQ ID NO: 136136 - DNA, 25 bp, Homo sapien
tactatataatagctgggggcacgg

SEQ ID NO: 136137 - DNA, 25 bp, Homo sapien
ctatataatagctgggggcacggtg

SEQ ID NO: 136138 - DNA, 25 bp, Homo sapien
ataaataaatggcctactatataat

SEQ ID NO: 136139 - DNA, 25 bp, Homo sapien
tctggtaatctggtaaaatgtcatt

SEQ ID NO: 136140 - DNA, 25 bp, Homo sapien
tataaattactctggtaatctggta

SEQ ID NO: 136141 - DNA, 25 bp, Homo sapien
tgttagatctgcacaatgtattctc

SEQ ID NO: 136142 - DNA, 25 bp, Homo sapien
tctagcttgctagtaattatataag

SEQ ID NO: 136143 - DNA, 25 bp, Homo sapien
tgtatattagtcacagcttttggtt

SEQ ID NO: 136144 - DNA, 25 bp, Homo sapien
aagcaattctcgtatctatgcctcc

SEQ ID NO: 136145 - DNA, 25 bp, Homo sapien
ggccaaatggttaagaagtcaacac

SEQ ID NO: 136146 - DNA, 25 bp, Homo sapien
catagcattatgacagtgtggccaa

SEQ ID NO: 136147 - DNA, 25 bp, Homo sapien
taacttggaagacggaatacacttg

SEQ ID NO: 136148 - DNA, 25 bp, Homo sapien
tgctcggaaatatgcccacttggtg

SEQ ID NO: 136149 - DNA, 25 bp, Homo sapien
tgagtcattggtttaagattgcccc

SEQ ID NO: 136150 - DNA, 25 bp, Homo sapien
gacagaaacattggatgaagccatc

SEQ ID NO: 136151 - DNA, 25 bp, Homo sapien
caatcaatatatcaaccacccaata

SEQ ID NO: 136152 - DNA, 25 bp, Homo sapien
caaacgctatcttatcttatactgg

SEQ ID NO: 136153 - DNA, 25 bp, Homo sapien
gctatagtttgccaaacgctatctt

SEQ ID NO: 136154 - DNA, 25 bp, Homo sapien
tgcctagcttatggctactgcagtg

SEQ ID NO: 136155 - DNA, 25 bp, Homo sapien
gatcgtgcaccactgtctcggtcac

SEQ ID NO: 136156 - DNA, 25 bp, Homo sapien
cagtccacatatattgatcgtgcac

SEQ ID NO: 136157 - DNA, 25 bp, Homo sapien
catggagcttgctggctaccttctc

SEQ ID NO: 136158 - DNA, 25 bp, Homo sapien
ccttctccattaggttgagttcagt

SEQ ID NO: 136159 - DNA, 25 bp, Homo sapien
gacctgaggttgagacttcctagag

SEQ ID NO: 136160 - DNA, 25 bp, Homo sapien
cctagagaaagtgatgatggctgag

SEQ ID NO: 136161 - DNA, 25 bp, Homo sapien
cttcctagagaaagtgatgatggct

SEQ ID NO: 136162 - DNA, 25 bp, Homo sapien
gttgagacttcctagagaaagtgat

SEQ ID NO: 136163 - DNA, 25 bp, Homo sapien
ggctggggacacaacaatctagtga

SEQ ID NO: 136164 - DNA, 25 bp, Homo sapien
gctggggacacaacaatctagtgac

SEQ ID NO: 136165 - DNA, 25 bp, Homo sapien
acagacactatgtattttctgattc

SEQ ID NO: 136166 - DNA, 25 bp, Homo sapien
catttggagaaacttctgaagtgac

SEQ ID NO: 136167 - DNA, 25 bp, Homo sapien
gacactatgtattttctgattcatt

SEQ ID NO: 136168 - DNA, 25 bp, Homo sapien
gaaacagacactatgtattttctga

SEQ ID NO: 136169 - DNA, 25 bp, Homo sapien
tgtgggagacgccatcttccaaccc

SEQ ID NO: 136170 - DNA, 25 bp, Homo sapien
gtctgtgggagacgccatcttccaa

SEQ ID NO: 136171 - DNA, 25 bp, Homo sapien
cgtctgtgggagacgccatcttcca

SEQ ID NO: 136172 - DNA, 25 bp, Homo sapien
tctgtgggagacgccatcttccaac

SEQ ID NO: 136173 - DNA, 25 bp, Homo sapien
cagagtggatgttcccagtagagca

SEQ ID NO: 136174 - DNA, 25 bp, Homo sapien
tgtgaagaaccggtgagctgaagac

SEQ ID NO: 136175 - DNA, 25 bp, Homo sapien
cagtatcgagatgaggtcagccagc

SEQ ID NO: 136176 - DNA, 25 bp, Homo sapien
catccgtgcgctcaatcagaagaga

SEQ ID NO: 136177 - DNA, 25 bp, Homo sapien
ccttaagaaacaacacgtaaagcag

SEQ ID NO: 136178 - DNA, 25 bp, Homo sapien
ggtacttaatatagctcaccttggc

SEQ ID NO: 136179 - DNA, 25 bp, Homo sapien
gaaatcgttaattcactcagcctta

SEQ ID NO: 136180 - DNA, 25 bp, Homo sapien
gcatgggagtataccaaaacaactt

SEQ ID NO: 136181 - DNA, 25 bp, Homo sapien
tgcgctcacaaaatttaagactcgg

SEQ ID NO: 136182 - DNA, 25 bp, Homo sapien
tgtgctaaacctggatccaactatg

SEQ ID NO: 136183 - DNA, 25 bp, Homo sapien
taatacagtatgtacctgcgctcac

SEQ ID NO: 136184 - DNA, 25 bp, Homo sapien
aagacctactgttcgtcaggcactg

SEQ ID NO: 136185 - DNA, 25 bp, Homo sapien
tccttttcaaagacgctccagcaaa

SEQ ID NO: 136186 - DNA, 25 bp, Homo sapien
ggtacaatctaataacctacatggg

SEQ ID NO: 136187 - DNA, 25 bp, Homo sapien
tacatgggtgaccttatgataccac

SEQ ID NO: 136188 - DNA, 25 bp, Homo sapien
tgataccacagtctgggatagaact

SEQ ID NO: 136189 - DNA, 25 bp, Homo sapien
agtaaagttattgggccaggtacag

SEQ ID NO: 136190 - DNA, 25 bp, Homo sapien
ctggtgaggcacggtcaagtttttc

SEQ ID NO: 136191 - DNA, 25 bp, Homo sapien
ggtgaggcacggtcaagtttttcaa

SEQ ID NO: 136192 - DNA, 25 bp, Homo sapien
ctggccaaagatctggtgaggcacg

SEQ ID NO: 136193 - DNA, 25 bp, Homo sapien
tctggccaaagatctggtgaggcac

SEQ ID NO: 136194 - DNA, 25 bp, Homo sapien
aaggaagctgcaaattcagcaacac

SEQ ID NO: 136195 - DNA, 25 bp, Homo sapien
gatgtcatcacgttctatctcagcc

SEQ ID NO: 136196 - DNA, 25 bp, Homo sapien
catttgggtggagaactagtaatag

SEQ ID NO: 136197 - DNA, 25 bp, Homo sapien
ctttcaacatgtcgatgtcatcacg

SEQ ID NO: 136198 - DNA, 25 bp, Homo sapien
tgtcgatgtcatcacgttctatctc

SEQ ID NO: 136199 - DNA, 25 bp, Homo sapien
gactgagtcttgaattggcaggatt

SEQ ID NO: 136200 - DNA, 25 bp, Homo sapien
cactatgactgagtcttgaattggc

SEQ ID NO: 136201 - DNA, 25 bp, Homo sapien
ctatgactgagtcttgaattggcag

SEQ ID NO: 136202 - DNA, 25 bp, Homo sapien
tatgactgagtcttgaattggcagg

SEQ ID NO: 136203 - DNA, 25 bp, Homo sapien
ctgaaacagaatcatttatttcaac

SEQ ID NO: 136204 - DNA, 25 bp, Homo sapien
cttctccatcaaattagccgtggtg

SEQ ID NO: 136205 - DNA, 25 bp, Homo sapien
ttagccgtggtgagactccccagtt

SEQ ID NO: 136206 - DNA, 25 bp, Homo sapien
taggctaggttctgtaggcctcgaa

SEQ ID NO: 136207 - DNA, 25 bp, Homo sapien
gccccagctgataggctaggttctg

SEQ ID NO: 136208 - DNA, 25 bp, Homo sapien
gctcagggtggaatacctgagctca

SEQ ID NO: 136209 - DNA, 25 bp, Homo sapien
gaacaaatgcgatcggggtactcac

SEQ ID NO: 136210 - DNA, 25 bp, Homo sapien
cagggtggaatacacccctgaacaa

SEQ ID NO: 136211 - DNA, 25 bp, Homo sapien
tgagctcagggtggaatacacagct

SEQ ID NO: 136212 - DNA, 25 bp, Homo sapien
ctgggcaacacagggagaccccatc

SEQ ID NO: 136213 - DNA, 25 bp, Homo sapien
gcctaggaggatgtggccagcctgg

SEQ ID NO: 136214 - DNA, 25 bp, Homo sapien
cttgagcctaggaggatgtggccag

SEQ ID NO: 136215 - DNA, 25 bp, Homo sapien
tgggcaacacagggagaccccatct

SEQ ID NO: 136216 - DNA, 25 bp, Homo sapien
ggaagctgaggtgggggacttgctt

SEQ ID NO: 136217 - DNA, 25 bp, Homo sapien
agcccgggaggtaggggttgcagtg

SEQ ID NO: 136218 - DNA, 25 bp, Homo sapien
agccaagatcacaccattgcactcc

SEQ ID NO: 136219 - DNA, 25 bp, Homo sapien
tccagcctgggtgacagagggagac

SEQ ID NO: 136220 - DNA, 25 bp, Homo sapien
tctctaccatcctactctatcctgt

SEQ ID NO: 136221 - DNA, 25 bp, Homo sapien
caccaatgcctcctaaaggtgtgta

SEQ ID NO: 136222 - DNA, 25 bp, Homo sapien
atcctactctatcctgtgcaccaat

SEQ ID NO: 136223 - DNA, 25 bp, Homo sapien
aatgcctcctaaaggtgtgtatctt

SEQ ID NO: 136224 - DNA, 25 bp, Homo sapien
tacctaatgggaattatcccagtgc

SEQ ID NO: 136225 - DNA, 25 bp, Homo sapien
aaaaagttcgccttcacaatagaag

SEQ ID NO: 136226 - DNA, 25 bp, Homo sapien
cagtgctgatataatccaatgtcgc

SEQ ID NO: 136227 - DNA, 25 bp, Homo sapien
gcctatcaagttggcaatgacttta

SEQ ID NO: 136228 - DNA, 25 bp, Homo sapien
gaaacgggcactacatttgaaatac

SEQ ID NO: 136229 - DNA, 25 bp, Homo sapien
gacttaacagttagagatacttctc

SEQ ID NO: 136230 - DNA, 25 bp, Homo sapien
taaattcccatgcattatcgctacc

SEQ ID NO: 136231 - DNA, 25 bp, Homo sapien
cacaaaccagtggaaagtaccagaa

SEQ ID NO: 136232 - DNA, 25 bp, Homo sapien
ctgagcctggcttgaaacttttttt

SEQ ID NO: 136233 - DNA, 25 bp, Homo sapien
taaatgctgatttcttgttcctatc

SEQ ID NO: 136234 - DNA, 25 bp, Homo sapien
taaacaggccaaattgcaacaagca

SEQ ID NO: 136235 - DNA, 25 bp, Homo sapien
cagagcaattctgtctgtaaacagg

SEQ ID NO: 136236 - DNA, 25 bp, Homo sapien
cgccactgtggattgagcattaaaa

SEQ ID NO: 136237 - DNA, 25 bp, Homo sapien
tagccaagctgttacacaagaaacc

SEQ ID NO: 136238 - DNA, 25 bp, Homo sapien
tgcgttcaaaacttgattcctggaa

SEQ ID NO: 136239 - DNA, 25 bp, Homo sapien
caaggcccttaaagttcatgaggca

SEQ ID NO: 136240 - DNA, 25 bp, Homo sapien
tcccaagtccattaatgcgttcaaa

SEQ ID NO: 136241 - DNA, 25 bp, Homo sapien
gtttgtcatagcacttcataaagac

SEQ ID NO: 136242 - DNA, 25 bp, Homo sapien
agttgagaacgcttgctgtatggta

SEQ ID NO: 136243 - DNA, 25 bp, Homo sapien
ttgtcatagcacttcataaagacag

SEQ ID NO: 136244 - DNA, 25 bp, Homo sapien
aaagttgagaacgcttgctgtatgg

SEQ ID NO: 136245 - DNA, 25 bp, Homo sapien
tctaggctaagaacggcagcaacct

SEQ ID NO: 136246 - DNA, 25 bp, Homo sapien
tctagtagaaatgcccagagagtat

SEQ ID NO: 136247 - DNA, 25 bp, Homo sapien
gatttctgaaaaccggtatggccta

SEQ ID NO: 136248 - DNA, 25 bp, Homo sapien
tcatgaaatctccatatgcatatgg

SEQ ID NO: 136249 - DNA, 25 bp, Homo sapien
tgttccttgactgctttgatggcta

SEQ ID NO: 136250 - DNA, 25 bp, Homo sapien
cctgagttcactacaagggccttac

SEQ ID NO: 136251 - DNA, 25 bp, Homo sapien
aatagaaagggtaagtgcctacctg

SEQ ID NO: 136252 - DNA, 25 bp, Homo sapien
caggaagaggagagctcaatgtcgt

SEQ ID NO: 136253 - DNA, 25 bp, Homo sapien
tctggaactctagttacaggtatgt

SEQ ID NO: 136254 - DNA, 25 bp, Homo sapien
tttaatcagggagaaaatggaacat

SEQ ID NO: 136255 - DNA, 25 bp, Homo sapien
tgtcccacaatatcaaggttctatt

SEQ ID NO: 136256 - DNA, 25 bp, Homo sapien
tctctcagtacttaattctggacag

SEQ ID NO: 136257 - DNA, 25 bp, Homo sapien
ttgtttaaccactcatgctaggaag

SEQ ID NO: 136258 - DNA, 25 bp, Homo sapien
tctggataaaaaatttgagcattgg

SEQ ID NO: 136259 - DNA, 25 bp, Homo sapien
ggacattactgccatataattaaag

SEQ ID NO: 136260 - DNA, 25 bp, Homo sapien
tacagtacttaggttatttacatac

SEQ ID NO: 136261 - DNA, 25 bp, Homo sapien
atactgtatctttactctacctttt

SEQ ID NO: 136262 - DNA, 25 bp, Homo sapien
ctgtatctttactctaccttttcta

SEQ ID NO: 136263 - DNA, 25 bp, Homo sapien
gtatctttactctaccttttctatg

SEQ ID NO: 136264 - DNA, 25 bp, Homo sapien
tactgtatctttactctaccttttc

SEQ ID NO: 136265 - DNA, 25 bp, Homo sapien
ggcatgatcccgctagtgataagaa

SEQ ID NO: 136266 - DNA, 25 bp, Homo sapien
agaacacgagttctgaccttcagtt

SEQ ID NO: 136267 - DNA, 25 bp, Homo sapien
ccgctagtgataagaacacgagttc

SEQ ID NO: 136268 - DNA, 25 bp, Homo sapien
ccttcagtttccaacgtgggctggt

SEQ ID NO: 136269 - DNA, 25 bp, Homo sapien
ttcagggaagccaaacagttgccga

SEQ ID NO: 136270 - DNA, 25 bp, Homo sapien
tagaacaggcctagagacaatgaca

SEQ ID NO: 136271 - DNA, 25 bp, Homo sapien
caaaagacaggagccaacttgaagg

SEQ ID NO: 136272 - DNA, 25 bp, Homo sapien
ggatatcctgacatgcctgaaagca

SEQ ID NO: 136273 - DNA, 25 bp, Homo sapien
gagctttcattagtctaccaagtgg

SEQ ID NO: 136274 - DNA, 25 bp, Homo sapien
taagccgtggagtctccttagctgc

SEQ ID NO: 136275 - DNA, 25 bp, Homo sapien
tcttgtcagtcatggtaagccgtgg

SEQ ID NO: 136276 - DNA, 25 bp, Homo sapien
tgtagtcaggatggaattcaacgga

SEQ ID NO: 136277 - DNA, 25 bp, Homo sapien
acaatggttgtagcttggtataatt

SEQ ID NO: 136278 - DNA, 25 bp, Homo sapien
cacaatggttgtagcttggtataat

SEQ ID NO: 136279 - DNA, 25 bp, Homo sapien
gatctcagaaagcatacgtagtgta

SEQ ID NO: 136280 - DNA, 25 bp, Homo sapien
cttaaatggatttaacagtgcagaa

SEQ ID NO: 136281 - DNA, 25 bp, Homo sapien
cctgcaaggccatgttttcagattt

SEQ ID NO: 136282 - DNA, 25 bp, Homo sapien
ctgatcgctgatggctggctctgga

SEQ ID NO: 136283 - DNA, 25 bp, Homo sapien
tgaggaatttcccccgtgtcatctc

SEQ ID NO: 136284 - DNA, 25 bp, Homo sapien
ggaatttcccccgtgtcatctctct

SEQ ID NO: 136285 - DNA, 25 bp, Homo sapien
attgaggaatttcccccgtgtcatc

SEQ ID NO: 136286 - DNA, 25 bp, Homo sapien
aatttcccccgtgtcatctctctgg

SEQ ID NO: 136287 - DNA, 25 bp, Homo sapien
tatacaagctaattccaggagggac

SEQ ID NO: 136288 - DNA, 25 bp, Homo sapien
gaatgatatgccctcagctgttacc

SEQ ID NO: 136289 - DNA, 25 bp, Homo sapien
ggcttctagctttcaaccaaatggg

SEQ ID NO: 136290 - DNA, 25 bp, Homo sapien
tatccgaggctaagaaggttcaagt

SEQ ID NO: 136291 - DNA, 25 bp, Homo sapien
tagccatgggctagattttcagatt

SEQ ID NO: 136292 - DNA, 25 bp, Homo sapien
cgtgtgtgtgcgtttctattatata

SEQ ID NO: 136293 - DNA, 25 bp, Homo sapien
tttaacagagacagataagtggtga

SEQ ID NO: 136294 - DNA, 25 bp, Homo sapien
gactggcttatacaagaaatatgga

SEQ ID NO: 136295 - DNA, 25 bp, Homo sapien
tcttttgacctatgatccacctgcc

SEQ ID NO: 136296 - DNA, 25 bp, Homo sapien
ggtctcgatcttttgacctatgatc

SEQ ID NO: 136297 - DNA, 25 bp, Homo sapien
gatcttttgacctatgatccacctg

SEQ ID NO: 136298 - DNA, 25 bp, Homo sapien
tcgatcttttgacctatgatccacc

SEQ ID NO: 136299 - DNA, 25 bp, Homo sapien
tatgtagcaccccagcagaatgttt

SEQ ID NO: 136300 - DNA, 25 bp, Homo sapien
caaccgcatttagtgagatacagaa

SEQ ID NO: 136301 - DNA, 25 bp, Homo sapien
caccatcagactattgccacaggga

SEQ ID NO: 136302 - DNA, 25 bp, Homo sapien
gaagagtgccatgccctagcaaaca

SEQ ID NO: 136303 - DNA, 25 bp, Homo sapien
tattgccccaaatagcttccatggg

SEQ ID NO: 136304 - DNA, 25 bp, Homo sapien
tcatagctttgaacccagggtgagt

SEQ ID NO: 136305 - DNA, 25 bp, Homo sapien
tagacaaaggtgctccctcgaagga

SEQ ID NO: 136306 - DNA, 25 bp, Homo sapien
gctgccaaagggacatgttgaccat

SEQ ID NO: 136307 - DNA, 25 bp, Homo sapien
tgaacaccccatcggcagtgctcag

SEQ ID NO: 136308 - DNA, 25 bp, Homo sapien
cactagggcaatcacagaggctttt

SEQ ID NO: 136309 - DNA, 25 bp, Homo sapien
ggagcgcataacctacactagggca

SEQ ID NO: 136310 - DNA, 25 bp, Homo sapien
tgatacagacatgaagaagccatgg

SEQ ID NO: 136311 - DNA, 25 bp, Homo sapien
cccgcttcgcgaagttggtcccagg

SEQ ID NO: 136312 - DNA, 25 bp, Homo sapien
ccgggcttcccgcttcgcgaagttg

SEQ ID NO: 136313 - DNA, 25 bp, Homo sapien
ttcccgcttcgcgaagttggtccca

SEQ ID NO: 136314 - DNA, 25 bp, Homo sapien
ggcttcccgcttcgcgaagttggtc

SEQ ID NO: 136315 - DNA, 25 bp, Homo sapien
ctttggaggggctgaggccgcaggt

SEQ ID NO: 136316 - DNA, 25 bp, Homo sapien
tccctgttctttggaggggctgagg

SEQ ID NO: 136317 - DNA, 25 bp, Homo sapien
ctccctgttctttggaggggctgag

SEQ ID NO: 136318 - DNA, 25 bp, Homo sapien
gttctttggaggggctgaggccgca

SEQ ID NO: 136319 - DNA, 25 bp, Homo sapien
acgctctgcgggtcggacagcactt

SEQ ID NO: 136320 - DNA, 25 bp, Homo sapien
ggtactcttggccactgtctcggat

SEQ ID NO: 136321 - DNA, 25 bp, Homo sapien
gatctcctggatgccgaacccagtg

SEQ ID NO: 136322 - DNA, 25 bp, Homo sapien
gctctgcccaatggctgcaagtgga

SEQ ID NO: 136323 - DNA, 25 bp, Homo sapien
aggcctggtccagcaagcgagagcc

SEQ ID NO: 136324 - DNA, 25 bp, Homo sapien
atcaccaggcgcgtcggcccaaggc

SEQ ID NO: 136325 - DNA, 25 bp, Homo sapien
tgcggacgccgaagcatcctcccgg

SEQ ID NO: 136326 - DNA, 25 bp, Homo sapien
ggccccatcaccaggcgcgtcggcc

SEQ ID NO: 136327 - DNA, 25 bp, Homo sapien
gggactggagaactgcgcggccgcc

SEQ ID NO: 136328 - DNA, 25 bp, Homo sapien
gactctgcaccacgggctccgacac

SEQ ID NO: 136329 - DNA, 25 bp, Homo sapien
acggccggcgactctgcaccacggg

SEQ ID NO: 136330 - DNA, 25 bp, Homo sapien
ggctccaacagagtgccgtggccga

SEQ ID NO: 136331 - DNA, 25 bp, Homo sapien
gggacgacggagagcgaggcagcct

SEQ ID NO: 136332 - DNA, 25 bp, Homo sapien
acagatttcgttgtaagagaggcaa

SEQ ID NO: 136333 - DNA, 25 bp, Homo sapien
gcgcgcttgggaccgggacgacgga

SEQ ID NO: 136334 - DNA, 25 bp, Homo sapien
ccgaatccggaggttttgaacagat

SEQ ID NO: 136335 - DNA, 25 bp, Homo sapien
aaagcgggcgtagggacatgcggca

SEQ ID NO: 136336 - DNA, 25 bp, Homo sapien
ctgaaaagcgggcgtagggacatgc

SEQ ID NO: 136337 - DNA, 25 bp, Homo sapien
tgcggcagagtgggggacgcgctcc

SEQ ID NO: 136338 - DNA, 25 bp, Homo sapien
tgaaaagcgggcgtagggacatgcg

SEQ ID NO: 136339 - DNA, 25 bp, Homo sapien
ctgtgtcgccgcttcttccgtttct

SEQ ID NO: 136340 - DNA, 25 bp, Homo sapien
cgatcgctggaggaaacatcttcag

SEQ ID NO: 136341 - DNA, 25 bp, Homo sapien
atttggacatttttcgatcgctgga

SEQ ID NO: 136342 - DNA, 25 bp, Homo sapien
tttttcgatcgctggaggaaacatc

SEQ ID NO: 136343 - DNA, 25 bp, Homo sapien
tgtatcctgtcttccggcagctccg

SEQ ID NO: 136344 - DNA, 25 bp, Homo sapien
gcagctccgttttcatggccagcat

SEQ ID NO: 136345 - DNA, 25 bp, Homo sapien
cgtctgggtagtgggcttcgttgaa

SEQ ID NO: 136346 - DNA, 25 bp, Homo sapien
tagctggtaggaggtaaagattgtc

SEQ ID NO: 136347 - DNA, 25 bp, Homo sapien
tcgccccagggaagtcgagggagtc

SEQ ID NO: 136348 - DNA, 25 bp, Homo sapien
cgccccagggaagtcgagggagtcg

SEQ ID NO: 136349 - DNA, 25 bp, Homo sapien
cacggggcacaggagtccatgatgc

SEQ ID NO: 136350 - DNA, 25 bp, Homo sapien
gggggatggagtgccgcaccatggc

SEQ ID NO: 136351 - DNA, 25 bp, Homo sapien
atggccccgtagagcccatactccg

SEQ ID NO: 136352 - DNA, 25 bp, Homo sapien
gacttgaggatggactcgggcaggg

SEQ ID NO: 136353 - DNA, 25 bp, Homo sapien
ttagaaaagcgcctgggaaagccat

SEQ ID NO: 136354 - DNA, 25 bp, Homo sapien
tttagaaaagcgcctgggaaagcca

SEQ ID NO: 136355 - DNA, 25 bp, Homo sapien
gcctccagcgactttttgtgcatcc

SEQ ID NO: 136356 - DNA, 25 bp, Homo sapien
tccagctgcggtggactgagcctct

SEQ ID NO: 136357 - DNA, 25 bp, Homo sapien
tggcccggagcaccgcaatgctgtt

SEQ ID NO: 136358 - DNA, 25 bp, Homo sapien
catcttgtcgagcttgggcagggcc

SEQ ID NO: 136359 - DNA, 25 bp, Homo sapien
tctgaacaggtcaaaggcttgctct

SEQ ID NO: 136360 - DNA, 25 bp, Homo sapien
caggcctgtggcttcgtagatgtca

SEQ ID NO: 136361 - DNA, 25 bp, Homo sapien
caaaaccagtgagcgttgcaaaggg

SEQ ID NO: 136362 - DNA, 25 bp, Homo sapien
caagcagcatatcacgagagtcgag

SEQ ID NO: 136363 - DNA, 25 bp, Homo sapien
aaagaaatgactcttggagtcaaga

SEQ ID NO: 136364 - DNA, 25 bp, Homo sapien
tttaatcagttaaattgtgcagcaa

SEQ ID NO: 136365 - DNA, 25 bp, Homo sapien
tatgcttgaagtgctgattacctac

SEQ ID NO: 136366 - DNA, 25 bp, Homo sapien
tgatttcagatcatgtttgctaaag

SEQ ID NO: 136367 - DNA, 25 bp, Homo sapien
cagccttgccctgtctattttgacc

SEQ ID NO: 136368 - DNA, 25 bp, Homo sapien
tgtgcaggttctgccgatgatgaga

SEQ ID NO: 136369 - DNA, 25 bp, Homo sapien
ctttgttgtgcaggttctgccgatg

SEQ ID NO: 136370 - DNA, 25 bp, Homo sapien
tgtctattttgaccagccaggaggc

SEQ ID NO: 136371 - DNA, 25 bp, Homo sapien
ccccaacaacttcatgttaacatca

SEQ ID NO: 136372 - DNA, 25 bp, Homo sapien
ccaacaacttcatgttaacatcatc

SEQ ID NO: 136373 - DNA, 25 bp, Homo sapien
aacaacttcatgttaacatcatctc

SEQ ID NO: 136374 - DNA, 25 bp, Homo sapien
caccccaacaacttcatgttaacat

SEQ ID NO: 136375 - DNA, 25 bp, Homo sapien
ttgcagtaaggcaagatcctgccat

SEQ ID NO: 136376 - DNA, 25 bp, Homo sapien
atcctgccattgcactccagcctgg

SEQ ID NO: 136377 - DNA, 25 bp, Homo sapien
agaggttgcagtaaggcaagatcct

SEQ ID NO: 136378 - DNA, 25 bp, Homo sapien
ggatgacatcgataacccgtaggcg

SEQ ID NO: 136379 - DNA, 25 bp, Homo sapien
cctcaacgtgctgcgggatgacatc

SEQ ID NO: 136380 - DNA, 25 bp, Homo sapien
gaagagctttgatcagttcacctgc

SEQ ID NO: 136381 - DNA, 25 bp, Homo sapien
gcgagccttgagctttgagctgaga

SEQ ID NO: 136382 - DNA, 25 bp, Homo sapien
ccccttttcatctctttggggtgct

SEQ ID NO: 136383 - DNA, 25 bp, Homo sapien
cgcccggccccttttcatctctttg

SEQ ID NO: 136384 - DNA, 25 bp, Homo sapien
tctttggggtgctgatgaggcaggg

SEQ ID NO: 136385 - DNA, 25 bp, Homo sapien
ttggggtgctgatgaggcagggact

SEQ ID NO: 136386 - DNA, 25 bp, Homo sapien
acatcactgtcagaaccgctgccag

SEQ ID NO: 136387 - DNA, 25 bp, Homo sapien
tgtcaacatcactgtcagaaccgct

SEQ ID NO: 136388 - DNA, 25 bp, Homo sapien
gaagtaagttcctttgatttgggca

SEQ ID NO: 136389 - DNA, 25 bp, Homo sapien
ctttgatttgggcattactctgctc

SEQ ID NO: 136390 - DNA, 25 bp, Homo sapien
ttattgtatactaagtggtgggcac

SEQ ID NO: 136391 - DNA, 25 bp, Homo sapien
aatcccaaacactggcccggcttgg

SEQ ID NO: 136392 - DNA, 25 bp, Homo sapien
gccttcaagagcaccaactctcatg

SEQ ID NO: 136393 - DNA, 25 bp, Homo sapien
tgtgtgatgccagcacctacagtcc

SEQ ID NO: 136394 - DNA, 25 bp, Homo sapien
cccacagatggcccacaggagctgt

SEQ ID NO: 136395 - DNA, 25 bp, Homo sapien
ggagctgtccctgtataggctgatt

SEQ ID NO: 136396 - DNA, 25 bp, Homo sapien
tgtccctgtataggctgattttctc

SEQ ID NO: 136397 - DNA, 25 bp, Homo sapien
tcccaaatctgcgttagtttctcat

SEQ ID NO: 136398 - DNA, 25 bp, Homo sapien
accaaggagctcagaggtgggcggc

SEQ ID NO: 136399 - DNA, 25 bp, Homo sapien
tccgtaccaaggagctcagaggtgg

SEQ ID NO: 136400 - DNA, 25 bp, Homo sapien
cctccgtaccaaggagctcagaggt

SEQ ID NO: 136401 - DNA, 25 bp, Homo sapien
gtaccaaggagctcagaggtgggcg

SEQ ID NO: 136402 - DNA, 25 bp, Homo sapien
tgcttgtttgcagggtctttgatag

SEQ ID NO: 136403 - DNA, 25 bp, Homo sapien
ggcaacctggattgccatctgcttg

SEQ ID NO: 136404 - DNA, 25 bp, Homo sapien
gggatgggcaatgtcattggcaacc

SEQ ID NO: 136405 - DNA, 25 bp, Homo sapien
gcagggtctttgataggtgcctttg

SEQ ID NO: 136406 - DNA, 25 bp, Homo sapien
gcacgcagtacctgcagcttcggtc

SEQ ID NO: 136407 - DNA, 25 bp, Homo sapien
gaaaggtgggggcacgcagtacctg

SEQ ID NO: 136408 - DNA, 25 bp, Homo sapien
ccactgaaaggtgggggcacgcagt

SEQ ID NO: 136409 - DNA, 25 bp, Homo sapien
gggggcacgcagtacctgcagcttc

SEQ ID NO: 136410 - DNA, 25 bp, Homo sapien
gcgtccccagccgagctcgtctcac

SEQ ID NO: 136411 - DNA, 25 bp, Homo sapien
aggccttctcaagtagcgtccccag

SEQ ID NO: 136412 - DNA, 25 bp, Homo sapien
ctgggacatttaagtcaccctgtgg

SEQ ID NO: 136413 - DNA, 25 bp, Homo sapien
gggaaaggccttctcaagtagcgtc

SEQ ID NO: 136414 - DNA, 25 bp, Homo sapien
agggacgagggatccaacctgagaa

SEQ ID NO: 136415 - DNA, 25 bp, Homo sapien
ttaaggtgccaggaggcaatgagtg

SEQ ID NO: 136416 - DNA, 25 bp, Homo sapien
ccaggaggcaatgagtggcaaaaga

SEQ ID NO: 136417 - DNA, 25 bp, Homo sapien
tgccaggaggcaatgagtggcaaaa

SEQ ID NO: 136418 - DNA, 25 bp, Homo sapien
gaaacaggaggccttgacgtcggca

SEQ ID NO: 136419 - DNA, 25 bp, Homo sapien
tataataagtggaccgtgagatgcc

SEQ ID NO: 136420 - DNA, 25 bp, Homo sapien
cactttggagtcgatcatgccctgg

SEQ ID NO: 136421 - DNA, 25 bp, Homo sapien
cctcagagcatagggagtagcgcac

SEQ ID NO: 136422 - DNA, 25 bp, Homo sapien
tgaagtttggacaggcctctgggcc

SEQ ID NO: 136423 - DNA, 25 bp, Homo sapien
agacgcctctgccaacgggacaggg

SEQ ID NO: 136424 - DNA, 25 bp, Homo sapien
atcacagctgtcacatccctgccag

SEQ ID NO: 136425 - DNA, 25 bp, Homo sapien
tgggccaaccccgagcaagactctt

SEQ ID NO: 136426 - DNA, 25 bp, Homo sapien
cctgggccttgaacttcgtggtagc

SEQ ID NO: 136427 - DNA, 25 bp, Homo sapien
tcttggactggaagcgcttctgcaa

SEQ ID NO: 136428 - DNA, 25 bp, Homo sapien
gagggctcgcttccacatgtagtat

SEQ ID NO: 136429 - DNA, 25 bp, Homo sapien
tcgtggtagcgatcatgtccatcac

SEQ ID NO: 136430 - DNA, 25 bp, Homo sapien
caactgagtaaagaggatgccaacc

SEQ ID NO: 136431 - DNA, 25 bp, Homo sapien
ccacagtttcctacgggagaccaga

SEQ ID NO: 136432 - DNA, 25 bp, Homo sapien
gacttagggtagacactgtgggacc

SEQ ID NO: 136433 - DNA, 25 bp, Homo sapien
tgcccagtgggaccgatgatcatgc

SEQ ID NO: 136434 - DNA, 25 bp, Homo sapien
caattgtatatctgtacggtttgta

SEQ ID NO: 136435 - DNA, 25 bp, Homo sapien
aaggcagactcttgacggctccttg

SEQ ID NO: 136436 - DNA, 25 bp, Homo sapien
gttaactatctggttattgactaga

SEQ ID NO: 136437 - DNA, 25 bp, Homo sapien
tatatctgtacggtttgtaaaaaga

SEQ ID NO: 136438 - DNA, 25 bp, Homo sapien
aaagaccacccttctggtgctgcaa

SEQ ID NO: 136439 - DNA, 25 bp, Homo sapien
tccctaacacttgcgctcagagctg

SEQ ID NO: 136440 - DNA, 25 bp, Homo sapien
ccagcctctgtgcaacttcgggtaa

SEQ ID NO: 136441 - DNA, 25 bp, Homo sapien
gactgaccccgttaagatgactgtg

SEQ ID NO: 136442 - DNA, 25 bp, Homo sapien
tatggctcccgcaaaattgagtgtc

SEQ ID NO: 136443 - DNA, 25 bp, Homo sapien
ccaactcaaggaggaacgtcacacc

SEQ ID NO: 136444 - DNA, 25 bp, Homo sapien
ccaaactacagccattcctaagggt

SEQ ID NO: 136445 - DNA, 25 bp, Homo sapien
ctgtctctcaaagaccaatgatgtt

SEQ ID NO: 136446 - DNA, 25 bp, Homo sapien
gggcacatccagaattttagagaca

SEQ ID NO: 136447 - DNA, 25 bp, Homo sapien
cggcccatgccgagcccccgagccc

SEQ ID NO: 136448 - DNA, 25 bp, Homo sapien
ggcccatgccgagcccccgagcccc

SEQ ID NO: 136449 - DNA, 25 bp, Homo sapien
ggcggtctgggggcgccgcgggagc

SEQ ID NO: 136450 - DNA, 25 bp, Homo sapien
aactggaagctttaagcagcctttg

SEQ ID NO: 136451 - DNA, 25 bp, Homo sapien
gattgaattgaagcagggataggcc

SEQ ID NO: 136452 - DNA, 25 bp, Homo sapien
actgcaatggctacagcccaaagaa

SEQ ID NO: 136453 - DNA, 25 bp, Homo sapien
tacactgtgctctggaacagttgag

SEQ ID NO: 136454 - DNA, 25 bp, Homo sapien
cacatgctgctttgccatgggcatt

SEQ ID NO: 136455 - DNA, 25 bp, Homo sapien
gccacatgctgctttgccatgggca

SEQ ID NO: 136456 - DNA, 25 bp, Homo sapien
tggggatgatccctccaagaacctg

SEQ ID NO: 136457 - DNA, 25 bp, Homo sapien
aaatagtatggaagggtggggtgcg

SEQ ID NO: 136458 - DNA, 25 bp, Homo sapien
gaatccgattcacttacagctgtca

SEQ ID NO: 136459 - DNA, 25 bp, Homo sapien
tggaaacagctaaaaggcccattgc

SEQ ID NO: 136460 - DNA, 25 bp, Homo sapien
tatgggaacctaccaggctctccaa

SEQ ID NO: 136461 - DNA, 25 bp, Homo sapien
gactagcaactaaatggtctgggtg

SEQ ID NO: 136462 - DNA, 25 bp, Homo sapien
tatccagtgattcgttgaagaggag

SEQ ID NO: 136463 - DNA, 25 bp, Homo sapien
agctctgctgcttcaacaacagtga

SEQ ID NO: 136464 - DNA, 25 bp, Homo sapien
tcattgagttcggtgcatctggcca

SEQ ID NO: 136465 - DNA, 25 bp, Homo sapien
caacagtgacttgctctccaatggt

SEQ ID NO: 136466 - DNA, 25 bp, Homo sapien
atgacaaaaaccaaagtctcttctg

SEQ ID NO: 136467 - DNA, 25 bp, Homo sapien
acaaaaaccaaagtctcttctgctg

SEQ ID NO: 136468 - DNA, 25 bp, Homo sapien
gctgggaaatcccagtacagatcgt

SEQ ID NO: 136469 - DNA, 25 bp, Homo sapien
ttctgctgggaaatcccagtacaga

SEQ ID NO: 136470 - DNA, 25 bp, Homo sapien
tgtgcctgcagtatctaggatttta

SEQ ID NO: 136471 - DNA, 25 bp, Homo sapien
taggattttaagcatacactgttgg

SEQ ID NO: 136472 - DNA, 25 bp, Homo sapien
aaggaccactagctcacccgtgatg

SEQ ID NO: 136473 - DNA, 25 bp, Homo sapien
tgaaccatcagagcagactgcccaa

SEQ ID NO: 136474 - DNA, 25 bp, Homo sapien
gtaagtcaaacgtggactgaatata

SEQ ID NO: 136475 - DNA, 25 bp, Homo sapien
taagtcaaacgtggactgaatatac

SEQ ID NO: 136476 - DNA, 25 bp, Homo sapien
acatttattgccaaccaaaatcatt

SEQ ID NO: 136477 - DNA, 25 bp, Homo sapien
cacatttattgccaaccaaaatcat

SEQ ID NO: 136478 - DNA, 25 bp, Homo sapien
cagttccatcactgtcatgctaaat

SEQ ID NO: 136479 - DNA, 25 bp, Homo sapien
ccatcactgtcatgctaaattctgg

SEQ ID NO: 136480 - DNA, 25 bp, Homo sapien
gttccatcactgtcatgctaaattc

SEQ ID NO: 136481 - DNA, 25 bp, Homo sapien
tccatcactgtcatgctaaattctg

SEQ ID NO: 136482 - DNA, 25 bp, Homo sapien
tattagagtcaagtatattttcaca

SEQ ID NO: 136483 - DNA, 25 bp, Homo sapien
aatgctggcactttccaattaggca

SEQ ID NO: 136484 - DNA, 25 bp, Homo sapien
tagcaatatctaacatttgaaatgc

SEQ ID NO: 136485 - DNA, 25 bp, Homo sapien
gcatccatgctcttttgtataatca

SEQ ID NO: 136486 - DNA, 25 bp, Homo sapien
aaggccgtggtgcatggcatcctga

SEQ ID NO: 136487 - DNA, 25 bp, Homo sapien
gcaaggccgtggtgcatggcatcct

SEQ ID NO: 136488 - DNA, 25 bp, Homo sapien
gcagcaaggccgtggtgcatggcat

SEQ ID NO: 136489 - DNA, 25 bp, Homo sapien
cagcaaggccgtggtgcatggcatc

SEQ ID NO: 136490 - DNA, 25 bp, Homo sapien
tggatggagttataaaggaagtgaa

SEQ ID NO: 136491 - DNA, 25 bp, Homo sapien
ctgtggatggagttataaaggaagt

SEQ ID NO: 136492 - DNA, 25 bp, Homo sapien
ggatggagttataaaggaagtgaat

SEQ ID NO: 136493 - DNA, 25 bp, Homo sapien
gttctgtggatggagttataaagga

SEQ ID NO: 136494 - DNA, 25 bp, Homo sapien
gctgcccaggccgaaccggtgcagt

SEQ ID NO: 136495 - DNA, 25 bp, Homo sapien
tccgcgatgcgtttcctggcagcta

SEQ ID NO: 136496 - DNA, 25 bp, Homo sapien
gaaccggtgcagttcaaggactgcg

SEQ ID NO: 136497 - DNA, 25 bp, Homo sapien
gtttcctggcagctacattcctgct

SEQ ID NO: 136498 - DNA, 25 bp, Homo sapien
tccacaagctccgcccctcgcgtct

SEQ ID NO: 136499 - DNA, 25 bp, Homo sapien
tctctgcgtcgcggccgttagggac

SEQ ID NO: 136500 - DNA, 25 bp, Homo sapien
tgcgtcgcggccgttagggacgacc

SEQ ID NO: 136501 - DNA, 25 bp, Homo sapien
ccgctctctgcgtcgcggccgttag

SEQ ID NO: 136502 - DNA, 25 bp, Homo sapien
cgctctctgcgtcgcggccgttagg

SEQ ID NO: 136503 - DNA, 25 bp, Homo sapien
gtcctagaggcgcagaaccaaacac

SEQ ID NO: 136504 - DNA, 25 bp, Homo sapien
gagcgcctcacgctaaacctggcga

SEQ ID NO: 136505 - DNA, 25 bp, Homo sapien
agaaggggcaccttgcaaccctcga

SEQ ID NO: 136506 - DNA, 25 bp, Homo sapien
tagtttcccatttgtcctagaggcg

SEQ ID NO: 136507 - DNA, 25 bp, Homo sapien
gacgcaactgtctgtgaggcggatc

SEQ ID NO: 136508 - DNA, 25 bp, Homo sapien
gacgcctcccgacgcgcctggggtc

SEQ ID NO: 136509 - DNA, 25 bp, Homo sapien
tcggggctggaggacgacgcctccc

SEQ ID NO: 136510 - DNA, 25 bp, Homo sapien
gtctgtgaggcggatctgcccttcg

SEQ ID NO: 136511 - DNA, 25 bp, Homo sapien
cgccgctccgcgtccggcctcctac

SEQ ID NO: 136512 - DNA, 25 bp, Homo sapien
tgaaaatttgtattggaatccggag

SEQ ID NO: 136513 - DNA, 25 bp, Homo sapien
gtatccagtgaaaatttgtattgga

SEQ ID NO: 136514 - DNA, 25 bp, Homo sapien
aaatttgtattggaatccggagcat

SEQ ID NO: 136515 - DNA, 25 bp, Homo sapien
ccagtgaaaatttgtattggaatcc

SEQ ID NO: 136516 - DNA, 25 bp, Homo sapien
tgagacgggcggtgttaaccatccc

SEQ ID NO: 136517 - DNA, 25 bp, Homo sapien
gactttctaccgactacccaatgga

SEQ ID NO: 136518 - DNA, 25 bp, Homo sapien
gaaggcattaaggagtatcgcaaac

SEQ ID NO: 136519 - DNA, 25 bp, Homo sapien
taagcctggaatctagtccggcctg

SEQ ID NO: 136520 - DNA, 25 bp, Homo sapien
acacttgaaatgagcttcggatcag

SEQ ID NO: 136521 - DNA, 25 bp, Homo sapien
tatcagagtcaaccaccactcttgc

SEQ ID NO: 136522 - DNA, 25 bp, Homo sapien
aatgagcttcggatcagttcttggc

SEQ ID NO: 136523 - DNA, 25 bp, Homo sapien
cagccttgctgtgcttgaggattgt

SEQ ID NO: 136524 - DNA, 25 bp, Homo sapien
ttggtgaccctaaagcagagttgcc

SEQ ID NO: 136525 - DNA, 25 bp, Homo sapien
tactggcggcactgtcttggtcatg

SEQ ID NO: 136526 - DNA, 25 bp, Homo sapien
gaaaccctatcaggcgcaggtactg

SEQ ID NO: 136527 - DNA, 25 bp, Homo sapien
catagcagatccacgagcatgagag

SEQ ID NO: 136528 - DNA, 25 bp, Homo sapien
tgcacaacattagcttgggtccaga

SEQ ID NO: 136529 - DNA, 25 bp, Homo sapien
gagagctgtaccaccacgatcagtg

SEQ ID NO: 136530 - DNA, 25 bp, Homo sapien
agtgaacagtgttaggccctgccca

SEQ ID NO: 136531 - DNA, 25 bp, Homo sapien
taccaggttgatcctgccaaatgcc

SEQ ID NO: 136532 - DNA, 25 bp, Homo sapien
gagaagcggttgtctgttcacctca

SEQ ID NO: 136533 - DNA, 25 bp, Homo sapien
taagactcctagctggcaagcatgt

SEQ ID NO: 136534 - DNA, 25 bp, Homo sapien
tgctggcactacaccttcgtaactg

SEQ ID NO: 136535 - DNA, 25 bp, Homo sapien
gctgatagcctatgatgggttccaa

SEQ ID NO: 136536 - DNA, 25 bp, Homo sapien
tggccataagactcctggcttctgc

SEQ ID NO: 136537 - DNA, 25 bp, Homo sapien
actcctggcttctgcccctctcctc

SEQ ID NO: 136538 - DNA, 25 bp, Homo sapien
cctggcttctgcccctctcctccat

SEQ ID NO: 136539 - DNA, 25 bp, Homo sapien
ctggccataagactcctggcttctg

SEQ ID NO: 136540 - DNA, 25 bp, Homo sapien
tctgggcctttgtagtgttaacgtg

SEQ ID NO: 136541 - DNA, 25 bp, Homo sapien
cttcaaggccgtcctttccagctgg

SEQ ID NO: 136542 - DNA, 25 bp, Homo sapien
agtgtattgcttcaaggccgtcctt

SEQ ID NO: 136543 - DNA, 25 bp, Homo sapien
ctgggtttggctgttgaggtccctt

SEQ ID NO: 136544 - DNA, 25 bp, Homo sapien
agggcagaccttcgctgtccctgac

SEQ ID NO: 136545 - DNA, 25 bp, Homo sapien
gtccctgacaccttggcaagcctgc

SEQ ID NO: 136546 - DNA, 25 bp, Homo sapien
caagcctgcagagggctaagcagcc

SEQ ID NO: 136547 - DNA, 25 bp, Homo sapien
cagggcagaccttcgctgtccctga

SEQ ID NO: 136548 - DNA, 25 bp, Homo sapien
ctccctgcagggctgttgtggacag

SEQ ID NO: 136549 - DNA, 25 bp, Homo sapien
caggtctgctgatgatatcgtgaac

SEQ ID NO: 136550 - DNA, 25 bp, Homo sapien
cacaggacaaggctccctgcagggc

SEQ ID NO: 136551 - DNA, 25 bp, Homo sapien
tcagtgtggcagcttgtaaattgtg

SEQ ID NO: 136552 - DNA, 25 bp, Homo sapien
attccaccaggaccattgtcaccag

SEQ ID NO: 136553 - DNA, 25 bp, Homo sapien
tcagcaggtccagtagtggctttgg

SEQ ID NO: 136554 - DNA, 25 bp, Homo sapien
gctttggctggcttgggatacagtt

SEQ ID NO: 136555 - DNA, 25 bp, Homo sapien
gggatacagttattccaccaggacc

SEQ ID NO: 136556 - DNA, 25 bp, Homo sapien
agggcaccaccccatgtgttgctca

SEQ ID NO: 136557 - DNA, 25 bp, Homo sapien
caagggcaccaccccatgtgttgct

SEQ ID NO: 136558 - DNA, 25 bp, Homo sapien
gggcaccaccccatgtgttgctcag

SEQ ID NO: 136559 - DNA, 25 bp, Homo sapien
aagggcaccaccccatgtgttgctc

SEQ ID NO: 136560 - DNA, 25 bp, Homo sapien
cattcccgatgaggaatttgacccc

SEQ ID NO: 136561 - DNA, 25 bp, Homo sapien
ttcacccaacctgcgcaggagcagt

SEQ ID NO: 136562 - DNA, 25 bp, Homo sapien
cctgtgtcctcagccgtttgcgagc

SEQ ID NO: 136563 - DNA, 25 bp, Homo sapien
agtcgccaccagctgggtaagtccc

SEQ ID NO: 136564 - DNA, 25 bp, Homo sapien
tcagtgccctatggccactgctgtc

SEQ ID NO: 136565 - DNA, 25 bp, Homo sapien
ctgtggtgccggcagctatattctg

SEQ ID NO: 136566 - DNA, 25 bp, Homo sapien
ggcagctatattctggccaccgtgc

SEQ ID NO: 136567 - DNA, 25 bp, Homo sapien
tttctctggccgcagtcgagagttc

SEQ ID NO: 136568 - DNA, 25 bp, Homo sapien
ggccgcagtcgagagttctgccttg

SEQ ID NO: 136569 - DNA, 25 bp, Homo sapien
taaatgtggacatcgcggtatcatg

SEQ ID NO: 136570 - DNA, 25 bp, Homo sapien
ctaaatgtggacatcgcggtatcat

SEQ ID NO: 136571 - DNA, 25 bp, Homo sapien
cacagtgtagtcttccggttgtccg

SEQ ID NO: 136572 - DNA, 25 bp, Homo sapien
gctggggggtattccgtcttctgca

SEQ ID NO: 136573 - DNA, 25 bp, Homo sapien
tcttctgcagatcaactcccgcagg

SEQ ID NO: 136574 - DNA, 25 bp, Homo sapien
cggttgtccgagggtactgtcccag

SEQ ID NO: 136575 - DNA, 25 bp, Homo sapien
actggcattggcaagcgaggaggct

SEQ ID NO: 136576 - DNA, 25 bp, Homo sapien
gactggcattggcaagcgaggaggc

SEQ ID NO: 136577 - DNA, 25 bp, Homo sapien
agagactggcattggcaagcgagga

SEQ ID NO: 136578 - DNA, 25 bp, Homo sapien
tggcattggcaagcgaggaggcttc

SEQ ID NO: 136579 - DNA, 25 bp, Homo sapien
tttccttctgtagctttgccagctc

SEQ ID NO: 136580 - DNA, 25 bp, Homo sapien
tatttgtggaggcagctgattgcgg

SEQ ID NO: 136581 - DNA, 25 bp, Homo sapien
ttgccagctctctctcgggacttat

SEQ ID NO: 136582 - DNA, 25 bp, Homo sapien
ctctctctcgggacttatgtgttta

SEQ ID NO: 136583 - DNA, 25 bp, Homo sapien
caaggagtcagtccctagagatctc

SEQ ID NO: 136584 - DNA, 25 bp, Homo sapien
taccctctagttccagtgcccggtg

SEQ ID NO: 136585 - DNA, 25 bp, Homo sapien
tagggagacgccctggtctaggcat

SEQ ID NO: 136586 - DNA, 25 bp, Homo sapien
gccagacacccggaagcaaagtttg

SEQ ID NO: 136587 - DNA, 25 bp, Homo sapien
gaaagttctgataactccacatctc

SEQ ID NO: 136588 - DNA, 25 bp, Homo sapien
tctgataactccacatctccaggta

SEQ ID NO: 136589 - DNA, 25 bp, Homo sapien
agttctgataactccacatctccag

SEQ ID NO: 136590 - DNA, 25 bp, Homo sapien
gttctgataactccacatctccagg

SEQ ID NO: 136591 - DNA, 25 bp, Homo sapien
aaatggggaggaacggaacagagct

SEQ ID NO: 136592 - DNA, 25 bp, Homo sapien
gctgaggagatgccgctggcaccac

SEQ ID NO: 136593 - DNA, 25 bp, Homo sapien
gaacagagctgaggagatgccgctg

SEQ ID NO: 136594 - DNA, 25 bp, Homo sapien
cttcagtcagaaatggggaggaacg

SEQ ID NO: 136595 - DNA, 25 bp, Homo sapien
ccaacagcagtgaggtccctggggc

SEQ ID NO: 136596 - DNA, 25 bp, Homo sapien
cagcagtgaggtccctggggcttca

SEQ ID NO: 136597 - DNA, 25 bp, Homo sapien
cagtgaggtccctggggcttcagga

SEQ ID NO: 136598 - DNA, 25 bp, Homo sapien
aacagcagtgaggtccctggggctt

SEQ ID NO: 136599 - DNA, 25 bp, Homo sapien
gaacttcatcttgtagcctctcctt

SEQ ID NO: 136600 - DNA, 25 bp, Homo sapien
catgaacttcatcttgtagcctctc

SEQ ID NO: 136601 - DNA, 25 bp, Homo sapien
atcttgtagcctctccttcccacat

SEQ ID NO: 136602 - DNA, 25 bp, Homo sapien
cttcatcttgtagcctctccttccc

SEQ ID NO: 136603 - DNA, 25 bp, Homo sapien
tgatgctgaaccaggagtgcacagg

SEQ ID NO: 136604 - DNA, 25 bp, Homo sapien
ctgcagccaatgttgatgctgaacc

SEQ ID NO: 136605 - DNA, 25 bp, Homo sapien
gtcaaactggatccataggctctgc

SEQ ID NO: 136606 - DNA, 25 bp, Homo sapien
caggagtgcacagggtcaaactgga

SEQ ID NO: 136607 - DNA, 25 bp, Homo sapien
gtgtccttgggggtaattgtgacca

SEQ ID NO: 136608 - DNA, 25 bp, Homo sapien
tgtccttgggggtaattgtgaccat

SEQ ID NO: 136609 - DNA, 25 bp, Homo sapien
ctaagcagagactcgagagtgccag

SEQ ID NO: 136610 - DNA, 25 bp, Homo sapien
aagcccctaagcagagactcgagag

SEQ ID NO: 136611 - DNA, 25 bp, Homo sapien
gtgccacagtgataccccctcagtg

SEQ ID NO: 136612 - DNA, 25 bp, Homo sapien
ggtatggtgccacagtgataccccc

SEQ ID NO: 136613 - DNA, 25 bp, Homo sapien
ccagggtcttcctgacatggattca

SEQ ID NO: 136614 - DNA, 25 bp, Homo sapien
gtcagttatggccatagttaccatt

SEQ ID NO: 136615 - DNA, 25 bp, Homo sapien
tatggccatagttaccatttgctct

SEQ ID NO: 136616 - DNA, 25 bp, Homo sapien
gccatagttaccatttgctctccct

SEQ ID NO: 136617 - DNA, 25 bp, Homo sapien
ctcagctcgttcctgcctttgttcc

SEQ ID NO: 136618 - DNA, 25 bp, Homo sapien
tgttcctttacttgttctgtgcact

SEQ ID NO: 136619 - DNA, 25 bp, Homo sapien
cagctcgttcctgcctttgttcctt

SEQ ID NO: 136620 - DNA, 25 bp, Homo sapien
tttgttcctttacttgttctgtgca

SEQ ID NO: 136621 - DNA, 25 bp, Homo sapien
tctcagtgaacgtggtctgaaccat

SEQ ID NO: 136622 - DNA, 25 bp, Homo sapien
cggtggctgtgaagcaccaccagct

SEQ ID NO: 136623 - DNA, 25 bp, Homo sapien
ccagctctcagtgaacgtggtctga

SEQ ID NO: 136624 - DNA, 25 bp, Homo sapien
gccagaggcccaaggacggtggctg

SEQ ID NO: 136625 - DNA, 25 bp, Homo sapien
ttccagctgttgcttccagggctga

SEQ ID NO: 136626 - DNA, 25 bp, Homo sapien
tgcagagaagcaaccgtgtggatag

SEQ ID NO: 136627 - DNA, 25 bp, Homo sapien
gtggcgggcctctgtcttgcagaga

SEQ ID NO: 136628 - DNA, 25 bp, Homo sapien
caaccgtgtggatagtgacaggcca

SEQ ID NO: 136629 - DNA, 25 bp, Homo sapien
cgttttctcacacaagcccaaagga

SEQ ID NO: 136630 - DNA, 25 bp, Homo sapien
taagttgcgcaggattacatgtcca

SEQ ID NO: 136631 - DNA, 25 bp, Homo sapien
tcagggtacgggttccattctccac

SEQ ID NO: 136632 - DNA, 25 bp, Homo sapien
tctaacccagggagacattgtgtag

SEQ ID NO: 136633 - DNA, 25 bp, Homo sapien
actcatcgtcccaaacatctgcttc

SEQ ID NO: 136634 - DNA, 25 bp, Homo sapien
ttcctgtacaaaccgcgggtggcac

SEQ ID NO: 136635 - DNA, 25 bp, Homo sapien
atctgcttccaattcgggcccttgc

SEQ ID NO: 136636 - DNA, 25 bp, Homo sapien
tgcttccaattcgggcccttgcctt

SEQ ID NO: 136637 - DNA, 25 bp, Homo sapien
ggtctgtttcgtgtcgaagcccaaa

SEQ ID NO: 136638 - DNA, 25 bp, Homo sapien
caactaatgagcaaagtgacttcca

SEQ ID NO: 136639 - DNA, 25 bp, Homo sapien
gaaaaggccctactcatgcagggta

SEQ ID NO: 136640 - DNA, 25 bp, Homo sapien
cacacagaggataagtaactgccaa

SEQ ID NO: 136641 - DNA, 25 bp, Homo sapien
tctagggatagggatcagacacacc

SEQ ID NO: 136642 - DNA, 25 bp, Homo sapien
gcttcttaaccatgggatagtggca

SEQ ID NO: 136643 - DNA, 25 bp, Homo sapien
ggcaatgttggtacctctagggata

SEQ ID NO: 136644 - DNA, 25 bp, Homo sapien
gacttgtcaatactagccagcagca

SEQ ID NO: 136645 - DNA, 25 bp, Homo sapien
gagaccagacatgagtgaataccta

SEQ ID NO: 136646 - DNA, 25 bp, Homo sapien
cctgctttcatactagccagtgtgg

SEQ ID NO: 136647 - DNA, 25 bp, Homo sapien
tgcagattcgtcaggccaggtgaaa

SEQ ID NO: 136648 - DNA, 25 bp, Homo sapien
gaatacctaggagagtgtcagcatg

SEQ ID NO: 136649 - DNA, 25 bp, Homo sapien
gaaacataatgctgccccttgggcc

SEQ ID NO: 136650 - DNA, 25 bp, Homo sapien
tcccatgggatatgtaccggaaggt

SEQ ID NO: 136651 - DNA, 25 bp, Homo sapien
tgtctgagccctcctgttcgcaggg

SEQ ID NO: 136652 - DNA, 25 bp, Homo sapien
tcgcagggatcatgaggaacaagcc

SEQ ID NO: 136653 - DNA, 25 bp, Homo sapien
taaccatcagccagaagatgccgca

SEQ ID NO: 136654 - DNA, 25 bp, Homo sapien
tggcatggtatgtaagctgagctct

SEQ ID NO: 136655 - DNA, 25 bp, Homo sapien
gcttctgggcgcaagttacagacat

SEQ ID NO: 136656 - DNA, 25 bp, Homo sapien
tggaggattttgtcacctacaagcc

SEQ ID NO: 136657 - DNA, 25 bp, Homo sapien
gatccctaagggctgtcatgctgac

SEQ ID NO: 136658 - DNA, 25 bp, Homo sapien
ttggagatggcgaagaaagagaacc

SEQ ID NO: 136659 - DNA, 25 bp, Homo sapien
gactaccctcctaatcatgtgacag

SEQ ID NO: 136660 - DNA, 25 bp, Homo sapien
gtcaaactgttcctaccctgtgtcc

SEQ ID NO: 136661 - DNA, 25 bp, Homo sapien
tattctccgtgtggcatggctcgct

SEQ ID NO: 136662 - DNA, 25 bp, Homo sapien
tggaaacccgttttctcagccatat

SEQ ID NO: 136663 - DNA, 25 bp, Homo sapien
ttccccaggaatgagaaggcttggt

SEQ ID NO: 136664 - DNA, 25 bp, Homo sapien
cgctgtctgaacctagccttgtgga

SEQ ID NO: 136665 - DNA, 25 bp, Homo sapien
tttagacatccttgctcttgcccag

SEQ ID NO: 136666 - DNA, 25 bp, Homo sapien
ggtgtacagtggtgctaccttgact

SEQ ID NO: 136667 - DNA, 25 bp, Homo sapien
ccattatctaatgggattattatta

SEQ ID NO: 136668 - DNA, 25 bp, Homo sapien
acctggcccttttgcccattatcta

SEQ ID NO: 136669 - DNA, 25 bp, Homo sapien
cgtaatcaccaacggcgcaatactt

SEQ ID NO: 136670 - DNA, 25 bp, Homo sapien
tcttccgtaatcaccaacggcgcaa

SEQ ID NO: 136671 - DNA, 25 bp, Homo sapien
tggttcttccgtaatcaccaacggc

SEQ ID NO: 136672 - DNA, 25 bp, Homo sapien
actcctggttcttccgtaatcacca

SEQ ID NO: 136673 - DNA, 25 bp, Homo sapien
tgataacgtcccttcttggaccgtc

SEQ ID NO: 136674 - DNA, 25 bp, Homo sapien
cacccaaaaagtggcctgataacgt

SEQ ID NO: 136675 - DNA, 25 bp, Homo sapien
tggcctgataacgtcccttcttgga

SEQ ID NO: 136676 - DNA, 25 bp, Homo sapien
aaagtggcctgataacgtcccttct

SEQ ID NO: 136677 - DNA, 25 bp, Homo sapien
tccccactctgtaaagcataacagt

SEQ ID NO: 136678 - DNA, 25 bp, Homo sapien
gcataacagtcaccgcttggagaag

SEQ ID NO: 136679 - DNA, 25 bp, Homo sapien
gtttaagagctaagaccagaatgaa

SEQ ID NO: 136680 - DNA, 25 bp, Homo sapien
tatgctaggataatgtgaaggaaat

SEQ ID NO: 136681 - DNA, 25 bp, Homo sapien
ctctgatctctgagactaagcattc

SEQ ID NO: 136682 - DNA, 25 bp, Homo sapien
tgatctctgagactaagcattcgct

SEQ ID NO: 136683 - DNA, 25 bp, Homo sapien
atctctgagactaagcattcgcttc

SEQ ID NO: 136684 - DNA, 25 bp, Homo sapien
ctctgagactaagcattcgcttcat

SEQ ID NO: 136685 - DNA, 25 bp, Homo sapien
ctctagactcttattagaatatccc

SEQ ID NO: 136686 - DNA, 25 bp, Homo sapien
tcttattagaatatccctgggcagt

SEQ ID NO: 136687 - DNA, 25 bp, Homo sapien
tccctgggcagttgattccagacac

SEQ ID NO: 136688 - DNA, 25 bp, Homo sapien
tttactacttatcctctctagactc

SEQ ID NO: 136689 - DNA, 25 bp, Homo sapien
tctacacttaagcagggacaccgct

SEQ ID NO: 136690 - DNA, 25 bp, Homo sapien
tttcccagtgtgatcgctcagcagc

SEQ ID NO: 136691 - DNA, 25 bp, Homo sapien
tggaaacgccagacaaacaaggtct

SEQ ID NO: 136692 - DNA, 25 bp, Homo sapien
gacttcaccgaactgacatgaggtt

SEQ ID NO: 136693 - DNA, 25 bp, Homo sapien
ggaaaagtattaccccatatgcttc

SEQ ID NO: 136694 - DNA, 25 bp, Homo sapien
caaataactctagtgcaaagcacag

SEQ ID NO: 136695 - DNA, 25 bp, Homo sapien
aaagcacagtacctggaagtatcag

SEQ ID NO: 136696 - DNA, 25 bp, Homo sapien
gaatctctcacatcaaggatcacaa

SEQ ID NO: 136697 - DNA, 25 bp, Homo sapien
acttctctttcctttaatgcgctgg

SEQ ID NO: 136698 - DNA, 25 bp, Homo sapien
cttctctttcctttaatgcgctggg

SEQ ID NO: 136699 - DNA, 25 bp, Homo sapien
tgcgctgggatccttcttttctttc

SEQ ID NO: 136700 - DNA, 25 bp, Homo sapien
taatgcgctgggatccttcttttct

SEQ ID NO: 136701 - DNA, 25 bp, Homo sapien
ttggcatacagacagtccatcattg

SEQ ID NO: 136702 - DNA, 25 bp, Homo sapien
tgcactaagtccagtttggctttta

SEQ ID NO: 136703 - DNA, 25 bp, Homo sapien
ttgataaagttggtatcaacgagga

SEQ ID NO: 136704 - DNA, 25 bp, Homo sapien
taaagttggtatcaacgaggatgtg

SEQ ID NO: 136705 - DNA, 25 bp, Homo sapien
tcatagatggccttacttttctttt

SEQ ID NO: 136706 - DNA, 25 bp, Homo sapien
ggcttcatagatggccttacttttc

SEQ ID NO: 136707 - DNA, 25 bp, Homo sapien
tatgataggcttcatagatggcctt

SEQ ID NO: 136708 - DNA, 25 bp, Homo sapien
ataggcttcatagatggccttactt

SEQ ID NO: 136709 - DNA, 25 bp, Homo sapien
tacacaatcggttatacatgggata

SEQ ID NO: 136710 - DNA, 25 bp, Homo sapien
ttagagccactcgatacttctgccc

SEQ ID NO: 136711 - DNA, 25 bp, Homo sapien
cttagagccactcgatacttctgcc

SEQ ID NO: 136712 - DNA, 25 bp, Homo sapien
agccattacacaatcggttatacat

SEQ ID NO: 136713 - DNA, 25 bp, Homo sapien
caaaactgataaaccgctaccaaga

SEQ ID NO: 136714 - DNA, 25 bp, Homo sapien
aacgatcaacaaaactgataaaccg

SEQ ID NO: 136715 - DNA, 25 bp, Homo sapien
caacaaaactgataaaccgctacca

SEQ ID NO: 136716 - DNA, 25 bp, Homo sapien
atcaacaaaactgataaaccgctac

SEQ ID NO: 136717 - DNA, 25 bp, Homo sapien
ctttgtgtgtacatggtaatcgttc

SEQ ID NO: 136718 - DNA, 25 bp, Homo sapien
tcctttgtgtgtacatggtaatcgt

SEQ ID NO: 136719 - DNA, 25 bp, Homo sapien
tgagttactctctgtactaagcagt

SEQ ID NO: 136720 - DNA, 25 bp, Homo sapien
tgtgtgtacatggtaatcgttcaaa

SEQ ID NO: 136721 - DNA, 25 bp, Homo sapien
taatgtatattcctagatgttttac

SEQ ID NO: 136722 - DNA, 25 bp, Homo sapien
gttttactgaccatgaacattcagg

SEQ ID NO: 136723 - DNA, 25 bp, Homo sapien
cctagatgttttactgaccatgaac

SEQ ID NO: 136724 - DNA, 25 bp, Homo sapien
gcacaaagtaaacagttatgaactg

SEQ ID NO: 136725 - DNA, 25 bp, Homo sapien
actccaggaatcttacggattcttc

SEQ ID NO: 136726 - DNA, 25 bp, Homo sapien
ttcaggtcccggtcaactgtggcca

SEQ ID NO: 136727 - DNA, 25 bp, Homo sapien
gattcttcttttcaggtcccggtca

SEQ ID NO: 136728 - DNA, 25 bp, Homo sapien
ctgtggccacaatgtaacacttatg

SEQ ID NO: 136729 - DNA, 25 bp, Homo sapien
ccttaaatcctatctctctcttttg

SEQ ID NO: 136730 - DNA, 25 bp, Homo sapien
cagtaatcttactctaacaatttaa

SEQ ID NO: 136731 - DNA, 25 bp, Homo sapien
ggccaaaaagattagcttgatttaa

SEQ ID NO: 136732 - DNA, 25 bp, Homo sapien
aaaacaatacgtctatttcttccag

SEQ ID NO: 136733 - DNA, 25 bp, Homo sapien
atctggcatccgttcaatgttgtat

SEQ ID NO: 136734 - DNA, 25 bp, Homo sapien
agaatcgaggggctccataatcatc

SEQ ID NO: 136735 - DNA, 25 bp, Homo sapien
atcgaggggctccataatcatctgg

SEQ ID NO: 136736 - DNA, 25 bp, Homo sapien
aatcatctggcatccgttcaatgtt

SEQ ID NO: 136737 - DNA, 25 bp, Homo sapien
taaaaatcccgctacattttgtgta

SEQ ID NO: 136738 - DNA, 25 bp, Homo sapien
ctgattccttaaaaatcccgctaca

SEQ ID NO: 136739 - DNA, 25 bp, Homo sapien
tgattccttaaaaatcccgctacat

SEQ ID NO: 136740 - DNA, 25 bp, Homo sapien
aatcccgctacattttgtgtaatga

SEQ ID NO: 136741 - DNA, 25 bp, Homo sapien
actctgttcagggttcagtcctttg

SEQ ID NO: 136742 - DNA, 25 bp, Homo sapien
taactctgttcagggttcagtcctt

SEQ ID NO: 136743 - DNA, 25 bp, Homo sapien
cttaactctgttcagggttcagtcc

SEQ ID NO: 136744 - DNA, 25 bp, Homo sapien
aacttaactctgttcagggttcagt

SEQ ID NO: 136745 - DNA, 25 bp, Homo sapien
gaataataattcatgctattgcatt

SEQ ID NO: 136746 - DNA, 25 bp, Homo sapien
aattcagttgcatgtaagaaaatcc

SEQ ID NO: 136747 - DNA, 25 bp, Homo sapien
aggcaaataggtcaacagaataata

SEQ ID NO: 136748 - DNA, 25 bp, Homo sapien
taataattcatgctattgcattgga

SEQ ID NO: 136749 - DNA, 25 bp, Homo sapien
aaaaaagagtgagcatattgaacta

SEQ ID NO: 136750 - DNA, 25 bp, Homo sapien
aaagagtgagcatattgaactaccc

SEQ ID NO: 136751 - DNA, 25 bp, Homo sapien
gagtgagcatattgaactaccctca

SEQ ID NO: 136752 - DNA, 25 bp, Homo sapien
gtgagcatattgaactaccctcagc

SEQ ID NO: 136753 - DNA, 25 bp, Homo sapien
aaaacagcatcagtggcaaaacagc

SEQ ID NO: 136754 - DNA, 25 bp, Homo sapien
ttcaaaacagcatcagtggcaaaac

SEQ ID NO: 136755 - DNA, 25 bp, Homo sapien
caaaacagcatcagtggcaaaacag

SEQ ID NO: 136756 - DNA, 25 bp, Homo sapien
gaggccgaggcatacttttctgtat

SEQ ID NO: 136757 - DNA, 25 bp, Homo sapien
cataaattgtggatacaatatggaa

SEQ ID NO: 136758 - DNA, 25 bp, Homo sapien
agtataggcaccacactgtacaaca

SEQ ID NO: 136759 - DNA, 25 bp, Homo sapien
aatgtatgggttacaaagtgatatc

SEQ ID NO: 136760 - DNA, 25 bp, Homo sapien
taccccattattaagtataggcacc

SEQ ID NO: 136761 - DNA, 25 bp, Homo sapien
tataaaacaatgaccgccaaattat

SEQ ID NO: 136762 - DNA, 25 bp, Homo sapien
acaatgaccgccaaattatgtgagc

SEQ ID NO: 136763 - DNA, 25 bp, Homo sapien
gccaaattatgtgagcaatcatcag

SEQ ID NO: 136764 - DNA, 25 bp, Homo sapien
tgtgagcaatcatcagaatatctga

SEQ ID NO: 136765 - DNA, 25 bp, Homo sapien
tattttagtggatcttgtcaacagc

SEQ ID NO: 136766 - DNA, 25 bp, Homo sapien
gaattgggctcacaggatatctgca

SEQ ID NO: 136767 - DNA, 25 bp, Homo sapien
gcagcagtgcagtaaacatccttct

SEQ ID NO: 136768 - DNA, 25 bp, Homo sapien
gtttcttcgcatacatatcacgttg

SEQ ID NO: 136769 - DNA, 25 bp, Homo sapien
aggaattctgtaccagtgaagagac

SEQ ID NO: 136770 - DNA, 25 bp, Homo sapien
tcttgagctgaggcgattcacctgc

SEQ ID NO: 136771 - DNA, 25 bp, Homo sapien
gaattctgtaccagtgaagagacgg

SEQ ID NO: 136772 - DNA, 25 bp, Homo sapien
gcgtccagcctgacattaatttatt

SEQ ID NO: 136773 - DNA, 25 bp, Homo sapien
catgattaccaacacagggcaaagg

SEQ ID NO: 136774 - DNA, 25 bp, Homo sapien
cagagagccagaatacttggtgacc

SEQ ID NO: 136775 - DNA, 25 bp, Homo sapien
taccttggtccgtaaaacagagagc

SEQ ID NO: 136776 - DNA, 25 bp, Homo sapien
tgtcaccaccatgaactggctgaga

SEQ ID NO: 136777 - DNA, 25 bp, Homo sapien
tgtgataaactacagtgaccacttg

SEQ ID NO: 136778 - DNA, 25 bp, Homo sapien
tgaccacttggaatacatagaactg

SEQ ID NO: 136779 - DNA, 25 bp, Homo sapien
tccagagtgagcgaacatattgtag

SEQ ID NO: 136780 - DNA, 25 bp, Homo sapien
tatgggcttagatacctcagatgaa

SEQ ID NO: 136781 - DNA, 25 bp, Homo sapien
agtagatcctgggacaactggcagt

SEQ ID NO: 136782 - DNA, 25 bp, Homo sapien
atccaggtgaaactcattaaatctg

SEQ ID NO: 136783 - DNA, 25 bp, Homo sapien
gaaagtagatcctgggacaactggc

SEQ ID NO: 136784 - DNA, 25 bp, Homo sapien
aaagtagatcctgggacaactggca

SEQ ID NO: 136785 - DNA, 25 bp, Homo sapien
gccccggagcgtgtaaacggagcgc

SEQ ID NO: 136786 - DNA, 25 bp, Homo sapien
agcgtgtaaacggagcgcgccagtg

SEQ ID NO: 136787 - DNA, 25 bp, Homo sapien
aacggagcgcgccagtgcgccggcg

SEQ ID NO: 136788 - DNA, 25 bp, Homo sapien
tgtaaacggagcgcgccagtgcgcc

SEQ ID NO: 136789 - DNA, 25 bp, Homo sapien
agggctcgtcctggcgccgttactc

SEQ ID NO: 136790 - DNA, 25 bp, Homo sapien
aaaagaaggcgcagggctcgtcctg

SEQ ID NO: 136791 - DNA, 25 bp, Homo sapien
ccaattcgggtacatatcgaaaaag

SEQ ID NO: 136792 - DNA, 25 bp, Homo sapien
tggcgccgttactcgtcgcaaccga

SEQ ID NO: 136793 - DNA, 25 bp, Homo sapien
tggagctgcgccaagtgctgttcgc

SEQ ID NO: 136794 - DNA, 25 bp, Homo sapien
gctgttcgcggaagctcatgaagcc

SEQ ID NO: 136795 - DNA, 25 bp, Homo sapien
cccgtctcgttggtggtggagcatc

SEQ ID NO: 136796 - DNA, 25 bp, Homo sapien
ggctgaagcacgcactgcatttgct

SEQ ID NO: 136797 - DNA, 25 bp, Homo sapien
gggggcatataggacccaggcggca

SEQ ID NO: 136798 - DNA, 25 bp, Homo sapien
gggattccagctccattggaaccaa

SEQ ID NO: 136799 - DNA, 25 bp, Homo sapien
catgtaagactgagatgggggcata

SEQ ID NO: 136800 - DNA, 25 bp, Homo sapien
ggtagtaagagggtggcggctgagg

SEQ ID NO: 136801 - DNA, 25 bp, Homo sapien
tgggatttagaatggccctgggagg

SEQ ID NO: 136802 - DNA, 25 bp, Homo sapien
tgcctgagaagagggcaagtaggac

SEQ ID NO: 136803 - DNA, 25 bp, Homo sapien
actgggaatggctcaaataggattg

SEQ ID NO: 136804 - DNA, 25 bp, Homo sapien
tcaaataggattgcgaggaagagga

SEQ ID NO: 136805 - DNA, 25 bp, Homo sapien
aggctcttgctggacagttgtctta

SEQ ID NO: 136806 - DNA, 25 bp, Homo sapien
ggcggcttgctgctgttcagtactc

SEQ ID NO: 136807 - DNA, 25 bp, Homo sapien
agtcatcgtagagggatctggctca

SEQ ID NO: 136808 - DNA, 25 bp, Homo sapien
gctgttcagtactcttgtttttggc

SEQ ID NO: 136809 - DNA, 25 bp, Homo sapien
gcaaactaagcaagtgctgtcgata

SEQ ID NO: 136810 - DNA, 25 bp, Homo sapien
cctctgttgcaaactaagcaagtgc

SEQ ID NO: 136811 - DNA, 25 bp, Homo sapien
taagcaagtgctgtcgataccaata

SEQ ID NO: 136812 - DNA, 25 bp, Homo sapien
tgttgcaaactaagcaagtgctgtc

SEQ ID NO: 136813 - DNA, 25 bp, Homo sapien
ttctggaacttgactggtggcaggt

SEQ ID NO: 136814 - DNA, 25 bp, Homo sapien
ggtggcaggtactgtaacttcttct

SEQ ID NO: 136815 - DNA, 25 bp, Homo sapien
ttcttttaccggctctggtgtatcc

SEQ ID NO: 136816 - DNA, 25 bp, Homo sapien
ccggctctggtgtatcctttgctac

SEQ ID NO: 136817 - DNA, 25 bp, Homo sapien
agaggaggtggcacttcctcatttg

SEQ ID NO: 136818 - DNA, 25 bp, Homo sapien
gagaggaggtggcacttcctcattt

SEQ ID NO: 136819 - DNA, 25 bp, Homo sapien
cctggcatcttcttctgggtcctca

SEQ ID NO: 136820 - DNA, 25 bp, Homo sapien
aactgctttaacctggcatcttctt

SEQ ID NO: 136821 - DNA, 25 bp, Homo sapien
ctgctttaacctggcatcttcttct

SEQ ID NO: 136822 - DNA, 25 bp, Homo sapien
tggcatcttcttctgggtcctcaga

SEQ ID NO: 136823 - DNA, 25 bp, Homo sapien
ctgctggtgctgctgccagtgtgct

SEQ ID NO: 136824 - DNA, 25 bp, Homo sapien
gtgctgctgccagtgtgctgctgca

SEQ ID NO: 136825 - DNA, 25 bp, Homo sapien
gctggtgctgctgccagtgtgctgc

SEQ ID NO: 136826 - DNA, 25 bp, Homo sapien
ctgctgccagtgtgctgctgcagcc

SEQ ID NO: 136827 - DNA, 25 bp, Homo sapien
tgctgtaactgagtgtgcttctgca

SEQ ID NO: 136828 - DNA, 25 bp, Homo sapien
tgcttctgcattattccctgatact

SEQ ID NO: 136829 - DNA, 25 bp, Homo sapien
ttctgcattattccctgatactgga

SEQ ID NO: 136830 - DNA, 25 bp, Homo sapien
ctgctgtaactgagtgtgcttctgc

SEQ ID NO: 136831 - DNA, 25 bp, Homo sapien
tgggggctgtataatctgctgatac

SEQ ID NO: 136832 - DNA, 25 bp, Homo sapien
ggggctgtataatctgctgatactg

SEQ ID NO: 136833 - DNA, 25 bp, Homo sapien
tggtgggggctgtataatctgctga

SEQ ID NO: 136834 - DNA, 25 bp, Homo sapien
tgtggtgggggctgtataatctgct

SEQ ID NO: 136835 - DNA, 25 bp, Homo sapien
aatgtcttggggcaacttcctattg

SEQ ID NO: 136836 - DNA, 25 bp, Homo sapien
cttggggcaacttcctattgtggac

SEQ ID NO: 136837 - DNA, 25 bp, Homo sapien
tgtcttggggcaacttcctattgtg

SEQ ID NO: 136838 - DNA, 25 bp, Homo sapien
tcttggggcaacttcctattgtgga

SEQ ID NO: 136839 - DNA, 25 bp, Homo sapien
tatgtccctgccatgttttccactg

SEQ ID NO: 136840 - DNA, 25 bp, Homo sapien
tgcatctcataatgccgcagctgca

SEQ ID NO: 136841 - DNA, 25 bp, Homo sapien
cctggagatagctctgagtggcttt

SEQ ID NO: 136842 - DNA, 25 bp, Homo sapien
gaaatgaattgactttctcctggag

SEQ ID NO: 136843 - DNA, 25 bp, Homo sapien
aagacaatggtgggaggggcatgac

SEQ ID NO: 136844 - DNA, 25 bp, Homo sapien
tgaagacaatggtgggaggggcatg

SEQ ID NO: 136845 - DNA, 25 bp, Homo sapien
ctgaagacaatggtgggaggggcat

SEQ ID NO: 136846 - DNA, 25 bp, Homo sapien
gaagacaatggtgggaggggcatga

SEQ ID NO: 136847 - DNA, 25 bp, Homo sapien
tgctgttaactgaggaggtatccct

SEQ ID NO: 136848 - DNA, 25 bp, Homo sapien
tggaacttgcgagctctgtgaactg

SEQ ID NO: 136849 - DNA, 25 bp, Homo sapien
taggtttctctggaacttgcgagct

SEQ ID NO: 136850 - DNA, 25 bp, Homo sapien
gaggtatcccttgtggaactccagg

SEQ ID NO: 136851 - DNA, 25 bp, Homo sapien
ctgattgcaacggaggatggtaagt

SEQ ID NO: 136852 - DNA, 25 bp, Homo sapien
gaccagctgattgcaacggaggatg

SEQ ID NO: 136853 - DNA, 25 bp, Homo sapien
tgatggaccagctgattgcaacgga

SEQ ID NO: 136854 - DNA, 25 bp, Homo sapien
cacttgttctgatggaccagctgat

SEQ ID NO: 136855 - DNA, 25 bp, Homo sapien
cagagcagacttgctcaaaggagct

SEQ ID NO: 136856 - DNA, 25 bp, Homo sapien
aagtaactacttctaggaggatctg

SEQ ID NO: 136857 - DNA, 25 bp, Homo sapien
tccttgatcagatgagaatgaactg

SEQ ID NO: 136858 - DNA, 25 bp, Homo sapien
atcagatgagaatgaactgtatggc

SEQ ID NO: 136859 - DNA, 25 bp, Homo sapien
tctctattatctggccgaggcaggc

SEQ ID NO: 136860 - DNA, 25 bp, Homo sapien
gactgagccgccttgacatccttta

SEQ ID NO: 136861 - DNA, 25 bp, Homo sapien
gcaggtacaggcttattcgcaaggg

SEQ ID NO: 136862 - DNA, 25 bp, Homo sapien
cattctggtcccaattagagggctc

SEQ ID NO: 136863 - DNA, 25 bp, Homo sapien
agctcttcggggtggtattctctct

SEQ ID NO: 136864 - DNA, 25 bp, Homo sapien
tctctctactcccagcccttcgaag

SEQ ID NO: 136865 - DNA, 25 bp, Homo sapien
tactcccagcccttcgaagaggtcc

SEQ ID NO: 136866 - DNA, 25 bp, Homo sapien
gctcttcggggtggtattctctctc

SEQ ID NO: 136867 - DNA, 25 bp, Homo sapien
gagtctaagcttgcatcggacccca

SEQ ID NO: 136868 - DNA, 25 bp, Homo sapien
cctaggaggctcatcccggtgatat

SEQ ID NO: 136869 - DNA, 25 bp, Homo sapien
ggaatatcccgttcacgaaactgtg

SEQ ID NO: 136870 - DNA, 25 bp, Homo sapien
ggaatgtctatccacatcagatggg

SEQ ID NO: 136871 - DNA, 25 bp, Homo sapien
gattagtgaatataaagtctatcag

SEQ ID NO: 136872 - DNA, 25 bp, Homo sapien
tctgaggatgctcctaagcaaacca

SEQ ID NO: 136873 - DNA, 25 bp, Homo sapien
agtatcaatagttaagacaaatctg

SEQ ID NO: 136874 - DNA, 25 bp, Homo sapien
caaggagaaatatctgcttttagtt

SEQ ID NO: 136875 - DNA, 25 bp, Homo sapien
tctgcaatcttgattcctgaggtgg

SEQ ID NO: 136876 - DNA, 25 bp, Homo sapien
tcctgaggtggtagatggtcagcca

SEQ ID NO: 136877 - DNA, 25 bp, Homo sapien
cggatacattccaggtcttgaagat

SEQ ID NO: 136878 - DNA, 25 bp, Homo sapien
gatacattccaggtcttgaagatgt

SEQ ID NO: 136879 - DNA, 25 bp, Homo sapien
gggaaaaggagcatctctaccacac

SEQ ID NO: 136880 - DNA, 25 bp, Homo sapien
taccattttgtgaacagaagctatg

SEQ ID NO: 136881 - DNA, 25 bp, Homo sapien
gaagctatgtagttcaggtgtactt

SEQ ID NO: 136882 - DNA, 25 bp, Homo sapien
cttggtgtacttatcaaaatctggg

SEQ ID NO: 136883 - DNA, 25 bp, Homo sapien
tgcctgaacagttctgaagtatgta

SEQ ID NO: 136884 - DNA, 25 bp, Homo sapien
gtatgtactggggtatgacatttcc

SEQ ID NO: 136885 - DNA, 25 bp, Homo sapien
tcatactgcctgaacagttctgaag

SEQ ID NO: 136886 - DNA, 25 bp, Homo sapien
gaacagttctgaagtatgtactggg

SEQ ID NO: 136887 - DNA, 25 bp, Homo sapien
gtatggcatggtaaactttgtcaag

SEQ ID NO: 136888 - DNA, 25 bp, Homo sapien
taataaaatggagttgactaataca

SEQ ID NO: 136889 - DNA, 25 bp, Homo sapien
gacaaatggctattacctaaaggta

SEQ ID NO: 136890 - DNA, 25 bp, Homo sapien
ttgactggaggtaactactggctac

SEQ ID NO: 136891 - DNA, 25 bp, Homo sapien
aacctggtggtttgcccataggagg

SEQ ID NO: 136892 - DNA, 25 bp, Homo sapien
tggaggtggtggtattgggacaggt

SEQ ID NO: 136893 - DNA, 25 bp, Homo sapien
acaggaacagatgatcttgctggtg

SEQ ID NO: 136894 - DNA, 25 bp, Homo sapien
ggagcagagggtcttacaattgaac

SEQ ID NO: 136895 - DNA, 25 bp, Homo sapien
gttcatcatttgtatcccagagccc

SEQ ID NO: 136896 - DNA, 25 bp, Homo sapien
gtggtaatactggagcagatggaat

SEQ ID NO: 136897 - DNA, 25 bp, Homo sapien
gatggaattgctgcagtttctgact

SEQ ID NO: 136898 - DNA, 25 bp, Homo sapien
taaattctgaattcagtccttgttc

SEQ ID NO: 136899 - DNA, 25 bp, Homo sapien
acagtctgttgtactggtggtggct

SEQ ID NO: 136900 - DNA, 25 bp, Homo sapien
taatcaacagtctgttgtactggtg

SEQ ID NO: 136901 - DNA, 25 bp, Homo sapien
tcaacagtctgttgtactggtggtg

SEQ ID NO: 136902 - DNA, 25 bp, Homo sapien
ataatcaacagtctgttgtactggt

SEQ ID NO: 136903 - DNA, 25 bp, Homo sapien
gggcgtagagttattctttctccat

SEQ ID NO: 136904 - DNA, 25 bp, Homo sapien
ctgtctcaaaagttgatctttcagg

SEQ ID NO: 136905 - DNA, 25 bp, Homo sapien
gtggatctgggcgtagagttattct

SEQ ID NO: 136906 - DNA, 25 bp, Homo sapien
tgatctttcaggtagtggatctggg

SEQ ID NO: 136907 - DNA, 25 bp, Homo sapien
taacgatcacgttggcctgcatgct

SEQ ID NO: 136908 - DNA, 25 bp, Homo sapien
tttgacgatcaaaataaggctcacg

SEQ ID NO: 136909 - DNA, 25 bp, Homo sapien
gggtcggcgttctctgtcaaatcga

SEQ ID NO: 136910 - DNA, 25 bp, Homo sapien
ggtctcgatctctatgtgtctcacg

SEQ ID NO: 136911 - DNA, 25 bp, Homo sapien
tcttttttgtctcgatatgactgag

SEQ ID NO: 136912 - DNA, 25 bp, Homo sapien
gtcttttttgtctcgatatgactga

SEQ ID NO: 136913 - DNA, 25 bp, Homo sapien
tagactggtcggtcagacttccggt

SEQ ID NO: 136914 - DNA, 25 bp, Homo sapien
ggtccttcatagactggtcggtcag

SEQ ID NO: 136915 - DNA, 25 bp, Homo sapien
tccaaacatggatggtccttcatag

SEQ ID NO: 136916 - DNA, 25 bp, Homo sapien
gacttccggtcataggatggcctat

SEQ ID NO: 136917 - DNA, 25 bp, Homo sapien
cagaggcattcgctcctcaggataa

SEQ ID NO: 136918 - DNA, 25 bp, Homo sapien
cattcgctcctcaggataagtcctt

SEQ ID NO: 136919 - DNA, 25 bp, Homo sapien
tcctcaggataagtccttcgttctc

SEQ ID NO: 136920 - DNA, 25 bp, Homo sapien
agctggcagaggcattcgctcctca

SEQ ID NO: 136921 - DNA, 25 bp, Homo sapien
ttcaaaatatcgtccacattctttg

SEQ ID NO: 136922 - DNA, 25 bp, Homo sapien
gtttcaaaatatcgtccacattctt

SEQ ID NO: 136923 - DNA, 25 bp, Homo sapien
ggtttcaaaatatcgtccacattct

SEQ ID NO: 136924 - DNA, 25 bp, Homo sapien
tcaaaatatcgtccacattctttga

SEQ ID NO: 136925 - DNA, 25 bp, Homo sapien
cgaagacgaatcaacttcataggac

SEQ ID NO: 136926 - DNA, 25 bp, Homo sapien
cacgaagacgaatcaacttcatagg

SEQ ID NO: 136927 - DNA, 25 bp, Homo sapien
atcttctggtttgcacgaagacgaa

SEQ ID NO: 136928 - DNA, 25 bp, Homo sapien
ggtttgcacgaagacgaatcaactt

SEQ ID NO: 136929 - DNA, 25 bp, Homo sapien
ccaggtaatcctctcattataacaa

SEQ ID NO: 136930 - DNA, 25 bp, Homo sapien
cactgccaggtaatcctctcattat

SEQ ID NO: 136931 - DNA, 25 bp, Homo sapien
tccactgccaggtaatcctctcatt

SEQ ID NO: 136932 - DNA, 25 bp, Homo sapien
ctgccaggtaatcctctcattataa

SEQ ID NO: 136933 - DNA, 25 bp, Homo sapien
caggcttagaactctgggtgcaggt

SEQ ID NO: 136934 - DNA, 25 bp, Homo sapien
ggtgcaggtcctccaaattctacct

SEQ ID NO: 136935 - DNA, 25 bp, Homo sapien
ggcttagaactctgggtgcaggtcc

SEQ ID NO: 136936 - DNA, 25 bp, Homo sapien
gtcctccaaattctacctccttatc

SEQ ID NO: 136937 - DNA, 25 bp, Homo sapien
ccatcatccagagtctttttgaaag

SEQ ID NO: 136938 - DNA, 25 bp, Homo sapien
aaactggtcaaaatgcctaactctg

SEQ ID NO: 136939 - DNA, 25 bp, Homo sapien
tgctggtgcggtaagtctcctccat

SEQ ID NO: 136940 - DNA, 25 bp, Homo sapien
cctaactctgtcattgatggcatcc

SEQ ID NO: 136941 - DNA, 25 bp, Homo sapien
ttctcttgccacaagtctggttatc

SEQ ID NO: 136942 - DNA, 25 bp, Homo sapien
atttctcttgccacaagtctggtta

SEQ ID NO: 136943 - DNA, 25 bp, Homo sapien
tttctcttgccacaagtctggttat

SEQ ID NO: 136944 - DNA, 25 bp, Homo sapien
tctcttgccacaagtctggttatct

SEQ ID NO: 136945 - DNA, 25 bp, Homo sapien
actgcagccttgacatggtgggctc

SEQ ID NO: 136946 - DNA, 25 bp, Homo sapien
agtgtagtggcgccaacatggctca

SEQ ID NO: 136947 - DNA, 25 bp, Homo sapien
ggagtgtagtggcgccaacatggct

SEQ ID NO: 136948 - DNA, 25 bp, Homo sapien
ccttgacatggtgggctcaagtgat

SEQ ID NO: 136949 - DNA, 25 bp, Homo sapien
cttgcagcaaagaacgaatatctag

SEQ ID NO: 136950 - DNA, 25 bp, Homo sapien
tctagacgcatcatgtgacgaggtg

SEQ ID NO: 136951 - DNA, 25 bp, Homo sapien
ggtgcagtttcccagtgatcagcca

SEQ ID NO: 136952 - DNA, 25 bp, Homo sapien
caaagaacgaatatctagacgcatc

SEQ ID NO: 136953 - DNA, 25 bp, Homo sapien
gttcttcgatatttgcatcaaaatc

SEQ ID NO: 136954 - DNA, 25 bp, Homo sapien
ttctttctgttcttcgatatttgca

SEQ ID NO: 136955 - DNA, 25 bp, Homo sapien
tttctgttcttcgatatttgcatca

SEQ ID NO: 136956 - DNA, 25 bp, Homo sapien
tctgttcttcgatatttgcatcaaa

SEQ ID NO: 136957 - DNA, 25 bp, Homo sapien
tatgaaacttgctcttaacccttgg

SEQ ID NO: 136958 - DNA, 25 bp, Homo sapien
tatcacacacgggttcgatgggacc

SEQ ID NO: 136959 - DNA, 25 bp, Homo sapien
tccagcagggtagaattttaaggcc

SEQ ID NO: 136960 - DNA, 25 bp, Homo sapien
tatgaggagcaactttagcaagggc

SEQ ID NO: 136961 - DNA, 25 bp, Homo sapien
taaaggaggcaaactatcataccaa

SEQ ID NO: 136962 - DNA, 25 bp, Homo sapien
catacatttctagtctaccagccag

SEQ ID NO: 136963 - DNA, 25 bp, Homo sapien
cacaggtaaagtaagtcacaaagca

SEQ ID NO: 136964 - DNA, 25 bp, Homo sapien
gaaaactttaagcatcactggaata

SEQ ID NO: 136965 - DNA, 25 bp, Homo sapien
taaatgaccaaattcaccaaacttc

SEQ ID NO: 136966 - DNA, 25 bp, Homo sapien
tcagagtagtcacttcagaatagta

SEQ ID NO: 136967 - DNA, 25 bp, Homo sapien
gaaggcgctttgaggcagctacagt

SEQ ID NO: 136968 - DNA, 25 bp, Homo sapien
tcagaatagtatcatgaaggcgctt

SEQ ID NO: 136969 - DNA, 25 bp, Homo sapien
tatcacgtttgaactggaaaagcat

SEQ ID NO: 136970 - DNA, 25 bp, Homo sapien
tccactgactagctgtaaatacatc

SEQ ID NO: 136971 - DNA, 25 bp, Homo sapien
tcagtttccactgactagctgtaaa

SEQ ID NO: 136972 - DNA, 25 bp, Homo sapien
cattaaaactgggaatggattcagt

SEQ ID NO: 136973 - DNA, 25 bp, Homo sapien
gtacacagagagaagctcgaagggt

SEQ ID NO: 136974 - DNA, 25 bp, Homo sapien
cgtacacagagagaagctcgaaggg

SEQ ID NO: 136975 - DNA, 25 bp, Homo sapien
gaagctcgaagggttagaaagagac

SEQ ID NO: 136976 - DNA, 25 bp, Homo sapien
tcgaagggttagaaagagacacata

SEQ ID NO: 136977 - DNA, 25 bp, Homo sapien
ctcccatttgcttttcggaatgtaa

SEQ ID NO: 136978 - DNA, 25 bp, Homo sapien
tcccatttgcttttcggaatgtaac

SEQ ID NO: 136979 - DNA, 25 bp, Homo sapien
cagatgtgtccatctcccatttgct

SEQ ID NO: 136980 - DNA, 25 bp, Homo sapien
ctagctttgcctcagatgtgtccat

SEQ ID NO: 136981 - DNA, 25 bp, Homo sapien
gaagcaaatggtagacgggccagaa

SEQ ID NO: 136982 - DNA, 25 bp, Homo sapien
gattagctctcaatacagtggtgca

SEQ ID NO: 136983 - DNA, 25 bp, Homo sapien
taaataggctacaagatccgacaca

SEQ ID NO: 136984 - DNA, 25 bp, Homo sapien
cctgatgtggcaagtaacaacctgc

SEQ ID NO: 136985 - DNA, 25 bp, Homo sapien
tatctacgtgtatatgacgggccgt

SEQ ID NO: 136986 - DNA, 25 bp, Homo sapien
gaaacacactagtattaggcaggcc

SEQ ID NO: 136987 - DNA, 25 bp, Homo sapien
cagtattaccagaagagacagaagc

SEQ ID NO: 136988 - DNA, 25 bp, Homo sapien
aaatctttcagacaccacgttggag

SEQ ID NO: 136989 - DNA, 25 bp, Homo sapien
gagggctaggctttccaacaactca

SEQ ID NO: 136990 - DNA, 25 bp, Homo sapien
ccattctgaggctaagggctagtca

SEQ ID NO: 136991 - DNA, 25 bp, Homo sapien
tctgaaccctgaatctgagagggct

SEQ ID NO: 136992 - DNA, 25 bp, Homo sapien
ggttgtaccaagaactcaatgagcc

SEQ ID NO: 136993 - DNA, 25 bp, Homo sapien
gcaatggcctcccagtcacgtttcc

SEQ ID NO: 136994 - DNA, 25 bp, Homo sapien
ttccttttagtaccagtcctcaagc

SEQ ID NO: 136995 - DNA, 25 bp, Homo sapien
cagtcacgtttccttttagtaccag

SEQ ID NO: 136996 - DNA, 25 bp, Homo sapien
ttttagtaccagtcctcaagccatc

SEQ ID NO: 136997 - DNA, 25 bp, Homo sapien
tcagaagcacgagtatcataatcat

SEQ ID NO: 136998 - DNA, 25 bp, Homo sapien
ggttcaccttccatagtcatcaaag

SEQ ID NO: 136999 - DNA, 25 bp, Homo sapien
gaaccactaaacatacaaggagcag

SEQ ID NO: 137000 - DNA, 25 bp, Homo sapien
gaagttaatcccaagaacccatctg

SEQ ID NO: 137001 - DNA, 25 bp, Homo sapien
gaggactcattcatagacttcgtac

SEQ ID NO: 137002 - DNA, 25 bp, Homo sapien
cagcacatagttaaatatactgatc

SEQ ID NO: 137003 - DNA, 25 bp, Homo sapien
gaaatgagtagtatgtttgcgaata

SEQ ID NO: 137004 - DNA, 25 bp, Homo sapien
tatacttatcaacctcagcacatag

SEQ ID NO: 137005 - DNA, 25 bp, Homo sapien
ttaacattggaattaggccaggcac

SEQ ID NO: 137006 - DNA, 25 bp, Homo sapien
gcgaaagatcattacgaactaagtc

SEQ ID NO: 137007 - DNA, 25 bp, Homo sapien
agatcattacgaactaagtcttggg

SEQ ID NO: 137008 - DNA, 25 bp, Homo sapien
ttttagcgaaagatcattacgaact

SEQ ID NO: 137009 - DNA, 25 bp, Homo sapien
atcattacgaactaagtcttgggca

SEQ ID NO: 137010 - DNA, 25 bp, Homo sapien
catgctctttacactgaacctggga

SEQ ID NO: 137011 - DNA, 25 bp, Homo sapien
tgttgcttgcactacacagtatcaa

SEQ ID NO: 137012 - DNA, 25 bp, Homo sapien
tatcacctggtcaaagggaggagcc

SEQ ID NO: 137013 - DNA, 25 bp, Homo sapien
gaacctgggaatgcattattgctct

SEQ ID NO: 137014 - DNA, 25 bp, Homo sapien
tccagattcatgctgccagagtgat

SEQ ID NO: 137015 - DNA, 25 bp, Homo sapien
tatccacttggcatgagtctagtca

SEQ ID NO: 137016 - DNA, 25 bp, Homo sapien
gagaaaactctctggacaatccaag

SEQ ID NO: 137017 - DNA, 25 bp, Homo sapien
caaagtccaagaactcaggtccctc

SEQ ID NO: 137018 - DNA, 25 bp, Homo sapien
tggcccttttcctatctgcatcctt

SEQ ID NO: 137019 - DNA, 25 bp, Homo sapien
tctcttccaggtctgcccatctgac

SEQ ID NO: 137020 - DNA, 25 bp, Homo sapien
cttttcctatctgcatccttcttct

SEQ ID NO: 137021 - DNA, 25 bp, Homo sapien
ctatggcccttttcctatctgcatc

SEQ ID NO: 137022 - DNA, 25 bp, Homo sapien
caatcagtctgtccgaccacaaaac

SEQ ID NO: 137023 - DNA, 25 bp, Homo sapien
gccaggtgaccactttcatctgtga

SEQ ID NO: 137024 - DNA, 25 bp, Homo sapien
catatatatttggttcgattgaggg

SEQ ID NO: 137025 - DNA, 25 bp, Homo sapien
gtgatcttctcccaatcagtctgtc

SEQ ID NO: 137026 - DNA, 25 bp, Homo sapien
ataatgactccgttcaaaaactaag

SEQ ID NO: 137027 - DNA, 25 bp, Homo sapien
ttcagaccacctcaaagcgaaccac

SEQ ID NO: 137028 - DNA, 25 bp, Homo sapien
acacaaagaagctccgcgaggcctt

SEQ ID NO: 137029 - DNA, 25 bp, Homo sapien
aactgaaacgtggaagcaaggtgac

SEQ ID NO: 137030 - DNA, 25 bp, Homo sapien
aaggtgacacacaaagaagctccgc

SEQ ID NO: 137031 - DNA, 25 bp, Homo sapien
caagaactgaaacgtggaagcaagg

SEQ ID NO: 137032 - DNA, 25 bp, Homo sapien
ttaacgtcttgcttgggtacagcaa

SEQ ID NO: 137033 - DNA, 25 bp, Homo sapien
attaacgtcttgcttgggtacagca

SEQ ID NO: 137034 - DNA, 25 bp, Homo sapien
aattaacgtcttgcttgggtacagc

SEQ ID NO: 137035 - DNA, 25 bp, Homo sapien
tctgttggaatcctccagcagaccc

SEQ ID NO: 137036 - DNA, 25 bp, Homo sapien
tactctctgttggaatcctccagca

SEQ ID NO: 137037 - DNA, 25 bp, Homo sapien
aatcctccagcagacccccgcctgg

SEQ ID NO: 137038 - DNA, 25 bp, Homo sapien
cagacccccgcctggcttcagcagt

SEQ ID NO: 137039 - DNA, 25 bp, Homo sapien
gatagtctgtgacattgtacagtgg

SEQ ID NO: 137040 - DNA, 25 bp, Homo sapien
aaagcaatgatgatagagatagtct

SEQ ID NO: 137041 - DNA, 25 bp, Homo sapien
atcctagtacaatcagctaccagtt

SEQ ID NO: 137042 - DNA, 25 bp, Homo sapien
tctgtgacattgtacagtggaggaa

SEQ ID NO: 137043 - DNA, 25 bp, Homo sapien
acatgtgctacggaatcattgagcc

SEQ ID NO: 137044 - DNA, 25 bp, Homo sapien
aaggcaacaagcttgagttccacag

SEQ ID NO: 137045 - DNA, 25 bp, Homo sapien
taaaggttacatgccagagtgctct

SEQ ID NO: 137046 - DNA, 25 bp, Homo sapien
cagaatggatatgctccagggaact

SEQ ID NO: 137047 - DNA, 25 bp, Homo sapien
gacaactgaaataaagcatcctgca

SEQ ID NO: 137048 - DNA, 25 bp, Homo sapien
cattggcattctaactactgtcaga

SEQ ID NO: 137049 - DNA, 25 bp, Homo sapien
ccctgccctggtataagagcacaga

SEQ ID NO: 137050 - DNA, 25 bp, Homo sapien
ggataatcaccactcatttcattgg

SEQ ID NO: 137051 - DNA, 25 bp, Homo sapien
ccacaggctctttgtaggatcacaa

SEQ ID NO: 137052 - DNA, 25 bp, Homo sapien
taactctcagtcacgtgtggaccag

SEQ ID NO: 137053 - DNA, 25 bp, Homo sapien
tacagtaaaccattaagtccacagg

SEQ ID NO: 137054 - DNA, 25 bp, Homo sapien
gatcagtcactgaggtgcacgtgca

SEQ ID NO: 137055 - DNA, 25 bp, Homo sapien
gatctcaccagaaccaactctaagg

SEQ ID NO: 137056 - DNA, 25 bp, Homo sapien
cacaagtcagatgtggcaggcaggc

SEQ ID NO: 137057 - DNA, 25 bp, Homo sapien
tatcaaaggtttcaagccggcagtc

SEQ ID NO: 137058 - DNA, 25 bp, Homo sapien
tatgagacctatatccccacatggc

SEQ ID NO: 137059 - DNA, 25 bp, Homo sapien
tagtaaggacagctcaagaggaatc

SEQ ID NO: 137060 - DNA, 25 bp, Homo sapien
aaagattaggaatggagcgctaccg

SEQ ID NO: 137061 - DNA, 25 bp, Homo sapien
cactgcagccgacatttttgttgcc

SEQ ID NO: 137062 - DNA, 25 bp, Homo sapien
gatgctcatcactgggtgaaagcaa

SEQ ID NO: 137063 - DNA, 25 bp, Homo sapien
caccttctaggagcttgtatgtaag

SEQ ID NO: 137064 - DNA, 25 bp, Homo sapien
tggtaggacatgtacaaacaaagcc

SEQ ID NO: 137065 - DNA, 25 bp, Homo sapien
caccagctggaagatacagaggtag

SEQ ID NO: 137066 - DNA, 25 bp, Homo sapien
tcagggacgcagtaccatgtgagct

SEQ ID NO: 137067 - DNA, 25 bp, Homo sapien
aaaatcaacccaccgcaaattcagc

SEQ ID NO: 137068 - DNA, 25 bp, Homo sapien
gggagacaatattcatgcttccatg

SEQ ID NO: 137069 - DNA, 25 bp, Homo sapien
tactagtaaaaaggtgctgctcaaa

SEQ ID NO: 137070 - DNA, 25 bp, Homo sapien
gccacttcgctcaatgaagacagaa

SEQ ID NO: 137071 - DNA, 25 bp, Homo sapien
gatggaaagtaatccagcctttctg

SEQ ID NO: 137072 - DNA, 25 bp, Homo sapien
tgatatacaccccaaagctgctttt

SEQ ID NO: 137073 - DNA, 25 bp, Homo sapien
catcccattacttcatcagagctga

SEQ ID NO: 137074 - DNA, 25 bp, Homo sapien
tctgctcttccatgagtgtgggttg

SEQ ID NO: 137075 - DNA, 25 bp, Homo sapien
gtacaagtcttaactgcttcaggga

SEQ ID NO: 137076 - DNA, 25 bp, Homo sapien
tgtaaagtacgagttcagatgatcc

SEQ ID NO: 137077 - DNA, 25 bp, Homo sapien
cagtggtgggcacgaaagagatact

SEQ ID NO: 137078 - DNA, 25 bp, Homo sapien
gctctgtaaagcagatcacagtttg

SEQ ID NO: 137079 - DNA, 25 bp, Homo sapien
gataatgcaaatagtctccagctga

SEQ ID NO: 137080 - DNA, 25 bp, Homo sapien
gatgcccaactgcatgctggaccca

SEQ ID NO: 137081 - DNA, 25 bp, Homo sapien
ggtgccccaacctcatatatgcaga

SEQ ID NO: 137082 - DNA, 25 bp, Homo sapien
gaaccaagactttctgatgcccaac

SEQ ID NO: 137083 - DNA, 25 bp, Homo sapien
taccgaagtctctttgagccacaga

SEQ ID NO: 137084 - DNA, 25 bp, Homo sapien
tctcactggagctgtcttatcaagg

SEQ ID NO: 137085 - DNA, 25 bp, Homo sapien
aattgccagcttgacgttacaggag

SEQ ID NO: 137086 - DNA, 25 bp, Homo sapien
cagaggagtcctagggttgcagaat

SEQ ID NO: 137087 - DNA, 25 bp, Homo sapien
catccaaatggaaaaatctgcccgg

SEQ ID NO: 137088 - DNA, 25 bp, Homo sapien
cacctcgtggcaaatgtctgactgg

SEQ ID NO: 137089 - DNA, 25 bp, Homo sapien
tggtgtcacaaatcccaaaatgctg

SEQ ID NO: 137090 - DNA, 25 bp, Homo sapien
tatatgaacccctatactgagctgg

SEQ ID NO: 137091 - DNA, 25 bp, Homo sapien
taaaccctggtcacttgaagaaggc

SEQ ID NO: 137092 - DNA, 25 bp, Homo sapien
ggctgagactctacccaaataaccg

SEQ ID NO: 137093 - DNA, 25 bp, Homo sapien
gaggcaagtcctaggtcatcatatg

SEQ ID NO: 137094 - DNA, 25 bp, Homo sapien
tccccttagtgttgctgatggaagc

SEQ ID NO: 137095 - DNA, 25 bp, Homo sapien
tccaataaggtcatcgctgcaacag

SEQ ID NO: 137096 - DNA, 25 bp, Homo sapien
gatgagggatagttctgccaggcaa

SEQ ID NO: 137097 - DNA, 25 bp, Homo sapien
ccaggcaaatggagagtgggtacca

SEQ ID NO: 137098 - DNA, 25 bp, Homo sapien
tacaaagagtcttcatagcccaggg

SEQ ID NO: 137099 - DNA, 25 bp, Homo sapien
tgcccatctggaaagtctacccctt

SEQ ID NO: 137100 - DNA, 25 bp, Homo sapien
gaacagagaggcctgcatgctgtca

SEQ ID NO: 137101 - DNA, 25 bp, Homo sapien
gcatgctgtcatggaggcactgcct

SEQ ID NO: 137102 - DNA, 25 bp, Homo sapien
ttcttccctcggtgaagatggaaca

SEQ ID NO: 137103 - DNA, 25 bp, Homo sapien
ctggtagatcattccatagttcaca

SEQ ID NO: 137104 - DNA, 25 bp, Homo sapien
gttcacagccatgcagtggttgatg

SEQ ID NO: 137105 - DNA, 25 bp, Homo sapien
ttccatagttcacagccatgcagtg

SEQ ID NO: 137106 - DNA, 25 bp, Homo sapien
ggtagatcattccatagttcacagc

SEQ ID NO: 137107 - DNA, 25 bp, Homo sapien
acaggatctcaggaggcgactggca

SEQ ID NO: 137108 - DNA, 25 bp, Homo sapien
gaatccatccacttattgcaggtga

SEQ ID NO: 137109 - DNA, 25 bp, Homo sapien
aagcttggtgggatactgttctaga

SEQ ID NO: 137110 - DNA, 25 bp, Homo sapien
taagcattccaccactacagcctag

SEQ ID NO: 137111 - DNA, 25 bp, Homo sapien
gtcaaatccaacacagaaccctgct

SEQ ID NO: 137112 - DNA, 25 bp, Homo sapien
aatccaacacagaaccctgctcctc

SEQ ID NO: 137113 - DNA, 25 bp, Homo sapien
tccaacacagaaccctgctcctcac

SEQ ID NO: 137114 - DNA, 25 bp, Homo sapien
ctgtcaaatccaacacagaaccctg

SEQ ID NO: 137115 - DNA, 25 bp, Homo sapien
actcttccacattcctattaactat

SEQ ID NO: 137116 - DNA, 25 bp, Homo sapien
tcacattgaaccatgtcaatatttg

SEQ ID NO: 137117 - DNA, 25 bp, Homo sapien
atatttgttaactcaaactcttcca

SEQ ID NO: 137118 - DNA, 25 bp, Homo sapien
ttccacattcctattaactatttcc

SEQ ID NO: 137119 - DNA, 25 bp, Homo sapien
caacatgttctctgaggatttgtgt

SEQ ID NO: 137120 - DNA, 25 bp, Homo sapien
aacatgttctctgaggatttgtgta

SEQ ID NO: 137121 - DNA, 25 bp, Homo sapien
caaactggtccaatatctttcctct

SEQ ID NO: 137122 - DNA, 25 bp, Homo sapien
aaactgagttaggtccactccaatg

SEQ ID NO: 137123 - DNA, 25 bp, Homo sapien
ccccgcccagctaagattctttaag

SEQ ID NO: 137124 - DNA, 25 bp, Homo sapien
catgtgtcatgaagggagatgaaaa

SEQ ID NO: 137125 - DNA, 25 bp, Homo sapien
ggatgttcatattggagctgcctct

SEQ ID NO: 137126 - DNA, 25 bp, Homo sapien
gaggatgttcatattggagctgcct

SEQ ID NO: 137127 - DNA, 25 bp, Homo sapien
gagaggatgttcatattggagctgc

SEQ ID NO: 137128 - DNA, 25 bp, Homo sapien
gatctgagatgccatggtttgctgt

SEQ ID NO: 137129 - DNA, 25 bp, Homo sapien
gccactgaaattctggaaggatggg

SEQ ID NO: 137130 - DNA, 25 bp, Homo sapien
gcttggcgcccttctctcttgggac

SEQ ID NO: 137131 - DNA, 25 bp, Homo sapien
gaaggtgtatacgactgtcccgcca

SEQ ID NO: 137132 - DNA, 25 bp, Homo sapien
cagaactggctctgagcttggcgcc

SEQ ID NO: 137133 - DNA, 25 bp, Homo sapien
tggagcaggcaaccctaaggcgctc

SEQ ID NO: 137134 - DNA, 25 bp, Homo sapien
cgcccgacgaggggtgttcggagcg

SEQ ID NO: 137135 - DNA, 25 bp, Homo sapien
gcccgacgaggggtgttcggagcga

SEQ ID NO: 137136 - DNA, 25 bp, Homo sapien
gacgaggggtgttcggagcgaacca

SEQ ID NO: 137137 - DNA, 25 bp, Homo sapien
gagggcgggcggacaccggatatag

SEQ ID NO: 137138 - DNA, 25 bp, Homo sapien
ggctgaacgcccgagacacacagcg

SEQ ID NO: 137139 - DNA, 25 bp, Homo sapien
acacacagcgggatcgggacagcat

SEQ ID NO: 137140 - DNA, 25 bp, Homo sapien
acgcccgagacacacagcgggatcg

SEQ ID NO: 137141 - DNA, 25 bp, Homo sapien
gagcggctgaacgcccgagacacac

SEQ ID NO: 137142 - DNA, 25 bp, Homo sapien
caggcagggaacgtctccctagagg

SEQ ID NO: 137143 - DNA, 25 bp, Homo sapien
cagggaacgtctccctagagggcag

SEQ ID NO: 137144 - DNA, 25 bp, Homo sapien
ggaacgtctccctagagggcagttc

SEQ ID NO: 137145 - DNA, 25 bp, Homo sapien
gaacgtctccctagagggcagttcc

SEQ ID NO: 137146 - DNA, 25 bp, Homo sapien
tgctgttagggtaacctggtccctg

SEQ ID NO: 137147 - DNA, 25 bp, Homo sapien
tgttagggtaacctggtccctggca

SEQ ID NO: 137148 - DNA, 25 bp, Homo sapien
agggtaacctggtccctggcataag

SEQ ID NO: 137149 - DNA, 25 bp, Homo sapien
ctgctgttagggtaacctggtccct

SEQ ID NO: 137150 - DNA, 25 bp, Homo sapien
tacagctgtagttctgaaaaagcga

SEQ ID NO: 137151 - DNA, 25 bp, Homo sapien
gaaaaagcgaacactgaagacactg

SEQ ID NO: 137152 - DNA, 25 bp, Homo sapien
ttctgaaaaagcgaacactgaagac

SEQ ID NO: 137153 - DNA, 25 bp, Homo sapien
ctgtagttctgaaaaagcgaacact

SEQ ID NO: 137154 - DNA, 25 bp, Homo sapien
ttctgcaaacgctggggttttgact

SEQ ID NO: 137155 - DNA, 25 bp, Homo sapien
tggggttttgactgtaaccaagtca

SEQ ID NO: 137156 - DNA, 25 bp, Homo sapien
acccattttggcaggtatgttataa

SEQ ID NO: 137157 - DNA, 25 bp, Homo sapien
ccattttggcaggtatgttataaga

SEQ ID NO: 137158 - DNA, 25 bp, Homo sapien
aacccattttggcaggtatgttata

SEQ ID NO: 137159 - DNA, 25 bp, Homo sapien
cccattttggcaggtatgttataag

SEQ ID NO: 137160 - DNA, 25 bp, Homo sapien
cttgtcagtttcaatctcacaaacc

SEQ ID NO: 137161 - DNA, 25 bp, Homo sapien
cagtttcaatctcacaaaccacttc

SEQ ID NO: 137162 - DNA, 25 bp, Homo sapien
gtttcaatctcacaaaccacttcat

SEQ ID NO: 137163 - DNA, 25 bp, Homo sapien
tgtcagtttcaatctcacaaaccac

SEQ ID NO: 137164 - DNA, 25 bp, Homo sapien
tttatccagcattagaaaattagct

SEQ ID NO: 137165 - DNA, 25 bp, Homo sapien
gacagatggaggaagtccaaatgtt

SEQ ID NO: 137166 - DNA, 25 bp, Homo sapien
ggaggaagtccaaatgtttatccag

SEQ ID NO: 137167 - DNA, 25 bp, Homo sapien
tgtttatccagcattagaaaattag

SEQ ID NO: 137168 - DNA, 25 bp, Homo sapien
aaagtggagtgcctccttcgacttt

SEQ ID NO: 137169 - DNA, 25 bp, Homo sapien
aggtaccaaaagagcttcaatcacg

SEQ ID NO: 137170 - DNA, 25 bp, Homo sapien
cctgagtgtgaaaagtggagtgcct

SEQ ID NO: 137171 - DNA, 25 bp, Homo sapien
tcacgccatttgctggtgatggaac

SEQ ID NO: 137172 - DNA, 25 bp, Homo sapien
cttgaccaccaggagaacttcttta

SEQ ID NO: 137173 - DNA, 25 bp, Homo sapien
ttgaccaccaggagaacttctttac

SEQ ID NO: 137174 - DNA, 25 bp, Homo sapien
tgacaagagtctttgacatatcggg

SEQ ID NO: 137175 - DNA, 25 bp, Homo sapien
tatgctcagtcccaatcccaagagg

SEQ ID NO: 137176 - DNA, 25 bp, Homo sapien
cttattccctcaactaagggcagct

SEQ ID NO: 137177 - DNA, 25 bp, Homo sapien
aatttgacatttgaagttcacacta

SEQ ID NO: 137178 - DNA, 25 bp, Homo sapien
agccggcttggccttagcaggagca

SEQ ID NO: 137179 - DNA, 25 bp, Homo sapien
ttcagccggcttggccttagcagga

SEQ ID NO: 137180 - DNA, 25 bp, Homo sapien
tcagccggcttggccttagcaggag

SEQ ID NO: 137181 - DNA, 25 bp, Homo sapien
cttcagccggcttggccttagcagg

SEQ ID NO: 137182 - DNA, 25 bp, Homo sapien
tgttctgaacgcagacctttgccag

SEQ ID NO: 137183 - DNA, 25 bp, Homo sapien
agctcctggctcagctagtggtggg

SEQ ID NO: 137184 - DNA, 25 bp, Homo sapien
ggcaacagtgggttttactgcagac

SEQ ID NO: 137185 - DNA, 25 bp, Homo sapien
ccgatgttctgaacgcagacctttg

SEQ ID NO: 137186 - DNA, 25 bp, Homo sapien
tgtcaatctcattaaaagttgtcag

SEQ ID NO: 137187 - DNA, 25 bp, Homo sapien
catgtcaatctcattaaaagttgtc

SEQ ID NO: 137188 - DNA, 25 bp, Homo sapien
atgtcaatctcattaaaagttgtca

SEQ ID NO: 137189 - DNA, 25 bp, Homo sapien
aactcctaccctggcattcaaaaca

SEQ ID NO: 137190 - DNA, 25 bp, Homo sapien
tgctatacaaaatcctcacaacaga

SEQ ID NO: 137191 - DNA, 25 bp, Homo sapien
catctcatggtctacactgttaaca

SEQ ID NO: 137192 - DNA, 25 bp, Homo sapien
aggatccaaccttctttaccattct

SEQ ID NO: 137193 - DNA, 25 bp, Homo sapien
aaaaagcctctttgtgccgagccct

SEQ ID NO: 137194 - DNA, 25 bp, Homo sapien
ttcttcaaaaaagcctctttgtgcc

SEQ ID NO: 137195 - DNA, 25 bp, Homo sapien
aagcctctttgtgccgagccctcat

SEQ ID NO: 137196 - DNA, 25 bp, Homo sapien
gcctagtttgaggttatgtttcttc

SEQ ID NO: 137197 - DNA, 25 bp, Homo sapien
tcccaggacctctccaattccagcc

SEQ ID NO: 137198 - DNA, 25 bp, Homo sapien
ccaattccagccacaagcaactcac

SEQ ID NO: 137199 - DNA, 25 bp, Homo sapien
caccacctctttggttgtgtcgtca

SEQ ID NO: 137200 - DNA, 25 bp, Homo sapien
ccacctctttggttgtgtcgtcaat

SEQ ID NO: 137201 - DNA, 25 bp, Homo sapien
acctctttggttgtgtcgtcaatca

SEQ ID NO: 137202 - DNA, 25 bp, Homo sapien
atacaccacctctttggttgtgtcg

SEQ ID NO: 137203 - DNA, 25 bp, Homo sapien
tcctgatgactggaaccaccagacc

SEQ ID NO: 137204 - DNA, 25 bp, Homo sapien
aattcatagcttccacattcctgat

SEQ ID NO: 137205 - DNA, 25 bp, Homo sapien
attcatagcttccacattcctgatg

SEQ ID NO: 137206 - DNA, 25 bp, Homo sapien
tcacctaaagtcagtccataatccc

SEQ ID NO: 137207 - DNA, 25 bp, Homo sapien
cagtttccttcacctaaagtcagtc

SEQ ID NO: 137208 - DNA, 25 bp, Homo sapien
cagtaagctatgactctaccactct

SEQ ID NO: 137209 - DNA, 25 bp, Homo sapien
taaagtcagtccataatcccagcgc

SEQ ID NO: 137210 - DNA, 25 bp, Homo sapien
ggtgttccaaagagcgagccaaaaa

SEQ ID NO: 137211 - DNA, 25 bp, Homo sapien
tgttccaaagagcgagccaaaaacg

SEQ ID NO: 137212 - DNA, 25 bp, Homo sapien
gtgttccaaagagcgagccaaaaac

SEQ ID NO: 137213 - DNA, 25 bp, Homo sapien
cgctgccttgattttgcggaggaaa

SEQ ID NO: 137214 - DNA, 25 bp, Homo sapien
tctgccatcaatcagccggtgatca

SEQ ID NO: 137215 - DNA, 25 bp, Homo sapien
ggtcagtgccacgtacatcatgggc

SEQ ID NO: 137216 - DNA, 25 bp, Homo sapien
atcataggtcagtgccacgtacatc

SEQ ID NO: 137217 - DNA, 25 bp, Homo sapien
ctaaagatccaggaggaggactctg

SEQ ID NO: 137218 - DNA, 25 bp, Homo sapien
tccaggaggaggactctgggatcct

SEQ ID NO: 137219 - DNA, 25 bp, Homo sapien
ggaggaggactctgggatcctctac

SEQ ID NO: 137220 - DNA, 25 bp, Homo sapien
caggaggaggactctgggatcctct

SEQ ID NO: 137221 - DNA, 25 bp, Homo sapien
tgactgctggttacacagtgctctg

SEQ ID NO: 137222 - DNA, 25 bp, Homo sapien
cagtgctctgcttccttgcttgagg

SEQ ID NO: 137223 - DNA, 25 bp, Homo sapien
tgcctgtcaccaggctaacccggga

SEQ ID NO: 137224 - DNA, 25 bp, Homo sapien
catgatcaacttgtagggtgtgtgg

SEQ ID NO: 137225 - DNA, 25 bp, Homo sapien
gcaatgtgagtcagtctagaggaga

SEQ ID NO: 137226 - DNA, 25 bp, Homo sapien
gatgattacaatgcatgacctcagg

SEQ ID NO: 137227 - DNA, 25 bp, Homo sapien
caggtgcttacagcaacttaactga

SEQ ID NO: 137228 - DNA, 25 bp, Homo sapien
ggaatcaagggagaatgtgcacagc

SEQ ID NO: 137229 - DNA, 25 bp, Homo sapien
ttcctaccccagtccacgtcctcca

SEQ ID NO: 137230 - DNA, 25 bp, Homo sapien
tgacctcatccgtttcaccactagg

SEQ ID NO: 137231 - DNA, 25 bp, Homo sapien
catccgtttcaccactaggtactaa

SEQ ID NO: 137232 - DNA, 25 bp, Homo sapien
ctcatccgtttcaccactaggtact

SEQ ID NO: 137233 - DNA, 25 bp, Homo sapien
tccgtttcaccactaggtactaaca

SEQ ID NO: 137234 - DNA, 25 bp, Homo sapien
gcactcagtattggctcccacccct

SEQ ID NO: 137235 - DNA, 25 bp, Homo sapien
aataatttcagtgcaacagtgctgg

SEQ ID NO: 137236 - DNA, 25 bp, Homo sapien
caacaggaccttgagtggctttcaa

SEQ ID NO: 137237 - DNA, 25 bp, Homo sapien
cagtcagggttctaccttctgtcaa

SEQ ID NO: 137238 - DNA, 25 bp, Homo sapien
tttggcaacactttcccggctggca

SEQ ID NO: 137239 - DNA, 25 bp, Homo sapien
tattctagagtatggcttgacaggc

SEQ ID NO: 137240 - DNA, 25 bp, Homo sapien
cctgcagtctaggttagctacccac

SEQ ID NO: 137241 - DNA, 25 bp, Homo sapien
gcttcacaaagatggtgaccccaaa

SEQ ID NO: 137242 - DNA, 25 bp, Homo sapien
cttggtccacaaggctatcaaatcc

SEQ ID NO: 137243 - DNA, 25 bp, Homo sapien
tatggagtggagttgacccaagccc

SEQ ID NO: 137244 - DNA, 25 bp, Homo sapien
cactccatgaagacagggatcctgg

SEQ ID NO: 137245 - DNA, 25 bp, Homo sapien
taaaagtctgtcatcagctgagacg

SEQ ID NO: 137246 - DNA, 25 bp, Homo sapien
cacttcgtaccttgtgggcagcaga

SEQ ID NO: 137247 - DNA, 25 bp, Homo sapien
caccccctcccggagcaggtctggg

SEQ ID NO: 137248 - DNA, 25 bp, Homo sapien
cggaagtgctctcggggacagctga

SEQ ID NO: 137249 - DNA, 25 bp, Homo sapien
ggacagctgagcagagctctttcct

SEQ ID NO: 137250 - DNA, 25 bp, Homo sapien
tggggccagcggaagtgctctcggg

SEQ ID NO: 137251 - DNA, 25 bp, Homo sapien
ggtttcctgtctggcccctggagcc

SEQ ID NO: 137252 - DNA, 25 bp, Homo sapien
ctggagccctggtggctttgctaaa

SEQ ID NO: 137253 - DNA, 25 bp, Homo sapien
gagggagggaggtttcctgtctggc

SEQ ID NO: 137254 - DNA, 25 bp, Homo sapien
agccctggtggctttgctaaaagca

SEQ ID NO: 137255 - DNA, 25 bp, Homo sapien
ggaaagtaagagagtaaaatcacag

SEQ ID NO: 137256 - DNA, 25 bp, Homo sapien
ctggaaagtaagagagtaaaatcac

SEQ ID NO: 137257 - DNA, 25 bp, Homo sapien
aaaatcacagatgtcagtttccaac

SEQ ID NO: 137258 - DNA, 25 bp, Homo sapien
cagatgtcagtttccaactccacct

SEQ ID NO: 137259 - DNA, 25 bp, Homo sapien
ggaccatgaagcttcgaggaatttc

SEQ ID NO: 137260 - DNA, 25 bp, Homo sapien
tcgaggaatttccaggtggtggaca

SEQ ID NO: 137261 - DNA, 25 bp, Homo sapien
gtggtggacaataagctgagctgtc

SEQ ID NO: 137262 - DNA, 25 bp, Homo sapien
caggtggtggacaataagctgagct

SEQ ID NO: 137263 - DNA, 25 bp, Homo sapien
ccgcctgctgcctggggaatcatgg

SEQ ID NO: 137264 - DNA, 25 bp, Homo sapien
ccacccgcctgctgcctggggaatc

SEQ ID NO: 137265 - DNA, 25 bp, Homo sapien
gggaatcatggggtgcctggcccgg

SEQ ID NO: 137266 - DNA, 25 bp, Homo sapien
gcctggcccggcctgcaagcaccat

SEQ ID NO: 137267 - DNA, 25 bp, Homo sapien
caggttgccataacagctggtggtt

SEQ ID NO: 137268 - DNA, 25 bp, Homo sapien
taacagctggtggttggactccacc

SEQ ID NO: 137269 - DNA, 25 bp, Homo sapien
gagatacaggttgccataacagctg

SEQ ID NO: 137270 - DNA, 25 bp, Homo sapien
ctgaagagatacaggttgccataac

SEQ ID NO: 137271 - DNA, 25 bp, Homo sapien
tcctcctggcatacccatgggtttg

SEQ ID NO: 137272 - DNA, 25 bp, Homo sapien
ctggcatacccatgggtttgcccat

SEQ ID NO: 137273 - DNA, 25 bp, Homo sapien
ggttcctcctggcatacccatgggt

SEQ ID NO: 137274 - DNA, 25 bp, Homo sapien
ccagtagggttcctcctggcatacc

SEQ ID NO: 137275 - DNA, 25 bp, Homo sapien
tcgatgcatgcacacattttggcat

SEQ ID NO: 137276 - DNA, 25 bp, Homo sapien
ctgcaatgcacatcgatgcatgcac

SEQ ID NO: 137277 - DNA, 25 bp, Homo sapien
acatcgatgcatgcacacattttgg

SEQ ID NO: 137278 - DNA, 25 bp, Homo sapien
tgcacatcgatgcatgcacacattt

SEQ ID NO: 137279 - DNA, 25 bp, Homo sapien
gaagccactttgggggcacggctgg

SEQ ID NO: 137280 - DNA, 25 bp, Homo sapien
ggaagccactttgggggcacggctg

SEQ ID NO: 137281 - DNA, 25 bp, Homo sapien
aggaagccactttgggggcacggct

SEQ ID NO: 137282 - DNA, 25 bp, Homo sapien
taagcacctctcgtgggtgagacgg

SEQ ID NO: 137283 - DNA, 25 bp, Homo sapien
tccccgcagccgcacccaatttggg

SEQ ID NO: 137284 - DNA, 25 bp, Homo sapien
cgcacccaatttgggcctctaagca

SEQ ID NO: 137285 - DNA, 25 bp, Homo sapien
ctctaagcacctctcgtgggtgaga

SEQ ID NO: 137286 - DNA, 25 bp, Homo sapien
cgtgtctgcatgtcctccccacagg

SEQ ID NO: 137287 - DNA, 25 bp, Homo sapien
ctctgcgtgtctgcatgtcctcccc

SEQ ID NO: 137288 - DNA, 25 bp, Homo sapien
tctgcatgtcctccccacaggccac

SEQ ID NO: 137289 - DNA, 25 bp, Homo sapien
tgtctgcatgtcctccccacaggcc

SEQ ID NO: 137290 - DNA, 25 bp, Homo sapien
tggtcatcccataggaagctcttac

SEQ ID NO: 137291 - DNA, 25 bp, Homo sapien
aagctcttactggtagggactgtct

SEQ ID NO: 137292 - DNA, 25 bp, Homo sapien
tacagggttgcatgtttcataacac

SEQ ID NO: 137293 - DNA, 25 bp, Homo sapien
cccatattcccagtcgtgcctggta

SEQ ID NO: 137294 - DNA, 25 bp, Homo sapien
ttccccacgcatcctccgtgtcctc

SEQ ID NO: 137295 - DNA, 25 bp, Homo sapien
ccccacgcatcctccgtgtcctctt

SEQ ID NO: 137296 - DNA, 25 bp, Homo sapien
tcttccccacgcatcctccgtgtcc

SEQ ID NO: 137297 - DNA, 25 bp, Homo sapien
ttcttccccacgcatcctccgtgtc

SEQ ID NO: 137298 - DNA, 25 bp, Homo sapien
ccgccgccaccgtggtgattaaggc

SEQ ID NO: 137299 - DNA, 25 bp, Homo sapien
ttgttgggatccagtttcaagctcc

SEQ ID NO: 137300 - DNA, 25 bp, Homo sapien
caggaaggagactgatgagcagaca

SEQ ID NO: 137301 - DNA, 25 bp, Homo sapien
gcagtaattggcctcgcagccaggc

SEQ ID NO: 137302 - DNA, 25 bp, Homo sapien
aggacaggaggagctgggcaaacac

SEQ ID NO: 137303 - DNA, 25 bp, Homo sapien
gacaggaggagctgggcaaacacac

SEQ ID NO: 137304 - DNA, 25 bp, Homo sapien
ccaggacaggaggagctgggcaaac

SEQ ID NO: 137305 - DNA, 25 bp, Homo sapien
agccccaggacaggaggagctgggc

SEQ ID NO: 137306 - DNA, 25 bp, Homo sapien
cgggcacccaatttgctctggctgg

SEQ ID NO: 137307 - DNA, 25 bp, Homo sapien
gaaatgccaaccagacctcaacatc

SEQ ID NO: 137308 - DNA, 25 bp, Homo sapien
tggcagggagcgtcggtcttcccgg

SEQ ID NO: 137309 - DNA, 25 bp, Homo sapien
tcttcccgggctcagttgttggcag

SEQ ID NO: 137310 - DNA, 25 bp, Homo sapien
aagatccgcctgagcccaaggagca

SEQ ID NO: 137311 - DNA, 25 bp, Homo sapien
accaagatccgcctgagcccaagga

SEQ ID NO: 137312 - DNA, 25 bp, Homo sapien
aggaagcaccaagatccgcctgagc

SEQ ID NO: 137313 - DNA, 25 bp, Homo sapien
atccaggaagcaccaagatccgcct

SEQ ID NO: 137314 - DNA, 25 bp, Homo sapien
agccgagtggctcgggagagagcca

SEQ ID NO: 137315 - DNA, 25 bp, Homo sapien
agctctacaaacaagggttcaggga

SEQ ID NO: 137316 - DNA, 25 bp, Homo sapien
catggagccgagtggctcgggagag

SEQ ID NO: 137317 - DNA, 25 bp, Homo sapien
aggtggagagctctacaaacaaggg

SEQ ID NO: 137318 - DNA, 25 bp, Homo sapien
ggaaggcgtctagggcactgaccgt

SEQ ID NO: 137319 - DNA, 25 bp, Homo sapien
tccactctcggctgcaataacaggg

SEQ ID NO: 137320 - DNA, 25 bp, Homo sapien
ttgggtatgggctgttgtttttgca

SEQ ID NO: 137321 - DNA, 25 bp, Homo sapien
cggctgcaataacagggctttgggt

SEQ ID NO: 137322 - DNA, 25 bp, Homo sapien
tcagccttcaccggcggaatccaca

SEQ ID NO: 137323 - DNA, 25 bp, Homo sapien
gccttcagccttcaccggcggaatc

SEQ ID NO: 137324 - DNA, 25 bp, Homo sapien
ccttcagccttcaccggcggaatcc

SEQ ID NO: 137325 - DNA, 25 bp, Homo sapien
cttcagccttcaccggcggaatcca

SEQ ID NO: 137326 - DNA, 25 bp, Homo sapien
tggtccgtgatgatctggcgcagca

SEQ ID NO: 137327 - DNA, 25 bp, Homo sapien
tagggtctcccgagccatttcctcg

SEQ ID NO: 137328 - DNA, 25 bp, Homo sapien
ccgcgttgctccagcggtggtccgt

SEQ ID NO: 137329 - DNA, 25 bp, Homo sapien
atctggcgcagcaaccctagggtct

SEQ ID NO: 137330 - DNA, 25 bp, Homo sapien
aggataagaggagccaacgcgaagt

SEQ ID NO: 137331 - DNA, 25 bp, Homo sapien
cagccctgggatcgggaacagacag

SEQ ID NO: 137332 - DNA, 25 bp, Homo sapien
acagacaggggccaggttcgccggc

SEQ ID NO: 137333 - DNA, 25 bp, Homo sapien
gagccaacgcgaagtgaggcctggg

SEQ ID NO: 137334 - DNA, 25 bp, Homo sapien
cttgagcactctccgcaccatgttg

SEQ ID NO: 137335 - DNA, 25 bp, Homo sapien
cccacggtggtctcggagggctgag

SEQ ID NO: 137336 - DNA, 25 bp, Homo sapien
atactcctcccggataatcttgagc

SEQ ID NO: 137337 - DNA, 25 bp, Homo sapien
agggctgagcggccgtcatcctcct

SEQ ID NO: 137338 - DNA, 25 bp, Homo sapien
tcaggcaggtaacaagggctgttca

SEQ ID NO: 137339 - DNA, 25 bp, Homo sapien
gggctgttcagctccaataaagtct

SEQ ID NO: 137340 - DNA, 25 bp, Homo sapien
ataaagtctccgagcaggtagaggg

SEQ ID NO: 137341 - DNA, 25 bp, Homo sapien
ggcccgtgcaaaaagtgtcactgga

SEQ ID NO: 137342 - DNA, 25 bp, Homo sapien
tgaaatcctcgtttaggcctccgga

SEQ ID NO: 137343 - DNA, 25 bp, Homo sapien
atgttggactggagttgggcataat

SEQ ID NO: 137344 - DNA, 25 bp, Homo sapien
tagcagctcattaatcgcctcaatg

SEQ ID NO: 137345 - DNA, 25 bp, Homo sapien
gatcactctcgtcgctgcgtccatg

SEQ ID NO: 137346 - DNA, 25 bp, Homo sapien
ctccacagatctgtagtctatcaag

SEQ ID NO: 137347 - DNA, 25 bp, Homo sapien
caacacttctacatgagagagactg

SEQ ID NO: 137348 - DNA, 25 bp, Homo sapien
acagtagattcagccaaggaatggc

SEQ ID NO: 137349 - DNA, 25 bp, Homo sapien
gaatagggtaaagagagcttcggcc

SEQ ID NO: 137350 - DNA, 25 bp, Homo sapien
tgcaagtcacttggaccgcaatgac

SEQ ID NO: 137351 - DNA, 25 bp, Homo sapien
aggaaggcctctactgttcgggaga

SEQ ID NO: 137352 - DNA, 25 bp, Homo sapien
ggaatttcctctttcgggcagcctc

SEQ ID NO: 137353 - DNA, 25 bp, Homo sapien
gcacactctgctacaatgacatgga

SEQ ID NO: 137354 - DNA, 25 bp, Homo sapien
tggtcatgatcacctcattggagtg

SEQ ID NO: 137355 - DNA, 25 bp, Homo sapien
ttcaaggttggaatggccctaccca

SEQ ID NO: 137356 - DNA, 25 bp, Homo sapien
caattcaaggttggaatggccctac

SEQ ID NO: 137357 - DNA, 25 bp, Homo sapien
gcttatcaattcaaggttggaatgg

SEQ ID NO: 137358 - DNA, 25 bp, Homo sapien
tatcaattcaaggttggaatggccc

SEQ ID NO: 137359 - DNA, 25 bp, Homo sapien
ctgcaatgggagggaaaggctgatt

SEQ ID NO: 137360 - DNA, 25 bp, Homo sapien
acaaattcacagccatttcatgacc

SEQ ID NO: 137361 - DNA, 25 bp, Homo sapien
tggacaaattcacagccatttcatg

SEQ ID NO: 137362 - DNA, 25 bp, Homo sapien
ggacaaattcacagccatttcatga

SEQ ID NO: 137363 - DNA, 25 bp, Homo sapien
ctttggacaaattcacagccatttc

SEQ ID NO: 137364 - DNA, 25 bp, Homo sapien
cataacggcaaaaatggcagcatca

SEQ ID NO: 137365 - DNA, 25 bp, Homo sapien
tgttgactcttgacataacggcaaa

SEQ ID NO: 137366 - DNA, 25 bp, Homo sapien
gcagcatcagtcatgacagttgtct

SEQ ID NO: 137367 - DNA, 25 bp, Homo sapien
gcatcagtcatgacagttgtctcaa

SEQ ID NO: 137368 - DNA, 25 bp, Homo sapien
tgcttagacctcagaattggtatcg

SEQ ID NO: 137369 - DNA, 25 bp, Homo sapien
gccactggccacaaaaagctaaatg

SEQ ID NO: 137370 - DNA, 25 bp, Homo sapien
tggagccctaaaagggccactggcc

SEQ ID NO: 137371 - DNA, 25 bp, Homo sapien
ttgggacaagacaaaaaatgtgagc

SEQ ID NO: 137372 - DNA, 25 bp, Homo sapien
cagagtgtgagttcctgtcacagct

SEQ ID NO: 137373 - DNA, 25 bp, Homo sapien
gttttgctgccagtgccagagtgtg

SEQ ID NO: 137374 - DNA, 25 bp, Homo sapien
agtttgaacataggtgcacagacga

SEQ ID NO: 137375 - DNA, 25 bp, Homo sapien
ccaggatggtcttcgtgccaatgat

SEQ ID NO: 137376 - DNA, 25 bp, Homo sapien
ctgcaacaataacaaaactgattct

SEQ ID NO: 137377 - DNA, 25 bp, Homo sapien
gtattcaggttacaaaggacaggcc

SEQ ID NO: 137378 - DNA, 25 bp, Homo sapien
gcaaatagcttctatcactgatgaa

SEQ ID NO: 137379 - DNA, 25 bp, Homo sapien
cacttagtccttgcttgtattcagg

SEQ ID NO: 137380 - DNA, 25 bp, Homo sapien
tacagggtgtttttctacagtggag

SEQ ID NO: 137381 - DNA, 25 bp, Homo sapien
caggagccacaaacttatgaaatga

SEQ ID NO: 137382 - DNA, 25 bp, Homo sapien
ttcaggagccacaaacttatgaaat

SEQ ID NO: 137383 - DNA, 25 bp, Homo sapien
aggagccacaaacttatgaaatgag

SEQ ID NO: 137384 - DNA, 25 bp, Homo sapien
gaaatgagtcttcttcattggggaa

SEQ ID NO: 137385 - DNA, 25 bp, Homo sapien
tcatcaggatggtagagttcactca

SEQ ID NO: 137386 - DNA, 25 bp, Homo sapien
taggaaggtgcattcccaccaatgt

SEQ ID NO: 137387 - DNA, 25 bp, Homo sapien
ctcatcaggcggtagatgtaggaag

SEQ ID NO: 137388 - DNA, 25 bp, Homo sapien
acagggcaatgcacgctgaccttct

SEQ ID NO: 137389 - DNA, 25 bp, Homo sapien
tgtgcactcccacattgcaaggatg

SEQ ID NO: 137390 - DNA, 25 bp, Homo sapien
cagtcctggatgtgtgcccttgtta

SEQ ID NO: 137391 - DNA, 25 bp, Homo sapien
gtttaagttcctgacacagacgcaa

SEQ ID NO: 137392 - DNA, 25 bp, Homo sapien
gcaaccaggtcactaagaggctcca

SEQ ID NO: 137393 - DNA, 25 bp, Homo sapien
accttcaagtggcttttattggtag

SEQ ID NO: 137394 - DNA, 25 bp, Homo sapien
ccttcaagtggcttttattggtaga

SEQ ID NO: 137395 - DNA, 25 bp, Homo sapien
cttttcccgctaactacagccctct

SEQ ID NO: 137396 - DNA, 25 bp, Homo sapien
ttttcccgctaactacagccctcta

SEQ ID NO: 137397 - DNA, 25 bp, Homo sapien
ttcccgctaactacagccctctatg

SEQ ID NO: 137398 - DNA, 25 bp, Homo sapien
cccgctaactacagccctctatgca

SEQ ID NO: 137399 - DNA, 25 bp, Homo sapien
gaaactatactttcatttgtacttg

SEQ ID NO: 137400 - DNA, 25 bp, Homo sapien
aactatactttcatttgtacttgtt

SEQ ID NO: 137401 - DNA, 25 bp, Homo sapien
actatactttcatttgtacttgtta

SEQ ID NO: 137402 - DNA, 25 bp, Homo sapien
aaactatactttcatttgtacttgt

SEQ ID NO: 137403 - DNA, 25 bp, Homo sapien
gagtttctcggttccgccagcaagg

SEQ ID NO: 137404 - DNA, 25 bp, Homo sapien
ttcatccaactcagtcatgcctggg

SEQ ID NO: 137405 - DNA, 25 bp, Homo sapien
tgtaagagctgaccagaaagagagc

SEQ ID NO: 137406 - DNA, 25 bp, Homo sapien
tgctcgtaattggtagctacaagcc

SEQ ID NO: 137407 - DNA, 25 bp, Homo sapien
tagcccaaagactgatgcaacagat

SEQ ID NO: 137408 - DNA, 25 bp, Homo sapien
taataattgcctagccattgtgcag

SEQ ID NO: 137409 - DNA, 25 bp, Homo sapien
gcagtaccttgcaagagctctttgg

SEQ ID NO: 137410 - DNA, 25 bp, Homo sapien
catgatggaactgtgactggcagcc

SEQ ID NO: 137411 - DNA, 25 bp, Homo sapien
gaccttagaaaggagagagttttca

SEQ ID NO: 137412 - DNA, 25 bp, Homo sapien
gaaaccaattcgtgctcatggaaga

SEQ ID NO: 137413 - DNA, 25 bp, Homo sapien
cattcattagcgtctgccccagaga

SEQ ID NO: 137414 - DNA, 25 bp, Homo sapien
gctggtaatgtttattgcaactggg

SEQ ID NO: 137415 - DNA, 25 bp, Homo sapien
tatatgtgctgccaaagcgaacacc

SEQ ID NO: 137416 - DNA, 25 bp, Homo sapien
attatatgtgctgccaaagcgaaca

SEQ ID NO: 137417 - DNA, 25 bp, Homo sapien
ttattatatgtgctgccaaagcgaa

SEQ ID NO: 137418 - DNA, 25 bp, Homo sapien
cttctccgtatcactccaattttat

SEQ ID NO: 137419 - DNA, 25 bp, Homo sapien
gacaccatgtcactttgaggagagt

SEQ ID NO: 137420 - DNA, 25 bp, Homo sapien
cgtgtgacttccgatgagaggagca

SEQ ID NO: 137421 - DNA, 25 bp, Homo sapien
tctagggattcagaagctaccagaa

SEQ ID NO: 137422 - DNA, 25 bp, Homo sapien
gctctttagaaaatccgtgtggaac

SEQ ID NO: 137423 - DNA, 25 bp, Homo sapien
cagttggatgcggagtcttactcaa

SEQ ID NO: 137424 - DNA, 25 bp, Homo sapien
gcagttgttatactgccctgtcagt

SEQ ID NO: 137425 - DNA, 25 bp, Homo sapien
cacttagcagcgcatcaggtaggca

SEQ ID NO: 137426 - DNA, 25 bp, Homo sapien
tgaacatgtctttgatttgatggat

SEQ ID NO: 137427 - DNA, 25 bp, Homo sapien
gcctaggctaaagtgcagtagtgcg

SEQ ID NO: 137428 - DNA, 25 bp, Homo sapien
ttgcctaggctaaagtgcagtagtg

SEQ ID NO: 137429 - DNA, 25 bp, Homo sapien
gttgcctaggctaaagtgcagtagt

SEQ ID NO: 137430 - DNA, 25 bp, Homo sapien
tgcctaggctaaagtgcagtagtgc

SEQ ID NO: 137431 - DNA, 25 bp, Homo sapien
cccagggcctagtttcccagacctg

SEQ ID NO: 137432 - DNA, 25 bp, Homo sapien
ttcccagacctgacctccccatcaa

SEQ ID NO: 137433 - DNA, 25 bp, Homo sapien
tccccatcaaccgacagccgcgcag

SEQ ID NO: 137434 - DNA, 25 bp, Homo sapien
gcttctgttattcccggtgcctgga

SEQ ID NO: 137435 - DNA, 25 bp, Homo sapien
ctgcccttcggtcccttaggaggtg

SEQ ID NO: 137436 - DNA, 25 bp, Homo sapien
ggtggaggtgctgatcccatgtctc

SEQ ID NO: 137437 - DNA, 25 bp, Homo sapien
ggctgaagtcacgttttgtcccgaa

SEQ ID NO: 137438 - DNA, 25 bp, Homo sapien
tgacctgaccgcggccggttttaga

SEQ ID NO: 137439 - DNA, 25 bp, Homo sapien
cacaaaagctgctagggcctggagc

SEQ ID NO: 137440 - DNA, 25 bp, Homo sapien
tggaaccgtgcttgattccaaagag

SEQ ID NO: 137441 - DNA, 25 bp, Homo sapien
cccgtggcgcagactgtaaaagttt

SEQ ID NO: 137442 - DNA, 25 bp, Homo sapien
tccaaagagcacaaaagctgctagg

SEQ ID NO: 137443 - DNA, 25 bp, Homo sapien
tattatgtgggagcataacgcccac

SEQ ID NO: 137444 - DNA, 25 bp, Homo sapien
tcaaggactgctgggaagagtcacc

SEQ ID NO: 137445 - DNA, 25 bp, Homo sapien
gggccctggagcttccgttgtatta

SEQ ID NO: 137446 - DNA, 25 bp, Homo sapien
agatgtgacgccaaccgctggagac

SEQ ID NO: 137447 - DNA, 25 bp, Homo sapien
ggtagacattatggtccccatcagt

SEQ ID NO: 137448 - DNA, 25 bp, Homo sapien
tgcacgacttcctgtggaccatggg

SEQ ID NO: 137449 - DNA, 25 bp, Homo sapien
gcttctagtcttcggatctgcaccc

SEQ ID NO: 137450 - DNA, 25 bp, Homo sapien
agatgaaaactctctcggctcaggg

SEQ ID NO: 137451 - DNA, 25 bp, Homo sapien
tccttttgcgtctggatccttctga

SEQ ID NO: 137452 - DNA, 25 bp, Homo sapien
gctcctggggagtataattttctgt

SEQ ID NO: 137453 - DNA, 25 bp, Homo sapien
cctgttccttttgcgtctggatcct

SEQ ID NO: 137454 - DNA, 25 bp, Homo sapien
tggcctgttccttttgcgtctggat

SEQ ID NO: 137455 - DNA, 25 bp, Homo sapien
taatcagagaactggaatggacctg

SEQ ID NO: 137456 - DNA, 25 bp, Homo sapien
gaatttctggcggatccctgcaaag

SEQ ID NO: 137457 - DNA, 25 bp, Homo sapien
cctgaacgagaggaatttgcgccca

SEQ ID NO: 137458 - DNA, 25 bp, Homo sapien
tgaattttgttgagaccgtccccaa

SEQ ID NO: 137459 - DNA, 25 bp, Homo sapien
tagttctgtgcccttagcccgggcc

SEQ ID NO: 137460 - DNA, 25 bp, Homo sapien
ggccccttccagttcaagtactgct

SEQ ID NO: 137461 - DNA, 25 bp, Homo sapien
tggccccttccagttcaagtactgc

SEQ ID NO: 137462 - DNA, 25 bp, Homo sapien
agtactgctctagttctgtgccctt

SEQ ID NO: 137463 - DNA, 25 bp, Homo sapien
cagatcctagtcttgggaagtggca

SEQ ID NO: 137464 - DNA, 25 bp, Homo sapien
caaagagtgaggagttctctccagg

SEQ ID NO: 137465 - DNA, 25 bp, Homo sapien
tatcatgtaagtgtcacgaaaccct

SEQ ID NO: 137466 - DNA, 25 bp, Homo sapien
tctccagatatgtccaaatgtgcct

SEQ ID NO: 137467 - DNA, 25 bp, Homo sapien
gaaggtacaaccactcagcttccaa

SEQ ID NO: 137468 - DNA, 25 bp, Homo sapien
ctgttcttgagtactctagaggaat

SEQ ID NO: 137469 - DNA, 25 bp, Homo sapien
ttgagtactctagaggaatgacagg

SEQ ID NO: 137470 - DNA, 25 bp, Homo sapien
aaggtacaaccactcagcttccaaa

SEQ ID NO: 137471 - DNA, 25 bp, Homo sapien
ctatctccagttgctcttctgagga

SEQ ID NO: 137472 - DNA, 25 bp, Homo sapien
tctccagttgctcttctgaggaggt

SEQ ID NO: 137473 - DNA, 25 bp, Homo sapien
tatctccagttgctcttctgaggag

SEQ ID NO: 137474 - DNA, 25 bp, Homo sapien
atctccagttgctcttctgaggagg

SEQ ID NO: 137475 - DNA, 25 bp, Homo sapien
ctggcggaacgtatggataaaagat

SEQ ID NO: 137476 - DNA, 25 bp, Homo sapien
aacgtatggataaaagattcatgct

SEQ ID NO: 137477 - DNA, 25 bp, Homo sapien
acgtatggataaaagattcatgctt

SEQ ID NO: 137478 - DNA, 25 bp, Homo sapien
gcggaacgtatggataaaagattca

SEQ ID NO: 137479 - DNA, 25 bp, Homo sapien
aaagtggtggctacactgaggacac

SEQ ID NO: 137480 - DNA, 25 bp, Homo sapien
gttcttgatggtcttacacttggga

SEQ ID NO: 137481 - DNA, 25 bp, Homo sapien
tgaggacactgaatgcagtctgggt

SEQ ID NO: 137482 - DNA, 25 bp, Homo sapien
gcagttacctgctggacctctcgag

SEQ ID NO: 137483 - DNA, 25 bp, Homo sapien
gcaataacataaagcataccagccc

SEQ ID NO: 137484 - DNA, 25 bp, Homo sapien
tgtcttcacccatcaattctgaggg

SEQ ID NO: 137485 - DNA, 25 bp, Homo sapien
gagctttaatggagcctgctcatga

SEQ ID NO: 137486 - DNA, 25 bp, Homo sapien
cagagctttctgaactatccaaaag

SEQ ID NO: 137487 - DNA, 25 bp, Homo sapien
ggaactctgaacatacatgcagtga

SEQ ID NO: 137488 - DNA, 25 bp, Homo sapien
gatgcaggcacttaactagcacaaa

SEQ ID NO: 137489 - DNA, 25 bp, Homo sapien
tattacacagtacaccatagggaag

SEQ ID NO: 137490 - DNA, 25 bp, Homo sapien
ttttggccaggcttatgcaccaggg

SEQ ID NO: 137491 - DNA, 25 bp, Homo sapien
gccctgttgactagctcaaattgag

SEQ ID NO: 137492 - DNA, 25 bp, Homo sapien
tttgagtaatacagaacagtaatcc

SEQ ID NO: 137493 - DNA, 25 bp, Homo sapien
tactctcgcagacattaacttatca

SEQ ID NO: 137494 - DNA, 25 bp, Homo sapien
tttgttgtctgtctagccctgttga

SEQ ID NO: 137495 - DNA, 25 bp, Homo sapien
tggagggcccggatctatgacctta

SEQ ID NO: 137496 - DNA, 25 bp, Homo sapien
taaaacatctgtggagcaaagcaat

SEQ ID NO: 137497 - DNA, 25 bp, Homo sapien
caatttgtgccatgcgggttgctgg

SEQ ID NO: 137498 - DNA, 25 bp, Homo sapien
gcgatcccaaatccaagtgcctgtg

SEQ ID NO: 137499 - DNA, 25 bp, Homo sapien
tgattttcttgaggaccgattgacc

SEQ ID NO: 137500 - DNA, 25 bp, Homo sapien
gagcctttccctagcagtggaacgc

SEQ ID NO: 137501 - DNA, 25 bp, Homo sapien
gctgggtcagtttgggtgttcatca

SEQ ID NO: 137502 - DNA, 25 bp, Homo sapien
ccatattgtgcctgggacagccata

SEQ ID NO: 137503 - DNA, 25 bp, Homo sapien
catttttcctacctgagtggcccaa

SEQ ID NO: 137504 - DNA, 25 bp, Homo sapien
aaagccagcaccaaaccctgggagt

SEQ ID NO: 137505 - DNA, 25 bp, Homo sapien
ggctgagagctcacttctaatcctg

SEQ ID NO: 137506 - DNA, 25 bp, Homo sapien
cagaacaggtagaacttgcaaaagg

SEQ ID NO: 137507 - DNA, 25 bp, Homo sapien
gagcttagtgctttaggcgcccacg

SEQ ID NO: 137508 - DNA, 25 bp, Homo sapien
catcaactcggactttgggagcgag

SEQ ID NO: 137509 - DNA, 25 bp, Homo sapien
cactcaccggcactagaaattggct

SEQ ID NO: 137510 - DNA, 25 bp, Homo sapien
gagtacgagcgacactgcgattcca

SEQ ID NO: 137511 - DNA, 25 bp, Homo sapien
ccaagttgtatgagtccggaccggg

SEQ ID NO: 137512 - DNA, 25 bp, Homo sapien
cagtgatgcccttgttcccgtggga

SEQ ID NO: 137513 - DNA, 25 bp, Homo sapien
atgagactggacgacctctgggcct

SEQ ID NO: 137514 - DNA, 25 bp, Homo sapien
cgagaggccgtaccgtcagtgatgc

SEQ ID NO: 137515 - DNA, 25 bp, Homo sapien
aatgatgcagtttaagtaagccttg

SEQ ID NO: 137516 - DNA, 25 bp, Homo sapien
tgtcatggacccctgtcataaagcc

SEQ ID NO: 137517 - DNA, 25 bp, Homo sapien
aagccttgttataccattgtcatgg

SEQ ID NO: 137518 - DNA, 25 bp, Homo sapien
tcatgccgaaactatcaactgggac

SEQ ID NO: 137519 - DNA, 25 bp, Homo sapien
aatttctatcatgtaccgttagcct

SEQ ID NO: 137520 - DNA, 25 bp, Homo sapien
gaaatttctatcatgtaccgttagc

SEQ ID NO: 137521 - DNA, 25 bp, Homo sapien
tttctatcatgtaccgttagcctaa

SEQ ID NO: 137522 - DNA, 25 bp, Homo sapien
tgaaatttctatcatgtaccgttag

SEQ ID NO: 137523 - DNA, 25 bp, Homo sapien
cagggcttgtttaatcacagtggca

SEQ ID NO: 137524 - DNA, 25 bp, Homo sapien
tagagaaccctgatgtgttgacctg

SEQ ID NO: 137525 - DNA, 25 bp, Homo sapien
tgcagatccttagcataggcagcaa

SEQ ID NO: 137526 - DNA, 25 bp, Homo sapien
gaatactggaatcgttagagaaccc

SEQ ID NO: 137527 - DNA, 25 bp, Homo sapien
actaccctactctttttccagagtg

SEQ ID NO: 137528 - DNA, 25 bp, Homo sapien
gccactcatacaattcagacagcaa

SEQ ID NO: 137529 - DNA, 25 bp, Homo sapien
cagacagcaatgtatgattgatcca

SEQ ID NO: 137530 - DNA, 25 bp, Homo sapien
gctctactttttacatacagccact

SEQ ID NO: 137531 - DNA, 25 bp, Homo sapien
ttgcactgcccttttacagccgcag

SEQ ID NO: 137532 - DNA, 25 bp, Homo sapien
gatgtgacacctcataaaagtgagc

SEQ ID NO: 137533 - DNA, 25 bp, Homo sapien
aatgtttacatagcttctggtgata

SEQ ID NO: 137534 - DNA, 25 bp, Homo sapien
aagtgagctttgaactgtagataac

SEQ ID NO: 137535 - DNA, 25 bp, Homo sapien
gggtctaacttgagagcagaagaca

SEQ ID NO: 137536 - DNA, 25 bp, Homo sapien
ttcttaggggtctaacttgagagca

SEQ ID NO: 137537 - DNA, 25 bp, Homo sapien
cttcattcctcagcatacagggaat

SEQ ID NO: 137538 - DNA, 25 bp, Homo sapien
tcattcctcagcatacagggaattc

SEQ ID NO: 137539 - DNA, 25 bp, Homo sapien
gttttcgcacttctcacaggctcag

SEQ ID NO: 137540 - DNA, 25 bp, Homo sapien
tgttgttcgtggttacttccaggaa

SEQ ID NO: 137541 - DNA, 25 bp, Homo sapien
gcctagcacggtccaagaaaatcca

SEQ ID NO: 137542 - DNA, 25 bp, Homo sapien
tggcaggacctgctcaaaaatctgt

SEQ ID NO: 137543 - DNA, 25 bp, Homo sapien
tctgctccccggggttcacaccatt

SEQ ID NO: 137544 - DNA, 25 bp, Homo sapien
caggctctgctccccggggttcaca

SEQ ID NO: 137545 - DNA, 25 bp, Homo sapien
cggtggtgcaatcttggctcactgc

SEQ ID NO: 137546 - DNA, 25 bp, Homo sapien
gctctgctccccggggttcacacca

SEQ ID NO: 137547 - DNA, 25 bp, Homo sapien
gacatgaaccggatgtctgcccggc

SEQ ID NO: 137548 - DNA, 25 bp, Homo sapien
tcaaaggcgcttgggagtgcctgca

SEQ ID NO: 137549 - DNA, 25 bp, Homo sapien
caaataccctgctatgggacatgaa

SEQ ID NO: 137550 - DNA, 25 bp, Homo sapien
catgtacattcagttagccagacaa

SEQ ID NO: 137551 - DNA, 25 bp, Homo sapien
tcagatcctacaggatgagggctct

SEQ ID NO: 137552 - DNA, 25 bp, Homo sapien
cttcggaacttctacccaatgggct

SEQ ID NO: 137553 - DNA, 25 bp, Homo sapien
tcctcacataccaagcagcggggca

SEQ ID NO: 137554 - DNA, 25 bp, Homo sapien
cagaagaagacttttgagttcaaat

SEQ ID NO: 137555 - DNA, 25 bp, Homo sapien
ggaagccgtcatccaaaatgcagaa

SEQ ID NO: 137556 - DNA, 25 bp, Homo sapien
tgtagaactgacagcactggttgcg

SEQ ID NO: 137557 - DNA, 25 bp, Homo sapien
caccaaatgttggagaagtgcgtct

SEQ ID NO: 137558 - DNA, 25 bp, Homo sapien
taatacttcctttgtccacgtgcca

SEQ ID NO: 137559 - DNA, 25 bp, Homo sapien
tccacgagcagtaggtaattgtagc

SEQ ID NO: 137560 - DNA, 25 bp, Homo sapien
cttggtccagtaatggaatccacga

SEQ ID NO: 137561 - DNA, 25 bp, Homo sapien
taatggaatccacgagcagtaggta

SEQ ID NO: 137562 - DNA, 25 bp, Homo sapien
cagtaggtaattgtagcagcctcaa

SEQ ID NO: 137563 - DNA, 25 bp, Homo sapien
aaagagagtctgcttaggtaaggta

SEQ ID NO: 137564 - DNA, 25 bp, Homo sapien
tgcttaggtaaggtaatggttccaa

SEQ ID NO: 137565 - DNA, 25 bp, Homo sapien
ggtgagcttccaaaagagagtctgc

SEQ ID NO: 137566 - DNA, 25 bp, Homo sapien
ctgcgtgcagggtgagcttccaaaa

SEQ ID NO: 137567 - DNA, 25 bp, Homo sapien
ggaagaaagacatcctgcggcccat

SEQ ID NO: 137568 - DNA, 25 bp, Homo sapien
gctcattcacaacagatcctacagc

SEQ ID NO: 137569 - DNA, 25 bp, Homo sapien
agggaagaaagacatcctgcggccc

SEQ ID NO: 137570 - DNA, 25 bp, Homo sapien
aacagatcctacagccccgaaataa

SEQ ID NO: 137571 - DNA, 25 bp, Homo sapien
cactggttgggtaattcttgtactt

SEQ ID NO: 137572 - DNA, 25 bp, Homo sapien
gaacccgattgacccactcactggt

SEQ ID NO: 137573 - DNA, 25 bp, Homo sapien
ttcggtctgcgtctgcggagccgtc

SEQ ID NO: 137574 - DNA, 25 bp, Homo sapien
tgctcgtcggggagtgtcatactcc

SEQ ID NO: 137575 - DNA, 25 bp, Homo sapien
ctcttcctagaatgcaccctcccac

SEQ ID NO: 137576 - DNA, 25 bp, Homo sapien
atttcctcttcctagaatgcaccct

SEQ ID NO: 137577 - DNA, 25 bp, Homo sapien
tcctcttcctagaatgcaccctccc

SEQ ID NO: 137578 - DNA, 25 bp, Homo sapien
ccatttcctcttcctagaatgcacc

SEQ ID NO: 137579 - DNA, 25 bp, Homo sapien
gtgaaagagtttttcctcaatattc

SEQ ID NO: 137580 - DNA, 25 bp, Homo sapien
tgaaagagtttttcctcaatattcc

SEQ ID NO: 137581 - DNA, 25 bp, Homo sapien
tgtgaaagagtttttcctcaatatt

SEQ ID NO: 137582 - DNA, 25 bp, Homo sapien
atgtgaaagagtttttcctcaatat

SEQ ID NO: 137583 - DNA, 25 bp, Homo sapien
ggtggcttctcctgacgcacttgga

SEQ ID NO: 137584 - DNA, 25 bp, Homo sapien
ttctcctgacgcacttggacaacag

SEQ ID NO: 137585 - DNA, 25 bp, Homo sapien
gccaggtggcttctcctgacgcact

SEQ ID NO: 137586 - DNA, 25 bp, Homo sapien
tggctccttccggccaggtggcttc

SEQ ID NO: 137587 - DNA, 25 bp, Homo sapien
gactataagactggctgccctctgc

SEQ ID NO: 137588 - DNA, 25 bp, Homo sapien
tgactataagactggctgccctctg

SEQ ID NO: 137589 - DNA, 25 bp, Homo sapien
attgactataagactggctgccctc

SEQ ID NO: 137590 - DNA, 25 bp, Homo sapien
ctattgactataagactggctgccc

SEQ ID NO: 137591 - DNA, 25 bp, Homo sapien
ggctgggaagtccttcctctaagac

SEQ ID NO: 137592 - DNA, 25 bp, Homo sapien
tcaagtttggctgggaagtccttcc

SEQ ID NO: 137593 - DNA, 25 bp, Homo sapien
ttggctgggaagtccttcctctaag

SEQ ID NO: 137594 - DNA, 25 bp, Homo sapien
tgggaagtccttcctctaagacctc

SEQ ID NO: 137595 - DNA, 25 bp, Homo sapien
caatgtcactttcccgttaagaacg

SEQ ID NO: 137596 - DNA, 25 bp, Homo sapien
tcggagttgagcttccctaggcctc

SEQ ID NO: 137597 - DNA, 25 bp, Homo sapien
cctaggcctccagcaaatagtaata

SEQ ID NO: 137598 - DNA, 25 bp, Homo sapien
agatgactttcaggatggcagccca

SEQ ID NO: 137599 - DNA, 25 bp, Homo sapien
aggtggaacagctgcaagggttccc

SEQ ID NO: 137600 - DNA, 25 bp, Homo sapien
ggtggaacagctgcaagggttcccc

SEQ ID NO: 137601 - DNA, 25 bp, Homo sapien
acacctctctccactattcaggtgg

SEQ ID NO: 137602 - DNA, 25 bp, Homo sapien
ctccactattcaggtggaacagctg

SEQ ID NO: 137603 - DNA, 25 bp, Homo sapien
tattactaacgtcatccagattcag

SEQ ID NO: 137604 - DNA, 25 bp, Homo sapien
caggtcaaagggcaggtttcctaga

SEQ ID NO: 137605 - DNA, 25 bp, Homo sapien
gcaggtttcctagactcccatcacg

SEQ ID NO: 137606 - DNA, 25 bp, Homo sapien
tattcctgtattactaacgtcatcc

SEQ ID NO: 137607 - DNA, 25 bp, Homo sapien
gtttggccgcctgacgttcccatgg

SEQ ID NO: 137608 - DNA, 25 bp, Homo sapien
gagacgacagagtaaacgtcatccc

SEQ ID NO: 137609 - DNA, 25 bp, Homo sapien
tggagacggaagaacgttacacacc

SEQ ID NO: 137610 - DNA, 25 bp, Homo sapien
cgttgacgtctatgcattatatcca

SEQ ID NO: 137611 - DNA, 25 bp, Homo sapien
tgtaatcggtaggagcaagctgcac

SEQ ID NO: 137612 - DNA, 25 bp, Homo sapien
atctgctgggctgtaatcggtagga

SEQ ID NO: 137613 - DNA, 25 bp, Homo sapien
cacgttcagcacgttttctcctgga

SEQ ID NO: 137614 - DNA, 25 bp, Homo sapien
agtggaactatgtcatctgctgggc

SEQ ID NO: 137615 - DNA, 25 bp, Homo sapien
gatttgaattaaaacaggcggagag

SEQ ID NO: 137616 - DNA, 25 bp, Homo sapien
tgaattaaaacaggcggagaggaaa

SEQ ID NO: 137617 - DNA, 25 bp, Homo sapien
ccgatttgaattaaaacaggcggag

SEQ ID NO: 137618 - DNA, 25 bp, Homo sapien
atcaaatggtccccccgatttgaat

SEQ ID NO: 137619 - DNA, 25 bp, Homo sapien
tggaatgtttaactccatcagtata

SEQ ID NO: 137620 - DNA, 25 bp, Homo sapien
ggaatgtttaactccatcagtatat

SEQ ID NO: 137621 - DNA, 25 bp, Homo sapien
ttggaatgtttaactccatcagtat

SEQ ID NO: 137622 - DNA, 25 bp, Homo sapien
cttggaatgtttaactccatcagta

SEQ ID NO: 137623 - DNA, 25 bp, Homo sapien
caacttgactgaaacccctgaggct

SEQ ID NO: 137624 - DNA, 25 bp, Homo sapien
ggcattcttttaagcgcaacttgac

SEQ ID NO: 137625 - DNA, 25 bp, Homo sapien
gaggctagatcgctatcttttgcca

SEQ ID NO: 137626 - DNA, 25 bp, Homo sapien
acttgtacgtgcatgagctggtgaa

SEQ ID NO: 137627 - DNA, 25 bp, Homo sapien
tattatctcgttattcctctttcag

SEQ ID NO: 137628 - DNA, 25 bp, Homo sapien
tcagtgtaacccagatatattggct

SEQ ID NO: 137629 - DNA, 25 bp, Homo sapien
caggtcatcttcaatgtacagtgta

SEQ ID NO: 137630 - DNA, 25 bp, Homo sapien
tatattggctctcagagaccaagac

SEQ ID NO: 137631 - DNA, 25 bp, Homo sapien
acaggcacattccattgtgtccttt

SEQ ID NO: 137632 - DNA, 25 bp, Homo sapien
aaacaggcacattccattgtgtcct

SEQ ID NO: 137633 - DNA, 25 bp, Homo sapien
aacaggcacattccattgtgtcctt

SEQ ID NO: 137634 - DNA, 25 bp, Homo sapien
tttctgcgggtgaagaatctttgct

SEQ ID NO: 137635 - DNA, 25 bp, Homo sapien
cacagcaggtgaggaattgggagtt

SEQ ID NO: 137636 - DNA, 25 bp, Homo sapien
ggaattgggagttcctttgctacta

SEQ ID NO: 137637 - DNA, 25 bp, Homo sapien
gtttctgcgggtgaagaatctttgc

SEQ ID NO: 137638 - DNA, 25 bp, Homo sapien
cagattcatcaggtggctgggaata

SEQ ID NO: 137639 - DNA, 25 bp, Homo sapien
ctccagattcatcaggtggctggga

SEQ ID NO: 137640 - DNA, 25 bp, Homo sapien
gattcatcaggtggctgggaataca

SEQ ID NO: 137641 - DNA, 25 bp, Homo sapien
tctattcctttctccagattcatca

SEQ ID NO: 137642 - DNA, 25 bp, Homo sapien
gggcccacaggattcttcatttaaa

SEQ ID NO: 137643 - DNA, 25 bp, Homo sapien
ggcttcagattggttagcatagagg

SEQ ID NO: 137644 - DNA, 25 bp, Homo sapien
tgggcccacaggattcttcatttaa

SEQ ID NO: 137645 - DNA, 25 bp, Homo sapien
ctgccggcttcagattggttagcat

SEQ ID NO: 137646 - DNA, 25 bp, Homo sapien
cccaggctaggatgcggtcgctcac

SEQ ID NO: 137647 - DNA, 25 bp, Homo sapien
aggctaggatgcggtcgctcactgc

SEQ ID NO: 137648 - DNA, 25 bp, Homo sapien
ccaggctaggatgcggtcgctcact

SEQ ID NO: 137649 - DNA, 25 bp, Homo sapien
ctaggatgcggtcgctcactgcagc

SEQ ID NO: 137650 - DNA, 25 bp, Homo sapien
gctccggcggacttagctgctgaaa

SEQ ID NO: 137651 - DNA, 25 bp, Homo sapien
ccggcggacttagctgctgaaattc

SEQ ID NO: 137652 - DNA, 25 bp, Homo sapien
ttctgcagctccggcggacttagct

SEQ ID NO: 137653 - DNA, 25 bp, Homo sapien
gcagctccggcggacttagctgctg

SEQ ID NO: 137654 - DNA, 25 bp, Homo sapien
gcggccttcggtacttctaattcta

SEQ ID NO: 137655 - DNA, 25 bp, Homo sapien
gattcgtggaactgggccacttgct

SEQ ID NO: 137656 - DNA, 25 bp, Homo sapien
tgaatcctaaagcaattctgcggcc

SEQ ID NO: 137657 - DNA, 25 bp, Homo sapien
tatttttgcattccctgtcacaggc

SEQ ID NO: 137658 - DNA, 25 bp, Homo sapien
aggagcggctccacgtcctggaaca

SEQ ID NO: 137659 - DNA, 25 bp, Homo sapien
ctgggcggaatacctcgactgctgg

SEQ ID NO: 137660 - DNA, 25 bp, Homo sapien
agcccgcagcgggtgattttccagc

SEQ ID NO: 137661 - DNA, 25 bp, Homo sapien
ctgccctgctgcgtaggacagccgg

SEQ ID NO: 137662 - DNA, 25 bp, Homo sapien
gagaaacggcatcgagtacaggacc

SEQ ID NO: 137663 - DNA, 25 bp, Homo sapien
caaatctgcgctgagggctggttcg

SEQ ID NO: 137664 - DNA, 25 bp, Homo sapien
cactgtgcaaaacctacgtgcgaag

SEQ ID NO: 137665 - DNA, 25 bp, Homo sapien
taagcctcggctcccgaaggaatgc

SEQ ID NO: 137666 - DNA, 25 bp, Homo sapien
tggcggttaggcaaagccgggcgag

SEQ ID NO: 137667 - DNA, 25 bp, Homo sapien
ctgctcgttcgctgcgccgcggccg

SEQ ID NO: 137668 - DNA, 25 bp, Homo sapien
gtaggagcacggtcactgctcgttc

SEQ ID NO: 137669 - DNA, 25 bp, Homo sapien
cggctcagtcttggcttctcagatg

SEQ ID NO: 137670 - DNA, 25 bp, Homo sapien
gaggatgacgcctcgtagtctgcgt

SEQ ID NO: 137671 - DNA, 25 bp, Homo sapien
gtctgcgttgaagcccgagaacatc

SEQ ID NO: 137672 - DNA, 25 bp, Homo sapien
ctgctgcagcgggaggatgacgcct

SEQ ID NO: 137673 - DNA, 25 bp, Homo sapien
tggtagtaagagaggctatccccgg

SEQ ID NO: 137674 - DNA, 25 bp, Homo sapien
cgcgttgacaggcgagcccatgctg

SEQ ID NO: 137675 - DNA, 25 bp, Homo sapien
gcgttgacaggcgagcccatgctgg

SEQ ID NO: 137676 - DNA, 25 bp, Homo sapien
ctgcgcgttgacaggcgagcccatg

SEQ ID NO: 137677 - DNA, 25 bp, Homo sapien
tgcgcgttgacaggcgagcccatgc

SEQ ID NO: 137678 - DNA, 25 bp, Homo sapien
aagggagccccctactcatctactg

SEQ ID NO: 137679 - DNA, 25 bp, Homo sapien
cctactcatctactggagcgtcccg

SEQ ID NO: 137680 - DNA, 25 bp, Homo sapien
tctactggagcgtcccgcccggtgt

SEQ ID NO: 137681 - DNA, 25 bp, Homo sapien
ggagccccctactcatctactggag

SEQ ID NO: 137682 - DNA, 25 bp, Homo sapien
tgcagcagtgaagagaaacgatcct

SEQ ID NO: 137683 - DNA, 25 bp, Homo sapien
cagagatccgtcctggagtgcagac

SEQ ID NO: 137684 - DNA, 25 bp, Homo sapien
taaatatccctgacgtctgcgctga

SEQ ID NO: 137685 - DNA, 25 bp, Homo sapien
tcttactatggcaagcgtgcgtgcg

SEQ ID NO: 137686 - DNA, 25 bp, Homo sapien
tccggactggtcgagatggcagtga

SEQ ID NO: 137687 - DNA, 25 bp, Homo sapien
ctctggtctgcgatggggccacgga

SEQ ID NO: 137688 - DNA, 25 bp, Homo sapien
aatgaagttggcactggagacggcc

SEQ ID NO: 137689 - DNA, 25 bp, Homo sapien
agacggccaggtccgtgcagaagtc

SEQ ID NO: 137690 - DNA, 25 bp, Homo sapien
tggtcttcacaacgccagccctgga

SEQ ID NO: 137691 - DNA, 25 bp, Homo sapien
ctgccaatgctctgcgctcggcctc

SEQ ID NO: 137692 - DNA, 25 bp, Homo sapien
agccctggagtaagccccagcggag

SEQ ID NO: 137693 - DNA, 25 bp, Homo sapien
aatgctctgcgctcggcctcctgtc

SEQ ID NO: 137694 - DNA, 25 bp, Homo sapien
cctgcagttgcagactaggtgtgac

SEQ ID NO: 137695 - DNA, 25 bp, Homo sapien
tcccaggaagagtacgctagagttc

SEQ ID NO: 137696 - DNA, 25 bp, Homo sapien
ccagtctgaaagcatgcggtaagaa

SEQ ID NO: 137697 - DNA, 25 bp, Homo sapien
tcccagttacggatgtgcagccagc

SEQ ID NO: 137698 - DNA, 25 bp, Homo sapien
cgcttggagtgtatcagtcagctcc

SEQ ID NO: 137699 - DNA, 25 bp, Homo sapien
cttggagtgtatcagtcagctccct

SEQ ID NO: 137700 - DNA, 25 bp, Homo sapien
agtcagctccctcctccggttgcgg

SEQ ID NO: 137701 - DNA, 25 bp, Homo sapien
tccggttgcggcatttggctgcagc

SEQ ID NO: 137702 - DNA, 25 bp, Homo sapien
ggataaaggaaagcataagacacag

SEQ ID NO: 137703 - DNA, 25 bp, Homo sapien
gacacagtcttactcaagggccctt

SEQ ID NO: 137704 - DNA, 25 bp, Homo sapien
gggcccttatgctcaatctccaact

SEQ ID NO: 137705 - DNA, 25 bp, Homo sapien
ttaaaaaggagcaacccacagagta

SEQ ID NO: 137706 - DNA, 25 bp, Homo sapien
tacaggtgaccaccggagtgcacag

SEQ ID NO: 137707 - DNA, 25 bp, Homo sapien
cagacatctcttctgggaagcccag

SEQ ID NO: 137708 - DNA, 25 bp, Homo sapien
catcaaagggctcggtcttcagctc

SEQ ID NO: 137709 - DNA, 25 bp, Homo sapien
caggttccactgagggcttgggctc

SEQ ID NO: 137710 - DNA, 25 bp, Homo sapien
taatcagaacacactattgccagga

SEQ ID NO: 137711 - DNA, 25 bp, Homo sapien
catctccggaagaggtaaggacttg

SEQ ID NO: 137712 - DNA, 25 bp, Homo sapien
tctgtaatgcaccagctcgggcagt

SEQ ID NO: 137713 - DNA, 25 bp, Homo sapien
gtttcacgcacagataaggtcctcc

SEQ ID NO: 137714 - DNA, 25 bp, Homo sapien
gacaatgtcttggaacaataagcaa

SEQ ID NO: 137715 - DNA, 25 bp, Homo sapien
gaccacctcaacaatgcatgatcag

SEQ ID NO: 137716 - DNA, 25 bp, Homo sapien
ggaaaactgttaatgtcagaacatt

SEQ ID NO: 137717 - DNA, 25 bp, Homo sapien
acatgtcaaaagacctcaaggtaga

SEQ ID NO: 137718 - DNA, 25 bp, Homo sapien
ggaagattctaatgccgataacgga

SEQ ID NO: 137719 - DNA, 25 bp, Homo sapien
ttaaccaagtatcaagaggcagttc

SEQ ID NO: 137720 - DNA, 25 bp, Homo sapien
tcagcctgctggatacgataacgag

SEQ ID NO: 137721 - DNA, 25 bp, Homo sapien
gtttcccgtccccagaagcagtaga

SEQ ID NO: 137722 - DNA, 25 bp, Homo sapien
gaaactttagacgattacctcaaga

SEQ ID NO: 137723 - DNA, 25 bp, Homo sapien
gcttaatatactaacagggaccagg

SEQ ID NO: 137724 - DNA, 25 bp, Homo sapien
cacacatgggaattgctgttgatac

SEQ ID NO: 137725 - DNA, 25 bp, Homo sapien
tgaagttgaattggcagaggtcatc

SEQ ID NO: 137726 - DNA, 25 bp, Homo sapien
ttagcacgaaggtatttcgttttgc

SEQ ID NO: 137727 - DNA, 25 bp, Homo sapien
gctcagtctagaccctttaataggg

SEQ ID NO: 137728 - DNA, 25 bp, Homo sapien
cgttttgctcagtctagacccttta

SEQ ID NO: 137729 - DNA, 25 bp, Homo sapien
gaaggtatttcgttttgctcagtct

SEQ ID NO: 137730 - DNA, 25 bp, Homo sapien
taagcaactggctatacctggactc

SEQ ID NO: 137731 - DNA, 25 bp, Homo sapien
taacaaatcctagagtgacccacag

SEQ ID NO: 137732 - DNA, 25 bp, Homo sapien
tgattgcagcctcgcgagaccttga

SEQ ID NO: 137733 - DNA, 25 bp, Homo sapien
tctagaaccgaagggtagcctcagc

SEQ ID NO: 137734 - DNA, 25 bp, Homo sapien
cgtgtcaccgtggaaaccaaacagt

SEQ ID NO: 137735 - DNA, 25 bp, Homo sapien
gcggtgacgggagtcgctgacggcg

SEQ ID NO: 137736 - DNA, 25 bp, Homo sapien
aacagtaaacagaggactcgcgagc

SEQ ID NO: 137737 - DNA, 25 bp, Homo sapien
gctgacggcgcctacgtgtcaccgt

SEQ ID NO: 137738 - DNA, 25 bp, Homo sapien
aggaatgctggaaacagctcattca

SEQ ID NO: 137739 - DNA, 25 bp, Homo sapien
gaatgctggaaacagctcattcatc

SEQ ID NO: 137740 - DNA, 25 bp, Homo sapien
ggaatgctggaaacagctcattcat

SEQ ID NO: 137741 - DNA, 25 bp, Homo sapien
aatgctggaaacagctcattcatcc

SEQ ID NO: 137742 - DNA, 25 bp, Homo sapien
gaaccgccgtcttcaaagctttcca

SEQ ID NO: 137743 - DNA, 25 bp, Homo sapien
cagaaccgccgtcttcaaagctttc

SEQ ID NO: 137744 - DNA, 25 bp, Homo sapien
cccagaaccgccgtcttcaaagctt

SEQ ID NO: 137745 - DNA, 25 bp, Homo sapien
ccagaaccgccgtcttcaaagcttt

SEQ ID NO: 137746 - DNA, 25 bp, Homo sapien
accgcgacgaggcttctggattgga

SEQ ID NO: 137747 - DNA, 25 bp, Homo sapien
agaaaaactcccttgctggcagcac

SEQ ID NO: 137748 - DNA, 25 bp, Homo sapien
ttcctcaaatcaggcggctgcagga

SEQ ID NO: 137749 - DNA, 25 bp, Homo sapien
aaagcagtcgtcttcttagtccgag

SEQ ID NO: 137750 - DNA, 25 bp, Homo sapien
tggtaagcgtggtagacaccctggc

SEQ ID NO: 137751 - DNA, 25 bp, Homo sapien
tcacacgtttaggattgcgacaccc

SEQ ID NO: 137752 - DNA, 25 bp, Homo sapien
ccggagctgtcaagtacgaggacct

SEQ ID NO: 137753 - DNA, 25 bp, Homo sapien
tacttttccacacgagttgaaggga

SEQ ID NO: 137754 - DNA, 25 bp, Homo sapien
aaattacaaactttgtcaaggatgt

SEQ ID NO: 137755 - DNA, 25 bp, Homo sapien
gaaattggaactctatgcactgttg

SEQ ID NO: 137756 - DNA, 25 bp, Homo sapien
aaaattacaaactttgtcaaggatg

SEQ ID NO: 137757 - DNA, 25 bp, Homo sapien
ggaactctatgcactgttggtgaga

SEQ ID NO: 137758 - DNA, 25 bp, Homo sapien
cccattttctaaagcccctagacat

SEQ ID NO: 137759 - DNA, 25 bp, Homo sapien
gtgacctcttctgggtctcgtggcc

SEQ ID NO: 137760 - DNA, 25 bp, Homo sapien
tgacctcttctgggtctcgtggcca

SEQ ID NO: 137761 - DNA, 25 bp, Homo sapien
acctcttctgggtctcgtggccacc

SEQ ID NO: 137762 - DNA, 25 bp, Homo sapien
gatggctctactgaggaagtgactg

SEQ ID NO: 137763 - DNA, 25 bp, Homo sapien
tggctccgttacaaggacgtcctgt

SEQ ID NO: 137764 - DNA, 25 bp, Homo sapien
tgccagggcctctcatagacagact

SEQ ID NO: 137765 - DNA, 25 bp, Homo sapien
caagtccttgccaacagcttaaggg

SEQ ID NO: 137766 - DNA, 25 bp, Homo sapien
tagctggctccagactatgccaagg

SEQ ID NO: 137767 - DNA, 25 bp, Homo sapien
tgtccaaactttatggcctccttta

SEQ ID NO: 137768 - DNA, 25 bp, Homo sapien
gattccccaatcagcaaattgggct

SEQ ID NO: 137769 - DNA, 25 bp, Homo sapien
cagactatgccaagggattccccaa

SEQ ID NO: 137770 - DNA, 25 bp, Homo sapien
ccagaaccatcaggtatttcgtgat

SEQ ID NO: 137771 - DNA, 25 bp, Homo sapien
ggcagcaggtacttatctccagaac

SEQ ID NO: 137772 - DNA, 25 bp, Homo sapien
cagtctccaaccaggcaccatgaat

SEQ ID NO: 137773 - DNA, 25 bp, Homo sapien
tctgaggatttatgatggtggtgcc

SEQ ID NO: 137774 - DNA, 25 bp, Homo sapien
tggtggcctcctgtatacacaagct

SEQ ID NO: 137775 - DNA, 25 bp, Homo sapien
tccaaacatttggtggcctcctgta

SEQ ID NO: 137776 - DNA, 25 bp, Homo sapien
cacgggcttcgtgatgctgagtata

SEQ ID NO: 137777 - DNA, 25 bp, Homo sapien
tatacacaagctcacgggcttcgtg

SEQ ID NO: 137778 - DNA, 25 bp, Homo sapien
cttccctgtgtggggtaagcgtagg

SEQ ID NO: 137779 - DNA, 25 bp, Homo sapien
tgtgtggggtaagcgtagggggctg

SEQ ID NO: 137780 - DNA, 25 bp, Homo sapien
tacttccctgtgtggggtaagcgta

SEQ ID NO: 137781 - DNA, 25 bp, Homo sapien
ctgtgtggggtaagcgtagggggct

SEQ ID NO: 137782 - DNA, 25 bp, Homo sapien
tctgaagttaatggaactactccag

SEQ ID NO: 137783 - DNA, 25 bp, Homo sapien
taatttgtatacttagaccagtcac

SEQ ID NO: 137784 - DNA, 25 bp, Homo sapien
gtgattcctctgtttagtcctgaga

SEQ ID NO: 137785 - DNA, 25 bp, Homo sapien
gacaattggcccgtttatcaatgtg

SEQ ID NO: 137786 - DNA, 25 bp, Homo sapien
gctccctggcgttctggcactcagg

SEQ ID NO: 137787 - DNA, 25 bp, Homo sapien
tccctggcgttctggcactcagggc

SEQ ID NO: 137788 - DNA, 25 bp, Homo sapien
ggctccctggcgttctggcactcag

SEQ ID NO: 137789 - DNA, 25 bp, Homo sapien
tggctccctggcgttctggcactca

SEQ ID NO: 137790 - DNA, 25 bp, Homo sapien
agtaatttgatactcttgtggaaga

SEQ ID NO: 137791 - DNA, 25 bp, Homo sapien
gtctccctcacagcattggtgtggg

SEQ ID NO: 137792 - DNA, 25 bp, Homo sapien
cattttcaccttcgccatcagcagt

SEQ ID NO: 137793 - DNA, 25 bp, Homo sapien
agaatatacattggaaaatgagcag

SEQ ID NO: 137794 - DNA, 25 bp, Homo sapien
gccagataggagtgacgatttttat

SEQ ID NO: 137795 - DNA, 25 bp, Homo sapien
ctccttctgagagtgatgtcaggtc

SEQ ID NO: 137796 - DNA, 25 bp, Homo sapien
tttttatactcagcgactttcggcc

SEQ ID NO: 137797 - DNA, 25 bp, Homo sapien
tctgcctaagccagataggagtgac

SEQ ID NO: 137798 - DNA, 25 bp, Homo sapien
cgccgcccggcttgtgcccgccagg

SEQ ID NO: 137799 - DNA, 25 bp, Homo sapien
cgcccggcttgtgcccgccaggcag

SEQ ID NO: 137800 - DNA, 25 bp, Homo sapien
caccgccgcccggcttgtgcccgcc

SEQ ID NO: 137801 - DNA, 25 bp, Homo sapien
gcaccgccgcccggcttgtgcccgc

SEQ ID NO: 137802 - DNA, 25 bp, Homo sapien
gcgctcctctccccgcgggggcgtc

SEQ ID NO: 137803 - DNA, 25 bp, Homo sapien
cgccgccttgggcgccctcctcccg

SEQ ID NO: 137804 - DNA, 25 bp, Homo sapien
gggcgtcccgggttccatgcagtcc

SEQ ID NO: 137805 - DNA, 25 bp, Homo sapien
cccggctccgccaccccacggtgca

SEQ ID NO: 137806 - DNA, 25 bp, Homo sapien
cgccgagcgtccctcccgcaggctg

SEQ ID NO: 137807 - DNA, 25 bp, Homo sapien
cggccgccgagcgtccctcccgcag

SEQ ID NO: 137808 - DNA, 25 bp, Homo sapien
caggcgccgtgcccgctccgcgccg

SEQ ID NO: 137809 - DNA, 25 bp, Homo sapien
ccgagcgtccctcccgcaggctgtg

SEQ ID NO: 137810 - DNA, 25 bp, Homo sapien
cttccccgccgcccgaggagagcac

SEQ ID NO: 137811 - DNA, 25 bp, Homo sapien
cccgccgcccgaggagagcacctcc

SEQ ID NO: 137812 - DNA, 25 bp, Homo sapien
tccccgccgcccgaggagagcacct

SEQ ID NO: 137813 - DNA, 25 bp, Homo sapien
ccttccccgccgcccgaggagagca

SEQ ID NO: 137814 - DNA, 25 bp, Homo sapien
ctccttatataacctggcgtgggag

SEQ ID NO: 137815 - DNA, 25 bp, Homo sapien
atataacctggcgtgggagacagga

SEQ ID NO: 137816 - DNA, 25 bp, Homo sapien
ccagagctccgaagcaatggccatg

SEQ ID NO: 137817 - DNA, 25 bp, Homo sapien
gcccagagctccgaagcaatggcca

SEQ ID NO: 137818 - DNA, 25 bp, Homo sapien
gatgctcctccaattaagaccctag

SEQ ID NO: 137819 - DNA, 25 bp, Homo sapien
gagagaccaccaagatttaagcctg

SEQ ID NO: 137820 - DNA, 25 bp, Homo sapien
cacatttgccctgagcacacgtggt

SEQ ID NO: 137821 - DNA, 25 bp, Homo sapien
cctttctgagatatagacctgagca

SEQ ID NO: 137822 - DNA, 25 bp, Homo sapien
ggaaggccccaagactgagagtgaa

SEQ ID NO: 137823 - DNA, 25 bp, Homo sapien
tccagaaggcgagaagcaagatgat

SEQ ID NO: 137824 - DNA, 25 bp, Homo sapien
tcttggaatctgaatgacgtaggtc

SEQ ID NO: 137825 - DNA, 25 bp, Homo sapien
taggtcacgcggcttccaaaagtcg

SEQ ID NO: 137826 - DNA, 25 bp, Homo sapien
gagaatcaaccaccaagcctcttct

SEQ ID NO: 137827 - DNA, 25 bp, Homo sapien
gaatcaaccaccaagcctcttcttg

SEQ ID NO: 137828 - DNA, 25 bp, Homo sapien
agaatcaaccaccaagcctcttctt

SEQ ID NO: 137829 - DNA, 25 bp, Homo sapien
ggagaatcaaccaccaagcctcttc

SEQ ID NO: 137830 - DNA, 25 bp, Homo sapien
ttgtagaagcaaaagtccccctgtc

SEQ ID NO: 137831 - DNA, 25 bp, Homo sapien
aatgagacactaacaaatgatccca

SEQ ID NO: 137832 - DNA, 25 bp, Homo sapien
aagcctcacccaggagacaaggcac

SEQ ID NO: 137833 - DNA, 25 bp, Homo sapien
ggcactagtctttcctttgtagaag

SEQ ID NO: 137834 - DNA, 25 bp, Homo sapien
gctctctgtctcctgcaggagtggc

SEQ ID NO: 137835 - DNA, 25 bp, Homo sapien
ttgggctctctgtctcctgcaggag

SEQ ID NO: 137836 - DNA, 25 bp, Homo sapien
gggctctctgtctcctgcaggagtg

SEQ ID NO: 137837 - DNA, 25 bp, Homo sapien
ggttcttgggctctctgtctcctgc

SEQ ID NO: 137838 - DNA, 25 bp, Homo sapien
gagggaagatctgatgtccatcgga

SEQ ID NO: 137839 - DNA, 25 bp, Homo sapien
tccgttgggcagttaatgtactcag

SEQ ID NO: 137840 - DNA, 25 bp, Homo sapien
cagttaatgtactcagatggccaca

SEQ ID NO: 137841 - DNA, 25 bp, Homo sapien
tgtctcttcccatggagagagatgt

SEQ ID NO: 137842 - DNA, 25 bp, Homo sapien
atttttagtagatacaggagttcat

SEQ ID NO: 137843 - DNA, 25 bp, Homo sapien
tttttagtagatacaggagttcatc

SEQ ID NO: 137844 - DNA, 25 bp, Homo sapien
ttttagtagatacaggagttcatca

SEQ ID NO: 137845 - DNA, 25 bp, Homo sapien
tcaattaactcacaccaaggtcacc

SEQ ID NO: 137846 - DNA, 25 bp, Homo sapien
accaaggtcacccttggcactgcca

SEQ ID NO: 137847 - DNA, 25 bp, Homo sapien
tggcactgccagaagtgtctgcctt

SEQ ID NO: 137848 - DNA, 25 bp, Homo sapien
ctgttatagaggaaaagttgctcaa

SEQ ID NO: 137849 - DNA, 25 bp, Homo sapien
gctgctcttcctgccgtaaagtcct

SEQ ID NO: 137850 - DNA, 25 bp, Homo sapien
ctcgtcttgccaggactgtggcttc

SEQ ID NO: 137851 - DNA, 25 bp, Homo sapien
agctgctcttcctgccgtaaagtcc

SEQ ID NO: 137852 - DNA, 25 bp, Homo sapien
agtccctcgtcttgccaggactgtg

SEQ ID NO: 137853 - DNA, 25 bp, Homo sapien
tcagcgtatttcagctcctccacag

SEQ ID NO: 137854 - DNA, 25 bp, Homo sapien
ccgaggttgcggatgtcagcgtatt

SEQ ID NO: 137855 - DNA, 25 bp, Homo sapien
atcatggccccgaggttgcggatgt

SEQ ID NO: 137856 - DNA, 25 bp, Homo sapien
gtcaccgaagggtccgggatctgcc

SEQ ID NO: 137857 - DNA, 25 bp, Homo sapien
gggaagggaggccacgctactcttc

SEQ ID NO: 137858 - DNA, 25 bp, Homo sapien
ggaggccacgctactcttcctccaa

SEQ ID NO: 137859 - DNA, 25 bp, Homo sapien
gaagggaggccacgctactcttcct

SEQ ID NO: 137860 - DNA, 25 bp, Homo sapien
ttgggaagggaggccacgctactct

SEQ ID NO: 137861 - DNA, 25 bp, Homo sapien
tgaggacagcacgtcactgtcgggt

SEQ ID NO: 137862 - DNA, 25 bp, Homo sapien
gacagcacgtcactgtcgggtacag

SEQ ID NO: 137863 - DNA, 25 bp, Homo sapien
actgtcgggtacagggcagatgcca

SEQ ID NO: 137864 - DNA, 25 bp, Homo sapien
ctgtgaggacagcacgtcactgtcg

SEQ ID NO: 137865 - DNA, 25 bp, Homo sapien
ggtacaatctcgcagctccatctgc

SEQ ID NO: 137866 - DNA, 25 bp, Homo sapien
tgacagcgagggagaggacatgcaa

SEQ ID NO: 137867 - DNA, 25 bp, Homo sapien
tttgcggcctggatggtgcacgtct

SEQ ID NO: 137868 - DNA, 25 bp, Homo sapien
aacggcttgttatttttgcggcctg

SEQ ID NO: 137869 - DNA, 25 bp, Homo sapien
taggaagcatttggaggtcggttcg

SEQ ID NO: 137870 - DNA, 25 bp, Homo sapien
ggtcggttcgcagtgcagggctggc

SEQ ID NO: 137871 - DNA, 25 bp, Homo sapien
aagcatttggaggtcggttcgcagt

SEQ ID NO: 137872 - DNA, 25 bp, Homo sapien
tcggttcgcagtgcagggctggcat

SEQ ID NO: 137873 - DNA, 25 bp, Homo sapien
gtcatcaaaatgatcgaacattctg

SEQ ID NO: 137874 - DNA, 25 bp, Homo sapien
agctcaacagagctctggttagaag

SEQ ID NO: 137875 - DNA, 25 bp, Homo sapien
tccccagctcaacagagctctggtt

SEQ ID NO: 137876 - DNA, 25 bp, Homo sapien
aatgatcgaacattctgcggccagg

SEQ ID NO: 137877 - DNA, 25 bp, Homo sapien
tgggacataaacatgggacacagac

SEQ ID NO: 137878 - DNA, 25 bp, Homo sapien
ccagagagtccacatttcccggctt

SEQ ID NO: 137879 - DNA, 25 bp, Homo sapien
taagaattgggaggtagagcgatca

SEQ ID NO: 137880 - DNA, 25 bp, Homo sapien
gaatgcggtgaactcaaggctgtat

SEQ ID NO: 137881 - DNA, 25 bp, Homo sapien
aaatgatgaggacacggatccggtc

SEQ ID NO: 137882 - DNA, 25 bp, Homo sapien
taaacatggatgcacgtcttggtct

SEQ ID NO: 137883 - DNA, 25 bp, Homo sapien
ggacctctctgccaaacaagtatga

SEQ ID NO: 137884 - DNA, 25 bp, Homo sapien
tgatacgtatgcaccgattcctcgg

SEQ ID NO: 137885 - DNA, 25 bp, Homo sapien
taagatggtaggattgacagaagac

SEQ ID NO: 137886 - DNA, 25 bp, Homo sapien
gacattaacaccacaggaaacaaga

SEQ ID NO: 137887 - DNA, 25 bp, Homo sapien
gaagacttgacagcccttcttaagg

SEQ ID NO: 137888 - DNA, 25 bp, Homo sapien
cttaaggctgctaaaagattgttgg

SEQ ID NO: 137889 - DNA, 25 bp, Homo sapien
tacagaggcaaaccacggaggagtt

SEQ ID NO: 137890 - DNA, 25 bp, Homo sapien
cctagtgggtgcaaagtagtatctc

SEQ ID NO: 137891 - DNA, 25 bp, Homo sapien
caatgagccccagcatatggcaggt

SEQ ID NO: 137892 - DNA, 25 bp, Homo sapien
aaatggctggatcgcatgggaactc

SEQ ID NO: 137893 - DNA, 25 bp, Homo sapien
tagctaactagctagccgggcacag

SEQ ID NO: 137894 - DNA, 25 bp, Homo sapien
tacaaatggtaggtaggtgatagct

SEQ ID NO: 137895 - DNA, 25 bp, Homo sapien
taagggcttacaattgcatcatatc

SEQ ID NO: 137896 - DNA, 25 bp, Homo sapien
tggtgcaaaacctttaactcagagg

SEQ ID NO: 137897 - DNA, 25 bp, Homo sapien
caggcccaccagggccccccctgca

SEQ ID NO: 137898 - DNA, 25 bp, Homo sapien
cccaccagggccccccctgcatgga

SEQ ID NO: 137899 - DNA, 25 bp, Homo sapien
gggccccccctgcatggaggagcca

SEQ ID NO: 137900 - DNA, 25 bp, Homo sapien
ccccccctgcatggaggagccacat

SEQ ID NO: 137901 - DNA, 25 bp, Homo sapien
tgaattctgacttttcataagcgtt

SEQ ID NO: 137902 - DNA, 25 bp, Homo sapien
ggcgcggcatttccactgtgacaaa

SEQ ID NO: 137903 - DNA, 25 bp, Homo sapien
ccccgtctgcaggtggcgcggcatt

SEQ ID NO: 137904 - DNA, 25 bp, Homo sapien
tgacttttcataagcgttttcaaaa

SEQ ID NO: 137905 - DNA, 25 bp, Homo sapien
ggagctttctctgccggggtggcct

SEQ ID NO: 137906 - DNA, 25 bp, Homo sapien
tgggagcctgccttccctagaagca

SEQ ID NO: 137907 - DNA, 25 bp, Homo sapien
tctctctgtttgtagtaggccagca

SEQ ID NO: 137908 - DNA, 25 bp, Homo sapien
gggagctttctctgccggggtggcc

SEQ ID NO: 137909 - DNA, 25 bp, Homo sapien
tgattagacactgaggcaggcttgg

SEQ ID NO: 137910 - DNA, 25 bp, Homo sapien
gccactgattagacactgaggcagg

SEQ ID NO: 137911 - DNA, 25 bp, Homo sapien
agagccactgattagacactgaggc

SEQ ID NO: 137912 - DNA, 25 bp, Homo sapien
cactgattagacactgaggcaggct

SEQ ID NO: 137913 - DNA, 25 bp, Homo sapien
ttcttgttccggcatcgggctgctg

SEQ ID NO: 137914 - DNA, 25 bp, Homo sapien
tctcccggcgccttttccttcgctc

SEQ ID NO: 137915 - DNA, 25 bp, Homo sapien
gctgcagaaactccgtgcgctcctt

SEQ ID NO: 137916 - DNA, 25 bp, Homo sapien
tcgggctgctgcgactttgttcttc

SEQ ID NO: 137917 - DNA, 25 bp, Homo sapien
tgccctaaacttcacaccaaacctc

SEQ ID NO: 137918 - DNA, 25 bp, Homo sapien
cctaaacttcacaccaaacctctgc

SEQ ID NO: 137919 - DNA, 25 bp, Homo sapien
tcatgccctaaacttcacaccaaac

SEQ ID NO: 137920 - DNA, 25 bp, Homo sapien
ctaaacttcacaccaaacctctgct

SEQ ID NO: 137921 - DNA, 25 bp, Homo sapien
tgagtgaacaaagacccaggcatgg

SEQ ID NO: 137922 - DNA, 25 bp, Homo sapien
taaagagcgggtctgaccttgggca

SEQ ID NO: 137923 - DNA, 25 bp, Homo sapien
gagctgactatgaacccaatggagg

SEQ ID NO: 137924 - DNA, 25 bp, Homo sapien
tagctcgctttaggacttagtaggg

SEQ ID NO: 137925 - DNA, 25 bp, Homo sapien
gacactgtcggtccggacgatgcag

SEQ ID NO: 137926 - DNA, 25 bp, Homo sapien
tcagctctgcgttcatgagttccag

SEQ ID NO: 137927 - DNA, 25 bp, Homo sapien
tcacttcttctcgagctgctcgagc

SEQ ID NO: 137928 - DNA, 25 bp, Homo sapien
tgctcgagcagtgggttgccttctg

SEQ ID NO: 137929 - DNA, 25 bp, Homo sapien
gacaacttatggagcaagcacagga

SEQ ID NO: 137930 - DNA, 25 bp, Homo sapien
tcatgggacaacctggaactctatc

SEQ ID NO: 137931 - DNA, 25 bp, Homo sapien
aaacagtctccgaccctgagagggc

SEQ ID NO: 137932 - DNA, 25 bp, Homo sapien
taggagttacacacaacggccgtaa

SEQ ID NO: 137933 - DNA, 25 bp, Homo sapien
gaggtcacacatgcacagtggcagg

SEQ ID NO: 137934 - DNA, 25 bp, Homo sapien
aatgttggaacgctagcacctaccc

SEQ ID NO: 137935 - DNA, 25 bp, Homo sapien
tgcacaggctaaggaggctctattt

SEQ ID NO: 137936 - DNA, 25 bp, Homo sapien
atatcaaaggattacagcgcgaggg

SEQ ID NO: 137937 - DNA, 25 bp, Homo sapien
tatgacataagtggtatccttccgc

SEQ ID NO: 137938 - DNA, 25 bp, Homo sapien
ttgaagttgaagtccagcgtcctac

SEQ ID NO: 137939 - DNA, 25 bp, Homo sapien
tattacccagatgtgtgtgtagcca

SEQ ID NO: 137940 - DNA, 25 bp, Homo sapien
agcgtcctacttacccttgcagtgg

SEQ ID NO: 137941 - DNA, 25 bp, Homo sapien
tccatccttgggaggggtcagaaac

SEQ ID NO: 137942 - DNA, 25 bp, Homo sapien
tgctccatccttgggaggggtcaga

SEQ ID NO: 137943 - DNA, 25 bp, Homo sapien
gaggggtcagaaactggccagacag

SEQ ID NO: 137944 - DNA, 25 bp, Homo sapien
tccttgggaggggtcagaaactggc

SEQ ID NO: 137945 - DNA, 25 bp, Homo sapien
acggcctcctctgactccgtgagaa

SEQ ID NO: 137946 - DNA, 25 bp, Homo sapien
aagccacacagtcttaaggtgttct

SEQ ID NO: 137947 - DNA, 25 bp, Homo sapien
ccacacagtcttaaggtgttctggg

SEQ ID NO: 137948 - DNA, 25 bp, Homo sapien
attctgtaagggcacggagcagacg

SEQ ID NO: 137949 - DNA, 25 bp, Homo sapien
catccgccttgagctcgcacttgat

SEQ ID NO: 137950 - DNA, 25 bp, Homo sapien
aatgcaggaagtgtgagccggtgcc

SEQ ID NO: 137951 - DNA, 25 bp, Homo sapien
tgcatgccaagcaagagcttgtgaa

SEQ ID NO: 137952 - DNA, 25 bp, Homo sapien
ccccagttcaagtcatcaatgcatg

SEQ ID NO: 137953 - DNA, 25 bp, Homo sapien
tcattagcaccaacggactcccgct

SEQ ID NO: 137954 - DNA, 25 bp, Homo sapien
agccgggctcccttggcctcattag

SEQ ID NO: 137955 - DNA, 25 bp, Homo sapien
tgaggttaaccagccccgaatctgt

SEQ ID NO: 137956 - DNA, 25 bp, Homo sapien
gactcccgctctctgaggttaacca

SEQ ID NO: 137957 - DNA, 25 bp, Homo sapien
cgctttggggcttgcacgctctctc

SEQ ID NO: 137958 - DNA, 25 bp, Homo sapien
gctccccaaagggacatgtcgctcg

SEQ ID NO: 137959 - DNA, 25 bp, Homo sapien
aaagggacatgtcgctcgctttggg

SEQ ID NO: 137960 - DNA, 25 bp, Homo sapien
cccaaagggacatgtcgctcgcttt

SEQ ID NO: 137961 - DNA, 25 bp, Homo sapien
tgaaatcttccgggctctcacactc

SEQ ID NO: 137962 - DNA, 25 bp, Homo sapien
gctgaaatcttccgggctctcacac

SEQ ID NO: 137963 - DNA, 25 bp, Homo sapien
ggctgaaatcttccgggctctcaca

SEQ ID NO: 137964 - DNA, 25 bp, Homo sapien
gaaatcttccgggctctcacactca

SEQ ID NO: 137965 - DNA, 25 bp, Homo sapien
gagtcactgctgtcggagctgtgag

SEQ ID NO: 137966 - DNA, 25 bp, Homo sapien
tggagtcactgctgtcggagctgtg

SEQ ID NO: 137967 - DNA, 25 bp, Homo sapien
tcactgctgtcggagctgtgaggca

SEQ ID NO: 137968 - DNA, 25 bp, Homo sapien
cactgctgtcggagctgtgaggcat

SEQ ID NO: 137969 - DNA, 25 bp, Homo sapien
ggcttaggatatacgccctgttcaa

SEQ ID NO: 137970 - DNA, 25 bp, Homo sapien
cagcctgctgctccgttattagagg

SEQ ID NO: 137971 - DNA, 25 bp, Homo sapien
taacccacggatacatgtcggatga

SEQ ID NO: 137972 - DNA, 25 bp, Homo sapien
tgaaaacccttgtggatatctgtgc

SEQ ID NO: 137973 - DNA, 25 bp, Homo sapien
aggaggtcattggcatagataggaa

SEQ ID NO: 137974 - DNA, 25 bp, Homo sapien
gaggtcattggcatagataggaagg

SEQ ID NO: 137975 - DNA, 25 bp, Homo sapien
ggtcattggcatagataggaaggaa

SEQ ID NO: 137976 - DNA, 25 bp, Homo sapien
caggcctttgtggtaggaggtcatt

SEQ ID NO: 137977 - DNA, 25 bp, Homo sapien
gcggcaatacgatttttctccctcc

SEQ ID NO: 137978 - DNA, 25 bp, Homo sapien
aactcttctcacatcatcagatgag

SEQ ID NO: 137979 - DNA, 25 bp, Homo sapien
tcttctgggcggcaatacgattttt

SEQ ID NO: 137980 - DNA, 25 bp, Homo sapien
gtgtctgcctctgtcggctcttctg

SEQ ID NO: 137981 - DNA, 25 bp, Homo sapien
cagctaatttgatgtagggcagatt

SEQ ID NO: 137982 - DNA, 25 bp, Homo sapien
agctaatttgatgtagggcagattg

SEQ ID NO: 137983 - DNA, 25 bp, Homo sapien
gctaatttgatgtagggcagattga

SEQ ID NO: 137984 - DNA, 25 bp, Homo sapien
acagctaatttgatgtagggcagat

SEQ ID NO: 137985 - DNA, 25 bp, Homo sapien
ccttggcctccgtatgtattgggat

SEQ ID NO: 137986 - DNA, 25 bp, Homo sapien
ggcatgaaccatcccacttggccat

SEQ ID NO: 137987 - DNA, 25 bp, Homo sapien
caaaggaggcattcaatcttcccag

SEQ ID NO: 137988 - DNA, 25 bp, Homo sapien
gatgaacatcgtgatgcacactggg

SEQ ID NO: 137989 - DNA, 25 bp, Homo sapien
ccgccgggagccattagggacgaag

SEQ ID NO: 137990 - DNA, 25 bp, Homo sapien
ggagccattagggacgaagaccaag

SEQ ID NO: 137991 - DNA, 25 bp, Homo sapien
cgggagccattagggacgaagacca

SEQ ID NO: 137992 - DNA, 25 bp, Homo sapien
cattagggacgaagaccaaggacaa

SEQ ID NO: 137993 - DNA, 25 bp, Homo sapien
gagcgcttcaacgatggggaatccc

SEQ ID NO: 137994 - DNA, 25 bp, Homo sapien
gcgcttcaacgatggggaatcccca

SEQ ID NO: 137995 - DNA, 25 bp, Homo sapien
gcttcaacgatggggaatccccagg

SEQ ID NO: 137996 - DNA, 25 bp, Homo sapien
agagcgcttcaacgatggggaatcc

SEQ ID NO: 137997 - DNA, 25 bp, Homo sapien
attcttccaatcatagagctgacca

SEQ ID NO: 137998 - DNA, 25 bp, Homo sapien
aatgcgtgggcgctgtacaccacct

SEQ ID NO: 137999 - DNA, 25 bp, Homo sapien
tcagcaccgacgtgaagtacttcag

SEQ ID NO: 138000 - DNA, 25 bp, Homo sapien
gggctcgtggctgttcagcaccgac

SEQ ID NO: 138001 - DNA, 25 bp, Homo sapien
tgcttgatctccttgcgtagagccg

SEQ ID NO: 138002 - DNA, 25 bp, Homo sapien
tgggaggcctcacgcccttccagtc

SEQ ID NO: 138003 - DNA, 25 bp, Homo sapien
tccagtcgtgacagttcccgtgttc

SEQ ID NO: 138004 - DNA, 25 bp, Homo sapien
gcctctgcgggatgggcgcagctct

SEQ ID NO: 138005 - DNA, 25 bp, Homo sapien
ccctcgaaacgctgcggcactgctg

SEQ ID NO: 138006 - DNA, 25 bp, Homo sapien
tctgtgccatgggacttgagcatct

SEQ ID NO: 138007 - DNA, 25 bp, Homo sapien
ctgtgccatgggacttgagcatctt

SEQ ID NO: 138008 - DNA, 25 bp, Homo sapien
gctctgtgccatgggacttgagcat

SEQ ID NO: 138009 - DNA, 25 bp, Homo sapien
ttgctctgtgccatgggacttgagc

SEQ ID NO: 138010 - DNA, 25 bp, Homo sapien
ctccaatccaatgccgatgtcctgg

SEQ ID NO: 138011 - DNA, 25 bp, Homo sapien
acactgtggcgacctgggagcttct

SEQ ID NO: 138012 - DNA, 25 bp, Homo sapien
gcttctgcactccaatccaatgccg

SEQ ID NO: 138013 - DNA, 25 bp, Homo sapien
cacactgtggcgacctgggagcttc

SEQ ID NO: 138014 - DNA, 25 bp, Homo sapien
tcgcctcacaggattttccagttct

SEQ ID NO: 138015 - DNA, 25 bp, Homo sapien
tccagtggccaccaaaacaaggaag

SEQ ID NO: 138016 - DNA, 25 bp, Homo sapien
cagtggccaccaaaacaaggaagga

SEQ ID NO: 138017 - DNA, 25 bp, Homo sapien
tcagccggatgtcgcctcacaggat

SEQ ID NO: 138018 - DNA, 25 bp, Homo sapien
ttttcctgatggattctgggcgaag

SEQ ID NO: 138019 - DNA, 25 bp, Homo sapien
atttttcctgatggattctgggcga

SEQ ID NO: 138020 - DNA, 25 bp, Homo sapien
tgttatgtggggctatttttcctga

SEQ ID NO: 138021 - DNA, 25 bp, Homo sapien
tcctgatggattctgggcgaagacc

SEQ ID NO: 138022 - DNA, 25 bp, Homo sapien
gaggactccggcagtcttaagggac

SEQ ID NO: 138023 - DNA, 25 bp, Homo sapien
cacgaggcgttccttgtgcaggaaa

SEQ ID NO: 138024 - DNA, 25 bp, Homo sapien
gacacttgcctattccagaagaaac

SEQ ID NO: 138025 - DNA, 25 bp, Homo sapien
aggctgcgtaaaagcctcaagtggg

SEQ ID NO: 138026 - DNA, 25 bp, Homo sapien
gactccggcacaggggtgtcatcgc

SEQ ID NO: 138027 - DNA, 25 bp, Homo sapien
ggtccgcttggagtgcggactccgg

SEQ ID NO: 138028 - DNA, 25 bp, Homo sapien
gggtgtcatcgctctcttcctggtt

SEQ ID NO: 138029 - DNA, 25 bp, Homo sapien
cttcctggttgggaccttcattcac

SEQ ID NO: 138030 - DNA, 25 bp, Homo sapien
gacgctggggttgatggagacgctg

SEQ ID NO: 138031 - DNA, 25 bp, Homo sapien
agccactgggttgggctaaggcact

SEQ ID NO: 138032 - DNA, 25 bp, Homo sapien
ccaagccactgggttgggctaaggc

SEQ ID NO: 138033 - DNA, 25 bp, Homo sapien
gagccaagccactgggttgggctaa

SEQ ID NO: 138034 - DNA, 25 bp, Homo sapien
ggagtagcagctaaacaccaggacc

SEQ ID NO: 138035 - DNA, 25 bp, Homo sapien
catgtagcacatggacagccagtca

SEQ ID NO: 138036 - DNA, 25 bp, Homo sapien
tggcaaaggcactgacaccgtagaa

SEQ ID NO: 138037 - DNA, 25 bp, Homo sapien
aaagagatgcggcttcaggctgccc

SEQ ID NO: 138038 - DNA, 25 bp, Homo sapien
gtaacactactgagacatgagacct

SEQ ID NO: 138039 - DNA, 25 bp, Homo sapien
atgccattcaccatgttatgacgca

SEQ ID NO: 138040 - DNA, 25 bp, Homo sapien
ctttcttgaacatgagatgccattc

SEQ ID NO: 138041 - DNA, 25 bp, Homo sapien
gatgctggtcgcttggccttggact

SEQ ID NO: 138042 - DNA, 25 bp, Homo sapien
gcatgtgcaaccatgcacagcttct

SEQ ID NO: 138043 - DNA, 25 bp, Homo sapien
aggcatgtgcaaccatgcacagctt

SEQ ID NO: 138044 - DNA, 25 bp, Homo sapien
catgtgcaaccatgcacagcttctt

SEQ ID NO: 138045 - DNA, 25 bp, Homo sapien
tgtgcaaccatgcacagcttctttt

SEQ ID NO: 138046 - DNA, 25 bp, Homo sapien
ggagccaggtactaacagaacaatg

SEQ ID NO: 138047 - DNA, 25 bp, Homo sapien
tatttcaaaagtctaaggccattcc

SEQ ID NO: 138048 - DNA, 25 bp, Homo sapien
gaatggtgggataccactgccctga

SEQ ID NO: 138049 - DNA, 25 bp, Homo sapien
gacacagtgtggttactttgacagc

SEQ ID NO: 138050 - DNA, 25 bp, Homo sapien
catgtagactgaaaaagtgtccgta

SEQ ID NO: 138051 - DNA, 25 bp, Homo sapien
gggaaatctgaaggctggccatgta

SEQ ID NO: 138052 - DNA, 25 bp, Homo sapien
aaccaagggcgtggccaagaaatca

SEQ ID NO: 138053 - DNA, 25 bp, Homo sapien
attagtagacagaaggcaaccaggc

SEQ ID NO: 138054 - DNA, 25 bp, Homo sapien
ctcattttggtggtggcaagacaac

SEQ ID NO: 138055 - DNA, 25 bp, Homo sapien
aactcattttggtggtggcaagaca

SEQ ID NO: 138056 - DNA, 25 bp, Homo sapien
actcattttggtggtggcaagacaa

SEQ ID NO: 138057 - DNA, 25 bp, Homo sapien
aaaatgaaatgaattagttaccagc

SEQ ID NO: 138058 - DNA, 25 bp, Homo sapien
tagccatcctaaataggtgtggagt

SEQ ID NO: 138059 - DNA, 25 bp, Homo sapien
taggtgctattgactgttgggagca

SEQ ID NO: 138060 - DNA, 25 bp, Homo sapien
tgttgagcacctttttaggtgctat

SEQ ID NO: 138061 - DNA, 25 bp, Homo sapien
aaagagttccaatgtcttcacatcc

SEQ ID NO: 138062 - DNA, 25 bp, Homo sapien
ctagcgacagtattctcccatccaa

SEQ ID NO: 138063 - DNA, 25 bp, Homo sapien
gatctagcgacagtattctcccatc

SEQ ID NO: 138064 - DNA, 25 bp, Homo sapien
tacacagcagatctagcgacagtat

SEQ ID NO: 138065 - DNA, 25 bp, Homo sapien
agcagatctagcgacagtattctcc

SEQ ID NO: 138066 - DNA, 25 bp, Homo sapien
ctggcagggctgtgcaatcaaaagc

SEQ ID NO: 138067 - DNA, 25 bp, Homo sapien
tggcagggctgtgcaatcaaaagca

SEQ ID NO: 138068 - DNA, 25 bp, Homo sapien
tctgtgtccctcttttccggagctg

SEQ ID NO: 138069 - DNA, 25 bp, Homo sapien
ctctagagccgccaaaggagaccca

SEQ ID NO: 138070 - DNA, 25 bp, Homo sapien
tcctatgttttccagtagatgaaca

SEQ ID NO: 138071 - DNA, 25 bp, Homo sapien
aaatagacttgcatacagacagcta

SEQ ID NO: 138072 - DNA, 25 bp, Homo sapien
atacagacagctacctctagagccg

SEQ ID NO: 138073 - DNA, 25 bp, Homo sapien
ccagttactagagcttggcaagtta

SEQ ID NO: 138074 - DNA, 25 bp, Homo sapien
taccacctagctcatcgggctgagg

SEQ ID NO: 138075 - DNA, 25 bp, Homo sapien
gtgtgtttcctaatccacaagagga

SEQ ID NO: 138076 - DNA, 25 bp, Homo sapien
tcaattcaaatctcggccctaccag

SEQ ID NO: 138077 - DNA, 25 bp, Homo sapien
catcatccatcaactgccaatctgc

SEQ ID NO: 138078 - DNA, 25 bp, Homo sapien
ctgactgacattttggctcatacat

SEQ ID NO: 138079 - DNA, 25 bp, Homo sapien
cttctgactgacattttggctcata

SEQ ID NO: 138080 - DNA, 25 bp, Homo sapien
cagagaaatctttcttctgactgac

SEQ ID NO: 138081 - DNA, 25 bp, Homo sapien
acaccagagaaatctttcttctgac

SEQ ID NO: 138082 - DNA, 25 bp, Homo sapien
agctcgtcccggtcttcaatgttgg

SEQ ID NO: 138083 - DNA, 25 bp, Homo sapien
gctgatgtggtaggcaagctcgtcc

SEQ ID NO: 138084 - DNA, 25 bp, Homo sapien
caatgttgggtaccaaaacaggagg

SEQ ID NO: 138085 - DNA, 25 bp, Homo sapien
cctattatatagaacatgatgctga

SEQ ID NO: 138086 - DNA, 25 bp, Homo sapien
agtgctcagtgggtttcatcaaggg

SEQ ID NO: 138087 - DNA, 25 bp, Homo sapien
cactaacaaagtgcataggaccagc

SEQ ID NO: 138088 - DNA, 25 bp, Homo sapien
ggcatgttcacaagggtcccatcaa

SEQ ID NO: 138089 - DNA, 25 bp, Homo sapien
catttgaagaccataagaagcccag

SEQ ID NO: 138090 - DNA, 25 bp, Homo sapien
tatataactgcttgactctggaggt

SEQ ID NO: 138091 - DNA, 25 bp, Homo sapien
tgagaacggttgaatgaggtaccca

SEQ ID NO: 138092 - DNA, 25 bp, Homo sapien
ggcagtgttcaaagatcaaggaaac

SEQ ID NO: 138093 - DNA, 25 bp, Homo sapien
aggctgaaatcactggacctcccag

SEQ ID NO: 138094 - DNA, 25 bp, Homo sapien
gagctcaagcgatttgcatgcctca

SEQ ID NO: 138095 - DNA, 25 bp, Homo sapien
cgatttgcatgcctcagccccccat

SEQ ID NO: 138096 - DNA, 25 bp, Homo sapien
atttgcatgcctcagccccccatag

SEQ ID NO: 138097 - DNA, 25 bp, Homo sapien
agcgatttgcatgcctcagcccccc

SEQ ID NO: 138098 - DNA, 25 bp, Homo sapien
aggagaggtcaaggcatagctcagg

SEQ ID NO: 138099 - DNA, 25 bp, Homo sapien
ggatatttaggtttctccttgaaca

SEQ ID NO: 138100 - DNA, 25 bp, Homo sapien
gaacctaagtatgaggcatcaggag

SEQ ID NO: 138101 - DNA, 25 bp, Homo sapien
atagctcagggattgggccctgctg

SEQ ID NO: 138102 - DNA, 25 bp, Homo sapien
taagtcaggacacatagcttgtgga

SEQ ID NO: 138103 - DNA, 25 bp, Homo sapien
aagggtgtaagtcaggacacatagc

SEQ ID NO: 138104 - DNA, 25 bp, Homo sapien
ggtgtaagtcaggacacatagcttg

SEQ ID NO: 138105 - DNA, 25 bp, Homo sapien
ttggaagggtgtaagtcaggacaca

SEQ ID NO: 138106 - DNA, 25 bp, Homo sapien
gcctcctggcctcccttcaatggtg

SEQ ID NO: 138107 - DNA, 25 bp, Homo sapien
ctggcctcccttcaatggtgatgat

SEQ ID NO: 138108 - DNA, 25 bp, Homo sapien
caaaggagaaaaggcctcctggcct

SEQ ID NO: 138109 - DNA, 25 bp, Homo sapien
tcctggcctcccttcaatggtgatg

SEQ ID NO: 138110 - DNA, 25 bp, Homo sapien
tggacaaggcataaaaagcaccagc

SEQ ID NO: 138111 - DNA, 25 bp, Homo sapien
caccatgcgattcagaagagtggac

SEQ ID NO: 138112 - DNA, 25 bp, Homo sapien
cgggtagtgccagatcaccatgcga

SEQ ID NO: 138113 - DNA, 25 bp, Homo sapien
gagtggacaaggcataaaaagcacc

SEQ ID NO: 138114 - DNA, 25 bp, Homo sapien
gatcgtcaggccaattcttccagca

SEQ ID NO: 138115 - DNA, 25 bp, Homo sapien
cattcctgcaatgacgatcgtcagg

SEQ ID NO: 138116 - DNA, 25 bp, Homo sapien
tccagccagattcctgagatcacag

SEQ ID NO: 138117 - DNA, 25 bp, Homo sapien
taggttttggacctatccagccaga

SEQ ID NO: 138118 - DNA, 25 bp, Homo sapien
tcaggagtaccatcagcaagtcttg

SEQ ID NO: 138119 - DNA, 25 bp, Homo sapien
gtgacattcaggactaccccagaag

SEQ ID NO: 138120 - DNA, 25 bp, Homo sapien
tggtggaggcaccaaatggcacgct

SEQ ID NO: 138121 - DNA, 25 bp, Homo sapien
tgggacagttgtgcgcatcacgcct

SEQ ID NO: 138122 - DNA, 25 bp, Homo sapien
gcagtgatgaacactacccacaggt

SEQ ID NO: 138123 - DNA, 25 bp, Homo sapien
tgtcatgatatagactaccagggtt

SEQ ID NO: 138124 - DNA, 25 bp, Homo sapien
tcaaggtaaacgtgtacaccaccat

SEQ ID NO: 138125 - DNA, 25 bp, Homo sapien
tgaacactacccacaggtgtcccag

SEQ ID NO: 138126 - DNA, 25 bp, Homo sapien
ggttctagcctccaagaggtcgcga

SEQ ID NO: 138127 - DNA, 25 bp, Homo sapien
tcctgaggtcagttagaaggcagca

SEQ ID NO: 138128 - DNA, 25 bp, Homo sapien
ctacaagtattaccgagacccctgg

SEQ ID NO: 138129 - DNA, 25 bp, Homo sapien
tgtgcccatggtctaacaggtaggc

SEQ ID NO: 138130 - DNA, 25 bp, Homo sapien
tctgggcatcctctatgtgatcata

SEQ ID NO: 138131 - DNA, 25 bp, Homo sapien
tgatcataccaaggagacgggcacc

SEQ ID NO: 138132 - DNA, 25 bp, Homo sapien
catactaggccctctaatgatctgg

SEQ ID NO: 138133 - DNA, 25 bp, Homo sapien
acgggcacccctgaaggccaggaag

SEQ ID NO: 138134 - DNA, 25 bp, Homo sapien
tcccagtgggagatagccagtcata

SEQ ID NO: 138135 - DNA, 25 bp, Homo sapien
ggccggaggagatgccttctgattc

SEQ ID NO: 138136 - DNA, 25 bp, Homo sapien
ccttctgattctgggtacgtgagct

SEQ ID NO: 138137 - DNA, 25 bp, Homo sapien
actcaaatcccagtgggagatagcc

SEQ ID NO: 138138 - DNA, 25 bp, Homo sapien
gagggctgctccaagagtaaggaac

SEQ ID NO: 138139 - DNA, 25 bp, Homo sapien
gccctgggagatggtaaagatgatc

SEQ ID NO: 138140 - DNA, 25 bp, Homo sapien
tgctccaagagtaaggaacacacac

SEQ ID NO: 138141 - DNA, 25 bp, Homo sapien
aagatgttcccaggcttggttccat

SEQ ID NO: 138142 - DNA, 25 bp, Homo sapien
tcatcttgccctcaggctccaactc

SEQ ID NO: 138143 - DNA, 25 bp, Homo sapien
gagcctcatcttgccctcaggctcc

SEQ ID NO: 138144 - DNA, 25 bp, Homo sapien
atcttgccctcaggctccaactcac

SEQ ID NO: 138145 - DNA, 25 bp, Homo sapien
cctcatcttgccctcaggctccaac

SEQ ID NO: 138146 - DNA, 25 bp, Homo sapien
cacgttcatccgagagaagaaacct

SEQ ID NO: 138147 - DNA, 25 bp, Homo sapien
cagttatcacgttcatccgagagaa

SEQ ID NO: 138148 - DNA, 25 bp, Homo sapien
aaatacagttatcacgttcatccga

SEQ ID NO: 138149 - DNA, 25 bp, Homo sapien
tatcacgttcatccgagagaagaaa

SEQ ID NO: 138150 - DNA, 25 bp, Homo sapien
ctccggagatctgccttaatgaatg

SEQ ID NO: 138151 - DNA, 25 bp, Homo sapien
ttgctttctgtctccggagatctgc

SEQ ID NO: 138152 - DNA, 25 bp, Homo sapien
aaagccttggaccccgatctcagcc

SEQ ID NO: 138153 - DNA, 25 bp, Homo sapien
catcaaaagccttggaccccgatct

SEQ ID NO: 138154 - DNA, 25 bp, Homo sapien
caaaagccttggaccccgatctcag

SEQ ID NO: 138155 - DNA, 25 bp, Homo sapien
atcaaaagccttggaccccgatctc

SEQ ID NO: 138156 - DNA, 25 bp, Homo sapien
gacttgtcctttcagagccccactg

SEQ ID NO: 138157 - DNA, 25 bp, Homo sapien
tgttctaggtcatactcctggtcct

SEQ ID NO: 138158 - DNA, 25 bp, Homo sapien
gagagtcacagccttagggccagca

SEQ ID NO: 138159 - DNA, 25 bp, Homo sapien
tggcaattctttggctccgtcccca

SEQ ID NO: 138160 - DNA, 25 bp, Homo sapien
aatgaaatagtggaacaactgaaat

SEQ ID NO: 138161 - DNA, 25 bp, Homo sapien
ctggtccatgtacacaaagagctgg

SEQ ID NO: 138162 - DNA, 25 bp, Homo sapien
ggtgcgtaatgtcacggctccagag

SEQ ID NO: 138163 - DNA, 25 bp, Homo sapien
agatctgccgtgtgcccagtcttca

SEQ ID NO: 138164 - DNA, 25 bp, Homo sapien
ggtcaatcattaccctgtcccagaa

SEQ ID NO: 138165 - DNA, 25 bp, Homo sapien
ggacacaagacaggtgagcaccatt

SEQ ID NO: 138166 - DNA, 25 bp, Homo sapien
ggcactttgctggtgttgctctcct

SEQ ID NO: 138167 - DNA, 25 bp, Homo sapien
cactttgctggtgttgctctcctcc

SEQ ID NO: 138168 - DNA, 25 bp, Homo sapien
tgacacagcagtgggcactttgctg

SEQ ID NO: 138169 - DNA, 25 bp, Homo sapien
ctctgacacagcagtgggcactttg

SEQ ID NO: 138170 - DNA, 25 bp, Homo sapien
aggtggggtgttcgtgttccctgag

SEQ ID NO: 138171 - DNA, 25 bp, Homo sapien
ggtgttcgtgttccctgagttgtca

SEQ ID NO: 138172 - DNA, 25 bp, Homo sapien
tggggtgttcgtgttccctgagttg

SEQ ID NO: 138173 - DNA, 25 bp, Homo sapien
gggtgttcgtgttccctgagttgtc

SEQ ID NO: 138174 - DNA, 25 bp, Homo sapien
aggaataggccatccatgccacaaa

SEQ ID NO: 138175 - DNA, 25 bp, Homo sapien
caaaaacatctctagcgaagccctt

SEQ ID NO: 138176 - DNA, 25 bp, Homo sapien
agccctttgtgctggcggtgagagc

SEQ ID NO: 138177 - DNA, 25 bp, Homo sapien
taggccatccatgccacaaatagtc

SEQ ID NO: 138178 - DNA, 25 bp, Homo sapien
gagaccaagctaggattgactccaa

SEQ ID NO: 138179 - DNA, 25 bp, Homo sapien
gcaatcagtccgatgacccaggaga

SEQ ID NO: 138180 - DNA, 25 bp, Homo sapien
acaagtcccggtggagctgttctga

SEQ ID NO: 138181 - DNA, 25 bp, Homo sapien
catgagaggctcttaggacactgga

SEQ ID NO: 138182 - DNA, 25 bp, Homo sapien
ggtcacgatcacagttgcccaatgc

SEQ ID NO: 138183 - DNA, 25 bp, Homo sapien
ggtaggtagccctcctgagtcggta

SEQ ID NO: 138184 - DNA, 25 bp, Homo sapien
tggtgcaaatactgtccccagcaga

SEQ ID NO: 138185 - DNA, 25 bp, Homo sapien
taaagattatcgctcaaagcaggtg

SEQ ID NO: 138186 - DNA, 25 bp, Homo sapien
tctacagatgcatgagggttggaag

SEQ ID NO: 138187 - DNA, 25 bp, Homo sapien
agttcttctaagaagggctcccctg

SEQ ID NO: 138188 - DNA, 25 bp, Homo sapien
tctgaaccttccaagggacaggcag

SEQ ID NO: 138189 - DNA, 25 bp, Homo sapien
tccatccaagtcaagaaattgccag

SEQ ID NO: 138190 - DNA, 25 bp, Homo sapien
ttcaggtcaccgagggaggctatct

SEQ ID NO: 138191 - DNA, 25 bp, Homo sapien
aagtcttttcttagcagccctggag

SEQ ID NO: 138192 - DNA, 25 bp, Homo sapien
actcaagtgagatttgaagcagggc

SEQ ID NO: 138193 - DNA, 25 bp, Homo sapien
ggctattagccgtttgatctcttca

SEQ ID NO: 138194 - DNA, 25 bp, Homo sapien
ggcttaggcagcggcaaccgctgat

SEQ ID NO: 138195 - DNA, 25 bp, Homo sapien
gagaggcttaggcagcggcaaccgc

SEQ ID NO: 138196 - DNA, 25 bp, Homo sapien
gggagaggcttaggcagcggcaacc

SEQ ID NO: 138197 - DNA, 25 bp, Homo sapien
gaggcttaggcagcggcaaccgctg

SEQ ID NO: 138198 - DNA, 25 bp, Homo sapien
aggcgctcataacgctcagctgcgg

SEQ ID NO: 138199 - DNA, 25 bp, Homo sapien
taggtccaacaggagggcttacggc

SEQ ID NO: 138200 - DNA, 25 bp, Homo sapien
gctgcttccccggttactacaacaa

SEQ ID NO: 138201 - DNA, 25 bp, Homo sapien
tccgcccctaagaggttgactccaa

SEQ ID NO: 138202 - DNA, 25 bp, Homo sapien
tcctctcccgaaaggaatctgcttc

SEQ ID NO: 138203 - DNA, 25 bp, Homo sapien
cgggaatgctcctccctagggtagg

SEQ ID NO: 138204 - DNA, 25 bp, Homo sapien
gctctgagcgggaagtcctgctgca

SEQ ID NO: 138205 - DNA, 25 bp, Homo sapien
aatcccacgtaggtccgcagatgct

SEQ ID NO: 138206 - DNA, 25 bp, Homo sapien
gcacgctgacaagatgccatcatgt

SEQ ID NO: 138207 - DNA, 25 bp, Homo sapien
tcacaaagtttggtacgactctcaa

SEQ ID NO: 138208 - DNA, 25 bp, Homo sapien
tagactctatgacaagcacgctgac

SEQ ID NO: 138209 - DNA, 25 bp, Homo sapien
gatcaaagatcttcggcgcaatagg

SEQ ID NO: 138210 - DNA, 25 bp, Homo sapien
tatggaatgtgcctcaatatgtgcc

SEQ ID NO: 138211 - DNA, 25 bp, Homo sapien
tattccttgctagacaaacctggcc

SEQ ID NO: 138212 - DNA, 25 bp, Homo sapien
tatgcaccaaaaggatagactcctc

SEQ ID NO: 138213 - DNA, 25 bp, Homo sapien
gaggcaggtgactgattccctaaaa

SEQ ID NO: 138214 - DNA, 25 bp, Homo sapien
agagacctttcctagcagattcact

SEQ ID NO: 138215 - DNA, 25 bp, Homo sapien
atgcagtcagcagacgggggcctca

SEQ ID NO: 138216 - DNA, 25 bp, Homo sapien
cctagcagattcactggatcaagca

SEQ ID NO: 138217 - DNA, 25 bp, Homo sapien
ttagggtttgtcatgcagtcagcag

SEQ ID NO: 138218 - DNA, 25 bp, Homo sapien
ctctgaggatgatgctgtttcctcc

SEQ ID NO: 138219 - DNA, 25 bp, Homo sapien
ggtcccgggccatcacgattggcat

SEQ ID NO: 138220 - DNA, 25 bp, Homo sapien
caggtcccgggccatcacgattggc

SEQ ID NO: 138221 - DNA, 25 bp, Homo sapien
tcttgacttatgacctcctcatcct

SEQ ID NO: 138222 - DNA, 25 bp, Homo sapien
gtcctttgtaagaatagcgtcggca

SEQ ID NO: 138223 - DNA, 25 bp, Homo sapien
taagaatagcgtcggcatggaatac

SEQ ID NO: 138224 - DNA, 25 bp, Homo sapien
cgtcggcatggaataccaaaactgg

SEQ ID NO: 138225 - DNA, 25 bp, Homo sapien
agtccacatgatgcatggatgatcc

SEQ ID NO: 138226 - DNA, 25 bp, Homo sapien
aggtggatgttgcagtgagcgccga

SEQ ID NO: 138227 - DNA, 25 bp, Homo sapien
ggtggatgttgcagtgagcgccgag

SEQ ID NO: 138228 - DNA, 25 bp, Homo sapien
tactaggcgactgtccgttcgtaca

SEQ ID NO: 138229 - DNA, 25 bp, Homo sapien
tcagaatgctgcgtactaggcgact

SEQ ID NO: 138230 - DNA, 25 bp, Homo sapien
tccgttcgtacaatcttataagaca

SEQ ID NO: 138231 - DNA, 25 bp, Homo sapien
catgggctgtcagaatgctgcgtac

SEQ ID NO: 138232 - DNA, 25 bp, Homo sapien
taggttatagtcagtgctgcttggg

SEQ ID NO: 138233 - DNA, 25 bp, Homo sapien
ttgtgcttcagagagggtgcgcagt

SEQ ID NO: 138234 - DNA, 25 bp, Homo sapien
tgcgcagtaagaagggcttcaggtg

SEQ ID NO: 138235 - DNA, 25 bp, Homo sapien
ggtgggatcctgtccacattaggtt

SEQ ID NO: 138236 - DNA, 25 bp, Homo sapien
ggctacatgccccaatgtcatgtac

SEQ ID NO: 138237 - DNA, 25 bp, Homo sapien
gacactaattacctttgctggctac

SEQ ID NO: 138238 - DNA, 25 bp, Homo sapien
tgctggctacatgccccaatgtcat

SEQ ID NO: 138239 - DNA, 25 bp, Homo sapien
ctttgctggctacatgccccaatgt

SEQ ID NO: 138240 - DNA, 25 bp, Homo sapien
tctaaagagttacagttcacagtcc

SEQ ID NO: 138241 - DNA, 25 bp, Homo sapien
cctagaccggttagtgaagatagta

SEQ ID NO: 138242 - DNA, 25 bp, Homo sapien
catatcgctgttaatccaaaaggct

SEQ ID NO: 138243 - DNA, 25 bp, Homo sapien
gaagatagtattgtatcctaaacat

SEQ ID NO: 138244 - DNA, 25 bp, Homo sapien
aaattccgcgtactcagctggcagg

SEQ ID NO: 138245 - DNA, 25 bp, Homo sapien
ccatgtgtatgctgcattcgaataa

SEQ ID NO: 138246 - DNA, 25 bp, Homo sapien
ataatgtttttgtacagtcggtcct

SEQ ID NO: 138247 - DNA, 25 bp, Homo sapien
gatgtgaaaagccttgaatccatgt

SEQ ID NO: 138248 - DNA, 25 bp, Homo sapien
aggaccaggcaaaactaaaattgct

SEQ ID NO: 138249 - DNA, 25 bp, Homo sapien
cacaggaccaggcaaaactaaaatt

SEQ ID NO: 138250 - DNA, 25 bp, Homo sapien
caggaccaggcaaaactaaaattgc

SEQ ID NO: 138251 - DNA, 25 bp, Homo sapien
caaggtccccggtccttcgaatatg

SEQ ID NO: 138252 - DNA, 25 bp, Homo sapien
cttgaagatgccactggttttacta

SEQ ID NO: 138253 - DNA, 25 bp, Homo sapien
gccactggttttactatccaaggtc

SEQ ID NO: 138254 - DNA, 25 bp, Homo sapien
gatgccactggttttactatccaag

SEQ ID NO: 138255 - DNA, 25 bp, Homo sapien
attgttgatcaggtagacgccccgc

SEQ ID NO: 138256 - DNA, 25 bp, Homo sapien
ttgttgatcaggtagacgccccgcc

SEQ ID NO: 138257 - DNA, 25 bp, Homo sapien
tgttgatcaggtagacgccccgccc

SEQ ID NO: 138258 - DNA, 25 bp, Homo sapien
gttgatcaggtagacgccccgcccc

SEQ ID NO: 138259 - DNA, 25 bp, Homo sapien
ttctgctgacacaacaggttgccct

SEQ ID NO: 138260 - DNA, 25 bp, Homo sapien
ggttgccctcccctaaaatctgatc

SEQ ID NO: 138261 - DNA, 25 bp, Homo sapien
gagtaactgctggtgcagaagattc

SEQ ID NO: 138262 - DNA, 25 bp, Homo sapien
aagtgtctttttagccatggagtaa

SEQ ID NO: 138263 - DNA, 25 bp, Homo sapien
agcagagaatatgctgatagtggtc

SEQ ID NO: 138264 - DNA, 25 bp, Homo sapien
cagagaatatgctgatagtggtcat

SEQ ID NO: 138265 - DNA, 25 bp, Homo sapien
acagcagagaatatgctgatagtgg

SEQ ID NO: 138266 - DNA, 25 bp, Homo sapien
gcagagaatatgctgatagtggtca

SEQ ID NO: 138267 - DNA, 25 bp, Homo sapien
ctccattttgaatctgctcaatgag

SEQ ID NO: 138268 - DNA, 25 bp, Homo sapien
tgatcagcttctcgtaagtactatc

SEQ ID NO: 138269 - DNA, 25 bp, Homo sapien
cagcttctcgtaagtactatctcca

SEQ ID NO: 138270 - DNA, 25 bp, Homo sapien
caatgagaattgatgcaatcactat

SEQ ID NO: 138271 - DNA, 25 bp, Homo sapien
gggagaccaaaatgttctcttccag

SEQ ID NO: 138272 - DNA, 25 bp, Homo sapien
catctatgagcagggggttgttaat

SEQ ID NO: 138273 - DNA, 25 bp, Homo sapien
atgagcagggggttgttaatgtaac

SEQ ID NO: 138274 - DNA, 25 bp, Homo sapien
atgtaacgggagaccaaaatgttct

SEQ ID NO: 138275 - DNA, 25 bp, Homo sapien
ggaagtcacgagcacatagaggcgc

SEQ ID NO: 138276 - DNA, 25 bp, Homo sapien
catagagatagatgacaagaggatc

SEQ ID NO: 138277 - DNA, 25 bp, Homo sapien
ctagccaatccttcttcatagagat

SEQ ID NO: 138278 - DNA, 25 bp, Homo sapien
tagaggcgcacgtcaaacttgaaat

SEQ ID NO: 138279 - DNA, 25 bp, Homo sapien
tgtacataaataggtagccttcttt

SEQ ID NO: 138280 - DNA, 25 bp, Homo sapien
ggtaaatatccctgcagagccagtg

SEQ ID NO: 138281 - DNA, 25 bp, Homo sapien
tgtgactgccacctagaggcgaacg

SEQ ID NO: 138282 - DNA, 25 bp, Homo sapien
tggtagagcatagcacccctctgtg

SEQ ID NO: 138283 - DNA, 25 bp, Homo sapien
tgtggcccaagataactaaaagctg

SEQ ID NO: 138284 - DNA, 25 bp, Homo sapien
cttggctccttgatcatatcgcaca

SEQ ID NO: 138285 - DNA, 25 bp, Homo sapien
ttgatcatatcgcacagttgcaaac

SEQ ID NO: 138286 - DNA, 25 bp, Homo sapien
cttgttgacactgtagtttgtcaga

SEQ ID NO: 138287 - DNA, 25 bp, Homo sapien
gatgcatgaactggttccgaatgtt

SEQ ID NO: 138288 - DNA, 25 bp, Homo sapien
ccacatctgagactgacacctctga

SEQ ID NO: 138289 - DNA, 25 bp, Homo sapien
acaacacccacatctgagactgaca

SEQ ID NO: 138290 - DNA, 25 bp, Homo sapien
ctttccacctctacaacacccacat

SEQ ID NO: 138291 - DNA, 25 bp, Homo sapien
ctgagactgacacctctgacttctg

SEQ ID NO: 138292 - DNA, 25 bp, Homo sapien
gagccccgcaatctggaacctgtgt

SEQ ID NO: 138293 - DNA, 25 bp, Homo sapien
tactattgctatggcagcggagtgg

SEQ ID NO: 138294 - DNA, 25 bp, Homo sapien
tcccacgaatgttggaagagccccg

SEQ ID NO: 138295 - DNA, 25 bp, Homo sapien
taacactgaagggagagtgcactgg

SEQ ID NO: 138296 - DNA, 25 bp, Homo sapien
tcttgtttcaggtacctaagcatag

SEQ ID NO: 138297 - DNA, 25 bp, Homo sapien
tgtttcaggtacctaagcatagcac

SEQ ID NO: 138298 - DNA, 25 bp, Homo sapien
gccttcttgtttcaggtacctaagc

SEQ ID NO: 138299 - DNA, 25 bp, Homo sapien
ttcaggtacctaagcatagcactca

SEQ ID NO: 138300 - DNA, 25 bp, Homo sapien
ggcagtagcaatagctagttcagca

SEQ ID NO: 138301 - DNA, 25 bp, Homo sapien
aggtcttctacatgggccatcaatg

SEQ ID NO: 138302 - DNA, 25 bp, Homo sapien
aacaaaggttttacaggcagtagca

SEQ ID NO: 138303 - DNA, 25 bp, Homo sapien
caaaacaactgctgcgatgaggaac

SEQ ID NO: 138304 - DNA, 25 bp, Homo sapien
aaacaggtgcagaggtagcaagcga

SEQ ID NO: 138305 - DNA, 25 bp, Homo sapien
caagcgagggcttacatggtagctc

SEQ ID NO: 138306 - DNA, 25 bp, Homo sapien
agtgagctaaatacgattgcgccat

SEQ ID NO: 138307 - DNA, 25 bp, Homo sapien
tatttcagacacacggtaaaacagg

SEQ ID NO: 138308 - DNA, 25 bp, Homo sapien
catctttaaagagcagcgaacatcc

SEQ ID NO: 138309 - DNA, 25 bp, Homo sapien
tcttcaactgatccaaaagctattc

SEQ ID NO: 138310 - DNA, 25 bp, Homo sapien
caaaagctattctcatagccagttg

SEQ ID NO: 138311 - DNA, 25 bp, Homo sapien
tagccagttgtatctcacaatgcca

SEQ ID NO: 138312 - DNA, 25 bp, Homo sapien
tctgtgggtggccaagtagtttaca

SEQ ID NO: 138313 - DNA, 25 bp, Homo sapien
ttgttggagaatgtacactgcctgc

SEQ ID NO: 138314 - DNA, 25 bp, Homo sapien
gacatcctccctataagaacctcag

SEQ ID NO: 138315 - DNA, 25 bp, Homo sapien
tctaaacaggagcatatgataaacc

SEQ ID NO: 138316 - DNA, 25 bp, Homo sapien
cctgagtatctagttacgggagagc

SEQ ID NO: 138317 - DNA, 25 bp, Homo sapien
cttaactagagcaaaaggagtgtcc

SEQ ID NO: 138318 - DNA, 25 bp, Homo sapien
tatattcctagagcacctgagtcac

SEQ ID NO: 138319 - DNA, 25 bp, Homo sapien
caaaagtggccggactcataaggac

SEQ ID NO: 138320 - DNA, 25 bp, Homo sapien
tttcaagaatctttcaagttcaaga

SEQ ID NO: 138321 - DNA, 25 bp, Homo sapien
caagaatctttcaagttcaagagaa

SEQ ID NO: 138322 - DNA, 25 bp, Homo sapien
agtgtaagtagcaagtggaagtaga

SEQ ID NO: 138323 - DNA, 25 bp, Homo sapien
tgagtgtaagtagcaagtggaagta

SEQ ID NO: 138324 - DNA, 25 bp, Homo sapien
ttccaacaaccatggcttcagagta

SEQ ID NO: 138325 - DNA, 25 bp, Homo sapien
gcttcagagtagaatctatgagcac

SEQ ID NO: 138326 - DNA, 25 bp, Homo sapien
tcacttccaacaaccatggcttcag

SEQ ID NO: 138327 - DNA, 25 bp, Homo sapien
tatgagcacgtcaaagccatagagt

SEQ ID NO: 138328 - DNA, 25 bp, Homo sapien
ctgaaatcatactggctttaatctt

SEQ ID NO: 138329 - DNA, 25 bp, Homo sapien
aatctttaggtccagaggcgcatca

SEQ ID NO: 138330 - DNA, 25 bp, Homo sapien
catactggctttaatctttaggtcc

SEQ ID NO: 138331 - DNA, 25 bp, Homo sapien
ggctttaatctttaggtccagaggc

SEQ ID NO: 138332 - DNA, 25 bp, Homo sapien
gtttcgcctggaagactcaaaggtg

SEQ ID NO: 138333 - DNA, 25 bp, Homo sapien
caaaggtgggataaattggccgagt

SEQ ID NO: 138334 - DNA, 25 bp, Homo sapien
tctggaaagggtttcgcctggaaga

SEQ ID NO: 138335 - DNA, 25 bp, Homo sapien
aattggccgagttgatgcccgctgg

SEQ ID NO: 138336 - DNA, 25 bp, Homo sapien
cctaccagttggcaaaacaagcatt

SEQ ID NO: 138337 - DNA, 25 bp, Homo sapien
acaagcattgaacagattttctaga

SEQ ID NO: 138338 - DNA, 25 bp, Homo sapien
caaagagttgccaataaagctgaca

SEQ ID NO: 138339 - DNA, 25 bp, Homo sapien
gcaatacagctacctctagaagtga

SEQ ID NO: 138340 - DNA, 25 bp, Homo sapien
tagtccacctgacaaactggtttca

SEQ ID NO: 138341 - DNA, 25 bp, Homo sapien
gaagatcctgaagtcaactagtcca

SEQ ID NO: 138342 - DNA, 25 bp, Homo sapien
tctcaccactgagggcacaatccta

SEQ ID NO: 138343 - DNA, 25 bp, Homo sapien
caagagccctacactttgtggttgg

SEQ ID NO: 138344 - DNA, 25 bp, Homo sapien
gcttggcctttgacgactgaaactg

SEQ ID NO: 138345 - DNA, 25 bp, Homo sapien
cttggcctttgacgactgaaactgt

SEQ ID NO: 138346 - DNA, 25 bp, Homo sapien
tgcttggcctttgacgactgaaact

SEQ ID NO: 138347 - DNA, 25 bp, Homo sapien
tgatagatatgccttcaagcccctg

SEQ ID NO: 138348 - DNA, 25 bp, Homo sapien
aaaagaggatccctaagttcctgca

SEQ ID NO: 138349 - DNA, 25 bp, Homo sapien
tgaaatgtcacctgttaaggaactc

SEQ ID NO: 138350 - DNA, 25 bp, Homo sapien
gtataatcactatcaggaaaagagg

SEQ ID NO: 138351 - DNA, 25 bp, Homo sapien
caaatacgtgaaagtgctgacatca

SEQ ID NO: 138352 - DNA, 25 bp, Homo sapien
taaccaatctccaaagctagcatgg

SEQ ID NO: 138353 - DNA, 25 bp, Homo sapien
tacactgtacttggcatgaagtcaa

SEQ ID NO: 138354 - DNA, 25 bp, Homo sapien
tctttggacacaagagagaccaact

SEQ ID NO: 138355 - DNA, 25 bp, Homo sapien
gatgagagacatcagtaacacagaa

SEQ ID NO: 138356 - DNA, 25 bp, Homo sapien
aatgggccctgtccatcactgatcc

SEQ ID NO: 138357 - DNA, 25 bp, Homo sapien
taccctgggtactccaagaaggcag

SEQ ID NO: 138358 - DNA, 25 bp, Homo sapien
gctggacttcaagaggcctggcaca

SEQ ID NO: 138359 - DNA, 25 bp, Homo sapien
ggtttttcatttccgcatcactggc

SEQ ID NO: 138360 - DNA, 25 bp, Homo sapien
cgggctgagcccacgaggtttttca

SEQ ID NO: 138361 - DNA, 25 bp, Homo sapien
tcatttccgcatcactggcagagag

SEQ ID NO: 138362 - DNA, 25 bp, Homo sapien
gcccacgaggtttttcatttccgca

SEQ ID NO: 138363 - DNA, 25 bp, Homo sapien
gaaatatgcgaataaatccacctcg

SEQ ID NO: 138364 - DNA, 25 bp, Homo sapien
catatatttcccatgtctcagatgt

SEQ ID NO: 138365 - DNA, 25 bp, Homo sapien
tcagatgtaggaaatatgcgaataa

SEQ ID NO: 138366 - DNA, 25 bp, Homo sapien
gaataaatccacctcgccgatcatt

SEQ ID NO: 138367 - DNA, 25 bp, Homo sapien
ggataactgttacaggacacgctct

SEQ ID NO: 138368 - DNA, 25 bp, Homo sapien
ggcaatttccagactacacagacag

SEQ ID NO: 138369 - DNA, 25 bp, Homo sapien
ggaaatgcaaatagagcccaactgt

SEQ ID NO: 138370 - DNA, 25 bp, Homo sapien
gaaatacacgaagtacaactgccct

SEQ ID NO: 138371 - DNA, 25 bp, Homo sapien
tgccagcatatagttcattgaggtc

SEQ ID NO: 138372 - DNA, 25 bp, Homo sapien
tgaggtcttatgctcgaggtaggac

SEQ ID NO: 138373 - DNA, 25 bp, Homo sapien
cctggaagaggcgtgttgccagcat

SEQ ID NO: 138374 - DNA, 25 bp, Homo sapien
agttcattgaggtcttatgctcgag

SEQ ID NO: 138375 - DNA, 25 bp, Homo sapien
tgttcttcctgtcaataagcttctt

SEQ ID NO: 138376 - DNA, 25 bp, Homo sapien
ttcctgtcaataagcttcttcttgg

SEQ ID NO: 138377 - DNA, 25 bp, Homo sapien
cgtgttcttcctgtcaataagcttc

SEQ ID NO: 138378 - DNA, 25 bp, Homo sapien
tcctgtcaataagcttcttcttggg

SEQ ID NO: 138379 - DNA, 25 bp, Homo sapien
gtcgtctacgttttcgcacctccag

SEQ ID NO: 138380 - DNA, 25 bp, Homo sapien
aattctggcgctccatcagcagtca

SEQ ID NO: 138381 - DNA, 25 bp, Homo sapien
tcaatctgctactccgtcgtctacg

SEQ ID NO: 138382 - DNA, 25 bp, Homo sapien
caggagcttcctctcgtaaagtgca

SEQ ID NO: 138383 - DNA, 25 bp, Homo sapien
cgacatcctggggtcaagtagtcct

SEQ ID NO: 138384 - DNA, 25 bp, Homo sapien
tcggctcattacagctcgacatcct

SEQ ID NO: 138385 - DNA, 25 bp, Homo sapien
tctcggctcattacagctcgacatc

SEQ ID NO: 138386 - DNA, 25 bp, Homo sapien
gctcattacagctcgacatcctggg

SEQ ID NO: 138387 - DNA, 25 bp, Homo sapien
aaatgttcctctctcccaatacctt

SEQ ID NO: 138388 - DNA, 25 bp, Homo sapien
ggattaaatgttcctctctcccaat

SEQ ID NO: 138389 - DNA, 25 bp, Homo sapien
aaggattaaatgttcctctctccca

SEQ ID NO: 138390 - DNA, 25 bp, Homo sapien
ttaaatgttcctctctcccaatacc

SEQ ID NO: 138391 - DNA, 25 bp, Homo sapien
ctaaatacgaagaatcactaatgtt

SEQ ID NO: 138392 - DNA, 25 bp, Homo sapien
taaatacgaagaatcactaatgttg

SEQ ID NO: 138393 - DNA, 25 bp, Homo sapien
tatctaatgcgacttcttcctcctc

SEQ ID NO: 138394 - DNA, 25 bp, Homo sapien
tttctaccaaagctgtcaatgaggg

SEQ ID NO: 138395 - DNA, 25 bp, Homo sapien
tctgcatcaggttaaatttaggctc

SEQ ID NO: 138396 - DNA, 25 bp, Homo sapien
tctcaagtttgcagcagtgtccacc

SEQ ID NO: 138397 - DNA, 25 bp, Homo sapien
caagccagaccaatcactctttttc

SEQ ID NO: 138398 - DNA, 25 bp, Homo sapien
tgtcctaagaccactttgttcatag

SEQ ID NO: 138399 - DNA, 25 bp, Homo sapien
tgagcttggccacctctacgtcttt

SEQ ID NO: 138400 - DNA, 25 bp, Homo sapien
tcctgaaaccctactcatctgtcaa

SEQ ID NO: 138401 - DNA, 25 bp, Homo sapien
cagagaatgctattcgggcctgcat

SEQ ID NO: 138402 - DNA, 25 bp, Homo sapien
tggcagcccaactggcactgaacgt

SEQ ID NO: 138403 - DNA, 25 bp, Homo sapien
actgaacgtctgaccgccactgtct

SEQ ID NO: 138404 - DNA, 25 bp, Homo sapien
gccactgtctttcatcaggcgaatt

SEQ ID NO: 138405 - DNA, 25 bp, Homo sapien
taataccatcctcagtgaatgctgg

SEQ ID NO: 138406 - DNA, 25 bp, Homo sapien
cagaagtgccaatcgtcgactgggt

SEQ ID NO: 138407 - DNA, 25 bp, Homo sapien
gaggttatttgatgctcgcttgagg

SEQ ID NO: 138408 - DNA, 25 bp, Homo sapien
cgcttgaggaaacgaacaaccagct

SEQ ID NO: 138409 - DNA, 25 bp, Homo sapien
ctacccagtgcccaaaccccacaga

SEQ ID NO: 138410 - DNA, 25 bp, Homo sapien
tacccagtgcccaaaccccacagaa

SEQ ID NO: 138411 - DNA, 25 bp, Homo sapien
gaaagttttccatattcaccccatc

SEQ ID NO: 138412 - DNA, 25 bp, Homo sapien
ctgaaagttttccatattcacccca

SEQ ID NO: 138413 - DNA, 25 bp, Homo sapien
agttttccatattcaccccatcttc

SEQ ID NO: 138414 - DNA, 25 bp, Homo sapien
actcctgaaagttttccatattcac

SEQ ID NO: 138415 - DNA, 25 bp, Homo sapien
ctttttcttgaagcttggctacgtt

SEQ ID NO: 138416 - DNA, 25 bp, Homo sapien
ttctttttcttgaagcttggctacg

SEQ ID NO: 138417 - DNA, 25 bp, Homo sapien
tctttttcttgaagcttggctacgt

SEQ ID NO: 138418 - DNA, 25 bp, Homo sapien
tgccccactatcagaataattgttg

SEQ ID NO: 138419 - DNA, 25 bp, Homo sapien
agaaattttagagtgagtccccagg

SEQ ID NO: 138420 - DNA, 25 bp, Homo sapien
gacactagcagacttgttcttttgg

SEQ ID NO: 138421 - DNA, 25 bp, Homo sapien
caccttttgccccactatcagaata

SEQ ID NO: 138422 - DNA, 25 bp, Homo sapien
ttctggattatcacaatggctggcg

SEQ ID NO: 138423 - DNA, 25 bp, Homo sapien
tcaggcaggctatgtatcaaattcc

SEQ ID NO: 138424 - DNA, 25 bp, Homo sapien
tattagacttcccaccaggtatgga

SEQ ID NO: 138425 - DNA, 25 bp, Homo sapien
gctggcggaagctaatggcatgtca

SEQ ID NO: 138426 - DNA, 25 bp, Homo sapien
tattttcacttcttccattatagtc

SEQ ID NO: 138427 - DNA, 25 bp, Homo sapien
cacttcttccattatagtctcaggg

SEQ ID NO: 138428 - DNA, 25 bp, Homo sapien
agaatgaatttctgtcgtctgttgc

SEQ ID NO: 138429 - DNA, 25 bp, Homo sapien
tgctgtttaggtggctttattttca

SEQ ID NO: 138430 - DNA, 25 bp, Homo sapien
tgctataaactaattttgcctcttt

SEQ ID NO: 138431 - DNA, 25 bp, Homo sapien
gcagagtagcagtaggaccagagga

SEQ ID NO: 138432 - DNA, 25 bp, Homo sapien
ctgcagagtagcagtaggaccagag

SEQ ID NO: 138433 - DNA, 25 bp, Homo sapien
agagtagcagtaggaccagaggagg

SEQ ID NO: 138434 - DNA, 25 bp, Homo sapien
taacagatgacaaatgggtgttggg

SEQ ID NO: 138435 - DNA, 25 bp, Homo sapien
ataaagaagaatggtggcaaggccc

SEQ ID NO: 138436 - DNA, 25 bp, Homo sapien
agaggtcagaggttgtaacagatga

SEQ ID NO: 138437 - DNA, 25 bp, Homo sapien
cagatgacaaatgggtgttgggaat

SEQ ID NO: 138438 - DNA, 25 bp, Homo sapien
aaattgttggctggtgaggcatgct

SEQ ID NO: 138439 - DNA, 25 bp, Homo sapien
tggctggtgaggcatgctggggata

SEQ ID NO: 138440 - DNA, 25 bp, Homo sapien
agtaaaattgttggctggtgaggca

SEQ ID NO: 138441 - DNA, 25 bp, Homo sapien
gttcagtaaaattgttggctggtga

SEQ ID NO: 138442 - DNA, 25 bp, Homo sapien
cttgggatgttctgtgccccgggat

SEQ ID NO: 138443 - DNA, 25 bp, Homo sapien
aaagggaccaatggtgtgacttcct

SEQ ID NO: 138444 - DNA, 25 bp, Homo sapien
tagggcttgggatgttctgtgcccc

SEQ ID NO: 138445 - DNA, 25 bp, Homo sapien
tgatcgacagcgtggcaggccagta

SEQ ID NO: 138446 - DNA, 25 bp, Homo sapien
ggacgagacagtttctggctataga

SEQ ID NO: 138447 - DNA, 25 bp, Homo sapien
ctttgctgaagagggacgagacagt

SEQ ID NO: 138448 - DNA, 25 bp, Homo sapien
ttctggctatagatgtgtgcagcac

SEQ ID NO: 138449 - DNA, 25 bp, Homo sapien
gctgaagagggacgagacagtttct

SEQ ID NO: 138450 - DNA, 25 bp, Homo sapien
tggactgtctttcgttctctcactc

SEQ ID NO: 138451 - DNA, 25 bp, Homo sapien
tgtggactgtctttcgttctctcac

SEQ ID NO: 138452 - DNA, 25 bp, Homo sapien
cattgtggactgtctttcgttctct

SEQ ID NO: 138453 - DNA, 25 bp, Homo sapien
gactgtctttcgttctctcactcac

SEQ ID NO: 138454 - DNA, 25 bp, Homo sapien
tgtgtcaatgaaggcatgctactgg

SEQ ID NO: 138455 - DNA, 25 bp, Homo sapien
ctttagtcacgtcagaacaatgcag

SEQ ID NO: 138456 - DNA, 25 bp, Homo sapien
ctccagtacctaaaagaagtcctgt

SEQ ID NO: 138457 - DNA, 25 bp, Homo sapien
cagaagccttgtcagattcatctct

SEQ ID NO: 138458 - DNA, 25 bp, Homo sapien
tgataggtgtcatcagaggtttgtc

SEQ ID NO: 138459 - DNA, 25 bp, Homo sapien
ggtgcacaccaactataattattta

SEQ ID NO: 138460 - DNA, 25 bp, Homo sapien
gcttttctactccttatattattta

SEQ ID NO: 138461 - DNA, 25 bp, Homo sapien
ggctttgccaccctctactgtgcct

SEQ ID NO: 138462 - DNA, 25 bp, Homo sapien
tggagaatactgtctcgctgcctgc

SEQ ID NO: 138463 - DNA, 25 bp, Homo sapien
ggttgtaccgtttgctatataaaga

SEQ ID NO: 138464 - DNA, 25 bp, Homo sapien
gaatgatgcttgtttagatagcacg

SEQ ID NO: 138465 - DNA, 25 bp, Homo sapien
gctgaagttcagctgtaaccatact

SEQ ID NO: 138466 - DNA, 25 bp, Homo sapien
ctgttgggtgaggaggttgatgtgg

SEQ ID NO: 138467 - DNA, 25 bp, Homo sapien
agagctcttggacaccccagaccat

SEQ ID NO: 138468 - DNA, 25 bp, Homo sapien
ctgtcattaattctatcctcaggtc

SEQ ID NO: 138469 - DNA, 25 bp, Homo sapien
tctatcctcaggtccaaagagctct

SEQ ID NO: 138470 - DNA, 25 bp, Homo sapien
ctcaggtccaaagagctcttggaca

SEQ ID NO: 138471 - DNA, 25 bp, Homo sapien
tcctcattatcttcaccagcgagca

SEQ ID NO: 138472 - DNA, 25 bp, Homo sapien
ctcattatcttcaccagcgagcatg

SEQ ID NO: 138473 - DNA, 25 bp, Homo sapien
cattatcttcaccagcgagcatgga

SEQ ID NO: 138474 - DNA, 25 bp, Homo sapien
tcattatcttcaccagcgagcatgg

SEQ ID NO: 138475 - DNA, 25 bp, Homo sapien
tggcttgtcagaatactttgcttct

SEQ ID NO: 138476 - DNA, 25 bp, Homo sapien
ttggcttgtcagaatactttgcttc

SEQ ID NO: 138477 - DNA, 25 bp, Homo sapien
ttttggcttgtcagaatactttgct

SEQ ID NO: 138478 - DNA, 25 bp, Homo sapien
tttggcttgtcagaatactttgctt

SEQ ID NO: 138479 - DNA, 25 bp, Homo sapien
ccactgtggacccttacggtgttag

SEQ ID NO: 138480 - DNA, 25 bp, Homo sapien
aagaagccgttgataatagtgccac

SEQ ID NO: 138481 - DNA, 25 bp, Homo sapien
gaagccgttgataatagtgccacat

SEQ ID NO: 138482 - DNA, 25 bp, Homo sapien
taagaagccgttgataatagtgcca

SEQ ID NO: 138483 - DNA, 25 bp, Homo sapien
ctaagaagccgttgataatagtgcc

SEQ ID NO: 138484 - DNA, 25 bp, Homo sapien
atatgacttatcatttctgtcccct

SEQ ID NO: 138485 - DNA, 25 bp, Homo sapien
atgacttatcatttctgtcccctac

SEQ ID NO: 138486 - DNA, 25 bp, Homo sapien
tgacttatcatttctgtcccctact

SEQ ID NO: 138487 - DNA, 25 bp, Homo sapien
tatgacttatcatttctgtccccta

SEQ ID NO: 138488 - DNA, 25 bp, Homo sapien
aaggaatggctcctgtgcacaaaga

SEQ ID NO: 138489 - DNA, 25 bp, Homo sapien
aaagcatcattaacaacatataggc

SEQ ID NO: 138490 - DNA, 25 bp, Homo sapien
catataggcaaaatcaagtcaaggc

SEQ ID NO: 138491 - DNA, 25 bp, Homo sapien
tcaaggccaacagatgctgacccct

SEQ ID NO: 138492 - DNA, 25 bp, Homo sapien
tatgatgccagttgccaaattcagg

SEQ ID NO: 138493 - DNA, 25 bp, Homo sapien
tctgtttatgatgccagttgccaaa

SEQ ID NO: 138494 - DNA, 25 bp, Homo sapien
gcactgcttctgtttatgatgccag

SEQ ID NO: 138495 - DNA, 25 bp, Homo sapien
ctaggactgatgatgggtcggaggg

SEQ ID NO: 138496 - DNA, 25 bp, Homo sapien
gagtgattctcgggagcttgggggt

SEQ ID NO: 138497 - DNA, 25 bp, Homo sapien
gctggagtgattctcgggagcttgg

SEQ ID NO: 138498 - DNA, 25 bp, Homo sapien
ctggagtgattctcgggagcttggg

SEQ ID NO: 138499 - DNA, 25 bp, Homo sapien
tgattctcgggagcttgggggtctg

SEQ ID NO: 138500 - DNA, 25 bp, Homo sapien
caggccatccctgagtaacccaaat

SEQ ID NO: 138501 - DNA, 25 bp, Homo sapien
caaatgctagttgcagggcccttca

SEQ ID NO: 138502 - DNA, 25 bp, Homo sapien
tgggaatggcttgcttgggacacag

SEQ ID NO: 138503 - DNA, 25 bp, Homo sapien
gccttagtgctatctccatacagaa

SEQ ID NO: 138504 - DNA, 25 bp, Homo sapien
aaaatgatgactataagcaaggttt

SEQ ID NO: 138505 - DNA, 25 bp, Homo sapien
tgatgactataagcaaggtttaaac

SEQ ID NO: 138506 - DNA, 25 bp, Homo sapien
aatgatgactataagcaaggtttaa

SEQ ID NO: 138507 - DNA, 25 bp, Homo sapien
aaatgatgactataagcaaggttta

SEQ ID NO: 138508 - DNA, 25 bp, Homo sapien
cagcgaggttgtttgagttcagtta

SEQ ID NO: 138509 - DNA, 25 bp, Homo sapien
caaatgagcattgttcagcgaggtt

SEQ ID NO: 138510 - DNA, 25 bp, Homo sapien
gccacatctctcaactacataaagg

SEQ ID NO: 138511 - DNA, 25 bp, Homo sapien
ttattgccagaagctacgtggattt

SEQ ID NO: 138512 - DNA, 25 bp, Homo sapien
attaaaacacacagcaagaccagaa

SEQ ID NO: 138513 - DNA, 25 bp, Homo sapien
aattaaaacacacagcaagaccaga

SEQ ID NO: 138514 - DNA, 25 bp, Homo sapien
aggggtaattaaaacacacagcaag

SEQ ID NO: 138515 - DNA, 25 bp, Homo sapien
tacaggggtaattaaaacacacagc

SEQ ID NO: 138516 - DNA, 25 bp, Homo sapien
tctcttccggagaatggcctgcaat

SEQ ID NO: 138517 - DNA, 25 bp, Homo sapien
actgtctgggcaagtcgtgggctct

SEQ ID NO: 138518 - DNA, 25 bp, Homo sapien
tgagcttacactgacccaatgggag

SEQ ID NO: 138519 - DNA, 25 bp, Homo sapien
tagggaactgcaagctacatggcca

SEQ ID NO: 138520 - DNA, 25 bp, Homo sapien
tatcacagaaatgtaggacctccag

SEQ ID NO: 138521 - DNA, 25 bp, Homo sapien
caagtgatcagaaacggacagagct

SEQ ID NO: 138522 - DNA, 25 bp, Homo sapien
cagtatccgggttacttgctgtggg

SEQ ID NO: 138523 - DNA, 25 bp, Homo sapien
gcaagaagtttactctgagaccagc

SEQ ID NO: 138524 - DNA, 25 bp, Homo sapien
tcccgctgaaactgggaactggatg

SEQ ID NO: 138525 - DNA, 25 bp, Homo sapien
caggtggccacgctgaggagactgg

SEQ ID NO: 138526 - DNA, 25 bp, Homo sapien
ggaactggatggacaagcctgctgc

SEQ ID NO: 138527 - DNA, 25 bp, Homo sapien
caccagtacagcaattcccgctgaa

SEQ ID NO: 138528 - DNA, 25 bp, Homo sapien
tggtgtgtgacttcttgtagtaggc

SEQ ID NO: 138529 - DNA, 25 bp, Homo sapien
aggctaaagaactgcccaggtagaa

SEQ ID NO: 138530 - DNA, 25 bp, Homo sapien
tctgtgaattttgggcataggtatg

SEQ ID NO: 138531 - DNA, 25 bp, Homo sapien
cccaggtagaagtccggtctgtgaa

SEQ ID NO: 138532 - DNA, 25 bp, Homo sapien
catgatatcatggttcgcttctaaa

SEQ ID NO: 138533 - DNA, 25 bp, Homo sapien
tatcccctagagtcacaagatttcc

SEQ ID NO: 138534 - DNA, 25 bp, Homo sapien
tgttgattgaccaacacctgtgtga

SEQ ID NO: 138535 - DNA, 25 bp, Homo sapien
taagttctattcaggagagtcagca

SEQ ID NO: 138536 - DNA, 25 bp, Homo sapien
taatgtgcagattgtctagggcagc

SEQ ID NO: 138537 - DNA, 25 bp, Homo sapien
tcaggcaacttggaacagtgaggcc

SEQ ID NO: 138538 - DNA, 25 bp, Homo sapien
tggttaagagcacgaattctgccac

SEQ ID NO: 138539 - DNA, 25 bp, Homo sapien
tagaaactctgtggttgggcccagc

SEQ ID NO: 138540 - DNA, 25 bp, Homo sapien
tttcatctgataatgttatgaacat

SEQ ID NO: 138541 - DNA, 25 bp, Homo sapien
ttcatctgataatgttatgaacatt

SEQ ID NO: 138542 - DNA, 25 bp, Homo sapien
tttcccacaagataatatgtgcttt

SEQ ID NO: 138543 - DNA, 25 bp, Homo sapien
caccatgttgacgtatattcttcct

SEQ ID NO: 138544 - DNA, 25 bp, Homo sapien
ccagcagcggctatataccctttca

SEQ ID NO: 138545 - DNA, 25 bp, Homo sapien
gtgatccaacaaccaaagacgtctg

SEQ ID NO: 138546 - DNA, 25 bp, Homo sapien
tagagaaattcatccgtgatccaac

SEQ ID NO: 138547 - DNA, 25 bp, Homo sapien
ctggaggggactttcctatggtgga

SEQ ID NO: 138548 - DNA, 25 bp, Homo sapien
agagcggctgcacggtggcccctgc

SEQ ID NO: 138549 - DNA, 25 bp, Homo sapien
cagagagagcggctgcacggtggcc

SEQ ID NO: 138550 - DNA, 25 bp, Homo sapien
ccgctgcagaatgctctaattctgg

SEQ ID NO: 138551 - DNA, 25 bp, Homo sapien
tgcgtccagccaaaatagatgattt

SEQ ID NO: 138552 - DNA, 25 bp, Homo sapien
tgaacaggcacagcaaatctacagt

SEQ ID NO: 138553 - DNA, 25 bp, Homo sapien
tatcgactggaaaaagacgcaaggg

SEQ ID NO: 138554 - DNA, 25 bp, Homo sapien
tcttctagcatacctctggtggcag

SEQ ID NO: 138555 - DNA, 25 bp, Homo sapien
tagagggtgattccacggtccatct

SEQ ID NO: 138556 - DNA, 25 bp, Homo sapien
tctatattgtactgtggcactgcag

SEQ ID NO: 138557 - DNA, 25 bp, Homo sapien
taccatgtacaaggatgcccctgct

SEQ ID NO: 138558 - DNA, 25 bp, Homo sapien
cactgacatttaattggcggaggtc

SEQ ID NO: 138559 - DNA, 25 bp, Homo sapien
catatgtagcaaataggcaacaata

SEQ ID NO: 138560 - DNA, 25 bp, Homo sapien
ccctttacatatgtagcaaataggc

SEQ ID NO: 138561 - DNA, 25 bp, Homo sapien
cttaatagcctatccatttagaact

SEQ ID NO: 138562 - DNA, 25 bp, Homo sapien
tctcttaatagcctatccatttaga

SEQ ID NO: 138563 - DNA, 25 bp, Homo sapien
gagatttccacaccaattagggcag

SEQ ID NO: 138564 - DNA, 25 bp, Homo sapien
tgcacacatattgaacggactggaa

SEQ ID NO: 138565 - DNA, 25 bp, Homo sapien
tttttacactgcaacactgggtggg

SEQ ID NO: 138566 - DNA, 25 bp, Homo sapien
gtttggctcccacagttcagttgct

SEQ ID NO: 138567 - DNA, 25 bp, Homo sapien
tcaacagagcactgaaggagggagc

SEQ ID NO: 138568 - DNA, 25 bp, Homo sapien
atctctcgttaagggtaagtccgtg

SEQ ID NO: 138569 - DNA, 25 bp, Homo sapien
tacctgacgataacaagggtcgctg

SEQ ID NO: 138570 - DNA, 25 bp, Homo sapien
gaccatgtctgtgtacttcctagca

SEQ ID NO: 138571 - DNA, 25 bp, Homo sapien
tttttgagtagtcagtacctatgct

SEQ ID NO: 138572 - DNA, 25 bp, Homo sapien
ctgaggaaggcgaagggccggtggc

SEQ ID NO: 138573 - DNA, 25 bp, Homo sapien
ttaaatactttgactatcttccttg

SEQ ID NO: 138574 - DNA, 25 bp, Homo sapien
tcagtacctatgctatgttatagta

SEQ ID NO: 138575 - DNA, 25 bp, Homo sapien
ccccactgaggctgacaatctgtac

SEQ ID NO: 138576 - DNA, 25 bp, Homo sapien
ccactgaggctgacaatctgtacac

SEQ ID NO: 138577 - DNA, 25 bp, Homo sapien
cccactgaggctgacaatctgtaca

SEQ ID NO: 138578 - DNA, 25 bp, Homo sapien
gattgccagaagacctacaagaaga

SEQ ID NO: 138579 - DNA, 25 bp, Homo sapien
taaaccgtagctccatgatgacaag

SEQ ID NO: 138580 - DNA, 25 bp, Homo sapien
aatttcattcccctgtgattgccag

SEQ ID NO: 138581 - DNA, 25 bp, Homo sapien
tagcacgtatcataaggcctggcac

SEQ ID NO: 138582 - DNA, 25 bp, Homo sapien
tgttgttcaagttgctgcagggcaa

SEQ ID NO: 138583 - DNA, 25 bp, Homo sapien
caaattgaagctgatagctgcctgc

SEQ ID NO: 138584 - DNA, 25 bp, Homo sapien
tggtgccgggctcgactctggtcca

SEQ ID NO: 138585 - DNA, 25 bp, Homo sapien
gcctggctgtacacgttgttttcta

SEQ ID NO: 138586 - DNA, 25 bp, Homo sapien
agcaggaagatataacacatggaaa

SEQ ID NO: 138587 - DNA, 25 bp, Homo sapien
gcaggaagatataacacatggaaaa

SEQ ID NO: 138588 - DNA, 25 bp, Homo sapien
tctcacacaaagttactgctgggag

SEQ ID NO: 138589 - DNA, 25 bp, Homo sapien
ttactgctgggagtccctcatatac

SEQ ID NO: 138590 - DNA, 25 bp, Homo sapien
ctcacacaaagttactgctgggagt

SEQ ID NO: 138591 - DNA, 25 bp, Homo sapien
atcatctcacacaaagttactgctg

SEQ ID NO: 138592 - DNA, 25 bp, Homo sapien
tgaatgtctctttcgaggcgtgaag

SEQ ID NO: 138593 - DNA, 25 bp, Homo sapien
caggcctggttataatcttgagggc

SEQ ID NO: 138594 - DNA, 25 bp, Homo sapien
cagggcacctgcgatactaagtgtt

SEQ ID NO: 138595 - DNA, 25 bp, Homo sapien
aactagtctgtaatcctgtcaaggg

SEQ ID NO: 138596 - DNA, 25 bp, Homo sapien
ttaggtagtgtctggctgccaaaga

SEQ ID NO: 138597 - DNA, 25 bp, Homo sapien
ttggagttaggtagtgtctggctgc

SEQ ID NO: 138598 - DNA, 25 bp, Homo sapien
gtagtgtctggctgccaaagattgc

SEQ ID NO: 138599 - DNA, 25 bp, Homo sapien
gagttaggtagtgtctggctgccaa

SEQ ID NO: 138600 - DNA, 25 bp, Homo sapien
taccactttttgtggcagagtggtt

SEQ ID NO: 138601 - DNA, 25 bp, Homo sapien
aaccagggaggcgcaagaacttgga

SEQ ID NO: 138602 - DNA, 25 bp, Homo sapien
ttctggccactagctgtggcactgg

SEQ ID NO: 138603 - DNA, 25 bp, Homo sapien
gatgttgcccttctgagcacttgtt

SEQ ID NO: 138604 - DNA, 25 bp, Homo sapien
tatttcctggaacaacgcctcacag

SEQ ID NO: 138605 - DNA, 25 bp, Homo sapien
cactcttgcctgtcacaaagaagaa

SEQ ID NO: 138606 - DNA, 25 bp, Homo sapien
gacttgtcctagagttttagaggca

SEQ ID NO: 138607 - DNA, 25 bp, Homo sapien
cacagcatgccttttgatacctgga

SEQ ID NO: 138608 - DNA, 25 bp, Homo sapien
ccacaaatagttttgaaaggaggat

SEQ ID NO: 138609 - DNA, 25 bp, Homo sapien
ataccacaaatagttttgaaaggag

SEQ ID NO: 138610 - DNA, 25 bp, Homo sapien
tgtgcctggcaaacttcaatctcct

SEQ ID NO: 138611 - DNA, 25 bp, Homo sapien
cattaattgggatttggtgctacca

SEQ ID NO: 138612 - DNA, 25 bp, Homo sapien
gtcaccctgatgagaatcacctaag

SEQ ID NO: 138613 - DNA, 25 bp, Homo sapien
gaagtctcccaggttacaacatctt

SEQ ID NO: 138614 - DNA, 25 bp, Homo sapien
ttattgtaaagtggtctgagaatga

SEQ ID NO: 138615 - DNA, 25 bp, Homo sapien
tgtaaagtggtctgagaatgaggca

SEQ ID NO: 138616 - DNA, 25 bp, Homo sapien
gaatgaggcatgtataatttctact

SEQ ID NO: 138617 - DNA, 25 bp, Homo sapien
tgaggacttaattgaaacgttccag

SEQ ID NO: 138618 - DNA, 25 bp, Homo sapien
gactgactggagtgatatttctccc

SEQ ID NO: 138619 - DNA, 25 bp, Homo sapien
tgctataagaaagtcccacgggaac

SEQ ID NO: 138620 - DNA, 25 bp, Homo sapien
tgatgttctctggtcatagtacacc

SEQ ID NO: 138621 - DNA, 25 bp, Homo sapien
taagagtgcagtgggatgcccttgc

SEQ ID NO: 138622 - DNA, 25 bp, Homo sapien
tgaaacacaaaggagcttggtcaga

SEQ ID NO: 138623 - DNA, 25 bp, Homo sapien
ctgaaacacaaaggagcttggtcag

SEQ ID NO: 138624 - DNA, 25 bp, Homo sapien
gaaacacaaaggagcttggtcagac

SEQ ID NO: 138625 - DNA, 25 bp, Homo sapien
acaaaggctgcagggttaaggctgc

SEQ ID NO: 138626 - DNA, 25 bp, Homo sapien
gggcacaaaggctgcagggttaagg

SEQ ID NO: 138627 - DNA, 25 bp, Homo sapien
gcacaaaggctgcagggttaaggct

SEQ ID NO: 138628 - DNA, 25 bp, Homo sapien
aaggctgcagggttaaggctgctct

SEQ ID NO: 138629 - DNA, 25 bp, Homo sapien
tctgtatgcacctacactgagaggc

SEQ ID NO: 138630 - DNA, 25 bp, Homo sapien
gatggcgaggtttcatttaccccaa

SEQ ID NO: 138631 - DNA, 25 bp, Homo sapien
taagatcaaactcacagggctgtgt

SEQ ID NO: 138632 - DNA, 25 bp, Homo sapien
tagatcaaagaccagagctccagct

SEQ ID NO: 138633 - DNA, 25 bp, Homo sapien
aatgttcagtggagaacacatcctt

SEQ ID NO: 138634 - DNA, 25 bp, Homo sapien
cttgaattcaggttctaaaatgttc

SEQ ID NO: 138635 - DNA, 25 bp, Homo sapien
gtgaggtgaatagatacccatcaag

SEQ ID NO: 138636 - DNA, 25 bp, Homo sapien
tcctatcatacttccatggatcagt

SEQ ID NO: 138637 - DNA, 25 bp, Homo sapien
tgaccacccaagtttccaactggct

SEQ ID NO: 138638 - DNA, 25 bp, Homo sapien
gaccacccaagtttccaactggctc

SEQ ID NO: 138639 - DNA, 25 bp, Homo sapien
ctgaccacccaagtttccaactggc

SEQ ID NO: 138640 - DNA, 25 bp, Homo sapien
ccacccaagtttccaactggctcag

SEQ ID NO: 138641 - DNA, 25 bp, Homo sapien
tttctctgtcctataactgtagcaa

SEQ ID NO: 138642 - DNA, 25 bp, Homo sapien
ttggatgtggcgaaaataacttggg

SEQ ID NO: 138643 - DNA, 25 bp, Homo sapien
cttaaattggccctgacttcaccga

SEQ ID NO: 138644 - DNA, 25 bp, Homo sapien
ataacttggggagtatccaaagatc

SEQ ID NO: 138645 - DNA, 25 bp, Homo sapien
gaagcttgctgatccaatgtaaatg

SEQ ID NO: 138646 - DNA, 25 bp, Homo sapien
tttggtatatgaccaagccatggat

SEQ ID NO: 138647 - DNA, 25 bp, Homo sapien
gtttagatgggctagggaaagatat

SEQ ID NO: 138648 - DNA, 25 bp, Homo sapien
ctaagaattaccaaaagaactctgg

SEQ ID NO: 138649 - DNA, 25 bp, Homo sapien
tgtacaacaacttcccttccagagg

SEQ ID NO: 138650 - DNA, 25 bp, Homo sapien
tctcctctcgatcatcagaaggctc

SEQ ID NO: 138651 - DNA, 25 bp, Homo sapien
gctcttgagactgattcctccctgt

SEQ ID NO: 138652 - DNA, 25 bp, Homo sapien
tgtacacatgtacgatgatgattaa

SEQ ID NO: 138653 - DNA, 25 bp, Homo sapien
gaatgagaagtattccattctgtct

SEQ ID NO: 138654 - DNA, 25 bp, Homo sapien
tggaggaatgaatgagaagtattcc

SEQ ID NO: 138655 - DNA, 25 bp, Homo sapien
tgaatgagaagtattccattctgtc

SEQ ID NO: 138656 - DNA, 25 bp, Homo sapien
gaatgaatgagaagtattccattct

SEQ ID NO: 138657 - DNA, 25 bp, Homo sapien
agttccatgctgtagcttattgcag

SEQ ID NO: 138658 - DNA, 25 bp, Homo sapien
tgttgactcattcatctgccgacgg

SEQ ID NO: 138659 - DNA, 25 bp, Homo sapien
tcttttgggcatacgcacacagaat

SEQ ID NO: 138660 - DNA, 25 bp, Homo sapien
tagcataacgtcctgaaagttccat

SEQ ID NO: 138661 - DNA, 25 bp, Homo sapien
atcctccctctccaggtctggctcc

SEQ ID NO: 138662 - DNA, 25 bp, Homo sapien
cctccctctccaggtctggctccat

SEQ ID NO: 138663 - DNA, 25 bp, Homo sapien
tgctccttatcctccctctccaggt

SEQ ID NO: 138664 - DNA, 25 bp, Homo sapien
cttgctccttatcctccctctccag

SEQ ID NO: 138665 - DNA, 25 bp, Homo sapien
gaactgctgtcccttcgaaggcggt

SEQ ID NO: 138666 - DNA, 25 bp, Homo sapien
cagaactgctgtcccttcgaaggcg

SEQ ID NO: 138667 - DNA, 25 bp, Homo sapien
accagaactgctgtcccttcgaagg

SEQ ID NO: 138668 - DNA, 25 bp, Homo sapien
tgctgtcccttcgaaggcggttcgg

SEQ ID NO: 138669 - DNA, 25 bp, Homo sapien
gctgcagagcttcatctacatccat

SEQ ID NO: 138670 - DNA, 25 bp, Homo sapien
tccaccctctgctgcagagcttcat

SEQ ID NO: 138671 - DNA, 25 bp, Homo sapien
ttcagctccaccctctgctgcagag

SEQ ID NO: 138672 - DNA, 25 bp, Homo sapien
ctctgctgcagagcttcatctacat

SEQ ID NO: 138673 - DNA, 25 bp, Homo sapien
gaaaaagagagtgaggccaggccca

SEQ ID NO: 138674 - DNA, 25 bp, Homo sapien
cagggacagctgctgtcccctaggc

SEQ ID NO: 138675 - DNA, 25 bp, Homo sapien
aaaaagagagtgaggccaggcccag

SEQ ID NO: 138676 - DNA, 25 bp, Homo sapien
ggacagctgctgtcccctaggcaca

SEQ ID NO: 138677 - DNA, 25 bp, Homo sapien
tcacaagtgggcaacaggatggtgt

SEQ ID NO: 138678 - DNA, 25 bp, Homo sapien
cacatcacaagtgggcaacaggatg

SEQ ID NO: 138679 - DNA, 25 bp, Homo sapien
tttcaaaggccaaaccacttgttca

SEQ ID NO: 138680 - DNA, 25 bp, Homo sapien
aaaggccaaaccacttgttcaatca

SEQ ID NO: 138681 - DNA, 25 bp, Homo sapien
gattccctccttgtgtacaatgaca

SEQ ID NO: 138682 - DNA, 25 bp, Homo sapien
gacaagatgatctctctggaagtat

SEQ ID NO: 138683 - DNA, 25 bp, Homo sapien
agattccctccttgtgtacaatgac

SEQ ID NO: 138684 - DNA, 25 bp, Homo sapien
atgatctctctggaagtatgtcagc

SEQ ID NO: 138685 - DNA, 25 bp, Homo sapien
gggcagccctggtagtatcttctgg

SEQ ID NO: 138686 - DNA, 25 bp, Homo sapien
gcctttccaactgatctgggcagcc

SEQ ID NO: 138687 - DNA, 25 bp, Homo sapien
ggcctttccaactgatctgggcagc

SEQ ID NO: 138688 - DNA, 25 bp, Homo sapien
cctggtagtatcttctggcaacatt

SEQ ID NO: 138689 - DNA, 25 bp, Homo sapien
gctcaagagttcaggattcaagacc

SEQ ID NO: 138690 - DNA, 25 bp, Homo sapien
cagactggaattgctctggtaatcc

SEQ ID NO: 138691 - DNA, 25 bp, Homo sapien
gactccttggcaaaggtctactagt

SEQ ID NO: 138692 - DNA, 25 bp, Homo sapien
tcctcaatggcaacattacactgta

SEQ ID NO: 138693 - DNA, 25 bp, Homo sapien
tactagtgacaaactcttttgcgtg

SEQ ID NO: 138694 - DNA, 25 bp, Homo sapien
cattggctgattggcaaccatctac

SEQ ID NO: 138695 - DNA, 25 bp, Homo sapien
cttgttgtcccagtgaaagtctgca

SEQ ID NO: 138696 - DNA, 25 bp, Homo sapien
aaagatacaagtgtgctctgacggg

SEQ ID NO: 138697 - DNA, 25 bp, Homo sapien
aaatactatggaccccttgaagtgc

SEQ ID NO: 138698 - DNA, 25 bp, Homo sapien
taccctggctcatgttgtcaatggc

SEQ ID NO: 138699 - DNA, 25 bp, Homo sapien
gaggaacaactttggcggatgatga

SEQ ID NO: 138700 - DNA, 25 bp, Homo sapien
tggcacaccgatttgtctcctctct

SEQ ID NO: 138701 - DNA, 25 bp, Homo sapien
caaagggtgcctttaccctggctca

SEQ ID NO: 138702 - DNA, 25 bp, Homo sapien
tgacttccgcctgctaagaagactg

SEQ ID NO: 138703 - DNA, 25 bp, Homo sapien
cacccgtatcagttgagaatgagag

SEQ ID NO: 138704 - DNA, 25 bp, Homo sapien
aagcacatacgaatttgacctccag

SEQ ID NO: 138705 - DNA, 25 bp, Homo sapien
cagattgtggccctcttgtcaggga

SEQ ID NO: 138706 - DNA, 25 bp, Homo sapien
tggccccagacgcatagactgaggt

SEQ ID NO: 138707 - DNA, 25 bp, Homo sapien
gaagcaggtgctacaacatgtgagg

SEQ ID NO: 138708 - DNA, 25 bp, Homo sapien
gacacttggttagacgccttccagg

SEQ ID NO: 138709 - DNA, 25 bp, Homo sapien
ggccttttggatatgctgaacgcag

SEQ ID NO: 138710 - DNA, 25 bp, Homo sapien
cagaaagtgagatagccgagagtcc

SEQ ID NO: 138711 - DNA, 25 bp, Homo sapien
gctaggaacagaaagtgagatagcc

SEQ ID NO: 138712 - DNA, 25 bp, Homo sapien
gagagtccacaacccctgaaactag

SEQ ID NO: 138713 - DNA, 25 bp, Homo sapien
gaagctaatttgaaatgctaggaac

SEQ ID NO: 138714 - DNA, 25 bp, Homo sapien
gaagtgggtccatgaacctaagggc

SEQ ID NO: 138715 - DNA, 25 bp, Homo sapien
tgccacgtgttaccctatgtcagag

SEQ ID NO: 138716 - DNA, 25 bp, Homo sapien
cacagcacggtatggagcaggctca

SEQ ID NO: 138717 - DNA, 25 bp, Homo sapien
gaaggttctgatcttggcaccctga

SEQ ID NO: 138718 - DNA, 25 bp, Homo sapien
taagcacttgtagagtgtatgtgtg

SEQ ID NO: 138719 - DNA, 25 bp, Homo sapien
tgtatgtgtgagattaatgtaggag

SEQ ID NO: 138720 - DNA, 25 bp, Homo sapien
agtttccattaaagaagtgctcagt

SEQ ID NO: 138721 - DNA, 25 bp, Homo sapien
tgtgagattaatgtaggagtttcca

SEQ ID NO: 138722 - DNA, 25 bp, Homo sapien
tgggagtcccactgtttttccatag

SEQ ID NO: 138723 - DNA, 25 bp, Homo sapien
tcctgggagtcccactgtttttcca

SEQ ID NO: 138724 - DNA, 25 bp, Homo sapien
cctgggagtcccactgtttttccat

SEQ ID NO: 138725 - DNA, 25 bp, Homo sapien
ctgggagtcccactgtttttccata

SEQ ID NO: 138726 - DNA, 25 bp, Homo sapien
cttggctggtactgcctggtctgat

SEQ ID NO: 138727 - DNA, 25 bp, Homo sapien
taagtgacttgaccgaggtcgtcca

SEQ ID NO: 138728 - DNA, 25 bp, Homo sapien
tccacatattgatgcccagagtccc

SEQ ID NO: 138729 - DNA, 25 bp, Homo sapien
tacaaactatttggcctgcacattg

SEQ ID NO: 138730 - DNA, 25 bp, Homo sapien
tagagccattctgttaagagccggc

SEQ ID NO: 138731 - DNA, 25 bp, Homo sapien
tcttgggaagaagaatacctgcccc

SEQ ID NO: 138732 - DNA, 25 bp, Homo sapien
cagtaactgtaagcatctgggtgcc

SEQ ID NO: 138733 - DNA, 25 bp, Homo sapien
ccaaggctcaggatgtgcgatgctc

SEQ ID NO: 138734 - DNA, 25 bp, Homo sapien
acagtccgcttcttcgtcctcaggg

SEQ ID NO: 138735 - DNA, 25 bp, Homo sapien
ttcggccacatcaagaagaagaggg

SEQ ID NO: 138736 - DNA, 25 bp, Homo sapien
acaagaatcccagcgctacaaggca

SEQ ID NO: 138737 - DNA, 25 bp, Homo sapien
caaaacctgtttagacacatggaca

SEQ ID NO: 138738 - DNA, 25 bp, Homo sapien
tctccccatcgccaagcggcgtttg

SEQ ID NO: 138739 - DNA, 25 bp, Homo sapien
catcgccaagcggcgtttggcaata

SEQ ID NO: 138740 - DNA, 25 bp, Homo sapien
tccccatcgccaagcggcgtttggc

SEQ ID NO: 138741 - DNA, 25 bp, Homo sapien
cccatcgccaagcggcgtttggcaa

SEQ ID NO: 138742 - DNA, 25 bp, Homo sapien
ctcgcctcgccagagggcaccctcg

SEQ ID NO: 138743 - DNA, 25 bp, Homo sapien
cggcctcgcctcgccagagggcacc

SEQ ID NO: 138744 - DNA, 25 bp, Homo sapien
gcctcgcctcgccagagggcaccct

SEQ ID NO: 138745 - DNA, 25 bp, Homo sapien
cgcctcgccagagggcaccctcgat

SEQ ID NO: 138746 - DNA, 25 bp, Homo sapien
gctgtagcgaagctcctcgtccaag

SEQ ID NO: 138747 - DNA, 25 bp, Homo sapien
gaggtagccaagctgtagcgaagct

SEQ ID NO: 138748 - DNA, 25 bp, Homo sapien
tcgtccaagtcgagcaaatcctcca

SEQ ID NO: 138749 - DNA, 25 bp, Homo sapien
gaagctcctcgtccaagtcgagcaa

SEQ ID NO: 138750 - DNA, 25 bp, Homo sapien
cctgagtcgcctcagagaagtcggg

SEQ ID NO: 138751 - DNA, 25 bp, Homo sapien
aggcctgccgccctgagtcgcctca

SEQ ID NO: 138752 - DNA, 25 bp, Homo sapien
tgccgccctgagtcgcctcagagaa

SEQ ID NO: 138753 - DNA, 25 bp, Homo sapien
ggcgcggcgcgaggcctgccgccct

SEQ ID NO: 138754 - DNA, 25 bp, Homo sapien
gggcggggcggtgaggctgcctcct

SEQ ID NO: 138755 - DNA, 25 bp, Homo sapien
taaagaaagcaaaccccaggccagc

SEQ ID NO: 138756 - DNA, 25 bp, Homo sapien
agcggcggagcccacagtggcctgg

SEQ ID NO: 138757 - DNA, 25 bp, Homo sapien
gggcggtgaggctgcctccttctgg

SEQ ID NO: 138758 - DNA, 25 bp, Homo sapien
ctagacgccggcggggacagggtgt

SEQ ID NO: 138759 - DNA, 25 bp, Homo sapien
cctagacgccggcggggacagggtg

SEQ ID NO: 138760 - DNA, 25 bp, Homo sapien
cggtcctagacgccggcggggacag

SEQ ID NO: 138761 - DNA, 25 bp, Homo sapien
gatcgatctgttctggggaagttcg

SEQ ID NO: 138762 - DNA, 25 bp, Homo sapien
tctgttctggggaagttcgcactcg

SEQ ID NO: 138763 - DNA, 25 bp, Homo sapien
tcgatctgttctggggaagttcgca

SEQ ID NO: 138764 - DNA, 25 bp, Homo sapien
cctgtgatcgatctgttctggggaa

SEQ ID NO: 138765 - DNA, 25 bp, Homo sapien
taggatgggagcgagtgcgaccccg

SEQ ID NO: 138766 - DNA, 25 bp, Homo sapien
gaacttctgcgacgaggtgtcccaa

SEQ ID NO: 138767 - DNA, 25 bp, Homo sapien
cagtgcggcttttgcaggaacttct

SEQ ID NO: 138768 - DNA, 25 bp, Homo sapien
cccttccatgcataaaacagtgcgg

SEQ ID NO: 138769 - DNA, 25 bp, Homo sapien
gggaagaaaggccgtccctgcctgc

SEQ ID NO: 138770 - DNA, 25 bp, Homo sapien
cgggaagaaaggccgtccctgcctg

SEQ ID NO: 138771 - DNA, 25 bp, Homo sapien
cccaaatgtcatttgggccactact

SEQ ID NO: 138772 - DNA, 25 bp, Homo sapien
actgagatgacaatccagccgggcg

SEQ ID NO: 138773 - DNA, 25 bp, Homo sapien
tttgggccactactgagatgacaat

SEQ ID NO: 138774 - DNA, 25 bp, Homo sapien
tgacccaaatgtcatttgggccact

SEQ ID NO: 138775 - DNA, 25 bp, Homo sapien
cggcctgcgctgactcctgttgagc

SEQ ID NO: 138776 - DNA, 25 bp, Homo sapien
gttgagctcggcgacccatcttggc

SEQ ID NO: 138777 - DNA, 25 bp, Homo sapien
gccattgaggtgattctcggcctgc

SEQ ID NO: 138778 - DNA, 25 bp, Homo sapien
tcagagtcaaagaggaattcttgcc

SEQ ID NO: 138779 - DNA, 25 bp, Homo sapien
ggaatcactaactcttaaacagtat

SEQ ID NO: 138780 - DNA, 25 bp, Homo sapien
gcattcaagagaagaaatatggaat

SEQ ID NO: 138781 - DNA, 25 bp, Homo sapien
agaaatatggaataccaaatccttg

SEQ ID NO: 138782 - DNA, 25 bp, Homo sapien
aatccttggtcattaaggaatcact

SEQ ID NO: 138783 - DNA, 25 bp, Homo sapien
cattcttttctcaccaataatatca

SEQ ID NO: 138784 - DNA, 25 bp, Homo sapien
attcttttctcaccaataatatcat

SEQ ID NO: 138785 - DNA, 25 bp, Homo sapien
tcattcttttctcaccaataatatc

SEQ ID NO: 138786 - DNA, 25 bp, Homo sapien
tccacatttgcggatttcttcaagc

SEQ ID NO: 138787 - DNA, 25 bp, Homo sapien
cattccacatttgcggatttcttca

SEQ ID NO: 138788 - DNA, 25 bp, Homo sapien
aagctccttcatcagccttctgctg

SEQ ID NO: 138789 - DNA, 25 bp, Homo sapien
gtttttcattccacatttgcggatt

SEQ ID NO: 138790 - DNA, 25 bp, Homo sapien
gtactctgctggaaatctgatctcc

SEQ ID NO: 138791 - DNA, 25 bp, Homo sapien
ccttgccaagtcaagaattagtttc

SEQ ID NO: 138792 - DNA, 25 bp, Homo sapien
aatctgatctccattctgaaggccc

SEQ ID NO: 138793 - DNA, 25 bp, Homo sapien
tgttttaactgtggtcttcagtggt

SEQ ID NO: 138794 - DNA, 25 bp, Homo sapien
gggttgttcacaagtgctatgacag

SEQ ID NO: 138795 - DNA, 25 bp, Homo sapien
ctttttgtcattgtttgggtgataa

SEQ ID NO: 138796 - DNA, 25 bp, Homo sapien
gacagcctggattacttggtcagtt

SEQ ID NO: 138797 - DNA, 25 bp, Homo sapien
caagtgctatgacagcctggattac

SEQ ID NO: 138798 - DNA, 25 bp, Homo sapien
tagtccatgggtcgcttttcctcat

SEQ ID NO: 138799 - DNA, 25 bp, Homo sapien
ggcagcgaggtaatttagcagagga

SEQ ID NO: 138800 - DNA, 25 bp, Homo sapien
ctgtcggcagcgaggtaatttagca

SEQ ID NO: 138801 - DNA, 25 bp, Homo sapien
tcggcagcgaggtaatttagcagag

SEQ ID NO: 138802 - DNA, 25 bp, Homo sapien
tgtcggcagcgaggtaatttagcag

SEQ ID NO: 138803 - DNA, 25 bp, Homo sapien
tcgaagccttcacggaatcacctgc

SEQ ID NO: 138804 - DNA, 25 bp, Homo sapien
agccttcacggaatcacctgcccag

SEQ ID NO: 138805 - DNA, 25 bp, Homo sapien
gaagccttcacggaatcacctgccc

SEQ ID NO: 138806 - DNA, 25 bp, Homo sapien
ttcgaagccttcacggaatcacctg

SEQ ID NO: 138807 - DNA, 25 bp, Homo sapien
ccccacccatactcttatgagctgc

SEQ ID NO: 138808 - DNA, 25 bp, Homo sapien
taaaacaacacaggagcaaagtccc

SEQ ID NO: 138809 - DNA, 25 bp, Homo sapien
gcaaagtccccccaaccgtgtgcac

SEQ ID NO: 138810 - DNA, 25 bp, Homo sapien
ccatactcttatgagctgctggtac

SEQ ID NO: 138811 - DNA, 25 bp, Homo sapien
tgagaagaatatggtcaaagcctat

SEQ ID NO: 138812 - DNA, 25 bp, Homo sapien
ccacctgccagaatgcctgtgagaa

SEQ ID NO: 138813 - DNA, 25 bp, Homo sapien
aatgcctgtgagaagaatatggtca

SEQ ID NO: 138814 - DNA, 25 bp, Homo sapien
cctgtgagaagaatatggtcaaagc

SEQ ID NO: 138815 - DNA, 25 bp, Homo sapien
aagtagttaaattcgatcactggcc

SEQ ID NO: 138816 - DNA, 25 bp, Homo sapien
ggccatcccactggtatatatattt

SEQ ID NO: 138817 - DNA, 25 bp, Homo sapien
ttttgaaggcaacaactgctcaagg

SEQ ID NO: 138818 - DNA, 25 bp, Homo sapien
cagtctttagaactggactctgaac

SEQ ID NO: 138819 - DNA, 25 bp, Homo sapien
accatgccccactaatttcgtattt

SEQ ID NO: 138820 - DNA, 25 bp, Homo sapien
ccaccatgccccactaatttcgtat

SEQ ID NO: 138821 - DNA, 25 bp, Homo sapien
caattctactgccttggtctcctga

SEQ ID NO: 138822 - DNA, 25 bp, Homo sapien
agcaattctactgccttggtctcct

SEQ ID NO: 138823 - DNA, 25 bp, Homo sapien
gaaatgtcatgacatctacaactta

SEQ ID NO: 138824 - DNA, 25 bp, Homo sapien
gaatgtcattaatcttgagagatgc

SEQ ID NO: 138825 - DNA, 25 bp, Homo sapien
gggtgaaatgtcatgacatctacaa

SEQ ID NO: 138826 - DNA, 25 bp, Homo sapien
gcccggccgagaatgtcattaatct

SEQ ID NO: 138827 - DNA, 25 bp, Homo sapien
caaggtaaaattgtcaggaggagtt

SEQ ID NO: 138828 - DNA, 25 bp, Homo sapien
aaattgtcaggaggagttgttagaa

SEQ ID NO: 138829 - DNA, 25 bp, Homo sapien
tcctgccgttcatcaataaactgac

SEQ ID NO: 138830 - DNA, 25 bp, Homo sapien
gtaaaatatattgtgacaattccac

SEQ ID NO: 138831 - DNA, 25 bp, Homo sapien
catcttaatgtccttgatgcgtgca

SEQ ID NO: 138832 - DNA, 25 bp, Homo sapien
acagcagttctaccgccatcttaat

SEQ ID NO: 138833 - DNA, 25 bp, Homo sapien
tgtccttgatgcgtgcagatggtgt

SEQ ID NO: 138834 - DNA, 25 bp, Homo sapien
taccgccatcttaatgtccttgatg

SEQ ID NO: 138835 - DNA, 25 bp, Homo sapien
ccaggactccggtcatgccatactg

SEQ ID NO: 138836 - DNA, 25 bp, Homo sapien
gacagttaagaacccacgttgccca

SEQ ID NO: 138837 - DNA, 25 bp, Homo sapien
gccatactgattccgggttctttgc

SEQ ID NO: 138838 - DNA, 25 bp, Homo sapien
ctgactgacagttaagaacccacgt

SEQ ID NO: 138839 - DNA, 25 bp, Homo sapien
ggaatagtgcatctgtaccacggga

SEQ ID NO: 138840 - DNA, 25 bp, Homo sapien
tgggctctccacaaatgggttctgc

SEQ ID NO: 138841 - DNA, 25 bp, Homo sapien
gactggacaagacacgtgggctctc

SEQ ID NO: 138842 - DNA, 25 bp, Homo sapien
tttaagggacacttccatgggccac

SEQ ID NO: 138843 - DNA, 25 bp, Homo sapien
tgggtcaggcagctggctggagcac

SEQ ID NO: 138844 - DNA, 25 bp, Homo sapien
cttcttctggtgggtcaggcagctg

SEQ ID NO: 138845 - DNA, 25 bp, Homo sapien
ggtcaggcagctggctggagcacaa

SEQ ID NO: 138846 - DNA, 25 bp, Homo sapien
tcaggcagctggctggagcacaact

SEQ ID NO: 138847 - DNA, 25 bp, Homo sapien
ggctgcagaacgagaggcacattct

SEQ ID NO: 138848 - DNA, 25 bp, Homo sapien
aacttgagataaatgcgtgcagcgc

SEQ ID NO: 138849 - DNA, 25 bp, Homo sapien
tcccagagggtagcagtaaagacaa

SEQ ID NO: 138850 - DNA, 25 bp, Homo sapien
tgagagaccgaatccatcaaaggga

SEQ ID NO: 138851 - DNA, 25 bp, Homo sapien
agagaaggtgcctcagttctggttg

SEQ ID NO: 138852 - DNA, 25 bp, Homo sapien
gagaaggtgcctcagttctggttgc

SEQ ID NO: 138853 - DNA, 25 bp, Homo sapien
gcacagagcagttaaatggaagttc

SEQ ID NO: 138854 - DNA, 25 bp, Homo sapien
ctgcagtacaaaagcagcacagagc

SEQ ID NO: 138855 - DNA, 25 bp, Homo sapien
cagagcagttaaatggaagttctta

SEQ ID NO: 138856 - DNA, 25 bp, Homo sapien
gcagttaaatggaagttcttattct

SEQ ID NO: 138857 - DNA, 25 bp, Homo sapien
gggagcaaagactggcttcccctcc

SEQ ID NO: 138858 - DNA, 25 bp, Homo sapien
gtgagggagcaaagactggcttccc

SEQ ID NO: 138859 - DNA, 25 bp, Homo sapien
ctccgcctcgtggagcagggtgagg

SEQ ID NO: 138860 - DNA, 25 bp, Homo sapien
cagggtgagggagcaaagactggct

SEQ ID NO: 138861 - DNA, 25 bp, Homo sapien
tctaacggaagcattaatgaacatg

SEQ ID NO: 138862 - DNA, 25 bp, Homo sapien
gagttgccgactttcttctaacgga

SEQ ID NO: 138863 - DNA, 25 bp, Homo sapien
tcagctgaatactccagttgctaag

SEQ ID NO: 138864 - DNA, 25 bp, Homo sapien
tgctaagcagcaaaactgaaactta

SEQ ID NO: 138865 - DNA, 25 bp, Homo sapien
attcacatctacaaacactacctcg

SEQ ID NO: 138866 - DNA, 25 bp, Homo sapien
acatctacaaacactacctcggctg

SEQ ID NO: 138867 - DNA, 25 bp, Homo sapien
tctacaaacactacctcggctgagt

SEQ ID NO: 138868 - DNA, 25 bp, Homo sapien
ctacaaacactacctcggctgagtt

SEQ ID NO: 138869 - DNA, 25 bp, Homo sapien
tcctctttagagacaagccccacaa

SEQ ID NO: 138870 - DNA, 25 bp, Homo sapien
caaggtttttgagagcccactagtc

SEQ ID NO: 138871 - DNA, 25 bp, Homo sapien
tctcatgcaccaggtagtatcttga

SEQ ID NO: 138872 - DNA, 25 bp, Homo sapien
gccccacaaccagcatgagagaact

SEQ ID NO: 138873 - DNA, 25 bp, Homo sapien
atttcttcagaagccttcctcctaa

SEQ ID NO: 138874 - DNA, 25 bp, Homo sapien
tcttctatttcttcagaagccttcc

SEQ ID NO: 138875 - DNA, 25 bp, Homo sapien
ttcttcagaagccttcctcctaaac

SEQ ID NO: 138876 - DNA, 25 bp, Homo sapien
ttctatttcttcagaagccttcctc

SEQ ID NO: 138877 - DNA, 25 bp, Homo sapien
tataattctaaaaccacacagtggg

SEQ ID NO: 138878 - DNA, 25 bp, Homo sapien
tgtgcgatgcactattccagaggac

SEQ ID NO: 138879 - DNA, 25 bp, Homo sapien
ttcagttgaggaagcgggattaacc

SEQ ID NO: 138880 - DNA, 25 bp, Homo sapien
tcaataatgcagaaggcatgggcca

SEQ ID NO: 138881 - DNA, 25 bp, Homo sapien
tccataatctgatccattcaggctc

SEQ ID NO: 138882 - DNA, 25 bp, Homo sapien
ccataatctgatccattcaggctct

SEQ ID NO: 138883 - DNA, 25 bp, Homo sapien
cataatctgatccattcaggctctg

SEQ ID NO: 138884 - DNA, 25 bp, Homo sapien
ctccataatctgatccattcaggct

SEQ ID NO: 138885 - DNA, 25 bp, Homo sapien
tcagcaaggcatgaagatgtgcatc

SEQ ID NO: 138886 - DNA, 25 bp, Homo sapien
gatgtgcatcagcatgcgtcagaag

SEQ ID NO: 138887 - DNA, 25 bp, Homo sapien
gggcctctctagaagaccttttgac

SEQ ID NO: 138888 - DNA, 25 bp, Homo sapien
ttagctgtagcccaggaaatgttct

SEQ ID NO: 138889 - DNA, 25 bp, Homo sapien
ctatccagagttgacttcctgagaa

SEQ ID NO: 138890 - DNA, 25 bp, Homo sapien
tctatccagagttgacttcctgaga

SEQ ID NO: 138891 - DNA, 25 bp, Homo sapien
tatccagagttgacttcctgagaat

SEQ ID NO: 138892 - DNA, 25 bp, Homo sapien
ttctatccagagttgacttcctgag

SEQ ID NO: 138893 - DNA, 25 bp, Homo sapien
tcttgcgagggtcagaggattccct

SEQ ID NO: 138894 - DNA, 25 bp, Homo sapien
gagggccaagtgacgtcctaagtcc

SEQ ID NO: 138895 - DNA, 25 bp, Homo sapien
gaaaacgcgtcacttggccatgaag

SEQ ID NO: 138896 - DNA, 25 bp, Homo sapien
gccatgaagtttgcctcttgcgagg

SEQ ID NO: 138897 - DNA, 25 bp, Homo sapien
tgaatgttcagaaagctggtagagc

SEQ ID NO: 138898 - DNA, 25 bp, Homo sapien
ctctgaatgttcagaaagctggtag

SEQ ID NO: 138899 - DNA, 25 bp, Homo sapien
ctgaatgttcagaaagctggtagag

SEQ ID NO: 138900 - DNA, 25 bp, Homo sapien
tctgaatgttcagaaagctggtaga

SEQ ID NO: 138901 - DNA, 25 bp, Homo sapien
cagcacaacaatcaagggcggcggg

SEQ ID NO: 138902 - DNA, 25 bp, Homo sapien
tttcaaaggagttcgccttgggcac

SEQ ID NO: 138903 - DNA, 25 bp, Homo sapien
ggtaaacctagtctgtcaaccacac

SEQ ID NO: 138904 - DNA, 25 bp, Homo sapien
ttttggactcaggaatcacattgtg

SEQ ID NO: 138905 - DNA, 25 bp, Homo sapien
gctctcttatcagatgagaaacggg

SEQ ID NO: 138906 - DNA, 25 bp, Homo sapien
gtcttactgctgctcgctctcttat

SEQ ID NO: 138907 - DNA, 25 bp, Homo sapien
ggaatgcttctgagcggctccctct

SEQ ID NO: 138908 - DNA, 25 bp, Homo sapien
gatcacagccactcggaatcgaatt

SEQ ID NO: 138909 - DNA, 25 bp, Homo sapien
gacctttagggagtatggcccgctg

SEQ ID NO: 138910 - DNA, 25 bp, Homo sapien
gagtcctgcagtagctctctcagag

SEQ ID NO: 138911 - DNA, 25 bp, Homo sapien
ggcccgctggatactgtcaattgaa

SEQ ID NO: 138912 - DNA, 25 bp, Homo sapien
caattgaaggaaacgaagaacggag

SEQ ID NO: 138913 - DNA, 25 bp, Homo sapien
ctgcagacacagcggggcatatggt

SEQ ID NO: 138914 - DNA, 25 bp, Homo sapien
gggcatatggtcaggagccatgcag

SEQ ID NO: 138915 - DNA, 25 bp, Homo sapien
ggcatatggtcaggagccatgcagg

SEQ ID NO: 138916 - DNA, 25 bp, Homo sapien
cacagcggggcatatggtcaggagc

SEQ ID NO: 138917 - DNA, 25 bp, Homo sapien
tccagggctgtgctcgttactggca

SEQ ID NO: 138918 - DNA, 25 bp, Homo sapien
tctgaaaactgcgacagtggctacg

SEQ ID NO: 138919 - DNA, 25 bp, Homo sapien
gaacaggactgaccatacgcagcat

SEQ ID NO: 138920 - DNA, 25 bp, Homo sapien
cagtggctacggagccatgctgcaa

SEQ ID NO: 138921 - DNA, 25 bp, Homo sapien
tctcaggtctctagcaggtctgctt

SEQ ID NO: 138922 - DNA, 25 bp, Homo sapien
ggtctgctttatgaagatgtgtccc

SEQ ID NO: 138923 - DNA, 25 bp, Homo sapien
taattagtggatctcaatcgtataa

SEQ ID NO: 138924 - DNA, 25 bp, Homo sapien
ggtcccctgcactcctcgaatcagg

SEQ ID NO: 138925 - DNA, 25 bp, Homo sapien
cttgacatctgagcgaatgatacaa

SEQ ID NO: 138926 - DNA, 25 bp, Homo sapien
agcttcctcagggtgcttaatgatg

SEQ ID NO: 138927 - DNA, 25 bp, Homo sapien
caaacggttggcttagctttccagc

SEQ ID NO: 138928 - DNA, 25 bp, Homo sapien
ggtgcttaatgatgacaccacccca

SEQ ID NO: 138929 - DNA, 25 bp, Homo sapien
ctgttgtttgcctgtttgggtaccg

SEQ ID NO: 138930 - DNA, 25 bp, Homo sapien
tagcatgcgttcagatccagctgtt

SEQ ID NO: 138931 - DNA, 25 bp, Homo sapien
tgtgatgcgttttgtgatagcatgc

SEQ ID NO: 138932 - DNA, 25 bp, Homo sapien
tttgtgatagcatgcgttcagatcc

SEQ ID NO: 138933 - DNA, 25 bp, Homo sapien
tccagtaagagacagtggcgacctg

SEQ ID NO: 138934 - DNA, 25 bp, Homo sapien
catggtcgagacagctttcacgtaa

SEQ ID NO: 138935 - DNA, 25 bp, Homo sapien
aattacctatgagcagtgatccggc

SEQ ID NO: 138936 - DNA, 25 bp, Homo sapien
aaagacgcctcctcctatagtgaag

SEQ ID NO: 138937 - DNA, 25 bp, Homo sapien
caactttagcatttgggtcctgtca

SEQ ID NO: 138938 - DNA, 25 bp, Homo sapien
caggctgctgagaatgccgttcccc

SEQ ID NO: 138939 - DNA, 25 bp, Homo sapien
tgtgccacgcaccatcggcagtgtg

SEQ ID NO: 138940 - DNA, 25 bp, Homo sapien
gctcaggacagggtcttcccaaact

SEQ ID NO: 138941 - DNA, 25 bp, Homo sapien
tctatgtgcattagccccgcagtgc

SEQ ID NO: 138942 - DNA, 25 bp, Homo sapien
catacgaggagacacgaggccattt

SEQ ID NO: 138943 - DNA, 25 bp, Homo sapien
gattctgacgcgtgcaacaggttag

SEQ ID NO: 138944 - DNA, 25 bp, Homo sapien
tgtagtgtcacaaagcggatgccgc

SEQ ID NO: 138945 - DNA, 25 bp, Homo sapien
gggctgccacctgcaaaacaaagtc

SEQ ID NO: 138946 - DNA, 25 bp, Homo sapien
cttcctccagatccggaatgatagg

SEQ ID NO: 138947 - DNA, 25 bp, Homo sapien
tccagatccggaatgataggaatat

SEQ ID NO: 138948 - DNA, 25 bp, Homo sapien
gtacttcctccagatccggaatgat

SEQ ID NO: 138949 - DNA, 25 bp, Homo sapien
tggatggagcccaacaccagaaaga

SEQ ID NO: 138950 - DNA, 25 bp, Homo sapien
taattcacgtgttctttgcctcccc

SEQ ID NO: 138951 - DNA, 25 bp, Homo sapien
gcaggacctgttccaggagtgctgc

SEQ ID NO: 138952 - DNA, 25 bp, Homo sapien
caaggtccactatagatgatatctg

SEQ ID NO: 138953 - DNA, 25 bp, Homo sapien
ggtaggtcatcacccgctttatctg

SEQ ID NO: 138954 - DNA, 25 bp, Homo sapien
gaatggctgagtacttcatgaggtc

SEQ ID NO: 138955 - DNA, 25 bp, Homo sapien
tgagtacttcatgaggtcattgtcc

SEQ ID NO: 138956 - DNA, 25 bp, Homo sapien
cattgtccaggtcacggtaggtcat

SEQ ID NO: 138957 - DNA, 25 bp, Homo sapien
gaggaccgagtgtgacagcagtaca

SEQ ID NO: 138958 - DNA, 25 bp, Homo sapien
accgagtgtgacagcagtacagcca

SEQ ID NO: 138959 - DNA, 25 bp, Homo sapien
actatgttgggtccagggttgctgt

SEQ ID NO: 138960 - DNA, 25 bp, Homo sapien
caggaggaccgagtgtgacagcagt

SEQ ID NO: 138961 - DNA, 25 bp, Homo sapien
gaggagtttcaggtcgatctcccca

SEQ ID NO: 138962 - DNA, 25 bp, Homo sapien
tgctccggcgcgagcactttggtga

SEQ ID NO: 138963 - DNA, 25 bp, Homo sapien
ctcccggacttcgtgctccggcgcg

SEQ ID NO: 138964 - DNA, 25 bp, Homo sapien
ggagtttcaggtcgatctccccatc

SEQ ID NO: 138965 - DNA, 25 bp, Homo sapien
tgagagaccggggaattgctgccac

SEQ ID NO: 138966 - DNA, 25 bp, Homo sapien
aaggccttttccctcaactgtagct

SEQ ID NO: 138967 - DNA, 25 bp, Homo sapien
tttccctcaactgtagctgacttct

SEQ ID NO: 138968 - DNA, 25 bp, Homo sapien
ggagtcggctggttatgggaatgcc

SEQ ID NO: 138969 - DNA, 25 bp, Homo sapien
ggtcccactcagtgaggacctctga

SEQ ID NO: 138970 - DNA, 25 bp, Homo sapien
tggtcccagtcccagccgacatcat

SEQ ID NO: 138971 - DNA, 25 bp, Homo sapien
cctccttctccgtctgcagtgggtc

SEQ ID NO: 138972 - DNA, 25 bp, Homo sapien
acctctgaggacacctcagtgaaca

SEQ ID NO: 138973 - DNA, 25 bp, Homo sapien
gcttctttagctttaagctcattgc

SEQ ID NO: 138974 - DNA, 25 bp, Homo sapien
ttcatgtctagagcatgggtgacgg

SEQ ID NO: 138975 - DNA, 25 bp, Homo sapien
catttcttcatgtctagagcatggg

SEQ ID NO: 138976 - DNA, 25 bp, Homo sapien
aagcttctttagctttaagctcatt

SEQ ID NO: 138977 - DNA, 25 bp, Homo sapien
tccaggtaaaaattcggagctgctt

SEQ ID NO: 138978 - DNA, 25 bp, Homo sapien
caggtaaaaattcggagctgcttac

SEQ ID NO: 138979 - DNA, 25 bp, Homo sapien
attccaggtaaaaattcggagctgc

SEQ ID NO: 138980 - DNA, 25 bp, Homo sapien
ttccaggtaaaaattcggagctgct

SEQ ID NO: 138981 - DNA, 25 bp, Homo sapien
attgcaattgaattatccaatgtgg

SEQ ID NO: 138982 - DNA, 25 bp, Homo sapien
tttattgcaattgaattatccaatg

SEQ ID NO: 138983 - DNA, 25 bp, Homo sapien
aagcaatttattgcaattgaattat

SEQ ID NO: 138984 - DNA, 25 bp, Homo sapien
taagcaatttattgcaattgaatta

SEQ ID NO: 138985 - DNA, 25 bp, Homo sapien
caacaaggccgcgagttctgagttc

SEQ ID NO: 138986 - DNA, 25 bp, Homo sapien
cagctttcagtaggagtgcccactc

SEQ ID NO: 138987 - DNA, 25 bp, Homo sapien
gaaacctcccgagaagtgaacagct

SEQ ID NO: 138988 - DNA, 25 bp, Homo sapien
gtcactaaggtcacaaagggcccag

SEQ ID NO: 138989 - DNA, 25 bp, Homo sapien
agccactcctccaacaggtcaggca

SEQ ID NO: 138990 - DNA, 25 bp, Homo sapien
caccccgggcaccttgacttccagc

SEQ ID NO: 138991 - DNA, 25 bp, Homo sapien
tgcagtagtttgagggaagttttcc

SEQ ID NO: 138992 - DNA, 25 bp, Homo sapien
ttttccatagtgtgcctgtcaagcc

SEQ ID NO: 138993 - DNA, 25 bp, Homo sapien
ctcagttgggttggattccacattg

SEQ ID NO: 138994 - DNA, 25 bp, Homo sapien
tctcagttgggttggattccacatt

SEQ ID NO: 138995 - DNA, 25 bp, Homo sapien
cttctcagttgggttggattccaca

SEQ ID NO: 138996 - DNA, 25 bp, Homo sapien
ttctcagttgggttggattccacat

SEQ ID NO: 138997 - DNA, 25 bp, Homo sapien
cctgggcgggaatgtgtcccgcagc

SEQ ID NO: 138998 - DNA, 25 bp, Homo sapien
cctggggacctgggcgggaatgtgt

SEQ ID NO: 138999 - DNA, 25 bp, Homo sapien
tgggcgggaatgtgtcccgcagccc

SEQ ID NO: 139000 - DNA, 25 bp, Homo sapien
ggacctgggcgggaatgtgtcccgc

SEQ ID NO: 139001 - DNA, 25 bp, Homo sapien
gctcagcagaagctcaattctgtct

SEQ ID NO: 139002 - DNA, 25 bp, Homo sapien
tcagcagaagctcaattctgtctgg

SEQ ID NO: 139003 - DNA, 25 bp, Homo sapien
gcagaagctcaattctgtctgggaa

SEQ ID NO: 139004 - DNA, 25 bp, Homo sapien
cagcagaagctcaattctgtctggg

SEQ ID NO: 139005 - DNA, 25 bp, Homo sapien
gagacatgacttatagggccttgca

SEQ ID NO: 139006 - DNA, 25 bp, Homo sapien
tatttggcgcagagttacggtgatg

SEQ ID NO: 139007 - DNA, 25 bp, Homo sapien
gagtaatggagagcattccccaggc

SEQ ID NO: 139008 - DNA, 25 bp, Homo sapien
gataggccacataaatctcccgaga

SEQ ID NO: 139009 - DNA, 25 bp, Homo sapien
gaagcctccgctgaggagatatcgc

SEQ ID NO: 139010 - DNA, 25 bp, Homo sapien
gagaagtgatttgcggactcaagaa

SEQ ID NO: 139011 - DNA, 25 bp, Homo sapien
gagatatcgcttcatttcggcaagg

SEQ ID NO: 139012 - DNA, 25 bp, Homo sapien
caatttgccggctgacactgggaga

SEQ ID NO: 139013 - DNA, 25 bp, Homo sapien
cccctccacatttcgccggcgccgc

SEQ ID NO: 139014 - DNA, 25 bp, Homo sapien
ccctccacatttcgccggcgccgcg

SEQ ID NO: 139015 - DNA, 25 bp, Homo sapien
ccccctccacatttcgccggcgccg

SEQ ID NO: 139016 - DNA, 25 bp, Homo sapien
tctttcatctcgtagatgaagccac

SEQ ID NO: 139017 - DNA, 25 bp, Homo sapien
gtagatgaagccactaaataaaggg

SEQ ID NO: 139018 - DNA, 25 bp, Homo sapien
ccatgaagcttcttgccgcgcaaag

SEQ ID NO: 139019 - DNA, 25 bp, Homo sapien
cacaagggcttttaatctgtctcat

SEQ ID NO: 139020 - DNA, 25 bp, Homo sapien
ccgccgctttttgggccgactctca

SEQ ID NO: 139021 - DNA, 25 bp, Homo sapien
ctttttgggccgactctcaccgccg

SEQ ID NO: 139022 - DNA, 25 bp, Homo sapien
gccgccgctttttgggccgactctc

SEQ ID NO: 139023 - DNA, 25 bp, Homo sapien
ccgctttttgggccgactctcaccg

SEQ ID NO: 139024 - DNA, 25 bp, Homo sapien
ggcttatctgccacacctgtaggag

SEQ ID NO: 139025 - DNA, 25 bp, Homo sapien
gatgaggctgagtcacgcacaggaa

SEQ ID NO: 139026 - DNA, 25 bp, Homo sapien
tcgcggatgcacactctcgagagga

SEQ ID NO: 139027 - DNA, 25 bp, Homo sapien
caacttgcagtcgaatgcctgtgca

SEQ ID NO: 139028 - DNA, 25 bp, Homo sapien
gaatgcagttttcgtgatccaagaa

SEQ ID NO: 139029 - DNA, 25 bp, Homo sapien
gagtagcacatggtctcatcgaggt

SEQ ID NO: 139030 - DNA, 25 bp, Homo sapien
gaaacagatcatggtagtccacagt

SEQ ID NO: 139031 - DNA, 25 bp, Homo sapien
tccaagaaattgtagtgacccaggt

SEQ ID NO: 139032 - DNA, 25 bp, Homo sapien
tgctccaaggctgaggctaagtcgt

SEQ ID NO: 139033 - DNA, 25 bp, Homo sapien
gacttgactcagaggcctcgctgta

SEQ ID NO: 139034 - DNA, 25 bp, Homo sapien
tagcagcaggtatgctctgccaggt

SEQ ID NO: 139035 - DNA, 25 bp, Homo sapien
ctaagtcgtgtaccagctcatccat

SEQ ID NO: 139036 - DNA, 25 bp, Homo sapien
cactaaaattggtcaccggagccac

SEQ ID NO: 139037 - DNA, 25 bp, Homo sapien
gagtattctccttccagcgggacag

SEQ ID NO: 139038 - DNA, 25 bp, Homo sapien
caatccgtggcctgatgaggtccag

SEQ ID NO: 139039 - DNA, 25 bp, Homo sapien
tcagtaaaggagtcagattcatgcc

SEQ ID NO: 139040 - DNA, 25 bp, Homo sapien
tgatggacagagatctcagctttct

SEQ ID NO: 139041 - DNA, 25 bp, Homo sapien
gtgatggacagagatctcagctttc

SEQ ID NO: 139042 - DNA, 25 bp, Homo sapien
aggtgatggacagagatctcagctt

SEQ ID NO: 139043 - DNA, 25 bp, Homo sapien
atggacagagatctcagctttctcc

SEQ ID NO: 139044 - DNA, 25 bp, Homo sapien
tcactgctgctacacacactgctgg

SEQ ID NO: 139045 - DNA, 25 bp, Homo sapien
gtcactgctgctacacacactgctg

SEQ ID NO: 139046 - DNA, 25 bp, Homo sapien
aatcactgtggagatctccaaaatg

SEQ ID NO: 139047 - DNA, 25 bp, Homo sapien
taataactcttaaatcactgtggag

SEQ ID NO: 139048 - DNA, 25 bp, Homo sapien
cattaacacgcaggataataactct

SEQ ID NO: 139049 - DNA, 25 bp, Homo sapien
caactaagaaagttactcaaagtgt

SEQ ID NO: 139050 - DNA, 25 bp, Homo sapien
tagataattgtatgtctgccaccac

SEQ ID NO: 139051 - DNA, 25 bp, Homo sapien
tcatactgtgttagactggaccgct

SEQ ID NO: 139052 - DNA, 25 bp, Homo sapien
caaagctagctatacctgagggatt

SEQ ID NO: 139053 - DNA, 25 bp, Homo sapien
tagtaaacaatgaagccaggatctg

SEQ ID NO: 139054 - DNA, 25 bp, Homo sapien
aaagtaaagacatcatatcataagc

SEQ ID NO: 139055 - DNA, 25 bp, Homo sapien
agtaaagacatcatatcataagcta

SEQ ID NO: 139056 - DNA, 25 bp, Homo sapien
acatcatatcataagctagaatttt

SEQ ID NO: 139057 - DNA, 25 bp, Homo sapien
taaagtaaagacatcatatcataag

SEQ ID NO: 139058 - DNA, 25 bp, Homo sapien
tagggacagtgaatcctgggacaca

SEQ ID NO: 139059 - DNA, 25 bp, Homo sapien
ctgaaaatttatccaatccagaatc

SEQ ID NO: 139060 - DNA, 25 bp, Homo sapien
gatcaggagcccacttgggcagaag

SEQ ID NO: 139061 - DNA, 25 bp, Homo sapien
tttctacttcagaacaatgatcagg

SEQ ID NO: 139062 - DNA, 25 bp, Homo sapien
tggagagaaccttaagctttgagac

SEQ ID NO: 139063 - DNA, 25 bp, Homo sapien
tgtcactaaatctggcacaaacggc

SEQ ID NO: 139064 - DNA, 25 bp, Homo sapien
tagaaaatccttgagctagctccaa

SEQ ID NO: 139065 - DNA, 25 bp, Homo sapien
cacaaacggcaatggcaagctgaag

SEQ ID NO: 139066 - DNA, 25 bp, Homo sapien
tactgggaaccctagaatcataaat

SEQ ID NO: 139067 - DNA, 25 bp, Homo sapien
gactatcacagagcttggtagacag

SEQ ID NO: 139068 - DNA, 25 bp, Homo sapien
catatcgtaagtgatgaccctgtca

SEQ ID NO: 139069 - DNA, 25 bp, Homo sapien
gacagtatcagagtattagcaccac

SEQ ID NO: 139070 - DNA, 25 bp, Homo sapien
tttgccaaggatttattattcccag

SEQ ID NO: 139071 - DNA, 25 bp, Homo sapien
tcactagcagtatgatcacaggcat

SEQ ID NO: 139072 - DNA, 25 bp, Homo sapien
tcacagagctatttgccaaggattt

SEQ ID NO: 139073 - DNA, 25 bp, Homo sapien
ttcccaggtctttgtcactagcagt

SEQ ID NO: 139074 - DNA, 25 bp, Homo sapien
gaaggaaggcctcagataccgaatg

SEQ ID NO: 139075 - DNA, 25 bp, Homo sapien
tagtacactgaaggctttaccccca

SEQ ID NO: 139076 - DNA, 25 bp, Homo sapien
gcaatcctatgtttctagtacactg

SEQ ID NO: 139077 - DNA, 25 bp, Homo sapien
gcagaaaatccatatgcaatcctat

SEQ ID NO: 139078 - DNA, 25 bp, Homo sapien
agctccaggtagacgattcaagcga

SEQ ID NO: 139079 - DNA, 25 bp, Homo sapien
tccaggtagacgattcaagcgagta

SEQ ID NO: 139080 - DNA, 25 bp, Homo sapien
caggtagacgattcaagcgagtatg

SEQ ID NO: 139081 - DNA, 25 bp, Homo sapien
tagacgattcaagcgagtatggtac

SEQ ID NO: 139082 - DNA, 25 bp, Homo sapien
ttatctccccactgagccaagctaa

SEQ ID NO: 139083 - DNA, 25 bp, Homo sapien
tcccatagggaatattatctcccca

SEQ ID NO: 139084 - DNA, 25 bp, Homo sapien
gccaagctaactgtgagaggtatca

SEQ ID NO: 139085 - DNA, 25 bp, Homo sapien
taataggatacacaactcccatagg

SEQ ID NO: 139086 - DNA, 25 bp, Homo sapien
ttctctgactgaggatgagccctgt

SEQ ID NO: 139087 - DNA, 25 bp, Homo sapien
taaatgagctgagtccctagtacca

SEQ ID NO: 139088 - DNA, 25 bp, Homo sapien
tcttgggctcgtctggaaataaaca

SEQ ID NO: 139089 - DNA, 25 bp, Homo sapien
aagatttgaacttgaggccgggcac

SEQ ID NO: 139090 - DNA, 25 bp, Homo sapien
gagcggtgacctcttctagaaatga

SEQ ID NO: 139091 - DNA, 25 bp, Homo sapien
tgtggaccgtgctaaacatcaggct

SEQ ID NO: 139092 - DNA, 25 bp, Homo sapien
ttgagagaacacaagtcacgggcgt

SEQ ID NO: 139093 - DNA, 25 bp, Homo sapien
tgtgtaattagcagctcactggcag

SEQ ID NO: 139094 - DNA, 25 bp, Homo sapien
gtccccaaagtgtttatgctggtct

SEQ ID NO: 139095 - DNA, 25 bp, Homo sapien
tccccaaagtgtttatgctggtctc

SEQ ID NO: 139096 - DNA, 25 bp, Homo sapien
gtcactaatgatatggcttatcctc

SEQ ID NO: 139097 - DNA, 25 bp, Homo sapien
gggtcactaatgatatggcttatcc

SEQ ID NO: 139098 - DNA, 25 bp, Homo sapien
ccgagggtcactaatgatatggctt

SEQ ID NO: 139099 - DNA, 25 bp, Homo sapien
ctgccgagggtcactaatgatatgg

SEQ ID NO: 139100 - DNA, 25 bp, Homo sapien
ttttcccagctgatggtaaccagaa

SEQ ID NO: 139101 - DNA, 25 bp, Homo sapien
tttcccagctgatggtaaccagaaa

SEQ ID NO: 139102 - DNA, 25 bp, Homo sapien
gaaaccaaatgataaaataaagatg

SEQ ID NO: 139103 - DNA, 25 bp, Homo sapien
aaagatgacaaagaaaaatgatctt

SEQ ID NO: 139104 - DNA, 25 bp, Homo sapien
agatgacaaagaaaaatgatcttac

SEQ ID NO: 139105 - DNA, 25 bp, Homo sapien
aataaagatgacaaagaaaaatgat

SEQ ID NO: 139106 - DNA, 25 bp, Homo sapien
aaaatcagaagccaacgctttattc

SEQ ID NO: 139107 - DNA, 25 bp, Homo sapien
aatcagaagccaacgctttattctt

SEQ ID NO: 139108 - DNA, 25 bp, Homo sapien
gaaaatcagaagccaacgctttatt

SEQ ID NO: 139109 - DNA, 25 bp, Homo sapien
atcagaagccaacgctttattcttt

SEQ ID NO: 139110 - DNA, 25 bp, Homo sapien
caagaaactaatgatcacagttgaa

SEQ ID NO: 139111 - DNA, 25 bp, Homo sapien
taagtgttggatactcttagaaaac

SEQ ID NO: 139112 - DNA, 25 bp, Homo sapien
gatactcttagaaaacggttctcca

SEQ ID NO: 139113 - DNA, 25 bp, Homo sapien
acctacaaagaggaattagctgcag

SEQ ID NO: 139114 - DNA, 25 bp, Homo sapien
tcattctgctttcttactgcaaagt

SEQ ID NO: 139115 - DNA, 25 bp, Homo sapien
gatgttgaactaaaccatatgcaaa

SEQ ID NO: 139116 - DNA, 25 bp, Homo sapien
tagtacttctcaacgcaggattctg

SEQ ID NO: 139117 - DNA, 25 bp, Homo sapien
tctgctccatacgtttaggcttcaa

SEQ ID NO: 139118 - DNA, 25 bp, Homo sapien
tagcttagtgttccccaaactgcag

SEQ ID NO: 139119 - DNA, 25 bp, Homo sapien
gcaactgttctatctgccacagagg

SEQ ID NO: 139120 - DNA, 25 bp, Homo sapien
tgtgaaccgagcatgagagggacct

SEQ ID NO: 139121 - DNA, 25 bp, Homo sapien
gaaacatatcgataaccactgtgag

SEQ ID NO: 139122 - DNA, 25 bp, Homo sapien
ggtgaacaccttcggtgagaagcat

SEQ ID NO: 139123 - DNA, 25 bp, Homo sapien
caccttcggtgagaagcatcggcaa

SEQ ID NO: 139124 - DNA, 25 bp, Homo sapien
gcagtgtgctggtgaacaccttcgg

SEQ ID NO: 139125 - DNA, 25 bp, Homo sapien
tgtgctggtgaacaccttcggtgag

SEQ ID NO: 139126 - DNA, 25 bp, Homo sapien
gcagttcaacattcttaataacacc

SEQ ID NO: 139127 - DNA, 25 bp, Homo sapien
gcccggcagttcaacattcttaata

SEQ ID NO: 139128 - DNA, 25 bp, Homo sapien
tgtgatggtctctcttttcaaaaga

SEQ ID NO: 139129 - DNA, 25 bp, Homo sapien
cttaataacaccatttgtgatggtc

SEQ ID NO: 139130 - DNA, 25 bp, Homo sapien
caaaaatgtatggaggcctacccaa

SEQ ID NO: 139131 - DNA, 25 bp, Homo sapien
gaaagaattaatactccgagacact

SEQ ID NO: 139132 - DNA, 25 bp, Homo sapien
taaaagatgactgagctgaggtcct

SEQ ID NO: 139133 - DNA, 25 bp, Homo sapien
tcagagaacaagtaagtgctagggt

SEQ ID NO: 139134 - DNA, 25 bp, Homo sapien
aggcaactgctacagcttcggcttc

SEQ ID NO: 139135 - DNA, 25 bp, Homo sapien
aaggcaactgctacagcttcggctt

SEQ ID NO: 139136 - DNA, 25 bp, Homo sapien
tcctgggaacaagtctaagcagcat

SEQ ID NO: 139137 - DNA, 25 bp, Homo sapien
taaatcctgggaacaagtctaagca

SEQ ID NO: 139138 - DNA, 25 bp, Homo sapien
cttgcataaatcctgggaacaagtc

SEQ ID NO: 139139 - DNA, 25 bp, Homo sapien
cataaatcctgggaacaagtctaag

SEQ ID NO: 139140 - DNA, 25 bp, Homo sapien
tggtccccagtgtacatttgcctgt

SEQ ID NO: 139141 - DNA, 25 bp, Homo sapien
ggccactggtttccgcttcctcttg

SEQ ID NO: 139142 - DNA, 25 bp, Homo sapien
cactggggctagacaaagatgctgt

SEQ ID NO: 139143 - DNA, 25 bp, Homo sapien
tcctcttgatgtcacgtgaacatgg

SEQ ID NO: 139144 - DNA, 25 bp, Homo sapien
gaagattgtccagtatgaaccacca

SEQ ID NO: 139145 - DNA, 25 bp, Homo sapien
tagagtcacaaggaaaccggtctga

SEQ ID NO: 139146 - DNA, 25 bp, Homo sapien
cccgatgttaggcagagcaagccca

SEQ ID NO: 139147 - DNA, 25 bp, Homo sapien
tcatatggagcattgccaacagccc

SEQ ID NO: 139148 - DNA, 25 bp, Homo sapien
tcacttcagcatgagggagacactt

SEQ ID NO: 139149 - DNA, 25 bp, Homo sapien
cacactggtgaagagtccgataaca

SEQ ID NO: 139150 - DNA, 25 bp, Homo sapien
ttaatacagcggcaaagcggaaccc

SEQ ID NO: 139151 - DNA, 25 bp, Homo sapien
taacagatgtatgccgtagcgtgat

SEQ ID NO: 139152 - DNA, 25 bp, Homo sapien
gaatttgccctatgactcctgagaa

SEQ ID NO: 139153 - DNA, 25 bp, Homo sapien
tggcaggacaaagcataattgaatc

SEQ ID NO: 139154 - DNA, 25 bp, Homo sapien
ggaactactgaatccaaccatgtgg

SEQ ID NO: 139155 - DNA, 25 bp, Homo sapien
aaacagaacccggtgaaagctgcaa

SEQ ID NO: 139156 - DNA, 25 bp, Homo sapien
ttcccacaagcactacacaagggtt

SEQ ID NO: 139157 - DNA, 25 bp, Homo sapien
tcttcatccaatttgtagcacatgg

SEQ ID NO: 139158 - DNA, 25 bp, Homo sapien
ggaagtggcctaaaagaatgtttgc

SEQ ID NO: 139159 - DNA, 25 bp, Homo sapien
gatttgtttccaccttgacgactgt

SEQ ID NO: 139160 - DNA, 25 bp, Homo sapien
aaaaatgtagcagtagttgcgtctg

SEQ ID NO: 139161 - DNA, 25 bp, Homo sapien
agaggtcctcaccaaccactcagag

SEQ ID NO: 139162 - DNA, 25 bp, Homo sapien
tggttggctccactgcatccatgtg

SEQ ID NO: 139163 - DNA, 25 bp, Homo sapien
cagtagttgcgtctgtggctttctc

SEQ ID NO: 139164 - DNA, 25 bp, Homo sapien
tcaagagtaggctcaaaggcaagcc

SEQ ID NO: 139165 - DNA, 25 bp, Homo sapien
taaaagctctacacaaaaggtatgc

SEQ ID NO: 139166 - DNA, 25 bp, Homo sapien
gaatccactgctgtgtttgaaagag

SEQ ID NO: 139167 - DNA, 25 bp, Homo sapien
tggaagttctcaaggcccagttgct

SEQ ID NO: 139168 - DNA, 25 bp, Homo sapien
aactctgaagatgaggtaaaataca

SEQ ID NO: 139169 - DNA, 25 bp, Homo sapien
gaaccagaggcgactcacaggtctg

SEQ ID NO: 139170 - DNA, 25 bp, Homo sapien
ggtggaacatccctgtgagcacaca

SEQ ID NO: 139171 - DNA, 25 bp, Homo sapien
cattacacttcgtatgggaaacagg

SEQ ID NO: 139172 - DNA, 25 bp, Homo sapien
caactaagaggcatgctgggccggc

SEQ ID NO: 139173 - DNA, 25 bp, Homo sapien
tatatgccacgggtcactatggtga

SEQ ID NO: 139174 - DNA, 25 bp, Homo sapien
ttcagacaggccatttgtgtagcca

SEQ ID NO: 139175 - DNA, 25 bp, Homo sapien
tgaggagcacaatttacaaccctgt

SEQ ID NO: 139176 - DNA, 25 bp, Homo sapien
aaatgtgtagaaaagcatgcccaag

SEQ ID NO: 139177 - DNA, 25 bp, Homo sapien
aaaatactgcatctgaaaaaaatct

SEQ ID NO: 139178 - DNA, 25 bp, Homo sapien
cctttaaaatactgcatctgaaaaa

SEQ ID NO: 139179 - DNA, 25 bp, Homo sapien
gttcctttaaaatactgcatctgaa

SEQ ID NO: 139180 - DNA, 25 bp, Homo sapien
ttgttcctttaaaatactgcatctg

SEQ ID NO: 139181 - DNA, 25 bp, Homo sapien
cgcacctattattacaacacctggg

SEQ ID NO: 139182 - DNA, 25 bp, Homo sapien
tagtcgcttgtccagggtgttgtgc

SEQ ID NO: 139183 - DNA, 25 bp, Homo sapien
tgtctctaactacaacatgcaaggc

SEQ ID NO: 139184 - DNA, 25 bp, Homo sapien
ttcttaccaagaggcaacacaaggc

SEQ ID NO: 139185 - DNA, 25 bp, Homo sapien
gcccagctcagataggttcacaaga

SEQ ID NO: 139186 - DNA, 25 bp, Homo sapien
tggagaacccatcgcatcagcaatg

SEQ ID NO: 139187 - DNA, 25 bp, Homo sapien
gacatatagggcactgaacacagct

SEQ ID NO: 139188 - DNA, 25 bp, Homo sapien
gacctttcacaacaggagtgggaga

SEQ ID NO: 139189 - DNA, 25 bp, Homo sapien
ctcaccctttccctctgtaccagtt

SEQ ID NO: 139190 - DNA, 25 bp, Homo sapien
cctcaccctttccctctgtaccagt

SEQ ID NO: 139191 - DNA, 25 bp, Homo sapien
ttcctcaccctttccctctgtacca

SEQ ID NO: 139192 - DNA, 25 bp, Homo sapien
tcctcaccctttccctctgtaccag

SEQ ID NO: 139193 - DNA, 25 bp, Homo sapien
gaaagcatctctctaccacttgcat

SEQ ID NO: 139194 - DNA, 25 bp, Homo sapien
tgtttccgggcatttgatgttcatc

SEQ ID NO: 139195 - DNA, 25 bp, Homo sapien
ctttttgatgttgctgtttccgggc

SEQ ID NO: 139196 - DNA, 25 bp, Homo sapien
gacgttaacacaggagaaagcatct

SEQ ID NO: 139197 - DNA, 25 bp, Homo sapien
catttatgatgtctactcgcagtga

SEQ ID NO: 139198 - DNA, 25 bp, Homo sapien
tgctggacttgttaaaaaccctgta

SEQ ID NO: 139199 - DNA, 25 bp, Homo sapien
taaatctggcaattttaccaagcat

SEQ ID NO: 139200 - DNA, 25 bp, Homo sapien
ggaccacacattgagaattcctgct

SEQ ID NO: 139201 - DNA, 25 bp, Homo sapien
cttatggagggaatatgagagcacc

SEQ ID NO: 139202 - DNA, 25 bp, Homo sapien
ccttgcgctgggagtttcggattca

SEQ ID NO: 139203 - DNA, 25 bp, Homo sapien
tcagagcttaggaggagaccagtcc

SEQ ID NO: 139204 - DNA, 25 bp, Homo sapien
taaccgtggcaaagcctatggttct

SEQ ID NO: 139205 - DNA, 25 bp, Homo sapien
catagcccttgatagcatcctttgt

SEQ ID NO: 139206 - DNA, 25 bp, Homo sapien
acatagcccttgatagcatcctttg

SEQ ID NO: 139207 - DNA, 25 bp, Homo sapien
gcccttgatagcatcctttgtcaat

SEQ ID NO: 139208 - DNA, 25 bp, Homo sapien
tagcccttgatagcatcctttgtca

SEQ ID NO: 139209 - DNA, 25 bp, Homo sapien
tctgaaatgctgaatccacgagtca

SEQ ID NO: 139210 - DNA, 25 bp, Homo sapien
tcagtcctagcaagagattaccaat

SEQ ID NO: 139211 - DNA, 25 bp, Homo sapien
cctgcaaaattgctagctgaaatct

SEQ ID NO: 139212 - DNA, 25 bp, Homo sapien
gcatgacatcgctattggtctccaa

SEQ ID NO: 139213 - DNA, 25 bp, Homo sapien
ttcgtcttgggcaggacaggcactg

SEQ ID NO: 139214 - DNA, 25 bp, Homo sapien
ttttgagtcaaagtcacgaaggcca

SEQ ID NO: 139215 - DNA, 25 bp, Homo sapien
taacactaacatttttggccagagg

SEQ ID NO: 139216 - DNA, 25 bp, Homo sapien
tgcaataagctgctgacaacaggag

SEQ ID NO: 139217 - DNA, 25 bp, Homo sapien
caggagtgacccaccttagaatctc

SEQ ID NO: 139218 - DNA, 25 bp, Homo sapien
tgtgaatgctccactctaatctgtg

SEQ ID NO: 139219 - DNA, 25 bp, Homo sapien
ttaaggtggtatggcaaaggaactc

SEQ ID NO: 139220 - DNA, 25 bp, Homo sapien
aaaggaactcactggcatacaggtg

SEQ ID NO: 139221 - DNA, 25 bp, Homo sapien
cagtccaagacccggaagaggagaa

SEQ ID NO: 139222 - DNA, 25 bp, Homo sapien
tccaagacccggaagaggagaaagc

SEQ ID NO: 139223 - DNA, 25 bp, Homo sapien
gatagtatatctaaggagcccagga

SEQ ID NO: 139224 - DNA, 25 bp, Homo sapien
gatgttgcttccaaatggcagacca

SEQ ID NO: 139225 - DNA, 25 bp, Homo sapien
tattcatagggctagtgctgatgcc

SEQ ID NO: 139226 - DNA, 25 bp, Homo sapien
cagtggcccacagcttatgcatatg

SEQ ID NO: 139227 - DNA, 25 bp, Homo sapien
acgcacagagaagggatgagcccat

SEQ ID NO: 139228 - DNA, 25 bp, Homo sapien
tcaatcatgtacgcacagagaaggg

SEQ ID NO: 139229 - DNA, 25 bp, Homo sapien
cagagaagggatgagcccattcaca

SEQ ID NO: 139230 - DNA, 25 bp, Homo sapien
tcatgtacgcacagagaagggatga

SEQ ID NO: 139231 - DNA, 25 bp, Homo sapien
cagtagctcctaccaataagtgggc

SEQ ID NO: 139232 - DNA, 25 bp, Homo sapien
taagaggatgtcacagaaaccggct

SEQ ID NO: 139233 - DNA, 25 bp, Homo sapien
gcagtagggtttccacgaatgcacc

SEQ ID NO: 139234 - DNA, 25 bp, Homo sapien
tttcccacggaaggtgatcaaggca

SEQ ID NO: 139235 - DNA, 25 bp, Homo sapien
catgggatcagaacttagtgtgagc

SEQ ID NO: 139236 - DNA, 25 bp, Homo sapien
ttatagcacggtattaatgagacca

SEQ ID NO: 139237 - DNA, 25 bp, Homo sapien
gattgctaaggtgttcagtccaaaa

SEQ ID NO: 139238 - DNA, 25 bp, Homo sapien
ttggttttatcccatgggcacttcc

SEQ ID NO: 139239 - DNA, 25 bp, Homo sapien
gagggaataaatcgccactgctcac

SEQ ID NO: 139240 - DNA, 25 bp, Homo sapien
ggttttggatcaagagcccctgaga

SEQ ID NO: 139241 - DNA, 25 bp, Homo sapien
ggtaccatgcacaagtagaccagtg

SEQ ID NO: 139242 - DNA, 25 bp, Homo sapien
tattcttggataggatgacaccaca

SEQ ID NO: 139243 - DNA, 25 bp, Homo sapien
gagagctaactagttcccttcacca

SEQ ID NO: 139244 - DNA, 25 bp, Homo sapien
gccctagtgattgggatttatgccc

SEQ ID NO: 139245 - DNA, 25 bp, Homo sapien
gaagataaaactgactgacctttgg

SEQ ID NO: 139246 - DNA, 25 bp, Homo sapien
gaattctgtacggatgctcagtacc

SEQ ID NO: 139247 - DNA, 25 bp, Homo sapien
taatggttagtcctgctcatgcaaa

SEQ ID NO: 139248 - DNA, 25 bp, Homo sapien
aatatttacccatgtgttaggcagc

SEQ ID NO: 139249 - DNA, 25 bp, Homo sapien
ctgaagctgactaacctctggtgaa

SEQ ID NO: 139250 - DNA, 25 bp, Homo sapien
ggagggatttcatgcacgatttgcc

SEQ ID NO: 139251 - DNA, 25 bp, Homo sapien
ttgcaaacattttatcccagcctgg

SEQ ID NO: 139252 - DNA, 25 bp, Homo sapien
tctttttacagtttggataacagtc

SEQ ID NO: 139253 - DNA, 25 bp, Homo sapien
caatctctgggtttgttgctatcct

SEQ ID NO: 139254 - DNA, 25 bp, Homo sapien
tgcgtacttagactgacttttagcc

SEQ ID NO: 139255 - DNA, 25 bp, Homo sapien
cacagctaaattgagcaggagtaca

SEQ ID NO: 139256 - DNA, 25 bp, Homo sapien
gatgatatcatactgtaggtagcct

SEQ ID NO: 139257 - DNA, 25 bp, Homo sapien
gcctgcatgtaccagattgtttatc

SEQ ID NO: 139258 - DNA, 25 bp, Homo sapien
gccaaaccgtctttcatcatagctg

SEQ ID NO: 139259 - DNA, 25 bp, Homo sapien
cccacgagccctttttatagcgtca

SEQ ID NO: 139260 - DNA, 25 bp, Homo sapien
gatatagcaagaacacatcctctaa

SEQ ID NO: 139261 - DNA, 25 bp, Homo sapien
gacatagaacatgaccacagtttcc

SEQ ID NO: 139262 - DNA, 25 bp, Homo sapien
tggagggacacattcaggatatagc

SEQ ID NO: 139263 - DNA, 25 bp, Homo sapien
ggcaggggggctgtccttctaccac

SEQ ID NO: 139264 - DNA, 25 bp, Homo sapien
gggcaggggggctgtccttctacca

SEQ ID NO: 139265 - DNA, 25 bp, Homo sapien
cagggcaggggggctgtccttctac

SEQ ID NO: 139266 - DNA, 25 bp, Homo sapien
tcagggcaggggggctgtccttcta

SEQ ID NO: 139267 - DNA, 25 bp, Homo sapien
gagctgtcttgtcagggcactctcg

SEQ ID NO: 139268 - DNA, 25 bp, Homo sapien
gctgtcttgtcagggcactctcgct

SEQ ID NO: 139269 - DNA, 25 bp, Homo sapien
ggaatacaggcctccgagtgttgtc

SEQ ID NO: 139270 - DNA, 25 bp, Homo sapien
ggcactctcgctggaatacaggcct

SEQ ID NO: 139271 - DNA, 25 bp, Homo sapien
gggaaaaggctggagaactcacgaa

SEQ ID NO: 139272 - DNA, 25 bp, Homo sapien
tgggaaaaggctggagaactcacga

SEQ ID NO: 139273 - DNA, 25 bp, Homo sapien
ggaaaaggctggagaactcacgaaa

SEQ ID NO: 139274 - DNA, 25 bp, Homo sapien
ctgggaaaaggctggagaactcacg

SEQ ID NO: 139275 - DNA, 25 bp, Homo sapien
gcaaatacaggagctactcatcacc

SEQ ID NO: 139276 - DNA, 25 bp, Homo sapien
cagatcctaaataacttctgagcac

SEQ ID NO: 139277 - DNA, 25 bp, Homo sapien
aaatacaggagctactcatcacccc

SEQ ID NO: 139278 - DNA, 25 bp, Homo sapien
ccccaagcaagagtctcagatccta

SEQ ID NO: 139279 - DNA, 25 bp, Homo sapien
tatccaggtgacagctcgggctgca

SEQ ID NO: 139280 - DNA, 25 bp, Homo sapien
gaagggtttcaccagctgctatcca

SEQ ID NO: 139281 - DNA, 25 bp, Homo sapien
ggagtctaccctcagctcttagaga

SEQ ID NO: 139282 - DNA, 25 bp, Homo sapien
ggtcagaagtttacacacaggttgg

SEQ ID NO: 139283 - DNA, 25 bp, Homo sapien
gaagatgcttgcctctccagaaagt

SEQ ID NO: 139284 - DNA, 25 bp, Homo sapien
gaaggtatacaccctttggcaggtc

SEQ ID NO: 139285 - DNA, 25 bp, Homo sapien
gcgttgtccacattggagaagaaac

SEQ ID NO: 139286 - DNA, 25 bp, Homo sapien
ccgaaagatcatatgctcagcgttg

SEQ ID NO: 139287 - DNA, 25 bp, Homo sapien
gaaaacgcagaatcaaattagcaag

SEQ ID NO: 139288 - DNA, 25 bp, Homo sapien
tgaggctggcaataaggaaatacgg

SEQ ID NO: 139289 - DNA, 25 bp, Homo sapien
caccagagatgcatctggcacttca

SEQ ID NO: 139290 - DNA, 25 bp, Homo sapien
catcatgattgagggtgttgctcac

SEQ ID NO: 139291 - DNA, 25 bp, Homo sapien
cacaacaagtggatactgatgttct

SEQ ID NO: 139292 - DNA, 25 bp, Homo sapien
aaaccacaacaagtggatactgatg

SEQ ID NO: 139293 - DNA, 25 bp, Homo sapien
accacaacaagtggatactgatgtt

SEQ ID NO: 139294 - DNA, 25 bp, Homo sapien
aacaagtggatactgatgttctgct

SEQ ID NO: 139295 - DNA, 25 bp, Homo sapien
aggaagtcaataacactaaataatt

SEQ ID NO: 139296 - DNA, 25 bp, Homo sapien
ttggattctttaccagtaaatagtg

SEQ ID NO: 139297 - DNA, 25 bp, Homo sapien
cagtaaatagtgtggtcagaaacaa

SEQ ID NO: 139298 - DNA, 25 bp, Homo sapien
tctttaccagtaaatagtgtggtca

SEQ ID NO: 139299 - DNA, 25 bp, Homo sapien
gctccttagctttcaccaacaatga

SEQ ID NO: 139300 - DNA, 25 bp, Homo sapien
cttgctccttagctttcaccaacaa

SEQ ID NO: 139301 - DNA, 25 bp, Homo sapien
tcttgagaactcctacttgctcctt

SEQ ID NO: 139302 - DNA, 25 bp, Homo sapien
gagaactcctacttgctccttagct

SEQ ID NO: 139303 - DNA, 25 bp, Homo sapien
tgtatgccatcaaccagttaacagc

SEQ ID NO: 139304 - DNA, 25 bp, Homo sapien
agctctgccgcaacctactcatgtg

SEQ ID NO: 139305 - DNA, 25 bp, Homo sapien
tgtctgggcaatgaatacacaggtg

SEQ ID NO: 139306 - DNA, 25 bp, Homo sapien
tgggaatgataaccataccggtctc

SEQ ID NO: 139307 - DNA, 25 bp, Homo sapien
gctttgccttccagggagcaagcaa

SEQ ID NO: 139308 - DNA, 25 bp, Homo sapien
cagctttgccttccagggagcaagc

SEQ ID NO: 139309 - DNA, 25 bp, Homo sapien
ctgcagctttgccttccagggagca

SEQ ID NO: 139310 - DNA, 25 bp, Homo sapien
tgccttccagggagcaagcaatcct

SEQ ID NO: 139311 - DNA, 25 bp, Homo sapien
gcggtttacaacaccaatgcttgca

SEQ ID NO: 139312 - DNA, 25 bp, Homo sapien
ggagcatcttccaatcagccttggc

SEQ ID NO: 139313 - DNA, 25 bp, Homo sapien
tgctgatgctgtaaatccaaacttc

SEQ ID NO: 139314 - DNA, 25 bp, Homo sapien
tacgtctttgtgaagtcggcaggca

SEQ ID NO: 139315 - DNA, 25 bp, Homo sapien
ctgtccttagccagcagcagccgga

SEQ ID NO: 139316 - DNA, 25 bp, Homo sapien
tcctctgcctgtccttagccagcag

SEQ ID NO: 139317 - DNA, 25 bp, Homo sapien
tccttagccagcagcagccggacca

SEQ ID NO: 139318 - DNA, 25 bp, Homo sapien
cctcctctgcctgtccttagccagc

SEQ ID NO: 139319 - DNA, 25 bp, Homo sapien
agaactgacggtagccatgcctcct

SEQ ID NO: 139320 - DNA, 25 bp, Homo sapien
cacagcgaccagctctcaatggagt

SEQ ID NO: 139321 - DNA, 25 bp, Homo sapien
tggagtctttgatgagcagcccgca

SEQ ID NO: 139322 - DNA, 25 bp, Homo sapien
gtcaggttcggagccaacactgctg

SEQ ID NO: 139323 - DNA, 25 bp, Homo sapien
gtttctattaatctccgcgaatcgg

SEQ ID NO: 139324 - DNA, 25 bp, Homo sapien
gcaggataattgttcgtagcgccga

SEQ ID NO: 139325 - DNA, 25 bp, Homo sapien
taatctcagagatagatggcaggat

SEQ ID NO: 139326 - DNA, 25 bp, Homo sapien
tacacggatgagtagttttcaatca

SEQ ID NO: 139327 - DNA, 25 bp, Homo sapien
ttacttgcagccttggaggcaccgc

SEQ ID NO: 139328 - DNA, 25 bp, Homo sapien
gaggcaccgccaatcacatgactca

SEQ ID NO: 139329 - DNA, 25 bp, Homo sapien
ccagttttgctctggcgagcgctgc

SEQ ID NO: 139330 - DNA, 25 bp, Homo sapien
gagcgctgccacatccattacttgc

SEQ ID NO: 139331 - DNA, 25 bp, Homo sapien
tggttgtaattggtagatattctat

SEQ ID NO: 139332 - DNA, 25 bp, Homo sapien
agagagagattggttgtaattggta

SEQ ID NO: 139333 - DNA, 25 bp, Homo sapien
tattgttattgtttgtccagcatac

SEQ ID NO: 139334 - DNA, 25 bp, Homo sapien
gagagattggttgtaattggtagat

SEQ ID NO: 139335 - DNA, 25 bp, Homo sapien
taaccagcacattgcttctcttctg

SEQ ID NO: 139336 - DNA, 25 bp, Homo sapien
ttaaccagcacattgcttctcttct

SEQ ID NO: 139337 - DNA, 25 bp, Homo sapien
caggacagtgttccttcggaggctc

SEQ ID NO: 139338 - DNA, 25 bp, Homo sapien
cggaagtcaatttcatggagctaaa

SEQ ID NO: 139339 - DNA, 25 bp, Homo sapien
tattgatgctgtgacaaatcgccac

SEQ ID NO: 139340 - DNA, 25 bp, Homo sapien
tactgactaaaagcaacacgaattt

SEQ ID NO: 139341 - DNA, 25 bp, Homo sapien
tggcagatttgggaactctgggtca

SEQ ID NO: 139342 - DNA, 25 bp, Homo sapien
agtgtttggcagatttgggaactct

SEQ ID NO: 139343 - DNA, 25 bp, Homo sapien
tgtttggcagatttgggaactctgg

SEQ ID NO: 139344 - DNA, 25 bp, Homo sapien
gatttgggaactctgggtcagactc

SEQ ID NO: 139345 - DNA, 25 bp, Homo sapien
agccgtcacctcaaatctcctccca

SEQ ID NO: 139346 - DNA, 25 bp, Homo sapien
gtcacctcaaatctcctcccaccac

SEQ ID NO: 139347 - DNA, 25 bp, Homo sapien
acagcagccgtcacctcaaatctcc

SEQ ID NO: 139348 - DNA, 25 bp, Homo sapien
agcagccgtcacctcaaatctcctc

SEQ ID NO: 139349 - DNA, 25 bp, Homo sapien
cgagccctcgctgatctctggcaga

SEQ ID NO: 139350 - DNA, 25 bp, Homo sapien
gagccctcgctgatctctggcagac

SEQ ID NO: 139351 - DNA, 25 bp, Homo sapien
agccctcgctgatctctggcagaca

SEQ ID NO: 139352 - DNA, 25 bp, Homo sapien
gccctcgctgatctctggcagacat

SEQ ID NO: 139353 - DNA, 25 bp, Homo sapien
tctcttctgatgcaaactgaggact

SEQ ID NO: 139354 - DNA, 25 bp, Homo sapien
ttctcttctgatgcaaactgaggac

SEQ ID NO: 139355 - DNA, 25 bp, Homo sapien
ttgattttctggatttcttgtgcat

SEQ ID NO: 139356 - DNA, 25 bp, Homo sapien
gtcttgattttctggatttcttgtg

SEQ ID NO: 139357 - DNA, 25 bp, Homo sapien
cttgattttctggatttcttgtgca

SEQ ID NO: 139358 - DNA, 25 bp, Homo sapien
ctgtcttgattttctggatttcttg

SEQ ID NO: 139359 - DNA, 25 bp, Homo sapien
gctcctccggtaccagctgacagtc

SEQ ID NO: 139360 - DNA, 25 bp, Homo sapien
cagttgctgataactcgttgctccg

SEQ ID NO: 139361 - DNA, 25 bp, Homo sapien
tttcagttgctgataactcgttgct

SEQ ID NO: 139362 - DNA, 25 bp, Homo sapien
gctgataactcgttgctccgctcct

SEQ ID NO: 139363 - DNA, 25 bp, Homo sapien
tcctggataggctgaggctagacct

SEQ ID NO: 139364 - DNA, 25 bp, Homo sapien
taccatgggctcaacctggagagag

SEQ ID NO: 139365 - DNA, 25 bp, Homo sapien
atgaggacaacactagggcaccagc

SEQ ID NO: 139366 - DNA, 25 bp, Homo sapien
tggaacccaagaacaaggcaatgcc

SEQ ID NO: 139367 - DNA, 25 bp, Homo sapien
gcaccacaatgtaggagtcaatgct

SEQ ID NO: 139368 - DNA, 25 bp, Homo sapien
taatctgagcaagtctctgtcgcag

SEQ ID NO: 139369 - DNA, 25 bp, Homo sapien
gaatgattccctcctatgtgttgga

SEQ ID NO: 139370 - DNA, 25 bp, Homo sapien
gagagagagtaccagcctcctagag

SEQ ID NO: 139371 - DNA, 25 bp, Homo sapien
aggaggccatagttaaaagttagca

SEQ ID NO: 139372 - DNA, 25 bp, Homo sapien
catcctcatgggtagagtggcttgg

SEQ ID NO: 139373 - DNA, 25 bp, Homo sapien
gctggcaggtcttgcagcaaccttg

SEQ ID NO: 139374 - DNA, 25 bp, Homo sapien
cttgcaagccaggaccaaactcatc

SEQ ID NO: 139375 - DNA, 25 bp, Homo sapien
ttcctctcttttgggcaatcactgt

SEQ ID NO: 139376 - DNA, 25 bp, Homo sapien
tttgggcaatcactgtaaaaaccat

SEQ ID NO: 139377 - DNA, 25 bp, Homo sapien
tgtaaaaaccatagcattttcactt

SEQ ID NO: 139378 - DNA, 25 bp, Homo sapien
tagcattttcactttcggccccttc

SEQ ID NO: 139379 - DNA, 25 bp, Homo sapien
tctagttccggttcagctgccagga

SEQ ID NO: 139380 - DNA, 25 bp, Homo sapien
gctgccaggatgttcaggttaatgg

SEQ ID NO: 139381 - DNA, 25 bp, Homo sapien
taaagccaagcggtagaaccatctg

SEQ ID NO: 139382 - DNA, 25 bp, Homo sapien
gttttctccacaaggagtctgctac

SEQ ID NO: 139383 - DNA, 25 bp, Homo sapien
tctcctgctgacagataaatgctgc

SEQ ID NO: 139384 - DNA, 25 bp, Homo sapien
gcttttcctgaagccgtaatgggcc

SEQ ID NO: 139385 - DNA, 25 bp, Homo sapien
taaatgctgcggaaacatgatggct

SEQ ID NO: 139386 - DNA, 25 bp, Homo sapien
tgctgccacgacaccaaggataaaa

SEQ ID NO: 139387 - DNA, 25 bp, Homo sapien
gaatggtctgagttgcaagccaagc

SEQ ID NO: 139388 - DNA, 25 bp, Homo sapien
cacagtgactaaggtgggcctggcc

SEQ ID NO: 139389 - DNA, 25 bp, Homo sapien
tctgaggacagtgctccatgggctc

SEQ ID NO: 139390 - DNA, 25 bp, Homo sapien
tgagcctaacctgcgcatctctgag

SEQ ID NO: 139391 - DNA, 25 bp, Homo sapien
ccgttttagcattcccagttggtag

SEQ ID NO: 139392 - DNA, 25 bp, Homo sapien
agtcccgttttagcattcccagttg

SEQ ID NO: 139393 - DNA, 25 bp, Homo sapien
cgttttagcattcccagttggtaga

SEQ ID NO: 139394 - DNA, 25 bp, Homo sapien
cgggatgcagagttcggacacgtcc

SEQ ID NO: 139395 - DNA, 25 bp, Homo sapien
ggatgcagagttcggacacgtccat

SEQ ID NO: 139396 - DNA, 25 bp, Homo sapien
ggtagccgagggggtccgggatgca

SEQ ID NO: 139397 - DNA, 25 bp, Homo sapien
tggtagccgagggggtccgggatgc

SEQ ID NO: 139398 - DNA, 25 bp, Homo sapien
gaaatggtgcccttctgttccgctg

SEQ ID NO: 139399 - DNA, 25 bp, Homo sapien
ccggacatgacacgcgggttgacca

SEQ ID NO: 139400 - DNA, 25 bp, Homo sapien
tgcttaggcgatcagttcactttcc

SEQ ID NO: 139401 - DNA, 25 bp, Homo sapien
gacccgcggtttctgagagtcgctt

SEQ ID NO: 139402 - DNA, 25 bp, Homo sapien
catgtggcatttttcctacgtgtga

SEQ ID NO: 139403 - DNA, 25 bp, Homo sapien
taccatgtggcatttttcctacgtg

SEQ ID NO: 139404 - DNA, 25 bp, Homo sapien
actgactctgaattaccatgtggca

SEQ ID NO: 139405 - DNA, 25 bp, Homo sapien
gtttttctccgggtcactgactctg

SEQ ID NO: 139406 - DNA, 25 bp, Homo sapien
ccgctttcctgtagcatcccaagaa

SEQ ID NO: 139407 - DNA, 25 bp, Homo sapien
ctgtgtgatccaactcgggattggc

SEQ ID NO: 139408 - DNA, 25 bp, Homo sapien
cgggattggccaggaatattttctc

SEQ ID NO: 139409 - DNA, 25 bp, Homo sapien
ccaagaaaccacaatgcagccaatg

SEQ ID NO: 139410 - DNA, 25 bp, Homo sapien
aatggttcatgtcagtccgtccagc

SEQ ID NO: 139411 - DNA, 25 bp, Homo sapien
gaatggttcatgtcagtccgtccag

SEQ ID NO: 139412 - DNA, 25 bp, Homo sapien
tggttcatgtcagtccgtccagcca

SEQ ID NO: 139413 - DNA, 25 bp, Homo sapien
gttcatgtcagtccgtccagccatc

SEQ ID NO: 139414 - DNA, 25 bp, Homo sapien
gttgagcctccggaagttgagcctc

SEQ ID NO: 139415 - DNA, 25 bp, Homo sapien
gaagttgagcctccgggctaagcct

SEQ ID NO: 139416 - DNA, 25 bp, Homo sapien
aagcctctgtctgggtttgtcctgc

SEQ ID NO: 139417 - DNA, 25 bp, Homo sapien
cgctggctccgggagttgagcctcc

SEQ ID NO: 139418 - DNA, 25 bp, Homo sapien
aggtgcaagtctatctgtgacctga

SEQ ID NO: 139419 - DNA, 25 bp, Homo sapien
tatctgtgacctgaatccgaaggcc

SEQ ID NO: 139420 - DNA, 25 bp, Homo sapien
tggaggtgcaagtctatctgtgacc

SEQ ID NO: 139421 - DNA, 25 bp, Homo sapien
tctggaggtgcaagtctatctgtga

SEQ ID NO: 139422 - DNA, 25 bp, Homo sapien
gtcctgggtcacctctacaagcccc

SEQ ID NO: 139423 - DNA, 25 bp, Homo sapien
gactggcctgctgggtgccgttgac

SEQ ID NO: 139424 - DNA, 25 bp, Homo sapien
tcagagcggtcactccaggaggttc

SEQ ID NO: 139425 - DNA, 25 bp, Homo sapien
gctgttttgcgtgggtagcatcaga

SEQ ID NO: 139426 - DNA, 25 bp, Homo sapien
tctcacacatgtgtctggcaactcc

SEQ ID NO: 139427 - DNA, 25 bp, Homo sapien
cctcccatatgaatattggacagtg

SEQ ID NO: 139428 - DNA, 25 bp, Homo sapien
attggacagtgtagggctcagtagt

SEQ ID NO: 139429 - DNA, 25 bp, Homo sapien
acggcaaaaggagcccttcttctca

SEQ ID NO: 139430 - DNA, 25 bp, Homo sapien
tgcccagaaattggggccaccatca

SEQ ID NO: 139431 - DNA, 25 bp, Homo sapien
aagtaatctatcctcacggtcccca

SEQ ID NO: 139432 - DNA, 25 bp, Homo sapien
tccctgaagtaatctatcctcacgg

SEQ ID NO: 139433 - DNA, 25 bp, Homo sapien
ggtgttccctgaagtaatctatcct

SEQ ID NO: 139434 - DNA, 25 bp, Homo sapien
cagcaaggaaatgtagagctgagca

SEQ ID NO: 139435 - DNA, 25 bp, Homo sapien
cgtgcagcaaggaaatgtagagctg

SEQ ID NO: 139436 - DNA, 25 bp, Homo sapien
ggaaatgtagagctgagcagggtct

SEQ ID NO: 139437 - DNA, 25 bp, Homo sapien
acctctgagggcaccggggcctcgt

SEQ ID NO: 139438 - DNA, 25 bp, Homo sapien
aggaagtccttgacctcaggaaact

SEQ ID NO: 139439 - DNA, 25 bp, Homo sapien
ttggcagggaaaaggaagtccttga

SEQ ID NO: 139440 - DNA, 25 bp, Homo sapien
tggacaccattttggcagggaaaag

SEQ ID NO: 139441 - DNA, 25 bp, Homo sapien
tcaaagttctggacaccattttggc

SEQ ID NO: 139442 - DNA, 25 bp, Homo sapien
ggcgcgacctcagagaggcttggca

SEQ ID NO: 139443 - DNA, 25 bp, Homo sapien
tggcgcgacctcagagaggcttggc

SEQ ID NO: 139444 - DNA, 25 bp, Homo sapien
gtggcgcgacctcagagaggcttgg

SEQ ID NO: 139445 - DNA, 25 bp, Homo sapien
gcgcgacctcagagaggcttggcag

SEQ ID NO: 139446 - DNA, 25 bp, Homo sapien
ccaattagtctgtttatttgtccac

SEQ ID NO: 139447 - DNA, 25 bp, Homo sapien
catggcattaatggcttcttagcac

SEQ ID NO: 139448 - DNA, 25 bp, Homo sapien
cttgtgttagacaaggatgggcaag

SEQ ID NO: 139449 - DNA, 25 bp, Homo sapien
agtctgtttatttgtccacatggca

SEQ ID NO: 139450 - DNA, 25 bp, Homo sapien
cccaaatcactggatcacctctggc

SEQ ID NO: 139451 - DNA, 25 bp, Homo sapien
aggacagatgggaactcctttcctt

SEQ ID NO: 139452 - DNA, 25 bp, Homo sapien
gacagatgggaactcctttccttct

SEQ ID NO: 139453 - DNA, 25 bp, Homo sapien
ccttctttgtgtcttcgtagaaggt

SEQ ID NO: 139454 - DNA, 25 bp, Homo sapien
cttcgtagaaggtgctgaataattt

SEQ ID NO: 139455 - DNA, 25 bp, Homo sapien
agttcttaaaggatccaccttgcca

SEQ ID NO: 139456 - DNA, 25 bp, Homo sapien
taaaggatccaccttgccatcagtt

SEQ ID NO: 139457 - DNA, 25 bp, Homo sapien
agtttcgatcgaattctgatcatcc

SEQ ID NO: 139458 - DNA, 25 bp, Homo sapien
gagaagaggagtccaccagcgcccc

SEQ ID NO: 139459 - DNA, 25 bp, Homo sapien
tagtcagtggtcgaagccccttggg

SEQ ID NO: 139460 - DNA, 25 bp, Homo sapien
gacgcccatccaagcagcctttgaa

SEQ ID NO: 139461 - DNA, 25 bp, Homo sapien
gagggaacagacgcccatccaagca

SEQ ID NO: 139462 - DNA, 25 bp, Homo sapien
gcagtagtcagtggtcgaagcccct

SEQ ID NO: 139463 - DNA, 25 bp, Homo sapien
aagagctgctccaggcagggacctc

SEQ ID NO: 139464 - DNA, 25 bp, Homo sapien
gagctgctccaggcagggacctcat

SEQ ID NO: 139465 - DNA, 25 bp, Homo sapien
caggcctgggcaagagctgctccag

SEQ ID NO: 139466 - DNA, 25 bp, Homo sapien
gcaagagctgctccaggcagggacc

SEQ ID NO: 139467 - DNA, 25 bp, Homo sapien
caccagtggagtccccaggaaagac

SEQ ID NO: 139468 - DNA, 25 bp, Homo sapien
ttcccaaccaccagtggagtcccca

SEQ ID NO: 139469 - DNA, 25 bp, Homo sapien
ccaaccaccagtggagtccccagga

SEQ ID NO: 139470 - DNA, 25 bp, Homo sapien
accaccagtggagtccccaggaaag

SEQ ID NO: 139471 - DNA, 25 bp, Homo sapien
tttcccatagaccagaagctgggag

SEQ ID NO: 139472 - DNA, 25 bp, Homo sapien
gcaaacatgggtggcgagtccagac

SEQ ID NO: 139473 - DNA, 25 bp, Homo sapien
gaagaaggccttgcaagcctcgcag

SEQ ID NO: 139474 - DNA, 25 bp, Homo sapien
gatggccgagtcctccatgatgccg

SEQ ID NO: 139475 - DNA, 25 bp, Homo sapien
gcatgtactcgcacttgatggccga

SEQ ID NO: 139476 - DNA, 25 bp, Homo sapien
aagcacccagggtttggcattcctg

SEQ ID NO: 139477 - DNA, 25 bp, Homo sapien
tgagaagcacccagggtttggcatt

SEQ ID NO: 139478 - DNA, 25 bp, Homo sapien
cttttggttttctggggctgtgcat

SEQ ID NO: 139479 - DNA, 25 bp, Homo sapien
cagtgagaagcacccagggtttggc

SEQ ID NO: 139480 - DNA, 25 bp, Homo sapien
gccactggcttccactatcacgaaa

SEQ ID NO: 139481 - DNA, 25 bp, Homo sapien
ctggcttccactatcacgaaattgg

SEQ ID NO: 139482 - DNA, 25 bp, Homo sapien
ggcttccactatcacgaaattggca

SEQ ID NO: 139483 - DNA, 25 bp, Homo sapien
ccactatcacgaaattggcaatgat

SEQ ID NO: 139484 - DNA, 25 bp, Homo sapien
tggagacagggaccatccctttcat

SEQ ID NO: 139485 - DNA, 25 bp, Homo sapien
ctggagacagggaccatccctttca

SEQ ID NO: 139486 - DNA, 25 bp, Homo sapien
ctctggagacagggaccatcccttt

SEQ ID NO: 139487 - DNA, 25 bp, Homo sapien
tctggagacagggaccatccctttc

SEQ ID NO: 139488 - DNA, 25 bp, Homo sapien
tgaggcatttcatgaagcggcaggc

SEQ ID NO: 139489 - DNA, 25 bp, Homo sapien
gcctccgtttggtgatctcgcactc

SEQ ID NO: 139490 - DNA, 25 bp, Homo sapien
caggacttgcgcctccgtttggtga

SEQ ID NO: 139491 - DNA, 25 bp, Homo sapien
tggccgggcagctgtactcaatgtt

SEQ ID NO: 139492 - DNA, 25 bp, Homo sapien
taacatgtccagaagattagccttt

SEQ ID NO: 139493 - DNA, 25 bp, Homo sapien
ggatcaccaccagactttacactgc

SEQ ID NO: 139494 - DNA, 25 bp, Homo sapien
tctgtttggaccagcactcgggagc

SEQ ID NO: 139495 - DNA, 25 bp, Homo sapien
gtacactcagcacacctctgtttgg

SEQ ID NO: 139496 - DNA, 25 bp, Homo sapien
ctatagcacatgatggtccaagttg

SEQ ID NO: 139497 - DNA, 25 bp, Homo sapien
tattgacaaagcgtcttaggtctgg

SEQ ID NO: 139498 - DNA, 25 bp, Homo sapien
gcgtcttaggtctgggcccttatct

SEQ ID NO: 139499 - DNA, 25 bp, Homo sapien
agttgtattgacaaagcgtcttagg

SEQ ID NO: 139500 - DNA, 25 bp, Homo sapien
tatggatacaggtgctgggctgagc

SEQ ID NO: 139501 - DNA, 25 bp, Homo sapien
gctgagctgaggtgaagtgggggac

SEQ ID NO: 139502 - DNA, 25 bp, Homo sapien
ttatggatacaggtgctgggctgag

SEQ ID NO: 139503 - DNA, 25 bp, Homo sapien
tgggctgagctgaggtgaagtgggg

SEQ ID NO: 139504 - DNA, 25 bp, Homo sapien
aaaacaatgcttccttggaccaggg

SEQ ID NO: 139505 - DNA, 25 bp, Homo sapien
gagtcaaggatgacctccaggtttc

SEQ ID NO: 139506 - DNA, 25 bp, Homo sapien
gccactgagtgatgtaaagcaaaat

SEQ ID NO: 139507 - DNA, 25 bp, Homo sapien
cattttggacattgacctgggagga

SEQ ID NO: 139508 - DNA, 25 bp, Homo sapien
gagagaaacacatccccacagttgt

SEQ ID NO: 139509 - DNA, 25 bp, Homo sapien
tattgaaacgtaacagagtgcttgg

SEQ ID NO: 139510 - DNA, 25 bp, Homo sapien
tgtccaacttgagaacagaggttcc

SEQ ID NO: 139511 - DNA, 25 bp, Homo sapien
aacactgggactctctggaatatgc

SEQ ID NO: 139512 - DNA, 25 bp, Homo sapien
gcacatgccatgacacccagataat

SEQ ID NO: 139513 - DNA, 25 bp, Homo sapien
tctcactctataggccaggctggct

SEQ ID NO: 139514 - DNA, 25 bp, Homo sapien
ggctggctctctgcatccttgacct

SEQ ID NO: 139515 - DNA, 25 bp, Homo sapien
tcccagcctcaagagatctttccac

SEQ ID NO: 139516 - DNA, 25 bp, Homo sapien
tcatccccatgccaggctgggggct

SEQ ID NO: 139517 - DNA, 25 bp, Homo sapien
atccccatgccaggctgggggcttc

SEQ ID NO: 139518 - DNA, 25 bp, Homo sapien
tcctcatccccatgccaggctgggg

SEQ ID NO: 139519 - DNA, 25 bp, Homo sapien
cctcctcatccccatgccaggctgg

SEQ ID NO: 139520 - DNA, 25 bp, Homo sapien
tccacgcactcgatcaaggcgcaca

SEQ ID NO: 139521 - DNA, 25 bp, Homo sapien
ctttttagcaggtggagaaatttgt

SEQ ID NO: 139522 - DNA, 25 bp, Homo sapien
ctgagtccagccgtcgcttgtattt

SEQ ID NO: 139523 - DNA, 25 bp, Homo sapien
ttgtatttctgacggcctccacgca

SEQ ID NO: 139524 - DNA, 25 bp, Homo sapien
ctgcaacaaccaaagagggaaaggt

SEQ ID NO: 139525 - DNA, 25 bp, Homo sapien
tgcaacaaccaaagagggaaaggta

SEQ ID NO: 139526 - DNA, 25 bp, Homo sapien
gcatagagcttgtccggctcagcca

SEQ ID NO: 139527 - DNA, 25 bp, Homo sapien
agctctcggtctgccaggtcacaga

SEQ ID NO: 139528 - DNA, 25 bp, Homo sapien
caccagtaggtatgagacaatcttg

SEQ ID NO: 139529 - DNA, 25 bp, Homo sapien
tgggatgtgcttggcccagccaatg

SEQ ID NO: 139530 - DNA, 25 bp, Homo sapien
gattgtagatccaaacatggccccg

SEQ ID NO: 139531 - DNA, 25 bp, Homo sapien
tggccccgcctcgaatgataactaa

SEQ ID NO: 139532 - DNA, 25 bp, Homo sapien
ccaatgctacaaggagagaagagga

SEQ ID NO: 139533 - DNA, 25 bp, Homo sapien
ccattgggtaggctgcggagatacc

SEQ ID NO: 139534 - DNA, 25 bp, Homo sapien
gatgtagtcctcagcgtacaccagc

SEQ ID NO: 139535 - DNA, 25 bp, Homo sapien
gggccttgagcgtcacaaactcctc

SEQ ID NO: 139536 - DNA, 25 bp, Homo sapien
acaccagcttgtcgtcatagggcag

SEQ ID NO: 139537 - DNA, 25 bp, Homo sapien
ccttgagcttcttgtacctgcgtac

SEQ ID NO: 139538 - DNA, 25 bp, Homo sapien
acgagcattagcaggcttggccagg

SEQ ID NO: 139539 - DNA, 25 bp, Homo sapien
tgcaggcacaaggacgagcattagc

SEQ ID NO: 139540 - DNA, 25 bp, Homo sapien
ggcacaaggacgagcattagcaggc

SEQ ID NO: 139541 - DNA, 25 bp, Homo sapien
aaggacgagcattagcaggcttggc

SEQ ID NO: 139542 - DNA, 25 bp, Homo sapien
ctctagatcctcgatgtacatggaa

SEQ ID NO: 139543 - DNA, 25 bp, Homo sapien
gacgctatagaagtgctgcacggcc

SEQ ID NO: 139544 - DNA, 25 bp, Homo sapien
ggctcagctcgtagtcctgcagtgc

SEQ ID NO: 139545 - DNA, 25 bp, Homo sapien
cagcttctggacagcctctagatcc

SEQ ID NO: 139546 - DNA, 25 bp, Homo sapien
aagccagttacagtcgagccccaca

SEQ ID NO: 139547 - DNA, 25 bp, Homo sapien
aaaagccagttacagtcgagcccca

SEQ ID NO: 139548 - DNA, 25 bp, Homo sapien
cagagccatgatacaggggttgaag

SEQ ID NO: 139549 - DNA, 25 bp, Homo sapien
agaaaaagccagttacagtcgagcc

SEQ ID NO: 139550 - DNA, 25 bp, Homo sapien
aacctccaggtggtatccagcctga

SEQ ID NO: 139551 - DNA, 25 bp, Homo sapien
ggaaaacctccaggtggtatccagc

SEQ ID NO: 139552 - DNA, 25 bp, Homo sapien
tccagtggcctccactcctgaaggg

SEQ ID NO: 139553 - DNA, 25 bp, Homo sapien
cactcctgaagggagtcagccctgg

SEQ ID NO: 139554 - DNA, 25 bp, Homo sapien
gaggatggtgtggtccccgctcttc

SEQ ID NO: 139555 - DNA, 25 bp, Homo sapien
cttggcaaagatgagtctgggcctc

SEQ ID NO: 139556 - DNA, 25 bp, Homo sapien
tgcctacttatctcagctgctcggc

SEQ ID NO: 139557 - DNA, 25 bp, Homo sapien
ttctctgtgccagcgcgttcctgtc

SEQ ID NO: 139558 - DNA, 25 bp, Homo sapien
tgtggcactggtacactagccctgt

SEQ ID NO: 139559 - DNA, 25 bp, Homo sapien
agtgtggtaggagggcacccctcct

SEQ ID NO: 139560 - DNA, 25 bp, Homo sapien
acctctggtagcccaagtgtggtag

SEQ ID NO: 139561 - DNA, 25 bp, Homo sapien
gtcctgccagagagctggcgtgctc

SEQ ID NO: 139562 - DNA, 25 bp, Homo sapien
tgaaaactttcacggccatccacag

SEQ ID NO: 139563 - DNA, 25 bp, Homo sapien
tcctgggataaagaaacgtcctgga

SEQ ID NO: 139564 - DNA, 25 bp, Homo sapien
ggctgccccttgagttagtgaaaac

SEQ ID NO: 139565 - DNA, 25 bp, Homo sapien
acagaaatagagtgacccactgtcc

SEQ ID NO: 139566 - DNA, 25 bp, Homo sapien
tcctagtgctgggtgagatctgcct

SEQ ID NO: 139567 - DNA, 25 bp, Homo sapien
ttccatcatggcttgacattctttc

SEQ ID NO: 139568 - DNA, 25 bp, Homo sapien
cttgtgaaggcagctgattggaagg

SEQ ID NO: 139569 - DNA, 25 bp, Homo sapien
tccccggggagttgctctgatccct

SEQ ID NO: 139570 - DNA, 25 bp, Homo sapien
tgtgggacaccatcagagagctgct

SEQ ID NO: 139571 - DNA, 25 bp, Homo sapien
gcagcatcctgggtaacggctccag

SEQ ID NO: 139572 - DNA, 25 bp, Homo sapien
ggctccagtgcctactcatcaagtg

SEQ ID NO: 139573 - DNA, 25 bp, Homo sapien
ccccaaggtctctactgtgaaggtt

SEQ ID NO: 139574 - DNA, 25 bp, Homo sapien
taaacttgagatctgttccactggg

SEQ ID NO: 139575 - DNA, 25 bp, Homo sapien
gattccagctaagaagttggcccct

SEQ ID NO: 139576 - DNA, 25 bp, Homo sapien
tgaggtcactcgcagcaacactaga

SEQ ID NO: 139577 - DNA, 25 bp, Homo sapien
tacatggtgagccagagatgctttc

SEQ ID NO: 139578 - DNA, 25 bp, Homo sapien
tcttgagagcctcttacttggttct

SEQ ID NO: 139579 - DNA, 25 bp, Homo sapien
cccccaccgacacaggtgggtgcag

SEQ ID NO: 139580 - DNA, 25 bp, Homo sapien
tggcctcccgactctgctggagtct

SEQ ID NO: 139581 - DNA, 25 bp, Homo sapien
agagcctcttacttggttcttaaag

SEQ ID NO: 139582 - DNA, 25 bp, Homo sapien
ttctgggagaacatatacagaggca

SEQ ID NO: 139583 - DNA, 25 bp, Homo sapien
gatggaagcatcctagggcatttga

SEQ ID NO: 139584 - DNA, 25 bp, Homo sapien
tagattccagatacatgggaccagg

SEQ ID NO: 139585 - DNA, 25 bp, Homo sapien
tctttggtgctgttccgtgagcatg

SEQ ID NO: 139586 - DNA, 25 bp, Homo sapien
gcgtgttattaacacagcagccaaa

SEQ ID NO: 139587 - DNA, 25 bp, Homo sapien
caccagtggtcttctagctgttctt

SEQ ID NO: 139588 - DNA, 25 bp, Homo sapien
cctgtcctcttggagcgtgttatta

SEQ ID NO: 139589 - DNA, 25 bp, Homo sapien
agcccccagtgcgtcttaacacctg

SEQ ID NO: 139590 - DNA, 25 bp, Homo sapien
tagcacactgaagacgtccccacag

SEQ ID NO: 139591 - DNA, 25 bp, Homo sapien
ctccatgccgatgcttagcacactg

SEQ ID NO: 139592 - DNA, 25 bp, Homo sapien
ttagcacactgaagacgtccccaca

SEQ ID NO: 139593 - DNA, 25 bp, Homo sapien
catgccgatgcttagcacactgaag

SEQ ID NO: 139594 - DNA, 25 bp, Homo sapien
tgttgagagcaatcaccatcaccgt

SEQ ID NO: 139595 - DNA, 25 bp, Homo sapien
ccttgaccgtcgaggagaagtagac

SEQ ID NO: 139596 - DNA, 25 bp, Homo sapien
catcaccgtgatcaacaaacatacc

SEQ ID NO: 139597 - DNA, 25 bp, Homo sapien
tcttcttggcaggtcttgaggaacc

SEQ ID NO: 139598 - DNA, 25 bp, Homo sapien
ggacaaacagcgttggatcacgggc

SEQ ID NO: 139599 - DNA, 25 bp, Homo sapien
gatcacgggcagttacggaggttat

SEQ ID NO: 139600 - DNA, 25 bp, Homo sapien
tactgacttgttaaatactgttgga

SEQ ID NO: 139601 - DNA, 25 bp, Homo sapien
tgtgaactgcggacctatctgcctg

SEQ ID NO: 139602 - DNA, 25 bp, Homo sapien
tgcaagttttagaagtcccaaataa

SEQ ID NO: 139603 - DNA, 25 bp, Homo sapien
ggccttgcaagttttagaagtccca

SEQ ID NO: 139604 - DNA, 25 bp, Homo sapien
cttgcaagttttagaagtcccaaat

SEQ ID NO: 139605 - DNA, 25 bp, Homo sapien
tggtaaaggccttgcaagttttaga

SEQ ID NO: 139606 - DNA, 25 bp, Homo sapien
gcggaaacccgatcacatcgtcggt

SEQ ID NO: 139607 - DNA, 25 bp, Homo sapien
tcacatcgtcggtctccatgaaggt

SEQ ID NO: 139608 - DNA, 25 bp, Homo sapien
tgggcgaggtgagatcagcagaagc

SEQ ID NO: 139609 - DNA, 25 bp, Homo sapien
aggtgagatcagcagaagcggaaac

SEQ ID NO: 139610 - DNA, 25 bp, Homo sapien
aaagcgacggcaaacagggagatgg

SEQ ID NO: 139611 - DNA, 25 bp, Homo sapien
gacccaaagtgcattttcagccctt

SEQ ID NO: 139612 - DNA, 25 bp, Homo sapien
taatggtcagtctcatagcccacca

SEQ ID NO: 139613 - DNA, 25 bp, Homo sapien
ttgaaaaagactgccctacagcacg

SEQ ID NO: 139614 - DNA, 25 bp, Homo sapien
acacagtgactaggacccaccttca

SEQ ID NO: 139615 - DNA, 25 bp, Homo sapien
acttgacaagctaagtagcggatgg

SEQ ID NO: 139616 - DNA, 25 bp, Homo sapien
cagttctgttgagatgggacgcaca

SEQ ID NO: 139617 - DNA, 25 bp, Homo sapien
gacgcacaggtgtggcttgtttcct

SEQ ID NO: 139618 - DNA, 25 bp, Homo sapien
tcagagaaggtcaaaacttgacaag

SEQ ID NO: 139619 - DNA, 25 bp, Homo sapien
ccctctcatcggggcttgccagcat

SEQ ID NO: 139620 - DNA, 25 bp, Homo sapien
aatttccctctcatcggggcttgcc

SEQ ID NO: 139621 - DNA, 25 bp, Homo sapien
ttgaatttccctctcatcggggctt

SEQ ID NO: 139622 - DNA, 25 bp, Homo sapien
tccctctcatcggggcttgccagca

SEQ ID NO: 139623 - DNA, 25 bp, Homo sapien
gcgaaacgatgccaaacacataggc

SEQ ID NO: 139624 - DNA, 25 bp, Homo sapien
gatctggatgtgagcgaaacgatgc

SEQ ID NO: 139625 - DNA, 25 bp, Homo sapien
ccagggccagaagagccgggatctg

SEQ ID NO: 139626 - DNA, 25 bp, Homo sapien
cacataggcataggcttgagcccca

SEQ ID NO: 139627 - DNA, 25 bp, Homo sapien
ggcaatgaagttccccattgttgct

SEQ ID NO: 139628 - DNA, 25 bp, Homo sapien
aggcaatgaagttccccattgttgc

SEQ ID NO: 139629 - DNA, 25 bp, Homo sapien
caatgaagttccccattgttgctgg

SEQ ID NO: 139630 - DNA, 25 bp, Homo sapien
aatgaagttccccattgttgctggc

SEQ ID NO: 139631 - DNA, 25 bp, Homo sapien
gtgtgatgataatgtcagcctctag

SEQ ID NO: 139632 - DNA, 25 bp, Homo sapien
ggtgtgatgataatgtcagcctcta

SEQ ID NO: 139633 - DNA, 25 bp, Homo sapien
atggggtgtgatgataatgtcagcc

SEQ ID NO: 139634 - DNA, 25 bp, Homo sapien
ggggtgtgatgataatgtcagcctc

SEQ ID NO: 139635 - DNA, 25 bp, Homo sapien
tttggaacctgggtgtgctcattgg

SEQ ID NO: 139636 - DNA, 25 bp, Homo sapien
tgtcctctgtactgatggtgtaagg

SEQ ID NO: 139637 - DNA, 25 bp, Homo sapien
ggctactcgctgaaactgtctccat

SEQ ID NO: 139638 - DNA, 25 bp, Homo sapien
tagtctgcactagaagcacggcctc

SEQ ID NO: 139639 - DNA, 25 bp, Homo sapien
tatctgaggcctgcacaaagctatt

SEQ ID NO: 139640 - DNA, 25 bp, Homo sapien
taaaagccgaaggtaggctacatcc

SEQ ID NO: 139641 - DNA, 25 bp, Homo sapien
agctaaaatctctccctgacacggg

SEQ ID NO: 139642 - DNA, 25 bp, Homo sapien
gcaaagctggctgcgaacattaaaa

SEQ ID NO: 139643 - DNA, 25 bp, Homo sapien
caaagagaatgacaacatccctcgg

SEQ ID NO: 139644 - DNA, 25 bp, Homo sapien
gaatgacaacatccctcggtcccat

SEQ ID NO: 139645 - DNA, 25 bp, Homo sapien
aagagaatgacaacatccctcggtc

SEQ ID NO: 139646 - DNA, 25 bp, Homo sapien
gagaatgacaacatccctcggtccc

SEQ ID NO: 139647 - DNA, 25 bp, Homo sapien
cagaaggctggtaattaagtgtcgc

SEQ ID NO: 139648 - DNA, 25 bp, Homo sapien
gcagcacgggtagctctgcttggct

SEQ ID NO: 139649 - DNA, 25 bp, Homo sapien
acaaggagacattggccacacggac

SEQ ID NO: 139650 - DNA, 25 bp, Homo sapien
tctgtcctcgggcagactcagagga

SEQ ID NO: 139651 - DNA, 25 bp, Homo sapien
gtgcccacgccagggagcactgaag

SEQ ID NO: 139652 - DNA, 25 bp, Homo sapien
cgtggtgaaggattgttgagtggcc

SEQ ID NO: 139653 - DNA, 25 bp, Homo sapien
gattgttgagtggcctggacgctcc

SEQ ID NO: 139654 - DNA, 25 bp, Homo sapien
cactgaaggacgtaattggcgtggt

SEQ ID NO: 139655 - DNA, 25 bp, Homo sapien
actaacaggcctacgtccccaactg

SEQ ID NO: 139656 - DNA, 25 bp, Homo sapien
tgtcactaacaggcctacgtcccca

SEQ ID NO: 139657 - DNA, 25 bp, Homo sapien
taacaggcctacgtccccaactgcc

SEQ ID NO: 139658 - DNA, 25 bp, Homo sapien
tcactaacaggcctacgtccccaac

SEQ ID NO: 139659 - DNA, 25 bp, Homo sapien
tatcgccatcctcaacaacataggg

SEQ ID NO: 139660 - DNA, 25 bp, Homo sapien
aaatgaaccgggagtatcgccatcc

SEQ ID NO: 139661 - DNA, 25 bp, Homo sapien
aacatagggattttgttggcaaaga

SEQ ID NO: 139662 - DNA, 25 bp, Homo sapien
tgccgcaactgcaaagaaggctagg

SEQ ID NO: 139663 - DNA, 25 bp, Homo sapien
cacgatgtggttagcgcctcaggct

SEQ ID NO: 139664 - DNA, 25 bp, Homo sapien
ggctttttgacagccccacgatgtg

SEQ ID NO: 139665 - DNA, 25 bp, Homo sapien
tctctcaggcaaaacactcgtggag

SEQ ID NO: 139666 - DNA, 25 bp, Homo sapien
ctaccattcttagtgcatgtgtctg

SEQ ID NO: 139667 - DNA, 25 bp, Homo sapien
tgactggactcacagacaacctggt

SEQ ID NO: 139668 - DNA, 25 bp, Homo sapien
taggaggtgactcggtgcctttcac

SEQ ID NO: 139669 - DNA, 25 bp, Homo sapien
gacctaggaggtgactcggtgcctt

SEQ ID NO: 139670 - DNA, 25 bp, Homo sapien
gaggacaataagacaatcactggct

SEQ ID NO: 139671 - DNA, 25 bp, Homo sapien
ggagcattttgccaccttcagaagc

SEQ ID NO: 139672 - DNA, 25 bp, Homo sapien
tcccaagggtcatgagacattctgc

SEQ ID NO: 139673 - DNA, 25 bp, Homo sapien
tcatcccgacccaaaagtggccatt

SEQ ID NO: 139674 - DNA, 25 bp, Homo sapien
caagccttgcaggtgggtgatacca

SEQ ID NO: 139675 - DNA, 25 bp, Homo sapien
cctcactctgagcttcaccagcatg

SEQ ID NO: 139676 - DNA, 25 bp, Homo sapien
actctgagcttcaccagcatggcat

SEQ ID NO: 139677 - DNA, 25 bp, Homo sapien
cactctgagcttcaccagcatggca

SEQ ID NO: 139678 - DNA, 25 bp, Homo sapien
tctgagcttcaccagcatggcatac

SEQ ID NO: 139679 - DNA, 25 bp, Homo sapien
gaatcccaggtcatattgtaatccc

SEQ ID NO: 139680 - DNA, 25 bp, Homo sapien
tctgtttcccttctcatatgacatg

SEQ ID NO: 139681 - DNA, 25 bp, Homo sapien
attcccttcgtgctattctccttgg

SEQ ID NO: 139682 - DNA, 25 bp, Homo sapien
taaaaatgtatagcacagccaggtg

SEQ ID NO: 139683 - DNA, 25 bp, Homo sapien
gcacgtttgctttgagagtcccggg

SEQ ID NO: 139684 - DNA, 25 bp, Homo sapien
tgtcccctgtatttccgtatttctg

SEQ ID NO: 139685 - DNA, 25 bp, Homo sapien
tatttccgtatttctgatgctgcct

SEQ ID NO: 139686 - DNA, 25 bp, Homo sapien
cagggagcattcagggctgacatct

SEQ ID NO: 139687 - DNA, 25 bp, Homo sapien
tgccactaacgggaaatagacgaat

SEQ ID NO: 139688 - DNA, 25 bp, Homo sapien
ttcagttgccactaacgggaaatag

SEQ ID NO: 139689 - DNA, 25 bp, Homo sapien
aaatagacgaatgggagggcatggg

SEQ ID NO: 139690 - DNA, 25 bp, Homo sapien
cactaacgggaaatagacgaatggg

SEQ ID NO: 139691 - DNA, 25 bp, Homo sapien
actcctttggtgaccagtgggtcac

SEQ ID NO: 139692 - DNA, 25 bp, Homo sapien
cctctcttgaaagactcctttggtg

SEQ ID NO: 139693 - DNA, 25 bp, Homo sapien
caggaatcacctccctcaagaccca

SEQ ID NO: 139694 - DNA, 25 bp, Homo sapien
gcaggaatcacctccctcaagaccc

SEQ ID NO: 139695 - DNA, 25 bp, Homo sapien
tgtgaagatggctgcttctgatttc

SEQ ID NO: 139696 - DNA, 25 bp, Homo sapien
taccaatgtgaagatggctgcttct

SEQ ID NO: 139697 - DNA, 25 bp, Homo sapien
catttaccaatgtgaagatggctgc

SEQ ID NO: 139698 - DNA, 25 bp, Homo sapien
tgcttctgatttctcggggacaggg

SEQ ID NO: 139699 - DNA, 25 bp, Homo sapien
gccttctgaacaccatctaagagta

SEQ ID NO: 139700 - DNA, 25 bp, Homo sapien
gcaaatttcacttgaggttgtttac

SEQ ID NO: 139701 - DNA, 25 bp, Homo sapien
ttatgggccttctgaacaccatcta

SEQ ID NO: 139702 - DNA, 25 bp, Homo sapien
actgggatctgattgttggcagaga

SEQ ID NO: 139703 - DNA, 25 bp, Homo sapien
tgctcaggaatgacggtctgcagcc

SEQ ID NO: 139704 - DNA, 25 bp, Homo sapien
ctctctgttccctttgaggtgcaat

SEQ ID NO: 139705 - DNA, 25 bp, Homo sapien
tgacggtctgcagccctgtgtctga

SEQ ID NO: 139706 - DNA, 25 bp, Homo sapien
gcaatgccaagggttgctgctcagg

SEQ ID NO: 139707 - DNA, 25 bp, Homo sapien
gtgctggcctcacttttccacagtg

SEQ ID NO: 139708 - DNA, 25 bp, Homo sapien
cttgtgctggcctcacttttccaca

SEQ ID NO: 139709 - DNA, 25 bp, Homo sapien
tgtgctggcctcacttttccacagt

SEQ ID NO: 139710 - DNA, 25 bp, Homo sapien
gctggcctcacttttccacagtgtg

SEQ ID NO: 139711 - DNA, 25 bp, Homo sapien
ctgtgtaagagaatacagcagcctg

SEQ ID NO: 139712 - DNA, 25 bp, Homo sapien
gtgtaagagaatacagcagcctgac

SEQ ID NO: 139713 - DNA, 25 bp, Homo sapien
ctgacctgtcttccgcccgaagaga

SEQ ID NO: 139714 - DNA, 25 bp, Homo sapien
gtcttccgcccgaagagaccatgga

SEQ ID NO: 139715 - DNA, 25 bp, Homo sapien
tactcaatagtagcttttttgagat

SEQ ID NO: 139716 - DNA, 25 bp, Homo sapien
tcttcttcttaatgccggcaaagat

SEQ ID NO: 139717 - DNA, 25 bp, Homo sapien
ccatcagggtatcctctccccacgt

SEQ ID NO: 139718 - DNA, 25 bp, Homo sapien
ctgtcttcttcttaatgccggcaaa

SEQ ID NO: 139719 - DNA, 25 bp, Homo sapien
ctgttcctcatttcctccccgctct

SEQ ID NO: 139720 - DNA, 25 bp, Homo sapien
tcatttcctccccgctctctctttt

SEQ ID NO: 139721 - DNA, 25 bp, Homo sapien
tcctcatttcctccccgctctctct

SEQ ID NO: 139722 - DNA, 25 bp, Homo sapien
tccccgctctctctttttccctgtg

SEQ ID NO: 139723 - DNA, 25 bp, Homo sapien
gtacaaactgcaaactaagggatgt

SEQ ID NO: 139724 - DNA, 25 bp, Homo sapien
gaatagagacggtgtatcccaagca

SEQ ID NO: 139725 - DNA, 25 bp, Homo sapien
ttagagcatggagctctggatccag

SEQ ID NO: 139726 - DNA, 25 bp, Homo sapien
ggtcaagaattaagtcaaagctgaa

SEQ ID NO: 139727 - DNA, 25 bp, Homo sapien
gacacaagcaattttcaaccgatga

SEQ ID NO: 139728 - DNA, 25 bp, Homo sapien
aagcttcacccatggacaagacaca

SEQ ID NO: 139729 - DNA, 25 bp, Homo sapien
caaccgatgatcaatgctcttacca

SEQ ID NO: 139730 - DNA, 25 bp, Homo sapien
ctatgagatctcttttgcctccaaa

SEQ ID NO: 139731 - DNA, 25 bp, Homo sapien
atagcatgtcggcagtgttgctggc

SEQ ID NO: 139732 - DNA, 25 bp, Homo sapien
tgttgctggcggtgtacatgtctgc

SEQ ID NO: 139733 - DNA, 25 bp, Homo sapien
tctacaccagggttctgaaactgct

SEQ ID NO: 139734 - DNA, 25 bp, Homo sapien
aactgctgtccatgaatgggcttca

SEQ ID NO: 139735 - DNA, 25 bp, Homo sapien
tcagcaggtaagtaaattccccatt

SEQ ID NO: 139736 - DNA, 25 bp, Homo sapien
cattggtccccttgctgttatcagc

SEQ ID NO: 139737 - DNA, 25 bp, Homo sapien
tttttcttcgcattggtccccttgc

SEQ ID NO: 139738 - DNA, 25 bp, Homo sapien
tgttatcagcaggtaagtaaattcc

SEQ ID NO: 139739 - DNA, 25 bp, Homo sapien
cacaaattacccagtatctgccttt

SEQ ID NO: 139740 - DNA, 25 bp, Homo sapien
ttccttgtgtgcctttgatgtggga

SEQ ID NO: 139741 - DNA, 25 bp, Homo sapien
atcttagaggcacttgtccgggggc

SEQ ID NO: 139742 - DNA, 25 bp, Homo sapien
tcctcacatctggatatggtggtcg

SEQ ID NO: 139743 - DNA, 25 bp, Homo sapien
aaatcttagaggcacttgtccgggg

SEQ ID NO: 139744 - DNA, 25 bp, Homo sapien
catctggatatggtggtcgtagcaa

SEQ ID NO: 139745 - DNA, 25 bp, Homo sapien
tcctaaaacgttcttggtgtccgca

SEQ ID NO: 139746 - DNA, 25 bp, Homo sapien
aaacgttcttggtgtccgcagattc

SEQ ID NO: 139747 - DNA, 25 bp, Homo sapien
cctaaaacgttcttggtgtccgcag

SEQ ID NO: 139748 - DNA, 25 bp, Homo sapien
taaaacgttcttggtgtccgcagat

SEQ ID NO: 139749 - DNA, 25 bp, Homo sapien
gcgttgcacacctcacggtaaaatt

SEQ ID NO: 139750 - DNA, 25 bp, Homo sapien
aaggtctgcgttgcacacctcacgg

SEQ ID NO: 139751 - DNA, 25 bp, Homo sapien
cacacctcacggtaaaattccttag

SEQ ID NO: 139752 - DNA, 25 bp, Homo sapien
agggagaaggtctgcgttgcacacc

SEQ ID NO: 139753 - DNA, 25 bp, Homo sapien
accgggttgtccctaatccagactg

SEQ ID NO: 139754 - DNA, 25 bp, Homo sapien
gccaccgggttgtccctaatccaga

SEQ ID NO: 139755 - DNA, 25 bp, Homo sapien
cgggttgtccctaatccagactggt

SEQ ID NO: 139756 - DNA, 25 bp, Homo sapien
cagccaccgggttgtccctaatcca

SEQ ID NO: 139757 - DNA, 25 bp, Homo sapien
caaaagcgtggctgaagctgatgat

SEQ ID NO: 139758 - DNA, 25 bp, Homo sapien
atggtgtagagaacaaaagcgtggc

SEQ ID NO: 139759 - DNA, 25 bp, Homo sapien
tgccttcattagcacaggatcctga

SEQ ID NO: 139760 - DNA, 25 bp, Homo sapien
tagagaacaaaagcgtggctgaagc

SEQ ID NO: 139761 - DNA, 25 bp, Homo sapien
tgcttttccaatactgaacctttgg

SEQ ID NO: 139762 - DNA, 25 bp, Homo sapien
tttccaatactgaacctttggcctg

SEQ ID NO: 139763 - DNA, 25 bp, Homo sapien
tccaatactgaacctttggcctggt

SEQ ID NO: 139764 - DNA, 25 bp, Homo sapien
tcaatgcttttccaatactgaacct

SEQ ID NO: 139765 - DNA, 25 bp, Homo sapien
gtagattcccatcgcatgcttcaaa

SEQ ID NO: 139766 - DNA, 25 bp, Homo sapien
agctacaggggaggccagctttctg

SEQ ID NO: 139767 - DNA, 25 bp, Homo sapien
ccatattggactttatttggtgctc

SEQ ID NO: 139768 - DNA, 25 bp, Homo sapien
gctccaaagggaggtagaaattgca

SEQ ID NO: 139769 - DNA, 25 bp, Homo sapien
cccagaaccgcctcccctggaggca

SEQ ID NO: 139770 - DNA, 25 bp, Homo sapien
gcctcccctggaggcatctgggaca

SEQ ID NO: 139771 - DNA, 25 bp, Homo sapien
gaaccgcctcccctggaggcatctg

SEQ ID NO: 139772 - DNA, 25 bp, Homo sapien
ccgcctcccctggaggcatctggga

SEQ ID NO: 139773 - DNA, 25 bp, Homo sapien
gagatttaagacacaaaagagctga

SEQ ID NO: 139774 - DNA, 25 bp, Homo sapien
catgtccagcaggttcattttatag

SEQ ID NO: 139775 - DNA, 25 bp, Homo sapien
taagcagttaatacttgcaggcagt

SEQ ID NO: 139776 - DNA, 25 bp, Homo sapien
gggcgcgcagcttgttaactcatgt

SEQ ID NO: 139777 - DNA, 25 bp, Homo sapien
tggctttagcacacttcctgccctg

SEQ ID NO: 139778 - DNA, 25 bp, Homo sapien
tgagcgccagcacattgtcttcact

SEQ ID NO: 139779 - DNA, 25 bp, Homo sapien
tgcctgagcgccagcacattgtctt

SEQ ID NO: 139780 - DNA, 25 bp, Homo sapien
gccagcacattgtcttcactcggca

SEQ ID NO: 139781 - DNA, 25 bp, Homo sapien
ccattgccagcaaccattcccagga

SEQ ID NO: 139782 - DNA, 25 bp, Homo sapien
gccaggtgtcgccttcatctgttct

SEQ ID NO: 139783 - DNA, 25 bp, Homo sapien
tgtcccattgccagcaaccattccc

SEQ ID NO: 139784 - DNA, 25 bp, Homo sapien
ggaagaagccaggtgtcgccttcat

SEQ ID NO: 139785 - DNA, 25 bp, Homo sapien
ggcggtgcctctgtcccaagttacc

SEQ ID NO: 139786 - DNA, 25 bp, Homo sapien
ccaaggacgccggtgggcattcgct

SEQ ID NO: 139787 - DNA, 25 bp, Homo sapien
agggcgccgcgaagccggtgcgaag

SEQ ID NO: 139788 - DNA, 25 bp, Homo sapien
cgcgaagccggtgcgaagctgcgga

SEQ ID NO: 139789 - DNA, 25 bp, Homo sapien
tgccgccgaccacgtcccctgccag

SEQ ID NO: 139790 - DNA, 25 bp, Homo sapien
caggctcgactacggcccgcgccgc

SEQ ID NO: 139791 - DNA, 25 bp, Homo sapien
cagccgatcgctgctcggcgaagct

SEQ ID NO: 139792 - DNA, 25 bp, Homo sapien
caccaggctcgactacggcccgcgc

SEQ ID NO: 139793 - DNA, 25 bp, Homo sapien
accgcaagcccggaggctcgcgcag

SEQ ID NO: 139794 - DNA, 25 bp, Homo sapien
ggagcagcccgccaacgcggagccc

SEQ ID NO: 139795 - DNA, 25 bp, Homo sapien
gcggagcccgccaacgagaagccca

SEQ ID NO: 139796 - DNA, 25 bp, Homo sapien
agtgacgaagccgggcgagcgcgcg

SEQ ID NO: 139797 - DNA, 25 bp, Homo sapien
atgctccgtggctgttcgctcgggc

SEQ ID NO: 139798 - DNA, 25 bp, Homo sapien
ccgcggggtcgctgcctgggactgg

SEQ ID NO: 139799 - DNA, 25 bp, Homo sapien
ctgcaccagccgagccatcgcaggg

SEQ ID NO: 139800 - DNA, 25 bp, Homo sapien
gcagcatgggcggtggcgcggcccg

SEQ ID NO: 139801 - DNA, 25 bp, Homo sapien
agacaagtccgggagccaagactcg

SEQ ID NO: 139802 - DNA, 25 bp, Homo sapien
ggcgatttctccgacgcgacgagac

SEQ ID NO: 139803 - DNA, 25 bp, Homo sapien
gtccccagaaacagcggcggagtcc

SEQ ID NO: 139804 - DNA, 25 bp, Homo sapien
aactccctgcacaaagtgggctttg

SEQ ID NO: 139805 - DNA, 25 bp, Homo sapien
cgcgccccaaggaagaccgaggcga

SEQ ID NO: 139806 - DNA, 25 bp, Homo sapien
gccccaaggaagaccgaggcgactc

SEQ ID NO: 139807 - DNA, 25 bp, Homo sapien
caaggaagaccgaggcgactcccgg

SEQ ID NO: 139808 - DNA, 25 bp, Homo sapien
tgcgcgcgccccaaggaagaccgag

SEQ ID NO: 139809 - DNA, 25 bp, Homo sapien
aaaatcccctacacaactctcgcac

SEQ ID NO: 139810 - DNA, 25 bp, Homo sapien
tctcagtttcggagggaacaaaatc

SEQ ID NO: 139811 - DNA, 25 bp, Homo sapien
ctgggtctcagtttcggagggaaca

SEQ ID NO: 139812 - DNA, 25 bp, Homo sapien
gaaaggacagagtcaaggcacgggt

SEQ ID NO: 139813 - DNA, 25 bp, Homo sapien
tgcgagaacaatgacgggcagcagt

SEQ ID NO: 139814 - DNA, 25 bp, Homo sapien
gcagtgagggctggcagagcggaga

SEQ ID NO: 139815 - DNA, 25 bp, Homo sapien
cagagcggagaaaagtcggagggaa

SEQ ID NO: 139816 - DNA, 25 bp, Homo sapien
aacttggcagccgtcacaaagcacc

SEQ ID NO: 139817 - DNA, 25 bp, Homo sapien
caccggctgcagagataacacatgg

SEQ ID NO: 139818 - DNA, 25 bp, Homo sapien
tggccagagtgcaaggcgcctttaa

SEQ ID NO: 139819 - DNA, 25 bp, Homo sapien
cgcctttaagaaatcagggcgtggc

SEQ ID NO: 139820 - DNA, 25 bp, Homo sapien
aacaactggctcacaagaggcctcc

SEQ ID NO: 139821 - DNA, 25 bp, Homo sapien
cgttggagtggcaccgctgctgcca

SEQ ID NO: 139822 - DNA, 25 bp, Homo sapien
cagcggacgttggagtggcaccgct

SEQ ID NO: 139823 - DNA, 25 bp, Homo sapien
cggacgttggagtggcaccgctgct

SEQ ID NO: 139824 - DNA, 25 bp, Homo sapien
tggccgcagcggacgttggagtggc

SEQ ID NO: 139825 - DNA, 25 bp, Homo sapien
tggccccacggatccgttgcgccac

SEQ ID NO: 139826 - DNA, 25 bp, Homo sapien
caaagaaggggacgcctccgtctcg

SEQ ID NO: 139827 - DNA, 25 bp, Homo sapien
ccttctctccatcggggtggatctt

SEQ ID NO: 139828 - DNA, 25 bp, Homo sapien
cacaggtagcccaccccggttgaca

SEQ ID NO: 139829 - DNA, 25 bp, Homo sapien
tttaaagatcttaccgagccagtgg

SEQ ID NO: 139830 - DNA, 25 bp, Homo sapien
gaggaggagttacagccaacacaga

SEQ ID NO: 139831 - DNA, 25 bp, Homo sapien
tgtacttacgtcacaaggctgttgg

SEQ ID NO: 139832 - DNA, 25 bp, Homo sapien
tgtgagcctccctcctagaatggca

SEQ ID NO: 139833 - DNA, 25 bp, Homo sapien
gcaggcagggctaagcactgggctc

SEQ ID NO: 139834 - DNA, 25 bp, Homo sapien
ctgggctctgaactcagtccaaagg

SEQ ID NO: 139835 - DNA, 25 bp, Homo sapien
cttccttccaacctgggcaggcagg

SEQ ID NO: 139836 - DNA, 25 bp, Homo sapien
cccttccttccaacctgggcaggca

SEQ ID NO: 139837 - DNA, 25 bp, Homo sapien
agatacatcagctagggtcctccga

SEQ ID NO: 139838 - DNA, 25 bp, Homo sapien
cacccgatgggactgctgagagtca

SEQ ID NO: 139839 - DNA, 25 bp, Homo sapien
tgtaaggctccccacatagagaggt

SEQ ID NO: 139840 - DNA, 25 bp, Homo sapien
attatgccagtatgggaccctctcc

SEQ ID NO: 139841 - DNA, 25 bp, Homo sapien
ggcatattcgccatgccttccagag

SEQ ID NO: 139842 - DNA, 25 bp, Homo sapien
gtcagtcagcggtagcaggccagaa

SEQ ID NO: 139843 - DNA, 25 bp, Homo sapien
ccaacttgaactgtcaaggagtcag

SEQ ID NO: 139844 - DNA, 25 bp, Homo sapien
ttccagagcaccaacttgaactgtc

SEQ ID NO: 139845 - DNA, 25 bp, Homo sapien
agctctctgatgtagcgctgcacag

SEQ ID NO: 139846 - DNA, 25 bp, Homo sapien
tgcagctctctgatgtagcgctgca

SEQ ID NO: 139847 - DNA, 25 bp, Homo sapien
tgtagacggctggaacgtaggcaca

SEQ ID NO: 139848 - DNA, 25 bp, Homo sapien
tggaacgtaggcacactcggtatgg

SEQ ID NO: 139849 - DNA, 25 bp, Homo sapien
tggccatgacccttgaccagagagg

SEQ ID NO: 139850 - DNA, 25 bp, Homo sapien
gtggccatgacccttgaccagagag

SEQ ID NO: 139851 - DNA, 25 bp, Homo sapien
catgacccttgaccagagaggatac

SEQ ID NO: 139852 - DNA, 25 bp, Homo sapien
gccatgacccttgaccagagaggat

SEQ ID NO: 139853 - DNA, 25 bp, Homo sapien
gacaaaattcctccgacacccagga

SEQ ID NO: 139854 - DNA, 25 bp, Homo sapien
ccagggagcacagagatgtcacgtg

SEQ ID NO: 139855 - DNA, 25 bp, Homo sapien
gggccctgcactcatcagacaaaat

SEQ ID NO: 139856 - DNA, 25 bp, Homo sapien
atgtcacgtgaatggtggccctggc

SEQ ID NO: 139857 - DNA, 25 bp, Homo sapien
gcaagtcactcaggacccattttcc

SEQ ID NO: 139858 - DNA, 25 bp, Homo sapien
agcaagtcactcaggacccattttc

SEQ ID NO: 139859 - DNA, 25 bp, Homo sapien
cagatctatctagacttggccaccc

SEQ ID NO: 139860 - DNA, 25 bp, Homo sapien
agagcagatctatctagacttggcc

SEQ ID NO: 139861 - DNA, 25 bp, Homo sapien
cctgtcagaggtctgctcttcttaa

SEQ ID NO: 139862 - DNA, 25 bp, Homo sapien
tgtcagaggtctgctcttcttaatt

SEQ ID NO: 139863 - DNA, 25 bp, Homo sapien
gaactgtgtccctgtgtgattgtac

SEQ ID NO: 139864 - DNA, 25 bp, Homo sapien
taatttcaaagaactgtgtccctgt

SEQ ID NO: 139865 - DNA, 25 bp, Homo sapien
ccaggcatttgattggcagggcctc

SEQ ID NO: 139866 - DNA, 25 bp, Homo sapien
ggcttccaggcatttgattggcagg

SEQ ID NO: 139867 - DNA, 25 bp, Homo sapien
ttccaggcatttgattggcagggcc

SEQ ID NO: 139868 - DNA, 25 bp, Homo sapien
agggcctctttggtcatttccttgg

SEQ ID NO: 139869 - DNA, 25 bp, Homo sapien
cctccccttcaggtgaggaaggata

SEQ ID NO: 139870 - DNA, 25 bp, Homo sapien
ccctccccttcaggtgaggaaggat

SEQ ID NO: 139871 - DNA, 25 bp, Homo sapien
ctccccttcaggtgaggaaggatac

SEQ ID NO: 139872 - DNA, 25 bp, Homo sapien
cccaccctcactttcagagcaggaa

SEQ ID NO: 139873 - DNA, 25 bp, Homo sapien
tctcgtccagaaatcaacatgttct

SEQ ID NO: 139874 - DNA, 25 bp, Homo sapien
tcccagactgtctagttcttggaaa

SEQ ID NO: 139875 - DNA, 25 bp, Homo sapien
gatgactgcatatgggagagccctg

SEQ ID NO: 139876 - DNA, 25 bp, Homo sapien
ggtccctgtatccacgtgactcaaa

SEQ ID NO: 139877 - DNA, 25 bp, Homo sapien
ggagaaccagccataaacacttcct

SEQ ID NO: 139878 - DNA, 25 bp, Homo sapien
tggtgactcagctacaggccccact

SEQ ID NO: 139879 - DNA, 25 bp, Homo sapien
cattgaccagttaggatggagaacc

SEQ ID NO: 139880 - DNA, 25 bp, Homo sapien
tgactgagaagaaaaggtagggctc

SEQ ID NO: 139881 - DNA, 25 bp, Homo sapien
gagaagcacggggccagcacaccgg

SEQ ID NO: 139882 - DNA, 25 bp, Homo sapien
cacggggccagcacaccgggaggga

SEQ ID NO: 139883 - DNA, 25 bp, Homo sapien
taaggaaagagccaggagaagcacg

SEQ ID NO: 139884 - DNA, 25 bp, Homo sapien
ctaaggaaagagccaggagaagcac

SEQ ID NO: 139885 - DNA, 25 bp, Homo sapien
tcaccttcttgagcacgtgccagca

SEQ ID NO: 139886 - DNA, 25 bp, Homo sapien
gcgggcggcttgtacatcaggtcct

SEQ ID NO: 139887 - DNA, 25 bp, Homo sapien
cacgatgtggcggaagtagttccct

SEQ ID NO: 139888 - DNA, 25 bp, Homo sapien
tcgaagtccagcacgagctcgctga

SEQ ID NO: 139889 - DNA, 25 bp, Homo sapien
tctttcactgcggctgttcctgcgg

SEQ ID NO: 139890 - DNA, 25 bp, Homo sapien
ctttcactgcggctgttcctgcggt

SEQ ID NO: 139891 - DNA, 25 bp, Homo sapien
ttcactgcggctgttcctgcggtgg

SEQ ID NO: 139892 - DNA, 25 bp, Homo sapien
cgtctttcactgcggctgttcctgc

SEQ ID NO: 139893 - DNA, 25 bp, Homo sapien
tcagacccggatctggtacccgtta

SEQ ID NO: 139894 - DNA, 25 bp, Homo sapien
tacccgttaaggtctggcatggctt

SEQ ID NO: 139895 - DNA, 25 bp, Homo sapien
tgggctcggaagtcttcttgtcacc

SEQ ID NO: 139896 - DNA, 25 bp, Homo sapien
gatctggtacccgttaaggtctggc

SEQ ID NO: 139897 - DNA, 25 bp, Homo sapien
tatctcatgctgacgggcaggctgg

SEQ ID NO: 139898 - DNA, 25 bp, Homo sapien
tctacttcagggattgcaaactggc

SEQ ID NO: 139899 - DNA, 25 bp, Homo sapien
gaaaggacctagtttcagcctggca

SEQ ID NO: 139900 - DNA, 25 bp, Homo sapien
agttaggttaggcatcctcccaggg

SEQ ID NO: 139901 - DNA, 25 bp, Homo sapien
ggctttggggagactttgcaatcac

SEQ ID NO: 139902 - DNA, 25 bp, Homo sapien
tttggggagactttgcaatcacccc

SEQ ID NO: 139903 - DNA, 25 bp, Homo sapien
ggagactttgcaatcacccccccaa

SEQ ID NO: 139904 - DNA, 25 bp, Homo sapien
actttgcaatcacccccccaacctg

SEQ ID NO: 139905 - DNA, 25 bp, Homo sapien
aagggctggaaatcacacgtggtca

SEQ ID NO: 139906 - DNA, 25 bp, Homo sapien
ggtcactcgaccagccagaatgaga

SEQ ID NO: 139907 - DNA, 25 bp, Homo sapien
ccaagatggagcgagacggtcaata

SEQ ID NO: 139908 - DNA, 25 bp, Homo sapien
tactgatggacttgcagctagcacc

SEQ ID NO: 139909 - DNA, 25 bp, Homo sapien
ggtatgactgcttcctgtcactacc

SEQ ID NO: 139910 - DNA, 25 bp, Homo sapien
cttgctggcagacactaagggttac

SEQ ID NO: 139911 - DNA, 25 bp, Homo sapien
cttcatcgtcaggcctctgagaagg

SEQ ID NO: 139912 - DNA, 25 bp, Homo sapien
ccagctcctggtaaatggggcagca

SEQ ID NO: 139913 - DNA, 25 bp, Homo sapien
tctgttaagtttgcacagtacttcc

SEQ ID NO: 139914 - DNA, 25 bp, Homo sapien
cagctagcaaagacagtggcactgt

SEQ ID NO: 139915 - DNA, 25 bp, Homo sapien
ggcagtttaggtggtgttcagattc

SEQ ID NO: 139916 - DNA, 25 bp, Homo sapien
cagtacttccacgtcagctagcaaa

SEQ ID NO: 139917 - DNA, 25 bp, Homo sapien
ggacactgcctaaaagggtctcaag

SEQ ID NO: 139918 - DNA, 25 bp, Homo sapien
taaaatggctaaccacagcagaggg

SEQ ID NO: 139919 - DNA, 25 bp, Homo sapien
gggcagatgcttgatagattatctt

SEQ ID NO: 139920 - DNA, 25 bp, Homo sapien
tgcattcatggttagaagctttcca

SEQ ID NO: 139921 - DNA, 25 bp, Homo sapien
gaatgggctggcatcatctcgggct

SEQ ID NO: 139922 - DNA, 25 bp, Homo sapien
tattataaaccaaagctagcagtgg

SEQ ID NO: 139923 - DNA, 25 bp, Homo sapien
gccttgaatcaatctcctggtggag

SEQ ID NO: 139924 - DNA, 25 bp, Homo sapien
cagtgcaggtcttcatgacgagttc

SEQ ID NO: 139925 - DNA, 25 bp, Homo sapien
agccctgggaagagtaggctttgat

SEQ ID NO: 139926 - DNA, 25 bp, Homo sapien
tctattgctgggagccctgttgaaa

SEQ ID NO: 139927 - DNA, 25 bp, Homo sapien
tgtctgggagaggtagctacttctc

SEQ ID NO: 139928 - DNA, 25 bp, Homo sapien
gaatttgaccccaactctgtctggg

SEQ ID NO: 139929 - DNA, 25 bp, Homo sapien
ctgcttccctaagaagcacacctgt

SEQ ID NO: 139930 - DNA, 25 bp, Homo sapien
ttgagggcagctgccaacttcttgc

SEQ ID NO: 139931 - DNA, 25 bp, Homo sapien
ctaagaagcacacctgtccattcac

SEQ ID NO: 139932 - DNA, 25 bp, Homo sapien
ttccctaagaagcacacctgtccat

SEQ ID NO: 139933 - DNA, 25 bp, Homo sapien
gctgaagaggcttgtcattgtccat

SEQ ID NO: 139934 - DNA, 25 bp, Homo sapien
tatcgctgctctgtcgtactggctc

SEQ ID NO: 139935 - DNA, 25 bp, Homo sapien
cacagtagagcattttatcgctgct

SEQ ID NO: 139936 - DNA, 25 bp, Homo sapien
ctgtttccgaattctcccgggctgg

SEQ ID NO: 139937 - DNA, 25 bp, Homo sapien
cactttttcaacagtcggcggggat

SEQ ID NO: 139938 - DNA, 25 bp, Homo sapien
tggaaaggagtgagatgacagctcc

SEQ ID NO: 139939 - DNA, 25 bp, Homo sapien
ggcaaaatcgagcaggcctttctgc

SEQ ID NO: 139940 - DNA, 25 bp, Homo sapien
caggtgacaagcgtgggaagctgca

SEQ ID NO: 139941 - DNA, 25 bp, Homo sapien
aggaggactccaggcaaaatcgagc

SEQ ID NO: 139942 - DNA, 25 bp, Homo sapien
ttgattccgcttttaacaagacgac

SEQ ID NO: 139943 - DNA, 25 bp, Homo sapien
tttgtgtattgattccgcttttaac

SEQ ID NO: 139944 - DNA, 25 bp, Homo sapien
gtattgattccgcttttaacaagac

SEQ ID NO: 139945 - DNA, 25 bp, Homo sapien
cttgtttgtgtattgattccgcttt

SEQ ID NO: 139946 - DNA, 25 bp, Homo sapien
gatgccccacgtggaaacatttaga

SEQ ID NO: 139947 - DNA, 25 bp, Homo sapien
cccacgtggaaacatttagaagatt

SEQ ID NO: 139948 - DNA, 25 bp, Homo sapien
ctaggactattgcaaagattgcata

SEQ ID NO: 139949 - DNA, 25 bp, Homo sapien
aaagattgcataggatgccccacgt

SEQ ID NO: 139950 - DNA, 25 bp, Homo sapien
gatggaaccagcgtcattctcttgc

SEQ ID NO: 139951 - DNA, 25 bp, Homo sapien
tgtcagatggaaccagcgtcattct

SEQ ID NO: 139952 - DNA, 25 bp, Homo sapien
cctgtcagatggaaccagcgtcatt

SEQ ID NO: 139953 - DNA, 25 bp, Homo sapien
tcagatggaaccagcgtcattctct

SEQ ID NO: 139954 - DNA, 25 bp, Homo sapien
acttcacagtttaatttggcagaac

SEQ ID NO: 139955 - DNA, 25 bp, Homo sapien
acagtttaatttggcagaactggcc

SEQ ID NO: 139956 - DNA, 25 bp, Homo sapien
tcacagtttaatttggcagaactgg

SEQ ID NO: 139957 - DNA, 25 bp, Homo sapien
ggaagggtgactgggctaggcttgg

SEQ ID NO: 139958 - DNA, 25 bp, Homo sapien
gtgccacattcagccattagaggtt

SEQ ID NO: 139959 - DNA, 25 bp, Homo sapien
cattcaggacagagtttttggtgcc

SEQ ID NO: 139960 - DNA, 25 bp, Homo sapien
ttcaggacagagtttttggtgccac

SEQ ID NO: 139961 - DNA, 25 bp, Homo sapien
ttttggtgccacattcagccattag

SEQ ID NO: 139962 - DNA, 25 bp, Homo sapien
ggagccagggctgctgagccccgag

SEQ ID NO: 139963 - DNA, 25 bp, Homo sapien
agcaggagcaccaggagccagggct

SEQ ID NO: 139964 - DNA, 25 bp, Homo sapien
agccagggctgctgagccccgagtt

SEQ ID NO: 139965 - DNA, 25 bp, Homo sapien
ccagggctgctgagccccgagttac

SEQ ID NO: 139966 - DNA, 25 bp, Homo sapien
ccagcactgctcccagctggcccat

SEQ ID NO: 139967 - DNA, 25 bp, Homo sapien
agccagcactgctcccagctggccc

SEQ ID NO: 139968 - DNA, 25 bp, Homo sapien
gccagcactgctcccagctggccca

SEQ ID NO: 139969 - DNA, 25 bp, Homo sapien
tctcttccacctttgccttctctcc

SEQ ID NO: 139970 - DNA, 25 bp, Homo sapien
gaaagatgggctgaagtaggatttc

SEQ ID NO: 139971 - DNA, 25 bp, Homo sapien
ctgcagagaaagatgggctgaagta

SEQ ID NO: 139972 - DNA, 25 bp, Homo sapien
tgggctgaagtaggatttctcttcc

SEQ ID NO: 139973 - DNA, 25 bp, Homo sapien
caggtacagctccttttgtccagtg

SEQ ID NO: 139974 - DNA, 25 bp, Homo sapien
gtacagctccttttgtccagtggtg

SEQ ID NO: 139975 - DNA, 25 bp, Homo sapien
ggcctccaggtacagctccttttgt

SEQ ID NO: 139976 - DNA, 25 bp, Homo sapien
tccaggtacagctccttttgtccag

SEQ ID NO: 139977 - DNA, 25 bp, Homo sapien
gaagtaggagacaggcactacaccc

SEQ ID NO: 139978 - DNA, 25 bp, Homo sapien
gtggttgaggttcacgtaggactcc

SEQ ID NO: 139979 - DNA, 25 bp, Homo sapien
gcccaggccgtggtggttgaggttc

SEQ ID NO: 139980 - DNA, 25 bp, Homo sapien
agtaggagacaggcactacacccat

SEQ ID NO: 139981 - DNA, 25 bp, Homo sapien
tatgctgacaggcagttgttaggtt

SEQ ID NO: 139982 - DNA, 25 bp, Homo sapien
tgctgacaggcagttgttaggtttt

SEQ ID NO: 139983 - DNA, 25 bp, Homo sapien
gctgacaggcagttgttaggttttc

SEQ ID NO: 139984 - DNA, 25 bp, Homo sapien
ctatgctgacaggcagttgttaggt

SEQ ID NO: 139985 - DNA, 25 bp, Homo sapien
ggtacagagaacagacacaggtttg

SEQ ID NO: 139986 - DNA, 25 bp, Homo sapien
acagacacaggtttggatttgagca

SEQ ID NO: 139987 - DNA, 25 bp, Homo sapien
tggatttgagcattttcaaggccca

SEQ ID NO: 139988 - DNA, 25 bp, Homo sapien
tgttcccagtacacacaggtacaga

SEQ ID NO: 139989 - DNA, 25 bp, Homo sapien
ttcaccaggctcgtcttaaacttct

SEQ ID NO: 139990 - DNA, 25 bp, Homo sapien
tgttcaccaggctcgtcttaaactt

SEQ ID NO: 139991 - DNA, 25 bp, Homo sapien
catgttcaccaggctcgtcttaaac

SEQ ID NO: 139992 - DNA, 25 bp, Homo sapien
caccaggctcgtcttaaacttctga

SEQ ID NO: 139993 - DNA, 25 bp, Homo sapien
ctgaaccaacccgtggagttttgct

SEQ ID NO: 139994 - DNA, 25 bp, Homo sapien
tgtgaatgggcgtggagatgcaggc

SEQ ID NO: 139995 - DNA, 25 bp, Homo sapien
ttctgggagaatttataaaaggatc

SEQ ID NO: 139996 - DNA, 25 bp, Homo sapien
gagttttgctaggacaatacgctga

SEQ ID NO: 139997 - DNA, 25 bp, Homo sapien
gctcaagacgccctcctccatgatg

SEQ ID NO: 139998 - DNA, 25 bp, Homo sapien
accaggctcaagacgccctcctcca

SEQ ID NO: 139999 - DNA, 25 bp, Homo sapien
ctggaggtagtagttctcttgtagc

SEQ ID NO: 140000 - DNA, 25 bp, Homo sapien
gaggtagtagttctcttgtagcatc

SEQ ID NO: 140001 - DNA, 25 bp, Homo sapien
tggtaagagccagcacaggggggca

SEQ ID NO: 140002 - DNA, 25 bp, Homo sapien
ccctcctctaagaagtcgtgtggga

SEQ ID NO: 140003 - DNA, 25 bp, Homo sapien
tgtctccagtgggttgtgaatcccc

SEQ ID NO: 140004 - DNA, 25 bp, Homo sapien
ggcttgtctccagtgggttgtgaat

SEQ ID NO: 140005 - DNA, 25 bp, Homo sapien
agaagaactgtttctctcaaagaaa

SEQ ID NO: 140006 - DNA, 25 bp, Homo sapien
agctcaaggctccagatagaagaac

SEQ ID NO: 140007 - DNA, 25 bp, Homo sapien
ccaaaccaaggtgattgttggaaat

SEQ ID NO: 140008 - DNA, 25 bp, Homo sapien
caaaccaaggtgattgttggaaata

SEQ ID NO: 140009 - DNA, 25 bp, Homo sapien
cagtgctgcggagtcttccttgaag

SEQ ID NO: 140010 - DNA, 25 bp, Homo sapien
cttggcagagcagtgctgcggagtc

SEQ ID NO: 140011 - DNA, 25 bp, Homo sapien
tggcagagcagtgctgcggagtctt

SEQ ID NO: 140012 - DNA, 25 bp, Homo sapien
gcagtgctgcggagtcttccttgaa

SEQ ID NO: 140013 - DNA, 25 bp, Homo sapien
aggtgctcccctcctacatcagaga

SEQ ID NO: 140014 - DNA, 25 bp, Homo sapien
ctcccctcctacatcagagaattgg

SEQ ID NO: 140015 - DNA, 25 bp, Homo sapien
gtgctcccctcctacatcagagaat

SEQ ID NO: 140016 - DNA, 25 bp, Homo sapien
gctcccctcctacatcagagaattg

SEQ ID NO: 140017 - DNA, 25 bp, Homo sapien
gctcagatccagtgacgtgagcccc

SEQ ID NO: 140018 - DNA, 25 bp, Homo sapien
ccccttgtgtggaagttattccagc

SEQ ID NO: 140019 - DNA, 25 bp, Homo sapien
ccagtgacgtgagccccacgttgat

SEQ ID NO: 140020 - DNA, 25 bp, Homo sapien
gtggaagttattccagctcagatcc

SEQ ID NO: 140021 - DNA, 25 bp, Homo sapien
cccaaagccattcatggagagatcc

SEQ ID NO: 140022 - DNA, 25 bp, Homo sapien
ggaggccccttcattgccgatgtca

SEQ ID NO: 140023 - DNA, 25 bp, Homo sapien
ccgatatccaggtagaccaggcagc

SEQ ID NO: 140024 - DNA, 25 bp, Homo sapien
ttgctgattttggaggccccttcat

SEQ ID NO: 140025 - DNA, 25 bp, Homo sapien
cagcggttgagtcggaggacttccc

SEQ ID NO: 140026 - DNA, 25 bp, Homo sapien
cctcttgatagccaggataagtaaa

SEQ ID NO: 140027 - DNA, 25 bp, Homo sapien
tagccaggataagtaaaatagcccc

SEQ ID NO: 140028 - DNA, 25 bp, Homo sapien
atccatatttatgggattcaggaaa

SEQ ID NO: 140029 - DNA, 25 bp, Homo sapien
gggttcctcttgatagccaggataa

SEQ ID NO: 140030 - DNA, 25 bp, Homo sapien
gtgcctgggtccatgccttccaacg

SEQ ID NO: 140031 - DNA, 25 bp, Homo sapien
cagattgagaactggagcatgagga

SEQ ID NO: 140032 - DNA, 25 bp, Homo sapien
aagagccaggaagcacaagaagggc

SEQ ID NO: 140033 - DNA, 25 bp, Homo sapien
tccaacgtgtactgcctgggagagg

SEQ ID NO: 140034 - DNA, 25 bp, Homo sapien
tccgtccaacgttttcatgaactgc

SEQ ID NO: 140035 - DNA, 25 bp, Homo sapien
atgaactgctcggacaccagcacgt

SEQ ID NO: 140036 - DNA, 25 bp, Homo sapien
tgccttgaataccacgtccagctgc

SEQ ID NO: 140037 - DNA, 25 bp, Homo sapien
cagctgcgggtgaacggcatacact

SEQ ID NO: 140038 - DNA, 25 bp, Homo sapien
cgatcgtgattttgtgttggtctgc

SEQ ID NO: 140039 - DNA, 25 bp, Homo sapien
ttgaagaagtccacgatcgtgattt

SEQ ID NO: 140040 - DNA, 25 bp, Homo sapien
catcttcattgtcccagtggggttc

SEQ ID NO: 140041 - DNA, 25 bp, Homo sapien
tggggttcaagctcttgaagaagtc

SEQ ID NO: 140042 - DNA, 25 bp, Homo sapien
gcctgttgccactaggacccagcac

SEQ ID NO: 140043 - DNA, 25 bp, Homo sapien
agcctgttgccactaggacccagca

SEQ ID NO: 140044 - DNA, 25 bp, Homo sapien
ctgttgccactaggacccagcacac

SEQ ID NO: 140045 - DNA, 25 bp, Homo sapien
cctgttgccactaggacccagcaca

SEQ ID NO: 140046 - DNA, 25 bp, Homo sapien
gtcttctcatcgagcttctttatca

SEQ ID NO: 140047 - DNA, 25 bp, Homo sapien
ctggtactggttcagggggaccttg

SEQ ID NO: 140048 - DNA, 25 bp, Homo sapien
gatgagaaggggggtagacagtggg

SEQ ID NO: 140049 - DNA, 25 bp, Homo sapien
gaacaagtgaattggggatgagaag

SEQ ID NO: 140050 - DNA, 25 bp, Homo sapien
ctgaacaagtgaattggggatgaga

SEQ ID NO: 140051 - DNA, 25 bp, Homo sapien
tgaacaagtgaattggggatgagaa

SEQ ID NO: 140052 - DNA, 25 bp, Homo sapien
caccagggcataaagatctgctccc

SEQ ID NO: 140053 - DNA, 25 bp, Homo sapien
cagcgcctgattgggctcaagtttc

SEQ ID NO: 140054 - DNA, 25 bp, Homo sapien
gctcctcccgctggcatccccagca

SEQ ID NO: 140055 - DNA, 25 bp, Homo sapien
agccagcagcgcctgattgggctca

SEQ ID NO: 140056 - DNA, 25 bp, Homo sapien
ctgcctttcttgtctgcatcgcggt

SEQ ID NO: 140057 - DNA, 25 bp, Homo sapien
ttgttccgcagagcagggcttgcag

SEQ ID NO: 140058 - DNA, 25 bp, Homo sapien
ttctccacgtggacgacgctgagtg

SEQ ID NO: 140059 - DNA, 25 bp, Homo sapien
taaagggagaggagatccgcgcaca

SEQ ID NO: 140060 - DNA, 25 bp, Homo sapien
ctatggcttcatcgtgttcaagaaa

SEQ ID NO: 140061 - DNA, 25 bp, Homo sapien
gccagactttatttgcttgtgccca

SEQ ID NO: 140062 - DNA, 25 bp, Homo sapien
tcgccgagacttctttctagaccag

SEQ ID NO: 140063 - DNA, 25 bp, Homo sapien
tgccaccatccgacttgcgaggact

SEQ ID NO: 140064 - DNA, 25 bp, Homo sapien
tgtccatcgagatttcagccacctc

SEQ ID NO: 140065 - DNA, 25 bp, Homo sapien
tcgccgccttccgttagccagtcca

SEQ ID NO: 140066 - DNA, 25 bp, Homo sapien
cttcgccgccttccgttagccagtc

SEQ ID NO: 140067 - DNA, 25 bp, Homo sapien
ccttcgccgccttccgttagccagt

SEQ ID NO: 140068 - DNA, 25 bp, Homo sapien
gccttcgccgccttccgttagccag

SEQ ID NO: 140069 - DNA, 25 bp, Homo sapien
tgtgacagatatcatagccggatcg

SEQ ID NO: 140070 - DNA, 25 bp, Homo sapien
gggaaggacatatgtggagcagtga

SEQ ID NO: 140071 - DNA, 25 bp, Homo sapien
acctgccgcaccatccagatcagct

SEQ ID NO: 140072 - DNA, 25 bp, Homo sapien
cttcgggaaggacatatgtggagca

SEQ ID NO: 140073 - DNA, 25 bp, Homo sapien
ggtattgcctccaagggcgtgtgct

SEQ ID NO: 140074 - DNA, 25 bp, Homo sapien
tgccaattggccctggcctatcaca

SEQ ID NO: 140075 - DNA, 25 bp, Homo sapien
aaaggctgctcctgccaattggccc

SEQ ID NO: 140076 - DNA, 25 bp, Homo sapien
aagggcgtgtgctccaaaggctgct

SEQ ID NO: 140077 - DNA, 25 bp, Homo sapien
cgtttacatgatcaagactatctgg

SEQ ID NO: 140078 - DNA, 25 bp, Homo sapien
cttggtgcccgtttacatgatcaag

SEQ ID NO: 140079 - DNA, 25 bp, Homo sapien
tcaagactatctgggtctttccaag

SEQ ID NO: 140080 - DNA, 25 bp, Homo sapien
gactatctgggtctttccaagactg

SEQ ID NO: 140081 - DNA, 25 bp, Homo sapien
ttcccacactgactgaaggcttagc

SEQ ID NO: 140082 - DNA, 25 bp, Homo sapien
ttttcccacactgactgaaggctta

SEQ ID NO: 140083 - DNA, 25 bp, Homo sapien
tcccacactgactgaaggcttagca

SEQ ID NO: 140084 - DNA, 25 bp, Homo sapien
ccacactgactgaaggcttagcacc

SEQ ID NO: 140085 - DNA, 25 bp, Homo sapien
tcagagttgtgcaaggactagattc

SEQ ID NO: 140086 - DNA, 25 bp, Homo sapien
gcaggtccctacttagctccttctg

SEQ ID NO: 140087 - DNA, 25 bp, Homo sapien
gagaccctgccaattctgcattcag

SEQ ID NO: 140088 - DNA, 25 bp, Homo sapien
agtaataaagcctgactttctgtgc

SEQ ID NO: 140089 - DNA, 25 bp, Homo sapien
caggatgtacagctggggctctact

SEQ ID NO: 140090 - DNA, 25 bp, Homo sapien
ggggctctacttccagctgtcctgg

SEQ ID NO: 140091 - DNA, 25 bp, Homo sapien
tgctctctgggttctaagttcttta

SEQ ID NO: 140092 - DNA, 25 bp, Homo sapien
gttcaggtgggtccttgctctctgg

SEQ ID NO: 140093 - DNA, 25 bp, Homo sapien
caacatcgttgggaggatttcttct

SEQ ID NO: 140094 - DNA, 25 bp, Homo sapien
gtctttggcgactgcaaatgcaaca

SEQ ID NO: 140095 - DNA, 25 bp, Homo sapien
ctcctgggtctttggcgactgcaaa

SEQ ID NO: 140096 - DNA, 25 bp, Homo sapien
ctgcaaatgcaacatcgttgggagg

SEQ ID NO: 140097 - DNA, 25 bp, Homo sapien
ggaaactctcggtcctgattgaaaa

SEQ ID NO: 140098 - DNA, 25 bp, Homo sapien
aggggagccgtcagcctgggctgga

SEQ ID NO: 140099 - DNA, 25 bp, Homo sapien
tgtcttccattcaggggagccgtca

SEQ ID NO: 140100 - DNA, 25 bp, Homo sapien
ggctggaaactctcggtcctgattg

SEQ ID NO: 140101 - DNA, 25 bp, Homo sapien
gtgggatacagagattcttacttcc

SEQ ID NO: 140102 - DNA, 25 bp, Homo sapien
tacagagattcttacttcctcttga

SEQ ID NO: 140103 - DNA, 25 bp, Homo sapien
cagtgggatacagagattcttactt

SEQ ID NO: 140104 - DNA, 25 bp, Homo sapien
gggatacagagattcttacttcctc

SEQ ID NO: 140105 - DNA, 25 bp, Homo sapien
gaatccatgccctgaactactgcct

SEQ ID NO: 140106 - DNA, 25 bp, Homo sapien
gagccagagggaggcctttaagtgg

SEQ ID NO: 140107 - DNA, 25 bp, Homo sapien
gagctggaggcaccgagccccaggc

SEQ ID NO: 140108 - DNA, 25 bp, Homo sapien
gcttttccatctcctacatgcagat

SEQ ID NO: 140109 - DNA, 25 bp, Homo sapien
gaaaacatgtttgtagactgcacgc

SEQ ID NO: 140110 - DNA, 25 bp, Homo sapien
gacatcagtgccaaagcagtgaccc

SEQ ID NO: 140111 - DNA, 25 bp, Homo sapien
gcagtacttaaccagggctcagcaa

SEQ ID NO: 140112 - DNA, 25 bp, Homo sapien
cagcgcctgaactcgtgaacacggt

SEQ ID NO: 140113 - DNA, 25 bp, Homo sapien
agctcagtggcatcgcagcagctgg

SEQ ID NO: 140114 - DNA, 25 bp, Homo sapien
tggggggtggacatggccattggca

SEQ ID NO: 140115 - DNA, 25 bp, Homo sapien
gtggggggtggacatggccattggc

SEQ ID NO: 140116 - DNA, 25 bp, Homo sapien
agccagctcagtggcatcgcagcag

SEQ ID NO: 140117 - DNA, 25 bp, Homo sapien
gaccgtatgcattgccatggactcc

SEQ ID NO: 140118 - DNA, 25 bp, Homo sapien
gaagaccgtatgcattgccatggac

SEQ ID NO: 140119 - DNA, 25 bp, Homo sapien
ggtcatcctgaagaccgtatgcatt

SEQ ID NO: 140120 - DNA, 25 bp, Homo sapien
tcctgaagaccgtatgcattgccat

SEQ ID NO: 140121 - DNA, 25 bp, Homo sapien
ggagtgaggagtgggtgtgcatgca

SEQ ID NO: 140122 - DNA, 25 bp, Homo sapien
gtgcatgcagcctgaacaatctcct

SEQ ID NO: 140123 - DNA, 25 bp, Homo sapien
aggagtgaggagtgggtgtgcatgc

SEQ ID NO: 140124 - DNA, 25 bp, Homo sapien
gaggagtgaggagtgggtgtgcatg

SEQ ID NO: 140125 - DNA, 25 bp, Homo sapien
ctgagttcttccagttgcactgtcc

SEQ ID NO: 140126 - DNA, 25 bp, Homo sapien
tgtcctggataacccttctggaacc

SEQ ID NO: 140127 - DNA, 25 bp, Homo sapien
ctgtcctggataacccttctggaac

SEQ ID NO: 140128 - DNA, 25 bp, Homo sapien
ccctgagttcttccagttgcactgt

SEQ ID NO: 140129 - DNA, 25 bp, Homo sapien
ccaccaagacggtgtccacaaatgc

SEQ ID NO: 140130 - DNA, 25 bp, Homo sapien
gcaaatcacccagttacagaagcaa

SEQ ID NO: 140131 - DNA, 25 bp, Homo sapien
aaatgcatccccaaacgacaagtgc

SEQ ID NO: 140132 - DNA, 25 bp, Homo sapien
tgacacccagctcggcacaactgtt

SEQ ID NO: 140133 - DNA, 25 bp, Homo sapien
tgattcgcagttgggtccttcaggg

SEQ ID NO: 140134 - DNA, 25 bp, Homo sapien
caggctgctgattcgcagttgggtc

SEQ ID NO: 140135 - DNA, 25 bp, Homo sapien
tgctgattcgcagttgggtccttca

SEQ ID NO: 140136 - DNA, 25 bp, Homo sapien
agccagctgggcgtggcaccctcag

SEQ ID NO: 140137 - DNA, 25 bp, Homo sapien
gccagggagactggttgcctggata

SEQ ID NO: 140138 - DNA, 25 bp, Homo sapien
gaaaggggatcatgggcatggtgat

SEQ ID NO: 140139 - DNA, 25 bp, Homo sapien
gatcatgggcatggtgataggagac

SEQ ID NO: 140140 - DNA, 25 bp, Homo sapien
gagactggtattccagacttcccag

SEQ ID NO: 140141 - DNA, 25 bp, Homo sapien
tcccaggttgggagcccagttgaga

SEQ ID NO: 140142 - DNA, 25 bp, Homo sapien
gagaacgagatccttctggttctga

SEQ ID NO: 140143 - DNA, 25 bp, Homo sapien
ttctgaaatatccctgcctttgctg

SEQ ID NO: 140144 - DNA, 25 bp, Homo sapien
gatgctcttgtagggagaacgagat

SEQ ID NO: 140145 - DNA, 25 bp, Homo sapien
agatccttctggttctgaaatatcc

SEQ ID NO: 140146 - DNA, 25 bp, Homo sapien
cccatctctgtgagctgggcctgct

SEQ ID NO: 140147 - DNA, 25 bp, Homo sapien
tctgtgagctgggcctgctggttct

SEQ ID NO: 140148 - DNA, 25 bp, Homo sapien
tgagctgggcctgctggttctgctt

SEQ ID NO: 140149 - DNA, 25 bp, Homo sapien
tgtgagctgggcctgctggttctgc

SEQ ID NO: 140150 - DNA, 25 bp, Homo sapien
ccctgcattcaaggttccgccaaat

SEQ ID NO: 140151 - DNA, 25 bp, Homo sapien
tcaaggttccgccaaatagtagaaa

SEQ ID NO: 140152 - DNA, 25 bp, Homo sapien
gccccgcaggcagaagtcgagcttt

SEQ ID NO: 140153 - DNA, 25 bp, Homo sapien
aaatgacaaacaggggctaaccgcg

SEQ ID NO: 140154 - DNA, 25 bp, Homo sapien
accgtgcccagcctctgccagtcat

SEQ ID NO: 140155 - DNA, 25 bp, Homo sapien
cgtgcccagcctctgccagtcattt

SEQ ID NO: 140156 - DNA, 25 bp, Homo sapien
ccaccgtgcccagcctctgccagtc

SEQ ID NO: 140157 - DNA, 25 bp, Homo sapien
gtgcccagcctctgccagtcatttc

SEQ ID NO: 140158 - DNA, 25 bp, Homo sapien
cactaggtctatggtcttggccgta

SEQ ID NO: 140159 - DNA, 25 bp, Homo sapien
tgtgctctagagttcgtgccctgat

SEQ ID NO: 140160 - DNA, 25 bp, Homo sapien
gatccaagggaaggcagaatgcgtc

SEQ ID NO: 140161 - DNA, 25 bp, Homo sapien
tcatgggacaaaaagcctgccacgg

SEQ ID NO: 140162 - DNA, 25 bp, Homo sapien
tgccttagaacctcatcaatgctgg

SEQ ID NO: 140163 - DNA, 25 bp, Homo sapien
aatggagaatgtgaacagggcttaa

SEQ ID NO: 140164 - DNA, 25 bp, Homo sapien
aaatgtcccccaaaaagcgctgtag

SEQ ID NO: 140165 - DNA, 25 bp, Homo sapien
ggatggattttatccaaatgtcccc

SEQ ID NO: 140166 - DNA, 25 bp, Homo sapien
gaaaccccatctctactaaacatac

SEQ ID NO: 140167 - DNA, 25 bp, Homo sapien
ttgagaccaggatggacaacatggt

SEQ ID NO: 140168 - DNA, 25 bp, Homo sapien
aaaaattagccgggcatggtggcat

SEQ ID NO: 140169 - DNA, 25 bp, Homo sapien
gggcatggtggcatgtgcctgtaat

SEQ ID NO: 140170 - DNA, 25 bp, Homo sapien
ctgccggacgcagtgctagtcactg

SEQ ID NO: 140171 - DNA, 25 bp, Homo sapien
ctatatgcttatgttgtgtgttttg

SEQ ID NO: 140172 - DNA, 25 bp, Homo sapien
tttctatatgcttatgttgtgtgtt

SEQ ID NO: 140173 - DNA, 25 bp, Homo sapien
gccggacgcagtgctagtcactgga

SEQ ID NO: 140174 - DNA, 25 bp, Homo sapien
ggcgcgggcgagtgtgggactggcg

SEQ ID NO: 140175 - DNA, 25 bp, Homo sapien
aatgagggccttgatcttatactct

SEQ ID NO: 140176 - DNA, 25 bp, Homo sapien
agggccttgatcttatactctgtga

SEQ ID NO: 140177 - DNA, 25 bp, Homo sapien
ctctgtgacagtcacctcattgtcg

SEQ ID NO: 140178 - DNA, 25 bp, Homo sapien
ttatactctgtgacagtcacctcat

SEQ ID NO: 140179 - DNA, 25 bp, Homo sapien
gctgctggagcaggtcctccagccc

SEQ ID NO: 140180 - DNA, 25 bp, Homo sapien
gctggagcaggtcctccagccccta

SEQ ID NO: 140181 - DNA, 25 bp, Homo sapien
cagctgctggagcaggtcctccagc

SEQ ID NO: 140182 - DNA, 25 bp, Homo sapien
tgctggagcaggtcctccagcccct

SEQ ID NO: 140183 - DNA, 25 bp, Homo sapien
tggagagagtatgcgcattcttggc

SEQ ID NO: 140184 - DNA, 25 bp, Homo sapien
aagaatggagagagtatgcgcattc

SEQ ID NO: 140185 - DNA, 25 bp, Homo sapien
agagagtatgcgcattcttggctga

SEQ ID NO: 140186 - DNA, 25 bp, Homo sapien
gagtatgcgcattcttggctgacca

SEQ ID NO: 140187 - DNA, 25 bp, Homo sapien
ggcaaccaaggcagaaatgggcgta

SEQ ID NO: 140188 - DNA, 25 bp, Homo sapien
aaccaaggcagaaatgggcgtacgc

SEQ ID NO: 140189 - DNA, 25 bp, Homo sapien
agtggaggtgggcaaccaaggcaga

SEQ ID NO: 140190 - DNA, 25 bp, Homo sapien
aggtgggcaaccaaggcagaaatgg

SEQ ID NO: 140191 - DNA, 25 bp, Homo sapien
tgtcatcatcagagtcctcaaattc

SEQ ID NO: 140192 - DNA, 25 bp, Homo sapien
gtcagaaagaccaaagcccatgtca

SEQ ID NO: 140193 - DNA, 25 bp, Homo sapien
catgtcatcatcagagtcctcaaat

SEQ ID NO: 140194 - DNA, 25 bp, Homo sapien
tcatcatcagagtcctcaaattctt

SEQ ID NO: 140195 - DNA, 25 bp, Homo sapien
ttgatcgaatatattataaaagagg

SEQ ID NO: 140196 - DNA, 25 bp, Homo sapien
aagttcagcttttgatcgaatatat

SEQ ID NO: 140197 - DNA, 25 bp, Homo sapien
tgatcgaatatattataaaagaggt

SEQ ID NO: 140198 - DNA, 25 bp, Homo sapien
cagcttttgatcgaatatattataa

SEQ ID NO: 140199 - DNA, 25 bp, Homo sapien
aaatttgaacaatattgacgtatgc

SEQ ID NO: 140200 - DNA, 25 bp, Homo sapien
actcaccaggtcctccctaattcta

SEQ ID NO: 140201 - DNA, 25 bp, Homo sapien
gtgtttatcctttcaggcaattttc

SEQ ID NO: 140202 - DNA, 25 bp, Homo sapien
cttccctttctcaccattttggtgt

SEQ ID NO: 140203 - DNA, 25 bp, Homo sapien
cctgttaacaccagttgagcaaagg

SEQ ID NO: 140204 - DNA, 25 bp, Homo sapien
gccccctgttaacaccagttgagca

SEQ ID NO: 140205 - DNA, 25 bp, Homo sapien
tgttaacaccagttgagcaaaggga

SEQ ID NO: 140206 - DNA, 25 bp, Homo sapien
ttaacaccagttgagcaaagggacc

SEQ ID NO: 140207 - DNA, 25 bp, Homo sapien
aggacaattgtgtgcccacaggcag

SEQ ID NO: 140208 - DNA, 25 bp, Homo sapien
agttgttgaacatgggagagcctgt

SEQ ID NO: 140209 - DNA, 25 bp, Homo sapien
tagggactcgcagataagaactctt

SEQ ID NO: 140210 - DNA, 25 bp, Homo sapien
taaaatggaccatggagtgggcaca

SEQ ID NO: 140211 - DNA, 25 bp, Homo sapien
ccctccctggtgcccgagaaggaga

SEQ ID NO: 140212 - DNA, 25 bp, Homo sapien
agagggctggcttgcaatagcaggg

SEQ ID NO: 140213 - DNA, 25 bp, Homo sapien
gggctggcttgcaatagcagggcat

SEQ ID NO: 140214 - DNA, 25 bp, Homo sapien
gtgcccgagaaggagagggctggct

SEQ ID NO: 140215 - DNA, 25 bp, Homo sapien
ggctatggggtagcccctggttaca

SEQ ID NO: 140216 - DNA, 25 bp, Homo sapien
tctttagggatgatagattgtcggg

SEQ ID NO: 140217 - DNA, 25 bp, Homo sapien
ttctttagggatgatagattgtcgg

SEQ ID NO: 140218 - DNA, 25 bp, Homo sapien
gcccctggttacatgcagatgtgac

SEQ ID NO: 140219 - DNA, 25 bp, Homo sapien
gcaactgactccaaaccaacaggga

SEQ ID NO: 140220 - DNA, 25 bp, Homo sapien
ccagatgctgtgcaatgtgcctggc

SEQ ID NO: 140221 - DNA, 25 bp, Homo sapien
tgtaccattccagctttaggcctgt

SEQ ID NO: 140222 - DNA, 25 bp, Homo sapien
ccaggcttttgaaggtttagagtca

SEQ ID NO: 140223 - DNA, 25 bp, Homo sapien
caagtgttgtattggtgcttatgag

SEQ ID NO: 140224 - DNA, 25 bp, Homo sapien
gtgttgtattggtgcttatgagtca

SEQ ID NO: 140225 - DNA, 25 bp, Homo sapien
gctgccaagtgttgtattggtgctt

SEQ ID NO: 140226 - DNA, 25 bp, Homo sapien
gccaagtgttgtattggtgcttatg

SEQ ID NO: 140227 - DNA, 25 bp, Homo sapien
taaactgccccaagtgttgaagtct

SEQ ID NO: 140228 - DNA, 25 bp, Homo sapien
tgatgcacggatgcttttgaacagt

SEQ ID NO: 140229 - DNA, 25 bp, Homo sapien
tggtgaaagcttccttctaaactgc

SEQ ID NO: 140230 - DNA, 25 bp, Homo sapien
cagaacactgtaatgtgccttggag

SEQ ID NO: 140231 - DNA, 25 bp, Homo sapien
ggtgtattgccccagcggagagaaa

SEQ ID NO: 140232 - DNA, 25 bp, Homo sapien
tctagagagagtatcaaggcccagg

SEQ ID NO: 140233 - DNA, 25 bp, Homo sapien
gccacgaacgtttggaggatacgca

SEQ ID NO: 140234 - DNA, 25 bp, Homo sapien
cgaaatcgcgactatcttagctggg

SEQ ID NO: 140235 - DNA, 25 bp, Homo sapien
tggaacagcgcagccgcttcgagta

SEQ ID NO: 140236 - DNA, 25 bp, Homo sapien
gagctgaaccgtcagagccccaatt

SEQ ID NO: 140237 - DNA, 25 bp, Homo sapien
acgttgatggttccagcaagcctgc

SEQ ID NO: 140238 - DNA, 25 bp, Homo sapien
cccaattcttcttcagcggcggcgt

SEQ ID NO: 140239 - DNA, 25 bp, Homo sapien
cgcgcctccggaacgtagagtaaca

SEQ ID NO: 140240 - DNA, 25 bp, Homo sapien
acattccgggcgagcgtgagcacga

SEQ ID NO: 140241 - DNA, 25 bp, Homo sapien
tagagtaacaatcacaaccccacat

SEQ ID NO: 140242 - DNA, 25 bp, Homo sapien
tggtgcagagcatggcggtgacgtc

SEQ ID NO: 140243 - DNA, 25 bp, Homo sapien
gaaaggaaaggtcatcgtctgttta

SEQ ID NO: 140244 - DNA, 25 bp, Homo sapien
caacaagtgggctccacagaggaag

SEQ ID NO: 140245 - DNA, 25 bp, Homo sapien
gggcctcagctgttgtacacacacg

SEQ ID NO: 140246 - DNA, 25 bp, Homo sapien
catgcgccttgcctgagcaacaagt

SEQ ID NO: 140247 - DNA, 25 bp, Homo sapien
tatagataatatccccttaataatg

SEQ ID NO: 140248 - DNA, 25 bp, Homo sapien
gtgatgcaagtaaagccacctagtt

SEQ ID NO: 140249 - DNA, 25 bp, Homo sapien
ttaagggtgatgcaagtaaagccac

SEQ ID NO: 140250 - DNA, 25 bp, Homo sapien
taatattaagggtgatgcaagtaaa

SEQ ID NO: 140251 - DNA, 25 bp, Homo sapien
cagtggtacaaatgcgcttggaagg

SEQ ID NO: 140252 - DNA, 25 bp, Homo sapien
tgtcacatgtcaaccagcaatagta

SEQ ID NO: 140253 - DNA, 25 bp, Homo sapien
gctgatgggaattttgagcacccca

SEQ ID NO: 140254 - DNA, 25 bp, Homo sapien
tgtatgtaacaccaaatcaactggg

SEQ ID NO: 140255 - DNA, 25 bp, Homo sapien
ctattcttgccgtccaaggcttcct

SEQ ID NO: 140256 - DNA, 25 bp, Homo sapien
ctgcctattcttgccgtccaaggct

SEQ ID NO: 140257 - DNA, 25 bp, Homo sapien
ctgtggcctggtcggccgccctgcc

SEQ ID NO: 140258 - DNA, 25 bp, Homo sapien
gctttctgcctattcttgccgtcca

SEQ ID NO: 140259 - DNA, 25 bp, Homo sapien
tctccgtagccggacggtggaaatc

SEQ ID NO: 140260 - DNA, 25 bp, Homo sapien
gaaatccccaggtcggtgtgggcca

SEQ ID NO: 140261 - DNA, 25 bp, Homo sapien
aagcgccggcggcaacgggtctccg

SEQ ID NO: 140262 - DNA, 25 bp, Homo sapien
acctgaccgagggatggcgaggctg

SEQ ID NO: 140263 - DNA, 25 bp, Homo sapien
ctgtagcctgccacaatcatgtggc

SEQ ID NO: 140264 - DNA, 25 bp, Homo sapien
agaagtgctttgaggactgtagcct

SEQ ID NO: 140265 - DNA, 25 bp, Homo sapien
ctgccacaatcatgtggcccctagc

SEQ ID NO: 140266 - DNA, 25 bp, Homo sapien
gtagcctgccacaatcatgtggccc

SEQ ID NO: 140267 - DNA, 25 bp, Homo sapien
tgtgccattcccaagtgtgattaat

SEQ ID NO: 140268 - DNA, 25 bp, Homo sapien
taggtttcttggctgcccgttctga

SEQ ID NO: 140269 - DNA, 25 bp, Homo sapien
ttctgataaacaatctgttcttggg

SEQ ID NO: 140270 - DNA, 25 bp, Homo sapien
gtgtgattaatctctggcagaggcc

SEQ ID NO: 140271 - DNA, 25 bp, Homo sapien
acaccctctgtcgttgttgcccaag

SEQ ID NO: 140272 - DNA, 25 bp, Homo sapien
gatttcctgcggtctcaggtaggcg

SEQ ID NO: 140273 - DNA, 25 bp, Homo sapien
tgctgcatgatgtaagtggctggct

SEQ ID NO: 140274 - DNA, 25 bp, Homo sapien
gcaagagaacaaggaaaggacccgc

SEQ ID NO: 140275 - DNA, 25 bp, Homo sapien
tgtcctcttgcacaacatccaggaa

SEQ ID NO: 140276 - DNA, 25 bp, Homo sapien
gggacctctgctcgcagccagcagg

SEQ ID NO: 140277 - DNA, 25 bp, Homo sapien
tgctaacacgaaccacctgaagacc

SEQ ID NO: 140278 - DNA, 25 bp, Homo sapien
gggtgatctgtgaatattgggtcaa

SEQ ID NO: 140279 - DNA, 25 bp, Homo sapien
tattgggtcaattgacccggcagca

SEQ ID NO: 140280 - DNA, 25 bp, Homo sapien
cgacccttaatgatttgcaaagaca

SEQ ID NO: 140281 - DNA, 25 bp, Homo sapien
tcagctgggacataattgcgggcct

SEQ ID NO: 140282 - DNA, 25 bp, Homo sapien
ggcctccctcacgttaatcaatgat

SEQ ID NO: 140283 - DNA, 25 bp, Homo sapien
caatgataatccagaattacgaccc

SEQ ID NO: 140284 - DNA, 25 bp, Homo sapien
gtctccacgcaacaactcttgatgt

SEQ ID NO: 140285 - DNA, 25 bp, Homo sapien
tttcctgaatggtcgccacgtggag

SEQ ID NO: 140286 - DNA, 25 bp, Homo sapien
cacgtggagccggagtcattagcat

SEQ ID NO: 140287 - DNA, 25 bp, Homo sapien
tggcagagagaacattgcagctttt

SEQ ID NO: 140288 - DNA, 25 bp, Homo sapien
gggtctctgatcgtcttgtgaaaaa

SEQ ID NO: 140289 - DNA, 25 bp, Homo sapien
tgatcgtcttgtgaaaaaccccatg

SEQ ID NO: 140290 - DNA, 25 bp, Homo sapien
ctctgatcgtcttgtgaaaaacccc

SEQ ID NO: 140291 - DNA, 25 bp, Homo sapien
tctctgggtctctgatcgtcttgtg

SEQ ID NO: 140292 - DNA, 25 bp, Homo sapien
aagggcccagccttcactgcccggg

SEQ ID NO: 140293 - DNA, 25 bp, Homo sapien
caagggcccagccttcactgcccgg

SEQ ID NO: 140294 - DNA, 25 bp, Homo sapien
ggcccagccttcactgcccggggag

SEQ ID NO: 140295 - DNA, 25 bp, Homo sapien
ccagccttcactgcccggggagcct

SEQ ID NO: 140296 - DNA, 25 bp, Homo sapien
taagctatgattgtattagtgcact

SEQ ID NO: 140297 - DNA, 25 bp, Homo sapien
tatgattgtattagtgcactctagc

SEQ ID NO: 140298 - DNA, 25 bp, Homo sapien
gcagtaagctatgattgtattagtg

SEQ ID NO: 140299 - DNA, 25 bp, Homo sapien
cagtaagctatgattgtattagtgc

SEQ ID NO: 140300 - DNA, 25 bp, Homo sapien
aggctgcccttgaagcagtcccact

SEQ ID NO: 140301 - DNA, 25 bp, Homo sapien
tgcagagcaggggtccacagtggtg

SEQ ID NO: 140302 - DNA, 25 bp, Homo sapien
tccaggctgcccttgaagcagtccc

SEQ ID NO: 140303 - DNA, 25 bp, Homo sapien
ctttcctccaggctgcccttgaagc

SEQ ID NO: 140304 - DNA, 25 bp, Homo sapien
gaaaccaggtaaagactccagtcgc

SEQ ID NO: 140305 - DNA, 25 bp, Homo sapien
gaaagaaatccatacccacctgggc

SEQ ID NO: 140306 - DNA, 25 bp, Homo sapien
catttccaggtaacgcagaagggct

SEQ ID NO: 140307 - DNA, 25 bp, Homo sapien
gaccttgaccacttggaccttggag

SEQ ID NO: 140308 - DNA, 25 bp, Homo sapien
aggttggtgatgttttgtacactcc

SEQ ID NO: 140309 - DNA, 25 bp, Homo sapien
gatgttttgtacactccatcccata

SEQ ID NO: 140310 - DNA, 25 bp, Homo sapien
tgtacactccatcccataattcata

SEQ ID NO: 140311 - DNA, 25 bp, Homo sapien
cataattcataaaacccaggaatag

SEQ ID NO: 140312 - DNA, 25 bp, Homo sapien
gactagcgcctttcccgtgaattga

SEQ ID NO: 140313 - DNA, 25 bp, Homo sapien
tggaaagacagttgctagacagagc

SEQ ID NO: 140314 - DNA, 25 bp, Homo sapien
ggcatgtcccaactcttgcgttagg

SEQ ID NO: 140315 - DNA, 25 bp, Homo sapien
tactttgtaaccatgcagctgcctc

SEQ ID NO: 140316 - DNA, 25 bp, Homo sapien
accaagtggttgcctagcaactcac

SEQ ID NO: 140317 - DNA, 25 bp, Homo sapien
attaccaagtggttgcctagcaact

SEQ ID NO: 140318 - DNA, 25 bp, Homo sapien
ttaccaagtggttgcctagcaactc

SEQ ID NO: 140319 - DNA, 25 bp, Homo sapien
taccaagtggttgcctagcaactca

SEQ ID NO: 140320 - DNA, 25 bp, Homo sapien
caggtgcaggtattcttggttgtcc

SEQ ID NO: 140321 - DNA, 25 bp, Homo sapien
tccaggtgcaggtattcttggttgt

SEQ ID NO: 140322 - DNA, 25 bp, Homo sapien
catccaggtgcaggtattcttggtt

SEQ ID NO: 140323 - DNA, 25 bp, Homo sapien
aggtgcaggtattcttggttgtcct

SEQ ID NO: 140324 - DNA, 25 bp, Homo sapien
cacgggacacgctgatctggagctg

SEQ ID NO: 140325 - DNA, 25 bp, Homo sapien
gcggagtcgttacaaggcagcttat

SEQ ID NO: 140326 - DNA, 25 bp, Homo sapien
tccagcaatttctgacagggcatgg

SEQ ID NO: 140327 - DNA, 25 bp, Homo sapien
gaacgatggtacgtttggcctcctg

SEQ ID NO: 140328 - DNA, 25 bp, Homo sapien
tccacgaccggcctgtgggtcaggt

SEQ ID NO: 140329 - DNA, 25 bp, Homo sapien
catgacaacctcgtcgtcgctgggt

SEQ ID NO: 140330 - DNA, 25 bp, Homo sapien
tcaggtggcgcatgcgcgagcacgg

SEQ ID NO: 140331 - DNA, 25 bp, Homo sapien
gtcgctgggtgtctcgctatcccca

SEQ ID NO: 140332 - DNA, 25 bp, Homo sapien
tcctcacccgcgattccctctccca

SEQ ID NO: 140333 - DNA, 25 bp, Homo sapien
ttgcgcccagggctagaccagggcc

SEQ ID NO: 140334 - DNA, 25 bp, Homo sapien
tggctctccgtcctccgaaagtccc

SEQ ID NO: 140335 - DNA, 25 bp, Homo sapien
ccgcccagccggctggcggttgcgc

SEQ ID NO: 140336 - DNA, 25 bp, Homo sapien
ggaggcagattcattggtactcttt

SEQ ID NO: 140337 - DNA, 25 bp, Homo sapien
ggcagattcattggtactcttttca

SEQ ID NO: 140338 - DNA, 25 bp, Homo sapien
gctggaggcagattcattggtactc

SEQ ID NO: 140339 - DNA, 25 bp, Homo sapien
gattcattggtactcttttcatctg

SEQ ID NO: 140340 - DNA, 25 bp, Homo sapien
gcagccatcccaagctgacgagcca

SEQ ID NO: 140341 - DNA, 25 bp, Homo sapien
cctactttggcagagagtcttctgg

SEQ ID NO: 140342 - DNA, 25 bp, Homo sapien
cctttgcctactttggcagagagtc

SEQ ID NO: 140343 - DNA, 25 bp, Homo sapien
tcccaagctgacgagccactttctt

SEQ ID NO: 140344 - DNA, 25 bp, Homo sapien
ggctcgaagcattccagtggcattc

SEQ ID NO: 140345 - DNA, 25 bp, Homo sapien
gagtggctcgaagcattccagtggc

SEQ ID NO: 140346 - DNA, 25 bp, Homo sapien
aagcattccagtggcattcactggg

SEQ ID NO: 140347 - DNA, 25 bp, Homo sapien
ctggcccaagagtggctcgaagcat

SEQ ID NO: 140348 - DNA, 25 bp, Homo sapien
tccaaggtaactggaataactcagg

SEQ ID NO: 140349 - DNA, 25 bp, Homo sapien
caaatttcatcctactccaaggtaa

SEQ ID NO: 140350 - DNA, 25 bp, Homo sapien
aaaagatagacatatggggtattca

SEQ ID NO: 140351 - DNA, 25 bp, Homo sapien
caaggtaactggaataactcaggca

SEQ ID NO: 140352 - DNA, 25 bp, Homo sapien
ttgcagttttggagttctgcctcgg

SEQ ID NO: 140353 - DNA, 25 bp, Homo sapien
cagggtagggaaggcattctttgca

SEQ ID NO: 140354 - DNA, 25 bp, Homo sapien
cagcctaaggcgctcagcatgtcct

SEQ ID NO: 140355 - DNA, 25 bp, Homo sapien
gcacattcttcatgacgaccatggg

SEQ ID NO: 140356 - DNA, 25 bp, Homo sapien
gctaggcccaagtctctcagtacag

SEQ ID NO: 140357 - DNA, 25 bp, Homo sapien
gagagttgctctctaacccatggag

SEQ ID NO: 140358 - DNA, 25 bp, Homo sapien
gaaagcgcctatgtttgctctgccg

SEQ ID NO: 140359 - DNA, 25 bp, Homo sapien
acgtgactgctggataccggctgaa

SEQ ID NO: 140360 - DNA, 25 bp, Homo sapien
aaacagctgggtttgctcctttagc

SEQ ID NO: 140361 - DNA, 25 bp, Homo sapien
cctgctcttggtggcttctataaac

SEQ ID NO: 140362 - DNA, 25 bp, Homo sapien
gatcagagaatgcttctaggtcact

SEQ ID NO: 140363 - DNA, 25 bp, Homo sapien
taggtcactgcctgtattactggac

SEQ ID NO: 140364 - DNA, 25 bp, Homo sapien
gctatagtaccacacagattcaggg

SEQ ID NO: 140365 - DNA, 25 bp, Homo sapien
gaagcttcctagcatggtgcacaga

SEQ ID NO: 140366 - DNA, 25 bp, Homo sapien
cagccttgggcaaccgatggagatc

SEQ ID NO: 140367 - DNA, 25 bp, Homo sapien
catgatccattgaagcacctgcagg

SEQ ID NO: 140368 - DNA, 25 bp, Homo sapien
cccttgaattaaatatttctgccat

SEQ ID NO: 140369 - DNA, 25 bp, Homo sapien
tttcccttgaattaaatatttctgc

SEQ ID NO: 140370 - DNA, 25 bp, Homo sapien
tgatcctgtgggtccaagaaccttt

SEQ ID NO: 140371 - DNA, 25 bp, Homo sapien
ctctgatcctgtgggtccaagaacc

SEQ ID NO: 140372 - DNA, 25 bp, Homo sapien
ggtgaggagaatcggcctgatgagt

SEQ ID NO: 140373 - DNA, 25 bp, Homo sapien
gagtgggcggcaggtagtgcaggac

SEQ ID NO: 140374 - DNA, 25 bp, Homo sapien
gcaggtagtgcaggacactgcagtc

SEQ ID NO: 140375 - DNA, 25 bp, Homo sapien
tcgaaactcatctaagcgtaaggtg

SEQ ID NO: 140376 - DNA, 25 bp, Homo sapien
tcctcagacccctgcgcgtgtcggg

SEQ ID NO: 140377 - DNA, 25 bp, Homo sapien
aagaccacagaatcccgaagccgat

SEQ ID NO: 140378 - DNA, 25 bp, Homo sapien
tacaggaagcagtggtgccggctgc

SEQ ID NO: 140379 - DNA, 25 bp, Homo sapien
cagccgtgggatgaaggccgcgcag

SEQ ID NO: 140380 - DNA, 25 bp, Homo sapien
ctggggcctttccatgatacggggc

SEQ ID NO: 140381 - DNA, 25 bp, Homo sapien
tctggggcctttccatgatacgggg

SEQ ID NO: 140382 - DNA, 25 bp, Homo sapien
tccaggcactggcaatgcagtgatg

SEQ ID NO: 140383 - DNA, 25 bp, Homo sapien
tgaacaggatgacaagattcatgcc

SEQ ID NO: 140384 - DNA, 25 bp, Homo sapien
gaagcctaggctgcctcaatggagg

SEQ ID NO: 140385 - DNA, 25 bp, Homo sapien
cactgccgtctgtgcactgattcac

SEQ ID NO: 140386 - DNA, 25 bp, Homo sapien
ggccctggcgcaagaacttacaaga

SEQ ID NO: 140387 - DNA, 25 bp, Homo sapien
tgctggtccccatgttcaatgtcgg

SEQ ID NO: 140388 - DNA, 25 bp, Homo sapien
caggcatttctaggctcctcacgag

SEQ ID NO: 140389 - DNA, 25 bp, Homo sapien
ggataagtagtagacactcccgtca

SEQ ID NO: 140390 - DNA, 25 bp, Homo sapien
tgtgccagcatgagttccagtgtct

SEQ ID NO: 140391 - DNA, 25 bp, Homo sapien
gcttgaggcctgtccatatgtgcta

SEQ ID NO: 140392 - DNA, 25 bp, Homo sapien
gaagagagccaacaagcctgcttat

SEQ ID NO: 140393 - DNA, 25 bp, Homo sapien
ccactggaaacaggcgagcaagact

SEQ ID NO: 140394 - DNA, 25 bp, Homo sapien
ctggaaaagttctctcgggcgcacg

SEQ ID NO: 140395 - DNA, 25 bp, Homo sapien
taagtatgccatcaccgagaggaga

SEQ ID NO: 140396 - DNA, 25 bp, Homo sapien
caccttagaatagcggagccctgga

SEQ ID NO: 140397 - DNA, 25 bp, Homo sapien
tgtacacagcccttccgaggagatg

SEQ ID NO: 140398 - DNA, 25 bp, Homo sapien
taggaatctacagcaagagcaatgg

SEQ ID NO: 140399 - DNA, 25 bp, Homo sapien
gatcaatggcaaatgtgtcctcagc

SEQ ID NO: 140400 - DNA, 25 bp, Homo sapien
cctgcaggtacagttatggcttaac

SEQ ID NO: 140401 - DNA, 25 bp, Homo sapien
caccaaatagcaagattgagggcgc

SEQ ID NO: 140402 - DNA, 25 bp, Homo sapien
tcccctagctttaactttagccaga

SEQ ID NO: 140403 - DNA, 25 bp, Homo sapien
tctcccctagctttaactttagcca

SEQ ID NO: 140404 - DNA, 25 bp, Homo sapien
tagctttaactttagccagattcca

SEQ ID NO: 140405 - DNA, 25 bp, Homo sapien
gctttaactttagccagattccacc

SEQ ID NO: 140406 - DNA, 25 bp, Homo sapien
ctgccgctgtcgcggggcctccccc

SEQ ID NO: 140407 - DNA, 25 bp, Homo sapien
agctgccgctgtcgcggggcctccc

SEQ ID NO: 140408 - DNA, 25 bp, Homo sapien
cgctgtcgcggggcctccccctcat

SEQ ID NO: 140409 - DNA, 25 bp, Homo sapien
gccgctgtcgcggggcctccccctc

SEQ ID NO: 140410 - DNA, 25 bp, Homo sapien
tctggctgtgatgcagctgccgccc

SEQ ID NO: 140411 - DNA, 25 bp, Homo sapien
tggctgtgatgcagctgccgcccgc

SEQ ID NO: 140412 - DNA, 25 bp, Homo sapien
ctggctgtgatgcagctgccgcccg

SEQ ID NO: 140413 - DNA, 25 bp, Homo sapien
ctgccgcccgctccctgtcccctgc

SEQ ID NO: 140414 - DNA, 25 bp, Homo sapien
cgccactatcactgaatgatattgg

SEQ ID NO: 140415 - DNA, 25 bp, Homo sapien
gtcattgttatccaccgccactatc

SEQ ID NO: 140416 - DNA, 25 bp, Homo sapien
ccggtgggtattcttagccagcagc

SEQ ID NO: 140417 - DNA, 25 bp, Homo sapien
tagtggaagacgagaaattcacagc

SEQ ID NO: 140418 - DNA, 25 bp, Homo sapien
aaggctgccggtccctggttccagc

SEQ ID NO: 140419 - DNA, 25 bp, Homo sapien
cctgatgcattgggccttggcagct

SEQ ID NO: 140420 - DNA, 25 bp, Homo sapien
ccctgatgcattgggccttggcagc

SEQ ID NO: 140421 - DNA, 25 bp, Homo sapien
ctgtcgctaccaggaaccatctgca

SEQ ID NO: 140422 - DNA, 25 bp, Homo sapien
agatcctacgcgaagacccaggctc

SEQ ID NO: 140423 - DNA, 25 bp, Homo sapien
ggaaccatctgcaaattactatctc

SEQ ID NO: 140424 - DNA, 25 bp, Homo sapien
aggctggcagatcctacgcgaagac

SEQ ID NO: 140425 - DNA, 25 bp, Homo sapien
tggccccgccccaaagcttctctga

SEQ ID NO: 140426 - DNA, 25 bp, Homo sapien
cctggcaagggactgtcagcaaatt

SEQ ID NO: 140427 - DNA, 25 bp, Homo sapien
tggcaagggactgtcagcaaattcc

SEQ ID NO: 140428 - DNA, 25 bp, Homo sapien
gtgagagaggcatcccggctcctcc

SEQ ID NO: 140429 - DNA, 25 bp, Homo sapien
gaggagactgccagcgggtcctcct

SEQ ID NO: 140430 - DNA, 25 bp, Homo sapien
gctccacgctccccacctgggagga

SEQ ID NO: 140431 - DNA, 25 bp, Homo sapien
ggaggagactgccagcgggtcctcc

SEQ ID NO: 140432 - DNA, 25 bp, Homo sapien
cctggagccccatgcggaagttgca

SEQ ID NO: 140433 - DNA, 25 bp, Homo sapien
gagccccatgcggaagttgcaactc

SEQ ID NO: 140434 - DNA, 25 bp, Homo sapien
cccatgcggaagttgcaactccctg

SEQ ID NO: 140435 - DNA, 25 bp, Homo sapien
catgcggaagttgcaactccctgca

SEQ ID NO: 140436 - DNA, 25 bp, Homo sapien
tgctggcactcgggcaggagggatg

SEQ ID NO: 140437 - DNA, 25 bp, Homo sapien
cctgtttttggctccgataggccca

SEQ ID NO: 140438 - DNA, 25 bp, Homo sapien
cactccctggctatgctcacagctg

SEQ ID NO: 140439 - DNA, 25 bp, Homo sapien
ttggctccgataggcccacagaaat

SEQ ID NO: 140440 - DNA, 25 bp, Homo sapien
gacacctgcattttcgggggtgaac

SEQ ID NO: 140441 - DNA, 25 bp, Homo sapien
tcagagcagaggtcgtggaattcga

SEQ ID NO: 140442 - DNA, 25 bp, Homo sapien
taggaagctccacggtgccactaga

SEQ ID NO: 140443 - DNA, 25 bp, Homo sapien
tggaattcgagagttgaggcagtgg

SEQ ID NO: 140444 - DNA, 25 bp, Homo sapien
tcttacctattgagcgggtgactca

SEQ ID NO: 140445 - DNA, 25 bp, Homo sapien
ccccagcagtaagaggtgagctcag

SEQ ID NO: 140446 - DNA, 25 bp, Homo sapien
tgctgcctgagaaggtctccccaag

SEQ ID NO: 140447 - DNA, 25 bp, Homo sapien
tgagtgtggttgcagctgtcacaac

SEQ ID NO: 140448 - DNA, 25 bp, Homo sapien
gctcccgtgactcgagatgtccttc

SEQ ID NO: 140449 - DNA, 25 bp, Homo sapien
tcccgtgactcgagatgtccttcag

SEQ ID NO: 140450 - DNA, 25 bp, Homo sapien
ccgtgactcgagatgtccttcagca

SEQ ID NO: 140451 - DNA, 25 bp, Homo sapien
ccctgctcccgtgactcgagatgtc

SEQ ID NO: 140452 - DNA, 25 bp, Homo sapien
tgaacagatgaggatagggataagg

SEQ ID NO: 140453 - DNA, 25 bp, Homo sapien
aagatctcatctggctgagatccag

SEQ ID NO: 140454 - DNA, 25 bp, Homo sapien
atgaggatagggataaggaccagga

SEQ ID NO: 140455 - DNA, 25 bp, Homo sapien
gaacagatgaggatagggataagga

SEQ ID NO: 140456 - DNA, 25 bp, Homo sapien
cattcaacccagctgagcagcagct

SEQ ID NO: 140457 - DNA, 25 bp, Homo sapien
gcagcagctgtggggagcgggccat

SEQ ID NO: 140458 - DNA, 25 bp, Homo sapien
tgagcagcagctgtggggagcgggc

SEQ ID NO: 140459 - DNA, 25 bp, Homo sapien
ctgagcagcagctgtggggagcggg

SEQ ID NO: 140460 - DNA, 25 bp, Homo sapien
cacagggacaacagaaccctctcag

SEQ ID NO: 140461 - DNA, 25 bp, Homo sapien
gggacaacagaaccctctcagtgca

SEQ ID NO: 140462 - DNA, 25 bp, Homo sapien
gcacagggacaacagaaccctctca

SEQ ID NO: 140463 - DNA, 25 bp, Homo sapien
cagggacaacagaaccctctcagtg

SEQ ID NO: 140464 - DNA, 25 bp, Homo sapien
tgatcagtccccaggaaacggtcct

SEQ ID NO: 140465 - DNA, 25 bp, Homo sapien
tctgagtggcccagcggtgtccccg

SEQ ID NO: 140466 - DNA, 25 bp, Homo sapien
tctgggctgtaataggaccttccct

SEQ ID NO: 140467 - DNA, 25 bp, Homo sapien
ctcgattcctgaccccgagggaggc

SEQ ID NO: 140468 - DNA, 25 bp, Homo sapien
cttctagcttgggatgtccagtcac

SEQ ID NO: 140469 - DNA, 25 bp, Homo sapien
accttctagcttgggatgtccagtc

SEQ ID NO: 140470 - DNA, 25 bp, Homo sapien
ccttctagcttgggatgtccagtca

SEQ ID NO: 140471 - DNA, 25 bp, Homo sapien
taccttctagcttgggatgtccagt

SEQ ID NO: 140472 - DNA, 25 bp, Homo sapien
tacacattataactgcggtcactgc

SEQ ID NO: 140473 - DNA, 25 bp, Homo sapien
ctgagccatgggagccaaggttttg

SEQ ID NO: 140474 - DNA, 25 bp, Homo sapien
atgacgtcacgtctgctgcctggcc

SEQ ID NO: 140475 - DNA, 25 bp, Homo sapien
cacagccccatgatgaatgaggacc

SEQ ID NO: 140476 - DNA, 25 bp, Homo sapien
gtctcccttagttgtgtcattccag

SEQ ID NO: 140477 - DNA, 25 bp, Homo sapien
cagggtctcccttagttgtgtcatt

SEQ ID NO: 140478 - DNA, 25 bp, Homo sapien
tcccttagttgtgtcattccagaag

SEQ ID NO: 140479 - DNA, 25 bp, Homo sapien
ccttagttgtgtcattccagaagtc

SEQ ID NO: 140480 - DNA, 25 bp, Homo sapien
agtgagcagccatgatggtgcccag

SEQ ID NO: 140481 - DNA, 25 bp, Homo sapien
ctgcctatgcccctgagtaagtgag

SEQ ID NO: 140482 - DNA, 25 bp, Homo sapien
cccaacccatggctttctgcctatg

SEQ ID NO: 140483 - DNA, 25 bp, Homo sapien
ctgagtaagtgagcagccatgatgg

SEQ ID NO: 140484 - DNA, 25 bp, Homo sapien
ggttctcccaaagaccatcacgtag

SEQ ID NO: 140485 - DNA, 25 bp, Homo sapien
aatgagagacagaaggccctttacc

SEQ ID NO: 140486 - DNA, 25 bp, Homo sapien
gaccatcacgtagtaggcctcaatg

SEQ ID NO: 140487 - DNA, 25 bp, Homo sapien
tgatagtagggaccatatctttctc

SEQ ID NO: 140488 - DNA, 25 bp, Homo sapien
taccctagggtatgagaaccatccc

SEQ ID NO: 140489 - DNA, 25 bp, Homo sapien
tggctcaaggtcatggcccagagaa

SEQ ID NO: 140490 - DNA, 25 bp, Homo sapien
tgctcaaactttagtccagggacag

SEQ ID NO: 140491 - DNA, 25 bp, Homo sapien
accccagagttaggatggtccagga

SEQ ID NO: 140492 - DNA, 25 bp, Homo sapien
gaaggtccacgtcaggcccggaggc

SEQ ID NO: 140493 - DNA, 25 bp, Homo sapien
aaggtccacgtcaggcccggaggct

SEQ ID NO: 140494 - DNA, 25 bp, Homo sapien
tgaacaagataaataaaaatccctc

SEQ ID NO: 140495 - DNA, 25 bp, Homo sapien
cagtgaacaagataaataaaaatcc

SEQ ID NO: 140496 - DNA, 25 bp, Homo sapien
ccaggtcagatgcaaagactccctt

SEQ ID NO: 140497 - DNA, 25 bp, Homo sapien
tctgtaaccttccccctgtactcag

SEQ ID NO: 140498 - DNA, 25 bp, Homo sapien
ctgtaaccttccccctgtactcagg

SEQ ID NO: 140499 - DNA, 25 bp, Homo sapien
ttctgtaaccttccccctgtactca

SEQ ID NO: 140500 - DNA, 25 bp, Homo sapien
atgttgaggcacagcacggtgggga

SEQ ID NO: 140501 - DNA, 25 bp, Homo sapien
ggtgttccgagactggaagcattca

SEQ ID NO: 140502 - DNA, 25 bp, Homo sapien
tgcccctggaggacggtgttccgag

SEQ ID NO: 140503 - DNA, 25 bp, Homo sapien
gctgcccctggaggacggtgttccg

SEQ ID NO: 140504 - DNA, 25 bp, Homo sapien
ccacgcagctttccggaggaaggag

SEQ ID NO: 140505 - DNA, 25 bp, Homo sapien
agtcccacgcagctttccggaggaa

SEQ ID NO: 140506 - DNA, 25 bp, Homo sapien
gcagctttccggaggaaggagtaaa

SEQ ID NO: 140507 - DNA, 25 bp, Homo sapien
catagtcccacgcagctttccggag

SEQ ID NO: 140508 - DNA, 25 bp, Homo sapien
gggagatgtcttctcgctctgctcc

SEQ ID NO: 140509 - DNA, 25 bp, Homo sapien
ggaagtctccgagggagatgtcttc

SEQ ID NO: 140510 - DNA, 25 bp, Homo sapien
tccaaggaagtctccgagggagatg

SEQ ID NO: 140511 - DNA, 25 bp, Homo sapien
ggagatgtcttctcgctctgctccc

SEQ ID NO: 140512 - DNA, 25 bp, Homo sapien
ttcattgttatgctgttgaagaacc

SEQ ID NO: 140513 - DNA, 25 bp, Homo sapien
tatgctgttgaagaaccaggaacag

SEQ ID NO: 140514 - DNA, 25 bp, Homo sapien
cattgttatgctgttgaagaaccag

SEQ ID NO: 140515 - DNA, 25 bp, Homo sapien
tgttatgctgttgaagaaccaggaa

SEQ ID NO: 140516 - DNA, 25 bp, Homo sapien
cagatccagtatagttgatgggcaa

SEQ ID NO: 140517 - DNA, 25 bp, Homo sapien
tggtactggaacacgatgtagatgc

SEQ ID NO: 140518 - DNA, 25 bp, Homo sapien
cacacttgttaatcagatcctcgtc

SEQ ID NO: 140519 - DNA, 25 bp, Homo sapien
cgatgtagatgcgtgcgtcgtcccc

SEQ ID NO: 140520 - DNA, 25 bp, Homo sapien
ggagacattgacaatggtggtccga

SEQ ID NO: 140521 - DNA, 25 bp, Homo sapien
ggtccgagcaaagtgactgctccag

SEQ ID NO: 140522 - DNA, 25 bp, Homo sapien
cattgacaatggtggtccgagcaaa

SEQ ID NO: 140523 - DNA, 25 bp, Homo sapien
caatggtggtccgagcaaagtgact

SEQ ID NO: 140524 - DNA, 25 bp, Homo sapien
gcctcgggaaggagccgatatccct

SEQ ID NO: 140525 - DNA, 25 bp, Homo sapien
tgagaggatgccatagcccctttcc

SEQ ID NO: 140526 - DNA, 25 bp, Homo sapien
gcccctttccgctcatttcagaatt

SEQ ID NO: 140527 - DNA, 25 bp, Homo sapien
catttcagaatttgggttaagccag

SEQ ID NO: 140528 - DNA, 25 bp, Homo sapien
ggaccagacggtttgcagcaccgcc

SEQ ID NO: 140529 - DNA, 25 bp, Homo sapien
aggaggaccagacggtttgcagcac

SEQ ID NO: 140530 - DNA, 25 bp, Homo sapien
gggaggaggaccagacggtttgcag

SEQ ID NO: 140531 - DNA, 25 bp, Homo sapien
gaggaccagacggtttgcagcaccg

SEQ ID NO: 140532 - DNA, 25 bp, Homo sapien
agccatgaacatgaagttggtgatg

SEQ ID NO: 140533 - DNA, 25 bp, Homo sapien
ttggctattcctgggtgcaaacccc

SEQ ID NO: 140534 - DNA, 25 bp, Homo sapien
gcaggctatgcagccacaggagctt

SEQ ID NO: 140535 - DNA, 25 bp, Homo sapien
ccaggcagtgatgagccatgaacat

SEQ ID NO: 140536 - DNA, 25 bp, Homo sapien
tccttgggcacataggtgatcatta

SEQ ID NO: 140537 - DNA, 25 bp, Homo sapien
gttctgggtcttcaatgtccttggg

SEQ ID NO: 140538 - DNA, 25 bp, Homo sapien
aggtgatcattagtgtccttgtgac

SEQ ID NO: 140539 - DNA, 25 bp, Homo sapien
ttcaatgtccttgggcacataggtg

SEQ ID NO: 140540 - DNA, 25 bp, Homo sapien
tcttgtcacgacactgcctggatag

SEQ ID NO: 140541 - DNA, 25 bp, Homo sapien
cctgacgtcgtagcagaagtggact

SEQ ID NO: 140542 - DNA, 25 bp, Homo sapien
gaagtggactcttgtcacgacactg

SEQ ID NO: 140543 - DNA, 25 bp, Homo sapien
tctgatcgtccaagtcgatcaggtt

SEQ ID NO: 140544 - DNA, 25 bp, Homo sapien
gccttggctgtatagaaaagccggc

SEQ ID NO: 140545 - DNA, 25 bp, Homo sapien
ctgtatagaaaagccggccccgcat

SEQ ID NO: 140546 - DNA, 25 bp, Homo sapien
ttggctgtatagaaaagccggcccc

SEQ ID NO: 140547 - DNA, 25 bp, Homo sapien
ggctgtatagaaaagccggccccgc

SEQ ID NO: 140548 - DNA, 25 bp, Homo sapien
ttgagctcggcgttgaactcgtccg

SEQ ID NO: 140549 - DNA, 25 bp, Homo sapien
gaactcgtccgttagctgctcctct

SEQ ID NO: 140550 - DNA, 25 bp, Homo sapien
tcgctgtaatactgctctgcatcca

SEQ ID NO: 140551 - DNA, 25 bp, Homo sapien
gacaaagatcaggtccagccgcttg

SEQ ID NO: 140552 - DNA, 25 bp, Homo sapien
ctggacatacttgtaatccttacgg

SEQ ID NO: 140553 - DNA, 25 bp, Homo sapien
ggacatacttgtaatccttacggac

SEQ ID NO: 140554 - DNA, 25 bp, Homo sapien
gacatacttgtaatccttacggaca

SEQ ID NO: 140555 - DNA, 25 bp, Homo sapien
cactggacatacttgtaatccttac

SEQ ID NO: 140556 - DNA, 25 bp, Homo sapien
ccatagtgaccctccagtaatatga

SEQ ID NO: 140557 - DNA, 25 bp, Homo sapien
cagtaatatgatttgacgatggtgg

SEQ ID NO: 140558 - DNA, 25 bp, Homo sapien
taatatgatttgacgatggtggtca

SEQ ID NO: 140559 - DNA, 25 bp, Homo sapien
gaccctccagtaatatgatttgacg

SEQ ID NO: 140560 - DNA, 25 bp, Homo sapien
gtcctgctgccttcttcagtctcag

SEQ ID NO: 140561 - DNA, 25 bp, Homo sapien
ggagagaaggccctgtcctgctgcc

SEQ ID NO: 140562 - DNA, 25 bp, Homo sapien
caatgacatggggagagaaggccct

SEQ ID NO: 140563 - DNA, 25 bp, Homo sapien
cttcagtctcagaggagctcagagg

SEQ ID NO: 140564 - DNA, 25 bp, Homo sapien
aagaggaaggtgttgattgcgataa

SEQ ID NO: 140565 - DNA, 25 bp, Homo sapien
ttgattgcgataaagcgggcccacc

SEQ ID NO: 140566 - DNA, 25 bp, Homo sapien
ccaccaaaagaagcggcggacagac

SEQ ID NO: 140567 - DNA, 25 bp, Homo sapien
caggcgtggtgagaaagaagaagag

SEQ ID NO: 140568 - DNA, 25 bp, Homo sapien
cagcttctcgatggggcgggtgacg

SEQ ID NO: 140569 - DNA, 25 bp, Homo sapien
ggtgacgttgtacatgtcgatagtg

SEQ ID NO: 140570 - DNA, 25 bp, Homo sapien
gacgttgtacatgtcgatagtgttc

SEQ ID NO: 140571 - DNA, 25 bp, Homo sapien
gggcgggtgacgttgtacatgtcga

SEQ ID NO: 140572 - DNA, 25 bp, Homo sapien
tagacaatcagaggcagtatcactg

SEQ ID NO: 140573 - DNA, 25 bp, Homo sapien
tcagaggcagtatcactgtgaagcc

SEQ ID NO: 140574 - DNA, 25 bp, Homo sapien
ggagaagtagacaatcagaggcagt

SEQ ID NO: 140575 - DNA, 25 bp, Homo sapien
gaaggcggagaagtagacaatcaga

SEQ ID NO: 140576 - DNA, 25 bp, Homo sapien
cccatagagggcagaatgactacca

SEQ ID NO: 140577 - DNA, 25 bp, Homo sapien
gatgtagcacttgtgcaccatgacc

SEQ ID NO: 140578 - DNA, 25 bp, Homo sapien
gcaccatgaccagattctgacttga

SEQ ID NO: 140579 - DNA, 25 bp, Homo sapien
catgaacaccagaaagatgtagcac

SEQ ID NO: 140580 - DNA, 25 bp, Homo sapien
cctgatggatgcttgctctagatag

SEQ ID NO: 140581 - DNA, 25 bp, Homo sapien
tggaacctgatggatgcttgctcta

SEQ ID NO: 140582 - DNA, 25 bp, Homo sapien
gcttgctctagatagtagatgtcaa

SEQ ID NO: 140583 - DNA, 25 bp, Homo sapien
ggatgcttgctctagatagtagatg

SEQ ID NO: 140584 - DNA, 25 bp, Homo sapien
cgtgatcacgtagttgacaaagaag

SEQ ID NO: 140585 - DNA, 25 bp, Homo sapien
ctccatgcctgtgccaagtaaagct

SEQ ID NO: 140586 - DNA, 25 bp, Homo sapien
gccaagtaaagctgccgtgatcacg

SEQ ID NO: 140587 - DNA, 25 bp, Homo sapien
ctctgatctagagaagaagaggcgg

SEQ ID NO: 140588 - DNA, 25 bp, Homo sapien
tgctgtacgccatcaccacgctgaa

SEQ ID NO: 140589 - DNA, 25 bp, Homo sapien
caaactggaagtctatggcctggtt

SEQ ID NO: 140590 - DNA, 25 bp, Homo sapien
gttcatcatccacgcatactcacgc

SEQ ID NO: 140591 - DNA, 25 bp, Homo sapien
aaggcacaatgatggggcaagtgat

SEQ ID NO: 140592 - DNA, 25 bp, Homo sapien
ccttcaagtctggacctttgtggct

SEQ ID NO: 140593 - DNA, 25 bp, Homo sapien
caagtctggacctttgtggctccag

SEQ ID NO: 140594 - DNA, 25 bp, Homo sapien
tggccccttcaagtctggacctttg

SEQ ID NO: 140595 - DNA, 25 bp, Homo sapien
tcagtggccccttcaagtctggacc

SEQ ID NO: 140596 - DNA, 25 bp, Homo sapien
gagtagtacatgttatagcgatccg

SEQ ID NO: 140597 - DNA, 25 bp, Homo sapien
tagcgatccgtcaagtgcttcatgc

SEQ ID NO: 140598 - DNA, 25 bp, Homo sapien
ccaagagtggcgcaaagatggcctg

SEQ ID NO: 140599 - DNA, 25 bp, Homo sapien
gcatccagaacagacccaagagtgg

SEQ ID NO: 140600 - DNA, 25 bp, Homo sapien
aaaggcaatcaccatggcaatgagg

SEQ ID NO: 140601 - DNA, 25 bp, Homo sapien
aaaatgccaacaaaggcaatcacca

SEQ ID NO: 140602 - DNA, 25 bp, Homo sapien
acagggaaaagatggtgatggcgtg

SEQ ID NO: 140603 - DNA, 25 bp, Homo sapien
tcgtagtcggcaaccatccgaagct

SEQ ID NO: 140604 - DNA, 25 bp, Homo sapien
tgcttggctccatgtcaaacactgt

SEQ ID NO: 140605 - DNA, 25 bp, Homo sapien
ggctccatgtcaaacactgtctgga

SEQ ID NO: 140606 - DNA, 25 bp, Homo sapien
tgctgcttggctccatgtcaaacac

SEQ ID NO: 140607 - DNA, 25 bp, Homo sapien
catgtcaaacactgtctggatctcc

SEQ ID NO: 140608 - DNA, 25 bp, Homo sapien
ggcagcctttggtcccgaggccaat

SEQ ID NO: 140609 - DNA, 25 bp, Homo sapien
ggtgccttccagacaatgccgagta

SEQ ID NO: 140610 - DNA, 25 bp, Homo sapien
tcagtgcagacttctaatagttccc

SEQ ID NO: 140611 - DNA, 25 bp, Homo sapien
tgcgtctacatgaccgaggtcgctg

SEQ ID NO: 140612 - DNA, 25 bp, Homo sapien
ttcatggtgccataggtgtgcctgg

SEQ ID NO: 140613 - DNA, 25 bp, Homo sapien
aactgggccgagtctagctccctcg

SEQ ID NO: 140614 - DNA, 25 bp, Homo sapien
tccggttcttgcagcacggtggcca

SEQ ID NO: 140615 - DNA, 25 bp, Homo sapien
tccctcttccggctggttgttcatg

SEQ ID NO: 140616 - DNA, 25 bp, Homo sapien
caggagacgcttttaagtggccaca

SEQ ID NO: 140617 - DNA, 25 bp, Homo sapien
tgcacggtggtcctgatgagagccc

SEQ ID NO: 140618 - DNA, 25 bp, Homo sapien
tcaacaagtcgccagtggaggcctc

SEQ ID NO: 140619 - DNA, 25 bp, Homo sapien
tcacctgcggtgaagcttggagctt

SEQ ID NO: 140620 - DNA, 25 bp, Homo sapien
ggaggctaaaagatgccccctgctc

SEQ ID NO: 140621 - DNA, 25 bp, Homo sapien
tggcggggggaggctaaaagatgcc

SEQ ID NO: 140622 - DNA, 25 bp, Homo sapien
tccaccatcctgtagtgaccatggg

SEQ ID NO: 140623 - DNA, 25 bp, Homo sapien
gctccaccatcctgtagtgaccatg

SEQ ID NO: 140624 - DNA, 25 bp, Homo sapien
tggtggccaaggttagcccacaccc

SEQ ID NO: 140625 - DNA, 25 bp, Homo sapien
cagaggacgcaacgctgctgatagg

SEQ ID NO: 140626 - DNA, 25 bp, Homo sapien
caagaaggttcagcattctggcaca

SEQ ID NO: 140627 - DNA, 25 bp, Homo sapien
taggcaataccggttcctgggcggc

SEQ ID NO: 140628 - DNA, 25 bp, Homo sapien
ttgggaggacttgtttattcaaggc

SEQ ID NO: 140629 - DNA, 25 bp, Homo sapien
gggaggacttgtttattcaaggcac

SEQ ID NO: 140630 - DNA, 25 bp, Homo sapien
gaggacttgtttattcaaggcacgg

SEQ ID NO: 140631 - DNA, 25 bp, Homo sapien
aggacttgtttattcaaggcacggt

SEQ ID NO: 140632 - DNA, 25 bp, Homo sapien
aggccgagaaacttcgcgcctggga

SEQ ID NO: 140633 - DNA, 25 bp, Homo sapien
gactcgacgaatcaggcccgtgtct

SEQ ID NO: 140634 - DNA, 25 bp, Homo sapien
gacctgccgacgactaaggctcagt

SEQ ID NO: 140635 - DNA, 25 bp, Homo sapien
agaaagatccttccggtcgcctctg

SEQ ID NO: 140636 - DNA, 25 bp, Homo sapien
gccgggagtcgttgtcggcctgggc

SEQ ID NO: 140637 - DNA, 25 bp, Homo sapien
ccctccacccgggtgcgcgtcacag

SEQ ID NO: 140638 - DNA, 25 bp, Homo sapien
ggcctgggcgggcggtgcagctcac

SEQ ID NO: 140639 - DNA, 25 bp, Homo sapien
ctccacccgggtgcgcgtcacagac

SEQ ID NO: 140640 - DNA, 25 bp, Homo sapien
ctcccggaacttcgagccccagcgg

SEQ ID NO: 140641 - DNA, 25 bp, Homo sapien
cggaacttcgagccccagcgggcag

SEQ ID NO: 140642 - DNA, 25 bp, Homo sapien
agagcgtgcccggcgcaaagcactg

SEQ ID NO: 140643 - DNA, 25 bp, Homo sapien
gcacgcaggcgcagagcgtgcccgg

SEQ ID NO: 140644 - DNA, 25 bp, Homo sapien
cgacgtttggaagccttagtggagg

SEQ ID NO: 140645 - DNA, 25 bp, Homo sapien
agcgactccaccctgctacgcactc

SEQ ID NO: 140646 - DNA, 25 bp, Homo sapien
agcagaagtgaagcgcgaccggaca

SEQ ID NO: 140647 - DNA, 25 bp, Homo sapien
gcatgaagggctgcgagaaattggg

SEQ ID NO: 140648 - DNA, 25 bp, Homo sapien
caaacttcatggcacgttaagaacc

SEQ ID NO: 140649 - DNA, 25 bp, Homo sapien
catgtgaaagccgtgaagctcccca

SEQ ID NO: 140650 - DNA, 25 bp, Homo sapien
gtgacgcaaagtcccatctaacgtg

SEQ ID NO: 140651 - DNA, 25 bp, Homo sapien
aaaaacatgcagattctcgagcccg

SEQ ID NO: 140652 - DNA, 25 bp, Homo sapien
tccctttccttacctagccaggcta

SEQ ID NO: 140653 - DNA, 25 bp, Homo sapien
atgcaactccctttccttacctagc

SEQ ID NO: 140654 - DNA, 25 bp, Homo sapien
gatgcaactccctttccttacctag

SEQ ID NO: 140655 - DNA, 25 bp, Homo sapien
gagatgcaactccctttccttacct

SEQ ID NO: 140656 - DNA, 25 bp, Homo sapien
agaggaggaattgggtggccacaac

SEQ ID NO: 140657 - DNA, 25 bp, Homo sapien
cagaaagtgtctttcgaagaggagg

SEQ ID NO: 140658 - DNA, 25 bp, Homo sapien
gaaagtaaagatggtcctggcacag

SEQ ID NO: 140659 - DNA, 25 bp, Homo sapien
tttgtggagaaagtaaagatggtcc

SEQ ID NO: 140660 - DNA, 25 bp, Homo sapien
actttgactctggtcagaaagggca

SEQ ID NO: 140661 - DNA, 25 bp, Homo sapien
cttgccagactctgtcatggtatcg

SEQ ID NO: 140662 - DNA, 25 bp, Homo sapien
tggtatcgtggtgaccctcagcctc

SEQ ID NO: 140663 - DNA, 25 bp, Homo sapien
gccaatggggaagctgggctaccca

SEQ ID NO: 140664 - DNA, 25 bp, Homo sapien
cccttggctccaaaattatgctggt

SEQ ID NO: 140665 - DNA, 25 bp, Homo sapien
gctagcctgagagtgccttccatac

SEQ ID NO: 140666 - DNA, 25 bp, Homo sapien
tcccttggctccaaaattatgctgg

SEQ ID NO: 140667 - DNA, 25 bp, Homo sapien
cccaaaggggcagctagcctgagag

SEQ ID NO: 140668 - DNA, 25 bp, Homo sapien
actctccatgagcaggagcttcgga

SEQ ID NO: 140669 - DNA, 25 bp, Homo sapien
caattcgaactctccatgagcagga

SEQ ID NO: 140670 - DNA, 25 bp, Homo sapien
caggagcttcggaaataggaataga

SEQ ID NO: 140671 - DNA, 25 bp, Homo sapien
tccatgagcaggagcttcggaaata

SEQ ID NO: 140672 - DNA, 25 bp, Homo sapien
tgttggcccccatcctttatgagat

SEQ ID NO: 140673 - DNA, 25 bp, Homo sapien
ctttatgagattgatgggcaccgtc

SEQ ID NO: 140674 - DNA, 25 bp, Homo sapien
tctcgtagtcgatgcctttcaaggc

SEQ ID NO: 140675 - DNA, 25 bp, Homo sapien
gatgggcaccgtctcgtagtcgatg

SEQ ID NO: 140676 - DNA, 25 bp, Homo sapien
tcagtgcctggaagtccttagaaaa

SEQ ID NO: 140677 - DNA, 25 bp, Homo sapien
ttcagtgcctggaagtccttagaaa

SEQ ID NO: 140678 - DNA, 25 bp, Homo sapien
gattcagtgcctggaagtccttaga

SEQ ID NO: 140679 - DNA, 25 bp, Homo sapien
aggattcagtgcctggaagtcctta

SEQ ID NO: 140680 - DNA, 25 bp, Homo sapien
tggtgaatggtgattccatcaatct

SEQ ID NO: 140681 - DNA, 25 bp, Homo sapien
ctggtgaatggtgattccatcaatc

SEQ ID NO: 140682 - DNA, 25 bp, Homo sapien
gactggtgaatggtgattccatcaa

SEQ ID NO: 140683 - DNA, 25 bp, Homo sapien
gtgaatggtgattccatcaatcttc

SEQ ID NO: 140684 - DNA, 25 bp, Homo sapien
ttctgctcagctcaagccctataag

SEQ ID NO: 140685 - DNA, 25 bp, Homo sapien
tccccacgagtcttgtattgagcct

SEQ ID NO: 140686 - DNA, 25 bp, Homo sapien
tgctaggcaccttgactgtacacag

SEQ ID NO: 140687 - DNA, 25 bp, Homo sapien
ttggaccttatcatgcagaacttgg

SEQ ID NO: 140688 - DNA, 25 bp, Homo sapien
tggatgccaccagcgatgaggtcag

SEQ ID NO: 140689 - DNA, 25 bp, Homo sapien
tcagaaatcatacgcacgctggccc

SEQ ID NO: 140690 - DNA, 25 bp, Homo sapien
aagtcgcggagtgggacgcatctcc

SEQ ID NO: 140691 - DNA, 25 bp, Homo sapien
tgaggcagaagtcgcggagtgggac

SEQ ID NO: 140692 - DNA, 25 bp, Homo sapien
aaaagccacgtgattctgtcagaga

SEQ ID NO: 140693 - DNA, 25 bp, Homo sapien
tcctttgttaaagcgacatgcgggt

SEQ ID NO: 140694 - DNA, 25 bp, Homo sapien
ctttgttatgacctacctgtgggac

SEQ ID NO: 140695 - DNA, 25 bp, Homo sapien
tcctcattcagagtagaagctggca

SEQ ID NO: 140696 - DNA, 25 bp, Homo sapien
gccacaagtgatggcgttctgggcc

SEQ ID NO: 140697 - DNA, 25 bp, Homo sapien
aagtgatggcgttctgggcccaggt

SEQ ID NO: 140698 - DNA, 25 bp, Homo sapien
acaagtgatggcgttctgggcccag

SEQ ID NO: 140699 - DNA, 25 bp, Homo sapien
gtgatggcgttctgggcccaggtca

SEQ ID NO: 140700 - DNA, 25 bp, Homo sapien
taaacatcttattctgggcgcaggg

SEQ ID NO: 140701 - DNA, 25 bp, Homo sapien
catagttatgaaatgggcgcccaac

SEQ ID NO: 140702 - DNA, 25 bp, Homo sapien
tgcgagggccatacctctaagaggc

SEQ ID NO: 140703 - DNA, 25 bp, Homo sapien
agctaaggtctggatgcccacccag

SEQ ID NO: 140704 - DNA, 25 bp, Homo sapien
tatgcccgctgtgctctgtaggatc

SEQ ID NO: 140705 - DNA, 25 bp, Homo sapien
agtatatgcccgctgtgctctgtag

SEQ ID NO: 140706 - DNA, 25 bp, Homo sapien
tcgtctcctacacagtatatgcccg

SEQ ID NO: 140707 - DNA, 25 bp, Homo sapien
tacacagtatatgcccgctgtgctc

SEQ ID NO: 140708 - DNA, 25 bp, Homo sapien
cacagccagtcttctaccttgagta

SEQ ID NO: 140709 - DNA, 25 bp, Homo sapien
gcagacatcatctagcacaatccct

SEQ ID NO: 140710 - DNA, 25 bp, Homo sapien
aagatggattgccttgactgcgcag

SEQ ID NO: 140711 - DNA, 25 bp, Homo sapien
tgagctgaggagtgccccatggcac

SEQ ID NO: 140712 - DNA, 25 bp, Homo sapien
ctgggggtaccaacaatctgcttcg

SEQ ID NO: 140713 - DNA, 25 bp, Homo sapien
aatctgcttcggctctttcacccat

SEQ ID NO: 140714 - DNA, 25 bp, Homo sapien
ctactgggggtaccaacaatctgct

SEQ ID NO: 140715 - DNA, 25 bp, Homo sapien
gggggtaccaacaatctgcttcggc

SEQ ID NO: 140716 - DNA, 25 bp, Homo sapien
tcagggtgcataccccagagtcagt

SEQ ID NO: 140717 - DNA, 25 bp, Homo sapien
ggtgcataccccagagtcagtggct

SEQ ID NO: 140718 - DNA, 25 bp, Homo sapien
agggtgcataccccagagtcagtgg

SEQ ID NO: 140719 - DNA, 25 bp, Homo sapien
gggtgcataccccagagtcagtggc

SEQ ID NO: 140720 - DNA, 25 bp, Homo sapien
caccaagcacagatcagccatggtc

SEQ ID NO: 140721 - DNA, 25 bp, Homo sapien
gcaccaagcacagatcagccatggt

SEQ ID NO: 140722 - DNA, 25 bp, Homo sapien
gagacacctggaaggcctccaagac

SEQ ID NO: 140723 - DNA, 25 bp, Homo sapien
gtagggggtgagatccaccttgaat

SEQ ID NO: 140724 - DNA, 25 bp, Homo sapien
tggctgccggcaggggtgagacacc

SEQ ID NO: 140725 - DNA, 25 bp, Homo sapien
cagcctcttgttgatggagctgatg

SEQ ID NO: 140726 - DNA, 25 bp, Homo sapien
aattaagactctcgtttccaggcct

SEQ ID NO: 140727 - DNA, 25 bp, Homo sapien
caccccacatgcgtgtgacagatga

SEQ ID NO: 140728 - DNA, 25 bp, Homo sapien
gataacagtattcctgcccaccctg

SEQ ID NO: 140729 - DNA, 25 bp, Homo sapien
ccagggctagagttcgagtctccca

SEQ ID NO: 140730 - DNA, 25 bp, Homo sapien
tttaatccgcattctcatctcagcc

SEQ ID NO: 140731 - DNA, 25 bp, Homo sapien
cgggcattctttggagtcacacaca

SEQ ID NO: 140732 - DNA, 25 bp, Homo sapien
aattcacgccaaatttcagcgcggg

SEQ ID NO: 140733 - DNA, 25 bp, Homo sapien
aacaaaagcggatgagaaaaggcac

SEQ ID NO: 140734 - DNA, 25 bp, Homo sapien
cctgggcttcagtttaattcacgcc

SEQ ID NO: 140735 - DNA, 25 bp, Homo sapien
ggaaggacttgacttaccactcatc

SEQ ID NO: 140736 - DNA, 25 bp, Homo sapien
tcatccgtttgagagaagcccctac

SEQ ID NO: 140737 - DNA, 25 bp, Homo sapien
gggaagaccacgtacatatctagtc

SEQ ID NO: 140738 - DNA, 25 bp, Homo sapien
tgcctctagcatatcaggatcaggt

SEQ ID NO: 140739 - DNA, 25 bp, Homo sapien
ttaataatagatctttcatctgcat

SEQ ID NO: 140740 - DNA, 25 bp, Homo sapien
gattgtgaaagttaagaagaactaa

SEQ ID NO: 140741 - DNA, 25 bp, Homo sapien
attctataagcccatatgaattatt

SEQ ID NO: 140742 - DNA, 25 bp, Homo sapien
tggcagagtatcatgacctgggaac

SEQ ID NO: 140743 - DNA, 25 bp, Homo sapien
tgcgattacactgatgattctgagc

SEQ ID NO: 140744 - DNA, 25 bp, Homo sapien
tctggaagggaaaccgtgtcactgt

SEQ ID NO: 140745 - DNA, 25 bp, Homo sapien
ggtgccatgtactcagatcagtcag

SEQ ID NO: 140746 - DNA, 25 bp, Homo sapien
cactgggtgtgttactgcgattaca

SEQ ID NO: 140747 - DNA, 25 bp, Homo sapien
caagagtgattgtgaagctgctccg

SEQ ID NO: 140748 - DNA, 25 bp, Homo sapien
gctccggaagggctttatgctaacc

SEQ ID NO: 140749 - DNA, 25 bp, Homo sapien
gaccacttatctgcagaaggttgcc

SEQ ID NO: 140750 - DNA, 25 bp, Homo sapien
ccccagtggttctaaggtgtggaat

SEQ ID NO: 140751 - DNA, 25 bp, Homo sapien
ggtcagaggtagatcaaagagttcc

SEQ ID NO: 140752 - DNA, 25 bp, Homo sapien
catttgagggagacagaaggtccag

SEQ ID NO: 140753 - DNA, 25 bp, Homo sapien
gggcctcaggaggttcttagaacat

SEQ ID NO: 140754 - DNA, 25 bp, Homo sapien
gaaggtccaggcaaagccataaatc

SEQ ID NO: 140755 - DNA, 25 bp, Homo sapien
tagcataactcaaggaacgggactc

SEQ ID NO: 140756 - DNA, 25 bp, Homo sapien
gctttgcgaggagtatggcccttca

SEQ ID NO: 140757 - DNA, 25 bp, Homo sapien
gcccttcagagatggatgatgccac

SEQ ID NO: 140758 - DNA, 25 bp, Homo sapien
tcccattggatagctgagtgaccgc

SEQ ID NO: 140759 - DNA, 25 bp, Homo sapien
tttgtctttagagtaggagtgctgt

SEQ ID NO: 140760 - DNA, 25 bp, Homo sapien
tttggaatcaaatgcagtgaaaccc

SEQ ID NO: 140761 - DNA, 25 bp, Homo sapien
caggtttccaaagtttctgcattta

SEQ ID NO: 140762 - DNA, 25 bp, Homo sapien
agctttcttgcattgagggcttaaa

SEQ ID NO: 140763 - DNA, 25 bp, Homo sapien
gagctggtttcccttactatgggca

SEQ ID NO: 140764 - DNA, 25 bp, Homo sapien
caatgtaacctaagatcttgtggga

SEQ ID NO: 140765 - DNA, 25 bp, Homo sapien
ggagaaagctctatccagcctgtca

SEQ ID NO: 140766 - DNA, 25 bp, Homo sapien
cattatttcctattccaagagctgg

SEQ ID NO: 140767 - DNA, 25 bp, Homo sapien
agcctctcttagcaaaatgcccggg

SEQ ID NO: 140768 - DNA, 25 bp, Homo sapien
cagtagatactcaaagaaaggcagg

SEQ ID NO: 140769 - DNA, 25 bp, Homo sapien
gagtttgcgaccgatgactatgaca

SEQ ID NO: 140770 - DNA, 25 bp, Homo sapien
tgcagatggctaagtatcaagttcc

SEQ ID NO: 140771 - DNA, 25 bp, Homo sapien
ggcttaataaaaggcagttggattc

SEQ ID NO: 140772 - DNA, 25 bp, Homo sapien
tattgcggtatcacatgtcatatag

SEQ ID NO: 140773 - DNA, 25 bp, Homo sapien
tcaaagcaaagaatgtagtacaaag

SEQ ID NO: 140774 - DNA, 25 bp, Homo sapien
tctgagttcattctattgcggtatc

SEQ ID NO: 140775 - DNA, 25 bp, Homo sapien
tcacacacagtaagtcaagctaatg

SEQ ID NO: 140776 - DNA, 25 bp, Homo sapien
tcagatagcctgttgtagtctcacc

SEQ ID NO: 140777 - DNA, 25 bp, Homo sapien
gcacggtaggcagtcataactcact

SEQ ID NO: 140778 - DNA, 25 bp, Homo sapien
tcccaggcaaaaattaacttattca

SEQ ID NO: 140779 - DNA, 25 bp, Homo sapien
aacttgttcatggttctaaggtaga

SEQ ID NO: 140780 - DNA, 25 bp, Homo sapien
gatggaaacaggtcaggtaaacttg

SEQ ID NO: 140781 - DNA, 25 bp, Homo sapien
aaaactctattgtgatcctgaagtc

SEQ ID NO: 140782 - DNA, 25 bp, Homo sapien
tcctgaagtcagcagtagaacttag

SEQ ID NO: 140783 - DNA, 25 bp, Homo sapien
tcctgccccgcttcctttctgagat

SEQ ID NO: 140784 - DNA, 25 bp, Homo sapien
tgccccgcttcctttctgagatctg

SEQ ID NO: 140785 - DNA, 25 bp, Homo sapien
ctgtttcgaaatgccttgattcctg

SEQ ID NO: 140786 - DNA, 25 bp, Homo sapien
tcctgtttcgaaatgccttgattcc

SEQ ID NO: 140787 - DNA, 25 bp, Homo sapien
tgtttccggagccactcgcggctgg

SEQ ID NO: 140788 - DNA, 25 bp, Homo sapien
tggcagcggagagctccgtgcgcgg

SEQ ID NO: 140789 - DNA, 25 bp, Homo sapien
tgcgcgggctgcagatgtctgacct

SEQ ID NO: 140790 - DNA, 25 bp, Homo sapien
gctcggctgtgctcggcgctcgctc

SEQ ID NO: 140791 - DNA, 25 bp, Homo sapien
ccctggttcagtttcgcttggtacg

SEQ ID NO: 140792 - DNA, 25 bp, Homo sapien
tctgctggtagcttcgagtctgcct

SEQ ID NO: 140793 - DNA, 25 bp, Homo sapien
cagacatggtttccgttggtggcac

SEQ ID NO: 140794 - DNA, 25 bp, Homo sapien
tcatctgggccggaatcataatcct

SEQ ID NO: 140795 - DNA, 25 bp, Homo sapien
gtcatctttggtggctgaagatctg

SEQ ID NO: 140796 - DNA, 25 bp, Homo sapien
tcatctttggtggctgaagatctgt

SEQ ID NO: 140797 - DNA, 25 bp, Homo sapien
taggctcacggtgctctagctcatc

SEQ ID NO: 140798 - DNA, 25 bp, Homo sapien
tgatctcctgtggtagcactggacc

SEQ ID NO: 140799 - DNA, 25 bp, Homo sapien
gaaagtctggtttagtccgctcagg

SEQ ID NO: 140800 - DNA, 25 bp, Homo sapien
ttctagtggctcaggaacgttctca

SEQ ID NO: 140801 - DNA, 25 bp, Homo sapien
aggtttgagcagttgacgtgaatga

SEQ ID NO: 140802 - DNA, 25 bp, Homo sapien
atccccatctgagggaggtttgagc

SEQ ID NO: 140803 - DNA, 25 bp, Homo sapien
gttttcggccactgatgaagtttgt

SEQ ID NO: 140804 - DNA, 25 bp, Homo sapien
cagttgacgtgaatgagttttcggc

SEQ ID NO: 140805 - DNA, 25 bp, Homo sapien
taagccgataatatccctataggga

SEQ ID NO: 140806 - DNA, 25 bp, Homo sapien
cagattttatcccagtatgaccttt

SEQ ID NO: 140807 - DNA, 25 bp, Homo sapien
ctatggttcagtgcaaggtaattcc

SEQ ID NO: 140808 - DNA, 25 bp, Homo sapien
ggagctcctgcgtatgccgagaaat

SEQ ID NO: 140809 - DNA, 25 bp, Homo sapien
ctcaagtaatttagtttgatctttc

SEQ ID NO: 140810 - DNA, 25 bp, Homo sapien
cttccctcaagtaatttagtttgat

SEQ ID NO: 140811 - DNA, 25 bp, Homo sapien
tccctcaagtaatttagtttgatct

SEQ ID NO: 140812 - DNA, 25 bp, Homo sapien
ccctcaagtaatttagtttgatctt

SEQ ID NO: 140813 - DNA, 25 bp, Homo sapien
gctcactataacctctgtttcctgg

SEQ ID NO: 140814 - DNA, 25 bp, Homo sapien
cactataacctctgtttcctgggtt

SEQ ID NO: 140815 - DNA, 25 bp, Homo sapien
tcactataacctctgtttcctgggt

SEQ ID NO: 140816 - DNA, 25 bp, Homo sapien
tcagctcactataacctctgtttcc

SEQ ID NO: 140817 - DNA, 25 bp, Homo sapien
aatctatacagctaaagaggatatc

SEQ ID NO: 140818 - DNA, 25 bp, Homo sapien
aatgtccacgatcttatatatgttc

SEQ ID NO: 140819 - DNA, 25 bp, Homo sapien
taaaagcaattagacttcttccttg

SEQ ID NO: 140820 - DNA, 25 bp, Homo sapien
tccttgcttaatgtccacgatctta

SEQ ID NO: 140821 - DNA, 25 bp, Homo sapien
tagatattgcaaaactgtagcacaa

SEQ ID NO: 140822 - DNA, 25 bp, Homo sapien
gaatcatatgtatgccaccttttga

SEQ ID NO: 140823 - DNA, 25 bp, Homo sapien
gaaatctcatgtacccatttaccca

SEQ ID NO: 140824 - DNA, 25 bp, Homo sapien
gaacagttctttcactaacgaattc

SEQ ID NO: 140825 - DNA, 25 bp, Homo sapien
cactgcttgatggtaaactgaggaa

SEQ ID NO: 140826 - DNA, 25 bp, Homo sapien
tcaagacaggtgtagagtctaccca

SEQ ID NO: 140827 - DNA, 25 bp, Homo sapien
gacaggatgcccgttgctcttgaaa

SEQ ID NO: 140828 - DNA, 25 bp, Homo sapien
tcaggaccctgacaaacgaaaagaa

SEQ ID NO: 140829 - DNA, 25 bp, Homo sapien
tgacgactgcggtagatccatggct

SEQ ID NO: 140830 - DNA, 25 bp, Homo sapien
tcctggacgttcacccgtagagtca

SEQ ID NO: 140831 - DNA, 25 bp, Homo sapien
cagcgattggttcggaagcggacat

SEQ ID NO: 140832 - DNA, 25 bp, Homo sapien
tttaactctgccagggatccgctgg

SEQ ID NO: 140833 - DNA, 25 bp, Homo sapien
agcgtcccgaaacccaactgctcat

SEQ ID NO: 140834 - DNA, 25 bp, Homo sapien
tccttcagactccatcgggttctcc

SEQ ID NO: 140835 - DNA, 25 bp, Homo sapien
cgtgggttccgcctgatttagagat

SEQ ID NO: 140836 - DNA, 25 bp, Homo sapien
gaaacccaactgctcatacaaccat

SEQ ID NO: 140837 - DNA, 25 bp, Homo sapien
accagctccggagcagccgtagcca

SEQ ID NO: 140838 - DNA, 25 bp, Homo sapien
cggctctcctatcgcggcgccacca

SEQ ID NO: 140839 - DNA, 25 bp, Homo sapien
tggaaactactagaagcggccgcaa

SEQ ID NO: 140840 - DNA, 25 bp, Homo sapien
acagcctcaggaccgcttagtgcca

SEQ ID NO: 140841 - DNA, 25 bp, Homo sapien
cctccacgatccagcgtgggtctcc

SEQ ID NO: 140842 - DNA, 25 bp, Homo sapien
ccagttgttgacgttggtggcgtcc

SEQ ID NO: 140843 - DNA, 25 bp, Homo sapien
cagtgccagttgttgacgttggtgg

SEQ ID NO: 140844 - DNA, 25 bp, Homo sapien
ttgttgacgttggtggcgtccgccc

SEQ ID NO: 140845 - DNA, 25 bp, Homo sapien
gatgcctctccatcaagcttactca

SEQ ID NO: 140846 - DNA, 25 bp, Homo sapien
aagtttccctttgcgattgttaatg

SEQ ID NO: 140847 - DNA, 25 bp, Homo sapien
tcttcattttgaacctgcactgcca

SEQ ID NO: 140848 - DNA, 25 bp, Homo sapien
tgttttcagcttatccgtggaccaa

SEQ ID NO: 140849 - DNA, 25 bp, Homo sapien
tcatggatgggacttatgagaccca

SEQ ID NO: 140850 - DNA, 25 bp, Homo sapien
gatactgctttacataggactccaa

SEQ ID NO: 140851 - DNA, 25 bp, Homo sapien
gaaatatcatcgtaggtgtcccaac

SEQ ID NO: 140852 - DNA, 25 bp, Homo sapien
gaagacagtgcacaaagatcaagac

SEQ ID NO: 140853 - DNA, 25 bp, Homo sapien
ttcttaccatttaatgtgcacaaaa

SEQ ID NO: 140854 - DNA, 25 bp, Homo sapien
tttcttaccatttaatgtgcacaaa

SEQ ID NO: 140855 - DNA, 25 bp, Homo sapien
tttttcatggtaaagcaccatattt

SEQ ID NO: 140856 - DNA, 25 bp, Homo sapien
tcatggtaaagcaccatatttattg

SEQ ID NO: 140857 - DNA, 25 bp, Homo sapien
ttcatggtaaagcaccatatttatt

SEQ ID NO: 140858 - DNA, 25 bp, Homo sapien
tttcatggtaaagcaccatatttat

SEQ ID NO: 140859 - DNA, 25 bp, Homo sapien
cactaggtgaatacggaaagcctca

SEQ ID NO: 140860 - DNA, 25 bp, Homo sapien
caatgacctcagtttacagcgtgtg

SEQ ID NO: 140861 - DNA, 25 bp, Homo sapien
catagtagtcctcaagctgcaaccc

SEQ ID NO: 140862 - DNA, 25 bp, Homo sapien
cagcgtgtgttgtgagccataccca

SEQ ID NO: 140863 - DNA, 25 bp, Homo sapien
tgctccagggtcctaactgctacct

SEQ ID NO: 140864 - DNA, 25 bp, Homo sapien
tacaatgtgagacaaagagctacag

SEQ ID NO: 140865 - DNA, 25 bp, Homo sapien
ttattctgagaatgccacatgccag

SEQ ID NO: 140866 - DNA, 25 bp, Homo sapien
gcaatgtcattagtccactccttgg

SEQ ID NO: 140867 - DNA, 25 bp, Homo sapien
gggatctccacatgtcctttgtatt

SEQ ID NO: 140868 - DNA, 25 bp, Homo sapien
cgctgttttcatcagacaaattggg

SEQ ID NO: 140869 - DNA, 25 bp, Homo sapien
catgtcctttgtattgtactcctga

SEQ ID NO: 140870 - DNA, 25 bp, Homo sapien
tccacttcatccacgctgttttcat

SEQ ID NO: 140871 - DNA, 25 bp, Homo sapien
tgggctatgaatcctgaatgacagg

SEQ ID NO: 140872 - DNA, 25 bp, Homo sapien
ctcggattaggagttatgaagcaca

SEQ ID NO: 140873 - DNA, 25 bp, Homo sapien
gggttctgaatgcttggaccaagcc

SEQ ID NO: 140874 - DNA, 25 bp, Homo sapien
gctctagaagtttccaatggcacca

SEQ ID NO: 140875 - DNA, 25 bp, Homo sapien
agtcctctctgtcaagtggctaatg

SEQ ID NO: 140876 - DNA, 25 bp, Homo sapien
cccattagtgttccttcttgagtcc

SEQ ID NO: 140877 - DNA, 25 bp, Homo sapien
caaaggaaatgcatgagtactgcgg

SEQ ID NO: 140878 - DNA, 25 bp, Homo sapien
ggtattcgtacaatccccattagtg

SEQ ID NO: 140879 - DNA, 25 bp, Homo sapien
ttgcttctcttagaagtttcacccc

SEQ ID NO: 140880 - DNA, 25 bp, Homo sapien
ctgttttgagggtgctgatgtaaat

SEQ ID NO: 140881 - DNA, 25 bp, Homo sapien
tcatctttggcaaggctcacactaa

SEQ ID NO: 140882 - DNA, 25 bp, Homo sapien
cacgagatttgtgtcaggctcatct

SEQ ID NO: 140883 - DNA, 25 bp, Homo sapien
tgtccaggcccttaaccagagtcta

SEQ ID NO: 140884 - DNA, 25 bp, Homo sapien
tgtgcccagcccgtagtgtaattta

SEQ ID NO: 140885 - DNA, 25 bp, Homo sapien
cagagtctaacaggtggaaactacc

SEQ ID NO: 140886 - DNA, 25 bp, Homo sapien
tcattattaggcaacacagctccag

SEQ ID NO: 140887 - DNA, 25 bp, Homo sapien
taggtaagatcatgccctgggtgaa

SEQ ID NO: 140888 - DNA, 25 bp, Homo sapien
gggtctactgactctccattcattg

SEQ ID NO: 140889 - DNA, 25 bp, Homo sapien
attcattgtaggtaagatcatgccc

SEQ ID NO: 140890 - DNA, 25 bp, Homo sapien
gctcctcagttttcagtgctggctg

SEQ ID NO: 140891 - DNA, 25 bp, Homo sapien
gggtttttgaaggagcaggcttagc

SEQ ID NO: 140892 - DNA, 25 bp, Homo sapien
ctgggtttttgaaggagcaggctta

SEQ ID NO: 140893 - DNA, 25 bp, Homo sapien
tgggtttttgaaggagcaggcttag

SEQ ID NO: 140894 - DNA, 25 bp, Homo sapien
cttacaagtggggattttgactcca

SEQ ID NO: 140895 - DNA, 25 bp, Homo sapien
tctggtgacgtcaggaaggtttcct

SEQ ID NO: 140896 - DNA, 25 bp, Homo sapien
ccttaagagtgatcttacaagtggg

SEQ ID NO: 140897 - DNA, 25 bp, Homo sapien
taaacactctatagagctcctctgg

SEQ ID NO: 140898 - DNA, 25 bp, Homo sapien
agccaggaattcttctgtgctacag

SEQ ID NO: 140899 - DNA, 25 bp, Homo sapien
tcagctgtgcaacacaaagaagcca

SEQ ID NO: 140900 - DNA, 25 bp, Homo sapien
aaagaagccaggaattcttctgtgc

SEQ ID NO: 140901 - DNA, 25 bp, Homo sapien
gaagccaggaattcttctgtgctac

SEQ ID NO: 140902 - DNA, 25 bp, Homo sapien
agccccgacctcctaagcttaggtg

SEQ ID NO: 140903 - DNA, 25 bp, Homo sapien
cagccccgacctcctaagcttaggt

SEQ ID NO: 140904 - DNA, 25 bp, Homo sapien
gtaaattccccagagacgttgccat

SEQ ID NO: 140905 - DNA, 25 bp, Homo sapien
cctctgtctgcttctaatgttgcag

SEQ ID NO: 140906 - DNA, 25 bp, Homo sapien
taccatgtggaactttccacctctg

SEQ ID NO: 140907 - DNA, 25 bp, Homo sapien
taatgttgcaggagcatgggtaaag

SEQ ID NO: 140908 - DNA, 25 bp, Homo sapien
acattttacctatagagttcagaaa

SEQ ID NO: 140909 - DNA, 25 bp, Homo sapien
aacctgagtctagggccggcaggta

SEQ ID NO: 140910 - DNA, 25 bp, Homo sapien
catctgaccagaggcaataacctga

SEQ ID NO: 140911 - DNA, 25 bp, Homo sapien
cagaggcaataacctgagtctaggg

SEQ ID NO: 140912 - DNA, 25 bp, Homo sapien
tggccaagatttaaacctccacttc

SEQ ID NO: 140913 - DNA, 25 bp, Homo sapien
ggccaagatttaaacctccacttca

SEQ ID NO: 140914 - DNA, 25 bp, Homo sapien
tccacttcatcacaatatgtttctc

SEQ ID NO: 140915 - DNA, 25 bp, Homo sapien
tcatcacaatatgtttctcagggac

SEQ ID NO: 140916 - DNA, 25 bp, Homo sapien
caggaggatcgtttgggtctgggag

SEQ ID NO: 140917 - DNA, 25 bp, Homo sapien
aggttaaggctgcagtttgctgtga

SEQ ID NO: 140918 - DNA, 25 bp, Homo sapien
taaggctgcagtttgctgtgattat

SEQ ID NO: 140919 - DNA, 25 bp, Homo sapien
ggttaaggctgcagtttgctgtgat

SEQ ID NO: 140920 - DNA, 25 bp, Homo sapien
ttgagcccaggagttcgagactagc

SEQ ID NO: 140921 - DNA, 25 bp, Homo sapien
tgggaggctgaggcaggaggatcac

SEQ ID NO: 140922 - DNA, 25 bp, Homo sapien
ctctactaaaattacgtgggcgtgg

SEQ ID NO: 140923 - DNA, 25 bp, Homo sapien
gcatgcacctgtaatcccagcactt

SEQ ID NO: 140924 - DNA, 25 bp, Homo sapien
gtttccatctgagtttaagactggg

SEQ ID NO: 140925 - DNA, 25 bp, Homo sapien
cagaggggacggaggtttcatatct

SEQ ID NO: 140926 - DNA, 25 bp, Homo sapien
ggtttcatatctaggtttccatctg

SEQ ID NO: 140927 - DNA, 25 bp, Homo sapien
taagactggggcaacctggctgggc

SEQ ID NO: 140928 - DNA, 25 bp, Homo sapien
aaaggtctgtttaatgccctcaaag

SEQ ID NO: 140929 - DNA, 25 bp, Homo sapien
agctcagtctctccgttcttgtcga

SEQ ID NO: 140930 - DNA, 25 bp, Homo sapien
tgtcgcgtccgctcttcctcaggag

SEQ ID NO: 140931 - DNA, 25 bp, Homo sapien
agcagggatgcctcgaccttccatg

SEQ ID NO: 140932 - DNA, 25 bp, Homo sapien
agagaaattgccctctgaacccacc

SEQ ID NO: 140933 - DNA, 25 bp, Homo sapien
caaacccaaggtatatgtggaaggg

SEQ ID NO: 140934 - DNA, 25 bp, Homo sapien
ccccaagttagcagctgggacgatg

SEQ ID NO: 140935 - DNA, 25 bp, Homo sapien
acgatgcaatcctgtgagtcgcaag

SEQ ID NO: 140936 - DNA, 25 bp, Homo sapien
cactagctcgggacggtgtgtcaca

SEQ ID NO: 140937 - DNA, 25 bp, Homo sapien
gatgcacataatcgctctcccggca

SEQ ID NO: 140938 - DNA, 25 bp, Homo sapien
tcacaagagccaccaaaagttaggg

SEQ ID NO: 140939 - DNA, 25 bp, Homo sapien
tgtaaattctcccagcagtgtccca

SEQ ID NO: 140940 - DNA, 25 bp, Homo sapien
gcttcacgtggatgctcagtgccca

SEQ ID NO: 140941 - DNA, 25 bp, Homo sapien
tagtgctagccaatgatccctttgc

SEQ ID NO: 140942 - DNA, 25 bp, Homo sapien
gataccctgctacttgcttcacgtg

SEQ ID NO: 140943 - DNA, 25 bp, Homo sapien
taagcagctcttttctagggaggaa

SEQ ID NO: 140944 - DNA, 25 bp, Homo sapien
tgtaatgtaaatctagggtccagtc

SEQ ID NO: 140945 - DNA, 25 bp, Homo sapien
gggtccagtcatatcctaggtatca

SEQ ID NO: 140946 - DNA, 25 bp, Homo sapien
gataccggttaaccatgactaccaa

SEQ ID NO: 140947 - DNA, 25 bp, Homo sapien
tgataggattcaaacagataccggt

SEQ ID NO: 140948 - DNA, 25 bp, Homo sapien
caggccctttgacgagacgacgtat

SEQ ID NO: 140949 - DNA, 25 bp, Homo sapien
cctttttggtgctccctcagaggaa

SEQ ID NO: 140950 - DNA, 25 bp, Homo sapien
catcggttggtacctctactggaca

SEQ ID NO: 140951 - DNA, 25 bp, Homo sapien
cctcagctactgaaggtggccacct

SEQ ID NO: 140952 - DNA, 25 bp, Homo sapien
taaacacttatcaagcaacaagcaa

SEQ ID NO: 140953 - DNA, 25 bp, Homo sapien
gattcccgggaagaactagtctcag

SEQ ID NO: 140954 - DNA, 25 bp, Homo sapien
gcaactactctctacatagtggtag

SEQ ID NO: 140955 - DNA, 25 bp, Homo sapien
gaacaataggtgatctttgcctttg

SEQ ID NO: 140956 - DNA, 25 bp, Homo sapien
tgggtccttgcaggcagctactgat

SEQ ID NO: 140957 - DNA, 25 bp, Homo sapien
tacctggagtgggaatactgagcac

SEQ ID NO: 140958 - DNA, 25 bp, Homo sapien
gagtcctgggctgtagcacactgtg

SEQ ID NO: 140959 - DNA, 25 bp, Homo sapien
aaatgatcaccttgagaataccggg

SEQ ID NO: 140960 - DNA, 25 bp, Homo sapien
tcccctagtcttttgccttgccatg

SEQ ID NO: 140961 - DNA, 25 bp, Homo sapien
tacctttgtcagtttaagccacaga

SEQ ID NO: 140962 - DNA, 25 bp, Homo sapien
ccacagatacagttgtcagaccatt

SEQ ID NO: 140963 - DNA, 25 bp, Homo sapien
gccttgccatggcttcatctacctt

SEQ ID NO: 140964 - DNA, 25 bp, Homo sapien
ggagcttgtagcaaggttcttagga

SEQ ID NO: 140965 - DNA, 25 bp, Homo sapien
tcttaggagtagaagctgctatggc

SEQ ID NO: 140966 - DNA, 25 bp, Homo sapien
cagtcagagtgagctaaaagctgtt

SEQ ID NO: 140967 - DNA, 25 bp, Homo sapien
ggcatgggatttgcaacgaattcaa

SEQ ID NO: 140968 - DNA, 25 bp, Homo sapien
caaatgttagtggttaagagtgcca

SEQ ID NO: 140969 - DNA, 25 bp, Homo sapien
gaatgtccctcgaaaaatcctgcca

SEQ ID NO: 140970 - DNA, 25 bp, Homo sapien
aatctgctttcatactggtacatgg

SEQ ID NO: 140971 - DNA, 25 bp, Homo sapien
gaattacgtaagctaatccatgtag

SEQ ID NO: 140972 - DNA, 25 bp, Homo sapien
tagtacagacgggtttcactgtgtt

SEQ ID NO: 140973 - DNA, 25 bp, Homo sapien
agagttatagagtatgcatgtcttc

SEQ ID NO: 140974 - DNA, 25 bp, Homo sapien
agagtatgcatgtcttcagtttcac

SEQ ID NO: 140975 - DNA, 25 bp, Homo sapien
ttcagtttcactagatagtgccaaa

SEQ ID NO: 140976 - DNA, 25 bp, Homo sapien
tgtcttcagtttcactagatagtgc

SEQ ID NO: 140977 - DNA, 25 bp, Homo sapien
ccagtgaggttggaacttagaaaat

SEQ ID NO: 140978 - DNA, 25 bp, Homo sapien
cttgtttccagtgaggttggaactt

SEQ ID NO: 140979 - DNA, 25 bp, Homo sapien
accaccaatcctggctaatatttgc

SEQ ID NO: 140980 - DNA, 25 bp, Homo sapien
tccatgtgatcaggctgggcttgaa

SEQ ID NO: 140981 - DNA, 25 bp, Homo sapien
gagcgggacttggagcagccgccgc

SEQ ID NO: 140982 - DNA, 25 bp, Homo sapien
ggtgcggagcgggacttggagcagc

SEQ ID NO: 140983 - DNA, 25 bp, Homo sapien
ggtggggtgcggagcgggacttgga

SEQ ID NO: 140984 - DNA, 25 bp, Homo sapien
tgcggagcgggacttggagcagccg

SEQ ID NO: 140985 - DNA, 25 bp, Homo sapien
ttattcatgatggaaacgtttgttg

SEQ ID NO: 140986 - DNA, 25 bp, Homo sapien
agaagtggctgaaggtgcccgcgcc

SEQ ID NO: 140987 - DNA, 25 bp, Homo sapien
aacgtttgttgagcgcctcgggtga

SEQ ID NO: 140988 - DNA, 25 bp, Homo sapien
cgcaggcgcagaagtggctgaaggt

SEQ ID NO: 140989 - DNA, 25 bp, Homo sapien
gctacttgaagaccgctcgtgttaa

SEQ ID NO: 140990 - DNA, 25 bp, Homo sapien
gtggtcttcaaagggatgaggcccc

SEQ ID NO: 140991 - DNA, 25 bp, Homo sapien
tgataatgtcgggtttcagccgcct

SEQ ID NO: 140992 - DNA, 25 bp, Homo sapien
tcccgagagattcaatggtagagcc

SEQ ID NO: 140993 - DNA, 25 bp, Homo sapien
tggtgacaggaacagagctctcatg

SEQ ID NO: 140994 - DNA, 25 bp, Homo sapien
tcagtcagggcattgagacgtaccg

SEQ ID NO: 140995 - DNA, 25 bp, Homo sapien
tcctgacagtgcttcatggtggcca

SEQ ID NO: 140996 - DNA, 25 bp, Homo sapien
caccagctacaggttgtccaggcaa

SEQ ID NO: 140997 - DNA, 25 bp, Homo sapien
cttcagactaaagcaccttctcgag

SEQ ID NO: 140998 - DNA, 25 bp, Homo sapien
tgatacttctacgcagcgccgcagc

SEQ ID NO: 140999 - DNA, 25 bp, Homo sapien
aaagcaaccggctgattgatacttc

SEQ ID NO: 141000 - DNA, 25 bp, Homo sapien
gtccaaggaattcttctcacaaaag

SEQ ID NO: 141001 - DNA, 25 bp, Homo sapien
atacttctacgcagcgccgcagcac

SEQ ID NO: 141002 - DNA, 25 bp, Homo sapien
ccatcctcagcaaatatcgagtgtt

SEQ ID NO: 141003 - DNA, 25 bp, Homo sapien
tcataccagttactgtgctatgtgg

SEQ ID NO: 141004 - DNA, 25 bp, Homo sapien
cagttactgtgctatgtggactatg

SEQ ID NO: 141005 - DNA, 25 bp, Homo sapien
caaatatcgagtgttttcataccag

SEQ ID NO: 141006 - DNA, 25 bp, Homo sapien
tcaccagatttcttgtggacaggaa

SEQ ID NO: 141007 - DNA, 25 bp, Homo sapien
cttagactgtagaaagacagggtca

SEQ ID NO: 141008 - DNA, 25 bp, Homo sapien
tgcatttccttaaaggcttaagatt

SEQ ID NO: 141009 - DNA, 25 bp, Homo sapien
agtagttactatattttggattctc

SEQ ID NO: 141010 - DNA, 25 bp, Homo sapien
tctgacatggccgaactgtgcaaag

SEQ ID NO: 141011 - DNA, 25 bp, Homo sapien
cttctgacatggccgaactgtgcaa

SEQ ID NO: 141012 - DNA, 25 bp, Homo sapien
catggccgaactgtgcaaagtgttc

SEQ ID NO: 141013 - DNA, 25 bp, Homo sapien
tgacatggccgaactgtgcaaagtg

SEQ ID NO: 141014 - DNA, 25 bp, Homo sapien
gagtagactgcttgagtgcgggagc

SEQ ID NO: 141015 - DNA, 25 bp, Homo sapien
caactagagtacaatgaatggaaca

SEQ ID NO: 141016 - DNA, 25 bp, Homo sapien
catcaaagccgccttttatttaaat

SEQ ID NO: 141017 - DNA, 25 bp, Homo sapien
tgcaggtcctattttatttatggac

SEQ ID NO: 141018 - DNA, 25 bp, Homo sapien
ttcctgttgtagtgcattccgaagt

SEQ ID NO: 141019 - DNA, 25 bp, Homo sapien
gttgtagtgcattccgaagtccttc

SEQ ID NO: 141020 - DNA, 25 bp, Homo sapien
gcattccgaagtccttcttctgaag

SEQ ID NO: 141021 - DNA, 25 bp, Homo sapien
tactccatctataatatgattttcc

SEQ ID NO: 141022 - DNA, 25 bp, Homo sapien
atgaataatgaataacccaggcagt

SEQ ID NO: 141023 - DNA, 25 bp, Homo sapien
ttaccatctttgttggtattatgac

SEQ ID NO: 141024 - DNA, 25 bp, Homo sapien
taatgaataacccaggcagttttta

SEQ ID NO: 141025 - DNA, 25 bp, Homo sapien
cactttattagggagtcagtatgaa

SEQ ID NO: 141026 - DNA, 25 bp, Homo sapien
catcatcagatgtttgcggaagttt

SEQ ID NO: 141027 - DNA, 25 bp, Homo sapien
catcagatgtttgcggaagttttgg

SEQ ID NO: 141028 - DNA, 25 bp, Homo sapien
tcttttcatcatcagatgtttgcgg

SEQ ID NO: 141029 - DNA, 25 bp, Homo sapien
cagatgtttgcggaagttttggcct

SEQ ID NO: 141030 - DNA, 25 bp, Homo sapien
gttcagaccgtagacagagaggccg

SEQ ID NO: 141031 - DNA, 25 bp, Homo sapien
gaaggaataggcacaggtctctcca

SEQ ID NO: 141032 - DNA, 25 bp, Homo sapien
tctaaaagaccctcagatagcagcc

SEQ ID NO: 141033 - DNA, 25 bp, Homo sapien
cagctgcatatgagtaaagttaccc

SEQ ID NO: 141034 - DNA, 25 bp, Homo sapien
ccaaggtacaagtttaggaacagca

SEQ ID NO: 141035 - DNA, 25 bp, Homo sapien
tgaagttcagtatgaccaaaggctc

SEQ ID NO: 141036 - DNA, 25 bp, Homo sapien
gatgtgaatacctatcctcagggaa

SEQ ID NO: 141037 - DNA, 25 bp, Homo sapien
ggctcttcaaccaatccaaggtaca

SEQ ID NO: 141038 - DNA, 25 bp, Homo sapien
ccaaaggctgaggactaaaagttct

SEQ ID NO: 141039 - DNA, 25 bp, Homo sapien
tctgaaaagtagagggaacgctgca

SEQ ID NO: 141040 - DNA, 25 bp, Homo sapien
tttggcaggccaaagcacgcgaatc

SEQ ID NO: 141041 - DNA, 25 bp, Homo sapien
tctagtacaattgaggagaagagca

SEQ ID NO: 141042 - DNA, 25 bp, Homo sapien
gcacccggccccatatcagttcttt

SEQ ID NO: 141043 - DNA, 25 bp, Homo sapien
cagaagcacatagagaaggaataag

SEQ ID NO: 141044 - DNA, 25 bp, Homo sapien
tcttttagtgaattgtagctagcag

SEQ ID NO: 141045 - DNA, 25 bp, Homo sapien
tgtagctagcagaagcacatagaga

SEQ ID NO: 141046 - DNA, 25 bp, Homo sapien
atatgccatgtaaattgttatgaaa

SEQ ID NO: 141047 - DNA, 25 bp, Homo sapien
ctttaaaatatgccatgtaaattgt

SEQ ID NO: 141048 - DNA, 25 bp, Homo sapien
tatgccatgtaaattgttatgaaaa

SEQ ID NO: 141049 - DNA, 25 bp, Homo sapien
cactcagccttgtgagatactagaa

SEQ ID NO: 141050 - DNA, 25 bp, Homo sapien
taattactatggaggaatcttgctc

SEQ ID NO: 141051 - DNA, 25 bp, Homo sapien
tgttgaacatacatgactaccaggg

SEQ ID NO: 141052 - DNA, 25 bp, Homo sapien
gcagcaaatgactcttgtatgctaa

SEQ ID NO: 141053 - DNA, 25 bp, Homo sapien
ggcccagtatccactggatatggga

SEQ ID NO: 141054 - DNA, 25 bp, Homo sapien
gcttttccagagatccatgtggccc

SEQ ID NO: 141055 - DNA, 25 bp, Homo sapien
tgcttttccagagatccatgtggcc

SEQ ID NO: 141056 - DNA, 25 bp, Homo sapien
gatcccagagatcacggcagacctc

SEQ ID NO: 141057 - DNA, 25 bp, Homo sapien
gatcacggcagacctcactggtctc

SEQ ID NO: 141058 - DNA, 25 bp, Homo sapien
cactggtctcctcccgaagagaacc

SEQ ID NO: 141059 - DNA, 25 bp, Homo sapien
tacggataccggaaaggctggatac

SEQ ID NO: 141060 - DNA, 25 bp, Homo sapien
catgtagactgtcatagcatctata

SEQ ID NO: 141061 - DNA, 25 bp, Homo sapien
tggattagatccctctcatgtagac

SEQ ID NO: 141062 - DNA, 25 bp, Homo sapien
agactggattagatccctctcatgt

SEQ ID NO: 141063 - DNA, 25 bp, Homo sapien
ttagatccctctcatgtagactgtc

SEQ ID NO: 141064 - DNA, 25 bp, Homo sapien
aatgagccacagtagtgaccgccgt

SEQ ID NO: 141065 - DNA, 25 bp, Homo sapien
tgtccactgggtgtcccgaaacaag

SEQ ID NO: 141066 - DNA, 25 bp, Homo sapien
gaggcccggagctgaacacagattt

SEQ ID NO: 141067 - DNA, 25 bp, Homo sapien
gaccgccgtctgctgatatgcgcca

SEQ ID NO: 141068 - DNA, 25 bp, Homo sapien
agatggggttggtgacggtagtggc

SEQ ID NO: 141069 - DNA, 25 bp, Homo sapien
aaagctgcggagtggtctcagacac

SEQ ID NO: 141070 - DNA, 25 bp, Homo sapien
ggccgccgctacgactaggcctagt

SEQ ID NO: 141071 - DNA, 25 bp, Homo sapien
aatgacgtgggccaagactacggct

SEQ ID NO: 141072 - DNA, 25 bp, Homo sapien
aagagtgggtttttcgcgtgagcat

SEQ ID NO: 141073 - DNA, 25 bp, Homo sapien
gtcctcgatacggaagggtctggga

SEQ ID NO: 141074 - DNA, 25 bp, Homo sapien
ttgattggggtcctcgatacggaag

SEQ ID NO: 141075 - DNA, 25 bp, Homo sapien
tcctcgatacggaagggtctgggag

SEQ ID NO: 141076 - DNA, 25 bp, Homo sapien
gaagggtctgggagtaccagtcttc

SEQ ID NO: 141077 - DNA, 25 bp, Homo sapien
gacagtatggttaagatcatgttct

SEQ ID NO: 141078 - DNA, 25 bp, Homo sapien
aggtagaatctttcacttggaagac

SEQ ID NO: 141079 - DNA, 25 bp, Homo sapien
gggaggaaggcacgacttgaactca

SEQ ID NO: 141080 - DNA, 25 bp, Homo sapien
ttaagatcatgttctccgggccggg

SEQ ID NO: 141081 - DNA, 25 bp, Homo sapien
gtactcagtgtcagccaagcactta

SEQ ID NO: 141082 - DNA, 25 bp, Homo sapien
agtactcagtgtcagccaagcactt

SEQ ID NO: 141083 - DNA, 25 bp, Homo sapien
ttagtactcagtgtcagccaagcac

SEQ ID NO: 141084 - DNA, 25 bp, Homo sapien
tagtactcagtgtcagccaagcact

SEQ ID NO: 141085 - DNA, 25 bp, Homo sapien
tgtgaagaattctcacaacgcaaca

SEQ ID NO: 141086 - DNA, 25 bp, Homo sapien
caaaagataccactggcagagtaga

SEQ ID NO: 141087 - DNA, 25 bp, Homo sapien
taaatggacaagaggcttgaacagg

SEQ ID NO: 141088 - DNA, 25 bp, Homo sapien
gaaaaagacgtataactcagtagta

SEQ ID NO: 141089 - DNA, 25 bp, Homo sapien
aatcagaaaaagagaatgaccaatt

SEQ ID NO: 141090 - DNA, 25 bp, Homo sapien
ccttttaaatcagaaaaagagaatg

SEQ ID NO: 141091 - DNA, 25 bp, Homo sapien
tccatggaggaacaaaatcctttta

SEQ ID NO: 141092 - DNA, 25 bp, Homo sapien
tttaaatcagaaaaagagaatgacc

SEQ ID NO: 141093 - DNA, 25 bp, Homo sapien
ctctcccacttgctagatgagaggc

SEQ ID NO: 141094 - DNA, 25 bp, Homo sapien
cttgctagatgagaggccccaggca

SEQ ID NO: 141095 - DNA, 25 bp, Homo sapien
tcccacttgctagatgagaggcccc

SEQ ID NO: 141096 - DNA, 25 bp, Homo sapien
tgtggactctcccacttgctagatg

SEQ ID NO: 141097 - DNA, 25 bp, Homo sapien
tcaaatgatccatccgctttagcct

SEQ ID NO: 141098 - DNA, 25 bp, Homo sapien
agagccgcggcgcccggcttccggc

SEQ ID NO: 141099 - DNA, 25 bp, Homo sapien
cccgagggaagcagagccgcggcgc

SEQ ID NO: 141100 - DNA, 25 bp, Homo sapien
gcggcgcccggcttccggccgcaac

SEQ ID NO: 141101 - DNA, 25 bp, Homo sapien
agccgcggcgcccggcttccggccg

SEQ ID NO: 141102 - DNA, 25 bp, Homo sapien
gcggctgcacaaccggagcagaggc

SEQ ID NO: 141103 - DNA, 25 bp, Homo sapien
cccagggcggctgcacaaccggagc

SEQ ID NO: 141104 - DNA, 25 bp, Homo sapien
gctgtccctcccggcgcccagggcg

SEQ ID NO: 141105 - DNA, 25 bp, Homo sapien
agaggccgactcccggcgtgtccat

SEQ ID NO: 141106 - DNA, 25 bp, Homo sapien
cgggtgcctgcaagactgtgccact

SEQ ID NO: 141107 - DNA, 25 bp, Homo sapien
gcccactggtgtgccaaactggaga

SEQ ID NO: 141108 - DNA, 25 bp, Homo sapien
tgcccactcgggtgcctgcaagact

SEQ ID NO: 141109 - DNA, 25 bp, Homo sapien
ggacaggtcacatgaaagcccactg

SEQ ID NO: 141110 - DNA, 25 bp, Homo sapien
gtccccattttattatgccaatatt

SEQ ID NO: 141111 - DNA, 25 bp, Homo sapien
caaaagggtaactatctgaggtgat

SEQ ID NO: 141112 - DNA, 25 bp, Homo sapien
gctttctagcatgctctttatttcc

SEQ ID NO: 141113 - DNA, 25 bp, Homo sapien
taaattaaaaccttgctttctagca

SEQ ID NO: 141114 - DNA, 25 bp, Homo sapien
agcaagagccatgctggtccacgaa

SEQ ID NO: 141115 - DNA, 25 bp, Homo sapien
gacagcgccaaagtcattagggtcc

SEQ ID NO: 141116 - DNA, 25 bp, Homo sapien
ttactgtagaagtagatgccagagg

SEQ ID NO: 141117 - DNA, 25 bp, Homo sapien
cacgaagcaagcttgagagcctttc

SEQ ID NO: 141118 - DNA, 25 bp, Homo sapien
ggtagtcgtaactgatgacagccgt

SEQ ID NO: 141119 - DNA, 25 bp, Homo sapien
ctcttcagggaagtgaggtagtcgt

SEQ ID NO: 141120 - DNA, 25 bp, Homo sapien
caagtactcctctgagccataaggg

SEQ ID NO: 141121 - DNA, 25 bp, Homo sapien
tcagctgcaagtactcctctgagcc

SEQ ID NO: 141122 - DNA, 25 bp, Homo sapien
ccgtagaatgttacaccagtggatg

SEQ ID NO: 141123 - DNA, 25 bp, Homo sapien
tgtgacacgtgacaggcaactgtct

SEQ ID NO: 141124 - DNA, 25 bp, Homo sapien
gcaactgtctttttgacacccatcg

SEQ ID NO: 141125 - DNA, 25 bp, Homo sapien
tgtgtccgagcctgcaagctctccg

SEQ ID NO: 141126 - DNA, 25 bp, Homo sapien
ccagcctgggagatacagcaagact

SEQ ID NO: 141127 - DNA, 25 bp, Homo sapien
tttgggatctgcttatctgcaaagc

SEQ ID NO: 141128 - DNA, 25 bp, Homo sapien
ctcctctctgtttgggatctgctta

SEQ ID NO: 141129 - DNA, 25 bp, Homo sapien
ctaagaggcagtcccccaactgaga

SEQ ID NO: 141130 - DNA, 25 bp, Homo sapien
tcccccaactgagaggcttgtccag

SEQ ID NO: 141131 - DNA, 25 bp, Homo sapien
gggaggtggctctattgcccttctt

SEQ ID NO: 141132 - DNA, 25 bp, Homo sapien
tcctccggtgtttcccaaatccatc

SEQ ID NO: 141133 - DNA, 25 bp, Homo sapien
cagggaggtggctctattgcccttc

SEQ ID NO: 141134 - DNA, 25 bp, Homo sapien
ggtggctctattgcccttcttcctc

SEQ ID NO: 141135 - DNA, 25 bp, Homo sapien
ggaggcctgcattgtgcactgctct

SEQ ID NO: 141136 - DNA, 25 bp, Homo sapien
cacacaggtgccacatgttatccag

SEQ ID NO: 141137 - DNA, 25 bp, Homo sapien
ctctgcaagcagtgcaccgggaagg

SEQ ID NO: 141138 - DNA, 25 bp, Homo sapien
tagtcctcgtaatcacatggccggc

SEQ ID NO: 141139 - DNA, 25 bp, Homo sapien
cggtccttccagagttgggaggtgg

SEQ ID NO: 141140 - DNA, 25 bp, Homo sapien
ggtggccccatctgccgccaggctg

SEQ ID NO: 141141 - DNA, 25 bp, Homo sapien
agttgggaggtggccccatctgccg

SEQ ID NO: 141142 - DNA, 25 bp, Homo sapien
ggaggtggccccatctgccgccagg

SEQ ID NO: 141143 - DNA, 25 bp, Homo sapien
gacctggcggatctcttgcatgctg

SEQ ID NO: 141144 - DNA, 25 bp, Homo sapien
cttgatgaaggtgccccggttggca

SEQ ID NO: 141145 - DNA, 25 bp, Homo sapien
cagatcttctcggatgacctggcgg

SEQ ID NO: 141146 - DNA, 25 bp, Homo sapien
cagcgtgctggtgtactcctctggc

SEQ ID NO: 141147 - DNA, 25 bp, Homo sapien
gtggatccccagcaccctggtcgag

SEQ ID NO: 141148 - DNA, 25 bp, Homo sapien
cagccggggccttttctgaagcatc

SEQ ID NO: 141149 - DNA, 25 bp, Homo sapien
tcgaggctgcaagaattcagccggg

SEQ ID NO: 141150 - DNA, 25 bp, Homo sapien
ctctttgatttcagcactgagagtg

SEQ ID NO: 141151 - DNA, 25 bp, Homo sapien
gagggccactgagattccttctaac

SEQ ID NO: 141152 - DNA, 25 bp, Homo sapien
tccacattaagggaccaatagtcag

SEQ ID NO: 141153 - DNA, 25 bp, Homo sapien
taagggaccaatagtcagtgccagc

SEQ ID NO: 141154 - DNA, 25 bp, Homo sapien
agctccacattaagggaccaatagt

SEQ ID NO: 141155 - DNA, 25 bp, Homo sapien
cattaagggaccaatagtcagtgcc

SEQ ID NO: 141156 - DNA, 25 bp, Homo sapien
aagtgggacacctttgaatggatgc

SEQ ID NO: 141157 - DNA, 25 bp, Homo sapien
tcactgagaagtgggacacctttga

SEQ ID NO: 141158 - DNA, 25 bp, Homo sapien
caggatatcactgagaagtgggaca

SEQ ID NO: 141159 - DNA, 25 bp, Homo sapien
cgctccaggccaggatatcactgag

SEQ ID NO: 141160 - DNA, 25 bp, Homo sapien
tccagtcagatggtgcatcaagaac

SEQ ID NO: 141161 - DNA, 25 bp, Homo sapien
catcaagaacacagagcacctgcag

SEQ ID NO: 141162 - DNA, 25 bp, Homo sapien
cattctcattgaaactccagtcaga

SEQ ID NO: 141163 - DNA, 25 bp, Homo sapien
tacgcttgtccctacgtactatggg

SEQ ID NO: 141164 - DNA, 25 bp, Homo sapien
atatggatgatggaaagagcctcct

SEQ ID NO: 141165 - DNA, 25 bp, Homo sapien
agatatggatgatggaaagagcctc

SEQ ID NO: 141166 - DNA, 25 bp, Homo sapien
caagatatggatgatggaaagagcc

SEQ ID NO: 141167 - DNA, 25 bp, Homo sapien
gatatggatgatggaaagagcctcc

SEQ ID NO: 141168 - DNA, 25 bp, Homo sapien
ggcctgcaggggagacctgttcccc

SEQ ID NO: 141169 - DNA, 25 bp, Homo sapien
gaggcatcagaagccactgcaatca

SEQ ID NO: 141170 - DNA, 25 bp, Homo sapien
gactgccacgaggaagaacagacct

SEQ ID NO: 141171 - DNA, 25 bp, Homo sapien
accctgcccatactgacagccccag

SEQ ID NO: 141172 - DNA, 25 bp, Homo sapien
tcacttacagcagctccatttgcta

SEQ ID NO: 141173 - DNA, 25 bp, Homo sapien
tttgctatcaggacagacgtcctgg

SEQ ID NO: 141174 - DNA, 25 bp, Homo sapien
ttccgacaaccctcagttgttcctg

SEQ ID NO: 141175 - DNA, 25 bp, Homo sapien
gacaaccctcagttgttcctgcatc

SEQ ID NO: 141176 - DNA, 25 bp, Homo sapien
ggggtgtcatcgaagctctggaaca

SEQ ID NO: 141177 - DNA, 25 bp, Homo sapien
gggtgctggaccttcacggccaccg

SEQ ID NO: 141178 - DNA, 25 bp, Homo sapien
ccagaggggtgtcatcgaagctctg

SEQ ID NO: 141179 - DNA, 25 bp, Homo sapien
ggtgctggaccttcacggccaccgt

SEQ ID NO: 141180 - DNA, 25 bp, Homo sapien
ggagaatgtccttcgagctctgagc

SEQ ID NO: 141181 - DNA, 25 bp, Homo sapien
ccatcaggagaatgtccttcgagct

SEQ ID NO: 141182 - DNA, 25 bp, Homo sapien
aatgtccttcgagctctgagcccgc

SEQ ID NO: 141183 - DNA, 25 bp, Homo sapien
tcaggagaatgtccttcgagctctg

SEQ ID NO: 141184 - DNA, 25 bp, Homo sapien
ccagctaggttttgcccagaggcaa

SEQ ID NO: 141185 - DNA, 25 bp, Homo sapien
gcaacactgagggatactggcatac

SEQ ID NO: 141186 - DNA, 25 bp, Homo sapien
tggattccagaccaacagggatatc

SEQ ID NO: 141187 - DNA, 25 bp, Homo sapien
cactttgttctgagaggcatcccga

SEQ ID NO: 141188 - DNA, 25 bp, Homo sapien
agcaagtgaacgggaaacagaagtg

SEQ ID NO: 141189 - DNA, 25 bp, Homo sapien
tgaacgggaaacagaagtgattccc

SEQ ID NO: 141190 - DNA, 25 bp, Homo sapien
cgggaaacagaagtgattcccccag

SEQ ID NO: 141191 - DNA, 25 bp, Homo sapien
aagtgaacgggaaacagaagtgatt

SEQ ID NO: 141192 - DNA, 25 bp, Homo sapien
tgcccaagttcctggatgatggctc

SEQ ID NO: 141193 - DNA, 25 bp, Homo sapien
agagacacaatcctaaggctgcccc

SEQ ID NO: 141194 - DNA, 25 bp, Homo sapien
ccagggacataggaggtgttccaga

SEQ ID NO: 141195 - DNA, 25 bp, Homo sapien
tgccatgagcagagacacaatccta

SEQ ID NO: 141196 - DNA, 25 bp, Homo sapien
ctgaaatccaacaagcaccccagtc

SEQ ID NO: 141197 - DNA, 25 bp, Homo sapien
tgaaatccaacaagcaccccagtca

SEQ ID NO: 141198 - DNA, 25 bp, Homo sapien
gaaatccaacaagcaccccagtcat

SEQ ID NO: 141199 - DNA, 25 bp, Homo sapien
agctccaaaggcaggttcttcttgg

SEQ ID NO: 141200 - DNA, 25 bp, Homo sapien
cagctccaaaggcaggttcttcttg

SEQ ID NO: 141201 - DNA, 25 bp, Homo sapien
ataaactcaaactctgggaacagct

SEQ ID NO: 141202 - DNA, 25 bp, Homo sapien
taaaacagtcccagcgtacagtagt

SEQ ID NO: 141203 - DNA, 25 bp, Homo sapien
gtagtgttagctatcagcatcgcca

SEQ ID NO: 141204 - DNA, 25 bp, Homo sapien
gaagaaccaactgtatgagccaagg

SEQ ID NO: 141205 - DNA, 25 bp, Homo sapien
agaggcagagaccacggcatatagg

SEQ ID NO: 141206 - DNA, 25 bp, Homo sapien
ctcgacatcgctgcgagtcggtgag

SEQ ID NO: 141207 - DNA, 25 bp, Homo sapien
catcgctgcgagtcggtgagtcacc

SEQ ID NO: 141208 - DNA, 25 bp, Homo sapien
gacatcgctgcgagtcggtgagtca

SEQ ID NO: 141209 - DNA, 25 bp, Homo sapien
cgctgcgagtcggtgagtcacccac

SEQ ID NO: 141210 - DNA, 25 bp, Homo sapien
tctctgtcattgacctgcccgccat

SEQ ID NO: 141211 - DNA, 25 bp, Homo sapien
ccgtggacaggtcccagtggattcg

SEQ ID NO: 141212 - DNA, 25 bp, Homo sapien
ccgctccgtggacaggtcccagtgg

SEQ ID NO: 141213 - DNA, 25 bp, Homo sapien
cattgacgtcgatcttgttcctctc

SEQ ID NO: 141214 - DNA, 25 bp, Homo sapien
tgaccaagcccacgttccccggcac

SEQ ID NO: 141215 - DNA, 25 bp, Homo sapien
ttgaccaagcccacgttccccggca

SEQ ID NO: 141216 - DNA, 25 bp, Homo sapien
ccaagcccacgttccccggcacagc

SEQ ID NO: 141217 - DNA, 25 bp, Homo sapien
accaagcccacgttccccggcacag

SEQ ID NO: 141218 - DNA, 25 bp, Homo sapien
agagggaagagacaacagacaggcc

SEQ ID NO: 141219 - DNA, 25 bp, Homo sapien
gagacaacagacaggccccacagag

SEQ ID NO: 141220 - DNA, 25 bp, Homo sapien
aggattaagtcccactgattttgca

SEQ ID NO: 141221 - DNA, 25 bp, Homo sapien
cagagccaaaaggattaagtcccac

SEQ ID NO: 141222 - DNA, 25 bp, Homo sapien
gctgtcccctttttgcctgatccct

SEQ ID NO: 141223 - DNA, 25 bp, Homo sapien
gaggctgatgcagttggttgctgct

SEQ ID NO: 141224 - DNA, 25 bp, Homo sapien
ggaggctgatgcagttggttgctgc

SEQ ID NO: 141225 - DNA, 25 bp, Homo sapien
ggctgatgcagttggttgctgctgt

SEQ ID NO: 141226 - DNA, 25 bp, Homo sapien
gatgggaggggggacacacaaagcc

SEQ ID NO: 141227 - DNA, 25 bp, Homo sapien
ctggccagtattccctgggacaagg

SEQ ID NO: 141228 - DNA, 25 bp, Homo sapien
cagtattccctgggacaagggggat

SEQ ID NO: 141229 - DNA, 25 bp, Homo sapien
ccactggccagtattccctgggaca

SEQ ID NO: 141230 - DNA, 25 bp, Homo sapien
tggcaggcctcagtgcctcttcctc

SEQ ID NO: 141231 - DNA, 25 bp, Homo sapien
cctggggttctcctcacaccctctc

SEQ ID NO: 141232 - DNA, 25 bp, Homo sapien
cttcctcactctccctggggttctc

SEQ ID NO: 141233 - DNA, 25 bp, Homo sapien
ggttctcctcacaccctctcgctgc

SEQ ID NO: 141234 - DNA, 25 bp, Homo sapien
tactcatcctgctggggacaccaac

SEQ ID NO: 141235 - DNA, 25 bp, Homo sapien
ctactcatcctgctggggacaccaa

SEQ ID NO: 141236 - DNA, 25 bp, Homo sapien
gatggtagagctggttcaaagagaa

SEQ ID NO: 141237 - DNA, 25 bp, Homo sapien
aaaataaatcctctagggagctggt

SEQ ID NO: 141238 - DNA, 25 bp, Homo sapien
caagttgatgtatgaccactctgtg

SEQ ID NO: 141239 - DNA, 25 bp, Homo sapien
tctatgaggcataaaaagaagtcac

SEQ ID NO: 141240 - DNA, 25 bp, Homo sapien
agcatgcatatggttctatctactt

SEQ ID NO: 141241 - DNA, 25 bp, Homo sapien
tgcatatggttctatctactttggg

SEQ ID NO: 141242 - DNA, 25 bp, Homo sapien
tatggttctatctactttgggtggc

SEQ ID NO: 141243 - DNA, 25 bp, Homo sapien
catatggttctatctactttgggtg

SEQ ID NO: 141244 - DNA, 25 bp, Homo sapien
tctcgatctccctgacctcttgatc

SEQ ID NO: 141245 - DNA, 25 bp, Homo sapien
tgcctgccaccacgcctggctaatt

SEQ ID NO: 141246 - DNA, 25 bp, Homo sapien
gtctcgatctccctgacctcttgat

SEQ ID NO: 141247 - DNA, 25 bp, Homo sapien
ttgatctgccctcctcggcctccca

SEQ ID NO: 141248 - DNA, 25 bp, Homo sapien
cccaggtcaagttctcagactcagg

SEQ ID NO: 141249 - DNA, 25 bp, Homo sapien
gactcaggctgagatgccagatgcc

SEQ ID NO: 141250 - DNA, 25 bp, Homo sapien
ggtgaaacagacatccctgcactca

SEQ ID NO: 141251 - DNA, 25 bp, Homo sapien
tgtctgttggccttaggagcaggac

SEQ ID NO: 141252 - DNA, 25 bp, Homo sapien
catgaaaccatgtgggcggtacaag

SEQ ID NO: 141253 - DNA, 25 bp, Homo sapien
gaagaaatgacactagagaagccgt

SEQ ID NO: 141254 - DNA, 25 bp, Homo sapien
catgggattaggtaggagaactgca

SEQ ID NO: 141255 - DNA, 25 bp, Homo sapien
caaagagatgctcgacccagaaagc

SEQ ID NO: 141256 - DNA, 25 bp, Homo sapien
tatccgagggacctctgtctggtct

SEQ ID NO: 141257 - DNA, 25 bp, Homo sapien
actcacatctatccgagggacctct

SEQ ID NO: 141258 - DNA, 25 bp, Homo sapien
cctctgtctggtctctcaatgtggt

SEQ ID NO: 141259 - DNA, 25 bp, Homo sapien
tctccactcacatctatccgaggga

SEQ ID NO: 141260 - DNA, 25 bp, Homo sapien
cacgaagccattgacgaagatcatc

SEQ ID NO: 141261 - DNA, 25 bp, Homo sapien
gggatcgcagtgcacgaagccattg

SEQ ID NO: 141262 - DNA, 25 bp, Homo sapien
gatcgcagtgcacgaagccattgac

SEQ ID NO: 141263 - DNA, 25 bp, Homo sapien
gcagtgcacgaagccattgacgaag

SEQ ID NO: 141264 - DNA, 25 bp, Homo sapien
gtaaagcccatggtccaacaggaca

SEQ ID NO: 141265 - DNA, 25 bp, Homo sapien
ctggtaaagcccatggtccaacagg

SEQ ID NO: 141266 - DNA, 25 bp, Homo sapien
ggtccaacaggacaatctccgcctt

SEQ ID NO: 141267 - DNA, 25 bp, Homo sapien
gtccaacaggacaatctccgccttt

SEQ ID NO: 141268 - DNA, 25 bp, Homo sapien
tgtgccttcccacgacatctgtttc

SEQ ID NO: 141269 - DNA, 25 bp, Homo sapien
gacgacggtgaggactgtgccttcc

SEQ ID NO: 141270 - DNA, 25 bp, Homo sapien
tccctgaagcttcaagttcaaagcg

SEQ ID NO: 141271 - DNA, 25 bp, Homo sapien
tgatgccaaccattgcaaaagacga

SEQ ID NO: 141272 - DNA, 25 bp, Homo sapien
atcgcgccgtcagcatgcaggcaaa

SEQ ID NO: 141273 - DNA, 25 bp, Homo sapien
tgccagaggtggcagtaattcaggc

SEQ ID NO: 141274 - DNA, 25 bp, Homo sapien
tgatgcctctgttgaccgagtccca

SEQ ID NO: 141275 - DNA, 25 bp, Homo sapien
tgtcagtccagatcagagactgcca

SEQ ID NO: 141276 - DNA, 25 bp, Homo sapien
ccccttgccacatgactggtttagg

SEQ ID NO: 141277 - DNA, 25 bp, Homo sapien
gaatctggattgagttcagccaggg

SEQ ID NO: 141278 - DNA, 25 bp, Homo sapien
aggcatggacacgtgacctgcgtca

SEQ ID NO: 141279 - DNA, 25 bp, Homo sapien
aattttgttcacttgatcccttggg

SEQ ID NO: 141280 - DNA, 25 bp, Homo sapien
cctgtggcccaaggtctgatgccct

SEQ ID NO: 141281 - DNA, 25 bp, Homo sapien
taccactgtcctcgcatgagagcca

SEQ ID NO: 141282 - DNA, 25 bp, Homo sapien
tcactggccgcaattttagatcagg

SEQ ID NO: 141283 - DNA, 25 bp, Homo sapien
caggattagcccttcatgctggtca

SEQ ID NO: 141284 - DNA, 25 bp, Homo sapien
cagcaacgtgacatgttgagaaagg

SEQ ID NO: 141285 - DNA, 25 bp, Homo sapien
ggccgcgttgttgcgaatctctaag

SEQ ID NO: 141286 - DNA, 25 bp, Homo sapien
tcgttggtcttcaagatgagcagca

SEQ ID NO: 141287 - DNA, 25 bp, Homo sapien
tcagctagcgctctgatgcagcaac

SEQ ID NO: 141288 - DNA, 25 bp, Homo sapien
gaatgaacaggtattcttcttcttg

SEQ ID NO: 141289 - DNA, 25 bp, Homo sapien
ctgaagaatgaacaggtattcttct

SEQ ID NO: 141290 - DNA, 25 bp, Homo sapien
tgaacaggtattcttcttcttgtgc

SEQ ID NO: 141291 - DNA, 25 bp, Homo sapien
gaagaatgaacaggtattcttcttc

SEQ ID NO: 141292 - DNA, 25 bp, Homo sapien
ggcctcgctgaaagagatctgggtc

SEQ ID NO: 141293 - DNA, 25 bp, Homo sapien
ctcgctgaaagagatctgggtcctt

SEQ ID NO: 141294 - DNA, 25 bp, Homo sapien
caggatgagctcatggaggttgatc

SEQ ID NO: 141295 - DNA, 25 bp, Homo sapien
ggttgatctgccataagttgaaggc

SEQ ID NO: 141296 - DNA, 25 bp, Homo sapien
gaacagccagcatattagggccaag

SEQ ID NO: 141297 - DNA, 25 bp, Homo sapien
atattagggccaagacccggtcagc

SEQ ID NO: 141298 - DNA, 25 bp, Homo sapien
gcagggaacagccagcatattaggg

SEQ ID NO: 141299 - DNA, 25 bp, Homo sapien
gccagcatattagggccaagacccg

SEQ ID NO: 141300 - DNA, 25 bp, Homo sapien
agatgccaaaccacctcgctgaggt

SEQ ID NO: 141301 - DNA, 25 bp, Homo sapien
tcatagctgtaatggagttggcccc

SEQ ID NO: 141302 - DNA, 25 bp, Homo sapien
ccacagtgtgcggagaggattccaa

SEQ ID NO: 141303 - DNA, 25 bp, Homo sapien
gaagagagagctatgccacagttca

SEQ ID NO: 141304 - DNA, 25 bp, Homo sapien
gaacaaggttggtacccaggtcaca

SEQ ID NO: 141305 - DNA, 25 bp, Homo sapien
cacaggttggaaggattacaggagc

SEQ ID NO: 141306 - DNA, 25 bp, Homo sapien
taatgggcattgtaggtgaactccc

SEQ ID NO: 141307 - DNA, 25 bp, Homo sapien
gaggaaccataagcccttggcgagg

SEQ ID NO: 141308 - DNA, 25 bp, Homo sapien
ggctcatgggcttgatacagctggc

SEQ ID NO: 141309 - DNA, 25 bp, Homo sapien
accagctcaggtgagacgctggctg

SEQ ID NO: 141310 - DNA, 25 bp, Homo sapien
catgggcttgatacagctggccacc

SEQ ID NO: 141311 - DNA, 25 bp, Homo sapien
ggcttgatacagctggccaccagct

SEQ ID NO: 141312 - DNA, 25 bp, Homo sapien
ggaagggcttcatgtcccacccaag

SEQ ID NO: 141313 - DNA, 25 bp, Homo sapien
agggcttcatgtcccacccaaggtc

SEQ ID NO: 141314 - DNA, 25 bp, Homo sapien
tctgtccctccagccgtccctctcc

SEQ ID NO: 141315 - DNA, 25 bp, Homo sapien
agccgtccctctccatgattaccct

SEQ ID NO: 141316 - DNA, 25 bp, Homo sapien
ctacccactacacagccctgacagc

SEQ ID NO: 141317 - DNA, 25 bp, Homo sapien
atggggaacagccagagcccctgac

SEQ ID NO: 141318 - DNA, 25 bp, Homo sapien
ctgagttgtcctgacagctccaaga

SEQ ID NO: 141319 - DNA, 25 bp, Homo sapien
acagccctgacagctgagttgtcct

SEQ ID NO: 141320 - DNA, 25 bp, Homo sapien
tgcttattgcctcaaggtcacaaaa

SEQ ID NO: 141321 - DNA, 25 bp, Homo sapien
gagggcagtggtaggaccacccaaa

SEQ ID NO: 141322 - DNA, 25 bp, Homo sapien
cactcctttgttgacgcgggtgagg

SEQ ID NO: 141323 - DNA, 25 bp, Homo sapien
gcagggcctgagttcggttcccact

SEQ ID NO: 141324 - DNA, 25 bp, Homo sapien
ttcgatgatctgatgggcagggcct

SEQ ID NO: 141325 - DNA, 25 bp, Homo sapien
caagtgcagaatcctaactgatcac

SEQ ID NO: 141326 - DNA, 25 bp, Homo sapien
ctgacacatgggagaagtttccaga

SEQ ID NO: 141327 - DNA, 25 bp, Homo sapien
ttccagaaggttggttcctgtacaa

SEQ ID NO: 141328 - DNA, 25 bp, Homo sapien
tggttcctgtacaaggatttttcag

SEQ ID NO: 141329 - DNA, 25 bp, Homo sapien
gatgtgtctcatccagtgctaggtg

SEQ ID NO: 141330 - DNA, 25 bp, Homo sapien
cgacatgtcatggtttcagcaagag

SEQ ID NO: 141331 - DNA, 25 bp, Homo sapien
tccattaatagggttatgggaagcc

SEQ ID NO: 141332 - DNA, 25 bp, Homo sapien
tctgtgaagggccatcgacatgtca

SEQ ID NO: 141333 - DNA, 25 bp, Homo sapien
gctcgtcgtatctgtcaccggatga

SEQ ID NO: 141334 - DNA, 25 bp, Homo sapien
agctcagtccttgctcgtcgtatct

SEQ ID NO: 141335 - DNA, 25 bp, Homo sapien
tatctgtcaccggatgattctgtca

SEQ ID NO: 141336 - DNA, 25 bp, Homo sapien
tgtcaccggatgattctgtcaccac

SEQ ID NO: 141337 - DNA, 25 bp, Homo sapien
actgttgatgcccgccccagacctc

SEQ ID NO: 141338 - DNA, 25 bp, Homo sapien
ctgttgatgcccgccccagacctcc

SEQ ID NO: 141339 - DNA, 25 bp, Homo sapien
cactgttgatgcccgccccagacct

SEQ ID NO: 141340 - DNA, 25 bp, Homo sapien
ccactgttgatgcccgccccagacc

SEQ ID NO: 141341 - DNA, 25 bp, Homo sapien
tctcggccttcattggcaaccacaa

SEQ ID NO: 141342 - DNA, 25 bp, Homo sapien
gggcggcgcgatagcccctgcaggc

SEQ ID NO: 141343 - DNA, 25 bp, Homo sapien
ggccttcattggcaaccacaagggc

SEQ ID NO: 141344 - DNA, 25 bp, Homo sapien
cttcattggcaaccacaagggcctg

SEQ ID NO: 141345 - DNA, 25 bp, Homo sapien
gctgacgggaaaatatttctgcctg

SEQ ID NO: 141346 - DNA, 25 bp, Homo sapien
gagctgggaccttgttagagtttgt

SEQ ID NO: 141347 - DNA, 25 bp, Homo sapien
gagataccaaaggttccgacaagct

SEQ ID NO: 141348 - DNA, 25 bp, Homo sapien
gattagaatccctaatgagctgctg

SEQ ID NO: 141349 - DNA, 25 bp, Homo sapien
tcaggtcctccacaaaagggactct

SEQ ID NO: 141350 - DNA, 25 bp, Homo sapien
ccacttcctccaccccagagccctc

SEQ ID NO: 141351 - DNA, 25 bp, Homo sapien
cacaaaagggactctccctccatct

SEQ ID NO: 141352 - DNA, 25 bp, Homo sapien
tccacaaaagggactctccctccat

SEQ ID NO: 141353 - DNA, 25 bp, Homo sapien
tccaataaggtctgggtttggcttc

SEQ ID NO: 141354 - DNA, 25 bp, Homo sapien
tcagaagatttcaagtgtccaataa

SEQ ID NO: 141355 - DNA, 25 bp, Homo sapien
ccctaaagcaatgggcatttgtgtc

SEQ ID NO: 141356 - DNA, 25 bp, Homo sapien
gtctgggtttggcttccctaaagca

SEQ ID NO: 141357 - DNA, 25 bp, Homo sapien
tggctcccttaggactgccgtggga

SEQ ID NO: 141358 - DNA, 25 bp, Homo sapien
gaacactgtagctttctttggcagt

SEQ ID NO: 141359 - DNA, 25 bp, Homo sapien
gactgccgtgggatgttttcacagc

SEQ ID NO: 141360 - DNA, 25 bp, Homo sapien
agagaacactgtagctttctttggc

SEQ ID NO: 141361 - DNA, 25 bp, Homo sapien
ctatgacctctcctccttgaccctc

SEQ ID NO: 141362 - DNA, 25 bp, Homo sapien
tgggtgccattcttccacttcacca

SEQ ID NO: 141363 - DNA, 25 bp, Homo sapien
gaaagctcctccaatgtccatctca

SEQ ID NO: 141364 - DNA, 25 bp, Homo sapien
acctggaaagctcctccaatgtcca

SEQ ID NO: 141365 - DNA, 25 bp, Homo sapien
tcattagtcttgactggccacccag

SEQ ID NO: 141366 - DNA, 25 bp, Homo sapien
tttaggacaacggaatcaaaggtga

SEQ ID NO: 141367 - DNA, 25 bp, Homo sapien
tgtccaaagtgttgaatcattagtc

SEQ ID NO: 141368 - DNA, 25 bp, Homo sapien
gaatcaaaggtgaatatcatcaggc

SEQ ID NO: 141369 - DNA, 25 bp, Homo sapien
ttcctcgttgaggaaaatctagttc

SEQ ID NO: 141370 - DNA, 25 bp, Homo sapien
ctggaggctggttgccacaaacacc

SEQ ID NO: 141371 - DNA, 25 bp, Homo sapien
gaaacacttgtggataaacttaaca

SEQ ID NO: 141372 - DNA, 25 bp, Homo sapien
ttccaatagagctgctcccagtgtc

SEQ ID NO: 141373 - DNA, 25 bp, Homo sapien
tcctcatttaacgtaactttgtctc

SEQ ID NO: 141374 - DNA, 25 bp, Homo sapien
tcctcaatcacggtcctcatttaac

SEQ ID NO: 141375 - DNA, 25 bp, Homo sapien
ttaacgtaactttgtctcatctctc

SEQ ID NO: 141376 - DNA, 25 bp, Homo sapien
atcacttcctttctggccacttcag

SEQ ID NO: 141377 - DNA, 25 bp, Homo sapien
tctgaccgatctagccacaagcagg

SEQ ID NO: 141378 - DNA, 25 bp, Homo sapien
tagtgtcccaagatacagacccatg

SEQ ID NO: 141379 - DNA, 25 bp, Homo sapien
gcttttcatctgcacaacccgaagg

SEQ ID NO: 141380 - DNA, 25 bp, Homo sapien
gcaggcacagaagggatcgattcca

SEQ ID NO: 141381 - DNA, 25 bp, Homo sapien
ccatccatccacaccatttgaccca

SEQ ID NO: 141382 - DNA, 25 bp, Homo sapien
tgtatcatagcagattcccagctcc

SEQ ID NO: 141383 - DNA, 25 bp, Homo sapien
ctgtgtccccgttcaccctccatcc

SEQ ID NO: 141384 - DNA, 25 bp, Homo sapien
atttgacccagcagacccaggctga

SEQ ID NO: 141385 - DNA, 25 bp, Homo sapien
cattactctattagtttggcaaggg

SEQ ID NO: 141386 - DNA, 25 bp, Homo sapien
ctagggttgcaagtagatatcttgg

SEQ ID NO: 141387 - DNA, 25 bp, Homo sapien
gtttcccgagggctgtccgaagagc

SEQ ID NO: 141388 - DNA, 25 bp, Homo sapien
ggtagcccaggtccattactctatt

SEQ ID NO: 141389 - DNA, 25 bp, Homo sapien
ctgaagcagaaaggcagcaacacgg

SEQ ID NO: 141390 - DNA, 25 bp, Homo sapien
agcagaaaggcagcaacacggagca

SEQ ID NO: 141391 - DNA, 25 bp, Homo sapien
gaagcagaaaggcagcaacacggag

SEQ ID NO: 141392 - DNA, 25 bp, Homo sapien
gaaaggcagcaacacggagcagggc

SEQ ID NO: 141393 - DNA, 25 bp, Homo sapien
cttggacctctaagtccagggggct

SEQ ID NO: 141394 - DNA, 25 bp, Homo sapien
gcatttgatcgtttttcctccattt

SEQ ID NO: 141395 - DNA, 25 bp, Homo sapien
tggcagggacttcttacactcagct

SEQ ID NO: 141396 - DNA, 25 bp, Homo sapien
tttctagttgactgcatttgatcgt

SEQ ID NO: 141397 - DNA, 25 bp, Homo sapien
gttgactgcatttgatcgtttttcc

SEQ ID NO: 141398 - DNA, 25 bp, Homo sapien
cagctctagacccactggattggaa

SEQ ID NO: 141399 - DNA, 25 bp, Homo sapien
ggaaaatgctagaatccagctctag

SEQ ID NO: 141400 - DNA, 25 bp, Homo sapien
attggaaccggcgtgctgacctggt

SEQ ID NO: 141401 - DNA, 25 bp, Homo sapien
ggtgcaaacgaatcgctgcagcgag

SEQ ID NO: 141402 - DNA, 25 bp, Homo sapien
cacaatgacatcctatacggtacct

SEQ ID NO: 141403 - DNA, 25 bp, Homo sapien
agtggcctcatttcgaacctctgtg

SEQ ID NO: 141404 - DNA, 25 bp, Homo sapien
aatgattctcaagaaccctctgaag

SEQ ID NO: 141405 - DNA, 25 bp, Homo sapien
aagccacactggaggctatgtgcta

SEQ ID NO: 141406 - DNA, 25 bp, Homo sapien
gaagtcagtgtctgtcctaggcccc

SEQ ID NO: 141407 - DNA, 25 bp, Homo sapien
tctgaggtccttggacctcctcatc

SEQ ID NO: 141408 - DNA, 25 bp, Homo sapien
agtgccgcccctgctcgtacttgaa

SEQ ID NO: 141409 - DNA, 25 bp, Homo sapien
tacttgaagccgtgaagtcagtgtc

SEQ ID NO: 141410 - DNA, 25 bp, Homo sapien
ggctgagaagagggggccagttcca

SEQ ID NO: 141411 - DNA, 25 bp, Homo sapien
gctgagaagagggggccagttccac

SEQ ID NO: 141412 - DNA, 25 bp, Homo sapien
cggctgagaagagggggccagttcc

SEQ ID NO: 141413 - DNA, 25 bp, Homo sapien
gttccatcacggatctggttaagcc

SEQ ID NO: 141414 - DNA, 25 bp, Homo sapien
ctgtcccttttgcaagcataagagg

SEQ ID NO: 141415 - DNA, 25 bp, Homo sapien
gacaccatcgaataaataacctaca

SEQ ID NO: 141416 - DNA, 25 bp, Homo sapien
ttgtgaagatgtactgcctgttcca

SEQ ID NO: 141417 - DNA, 25 bp, Homo sapien
caggcactgatcacgccagctcttt

SEQ ID NO: 141418 - DNA, 25 bp, Homo sapien
cagctctttgtcactgatacactcc

SEQ ID NO: 141419 - DNA, 25 bp, Homo sapien
gtgacttcatgactttctacagatg

SEQ ID NO: 141420 - DNA, 25 bp, Homo sapien
gatcacgccagctctttgtcactga

SEQ ID NO: 141421 - DNA, 25 bp, Homo sapien
ggtgggtgggagcaactcctccgga

SEQ ID NO: 141422 - DNA, 25 bp, Homo sapien
caaggacatgcagcccataccacag

SEQ ID NO: 141423 - DNA, 25 bp, Homo sapien
ggagcaactcctccggagcaattca

SEQ ID NO: 141424 - DNA, 25 bp, Homo sapien
tcaaggacatgcagcccataccaca

SEQ ID NO: 141425 - DNA, 25 bp, Homo sapien
gacggcacatctccaagaccatact

SEQ ID NO: 141426 - DNA, 25 bp, Homo sapien
tccaagaccatactccccagaagga

SEQ ID NO: 141427 - DNA, 25 bp, Homo sapien
caatgacctggtatggggccaggga

SEQ ID NO: 141428 - DNA, 25 bp, Homo sapien
gaagacggcacatctccaagaccat

SEQ ID NO: 141429 - DNA, 25 bp, Homo sapien
ttggaggtgcgaaaagcaggtcctt

SEQ ID NO: 141430 - DNA, 25 bp, Homo sapien
ctttccagttgaacagaagatttgg

SEQ ID NO: 141431 - DNA, 25 bp, Homo sapien
tgtttaatcaactgagtttgctggg

SEQ ID NO: 141432 - DNA, 25 bp, Homo sapien
caagaggcgatgtgtagggctgagc

SEQ ID NO: 141433 - DNA, 25 bp, Homo sapien
gtactgccatagacgccaaagagag

SEQ ID NO: 141434 - DNA, 25 bp, Homo sapien
ggaagctcaaagacatgagtggctg

SEQ ID NO: 141435 - DNA, 25 bp, Homo sapien
ccctcttaagacataagacttgaga

SEQ ID NO: 141436 - DNA, 25 bp, Homo sapien
ctaggagtctaatatggtactgcca

SEQ ID NO: 141437 - DNA, 25 bp, Homo sapien
gatatagctcagatctctccaaagg

SEQ ID NO: 141438 - DNA, 25 bp, Homo sapien
gccctgtaccactacctgagttgag

SEQ ID NO: 141439 - DNA, 25 bp, Homo sapien
gatctcaatgagtgcaacagaccac

SEQ ID NO: 141440 - DNA, 25 bp, Homo sapien
gagtgcccgtatcagtttaacatct

SEQ ID NO: 141441 - DNA, 25 bp, Homo sapien
ttccaaaataccaaaccagagcttc

SEQ ID NO: 141442 - DNA, 25 bp, Homo sapien
agctctccccaaagttaccagtggc

SEQ ID NO: 141443 - DNA, 25 bp, Homo sapien
tccaaaataccaaaccagagcttct

SEQ ID NO: 141444 - DNA, 25 bp, Homo sapien
tccctgggaccctgttctatcaaca

SEQ ID NO: 141445 - DNA, 25 bp, Homo sapien
taaaactgacttatccccagtgctc

SEQ ID NO: 141446 - DNA, 25 bp, Homo sapien
caacactttcttgaacctctatagg

SEQ ID NO: 141447 - DNA, 25 bp, Homo sapien
tgaacctctataggctccccactca

SEQ ID NO: 141448 - DNA, 25 bp, Homo sapien
ttcaacttttccccaatatgctccc

SEQ ID NO: 141449 - DNA, 25 bp, Homo sapien
cattcagatgccacaggggctcctt

SEQ ID NO: 141450 - DNA, 25 bp, Homo sapien
ctcattcagatgccacaggggctcc

SEQ ID NO: 141451 - DNA, 25 bp, Homo sapien
caacttttccccaatatgctccctt

SEQ ID NO: 141452 - DNA, 25 bp, Homo sapien
agtagaagaacaggcacaacccaac

SEQ ID NO: 141453 - DNA, 25 bp, Homo sapien
tccactgggtgctctaaaaagcagc

SEQ ID NO: 141454 - DNA, 25 bp, Homo sapien
ctccatggagttcagggtgctctgg

SEQ ID NO: 141455 - DNA, 25 bp, Homo sapien
caacccaacgctgaaacctgaacat

SEQ ID NO: 141456 - DNA, 25 bp, Homo sapien
gcaaagtcagtgagccagcaaagct

SEQ ID NO: 141457 - DNA, 25 bp, Homo sapien
cgtctgcttcggtgttaactgccta

SEQ ID NO: 141458 - DNA, 25 bp, Homo sapien
gcctatgctgaaggacgtcaccgca

SEQ ID NO: 141459 - DNA, 25 bp, Homo sapien
tccaagcctataagcaccacgatgt

SEQ ID NO: 141460 - DNA, 25 bp, Homo sapien
tctgttgcaacatccttaggtcccc

SEQ ID NO: 141461 - DNA, 25 bp, Homo sapien
tgaacttagcatccttgtcaatggc

SEQ ID NO: 141462 - DNA, 25 bp, Homo sapien
tgccaacccctagagagtatatggt

SEQ ID NO: 141463 - DNA, 25 bp, Homo sapien
aacagtgacccagtgagcccatctg

SEQ ID NO: 141464 - DNA, 25 bp, Homo sapien
tatccatgtggatccggaggccttg

SEQ ID NO: 141465 - DNA, 25 bp, Homo sapien
gaagaagccttcagcgatgcactcc

SEQ ID NO: 141466 - DNA, 25 bp, Homo sapien
gaaagtgtacaagagagtcccagag

SEQ ID NO: 141467 - DNA, 25 bp, Homo sapien
taaagttctacctcctagcagcggc

SEQ ID NO: 141468 - DNA, 25 bp, Homo sapien
catagccagtggtagaacagtcaca

SEQ ID NO: 141469 - DNA, 25 bp, Homo sapien
ttaaccccttgaagccgggcatggc

SEQ ID NO: 141470 - DNA, 25 bp, Homo sapien
tatgtcagtagggactccaccaagg

SEQ ID NO: 141471 - DNA, 25 bp, Homo sapien
ccaccagggagaggcataggaagtc

SEQ ID NO: 141472 - DNA, 25 bp, Homo sapien
ctagcaagagagggagagggtctta

SEQ ID NO: 141473 - DNA, 25 bp, Homo sapien
tagcaagagagggagagggtcttac

SEQ ID NO: 141474 - DNA, 25 bp, Homo sapien
tgatttcttgccctgggttgactgt

SEQ ID NO: 141475 - DNA, 25 bp, Homo sapien
tgccctgggttgactgtgataaacg

SEQ ID NO: 141476 - DNA, 25 bp, Homo sapien
cctgggttgactgtgataaacggtg

SEQ ID NO: 141477 - DNA, 25 bp, Homo sapien
tcttgccctgggttgactgtgataa

SEQ ID NO: 141478 - DNA, 25 bp, Homo sapien
cacgaagagaccagtaggggatggc

SEQ ID NO: 141479 - DNA, 25 bp, Homo sapien
ccacgaagagaccagtaggggatgg

SEQ ID NO: 141480 - DNA, 25 bp, Homo sapien
ctctcccaaagcaactacctcctgt

SEQ ID NO: 141481 - DNA, 25 bp, Homo sapien
actctcccaaagcaactacctcctg

SEQ ID NO: 141482 - DNA, 25 bp, Homo sapien
tacccataggtccaaactctcccaa

SEQ ID NO: 141483 - DNA, 25 bp, Homo sapien
ctcatacccataggtccaaactctc

SEQ ID NO: 141484 - DNA, 25 bp, Homo sapien
cagctgccccagaaactggaaacca

SEQ ID NO: 141485 - DNA, 25 bp, Homo sapien
acagctgccccagaaactggaaacc

SEQ ID NO: 141486 - DNA, 25 bp, Homo sapien
acgtttgccggcagagccctgaatc

SEQ ID NO: 141487 - DNA, 25 bp, Homo sapien
catcccgcagtcataaccattgtca

SEQ ID NO: 141488 - DNA, 25 bp, Homo sapien
ggctgctgaggccagaacaccacac

SEQ ID NO: 141489 - DNA, 25 bp, Homo sapien
tcccgcagtcataaccattgtcagc

SEQ ID NO: 141490 - DNA, 25 bp, Homo sapien
ggagccttgggtccaatcccagtca

SEQ ID NO: 141491 - DNA, 25 bp, Homo sapien
gctccaactacctccggagccttgg

SEQ ID NO: 141492 - DNA, 25 bp, Homo sapien
agcgaagctccggtgtggtgcacct

SEQ ID NO: 141493 - DNA, 25 bp, Homo sapien
gaggtcatcctgtccagcgaagctc

SEQ ID NO: 141494 - DNA, 25 bp, Homo sapien
gaaaaaaccctcaggaggatgacta

SEQ ID NO: 141495 - DNA, 25 bp, Homo sapien
gagccacagcaaactaaacctccca

SEQ ID NO: 141496 - DNA, 25 bp, Homo sapien
cacagcctgatacctgcaacacagt

SEQ ID NO: 141497 - DNA, 25 bp, Homo sapien
gactagagtgatccctctgtctaaa

SEQ ID NO: 141498 - DNA, 25 bp, Homo sapien
cttctaaggacttcacacgggcaaa

SEQ ID NO: 141499 - DNA, 25 bp, Homo sapien
ccagcaatcaaccacaggactgttg

SEQ ID NO: 141500 - DNA, 25 bp, Homo sapien
cagtggagacaccagtcctacatta

SEQ ID NO: 141501 - DNA, 25 bp, Homo sapien
actgttgggactccgtcttctaagg

SEQ ID NO: 141502 - DNA, 25 bp, Homo sapien
aagtagctggcaccacaggcatgca

SEQ ID NO: 141503 - DNA, 25 bp, Homo sapien
tcccaagtagctggcaccacaggca

SEQ ID NO: 141504 - DNA, 25 bp, Homo sapien
ttcaagcgatcctcccacctcagct

SEQ ID NO: 141505 - DNA, 25 bp, Homo sapien
actgcagcctttatctcctgggttc

SEQ ID NO: 141506 - DNA, 25 bp, Homo sapien
cagagcttgccaaagttgtgcgttc

SEQ ID NO: 141507 - DNA, 25 bp, Homo sapien
cacctctaaccaacagagaattctt

SEQ ID NO: 141508 - DNA, 25 bp, Homo sapien
caaagttgtgcgttctgtggtccaa

SEQ ID NO: 141509 - DNA, 25 bp, Homo sapien
tcctctgtggctcggattccttcgg

SEQ ID NO: 141510 - DNA, 25 bp, Homo sapien
gggtgcatgatgtgcataatcaaac

SEQ ID NO: 141511 - DNA, 25 bp, Homo sapien
tggctaccaagaccccaaaaccaca

SEQ ID NO: 141512 - DNA, 25 bp, Homo sapien
gagggtgggcctggctaccaagacc

SEQ ID NO: 141513 - DNA, 25 bp, Homo sapien
ccacagagtccttggattgaaggca

SEQ ID NO: 141514 - DNA, 25 bp, Homo sapien
gaaggcaggataacggccaaatcaa

SEQ ID NO: 141515 - DNA, 25 bp, Homo sapien
ctataggatctgcacggaaggcagg

SEQ ID NO: 141516 - DNA, 25 bp, Homo sapien
gatctgcacggaaggcaggataacg

SEQ ID NO: 141517 - DNA, 25 bp, Homo sapien
ggataacggccaaatcaaaatctat

SEQ ID NO: 141518 - DNA, 25 bp, Homo sapien
ttcagccaagcaaatgacaatgaac

SEQ ID NO: 141519 - DNA, 25 bp, Homo sapien
tcagccaagcaaatgacaatgaaca

SEQ ID NO: 141520 - DNA, 25 bp, Homo sapien
ctgcattctggaaggagagggccat

SEQ ID NO: 141521 - DNA, 25 bp, Homo sapien
ttctgcattctggaaggagagggcc

SEQ ID NO: 141522 - DNA, 25 bp, Homo sapien
gattctgcattctggaaggagaggg

SEQ ID NO: 141523 - DNA, 25 bp, Homo sapien
ctccaagattctgcattctggaagg

SEQ ID NO: 141524 - DNA, 25 bp, Homo sapien
ggaacataaatgtccctggcaacaa

SEQ ID NO: 141525 - DNA, 25 bp, Homo sapien
tgaagagcagagatctatcaagaca

SEQ ID NO: 141526 - DNA, 25 bp, Homo sapien
tttccactactcctctaagttgaga

SEQ ID NO: 141527 - DNA, 25 bp, Homo sapien
catgtaccgagaaaacaaactgtgg

SEQ ID NO: 141528 - DNA, 25 bp, Homo sapien
aatgctgcgtgggatctcaggagcc

SEQ ID NO: 141529 - DNA, 25 bp, Homo sapien
ctctgggacaccaggacaaatttca

SEQ ID NO: 141530 - DNA, 25 bp, Homo sapien
tgtgtgctcgctgagaccactggaa

SEQ ID NO: 141531 - DNA, 25 bp, Homo sapien
tgtatgtacaacgtccaatgctgcg

SEQ ID NO: 141532 - DNA, 25 bp, Homo sapien
tgggactcataacacacacggtagc

SEQ ID NO: 141533 - DNA, 25 bp, Homo sapien
tcacagagcttaaccggaaagatga

SEQ ID NO: 141534 - DNA, 25 bp, Homo sapien
tctcctggaattggacacaaagttg

SEQ ID NO: 141535 - DNA, 25 bp, Homo sapien
tcagtgacacgtaatagaggaagca

SEQ ID NO: 141536 - DNA, 25 bp, Homo sapien
cagctggtctaacaggagcatccac

SEQ ID NO: 141537 - DNA, 25 bp, Homo sapien
gagctgtatagatgagaccctcaga

SEQ ID NO: 141538 - DNA, 25 bp, Homo sapien
ccagctggtctaacaggagcatcca

SEQ ID NO: 141539 - DNA, 25 bp, Homo sapien
agggagctgtatagatgagaccctc

SEQ ID NO: 141540 - DNA, 25 bp, Homo sapien
tcttctgcaatctgcccccactttt

SEQ ID NO: 141541 - DNA, 25 bp, Homo sapien
tgccctatgagtgggtcatggttta

SEQ ID NO: 141542 - DNA, 25 bp, Homo sapien
tgttcttcatgccaaccgataatga

SEQ ID NO: 141543 - DNA, 25 bp, Homo sapien
attctctgtgcctctaatttgctgc

SEQ ID NO: 141544 - DNA, 25 bp, Homo sapien
gcctgaacaggatgggtaatgttct

SEQ ID NO: 141545 - DNA, 25 bp, Homo sapien
tttctgcacactgacaccaaagcaa

SEQ ID NO: 141546 - DNA, 25 bp, Homo sapien
taaaatattctggttgatttctgca

SEQ ID NO: 141547 - DNA, 25 bp, Homo sapien
ggttgatttctgcacactgacacca

SEQ ID NO: 141548 - DNA, 25 bp, Homo sapien
tattctggttgatttctgcacactg

SEQ ID NO: 141549 - DNA, 25 bp, Homo sapien
tcagatagggcttcaaagagccaag

SEQ ID NO: 141550 - DNA, 25 bp, Homo sapien
aatcagatagggcttcaaagagcca

SEQ ID NO: 141551 - DNA, 25 bp, Homo sapien
tagggcttcaaagagccaagcagac

SEQ ID NO: 141552 - DNA, 25 bp, Homo sapien
ctggaatcagatagggcttcaaaga

SEQ ID NO: 141553 - DNA, 25 bp, Homo sapien
aaaaaccacccatgcaagccgaggg

SEQ ID NO: 141554 - DNA, 25 bp, Homo sapien
gccgaggggccaagctcccttttca

SEQ ID NO: 141555 - DNA, 25 bp, Homo sapien
cacatctgtccggaaagacatcatc

SEQ ID NO: 141556 - DNA, 25 bp, Homo sapien
gcatgtagcaagagaggtaagcttc

SEQ ID NO: 141557 - DNA, 25 bp, Homo sapien
ccccagaggtactcagcttctgagc

SEQ ID NO: 141558 - DNA, 25 bp, Homo sapien
tgactatcaagttcatgcaagcccc

SEQ ID NO: 141559 - DNA, 25 bp, Homo sapien
tgctcttgcatgactatcaagttca

SEQ ID NO: 141560 - DNA, 25 bp, Homo sapien
gcaagccccagaggtactcagcttc

SEQ ID NO: 141561 - DNA, 25 bp, Homo sapien
cgggtaggggaaggctccagcaaag

SEQ ID NO: 141562 - DNA, 25 bp, Homo sapien
aggaacacaatacggggcggagatc

SEQ ID NO: 141563 - DNA, 25 bp, Homo sapien
aatggaggaggaacacaatacgggg

SEQ ID NO: 141564 - DNA, 25 bp, Homo sapien
gggcggagatcaagagcgggtaggg

SEQ ID NO: 141565 - DNA, 25 bp, Homo sapien
aagacgagggctttcgcaaggtgaa

SEQ ID NO: 141566 - DNA, 25 bp, Homo sapien
tttcgcaaggtgaaccgcaacttct

SEQ ID NO: 141567 - DNA, 25 bp, Homo sapien
ggtgaaccgcaacttctcagtaaag

SEQ ID NO: 141568 - DNA, 25 bp, Homo sapien
gagggctttcgcaaggtgaaccgca

SEQ ID NO: 141569 - DNA, 25 bp, Homo sapien
ggtacatggttgagacgtaacagca

SEQ ID NO: 141570 - DNA, 25 bp, Homo sapien
tagcagcatgggctaccaggatcat

SEQ ID NO: 141571 - DNA, 25 bp, Homo sapien
ttcagaagcaaccaggacactgcca

SEQ ID NO: 141572 - DNA, 25 bp, Homo sapien
aagtgcattggtaaggacttttctg

SEQ ID NO: 141573 - DNA, 25 bp, Homo sapien
gttcactcatcatgaggtgggagag

SEQ ID NO: 141574 - DNA, 25 bp, Homo sapien
catagtcacttgctgttggcccttc

SEQ ID NO: 141575 - DNA, 25 bp, Homo sapien
tgcaatcatcccaaggctcagaaga

SEQ ID NO: 141576 - DNA, 25 bp, Homo sapien
aaaggtgagccatcaaattccagca

SEQ ID NO: 141577 - DNA, 25 bp, Homo sapien
gacttttggttacagggcaaggcag

SEQ ID NO: 141578 - DNA, 25 bp, Homo sapien
gatgtgatgcactcagttctccaag

SEQ ID NO: 141579 - DNA, 25 bp, Homo sapien
cactataaaagcttggagaactccc

SEQ ID NO: 141580 - DNA, 25 bp, Homo sapien
cataaggctaaagaatgtaggaggg

SEQ ID NO: 141581 - DNA, 25 bp, Homo sapien
tcaagatcaaggaagtccccatcag

SEQ ID NO: 141582 - DNA, 25 bp, Homo sapien
aattgtcagaattagcaaccattta

SEQ ID NO: 141583 - DNA, 25 bp, Homo sapien
cagaattagcaaccatttaaaaggc

SEQ ID NO: 141584 - DNA, 25 bp, Homo sapien
aattagcaaccatttaaaaggcagc

SEQ ID NO: 141585 - DNA, 25 bp, Homo sapien
gcattaattgtcagaattagcaacc

SEQ ID NO: 141586 - DNA, 25 bp, Homo sapien
caaaactcacattatcaagttcagg

SEQ ID NO: 141587 - DNA, 25 bp, Homo sapien
ctcacattatcaagttcaggttcag

SEQ ID NO: 141588 - DNA, 25 bp, Homo sapien
tcaacttcatagcacacaagccatt

SEQ ID NO: 141589 - DNA, 25 bp, Homo sapien
cattataggtaaaatactggaccac

SEQ ID NO: 141590 - DNA, 25 bp, Homo sapien
ccacctgtgagataattgctggcat

SEQ ID NO: 141591 - DNA, 25 bp, Homo sapien
aatatcagaagcaaattgtccaccc

SEQ ID NO: 141592 - DNA, 25 bp, Homo sapien
tacaatgggccaacctctagctaca

SEQ ID NO: 141593 - DNA, 25 bp, Homo sapien
ggagcctttattctaaacccagtgc

SEQ ID NO: 141594 - DNA, 25 bp, Homo sapien
aaaccagagccatcagccaatatag

SEQ ID NO: 141595 - DNA, 25 bp, Homo sapien
ccagagccatcagccaatatagaca

SEQ ID NO: 141596 - DNA, 25 bp, Homo sapien
gacactggcaaccagttgtgaaata

SEQ ID NO: 141597 - DNA, 25 bp, Homo sapien
gagcctcctaatgcacttctgttcc

SEQ ID NO: 141598 - DNA, 25 bp, Homo sapien
cagtgagttgtgtgagtaagcagac

SEQ ID NO: 141599 - DNA, 25 bp, Homo sapien
catgtgcaccccaccacgatgtata

SEQ ID NO: 141600 - DNA, 25 bp, Homo sapien
cattgctctgtgaacaccacgcttc

SEQ ID NO: 141601 - DNA, 25 bp, Homo sapien
gcagactaactggattcgaattcag

SEQ ID NO: 141602 - DNA, 25 bp, Homo sapien
gagaaatagctttaactggagagtc

SEQ ID NO: 141603 - DNA, 25 bp, Homo sapien
cctgagaaatagctttaactggaga

SEQ ID NO: 141604 - DNA, 25 bp, Homo sapien
atagctttaactggagagtcatcgt

SEQ ID NO: 141605 - DNA, 25 bp, Homo sapien
gaaatagctttaactggagagtcat

SEQ ID NO: 141606 - DNA, 25 bp, Homo sapien
tataacagtccattagcgcaaagct

SEQ ID NO: 141607 - DNA, 25 bp, Homo sapien
tcaagccctcgtgttgcagaatgat

SEQ ID NO: 141608 - DNA, 25 bp, Homo sapien
gacaagtctctagaaactgtgcagc

SEQ ID NO: 141609 - DNA, 25 bp, Homo sapien
gaaggtttccctgtagagtgccaga

SEQ ID NO: 141610 - DNA, 25 bp, Homo sapien
ctgttttgatgctcgtaactgcaat

SEQ ID NO: 141611 - DNA, 25 bp, Homo sapien
tgctgttttgatgctcgtaactgca

SEQ ID NO: 141612 - DNA, 25 bp, Homo sapien
gttttgatgctcgtaactgcaataa

SEQ ID NO: 141613 - DNA, 25 bp, Homo sapien
tttgatgctcgtaactgcaataata

SEQ ID NO: 141614 - DNA, 25 bp, Homo sapien
taaagacagtgctcagtagctaaac

SEQ ID NO: 141615 - DNA, 25 bp, Homo sapien
gggcaacaggtatgtacttacagag

SEQ ID NO: 141616 - DNA, 25 bp, Homo sapien
tctaagaactagagccctgaccctt

SEQ ID NO: 141617 - DNA, 25 bp, Homo sapien
gccaggctcttccaaactttagtga

SEQ ID NO: 141618 - DNA, 25 bp, Homo sapien
gcttttcatgcagagagtgcttcgg

SEQ ID NO: 141619 - DNA, 25 bp, Homo sapien
tgtcatgactcagagacctcagtag

SEQ ID NO: 141620 - DNA, 25 bp, Homo sapien
cctcagtagacctccaagagctgca

SEQ ID NO: 141621 - DNA, 25 bp, Homo sapien
aacacttcccctttatgctcagcaa

SEQ ID NO: 141622 - DNA, 25 bp, Homo sapien
gaaacccgtacagtccattggatga

SEQ ID NO: 141623 - DNA, 25 bp, Homo sapien
gatgaacggatatttccaaggcatg

SEQ ID NO: 141624 - DNA, 25 bp, Homo sapien
ccaagttggtggctggttttctcag

SEQ ID NO: 141625 - DNA, 25 bp, Homo sapien
tcagtttcccttcgggcttgcagat

SEQ ID NO: 141626 - DNA, 25 bp, Homo sapien
ggactggtcctcttgggaaaaggca

SEQ ID NO: 141627 - DNA, 25 bp, Homo sapien
acaagggctggactggtcctcttgg

SEQ ID NO: 141628 - DNA, 25 bp, Homo sapien
ggctggactggtcctcttgggaaaa

SEQ ID NO: 141629 - DNA, 25 bp, Homo sapien
ctaacaagggctggactggtcctct

SEQ ID NO: 141630 - DNA, 25 bp, Homo sapien
taatgagcatgtgttgtgagtcagt

SEQ ID NO: 141631 - DNA, 25 bp, Homo sapien
tgcctgctcagctgtattaatgagc

SEQ ID NO: 141632 - DNA, 25 bp, Homo sapien
cagtgggcatgcccagaggaatttt

SEQ ID NO: 141633 - DNA, 25 bp, Homo sapien
cagctgtattaatgagcatgtgttg

SEQ ID NO: 141634 - DNA, 25 bp, Homo sapien
aatcgtaagacttagcattccctgg

SEQ ID NO: 141635 - DNA, 25 bp, Homo sapien
cttgtgcgatttacattagcaggga

SEQ ID NO: 141636 - DNA, 25 bp, Homo sapien
cctgaacaagactgccttccttgtg

SEQ ID NO: 141637 - DNA, 25 bp, Homo sapien
gcaagtgcaaagtgtatccaatccc

SEQ ID NO: 141638 - DNA, 25 bp, Homo sapien
ctaatttttgtatggcaatgcctac

SEQ ID NO: 141639 - DNA, 25 bp, Homo sapien
taatttttgtatggcaatgcctact

SEQ ID NO: 141640 - DNA, 25 bp, Homo sapien
aatttttgtatggcaatgcctacta

SEQ ID NO: 141641 - DNA, 25 bp, Homo sapien
gagttgccaaaaactgcccactctg

SEQ ID NO: 141642 - DNA, 25 bp, Homo sapien
ctgatagcagttgcccttacacagg

SEQ ID NO: 141643 - DNA, 25 bp, Homo sapien
tcaaagtcggctgcctggaatggtt

SEQ ID NO: 141644 - DNA, 25 bp, Homo sapien
ctgcagctgcatctcaatgagtcaa

SEQ ID NO: 141645 - DNA, 25 bp, Homo sapien
ttaagacccactagttcccacaggc

SEQ ID NO: 141646 - DNA, 25 bp, Homo sapien
aatgtcccgagtcaataaatcttgg

SEQ ID NO: 141647 - DNA, 25 bp, Homo sapien
tcaatatagcacaagagatctagag

SEQ ID NO: 141648 - DNA, 25 bp, Homo sapien
gagagctgtaccaaatccaggaagg

SEQ ID NO: 141649 - DNA, 25 bp, Homo sapien
tcagcaggtgctttggacagcaagt

SEQ ID NO: 141650 - DNA, 25 bp, Homo sapien
tgctaaagatggtgactggcaggca

SEQ ID NO: 141651 - DNA, 25 bp, Homo sapien
taggcacgccttgtttttgaaactg

SEQ ID NO: 141652 - DNA, 25 bp, Homo sapien
ccattactcttgaagtttgaagtcc

SEQ ID NO: 141653 - DNA, 25 bp, Homo sapien
ttgaaatctctactattttgagtct

SEQ ID NO: 141654 - DNA, 25 bp, Homo sapien
cagggagaattgaaatctctactat

SEQ ID NO: 141655 - DNA, 25 bp, Homo sapien
cattacaacctggatatcaattcag

SEQ ID NO: 141656 - DNA, 25 bp, Homo sapien
caagtcatgatatgttagcttctcc

SEQ ID NO: 141657 - DNA, 25 bp, Homo sapien
gagctcatttgctcttggcccagaa

SEQ ID NO: 141658 - DNA, 25 bp, Homo sapien
tgagctcatttgctcttggcccaga

SEQ ID NO: 141659 - DNA, 25 bp, Homo sapien
ctgagctcatttgctcttggcccag

SEQ ID NO: 141660 - DNA, 25 bp, Homo sapien
tacatagactgtatatgagaaccca

SEQ ID NO: 141661 - DNA, 25 bp, Homo sapien
tcctggtacatagactgtatatgag

SEQ ID NO: 141662 - DNA, 25 bp, Homo sapien
tgaagcacttcctggtacatagact

SEQ ID NO: 141663 - DNA, 25 bp, Homo sapien
gcacttcctggtacatagactgtat

SEQ ID NO: 141664 - DNA, 25 bp, Homo sapien
ctgggaaagccagtagcaaaggcaa

SEQ ID NO: 141665 - DNA, 25 bp, Homo sapien
ggaatcctggaggatccttaacgta

SEQ ID NO: 141666 - DNA, 25 bp, Homo sapien
ctggaggatccttaacgtaccccag

SEQ ID NO: 141667 - DNA, 25 bp, Homo sapien
aaggctgggaaagccagtagcaaag

SEQ ID NO: 141668 - DNA, 25 bp, Homo sapien
cacctacaacagtgtgcaggaagct

SEQ ID NO: 141669 - DNA, 25 bp, Homo sapien
tctctcccggagcaattgataatct

SEQ ID NO: 141670 - DNA, 25 bp, Homo sapien
gcagaaacaacgaagagagggacca

SEQ ID NO: 141671 - DNA, 25 bp, Homo sapien
tgcatatccctgagaaagcacaacc

SEQ ID NO: 141672 - DNA, 25 bp, Homo sapien
ataacctaagaaatctatagctgcc

SEQ ID NO: 141673 - DNA, 25 bp, Homo sapien
ctgtattgacaacatgcaaccctgt

SEQ ID NO: 141674 - DNA, 25 bp, Homo sapien
gacttctgcagcctgtattgacaac

SEQ ID NO: 141675 - DNA, 25 bp, Homo sapien
cttattgacttctgcagcctgtatt

SEQ ID NO: 141676 - DNA, 25 bp, Homo sapien
gggccagaacattcatctactttac

SEQ ID NO: 141677 - DNA, 25 bp, Homo sapien
actttactctaggtttgtagcatca

SEQ ID NO: 141678 - DNA, 25 bp, Homo sapien
tttgctagttttacctcactgggac

SEQ ID NO: 141679 - DNA, 25 bp, Homo sapien
caagcatgagattagtggaagaaga

SEQ ID NO: 141680 - DNA, 25 bp, Homo sapien
catggagtttcttgccccaatctgt

SEQ ID NO: 141681 - DNA, 25 bp, Homo sapien
caagctgcatggagtttcttgcccc

SEQ ID NO: 141682 - DNA, 25 bp, Homo sapien
gctgcatggagtttcttgccccaat

SEQ ID NO: 141683 - DNA, 25 bp, Homo sapien
gtttccaagctgcatggagtttctt

SEQ ID NO: 141684 - DNA, 25 bp, Homo sapien
ttccttgtaaggcacactctgacat

SEQ ID NO: 141685 - DNA, 25 bp, Homo sapien
gccttgtttccttgtaaggcacact

SEQ ID NO: 141686 - DNA, 25 bp, Homo sapien
tgccttgtttccttgtaaggcacac

SEQ ID NO: 141687 - DNA, 25 bp, Homo sapien
ccttgtttccttgtaaggcacactc

SEQ ID NO: 141688 - DNA, 25 bp, Homo sapien
ttgtaagatcctcagccaaggctat

SEQ ID NO: 141689 - DNA, 25 bp, Homo sapien
tctaagagaaatgtcgatgagggca

SEQ ID NO: 141690 - DNA, 25 bp, Homo sapien
caaggctatagcagtggaacgaagt

SEQ ID NO: 141691 - DNA, 25 bp, Homo sapien
gaacgaagtcagagccaccagtttg

SEQ ID NO: 141692 - DNA, 25 bp, Homo sapien
aataaacggagcatctaggaccaag

SEQ ID NO: 141693 - DNA, 25 bp, Homo sapien
ctaataaacggagcatctaggacca

SEQ ID NO: 141694 - DNA, 25 bp, Homo sapien
taaacggagcatctaggaccaagcc

SEQ ID NO: 141695 - DNA, 25 bp, Homo sapien
taataaacggagcatctaggaccaa

SEQ ID NO: 141696 - DNA, 25 bp, Homo sapien
ctcaggcttatcctccatgagccaa

SEQ ID NO: 141697 - DNA, 25 bp, Homo sapien
taccccagactctcagaagctcagg

SEQ ID NO: 141698 - DNA, 25 bp, Homo sapien
gaaggcatggccacttgtttacccc

SEQ ID NO: 141699 - DNA, 25 bp, Homo sapien
gaagctcaggcttatcctccatgag

SEQ ID NO: 141700 - DNA, 25 bp, Homo sapien
ccccatggctgaatagctttcacat

SEQ ID NO: 141701 - DNA, 25 bp, Homo sapien
agtctgtccagatacttcctgattt

SEQ ID NO: 141702 - DNA, 25 bp, Homo sapien
agccacagtgggacgatgacaggaa

SEQ ID NO: 141703 - DNA, 25 bp, Homo sapien
tttgctttgttccaacagtctgtcc

SEQ ID NO: 141704 - DNA, 25 bp, Homo sapien
ttgctcctccttccccctcagtctt

SEQ ID NO: 141705 - DNA, 25 bp, Homo sapien
ttttgctcctccttccccctcagtc

SEQ ID NO: 141706 - DNA, 25 bp, Homo sapien
ccttttgctcctccttccccctcag

SEQ ID NO: 141707 - DNA, 25 bp, Homo sapien
cctcagtcttttcctccttggggct

SEQ ID NO: 141708 - DNA, 25 bp, Homo sapien
catcttccgcttccctacactgaca

SEQ ID NO: 141709 - DNA, 25 bp, Homo sapien
gaaactatttccttcctcatgcaca

SEQ ID NO: 141710 - DNA, 25 bp, Homo sapien
ttaacatcttccgcttccctacact

SEQ ID NO: 141711 - DNA, 25 bp, Homo sapien
aacatcttccgcttccctacactga

SEQ ID NO: 141712 - DNA, 25 bp, Homo sapien
caacaattataccagtctgtcaggt

SEQ ID NO: 141713 - DNA, 25 bp, Homo sapien
tagtcatggactgcaagcccttcac

SEQ ID NO: 141714 - DNA, 25 bp, Homo sapien
cacgtgaagtctgtgttcttagtca

SEQ ID NO: 141715 - DNA, 25 bp, Homo sapien
aagttttctccactccttactgcca

SEQ ID NO: 141716 - DNA, 25 bp, Homo sapien
tcttgagtggagcagtctctgcatt

SEQ ID NO: 141717 - DNA, 25 bp, Homo sapien
gcaacccattgatcatggccttcac

SEQ ID NO: 141718 - DNA, 25 bp, Homo sapien
tcacttcttgttcacttgcaaccca

SEQ ID NO: 141719 - DNA, 25 bp, Homo sapien
ctcctctgtagctgttctcaccatg

SEQ ID NO: 141720 - DNA, 25 bp, Homo sapien
cctggacgtcgatgtgtgacctttg

SEQ ID NO: 141721 - DNA, 25 bp, Homo sapien
gatgaaacgcatccagaaagagaag

SEQ ID NO: 141722 - DNA, 25 bp, Homo sapien
aatgtgatgttgtgccttgggcact

SEQ ID NO: 141723 - DNA, 25 bp, Homo sapien
gggaacagcccactgcaagtcagca

SEQ ID NO: 141724 - DNA, 25 bp, Homo sapien
tgaccctaccaagatgcgtgatgag

SEQ ID NO: 141725 - DNA, 25 bp, Homo sapien
tatgcaggaagacacacaactcacg

SEQ ID NO: 141726 - DNA, 25 bp, Homo sapien
gactagaaagtaagagaccccagct

SEQ ID NO: 141727 - DNA, 25 bp, Homo sapien
aactcacgtactggccggtggtgca

SEQ ID NO: 141728 - DNA, 25 bp, Homo sapien
aacagctgaacactgactctggcct

SEQ ID NO: 141729 - DNA, 25 bp, Homo sapien
ctacaggacgaacatagttgatttc

SEQ ID NO: 141730 - DNA, 25 bp, Homo sapien
ttgatttcacctctttaaccctgga

SEQ ID NO: 141731 - DNA, 25 bp, Homo sapien
aggatcctggagctttatctcgtga

SEQ ID NO: 141732 - DNA, 25 bp, Homo sapien
cctgcagctcgagacctagtggctc

SEQ ID NO: 141733 - DNA, 25 bp, Homo sapien
gcagacttatagcattgttacccag

SEQ ID NO: 141734 - DNA, 25 bp, Homo sapien
ttcataggctgtaggactgggtcca

SEQ ID NO: 141735 - DNA, 25 bp, Homo sapien
tatttcttgcaattgccctaagcag

SEQ ID NO: 141736 - DNA, 25 bp, Homo sapien
tgccaatagtaggaccagacctgag

SEQ ID NO: 141737 - DNA, 25 bp, Homo sapien
taagcactgtggcttagacctcatc

SEQ ID NO: 141738 - DNA, 25 bp, Homo sapien
tttccaagtgcactacagagcaatg

SEQ ID NO: 141739 - DNA, 25 bp, Homo sapien
cacctggagaggtgttaataagcac

SEQ ID NO: 141740 - DNA, 25 bp, Homo sapien
ggattccattgattaccaggtcgaa

SEQ ID NO: 141741 - DNA, 25 bp, Homo sapien
tatgtaaagagcatagggaccccac

SEQ ID NO: 141742 - DNA, 25 bp, Homo sapien
cactcttgtaataggtcagtctgga

SEQ ID NO: 141743 - DNA, 25 bp, Homo sapien
tcaggaaactgacaagggagactat

SEQ ID NO: 141744 - DNA, 25 bp, Homo sapien
ctagctctgagtcctggatctctgt

SEQ ID NO: 141745 - DNA, 25 bp, Homo sapien
gctctgagtcctggatctctgtgat

SEQ ID NO: 141746 - DNA, 25 bp, Homo sapien
tgagtcctggatctctgtgatctgc

SEQ ID NO: 141747 - DNA, 25 bp, Homo sapien
gatctctgtgatctgcccaaaacaa

SEQ ID NO: 141748 - DNA, 25 bp, Homo sapien
tggcacatcccctatctgcctgaag

SEQ ID NO: 141749 - DNA, 25 bp, Homo sapien
ttttcacgaaactcgtcatctcggc

SEQ ID NO: 141750 - DNA, 25 bp, Homo sapien
aactcctgccctcctattagtgaaa

SEQ ID NO: 141751 - DNA, 25 bp, Homo sapien
cataggccacttcctaggcaggagg

SEQ ID NO: 141752 - DNA, 25 bp, Homo sapien
tttaggcacaggaagttggatccct

SEQ ID NO: 141753 - DNA, 25 bp, Homo sapien
gactgcaatccttccaggtgggtga

SEQ ID NO: 141754 - DNA, 25 bp, Homo sapien
aagatccatttgtctaggcagagag

SEQ ID NO: 141755 - DNA, 25 bp, Homo sapien
gccttaactccccaaatagactgta

SEQ ID NO: 141756 - DNA, 25 bp, Homo sapien
gatggtctttacttataacaaagga

SEQ ID NO: 141757 - DNA, 25 bp, Homo sapien
acacatatgcggaaggggaaaatac

SEQ ID NO: 141758 - DNA, 25 bp, Homo sapien
gctctaatttgctcattacacacaa

SEQ ID NO: 141759 - DNA, 25 bp, Homo sapien
ggaacaatcaggtctgtccttgttt

SEQ ID NO: 141760 - DNA, 25 bp, Homo sapien
ggtgctcagataaccatcaccttga

SEQ ID NO: 141761 - DNA, 25 bp, Homo sapien
cagataaccatcaccttgaatcagg

SEQ ID NO: 141762 - DNA, 25 bp, Homo sapien
ctggtgctcagataaccatcacctt

SEQ ID NO: 141763 - DNA, 25 bp, Homo sapien
gctcagataaccatcaccttgaatc

SEQ ID NO: 141764 - DNA, 25 bp, Homo sapien
tcatgccagtgtctgagacttctca

SEQ ID NO: 141765 - DNA, 25 bp, Homo sapien
ctgggcctgagcatgaacaatgctg

SEQ ID NO: 141766 - DNA, 25 bp, Homo sapien
ccttactgatctaacactaggtctt

SEQ ID NO: 141767 - DNA, 25 bp, Homo sapien
ggtcttattccatcaaacggtgtat

SEQ ID NO: 141768 - DNA, 25 bp, Homo sapien
ccacgaacgctaaaatgtcagcaac

SEQ ID NO: 141769 - DNA, 25 bp, Homo sapien
aaactggcccacgaacgctaaaatg

SEQ ID NO: 141770 - DNA, 25 bp, Homo sapien
cagcaaccacgtttactcttttaag

SEQ ID NO: 141771 - DNA, 25 bp, Homo sapien
tgtcagcaaccacgtttactctttt

SEQ ID NO: 141772 - DNA, 25 bp, Homo sapien
acatctttccataatcaccacctgc

SEQ ID NO: 141773 - DNA, 25 bp, Homo sapien
tctttccataatcaccacctgcatt

SEQ ID NO: 141774 - DNA, 25 bp, Homo sapien
tccataatcaccacctgcattattc

SEQ ID NO: 141775 - DNA, 25 bp, Homo sapien
taatcaccacctgcattattcattt

SEQ ID NO: 141776 - DNA, 25 bp, Homo sapien
cctccttcttcctcaggtccctgag

SEQ ID NO: 141777 - DNA, 25 bp, Homo sapien
ccttcttcctcaggtccctgagcat

SEQ ID NO: 141778 - DNA, 25 bp, Homo sapien
tccttcttcctcaggtccctgagca

SEQ ID NO: 141779 - DNA, 25 bp, Homo sapien
tcctccttcttcctcaggtccctga

SEQ ID NO: 141780 - DNA, 25 bp, Homo sapien
ctgggagaaaatgtcccgggcctca

SEQ ID NO: 141781 - DNA, 25 bp, Homo sapien
tgcataattcctcaggcgagcactg

SEQ ID NO: 141782 - DNA, 25 bp, Homo sapien
ccgggcctcagtgggatatcaagat

SEQ ID NO: 141783 - DNA, 25 bp, Homo sapien
gcactgccagccaatgttgtcacag

SEQ ID NO: 141784 - DNA, 25 bp, Homo sapien
gtgaagttgtcgttgagtgtttttg

SEQ ID NO: 141785 - DNA, 25 bp, Homo sapien
tttgtgaagttgtcgttgagtgttt

SEQ ID NO: 141786 - DNA, 25 bp, Homo sapien
ttgtttgtgaagttgtcgttgagtg

SEQ ID NO: 141787 - DNA, 25 bp, Homo sapien
tgtttgtgaagttgtcgttgagtgt

SEQ ID NO: 141788 - DNA, 25 bp, Homo sapien
tagatgaaatgaaccgggttagccc

SEQ ID NO: 141789 - DNA, 25 bp, Homo sapien
cagacttaaactgggctttgaagag

SEQ ID NO: 141790 - DNA, 25 bp, Homo sapien
tcaggcaacaagtgcaagagaccgc

SEQ ID NO: 141791 - DNA, 25 bp, Homo sapien
caagtgcaagagaccgccagaggca

SEQ ID NO: 141792 - DNA, 25 bp, Homo sapien
ctgccccaggcatgtcctggcccaa

SEQ ID NO: 141793 - DNA, 25 bp, Homo sapien
gtcctggcccaagagcagaaccagg

SEQ ID NO: 141794 - DNA, 25 bp, Homo sapien
cagaaccaggatttataagaacttt

SEQ ID NO: 141795 - DNA, 25 bp, Homo sapien
ttcccccaagatgcagacaatccag

SEQ ID NO: 141796 - DNA, 25 bp, Homo sapien
ttcccaacacagtttaagcttcctc

SEQ ID NO: 141797 - DNA, 25 bp, Homo sapien
tcacgttgccatggaggcccggttg

SEQ ID NO: 141798 - DNA, 25 bp, Homo sapien
catggaggcccggttgtttcttggt

SEQ ID NO: 141799 - DNA, 25 bp, Homo sapien
cgttgccatggaggcccggttgttt

SEQ ID NO: 141800 - DNA, 25 bp, Homo sapien
gccatggaggcccggttgtttcttg

SEQ ID NO: 141801 - DNA, 25 bp, Homo sapien
aacataatggtgtgttattgcccat

SEQ ID NO: 141802 - DNA, 25 bp, Homo sapien
tgccagagtcgatattaaatgaggg

SEQ ID NO: 141803 - DNA, 25 bp, Homo sapien
gcccattatctgttctgtcagtgcc

SEQ ID NO: 141804 - DNA, 25 bp, Homo sapien
tctgtcagtgccagagtcgatatta

SEQ ID NO: 141805 - DNA, 25 bp, Homo sapien
cagattggatgctgcaagtgccttg

SEQ ID NO: 141806 - DNA, 25 bp, Homo sapien
gagtggttccccagattggatgctg

SEQ ID NO: 141807 - DNA, 25 bp, Homo sapien
ggttctgagtggttccccagattgg

SEQ ID NO: 141808 - DNA, 25 bp, Homo sapien
agattggatgctgcaagtgccttgc

SEQ ID NO: 141809 - DNA, 25 bp, Homo sapien
cctgaaggccttatcagctgtgtac

SEQ ID NO: 141810 - DNA, 25 bp, Homo sapien
ggagagaatgctgcctaaatgactc

SEQ ID NO: 141811 - DNA, 25 bp, Homo sapien
tctcctgaaggccttatcagctgtg

SEQ ID NO: 141812 - DNA, 25 bp, Homo sapien
agggagagaatgctgcctaaatgac

SEQ ID NO: 141813 - DNA, 25 bp, Homo sapien
cattttggagtaacactttgaccat

SEQ ID NO: 141814 - DNA, 25 bp, Homo sapien
tgactccacgagaacatttcctccc

SEQ ID NO: 141815 - DNA, 25 bp, Homo sapien
aaatagtaaatcaacttgtcacttg

SEQ ID NO: 141816 - DNA, 25 bp, Homo sapien
gcttcttgaaagtgatgagaaggaa

SEQ ID NO: 141817 - DNA, 25 bp, Homo sapien
aatcaacttgtcacttggaaaataa

SEQ ID NO: 141818 - DNA, 25 bp, Homo sapien
agaaggaaaatagtaaatcaacttg

SEQ ID NO: 141819 - DNA, 25 bp, Homo sapien
cctctaagagcctcttaggaagctg

SEQ ID NO: 141820 - DNA, 25 bp, Homo sapien
tatactgaacaggaacacctacctc

SEQ ID NO: 141821 - DNA, 25 bp, Homo sapien
tgtgagcagacatccaagttatctg

SEQ ID NO: 141822 - DNA, 25 bp, Homo sapien
ctgaacaggaacacctacctctaag

SEQ ID NO: 141823 - DNA, 25 bp, Homo sapien
gcaatcagcacttgtctggcaagag

SEQ ID NO: 141824 - DNA, 25 bp, Homo sapien
aaagtggccacattctcctctcgag

SEQ ID NO: 141825 - DNA, 25 bp, Homo sapien
gttaatgaccaaggagaccgcacca

SEQ ID NO: 141826 - DNA, 25 bp, Homo sapien
gccgacttgcccgtgtgcaggatga

SEQ ID NO: 141827 - DNA, 25 bp, Homo sapien
tctggatcgggttctgagacaggtc

SEQ ID NO: 141828 - DNA, 25 bp, Homo sapien
ctgggagaaagttagacgttaacat

SEQ ID NO: 141829 - DNA, 25 bp, Homo sapien
taattttccacgtgaaattgcaaag

SEQ ID NO: 141830 - DNA, 25 bp, Homo sapien
atttactacccagccacctaagatg

SEQ ID NO: 141831 - DNA, 25 bp, Homo sapien
gacgttaacatctccatccctgaat

SEQ ID NO: 141832 - DNA, 25 bp, Homo sapien
caccgatacacccatgcagaaatta

SEQ ID NO: 141833 - DNA, 25 bp, Homo sapien
accgatacacccatgcagaaattat

SEQ ID NO: 141834 - DNA, 25 bp, Homo sapien
catacaccgatacacccatgcagaa

SEQ ID NO: 141835 - DNA, 25 bp, Homo sapien
tacaccgatacacccatgcagaaat

SEQ ID NO: 141836 - DNA, 25 bp, Homo sapien
cgtcgtggtaagaatgccatccaca

SEQ ID NO: 141837 - DNA, 25 bp, Homo sapien
agtgtagcccgtcgtggtaagaatg

SEQ ID NO: 141838 - DNA, 25 bp, Homo sapien
gtcgtggtaagaatgccatccacag

SEQ ID NO: 141839 - DNA, 25 bp, Homo sapien
ccaggcaagtcagcggtacttgggc

SEQ ID NO: 141840 - DNA, 25 bp, Homo sapien
atagaagaagtcgtccgagcccagc

SEQ ID NO: 141841 - DNA, 25 bp, Homo sapien
ttcctcctacatagaagaagtcgtc

SEQ ID NO: 141842 - DNA, 25 bp, Homo sapien
agtcagcggtacttgggcttcctcc

SEQ ID NO: 141843 - DNA, 25 bp, Homo sapien
agatgccatgagaaaagagagatga

SEQ ID NO: 141844 - DNA, 25 bp, Homo sapien
ggtctcagtggcactttcgcttctc

SEQ ID NO: 141845 - DNA, 25 bp, Homo sapien
agagatgccatgagaaaagagagat

SEQ ID NO: 141846 - DNA, 25 bp, Homo sapien
tctcagtggcactttcgcttctcca

SEQ ID NO: 141847 - DNA, 25 bp, Homo sapien
gataatcggcattctactacatttg

SEQ ID NO: 141848 - DNA, 25 bp, Homo sapien
ggtaattaaccactgagcacattta

SEQ ID NO: 141849 - DNA, 25 bp, Homo sapien
aggatttaacctgcagtaaatccaa

SEQ ID NO: 141850 - DNA, 25 bp, Homo sapien
ccaaatttgcataaggataatcggc

SEQ ID NO: 141851 - DNA, 25 bp, Homo sapien
cttgaaccattgcttggactgcctg

SEQ ID NO: 141852 - DNA, 25 bp, Homo sapien
tgactcctataacctccaagtgcca

SEQ ID NO: 141853 - DNA, 25 bp, Homo sapien
ggatgacaccgctggcatcaatagt

SEQ ID NO: 141854 - DNA, 25 bp, Homo sapien
tataacctccaagtgccagtgccac

SEQ ID NO: 141855 - DNA, 25 bp, Homo sapien
gttttggaaccatatatagctccac

SEQ ID NO: 141856 - DNA, 25 bp, Homo sapien
ttgacatgtgttttggaaccatata

SEQ ID NO: 141857 - DNA, 25 bp, Homo sapien
catgtgttttggaaccatatatagc

SEQ ID NO: 141858 - DNA, 25 bp, Homo sapien
gtgttttggaaccatatatagctcc

SEQ ID NO: 141859 - DNA, 25 bp, Homo sapien
ttgcatgtgggagattctcttctgt

SEQ ID NO: 141860 - DNA, 25 bp, Homo sapien
ttttgttgctataagatgacctggg

SEQ ID NO: 141861 - DNA, 25 bp, Homo sapien
ggctgatttgcatgtgggagattct

SEQ ID NO: 141862 - DNA, 25 bp, Homo sapien
ctgatttgcatgtgggagattctct

SEQ ID NO: 141863 - DNA, 25 bp, Homo sapien
cctggggctcatagtcccaactgct

SEQ ID NO: 141864 - DNA, 25 bp, Homo sapien
ctgctgagatacagctgacatccaa

SEQ ID NO: 141865 - DNA, 25 bp, Homo sapien
agatacagctgacatccaacctggg

SEQ ID NO: 141866 - DNA, 25 bp, Homo sapien
tgagatacagctgacatccaacctg

SEQ ID NO: 141867 - DNA, 25 bp, Homo sapien
tcagcggataagaccatgtcactca

SEQ ID NO: 141868 - DNA, 25 bp, Homo sapien
aatgatccactccacatcagtggag

SEQ ID NO: 141869 - DNA, 25 bp, Homo sapien
cacaggtttgtgacttgaggcctga

SEQ ID NO: 141870 - DNA, 25 bp, Homo sapien
taaactatctgcatagaggacaact

SEQ ID NO: 141871 - DNA, 25 bp, Homo sapien
cagagcccatgtcaagcagcaagta

SEQ ID NO: 141872 - DNA, 25 bp, Homo sapien
ccacttgggcaagctgatgtaagcc

SEQ ID NO: 141873 - DNA, 25 bp, Homo sapien
ttcatcttggtgtccgcaatccggg

SEQ ID NO: 141874 - DNA, 25 bp, Homo sapien
tacaggttgccatcgaggagttcca

SEQ ID NO: 141875 - DNA, 25 bp, Homo sapien
caatgaataggtcgcggatgcagcc

SEQ ID NO: 141876 - DNA, 25 bp, Homo sapien
aataaggccagcacggttctccggc

SEQ ID NO: 141877 - DNA, 25 bp, Homo sapien
tccccactggcggtgaatggcgtgc

SEQ ID NO: 141878 - DNA, 25 bp, Homo sapien
gcttggcactcatccgtgaacagga

SEQ ID NO: 141879 - DNA, 25 bp, Homo sapien
catcactgcatgagggccagatttc

SEQ ID NO: 141880 - DNA, 25 bp, Homo sapien
taaaacagccagttggctaggcccc

SEQ ID NO: 141881 - DNA, 25 bp, Homo sapien
gctgcccagggatccaactgtaaca

SEQ ID NO: 141882 - DNA, 25 bp, Homo sapien
tcaggtcctcaactgtcagggttgc

SEQ ID NO: 141883 - DNA, 25 bp, Homo sapien
tgtcagatactgaagtggtgaacga

SEQ ID NO: 141884 - DNA, 25 bp, Homo sapien
tggcccagtctacagggtcagccct

SEQ ID NO: 141885 - DNA, 25 bp, Homo sapien
tgaagtggtgaacgaaaagggaatc

SEQ ID NO: 141886 - DNA, 25 bp, Homo sapien
gatactgaagtggtgaacgaaaagg

SEQ ID NO: 141887 - DNA, 25 bp, Homo sapien
gccactggtctgtagagatgagacc

SEQ ID NO: 141888 - DNA, 25 bp, Homo sapien
tgcaggtctctcctcaaaacgttct

SEQ ID NO: 141889 - DNA, 25 bp, Homo sapien
caaaacgttcttctgtctctgaatc

SEQ ID NO: 141890 - DNA, 25 bp, Homo sapien
ggtctgtagagatgagaccctgcag

SEQ ID NO: 141891 - DNA, 25 bp, Homo sapien
agattcccctcctcaatagcactga

SEQ ID NO: 141892 - DNA, 25 bp, Homo sapien
tagcactgagaccagtgaaagcaac

SEQ ID NO: 141893 - DNA, 25 bp, Homo sapien
agggatgagggcacagccataacgc

SEQ ID NO: 141894 - DNA, 25 bp, Homo sapien
gagggcacagccataacgcagattc

SEQ ID NO: 141895 - DNA, 25 bp, Homo sapien
gccaaagcttggttgagatcactac

SEQ ID NO: 141896 - DNA, 25 bp, Homo sapien
tttaaagtatgaagaaaggcatgct

SEQ ID NO: 141897 - DNA, 25 bp, Homo sapien
gaaataagacctgggtcatttccac

SEQ ID NO: 141898 - DNA, 25 bp, Homo sapien
taaactctaacctgtatcatatgcc

SEQ ID NO: 141899 - DNA, 25 bp, Homo sapien
gaatgtgctttatgccaccgtatta

SEQ ID NO: 141900 - DNA, 25 bp, Homo sapien
tgatggctatggttgcacagcaatg

SEQ ID NO: 141901 - DNA, 25 bp, Homo sapien
aaccaaggccaaaagaaagattctg

SEQ ID NO: 141902 - DNA, 25 bp, Homo sapien
ttctgaagatggatgatggctatgg

SEQ ID NO: 141903 - DNA, 25 bp, Homo sapien
gggatacatagccgatggctccccg

SEQ ID NO: 141904 - DNA, 25 bp, Homo sapien
actggggatacatagccgatggctc

SEQ ID NO: 141905 - DNA, 25 bp, Homo sapien
tggggatacatagccgatggctccc

SEQ ID NO: 141906 - DNA, 25 bp, Homo sapien
ggatacatagccgatggctccccgt

SEQ ID NO: 141907 - DNA, 25 bp, Homo sapien
taaagcagacaatataagagtgctc

SEQ ID NO: 141908 - DNA, 25 bp, Homo sapien
tgctttgatgtttgacccaagctca

SEQ ID NO: 141909 - DNA, 25 bp, Homo sapien
ctctcagacaataatagaggcaata

SEQ ID NO: 141910 - DNA, 25 bp, Homo sapien
aaccacacttgcctgcataaagcag

SEQ ID NO: 141911 - DNA, 25 bp, Homo sapien
tggtgctattgaccaggctccacat

SEQ ID NO: 141912 - DNA, 25 bp, Homo sapien
gaaagctgcatgttgaacagatgac

SEQ ID NO: 141913 - DNA, 25 bp, Homo sapien
aggaaaaagctatcacagctgagga

SEQ ID NO: 141914 - DNA, 25 bp, Homo sapien
gcaagtcatgctgacaggagagctc

SEQ ID NO: 141915 - DNA, 25 bp, Homo sapien
tgtgccacataggtatgtttttggc

SEQ ID NO: 141916 - DNA, 25 bp, Homo sapien
ttttggcaattcctgcattagctcc

SEQ ID NO: 141917 - DNA, 25 bp, Homo sapien
tagaacaagaacatgcaggacctgt

SEQ ID NO: 141918 - DNA, 25 bp, Homo sapien
ttggcaattcctgcattagctccag

SEQ ID NO: 141919 - DNA, 25 bp, Homo sapien
tgtacttcaagggacccagggacaa

SEQ ID NO: 141920 - DNA, 25 bp, Homo sapien
tccgagactaagtgtgaacccacag

SEQ ID NO: 141921 - DNA, 25 bp, Homo sapien
tggtgctagacaaacccatacttct

SEQ ID NO: 141922 - DNA, 25 bp, Homo sapien
gacactgaccaaatgttagcttctg

SEQ ID NO: 141923 - DNA, 25 bp, Homo sapien
aaagaacttcctccgagttagaatg

SEQ ID NO: 141924 - DNA, 25 bp, Homo sapien
tggttcactgactagcagcactgga

SEQ ID NO: 141925 - DNA, 25 bp, Homo sapien
caatcgggactttatgcttatgaga

SEQ ID NO: 141926 - DNA, 25 bp, Homo sapien
taaaatccccagatgatttgtgtgc

SEQ ID NO: 141927 - DNA, 25 bp, Homo sapien
cactcctttcaggttctactctatg

SEQ ID NO: 141928 - DNA, 25 bp, Homo sapien
tcaggttctactctatggaggagct

SEQ ID NO: 141929 - DNA, 25 bp, Homo sapien
ttctactctatggaggagctggatc

SEQ ID NO: 141930 - DNA, 25 bp, Homo sapien
ctttcaggttctactctatggagga

SEQ ID NO: 141931 - DNA, 25 bp, Homo sapien
agcagaagatagaaagtagagggta

SEQ ID NO: 141932 - DNA, 25 bp, Homo sapien
ctgcagcagaagatagaaagtagag

SEQ ID NO: 141933 - DNA, 25 bp, Homo sapien
cagcagaagatagaaagtagagggt

SEQ ID NO: 141934 - DNA, 25 bp, Homo sapien
tgcagcagaagatagaaagtagagg

SEQ ID NO: 141935 - DNA, 25 bp, Homo sapien
acttagaaatgagtgggccaagaat

SEQ ID NO: 141936 - DNA, 25 bp, Homo sapien
aaaacttagaaatgagtgggccaag

SEQ ID NO: 141937 - DNA, 25 bp, Homo sapien
agaaatgagtgggccaagaatagcg

SEQ ID NO: 141938 - DNA, 25 bp, Homo sapien
aaacttagaaatgagtgggccaaga

SEQ ID NO: 141939 - DNA, 25 bp, Homo sapien
ttcatcaaggtataagccacggctg

SEQ ID NO: 141940 - DNA, 25 bp, Homo sapien
tacagggaacaagttatctggctcc

SEQ ID NO: 141941 - DNA, 25 bp, Homo sapien
gactaggatgcatcatacgcaggct

SEQ ID NO: 141942 - DNA, 25 bp, Homo sapien
catggaggtacatgctatggccacc

SEQ ID NO: 141943 - DNA, 25 bp, Homo sapien
agtgcatatgttgttttaggtgtga

SEQ ID NO: 141944 - DNA, 25 bp, Homo sapien
cagtgcatatgttgttttaggtgtg

SEQ ID NO: 141945 - DNA, 25 bp, Homo sapien
gggctagcaggctcatcatgcttga

SEQ ID NO: 141946 - DNA, 25 bp, Homo sapien
acataggtggggctagcaggctcat

SEQ ID NO: 141947 - DNA, 25 bp, Homo sapien
tagcaggctcatcatgcttgaccat

SEQ ID NO: 141948 - DNA, 25 bp, Homo sapien
taggtggggctagcaggctcatcat

SEQ ID NO: 141949 - DNA, 25 bp, Homo sapien
gcttccaagcaccaaagcacatcca

SEQ ID NO: 141950 - DNA, 25 bp, Homo sapien
atgcttccaagcaccaaagcacatc

SEQ ID NO: 141951 - DNA, 25 bp, Homo sapien
tgcttccaagcaccaaagcacatcc

SEQ ID NO: 141952 - DNA, 25 bp, Homo sapien
taggatgacggatgtcacagttgcc

SEQ ID NO: 141953 - DNA, 25 bp, Homo sapien
gaatggagaagatcgttaggatgac

SEQ ID NO: 141954 - DNA, 25 bp, Homo sapien
tgacggatgtcacagttgccaaata

SEQ ID NO: 141955 - DNA, 25 bp, Homo sapien
gaagatcgttaggatgacggatgtc

SEQ ID NO: 141956 - DNA, 25 bp, Homo sapien
taagttaaccatgagcttgacacgc

SEQ ID NO: 141957 - DNA, 25 bp, Homo sapien
ctgggacatgaagcggaaggacaca

SEQ ID NO: 141958 - DNA, 25 bp, Homo sapien
agtccctggaggtcgtagccaccag

SEQ ID NO: 141959 - DNA, 25 bp, Homo sapien
tctgcctcagtatgcatgaccatgg

SEQ ID NO: 141960 - DNA, 25 bp, Homo sapien
tgaaattgcatccttcaaggtaaca

SEQ ID NO: 141961 - DNA, 25 bp, Homo sapien
ggaacagaaaactccaggctttgga

SEQ ID NO: 141962 - DNA, 25 bp, Homo sapien
taattatcatccttaaactgtaggt

SEQ ID NO: 141963 - DNA, 25 bp, Homo sapien
tgtaagtgatgccaagacaaggata

SEQ ID NO: 141964 - DNA, 25 bp, Homo sapien
ggataaagcactctatttagtaagc

SEQ ID NO: 141965 - DNA, 25 bp, Homo sapien
tctctcgatgctggaagatcatcct

SEQ ID NO: 141966 - DNA, 25 bp, Homo sapien
aatagcagcaagaggtaaggctcag

SEQ ID NO: 141967 - DNA, 25 bp, Homo sapien
tgaaaattaagcaaggtaccctatg

SEQ ID NO: 141968 - DNA, 25 bp, Homo sapien
aaagagtgtcacagaatgccttgga

SEQ ID NO: 141969 - DNA, 25 bp, Homo sapien
tatatccaaggtagcttcaagtcat

SEQ ID NO: 141970 - DNA, 25 bp, Homo sapien
gtaaaaattttaggctgtactggca

SEQ ID NO: 141971 - DNA, 25 bp, Homo sapien
taaattaaggtagcgcaatggatac

SEQ ID NO: 141972 - DNA, 25 bp, Homo sapien
gtcataaaaatcatacagtggcaga

SEQ ID NO: 141973 - DNA, 25 bp, Homo sapien
caaccaaaatatggcccaatcagac

SEQ ID NO: 141974 - DNA, 25 bp, Homo sapien
taggttaagacgacaaattcactcc

SEQ ID NO: 141975 - DNA, 25 bp, Homo sapien
tttctgagtgacaacaagacaaaac

SEQ ID NO: 141976 - DNA, 25 bp, Homo sapien
caagacaaaacactgtactttacaa

SEQ ID NO: 141977 - DNA, 25 bp, Homo sapien
ggaggaccaactgtacttacagaat

SEQ ID NO: 141978 - DNA, 25 bp, Homo sapien
gaattgaatgttgaattagccctga

SEQ ID NO: 141979 - DNA, 25 bp, Homo sapien
taaaccagcatttagggccccatca

SEQ ID NO: 141980 - DNA, 25 bp, Homo sapien
cagaaccagcagttatggaggacca

SEQ ID NO: 141981 - DNA, 25 bp, Homo sapien
gctgctgacagagggctggcacagg

SEQ ID NO: 141982 - DNA, 25 bp, Homo sapien
tttccacagggtcccttgaggaatc

SEQ ID NO: 141983 - DNA, 25 bp, Homo sapien
acagggtcccttgaggaatctttga

SEQ ID NO: 141984 - DNA, 25 bp, Homo sapien
tccacagggtcccttgaggaatctt

SEQ ID NO: 141985 - DNA, 25 bp, Homo sapien
tatgggcattgtcactctggtcagt

SEQ ID NO: 141986 - DNA, 25 bp, Homo sapien
tcactctggtcagtggggcagttcc

SEQ ID NO: 141987 - DNA, 25 bp, Homo sapien
cccttcagtcctatgggcattgtca

SEQ ID NO: 141988 - DNA, 25 bp, Homo sapien
agtcctatgggcattgtcactctgg

SEQ ID NO: 141989 - DNA, 25 bp, Homo sapien
gctgctgccatacactgtttctgct

SEQ ID NO: 141990 - DNA, 25 bp, Homo sapien
ttgctgctgccatacactgtttctg

SEQ ID NO: 141991 - DNA, 25 bp, Homo sapien
gctgccatacactgtttctgctcct

SEQ ID NO: 141992 - DNA, 25 bp, Homo sapien
tttgctgctgccatacactgtttct

SEQ ID NO: 141993 - DNA, 25 bp, Homo sapien
ccctttgtctttctatctgacacac

SEQ ID NO: 141994 - DNA, 25 bp, Homo sapien
tccctttgtctttctatctgacaca

SEQ ID NO: 141995 - DNA, 25 bp, Homo sapien
ctagccagagataaccggcccagtg

SEQ ID NO: 141996 - DNA, 25 bp, Homo sapien
tgtgagatgggaaaggtacagaatt

SEQ ID NO: 141997 - DNA, 25 bp, Homo sapien
aaaggtacagaatttttccagcatt

SEQ ID NO: 141998 - DNA, 25 bp, Homo sapien
agagataaccggcccagtggctgca

SEQ ID NO: 141999 - DNA, 25 bp, Homo sapien
taaagcatgtatctattggccagaa

SEQ ID NO: 142000 - DNA, 25 bp, Homo sapien
ccttgacggaaaacatagttcatag

SEQ ID NO: 142001 - DNA, 25 bp, Homo sapien
ttaacagtagtcacagacttcagtc

SEQ ID NO: 142002 - DNA, 25 bp, Homo sapien
tatgccgttgtgcaaaccttgacgg

SEQ ID NO: 142003 - DNA, 25 bp, Homo sapien
ggtgtgagaatatccaaattctgtc

SEQ ID NO: 142004 - DNA, 25 bp, Homo sapien
tgctgatgatcagcaacagaaatga

SEQ ID NO: 142005 - DNA, 25 bp, Homo sapien
tttctgcagcaatagtacattggtg

SEQ ID NO: 142006 - DNA, 25 bp, Homo sapien
tgaaatggtaatttaggcctttgaa

SEQ ID NO: 142007 - DNA, 25 bp, Homo sapien
tattatggcctcagcaagtgtttca

SEQ ID NO: 142008 - DNA, 25 bp, Homo sapien
tctgatggcatccaatagttttccc

SEQ ID NO: 142009 - DNA, 25 bp, Homo sapien
gacctgtcagcccttaggaatggca

SEQ ID NO: 142010 - DNA, 25 bp, Homo sapien
ctttgaatgggattcactggaccca

SEQ ID NO: 142011 - DNA, 25 bp, Homo sapien
cattatcagcacttagaaatatggg

SEQ ID NO: 142012 - DNA, 25 bp, Homo sapien
cactaagattcctcacttcaaaggg

SEQ ID NO: 142013 - DNA, 25 bp, Homo sapien
tcagatttgaaagccacttcctacc

SEQ ID NO: 142014 - DNA, 25 bp, Homo sapien
gaataataatacctctttggcaggg

SEQ ID NO: 142015 - DNA, 25 bp, Homo sapien
ggaaggagtcttgattacaaaagcc

SEQ ID NO: 142016 - DNA, 25 bp, Homo sapien
tatgggttttagatgacgtagacac

SEQ ID NO: 142017 - DNA, 25 bp, Homo sapien
aagcttgacaaattatagggcaccc

SEQ ID NO: 142018 - DNA, 25 bp, Homo sapien
cctgagagcctgtgcaagatcattt

SEQ ID NO: 142019 - DNA, 25 bp, Homo sapien
cattgtatagctttgcaactggcag

SEQ ID NO: 142020 - DNA, 25 bp, Homo sapien
catacattatggtatttaaatccca

SEQ ID NO: 142021 - DNA, 25 bp, Homo sapien
taattaaccgtatgcagttctccac

SEQ ID NO: 142022 - DNA, 25 bp, Homo sapien
atttaaatcccataacagcagcaga

SEQ ID NO: 142023 - DNA, 25 bp, Homo sapien
tcaaccaacaggagattcggcatgg

SEQ ID NO: 142024 - DNA, 25 bp, Homo sapien
ccttcttcaaccaacaggagattcg

SEQ ID NO: 142025 - DNA, 25 bp, Homo sapien
gactttcaccttcttcaaccaacag

SEQ ID NO: 142026 - DNA, 25 bp, Homo sapien
caacaggagattcggcatggactct

SEQ ID NO: 142027 - DNA, 25 bp, Homo sapien
tggtccagagaaccactctctgatt

SEQ ID NO: 142028 - DNA, 25 bp, Homo sapien
cagagaaccactctctgattatttt

SEQ ID NO: 142029 - DNA, 25 bp, Homo sapien
ctgaagaacaggatgtggtccagag

SEQ ID NO: 142030 - DNA, 25 bp, Homo sapien
tccagagaaccactctctgattatt

SEQ ID NO: 142031 - DNA, 25 bp, Homo sapien
cctctgaatcaattctagggataag

SEQ ID NO: 142032 - DNA, 25 bp, Homo sapien
taactgtagctttgtcctctgaatc

SEQ ID NO: 142033 - DNA, 25 bp, Homo sapien
gaatcaattctagggataagctttt

SEQ ID NO: 142034 - DNA, 25 bp, Homo sapien
aagtggcctttctcataactgtagc

SEQ ID NO: 142035 - DNA, 25 bp, Homo sapien
cacaattcgtatcatcactgtacct

SEQ ID NO: 142036 - DNA, 25 bp, Homo sapien
aattcgtatcatcactgtacctggg

SEQ ID NO: 142037 - DNA, 25 bp, Homo sapien
tccaacacaattcgtatcatcactg

SEQ ID NO: 142038 - DNA, 25 bp, Homo sapien
aaatccaacacaattcgtatcatca

SEQ ID NO: 142039 - DNA, 25 bp, Homo sapien
tcagcaaatgtcgagtacttccgtg

SEQ ID NO: 142040 - DNA, 25 bp, Homo sapien
gattaagagagcatgcaagttcagc

SEQ ID NO: 142041 - DNA, 25 bp, Homo sapien
gaacctgcttacaagaacctgctgt

SEQ ID NO: 142042 - DNA, 25 bp, Homo sapien
gatccctggatcaaagttacttaca

SEQ ID NO: 142043 - DNA, 25 bp, Homo sapien
tttcatgtctgacatatgggctcca

SEQ ID NO: 142044 - DNA, 25 bp, Homo sapien
ttttccaaatctttcatgtctgaca

SEQ ID NO: 142045 - DNA, 25 bp, Homo sapien
atatgggctccagatattcttcagc

SEQ ID NO: 142046 - DNA, 25 bp, Homo sapien
acatatgggctccagatattcttca

SEQ ID NO: 142047 - DNA, 25 bp, Homo sapien
ttgtctccctctattacttttataa

SEQ ID NO: 142048 - DNA, 25 bp, Homo sapien
ttataacctttctatctgcagccat

SEQ ID NO: 142049 - DNA, 25 bp, Homo sapien
tttataacctttctatctgcagcca

SEQ ID NO: 142050 - DNA, 25 bp, Homo sapien
caatgtatttctaagacctggccaa

SEQ ID NO: 142051 - DNA, 25 bp, Homo sapien
gcagcaagactacaagttacccctg

SEQ ID NO: 142052 - DNA, 25 bp, Homo sapien
gttacccctgacatacacgtgtttg

SEQ ID NO: 142053 - DNA, 25 bp, Homo sapien
ccccaggagcaatataagcagcaag

SEQ ID NO: 142054 - DNA, 25 bp, Homo sapien
cacccgaacggtgtgccactcgttg

SEQ ID NO: 142055 - DNA, 25 bp, Homo sapien
catcatccacggttaacttaaggct

SEQ ID NO: 142056 - DNA, 25 bp, Homo sapien
gccctgcatacaaggtctctggtcc

SEQ ID NO: 142057 - DNA, 25 bp, Homo sapien
aacggtgtgccactcgttgtcattg

SEQ ID NO: 142058 - DNA, 25 bp, Homo sapien
gagaaaagacagacgaatttcacca

SEQ ID NO: 142059 - DNA, 25 bp, Homo sapien
aaagacagacgaatttcaccatagt

SEQ ID NO: 142060 - DNA, 25 bp, Homo sapien
aaaagacagacgaatttcaccatag

SEQ ID NO: 142061 - DNA, 25 bp, Homo sapien
gaaaagacagacgaatttcaccata

SEQ ID NO: 142062 - DNA, 25 bp, Homo sapien
cagggcccagatctgatggcaacag

SEQ ID NO: 142063 - DNA, 25 bp, Homo sapien
cactgactgcatttgacaaggccca

SEQ ID NO: 142064 - DNA, 25 bp, Homo sapien
taacgtcctgcaagttaacgtcagg

SEQ ID NO: 142065 - DNA, 25 bp, Homo sapien
atgtaataccccatgctgccccaaa

SEQ ID NO: 142066 - DNA, 25 bp, Homo sapien
tgtaaatgaggtacaaacagaaaag

SEQ ID NO: 142067 - DNA, 25 bp, Homo sapien
cagcaccctcaagtatattttttgg

SEQ ID NO: 142068 - DNA, 25 bp, Homo sapien
gttaccatcatttatcacagcaccc

SEQ ID NO: 142069 - DNA, 25 bp, Homo sapien
acagaaaagttaccatcatttatca

SEQ ID NO: 142070 - DNA, 25 bp, Homo sapien
tggtcttaaaggtgacagggtcagc

SEQ ID NO: 142071 - DNA, 25 bp, Homo sapien
gatgttcctcagtccaaaacgagcc

SEQ ID NO: 142072 - DNA, 25 bp, Homo sapien
cacaagtcaatgtagagaaggccat

SEQ ID NO: 142073 - DNA, 25 bp, Homo sapien
tccaaacgggtatggtctcccacca

SEQ ID NO: 142074 - DNA, 25 bp, Homo sapien
gcggtcactgttgcctttgatcaca

SEQ ID NO: 142075 - DNA, 25 bp, Homo sapien
gataacctgagtgaccactttggtg

SEQ ID NO: 142076 - DNA, 25 bp, Homo sapien
tcccgagtgatgacgacattgtgcc

SEQ ID NO: 142077 - DNA, 25 bp, Homo sapien
tttgatcacattgggaccgtttccg

SEQ ID NO: 142078 - DNA, 25 bp, Homo sapien
tccgctccgatgaagagcatcattg

SEQ ID NO: 142079 - DNA, 25 bp, Homo sapien
ggttgctgtacatgccttgggccag

SEQ ID NO: 142080 - DNA, 25 bp, Homo sapien
cactgatgctagacagccctgaaag

SEQ ID NO: 142081 - DNA, 25 bp, Homo sapien
gccagaccagccatatagagatcac

SEQ ID NO: 142082 - DNA, 25 bp, Homo sapien
cttgcaggtcagctttggtcaacgc

SEQ ID NO: 142083 - DNA, 25 bp, Homo sapien
tgcaggtcagctttggtcaacgcaa

SEQ ID NO: 142084 - DNA, 25 bp, Homo sapien
ttgcaggtcagctttggtcaacgca

SEQ ID NO: 142085 - DNA, 25 bp, Homo sapien
ggcatctttcagtccaaagtggtaa

SEQ ID NO: 142086 - DNA, 25 bp, Homo sapien
tgctgctgtccaagaggtgtgacag

SEQ ID NO: 142087 - DNA, 25 bp, Homo sapien
aagataccaagggttacacagggca

SEQ ID NO: 142088 - DNA, 25 bp, Homo sapien
tggtaatgggaacaagaaccttctc

SEQ ID NO: 142089 - DNA, 25 bp, Homo sapien
cattaaactctttcggtccgcctgg

SEQ ID NO: 142090 - DNA, 25 bp, Homo sapien
taaactctttcggtccgcctggcac

SEQ ID NO: 142091 - DNA, 25 bp, Homo sapien
agattgccattaaactctttcggtc

SEQ ID NO: 142092 - DNA, 25 bp, Homo sapien
tgccattaaactctttcggtccgcc

SEQ ID NO: 142093 - DNA, 25 bp, Homo sapien
ttgttgcatgcagaccccctggttg

SEQ ID NO: 142094 - DNA, 25 bp, Homo sapien
tcatagaacaatcacaggtgaagcc

SEQ ID NO: 142095 - DNA, 25 bp, Homo sapien
ggtttccagaataagaggtcataga

SEQ ID NO: 142096 - DNA, 25 bp, Homo sapien
cctggttggcacatgaatcttcctg

SEQ ID NO: 142097 - DNA, 25 bp, Homo sapien
ttcccaatgtaagttctagtgcttc

SEQ ID NO: 142098 - DNA, 25 bp, Homo sapien
cagtgtgatactccacatcccagaa

SEQ ID NO: 142099 - DNA, 25 bp, Homo sapien
gcttcattatatcccaacaaattcc

SEQ ID NO: 142100 - DNA, 25 bp, Homo sapien
aacaaattccccaagtcagacagtg

SEQ ID NO: 142101 - DNA, 25 bp, Homo sapien
cctaatgttcggcagctgagcccat

SEQ ID NO: 142102 - DNA, 25 bp, Homo sapien
gcttcacgggtttcacagagcccac

SEQ ID NO: 142103 - DNA, 25 bp, Homo sapien
ccttctggcatgtcaagcaatcaca

SEQ ID NO: 142104 - DNA, 25 bp, Homo sapien
ccttcaatactatcagcttcacggg

SEQ ID NO: 142105 - DNA, 25 bp, Homo sapien
tgccagtttttaagatagctaaatt

SEQ ID NO: 142106 - DNA, 25 bp, Homo sapien
agtgccagtttttaagatagctaaa

SEQ ID NO: 142107 - DNA, 25 bp, Homo sapien
tcagaagtgccagtttttaagatag

SEQ ID NO: 142108 - DNA, 25 bp, Homo sapien
tcttttttgaattctttctccacca

SEQ ID NO: 142109 - DNA, 25 bp, Homo sapien
ggaatgaacttgttcctagccacac

SEQ ID NO: 142110 - DNA, 25 bp, Homo sapien
cagtttagcagtagtgagtttgagc

SEQ ID NO: 142111 - DNA, 25 bp, Homo sapien
agagccctgtagtacttcatttagc

SEQ ID NO: 142112 - DNA, 25 bp, Homo sapien
tcaatcagggagaccataacagttc

SEQ ID NO: 142113 - DNA, 25 bp, Homo sapien
ctgatctgaggtaatgtgggccctg

SEQ ID NO: 142114 - DNA, 25 bp, Homo sapien
tctgaggtaatgtgggccctgatta

SEQ ID NO: 142115 - DNA, 25 bp, Homo sapien
ccctgattaaggctaatgaagacat

SEQ ID NO: 142116 - DNA, 25 bp, Homo sapien
taatgtgggccctgattaaggctaa

SEQ ID NO: 142117 - DNA, 25 bp, Homo sapien
tgtagagctgatgggcccacaaatt

SEQ ID NO: 142118 - DNA, 25 bp, Homo sapien
tcctcattaaacacctgagatgtgt

SEQ ID NO: 142119 - DNA, 25 bp, Homo sapien
ttttcacataccttagtatccatgg

SEQ ID NO: 142120 - DNA, 25 bp, Homo sapien
tttgaggtgataggactgtagagct

SEQ ID NO: 142121 - DNA, 25 bp, Homo sapien
caaaagcttatgttctagactaccc

SEQ ID NO: 142122 - DNA, 25 bp, Homo sapien
catatttcaggcaagcgacagctaa

SEQ ID NO: 142123 - DNA, 25 bp, Homo sapien
tagagacctcaatccagacagtact

SEQ ID NO: 142124 - DNA, 25 bp, Homo sapien
ggcattataactagcaactcgaagt

SEQ ID NO: 142125 - DNA, 25 bp, Homo sapien
gcaagtctacatacaccagcaccat

SEQ ID NO: 142126 - DNA, 25 bp, Homo sapien
tcacgcaagtctacatacaccagca

SEQ ID NO: 142127 - DNA, 25 bp, Homo sapien
tcctccccctcacgcaagtctacat

SEQ ID NO: 142128 - DNA, 25 bp, Homo sapien
cccctcacgcaagtctacatacacc

SEQ ID NO: 142129 - DNA, 25 bp, Homo sapien
aaatagcaaggagagcatacccatt

SEQ ID NO: 142130 - DNA, 25 bp, Homo sapien
tcatgcccaacaagaaaaaactaca

SEQ ID NO: 142131 - DNA, 25 bp, Homo sapien
gaagatgaagccagtcattcatgcc

SEQ ID NO: 142132 - DNA, 25 bp, Homo sapien
gcagtcaacaattacctagagataa

SEQ ID NO: 142133 - DNA, 25 bp, Homo sapien
catttggatgtaaataaggctcctt

SEQ ID NO: 142134 - DNA, 25 bp, Homo sapien
ttcatttggatgtaaataaggctcc

SEQ ID NO: 142135 - DNA, 25 bp, Homo sapien
tcatttggatgtaaataaggctcct

SEQ ID NO: 142136 - DNA, 25 bp, Homo sapien
atttggatgtaaataaggctccttt

SEQ ID NO: 142137 - DNA, 25 bp, Homo sapien
gatggaaccagggaacgaaaggcca

SEQ ID NO: 142138 - DNA, 25 bp, Homo sapien
tggagaggtagacagacggacaact

SEQ ID NO: 142139 - DNA, 25 bp, Homo sapien
aaaggccaggtagcgagggattcct

SEQ ID NO: 142140 - DNA, 25 bp, Homo sapien
cagaggcatgcataattgggtccaa

SEQ ID NO: 142141 - DNA, 25 bp, Homo sapien
cagacaggcatttaacaaggtaacc

SEQ ID NO: 142142 - DNA, 25 bp, Homo sapien
ggaaggccacttcagattagctgta

SEQ ID NO: 142143 - DNA, 25 bp, Homo sapien
gcaggacactgatgatatgcaggcc

SEQ ID NO: 142144 - DNA, 25 bp, Homo sapien
caactattgggcctgctatatgcag

SEQ ID NO: 142145 - DNA, 25 bp, Homo sapien
tatggtgtcataatggatctgctcc

SEQ ID NO: 142146 - DNA, 25 bp, Homo sapien
cactttctgcggatgtggttatcca

SEQ ID NO: 142147 - DNA, 25 bp, Homo sapien
tttagcatatcccagaacccaaggc

SEQ ID NO: 142148 - DNA, 25 bp, Homo sapien
gaaagtacctgctaaaaaccatgct

SEQ ID NO: 142149 - DNA, 25 bp, Homo sapien
gtttctcttgtgctagttgctccct

SEQ ID NO: 142150 - DNA, 25 bp, Homo sapien
ggtttctcttgtgctagttgctccc

SEQ ID NO: 142151 - DNA, 25 bp, Homo sapien
tgtcccgggccatagatcccaagat

SEQ ID NO: 142152 - DNA, 25 bp, Homo sapien
gaacttcatgaagtctactgctgta

SEQ ID NO: 142153 - DNA, 25 bp, Homo sapien
gattcaatagtcctcagaagtaaag

SEQ ID NO: 142154 - DNA, 25 bp, Homo sapien
tgcaatttcaggacctccagttgct

SEQ ID NO: 142155 - DNA, 25 bp, Homo sapien
tcaggattggccttctctgtttatg

SEQ ID NO: 142156 - DNA, 25 bp, Homo sapien
ggattggccttctctgtttatggct

SEQ ID NO: 142157 - DNA, 25 bp, Homo sapien
gtttatggcttgctcccggtcataa

SEQ ID NO: 142158 - DNA, 25 bp, Homo sapien
ccggtcataaatttggagcagaagg

SEQ ID NO: 142159 - DNA, 25 bp, Homo sapien
ctcttggttttggtgatactgctat

SEQ ID NO: 142160 - DNA, 25 bp, Homo sapien
ggtgatactgctatagctcattcta

SEQ ID NO: 142161 - DNA, 25 bp, Homo sapien
ggttttggtgatactgctatagctc

SEQ ID NO: 142162 - DNA, 25 bp, Homo sapien
gctatagctcattctaaaatctacc

SEQ ID NO: 142163 - DNA, 25 bp, Homo sapien
caagcaccagagacgcactttgtgt

SEQ ID NO: 142164 - DNA, 25 bp, Homo sapien
gtcaactgatctgcacaagcaccag

SEQ ID NO: 142165 - DNA, 25 bp, Homo sapien
tgccccagctctaataactcaagtg

SEQ ID NO: 142166 - DNA, 25 bp, Homo sapien
cttaaaggataagtgcatgtgggca

SEQ ID NO: 142167 - DNA, 25 bp, Homo sapien
cttcgtcaccatagaaatgcctgtg

SEQ ID NO: 142168 - DNA, 25 bp, Homo sapien
gaactgcaagaagaaggttttgtta

SEQ ID NO: 142169 - DNA, 25 bp, Homo sapien
tgatgatgtggtgaaatacctttcc

SEQ ID NO: 142170 - DNA, 25 bp, Homo sapien
ctttgttcatggcacatcgcttcgt

SEQ ID NO: 142171 - DNA, 25 bp, Homo sapien
gctaactatagtttcactggatctc

SEQ ID NO: 142172 - DNA, 25 bp, Homo sapien
agtatgtgcacctacacttgctaac

SEQ ID NO: 142173 - DNA, 25 bp, Homo sapien
tgttttcattaactagtgcagtgcc

SEQ ID NO: 142174 - DNA, 25 bp, Homo sapien
ggctggacacatcatatcttttctc

SEQ ID NO: 142175 - DNA, 25 bp, Homo sapien
gcagcggttgcctgatatttcttgc

SEQ ID NO: 142176 - DNA, 25 bp, Homo sapien
ccaggtaagttctcaaacataaaag

SEQ ID NO: 142177 - DNA, 25 bp, Homo sapien
taaaagaatgcggtaaagatgtgag

SEQ ID NO: 142178 - DNA, 25 bp, Homo sapien
gctcaaagagttgtgcgtatgcttc

SEQ ID NO: 142179 - DNA, 25 bp, Homo sapien
gacgttgctccaactcatccaaata

SEQ ID NO: 142180 - DNA, 25 bp, Homo sapien
tgttatttcccaaacaagcaggcga

SEQ ID NO: 142181 - DNA, 25 bp, Homo sapien
tgctttaaccagaaacaactagttg

SEQ ID NO: 142182 - DNA, 25 bp, Homo sapien
tgagcaatttccaatcattctgacg

SEQ ID NO: 142183 - DNA, 25 bp, Homo sapien
tccttctgtccttcggtcaaatcag

SEQ ID NO: 142184 - DNA, 25 bp, Homo sapien
ttaatccttctgtccttcggtcaaa

SEQ ID NO: 142185 - DNA, 25 bp, Homo sapien
aatccttctgtccttcggtcaaatc

SEQ ID NO: 142186 - DNA, 25 bp, Homo sapien
taatccttctgtccttcggtcaaat

SEQ ID NO: 142187 - DNA, 25 bp, Homo sapien
gagagttagaggtctgcagatgcct

SEQ ID NO: 142188 - DNA, 25 bp, Homo sapien
tattaaccattatctaacgaccctg

SEQ ID NO: 142189 - DNA, 25 bp, Homo sapien
taagccagagctttatgactgtggt

SEQ ID NO: 142190 - DNA, 25 bp, Homo sapien
tcagagtagtcttgaacatgcaaac

SEQ ID NO: 142191 - DNA, 25 bp, Homo sapien
ttggaacaaggcttaaagcatacat

SEQ ID NO: 142192 - DNA, 25 bp, Homo sapien
aatcttggaacaaggcttaaagcat

SEQ ID NO: 142193 - DNA, 25 bp, Homo sapien
atcttggaacaaggcttaaagcata

SEQ ID NO: 142194 - DNA, 25 bp, Homo sapien
cttggaacaaggcttaaagcataca

SEQ ID NO: 142195 - DNA, 25 bp, Homo sapien
tatgtggtggatctcctactgggag

SEQ ID NO: 142196 - DNA, 25 bp, Homo sapien
tctaattgggttaatggtatctgca

SEQ ID NO: 142197 - DNA, 25 bp, Homo sapien
ttctcagtagccaggtcagatggca

SEQ ID NO: 142198 - DNA, 25 bp, Homo sapien
tatctgcagagaagtagcagctctt

SEQ ID NO: 142199 - DNA, 25 bp, Homo sapien
tgctgaattgctggctccaataatg

SEQ ID NO: 142200 - DNA, 25 bp, Homo sapien
ttggacttctgctgaattgctggct

SEQ ID NO: 142201 - DNA, 25 bp, Homo sapien
gctgcactggacctttggacttctg

SEQ ID NO: 142202 - DNA, 25 bp, Homo sapien
ttgctggctccaataatggctgcca

SEQ ID NO: 142203 - DNA, 25 bp, Homo sapien
cctaatttgagctggccattggtta

SEQ ID NO: 142204 - DNA, 25 bp, Homo sapien
ggtgagattcccattatcagagtct

SEQ ID NO: 142205 - DNA, 25 bp, Homo sapien
gaggccctgttcatttgagctccta

SEQ ID NO: 142206 - DNA, 25 bp, Homo sapien
tgtctagatctaccccaaaagtgga

SEQ ID NO: 142207 - DNA, 25 bp, Homo sapien
aatgactaatcctgcgtgaccctgc

SEQ ID NO: 142208 - DNA, 25 bp, Homo sapien
tgggttcctaccaagcctggacttc

SEQ ID NO: 142209 - DNA, 25 bp, Homo sapien
cccaggcaatgcaaggagtgtcata

SEQ ID NO: 142210 - DNA, 25 bp, Homo sapien
tattggcgagttccatgctcttcgc

SEQ ID NO: 142211 - DNA, 25 bp, Homo sapien
aaaatctgccaatctcctttatttt

SEQ ID NO: 142212 - DNA, 25 bp, Homo sapien
ttgtcttttgtcaggctataataca

SEQ ID NO: 142213 - DNA, 25 bp, Homo sapien
ttttaaatgaggactaattcttgtc

SEQ ID NO: 142214 - DNA, 25 bp, Homo sapien
tatgagaagtaataccgacttttca

SEQ ID NO: 142215 - DNA, 25 bp, Homo sapien
taagatgttcaagacaaggctgaga

SEQ ID NO: 142216 - DNA, 25 bp, Homo sapien
ggaatcacacaaaaacagacgagga

SEQ ID NO: 142217 - DNA, 25 bp, Homo sapien
tcaaacttgtcaggccatgactgga

SEQ ID NO: 142218 - DNA, 25 bp, Homo sapien
aatattcacacagcttataccaggg

SEQ ID NO: 142219 - DNA, 25 bp, Homo sapien
aagaagaagtgataagtgacaggtc

SEQ ID NO: 142220 - DNA, 25 bp, Homo sapien
gaagagtatcctaagaagaagaagt

SEQ ID NO: 142221 - DNA, 25 bp, Homo sapien
tagagtagacataagaattacagtg

SEQ ID NO: 142222 - DNA, 25 bp, Homo sapien
tctaaagagcaatacaagggactac

SEQ ID NO: 142223 - DNA, 25 bp, Homo sapien
ttgcttgagagctcagaataatccc

SEQ ID NO: 142224 - DNA, 25 bp, Homo sapien
catgttttgcttgagagctcagaat

SEQ ID NO: 142225 - DNA, 25 bp, Homo sapien
gttttgcttgagagctcagaataat

SEQ ID NO: 142226 - DNA, 25 bp, Homo sapien
ccatgttttgcttgagagctcagaa

SEQ ID NO: 142227 - DNA, 25 bp, Homo sapien
tctaggtttaactgtgagtgtagca

SEQ ID NO: 142228 - DNA, 25 bp, Homo sapien
gatttgattttccagctataggtaa

SEQ ID NO: 142229 - DNA, 25 bp, Homo sapien
gcatgtggccttgtctagagaaaga

SEQ ID NO: 142230 - DNA, 25 bp, Homo sapien
agtctgctttcatatgcatgtggcc

SEQ ID NO: 142231 - DNA, 25 bp, Homo sapien
ggtttacaatcagtgcctctttctg

SEQ ID NO: 142232 - DNA, 25 bp, Homo sapien
agcacactttcaggtttacaatcag

SEQ ID NO: 142233 - DNA, 25 bp, Homo sapien
gcctctttctgattcctaaagctat

SEQ ID NO: 142234 - DNA, 25 bp, Homo sapien
tccacaaagcacactttcaggttta

SEQ ID NO: 142235 - DNA, 25 bp, Homo sapien
ctttgaattgtggaaagactctctg

SEQ ID NO: 142236 - DNA, 25 bp, Homo sapien
gtggaaagactctctgtggttcccc

SEQ ID NO: 142237 - DNA, 25 bp, Homo sapien
tcagacctgttgctggtagtggctt

SEQ ID NO: 142238 - DNA, 25 bp, Homo sapien
ctgttgctggtagtggcttcaaaac

SEQ ID NO: 142239 - DNA, 25 bp, Homo sapien
tctctgggtctaggaaactccccca

SEQ ID NO: 142240 - DNA, 25 bp, Homo sapien
tatgccaaatcctctaagcaaactt

SEQ ID NO: 142241 - DNA, 25 bp, Homo sapien
tattccacatattgccccacttcta

SEQ ID NO: 142242 - DNA, 25 bp, Homo sapien
gcttccccggtatactctcatcatg

SEQ ID NO: 142243 - DNA, 25 bp, Homo sapien
tattgccccacttctacagttcttc

SEQ ID NO: 142244 - DNA, 25 bp, Homo sapien
cagtactgctcgctgattcaaagca

SEQ ID NO: 142245 - DNA, 25 bp, Homo sapien
cagagttgttcccaaaagggtcatc

SEQ ID NO: 142246 - DNA, 25 bp, Homo sapien
taggcaaacttgacatcagtactgc

SEQ ID NO: 142247 - DNA, 25 bp, Homo sapien
gaattgagttggtatgtgccacgca

SEQ ID NO: 142248 - DNA, 25 bp, Homo sapien
gtttttgtgagcatgcctcagaggc

SEQ ID NO: 142249 - DNA, 25 bp, Homo sapien
tgtgagcatgcctcagaggcaagag

SEQ ID NO: 142250 - DNA, 25 bp, Homo sapien
ttttgtgagcatgcctcagaggcaa

SEQ ID NO: 142251 - DNA, 25 bp, Homo sapien
aggtttttgtgagcatgcctcagag

SEQ ID NO: 142252 - DNA, 25 bp, Homo sapien
gcaactcacagggtaaattcaaggg

SEQ ID NO: 142253 - DNA, 25 bp, Homo sapien
taaaccagagtgttagttgcacaga

SEQ ID NO: 142254 - DNA, 25 bp, Homo sapien
caaatgggtttcttcacaagacaga

SEQ ID NO: 142255 - DNA, 25 bp, Homo sapien
cacagatcctcgctgatgctcagag

SEQ ID NO: 142256 - DNA, 25 bp, Homo sapien
gacaaattatcatacttgttccctt

SEQ ID NO: 142257 - DNA, 25 bp, Homo sapien
taacatccaaatggtagcagacaaa

SEQ ID NO: 142258 - DNA, 25 bp, Homo sapien
tggctgctgagacaatagtaacatc

SEQ ID NO: 142259 - DNA, 25 bp, Homo sapien
cctggctgctgagacaatagtaaca

SEQ ID NO: 142260 - DNA, 25 bp, Homo sapien
tctacaatagagtgcctaaagggat

SEQ ID NO: 142261 - DNA, 25 bp, Homo sapien
aactgtcagaggtctaggagatcac

SEQ ID NO: 142262 - DNA, 25 bp, Homo sapien
tacaggaagctttatcagggagact

SEQ ID NO: 142263 - DNA, 25 bp, Homo sapien
tacatggctagcacttcagggaaag

SEQ ID NO: 142264 - DNA, 25 bp, Homo sapien
aaaacacccttgtgacaccatacag

SEQ ID NO: 142265 - DNA, 25 bp, Homo sapien
tctctaaagttaggcaaaacattac

SEQ ID NO: 142266 - DNA, 25 bp, Homo sapien
caccatacagtataattagtgtgca

SEQ ID NO: 142267 - DNA, 25 bp, Homo sapien
tgtacatgtttgcaagcagtgaatt

SEQ ID NO: 142268 - DNA, 25 bp, Homo sapien
aagtttctggtacaagataaatcct

SEQ ID NO: 142269 - DNA, 25 bp, Homo sapien
ggtacaagataaatcctcaagtaat

SEQ ID NO: 142270 - DNA, 25 bp, Homo sapien
gataaatcctcaagtaatattacct

SEQ ID NO: 142271 - DNA, 25 bp, Homo sapien
tctggtacaagataaatcctcaagt

SEQ ID NO: 142272 - DNA, 25 bp, Homo sapien
caggagagttttggccacgtttaca

SEQ ID NO: 142273 - DNA, 25 bp, Homo sapien
caatgtacaacctgaagtgcctgct

SEQ ID NO: 142274 - DNA, 25 bp, Homo sapien
gctcaaccacgcagtagattaggca

SEQ ID NO: 142275 - DNA, 25 bp, Homo sapien
ggagatcacctcgagagacaacagt

SEQ ID NO: 142276 - DNA, 25 bp, Homo sapien
cttcatacagatgtgactgaaccac

SEQ ID NO: 142277 - DNA, 25 bp, Homo sapien
tattgaaagttatgaagttctccaa

SEQ ID NO: 142278 - DNA, 25 bp, Homo sapien
ttccttgggagtcttcaagtcttca

SEQ ID NO: 142279 - DNA, 25 bp, Homo sapien
ggtgccacctagactaatggatgtg

SEQ ID NO: 142280 - DNA, 25 bp, Homo sapien
actccttcagctttcgtttcttctc

SEQ ID NO: 142281 - DNA, 25 bp, Homo sapien
cactccttcagctttcgtttcttct

SEQ ID NO: 142282 - DNA, 25 bp, Homo sapien
caagagaatgtttcatgaaattcag

SEQ ID NO: 142283 - DNA, 25 bp, Homo sapien
gaaatgtgaggattgggcacttcat

SEQ ID NO: 142284 - DNA, 25 bp, Homo sapien
ggttcacttgcatgggaagaaatgt

SEQ ID NO: 142285 - DNA, 25 bp, Homo sapien
ggagcattccaagcctccacatttc

SEQ ID NO: 142286 - DNA, 25 bp, Homo sapien
gctttgaaggccctgtatgtgtgca

SEQ ID NO: 142287 - DNA, 25 bp, Homo sapien
ctgaaatgcagaactctctctttgc

SEQ ID NO: 142288 - DNA, 25 bp, Homo sapien
ctttgaaggccctgtatgtgtgcag

SEQ ID NO: 142289 - DNA, 25 bp, Homo sapien
ccctgaaatgcagaactctctcttt

SEQ ID NO: 142290 - DNA, 25 bp, Homo sapien
cgctttgtacctatcagtgttgcta

SEQ ID NO: 142291 - DNA, 25 bp, Homo sapien
ccttcttcgctttgtacctatcagt

SEQ ID NO: 142292 - DNA, 25 bp, Homo sapien
tacctatcagtgttgctatccaccc

SEQ ID NO: 142293 - DNA, 25 bp, Homo sapien
agtgttgctatccacccaggagcca

SEQ ID NO: 142294 - DNA, 25 bp, Homo sapien
aaatgactatagatgacaaagtatt

SEQ ID NO: 142295 - DNA, 25 bp, Homo sapien
atttgctgaactgataggttgccca

SEQ ID NO: 142296 - DNA, 25 bp, Homo sapien
aactttgcccatgtggacattacca

SEQ ID NO: 142297 - DNA, 25 bp, Homo sapien
ggatgaggtgatgagccaactttgc

SEQ ID NO: 142298 - DNA, 25 bp, Homo sapien
taggttgcccaatgtgctgtggctg

SEQ ID NO: 142299 - DNA, 25 bp, Homo sapien
tcttttactcaaaggcagggcttaa

SEQ ID NO: 142300 - DNA, 25 bp, Homo sapien
gactagctatcgaaggtctaaactt

SEQ ID NO: 142301 - DNA, 25 bp, Homo sapien
aaacttcgtatcctcagcaccatgg

SEQ ID NO: 142302 - DNA, 25 bp, Homo sapien
tacaacctgtttgtcttcactaagc

SEQ ID NO: 142303 - DNA, 25 bp, Homo sapien
tgaagttcatgatgcccaagggccc

SEQ ID NO: 142304 - DNA, 25 bp, Homo sapien
tgagtttatcccaacatccaaggag

SEQ ID NO: 142305 - DNA, 25 bp, Homo sapien
caggtatagcaaacctcctacggag

SEQ ID NO: 142306 - DNA, 25 bp, Homo sapien
tcccggagctgaaatttagaatgcc

SEQ ID NO: 142307 - DNA, 25 bp, Homo sapien
tacagagctgacgatacatccccag

SEQ ID NO: 142308 - DNA, 25 bp, Homo sapien
gaacgatagatagaaataggcactg

SEQ ID NO: 142309 - DNA, 25 bp, Homo sapien
cactgagtgatgcttgctgccatgg

SEQ ID NO: 142310 - DNA, 25 bp, Homo sapien
cgtctcgcgtggattctcaggtgca

SEQ ID NO: 142311 - DNA, 25 bp, Homo sapien
caagagttttctggtcacaaccagg

SEQ ID NO: 142312 - DNA, 25 bp, Homo sapien
gcatttggaagagtacctgtcacac

SEQ ID NO: 142313 - DNA, 25 bp, Homo sapien
tattaggttcaaaggctagtgagga

SEQ ID NO: 142314 - DNA, 25 bp, Homo sapien
tggtgtataactcaagcaagtctct

SEQ ID NO: 142315 - DNA, 25 bp, Homo sapien
aattttaatggaaggcctggcaagt

SEQ ID NO: 142316 - DNA, 25 bp, Homo sapien
taattttaatggaaggcctggcaag

SEQ ID NO: 142317 - DNA, 25 bp, Homo sapien
tctattgcctagcaaccatggtggc

SEQ ID NO: 142318 - DNA, 25 bp, Homo sapien
ccaatgtgggttcagtttaataccg

SEQ ID NO: 142319 - DNA, 25 bp, Homo sapien
taataccgtgctctatcaacccgct

SEQ ID NO: 142320 - DNA, 25 bp, Homo sapien
taaatgagttgactgtgctgcaacc

SEQ ID NO: 142321 - DNA, 25 bp, Homo sapien
agtgtttggagtatcttggttgtca

SEQ ID NO: 142322 - DNA, 25 bp, Homo sapien
ggtaattacaggaaacagtgcgagt

SEQ ID NO: 142323 - DNA, 25 bp, Homo sapien
tgctctctggatggtaattacagga

SEQ ID NO: 142324 - DNA, 25 bp, Homo sapien
acatgcctgacacggagtgggagct

SEQ ID NO: 142325 - DNA, 25 bp, Homo sapien
atgtaattaggctcaaaagctctca

SEQ ID NO: 142326 - DNA, 25 bp, Homo sapien
atcaaacagtttgattgaaatgcag

SEQ ID NO: 142327 - DNA, 25 bp, Homo sapien
ccttccatgtaattaggctcaaaag

SEQ ID NO: 142328 - DNA, 25 bp, Homo sapien
ggctcaaaagctctcatcaaacagt

SEQ ID NO: 142329 - DNA, 25 bp, Homo sapien
ttaaagtccatcaaactttcatctt

SEQ ID NO: 142330 - DNA, 25 bp, Homo sapien
aagacagctgccgatgaaatcaaat

SEQ ID NO: 142331 - DNA, 25 bp, Homo sapien
atgagtaagacagctgccgatgaaa

SEQ ID NO: 142332 - DNA, 25 bp, Homo sapien
gctgccgatgaaatcaaatttctcc

SEQ ID NO: 142333 - DNA, 25 bp, Homo sapien
cggtgcgcgcacacactggcctgcg

SEQ ID NO: 142334 - DNA, 25 bp, Homo sapien
tcggctcgcgcacggtgcgcgcaca

SEQ ID NO: 142335 - DNA, 25 bp, Homo sapien
tcttaagccggtctgaaaagcgcaa

SEQ ID NO: 142336 - DNA, 25 bp, Homo sapien
cttaagccggtctgaaaagcgcaat

SEQ ID NO: 142337 - DNA, 25 bp, Homo sapien
tctttgccaccaaaccacgtttctg

SEQ ID NO: 142338 - DNA, 25 bp, Homo sapien
tgtctggtgatcagatatctttgtg

SEQ ID NO: 142339 - DNA, 25 bp, Homo sapien
gcctggcttgaataaagaatctgat

SEQ ID NO: 142340 - DNA, 25 bp, Homo sapien
cacttttctcctggtgagctttgga

SEQ ID NO: 142341 - DNA, 25 bp, Homo sapien
gataaagtaatcgtcctagcattgg

SEQ ID NO: 142342 - DNA, 25 bp, Homo sapien
tggactcacgtaaaggaacactccc

SEQ ID NO: 142343 - DNA, 25 bp, Homo sapien
aagcaaatccgagatctactccgtg

SEQ ID NO: 142344 - DNA, 25 bp, Homo sapien
gccaacacttcctgtctgactgaaa

SEQ ID NO: 142345 - DNA, 25 bp, Homo sapien
tattctgtaagagtttctttcacca

SEQ ID NO: 142346 - DNA, 25 bp, Homo sapien
attctgtaagagtttctttcaccat

SEQ ID NO: 142347 - DNA, 25 bp, Homo sapien
atattctgtaagagtttctttcacc

SEQ ID NO: 142348 - DNA, 25 bp, Homo sapien
cctacgaggtgctattttaagacat

SEQ ID NO: 142349 - DNA, 25 bp, Homo sapien
tcagtgtattaatttggtgccatct

SEQ ID NO: 142350 - DNA, 25 bp, Homo sapien
ttctgttattgagagcctacgaggt

SEQ ID NO: 142351 - DNA, 25 bp, Homo sapien
tattgagagcctacgaggtgctatt

SEQ ID NO: 142352 - DNA, 25 bp, Homo sapien
cttaaggcacgagctattactgagc

SEQ ID NO: 142353 - DNA, 25 bp, Homo sapien
agctattactgagcattcatctttc

SEQ ID NO: 142354 - DNA, 25 bp, Homo sapien
tcggccacgtcttaaggcacgagct

SEQ ID NO: 142355 - DNA, 25 bp, Homo sapien
tccaaagcttgctcggccacgtctt

SEQ ID NO: 142356 - DNA, 25 bp, Homo sapien
atttcttggcatctgcgtcacataa

SEQ ID NO: 142357 - DNA, 25 bp, Homo sapien
ggcatctgcgtcacataatcttccc

SEQ ID NO: 142358 - DNA, 25 bp, Homo sapien
ttcttggcatctgcgtcacataatc

SEQ ID NO: 142359 - DNA, 25 bp, Homo sapien
cttggcatctgcgtcacataatctt

SEQ ID NO: 142360 - DNA, 25 bp, Homo sapien
gggcctaatcaccagacttccaatg

SEQ ID NO: 142361 - DNA, 25 bp, Homo sapien
ttagaaccattgaaagcaatcacgg

SEQ ID NO: 142362 - DNA, 25 bp, Homo sapien
ggaagcatcccatacttcgaagtga

SEQ ID NO: 142363 - DNA, 25 bp, Homo sapien
tgaaggctgaacacaaggtttccat

SEQ ID NO: 142364 - DNA, 25 bp, Homo sapien
ttgtctggtacccttccttcctcat

SEQ ID NO: 142365 - DNA, 25 bp, Homo sapien
ctgtctgttgtctggtacccttcct

SEQ ID NO: 142366 - DNA, 25 bp, Homo sapien
tgttgtctggtacccttccttcctc

SEQ ID NO: 142367 - DNA, 25 bp, Homo sapien
gtctgttgtctggtacccttccttc

SEQ ID NO: 142368 - DNA, 25 bp, Homo sapien
attttcttccaacactctttccttg

SEQ ID NO: 142369 - DNA, 25 bp, Homo sapien
ttcttccaacactctttccttgccc

SEQ ID NO: 142370 - DNA, 25 bp, Homo sapien
cttgtattttcttccaacactcttt

SEQ ID NO: 142371 - DNA, 25 bp, Homo sapien
tgtattttcttccaacactctttcc

SEQ ID NO: 142372 - DNA, 25 bp, Homo sapien
gctttgatgcctaaagactcaaccc

SEQ ID NO: 142373 - DNA, 25 bp, Homo sapien
ttgaacccctccaacagatgcttct

SEQ ID NO: 142374 - DNA, 25 bp, Homo sapien
tactttgatagcactatttccttat

SEQ ID NO: 142375 - DNA, 25 bp, Homo sapien
ccaactcctagctttgatgcctaaa

SEQ ID NO: 142376 - DNA, 25 bp, Homo sapien
tcttaaggacattaaacttgataac

SEQ ID NO: 142377 - DNA, 25 bp, Homo sapien
ccagtgcacacagttagtcttaagg

SEQ ID NO: 142378 - DNA, 25 bp, Homo sapien
tgataacaaagcgatgatagcacat

SEQ ID NO: 142379 - DNA, 25 bp, Homo sapien
ggacattaaacttgataacaaagcg

SEQ ID NO: 142380 - DNA, 25 bp, Homo sapien
gatctttctcactccaaggctatgt

SEQ ID NO: 142381 - DNA, 25 bp, Homo sapien
ttatgatgtgctaagatagggccac

SEQ ID NO: 142382 - DNA, 25 bp, Homo sapien
tgaccattcaattgccaaccaagga

SEQ ID NO: 142383 - DNA, 25 bp, Homo sapien
ccatcatacacacgaggaaaccaag

SEQ ID NO: 142384 - DNA, 25 bp, Homo sapien
ttttgaatgcctaatagcatttccg

SEQ ID NO: 142385 - DNA, 25 bp, Homo sapien
ctggattgttcatttttgaatgcct

SEQ ID NO: 142386 - DNA, 25 bp, Homo sapien
ggattgttcatttttgaatgcctaa

SEQ ID NO: 142387 - DNA, 25 bp, Homo sapien
gaatgcctaatagcatttccggcca

SEQ ID NO: 142388 - DNA, 25 bp, Homo sapien
ctgtcgattgacattcttgcttcat

SEQ ID NO: 142389 - DNA, 25 bp, Homo sapien
ccctgactttgattcacctgtcgat

SEQ ID NO: 142390 - DNA, 25 bp, Homo sapien
catcccaggcctcaatgaaagtaat

SEQ ID NO: 142391 - DNA, 25 bp, Homo sapien
tgattcacctgtcgattgacattct

SEQ ID NO: 142392 - DNA, 25 bp, Homo sapien
agttctgttctcttccgtagctgca

SEQ ID NO: 142393 - DNA, 25 bp, Homo sapien
gtgaggttcggcagccatgccatgt

SEQ ID NO: 142394 - DNA, 25 bp, Homo sapien
gcagagattgcctgcttcaggatta

SEQ ID NO: 142395 - DNA, 25 bp, Homo sapien
tcaggattatctgtgaggttcggca

SEQ ID NO: 142396 - DNA, 25 bp, Homo sapien
aaggcactacattgcatacagccag

SEQ ID NO: 142397 - DNA, 25 bp, Homo sapien
cacactgttgagaccctacacagaa

SEQ ID NO: 142398 - DNA, 25 bp, Homo sapien
gggagacatcaaggcactacattgc

SEQ ID NO: 142399 - DNA, 25 bp, Homo sapien
gcatacagccagctgtagcacactg

SEQ ID NO: 142400 - DNA, 25 bp, Homo sapien
caagtcctggagcactgtcgatgcg

SEQ ID NO: 142401 - DNA, 25 bp, Homo sapien
tgtcgatgcggaccaagatgccatc

SEQ ID NO: 142402 - DNA, 25 bp, Homo sapien
gccaggtgtagaggataagcccacc

SEQ ID NO: 142403 - DNA, 25 bp, Homo sapien
ttcccaaagatgtacgtagcgccag

SEQ ID NO: 142404 - DNA, 25 bp, Homo sapien
ctgagtcacaaaatagattaagttc

SEQ ID NO: 142405 - DNA, 25 bp, Homo sapien
ctcacagtaatacctggaatatgat

SEQ ID NO: 142406 - DNA, 25 bp, Homo sapien
actctctaaaatctgatactcacag

SEQ ID NO: 142407 - DNA, 25 bp, Homo sapien
gaatatgatgtgctattctgacctc

SEQ ID NO: 142408 - DNA, 25 bp, Homo sapien
tgtatgaacaaactgtgggcatgag

SEQ ID NO: 142409 - DNA, 25 bp, Homo sapien
gttctaagtttttggatcacacaac

SEQ ID NO: 142410 - DNA, 25 bp, Homo sapien
tggaattactgagacaaggatcact

SEQ ID NO: 142411 - DNA, 25 bp, Homo sapien
tattgagttgcagtgagaagtggtc

SEQ ID NO: 142412 - DNA, 25 bp, Homo sapien
tgatgccctgaacctttaatatctg

SEQ ID NO: 142413 - DNA, 25 bp, Homo sapien
tcctttttagaaatgtgactctgtc

SEQ ID NO: 142414 - DNA, 25 bp, Homo sapien
tgaacctttaatatctgtgggactg

SEQ ID NO: 142415 - DNA, 25 bp, Homo sapien
cctttaatatctgtgggactgcatc

SEQ ID NO: 142416 - DNA, 25 bp, Homo sapien
tgaacagttacaaccggatatccct

SEQ ID NO: 142417 - DNA, 25 bp, Homo sapien
tggaagcaatccagactcctcggtc

SEQ ID NO: 142418 - DNA, 25 bp, Homo sapien
ggtagttagaaatatggccctagca

SEQ ID NO: 142419 - DNA, 25 bp, Homo sapien
tgctatctcctgctacattggaagg

SEQ ID NO: 142420 - DNA, 25 bp, Homo sapien
caatgttagtccaccaagttcgcac

SEQ ID NO: 142421 - DNA, 25 bp, Homo sapien
gaaccatgtggctacctgaaattgc

SEQ ID NO: 142422 - DNA, 25 bp, Homo sapien
caacaagtggtatttaacatggcag

SEQ ID NO: 142423 - DNA, 25 bp, Homo sapien
gaagtggcctgtaatgctattcagc

SEQ ID NO: 142424 - DNA, 25 bp, Homo sapien
aacttcttaggactagatgaggcca

SEQ ID NO: 142425 - DNA, 25 bp, Homo sapien
aggccagtgctaacattgtatagga

SEQ ID NO: 142426 - DNA, 25 bp, Homo sapien
tttgggaaacctacacaggagaatc

SEQ ID NO: 142427 - DNA, 25 bp, Homo sapien
acatgctttgggaaacctacacagg

SEQ ID NO: 142428 - DNA, 25 bp, Homo sapien
cctggccagcagttattcttgttac

SEQ ID NO: 142429 - DNA, 25 bp, Homo sapien
tctcacgttcgtttctttcccagcg

SEQ ID NO: 142430 - DNA, 25 bp, Homo sapien
taaattccaataagtgtctctcacg

SEQ ID NO: 142431 - DNA, 25 bp, Homo sapien
cacctagtagatatagtggagtggc

SEQ ID NO: 142432 - DNA, 25 bp, Homo sapien
ttctttctaacatgataagcaaaaa

SEQ ID NO: 142433 - DNA, 25 bp, Homo sapien
taaattctttctaacatgataagca

SEQ ID NO: 142434 - DNA, 25 bp, Homo sapien
ttttggcgaaggagtctcattctgt

SEQ ID NO: 142435 - DNA, 25 bp, Homo sapien
tttaaattctttctaacatgataag

SEQ ID NO: 142436 - DNA, 25 bp, Homo sapien
aatctcataacactatccctattca

SEQ ID NO: 142437 - DNA, 25 bp, Homo sapien
tcataacactatccctattcacctt

SEQ ID NO: 142438 - DNA, 25 bp, Homo sapien
attttctgcgaaatgtcatcaatgt

SEQ ID NO: 142439 - DNA, 25 bp, Homo sapien
aacattttctgcgaaatgtcatcaa

SEQ ID NO: 142440 - DNA, 25 bp, Homo sapien
taactttttcgcatcatggaacaca

SEQ ID NO: 142441 - DNA, 25 bp, Homo sapien
gatattatttgcatggtccacagag

SEQ ID NO: 142442 - DNA, 25 bp, Homo sapien
taagccgtcgtaacaactgaagatg

SEQ ID NO: 142443 - DNA, 25 bp, Homo sapien
tatattggtgcctgatacaaagacc

SEQ ID NO: 142444 - DNA, 25 bp, Homo sapien
ccaacaggccacatttcgagattgt

SEQ ID NO: 142445 - DNA, 25 bp, Homo sapien
tatgcaattttgaaccttaccccag

SEQ ID NO: 142446 - DNA, 25 bp, Homo sapien
cagtcttagaactcttgtgccctca

SEQ ID NO: 142447 - DNA, 25 bp, Homo sapien
caatagacattcatgccgatggcta

SEQ ID NO: 142448 - DNA, 25 bp, Homo sapien
cttgtcaggtacatgagtgtctggg

SEQ ID NO: 142449 - DNA, 25 bp, Homo sapien
tctttcctacctcatcaggcctata

SEQ ID NO: 142450 - DNA, 25 bp, Homo sapien
agtgtctgggagaccttgccctgcc

SEQ ID NO: 142451 - DNA, 25 bp, Homo sapien
ttcctacctcatcaggcctatagct

SEQ ID NO: 142452 - DNA, 25 bp, Homo sapien
cctctagctgagacatgatggttcc

SEQ ID NO: 142453 - DNA, 25 bp, Homo sapien
aatgcaactccatcagctacaggtg

SEQ ID NO: 142454 - DNA, 25 bp, Homo sapien
gaactaggctttcttggacgcttcc

SEQ ID NO: 142455 - DNA, 25 bp, Homo sapien
tgtgacatctggaacgtaacctggc

SEQ ID NO: 142456 - DNA, 25 bp, Homo sapien
ctgagttggcaatcaggtgatgcct

SEQ ID NO: 142457 - DNA, 25 bp, Homo sapien
cactgtcctgagcaatttgccttca

SEQ ID NO: 142458 - DNA, 25 bp, Homo sapien
tgtatgactgacatcgccagagtca

SEQ ID NO: 142459 - DNA, 25 bp, Homo sapien
gatagatatcccagtgcttgcctgt

SEQ ID NO: 142460 - DNA, 25 bp, Homo sapien
taactgggtttactcagcaatctga

SEQ ID NO: 142461 - DNA, 25 bp, Homo sapien
tctactatgtatctggcaccttatt

SEQ ID NO: 142462 - DNA, 25 bp, Homo sapien
tatggcccaaaattgcataacttgc

SEQ ID NO: 142463 - DNA, 25 bp, Homo sapien
catttgcttaatgcagataccctaa

SEQ ID NO: 142464 - DNA, 25 bp, Homo sapien
ctgctgtgcttgctccttcccaaat

SEQ ID NO: 142465 - DNA, 25 bp, Homo sapien
gcaccagcatgcagtaaaactggcc

SEQ ID NO: 142466 - DNA, 25 bp, Homo sapien
gcatgcagtaaaactggcctctgct

SEQ ID NO: 142467 - DNA, 25 bp, Homo sapien
cagcatgcagtaaaactggcctctg

SEQ ID NO: 142468 - DNA, 25 bp, Homo sapien
tggttctctcctcactgtcttctac

SEQ ID NO: 142469 - DNA, 25 bp, Homo sapien
ctcactgtcttctactctatgaacc

SEQ ID NO: 142470 - DNA, 25 bp, Homo sapien
tcctcactgtcttctactctatgaa

SEQ ID NO: 142471 - DNA, 25 bp, Homo sapien
tctcctcactgtcttctactctatg

SEQ ID NO: 142472 - DNA, 25 bp, Homo sapien
gaaagggtggttagaaatgccatac

SEQ ID NO: 142473 - DNA, 25 bp, Homo sapien
ccaggcctaagctcatggaaggaaa

SEQ ID NO: 142474 - DNA, 25 bp, Homo sapien
gaacacagaaatttgcggcttggta

SEQ ID NO: 142475 - DNA, 25 bp, Homo sapien
cggcttggtagatttaaggctccca

SEQ ID NO: 142476 - DNA, 25 bp, Homo sapien
ttttccaccgaatccattaacataa

SEQ ID NO: 142477 - DNA, 25 bp, Homo sapien
aagccgtattttccaccgaatccat

SEQ ID NO: 142478 - DNA, 25 bp, Homo sapien
tcattaaagccgtattttccaccga

SEQ ID NO: 142479 - DNA, 25 bp, Homo sapien
gaaatgacaacagagtaatcatagt

SEQ ID NO: 142480 - DNA, 25 bp, Homo sapien
tggctgctgtttgacagctcttgca

SEQ ID NO: 142481 - DNA, 25 bp, Homo sapien
tgtgactgccacagaagagacgctg

SEQ ID NO: 142482 - DNA, 25 bp, Homo sapien
cagaagagacgctgcttctggcttt

SEQ ID NO: 142483 - DNA, 25 bp, Homo sapien
ttcactttctcatcaggatggctgc

SEQ ID NO: 142484 - DNA, 25 bp, Homo sapien
tctttccagtctccattgaggttga

SEQ ID NO: 142485 - DNA, 25 bp, Homo sapien
accctgttgctgaagagaggggcct

SEQ ID NO: 142486 - DNA, 25 bp, Homo sapien
tctggggcaatttgtatttctcttt

SEQ ID NO: 142487 - DNA, 25 bp, Homo sapien
cctgtgttctctttctggggcaatt

SEQ ID NO: 142488 - DNA, 25 bp, Homo sapien
gtacaagccgcttaaccatccagaa

SEQ ID NO: 142489 - DNA, 25 bp, Homo sapien
aaaactctcagacctccaagaatgt

SEQ ID NO: 142490 - DNA, 25 bp, Homo sapien
gaagcttgtctagaatggtggtcat

SEQ ID NO: 142491 - DNA, 25 bp, Homo sapien
tccagataaagtgtgcgggacaatg

SEQ ID NO: 142492 - DNA, 25 bp, Homo sapien
acagtcagcatctcagggtctgttc

SEQ ID NO: 142493 - DNA, 25 bp, Homo sapien
cagcatctcagggtctgttccgcac

SEQ ID NO: 142494 - DNA, 25 bp, Homo sapien
gcatctcagggtctgttccgcacat

SEQ ID NO: 142495 - DNA, 25 bp, Homo sapien
gtcagcatctcagggtctgttccgc

SEQ ID NO: 142496 - DNA, 25 bp, Homo sapien
gctgctgctggtttctggacttttt

SEQ ID NO: 142497 - DNA, 25 bp, Homo sapien
cattttggcagcacctgctgctgct

SEQ ID NO: 142498 - DNA, 25 bp, Homo sapien
tgctgctgctggtttctggactttt

SEQ ID NO: 142499 - DNA, 25 bp, Homo sapien
gctgctggtttctggacttttttgt

SEQ ID NO: 142500 - DNA, 25 bp, Homo sapien
tttgcacaccccttgaaatcagcac

SEQ ID NO: 142501 - DNA, 25 bp, Homo sapien
ttgcacaccccttgaaatcagcaca

SEQ ID NO: 142502 - DNA, 25 bp, Homo sapien
tgcacaccccttgaaatcagcacag

SEQ ID NO: 142503 - DNA, 25 bp, Homo sapien
tacatgagcctcttcaaatcagcac

SEQ ID NO: 142504 - DNA, 25 bp, Homo sapien
catttgtgacataaatacatgagcc

SEQ ID NO: 142505 - DNA, 25 bp, Homo sapien
ttgtgcataagaaggtaagtaactg

SEQ ID NO: 142506 - DNA, 25 bp, Homo sapien
tatatatttacacaccactggcaga

SEQ ID NO: 142507 - DNA, 25 bp, Homo sapien
gtctctgatatgagtcagaatccga

SEQ ID NO: 142508 - DNA, 25 bp, Homo sapien
tgatatgagtcagaatccgatccat

SEQ ID NO: 142509 - DNA, 25 bp, Homo sapien
cagaatccgatccatggtcagcggg

SEQ ID NO: 142510 - DNA, 25 bp, Homo sapien
gaagagggagtctctgatatgagtc

SEQ ID NO: 142511 - DNA, 25 bp, Homo sapien
taaggttctaagtcaaattgctgcc

SEQ ID NO: 142512 - DNA, 25 bp, Homo sapien
ggaacaaaagctcacatgcctatgg

SEQ ID NO: 142513 - DNA, 25 bp, Homo sapien
gcgtgtgtcccaagtcccataaggt

SEQ ID NO: 142514 - DNA, 25 bp, Homo sapien
tctaggtctcaaggttacagtgcgt

SEQ ID NO: 142515 - DNA, 25 bp, Homo sapien
taacaatttcctgggataacatgac

SEQ ID NO: 142516 - DNA, 25 bp, Homo sapien
cacaatgggtggctctagtcaataa

SEQ ID NO: 142517 - DNA, 25 bp, Homo sapien
gaaacaatattgtgggccccaaaca

SEQ ID NO: 142518 - DNA, 25 bp, Homo sapien
tgtgtccagcctcaatagaattttt

SEQ ID NO: 142519 - DNA, 25 bp, Homo sapien
tgatttccttgatgacacggtgact

SEQ ID NO: 142520 - DNA, 25 bp, Homo sapien
gataaaatgtagagccatggctcag

SEQ ID NO: 142521 - DNA, 25 bp, Homo sapien
gctcagagtgagctagtgacaatca

SEQ ID NO: 142522 - DNA, 25 bp, Homo sapien
gaaatcgggtctatcatgaaatgac

SEQ ID NO: 142523 - DNA, 25 bp, Homo sapien
cattctcatagaactgactggctag

SEQ ID NO: 142524 - DNA, 25 bp, Homo sapien
tatgaacaggacagggcaagtgctg

SEQ ID NO: 142525 - DNA, 25 bp, Homo sapien
taatgtgtcccgactcatggaagac

SEQ ID NO: 142526 - DNA, 25 bp, Homo sapien
gcaggtaggttgtctgttcttccaa

SEQ ID NO: 142527 - DNA, 25 bp, Homo sapien
gaatgaagaccgtggcgatatgatg

SEQ ID NO: 142528 - DNA, 25 bp, Homo sapien
cagcatatactctagagaatgaggg

SEQ ID NO: 142529 - DNA, 25 bp, Homo sapien
gatgtctagatctgctccaagcaag

SEQ ID NO: 142530 - DNA, 25 bp, Homo sapien
ggtcagcatgaagattatagcaagg

SEQ ID NO: 142531 - DNA, 25 bp, Homo sapien
caaaaagatcactgtactgcagagg

SEQ ID NO: 142532 - DNA, 25 bp, Homo sapien
ttatgtagagatgcatgcctcactg

SEQ ID NO: 142533 - DNA, 25 bp, Homo sapien
agacacccgaccagctcttcagagt

SEQ ID NO: 142534 - DNA, 25 bp, Homo sapien
gaaccaatgaatttcctccaagcac

SEQ ID NO: 142535 - DNA, 25 bp, Homo sapien
tatctaaggccagtaacaaatgctg

SEQ ID NO: 142536 - DNA, 25 bp, Homo sapien
caaatgctgggtcttctattccctt

SEQ ID NO: 142537 - DNA, 25 bp, Homo sapien
tatctcaacggaaccatcacagagc

SEQ ID NO: 142538 - DNA, 25 bp, Homo sapien
ccttgagctaaaaactaactgggcg

SEQ ID NO: 142539 - DNA, 25 bp, Homo sapien
gatcataacttctgcagagccagct

SEQ ID NO: 142540 - DNA, 25 bp, Homo sapien
cggcggtagatcaaatgttacttcc

SEQ ID NO: 142541 - DNA, 25 bp, Homo sapien
gggatctatattcggcggtagatca

SEQ ID NO: 142542 - DNA, 25 bp, Homo sapien
gacaatccagtcaaaatccaatact

SEQ ID NO: 142543 - DNA, 25 bp, Homo sapien
taaagcactatgatagccctggaga

SEQ ID NO: 142544 - DNA, 25 bp, Homo sapien
tccttgagagggacagtagaaactc

SEQ ID NO: 142545 - DNA, 25 bp, Homo sapien
ccctggagatccgttgtcactgcaa

SEQ ID NO: 142546 - DNA, 25 bp, Homo sapien
tccaagagaagacccagcctagttt

SEQ ID NO: 142547 - DNA, 25 bp, Homo sapien
ctgctctgcagctgtaaaaggcatt

SEQ ID NO: 142548 - DNA, 25 bp, Homo sapien
gcagctgtaaaaggcatttgcatgg

SEQ ID NO: 142549 - DNA, 25 bp, Homo sapien
tctgcagctgtaaaaggcatttgca

SEQ ID NO: 142550 - DNA, 25 bp, Homo sapien
catttgcatggtatggggatgatga

SEQ ID NO: 142551 - DNA, 25 bp, Homo sapien
agactgccttgaagatctagctctg

SEQ ID NO: 142552 - DNA, 25 bp, Homo sapien
ccttgaagatctagctctggctctt

SEQ ID NO: 142553 - DNA, 25 bp, Homo sapien
actgccttgaagatctagctctggc

SEQ ID NO: 142554 - DNA, 25 bp, Homo sapien
tctggaggggaggatccaggtccca

SEQ ID NO: 142555 - DNA, 25 bp, Homo sapien
cagctgtttccgtgctattttttgc

SEQ ID NO: 142556 - DNA, 25 bp, Homo sapien
gtttccgtgctattttttgccatga

SEQ ID NO: 142557 - DNA, 25 bp, Homo sapien
tgtttccgtgctattttttgccatg

SEQ ID NO: 142558 - DNA, 25 bp, Homo sapien
gctgtttccgtgctattttttgcca

SEQ ID NO: 142559 - DNA, 25 bp, Homo sapien
agacaatcctgccaccacagattgg

SEQ ID NO: 142560 - DNA, 25 bp, Homo sapien
gatctgaaaagccaatccacaggca

SEQ ID NO: 142561 - DNA, 25 bp, Homo sapien
gatttgtgacttggaggttggtaca

SEQ ID NO: 142562 - DNA, 25 bp, Homo sapien
caggcatctacagaggatttgtgac

SEQ ID NO: 142563 - DNA, 25 bp, Homo sapien
gaccatagctgttcacttgtttcac

SEQ ID NO: 142564 - DNA, 25 bp, Homo sapien
gtttcacatagtctaccaaactgtc

SEQ ID NO: 142565 - DNA, 25 bp, Homo sapien
ctctcaggtgaccatagctgttcac

SEQ ID NO: 142566 - DNA, 25 bp, Homo sapien
gctgttcacttgtttcacatagtct

SEQ ID NO: 142567 - DNA, 25 bp, Homo sapien
gagtccaccatactagcattgagaa

SEQ ID NO: 142568 - DNA, 25 bp, Homo sapien
cttttgaaaagagtccaccatacta

SEQ ID NO: 142569 - DNA, 25 bp, Homo sapien
tatttcaaagctatgtgctctttcg

SEQ ID NO: 142570 - DNA, 25 bp, Homo sapien
tgtgctctttcgatagaataattag

SEQ ID NO: 142571 - DNA, 25 bp, Homo sapien
tcacgtccttcaaatctactcggaa

SEQ ID NO: 142572 - DNA, 25 bp, Homo sapien
tactcggaacatccacttctcattc

SEQ ID NO: 142573 - DNA, 25 bp, Homo sapien
catcctgagtcatcacgtccttcaa

SEQ ID NO: 142574 - DNA, 25 bp, Homo sapien
tctcattcacagaccccaatgtcat

SEQ ID NO: 142575 - DNA, 25 bp, Homo sapien
agcaagatatattcttgggcagatt

SEQ ID NO: 142576 - DNA, 25 bp, Homo sapien
tacggttctggctcagtgagttcgc

SEQ ID NO: 142577 - DNA, 25 bp, Homo sapien
cagtgagttcgctgatcagcaagat

SEQ ID NO: 142578 - DNA, 25 bp, Homo sapien
gccaagtacggttctggctcagtga

SEQ ID NO: 142579 - DNA, 25 bp, Homo sapien
cacatggtatttgccgtcatttaca

SEQ ID NO: 142580 - DNA, 25 bp, Homo sapien
tgtgccaatgttgaagacaactcca

SEQ ID NO: 142581 - DNA, 25 bp, Homo sapien
cctggtgaagcgtaccacatggtat

SEQ ID NO: 142582 - DNA, 25 bp, Homo sapien
tcctctttgatggagatgtcaactg

SEQ ID NO: 142583 - DNA, 25 bp, Homo sapien
tttgaatatccaggcaggcttaggg

SEQ ID NO: 142584 - DNA, 25 bp, Homo sapien
gcatccgactaaatggcaccacaaa

SEQ ID NO: 142585 - DNA, 25 bp, Homo sapien
tagcaaagtccaccaaacgaataaa

SEQ ID NO: 142586 - DNA, 25 bp, Homo sapien
tgtcttcaagttcagtaattgtcct

SEQ ID NO: 142587 - DNA, 25 bp, Homo sapien
tttacgatcagcattcaggactttt

SEQ ID NO: 142588 - DNA, 25 bp, Homo sapien
agggttgtcccttccattcctggca

SEQ ID NO: 142589 - DNA, 25 bp, Homo sapien
aacaatggccctttgctgaagggtt

SEQ ID NO: 142590 - DNA, 25 bp, Homo sapien
tcttgcatccatcagatgacagtgc

SEQ ID NO: 142591 - DNA, 25 bp, Homo sapien
tcatgcccacattagtgagaagtgc

SEQ ID NO: 142592 - DNA, 25 bp, Homo sapien
tgcccacattagtgagaagtgcaat

SEQ ID NO: 142593 - DNA, 25 bp, Homo sapien
cccacattagtgagaagtgcaatat

SEQ ID NO: 142594 - DNA, 25 bp, Homo sapien
cacattagtgagaagtgcaatattc

SEQ ID NO: 142595 - DNA, 25 bp, Homo sapien
ttgaactgaaagcaacgctagtcct

SEQ ID NO: 142596 - DNA, 25 bp, Homo sapien
aatctggcaaggtctcaaatgttcg

SEQ ID NO: 142597 - DNA, 25 bp, Homo sapien
tgttttaatgcatgcttcaaatctg

SEQ ID NO: 142598 - DNA, 25 bp, Homo sapien
gctagtcctgaacggatgaatgagc

SEQ ID NO: 142599 - DNA, 25 bp, Homo sapien
tgttcggcaaatggcagccatcacc

SEQ ID NO: 142600 - DNA, 25 bp, Homo sapien
gggagtatgtcataaatgttcggca

SEQ ID NO: 142601 - DNA, 25 bp, Homo sapien
tatgtcataaatgttcggcaaatgg

SEQ ID NO: 142602 - DNA, 25 bp, Homo sapien
taagtaggatgctgcccatgaagtg

SEQ ID NO: 142603 - DNA, 25 bp, Homo sapien
ctatgctcttgtatgggtggtagga

SEQ ID NO: 142604 - DNA, 25 bp, Homo sapien
gtggtaggacacttggtgttcaggc

SEQ ID NO: 142605 - DNA, 25 bp, Homo sapien
gctcttgtatgggtggtaggacact

SEQ ID NO: 142606 - DNA, 25 bp, Homo sapien
tcttgtatgggtggtaggacacttg

SEQ ID NO: 142607 - DNA, 25 bp, Homo sapien
gatcccttcaagatttccccaggtg

SEQ ID NO: 142608 - DNA, 25 bp, Homo sapien
tttgggaggacaattccgctgcaca

SEQ ID NO: 142609 - DNA, 25 bp, Homo sapien
ggaacattgtcatcccgacaacagg

SEQ ID NO: 142610 - DNA, 25 bp, Homo sapien
cagccgtttgacatatgatcccttc

SEQ ID NO: 142611 - DNA, 25 bp, Homo sapien
ggtattatgtactaaaatgatttac

SEQ ID NO: 142612 - DNA, 25 bp, Homo sapien
aatattagacttctctttcatatcc

SEQ ID NO: 142613 - DNA, 25 bp, Homo sapien
tgctgtctgttgctggttgaacata

SEQ ID NO: 142614 - DNA, 25 bp, Homo sapien
aatccatttctgctgaggtattatg

SEQ ID NO: 142615 - DNA, 25 bp, Homo sapien
ggtgtattacgtccagctatccgaa

SEQ ID NO: 142616 - DNA, 25 bp, Homo sapien
tgtaaccctggtgtattacgtccag

SEQ ID NO: 142617 - DNA, 25 bp, Homo sapien
catgccggagatgtaaccctggtgt

SEQ ID NO: 142618 - DNA, 25 bp, Homo sapien
tacgtccagctatccgaatgttcat

SEQ ID NO: 142619 - DNA, 25 bp, Homo sapien
tatcatgtccaaatatcttataggc

SEQ ID NO: 142620 - DNA, 25 bp, Homo sapien
ggcctatcatgtccaaatatcttat

SEQ ID NO: 142621 - DNA, 25 bp, Homo sapien
tccaaatatcttataggctatggaa

SEQ ID NO: 142622 - DNA, 25 bp, Homo sapien
acctggcctatcatgtccaaatatc

SEQ ID NO: 142623 - DNA, 25 bp, Homo sapien
tctcccagtaaggagccttgaacag

SEQ ID NO: 142624 - DNA, 25 bp, Homo sapien
atgggagtcagggtaaatccttgcc

SEQ ID NO: 142625 - DNA, 25 bp, Homo sapien
ccaaaacctttttcagtctcgatat

SEQ ID NO: 142626 - DNA, 25 bp, Homo sapien
tccttgccttgagagccttccaaaa

SEQ ID NO: 142627 - DNA, 25 bp, Homo sapien
tcataaagcctgttaggaatacttc

SEQ ID NO: 142628 - DNA, 25 bp, Homo sapien
cttactgtaagaggacctttctgaa

SEQ ID NO: 142629 - DNA, 25 bp, Homo sapien
aagcctgttaggaatacttcttcca

SEQ ID NO: 142630 - DNA, 25 bp, Homo sapien
ctttctgaacaagcatccattcata

SEQ ID NO: 142631 - DNA, 25 bp, Homo sapien
ctcctctacaggccgattatatttg

SEQ ID NO: 142632 - DNA, 25 bp, Homo sapien
cactcctctacaggccgattatatt

SEQ ID NO: 142633 - DNA, 25 bp, Homo sapien
ccactcctctacaggccgattatat

SEQ ID NO: 142634 - DNA, 25 bp, Homo sapien
tcctctacaggccgattatatttga

SEQ ID NO: 142635 - DNA, 25 bp, Homo sapien
ggaggtcgtctgtgttgttcccaaa

SEQ ID NO: 142636 - DNA, 25 bp, Homo sapien
gtgttgaagatggttaactgccggc

SEQ ID NO: 142637 - DNA, 25 bp, Homo sapien
gctatttgcgcctgagtgttgaaga

SEQ ID NO: 142638 - DNA, 25 bp, Homo sapien
ttgatgggacttctccaaccagccg

SEQ ID NO: 142639 - DNA, 25 bp, Homo sapien
atgctggctgtagagcgattcttac

SEQ ID NO: 142640 - DNA, 25 bp, Homo sapien
caaacaggacaagtgctaatctact

SEQ ID NO: 142641 - DNA, 25 bp, Homo sapien
gtaagtaattgttgtcgcagcagca

SEQ ID NO: 142642 - DNA, 25 bp, Homo sapien
tatgaaatgccaagggagtcagcaa

SEQ ID NO: 142643 - DNA, 25 bp, Homo sapien
gaatgtctcatggtatgccagagca

SEQ ID NO: 142644 - DNA, 25 bp, Homo sapien
gaaaaatgggaacacataggtggta

SEQ ID NO: 142645 - DNA, 25 bp, Homo sapien
taagttaaccacgtccattggagtc

SEQ ID NO: 142646 - DNA, 25 bp, Homo sapien
taaagacacaactgagctcctggat

SEQ ID NO: 142647 - DNA, 25 bp, Homo sapien
cagtgtaaaggtgatgttaaagaca

SEQ ID NO: 142648 - DNA, 25 bp, Homo sapien
taattactacagcttggttcccgaa

SEQ ID NO: 142649 - DNA, 25 bp, Homo sapien
ttttcagtgagtagagcaaggtgtc

SEQ ID NO: 142650 - DNA, 25 bp, Homo sapien
taatttgcggaaagagttcaggaac

SEQ ID NO: 142651 - DNA, 25 bp, Homo sapien
tcatctcctctaaaatggccatagg

SEQ ID NO: 142652 - DNA, 25 bp, Homo sapien
agtctctagagtctgggaattgtcc

SEQ ID NO: 142653 - DNA, 25 bp, Homo sapien
atcagaactttatgaatcctcctca

SEQ ID NO: 142654 - DNA, 25 bp, Homo sapien
cagaactttatgaatcctcctcatc

SEQ ID NO: 142655 - DNA, 25 bp, Homo sapien
tcagaactttatgaatcctcctcat

SEQ ID NO: 142656 - DNA, 25 bp, Homo sapien
tgctatgagtaaattaacatcagcc

SEQ ID NO: 142657 - DNA, 25 bp, Homo sapien
gcttgggcatgattgctatgagtaa

SEQ ID NO: 142658 - DNA, 25 bp, Homo sapien
gacctgatgcttgggcatgattgct

SEQ ID NO: 142659 - DNA, 25 bp, Homo sapien
tcaagacctgatgcttgggcatgat

SEQ ID NO: 142660 - DNA, 25 bp, Homo sapien
gaaatatccgccttgatgcctggca

SEQ ID NO: 142661 - DNA, 25 bp, Homo sapien
cagtttaaattgaaaccattggctt

SEQ ID NO: 142662 - DNA, 25 bp, Homo sapien
ggttgaatgcagatgcaatcccaca

SEQ ID NO: 142663 - DNA, 25 bp, Homo sapien
cgattgctgcttgaagtcgttttcc

SEQ ID NO: 142664 - DNA, 25 bp, Homo sapien
tcagtggaatagcttcccagccagt

SEQ ID NO: 142665 - DNA, 25 bp, Homo sapien
cagtagggcattaatcatgagaaca

SEQ ID NO: 142666 - DNA, 25 bp, Homo sapien
cagcagccccgagataaaggctggg

SEQ ID NO: 142667 - DNA, 25 bp, Homo sapien
tcagaagccgcagatggaggcatct

SEQ ID NO: 142668 - DNA, 25 bp, Homo sapien
ctggctagaaatagccctgggaaca

SEQ ID NO: 142669 - DNA, 25 bp, Homo sapien
tctggctagaaatagccctgggaac

SEQ ID NO: 142670 - DNA, 25 bp, Homo sapien
aaagcctccagcttcgttttctggc

SEQ ID NO: 142671 - DNA, 25 bp, Homo sapien
ctccagcttcgttttctggctagaa

SEQ ID NO: 142672 - DNA, 25 bp, Homo sapien
ctgagaagggccattcgtaacctgg

SEQ ID NO: 142673 - DNA, 25 bp, Homo sapien
gagaagggccattcgtaacctggta

SEQ ID NO: 142674 - DNA, 25 bp, Homo sapien
cctagtctcaatctagagactgaga

SEQ ID NO: 142675 - DNA, 25 bp, Homo sapien
tgacagaagaatcctagtctcaatc

SEQ ID NO: 142676 - DNA, 25 bp, Homo sapien
acttttactgccaagaggtgccttg

SEQ ID NO: 142677 - DNA, 25 bp, Homo sapien
cacacatgtgaaatgaattgctttc

SEQ ID NO: 142678 - DNA, 25 bp, Homo sapien
gaagttgcctctcagtagaggccag

SEQ ID NO: 142679 - DNA, 25 bp, Homo sapien
cagggagaagttgcctctcagtaga

SEQ ID NO: 142680 - DNA, 25 bp, Homo sapien
tgtactgcactgagaaccaatgttc

SEQ ID NO: 142681 - DNA, 25 bp, Homo sapien
cccactgcttgcataaagggttgcc

SEQ ID NO: 142682 - DNA, 25 bp, Homo sapien
aaaggcacccactgcttgcataaag

SEQ ID NO: 142683 - DNA, 25 bp, Homo sapien
tcagcaagggagataactttgaaac

SEQ ID NO: 142684 - DNA, 25 bp, Homo sapien
tccgtggtagccaatgggcacttcg

SEQ ID NO: 142685 - DNA, 25 bp, Homo sapien
cacttcggcattgttgtaatctggg

SEQ ID NO: 142686 - DNA, 25 bp, Homo sapien
tagccaatgggcacttcggcattgt

SEQ ID NO: 142687 - DNA, 25 bp, Homo sapien
tatctccgtggtagccaatgggcac

SEQ ID NO: 142688 - DNA, 25 bp, Homo sapien
taccttgcttcctcagtcagtgcaa

SEQ ID NO: 142689 - DNA, 25 bp, Homo sapien
aagggaccctgagatgagctaaaaa

SEQ ID NO: 142690 - DNA, 25 bp, Homo sapien
ttgaagctctgtggccaacaacagt

SEQ ID NO: 142691 - DNA, 25 bp, Homo sapien
cagttgctcatggaatagtacatca

SEQ ID NO: 142692 - DNA, 25 bp, Homo sapien
ctaagtttgactccagggcccaagt

SEQ ID NO: 142693 - DNA, 25 bp, Homo sapien
agagtttcagtagcccacccaaaga

SEQ ID NO: 142694 - DNA, 25 bp, Homo sapien
gcatgaccgagccacctaagtttga

SEQ ID NO: 142695 - DNA, 25 bp, Homo sapien
gacacatcaattggctgagttaggc

SEQ ID NO: 142696 - DNA, 25 bp, Homo sapien
gctccatgaaggtaattctattttg

SEQ ID NO: 142697 - DNA, 25 bp, Homo sapien
ttaaacttgctccatgaaggtaatt

SEQ ID NO: 142698 - DNA, 25 bp, Homo sapien
tctattttgttccacaggacttagt

SEQ ID NO: 142699 - DNA, 25 bp, Homo sapien
aacttgctccatgaaggtaattcta

SEQ ID NO: 142700 - DNA, 25 bp, Homo sapien
gaaatctttgtgctcttctaatttg

SEQ ID NO: 142701 - DNA, 25 bp, Homo sapien
tgcggtaggtgcactttgtcagcat

SEQ ID NO: 142702 - DNA, 25 bp, Homo sapien
tgtgctcttctaatttgcggtaggt

SEQ ID NO: 142703 - DNA, 25 bp, Homo sapien
ctcttctaatttgcggtaggtgcac

SEQ ID NO: 142704 - DNA, 25 bp, Homo sapien
gtattttatttctaattcacttatg

SEQ ID NO: 142705 - DNA, 25 bp, Homo sapien
ttctcagactcctagggaaatctca

SEQ ID NO: 142706 - DNA, 25 bp, Homo sapien
tgctttcgggtaagcaaggtcgcca

SEQ ID NO: 142707 - DNA, 25 bp, Homo sapien
ttcaagggttgtttcaggtacagga

SEQ ID NO: 142708 - DNA, 25 bp, Homo sapien
ggcagagtgctggatgatattacca

SEQ ID NO: 142709 - DNA, 25 bp, Homo sapien
tgcttacattgccttcctgacaaga

SEQ ID NO: 142710 - DNA, 25 bp, Homo sapien
cagttggcgatcagtgcattcttgg

SEQ ID NO: 142711 - DNA, 25 bp, Homo sapien
tatctggttagagttcataagaggc

SEQ ID NO: 142712 - DNA, 25 bp, Homo sapien
gacaagaacaaccttgcaggtggag

SEQ ID NO: 142713 - DNA, 25 bp, Homo sapien
cagtcatgtggagctgtgaagtcca

SEQ ID NO: 142714 - DNA, 25 bp, Homo sapien
tcaaaggatggacatgcaaaaggtg

SEQ ID NO: 142715 - DNA, 25 bp, Homo sapien
cagactagactaacacaccaggagt

SEQ ID NO: 142716 - DNA, 25 bp, Homo sapien
ggaagagaggaagtatttcccatcc

SEQ ID NO: 142717 - DNA, 25 bp, Homo sapien
gaaatggatatcagcgagtcagaga

SEQ ID NO: 142718 - DNA, 25 bp, Homo sapien
gggttactatactcctggaccagag

SEQ ID NO: 142719 - DNA, 25 bp, Homo sapien
gacaagggacttcttctagaggcaa

SEQ ID NO: 142720 - DNA, 25 bp, Homo sapien
tattggtctgaaatcacccgtaggg

SEQ ID NO: 142721 - DNA, 25 bp, Homo sapien
tgttctctctaggattgctaatcag

SEQ ID NO: 142722 - DNA, 25 bp, Homo sapien
gattgctaatcagaaaggcttggct

SEQ ID NO: 142723 - DNA, 25 bp, Homo sapien
gagccacctgttctctctaggattg

SEQ ID NO: 142724 - DNA, 25 bp, Homo sapien
ggcgtgagccacctgttctctctag

SEQ ID NO: 142725 - DNA, 25 bp, Homo sapien
agggaaaggcccataaatattctga

SEQ ID NO: 142726 - DNA, 25 bp, Homo sapien
aacagccatacatctctgcagctgc

SEQ ID NO: 142727 - DNA, 25 bp, Homo sapien
aagggaaaggcccataaatattctg

SEQ ID NO: 142728 - DNA, 25 bp, Homo sapien
acagaaaacagccatacatctctgc

SEQ ID NO: 142729 - DNA, 25 bp, Homo sapien
tactgagcatgaatttcatgtcctg

SEQ ID NO: 142730 - DNA, 25 bp, Homo sapien
tcatgtcctgccctatcagacttct

SEQ ID NO: 142731 - DNA, 25 bp, Homo sapien
ccatttggttggaagctactacaca

SEQ ID NO: 142732 - DNA, 25 bp, Homo sapien
tgtcccatttggttggaagctacta

SEQ ID NO: 142733 - DNA, 25 bp, Homo sapien
ttttcccctcacaatgattgtctaa

SEQ ID NO: 142734 - DNA, 25 bp, Homo sapien
ccctcacaatgattgtctaaagctc

SEQ ID NO: 142735 - DNA, 25 bp, Homo sapien
ttatcaagttgcgttcaatgtcatc

SEQ ID NO: 142736 - DNA, 25 bp, Homo sapien
tcaagttgcgttcaatgtcatcttc

SEQ ID NO: 142737 - DNA, 25 bp, Homo sapien
tcggctcacattcaacaaagtcttc

SEQ ID NO: 142738 - DNA, 25 bp, Homo sapien
gatgaaacaagatcatctgatgttg

SEQ ID NO: 142739 - DNA, 25 bp, Homo sapien
tgtactcggctcacattcaacaaag

SEQ ID NO: 142740 - DNA, 25 bp, Homo sapien
tcatcatcacttgaacattcagcag

SEQ ID NO: 142741 - DNA, 25 bp, Homo sapien
tgttcccaccctctgtgaatttcat

SEQ ID NO: 142742 - DNA, 25 bp, Homo sapien
tcctccatgggttcatcctttcttg

SEQ ID NO: 142743 - DNA, 25 bp, Homo sapien
cctccatgggttcatcctttcttga

SEQ ID NO: 142744 - DNA, 25 bp, Homo sapien
cctggataacgactggatgaatcaa

SEQ ID NO: 142745 - DNA, 25 bp, Homo sapien
ctgaaaaatatacccctggataacg

SEQ ID NO: 142746 - DNA, 25 bp, Homo sapien
aatgtggttaagtattgccatgccc

SEQ ID NO: 142747 - DNA, 25 bp, Homo sapien
aaaactagctacttgacaaactgaa

SEQ ID NO: 142748 - DNA, 25 bp, Homo sapien
ccattatgaaagctgcttagcacag

SEQ ID NO: 142749 - DNA, 25 bp, Homo sapien
cactcagcttgggttgtatattata

SEQ ID NO: 142750 - DNA, 25 bp, Homo sapien
gaggaactaagtagcagtaacaccg

SEQ ID NO: 142751 - DNA, 25 bp, Homo sapien
aaatatacctgagaaccactctggg

SEQ ID NO: 142752 - DNA, 25 bp, Homo sapien
tattttgtcatctcatattactgcc

SEQ ID NO: 142753 - DNA, 25 bp, Homo sapien
ccatttatgtgcaggtatgtgacct

SEQ ID NO: 142754 - DNA, 25 bp, Homo sapien
tagtacctgggctagtggtgtgctt

SEQ ID NO: 142755 - DNA, 25 bp, Homo sapien
ttcatgtacccagtatagtacctgg

SEQ ID NO: 142756 - DNA, 25 bp, Homo sapien
tcaactgtaagatgaccaagctagt

SEQ ID NO: 142757 - DNA, 25 bp, Homo sapien
aagttaaccttatgctccctctggg

SEQ ID NO: 142758 - DNA, 25 bp, Homo sapien
aagatttagcttcatggtttgcccc

SEQ ID NO: 142759 - DNA, 25 bp, Homo sapien
ggaacacaaggaaacgacagacaat

SEQ ID NO: 142760 - DNA, 25 bp, Homo sapien
gacaatggagtctacttgagcaggg

SEQ ID NO: 142761 - DNA, 25 bp, Homo sapien
tatgtacacaacacctgaagctggg

SEQ ID NO: 142762 - DNA, 25 bp, Homo sapien
aattacgggtctggcgaagcttccg

SEQ ID NO: 142763 - DNA, 25 bp, Homo sapien
tacaggatagcttgtgcccactgct

SEQ ID NO: 142764 - DNA, 25 bp, Homo sapien
tgtgttaagctatatagagccctgc

SEQ ID NO: 142765 - DNA, 25 bp, Homo sapien
gtatcacataagcattgtgctccat

SEQ ID NO: 142766 - DNA, 25 bp, Homo sapien
ccgtgtatcacataagcattgtgct

SEQ ID NO: 142767 - DNA, 25 bp, Homo sapien
ttccgtgtatcacataagcattgtg

SEQ ID NO: 142768 - DNA, 25 bp, Homo sapien
cgtgtatcacataagcattgtgctc

SEQ ID NO: 142769 - DNA, 25 bp, Homo sapien
tcagagaagtctgtaatcccttaga

SEQ ID NO: 142770 - DNA, 25 bp, Homo sapien
ttcagagaagtctgtaatcccttag

SEQ ID NO: 142771 - DNA, 25 bp, Homo sapien
cctgtgcgactatcatgattatcaa

SEQ ID NO: 142772 - DNA, 25 bp, Homo sapien
tgtcactgtcaagtttcctgtgcga

SEQ ID NO: 142773 - DNA, 25 bp, Homo sapien
caagtttcctgtgcgactatcatga

SEQ ID NO: 142774 - DNA, 25 bp, Homo sapien
cagtggccaagtaggatactgtgct

SEQ ID NO: 142775 - DNA, 25 bp, Homo sapien
tgtactctgaagctgtaagcagctc

SEQ ID NO: 142776 - DNA, 25 bp, Homo sapien
tcaatctaagatgttcagagatggc

SEQ ID NO: 142777 - DNA, 25 bp, Homo sapien
atggcacagcaacaattatccatct

SEQ ID NO: 142778 - DNA, 25 bp, Homo sapien
cagaaagtaagctctcttgaacttg

SEQ ID NO: 142779 - DNA, 25 bp, Homo sapien
tgggtcttttcccacaggttataca

SEQ ID NO: 142780 - DNA, 25 bp, Homo sapien
tactaacaagcaaagcttccagaaa

SEQ ID NO: 142781 - DNA, 25 bp, Homo sapien
gagataagtaaaagtggatgctgct

SEQ ID NO: 142782 - DNA, 25 bp, Homo sapien
tcctcataacttcttctgtagacat

SEQ ID NO: 142783 - DNA, 25 bp, Homo sapien
ctttgttcctcataacttcttctgt

SEQ ID NO: 142784 - DNA, 25 bp, Homo sapien
gttcctcataacttcttctgtagac

SEQ ID NO: 142785 - DNA, 25 bp, Homo sapien
ttgttcctcataacttcttctgtag

SEQ ID NO: 142786 - DNA, 25 bp, Homo sapien
ttaatttagggagatggatgacagc

SEQ ID NO: 142787 - DNA, 25 bp, Homo sapien
gctcttggacaaatagaattgccac

SEQ ID NO: 142788 - DNA, 25 bp, Homo sapien
gtgtaagtgagtcgccatgtccatg

SEQ ID NO: 142789 - DNA, 25 bp, Homo sapien
catgtccatgtaagggcggcacgga

SEQ ID NO: 142790 - DNA, 25 bp, Homo sapien
ctgagggaaccgagaaagcatataa

SEQ ID NO: 142791 - DNA, 25 bp, Homo sapien
taagcctctattctggtgctcagag

SEQ ID NO: 142792 - DNA, 25 bp, Homo sapien
caacagaatgttgcagtgtcatctc

SEQ ID NO: 142793 - DNA, 25 bp, Homo sapien
tgtactagaccagcagacacctgtt

SEQ ID NO: 142794 - DNA, 25 bp, Homo sapien
ttagccaataacaattgtgttctgc

SEQ ID NO: 142795 - DNA, 25 bp, Homo sapien
agccaataacaattgtgttctgcag

SEQ ID NO: 142796 - DNA, 25 bp, Homo sapien
tgtttagccaataacaattgtgttc

SEQ ID NO: 142797 - DNA, 25 bp, Homo sapien
tccctgtttagccaataacaattgt

SEQ ID NO: 142798 - DNA, 25 bp, Homo sapien
cttcaagcactgagaaactgttggt

SEQ ID NO: 142799 - DNA, 25 bp, Homo sapien
tcaagcactgagaaactgttggtgc

SEQ ID NO: 142800 - DNA, 25 bp, Homo sapien
caagcactgagaaactgttggtgcc

SEQ ID NO: 142801 - DNA, 25 bp, Homo sapien
ttcaagcactgagaaactgttggtg

SEQ ID NO: 142802 - DNA, 25 bp, Homo sapien
tcctgagaagaaagctaatacctac

SEQ ID NO: 142803 - DNA, 25 bp, Homo sapien
aaaactctccttttgaatgcatagg

SEQ ID NO: 142804 - DNA, 25 bp, Homo sapien
taggaaatgcttcaagatgcaacct

SEQ ID NO: 142805 - DNA, 25 bp, Homo sapien
ctttcccatgcatccaaattgtcca

SEQ ID NO: 142806 - DNA, 25 bp, Homo sapien
gacattcagtcaatgatactgttat

SEQ ID NO: 142807 - DNA, 25 bp, Homo sapien
tctgcttatgggctgatgacattca

SEQ ID NO: 142808 - DNA, 25 bp, Homo sapien
tactggctggctatcaaaattggca

SEQ ID NO: 142809 - DNA, 25 bp, Homo sapien
tgtgtgggtacacgcacacattgtg

SEQ ID NO: 142810 - DNA, 25 bp, Homo sapien
gacagggaatctttggtggtctcaa

SEQ ID NO: 142811 - DNA, 25 bp, Homo sapien
gagccatacccagatatcaccaagc

SEQ ID NO: 142812 - DNA, 25 bp, Homo sapien
tagagtcaaaggtttcccctgagcc

SEQ ID NO: 142813 - DNA, 25 bp, Homo sapien
ggtaaccccgcctcagaggtcatgg

SEQ ID NO: 142814 - DNA, 25 bp, Homo sapien
tagctcataggcagtgggcaacgga

SEQ ID NO: 142815 - DNA, 25 bp, Homo sapien
gatcacggttattcattttgccagc

SEQ ID NO: 142816 - DNA, 25 bp, Homo sapien
caacggaagcaagactatatcaggc

SEQ ID NO: 142817 - DNA, 25 bp, Homo sapien
cacttgggcgcatgtgctttgtagc

SEQ ID NO: 142818 - DNA, 25 bp, Homo sapien
accatccctgttgtgctgctcgact

SEQ ID NO: 142819 - DNA, 25 bp, Homo sapien
tacatggcgtacaggaggatcaaga

SEQ ID NO: 142820 - DNA, 25 bp, Homo sapien
gagttgctgatgtagttccgcgtct

SEQ ID NO: 142821 - DNA, 25 bp, Homo sapien
tctccttcatgagcgtgccgttgct

SEQ ID NO: 142822 - DNA, 25 bp, Homo sapien
aactcgcgtgtgagcagtgttcgca

SEQ ID NO: 142823 - DNA, 25 bp, Homo sapien
taatcaacttcgtataggctgggcc

SEQ ID NO: 142824 - DNA, 25 bp, Homo sapien
catgacatggttggcttgtgtgacc

SEQ ID NO: 142825 - DNA, 25 bp, Homo sapien
gatcataaagttacacgcacactgg

SEQ ID NO: 142826 - DNA, 25 bp, Homo sapien
gatactttggaacttcaacctttgc

SEQ ID NO: 142827 - DNA, 25 bp, Homo sapien
tacttgggccatgtaaccacttcaa

SEQ ID NO: 142828 - DNA, 25 bp, Homo sapien
tctgtggcttggtgtctcttggaat

SEQ ID NO: 142829 - DNA, 25 bp, Homo sapien
ttgctagaaacagaaccatatcccc

SEQ ID NO: 142830 - DNA, 25 bp, Homo sapien
tgaaagctgagccttagctaagcag

SEQ ID NO: 142831 - DNA, 25 bp, Homo sapien
tcaagaaacctgcaagataagtata

SEQ ID NO: 142832 - DNA, 25 bp, Homo sapien
gctgttgttgtcttatatgccctca

SEQ ID NO: 142833 - DNA, 25 bp, Homo sapien
cttaagttacagtaccagatgagcc

SEQ ID NO: 142834 - DNA, 25 bp, Homo sapien
ttaagaaagaactgtcctagacttc

SEQ ID NO: 142835 - DNA, 25 bp, Homo sapien
tgtcctagacttcccacatcaaatt

SEQ ID NO: 142836 - DNA, 25 bp, Homo sapien
gaaagaactgtcctagacttcccac

SEQ ID NO: 142837 - DNA, 25 bp, Homo sapien
gaactgtcctagacttcccacatca

SEQ ID NO: 142838 - DNA, 25 bp, Homo sapien
gccacatcagcagtatccaaataat

SEQ ID NO: 142839 - DNA, 25 bp, Homo sapien
taatagtaaggctcaattggctgca

SEQ ID NO: 142840 - DNA, 25 bp, Homo sapien
tcactttcctctagcaaatcagctt

SEQ ID NO: 142841 - DNA, 25 bp, Homo sapien
ttcctctagcaaatcagcttccttc

SEQ ID NO: 142842 - DNA, 25 bp, Homo sapien
tcaaagtgtcgttcaatgtattcat

SEQ ID NO: 142843 - DNA, 25 bp, Homo sapien
ttcaaagtgtcgttcaatgtattca

SEQ ID NO: 142844 - DNA, 25 bp, Homo sapien
tttcaaagtgtcgttcaatgtattc

SEQ ID NO: 142845 - DNA, 25 bp, Homo sapien
tcatcactagtgagatgcagagctg

SEQ ID NO: 142846 - DNA, 25 bp, Homo sapien
tgagcaattggacttcacagcaggt

SEQ ID NO: 142847 - DNA, 25 bp, Homo sapien
tcaaaaatgcctgctgactaaatgg

SEQ ID NO: 142848 - DNA, 25 bp, Homo sapien
ggttgatgagacttccaagactgca

SEQ ID NO: 142849 - DNA, 25 bp, Homo sapien
agcctttgcagactaatgctcctga

SEQ ID NO: 142850 - DNA, 25 bp, Homo sapien
gagggatacccaggagtcagaagaa

SEQ ID NO: 142851 - DNA, 25 bp, Homo sapien
ctggtgaacctgatctttggaacta

SEQ ID NO: 142852 - DNA, 25 bp, Homo sapien
tgtaacaagcaatgattcctggagt

SEQ ID NO: 142853 - DNA, 25 bp, Homo sapien
ctaaactatctaacggtttcttcat

SEQ ID NO: 142854 - DNA, 25 bp, Homo sapien
ctatctaacggtttcttcataagag

SEQ ID NO: 142855 - DNA, 25 bp, Homo sapien
aactatctaacggtttcttcataag

SEQ ID NO: 142856 - DNA, 25 bp, Homo sapien
tatctaacggtttcttcataagaga

SEQ ID NO: 142857 - DNA, 25 bp, Homo sapien
gacactagcaaccatgaattcacag

SEQ ID NO: 142858 - DNA, 25 bp, Homo sapien
ttagtgaccttctctttggcatgac

SEQ ID NO: 142859 - DNA, 25 bp, Homo sapien
aactgctggcccactgagtccttag

SEQ ID NO: 142860 - DNA, 25 bp, Homo sapien
cacattagagggtatgggaagccag

SEQ ID NO: 142861 - DNA, 25 bp, Homo sapien
caaattcttgaccctgagggtccta

SEQ ID NO: 142862 - DNA, 25 bp, Homo sapien
tggtggcactacccaaattcttgac

SEQ ID NO: 142863 - DNA, 25 bp, Homo sapien
tggtggtatccctggtggcactacc

SEQ ID NO: 142864 - DNA, 25 bp, Homo sapien
ctgctaaacttggtggtatccctgg

SEQ ID NO: 142865 - DNA, 25 bp, Homo sapien
gataaaacgatgcaggaaagagcca

SEQ ID NO: 142866 - DNA, 25 bp, Homo sapien
agtaagagtagttaattcccacaag

SEQ ID NO: 142867 - DNA, 25 bp, Homo sapien
gaaagagccatgatgcaggtgacct

SEQ ID NO: 142868 - DNA, 25 bp, Homo sapien
tcatctaggacaagagttctcaacc

SEQ ID NO: 142869 - DNA, 25 bp, Homo sapien
cacctgaagtcgtctggaaatgatt

SEQ ID NO: 142870 - DNA, 25 bp, Homo sapien
gagaacacctgaagtcgtctggaaa

SEQ ID NO: 142871 - DNA, 25 bp, Homo sapien
aatctacaccggcattggttgggat

SEQ ID NO: 142872 - DNA, 25 bp, Homo sapien
gattaggtgagtgatctatagcaag

SEQ ID NO: 142873 - DNA, 25 bp, Homo sapien
gaaaatgaatgttcagtatactgcc

SEQ ID NO: 142874 - DNA, 25 bp, Homo sapien
aagagatgatgtcttcgagcctgaa

SEQ ID NO: 142875 - DNA, 25 bp, Homo sapien
aaaacctcaagaatggttacagcac

SEQ ID NO: 142876 - DNA, 25 bp, Homo sapien
gtaggcatcctagtggtaataagag

SEQ ID NO: 142877 - DNA, 25 bp, Homo sapien
gaaggccttggtctatttgtgcata

SEQ ID NO: 142878 - DNA, 25 bp, Homo sapien
ggccttggtctatttgtgcatattt

SEQ ID NO: 142879 - DNA, 25 bp, Homo sapien
agaaggccttggtctatttgtgcat

SEQ ID NO: 142880 - DNA, 25 bp, Homo sapien
aaggccttggtctatttgtgcatat

SEQ ID NO: 142881 - DNA, 25 bp, Homo sapien
tgtgagatgaggatgcttgtgaaac

SEQ ID NO: 142882 - DNA, 25 bp, Homo sapien
gcactggtgctcgtcgggcagccac

SEQ ID NO: 142883 - DNA, 25 bp, Homo sapien
ctaggatccagagtagcaatggcac

SEQ ID NO: 142884 - DNA, 25 bp, Homo sapien
gtgctcgtcgggcagccacctctga

SEQ ID NO: 142885 - DNA, 25 bp, Homo sapien
taacacagtgttcattgcgcccata

SEQ ID NO: 142886 - DNA, 25 bp, Homo sapien
tagaatatgcctttgtgaaggagac

SEQ ID NO: 142887 - DNA, 25 bp, Homo sapien
ggtcagcttgatgctgtgtttgtgc

SEQ ID NO: 142888 - DNA, 25 bp, Homo sapien
gtctaaatagacatgtagaatatgc

SEQ ID NO: 142889 - DNA, 25 bp, Homo sapien
aaacttgcctataagattgagaccc

SEQ ID NO: 142890 - DNA, 25 bp, Homo sapien
gctccacggatggacccaatgcatg

SEQ ID NO: 142891 - DNA, 25 bp, Homo sapien
tttttgagtgtagcagctccacgga

SEQ ID NO: 142892 - DNA, 25 bp, Homo sapien
tgtgggtccccatgtgactttgaga

SEQ ID NO: 142893 - DNA, 25 bp, Homo sapien
tgcaattcttcttgcttctgtctgg

SEQ ID NO: 142894 - DNA, 25 bp, Homo sapien
aattcttcttgcttctgtctggtgt

SEQ ID NO: 142895 - DNA, 25 bp, Homo sapien
cttggcctcctgcaattcttcttgc

SEQ ID NO: 142896 - DNA, 25 bp, Homo sapien
cttcttgcttctgtctggtgtctcc

SEQ ID NO: 142897 - DNA, 25 bp, Homo sapien
tccttattgggttctggaaatagga

SEQ ID NO: 142898 - DNA, 25 bp, Homo sapien
tttattgtccttattgggttctgga

SEQ ID NO: 142899 - DNA, 25 bp, Homo sapien
aaaatcttacgatctcaaaattcca

SEQ ID NO: 142900 - DNA, 25 bp, Homo sapien
catattagaaattcatagaggttaa

SEQ ID NO: 142901 - DNA, 25 bp, Homo sapien
accaggttgtgggatgcttaaaggt

SEQ ID NO: 142902 - DNA, 25 bp, Homo sapien
ttgatgtccacactcaacagtcccc

SEQ ID NO: 142903 - DNA, 25 bp, Homo sapien
tccccaccaggttgtgggatgctta

SEQ ID NO: 142904 - DNA, 25 bp, Homo sapien
gttgtgggatgcttaaaggtgccca

SEQ ID NO: 142905 - DNA, 25 bp, Homo sapien
ctaagctgaagctgataggagctat

SEQ ID NO: 142906 - DNA, 25 bp, Homo sapien
agctgataggagctatattcactgc

SEQ ID NO: 142907 - DNA, 25 bp, Homo sapien
aaagacttttcctgtgctaagctga

SEQ ID NO: 142908 - DNA, 25 bp, Homo sapien
gacttttcctgtgctaagctgaagc

SEQ ID NO: 142909 - DNA, 25 bp, Homo sapien
tcagagtcggggctcaatgcccact

SEQ ID NO: 142910 - DNA, 25 bp, Homo sapien
agggcctaggccttctgattccttt

SEQ ID NO: 142911 - DNA, 25 bp, Homo sapien
gagacaccggcaagggcctaggcct

SEQ ID NO: 142912 - DNA, 25 bp, Homo sapien
gggctcaatgcccactctgaacttc

SEQ ID NO: 142913 - DNA, 25 bp, Homo sapien
caatcttggtcatgtcctgaggctc

SEQ ID NO: 142914 - DNA, 25 bp, Homo sapien
tatagtaccagaagcaaggtctcag

SEQ ID NO: 142915 - DNA, 25 bp, Homo sapien
ggctacccgtcttaggcagcaacag

SEQ ID NO: 142916 - DNA, 25 bp, Homo sapien
tgagacttcgaagacccagcagatg

SEQ ID NO: 142917 - DNA, 25 bp, Homo sapien
gaggtaggtaccatggccattcagc

SEQ ID NO: 142918 - DNA, 25 bp, Homo sapien
tatttgtcatatgctcctagagagg

SEQ ID NO: 142919 - DNA, 25 bp, Homo sapien
tatatatattctcagctgctgcggg

SEQ ID NO: 142920 - DNA, 25 bp, Homo sapien
gagtttcacccttaagctgtagaga

SEQ ID NO: 142921 - DNA, 25 bp, Homo sapien
gaagagcttcctcctcgatgcctac

SEQ ID NO: 142922 - DNA, 25 bp, Homo sapien
tgggcatcctcagcgtagacttgct

SEQ ID NO: 142923 - DNA, 25 bp, Homo sapien
catgctgacctcagagggactgcgc

SEQ ID NO: 142924 - DNA, 25 bp, Homo sapien
gactcggtcattctgctcaagcacg

SEQ ID NO: 142925 - DNA, 25 bp, Homo sapien
acatatcccatgtctttatgctggg

SEQ ID NO: 142926 - DNA, 25 bp, Homo sapien
tattccttttctcacatatcccatg

SEQ ID NO: 142927 - DNA, 25 bp, Homo sapien
cctttgagtgattttgagtagattt

SEQ ID NO: 142928 - DNA, 25 bp, Homo sapien
taatgtaagccggtgtctctttggc

SEQ ID NO: 142929 - DNA, 25 bp, Homo sapien
caaggggcctgattttagcaccagc

SEQ ID NO: 142930 - DNA, 25 bp, Homo sapien
aacatcatgttgaaccacaattatt

SEQ ID NO: 142931 - DNA, 25 bp, Homo sapien
ccaggtactgaagagagggtattca

SEQ ID NO: 142932 - DNA, 25 bp, Homo sapien
tggtagtcttgattccaggtactga

SEQ ID NO: 142933 - DNA, 25 bp, Homo sapien
tccaggtactgaagagagggtattc

SEQ ID NO: 142934 - DNA, 25 bp, Homo sapien
cttggtagtcttgattccaggtact

SEQ ID NO: 142935 - DNA, 25 bp, Homo sapien
ttgaaatgcgagtgtctggatgtgc

SEQ ID NO: 142936 - DNA, 25 bp, Homo sapien
aatggttgatatggcttgaaatgcg

SEQ ID NO: 142937 - DNA, 25 bp, Homo sapien
tcagtgcatgagtcttgttcaaaag

SEQ ID NO: 142938 - DNA, 25 bp, Homo sapien
gcaaagaattgtgttcgggaatggt

SEQ ID NO: 142939 - DNA, 25 bp, Homo sapien
ggtaatgaattcaagggctggtatc

SEQ ID NO: 142940 - DNA, 25 bp, Homo sapien
tactaggctgcaactgatggctaac

SEQ ID NO: 142941 - DNA, 25 bp, Homo sapien
cataaagcggatgtgtaatagaagc

SEQ ID NO: 142942 - DNA, 25 bp, Homo sapien
gctggtatcttgaaatactaggctg

SEQ ID NO: 142943 - DNA, 25 bp, Homo sapien
gtctccaatgttgagacaagaactt

SEQ ID NO: 142944 - DNA, 25 bp, Homo sapien
catctagagaccatgtgggttctgg

SEQ ID NO: 142945 - DNA, 25 bp, Homo sapien
gtgggttctggcctactcatggaat

SEQ ID NO: 142946 - DNA, 25 bp, Homo sapien
gaccatgtgggttctggcctactca

SEQ ID NO: 142947 - DNA, 25 bp, Homo sapien
ttctggcctactcatggaattaaag

SEQ ID NO: 142948 - DNA, 25 bp, Homo sapien
tcaagagagcgtgcacagtaagtac

SEQ ID NO: 142949 - DNA, 25 bp, Homo sapien
ccttcttttggaattcgagaattat

SEQ ID NO: 142950 - DNA, 25 bp, Homo sapien
ttcttttctaccagcgtgaattgcc

SEQ ID NO: 142951 - DNA, 25 bp, Homo sapien
gtacttcttttctaccagcgtgaat

SEQ ID NO: 142952 - DNA, 25 bp, Homo sapien
ttgacctgtatcaataaaatcaccc

SEQ ID NO: 142953 - DNA, 25 bp, Homo sapien
tcccccttgtcagtataaaatgtat

SEQ ID NO: 142954 - DNA, 25 bp, Homo sapien
ggtcagtgagtgttggataagaaat

SEQ ID NO: 142955 - DNA, 25 bp, Homo sapien
taggctcctccagagacttgtcttg

SEQ ID NO: 142956 - DNA, 25 bp, Homo sapien
ttctctgtatggctatgtttctact

SEQ ID NO: 142957 - DNA, 25 bp, Homo sapien
cgtcctaacttcaggagagaaggtc

SEQ ID NO: 142958 - DNA, 25 bp, Homo sapien
tgtttctacttgcacgtcgtcctaa

SEQ ID NO: 142959 - DNA, 25 bp, Homo sapien
tgcacgtcgtcctaacttcaggaga

SEQ ID NO: 142960 - DNA, 25 bp, Homo sapien
ggaaatatgggaacttattgaagct

SEQ ID NO: 142961 - DNA, 25 bp, Homo sapien
tggtttcagtaccttagaatactcc

SEQ ID NO: 142962 - DNA, 25 bp, Homo sapien
cagtaccttagaatactccttgagt

SEQ ID NO: 142963 - DNA, 25 bp, Homo sapien
gaagcttgaggaccgaagttcagtg

SEQ ID NO: 142964 - DNA, 25 bp, Homo sapien
tgatatgcaagtgaggagagaccag

SEQ ID NO: 142965 - DNA, 25 bp, Homo sapien
gactgagaggaattctggtccagaa

SEQ ID NO: 142966 - DNA, 25 bp, Homo sapien
agagaccaggagcacccacacatga

SEQ ID NO: 142967 - DNA, 25 bp, Homo sapien
tcctggagcatccaaggcatatgga

SEQ ID NO: 142968 - DNA, 25 bp, Homo sapien
ttatatcagccttatcacattttgg

SEQ ID NO: 142969 - DNA, 25 bp, Homo sapien
ttttatttttgccatcgttgacagc

SEQ ID NO: 142970 - DNA, 25 bp, Homo sapien
ccatcgttgacagctattccactct

SEQ ID NO: 142971 - DNA, 25 bp, Homo sapien
ccctttcctttatatcagccttatc

SEQ ID NO: 142972 - DNA, 25 bp, Homo sapien
ctgccaattaaacaagagagattta

SEQ ID NO: 142973 - DNA, 25 bp, Homo sapien
gagatttatcagagacctcagttaa

SEQ ID NO: 142974 - DNA, 25 bp, Homo sapien
gcatacaccggaatacttatgtgca

SEQ ID NO: 142975 - DNA, 25 bp, Homo sapien
agttaaggctgcatacaccggaata

SEQ ID NO: 142976 - DNA, 25 bp, Homo sapien
gctcaatgtaagtcttaacctccag

SEQ ID NO: 142977 - DNA, 25 bp, Homo sapien
gtaagtcttaacctccaggtctcag

SEQ ID NO: 142978 - DNA, 25 bp, Homo sapien
tcgtggctcaatgtaagtcttaacc

SEQ ID NO: 142979 - DNA, 25 bp, Homo sapien
tgtgatcgtggctcaatgtaagtct

SEQ ID NO: 142980 - DNA, 25 bp, Homo sapien
ccttgaacttagtaggtatccagta

SEQ ID NO: 142981 - DNA, 25 bp, Homo sapien
tctgaacgactgattggttgaaagt

SEQ ID NO: 142982 - DNA, 25 bp, Homo sapien
ttggccccttgactgtaaactccat

SEQ ID NO: 142983 - DNA, 25 bp, Homo sapien
tatagcacaaacaatgccttgaact

SEQ ID NO: 142984 - DNA, 25 bp, Homo sapien
aatgtagcataaaacagtagtgacc

SEQ ID NO: 142985 - DNA, 25 bp, Homo sapien
aaatgtagcataaaacagtagtgac

SEQ ID NO: 142986 - DNA, 25 bp, Homo sapien
caaatgtagcataaaacagtagtga

SEQ ID NO: 142987 - DNA, 25 bp, Homo sapien
aagtagtgttcactggtcacaccca

SEQ ID NO: 142988 - DNA, 25 bp, Homo sapien
agtagtgttcactggtcacacccat

SEQ ID NO: 142989 - DNA, 25 bp, Homo sapien
tgacattggttgatgaacaccattg

SEQ ID NO: 142990 - DNA, 25 bp, Homo sapien
gatgaacaccattgatctgttcaga

SEQ ID NO: 142991 - DNA, 25 bp, Homo sapien
tggctgctcaaatcgtgacattggt

SEQ ID NO: 142992 - DNA, 25 bp, Homo sapien
tggtattggctgctcaaatcgtgac

SEQ ID NO: 142993 - DNA, 25 bp, Homo sapien
aacctgaaggacaaccacccacatg

SEQ ID NO: 142994 - DNA, 25 bp, Homo sapien
aaacctgaaggacaaccacccacat

SEQ ID NO: 142995 - DNA, 25 bp, Homo sapien
taagcttgcaacttcattgatgact

SEQ ID NO: 142996 - DNA, 25 bp, Homo sapien
cagtctccggttggatgattggtta

SEQ ID NO: 142997 - DNA, 25 bp, Homo sapien
tctgagtccagatattacaaagttc

SEQ ID NO: 142998 - DNA, 25 bp, Homo sapien
aatgtgaaggatatcctaagcttgc

SEQ ID NO: 142999 - DNA, 25 bp, Homo sapien
ccttatggtcatgtggccaactgga

SEQ ID NO: 143000 - DNA, 25 bp, Homo sapien
aatcatctgggaacatagtacatgg

SEQ ID NO: 143001 - DNA, 25 bp, Homo sapien
tcgctaccgctgctcaaaatcgtga

SEQ ID NO: 143002 - DNA, 25 bp, Homo sapien
aactggaatctgaggctcgctaccg

SEQ ID NO: 143003 - DNA, 25 bp, Homo sapien
tcaatgatcaatcttggcaaacctc

SEQ ID NO: 143004 - DNA, 25 bp, Homo sapien
ccaacattgggattcagcaaatgat

SEQ ID NO: 143005 - DNA, 25 bp, Homo sapien
caaacctcactttcggcttggctga

SEQ ID NO: 143006 - DNA, 25 bp, Homo sapien
aagttcatgctttaccaacattggg

SEQ ID NO: 143007 - DNA, 25 bp, Homo sapien
tcacgatgacattccagtgcaaggt

SEQ ID NO: 143008 - DNA, 25 bp, Homo sapien
ctttaaagtcacgatgacattccag

SEQ ID NO: 143009 - DNA, 25 bp, Homo sapien
gatgacattccagtgcaaggtgaag

SEQ ID NO: 143010 - DNA, 25 bp, Homo sapien
taaagtcacgatgacattccagtgc

SEQ ID NO: 143011 - DNA, 25 bp, Homo sapien
caggacctgcgtcagttggcatttc

SEQ ID NO: 143012 - DNA, 25 bp, Homo sapien
agttggcatttcaccacaatcaact

SEQ ID NO: 143013 - DNA, 25 bp, Homo sapien
cttgatctcctcaggacctgcgtca

SEQ ID NO: 143014 - DNA, 25 bp, Homo sapien
tttcaccacaatcaactccaaataa

SEQ ID NO: 143015 - DNA, 25 bp, Homo sapien
tccctcaaggccagacagtatttcc

SEQ ID NO: 143016 - DNA, 25 bp, Homo sapien
tctgttccgctacaaagagccaagg

SEQ ID NO: 143017 - DNA, 25 bp, Homo sapien
gaaggactcgatgactacaactgta

SEQ ID NO: 143018 - DNA, 25 bp, Homo sapien
caaggacggctttgtagagccagga

SEQ ID NO: 143019 - DNA, 25 bp, Homo sapien
cagggaagcttaagtgtgtggccaa

SEQ ID NO: 143020 - DNA, 25 bp, Homo sapien
tgttcatgagaggtgtccggaagac

SEQ ID NO: 143021 - DNA, 25 bp, Homo sapien
gagaacacataatggcctggctcct

SEQ ID NO: 143022 - DNA, 25 bp, Homo sapien
tgtccaagcctaggatgcaaaatga

SEQ ID NO: 143023 - DNA, 25 bp, Homo sapien
cttcttctgtgttgagtctacaagt

SEQ ID NO: 143024 - DNA, 25 bp, Homo sapien
gttgagtctacaagtttgcttgaaa

SEQ ID NO: 143025 - DNA, 25 bp, Homo sapien
tgtgttgagtctacaagtttgcttg

SEQ ID NO: 143026 - DNA, 25 bp, Homo sapien
tctgtgttgagtctacaagtttgct

SEQ ID NO: 143027 - DNA, 25 bp, Homo sapien
atacttcctgaacgtgttcctttct

SEQ ID NO: 143028 - DNA, 25 bp, Homo sapien
taacctctgcctcaatgtatactct

SEQ ID NO: 143029 - DNA, 25 bp, Homo sapien
ttaacctctgcctcaatgtatactc

SEQ ID NO: 143030 - DNA, 25 bp, Homo sapien
ctcttcactgatgttgaccaaacca

SEQ ID NO: 143031 - DNA, 25 bp, Homo sapien
acctctgcctcaatgtatactcttc

SEQ ID NO: 143032 - DNA, 25 bp, Homo sapien
atttgagattatgctccctggcaat

SEQ ID NO: 143033 - DNA, 25 bp, Homo sapien
agattatgctccctggcaatctcat

SEQ ID NO: 143034 - DNA, 25 bp, Homo sapien
ccgtcaaatgcatttgagattatgc

SEQ ID NO: 143035 - DNA, 25 bp, Homo sapien
tgagattatgctccctggcaatctc

SEQ ID NO: 143036 - DNA, 25 bp, Homo sapien
ctacttctcgtttttcatcctccat

SEQ ID NO: 143037 - DNA, 25 bp, Homo sapien
tatctacttctcgtttttcatcctc

SEQ ID NO: 143038 - DNA, 25 bp, Homo sapien
tctacttctcgtttttcatcctcca

SEQ ID NO: 143039 - DNA, 25 bp, Homo sapien
gttatctacttctcgtttttcatcc

SEQ ID NO: 143040 - DNA, 25 bp, Homo sapien
taggtcattaaagggcacagattcc

SEQ ID NO: 143041 - DNA, 25 bp, Homo sapien
gaacatacttagcttcaagggatgc

SEQ ID NO: 143042 - DNA, 25 bp, Homo sapien
ttctcacattagtctggccggtcca

SEQ ID NO: 143043 - DNA, 25 bp, Homo sapien
aaatgtagtctgtagctgggaggcc

SEQ ID NO: 143044 - DNA, 25 bp, Homo sapien
ttcatgtatcatcactggaaccctg

SEQ ID NO: 143045 - DNA, 25 bp, Homo sapien
gttctgtgtttgagcagtacctcca

SEQ ID NO: 143046 - DNA, 25 bp, Homo sapien
ttgagcagtacctccataccaagga

SEQ ID NO: 143047 - DNA, 25 bp, Homo sapien
accctgttctgtgtttgagcagtac

SEQ ID NO: 143048 - DNA, 25 bp, Homo sapien
ctcttcttggagagtcattacaagt

SEQ ID NO: 143049 - DNA, 25 bp, Homo sapien
ttcttggagagtcattacaagtgaa

SEQ ID NO: 143050 - DNA, 25 bp, Homo sapien
tcttcttggagagtcattacaagtg

SEQ ID NO: 143051 - DNA, 25 bp, Homo sapien
cttcttggagagtcattacaagtga

SEQ ID NO: 143052 - DNA, 25 bp, Homo sapien
agcagcaaattgagccaaatcatga

SEQ ID NO: 143053 - DNA, 25 bp, Homo sapien
cagcaaattgagccaaatcatgata

SEQ ID NO: 143054 - DNA, 25 bp, Homo sapien
gcagcaaattgagccaaatcatgat

SEQ ID NO: 143055 - DNA, 25 bp, Homo sapien
cctcagtcacattcgaagaggccac

SEQ ID NO: 143056 - DNA, 25 bp, Homo sapien
ctcctcagtcacattcgaagaggcc

SEQ ID NO: 143057 - DNA, 25 bp, Homo sapien
catgtgggtggtattcttgaatttt

SEQ ID NO: 143058 - DNA, 25 bp, Homo sapien
cacattcgaagaggccacatgtggg

SEQ ID NO: 143059 - DNA, 25 bp, Homo sapien
cccacactgtaagggccgagtctag

SEQ ID NO: 143060 - DNA, 25 bp, Homo sapien
ggatagcccctattgttgaccgctg

SEQ ID NO: 143061 - DNA, 25 bp, Homo sapien
ttgtagcccctgcatttcttttcag

SEQ ID NO: 143062 - DNA, 25 bp, Homo sapien
gaagtctagtaagtgttcgacccac

SEQ ID NO: 143063 - DNA, 25 bp, Homo sapien
caatgaatggaacaagttcacaacc

SEQ ID NO: 143064 - DNA, 25 bp, Homo sapien
caaacaaggaagatgccacaatgaa

SEQ ID NO: 143065 - DNA, 25 bp, Homo sapien
cttgccagcatttaccaaaagaact

SEQ ID NO: 143066 - DNA, 25 bp, Homo sapien
tttaccaaaagaactgttgctccag

SEQ ID NO: 143067 - DNA, 25 bp, Homo sapien
tgccacgatctatccctgccgtctc

SEQ ID NO: 143068 - DNA, 25 bp, Homo sapien
ctcccttccttcctatatgtggtct

SEQ ID NO: 143069 - DNA, 25 bp, Homo sapien
ccttcctatatgtggtcttcaagtt

SEQ ID NO: 143070 - DNA, 25 bp, Homo sapien
ctgccacgatctatccctgccgtct

SEQ ID NO: 143071 - DNA, 25 bp, Homo sapien
gttcccacactcgtgggttagatca

SEQ ID NO: 143072 - DNA, 25 bp, Homo sapien
cttgtgtaatcattgaaatgctgtg

SEQ ID NO: 143073 - DNA, 25 bp, Homo sapien
cacactcgtgggttagatcactcat

SEQ ID NO: 143074 - DNA, 25 bp, Homo sapien
tgtgtaatcattgaaatgctgtgcc

SEQ ID NO: 143075 - DNA, 25 bp, Homo sapien
gggtacagcttggtatatgtatttt

SEQ ID NO: 143076 - DNA, 25 bp, Homo sapien
tctgagctaaatatgagtggctgtg

SEQ ID NO: 143077 - DNA, 25 bp, Homo sapien
ggggtacagcttggtatatgtattt

SEQ ID NO: 143078 - DNA, 25 bp, Homo sapien
gagctaaatatgagtggctgtggcc

SEQ ID NO: 143079 - DNA, 25 bp, Homo sapien
ccctggtcacttggttggtcaaaat

SEQ ID NO: 143080 - DNA, 25 bp, Homo sapien
tcttctatgtataagtctagctgct

SEQ ID NO: 143081 - DNA, 25 bp, Homo sapien
taagagccaagaaacccctggtcac

SEQ ID NO: 143082 - DNA, 25 bp, Homo sapien
agtgtgatgatcaccttcttctatg

SEQ ID NO: 143083 - DNA, 25 bp, Homo sapien
tctgcacaaagtattttgccctggg

SEQ ID NO: 143084 - DNA, 25 bp, Homo sapien
tgacataggtcctcatgacatctct

SEQ ID NO: 143085 - DNA, 25 bp, Homo sapien
gccctgggaattaacatgacatagg

SEQ ID NO: 143086 - DNA, 25 bp, Homo sapien
gccctttaaggcatgagataatgta

SEQ ID NO: 143087 - DNA, 25 bp, Homo sapien
gcagggccaagctcctatagactca

SEQ ID NO: 143088 - DNA, 25 bp, Homo sapien
caagctcctatagactcatccatag

SEQ ID NO: 143089 - DNA, 25 bp, Homo sapien
tccagcagggccaagctcctataga

SEQ ID NO: 143090 - DNA, 25 bp, Homo sapien
ctatagactcatccataggaaacat

SEQ ID NO: 143091 - DNA, 25 bp, Homo sapien
ggattcagggaaatgattagcattt

SEQ ID NO: 143092 - DNA, 25 bp, Homo sapien
gattcagggaaatgattagcatttc

SEQ ID NO: 143093 - DNA, 25 bp, Homo sapien
tgccggatttctgtttagatctgat

SEQ ID NO: 143094 - DNA, 25 bp, Homo sapien
ccggatttctgtttagatctgatct

SEQ ID NO: 143095 - DNA, 25 bp, Homo sapien
ggatttctgtttagatctgatctgc

SEQ ID NO: 143096 - DNA, 25 bp, Homo sapien
cttgccggatttctgtttagatctg

SEQ ID NO: 143097 - DNA, 25 bp, Homo sapien
tctttgagacagtgcagctggattt

SEQ ID NO: 143098 - DNA, 25 bp, Homo sapien
ttaactaagtatggtttggcagtga

SEQ ID NO: 143099 - DNA, 25 bp, Homo sapien
tttgctacaagagccagaagagtgt

SEQ ID NO: 143100 - DNA, 25 bp, Homo sapien
gatatacctgatagtctctgcttcc

SEQ ID NO: 143101 - DNA, 25 bp, Homo sapien
gaagtcctatcagactccacagaag

SEQ ID NO: 143102 - DNA, 25 bp, Homo sapien
gataaccaactactccatgcaatgg

SEQ ID NO: 143103 - DNA, 25 bp, Homo sapien
ttccttcttataggcactgcactgg

SEQ ID NO: 143104 - DNA, 25 bp, Homo sapien
agtaggctcacagggaggagaaact

SEQ ID NO: 143105 - DNA, 25 bp, Homo sapien
cttgccgctcaggctgcattttcca

SEQ ID NO: 143106 - DNA, 25 bp, Homo sapien
gtctgaaatctgtcccaacaaacca

SEQ ID NO: 143107 - DNA, 25 bp, Homo sapien
ctgaaatctgtcccaacaaaccaat

SEQ ID NO: 143108 - DNA, 25 bp, Homo sapien
agtctgaaatctgtcccaacaaacc

SEQ ID NO: 143109 - DNA, 25 bp, Homo sapien
actggagaatttgacagtccctgga

SEQ ID NO: 143110 - DNA, 25 bp, Homo sapien
cactggagaatttgacagtccctgg

SEQ ID NO: 143111 - DNA, 25 bp, Homo sapien
ctggagaatttgacagtccctggag

SEQ ID NO: 143112 - DNA, 25 bp, Homo sapien
tctgcttcgatgttgatcatcctca

SEQ ID NO: 143113 - DNA, 25 bp, Homo sapien
tctagtgtagaatgctgaggggtaa

SEQ ID NO: 143114 - DNA, 25 bp, Homo sapien
tcgatgttgatcatcctcatcagca

SEQ ID NO: 143115 - DNA, 25 bp, Homo sapien
ttaagactttctgcttcgatgttga

SEQ ID NO: 143116 - DNA, 25 bp, Homo sapien
aatagcggtaggtgttgctgctgtt

SEQ ID NO: 143117 - DNA, 25 bp, Homo sapien
taatagcggtaggtgttgctgctgt

SEQ ID NO: 143118 - DNA, 25 bp, Homo sapien
atagcggtaggtgttgctgctgttt

SEQ ID NO: 143119 - DNA, 25 bp, Homo sapien
ctaatagcggtaggtgttgctgctg

SEQ ID NO: 143120 - DNA, 25 bp, Homo sapien
gggattcttctacctgatggtatac

SEQ ID NO: 143121 - DNA, 25 bp, Homo sapien
gataggccacataaagtccaaagag

SEQ ID NO: 143122 - DNA, 25 bp, Homo sapien
cgggtaaagatgtttgcttttggca

SEQ ID NO: 143123 - DNA, 25 bp, Homo sapien
aagagcaagagaagtgttctgtgat

SEQ ID NO: 143124 - DNA, 25 bp, Homo sapien
caaagagtttgaatatagtggtaga

SEQ ID NO: 143125 - DNA, 25 bp, Homo sapien
gagtttgaatatagtggtagatcca

SEQ ID NO: 143126 - DNA, 25 bp, Homo sapien
ggtagatccaaatgcataacaatga

SEQ ID NO: 143127 - DNA, 25 bp, Homo sapien
gaatatagtggtagatccaaatgca

SEQ ID NO: 143128 - DNA, 25 bp, Homo sapien
aaggcaaaatacctttgttgctgct

SEQ ID NO: 143129 - DNA, 25 bp, Homo sapien
gtcaaaatctgcatatccagaagca

SEQ ID NO: 143130 - DNA, 25 bp, Homo sapien
aaatacctttgttgctgcttaatgg

SEQ ID NO: 143131 - DNA, 25 bp, Homo sapien
ctttgttgctgcttaatggtcaact

SEQ ID NO: 143132 - DNA, 25 bp, Homo sapien
tattcaaagcttcccttgacttaaa

SEQ ID NO: 143133 - DNA, 25 bp, Homo sapien
tgcaatgaattttcacggacagatt

SEQ ID NO: 143134 - DNA, 25 bp, Homo sapien
taattgagtatggactccaaggaga

SEQ ID NO: 143135 - DNA, 25 bp, Homo sapien
cacggacagattgcggaagtgatca

SEQ ID NO: 143136 - DNA, 25 bp, Homo sapien
attgcggaagtgatcagaggtgtat

SEQ ID NO: 143137 - DNA, 25 bp, Homo sapien
catgttcagtaaacaactgcagcat

SEQ ID NO: 143138 - DNA, 25 bp, Homo sapien
gttcatgttcagtaaacaactgcag

SEQ ID NO: 143139 - DNA, 25 bp, Homo sapien
tcatgttcagtaaacaactgcagca

SEQ ID NO: 143140 - DNA, 25 bp, Homo sapien
ctgttcatgttcagtaaacaactgc

SEQ ID NO: 143141 - DNA, 25 bp, Homo sapien
tttattcattgaggagtgtggatga

SEQ ID NO: 143142 - DNA, 25 bp, Homo sapien
gaatgtagccaagggaaatttgctg

SEQ ID NO: 143143 - DNA, 25 bp, Homo sapien
tgacaagcataaatgtgaatagggc

SEQ ID NO: 143144 - DNA, 25 bp, Homo sapien
tgccttttgaatgtagccaagggaa

SEQ ID NO: 143145 - DNA, 25 bp, Homo sapien
tttcccacgcattcagctgagatca

SEQ ID NO: 143146 - DNA, 25 bp, Homo sapien
tctcagtgctatgtttcccacgcat

SEQ ID NO: 143147 - DNA, 25 bp, Homo sapien
attttctcagtgctatgtttcccac

SEQ ID NO: 143148 - DNA, 25 bp, Homo sapien
tgtttcccacgcattcagctgagat

SEQ ID NO: 143149 - DNA, 25 bp, Homo sapien
gaggccctcaccatcttttttagga

SEQ ID NO: 143150 - DNA, 25 bp, Homo sapien
gcaaagggttgagtttgacctgaac

SEQ ID NO: 143151 - DNA, 25 bp, Homo sapien
ttgcttctgacacccgctgccagaa

SEQ ID NO: 143152 - DNA, 25 bp, Homo sapien
gaactctgtctattgcttctgacac

SEQ ID NO: 143153 - DNA, 25 bp, Homo sapien
tggctttaaccaaaggtcctgtgtc

SEQ ID NO: 143154 - DNA, 25 bp, Homo sapien
gtgtccctttctctactggaatgag

SEQ ID NO: 143155 - DNA, 25 bp, Homo sapien
ggtcctgtgtccctttctctactgg

SEQ ID NO: 143156 - DNA, 25 bp, Homo sapien
tgaagctcctggctttaaccaaagg

SEQ ID NO: 143157 - DNA, 25 bp, Homo sapien
gaaggtccttatctatagcatgtcc

SEQ ID NO: 143158 - DNA, 25 bp, Homo sapien
tgacaaaatgctgaaggtccttatc

SEQ ID NO: 143159 - DNA, 25 bp, Homo sapien
tccttatctatagcatgtccctgca

SEQ ID NO: 143160 - DNA, 25 bp, Homo sapien
aatgctgaaggtccttatctatagc

SEQ ID NO: 143161 - DNA, 25 bp, Homo sapien
agcttatctttgtagcattctgatg

SEQ ID NO: 143162 - DNA, 25 bp, Homo sapien
ttcaaaatttgccaatcagaggtac

SEQ ID NO: 143163 - DNA, 25 bp, Homo sapien
tcaaaatttgccaatcagaggtaca

SEQ ID NO: 143164 - DNA, 25 bp, Homo sapien
ctgcttcaaaatttgccaatcagag

SEQ ID NO: 143165 - DNA, 25 bp, Homo sapien
gcttcaaaatttgccaatcagaggt

SEQ ID NO: 143166 - DNA, 25 bp, Homo sapien
gtctttccggtctccttctaacagc

SEQ ID NO: 143167 - DNA, 25 bp, Homo sapien
accaatctagacacttgcaggtctt

SEQ ID NO: 143168 - DNA, 25 bp, Homo sapien
cacttgcaggtctttccggtctcct

SEQ ID NO: 143169 - DNA, 25 bp, Homo sapien
tctagacacttgcaggtctttccgg

SEQ ID NO: 143170 - DNA, 25 bp, Homo sapien
gggtatgtgtccagtgtgattcctc

SEQ ID NO: 143171 - DNA, 25 bp, Homo sapien
aggtccatccatttggttgttggtt

SEQ ID NO: 143172 - DNA, 25 bp, Homo sapien
gtagcactggccagcttgatcttca

SEQ ID NO: 143173 - DNA, 25 bp, Homo sapien
tgggcagcgcttccctgtagcactg

SEQ ID NO: 143174 - DNA, 25 bp, Homo sapien
tggttgtagtctgcagccactataa

SEQ ID NO: 143175 - DNA, 25 bp, Homo sapien
catggatcttctgtgtgattcgtcc

SEQ ID NO: 143176 - DNA, 25 bp, Homo sapien
tgacaacctcatggatcttctgtgt

SEQ ID NO: 143177 - DNA, 25 bp, Homo sapien
gctgacaacctcatggatcttctgt

SEQ ID NO: 143178 - DNA, 25 bp, Homo sapien
cctcatggatcttctgtgtgattcg

SEQ ID NO: 143179 - DNA, 25 bp, Homo sapien
caggtcccagtagtggtctgggttt

SEQ ID NO: 143180 - DNA, 25 bp, Homo sapien
gggtcaggtcccagtagtggtctgg

SEQ ID NO: 143181 - DNA, 25 bp, Homo sapien
cccagatggaaatgagcaacttgtt

SEQ ID NO: 143182 - DNA, 25 bp, Homo sapien
gagacaggtggtatattgctcctcc

SEQ ID NO: 143183 - DNA, 25 bp, Homo sapien
tggagagctgctatagatacacaaa

SEQ ID NO: 143184 - DNA, 25 bp, Homo sapien
ttcaccttccgcgatgactctgaag

SEQ ID NO: 143185 - DNA, 25 bp, Homo sapien
tggggacctcagagcggcgcgggat

SEQ ID NO: 143186 - DNA, 25 bp, Homo sapien
gtggggacctcagagcggcgcggga

SEQ ID NO: 143187 - DNA, 25 bp, Homo sapien
gatcatcctccgtctcaggtacctg

SEQ ID NO: 143188 - DNA, 25 bp, Homo sapien
tcatcctccgtctcaggtacctgcc

SEQ ID NO: 143189 - DNA, 25 bp, Homo sapien
atcctccgtctcaggtacctgcccc

SEQ ID NO: 143190 - DNA, 25 bp, Homo sapien
gggatcatcctccgtctcaggtacc

SEQ ID NO: 143191 - DNA, 25 bp, Homo sapien
agtcgctgcgtttggtcagttgcac

SEQ ID NO: 143192 - DNA, 25 bp, Homo sapien
ttctgggtcactggtagccgcggga

SEQ ID NO: 143193 - DNA, 25 bp, Homo sapien
tcaagttgccatagctgcgagtctg

SEQ ID NO: 143194 - DNA, 25 bp, Homo sapien
ggagagcacagtcggttgagtcgct

SEQ ID NO: 143195 - DNA, 25 bp, Homo sapien
gatttgcagttccttttcgggactc

SEQ ID NO: 143196 - DNA, 25 bp, Homo sapien
cgcggccaagggatcaggcttttat

SEQ ID NO: 143197 - DNA, 25 bp, Homo sapien
taattccttgatcatgaggccgaga

SEQ ID NO: 143198 - DNA, 25 bp, Homo sapien
gaaagttacccgaaggccagctata

SEQ ID NO: 143199 - DNA, 25 bp, Homo sapien
tgttaccacattcccagtcaggaat

SEQ ID NO: 143200 - DNA, 25 bp, Homo sapien
gttaccacattcccagtcaggaatc

SEQ ID NO: 143201 - DNA, 25 bp, Homo sapien
ttaccacattcccagtcaggaatct

SEQ ID NO: 143202 - DNA, 25 bp, Homo sapien
cccttcttctctgttaccacattcc

SEQ ID NO: 143203 - DNA, 25 bp, Homo sapien
cgcgggcggaccaatgtcctgcaga

SEQ ID NO: 143204 - DNA, 25 bp, Homo sapien
agtccccgcggagtggactgtccgc

SEQ ID NO: 143205 - DNA, 25 bp, Homo sapien
gactgtccgcgggcggaccaatgtc

SEQ ID NO: 143206 - DNA, 25 bp, Homo sapien
ccagagaaagtccccgcggagtgga

SEQ ID NO: 143207 - DNA, 25 bp, Homo sapien
tccgcttccctaggcaaccttgacc

SEQ ID NO: 143208 - DNA, 25 bp, Homo sapien
ttggctggacccacgcagtccgctc

SEQ ID NO: 143209 - DNA, 25 bp, Homo sapien
cccaaacaagtctgcttgcttcact

SEQ ID NO: 143210 - DNA, 25 bp, Homo sapien
gcttgcttcactttccttggctgga

SEQ ID NO: 143211 - DNA, 25 bp, Homo sapien
gactcggggctatttctccatcctc

SEQ ID NO: 143212 - DNA, 25 bp, Homo sapien
ggctgtgacctcaccactgtggagg

SEQ ID NO: 143213 - DNA, 25 bp, Homo sapien
agctctgcacctcgggttaccccag

SEQ ID NO: 143214 - DNA, 25 bp, Homo sapien
ctccgaaatcgcctcattctcagct

SEQ ID NO: 143215 - DNA, 25 bp, Homo sapien
taagctggggatgcgttgaatatcc

SEQ ID NO: 143216 - DNA, 25 bp, Homo sapien
ggtggagacgaacaccccattccgc

SEQ ID NO: 143217 - DNA, 25 bp, Homo sapien
ttgaatatccttgcaggtgactctg

SEQ ID NO: 143218 - DNA, 25 bp, Homo sapien
gggatgcgttgaatatccttgcagg

SEQ ID NO: 143219 - DNA, 25 bp, Homo sapien
cttttgtgcacttcgggccacctct

SEQ ID NO: 143220 - DNA, 25 bp, Homo sapien
acactcacacactacttcgggctgt

SEQ ID NO: 143221 - DNA, 25 bp, Homo sapien
tacttcgggctgttattgagctgct

SEQ ID NO: 143222 - DNA, 25 bp, Homo sapien
tgagctgcttttgtgcacttcgggc

SEQ ID NO: 143223 - DNA, 25 bp, Homo sapien
tttaaacaggatgtctacgagttcc

SEQ ID NO: 143224 - DNA, 25 bp, Homo sapien
caacatagagtggacattcagagac

SEQ ID NO: 143225 - DNA, 25 bp, Homo sapien
ctttctccccaacatagagtggaca

SEQ ID NO: 143226 - DNA, 25 bp, Homo sapien
ttctgccactgttaaagaagtctct

SEQ ID NO: 143227 - DNA, 25 bp, Homo sapien
gcatccataagaccacggggctggg

SEQ ID NO: 143228 - DNA, 25 bp, Homo sapien
ggcaagagagctgtttacctttcag

SEQ ID NO: 143229 - DNA, 25 bp, Homo sapien
tccataagaccacggggctgggata

SEQ ID NO: 143230 - DNA, 25 bp, Homo sapien
ggatatgggtagtagggcaagagag

SEQ ID NO: 143231 - DNA, 25 bp, Homo sapien
gggccacagtccgtaactctctccc

SEQ ID NO: 143232 - DNA, 25 bp, Homo sapien
tgagggccacagtccgtaactctct

SEQ ID NO: 143233 - DNA, 25 bp, Homo sapien
agggccacagtccgtaactctctcc

SEQ ID NO: 143234 - DNA, 25 bp, Homo sapien
gagggccacagtccgtaactctctc

SEQ ID NO: 143235 - DNA, 25 bp, Homo sapien
ggaggagtgaggaaaagatacagca

SEQ ID NO: 143236 - DNA, 25 bp, Homo sapien
ctggaggggaggagtgaggaaaaga

SEQ ID NO: 143237 - DNA, 25 bp, Homo sapien
gggaggagtgaggaaaagatacagc

SEQ ID NO: 143238 - DNA, 25 bp, Homo sapien
gaggggaggagtgaggaaaagatac

SEQ ID NO: 143239 - DNA, 25 bp, Homo sapien
ttccactcaggtaaagcatcatacc

SEQ ID NO: 143240 - DNA, 25 bp, Homo sapien
cactcaggtaaagcatcataccctt

SEQ ID NO: 143241 - DNA, 25 bp, Homo sapien
cttccactcaggtaaagcatcatac

SEQ ID NO: 143242 - DNA, 25 bp, Homo sapien
tccactcaggtaaagcatcataccc

SEQ ID NO: 143243 - DNA, 25 bp, Homo sapien
ggagaaggcagatgtagcagttact

SEQ ID NO: 143244 - DNA, 25 bp, Homo sapien
gcagatgtagcagttactgtcataa

SEQ ID NO: 143245 - DNA, 25 bp, Homo sapien
aaggcagatgtagcagttactgtca

SEQ ID NO: 143246 - DNA, 25 bp, Homo sapien
tgtagcagttactgtcataatgaaa

SEQ ID NO: 143247 - DNA, 25 bp, Homo sapien
catgatctgaatggcaaagagtcgt

SEQ ID NO: 143248 - DNA, 25 bp, Homo sapien
tgaatggcaaagagtcgtcctgctc

SEQ ID NO: 143249 - DNA, 25 bp, Homo sapien
tttccccatgatctgaatggcaaag

SEQ ID NO: 143250 - DNA, 25 bp, Homo sapien
tctgaatggcaaagagtcgtcctgc

SEQ ID NO: 143251 - DNA, 25 bp, Homo sapien
tcttagcaccggaatgattaccagc

SEQ ID NO: 143252 - DNA, 25 bp, Homo sapien
gctaccagcggtgatggaccttgga

SEQ ID NO: 143253 - DNA, 25 bp, Homo sapien
cacgcttgggctagggaagaatgat

SEQ ID NO: 143254 - DNA, 25 bp, Homo sapien
gctgaagctgatggtcgtccgacaa

SEQ ID NO: 143255 - DNA, 25 bp, Homo sapien
ccagacctaggtttgcaactggccc

SEQ ID NO: 143256 - DNA, 25 bp, Homo sapien
cagacctaggtttgcaactggcccc

SEQ ID NO: 143257 - DNA, 25 bp, Homo sapien
aatttcatccacaggctgagatcta

SEQ ID NO: 143258 - DNA, 25 bp, Homo sapien
tccgaatactgctggagttacagca

SEQ ID NO: 143259 - DNA, 25 bp, Homo sapien
agggcttgccttagatgcctgggat

SEQ ID NO: 143260 - DNA, 25 bp, Homo sapien
tagatgcctgggatctaatccgaat

SEQ ID NO: 143261 - DNA, 25 bp, Homo sapien
gtctggatgcaagggtcggaaccaa

SEQ ID NO: 143262 - DNA, 25 bp, Homo sapien
tctgtgctcttttatgaacaagagg

SEQ ID NO: 143263 - DNA, 25 bp, Homo sapien
ttacctccctaatcctgatttggtg

SEQ ID NO: 143264 - DNA, 25 bp, Homo sapien
tggatacccattgcaatctgtgctc

SEQ ID NO: 143265 - DNA, 25 bp, Homo sapien
ttcatccccagaaggaggattcaga

SEQ ID NO: 143266 - DNA, 25 bp, Homo sapien
tcatccccagaaggaggattcagag

SEQ ID NO: 143267 - DNA, 25 bp, Homo sapien
caggtgagttcaaaggaaatgacat

SEQ ID NO: 143268 - DNA, 25 bp, Homo sapien
ccaggtgagttcaaaggaaatgaca

SEQ ID NO: 143269 - DNA, 25 bp, Homo sapien
tctgaaaagtcaccggcaacaatgt

SEQ ID NO: 143270 - DNA, 25 bp, Homo sapien
gaaaagtcaccggcaacaatgtagt

SEQ ID NO: 143271 - DNA, 25 bp, Homo sapien
aaaagtcaccggcaacaatgtagtg

SEQ ID NO: 143272 - DNA, 25 bp, Homo sapien
tttggtcatgggtatacacgtgcac

SEQ ID NO: 143273 - DNA, 25 bp, Homo sapien
ttagctcacttacaacgaactcgtt

SEQ ID NO: 143274 - DNA, 25 bp, Homo sapien
tcgtgttagccggtacaaatgcaga

SEQ ID NO: 143275 - DNA, 25 bp, Homo sapien
gaaggccgtcgcctcaaaatgtcct

SEQ ID NO: 143276 - DNA, 25 bp, Homo sapien
caacgactaagaatcactgtcttgt

SEQ ID NO: 143277 - DNA, 25 bp, Homo sapien
ttgttgaagctgcaattctggatct

SEQ ID NO: 143278 - DNA, 25 bp, Homo sapien
cacagcagcctcttgtagctttgct

SEQ ID NO: 143279 - DNA, 25 bp, Homo sapien
tctggatctaaatttctccgattac

SEQ ID NO: 143280 - DNA, 25 bp, Homo sapien
tggattttaatgctgacacgaggta

SEQ ID NO: 143281 - DNA, 25 bp, Homo sapien
ccgtttcagctcagactagggatta

SEQ ID NO: 143282 - DNA, 25 bp, Homo sapien
tgagtcagcaaagatcttcccactg

SEQ ID NO: 143283 - DNA, 25 bp, Homo sapien
taacctaaacgtcctgggcatgctt

SEQ ID NO: 143284 - DNA, 25 bp, Homo sapien
cagaagggggcaatagagagctttc

SEQ ID NO: 143285 - DNA, 25 bp, Homo sapien
cattgacgatgtaagctaattgagg

SEQ ID NO: 143286 - DNA, 25 bp, Homo sapien
caagcaacaaggttagcattgacga

SEQ ID NO: 143287 - DNA, 25 bp, Homo sapien
gctagtctgccagctaccagaaggg

SEQ ID NO: 143288 - DNA, 25 bp, Homo sapien
tcccttaaggcctagaatcgcctgt

SEQ ID NO: 143289 - DNA, 25 bp, Homo sapien
gttggtgcattttactcagcccaca

SEQ ID NO: 143290 - DNA, 25 bp, Homo sapien
gcctagaatcgcctgtccttgtttt

SEQ ID NO: 143291 - DNA, 25 bp, Homo sapien
aaagttggtgcattttactcagccc

SEQ ID NO: 143292 - DNA, 25 bp, Homo sapien
gagaaagcacgatacataattgtac

SEQ ID NO: 143293 - DNA, 25 bp, Homo sapien
ccttttaggccataagtattgcagc

SEQ ID NO: 143294 - DNA, 25 bp, Homo sapien
ctaaaaatgcactaaccagaatggt

SEQ ID NO: 143295 - DNA, 25 bp, Homo sapien
gataaacatgtagcaaaattggtca

SEQ ID NO: 143296 - DNA, 25 bp, Homo sapien
ctcctggtgcccttgagttactggg

SEQ ID NO: 143297 - DNA, 25 bp, Homo sapien
agttactgggagctctactgaggtc

SEQ ID NO: 143298 - DNA, 25 bp, Homo sapien
actcctggtgcccttgagttactgg

SEQ ID NO: 143299 - DNA, 25 bp, Homo sapien
ttgagttactgggagctctactgag

SEQ ID NO: 143300 - DNA, 25 bp, Homo sapien
gattaactgataggtcaccaggtgg

SEQ ID NO: 143301 - DNA, 25 bp, Homo sapien
gaagaacagtttcccagaatggcac

SEQ ID NO: 143302 - DNA, 25 bp, Homo sapien
tagcgctgaggcttggaaattccag

SEQ ID NO: 143303 - DNA, 25 bp, Homo sapien
tccagacaacgttgggcagtctcaa

SEQ ID NO: 143304 - DNA, 25 bp, Homo sapien
tgttgatctaaatggaaaactctga

SEQ ID NO: 143305 - DNA, 25 bp, Homo sapien
cttgaatttgttgatctaaatggaa

SEQ ID NO: 143306 - DNA, 25 bp, Homo sapien
ggtaagaacttgaatttgttgatct

SEQ ID NO: 143307 - DNA, 25 bp, Homo sapien
gaaaactctgacaactcccttgttg

SEQ ID NO: 143308 - DNA, 25 bp, Homo sapien
caagcaaggagaaccactacagtct

SEQ ID NO: 143309 - DNA, 25 bp, Homo sapien
caggattgaaggagccacaagcaag

SEQ ID NO: 143310 - DNA, 25 bp, Homo sapien
ggtgacaggattgaaggagccacaa

SEQ ID NO: 143311 - DNA, 25 bp, Homo sapien
catgttggtgacaggattgaaggag

SEQ ID NO: 143312 - DNA, 25 bp, Homo sapien
tcatgcagtccttggctagttcaaa

SEQ ID NO: 143313 - DNA, 25 bp, Homo sapien
catgcagtccttggctagttcaaac

SEQ ID NO: 143314 - DNA, 25 bp, Homo sapien
ttcatgcagtccttggctagttcaa

SEQ ID NO: 143315 - DNA, 25 bp, Homo sapien
ttcttgtatgcatcaccaacaggag

SEQ ID NO: 143316 - DNA, 25 bp, Homo sapien
gagtcccttcttcttgtatgcatca

SEQ ID NO: 143317 - DNA, 25 bp, Homo sapien
tcttcttgtatgcatcaccaacagg

SEQ ID NO: 143318 - DNA, 25 bp, Homo sapien
ccttcttcttgtatgcatcaccaac

SEQ ID NO: 143319 - DNA, 25 bp, Homo sapien
catgtatcaacttccaccaatttgg

SEQ ID NO: 143320 - DNA, 25 bp, Homo sapien
caatttggaattcttggtggcaagt

SEQ ID NO: 143321 - DNA, 25 bp, Homo sapien
gaaaatttttccatgtatcaacttc

SEQ ID NO: 143322 - DNA, 25 bp, Homo sapien
ccttctgaaaatttttccatgtatc

SEQ ID NO: 143323 - DNA, 25 bp, Homo sapien
gatagtatcttagcatcttaacagc

SEQ ID NO: 143324 - DNA, 25 bp, Homo sapien
ccagtttatcttgatagtatcttag

SEQ ID NO: 143325 - DNA, 25 bp, Homo sapien
atagtatcttagcatcttaacagcc

SEQ ID NO: 143326 - DNA, 25 bp, Homo sapien
tagcctccagtttatcttgatagta

SEQ ID NO: 143327 - DNA, 25 bp, Homo sapien
ctctttcgtccaggcctttctagtg

SEQ ID NO: 143328 - DNA, 25 bp, Homo sapien
tcgtccaggcctttctagtgtaggt

SEQ ID NO: 143329 - DNA, 25 bp, Homo sapien
tagtgtaggtgagttctgctgttga

SEQ ID NO: 143330 - DNA, 25 bp, Homo sapien
cagctcatggaattcctctttcgtc

SEQ ID NO: 143331 - DNA, 25 bp, Homo sapien
gatctcttttgactagaagcttgtc

SEQ ID NO: 143332 - DNA, 25 bp, Homo sapien
atctcttttgactagaagcttgtct

SEQ ID NO: 143333 - DNA, 25 bp, Homo sapien
acacagcagcttgacttttggtgca

SEQ ID NO: 143334 - DNA, 25 bp, Homo sapien
gcagcttgacttttggtgcaccttt

SEQ ID NO: 143335 - DNA, 25 bp, Homo sapien
cccacacagcagcttgacttttggt

SEQ ID NO: 143336 - DNA, 25 bp, Homo sapien
acagcagcttgacttttggtgcacc

SEQ ID NO: 143337 - DNA, 25 bp, Homo sapien
cagcttgagtaatgcatatgagccc

SEQ ID NO: 143338 - DNA, 25 bp, Homo sapien
ttgagtaatgcatatgagcccatag

SEQ ID NO: 143339 - DNA, 25 bp, Homo sapien
gcttgagtaatgcatatgagcccat

SEQ ID NO: 143340 - DNA, 25 bp, Homo sapien
agcttgagtaatgcatatgagccca

SEQ ID NO: 143341 - DNA, 25 bp, Homo sapien
tttttgtggatgagatatcattagt

SEQ ID NO: 143342 - DNA, 25 bp, Homo sapien
ttgtggatgagatatcattagtgat

SEQ ID NO: 143343 - DNA, 25 bp, Homo sapien
gatttttgtggatgagatatcatta

SEQ ID NO: 143344 - DNA, 25 bp, Homo sapien
ctgagggctcttcagatttttgtgg

SEQ ID NO: 143345 - DNA, 25 bp, Homo sapien
caagatctagtaccaagtagtggat

SEQ ID NO: 143346 - DNA, 25 bp, Homo sapien
gacaagatctagtaccaagtagtgg

SEQ ID NO: 143347 - DNA, 25 bp, Homo sapien
tctagtaccaagtagtggatgctct

SEQ ID NO: 143348 - DNA, 25 bp, Homo sapien
agtaccaagtagtggatgctctggc

SEQ ID NO: 143349 - DNA, 25 bp, Homo sapien
tgtcttcactctcggagtgtcttca

SEQ ID NO: 143350 - DNA, 25 bp, Homo sapien
tggaaaacattcatcttagcaactt

SEQ ID NO: 143351 - DNA, 25 bp, Homo sapien
cagattgtttcaaaccctgaaagga

SEQ ID NO: 143352 - DNA, 25 bp, Homo sapien
ggatggcccctgtcattcactttcg

SEQ ID NO: 143353 - DNA, 25 bp, Homo sapien
tggcccattggttgttccaggagca

SEQ ID NO: 143354 - DNA, 25 bp, Homo sapien
aaatattttgattggcccattggtt

SEQ ID NO: 143355 - DNA, 25 bp, Homo sapien
ccatgtatttgcacgatttccaaaa

SEQ ID NO: 143356 - DNA, 25 bp, Homo sapien
gcacgatttccaaaattcttcctct

SEQ ID NO: 143357 - DNA, 25 bp, Homo sapien
gctgatcttctttgccgtggcagag

SEQ ID NO: 143358 - DNA, 25 bp, Homo sapien
gattctgcgtgtttgtataatatca

SEQ ID NO: 143359 - DNA, 25 bp, Homo sapien
ctatttgcctcctggcaaacaggct

SEQ ID NO: 143360 - DNA, 25 bp, Homo sapien
cccacttgtgtgtcctatttgcctc

SEQ ID NO: 143361 - DNA, 25 bp, Homo sapien
ttggaatagttctcaggtgagtctc

SEQ ID NO: 143362 - DNA, 25 bp, Homo sapien
tattgggcagattagaaaatgcatg

SEQ ID NO: 143363 - DNA, 25 bp, Homo sapien
aatgcatgacttggaatagttctca

SEQ ID NO: 143364 - DNA, 25 bp, Homo sapien
attctggaaatattgggcagattag

SEQ ID NO: 143365 - DNA, 25 bp, Homo sapien
cactttactcaaattgtagaaggag

SEQ ID NO: 143366 - DNA, 25 bp, Homo sapien
tgtagaaggagtgtgattccagctg

SEQ ID NO: 143367 - DNA, 25 bp, Homo sapien
tttactcaaattgtagaaggagtgt

SEQ ID NO: 143368 - DNA, 25 bp, Homo sapien
agtcactttactcaaattgtagaag

SEQ ID NO: 143369 - DNA, 25 bp, Homo sapien
gcaattttactatgatgtgcctcga

SEQ ID NO: 143370 - DNA, 25 bp, Homo sapien
ttactatgatgtgcctcgatgtagc

SEQ ID NO: 143371 - DNA, 25 bp, Homo sapien
tgtagctttcttcgtatttatcctt

SEQ ID NO: 143372 - DNA, 25 bp, Homo sapien
tatgatgtgcctcgatgtagctttc

SEQ ID NO: 143373 - DNA, 25 bp, Homo sapien
aaaagggtgtgcttacatgcctggc

SEQ ID NO: 143374 - DNA, 25 bp, Homo sapien
tacatggttgttcagggttccaagg

SEQ ID NO: 143375 - DNA, 25 bp, Homo sapien
aattgctagaaggttaggctcagct

SEQ ID NO: 143376 - DNA, 25 bp, Homo sapien
catcagtgcagttggacgtcttaca

SEQ ID NO: 143377 - DNA, 25 bp, Homo sapien
tatcctcgctgaagttactacccag

SEQ ID NO: 143378 - DNA, 25 bp, Homo sapien
tacttttagtggagtgctggcccac

SEQ ID NO: 143379 - DNA, 25 bp, Homo sapien
ggcattcagaacttggtcactatta

SEQ ID NO: 143380 - DNA, 25 bp, Homo sapien
ttttcggtccaaacagtatcctcgc

SEQ ID NO: 143381 - DNA, 25 bp, Homo sapien
gaacacagtcactataatgcatccg

SEQ ID NO: 143382 - DNA, 25 bp, Homo sapien
caaggaacacagtcactataatgca

SEQ ID NO: 143383 - DNA, 25 bp, Homo sapien
gtcactataatgcatccgtatctgt

SEQ ID NO: 143384 - DNA, 25 bp, Homo sapien
tgtataagttacaaggaacacagtc

SEQ ID NO: 143385 - DNA, 25 bp, Homo sapien
ctttaggagggggagctctttgagg

SEQ ID NO: 143386 - DNA, 25 bp, Homo sapien
gcatcagggtctatgtaagttaagt

SEQ ID NO: 143387 - DNA, 25 bp, Homo sapien
gagggcatcagggtctatgtaagtt

SEQ ID NO: 143388 - DNA, 25 bp, Homo sapien
tcagggtctatgtaagttaagttcc

SEQ ID NO: 143389 - DNA, 25 bp, Homo sapien
atatcagtggaataaactttggtca

SEQ ID NO: 143390 - DNA, 25 bp, Homo sapien
aatatatcagtggaataaactttgg

SEQ ID NO: 143391 - DNA, 25 bp, Homo sapien
atatatcagtggaataaactttggt

SEQ ID NO: 143392 - DNA, 25 bp, Homo sapien
tatatcagtggaataaactttggtc

SEQ ID NO: 143393 - DNA, 25 bp, Homo sapien
gacgtcatgtaagggttgtctgtaa

SEQ ID NO: 143394 - DNA, 25 bp, Homo sapien
agcattcacagggattgacgtcatg

SEQ ID NO: 143395 - DNA, 25 bp, Homo sapien
ttcattgcatagtccctgaaaagca

SEQ ID NO: 143396 - DNA, 25 bp, Homo sapien
agtgtcaaggtttcattgcatagtc

SEQ ID NO: 143397 - DNA, 25 bp, Homo sapien
ccattgaaagcatatccttggactg

SEQ ID NO: 143398 - DNA, 25 bp, Homo sapien
gctttgtcccattgaaagcatatcc

SEQ ID NO: 143399 - DNA, 25 bp, Homo sapien
gcatccagctttgtcccattgaaag

SEQ ID NO: 143400 - DNA, 25 bp, Homo sapien
tgtcccattgaaagcatatccttgg

SEQ ID NO: 143401 - DNA, 25 bp, Homo sapien
ttcatctggaagctcacgaatggct

SEQ ID NO: 143402 - DNA, 25 bp, Homo sapien
cagcattggtaaagtcaggttctcg

SEQ ID NO: 143403 - DNA, 25 bp, Homo sapien
ttatcgccgaccagacttcatctgg

SEQ ID NO: 143404 - DNA, 25 bp, Homo sapien
aaacttctcctgattatgcctcgag

SEQ ID NO: 143405 - DNA, 25 bp, Homo sapien
tgtcaggtatttattcttgtttagg

SEQ ID NO: 143406 - DNA, 25 bp, Homo sapien
ctttgtcaataactgtcaggtattt

SEQ ID NO: 143407 - DNA, 25 bp, Homo sapien
ataactgtcaggtatttattcttgt

SEQ ID NO: 143408 - DNA, 25 bp, Homo sapien
tcaggtatttattcttgtttaggta

SEQ ID NO: 143409 - DNA, 25 bp, Homo sapien
gcaagcttggtccactgtatactcc

SEQ ID NO: 143410 - DNA, 25 bp, Homo sapien
agcaagcttggtccactgtatactc

SEQ ID NO: 143411 - DNA, 25 bp, Homo sapien
aagcttggtccactgtatactcctc

SEQ ID NO: 143412 - DNA, 25 bp, Homo sapien
gcttggtccactgtatactcctcca

SEQ ID NO: 143413 - DNA, 25 bp, Homo sapien
aggacaaggactttcttccaagagg

SEQ ID NO: 143414 - DNA, 25 bp, Homo sapien
aaggacaaggactttcttccaagag

SEQ ID NO: 143415 - DNA, 25 bp, Homo sapien
tgatggcatactggagcgtggggcc

SEQ ID NO: 143416 - DNA, 25 bp, Homo sapien
catgatggcatactggagcgtgggg

SEQ ID NO: 143417 - DNA, 25 bp, Homo sapien
tcatgatggcatactggagcgtggg

SEQ ID NO: 143418 - DNA, 25 bp, Homo sapien
atggcatactggagcgtggggcctt

SEQ ID NO: 143419 - DNA, 25 bp, Homo sapien
gtacaccaaggtggctgccttagca

SEQ ID NO: 143420 - DNA, 25 bp, Homo sapien
tctgtgagcatgtacaccaaggtgg

SEQ ID NO: 143421 - DNA, 25 bp, Homo sapien
ctgctccatgaacagagcctctgtg

SEQ ID NO: 143422 - DNA, 25 bp, Homo sapien
tccatgaacagagcctctgtgagca

SEQ ID NO: 143423 - DNA, 25 bp, Homo sapien
cattgtgcaatgtacattcaggtac

SEQ ID NO: 143424 - DNA, 25 bp, Homo sapien
cagacgagtcgaactatcatttata

SEQ ID NO: 143425 - DNA, 25 bp, Homo sapien
tagagtgccttccatctagttgtgg

SEQ ID NO: 143426 - DNA, 25 bp, Homo sapien
gattgtaagttcttccacagacgag

SEQ ID NO: 143427 - DNA, 25 bp, Homo sapien
ctaagaggttcgatatggatggacc

SEQ ID NO: 143428 - DNA, 25 bp, Homo sapien
gatggaccattgatcagaggcgtaa

SEQ ID NO: 143429 - DNA, 25 bp, Homo sapien
gattatggcaatgccttgcaagcca

SEQ ID NO: 143430 - DNA, 25 bp, Homo sapien
tggagacgctaatcatctagactac

SEQ ID NO: 143431 - DNA, 25 bp, Homo sapien
cctattgacctctcacatgctgaca

SEQ ID NO: 143432 - DNA, 25 bp, Homo sapien
tattgacctctcacatgctgacatc

SEQ ID NO: 143433 - DNA, 25 bp, Homo sapien
ttttctcctattgacctctcacatg

SEQ ID NO: 143434 - DNA, 25 bp, Homo sapien
tctcctattgacctctcacatgctg

SEQ ID NO: 143435 - DNA, 25 bp, Homo sapien
caaggatattattacagagatttcc

SEQ ID NO: 143436 - DNA, 25 bp, Homo sapien
ggaggtacttactcaacaatatgct

SEQ ID NO: 143437 - DNA, 25 bp, Homo sapien
tctgactctagatattgcacctgct

SEQ ID NO: 143438 - DNA, 25 bp, Homo sapien
gaaatatgacagtgccatgaccctt

SEQ ID NO: 143439 - DNA, 25 bp, Homo sapien
gtataaaatgctcataccttgctgg

SEQ ID NO: 143440 - DNA, 25 bp, Homo sapien
gctgacaagtgcataaaaagatgct

SEQ ID NO: 143441 - DNA, 25 bp, Homo sapien
caatgagagacccattagaatggct

SEQ ID NO: 143442 - DNA, 25 bp, Homo sapien
gaaaaatagcatgtctatgggaggt

SEQ ID NO: 143443 - DNA, 25 bp, Homo sapien
gtctctcttgcccttgccctacgtt

SEQ ID NO: 143444 - DNA, 25 bp, Homo sapien
cagggcttgaagcttcgatgtcctt

SEQ ID NO: 143445 - DNA, 25 bp, Homo sapien
gcttgaagcttcgatgtccttgtgg

SEQ ID NO: 143446 - DNA, 25 bp, Homo sapien
cactttccagggcttgaagcttcga

SEQ ID NO: 143447 - DNA, 25 bp, Homo sapien
taagtctccatggactcattaggaa

SEQ ID NO: 143448 - DNA, 25 bp, Homo sapien
cagatccaggtgcagtaagtctcca

SEQ ID NO: 143449 - DNA, 25 bp, Homo sapien
ccaagggtggagtcataagtatcat

SEQ ID NO: 143450 - DNA, 25 bp, Homo sapien
gcatttttatgaagcgggcagatac

SEQ ID NO: 143451 - DNA, 25 bp, Homo sapien
gcccgtgtgaggtgaaggaaactca

SEQ ID NO: 143452 - DNA, 25 bp, Homo sapien
aaaggtcagcccgtgtgaggtgaag

SEQ ID NO: 143453 - DNA, 25 bp, Homo sapien
cttgctatcagttccttcaggtgct

SEQ ID NO: 143454 - DNA, 25 bp, Homo sapien
ggtgtttcttgctatcagttccttc

SEQ ID NO: 143455 - DNA, 25 bp, Homo sapien
tgatgaccgtcagcgtatacaccga

SEQ ID NO: 143456 - DNA, 25 bp, Homo sapien
cagtgaagaaaccagccgtgttgca

SEQ ID NO: 143457 - DNA, 25 bp, Homo sapien
cgcatggcgaaggtgatggcatacc

SEQ ID NO: 143458 - DNA, 25 bp, Homo sapien
cacgggttgaactcatcggacttgg

SEQ ID NO: 143459 - DNA, 25 bp, Homo sapien
tgtccatgggcaggcagatactgac

SEQ ID NO: 143460 - DNA, 25 bp, Homo sapien
ctcggtgtccatgggcaggcagata

SEQ ID NO: 143461 - DNA, 25 bp, Homo sapien
cggtgtccatgggcaggcagatact

SEQ ID NO: 143462 - DNA, 25 bp, Homo sapien
gtgtccatgggcaggcagatactga

SEQ ID NO: 143463 - DNA, 25 bp, Homo sapien
cataacagcagcagacgatgacgaa

SEQ ID NO: 143464 - DNA, 25 bp, Homo sapien
caaaaacaatatatgccagagcaag

SEQ ID NO: 143465 - DNA, 25 bp, Homo sapien
cgatgacgaaggcaactatgttgag

SEQ ID NO: 143466 - DNA, 25 bp, Homo sapien
tgttgagcgtcagaacaaaaacaat

SEQ ID NO: 143467 - DNA, 25 bp, Homo sapien
cctgggttgtactgcggatttcgga

SEQ ID NO: 143468 - DNA, 25 bp, Homo sapien
catgcatatgaagtcggtgaagatc

SEQ ID NO: 143469 - DNA, 25 bp, Homo sapien
gaagatcaacacagccatcctcttg

SEQ ID NO: 143470 - DNA, 25 bp, Homo sapien
caaacttgctgagtaggatgaacac

SEQ ID NO: 143471 - DNA, 25 bp, Homo sapien
ctcttctgagatttggccttgcttc

SEQ ID NO: 143472 - DNA, 25 bp, Homo sapien
agacatcttccatgttgtggagacc

SEQ ID NO: 143473 - DNA, 25 bp, Homo sapien
tggagaccctgcctcatctcgtggg

SEQ ID NO: 143474 - DNA, 25 bp, Homo sapien
aaccgtttgcatatactcttctgag

SEQ ID NO: 143475 - DNA, 25 bp, Homo sapien
gaaacatcgcctgcacaagagtgag

SEQ ID NO: 143476 - DNA, 25 bp, Homo sapien
gacatctctggacttggcatcaaga

SEQ ID NO: 143477 - DNA, 25 bp, Homo sapien
tgtaagttcccctaccattgtgagt

SEQ ID NO: 143478 - DNA, 25 bp, Homo sapien
tatcataccgtggactggaaatggc

SEQ ID NO: 143479 - DNA, 25 bp, Homo sapien
ctgtgtctgtgtgctattgatgtgc

SEQ ID NO: 143480 - DNA, 25 bp, Homo sapien
tgatggtaacgcctcaatgatcagg

SEQ ID NO: 143481 - DNA, 25 bp, Homo sapien
gaatgagaatagctaatgtcagcag

SEQ ID NO: 143482 - DNA, 25 bp, Homo sapien
caggcttcacttatgtgtgagggca

SEQ ID NO: 143483 - DNA, 25 bp, Homo sapien
gcccttgaggtcaatctttaaattg

SEQ ID NO: 143484 - DNA, 25 bp, Homo sapien
tctcctagagaattgaggcttggat

SEQ ID NO: 143485 - DNA, 25 bp, Homo sapien
gaaaattctcctagagaattgaggc

SEQ ID NO: 143486 - DNA, 25 bp, Homo sapien
taatatagctcttgctgagcaactt

SEQ ID NO: 143487 - DNA, 25 bp, Homo sapien
aacacgtaactggtcaatattcatg

SEQ ID NO: 143488 - DNA, 25 bp, Homo sapien
aactggacttatctaggtcacaggg

SEQ ID NO: 143489 - DNA, 25 bp, Homo sapien
gctcagctgcccaacaactggactt

SEQ ID NO: 143490 - DNA, 25 bp, Homo sapien
tctgtccattttgggccattactgc

SEQ ID NO: 143491 - DNA, 25 bp, Homo sapien
gggttacagcctcgcatgagcacgc

SEQ ID NO: 143492 - DNA, 25 bp, Homo sapien
gttagatagcattaatacaggtgtc

SEQ ID NO: 143493 - DNA, 25 bp, Homo sapien
gtgtgggccaccgttcctgaactag

SEQ ID NO: 143494 - DNA, 25 bp, Homo sapien
catgaaatggctgtcgtagaattat

SEQ ID NO: 143495 - DNA, 25 bp, Homo sapien
tgtgccagcaatcctaaactatgtc

SEQ ID NO: 143496 - DNA, 25 bp, Homo sapien
tatgtcaatgatagaacaccttccc

SEQ ID NO: 143497 - DNA, 25 bp, Homo sapien
agaatggtggttactccggactgga

SEQ ID NO: 143498 - DNA, 25 bp, Homo sapien
cagttagcgttgagagtgtttttcc

SEQ ID NO: 143499 - DNA, 25 bp, Homo sapien
gctacacctgttaataagaggctgt

SEQ ID NO: 143500 - DNA, 25 bp, Homo sapien
ttctgttcagaggagatattctggg

SEQ ID NO: 143501 - DNA, 25 bp, Homo sapien
ttagctacacctgttaataagaggc

SEQ ID NO: 143502 - DNA, 25 bp, Homo sapien
gccaacctggtctcttgtttctgtt

SEQ ID NO: 143503 - DNA, 25 bp, Homo sapien
ttcctcatgagtttgttaaatagct

SEQ ID NO: 143504 - DNA, 25 bp, Homo sapien
aatagctttgcattttagtcctcta

SEQ ID NO: 143505 - DNA, 25 bp, Homo sapien
gtcaaggttccttaatcagtccagt

SEQ ID NO: 143506 - DNA, 25 bp, Homo sapien
gggaagttactacacattgagttag

SEQ ID NO: 143507 - DNA, 25 bp, Homo sapien
gaccatttgaatgcctgagagcatg

SEQ ID NO: 143508 - DNA, 25 bp, Homo sapien
tggtggccatttgggtaatcagacc

SEQ ID NO: 143509 - DNA, 25 bp, Homo sapien
cacagatggcgatggcaccttttac

SEQ ID NO: 143510 - DNA, 25 bp, Homo sapien
ggcagaaaatagttcggacttggta

SEQ ID NO: 143511 - DNA, 25 bp, Homo sapien
ggtgtctagcatgctagtagttaga

SEQ ID NO: 143512 - DNA, 25 bp, Homo sapien
actttggtgttaatggtggtgtcta

SEQ ID NO: 143513 - DNA, 25 bp, Homo sapien
gatgccataactggtaatacagctt

SEQ ID NO: 143514 - DNA, 25 bp, Homo sapien
gtcagtgacctgaactacctataaa

SEQ ID NO: 143515 - DNA, 25 bp, Homo sapien
tttgccggtttaccactcttcaggc

SEQ ID NO: 143516 - DNA, 25 bp, Homo sapien
tgccggtttaccactcttcaggcaa

SEQ ID NO: 143517 - DNA, 25 bp, Homo sapien
tgccgaacttatttggacacctgat

SEQ ID NO: 143518 - DNA, 25 bp, Homo sapien
cttttgccggtttaccactcttcag

SEQ ID NO: 143519 - DNA, 25 bp, Homo sapien
gggcagtagatggatttcattcaga

SEQ ID NO: 143520 - DNA, 25 bp, Homo sapien
gcagtccagggcagtagatggattt

SEQ ID NO: 143521 - DNA, 25 bp, Homo sapien
agggcagtagatggatttcattcag

SEQ ID NO: 143522 - DNA, 25 bp, Homo sapien
acaagtactgatggaactaaaaact

SEQ ID NO: 143523 - DNA, 25 bp, Homo sapien
gatgtcattaatgatgtgagagaca

SEQ ID NO: 143524 - DNA, 25 bp, Homo sapien
atgaacaagtactgatggaactaaa

SEQ ID NO: 143525 - DNA, 25 bp, Homo sapien
ggaatatatccgaatcgctgtccct

SEQ ID NO: 143526 - DNA, 25 bp, Homo sapien
tctaatatagactctgccaggatgg

SEQ ID NO: 143527 - DNA, 25 bp, Homo sapien
tgtgatttcgcacccgtcgcgggct

SEQ ID NO: 143528 - DNA, 25 bp, Homo sapien
ccagatccggctttaaatagtgaga

SEQ ID NO: 143529 - DNA, 25 bp, Homo sapien
tccctttggctgccctgtttatata

SEQ ID NO: 143530 - DNA, 25 bp, Homo sapien
ctttggctgccctgtttatatagag

SEQ ID NO: 143531 - DNA, 25 bp, Homo sapien
ggctgccctgtttatatagagccat

SEQ ID NO: 143532 - DNA, 25 bp, Homo sapien
agtccctgagccttgtggtcctcct

SEQ ID NO: 143533 - DNA, 25 bp, Homo sapien
tctcgcggtgtctcgcgctcagccc

SEQ ID NO: 143534 - DNA, 25 bp, Homo sapien
cgcggtgtctcgcgctcagccccgc

SEQ ID NO: 143535 - DNA, 25 bp, Homo sapien
ctcgcggtgtctcgcgctcagcccc

SEQ ID NO: 143536 - DNA, 25 bp, Homo sapien
tcgcggtgtctcgcgctcagccccg

SEQ ID NO: 143537 - DNA, 25 bp, Homo sapien
ggtgccaaccacgtgatcacgcgag

SEQ ID NO: 143538 - DNA, 25 bp, Homo sapien
gcaacgctttgcaagttcttcaccg

SEQ ID NO: 143539 - DNA, 25 bp, Homo sapien
gtagaactcccgtcttttccagcaa

SEQ ID NO: 143540 - DNA, 25 bp, Homo sapien
gagaggcgtaggtccgatttcacta

SEQ ID NO: 143541 - DNA, 25 bp, Homo sapien
cattcctagcgaggcagtaggcacc

SEQ ID NO: 143542 - DNA, 25 bp, Homo sapien
ccttcccgaataggaacgcgccaga

SEQ ID NO: 143543 - DNA, 25 bp, Homo sapien
gatgactccgcatttaaaaccttcc

SEQ ID NO: 143544 - DNA, 25 bp, Homo sapien
gaacgcgccagaggccggaagccac

SEQ ID NO: 143545 - DNA, 25 bp, Homo sapien
ggcgcgaacgccgcgaagctcacag

SEQ ID NO: 143546 - DNA, 25 bp, Homo sapien
gaagctcacagtcaaagcctcgctg

SEQ ID NO: 143547 - DNA, 25 bp, Homo sapien
cctcggtgaggcggtgaggcgcgaa

SEQ ID NO: 143548 - DNA, 25 bp, Homo sapien
ggtgaggcgcgaacgccgcgaagct

SEQ ID NO: 143549 - DNA, 25 bp, Homo sapien
aacaaacgaatcagacgttactaat

SEQ ID NO: 143550 - DNA, 25 bp, Homo sapien
tcagacgttactaattgtggaatgt

SEQ ID NO: 143551 - DNA, 25 bp, Homo sapien
gacgttactaattgtggaatgttaa

SEQ ID NO: 143552 - DNA, 25 bp, Homo sapien
acgaatcagacgttactaattgtgg

SEQ ID NO: 143553 - DNA, 25 bp, Homo sapien
tgggtaacataagcctagtcttcgc

SEQ ID NO: 143554 - DNA, 25 bp, Homo sapien
ctctgggtaacataagcctagtctt

SEQ ID NO: 143555 - DNA, 25 bp, Homo sapien
taacataagcctagtcttcgcagcg

SEQ ID NO: 143556 - DNA, 25 bp, Homo sapien
aagcctagtcttcgcagcgtaccca

SEQ ID NO: 143557 - DNA, 25 bp, Homo sapien
gaattgaacatggaacacagccggc

SEQ ID NO: 143558 - DNA, 25 bp, Homo sapien
gatcagtcactatacgttggccaca

SEQ ID NO: 143559 - DNA, 25 bp, Homo sapien
tcttatagcgagaggccatgcgagt

SEQ ID NO: 143560 - DNA, 25 bp, Homo sapien
tgtgctgttacaatccaaaggctgg

SEQ ID NO: 143561 - DNA, 25 bp, Homo sapien
tctttggtaagacgcctttgatatt

SEQ ID NO: 143562 - DNA, 25 bp, Homo sapien
ctctttggtaagacgcctttgatat

SEQ ID NO: 143563 - DNA, 25 bp, Homo sapien
cttcaaatctggtttcaccagcaca

SEQ ID NO: 143564 - DNA, 25 bp, Homo sapien
tctggtttctctaatccctttcttc

SEQ ID NO: 143565 - DNA, 25 bp, Homo sapien
ctgttaacaggggaatggacttggc

SEQ ID NO: 143566 - DNA, 25 bp, Homo sapien
gctgtgcaggaaactgggaagcaac

SEQ ID NO: 143567 - DNA, 25 bp, Homo sapien
tggacttggcgtgaaaagaaatgtc

SEQ ID NO: 143568 - DNA, 25 bp, Homo sapien
aatgtcaaggttcatagatatcctc

SEQ ID NO: 143569 - DNA, 25 bp, Homo sapien
agagagaagccaactcagagcctcc

SEQ ID NO: 143570 - DNA, 25 bp, Homo sapien
agagaagccaactcagagcctccag

SEQ ID NO: 143571 - DNA, 25 bp, Homo sapien
cacagattaattctgtgaagagcaa

SEQ ID NO: 143572 - DNA, 25 bp, Homo sapien
tttaatccagtaactacaatccatt

SEQ ID NO: 143573 - DNA, 25 bp, Homo sapien
catataacagctattgagggactgg

SEQ ID NO: 143574 - DNA, 25 bp, Homo sapien
tctttccgaaactaaactggatggc

SEQ ID NO: 143575 - DNA, 25 bp, Homo sapien
tccatgatggctagatgccagacac

SEQ ID NO: 143576 - DNA, 25 bp, Homo sapien
actggatggcacacatatgttgcaa

SEQ ID NO: 143577 - DNA, 25 bp, Homo sapien
gtgtaagatcacaaacagcaaatcc

SEQ ID NO: 143578 - DNA, 25 bp, Homo sapien
tagaaagagctgttaaagttagaaa

SEQ ID NO: 143579 - DNA, 25 bp, Homo sapien
cacaaggagagtactattatgtatc

SEQ ID NO: 143580 - DNA, 25 bp, Homo sapien
catagctgctacaaagtgtaagatc

SEQ ID NO: 143581 - DNA, 25 bp, Homo sapien
tcattaagataagtgagccctgttc

SEQ ID NO: 143582 - DNA, 25 bp, Homo sapien
cctcagctggtagtgctgggctaat

SEQ ID NO: 143583 - DNA, 25 bp, Homo sapien
tgacggtcatcttcagtaactgcct

SEQ ID NO: 143584 - DNA, 25 bp, Homo sapien
gaaatatgcaggagtagcgcaggaa

SEQ ID NO: 143585 - DNA, 25 bp, Homo sapien
cagaagtaggtctaaccctccaagt

SEQ ID NO: 143586 - DNA, 25 bp, Homo sapien
cacagacaggtctccaaaatagatg

SEQ ID NO: 143587 - DNA, 25 bp, Homo sapien
gatcaaaccctcaattctagttggg

SEQ ID NO: 143588 - DNA, 25 bp, Homo sapien
actgttgcgcctccatgtgctttgg

SEQ ID NO: 143589 - DNA, 25 bp, Homo sapien
caaggtctaagtgctaattccccac

SEQ ID NO: 143590 - DNA, 25 bp, Homo sapien
gactggctttagatatcatgactca

SEQ ID NO: 143591 - DNA, 25 bp, Homo sapien
tgtataaggcaaccacaaatgtaga

SEQ ID NO: 143592 - DNA, 25 bp, Homo sapien
tagtgtgccttagcaaatctgctgg

SEQ ID NO: 143593 - DNA, 25 bp, Homo sapien
ttcaaaaccatcatgggccaagggt

SEQ ID NO: 143594 - DNA, 25 bp, Homo sapien
acaggaatttcaagcaaaactaaca

SEQ ID NO: 143595 - DNA, 25 bp, Homo sapien
catgtccagaatgcaatttaacagg

SEQ ID NO: 143596 - DNA, 25 bp, Homo sapien
agggttggacaagctagccttaggt

SEQ ID NO: 143597 - DNA, 25 bp, Homo sapien
tccctttggactgacaaccagggcc

SEQ ID NO: 143598 - DNA, 25 bp, Homo sapien
ttccctttggactgacaaccagggc

SEQ ID NO: 143599 - DNA, 25 bp, Homo sapien
gaacttggtgacttgaacatctgta

SEQ ID NO: 143600 - DNA, 25 bp, Homo sapien
tgaatgccttagattcaatgtgcct

SEQ ID NO: 143601 - DNA, 25 bp, Homo sapien
tcttgagtcgttttcattggaggca

SEQ ID NO: 143602 - DNA, 25 bp, Homo sapien
gcaaagaatacttaactctatggcc

SEQ ID NO: 143603 - DNA, 25 bp, Homo sapien
ttaaaatcttggatccaagtgagac

SEQ ID NO: 143604 - DNA, 25 bp, Homo sapien
caggaagagcctgtgtgtattgaga

SEQ ID NO: 143605 - DNA, 25 bp, Homo sapien
agactttccatcactacaggaagag

SEQ ID NO: 143606 - DNA, 25 bp, Homo sapien
catccgaagggatactgagcctatt

SEQ ID NO: 143607 - DNA, 25 bp, Homo sapien
tgtcagtgcaatgcagcagcgtatc

SEQ ID NO: 143608 - DNA, 25 bp, Homo sapien
gaaacaggaggtttcctgtccatct

SEQ ID NO: 143609 - DNA, 25 bp, Homo sapien
gaaagagatgtcagtgcaatgcagc

SEQ ID NO: 143610 - DNA, 25 bp, Homo sapien
ctgtccatctctgccgtgaaagaga

SEQ ID NO: 143611 - DNA, 25 bp, Homo sapien
gatatcagtggcacccgttgactca

SEQ ID NO: 143612 - DNA, 25 bp, Homo sapien
agaagacagagacatagtcctcaaa

SEQ ID NO: 143613 - DNA, 25 bp, Homo sapien
ctaatagggaacaagtactcgaggg

SEQ ID NO: 143614 - DNA, 25 bp, Homo sapien
gacagagacatagtcctcaaatcct

SEQ ID NO: 143615 - DNA, 25 bp, Homo sapien
tctgtgcaggcaacttaaggattcc

SEQ ID NO: 143616 - DNA, 25 bp, Homo sapien
catatccaggtttctagagctgcag

SEQ ID NO: 143617 - DNA, 25 bp, Homo sapien
gtacggagcagcctatgcttaacat

SEQ ID NO: 143618 - DNA, 25 bp, Homo sapien
gcttaacatatccaggtttctagag

SEQ ID NO: 143619 - DNA, 25 bp, Homo sapien
tttgacctatgccagatgactctga

SEQ ID NO: 143620 - DNA, 25 bp, Homo sapien
ttgacctatgccagatgactctgaa

SEQ ID NO: 143621 - DNA, 25 bp, Homo sapien
tgacctatgccagatgactctgaat

SEQ ID NO: 143622 - DNA, 25 bp, Homo sapien
ggtttgacctatgccagatgactct

SEQ ID NO: 143623 - DNA, 25 bp, Homo sapien
tgcccgcagcaggaacgcttcattc

SEQ ID NO: 143624 - DNA, 25 bp, Homo sapien
ctgagacaattgaaggtgttttgtt

SEQ ID NO: 143625 - DNA, 25 bp, Homo sapien
cgcagcaggaacgcttcattcattt

SEQ ID NO: 143626 - DNA, 25 bp, Homo sapien
tttttgattgtgtttagatggcaga

SEQ ID NO: 143627 - DNA, 25 bp, Homo sapien
caaggcaaagtccataggcactggg

SEQ ID NO: 143628 - DNA, 25 bp, Homo sapien
aaattcagcctaaaagtgactccag

SEQ ID NO: 143629 - DNA, 25 bp, Homo sapien
cactgggagactgttgagaatcctg

SEQ ID NO: 143630 - DNA, 25 bp, Homo sapien
aagaatgtgccccttggacaaggca

SEQ ID NO: 143631 - DNA, 25 bp, Homo sapien
tgcttcctccaaaccaacaagttat

SEQ ID NO: 143632 - DNA, 25 bp, Homo sapien
catgcttcctccaaaccaacaagtt

SEQ ID NO: 143633 - DNA, 25 bp, Homo sapien
tccctcagctgtattactgccatgc

SEQ ID NO: 143634 - DNA, 25 bp, Homo sapien
gcctttgtttatgaacacccatgct

SEQ ID NO: 143635 - DNA, 25 bp, Homo sapien
caaaaatcagggtggccaatgccat

SEQ ID NO: 143636 - DNA, 25 bp, Homo sapien
tgctgggtgcatactctgaggttgc

SEQ ID NO: 143637 - DNA, 25 bp, Homo sapien
caacatgaggtcttggaacagaacc

SEQ ID NO: 143638 - DNA, 25 bp, Homo sapien
ggcttttaggaacacagcgtggcaa

SEQ ID NO: 143639 - DNA, 25 bp, Homo sapien
aataaagtcacattcgtacgttctg

SEQ ID NO: 143640 - DNA, 25 bp, Homo sapien
ataaagtcacattcgtacgttctgg

SEQ ID NO: 143641 - DNA, 25 bp, Homo sapien
gaaatccaaagtcaacatgtcagtg

SEQ ID NO: 143642 - DNA, 25 bp, Homo sapien
agtggggtttcttctagttgctggc

SEQ ID NO: 143643 - DNA, 25 bp, Homo sapien
aatccaaagtcaacatgtcagtggg

SEQ ID NO: 143644 - DNA, 25 bp, Homo sapien
gtcagtggggtttcttctagttgct

SEQ ID NO: 143645 - DNA, 25 bp, Homo sapien
gaaggcaacagtaccgtacctaaga

SEQ ID NO: 143646 - DNA, 25 bp, Homo sapien
gccaaagttggtgtcgctaaaaaga

SEQ ID NO: 143647 - DNA, 25 bp, Homo sapien
gaccaaccaacgacttcagaggaaa

SEQ ID NO: 143648 - DNA, 25 bp, Homo sapien
gaaatgaggtgtctagcagtgagct

SEQ ID NO: 143649 - DNA, 25 bp, Homo sapien
tggtcctgattccctcaaccttggg

SEQ ID NO: 143650 - DNA, 25 bp, Homo sapien
tgtggtcctgattccctcaaccttg

SEQ ID NO: 143651 - DNA, 25 bp, Homo sapien
gtgactttcatgtcctgttgagctg

SEQ ID NO: 143652 - DNA, 25 bp, Homo sapien
ggtgactttcatgtcctgttgagct

SEQ ID NO: 143653 - DNA, 25 bp, Homo sapien
tccagtgcggatttctctgtgcttc

SEQ ID NO: 143654 - DNA, 25 bp, Homo sapien
gcattgccgcttgacttgtgttggg

SEQ ID NO: 143655 - DNA, 25 bp, Homo sapien
ggtctccacttataacaggatggct

SEQ ID NO: 143656 - DNA, 25 bp, Homo sapien
tgcctcactgacataggcattgccg

SEQ ID NO: 143657 - DNA, 25 bp, Homo sapien
tgtggcattttgctgcagaattgga

SEQ ID NO: 143658 - DNA, 25 bp, Homo sapien
gaagcatatggaatcataccccttg

SEQ ID NO: 143659 - DNA, 25 bp, Homo sapien
tatatatggaaaaagagcatcagtt

SEQ ID NO: 143660 - DNA, 25 bp, Homo sapien
cataccccttgaatcttttatgaaa

SEQ ID NO: 143661 - DNA, 25 bp, Homo sapien
gacctgagtttactaggaatgaaga

SEQ ID NO: 143662 - DNA, 25 bp, Homo sapien
ggaggtgctaagcatcgcccggctg

SEQ ID NO: 143663 - DNA, 25 bp, Homo sapien
gggaggtgctaagcatcgcccggct

SEQ ID NO: 143664 - DNA, 25 bp, Homo sapien
aggtgctaagcatcgcccggctgga

SEQ ID NO: 143665 - DNA, 25 bp, Homo sapien
tggggaggtgctaagcatcgcccgg

SEQ ID NO: 143666 - DNA, 25 bp, Homo sapien
cgcactccaccgagttctgctgcgt

SEQ ID NO: 143667 - DNA, 25 bp, Homo sapien
actccaccgagttctgctgcgtctc

SEQ ID NO: 143668 - DNA, 25 bp, Homo sapien
cactccaccgagttctgctgcgtct

SEQ ID NO: 143669 - DNA, 25 bp, Homo sapien
tccaccgagttctgctgcgtctctt

SEQ ID NO: 143670 - DNA, 25 bp, Homo sapien
taaaggttcgaacatcgaggtgttc

SEQ ID NO: 143671 - DNA, 25 bp, Homo sapien
tggatggaccactggtgggtggcac

SEQ ID NO: 143672 - DNA, 25 bp, Homo sapien
aataaaggttcgaacatcgaggtgt

SEQ ID NO: 143673 - DNA, 25 bp, Homo sapien
acaataaaggttcgaacatcgaggt

SEQ ID NO: 143674 - DNA, 25 bp, Homo sapien
tgcctccggtaccttctctcactac

SEQ ID NO: 143675 - DNA, 25 bp, Homo sapien
ctgaagttgtccactgtgttgaccc

SEQ ID NO: 143676 - DNA, 25 bp, Homo sapien
gaagttgtccactgtgttgaccctg

SEQ ID NO: 143677 - DNA, 25 bp, Homo sapien
cctgcctccggtaccttctctcact

SEQ ID NO: 143678 - DNA, 25 bp, Homo sapien
tgtggtacacactcttcgtgggcat

SEQ ID NO: 143679 - DNA, 25 bp, Homo sapien
tgtgtggtacacactcttcgtgggc

SEQ ID NO: 143680 - DNA, 25 bp, Homo sapien
gactgtgtggtacacactcttcgtg

SEQ ID NO: 143681 - DNA, 25 bp, Homo sapien
agactgtgtggtacacactcttcgt

SEQ ID NO: 143682 - DNA, 25 bp, Homo sapien
ctgttgactgaaatggcccagatga

SEQ ID NO: 143683 - DNA, 25 bp, Homo sapien
acaccttggctgacgattatagcag

SEQ ID NO: 143684 - DNA, 25 bp, Homo sapien
gaggttggtcatagctttggtcaca

SEQ ID NO: 143685 - DNA, 25 bp, Homo sapien
tagcagcggtgtcctctgttcaggg

SEQ ID NO: 143686 - DNA, 25 bp, Homo sapien
ttaagttcccgattcctgagcaggc

SEQ ID NO: 143687 - DNA, 25 bp, Homo sapien
tgtgctgtctgcaacacagccagct

SEQ ID NO: 143688 - DNA, 25 bp, Homo sapien
catcaacctaattggcataggcggg

SEQ ID NO: 143689 - DNA, 25 bp, Homo sapien
catgctctgcttccggttgatttta

SEQ ID NO: 143690 - DNA, 25 bp, Homo sapien
ggtgaggcagtcagctgcgctcaca

SEQ ID NO: 143691 - DNA, 25 bp, Homo sapien
ccctcgtgatttcatcagttcccaa

SEQ ID NO: 143692 - DNA, 25 bp, Homo sapien
gatttcatcagttcccaagtgtttg

SEQ ID NO: 143693 - DNA, 25 bp, Homo sapien
gacaagaaccccctcgtgatttcat

SEQ ID NO: 143694 - DNA, 25 bp, Homo sapien
cctggaactggcaccttgcacagct

SEQ ID NO: 143695 - DNA, 25 bp, Homo sapien
gagctcctggaactggcaccttgca

SEQ ID NO: 143696 - DNA, 25 bp, Homo sapien
ccagcaagagctcctggaactggca

SEQ ID NO: 143697 - DNA, 25 bp, Homo sapien
tggaactggcaccttgcacagctga

SEQ ID NO: 143698 - DNA, 25 bp, Homo sapien
tcctgggggaccaccgctgagcgac

SEQ ID NO: 143699 - DNA, 25 bp, Homo sapien
gttggaaggtgggagctgaagaggt

SEQ ID NO: 143700 - DNA, 25 bp, Homo sapien
cttatatagcagacgtcctcctggg

SEQ ID NO: 143701 - DNA, 25 bp, Homo sapien
agcttctcacggatgtggaaagaac

SEQ ID NO: 143702 - DNA, 25 bp, Homo sapien
ggcaaaatctgagggacaggtgctc

SEQ ID NO: 143703 - DNA, 25 bp, Homo sapien
ctggggtaggcaaaatctgagggac

SEQ ID NO: 143704 - DNA, 25 bp, Homo sapien
gtaggcaaaatctgagggacaggtg

SEQ ID NO: 143705 - DNA, 25 bp, Homo sapien
aaaatctgagggacaggtgctcccc

SEQ ID NO: 143706 - DNA, 25 bp, Homo sapien
tccactagagggcacaaaagggcta

SEQ ID NO: 143707 - DNA, 25 bp, Homo sapien
tacatctgaggcaaagtttaggcga

SEQ ID NO: 143708 - DNA, 25 bp, Homo sapien
tgactgcagttaccgtaatttccac

SEQ ID NO: 143709 - DNA, 25 bp, Homo sapien
ggttcctcggaaaagtatgactgca

SEQ ID NO: 143710 - DNA, 25 bp, Homo sapien
cagaggttcggactaacatttcaca

SEQ ID NO: 143711 - DNA, 25 bp, Homo sapien
taaagagccgttgatgcctccagga

SEQ ID NO: 143712 - DNA, 25 bp, Homo sapien
tggcattgtgaaggaacaccatggt

SEQ ID NO: 143713 - DNA, 25 bp, Homo sapien
tgaaaagaagctctccacccacttg

SEQ ID NO: 143714 - DNA, 25 bp, Homo sapien
tatctgtgaaaggtaggaaacttac

SEQ ID NO: 143715 - DNA, 25 bp, Homo sapien
gagccatatgtatgaaagcgtatct

SEQ ID NO: 143716 - DNA, 25 bp, Homo sapien
ggcaactcttgtaaatagtgagact

SEQ ID NO: 143717 - DNA, 25 bp, Homo sapien
ttggtacagtactttggtgtctcca

SEQ ID NO: 143718 - DNA, 25 bp, Homo sapien
tgaaatatcattgccagggtatggc

SEQ ID NO: 143719 - DNA, 25 bp, Homo sapien
agccactgcttagctatcatagtca

SEQ ID NO: 143720 - DNA, 25 bp, Homo sapien
tcaaagatggattaaactcagtggt

SEQ ID NO: 143721 - DNA, 25 bp, Homo sapien
caaggctactatgcttcaggattgt

SEQ ID NO: 143722 - DNA, 25 bp, Homo sapien
tgagaaactcttaccagtccacatg

SEQ ID NO: 143723 - DNA, 25 bp, Homo sapien
catctttaaggtattgtgcatcgac

SEQ ID NO: 143724 - DNA, 25 bp, Homo sapien
gaaggaagttatctgctgggaacac

SEQ ID NO: 143725 - DNA, 25 bp, Homo sapien
gaactgactccttgcactaacgcga

SEQ ID NO: 143726 - DNA, 25 bp, Homo sapien
cctctgcaaattgggcgtcgtctat

SEQ ID NO: 143727 - DNA, 25 bp, Homo sapien
tgaagccagcccagatgcacaagtt

SEQ ID NO: 143728 - DNA, 25 bp, Homo sapien
ttgcagtacatacgggaaacaaacg

SEQ ID NO: 143729 - DNA, 25 bp, Homo sapien
tataggatattcaccttgcgaaacg

SEQ ID NO: 143730 - DNA, 25 bp, Homo sapien
agccaccttgaatgtagcagtacct

SEQ ID NO: 143731 - DNA, 25 bp, Homo sapien
taaactggtcaccttgcatccagcc

SEQ ID NO: 143732 - DNA, 25 bp, Homo sapien
tctatgtacccctaacgcacctggg

SEQ ID NO: 143733 - DNA, 25 bp, Homo sapien
attctgtatcttagtaagggcagcc

SEQ ID NO: 143734 - DNA, 25 bp, Homo sapien
gactcacgcgctgattccggttgaa

SEQ ID NO: 143735 - DNA, 25 bp, Homo sapien
tgggagcttcgtacaatgattggcc

SEQ ID NO: 143736 - DNA, 25 bp, Homo sapien
aaatcttgccctacgatggactacg

SEQ ID NO: 143737 - DNA, 25 bp, Homo sapien
tgtccgtgagtcgtggtccaaccga

SEQ ID NO: 143738 - DNA, 25 bp, Homo sapien
gaacgttctttctgagctacttcca

SEQ ID NO: 143739 - DNA, 25 bp, Homo sapien
tgtctgaacgttctttctgagctac

SEQ ID NO: 143740 - DNA, 25 bp, Homo sapien
tatatgtttctactctgtctgaacg

SEQ ID NO: 143741 - DNA, 25 bp, Homo sapien
tactctgtctgaacgttctttctga

SEQ ID NO: 143742 - DNA, 25 bp, Homo sapien
gtacctggtaagtttctgtgtacat

SEQ ID NO: 143743 - DNA, 25 bp, Homo sapien
tgtacctggtaagtttctgtgtaca

SEQ ID NO: 143744 - DNA, 25 bp, Homo sapien
caggtgtacctggtaagtttctgtg

SEQ ID NO: 143745 - DNA, 25 bp, Homo sapien
cttcaggtgtacctggtaagtttct

SEQ ID NO: 143746 - DNA, 25 bp, Homo sapien
gtggtggctggaagcacattccagc

SEQ ID NO: 143747 - DNA, 25 bp, Homo sapien
ccaagacaacgggccacatcaggaa

SEQ ID NO: 143748 - DNA, 25 bp, Homo sapien
tctccaagacaacgggccacatcag

SEQ ID NO: 143749 - DNA, 25 bp, Homo sapien
tgttctccaagacaacgggccacat

SEQ ID NO: 143750 - DNA, 25 bp, Homo sapien
tcacaggaggcaagagagctttcct

SEQ ID NO: 143751 - DNA, 25 bp, Homo sapien
ggtgagttaaaccataaagaggaca

SEQ ID NO: 143752 - DNA, 25 bp, Homo sapien
taaaccataaagaggacattcctgc

SEQ ID NO: 143753 - DNA, 25 bp, Homo sapien
tccaaagtatagtagagagggaacg

SEQ ID NO: 143754 - DNA, 25 bp, Homo sapien
tggctgttcgcagccctttgatgag

SEQ ID NO: 143755 - DNA, 25 bp, Homo sapien
tcctgggtagtctgaagttgctggc

SEQ ID NO: 143756 - DNA, 25 bp, Homo sapien
agttgctggctgttcgcagcccttt

SEQ ID NO: 143757 - DNA, 25 bp, Homo sapien
tgatgagttcctggaagtctctttc

SEQ ID NO: 143758 - DNA, 25 bp, Homo sapien
acggaaggaaagctgacatcttgct

SEQ ID NO: 143759 - DNA, 25 bp, Homo sapien
ttacacggaaggaaagctgacatct

SEQ ID NO: 143760 - DNA, 25 bp, Homo sapien
tacacggaaggaaagctgacatctt

SEQ ID NO: 143761 - DNA, 25 bp, Homo sapien
cacggaaggaaagctgacatcttgc

SEQ ID NO: 143762 - DNA, 25 bp, Homo sapien
gaccttgggcttcggtagatttctc

SEQ ID NO: 143763 - DNA, 25 bp, Homo sapien
tagctatagagctatcctcactcat

SEQ ID NO: 143764 - DNA, 25 bp, Homo sapien
ctccagtcccatgtgtagctataga

SEQ ID NO: 143765 - DNA, 25 bp, Homo sapien
cttcccattgctcagtgaccttggg

SEQ ID NO: 143766 - DNA, 25 bp, Homo sapien
catgagaagagagctacccggttgt

SEQ ID NO: 143767 - DNA, 25 bp, Homo sapien
cagtcaattacctgcaagctcacaa

SEQ ID NO: 143768 - DNA, 25 bp, Homo sapien
tagcatgtggcatctcgtggacacc

SEQ ID NO: 143769 - DNA, 25 bp, Homo sapien
cataaatgcttggtcaatggacaac

SEQ ID NO: 143770 - DNA, 25 bp, Homo sapien
tcttcctcgggccttcccattgtag

SEQ ID NO: 143771 - DNA, 25 bp, Homo sapien
gggccttcccattgtagcctctttg

SEQ ID NO: 143772 - DNA, 25 bp, Homo sapien
tcgggccttcccattgtagcctctt

SEQ ID NO: 143773 - DNA, 25 bp, Homo sapien
gccttcccattgtagcctctttgta

SEQ ID NO: 143774 - DNA, 25 bp, Homo sapien
gtgacaggcgccacccacctgcagg

SEQ ID NO: 143775 - DNA, 25 bp, Homo sapien
agtgacaggcgccacccacctgcag

SEQ ID NO: 143776 - DNA, 25 bp, Homo sapien
cagtgacaggcgccacccacctgca

SEQ ID NO: 143777 - DNA, 25 bp, Homo sapien
caaagcctcttgataggtcagagta

SEQ ID NO: 143778 - DNA, 25 bp, Homo sapien
gcctcttgataggtcagagtacagg

SEQ ID NO: 143779 - DNA, 25 bp, Homo sapien
cctcttgataggtcagagtacagga

SEQ ID NO: 143780 - DNA, 25 bp, Homo sapien
aagcctcttgataggtcagagtaca

SEQ ID NO: 143781 - DNA, 25 bp, Homo sapien
tcctccaaccccctctttaatgtga

SEQ ID NO: 143782 - DNA, 25 bp, Homo sapien
ttaatgtgaacacccagctattcca

SEQ ID NO: 143783 - DNA, 25 bp, Homo sapien
ctggcaggactccggagtctgcatt

SEQ ID NO: 143784 - DNA, 25 bp, Homo sapien
ttgtgtgctagttctgtggagagct

SEQ ID NO: 143785 - DNA, 25 bp, Homo sapien
caagggcaagacttcatgaggttct

SEQ ID NO: 143786 - DNA, 25 bp, Homo sapien
ttgttgcttgacataaagatgttca

SEQ ID NO: 143787 - DNA, 25 bp, Homo sapien
tatgtccctttcattgattgtaggc

SEQ ID NO: 143788 - DNA, 25 bp, Homo sapien
cacttggcaaagacctgagtcgtaa

SEQ ID NO: 143789 - DNA, 25 bp, Homo sapien
tctaagtagaatgagacaggagatg

SEQ ID NO: 143790 - DNA, 25 bp, Homo sapien
gaatgagtcctcttattttctaagt

SEQ ID NO: 143791 - DNA, 25 bp, Homo sapien
tagaatgagacaggagatgcacagc

SEQ ID NO: 143792 - DNA, 25 bp, Homo sapien
gcttctgctaatgaagtgaggctga

SEQ ID NO: 143793 - DNA, 25 bp, Homo sapien
tactgccacctatattagccttcct

SEQ ID NO: 143794 - DNA, 25 bp, Homo sapien
tcagttactgccacctatattagcc

SEQ ID NO: 143795 - DNA, 25 bp, Homo sapien
ttagccttcctattaaccatgtgac

SEQ ID NO: 143796 - DNA, 25 bp, Homo sapien
gccacctatattagccttcctatta

SEQ ID NO: 143797 - DNA, 25 bp, Homo sapien
tggctttccccctcctcctctccca

SEQ ID NO: 143798 - DNA, 25 bp, Homo sapien
caggctgttgtctaattgagtcacc

SEQ ID NO: 143799 - DNA, 25 bp, Homo sapien
acagaacggacagccaccaggctgt

SEQ ID NO: 143800 - DNA, 25 bp, Homo sapien
tattctccttggagacagaacggac

SEQ ID NO: 143801 - DNA, 25 bp, Homo sapien
gtctaattgagtcaccttgcaaaag

SEQ ID NO: 143802 - DNA, 25 bp, Homo sapien
cttgctggcatcttcctgcaagagg

SEQ ID NO: 143803 - DNA, 25 bp, Homo sapien
caagaggttgatgggacaggatggc

SEQ ID NO: 143804 - DNA, 25 bp, Homo sapien
ggatggctgggggcagctcaaatac

SEQ ID NO: 143805 - DNA, 25 bp, Homo sapien
ctgcaagaggttgatgggacaggat

SEQ ID NO: 143806 - DNA, 25 bp, Homo sapien
taggacactatctggattgatacca

SEQ ID NO: 143807 - DNA, 25 bp, Homo sapien
aatctaggacactatctggattgat

SEQ ID NO: 143808 - DNA, 25 bp, Homo sapien
tcaaatctaggacactatctggatt

SEQ ID NO: 143809 - DNA, 25 bp, Homo sapien
tggattgataccactctcagcaaac

SEQ ID NO: 143810 - DNA, 25 bp, Homo sapien
agagatctgtgtgggtgtgtcttct

SEQ ID NO: 143811 - DNA, 25 bp, Homo sapien
tgtcttctgggtggtcccacactct

SEQ ID NO: 143812 - DNA, 25 bp, Homo sapien
actcccaaggcccaccgtagagaag

SEQ ID NO: 143813 - DNA, 25 bp, Homo sapien
caaggagagatctgtgtgggtgtgt

SEQ ID NO: 143814 - DNA, 25 bp, Homo sapien
cagtcttgcaatttccattctatgc

SEQ ID NO: 143815 - DNA, 25 bp, Homo sapien
cattctatgcaaagccaatgctatc

SEQ ID NO: 143816 - DNA, 25 bp, Homo sapien
aatgctatcattccctctagccagc

SEQ ID NO: 143817 - DNA, 25 bp, Homo sapien
gccagctccataagtaatgaggttt

SEQ ID NO: 143818 - DNA, 25 bp, Homo sapien
cagaagcctccaccacttccaggag

SEQ ID NO: 143819 - DNA, 25 bp, Homo sapien
gaagcctccaccacttccaggagga

SEQ ID NO: 143820 - DNA, 25 bp, Homo sapien
gaggatgaggttgggcaggacctac

SEQ ID NO: 143821 - DNA, 25 bp, Homo sapien
ctccaccacttccaggaggatgagg

SEQ ID NO: 143822 - DNA, 25 bp, Homo sapien
accagaaggaggcaaaatcacactg

SEQ ID NO: 143823 - DNA, 25 bp, Homo sapien
agaaggaggcaaaatcacactgagc

SEQ ID NO: 143824 - DNA, 25 bp, Homo sapien
ttcaatttaccagccatgaagaggt

SEQ ID NO: 143825 - DNA, 25 bp, Homo sapien
ttgttcaatttaccagccatgaaga

SEQ ID NO: 143826 - DNA, 25 bp, Homo sapien
gaggcccattgcatcagggtgagaa

SEQ ID NO: 143827 - DNA, 25 bp, Homo sapien
ttgcatcagggtgagaagggactat

SEQ ID NO: 143828 - DNA, 25 bp, Homo sapien
cccattgcatcagggtgagaaggga

SEQ ID NO: 143829 - DNA, 25 bp, Homo sapien
cattgcatcagggtgagaagggact

SEQ ID NO: 143830 - DNA, 25 bp, Homo sapien
aaatcttagctatggtgaacaatgc

SEQ ID NO: 143831 - DNA, 25 bp, Homo sapien
aatgacatcaatgttggttggagtc

SEQ ID NO: 143832 - DNA, 25 bp, Homo sapien
gtccaatgacatcaatgttggttgg

SEQ ID NO: 143833 - DNA, 25 bp, Homo sapien
gaacctaagtgtccaatgacatcaa

SEQ ID NO: 143834 - DNA, 25 bp, Homo sapien
cctaagtgtccaatgacatcaatgt

SEQ ID NO: 143835 - DNA, 25 bp, Homo sapien
ctaagatatgcctgtaaccatgttt

SEQ ID NO: 143836 - DNA, 25 bp, Homo sapien
gctcaggctcagcttttagtttatc

SEQ ID NO: 143837 - DNA, 25 bp, Homo sapien
atagggagatatcaatgatgacatc

SEQ ID NO: 143838 - DNA, 25 bp, Homo sapien
gatatgcctgtaaccatgtttttga

SEQ ID NO: 143839 - DNA, 25 bp, Homo sapien
cattgccatctttacggacgacttt

SEQ ID NO: 143840 - DNA, 25 bp, Homo sapien
gatagtatcagtaccaccaactctg

SEQ ID NO: 143841 - DNA, 25 bp, Homo sapien
gatagtatcagtaccaccaagtctg

SEQ ID NO: 143842 - DNA, 25 bp, Homo sapien
ccaaggatttgttgtttcacaccca

SEQ ID NO: 143843 - DNA, 25 bp, Homo sapien
aatgcaacgtcaggcataaagggtg

SEQ ID NO: 143844 - DNA, 25 bp, Homo sapien
cattgaagcttacattgtccctagg

SEQ ID NO: 143845 - DNA, 25 bp, Homo sapien
tattcatgtaaccttccgagctttc

SEQ ID NO: 143846 - DNA, 25 bp, Homo sapien
cccagaggagtattgtgagagaagc

SEQ ID NO: 143847 - DNA, 25 bp, Homo sapien
aatttgatgtcaagccacgggcagg

SEQ ID NO: 143848 - DNA, 25 bp, Homo sapien
ggaatgaatagatctgcctgccagc

SEQ ID NO: 143849 - DNA, 25 bp, Homo sapien
tccccgctttccactgggagttgag

SEQ ID NO: 143850 - DNA, 25 bp, Homo sapien
cactgcttccaagaggcccgtagtt

SEQ ID NO: 143851 - DNA, 25 bp, Homo sapien
gtggcactgagatcaaagaaaatta

SEQ ID NO: 143852 - DNA, 25 bp, Homo sapien
caaccctcataaagaaagtccaatt

SEQ ID NO: 143853 - DNA, 25 bp, Homo sapien
cctctccaaccctcataaagaaagt

SEQ ID NO: 143854 - DNA, 25 bp, Homo sapien
ctccaaccctcataaagaaagtcca

SEQ ID NO: 143855 - DNA, 25 bp, Homo sapien
ttagacgtaggagtccatgatggag

SEQ ID NO: 143856 - DNA, 25 bp, Homo sapien
cgacaaaccactacagaatcccttt

SEQ ID NO: 143857 - DNA, 25 bp, Homo sapien
tgtgtagcgcagtaggtagttctca

SEQ ID NO: 143858 - DNA, 25 bp, Homo sapien
tggcagccacagcaaaatgccgaca

SEQ ID NO: 143859 - DNA, 25 bp, Homo sapien
ggtggaaacatacatactgcagtgc

SEQ ID NO: 143860 - DNA, 25 bp, Homo sapien
tgctgagactgttcgccagaatcaa

SEQ ID NO: 143861 - DNA, 25 bp, Homo sapien
tcagctggtgcaatgggcatcatag

SEQ ID NO: 143862 - DNA, 25 bp, Homo sapien
caatgggcatcatagggtgctgaga

SEQ ID NO: 143863 - DNA, 25 bp, Homo sapien
tttccttttgggcactgtctctttc

SEQ ID NO: 143864 - DNA, 25 bp, Homo sapien
ggaataaagacctgacctatcactg

SEQ ID NO: 143865 - DNA, 25 bp, Homo sapien
gactgttcatcacaatgcccacctg

SEQ ID NO: 143866 - DNA, 25 bp, Homo sapien
tgcccacctgttcactggctgtaag

SEQ ID NO: 143867 - DNA, 25 bp, Homo sapien
caaagcacgtactaatgttttaaca

SEQ ID NO: 143868 - DNA, 25 bp, Homo sapien
ttttaacagctgtagtggttaagca

SEQ ID NO: 143869 - DNA, 25 bp, Homo sapien
tgtagtggttaagcattcttctgtt

SEQ ID NO: 143870 - DNA, 25 bp, Homo sapien
aagcacgtactaatgttttaacagc

SEQ ID NO: 143871 - DNA, 25 bp, Homo sapien
gtgtacaacatgaggactaacgtta

SEQ ID NO: 143872 - DNA, 25 bp, Homo sapien
gatagatgtatcagtcagcttcact

SEQ ID NO: 143873 - DNA, 25 bp, Homo sapien
ttaagtaagtagaatttagctgcac

SEQ ID NO: 143874 - DNA, 25 bp, Homo sapien
taacgtcatgttttaagcctcaaat

SEQ ID NO: 143875 - DNA, 25 bp, Homo sapien
ttaatgatttccttctatcgtccat

SEQ ID NO: 143876 - DNA, 25 bp, Homo sapien
tgtaattaatgatttccttctatcg

SEQ ID NO: 143877 - DNA, 25 bp, Homo sapien
taattaatgatttccttctatcgtc

SEQ ID NO: 143878 - DNA, 25 bp, Homo sapien
cccttgtaattaatgatttccttct

SEQ ID NO: 143879 - DNA, 25 bp, Homo sapien
agtagtccactggtaggcgtttcat

SEQ ID NO: 143880 - DNA, 25 bp, Homo sapien
ctgcttttgggtagtagtccactgg

SEQ ID NO: 143881 - DNA, 25 bp, Homo sapien
tttgggtagtagtccactggtaggc

SEQ ID NO: 143882 - DNA, 25 bp, Homo sapien
gtagtagtccactggtaggcgtttc

SEQ ID NO: 143883 - DNA, 25 bp, Homo sapien
tgagcttccatgaccactcacagct

SEQ ID NO: 143884 - DNA, 25 bp, Homo sapien
agcttccatgaccactcacagctgt

SEQ ID NO: 143885 - DNA, 25 bp, Homo sapien
ttggttttgaagtactgtgttggcc

SEQ ID NO: 143886 - DNA, 25 bp, Homo sapien
tttggttttgaagtactgtgttggc

SEQ ID NO: 143887 - DNA, 25 bp, Homo sapien
gatagagtctatcattggatcattt

SEQ ID NO: 143888 - DNA, 25 bp, Homo sapien
ggatcatttaattggatcagctcac

SEQ ID NO: 143889 - DNA, 25 bp, Homo sapien
caacttgtctaagatagagtctatc

SEQ ID NO: 143890 - DNA, 25 bp, Homo sapien
tctgtcctatactcttccaacttgt

SEQ ID NO: 143891 - DNA, 25 bp, Homo sapien
tccctctcgagtgacaggaggtgga

SEQ ID NO: 143892 - DNA, 25 bp, Homo sapien
aaagtggtagaatctctttcccagg

SEQ ID NO: 143893 - DNA, 25 bp, Homo sapien
gacagatttccctctcgagtgacag

SEQ ID NO: 143894 - DNA, 25 bp, Homo sapien
gatttccctctcgagtgacaggagg

SEQ ID NO: 143895 - DNA, 25 bp, Homo sapien
gaactctgcagagagacttcactca

SEQ ID NO: 143896 - DNA, 25 bp, Homo sapien
ctctgcagagagacttcactcatat

SEQ ID NO: 143897 - DNA, 25 bp, Homo sapien
cactcatattaatgtagaactcggt

SEQ ID NO: 143898 - DNA, 25 bp, Homo sapien
actctgcagagagacttcactcata

SEQ ID NO: 143899 - DNA, 25 bp, Homo sapien
aatgaagtgggcctgcaaagctatc

SEQ ID NO: 143900 - DNA, 25 bp, Homo sapien
cccagtatgtttctaggtcttcaat

SEQ ID NO: 143901 - DNA, 25 bp, Homo sapien
gaaatggctgaaatagagccagcag

SEQ ID NO: 143902 - DNA, 25 bp, Homo sapien
aacatggcattgtggtaccataggg

SEQ ID NO: 143903 - DNA, 25 bp, Homo sapien
ttgcttatgggaatagaaatgtgag

SEQ ID NO: 143904 - DNA, 25 bp, Homo sapien
cttgcttatgggaatagaaatgtga

SEQ ID NO: 143905 - DNA, 25 bp, Homo sapien
ggacccaacattcagattaaggggc

SEQ ID NO: 143906 - DNA, 25 bp, Homo sapien
ccaacattcagattaaggggctctt

SEQ ID NO: 143907 - DNA, 25 bp, Homo sapien
aggaagagagcctcatacccaggct

SEQ ID NO: 143908 - DNA, 25 bp, Homo sapien
atacccaggctcataaccctcagtg

SEQ ID NO: 143909 - DNA, 25 bp, Homo sapien
ccagggacacaggtgtgcagctcat

SEQ ID NO: 143910 - DNA, 25 bp, Homo sapien
cagccagggacacaggtgtgcagct

SEQ ID NO: 143911 - DNA, 25 bp, Homo sapien
ggcagccagccagggacacaggtgt

SEQ ID NO: 143912 - DNA, 25 bp, Homo sapien
ctcttcccactgtgtggagggcagc

SEQ ID NO: 143913 - DNA, 25 bp, Homo sapien
gaatgaggtttaactgctccagttc

SEQ ID NO: 143914 - DNA, 25 bp, Homo sapien
gaaagttttccgctcttggcagtag

SEQ ID NO: 143915 - DNA, 25 bp, Homo sapien
gctgagataatgagcttgttctttc

SEQ ID NO: 143916 - DNA, 25 bp, Homo sapien
ttggcagtagcaccagtaccctgga

SEQ ID NO: 143917 - DNA, 25 bp, Homo sapien
tagcagcatggaaacacttacccaa

SEQ ID NO: 143918 - DNA, 25 bp, Homo sapien
ggcccagtgcaagtcacaacacgta

SEQ ID NO: 143919 - DNA, 25 bp, Homo sapien
tatgacacaggaatcacatagtgcg

SEQ ID NO: 143920 - DNA, 25 bp, Homo sapien
tctgttaaagggaccaacacacctg

SEQ ID NO: 143921 - DNA, 25 bp, Homo sapien
tttctcctaccaaattcacaataaa

SEQ ID NO: 143922 - DNA, 25 bp, Homo sapien
acatcttcgaaaccctccaaacatc

SEQ ID NO: 143923 - DNA, 25 bp, Homo sapien
atcttcgaaaccctccaaacatctg

SEQ ID NO: 143924 - DNA, 25 bp, Homo sapien
ctaccaaattcacaataaagaatag

SEQ ID NO: 143925 - DNA, 25 bp, Homo sapien
ctaataccttctgcaactttgcgga

SEQ ID NO: 143926 - DNA, 25 bp, Homo sapien
ccttctgcaactttgcggagctatt

SEQ ID NO: 143927 - DNA, 25 bp, Homo sapien
actttgcggagctattacctgtgtg

SEQ ID NO: 143928 - DNA, 25 bp, Homo sapien
ttacctgtgtgaccaacaacccatc

SEQ ID NO: 143929 - DNA, 25 bp, Homo sapien
gggccctacacgcatttcccaaaga

SEQ ID NO: 143930 - DNA, 25 bp, Homo sapien
ggccctacacgcatttcccaaagag

SEQ ID NO: 143931 - DNA, 25 bp, Homo sapien
ttggggccctacacgcatttcccaa

SEQ ID NO: 143932 - DNA, 25 bp, Homo sapien
ctacacgcatttcccaaagagcaac

SEQ ID NO: 143933 - DNA, 25 bp, Homo sapien
agtcactcaaaatttcaccaaacat

SEQ ID NO: 143934 - DNA, 25 bp, Homo sapien
tcctgtcttaaagtcactcaaaatt

SEQ ID NO: 143935 - DNA, 25 bp, Homo sapien
taaagtcactcaaaatttcaccaaa

SEQ ID NO: 143936 - DNA, 25 bp, Homo sapien
cttaaagtcactcaaaatttcacca

SEQ ID NO: 143937 - DNA, 25 bp, Homo sapien
gataagtatagggatcataagcctc

SEQ ID NO: 143938 - DNA, 25 bp, Homo sapien
aatcatcgcgagataagacatggct

SEQ ID NO: 143939 - DNA, 25 bp, Homo sapien
aaggccctgcttttggatctccata

SEQ ID NO: 143940 - DNA, 25 bp, Homo sapien
catagtcgcccagataagtataggg

SEQ ID NO: 143941 - DNA, 25 bp, Homo sapien
tgataggtttgctattcatactgac

SEQ ID NO: 143942 - DNA, 25 bp, Homo sapien
ctgataggtttgctattcatactga

SEQ ID NO: 143943 - DNA, 25 bp, Homo sapien
ctagatggagtttttgatcacttca

SEQ ID NO: 143944 - DNA, 25 bp, Homo sapien
gatggagtttttgatcacttcaggc

SEQ ID NO: 143945 - DNA, 25 bp, Homo sapien
gagtttttgatcacttcaggcatta

SEQ ID NO: 143946 - DNA, 25 bp, Homo sapien
tggagtttttgatcacttcaggcat

SEQ ID NO: 143947 - DNA, 25 bp, Homo sapien
aaatccgagacagttttgcgtaaat

SEQ ID NO: 143948 - DNA, 25 bp, Homo sapien
aatccgagacagttttgcgtaaata

SEQ ID NO: 143949 - DNA, 25 bp, Homo sapien
caaatccgagacagttttgcgtaaa

SEQ ID NO: 143950 - DNA, 25 bp, Homo sapien
tcaaatccgagacagttttgcgtaa

SEQ ID NO: 143951 - DNA, 25 bp, Homo sapien
atacaccttctggtcaatgacatca

SEQ ID NO: 143952 - DNA, 25 bp, Homo sapien
gagcaatggcttcagcctcgggcca

SEQ ID NO: 143953 - DNA, 25 bp, Homo sapien
tggcttcagcctcgggccaaggtgt

SEQ ID NO: 143954 - DNA, 25 bp, Homo sapien
gaatctttcagtcagcttggtccag

SEQ ID NO: 143955 - DNA, 25 bp, Homo sapien
atatgtgcctgtagtataattcttt

SEQ ID NO: 143956 - DNA, 25 bp, Homo sapien
agggaaggaggaccatcaacattaa

SEQ ID NO: 143957 - DNA, 25 bp, Homo sapien
gaagagattgcaattgttataatag

SEQ ID NO: 143958 - DNA, 25 bp, Homo sapien
gattgcaattgttataataggattc

SEQ ID NO: 143959 - DNA, 25 bp, Homo sapien
aggaggaccatcaacattaagaata

SEQ ID NO: 143960 - DNA, 25 bp, Homo sapien
ctggtagatgaactcatcaatgata

SEQ ID NO: 143961 - DNA, 25 bp, Homo sapien
tgaaactggtagatgaactcatcaa

SEQ ID NO: 143962 - DNA, 25 bp, Homo sapien
aactggtagatgaactcatcaatga

SEQ ID NO: 143963 - DNA, 25 bp, Homo sapien
gaaactggtagatgaactcatcaat

SEQ ID NO: 143964 - DNA, 25 bp, Homo sapien
ccaactgtcggttgatgttggattt

SEQ ID NO: 143965 - DNA, 25 bp, Homo sapien
ctccaactgtcggttgatgttggat

SEQ ID NO: 143966 - DNA, 25 bp, Homo sapien
caactgtcggttgatgttggatttg

SEQ ID NO: 143967 - DNA, 25 bp, Homo sapien
gattgcaggcagagaaaccccacaa

SEQ ID NO: 143968 - DNA, 25 bp, Homo sapien
ttgcaggcagagaaaccccacaagg

SEQ ID NO: 143969 - DNA, 25 bp, Homo sapien
acagggattgcaggcagagaaaccc

SEQ ID NO: 143970 - DNA, 25 bp, Homo sapien
gggattgcaggcagagaaaccccac

SEQ ID NO: 143971 - DNA, 25 bp, Homo sapien
tctggttcagctcgatgttctctag

SEQ ID NO: 143972 - DNA, 25 bp, Homo sapien
ggttcagctcgatgttctctagcac

SEQ ID NO: 143973 - DNA, 25 bp, Homo sapien
tggttcagctcgatgttctctagca

SEQ ID NO: 143974 - DNA, 25 bp, Homo sapien
ctggttcagctcgatgttctctagc

SEQ ID NO: 143975 - DNA, 25 bp, Homo sapien
gataatagtatgtggtgacctggca

SEQ ID NO: 143976 - DNA, 25 bp, Homo sapien
ctggtagcaatgcatcatcaaatac

SEQ ID NO: 143977 - DNA, 25 bp, Homo sapien
ggtagcaatgcatcatcaaatacgc

SEQ ID NO: 143978 - DNA, 25 bp, Homo sapien
caaatacgcaaacccaagataatag

SEQ ID NO: 143979 - DNA, 25 bp, Homo sapien
tattggtgaagacctggatggcgtc

SEQ ID NO: 143980 - DNA, 25 bp, Homo sapien
ggatattggtgaagacctggatggc

SEQ ID NO: 143981 - DNA, 25 bp, Homo sapien
atattggtgaagacctggatggcgt

SEQ ID NO: 143982 - DNA, 25 bp, Homo sapien
gatattggtgaagacctggatggcg

SEQ ID NO: 143983 - DNA, 25 bp, Homo sapien
tctgcttgcgcagcaacttgtcccc

SEQ ID NO: 143984 - DNA, 25 bp, Homo sapien
ttgcgcagcaacttgtccccatatt

SEQ ID NO: 143985 - DNA, 25 bp, Homo sapien
gatatgcatggggtacatcatgagg

SEQ ID NO: 143986 - DNA, 25 bp, Homo sapien
tcatcgatatgcatggggtacatca

SEQ ID NO: 143987 - DNA, 25 bp, Homo sapien
ggagtaactgaaaagttcttcatag

SEQ ID NO: 143988 - DNA, 25 bp, Homo sapien
agtaactgaaaagttcttcatagac

SEQ ID NO: 143989 - DNA, 25 bp, Homo sapien
ggcaggagtaactgaaaagttcttc

SEQ ID NO: 143990 - DNA, 25 bp, Homo sapien
cttggggcaggagtaactgaaaagt

SEQ ID NO: 143991 - DNA, 25 bp, Homo sapien
gggtacacgttatcatagctgggca

SEQ ID NO: 143992 - DNA, 25 bp, Homo sapien
tgttctgtaaggtccagggagccag

SEQ ID NO: 143993 - DNA, 25 bp, Homo sapien
gcttcatcggaaaacacctccagct

SEQ ID NO: 143994 - DNA, 25 bp, Homo sapien
ctctctgtggtagttggggtacacg

SEQ ID NO: 143995 - DNA, 25 bp, Homo sapien
ccagggctgagatgctgctggtcca

SEQ ID NO: 143996 - DNA, 25 bp, Homo sapien
catccagggctgagatgctgctggt

SEQ ID NO: 143997 - DNA, 25 bp, Homo sapien
gggctgagatgctgctggtccacac

SEQ ID NO: 143998 - DNA, 25 bp, Homo sapien
agggctgagatgctgctggtccaca

SEQ ID NO: 143999 - DNA, 25 bp, Homo sapien
gatatccccatagcgcttggtgacc

SEQ ID NO: 144000 - DNA, 25 bp, Homo sapien
tgaagatatccccatagcgcttggt

SEQ ID NO: 144001 - DNA, 25 bp, Homo sapien
aagatatccccatagcgcttggtga

SEQ ID NO: 144002 - DNA, 25 bp, Homo sapien
ctgatggatgaagatatccccatag

SEQ ID NO: 144003 - DNA, 25 bp, Homo sapien
tgtgttgttgatcattccaagcaac

SEQ ID NO: 144004 - DNA, 25 bp, Homo sapien
ggcatttgtggattcgacctttgtg

SEQ ID NO: 144005 - DNA, 25 bp, Homo sapien
taaacactagcacccgcacacagct

SEQ ID NO: 144006 - DNA, 25 bp, Homo sapien
acagctgacccttggcatttgtgga

SEQ ID NO: 144007 - DNA, 25 bp, Homo sapien
attttcgaaagtaataagacatgtg

SEQ ID NO: 144008 - DNA, 25 bp, Homo sapien
agcctttccacatgattattttcga

SEQ ID NO: 144009 - DNA, 25 bp, Homo sapien
aagacatgtgtgacctggaaaatca

SEQ ID NO: 144010 - DNA, 25 bp, Homo sapien
gaaaatcagcccttccgacgtgtca

SEQ ID NO: 144011 - DNA, 25 bp, Homo sapien
tggctcctgagatgcaggttacctc

SEQ ID NO: 144012 - DNA, 25 bp, Homo sapien
ctggctcctgagatgcaggttacct

SEQ ID NO: 144013 - DNA, 25 bp, Homo sapien
ctcctgagatgcaggttacctccat

SEQ ID NO: 144014 - DNA, 25 bp, Homo sapien
gctcctgagatgcaggttacctcca

SEQ ID NO: 144015 - DNA, 25 bp, Homo sapien
gcctacgtgtatttgctgatctgtc

SEQ ID NO: 144016 - DNA, 25 bp, Homo sapien
gacactggaaataagcccagtacat

SEQ ID NO: 144017 - DNA, 25 bp, Homo sapien
cactggaaataagcccagtacatta

SEQ ID NO: 144018 - DNA, 25 bp, Homo sapien
ataggcagttgtgcctacgtgtatt

SEQ ID NO: 144019 - DNA, 25 bp, Homo sapien
ctccttaacgcctctcaattccact

SEQ ID NO: 144020 - DNA, 25 bp, Homo sapien
tccttaacgcctctcaattccacta

SEQ ID NO: 144021 - DNA, 25 bp, Homo sapien
tgaggacctagataaaacatttccc

SEQ ID NO: 144022 - DNA, 25 bp, Homo sapien
tacagctgcttctcaaggtcaagca

SEQ ID NO: 144023 - DNA, 25 bp, Homo sapien
agcacaccctgctcgaatgagatat

SEQ ID NO: 144024 - DNA, 25 bp, Homo sapien
gaacatggtgccagttctaaacttt

SEQ ID NO: 144025 - DNA, 25 bp, Homo sapien
gatggaacggactagagatgacctc

SEQ ID NO: 144026 - DNA, 25 bp, Homo sapien
cactgctggacaacaagatggaacg

SEQ ID NO: 144027 - DNA, 25 bp, Homo sapien
tcttgttcctcatgtacactgctgg

SEQ ID NO: 144028 - DNA, 25 bp, Homo sapien
ctttgccataaagaggaggctgaac

SEQ ID NO: 144029 - DNA, 25 bp, Homo sapien
atttctctgtattgtgtagtgatac

SEQ ID NO: 144030 - DNA, 25 bp, Homo sapien
acatacaaggtcatgtatttctctg

SEQ ID NO: 144031 - DNA, 25 bp, Homo sapien
tgatccctgagttaatccactttct

SEQ ID NO: 144032 - DNA, 25 bp, Homo sapien
tgaagtatccaacagtccttacata

SEQ ID NO: 144033 - DNA, 25 bp, Homo sapien
tctccaataatcttactcaggctga

SEQ ID NO: 144034 - DNA, 25 bp, Homo sapien
ttctccaataatcttactcaggctg

SEQ ID NO: 144035 - DNA, 25 bp, Homo sapien
tcacaacacaaccagggacttctaa

SEQ ID NO: 144036 - DNA, 25 bp, Homo sapien
cctcatacttagttatcctctcctg

SEQ ID NO: 144037 - DNA, 25 bp, Homo sapien
ggacttctaacatatcctcatactt

SEQ ID NO: 144038 - DNA, 25 bp, Homo sapien
acttctcctactccttgcactgtgg

SEQ ID NO: 144039 - DNA, 25 bp, Homo sapien
catgaattatccattcataattaaa

SEQ ID NO: 144040 - DNA, 25 bp, Homo sapien
tttccatgaattatccattcataat

SEQ ID NO: 144041 - DNA, 25 bp, Homo sapien
catttccatgaattatccattcata

SEQ ID NO: 144042 - DNA, 25 bp, Homo sapien
tccatgaattatccattcataatta

SEQ ID NO: 144043 - DNA, 25 bp, Homo sapien
ttattttcctaggataataagtgct

SEQ ID NO: 144044 - DNA, 25 bp, Homo sapien
attttcctaggataataagtgctca

SEQ ID NO: 144045 - DNA, 25 bp, Homo sapien
ctttattttcctaggataataagtg

SEQ ID NO: 144046 - DNA, 25 bp, Homo sapien
ttttcctaggataataagtgctcat

SEQ ID NO: 144047 - DNA, 25 bp, Homo sapien
ggacataatatcagggacacaggta

SEQ ID NO: 144048 - DNA, 25 bp, Homo sapien
aagtctagtaatgagctgtccctgc

SEQ ID NO: 144049 - DNA, 25 bp, Homo sapien
ctgacagtacttggaatggaagaca

SEQ ID NO: 144050 - DNA, 25 bp, Homo sapien
aagcacactcaaggactgacagtac

SEQ ID NO: 144051 - DNA, 25 bp, Homo sapien
gcaatgatgacagggggacttttca

SEQ ID NO: 144052 - DNA, 25 bp, Homo sapien
actgagcagtgaagaagcaatgatg

SEQ ID NO: 144053 - DNA, 25 bp, Homo sapien
gaaggacactgagcagtgaagaagc

SEQ ID NO: 144054 - DNA, 25 bp, Homo sapien
gcagtgaagaagcaatgatgacagg

SEQ ID NO: 144055 - DNA, 25 bp, Homo sapien
tttccaagaagtacagaactataag

SEQ ID NO: 144056 - DNA, 25 bp, Homo sapien
ggcacagaagatgagtcaaagtctt

SEQ ID NO: 144057 - DNA, 25 bp, Homo sapien
gcacagaagatgagtcaaagtcttt

SEQ ID NO: 144058 - DNA, 25 bp, Homo sapien
aagtacagaactataaggcacagaa

SEQ ID NO: 144059 - DNA, 25 bp, Homo sapien
aatacagcccacctaaggctctctg

SEQ ID NO: 144060 - DNA, 25 bp, Homo sapien
taggtaaggaatcaacacctttatg

SEQ ID NO: 144061 - DNA, 25 bp, Homo sapien
gaatcaacacctttatgtgcaaaag

SEQ ID NO: 144062 - DNA, 25 bp, Homo sapien
ttgaactgttcttgcaaataataca

SEQ ID NO: 144063 - DNA, 25 bp, Homo sapien
ctgctcagtggaaacaacttggaat

SEQ ID NO: 144064 - DNA, 25 bp, Homo sapien
tgtgctgcccaccttctatgctgct

SEQ ID NO: 144065 - DNA, 25 bp, Homo sapien
tccataggacctgcttcccttgtct

SEQ ID NO: 144066 - DNA, 25 bp, Homo sapien
gcttcccttgtctatgtgctgccca

SEQ ID NO: 144067 - DNA, 25 bp, Homo sapien
ttccacctgctaaccttgtgcgctg

SEQ ID NO: 144068 - DNA, 25 bp, Homo sapien
cattgagaggagactgtgcagagca

SEQ ID NO: 144069 - DNA, 25 bp, Homo sapien
ttgtgcgctgtgactctgcatgctg

SEQ ID NO: 144070 - DNA, 25 bp, Homo sapien
tgcaggtcgtttctctgaatgagca

SEQ ID NO: 144071 - DNA, 25 bp, Homo sapien
gcaagtgttttgctattctcctccg

SEQ ID NO: 144072 - DNA, 25 bp, Homo sapien
ggtagcaagtgttttgctattctcc

SEQ ID NO: 144073 - DNA, 25 bp, Homo sapien
agtgttttgctattctcctccgcca

SEQ ID NO: 144074 - DNA, 25 bp, Homo sapien
ctgttagagaggtagcaagtgtttt

SEQ ID NO: 144075 - DNA, 25 bp, Homo sapien
cagtgtggctctaaagtgtcaaaac

SEQ ID NO: 144076 - DNA, 25 bp, Homo sapien
caaaactggggactatgggagttga

SEQ ID NO: 144077 - DNA, 25 bp, Homo sapien
gccccagtgtggctctaaagtgtca

SEQ ID NO: 144078 - DNA, 25 bp, Homo sapien
aaattttcaccggaatcccagctgt

SEQ ID NO: 144079 - DNA, 25 bp, Homo sapien
taaacccttcacatattcctgaacc

SEQ ID NO: 144080 - DNA, 25 bp, Homo sapien
aacccttcacatattcctgaaccat

SEQ ID NO: 144081 - DNA, 25 bp, Homo sapien
aaacccttcacatattcctgaacca

SEQ ID NO: 144082 - DNA, 25 bp, Homo sapien
tcatattttcttccgtggctatgtc

SEQ ID NO: 144083 - DNA, 25 bp, Homo sapien
tatgtctgaacacttacatcttgtg

SEQ ID NO: 144084 - DNA, 25 bp, Homo sapien
cttacatcttgtgtcaaacactaga

SEQ ID NO: 144085 - DNA, 25 bp, Homo sapien
tcttccgtggctatgtctgaacact

SEQ ID NO: 144086 - DNA, 25 bp, Homo sapien
gataagcctctgactgtaagccaaa

SEQ ID NO: 144087 - DNA, 25 bp, Homo sapien
tatcatatgtaatggccctcaagga

SEQ ID NO: 144088 - DNA, 25 bp, Homo sapien
ctatatgaatggacaagagagcttc

SEQ ID NO: 144089 - DNA, 25 bp, Homo sapien
taaatgtcctatggaagatgcaaag

SEQ ID NO: 144090 - DNA, 25 bp, Homo sapien
acactctttctctttcttttcaagt

SEQ ID NO: 144091 - DNA, 25 bp, Homo sapien
tcacactctttctctttcttttcaa

SEQ ID NO: 144092 - DNA, 25 bp, Homo sapien
cacactctttctctttcttttcaag

SEQ ID NO: 144093 - DNA, 25 bp, Homo sapien
atcacactctttctctttcttttca

SEQ ID NO: 144094 - DNA, 25 bp, Homo sapien
tctgatcctataaaaccaggccttt

SEQ ID NO: 144095 - DNA, 25 bp, Homo sapien
tctagcatagcatccagaacccgat

SEQ ID NO: 144096 - DNA, 25 bp, Homo sapien
gaattaatccaatcacgatcactgt

SEQ ID NO: 144097 - DNA, 25 bp, Homo sapien
cactctggaaggaatcccctttact

SEQ ID NO: 144098 - DNA, 25 bp, Homo sapien
tcaaagcaacactaagtggcagaac

SEQ ID NO: 144099 - DNA, 25 bp, Homo sapien
caacttgcatgagagcagcaaatgg

SEQ ID NO: 144100 - DNA, 25 bp, Homo sapien
gcagcaagatgcattggaatatcca

SEQ ID NO: 144101 - DNA, 25 bp, Homo sapien
cagcaaatggcttaacataggagtg

SEQ ID NO: 144102 - DNA, 25 bp, Homo sapien
gagtcagtacctcaccgtgttgtcc

SEQ ID NO: 144103 - DNA, 25 bp, Homo sapien
tgatggcaatcttagtggagacact

SEQ ID NO: 144104 - DNA, 25 bp, Homo sapien
cggtgcagtccctgtactaatcagc

SEQ ID NO: 144105 - DNA, 25 bp, Homo sapien
gttttctatgtaggccaattcccca

SEQ ID NO: 144106 - DNA, 25 bp, Homo sapien
tggaaggctctaaatcccactagag

SEQ ID NO: 144107 - DNA, 25 bp, Homo sapien
cctggaaggctctaaatcccactag

SEQ ID NO: 144108 - DNA, 25 bp, Homo sapien
tgccctggaaggctctaaatcccac

SEQ ID NO: 144109 - DNA, 25 bp, Homo sapien
ggaaggctctaaatcccactagagt

SEQ ID NO: 144110 - DNA, 25 bp, Homo sapien
attaagcccgcccttcctgagtggc

SEQ ID NO: 144111 - DNA, 25 bp, Homo sapien
ttgccaattccagcctgtccttctt

SEQ ID NO: 144112 - DNA, 25 bp, Homo sapien
ttaatagaaactggctaatttcttg

SEQ ID NO: 144113 - DNA, 25 bp, Homo sapien
gataaatgaattctgccattgccaa

SEQ ID NO: 144114 - DNA, 25 bp, Homo sapien
gaacattgcctccttgatcaaagca

SEQ ID NO: 144115 - DNA, 25 bp, Homo sapien
caactatgctgactttctccagcca

SEQ ID NO: 144116 - DNA, 25 bp, Homo sapien
caaagcagtgcttgacaacccaact

SEQ ID NO: 144117 - DNA, 25 bp, Homo sapien
tctccaacgtggactgatgagaaca

SEQ ID NO: 144118 - DNA, 25 bp, Homo sapien
caatccctattcttatgaaccacaa

SEQ ID NO: 144119 - DNA, 25 bp, Homo sapien
tgaaatcccaatccctattcttatg

SEQ ID NO: 144120 - DNA, 25 bp, Homo sapien
tgccaacatcttaaggtttaaggga

SEQ ID NO: 144121 - DNA, 25 bp, Homo sapien
atgagtgtgaaatcccaatccctat

SEQ ID NO: 144122 - DNA, 25 bp, Homo sapien
ccaccacttgtgcttcgtgaatttg

SEQ ID NO: 144123 - DNA, 25 bp, Homo sapien
gaatttgcaatcagtacgaagagaa

SEQ ID NO: 144124 - DNA, 25 bp, Homo sapien
tctttacctgttagccatagccttc

SEQ ID NO: 144125 - DNA, 25 bp, Homo sapien
cctaattgccttggaagctcattga

SEQ ID NO: 144126 - DNA, 25 bp, Homo sapien
tgtacaatgtggactgttttattta

SEQ ID NO: 144127 - DNA, 25 bp, Homo sapien
ctgatgcctgctacaatgtgtacaa

SEQ ID NO: 144128 - DNA, 25 bp, Homo sapien
caatgtgtacaatgtggactgtttt

SEQ ID NO: 144129 - DNA, 25 bp, Homo sapien
tgatgcctgctacaatgtgtacaat

SEQ ID NO: 144130 - DNA, 25 bp, Homo sapien
caggtcttaggagagtctgagcttc

SEQ ID NO: 144131 - DNA, 25 bp, Homo sapien
tttgcgacatttccatacttccagt

SEQ ID NO: 144132 - DNA, 25 bp, Homo sapien
gagcttcagtgaaacaaatctcctg

SEQ ID NO: 144133 - DNA, 25 bp, Homo sapien
catctcaagcatgaagttttgcgac

SEQ ID NO: 144134 - DNA, 25 bp, Homo sapien
ggtacccacatgatgagcaatgttc

SEQ ID NO: 144135 - DNA, 25 bp, Homo sapien
ccacatgatgagcaatgttctttag

SEQ ID NO: 144136 - DNA, 25 bp, Homo sapien
catgggtacccacatgatgagcaat

SEQ ID NO: 144137 - DNA, 25 bp, Homo sapien
gatgagcaatgttctttaggagcaa

SEQ ID NO: 144138 - DNA, 25 bp, Homo sapien
ctcttcccctctccaatatgcaacc

SEQ ID NO: 144139 - DNA, 25 bp, Homo sapien
cctctccaatatgcaaccattccag

SEQ ID NO: 144140 - DNA, 25 bp, Homo sapien
ccagtgtgttcagtgcgttcatttt

SEQ ID NO: 144141 - DNA, 25 bp, Homo sapien
cagtgtgttcagtgcgttcatttta

SEQ ID NO: 144142 - DNA, 25 bp, Homo sapien
catcaaaggatgttcttcttaaata

SEQ ID NO: 144143 - DNA, 25 bp, Homo sapien
tttagcacacgaatttctgggagca

SEQ ID NO: 144144 - DNA, 25 bp, Homo sapien
ttatgatgtctgatttcgtgtaggc

SEQ ID NO: 144145 - DNA, 25 bp, Homo sapien
tctgatggcagatttagcacacgaa

SEQ ID NO: 144146 - DNA, 25 bp, Homo sapien
gagaaggaagcctgtttactggctc

SEQ ID NO: 144147 - DNA, 25 bp, Homo sapien
gaaggaagcctgtttactggctccg

SEQ ID NO: 144148 - DNA, 25 bp, Homo sapien
gagcgagaaggaagcctgtttactg

SEQ ID NO: 144149 - DNA, 25 bp, Homo sapien
gcgagaaggaagcctgtttactggc

SEQ ID NO: 144150 - DNA, 25 bp, Homo sapien
tggttgtgaattcgatgttctttaa

SEQ ID NO: 144151 - DNA, 25 bp, Homo sapien
gacaccctgtaactgcttagtgaga

SEQ ID NO: 144152 - DNA, 25 bp, Homo sapien
gtttctcctacttcttcttcttata

SEQ ID NO: 144153 - DNA, 25 bp, Homo sapien
tctcctccttattttgtttctccta

SEQ ID NO: 144154 - DNA, 25 bp, Homo sapien
tcaaattattttacttcttctcctc

SEQ ID NO: 144155 - DNA, 25 bp, Homo sapien
cttcatattccttctcaaattattt

SEQ ID NO: 144156 - DNA, 25 bp, Homo sapien
tggtaaagtagcctcctggcaagca

SEQ ID NO: 144157 - DNA, 25 bp, Homo sapien
gggattccaaaataacacatgcgca

SEQ ID NO: 144158 - DNA, 25 bp, Homo sapien
gaaactgcctgtaagcactgtactc

SEQ ID NO: 144159 - DNA, 25 bp, Homo sapien
tctagaggcaagtggttatatacag

SEQ ID NO: 144160 - DNA, 25 bp, Homo sapien
tggtaggttacataaaaggccacaa

SEQ ID NO: 144161 - DNA, 25 bp, Homo sapien
tactgtatctgtttacctgcaagag

SEQ ID NO: 144162 - DNA, 25 bp, Homo sapien
cactaactacatgatagggtaacta

SEQ ID NO: 144163 - DNA, 25 bp, Homo sapien
gaaagatttgacgtgcttcatgaaa

SEQ ID NO: 144164 - DNA, 25 bp, Homo sapien
taccgaaattccagagagcgagggt

SEQ ID NO: 144165 - DNA, 25 bp, Homo sapien
taaaatacactgcagggacctatga

SEQ ID NO: 144166 - DNA, 25 bp, Homo sapien
gcagaatccctatgaattttggctc

SEQ ID NO: 144167 - DNA, 25 bp, Homo sapien
gagcgagggtgcaatgatagcccca

SEQ ID NO: 144168 - DNA, 25 bp, Homo sapien
ctaagaagaggcaaacacattgaga

SEQ ID NO: 144169 - DNA, 25 bp, Homo sapien
cacattatgaactataggaaatgaa

SEQ ID NO: 144170 - DNA, 25 bp, Homo sapien
gtcagtaattcaagctatgagaaac

SEQ ID NO: 144171 - DNA, 25 bp, Homo sapien
ttgcctagtctaatactcaaaaagt

SEQ ID NO: 144172 - DNA, 25 bp, Homo sapien
ccagttttgttggtaaatgtgcaaa

SEQ ID NO: 144173 - DNA, 25 bp, Homo sapien
gaaaattggctttcagcggatccat

SEQ ID NO: 144174 - DNA, 25 bp, Homo sapien
atttgagggccttgtgtcattccct

SEQ ID NO: 144175 - DNA, 25 bp, Homo sapien
agagaaaattggctttcagcggatc

SEQ ID NO: 144176 - DNA, 25 bp, Homo sapien
cagagcttccttttacccatgacgg

SEQ ID NO: 144177 - DNA, 25 bp, Homo sapien
catgaggaattcgagccagagcttc

SEQ ID NO: 144178 - DNA, 25 bp, Homo sapien
aatcaggccgtgctttattctcatg

SEQ ID NO: 144179 - DNA, 25 bp, Homo sapien
ccattggctggtcactggtttgctt

SEQ ID NO: 144180 - DNA, 25 bp, Homo sapien
aaatgttccatttggctttgcagtc

SEQ ID NO: 144181 - DNA, 25 bp, Homo sapien
gaaactgtgtgcacagctgtcatct

SEQ ID NO: 144182 - DNA, 25 bp, Homo sapien
tggatatctgccctggtgtagtacc

SEQ ID NO: 144183 - DNA, 25 bp, Homo sapien
cttgaaaatttcagcggaaactgtg

SEQ ID NO: 144184 - DNA, 25 bp, Homo sapien
ctcaatctcatcacatggtgccttt

SEQ ID NO: 144185 - DNA, 25 bp, Homo sapien
tctcatcacatggtgcctttttcag

SEQ ID NO: 144186 - DNA, 25 bp, Homo sapien
caatctcatcacatggtgccttttt

SEQ ID NO: 144187 - DNA, 25 bp, Homo sapien
tcatcacatggtgcctttttcagga

SEQ ID NO: 144188 - DNA, 25 bp, Homo sapien
gaagaggaatgttgagtttcctttg

SEQ ID NO: 144189 - DNA, 25 bp, Homo sapien
tgctggcacccaagttgaaaactct

SEQ ID NO: 144190 - DNA, 25 bp, Homo sapien
ctcttactggcttgtccacatggga

SEQ ID NO: 144191 - DNA, 25 bp, Homo sapien
gagttgctattattagatggaaggg

SEQ ID NO: 144192 - DNA, 25 bp, Homo sapien
tggacaaaggttgcagcacccagga

SEQ ID NO: 144193 - DNA, 25 bp, Homo sapien
ttctatcccatgctacttggtgaag

SEQ ID NO: 144194 - DNA, 25 bp, Homo sapien
gcacccaggataacttttactctaa

SEQ ID NO: 144195 - DNA, 25 bp, Homo sapien
gctgatgttcagagcttctatccca

SEQ ID NO: 144196 - DNA, 25 bp, Homo sapien
aggccaaatacagctagttcagcca

SEQ ID NO: 144197 - DNA, 25 bp, Homo sapien
aaggccaaatacagctagttcagcc

SEQ ID NO: 144198 - DNA, 25 bp, Homo sapien
ggctcggttctaaagccagagctaa

SEQ ID NO: 144199 - DNA, 25 bp, Homo sapien
tcatgaatgcggctcggttctaaag

SEQ ID NO: 144200 - DNA, 25 bp, Homo sapien
ctaaagccagagctaacagtagtat

SEQ ID NO: 144201 - DNA, 25 bp, Homo sapien
ttaacagtcatgaatgcggctcggt

SEQ ID NO: 144202 - DNA, 25 bp, Homo sapien
aaagccaacacttgatgaagccata

SEQ ID NO: 144203 - DNA, 25 bp, Homo sapien
tattcacaactttgggacacattct

SEQ ID NO: 144204 - DNA, 25 bp, Homo sapien
cacacctcaggtactgttccaagtg

SEQ ID NO: 144205 - DNA, 25 bp, Homo sapien
tcttggatacattgtgacactctat

SEQ ID NO: 144206 - DNA, 25 bp, Homo sapien
taacgactgaaggtttgctggcaaa

SEQ ID NO: 144207 - DNA, 25 bp, Homo sapien
gcaatttctctattgccgttgtgaa

SEQ ID NO: 144208 - DNA, 25 bp, Homo sapien
tgtgaacactggtaacgactgaagg

SEQ ID NO: 144209 - DNA, 25 bp, Homo sapien
gactatattgtcctctcagagagct

SEQ ID NO: 144210 - DNA, 25 bp, Homo sapien
ttctctagtctgacattcttcttcc

SEQ ID NO: 144211 - DNA, 25 bp, Homo sapien
ctttgcattctctagtctgacattc

SEQ ID NO: 144212 - DNA, 25 bp, Homo sapien
tgcattctctagtctgacattcttc

SEQ ID NO: 144213 - DNA, 25 bp, Homo sapien
cattctctagtctgacattcttctt

SEQ ID NO: 144214 - DNA, 25 bp, Homo sapien
tgcaaccagcactgcgcaatcagat

SEQ ID NO: 144215 - DNA, 25 bp, Homo sapien
gcactgcgcaatcagatcttgaaat

SEQ ID NO: 144216 - DNA, 25 bp, Homo sapien
accagcactgcgcaatcagatcttg

SEQ ID NO: 144217 - DNA, 25 bp, Homo sapien
aaatgcaaccagcactgcgcaatca

SEQ ID NO: 144218 - DNA, 25 bp, Homo sapien
tcgcactggacttgttccaaaccac

SEQ ID NO: 144219 - DNA, 25 bp, Homo sapien
gagggcatcgcactggacttgttcc

SEQ ID NO: 144220 - DNA, 25 bp, Homo sapien
gtctccacggaagagggcatcgcac

SEQ ID NO: 144221 - DNA, 25 bp, Homo sapien
cggaagagggcatcgcactggactt

SEQ ID NO: 144222 - DNA, 25 bp, Homo sapien
gagtggctacagttgcttcttggac

SEQ ID NO: 144223 - DNA, 25 bp, Homo sapien
tgcactctctaagagtggctacagt

SEQ ID NO: 144224 - DNA, 25 bp, Homo sapien
ggagaagtgccccttgcactctcta

SEQ ID NO: 144225 - DNA, 25 bp, Homo sapien
gtggctacagttgcttcttggacaa

SEQ ID NO: 144226 - DNA, 25 bp, Homo sapien
cctgctcaagtctgctctgagccat

SEQ ID NO: 144227 - DNA, 25 bp, Homo sapien
actatgatggtatacgtgtaagcca

SEQ ID NO: 144228 - DNA, 25 bp, Homo sapien
atacgtgtaagccagaggagcaagg

SEQ ID NO: 144229 - DNA, 25 bp, Homo sapien
ggccaagtcctctgtgttagaatct

SEQ ID NO: 144230 - DNA, 25 bp, Homo sapien
tagaatctttaccttcagtattcct

SEQ ID NO: 144231 - DNA, 25 bp, Homo sapien
ctctacttgcatgtggctaaaagca

SEQ ID NO: 144232 - DNA, 25 bp, Homo sapien
gctaaaagcagggatatgccctggg

SEQ ID NO: 144233 - DNA, 25 bp, Homo sapien
aatctctacttgcatgtggctaaaa

SEQ ID NO: 144234 - DNA, 25 bp, Homo sapien
tgttgggcaccatgactgaatactc

SEQ ID NO: 144235 - DNA, 25 bp, Homo sapien
actgctcgaggatcaaagtgggacc

SEQ ID NO: 144236 - DNA, 25 bp, Homo sapien
ggcattcgtgtcgtcattggcagga

SEQ ID NO: 144237 - DNA, 25 bp, Homo sapien
catttgagaccgagtgacccaaggc

SEQ ID NO: 144238 - DNA, 25 bp, Homo sapien
tgtgcagtcaaagaagtggagctct

SEQ ID NO: 144239 - DNA, 25 bp, Homo sapien
caactgcatgatattaggtggtgct

SEQ ID NO: 144240 - DNA, 25 bp, Homo sapien
tccaactgcatgatattaggtggtg

SEQ ID NO: 144241 - DNA, 25 bp, Homo sapien
gcatgatattaggtggtgctatttc

SEQ ID NO: 144242 - DNA, 25 bp, Homo sapien
ttcttccaactgcatgatattaggt

SEQ ID NO: 144243 - DNA, 25 bp, Homo sapien
gagacagtgacaattgtgcaggtca

SEQ ID NO: 144244 - DNA, 25 bp, Homo sapien
gagttttatattggggcttgtagcc

SEQ ID NO: 144245 - DNA, 25 bp, Homo sapien
aaaaacttcatagaggagagctgag

SEQ ID NO: 144246 - DNA, 25 bp, Homo sapien
gaagagacagtgacaattgtgcagg

SEQ ID NO: 144247 - DNA, 25 bp, Homo sapien
tcttccaatataagaatgtgatttt

SEQ ID NO: 144248 - DNA, 25 bp, Homo sapien
ttccaatataagaatgtgattttct

SEQ ID NO: 144249 - DNA, 25 bp, Homo sapien
cttcttccaatataagaatgtgatt

SEQ ID NO: 144250 - DNA, 25 bp, Homo sapien
tataagaatgtgattttctttaatc

SEQ ID NO: 144251 - DNA, 25 bp, Homo sapien
tctccctcactagtaattgagagag

SEQ ID NO: 144252 - DNA, 25 bp, Homo sapien
tagcgcaattcaccaagagatacag

SEQ ID NO: 144253 - DNA, 25 bp, Homo sapien
gaatatttatccgtgcatctaccca

SEQ ID NO: 144254 - DNA, 25 bp, Homo sapien
tactcctacctctaatgtgggctgg

SEQ ID NO: 144255 - DNA, 25 bp, Homo sapien
tgaaggagctgctctagtgccatga

SEQ ID NO: 144256 - DNA, 25 bp, Homo sapien
gaaggagctgctctagtgccatgag

SEQ ID NO: 144257 - DNA, 25 bp, Homo sapien
aaggagctgctctagtgccatgagc

SEQ ID NO: 144258 - DNA, 25 bp, Homo sapien
ggagctgctctagtgccatgagcac

SEQ ID NO: 144259 - DNA, 25 bp, Homo sapien
ccatcttcattggcccatgttcttt

SEQ ID NO: 144260 - DNA, 25 bp, Homo sapien
atcttcattggcccatgttctttct

SEQ ID NO: 144261 - DNA, 25 bp, Homo sapien
catcttcattggcccatgttctttc

SEQ ID NO: 144262 - DNA, 25 bp, Homo sapien
tcttaacattccaatctgagttaaa

SEQ ID NO: 144263 - DNA, 25 bp, Homo sapien
aatgtttcttaacattccaatctga

SEQ ID NO: 144264 - DNA, 25 bp, Homo sapien
cttaacattccaatctgagttaaat

SEQ ID NO: 144265 - DNA, 25 bp, Homo sapien
gtttcttaacattccaatctgagtt

SEQ ID NO: 144266 - DNA, 25 bp, Homo sapien
caccaccttcacattgggatttcgg

SEQ ID NO: 144267 - DNA, 25 bp, Homo sapien
tgaagacatattaaacacacgtaac

SEQ ID NO: 144268 - DNA, 25 bp, Homo sapien
ttaaacacacgtaacaccaccttca

SEQ ID NO: 144269 - DNA, 25 bp, Homo sapien
cacattgggatttcggagtttatga

SEQ ID NO: 144270 - DNA, 25 bp, Homo sapien
actgggagatgctgtgcagaataat

SEQ ID NO: 144271 - DNA, 25 bp, Homo sapien
tttctctggtgattgcaactgggag

SEQ ID NO: 144272 - DNA, 25 bp, Homo sapien
ggcttggactccactgggatggtta

SEQ ID NO: 144273 - DNA, 25 bp, Homo sapien
taattcaaatcgagaacaggctcca

SEQ ID NO: 144274 - DNA, 25 bp, Homo sapien
ttttggaattttcttctgagtattc

SEQ ID NO: 144275 - DNA, 25 bp, Homo sapien
cttctgagtattctttttctttcat

SEQ ID NO: 144276 - DNA, 25 bp, Homo sapien
ttggaattttcttctgagtattctt

SEQ ID NO: 144277 - DNA, 25 bp, Homo sapien
ttcttctgagtattctttttctttc

SEQ ID NO: 144278 - DNA, 25 bp, Homo sapien
cacagctcctctaactcttggatgg

SEQ ID NO: 144279 - DNA, 25 bp, Homo sapien
ccacagctcctctaactcttggatg

SEQ ID NO: 144280 - DNA, 25 bp, Homo sapien
tggagaggatgtaattccccacagc

SEQ ID NO: 144281 - DNA, 25 bp, Homo sapien
agaggatgtaattccccacagctcc

SEQ ID NO: 144282 - DNA, 25 bp, Homo sapien
tctgaagtttccaggaggcttaagg

SEQ ID NO: 144283 - DNA, 25 bp, Homo sapien
ctgtgtctctttctgaagtttccag

SEQ ID NO: 144284 - DNA, 25 bp, Homo sapien
gaggcttaaggaaagagtcagcctt

SEQ ID NO: 144285 - DNA, 25 bp, Homo sapien
ttccaggaggcttaaggaaagagtc

SEQ ID NO: 144286 - DNA, 25 bp, Homo sapien
gagccacactgcaattgttctacca

SEQ ID NO: 144287 - DNA, 25 bp, Homo sapien
taattttgatattgcagagccacac

SEQ ID NO: 144288 - DNA, 25 bp, Homo sapien
ttcattgcttagttgactggcaagg

SEQ ID NO: 144289 - DNA, 25 bp, Homo sapien
gcaagggtcgccttccacacaaatt

SEQ ID NO: 144290 - DNA, 25 bp, Homo sapien
gtggcctagaggtgccaaaaaagct

SEQ ID NO: 144291 - DNA, 25 bp, Homo sapien
aaaaaagctttttatccaaatgctg

SEQ ID NO: 144292 - DNA, 25 bp, Homo sapien
gctttttatccaaatgctggtattc

SEQ ID NO: 144293 - DNA, 25 bp, Homo sapien
tggcctagaggtgccaaaaaagctt

SEQ ID NO: 144294 - DNA, 25 bp, Homo sapien
acatcagatacactctgagcacccg

SEQ ID NO: 144295 - DNA, 25 bp, Homo sapien
caagtgaactcggtcaagatgatgc

SEQ ID NO: 144296 - DNA, 25 bp, Homo sapien
gcagagacttcagtagtggtatgga

SEQ ID NO: 144297 - DNA, 25 bp, Homo sapien
aaggtgttagtgacatcagatacac

SEQ ID NO: 144298 - DNA, 25 bp, Homo sapien
tctgttactctggtgcagatctgct

SEQ ID NO: 144299 - DNA, 25 bp, Homo sapien
tacacttaggattcaggcacttttc

SEQ ID NO: 144300 - DNA, 25 bp, Homo sapien
cccaaacagtgcttatacacttagg

SEQ ID NO: 144301 - DNA, 25 bp, Homo sapien
tactactaaataattggtcgctaat

SEQ ID NO: 144302 - DNA, 25 bp, Homo sapien
ccaagtgtttggataactacagaaa

SEQ ID NO: 144303 - DNA, 25 bp, Homo sapien
atttcaatttgggaatctcctgcac

SEQ ID NO: 144304 - DNA, 25 bp, Homo sapien
tcctgcacaagtccaagtgtttgga

SEQ ID NO: 144305 - DNA, 25 bp, Homo sapien
tttcaggatcaatgtgccaagaacc

SEQ ID NO: 144306 - DNA, 25 bp, Homo sapien
ataattattttcgaagtttcaatct

SEQ ID NO: 144307 - DNA, 25 bp, Homo sapien
attattttcgaagtttcaatctcca

SEQ ID NO: 144308 - DNA, 25 bp, Homo sapien
taattattttcgaagtttcaatctc

SEQ ID NO: 144309 - DNA, 25 bp, Homo sapien
cttaatttgtgcttgattgacacca

SEQ ID NO: 144310 - DNA, 25 bp, Homo sapien
tggagtaagacactgaactgagttt

SEQ ID NO: 144311 - DNA, 25 bp, Homo sapien
tctgagagtttcagaatggagtaag

SEQ ID NO: 144312 - DNA, 25 bp, Homo sapien
tgcttgattgacaccaggtctgaga

SEQ ID NO: 144313 - DNA, 25 bp, Homo sapien
tgattttattaccacagaaggctta

SEQ ID NO: 144314 - DNA, 25 bp, Homo sapien
taccacagaaggcttaattagaaag

SEQ ID NO: 144315 - DNA, 25 bp, Homo sapien
gctgttactcctagttctctaggca

SEQ ID NO: 144316 - DNA, 25 bp, Homo sapien
gcttaattagaaaggtggctgttac

SEQ ID NO: 144317 - DNA, 25 bp, Homo sapien
ctccactccattcgctctggatcta

SEQ ID NO: 144318 - DNA, 25 bp, Homo sapien
atctagagcacaataaggcattgca

SEQ ID NO: 144319 - DNA, 25 bp, Homo sapien
tggatctagagcacaataaggcatt

SEQ ID NO: 144320 - DNA, 25 bp, Homo sapien
tagagcacaataaggcattgcagaa

SEQ ID NO: 144321 - DNA, 25 bp, Homo sapien
ggaaatctttgtgcatcccctccgg

SEQ ID NO: 144322 - DNA, 25 bp, Homo sapien
ccggctgccatcactaccccacatt

SEQ ID NO: 144323 - DNA, 25 bp, Homo sapien
ctgccatcactaccccacattccat

SEQ ID NO: 144324 - DNA, 25 bp, Homo sapien
aatctttgtgcatcccctccggctg

SEQ ID NO: 144325 - DNA, 25 bp, Homo sapien
cttgggcaacatttgaattctggtc

SEQ ID NO: 144326 - DNA, 25 bp, Homo sapien
caaggctagcattgcttgggcaaca

SEQ ID NO: 144327 - DNA, 25 bp, Homo sapien
ctagcattgcttgggcaacatttga

SEQ ID NO: 144328 - DNA, 25 bp, Homo sapien
ctaagccaaggctagcattgcttgg

SEQ ID NO: 144329 - DNA, 25 bp, Homo sapien
caggcagctttgctcaggtccggat

SEQ ID NO: 144330 - DNA, 25 bp, Homo sapien
ccaagttgggtgcagtaatatattt

SEQ ID NO: 144331 - DNA, 25 bp, Homo sapien
tcataaacctgaatgccaagttggg

SEQ ID NO: 144332 - DNA, 25 bp, Homo sapien
cactagtatgtattcctcataaacc

SEQ ID NO: 144333 - DNA, 25 bp, Homo sapien
cttctttgtcccatttggcatccag

SEQ ID NO: 144334 - DNA, 25 bp, Homo sapien
tggctgctaagaggatattcaggtc

SEQ ID NO: 144335 - DNA, 25 bp, Homo sapien
ctgctaagaggatattcaggtccat

SEQ ID NO: 144336 - DNA, 25 bp, Homo sapien
ttggcatccagtcatggctgctaag

SEQ ID NO: 144337 - DNA, 25 bp, Homo sapien
tggagtgagtgctctgttctttgta

SEQ ID NO: 144338 - DNA, 25 bp, Homo sapien
atggagtgagtgctctgttctttgt

SEQ ID NO: 144339 - DNA, 25 bp, Homo sapien
ttatggagtgagtgctctgttcttt

SEQ ID NO: 144340 - DNA, 25 bp, Homo sapien
tatggagtgagtgctctgttctttg

SEQ ID NO: 144341 - DNA, 25 bp, Homo sapien
tcatagtaaagtcatccgaatgcat

SEQ ID NO: 144342 - DNA, 25 bp, Homo sapien
aacatgcactaagaagagggggtga

SEQ ID NO: 144343 - DNA, 25 bp, Homo sapien
catgggttgtggtgatattccagga

SEQ ID NO: 144344 - DNA, 25 bp, Homo sapien
gcaaaaaccgttctcgaaattgctg

SEQ ID NO: 144345 - DNA, 25 bp, Homo sapien
ctcgaaattgctgctagtttgtgta

SEQ ID NO: 144346 - DNA, 25 bp, Homo sapien
taattctccaccaacgggagcacgg

SEQ ID NO: 144347 - DNA, 25 bp, Homo sapien
ccaccaacgggagcacggttgtttg

SEQ ID NO: 144348 - DNA, 25 bp, Homo sapien
ctccaccaacgggagcacggttgtt

SEQ ID NO: 144349 - DNA, 25 bp, Homo sapien
ttaggctaattctccaccaacggga

SEQ ID NO: 144350 - DNA, 25 bp, Homo sapien
tgatatcttccatttctgattacta

SEQ ID NO: 144351 - DNA, 25 bp, Homo sapien
tgtgatatcttccatttctgattac

SEQ ID NO: 144352 - DNA, 25 bp, Homo sapien
ctgtgatatcttccatttctgatta

SEQ ID NO: 144353 - DNA, 25 bp, Homo sapien
gtgatatcttccatttctgattact

SEQ ID NO: 144354 - DNA, 25 bp, Homo sapien
ggaagaaatcacctgagcttggaga

SEQ ID NO: 144355 - DNA, 25 bp, Homo sapien
gaagaaatcacctgagcttggagag

SEQ ID NO: 144356 - DNA, 25 bp, Homo sapien
cttcatcctgggtaacagtaagatc

SEQ ID NO: 144357 - DNA, 25 bp, Homo sapien
cacagtacttcatcctgggtaacag

SEQ ID NO: 144358 - DNA, 25 bp, Homo sapien
tcttgcaagctcagattgtggtggg

SEQ ID NO: 144359 - DNA, 25 bp, Homo sapien
taaatgctgtctcgttgcttccctt

SEQ ID NO: 144360 - DNA, 25 bp, Homo sapien
taaaacactgaattggaatgagctc

SEQ ID NO: 144361 - DNA, 25 bp, Homo sapien
gattacttatagtaagcaccagaag

SEQ ID NO: 144362 - DNA, 25 bp, Homo sapien
gaatctggtaaattgtttgccaatt

SEQ ID NO: 144363 - DNA, 25 bp, Homo sapien
ttctgaatctggtaaattgtttgcc

SEQ ID NO: 144364 - DNA, 25 bp, Homo sapien
ctgaatctggtaaattgtttgccaa

SEQ ID NO: 144365 - DNA, 25 bp, Homo sapien
ctttttctgaatctggtaaattgtt

SEQ ID NO: 144366 - DNA, 25 bp, Homo sapien
tgctctctcagtgtggctgctctca

SEQ ID NO: 144367 - DNA, 25 bp, Homo sapien
gctgctgctctctcagtgtggctgc

SEQ ID NO: 144368 - DNA, 25 bp, Homo sapien
gctctctcagtgtggctgctctcat

SEQ ID NO: 144369 - DNA, 25 bp, Homo sapien
tgctgctctctcagtgtggctgctc

SEQ ID NO: 144370 - DNA, 25 bp, Homo sapien
ctcttttctgttagtgaactgttca

SEQ ID NO: 144371 - DNA, 25 bp, Homo sapien
tctctcttttctgttagtgaactgt

SEQ ID NO: 144372 - DNA, 25 bp, Homo sapien
tgtagagattactgaactctctctc

SEQ ID NO: 144373 - DNA, 25 bp, Homo sapien
tccaaaaccatgttgggtcatgtag

SEQ ID NO: 144374 - DNA, 25 bp, Homo sapien
taaagggccatgagttgtaatttat

SEQ ID NO: 144375 - DNA, 25 bp, Homo sapien
ttaaagggccatgagttgtaattta

SEQ ID NO: 144376 - DNA, 25 bp, Homo sapien
aatttgtttggttgtaccctgcagg

SEQ ID NO: 144377 - DNA, 25 bp, Homo sapien
ttggttgtaccctgcagggctccca

SEQ ID NO: 144378 - DNA, 25 bp, Homo sapien
ggcagcagcggtaccaagttggcac

SEQ ID NO: 144379 - DNA, 25 bp, Homo sapien
gtaccaagttggcacaaagtagcag

SEQ ID NO: 144380 - DNA, 25 bp, Homo sapien
gatagccttaggtcgtgtttcttaa

SEQ ID NO: 144381 - DNA, 25 bp, Homo sapien
cagttctcaaccttgtgaaagattc

SEQ ID NO: 144382 - DNA, 25 bp, Homo sapien
gaaagattctacacagcacctctag

SEQ ID NO: 144383 - DNA, 25 bp, Homo sapien
tagcacctgcatcgaagactttcca

SEQ ID NO: 144384 - DNA, 25 bp, Homo sapien
gtttttaacatcatcaactaacagt

SEQ ID NO: 144385 - DNA, 25 bp, Homo sapien
ttaacatcatcaactaacagttctt

SEQ ID NO: 144386 - DNA, 25 bp, Homo sapien
tagacccaggattgatagtttttaa

SEQ ID NO: 144387 - DNA, 25 bp, Homo sapien
ttagacccaggattgatagttttta

SEQ ID NO: 144388 - DNA, 25 bp, Homo sapien
tggacctccgcactgcaaatttggc

SEQ ID NO: 144389 - DNA, 25 bp, Homo sapien
cctccgcactgcaaatttggccagt

SEQ ID NO: 144390 - DNA, 25 bp, Homo sapien
gacctccgcactgcaaatttggcca

SEQ ID NO: 144391 - DNA, 25 bp, Homo sapien
ttcctggacctccgcactgcaaatt

SEQ ID NO: 144392 - DNA, 25 bp, Homo sapien
gctggattcctgcatctttagggtc

SEQ ID NO: 144393 - DNA, 25 bp, Homo sapien
gattcctgcatctttagggtcggca

SEQ ID NO: 144394 - DNA, 25 bp, Homo sapien
ttagggtcggcagcaaacaacctgc

SEQ ID NO: 144395 - DNA, 25 bp, Homo sapien
gcatctttagggtcggcagcaaaca

SEQ ID NO: 144396 - DNA, 25 bp, Homo sapien
agtttccctttatcatttccacagt

SEQ ID NO: 144397 - DNA, 25 bp, Homo sapien
ggagtttccctttatcatttccaca

SEQ ID NO: 144398 - DNA, 25 bp, Homo sapien
tttccctttatcatttccacagtca

SEQ ID NO: 144399 - DNA, 25 bp, Homo sapien
tccctttatcatttccacagtcagc

SEQ ID NO: 144400 - DNA, 25 bp, Homo sapien
cctaggattagggtcacttgtggaa

SEQ ID NO: 144401 - DNA, 25 bp, Homo sapien
ggccactatgctttcagtaccaata

SEQ ID NO: 144402 - DNA, 25 bp, Homo sapien
tatgtctccctttgttcgaggactg

SEQ ID NO: 144403 - DNA, 25 bp, Homo sapien
taccaatagccatggctatgtctcc

SEQ ID NO: 144404 - DNA, 25 bp, Homo sapien
tagccagtactgcattgactcaatc

SEQ ID NO: 144405 - DNA, 25 bp, Homo sapien
gcattgactcaatccatggaagttt

SEQ ID NO: 144406 - DNA, 25 bp, Homo sapien
tcaatccatggaagttttagcaaca

SEQ ID NO: 144407 - DNA, 25 bp, Homo sapien
ttgagctttagccagtactgcattg

SEQ ID NO: 144408 - DNA, 25 bp, Homo sapien
tatttcagtaggactagataagagc

SEQ ID NO: 144409 - DNA, 25 bp, Homo sapien
tcagtaggactagataagagctggt

SEQ ID NO: 144410 - DNA, 25 bp, Homo sapien
tctggaactctatttcagtaggact

SEQ ID NO: 144411 - DNA, 25 bp, Homo sapien
ggactagataagagctggttttcag

SEQ ID NO: 144412 - DNA, 25 bp, Homo sapien
gacatagtgacgtaagtgtcatgga

SEQ ID NO: 144413 - DNA, 25 bp, Homo sapien
tagtgacgtaagtgtcatggatgtg

SEQ ID NO: 144414 - DNA, 25 bp, Homo sapien
atgtgacatagtgacgtaagtgtca

SEQ ID NO: 144415 - DNA, 25 bp, Homo sapien
gacgtaagtgtcatggatgtgttta

SEQ ID NO: 144416 - DNA, 25 bp, Homo sapien
tctcagtagtgtcttgattcactgc

SEQ ID NO: 144417 - DNA, 25 bp, Homo sapien
agtgtcttgattcactgctttgtag

SEQ ID NO: 144418 - DNA, 25 bp, Homo sapien
cagtagtgtcttgattcactgcttt

SEQ ID NO: 144419 - DNA, 25 bp, Homo sapien
tgaaatctcagtagtgtcttgattc

SEQ ID NO: 144420 - DNA, 25 bp, Homo sapien
tattttatgtcgaattcgatgacca

SEQ ID NO: 144421 - DNA, 25 bp, Homo sapien
cctattttatgtcgaattcgatgac

SEQ ID NO: 144422 - DNA, 25 bp, Homo sapien
ttatgtcgaattcgatgaccaaaat

SEQ ID NO: 144423 - DNA, 25 bp, Homo sapien
tatcctattttatgtcgaattcgat

SEQ ID NO: 144424 - DNA, 25 bp, Homo sapien
ttgatgtagtctacttctgtttccg

SEQ ID NO: 144425 - DNA, 25 bp, Homo sapien
gatgtagtctacttctgtttccgaa

SEQ ID NO: 144426 - DNA, 25 bp, Homo sapien
gattgatgtagtctacttctgtttc

SEQ ID NO: 144427 - DNA, 25 bp, Homo sapien
atgtagtctacttctgtttccgaaa

SEQ ID NO: 144428 - DNA, 25 bp, Homo sapien
gaatctgctttgccaatgggcctgt

SEQ ID NO: 144429 - DNA, 25 bp, Homo sapien
aatgggcctgtagctatcctttttc

SEQ ID NO: 144430 - DNA, 25 bp, Homo sapien
catcccctctgggataaagtttaag

SEQ ID NO: 144431 - DNA, 25 bp, Homo sapien
tctgctttgccaatgggcctgtagc

SEQ ID NO: 144432 - DNA, 25 bp, Homo sapien
cacctcttgcccccagcctattacc

SEQ ID NO: 144433 - DNA, 25 bp, Homo sapien
cttgcccccagcctattaccgccat

SEQ ID NO: 144434 - DNA, 25 bp, Homo sapien
acctcttgcccccagcctattaccg

SEQ ID NO: 144435 - DNA, 25 bp, Homo sapien
ctcttgcccccagcctattaccgcc

SEQ ID NO: 144436 - DNA, 25 bp, Homo sapien
accaaatccgttgtagaagctgagc

SEQ ID NO: 144437 - DNA, 25 bp, Homo sapien
ctaccaaatccgttgtagaagctga

SEQ ID NO: 144438 - DNA, 25 bp, Homo sapien
ttgaatattccaacctggcataact

SEQ ID NO: 144439 - DNA, 25 bp, Homo sapien
attgaatattccaacctggcataac

SEQ ID NO: 144440 - DNA, 25 bp, Homo sapien
tgaatctgctgtagccgtactcgga

SEQ ID NO: 144441 - DNA, 25 bp, Homo sapien
ctgaatctgctgtagccgtactcgg

SEQ ID NO: 144442 - DNA, 25 bp, Homo sapien
cagatgttgctgaagtcttaggtct

SEQ ID NO: 144443 - DNA, 25 bp, Homo sapien
atgttgctgaagtcttaggtctaat

SEQ ID NO: 144444 - DNA, 25 bp, Homo sapien
gatgttgctgaagtcttaggtctaa

SEQ ID NO: 144445 - DNA, 25 bp, Homo sapien
acaaatagcagtatcagatgttgct

SEQ ID NO: 144446 - DNA, 25 bp, Homo sapien
caggagaaaaggggacgcaaaggtg

SEQ ID NO: 144447 - DNA, 25 bp, Homo sapien
atttcctttattccatggatgcatg

SEQ ID NO: 144448 - DNA, 25 bp, Homo sapien
tttcctttattccatggatgcatgt

SEQ ID NO: 144449 - DNA, 25 bp, Homo sapien
aaaggggacgcaaaggtgctggact

SEQ ID NO: 144450 - DNA, 25 bp, Homo sapien
tccttggccgctctatttatttctc

SEQ ID NO: 144451 - DNA, 25 bp, Homo sapien
tgctgtctacctctttggctctttg

SEQ ID NO: 144452 - DNA, 25 bp, Homo sapien
ctgaatctggttgtttgtcatcttc

SEQ ID NO: 144453 - DNA, 25 bp, Homo sapien
tctttgcactgaatctggttgtttg

SEQ ID NO: 144454 - DNA, 25 bp, Homo sapien
cttcagtctggttgaggacagttcg

SEQ ID NO: 144455 - DNA, 25 bp, Homo sapien
tattgaggggatgtgtatccagact

SEQ ID NO: 144456 - DNA, 25 bp, Homo sapien
aatgagatcatcttcctgtattttt

SEQ ID NO: 144457 - DNA, 25 bp, Homo sapien
tggttgaggacagttcgtgtcttac

SEQ ID NO: 144458 - DNA, 25 bp, Homo sapien
ctggaacatgttaaaatatgacatg

SEQ ID NO: 144459 - DNA, 25 bp, Homo sapien
taaacctctggcatgatccaggatc

SEQ ID NO: 144460 - DNA, 25 bp, Homo sapien
gaacttgttgaacttcacttcttct

SEQ ID NO: 144461 - DNA, 25 bp, Homo sapien
tttggtagacctgtgagaaattctg

SEQ ID NO: 144462 - DNA, 25 bp, Homo sapien
caacatgatgtgtagcacaaatgtg

SEQ ID NO: 144463 - DNA, 25 bp, Homo sapien
cagctgaataggagatctcctccat

SEQ ID NO: 144464 - DNA, 25 bp, Homo sapien
tcatgaaatcccttaattccatttt

SEQ ID NO: 144465 - DNA, 25 bp, Homo sapien
tctgacttctataacgggaactcaa

SEQ ID NO: 144466 - DNA, 25 bp, Homo sapien
taaagagacctccaaaaatgagtcc

SEQ ID NO: 144467 - DNA, 25 bp, Homo sapien
ttaaacgggtagctggtctctgcca

SEQ ID NO: 144468 - DNA, 25 bp, Homo sapien
tgccaggaatactcctctgctcatt

SEQ ID NO: 144469 - DNA, 25 bp, Homo sapien
ccctgcttcttttgcaggtcttaaa

SEQ ID NO: 144470 - DNA, 25 bp, Homo sapien
tattgttccaagaataaatgagaag

SEQ ID NO: 144471 - DNA, 25 bp, Homo sapien
ttgttccaagaataaatgagaagta

SEQ ID NO: 144472 - DNA, 25 bp, Homo sapien
gacaccaattattattgttccaaga

SEQ ID NO: 144473 - DNA, 25 bp, Homo sapien
ctgacaccaattattattgttccaa

SEQ ID NO: 144474 - DNA, 25 bp, Homo sapien
gtctctgttgtcctgattgaaaatc

SEQ ID NO: 144475 - DNA, 25 bp, Homo sapien
tgtctctgttgtcctgattgaaaat

SEQ ID NO: 144476 - DNA, 25 bp, Homo sapien
taaagaagctactgaatgttcctct

SEQ ID NO: 144477 - DNA, 25 bp, Homo sapien
gaagctactgaatgttcctctattt

SEQ ID NO: 144478 - DNA, 25 bp, Homo sapien
agctactgaatgttcctctatttcc

SEQ ID NO: 144479 - DNA, 25 bp, Homo sapien
ttcactaaagaagctactgaatgtt

SEQ ID NO: 144480 - DNA, 25 bp, Homo sapien
tatttgagctgtcctccacaatcat

SEQ ID NO: 144481 - DNA, 25 bp, Homo sapien
cttttatttgagctgtcctccacaa

SEQ ID NO: 144482 - DNA, 25 bp, Homo sapien
tttatttgagctgtcctccacaatc

SEQ ID NO: 144483 - DNA, 25 bp, Homo sapien
acttttatttgagctgtcctccaca

SEQ ID NO: 144484 - DNA, 25 bp, Homo sapien
tatactgatgcttccaactgtaatg

SEQ ID NO: 144485 - DNA, 25 bp, Homo sapien
gcttattgctacttggatgtccttg

SEQ ID NO: 144486 - DNA, 25 bp, Homo sapien
aggatttccttacctatggcactac

SEQ ID NO: 144487 - DNA, 25 bp, Homo sapien
gtacatgtgagtttctaggatttcc

SEQ ID NO: 144488 - DNA, 25 bp, Homo sapien
gagataaagggaatctacaagaact

SEQ ID NO: 144489 - DNA, 25 bp, Homo sapien
gattgggaacaatactggcaggtgt

SEQ ID NO: 144490 - DNA, 25 bp, Homo sapien
caagaactctctggtttgaaatatg

SEQ ID NO: 144491 - DNA, 25 bp, Homo sapien
tttctgttaagctttggtctattat

SEQ ID NO: 144492 - DNA, 25 bp, Homo sapien
tgctatctaccttgtcatcataaaa

SEQ ID NO: 144493 - DNA, 25 bp, Homo sapien
gatcttgctatctaccttgtcatca

SEQ ID NO: 144494 - DNA, 25 bp, Homo sapien
aactacttgtatagaaagatgaatg

SEQ ID NO: 144495 - DNA, 25 bp, Homo sapien
acagatgatcttgctatctaccttg

SEQ ID NO: 144496 - DNA, 25 bp, Homo sapien
gtattgtttagtgaaatctggaggc

SEQ ID NO: 144497 - DNA, 25 bp, Homo sapien
attgtttagtgaaatctggaggcat

SEQ ID NO: 144498 - DNA, 25 bp, Homo sapien
tattgtttagtgaaatctggaggca

SEQ ID NO: 144499 - DNA, 25 bp, Homo sapien
aaaatgtacttttgactacaaatgt

SEQ ID NO: 144500 - DNA, 25 bp, Homo sapien
gctggagtgtagtaacaggatctca

SEQ ID NO: 144501 - DNA, 25 bp, Homo sapien
ctcttggtcgcaagtgatccaccct

SEQ ID NO: 144502 - DNA, 25 bp, Homo sapien
ccacatccagcctaaaatgtacttt

SEQ ID NO: 144503 - DNA, 25 bp, Homo sapien
agagtcccttctgctcttcgctgag

SEQ ID NO: 144504 - DNA, 25 bp, Homo sapien
tatgtctcagacatccatacctcaa

SEQ ID NO: 144505 - DNA, 25 bp, Homo sapien
agaatgactataggaatcagagatg

SEQ ID NO: 144506 - DNA, 25 bp, Homo sapien
tcagttaagtactcaagagtccctt

SEQ ID NO: 144507 - DNA, 25 bp, Homo sapien
tgcctttaccgtatgcatgttgtca

SEQ ID NO: 144508 - DNA, 25 bp, Homo sapien
ggcaatgcctttaccgtatgcatgt

SEQ ID NO: 144509 - DNA, 25 bp, Homo sapien
caatgcctttaccgtatgcatgttg

SEQ ID NO: 144510 - DNA, 25 bp, Homo sapien
ggtggcaatgcctttaccgtatgca

SEQ ID NO: 144511 - DNA, 25 bp, Homo sapien
cactcaactctaatgacaggatcct

SEQ ID NO: 144512 - DNA, 25 bp, Homo sapien
tgaccaatctacttgaaagcacgtt

SEQ ID NO: 144513 - DNA, 25 bp, Homo sapien
ttgacaggcccgtggaactcaacct

SEQ ID NO: 144514 - DNA, 25 bp, Homo sapien
tgccaggtttccctattctcccaaa

SEQ ID NO: 144515 - DNA, 25 bp, Homo sapien
cagcctcccattggtaccttttatt

SEQ ID NO: 144516 - DNA, 25 bp, Homo sapien
tatgccgtggcagaatctagaacta

SEQ ID NO: 144517 - DNA, 25 bp, Homo sapien
gcagaatctagaactatgacagtgt

SEQ ID NO: 144518 - DNA, 25 bp, Homo sapien
gcaggatatgccgtggcagaatcta

SEQ ID NO: 144519 - DNA, 25 bp, Homo sapien
ctgcagccgtggcaggatatgccgt

SEQ ID NO: 144520 - DNA, 25 bp, Homo sapien
tcattctcctcttagccacagaggt

SEQ ID NO: 144521 - DNA, 25 bp, Homo sapien
gaatgaaatattctcttgacttctt

SEQ ID NO: 144522 - DNA, 25 bp, Homo sapien
tctcctcttagccacagaggtgttt

SEQ ID NO: 144523 - DNA, 25 bp, Homo sapien
tcttgacttcttcatatgcttagct

SEQ ID NO: 144524 - DNA, 25 bp, Homo sapien
agggcacaataacttcgctcaggct

SEQ ID NO: 144525 - DNA, 25 bp, Homo sapien
cgctcaggcttaaaattaacgatct

SEQ ID NO: 144526 - DNA, 25 bp, Homo sapien
ggaagtatatgctccttttgtaagg

SEQ ID NO: 144527 - DNA, 25 bp, Homo sapien
taacgatctaataaagttggaagta

SEQ ID NO: 144528 - DNA, 25 bp, Homo sapien
tatcttttcgcatgtaaagaacagc

SEQ ID NO: 144529 - DNA, 25 bp, Homo sapien
ccaaggtatatgcttctgatacgta

SEQ ID NO: 144530 - DNA, 25 bp, Homo sapien
tattgagtatgagtttcccggagga

SEQ ID NO: 144531 - DNA, 25 bp, Homo sapien
taacgccctgtaaactatgaatttc

SEQ ID NO: 144532 - DNA, 25 bp, Homo sapien
ctgtgggaactctcttgggtttgga

SEQ ID NO: 144533 - DNA, 25 bp, Homo sapien
gacttgaatccttgcacacattcag

SEQ ID NO: 144534 - DNA, 25 bp, Homo sapien
tcaatttcccattgttcaccaactg

SEQ ID NO: 144535 - DNA, 25 bp, Homo sapien
ggtttggatgacttgaatccttgca

SEQ ID NO: 144536 - DNA, 25 bp, Homo sapien
gagttcctcgttttgtaagtattca

SEQ ID NO: 144537 - DNA, 25 bp, Homo sapien
tgtgtttcgagttcctcgttttgta

SEQ ID NO: 144538 - DNA, 25 bp, Homo sapien
ggtggcatctagtggttgctttggc

SEQ ID NO: 144539 - DNA, 25 bp, Homo sapien
gtggcatctagtggttgctttggca

SEQ ID NO: 144540 - DNA, 25 bp, Homo sapien
tctttaaagggatgaacgataaatg

SEQ ID NO: 144541 - DNA, 25 bp, Homo sapien
tgggagcagtatttaccctgcacct

SEQ ID NO: 144542 - DNA, 25 bp, Homo sapien
taacgtttgctcttagtgatggtgt

SEQ ID NO: 144543 - DNA, 25 bp, Homo sapien
gatgaacgataaatgagggcagtgc

SEQ ID NO: 144544 - DNA, 25 bp, Homo sapien
cagtgtgtattttcttttcccatag

SEQ ID NO: 144545 - DNA, 25 bp, Homo sapien
agtgtgtattttcttttcccatagg

SEQ ID NO: 144546 - DNA, 25 bp, Homo sapien
tcagtgtgtattttcttttcccata

SEQ ID NO: 144547 - DNA, 25 bp, Homo sapien
tgtgtattttcttttcccatagggc

SEQ ID NO: 144548 - DNA, 25 bp, Homo sapien
tcccttttgcacgtgcagccacact

SEQ ID NO: 144549 - DNA, 25 bp, Homo sapien
caagctcccttttgcacgtgcagcc

SEQ ID NO: 144550 - DNA, 25 bp, Homo sapien
aagctcccttttgcacgtgcagcca

SEQ ID NO: 144551 - DNA, 25 bp, Homo sapien
ccccaagctcccttttgcacgtgca

SEQ ID NO: 144552 - DNA, 25 bp, Homo sapien
aactgcacaacatcatcatttatta

SEQ ID NO: 144553 - DNA, 25 bp, Homo sapien
tgaatgaagagaactactatacaaa

SEQ ID NO: 144554 - DNA, 25 bp, Homo sapien
taccagttatataaactgcacaaca

SEQ ID NO: 144555 - DNA, 25 bp, Homo sapien
tcatttattaaaggtgagttaatag

SEQ ID NO: 144556 - DNA, 25 bp, Homo sapien
ccttttccgatccagtatgactttg

SEQ ID NO: 144557 - DNA, 25 bp, Homo sapien
gattgatatgcatcctggtaaggca

SEQ ID NO: 144558 - DNA, 25 bp, Homo sapien
ccattggattccacataatcaacag

SEQ ID NO: 144559 - DNA, 25 bp, Homo sapien
gagcatatgaacaaggagctgtcct

SEQ ID NO: 144560 - DNA, 25 bp, Homo sapien
gcaaagtgagaggttggaaaccgta

SEQ ID NO: 144561 - DNA, 25 bp, Homo sapien
agcaaagtgagaggttggaaaccgt

SEQ ID NO: 144562 - DNA, 25 bp, Homo sapien
caaagtgagaggttggaaaccgtat

SEQ ID NO: 144563 - DNA, 25 bp, Homo sapien
caattgtggcttcaagccagttata

SEQ ID NO: 144564 - DNA, 25 bp, Homo sapien
gaggagtgagagtatggatatcaat

SEQ ID NO: 144565 - DNA, 25 bp, Homo sapien
tatagctggagtacaagcttcttcc

SEQ ID NO: 144566 - DNA, 25 bp, Homo sapien
aaaagccagtcatcaactggaaggc

SEQ ID NO: 144567 - DNA, 25 bp, Homo sapien
tgtcttcttgcatccaaaggtgcaa

SEQ ID NO: 144568 - DNA, 25 bp, Homo sapien
ccaaaggtgcaacattcctgttcaa

SEQ ID NO: 144569 - DNA, 25 bp, Homo sapien
tcttgcatccaaaggtgcaacattc

SEQ ID NO: 144570 - DNA, 25 bp, Homo sapien
tgcatccaaaggtgcaacattcctg

SEQ ID NO: 144571 - DNA, 25 bp, Homo sapien
ctagaaccagcaggagggaggaagc

SEQ ID NO: 144572 - DNA, 25 bp, Homo sapien
cagcaggagggaggaagcagagccc

SEQ ID NO: 144573 - DNA, 25 bp, Homo sapien
gcaggagggaggaagcagagcccac

SEQ ID NO: 144574 - DNA, 25 bp, Homo sapien
accagcaggagggaggaagcagagc

SEQ ID NO: 144575 - DNA, 25 bp, Homo sapien
agtctctctataacactctgtgtca

SEQ ID NO: 144576 - DNA, 25 bp, Homo sapien
gggcatagcgatgaaggtcacctga

SEQ ID NO: 144577 - DNA, 25 bp, Homo sapien
cctttcacgatcaagttcaagggct

SEQ ID NO: 144578 - DNA, 25 bp, Homo sapien
ctgaatcctgggcatagcgatgaag

SEQ ID NO: 144579 - DNA, 25 bp, Homo sapien
taagccatgcaactggactctgacc

SEQ ID NO: 144580 - DNA, 25 bp, Homo sapien
tcccaggcgctgactgatagagtag

SEQ ID NO: 144581 - DNA, 25 bp, Homo sapien
aaataatcgggcaaacagccggctt

SEQ ID NO: 144582 - DNA, 25 bp, Homo sapien
agttggccccgcatgctgtgagcat

SEQ ID NO: 144583 - DNA, 25 bp, Homo sapien
gctttgttttcagaatggcttgtgg

SEQ ID NO: 144584 - DNA, 25 bp, Homo sapien
tggtaccttcttcaccatcaatagc

SEQ ID NO: 144585 - DNA, 25 bp, Homo sapien
ggcttgtggaacaacaaaaactaca

SEQ ID NO: 144586 - DNA, 25 bp, Homo sapien
ttcttcaccatcaatagctttgttt

SEQ ID NO: 144587 - DNA, 25 bp, Homo sapien
ttcctctgttttcttctttcattcc

SEQ ID NO: 144588 - DNA, 25 bp, Homo sapien
tcctctgttttcttctttcattccc

SEQ ID NO: 144589 - DNA, 25 bp, Homo sapien
ctctgttttcttctttcattccctt

SEQ ID NO: 144590 - DNA, 25 bp, Homo sapien
ctttcctctgttttcttctttcatt

SEQ ID NO: 144591 - DNA, 25 bp, Homo sapien
tgccattcttaatgcgaatacagta

SEQ ID NO: 144592 - DNA, 25 bp, Homo sapien
gccattcttaatgcgaatacagtaa

SEQ ID NO: 144593 - DNA, 25 bp, Homo sapien
aatgcgaatacagtaaacaacaatg

SEQ ID NO: 144594 - DNA, 25 bp, Homo sapien
tcttaatgcgaatacagtaaacaac

SEQ ID NO: 144595 - DNA, 25 bp, Homo sapien
gcagtgaaaccacgtcacaccgcat

SEQ ID NO: 144596 - DNA, 25 bp, Homo sapien
cataaaggccagtggccacaacaaa

SEQ ID NO: 144597 - DNA, 25 bp, Homo sapien
ttgaagcataaaggccagtggccac

SEQ ID NO: 144598 - DNA, 25 bp, Homo sapien
agcagtgaaaccacgtcacaccgca

SEQ ID NO: 144599 - DNA, 25 bp, Homo sapien
ttcatcctctttctccagtgttacc

SEQ ID NO: 144600 - DNA, 25 bp, Homo sapien
catcctctttctccagtgttacctt

SEQ ID NO: 144601 - DNA, 25 bp, Homo sapien
cctctttctccagtgttaccttcat

SEQ ID NO: 144602 - DNA, 25 bp, Homo sapien
tcctctttctccagtgttaccttca

SEQ ID NO: 144603 - DNA, 25 bp, Homo sapien
cggtacttcaagcttcaactctagt

SEQ ID NO: 144604 - DNA, 25 bp, Homo sapien
cttggcacagataatattgtgcttc

SEQ ID NO: 144605 - DNA, 25 bp, Homo sapien
tgtgcttcaccttcaactcttccgg

SEQ ID NO: 144606 - DNA, 25 bp, Homo sapien
actcttggtgaatctccttggcaca

SEQ ID NO: 144607 - DNA, 25 bp, Homo sapien
cttggtgatagggagcaggcttata

SEQ ID NO: 144608 - DNA, 25 bp, Homo sapien
tgtaaagtcttggtgatagggagca

SEQ ID NO: 144609 - DNA, 25 bp, Homo sapien
ctcttcagagtttgtaaagtcttgg

SEQ ID NO: 144610 - DNA, 25 bp, Homo sapien
agggagcaggcttatacttgtttat

SEQ ID NO: 144611 - DNA, 25 bp, Homo sapien
tatgacttgggtgtatcaaggcaat

SEQ ID NO: 144612 - DNA, 25 bp, Homo sapien
ttgggtgtatcaaggcaatatggtt

SEQ ID NO: 144613 - DNA, 25 bp, Homo sapien
gggtgtatcaacacagtatgacttg

SEQ ID NO: 144614 - DNA, 25 bp, Homo sapien
ctgggtgtatcaacacagtatgact

SEQ ID NO: 144615 - DNA, 25 bp, Homo sapien
gtactcaataactgccatttaatga

SEQ ID NO: 144616 - DNA, 25 bp, Homo sapien
tgatcattttaacttctgcatccat

SEQ ID NO: 144617 - DNA, 25 bp, Homo sapien
tcaataactgccatttaatgatcat

SEQ ID NO: 144618 - DNA, 25 bp, Homo sapien
taactgccatttaatgatcatttta

SEQ ID NO: 144619 - DNA, 25 bp, Homo sapien
gctctcggtagccttgtcaccgcta

SEQ ID NO: 144620 - DNA, 25 bp, Homo sapien
tcggtagccttgtcaccgctactca

SEQ ID NO: 144621 - DNA, 25 bp, Homo sapien
tctcggtagccttgtcaccgctact

SEQ ID NO: 144622 - DNA, 25 bp, Homo sapien
caggctctcggtagccttgtcaccg

SEQ ID NO: 144623 - DNA, 25 bp, Homo sapien
tagcggctacaccattaggacgtcc

SEQ ID NO: 144624 - DNA, 25 bp, Homo sapien
cgtcctgatccaacattgaggttgt

SEQ ID NO: 144625 - DNA, 25 bp, Homo sapien
tgaggttgtaaaccttattgtcgat

SEQ ID NO: 144626 - DNA, 25 bp, Homo sapien
cattgaacaaacgaacccttattag

SEQ ID NO: 144627 - DNA, 25 bp, Homo sapien
taagagcagaagttgaacctctgat

SEQ ID NO: 144628 - DNA, 25 bp, Homo sapien
gttaagagcagaagttgaacctctg

SEQ ID NO: 144629 - DNA, 25 bp, Homo sapien
gttttacgcaattgccaggctctgt

SEQ ID NO: 144630 - DNA, 25 bp, Homo sapien
attgccaggctctgtcatcttaaca

SEQ ID NO: 144631 - DNA, 25 bp, Homo sapien
ggcatataagaagttgcaggcttct

SEQ ID NO: 144632 - DNA, 25 bp, Homo sapien
ctaatattttgttaaactatagcta

SEQ ID NO: 144633 - DNA, 25 bp, Homo sapien
ctattattagatccaaaatctaata

SEQ ID NO: 144634 - DNA, 25 bp, Homo sapien
ttagatccaaaatctaatattttgt

SEQ ID NO: 144635 - DNA, 25 bp, Homo sapien
gagagaaccatgttgttaggcatgg

SEQ ID NO: 144636 - DNA, 25 bp, Homo sapien
catgagttagcagttcttacatact

SEQ ID NO: 144637 - DNA, 25 bp, Homo sapien
gttagcagttcttacatactttctt

SEQ ID NO: 144638 - DNA, 25 bp, Homo sapien
gagttagcagttcttacatactttc

SEQ ID NO: 144639 - DNA, 25 bp, Homo sapien
tttatttggagcaccaatgtttttg

SEQ ID NO: 144640 - DNA, 25 bp, Homo sapien
tttggagcaccaatgtttttggttc

SEQ ID NO: 144641 - DNA, 25 bp, Homo sapien
accaatggataactctaatccttta

SEQ ID NO: 144642 - DNA, 25 bp, Homo sapien
ctaagaccaatggataactctaatc

SEQ ID NO: 144643 - DNA, 25 bp, Homo sapien
catataacttggggtggaaggtaat

SEQ ID NO: 144644 - DNA, 25 bp, Homo sapien
acttagacatcaagttaacatataa

SEQ ID NO: 144645 - DNA, 25 bp, Homo sapien
taacttagacatcaagttaacatat

SEQ ID NO: 144646 - DNA, 25 bp, Homo sapien
ttttaacttagacatcaagttaaca

SEQ ID NO: 144647 - DNA, 25 bp, Homo sapien
ggtgtccccatgttgtagatgccca

SEQ ID NO: 144648 - DNA, 25 bp, Homo sapien
tctaataaaagctgtattctggtct

SEQ ID NO: 144649 - DNA, 25 bp, Homo sapien
gatgcccaggcgactaaacacttct

SEQ ID NO: 144650 - DNA, 25 bp, Homo sapien
tctggtctttgtcaacccacgtggt

SEQ ID NO: 144651 - DNA, 25 bp, Homo sapien
atcaagctacaaatggtccaaactt

SEQ ID NO: 144652 - DNA, 25 bp, Homo sapien
tttcagatcgtttctctcaagttca

SEQ ID NO: 144653 - DNA, 25 bp, Homo sapien
ttccaatttcagatcgtttctctca

SEQ ID NO: 144654 - DNA, 25 bp, Homo sapien
tcaagctacaaatggtccaaacttt

SEQ ID NO: 144655 - DNA, 25 bp, Homo sapien
ccttctgaggcctttcctgatttcc

SEQ ID NO: 144656 - DNA, 25 bp, Homo sapien
gtcctcaccttctgaggcctttcct

SEQ ID NO: 144657 - DNA, 25 bp, Homo sapien
ctcaccttctgaggcctttcctgat

SEQ ID NO: 144658 - DNA, 25 bp, Homo sapien
caccttctgaggcctttcctgattt

SEQ ID NO: 144659 - DNA, 25 bp, Homo sapien
tattcgtctgaatgaacagctggac

SEQ ID NO: 144660 - DNA, 25 bp, Homo sapien
gtttatattcgtctgaatgaacagc

SEQ ID NO: 144661 - DNA, 25 bp, Homo sapien
attttgtttatattcgtctgaatga

SEQ ID NO: 144662 - DNA, 25 bp, Homo sapien
tatattcgtctgaatgaacagctgg

SEQ ID NO: 144663 - DNA, 25 bp, Homo sapien
gctaactgaactacctgagcttcca

SEQ ID NO: 144664 - DNA, 25 bp, Homo sapien
gacacggtgtattggtgaggtccca

SEQ ID NO: 144665 - DNA, 25 bp, Homo sapien
gggagcctccactagacacggtgta

SEQ ID NO: 144666 - DNA, 25 bp, Homo sapien
gagcttccaacggtgttaatgttaa

SEQ ID NO: 144667 - DNA, 25 bp, Homo sapien
tcaactttatcacttcctgagctca

SEQ ID NO: 144668 - DNA, 25 bp, Homo sapien
ggcatgagccagtaagaaatccatc

SEQ ID NO: 144669 - DNA, 25 bp, Homo sapien
tttggcaccaggaaacaacttggca

SEQ ID NO: 144670 - DNA, 25 bp, Homo sapien
acgtgccatatttcctgatccattg

SEQ ID NO: 144671 - DNA, 25 bp, Homo sapien
gccaaatggggaatcttatctgagt

SEQ ID NO: 144672 - DNA, 25 bp, Homo sapien
agctgctgatcaacacaattgtttg

SEQ ID NO: 144673 - DNA, 25 bp, Homo sapien
tggccaaatggggaatcttatctga

SEQ ID NO: 144674 - DNA, 25 bp, Homo sapien
caaatggggaatcttatctgagtca

SEQ ID NO: 144675 - DNA, 25 bp, Homo sapien
cctgaggttcatctctacaagcatg

SEQ ID NO: 144676 - DNA, 25 bp, Homo sapien
gttcatctctacaagcatgggatcc

SEQ ID NO: 144677 - DNA, 25 bp, Homo sapien
tgaggttcatctctacaagcatggg

SEQ ID NO: 144678 - DNA, 25 bp, Homo sapien
gaggttcatctctacaagcatggga

SEQ ID NO: 144679 - DNA, 25 bp, Homo sapien
gttcagtgctttggatgtctggaat

SEQ ID NO: 144680 - DNA, 25 bp, Homo sapien
tattccattcaaaatgcctgtgtga

SEQ ID NO: 144681 - DNA, 25 bp, Homo sapien
tgcctgtgtgaactataaaggccat

SEQ ID NO: 144682 - DNA, 25 bp, Homo sapien
gctttggatgtctggaatattccat

SEQ ID NO: 144683 - DNA, 25 bp, Homo sapien
ttagacaatgacaccagaaacttcc

SEQ ID NO: 144684 - DNA, 25 bp, Homo sapien
caatgacaccagaaacttcctgtga

SEQ ID NO: 144685 - DNA, 25 bp, Homo sapien
cagaaacttcctgtgactggatttt

SEQ ID NO: 144686 - DNA, 25 bp, Homo sapien
tgacaccagaaacttcctgtgactg

SEQ ID NO: 144687 - DNA, 25 bp, Homo sapien
ctatcttgacagataccaggttgaa

SEQ ID NO: 144688 - DNA, 25 bp, Homo sapien
gagctgtacacttgcaacctgcttg

SEQ ID NO: 144689 - DNA, 25 bp, Homo sapien
ctatgtgagctgtacacttgcaacc

SEQ ID NO: 144690 - DNA, 25 bp, Homo sapien
ccagtctcattgtaaatgatgtaaa

SEQ ID NO: 144691 - DNA, 25 bp, Homo sapien
cctctctaccttccaggattctgac

SEQ ID NO: 144692 - DNA, 25 bp, Homo sapien
ccttccaggattctgacttctgcct

SEQ ID NO: 144693 - DNA, 25 bp, Homo sapien
taccttccaggattctgacttctgc

SEQ ID NO: 144694 - DNA, 25 bp, Homo sapien
gattctgacttctgcctcagaatca

SEQ ID NO: 144695 - DNA, 25 bp, Homo sapien
gggcttctcgccttgttccggttgc

SEQ ID NO: 144696 - DNA, 25 bp, Homo sapien
caagtgtaactcagggcttgctcac

SEQ ID NO: 144697 - DNA, 25 bp, Homo sapien
ctgcagtgatggtcaatttttccat

SEQ ID NO: 144698 - DNA, 25 bp, Homo sapien
ccttgttccggttgcagctgagttt

SEQ ID NO: 144699 - DNA, 25 bp, Homo sapien
caataatgggagtaatggatgcagc

SEQ ID NO: 144700 - DNA, 25 bp, Homo sapien
ttgacttgcaatggagctgccctgc

SEQ ID NO: 144701 - DNA, 25 bp, Homo sapien
tcttgccttagggatgatcttgtgt

SEQ ID NO: 144702 - DNA, 25 bp, Homo sapien
tgctgacaaattggccaataatggg

SEQ ID NO: 144703 - DNA, 25 bp, Homo sapien
cagttgtgccagaatgtatgatggt

SEQ ID NO: 144704 - DNA, 25 bp, Homo sapien
tccgggccttgttggagcagacaat

SEQ ID NO: 144705 - DNA, 25 bp, Homo sapien
gatgttcagaattgcttcatggcca

SEQ ID NO: 144706 - DNA, 25 bp, Homo sapien
gacaataatccttgacatggatata

SEQ ID NO: 144707 - DNA, 25 bp, Homo sapien
taaaaataacctttcagctgattcc

SEQ ID NO: 144708 - DNA, 25 bp, Homo sapien
ctgattccttgcataattgctatct

SEQ ID NO: 144709 - DNA, 25 bp, Homo sapien
aaaataacctttcagctgattcctt

SEQ ID NO: 144710 - DNA, 25 bp, Homo sapien
atactgtggctgaattgtaacttgc

SEQ ID NO: 144711 - DNA, 25 bp, Homo sapien
ggtagagctggccttatgtatccct

SEQ ID NO: 144712 - DNA, 25 bp, Homo sapien
tttcagtactcaggaaagaagaggt

SEQ ID NO: 144713 - DNA, 25 bp, Homo sapien
ggaaatagcctatgacccctgtgca

SEQ ID NO: 144714 - DNA, 25 bp, Homo sapien
gcaatgtgcaaggatatggctttta

SEQ ID NO: 144715 - DNA, 25 bp, Homo sapien
agcctctgcctgttatctagttcta

SEQ ID NO: 144716 - DNA, 25 bp, Homo sapien
cttccaccaaatactctaagtcatt

SEQ ID NO: 144717 - DNA, 25 bp, Homo sapien
caataattctttaggaagtctcaaa

SEQ ID NO: 144718 - DNA, 25 bp, Homo sapien
tgagctctacagactgttccagcct

SEQ ID NO: 144719 - DNA, 25 bp, Homo sapien
catggcttctcgttttgctcttccc

SEQ ID NO: 144720 - DNA, 25 bp, Homo sapien
ctgctatctcccagttctccttcct

SEQ ID NO: 144721 - DNA, 25 bp, Homo sapien
tcgttttgctcttccctgctatctc

SEQ ID NO: 144722 - DNA, 25 bp, Homo sapien
cctgctatctcccagttctccttcc

SEQ ID NO: 144723 - DNA, 25 bp, Homo sapien
tttgtactttcaacaacagcagaac

SEQ ID NO: 144724 - DNA, 25 bp, Homo sapien
tttcaacaacagcagaacgggacat

SEQ ID NO: 144725 - DNA, 25 bp, Homo sapien
cttttgtactttcaacaacagcaga

SEQ ID NO: 144726 - DNA, 25 bp, Homo sapien
tactttcaacaacagcagaacggga

SEQ ID NO: 144727 - DNA, 25 bp, Homo sapien
tttgaatgtcacaagcaaatgagct

SEQ ID NO: 144728 - DNA, 25 bp, Homo sapien
tcacaagcaaatgagctgacaccat

SEQ ID NO: 144729 - DNA, 25 bp, Homo sapien
tgtcacaagcaaatgagctgacacc

SEQ ID NO: 144730 - DNA, 25 bp, Homo sapien
aatgtcacaagcaaatgagctgaca

SEQ ID NO: 144731 - DNA, 25 bp, Homo sapien
acaagaatctgaatgccacggaaca

SEQ ID NO: 144732 - DNA, 25 bp, Homo sapien
caagaatctgaatgccacggaacac

SEQ ID NO: 144733 - DNA, 25 bp, Homo sapien
aaattcacagacattgctgcagtcc

SEQ ID NO: 144734 - DNA, 25 bp, Homo sapien
aattcacagacattgctgcagtccc

SEQ ID NO: 144735 - DNA, 25 bp, Homo sapien
ggggttgttttcataggacatatca

SEQ ID NO: 144736 - DNA, 25 bp, Homo sapien
taggacatatcagagtgacaaattg

SEQ ID NO: 144737 - DNA, 25 bp, Homo sapien
ctctggggttgttttcataggacat

SEQ ID NO: 144738 - DNA, 25 bp, Homo sapien
ttttcataggacatatcagagtgac

SEQ ID NO: 144739 - DNA, 25 bp, Homo sapien
tgaagactttctattgcagcaggtt

SEQ ID NO: 144740 - DNA, 25 bp, Homo sapien
gactttctattgcagcaggttgaaa

SEQ ID NO: 144741 - DNA, 25 bp, Homo sapien
gaagactttctattgcagcaggttg

SEQ ID NO: 144742 - DNA, 25 bp, Homo sapien
cttgaagactttctattgcagcagg

SEQ ID NO: 144743 - DNA, 25 bp, Homo sapien
catcagtcacaaccgcttgcttggg

SEQ ID NO: 144744 - DNA, 25 bp, Homo sapien
tcaaacaagctcaggtctgaatact

SEQ ID NO: 144745 - DNA, 25 bp, Homo sapien
aatactccaaccaattggcttggtg

SEQ ID NO: 144746 - DNA, 25 bp, Homo sapien
ttggcttggtggacagggtagcttt

SEQ ID NO: 144747 - DNA, 25 bp, Homo sapien
atagcaaggcgagttctcaatctgg

SEQ ID NO: 144748 - DNA, 25 bp, Homo sapien
aagcaagcaaaatagcaaggcgagt

SEQ ID NO: 144749 - DNA, 25 bp, Homo sapien
aatcaatccggaaatggtaggtata

SEQ ID NO: 144750 - DNA, 25 bp, Homo sapien
gggatcaatcagataaaagcaagca

SEQ ID NO: 144751 - DNA, 25 bp, Homo sapien
ctgagaatcagctgatagggtgcta

SEQ ID NO: 144752 - DNA, 25 bp, Homo sapien
tgatttctcacgactgggttcttct

SEQ ID NO: 144753 - DNA, 25 bp, Homo sapien
tgtctgatttctcacgactgggttc

SEQ ID NO: 144754 - DNA, 25 bp, Homo sapien
tagggtgctaattctttctgagtca

SEQ ID NO: 144755 - DNA, 25 bp, Homo sapien
tgggaaaatggtgttaaagagagaa

SEQ ID NO: 144756 - DNA, 25 bp, Homo sapien
ttgggaaaatggtgttaaagagaga

SEQ ID NO: 144757 - DNA, 25 bp, Homo sapien
ttcctaatttaactagcaggtccgc

SEQ ID NO: 144758 - DNA, 25 bp, Homo sapien
tcctcttatattcaaagtgatcggc

SEQ ID NO: 144759 - DNA, 25 bp, Homo sapien
tcagcactcttgtgctctctgggtt

SEQ ID NO: 144760 - DNA, 25 bp, Homo sapien
gtgtgcccattactcattctctggc

SEQ ID NO: 144761 - DNA, 25 bp, Homo sapien
gctgctcacaccctcaacatgattt

SEQ ID NO: 144762 - DNA, 25 bp, Homo sapien
ggttgagtgacacacttattattta

SEQ ID NO: 144763 - DNA, 25 bp, Homo sapien
tgtataaatcaacaatgtgttcccc

SEQ ID NO: 144764 - DNA, 25 bp, Homo sapien
tcaagttgaaatctggttgagtgac

SEQ ID NO: 144765 - DNA, 25 bp, Homo sapien
tatctaccaaatcccttgctgagag

SEQ ID NO: 144766 - DNA, 25 bp, Homo sapien
taagaaatctggctcctacaatctg

SEQ ID NO: 144767 - DNA, 25 bp, Homo sapien
cgtcagataattggaagaatagcct

SEQ ID NO: 144768 - DNA, 25 bp, Homo sapien
tccattgcattacatcgtagccagc

SEQ ID NO: 144769 - DNA, 25 bp, Homo sapien
ccattctgatgttaggataaacaac

SEQ ID NO: 144770 - DNA, 25 bp, Homo sapien
gagacagattatgccctggttgatc

SEQ ID NO: 144771 - DNA, 25 bp, Homo sapien
gattatgccctggttgatccaaaac

SEQ ID NO: 144772 - DNA, 25 bp, Homo sapien
tggccatgagacagattatgccctg

SEQ ID NO: 144773 - DNA, 25 bp, Homo sapien
tgtgtattcttaagcgtccctttct

SEQ ID NO: 144774 - DNA, 25 bp, Homo sapien
tattcttaagcgtccctttcttgta

SEQ ID NO: 144775 - DNA, 25 bp, Homo sapien
ttgctgtgtattcttaagcgtccct

SEQ ID NO: 144776 - DNA, 25 bp, Homo sapien
taatcattatatgggatgtaaaatg

SEQ ID NO: 144777 - DNA, 25 bp, Homo sapien
taagtaacaacataatagagccctc

SEQ ID NO: 144778 - DNA, 25 bp, Homo sapien
aatgtagtacttctcgtcctctgga

SEQ ID NO: 144779 - DNA, 25 bp, Homo sapien
ctgaatgatgcgttgcataagtaac

SEQ ID NO: 144780 - DNA, 25 bp, Homo sapien
tattgttccctttgacgttttgaca

SEQ ID NO: 144781 - DNA, 25 bp, Homo sapien
ccatgtcagtgtgacgtttaccatc

SEQ ID NO: 144782 - DNA, 25 bp, Homo sapien
atttaacagtttttgacgaggccat

SEQ ID NO: 144783 - DNA, 25 bp, Homo sapien
ccccacaaacactatgggatctaat

SEQ ID NO: 144784 - DNA, 25 bp, Homo sapien
gtgacgtttaccatccccacaaaca

SEQ ID NO: 144785 - DNA, 25 bp, Homo sapien
ttatacccactctccatgcccactt

SEQ ID NO: 144786 - DNA, 25 bp, Homo sapien
ctccatgcccacttcttctttttca

SEQ ID NO: 144787 - DNA, 25 bp, Homo sapien
ctgttcttcttatacccactctcca

SEQ ID NO: 144788 - DNA, 25 bp, Homo sapien
cccactctccatgcccacttcttct

SEQ ID NO: 144789 - DNA, 25 bp, Homo sapien
gccaaccttgtgagccagatactcc

SEQ ID NO: 144790 - DNA, 25 bp, Homo sapien
ctgatacttctagccaaccttgtga

SEQ ID NO: 144791 - DNA, 25 bp, Homo sapien
tagccaaccttgtgagccagatact

SEQ ID NO: 144792 - DNA, 25 bp, Homo sapien
cttctagccaaccttgtgagccaga

SEQ ID NO: 144793 - DNA, 25 bp, Homo sapien
cttatggtagtggaatttggtcttc

SEQ ID NO: 144794 - DNA, 25 bp, Homo sapien
ctgtttcttatggtagtggaatttg

SEQ ID NO: 144795 - DNA, 25 bp, Homo sapien
atggtagtggaatttggtcttctca

SEQ ID NO: 144796 - DNA, 25 bp, Homo sapien
tttcttatggtagtggaatttggtc

SEQ ID NO: 144797 - DNA, 25 bp, Homo sapien
atgaggaataaacagtctttagtgg

SEQ ID NO: 144798 - DNA, 25 bp, Homo sapien
gaggaataaacagtctttagtgggc

SEQ ID NO: 144799 - DNA, 25 bp, Homo sapien
tgaggaataaacagtctttagtggg

SEQ ID NO: 144800 - DNA, 25 bp, Homo sapien
tgttctccttatcactctggtaact

SEQ ID NO: 144801 - DNA, 25 bp, Homo sapien
gtgttctccttatcactctggtaac

SEQ ID NO: 144802 - DNA, 25 bp, Homo sapien
gtgttctccttatcactctggtaac

SEQ ID NO: 144803 - DNA, 25 bp, Homo sapien
tgttctccttatcactctggtaact

SEQ ID NO: 144804 - DNA, 25 bp, Homo sapien
cctctggcaagctggctgtctgttt

SEQ ID NO: 144805 - DNA, 25 bp, Homo sapien
aagctggctgtctgtttttccaaaa

SEQ ID NO: 144806 - DNA, 25 bp, Homo sapien
ctggcaagctggctgtctgtttttc

SEQ ID NO: 144807 - DNA, 25 bp, Homo sapien
ggcaagctggctgtctgtttttcca

SEQ ID NO: 144808 - DNA, 25 bp, Homo sapien
atgtcattaatttagggctaaatcc

SEQ ID NO: 144809 - DNA, 25 bp, Homo sapien
tgagccccagtttccaagttgatca

SEQ ID NO: 144810 - DNA, 25 bp, Homo sapien
tctttaaacctccaggaaatgtcat

SEQ ID NO: 144811 - DNA, 25 bp, Homo sapien
tgcaattgctaaacaacctgataag

SEQ ID NO: 144812 - DNA, 25 bp, Homo sapien
acaggtggatgcctcctttgtgcac

SEQ ID NO: 144813 - DNA, 25 bp, Homo sapien
tctccatggctatggacataagata

SEQ ID NO: 144814 - DNA, 25 bp, Homo sapien
ggacataagatacagtaggaaaaag

SEQ ID NO: 144815 - DNA, 25 bp, Homo sapien
taggcactggaataaatccagctct

SEQ ID NO: 144816 - DNA, 25 bp, Homo sapien
aatgctaacagtggtatggacaata

SEQ ID NO: 144817 - DNA, 25 bp, Homo sapien
aagatgtggaaaggtttggaatctc

SEQ ID NO: 144818 - DNA, 25 bp, Homo sapien
ctaacagtggtatggacaataaagt

SEQ ID NO: 144819 - DNA, 25 bp, Homo sapien
tctcctagatactggttgaatggct

SEQ ID NO: 144820 - DNA, 25 bp, Homo sapien
accatgccatggtaagttggccgaa

SEQ ID NO: 144821 - DNA, 25 bp, Homo sapien
atttgactgaacatagacctctttc

SEQ ID NO: 144822 - DNA, 25 bp, Homo sapien
aagttggccgaagtgcttcgttgga

SEQ ID NO: 144823 - DNA, 25 bp, Homo sapien
cttcgttggagtagggctgatgttt

SEQ ID NO: 144824 - DNA, 25 bp, Homo sapien
tgggcagagccatatgagtcagtcc

SEQ ID NO: 144825 - DNA, 25 bp, Homo sapien
tattaagacgttgactctggtactg

SEQ ID NO: 144826 - DNA, 25 bp, Homo sapien
ccttgttccagagaatattaagacg

SEQ ID NO: 144827 - DNA, 25 bp, Homo sapien
ctctggtactgattgagaaactcgc

SEQ ID NO: 144828 - DNA, 25 bp, Homo sapien
ttacttcctacaacaagtccagagt

SEQ ID NO: 144829 - DNA, 25 bp, Homo sapien
caagtccagagtgtttgatgggcat

SEQ ID NO: 144830 - DNA, 25 bp, Homo sapien
tcctacaacaagtccagagtgtttg

SEQ ID NO: 144831 - DNA, 25 bp, Homo sapien
tacaacaagtccagagtgtttgatg

SEQ ID NO: 144832 - DNA, 25 bp, Homo sapien
gctgtttcttctagacggctgtcaa

SEQ ID NO: 144833 - DNA, 25 bp, Homo sapien
tcagctttgcgagctctggcaggac

SEQ ID NO: 144834 - DNA, 25 bp, Homo sapien
tgcacacagccgttgacgctttagg

SEQ ID NO: 144835 - DNA, 25 bp, Homo sapien
aatttgagtgctgatcagactcagc

SEQ ID NO: 144836 - DNA, 25 bp, Homo sapien
gctcctgctcttgcatcctaccaac

SEQ ID NO: 144837 - DNA, 25 bp, Homo sapien
ctgctcttgcatcctaccaaccctt

SEQ ID NO: 144838 - DNA, 25 bp, Homo sapien
tcctgctcttgcatcctaccaaccc

SEQ ID NO: 144839 - DNA, 25 bp, Homo sapien
cctgctcttgcatcctaccaaccct

SEQ ID NO: 144840 - DNA, 25 bp, Homo sapien
tcacctttgtgagcacaaagcctca

SEQ ID NO: 144841 - DNA, 25 bp, Homo sapien
cagtcacctttgtgagcacaaagcc

SEQ ID NO: 144842 - DNA, 25 bp, Homo sapien
tttgtgagcacaaagcctcatctcc

SEQ ID NO: 144843 - DNA, 25 bp, Homo sapien
ttctgtccatttgtgcggctttcct

SEQ ID NO: 144844 - DNA, 25 bp, Homo sapien
gggagagttaccatacatatctgtg

SEQ ID NO: 144845 - DNA, 25 bp, Homo sapien
tcttttaatactatagcaaatgcta

SEQ ID NO: 144846 - DNA, 25 bp, Homo sapien
taccatacatatctgtggattctgt

SEQ ID NO: 144847 - DNA, 25 bp, Homo sapien
caaatgctatgggtgcccagtctaa

SEQ ID NO: 144848 - DNA, 25 bp, Homo sapien
gatccggtagttcgggttatgttga

SEQ ID NO: 144849 - DNA, 25 bp, Homo sapien
tgttgatggcttctgcaacattttg

SEQ ID NO: 144850 - DNA, 25 bp, Homo sapien
tagttcgggttatgttgatggcttc

SEQ ID NO: 144851 - DNA, 25 bp, Homo sapien
cggtagttcgggttatgttgatggc

SEQ ID NO: 144852 - DNA, 25 bp, Homo sapien
gcttatgtgtaaaagaatttagcca

SEQ ID NO: 144853 - DNA, 25 bp, Homo sapien
ctgcttatgtgtaaaagaatttagc

SEQ ID NO: 144854 - DNA, 25 bp, Homo sapien
cttatgtgtaaaagaatttagccac

SEQ ID NO: 144855 - DNA, 25 bp, Homo sapien
tatgtgtaaaagaatttagccacat

SEQ ID NO: 144856 - DNA, 25 bp, Homo sapien
tttacatatccactagtccctactg

SEQ ID NO: 144857 - DNA, 25 bp, Homo sapien
acatttacatatccactagtcccta

SEQ ID NO: 144858 - DNA, 25 bp, Homo sapien
tacatatccactagtccctactgtc

SEQ ID NO: 144859 - DNA, 25 bp, Homo sapien
atatccactagtccctactgtcact

SEQ ID NO: 144860 - DNA, 25 bp, Homo sapien
catgttgtagtagacgctacttgca

SEQ ID NO: 144861 - DNA, 25 bp, Homo sapien
agacctggcatgatctgccccttga

SEQ ID NO: 144862 - DNA, 25 bp, Homo sapien
taataaggtcagtgccgggctttag

SEQ ID NO: 144863 - DNA, 25 bp, Homo sapien
tcttgagtcagtctagacagctgat

SEQ ID NO: 144864 - DNA, 25 bp, Homo sapien
gaatatcagtcagcagcttgtgcgg

SEQ ID NO: 144865 - DNA, 25 bp, Homo sapien
tatcagtcagcagcttgtgcggcat

SEQ ID NO: 144866 - DNA, 25 bp, Homo sapien
aatatcagtcagcagcttgtgcggc

SEQ ID NO: 144867 - DNA, 25 bp, Homo sapien
ttgaatatcagtcagcagcttgtgc

SEQ ID NO: 144868 - DNA, 25 bp, Homo sapien
tttccataagtgaatttccatacat

SEQ ID NO: 144869 - DNA, 25 bp, Homo sapien
tttttccataagtgaatttccatac

SEQ ID NO: 144870 - DNA, 25 bp, Homo sapien
cttctactttttccataagtgaatt

SEQ ID NO: 144871 - DNA, 25 bp, Homo sapien
actttttccataagtgaatttccat

SEQ ID NO: 144872 - DNA, 25 bp, Homo sapien
tgttccctgggagccctccacattt

SEQ ID NO: 144873 - DNA, 25 bp, Homo sapien
ctaaacgaggtccagctgtaggtca

SEQ ID NO: 144874 - DNA, 25 bp, Homo sapien
ctgagactgtaaatcaaggttttct

SEQ ID NO: 144875 - DNA, 25 bp, Homo sapien
ggtcagagggtctggcataagccac

SEQ ID NO: 144876 - DNA, 25 bp, Homo sapien
ggtgacatgtcactgcaactctccc

SEQ ID NO: 144877 - DNA, 25 bp, Homo sapien
aggtgacatgtcactgcaactctcc

SEQ ID NO: 144878 - DNA, 25 bp, Homo sapien
gacatgtcactgcaactctccctca

SEQ ID NO: 144879 - DNA, 25 bp, Homo sapien
gtgacatgtcactgcaactctccct

SEQ ID NO: 144880 - DNA, 25 bp, Homo sapien
gatgacaacttgctctagcgtacct

SEQ ID NO: 144881 - DNA, 25 bp, Homo sapien
tgggctaagccaacttaatccttgg

SEQ ID NO: 144882 - DNA, 25 bp, Homo sapien
ggctagccaattttaagtgtcccca

SEQ ID NO: 144883 - DNA, 25 bp, Homo sapien
gattactggtgtatccccataggaa

SEQ ID NO: 144884 - DNA, 25 bp, Homo sapien
cctggttgcctagattacgatgtca

SEQ ID NO: 144885 - DNA, 25 bp, Homo sapien
tagatttcctacatggcagcttggg

SEQ ID NO: 144886 - DNA, 25 bp, Homo sapien
gattaggccctttgcaactgtgtct

SEQ ID NO: 144887 - DNA, 25 bp, Homo sapien
agttaaagtagtcaaagagcctgcc

SEQ ID NO: 144888 - DNA, 25 bp, Homo sapien
ggtggttcacttaccccatgttaca

SEQ ID NO: 144889 - DNA, 25 bp, Homo sapien
gtggttcacttaccccatgttacag

SEQ ID NO: 144890 - DNA, 25 bp, Homo sapien
ttactgcattataagtatccccaaa

SEQ ID NO: 144891 - DNA, 25 bp, Homo sapien
ttgttactgcattataagtatcccc

SEQ ID NO: 144892 - DNA, 25 bp, Homo sapien
tcccagtcctttccagtccacatgt

SEQ ID NO: 144893 - DNA, 25 bp, Homo sapien
tgacctctaacctcaactctcctgg

SEQ ID NO: 144894 - DNA, 25 bp, Homo sapien
taattgtcaaatctggatgtcaagg

SEQ ID NO: 144895 - DNA, 25 bp, Homo sapien
tgtggacaccctggtaccgattagt

SEQ ID NO: 144896 - DNA, 25 bp, Homo sapien
ccaaaaccatctcatccattaccat

SEQ ID NO: 144897 - DNA, 25 bp, Homo sapien
tccaaaaccatctcatccattacca

SEQ ID NO: 144898 - DNA, 25 bp, Homo sapien
tttccaaaaccatctcatccattac

SEQ ID NO: 144899 - DNA, 25 bp, Homo sapien
ttttccaaaaccatctcatccatta

SEQ ID NO: 144900 - DNA, 25 bp, Homo sapien
tcaatgtagactctatcagctgctc

SEQ ID NO: 144901 - DNA, 25 bp, Homo sapien
ggttgagtcaatgtagactctatca

SEQ ID NO: 144902 - DNA, 25 bp, Homo sapien
aataaattgacaagtatttggaatg

SEQ ID NO: 144903 - DNA, 25 bp, Homo sapien
aactcttggttgagtcaatgtagac

SEQ ID NO: 144904 - DNA, 25 bp, Homo sapien
gacttcagtaagaagcctgcttggc

SEQ ID NO: 144905 - DNA, 25 bp, Homo sapien
cactgtgaggtaaatgcaaagctcc

SEQ ID NO: 144906 - DNA, 25 bp, Homo sapien
tcagaaagagttactgggtcaccac

SEQ ID NO: 144907 - DNA, 25 bp, Homo sapien
tgactttataggatgtgaccacatg

SEQ ID NO: 144908 - DNA, 25 bp, Homo sapien
gcaatgcacggctgtaacaaatacc

SEQ ID NO: 144909 - DNA, 25 bp, Homo sapien
gactaccccggtcattgtcagaaac

SEQ ID NO: 144910 - DNA, 25 bp, Homo sapien
aaatcagagcggcacagcaatgcac

SEQ ID NO: 144911 - DNA, 25 bp, Homo sapien
cgaaggaatctcattgtgtagacgc

SEQ ID NO: 144912 - DNA, 25 bp, Homo sapien
tctggtcctgatggtcgaagtgcca

SEQ ID NO: 144913 - DNA, 25 bp, Homo sapien
tattcatatccaatgcttcctctgc

SEQ ID NO: 144914 - DNA, 25 bp, Homo sapien
tgcacttctgtgtaccatctggtcc

SEQ ID NO: 144915 - DNA, 25 bp, Homo sapien
tccagtccaaccagaatcaaaaagt

SEQ ID NO: 144916 - DNA, 25 bp, Homo sapien
tcttctgaagaccacattttaaggc

SEQ ID NO: 144917 - DNA, 25 bp, Homo sapien
taagatgatgattcttccttctgtt

SEQ ID NO: 144918 - DNA, 25 bp, Homo sapien
tccttctgtttaaacttgatagtca

SEQ ID NO: 144919 - DNA, 25 bp, Homo sapien
actttatctgtaagctctcccacac

SEQ ID NO: 144920 - DNA, 25 bp, Homo sapien
ccagatatgattatgggtccgagta

SEQ ID NO: 144921 - DNA, 25 bp, Homo sapien
tttgctttgagaacgaacccggata

SEQ ID NO: 144922 - DNA, 25 bp, Homo sapien
tatggactctaagctcaaactgagg

SEQ ID NO: 144923 - DNA, 25 bp, Homo sapien
gatacactgacacggcagttctgtg

SEQ ID NO: 144924 - DNA, 25 bp, Homo sapien
gtaacaaactatagaaatgatccct

SEQ ID NO: 144925 - DNA, 25 bp, Homo sapien
acttctctagtaacaaactatagaa

SEQ ID NO: 144926 - DNA, 25 bp, Homo sapien
tttagtgctctacacgttcagagaa

SEQ ID NO: 144927 - DNA, 25 bp, Homo sapien
aatgatccctgaaagtatagtcttg

SEQ ID NO: 144928 - DNA, 25 bp, Homo sapien
gaatgcccgaaagttcacaccagct

SEQ ID NO: 144929 - DNA, 25 bp, Homo sapien
tatgccagggccaatcctagtgttg

SEQ ID NO: 144930 - DNA, 25 bp, Homo sapien
tccttcttggaaggcagcttggccc

SEQ ID NO: 144931 - DNA, 25 bp, Homo sapien
gaggcaccgctgaccatatagaaga

SEQ ID NO: 144932 - DNA, 25 bp, Homo sapien
gtggttaggaatatctactgccttc

SEQ ID NO: 144933 - DNA, 25 bp, Homo sapien
catggacaggtaacgatttactgcc

SEQ ID NO: 144934 - DNA, 25 bp, Homo sapien
gctatctttaagtatattgccagaa

SEQ ID NO: 144935 - DNA, 25 bp, Homo sapien
cagctgcccaatagagtggttagga

SEQ ID NO: 144936 - DNA, 25 bp, Homo sapien
gaaccatgtgggaaaaggtgtagca

SEQ ID NO: 144937 - DNA, 25 bp, Homo sapien
taaggatctgagttgttcctgacca

SEQ ID NO: 144938 - DNA, 25 bp, Homo sapien
caactaccattggtgaaggcaccag

SEQ ID NO: 144939 - DNA, 25 bp, Homo sapien
ctcttggaacacagactttcgtcat

SEQ ID NO: 144940 - DNA, 25 bp, Homo sapien
ttggtatgcatcacagagattaggc

SEQ ID NO: 144941 - DNA, 25 bp, Homo sapien
tttggctgattaagcttcctggagt

SEQ ID NO: 144942 - DNA, 25 bp, Homo sapien
taggcaagtggaatccaatgtgtga

SEQ ID NO: 144943 - DNA, 25 bp, Homo sapien
gattaggcaagtggaatccaatgtg

SEQ ID NO: 144944 - DNA, 25 bp, Homo sapien
tggccatagagtggacttgtcccct

SEQ ID NO: 144945 - DNA, 25 bp, Homo sapien
tgatgacttgatgaacttagagagg

SEQ ID NO: 144946 - DNA, 25 bp, Homo sapien
gcagggaccactagaatgttcaaac

SEQ ID NO: 144947 - DNA, 25 bp, Homo sapien
cagtcagctagtaatgcagggacca

SEQ ID NO: 144948 - DNA, 25 bp, Homo sapien
gactgtgtgtgaccgaccagtcaaa

SEQ ID NO: 144949 - DNA, 25 bp, Homo sapien
tgaagactgtgtgtgaccgaccagt

SEQ ID NO: 144950 - DNA, 25 bp, Homo sapien
tgtgtgtgaccgaccagtcaaaacc

SEQ ID NO: 144951 - DNA, 25 bp, Homo sapien
tgtgaccgaccagtcaaaacctcct

SEQ ID NO: 144952 - DNA, 25 bp, Homo sapien
tccaataatccttaggagatgcaat

SEQ ID NO: 144953 - DNA, 25 bp, Homo sapien
gctttattgtagtcttccaataatc

SEQ ID NO: 144954 - DNA, 25 bp, Homo sapien
ccttaggagatgcaattatgtagat

SEQ ID NO: 144955 - DNA, 25 bp, Homo sapien
tagtcttccaataatccttaggaga

SEQ ID NO: 144956 - DNA, 25 bp, Homo sapien
catcatgctacagattttctacacc

SEQ ID NO: 144957 - DNA, 25 bp, Homo sapien
tacagattttctacacctccgtaag

SEQ ID NO: 144958 - DNA, 25 bp, Homo sapien
cagattttctacacctccgtaagga

SEQ ID NO: 144959 - DNA, 25 bp, Homo sapien
tgctacagattttctacacctccgt

SEQ ID NO: 144960 - DNA, 25 bp, Homo sapien
ccaatagccctgtagttagttcctt

SEQ ID NO: 144961 - DNA, 25 bp, Homo sapien
ttcacagaggatcaatggataccat

SEQ ID NO: 144962 - DNA, 25 bp, Homo sapien
tctcactgagcataatacaattgca

SEQ ID NO: 144963 - DNA, 25 bp, Homo sapien
aaccgattgcttgatttaaactgtg

SEQ ID NO: 144964 - DNA, 25 bp, Homo sapien
tggagatactatgtcaacctgttct

SEQ ID NO: 144965 - DNA, 25 bp, Homo sapien
accctgcagtccaccatccgtttag

SEQ ID NO: 144966 - DNA, 25 bp, Homo sapien
accatccgtttagtcccacacttca

SEQ ID NO: 144967 - DNA, 25 bp, Homo sapien
actatgtcaacctgttctctttgtc

SEQ ID NO: 144968 - DNA, 25 bp, Homo sapien
aacacggtagccacgagctccatgt

SEQ ID NO: 144969 - DNA, 25 bp, Homo sapien
tacgtatgtggctagtggtttctgc

SEQ ID NO: 144970 - DNA, 25 bp, Homo sapien
tgcagtagccacacttcgagtacgt

SEQ ID NO: 144971 - DNA, 25 bp, Homo sapien
tatattttgcctctccccgtaatcc

SEQ ID NO: 144972 - DNA, 25 bp, Homo sapien
cttctctatgtcactacagtcccca

SEQ ID NO: 144973 - DNA, 25 bp, Homo sapien
ttctctatgtcactacagtccccat

SEQ ID NO: 144974 - DNA, 25 bp, Homo sapien
gcttctctatgtcactacagtcccc

SEQ ID NO: 144975 - DNA, 25 bp, Homo sapien
gaagcaaaacatcgcatctttccat

SEQ ID NO: 144976 - DNA, 25 bp, Homo sapien
ggacaatgccaactcctgaagatct

SEQ ID NO: 144977 - DNA, 25 bp, Homo sapien
gatcttgctctaagtggtcaaaggg

SEQ ID NO: 144978 - DNA, 25 bp, Homo sapien
cagaagcaaaacatcgcatctttcc

SEQ ID NO: 144979 - DNA, 25 bp, Homo sapien
gattgagtaggttaatatttgcata

SEQ ID NO: 144980 - DNA, 25 bp, Homo sapien
ccaacagtcagttcaccactgagtt

SEQ ID NO: 144981 - DNA, 25 bp, Homo sapien
tttatgaggattgagtaggttaata

SEQ ID NO: 144982 - DNA, 25 bp, Homo sapien
ttctcatctgccaggccaacagtca

SEQ ID NO: 144983 - DNA, 25 bp, Homo sapien
ccagaaaggagctgtatatttcatt

SEQ ID NO: 144984 - DNA, 25 bp, Homo sapien
ttacccttgtccctgaaaggcacag

SEQ ID NO: 144985 - DNA, 25 bp, Homo sapien
cacagaaaggtcaggatatccatgg

SEQ ID NO: 144986 - DNA, 25 bp, Homo sapien
agcagaacaggtacattccagaaag

SEQ ID NO: 144987 - DNA, 25 bp, Homo sapien
tagcttcgtcatccaatgagacaat

SEQ ID NO: 144988 - DNA, 25 bp, Homo sapien
ttttaatgtgaatcaaagtggttgt

SEQ ID NO: 144989 - DNA, 25 bp, Homo sapien
tacaaaattttagcttcgtcatcca

SEQ ID NO: 144990 - DNA, 25 bp, Homo sapien
cagtagctcttgagtagatttccac

SEQ ID NO: 144991 - DNA, 25 bp, Homo sapien
agtcccgctctttagcctaggccgg

SEQ ID NO: 144992 - DNA, 25 bp, Homo sapien
gagtcccgctctttagcctaggccg

SEQ ID NO: 144993 - DNA, 25 bp, Homo sapien
acggagtcccgctctttagcctagg

SEQ ID NO: 144994 - DNA, 25 bp, Homo sapien
agacggagtcccgctctttagccta

SEQ ID NO: 144995 - DNA, 25 bp, Homo sapien
gctaacaaggcaagagacttggtgc

SEQ ID NO: 144996 - DNA, 25 bp, Homo sapien
taagtatgaagcgtaatggcatttg

SEQ ID NO: 144997 - DNA, 25 bp, Homo sapien
gctggtgtgcagtagtaagtatgaa

SEQ ID NO: 144998 - DNA, 25 bp, Homo sapien
cttgctcatcataaggcttacagct

SEQ ID NO: 144999 - DNA, 25 bp, Homo sapien
aagtgcaaaactgtagttgaggatg

SEQ ID NO: 145000 - DNA, 25 bp, Homo sapien
tcaagtgcaaaactgtagttgagga

SEQ ID NO: 145001 - DNA, 25 bp, Homo sapien
gtgcaaaactgtagttgaggatgta

SEQ ID NO: 145002 - DNA, 25 bp, Homo sapien
aactgtagttgaggatgtagtccat

SEQ ID NO: 145003 - DNA, 25 bp, Homo sapien
gccttaaaccaacaggagatctggt

SEQ ID NO: 145004 - DNA, 25 bp, Homo sapien
ctgccagtcacacggggtaagcctt

SEQ ID NO: 145005 - DNA, 25 bp, Homo sapien
gtaagccttaaaccaacaggagatc

SEQ ID NO: 145006 - DNA, 25 bp, Homo sapien
cttaaaccaacaggagatctggtat

SEQ ID NO: 145007 - DNA, 25 bp, Homo sapien
aaactgacgggtgcattcttgtaca

SEQ ID NO: 145008 - DNA, 25 bp, Homo sapien
ccagcagcaagaaaactgacgggtg

SEQ ID NO: 145009 - DNA, 25 bp, Homo sapien
gagagtgcttaggtcttcaccagca

SEQ ID NO: 145010 - DNA, 25 bp, Homo sapien
ccagaagaagagagtgcttaggtct

SEQ ID NO: 145011 - DNA, 25 bp, Homo sapien
tatccattgacccatccctgtacct

SEQ ID NO: 145012 - DNA, 25 bp, Homo sapien
ctttttcccatgcattttcctgaat

SEQ ID NO: 145013 - DNA, 25 bp, Homo sapien
ggagagagttctagcctttgtaaac

SEQ ID NO: 145014 - DNA, 25 bp, Homo sapien
tcctgaatgctaccggaagcattgg

SEQ ID NO: 145015 - DNA, 25 bp, Homo sapien
gttctcccagtgggttatcatttcc

SEQ ID NO: 145016 - DNA, 25 bp, Homo sapien
ccagtgggttatcatttcctcggca

SEQ ID NO: 145017 - DNA, 25 bp, Homo sapien
tgggttatcatttcctcggcaccag

SEQ ID NO: 145018 - DNA, 25 bp, Homo sapien
gttatcatttcctcggcaccagcca

SEQ ID NO: 145019 - DNA, 25 bp, Homo sapien
ccctcatattccaaatttgttttgc

SEQ ID NO: 145020 - DNA, 25 bp, Homo sapien
gtttctggggagcaggaaccctcat

SEQ ID NO: 145021 - DNA, 25 bp, Homo sapien
cctgctaatgggaaatcttgcagca

SEQ ID NO: 145022 - DNA, 25 bp, Homo sapien
tggtatcgaaacaaccaggtcctgc

SEQ ID NO: 145023 - DNA, 25 bp, Homo sapien
ggctgagtactacaaacagttttct

SEQ ID NO: 145024 - DNA, 25 bp, Homo sapien
tatacacacgataactagacaaatt

SEQ ID NO: 145025 - DNA, 25 bp, Homo sapien
gccccttgcatttgcttatacacac

SEQ ID NO: 145026 - DNA, 25 bp, Homo sapien
gcagtttctatcatgcagccccttg

SEQ ID NO: 145027 - DNA, 25 bp, Homo sapien
cagatgctgcaggttgttaacccag

SEQ ID NO: 145028 - DNA, 25 bp, Homo sapien
gtttgtgctgtcttatccacgaatc

SEQ ID NO: 145029 - DNA, 25 bp, Homo sapien
ccacgaatccgatagaaaagtccag

SEQ ID NO: 145030 - DNA, 25 bp, Homo sapien
taacccagttgtcagccacttctct

SEQ ID NO: 145031 - DNA, 25 bp, Homo sapien
tcaggctctaattttgataataggg

SEQ ID NO: 145032 - DNA, 25 bp, Homo sapien
tcagctgcctcttgtgttgaataat

SEQ ID NO: 145033 - DNA, 25 bp, Homo sapien
gctgcctcttgtgttgaataatttt

SEQ ID NO: 145034 - DNA, 25 bp, Homo sapien
caagattcagctgcctcttgtgttg

SEQ ID NO: 145035 - DNA, 25 bp, Homo sapien
cctcttgtgttgaataattttctgc

SEQ ID NO: 145036 - DNA, 25 bp, Homo sapien
tacatttcttacgaagtgttctttg

SEQ ID NO: 145037 - DNA, 25 bp, Homo sapien
ttcttacgaagtgttctttggaaca

SEQ ID NO: 145038 - DNA, 25 bp, Homo sapien
catttcttacgaagtgttctttgga

SEQ ID NO: 145039 - DNA, 25 bp, Homo sapien
cttacatttcttacgaagtgttctt

SEQ ID NO: 145040 - DNA, 25 bp, Homo sapien
ggtttcatctgtaatttatctttat

SEQ ID NO: 145041 - DNA, 25 bp, Homo sapien
tccagtttcccagataatatcactg

SEQ ID NO: 145042 - DNA, 25 bp, Homo sapien
tcccagataatatcactgctttcgc

SEQ ID NO: 145043 - DNA, 25 bp, Homo sapien
gctttcgccttgatgacctggtgtt

SEQ ID NO: 145044 - DNA, 25 bp, Homo sapien
tatggaactttcacctgattgaagc

SEQ ID NO: 145045 - DNA, 25 bp, Homo sapien
cattgccacatttccggatggttca

SEQ ID NO: 145046 - DNA, 25 bp, Homo sapien
ctattctcttagtgtccagtatgga

SEQ ID NO: 145047 - DNA, 25 bp, Homo sapien
gaagctcaaaacatggttgctgaat

SEQ ID NO: 145048 - DNA, 25 bp, Homo sapien
agtctatgggtgtcaataatagcca

SEQ ID NO: 145049 - DNA, 25 bp, Homo sapien
tcaagctccagcatcaacaaggaag

SEQ ID NO: 145050 - DNA, 25 bp, Homo sapien
catagggatagctcctcaagctcca

SEQ ID NO: 145051 - DNA, 25 bp, Homo sapien
cctgtgcagaactccgttgtaaatc

SEQ ID NO: 145052 - DNA, 25 bp, Homo sapien
gccaggacgtcgctcagagcgcaaa

SEQ ID NO: 145053 - DNA, 25 bp, Homo sapien
cacacccaaatgagccaggacgtcg

SEQ ID NO: 145054 - DNA, 25 bp, Homo sapien
gggacatcttcaaccgaatctttct

SEQ ID NO: 145055 - DNA, 25 bp, Homo sapien
cgctcagagcgcaaactgagatcca

SEQ ID NO: 145056 - DNA, 25 bp, Homo sapien
cagcttttttggaggcggttacata

SEQ ID NO: 145057 - DNA, 25 bp, Homo sapien
taagtcccaacattgacagcagagg

SEQ ID NO: 145058 - DNA, 25 bp, Homo sapien
cagcagagggtcagctttaagcgcc

SEQ ID NO: 145059 - DNA, 25 bp, Homo sapien
taagcgcctacattttgatccgcga

SEQ ID NO: 145060 - DNA, 25 bp, Homo sapien
aaaggagtagctcagcgccttggcg

SEQ ID NO: 145061 - DNA, 25 bp, Homo sapien
gcactgatgatatctcgagcgctcg

SEQ ID NO: 145062 - DNA, 25 bp, Homo sapien
caagtgacggcgacaggtttcgaac

SEQ ID NO: 145063 - DNA, 25 bp, Homo sapien
tcctccgcggtgacaatggataatg

SEQ ID NO: 145064 - DNA, 25 bp, Homo sapien
catccgaatccgacagggtcaggga

SEQ ID NO: 145065 - DNA, 25 bp, Homo sapien
ctgatcccagggctcggtggacacg

SEQ ID NO: 145066 - DNA, 25 bp, Homo sapien
gatcccggggcatggtattgtttta

SEQ ID NO: 145067 - DNA, 25 bp, Homo sapien
tcctgcccatcgttgagaactgcca

SEQ ID NO: 145068 - DNA, 25 bp, Homo sapien
tctctccaggtgaaagacaaagcct

SEQ ID NO: 145069 - DNA, 25 bp, Homo sapien
gaggtggattcgaccagcagacaga

SEQ ID NO: 145070 - DNA, 25 bp, Homo sapien
caaagtcgagagagagctaagctgc

SEQ ID NO: 145071 - DNA, 25 bp, Homo sapien
gcagacagatgtccccaaagtcgag

SEQ ID NO: 145072 - DNA, 25 bp, Homo sapien
tagaaaggcgtgatggccccagctc

SEQ ID NO: 145073 - DNA, 25 bp, Homo sapien
ctagaaaggcgtgatggccccagct

SEQ ID NO: 145074 - DNA, 25 bp, Homo sapien
gccagcccgaagaggacaagcaggg

SEQ ID NO: 145075 - DNA, 25 bp, Homo sapien
cgccagcccgaagaggacaagcagg

SEQ ID NO: 145076 - DNA, 25 bp, Homo sapien
gattccgcctcgtatgctctccaag

SEQ ID NO: 145077 - DNA, 25 bp, Homo sapien
tcgtatgctctccaagccttcgcca

SEQ ID NO: 145078 - DNA, 25 bp, Homo sapien
tcgatccggattccgcctcgtatgc

SEQ ID NO: 145079 - DNA, 25 bp, Homo sapien
tatgctctccaagccttcgccacct

SEQ ID NO: 145080 - DNA, 25 bp, Homo sapien
gaagcaaagcgccaacgacgacagt

SEQ ID NO: 145081 - DNA, 25 bp, Homo sapien
aacgacgacagtagcggtggcctca

SEQ ID NO: 145082 - DNA, 25 bp, Homo sapien
aaagcgccaacgacgacagtagcgg

SEQ ID NO: 145083 - DNA, 25 bp, Homo sapien
gccatcttgctgggaggttccagaa

SEQ ID NO: 145084 - DNA, 25 bp, Homo sapien
cacagtatgtgactaatacgtatcc

SEQ ID NO: 145085 - DNA, 25 bp, Homo sapien
tccccacagtatgtgactaatacgt

SEQ ID NO: 145086 - DNA, 25 bp, Homo sapien
cagtatgtgactaatacgtatcccg

SEQ ID NO: 145087 - DNA, 25 bp, Homo sapien
gtatgtgactaatacgtatcccggg

SEQ ID NO: 145088 - DNA, 25 bp, Homo sapien
cgcgcgggtcgctgttcctgttgca

SEQ ID NO: 145089 - DNA, 25 bp, Homo sapien
ttcgtgcgcgcgggtcgctgttcct

SEQ ID NO: 145090 - DNA, 25 bp, Homo sapien
cgtgcgcgcgggtcgctgttcctgt

SEQ ID NO: 145091 - DNA, 25 bp, Homo sapien
ccggttcgtgcgcgcgggtcgctgt

SEQ ID NO: 145092 - DNA, 25 bp, Homo sapien
aagacgacttggagaaacgcccgat

SEQ ID NO: 145093 - DNA, 25 bp, Homo sapien
tctccccgcagaagagtttaagtgg

SEQ ID NO: 145094 - DNA, 25 bp, Homo sapien
tgttgtaacaagtccggtgaggctg

SEQ ID NO: 145095 - DNA, 25 bp, Homo sapien
cacgcgagatgcaaccggagagttt

SEQ ID NO: 145096 - DNA, 25 bp, Homo sapien
tcggatttggaggatcccgggactc

SEQ ID NO: 145097 - DNA, 25 bp, Homo sapien
gctctcctccgacgcgtgtgtgcgg

SEQ ID NO: 145098 - DNA, 25 bp, Homo sapien
cgaaccccaaaagaagtacagcgag

SEQ ID NO: 145099 - DNA, 25 bp, Homo sapien
gtgtgtgcggacagctcggagccgg

SEQ ID NO: 145100 - DNA, 25 bp, Homo sapien
ggagctgcggcatcgtcttcccccg

SEQ ID NO: 145101 - DNA, 25 bp, Homo sapien
tccagggttcgggcatgccactttc

SEQ ID NO: 145102 - DNA, 25 bp, Homo sapien
cgcctccagggttcgggcatgccac

SEQ ID NO: 145103 - DNA, 25 bp, Homo sapien
gcctccagggttcgggcatgccact

SEQ ID NO: 145104 - DNA, 25 bp, Homo sapien
gagcctcagagcggcgcgcgcctcc

SEQ ID NO: 145105 - DNA, 25 bp, Homo sapien
tttgctgggtcctccgggtggcggc

SEQ ID NO: 145106 - DNA, 25 bp, Homo sapien
cggagcctcagagcggcgcgcgcct

SEQ ID NO: 145107 - DNA, 25 bp, Homo sapien
cttttgctgggtcctccgggtggcg

SEQ ID NO: 145108 - DNA, 25 bp, Homo sapien
tagtgatctgccagcgctcggtgct

SEQ ID NO: 145109 - DNA, 25 bp, Homo sapien
tcatccccgggatcttgaacttcgc

SEQ ID NO: 145110 - DNA, 25 bp, Homo sapien
ttactttctgccagacccgcgaggg

SEQ ID NO: 145111 - DNA, 25 bp, Homo sapien
gctgcccctctaacgtgactagtga

SEQ ID NO: 145112 - DNA, 25 bp, Homo sapien
tagatccagccggtcaaagtcaaac

SEQ ID NO: 145113 - DNA, 25 bp, Homo sapien
aactcgtatatgatcacatcatctg

SEQ ID NO: 145114 - DNA, 25 bp, Homo sapien
gccggtcaaagtcaaactcgtatat

SEQ ID NO: 145115 - DNA, 25 bp, Homo sapien
tcaaattagatccagccggtcaaag

SEQ ID NO: 145116 - DNA, 25 bp, Homo sapien
aagccgctcggcacccttgctgttt

SEQ ID NO: 145117 - DNA, 25 bp, Homo sapien
ttgaatcttctaaacagagagcaaa

SEQ ID NO: 145118 - DNA, 25 bp, Homo sapien
taacttcagacgcttcagatcccag

SEQ ID NO: 145119 - DNA, 25 bp, Homo sapien
gcaaaaccaaaagccgctcggcacc

SEQ ID NO: 145120 - DNA, 25 bp, Homo sapien
ccaagaatcgggatccaaccacgta

SEQ ID NO: 145121 - DNA, 25 bp, Homo sapien
gaaataaacatgctcactcttggaa

SEQ ID NO: 145122 - DNA, 25 bp, Homo sapien
tccacagggtttaatgacactaaca

SEQ ID NO: 145123 - DNA, 25 bp, Homo sapien
aaatgtcccttttgcactagcctgc

SEQ ID NO: 145124 - DNA, 25 bp, Homo sapien
ctggtgtcatcggcagaaggacaca

SEQ ID NO: 145125 - DNA, 25 bp, Homo sapien
gctgcaggcactggtgtcatcggca

SEQ ID NO: 145126 - DNA, 25 bp, Homo sapien
tgagctcagtgtcatagtctagaca

SEQ ID NO: 145127 - DNA, 25 bp, Homo sapien
atagtctagacatggaactccttgg

SEQ ID NO: 145128 - DNA, 25 bp, Homo sapien
aggagactgccgctaccaagagaga

SEQ ID NO: 145129 - DNA, 25 bp, Homo sapien
aaaagcactgattctccggtcagaa

SEQ ID NO: 145130 - DNA, 25 bp, Homo sapien
gaaggtacttttctagcagatggag

SEQ ID NO: 145131 - DNA, 25 bp, Homo sapien
caaagggcatgagaaggttacaata

SEQ ID NO: 145132 - DNA, 25 bp, Homo sapien
caaacctgctcagagtaaggcagaa

SEQ ID NO: 145133 - DNA, 25 bp, Homo sapien
tcaaggttgggtttaccagccaata

SEQ ID NO: 145134 - DNA, 25 bp, Homo sapien
caaggttgggtttaccagccaatat

SEQ ID NO: 145135 - DNA, 25 bp, Homo sapien
atttgtctgacaaacctgctcagag

SEQ ID NO: 145136 - DNA, 25 bp, Homo sapien
cctctcagaggccacacactttatg

SEQ ID NO: 145137 - DNA, 25 bp, Homo sapien
tggtcattccgttgtccattatcac

SEQ ID NO: 145138 - DNA, 25 bp, Homo sapien
gaggccacacactttatgctattat

SEQ ID NO: 145139 - DNA, 25 bp, Homo sapien
cctctggtcattccgttgtccatta

SEQ ID NO: 145140 - DNA, 25 bp, Homo sapien
ccatggacaaataactgaagggtct

SEQ ID NO: 145141 - DNA, 25 bp, Homo sapien
tgtagtccagacaaacaaggaagcc

SEQ ID NO: 145142 - DNA, 25 bp, Homo sapien
cataggctgattcttgacggatgca

SEQ ID NO: 145143 - DNA, 25 bp, Homo sapien
aaggattccattagactggcccagg

SEQ ID NO: 145144 - DNA, 25 bp, Homo sapien
tacggaattgccttatctatgcagg

SEQ ID NO: 145145 - DNA, 25 bp, Homo sapien
taggcaagatgtactgtggccccac

SEQ ID NO: 145146 - DNA, 25 bp, Homo sapien
catatcattttacattggagggcaa

SEQ ID NO: 145147 - DNA, 25 bp, Homo sapien
gaatggtaacacagccttacggaat

SEQ ID NO: 145148 - DNA, 25 bp, Homo sapien
tctcactggcaagaagtgaattaag

SEQ ID NO: 145149 - DNA, 25 bp, Homo sapien
cagtaatctcagtcgggtccattaa

SEQ ID NO: 145150 - DNA, 25 bp, Homo sapien
taagtcatcagtaatctcagtcggg

SEQ ID NO: 145151 - DNA, 25 bp, Homo sapien
gcaagaagtgaattaagtcatcagt

SEQ ID NO: 145152 - DNA, 25 bp, Homo sapien
tatcatcctgaaacaattgctgagc

SEQ ID NO: 145153 - DNA, 25 bp, Homo sapien
gcgacggaattatcaacattatcat

SEQ ID NO: 145154 - DNA, 25 bp, Homo sapien
tcctgaaacaattgctgagctccca

SEQ ID NO: 145155 - DNA, 25 bp, Homo sapien
ctgcaccagaaaacccaatgatgcg

SEQ ID NO: 145156 - DNA, 25 bp, Homo sapien
tgtctcggaaggattgcaggaatac

SEQ ID NO: 145157 - DNA, 25 bp, Homo sapien
aaggcgccataatcagccctccaaa

SEQ ID NO: 145158 - DNA, 25 bp, Homo sapien
tcctcacatcaaaggcgccataatc

SEQ ID NO: 145159 - DNA, 25 bp, Homo sapien
gcaggaatacctcctcacatcaaag

SEQ ID NO: 145160 - DNA, 25 bp, Homo sapien
catttgacaagtatctaccctaccc

SEQ ID NO: 145161 - DNA, 25 bp, Homo sapien
tgaataagttatgctctttaaaaaa

SEQ ID NO: 145162 - DNA, 25 bp, Homo sapien
gagaagggaggccttgcttcatatt

SEQ ID NO: 145163 - DNA, 25 bp, Homo sapien
cctaccctttaagtgaatgagtata

SEQ ID NO: 145164 - DNA, 25 bp, Homo sapien
taggaagaccatttaaactagcact

SEQ ID NO: 145165 - DNA, 25 bp, Homo sapien
tacgtccactctgttgtaagggcac

SEQ ID NO: 145166 - DNA, 25 bp, Homo sapien
tatatgaggcttcagtaaatacttg

SEQ ID NO: 145167 - DNA, 25 bp, Homo sapien
ctttgaactttctggtatatgaggc

SEQ ID NO: 145168 - DNA, 25 bp, Homo sapien
tcacaaccctaactatttagatcaa

SEQ ID NO: 145169 - DNA, 25 bp, Homo sapien
cattccttggattagattaaaacct

SEQ ID NO: 145170 - DNA, 25 bp, Homo sapien
ctaaagagaagtaaccattccttgg

SEQ ID NO: 145171 - DNA, 25 bp, Homo sapien
gattaaaacctagactaatattcac

SEQ ID NO: 145172 - DNA, 25 bp, Homo sapien
tgctaccaccttagattttagctct

SEQ ID NO: 145173 - DNA, 25 bp, Homo sapien
aactaagctttagtatgctaccacc

SEQ ID NO: 145174 - DNA, 25 bp, Homo sapien
tggcctcataagtcaggatctgaat

SEQ ID NO: 145175 - DNA, 25 bp, Homo sapien
tatcaggactgctaacctttttggc

SEQ ID NO: 145176 - DNA, 25 bp, Homo sapien
agtctatggatgctttccacagaag

SEQ ID NO: 145177 - DNA, 25 bp, Homo sapien
gctttctacggaagtctatggatgc

SEQ ID NO: 145178 - DNA, 25 bp, Homo sapien
taagcaaagtagctctgagaagtgt

SEQ ID NO: 145179 - DNA, 25 bp, Homo sapien
tctaccatgaactagcgacataagc

SEQ ID NO: 145180 - DNA, 25 bp, Homo sapien
tgcatatcgacatttatccaggaac

SEQ ID NO: 145181 - DNA, 25 bp, Homo sapien
gcattaggtagcaaggagcactgta

SEQ ID NO: 145182 - DNA, 25 bp, Homo sapien
tggcaatagcagtatcagagcaatc

SEQ ID NO: 145183 - DNA, 25 bp, Homo sapien
tcccgaaggttattatctgctctgg

SEQ ID NO: 145184 - DNA, 25 bp, Homo sapien
ttctgcatgaagagctatgacagtg

SEQ ID NO: 145185 - DNA, 25 bp, Homo sapien
tgttttcaggctgcaatgtacacag

SEQ ID NO: 145186 - DNA, 25 bp, Homo sapien
tccatgttctttcaccaatgaccag

SEQ ID NO: 145187 - DNA, 25 bp, Homo sapien
gcatgtgcacctatctatgtgtaca

SEQ ID NO: 145188 - DNA, 25 bp, Homo sapien
ttatagacaacgtataatcatgggt

SEQ ID NO: 145189 - DNA, 25 bp, Homo sapien
tgtgaaggggctttatagacaacgt

SEQ ID NO: 145190 - DNA, 25 bp, Homo sapien
tagacaacgtataatcatgggtaga

SEQ ID NO: 145191 - DNA, 25 bp, Homo sapien
caacgtataatcatgggtagatata

SEQ ID NO: 145192 - DNA, 25 bp, Homo sapien
ccagaacatcattggagggaaactg

SEQ ID NO: 145193 - DNA, 25 bp, Homo sapien
gagtcccagaacatcattggaggga

SEQ ID NO: 145194 - DNA, 25 bp, Homo sapien
tcccagaacatcattggagggaaac

SEQ ID NO: 145195 - DNA, 25 bp, Homo sapien
gaacatcattggagggaaactgggc

SEQ ID NO: 145196 - DNA, 25 bp, Homo sapien
tctggcttcatgattctagacttag

SEQ ID NO: 145197 - DNA, 25 bp, Homo sapien
tcacatcttctcacctatagacaca

SEQ ID NO: 145198 - DNA, 25 bp, Homo sapien
gtatgttcacatcttctcacctata

SEQ ID NO: 145199 - DNA, 25 bp, Homo sapien
tagtttcaattaactgtatgttcac

SEQ ID NO: 145200 - DNA, 25 bp, Homo sapien
gtaacggagtaattgcttgtctgca

SEQ ID NO: 145201 - DNA, 25 bp, Homo sapien
gacagtgagccgttaacaaggtaaa

SEQ ID NO: 145202 - DNA, 25 bp, Homo sapien
tattggtgcaatttggagcatgcgt

SEQ ID NO: 145203 - DNA, 25 bp, Homo sapien
tgtagtgctctacatactgacagtg

SEQ ID NO: 145204 - DNA, 25 bp, Homo sapien
tgtacagctcccattaccatcaaac

SEQ ID NO: 145205 - DNA, 25 bp, Homo sapien
cactgctcaggagatagcttctgaa

SEQ ID NO: 145206 - DNA, 25 bp, Homo sapien
caggagagaattacacactgctcag

SEQ ID NO: 145207 - DNA, 25 bp, Homo sapien
atacatgtacagctcccattaccat

SEQ ID NO: 145208 - DNA, 25 bp, Homo sapien
ccatgagcatagtctttaatatatc

SEQ ID NO: 145209 - DNA, 25 bp, Homo sapien
tgatgcaatcatgtgacgacattct

SEQ ID NO: 145210 - DNA, 25 bp, Homo sapien
attgaaccgtgtggcctgaatactg

SEQ ID NO: 145211 - DNA, 25 bp, Homo sapien
cattttgaagaacatgatgcaatca

SEQ ID NO: 145212 - DNA, 25 bp, Homo sapien
cattctttcccgttattgaaccgtg

SEQ ID NO: 145213 - DNA, 25 bp, Homo sapien
gctagataagtagaacaagaagccc

SEQ ID NO: 145214 - DNA, 25 bp, Homo sapien
tacaacactgtgaaaagggcgctag

SEQ ID NO: 145215 - DNA, 25 bp, Homo sapien
gcagggttctgttacaatccattga

SEQ ID NO: 145216 - DNA, 25 bp, Homo sapien
ttgaaagctatgtctcttcttgcag

SEQ ID NO: 145217 - DNA, 25 bp, Homo sapien
catagaaatggtaaggcagagagcc

SEQ ID NO: 145218 - DNA, 25 bp, Homo sapien
tacaaattgcataccaagactggca

SEQ ID NO: 145219 - DNA, 25 bp, Homo sapien
cagaaaacggtgtgcatgacagaat

SEQ ID NO: 145220 - DNA, 25 bp, Homo sapien
tctcatcgtccagatgtaggagctg

SEQ ID NO: 145221 - DNA, 25 bp, Homo sapien
ggaaaccacagcgttcaggaaactg

SEQ ID NO: 145222 - DNA, 25 bp, Homo sapien
tgtggcagctcaaatatgatgcttt

SEQ ID NO: 145223 - DNA, 25 bp, Homo sapien
tccagtgtccatgggattctgaggg

SEQ ID NO: 145224 - DNA, 25 bp, Homo sapien
gggacatgtcaaatgtggcagctca

SEQ ID NO: 145225 - DNA, 25 bp, Homo sapien
gttggcacacccagtagaaggagct

SEQ ID NO: 145226 - DNA, 25 bp, Homo sapien
aaagcaactggccaatcatggtgga

SEQ ID NO: 145227 - DNA, 25 bp, Homo sapien
tgaggaagacacaacaagccagatt

SEQ ID NO: 145228 - DNA, 25 bp, Homo sapien
tgtcaaaaggagatcatgtaaaccc

SEQ ID NO: 145229 - DNA, 25 bp, Homo sapien
ctgaaaatctgaactactgggacct

SEQ ID NO: 145230 - DNA, 25 bp, Homo sapien
caacaaattggccagtgaggaggtc

SEQ ID NO: 145231 - DNA, 25 bp, Homo sapien
tagtatgcttcacggtttcctggga

SEQ ID NO: 145232 - DNA, 25 bp, Homo sapien
tttaatgggcagtaccaaagcctct

SEQ ID NO: 145233 - DNA, 25 bp, Homo sapien
caaccagtgtgtactgccattgcat

SEQ ID NO: 145234 - DNA, 25 bp, Homo sapien
ttggaattagattttcggaaattga

SEQ ID NO: 145235 - DNA, 25 bp, Homo sapien
gtccaaccagtgtgtactgccattg

SEQ ID NO: 145236 - DNA, 25 bp, Homo sapien
accagtgtgtactgccattgcattt

SEQ ID NO: 145237 - DNA, 25 bp, Homo sapien
caactcagtttgacacaatctccag

SEQ ID NO: 145238 - DNA, 25 bp, Homo sapien
caatctccagagacagtgatagcca

SEQ ID NO: 145239 - DNA, 25 bp, Homo sapien
aaagtctgctcacgaccttctcgcg

SEQ ID NO: 145240 - DNA, 25 bp, Homo sapien
tcctgaataaaggccaaagtctgct

SEQ ID NO: 145241 - DNA, 25 bp, Homo sapien
caccatccagtagagctgcctgtga

SEQ ID NO: 145242 - DNA, 25 bp, Homo sapien
cctttggagtgccttctggtttgag

SEQ ID NO: 145243 - DNA, 25 bp, Homo sapien
gatggccatccaggtctcaatgaga

SEQ ID NO: 145244 - DNA, 25 bp, Homo sapien
aaggcagccatatttcaccatccag

SEQ ID NO: 145245 - DNA, 25 bp, Homo sapien
tgttatgagccacgtgaagccaagg

SEQ ID NO: 145246 - DNA, 25 bp, Homo sapien
tacttgtgctatgaaggcccacgaa

SEQ ID NO: 145247 - DNA, 25 bp, Homo sapien
ggaagggaacaaccgccatattgct

SEQ ID NO: 145248 - DNA, 25 bp, Homo sapien
ctggaagactcaaggactgctgctg

SEQ ID NO: 145249 - DNA, 25 bp, Homo sapien
taaggtcgatgctccagttactccc

SEQ ID NO: 145250 - DNA, 25 bp, Homo sapien
tactgagtgcctaactacgtaccag

SEQ ID NO: 145251 - DNA, 25 bp, Homo sapien
taccaggcaccttatttgagatgtc

SEQ ID NO: 145252 - DNA, 25 bp, Homo sapien
taaactctgactggcctaattctag

SEQ ID NO: 145253 - DNA, 25 bp, Homo sapien
gaatattctttaagcggaccaggag

SEQ ID NO: 145254 - DNA, 25 bp, Homo sapien
ccagggctgtgctaggagcgtctct

SEQ ID NO: 145255 - DNA, 25 bp, Homo sapien
tctttctagggcatggcaatcaaca

SEQ ID NO: 145256 - DNA, 25 bp, Homo sapien
tatttcctgttagaggcactggcag

SEQ ID NO: 145257 - DNA, 25 bp, Homo sapien
tgcacaggaagcgattctctgctca

SEQ ID NO: 145258 - DNA, 25 bp, Homo sapien
cgggcaggacctgccctgtttgcag

SEQ ID NO: 145259 - DNA, 25 bp, Homo sapien
aactgcacaggaagcgattctctgc

SEQ ID NO: 145260 - DNA, 25 bp, Homo sapien
gctctggggggcatactgtcatgtc

SEQ ID NO: 145261 - DNA, 25 bp, Homo sapien
gggatgaaccaaacctgcaagagat

SEQ ID NO: 145262 - DNA, 25 bp, Homo sapien
tcttgacctttcaaccctgagggca

SEQ ID NO: 145263 - DNA, 25 bp, Homo sapien
gagggaaactggagctcaaggtcac

SEQ ID NO: 145264 - DNA, 25 bp, Homo sapien
tggatggccacgaaaggaaaaggct

SEQ ID NO: 145265 - DNA, 25 bp, Homo sapien
ttcacctagacagacctcatggcag

SEQ ID NO: 145266 - DNA, 25 bp, Homo sapien
tactcccgcagaacatcaagaacag

SEQ ID NO: 145267 - DNA, 25 bp, Homo sapien
caagggcccttgtagctttatatct

SEQ ID NO: 145268 - DNA, 25 bp, Homo sapien
tagaatgccctctatacacacgcac

SEQ ID NO: 145269 - DNA, 25 bp, Homo sapien
attgattgatggctgataaatgaac

SEQ ID NO: 145270 - DNA, 25 bp, Homo sapien
gattgatggctgataaatgaactaa

SEQ ID NO: 145271 - DNA, 25 bp, Homo sapien
cgtattttaaatattgattgatggc

SEQ ID NO: 145272 - DNA, 25 bp, Homo sapien
aatattgattgatggctgataaatg

SEQ ID NO: 145273 - DNA, 25 bp, Homo sapien
tacttggcactagaacaacatgggt

SEQ ID NO: 145274 - DNA, 25 bp, Homo sapien
tgggcattatggaagtatacttggc

SEQ ID NO: 145275 - DNA, 25 bp, Homo sapien
ataaaagtagcaccaagtgtacctg

SEQ ID NO: 145276 - DNA, 25 bp, Homo sapien
taaacatcagcacttgatcctagga

SEQ ID NO: 145277 - DNA, 25 bp, Homo sapien
taaatccgcgaggacagtttctatg

SEQ ID NO: 145278 - DNA, 25 bp, Homo sapien
aatccgcgaggacagtttctatgtc

SEQ ID NO: 145279 - DNA, 25 bp, Homo sapien
ctaaatccgcgaggacagtttctat

SEQ ID NO: 145280 - DNA, 25 bp, Homo sapien
aaatccgcgaggacagtttctatgt

SEQ ID NO: 145281 - DNA, 25 bp, Homo sapien
gtccatctggaacttcaaaccaaat

SEQ ID NO: 145282 - DNA, 25 bp, Homo sapien
ccaaatctttcaagctctttttctg

SEQ ID NO: 145283 - DNA, 25 bp, Homo sapien
accaaatctttcaagctctttttct

SEQ ID NO: 145284 - DNA, 25 bp, Homo sapien
catctggaacttcaaaccaaatctt

SEQ ID NO: 145285 - DNA, 25 bp, Homo sapien
tgccacccaccagcatgaaaggaga

SEQ ID NO: 145286 - DNA, 25 bp, Homo sapien
tgaatgttccgctaaggcagacaca

SEQ ID NO: 145287 - DNA, 25 bp, Homo sapien
aatgagcacattggcgattaccagg

SEQ ID NO: 145288 - DNA, 25 bp, Homo sapien
taggcataagtaaaggaagatctgg

SEQ ID NO: 145289 - DNA, 25 bp, Homo sapien
gattctgaactctctgtgtcaaaga

SEQ ID NO: 145290 - DNA, 25 bp, Homo sapien
aaagaatcatgtcggcactaacagg

SEQ ID NO: 145291 - DNA, 25 bp, Homo sapien
caggttcactgcagttaggccccaa

SEQ ID NO: 145292 - DNA, 25 bp, Homo sapien
aaagggctatgaattcttactggca

SEQ ID NO: 145293 - DNA, 25 bp, Homo sapien
tcccaagcttgactggactgtaggc

SEQ ID NO: 145294 - DNA, 25 bp, Homo sapien
gagaatcctacgcttgaaatgacag

SEQ ID NO: 145295 - DNA, 25 bp, Homo sapien
ttgtgcatataatggccaccagagg

SEQ ID NO: 145296 - DNA, 25 bp, Homo sapien
gtaagttacattctgactcagtcca

SEQ ID NO: 145297 - DNA, 25 bp, Homo sapien
acaggtttatacacaaccagaatgc

SEQ ID NO: 145298 - DNA, 25 bp, Homo sapien
tacaggtttatacacaaccagaatg

SEQ ID NO: 145299 - DNA, 25 bp, Homo sapien
cttttacaggtttatacacaaccag

SEQ ID NO: 145300 - DNA, 25 bp, Homo sapien
tttacaggtttatacacaaccagaa

SEQ ID NO: 145301 - DNA, 25 bp, Homo sapien
tctggagacagaggacctgaacagc

SEQ ID NO: 145302 - DNA, 25 bp, Homo sapien
tgttaacttgggcacactgcgtcac

SEQ ID NO: 145303 - DNA, 25 bp, Homo sapien
taactaagaggaccaattaggcact

SEQ ID NO: 145304 - DNA, 25 bp, Homo sapien
taatatttcacggttgttagagggc

SEQ ID NO: 145305 - DNA, 25 bp, Homo sapien
agaatagccaactgtcttgatgctc

SEQ ID NO: 145306 - DNA, 25 bp, Homo sapien
gatgctctgaaagctattcctgata

SEQ ID NO: 145307 - DNA, 25 bp, Homo sapien
atagcaactggttgggtagttggtc

SEQ ID NO: 145308 - DNA, 25 bp, Homo sapien
ctattcctgatagcaactggttggg

SEQ ID NO: 145309 - DNA, 25 bp, Homo sapien
actactgcctgcacggtgtttggat

SEQ ID NO: 145310 - DNA, 25 bp, Homo sapien
caactactgcctgcacggtgtttgg

SEQ ID NO: 145311 - DNA, 25 bp, Homo sapien
aactactgcctgcacggtgtttgga

SEQ ID NO: 145312 - DNA, 25 bp, Homo sapien
tcaactactgcctgcacggtgtttg

SEQ ID NO: 145313 - DNA, 25 bp, Homo sapien
gggagggagatcccactgatcatcc

SEQ ID NO: 145314 - DNA, 25 bp, Homo sapien
gagggagatcccactgatcatccct

SEQ ID NO: 145315 - DNA, 25 bp, Homo sapien
ggagatcccactgatcatccctggc

SEQ ID NO: 145316 - DNA, 25 bp, Homo sapien
gggagatcccactgatcatccctgg

SEQ ID NO: 145317 - DNA, 25 bp, Homo sapien
tggcaggtgctaggtaaaaacagaa

SEQ ID NO: 145318 - DNA, 25 bp, Homo sapien
tctctcctagtgctgcctaagaagg

SEQ ID NO: 145319 - DNA, 25 bp, Homo sapien
aaaggagaccatagcttcaaaagcc

SEQ ID NO: 145320 - DNA, 25 bp, Homo sapien
ggagcctgtattccaggagcactta

SEQ ID NO: 145321 - DNA, 25 bp, Homo sapien
cccatgaggtatcaggaaaaacact

SEQ ID NO: 145322 - DNA, 25 bp, Homo sapien
catggtcctgtggaaagagttctac

SEQ ID NO: 145323 - DNA, 25 bp, Homo sapien
gaaagagttctaccctagcccatga

SEQ ID NO: 145324 - DNA, 25 bp, Homo sapien
aggtaatcatggtcctgtggaaaga

SEQ ID NO: 145325 - DNA, 25 bp, Homo sapien
taatcacttttgtccccgggagaca

SEQ ID NO: 145326 - DNA, 25 bp, Homo sapien
gagttacttgtcatcaccggagccc

SEQ ID NO: 145327 - DNA, 25 bp, Homo sapien
gcagcatgagcctaacctggcaaga

SEQ ID NO: 145328 - DNA, 25 bp, Homo sapien
gaaaagctaaacctcaggcccagaa

SEQ ID NO: 145329 - DNA, 25 bp, Homo sapien
tcttcttttgtaggtcaagccagcc

SEQ ID NO: 145330 - DNA, 25 bp, Homo sapien
cctgagggcgtatggtaaaataatc

SEQ ID NO: 145331 - DNA, 25 bp, Homo sapien
aagccagccttgattagcctacgaa

SEQ ID NO: 145332 - DNA, 25 bp, Homo sapien
tccagctagagggaacgtcctgagg

SEQ ID NO: 145333 - DNA, 25 bp, Homo sapien
tacaggtagaccgtgtgcaccgact

SEQ ID NO: 145334 - DNA, 25 bp, Homo sapien
caagctcgtgagattctggaaggcc

SEQ ID NO: 145335 - DNA, 25 bp, Homo sapien
agagtacagttacgccctccgggat

SEQ ID NO: 145336 - DNA, 25 bp, Homo sapien
tttggacacctgtgagtagagcccc

SEQ ID NO: 145337 - DNA, 25 bp, Homo sapien
tgggagatcgggaggagggtgggac

SEQ ID NO: 145338 - DNA, 25 bp, Homo sapien
ggaggagggtgggacagcgaattac

SEQ ID NO: 145339 - DNA, 25 bp, Homo sapien
ctgggagatcgggaggagggtggga

SEQ ID NO: 145340 - DNA, 25 bp, Homo sapien
tcgggaggagggtgggacagcgaat

SEQ ID NO: 145341 - DNA, 25 bp, Homo sapien
ccaagggttattccgagcagtgagc

SEQ ID NO: 145342 - DNA, 25 bp, Homo sapien
tccacttctgggaggtgtagcgccc

SEQ ID NO: 145343 - DNA, 25 bp, Homo sapien
catcacggtgaagagagagagccag

SEQ ID NO: 145344 - DNA, 25 bp, Homo sapien
caaatggtgtcttctaccgcgcggt

SEQ ID NO: 145345 - DNA, 25 bp, Homo sapien
tcaggccgggttaacttatctcacg

SEQ ID NO: 145346 - DNA, 25 bp, Homo sapien
taattgtccgccttgataacgctgg

SEQ ID NO: 145347 - DNA, 25 bp, Homo sapien
tatcacataggaccagggaagcatg

SEQ ID NO: 145348 - DNA, 25 bp, Homo sapien
tgctacaacatcagactggtccctg

SEQ ID NO: 145349 - DNA, 25 bp, Homo sapien
tatctagaattaagcacggacatcc

SEQ ID NO: 145350 - DNA, 25 bp, Homo sapien
tcaaaagtggaacaggatcaaagtc

SEQ ID NO: 145351 - DNA, 25 bp, Homo sapien
tgtgtctacgacatacagctgcagt

SEQ ID NO: 145352 - DNA, 25 bp, Homo sapien
tcaaagtcagtccaaggtggaaacc

SEQ ID NO: 145353 - DNA, 25 bp, Homo sapien
aacctcagggagaatgtctaatata

SEQ ID NO: 145354 - DNA, 25 bp, Homo sapien
ctcagggagaatgtctaatatattt

SEQ ID NO: 145355 - DNA, 25 bp, Homo sapien
cctcagggagaatgtctaatatatt

SEQ ID NO: 145356 - DNA, 25 bp, Homo sapien
cagactggtcacgtactttttgttt

SEQ ID NO: 145357 - DNA, 25 bp, Homo sapien
tatgataggtgctagtagaaaatga

SEQ ID NO: 145358 - DNA, 25 bp, Homo sapien
gaaatgactaagaccattatgatag

SEQ ID NO: 145359 - DNA, 25 bp, Homo sapien
ttctgatttgtgtgaaatgactaag

SEQ ID NO: 145360 - DNA, 25 bp, Homo sapien
gaccattatgataggtgctagtaga

SEQ ID NO: 145361 - DNA, 25 bp, Homo sapien
tgtggactgcaatattgcctcgtgt

SEQ ID NO: 145362 - DNA, 25 bp, Homo sapien
caatattgcctcgtgttctgaatgg

SEQ ID NO: 145363 - DNA, 25 bp, Homo sapien
tctgcagccaaggtccggagatcaa

SEQ ID NO: 145364 - DNA, 25 bp, Homo sapien
tctgaatggatgcttcaatcacagc

SEQ ID NO: 145365 - DNA, 25 bp, Homo sapien
caaagtgtgcgacatggtaggtctc

SEQ ID NO: 145366 - DNA, 25 bp, Homo sapien
tcagccccttatcagagagaacaca

SEQ ID NO: 145367 - DNA, 25 bp, Homo sapien
tgctataagcaaagacaccaatggg

SEQ ID NO: 145368 - DNA, 25 bp, Homo sapien
tatgagcgacacacacttggcaatg

SEQ ID NO: 145369 - DNA, 25 bp, Homo sapien
gaatagatacatttccttgagtgcc

SEQ ID NO: 145370 - DNA, 25 bp, Homo sapien
tttaaaaccaatagcgtggctgggc

SEQ ID NO: 145371 - DNA, 25 bp, Homo sapien
gagtgcctattgaaaggatggacag

SEQ ID NO: 145372 - DNA, 25 bp, Homo sapien
tgtgctataaattctgcggcagaaa

SEQ ID NO: 145373 - DNA, 25 bp, Homo sapien
gatttggctaagaacgcatttcact

SEQ ID NO: 145374 - DNA, 25 bp, Homo sapien
tgaatccccggaagaccctaacata

SEQ ID NO: 145375 - DNA, 25 bp, Homo sapien
tgtgaggcctctgaactcagcctag

SEQ ID NO: 145376 - DNA, 25 bp, Homo sapien
cctgatctgtgagtttcttaatggc

SEQ ID NO: 145377 - DNA, 25 bp, Homo sapien
tacgttatcacacagtttgcacaag

SEQ ID NO: 145378 - DNA, 25 bp, Homo sapien
caattaagagtccatggagtcatgc

SEQ ID NO: 145379 - DNA, 25 bp, Homo sapien
tttagattgagttccatcgtggtgc

SEQ ID NO: 145380 - DNA, 25 bp, Homo sapien
gagtcatgctcagtggtaattcctg

SEQ ID NO: 145381 - DNA, 25 bp, Homo sapien
tccactgagaagttatgatagctcc

SEQ ID NO: 145382 - DNA, 25 bp, Homo sapien
gagaagttatgatagctccatcatg

SEQ ID NO: 145383 - DNA, 25 bp, Homo sapien
ttatgatagctccatcatgaaaaat

SEQ ID NO: 145384 - DNA, 25 bp, Homo sapien
gtatccactgagaagttatgatagc

SEQ ID NO: 145385 - DNA, 25 bp, Homo sapien
tctgtccatcgcaatggcccgtgct

SEQ ID NO: 145386 - DNA, 25 bp, Homo sapien
tctgcggtggcgtctgtccatcgca

SEQ ID NO: 145387 - DNA, 25 bp, Homo sapien
gcaatggcccgtgctccaaactctt

SEQ ID NO: 145388 - DNA, 25 bp, Homo sapien
tggcgtctgtccatcgcaatggccc

SEQ ID NO: 145389 - DNA, 25 bp, Homo sapien
ccaaagccttggctttaataggctc

SEQ ID NO: 145390 - DNA, 25 bp, Homo sapien
tctgaagcaatcacattggtcacca

SEQ ID NO: 145391 - DNA, 25 bp, Homo sapien
atctcaggtaataatttcagctgct

SEQ ID NO: 145392 - DNA, 25 bp, Homo sapien
cttggctttaataggctcttcattc

SEQ ID NO: 145393 - DNA, 25 bp, Homo sapien
ctggtgtacctccctttgagtctgt

SEQ ID NO: 145394 - DNA, 25 bp, Homo sapien
tacctccctttgagtctgttgccat

SEQ ID NO: 145395 - DNA, 25 bp, Homo sapien
tgtacctccctttgagtctgttgcc

SEQ ID NO: 145396 - DNA, 25 bp, Homo sapien
ggtgtacctccctttgagtctgttg

SEQ ID NO: 145397 - DNA, 25 bp, Homo sapien
cactctgctgcaactggactaaatg

SEQ ID NO: 145398 - DNA, 25 bp, Homo sapien
tgttgtcgtttgttctctgtcactc

SEQ ID NO: 145399 - DNA, 25 bp, Homo sapien
ccccacttaaacagggagcacattt

SEQ ID NO: 145400 - DNA, 25 bp, Homo sapien
gagcacattttgtgggcagcatcta

SEQ ID NO: 145401 - DNA, 25 bp, Homo sapien
caccaggaactcagcagagcaagtt

SEQ ID NO: 145402 - DNA, 25 bp, Homo sapien
gccttgccttaagtgaaatcattct

SEQ ID NO: 145403 - DNA, 25 bp, Homo sapien
tctggctgataagaatatgggtaac

SEQ ID NO: 145404 - DNA, 25 bp, Homo sapien
tggcatagacataaacatcaaggta

SEQ ID NO: 145405 - DNA, 25 bp, Homo sapien
caagaaagcccaagttatagcgcgc

SEQ ID NO: 145406 - DNA, 25 bp, Homo sapien
tttgacgaacttctaaggagacgga

SEQ ID NO: 145407 - DNA, 25 bp, Homo sapien
gagacggattttgcactcgtgaaag

SEQ ID NO: 145408 - DNA, 25 bp, Homo sapien
tatagcgcgctgctcttgtgaccct

SEQ ID NO: 145409 - DNA, 25 bp, Homo sapien
aatagggaaatatattagtctgcag

SEQ ID NO: 145410 - DNA, 25 bp, Homo sapien
ttacaggcaagcaccttaggtgcct

SEQ ID NO: 145411 - DNA, 25 bp, Homo sapien
gaaaggtacactgcaacccataatt

SEQ ID NO: 145412 - DNA, 25 bp, Homo sapien
gcaacccataattcagttaggaaat

SEQ ID NO: 145413 - DNA, 25 bp, Homo sapien
catagaacatggaaaacccccttgc

SEQ ID NO: 145414 - DNA, 25 bp, Homo sapien
gaaaaaatggggcaagacgaatgtc

SEQ ID NO: 145415 - DNA, 25 bp, Homo sapien
gcaagacgaatgtcaccccagaaat

SEQ ID NO: 145416 - DNA, 25 bp, Homo sapien
aaaagttctaaacaaggcaatcagc

SEQ ID NO: 145417 - DNA, 25 bp, Homo sapien
cacaaccagggatattgcaattatt

SEQ ID NO: 145418 - DNA, 25 bp, Homo sapien
ttctaaacaaggcaatcagctgaat

SEQ ID NO: 145419 - DNA, 25 bp, Homo sapien
ggcacaaccagggatattgcaatta

SEQ ID NO: 145420 - DNA, 25 bp, Homo sapien
gggagtacttagtgtcagatggaaa

SEQ ID NO: 145421 - DNA, 25 bp, Homo sapien
tggaaagtgggtagcgaaatgggac

SEQ ID NO: 145422 - DNA, 25 bp, Homo sapien
tagccatcttgttgcttccaccagt

SEQ ID NO: 145423 - DNA, 25 bp, Homo sapien
tccaccagtgtagaaactgttagtt

SEQ ID NO: 145424 - DNA, 25 bp, Homo sapien
aatccagtgtctcgtgaaggctgct

SEQ ID NO: 145425 - DNA, 25 bp, Homo sapien
aaatccagtgtctcgtgaaggctgc

SEQ ID NO: 145426 - DNA, 25 bp, Homo sapien
gaaatccagtgtctcgtgaaggctg

SEQ ID NO: 145427 - DNA, 25 bp, Homo sapien
ccacataccccgacaaatggccatt

SEQ ID NO: 145428 - DNA, 25 bp, Homo sapien
aatggccattcctccgagacttcaa

SEQ ID NO: 145429 - DNA, 25 bp, Homo sapien
cttcaagaggtcaactgaagaagaa

SEQ ID NO: 145430 - DNA, 25 bp, Homo sapien
cattcctccgagacttcaagaggtc

SEQ ID NO: 145431 - DNA, 25 bp, Homo sapien
ttgattccggccagtgaacttcccc

SEQ ID NO: 145432 - DNA, 25 bp, Homo sapien
tttcatcgcatttgcctcctaccag

SEQ ID NO: 145433 - DNA, 25 bp, Homo sapien
tcattgattccggccagtgaacttc

SEQ ID NO: 145434 - DNA, 25 bp, Homo sapien
agcaggagtctttcatcgcatttgc

SEQ ID NO: 145435 - DNA, 25 bp, Homo sapien
aaatggaatggattgcctttcccag

SEQ ID NO: 145436 - DNA, 25 bp, Homo sapien
taaatggaatggattgcctttccca

SEQ ID NO: 145437 - DNA, 25 bp, Homo sapien
ctttcccagcccgaaatgcgtaatc

SEQ ID NO: 145438 - DNA, 25 bp, Homo sapien
cccgaaatgcgtaatctttggttag

SEQ ID NO: 145439 - DNA, 25 bp, Homo sapien
taccatttggtctaatttcctgatg

SEQ ID NO: 145440 - DNA, 25 bp, Homo sapien
actggagaatgtaggttggctaatg

SEQ ID NO: 145441 - DNA, 25 bp, Homo sapien
ggaattaaagatcctagccacatat

SEQ ID NO: 145442 - DNA, 25 bp, Homo sapien
gatgtctgctccaatcattgtatgt

SEQ ID NO: 145443 - DNA, 25 bp, Homo sapien
tgttaaccacttccatcttttcttg

SEQ ID NO: 145444 - DNA, 25 bp, Homo sapien
cttgttaaccacttccatcttttct

SEQ ID NO: 145445 - DNA, 25 bp, Homo sapien
accacttccatcttttcttggtctt

SEQ ID NO: 145446 - DNA, 25 bp, Homo sapien
cttcctgtgcctcttccccacacat

SEQ ID NO: 145447 - DNA, 25 bp, Homo sapien
gtttggcacaccttgcagtttagca

SEQ ID NO: 145448 - DNA, 25 bp, Homo sapien
cttggagggcccatggtataacttc

SEQ ID NO: 145449 - DNA, 25 bp, Homo sapien
attatgatccctgagctatttgcgg

SEQ ID NO: 145450 - DNA, 25 bp, Homo sapien
tacagacttgcgtacaagagactga

SEQ ID NO: 145451 - DNA, 25 bp, Homo sapien
acttgaagtgagtcggctctgggca

SEQ ID NO: 145452 - DNA, 25 bp, Homo sapien
cagatcccaagtcatcagttagcca

SEQ ID NO: 145453 - DNA, 25 bp, Homo sapien
ttagccaggctaaaaggacttgaag

SEQ ID NO: 145454 - DNA, 25 bp, Homo sapien
tgttgagtgtaaggtcagatcccaa

SEQ ID NO: 145455 - DNA, 25 bp, Homo sapien
ccctctttaaccagcctcatctgtg

SEQ ID NO: 145456 - DNA, 25 bp, Homo sapien
tttaccctcttcaataattcgagaa

SEQ ID NO: 145457 - DNA, 25 bp, Homo sapien
tttgaggccctctttaaccagcctc

SEQ ID NO: 145458 - DNA, 25 bp, Homo sapien
gcctcatctgtgacaccaccttctt

SEQ ID NO: 145459 - DNA, 25 bp, Homo sapien
gcagctctaggagaatggtcaatat

SEQ ID NO: 145460 - DNA, 25 bp, Homo sapien
cctagcttggatcccctaaagagta

SEQ ID NO: 145461 - DNA, 25 bp, Homo sapien
aaaaagtgcatttggccccgtgaat

SEQ ID NO: 145462 - DNA, 25 bp, Homo sapien
tatgtggagggttgttatctgcagc

SEQ ID NO: 145463 - DNA, 25 bp, Homo sapien
gacaagttcataggaatgatcctgg

SEQ ID NO: 145464 - DNA, 25 bp, Homo sapien
ggcagattgaaaggagccaggccat

SEQ ID NO: 145465 - DNA, 25 bp, Homo sapien
gagttgtcagcaggaaccattcctc

SEQ ID NO: 145466 - DNA, 25 bp, Homo sapien
tcctcacaggtccaaaagaataagc

SEQ ID NO: 145467 - DNA, 25 bp, Homo sapien
acaaaacaattgcaatcatggccgc

SEQ ID NO: 145468 - DNA, 25 bp, Homo sapien
gcatcttggtaatgacaccacaggc

SEQ ID NO: 145469 - DNA, 25 bp, Homo sapien
tgtaactacagctaaatgccagcgc

SEQ ID NO: 145470 - DNA, 25 bp, Homo sapien
tgccagcgctgcaactgaaatactt

SEQ ID NO: 145471 - DNA, 25 bp, Homo sapien
gacaattcaagttgtactcttttga

SEQ ID NO: 145472 - DNA, 25 bp, Homo sapien
aatgagttctccaaacgacaggtca

SEQ ID NO: 145473 - DNA, 25 bp, Homo sapien
cgacaggtcagtgtattcaaaattt

SEQ ID NO: 145474 - DNA, 25 bp, Homo sapien
ttcattgtcacaagttttccgcagg

SEQ ID NO: 145475 - DNA, 25 bp, Homo sapien
ttctctagctcagaacctacatcca

SEQ ID NO: 145476 - DNA, 25 bp, Homo sapien
cttcctccaacccagtcttagttga

SEQ ID NO: 145477 - DNA, 25 bp, Homo sapien
tcttagttgacaaagtgtcaccacc

SEQ ID NO: 145478 - DNA, 25 bp, Homo sapien
caccaccttctctagctcagaacct

SEQ ID NO: 145479 - DNA, 25 bp, Homo sapien
gatatctgtatctaggctcagtaca

SEQ ID NO: 145480 - DNA, 25 bp, Homo sapien
gaggaaccctatatcgatatctgta

SEQ ID NO: 145481 - DNA, 25 bp, Homo sapien
ttatttgtgctgttaacttcttgaa

SEQ ID NO: 145482 - DNA, 25 bp, Homo sapien
taaagctcgagatgcaacgtctgca

SEQ ID NO: 145483 - DNA, 25 bp, Homo sapien
ggaatgcatagcaatgccagccttc

SEQ ID NO: 145484 - DNA, 25 bp, Homo sapien
tgaattatagatgtacttctgaggg

SEQ ID NO: 145485 - DNA, 25 bp, Homo sapien
ccacttgaataagggaagggaatgc

SEQ ID NO: 145486 - DNA, 25 bp, Homo sapien
cacagcttctgatttggtccatgaa

SEQ ID NO: 145487 - DNA, 25 bp, Homo sapien
ttttctcaatggaagcgttcgtgtc

SEQ ID NO: 145488 - DNA, 25 bp, Homo sapien
cagcgagtgttacaacttgattaga

SEQ ID NO: 145489 - DNA, 25 bp, Homo sapien
gttcgtgtctcacgggcttcaagga

SEQ ID NO: 145490 - DNA, 25 bp, Homo sapien
cagcagtcccactgagacgagaagt

SEQ ID NO: 145491 - DNA, 25 bp, Homo sapien
ctagccaagattcaatattcttaag

SEQ ID NO: 145492 - DNA, 25 bp, Homo sapien
gcctagccaagattcaatattctta

SEQ ID NO: 145493 - DNA, 25 bp, Homo sapien
cctagccaagattcaatattcttaa

SEQ ID NO: 145494 - DNA, 25 bp, Homo sapien
atccctttgtggttagagatcatac

SEQ ID NO: 145495 - DNA, 25 bp, Homo sapien
aaccactgatttttagccttgatag

SEQ ID NO: 145496 - DNA, 25 bp, Homo sapien
gagttcttctttgaccctggaataa

SEQ ID NO: 145497 - DNA, 25 bp, Homo sapien
tgtacttcatcggaaatatgttgag

SEQ ID NO: 145498 - DNA, 25 bp, Homo sapien
cgtatcttcaccacccggccctctt

SEQ ID NO: 145499 - DNA, 25 bp, Homo sapien
ccgtatcttcaccacccggccctct

SEQ ID NO: 145500 - DNA, 25 bp, Homo sapien
ttccaccgtatcttcaccacccggc

SEQ ID NO: 145501 - DNA, 25 bp, Homo sapien
atcttccaccgtatcttcaccaccc

SEQ ID NO: 145502 - DNA, 25 bp, Homo sapien
cacaaaagtgctatgtctctggtcc

SEQ ID NO: 145503 - DNA, 25 bp, Homo sapien
gcagttaccctggatcttaaattag

SEQ ID NO: 145504 - DNA, 25 bp, Homo sapien
aactgtgtggcaggttgaatcaaac

SEQ ID NO: 145505 - DNA, 25 bp, Homo sapien
gagagctgccacgaaaagagatacc

SEQ ID NO: 145506 - DNA, 25 bp, Homo sapien
tagctggtgacttgacagttgaaca

SEQ ID NO: 145507 - DNA, 25 bp, Homo sapien
tattcacatccaacaaaaacaaggg

SEQ ID NO: 145508 - DNA, 25 bp, Homo sapien
tccgtaagtctgtatgttttgaaaa

SEQ ID NO: 145509 - DNA, 25 bp, Homo sapien
aatattgtttatgcaacatcaaggc

SEQ ID NO: 145510 - DNA, 25 bp, Homo sapien
aaagagatgatgctcaaaaatctgt

SEQ ID NO: 145511 - DNA, 25 bp, Homo sapien
ctgagtcaggtggatcgcatgaacc

SEQ ID NO: 145512 - DNA, 25 bp, Homo sapien
gagtcaggtggatcgcatgaaccca

SEQ ID NO: 145513 - DNA, 25 bp, Homo sapien
ggctgagtcaggtggatcgcatgaa

SEQ ID NO: 145514 - DNA, 25 bp, Homo sapien
agtcaggtggatcgcatgaacccag

SEQ ID NO: 145515 - DNA, 25 bp, Homo sapien
tcaactgttcccatgtgtactgggc

SEQ ID NO: 145516 - DNA, 25 bp, Homo sapien
tctcgggctgctatgagccagtggc

SEQ ID NO: 145517 - DNA, 25 bp, Homo sapien
catctttggaggttgcacttagggc

SEQ ID NO: 145518 - DNA, 25 bp, Homo sapien
tatcctggtaatggaagctctccct

SEQ ID NO: 145519 - DNA, 25 bp, Homo sapien
gctagttctgacgtttccaaatatt

SEQ ID NO: 145520 - DNA, 25 bp, Homo sapien
gttctttgctagttctgacgtttcc

SEQ ID NO: 145521 - DNA, 25 bp, Homo sapien
tatttctcaccaacttgtggctgaa

SEQ ID NO: 145522 - DNA, 25 bp, Homo sapien
atatttctcaccaacttgtggctga

SEQ ID NO: 145523 - DNA, 25 bp, Homo sapien
cagatctcagaagagttagcctcac

SEQ ID NO: 145524 - DNA, 25 bp, Homo sapien
tgcctcttgcagatctcagaagagt

SEQ ID NO: 145525 - DNA, 25 bp, Homo sapien
tgcagatctcagaagagttagcctc

SEQ ID NO: 145526 - DNA, 25 bp, Homo sapien
cttgcagatctcagaagagttagcc

SEQ ID NO: 145527 - DNA, 25 bp, Homo sapien
caagcttatagagaacagctctggt

SEQ ID NO: 145528 - DNA, 25 bp, Homo sapien
cacacgatctctttgtttgaggaag

SEQ ID NO: 145529 - DNA, 25 bp, Homo sapien
tggtgagtcttcatcacacgatctc

SEQ ID NO: 145530 - DNA, 25 bp, Homo sapien
gaggaagaatagtcctgttcatttt

SEQ ID NO: 145531 - DNA, 25 bp, Homo sapien
tgccatccgaaagccgtcaatggat

SEQ ID NO: 145532 - DNA, 25 bp, Homo sapien
ttagtgccatccgaaagccgtcaat

SEQ ID NO: 145533 - DNA, 25 bp, Homo sapien
gggcaaattgctgcgtttaggaaag

SEQ ID NO: 145534 - DNA, 25 bp, Homo sapien
catccgaaagccgtcaatggatggg

SEQ ID NO: 145535 - DNA, 25 bp, Homo sapien
cagttacactaccaaagcttcagaa

SEQ ID NO: 145536 - DNA, 25 bp, Homo sapien
aaaagtcatggaactcaacttctgg

SEQ ID NO: 145537 - DNA, 25 bp, Homo sapien
tttccaattccaggactcttacagt

SEQ ID NO: 145538 - DNA, 25 bp, Homo sapien
ggaactcaacttctggatttgcttt

SEQ ID NO: 145539 - DNA, 25 bp, Homo sapien
caccaaagaagccaatgtgtgaatg

SEQ ID NO: 145540 - DNA, 25 bp, Homo sapien
tctcatcctcgatgaattaaaaata

SEQ ID NO: 145541 - DNA, 25 bp, Homo sapien
ggattcagctagtctctcatcagaa

SEQ ID NO: 145542 - DNA, 25 bp, Homo sapien
gtgtgaatgcttgtctagaatagaa

SEQ ID NO: 145543 - DNA, 25 bp, Homo sapien
aaggccactgatcaaggcctttggg

SEQ ID NO: 145544 - DNA, 25 bp, Homo sapien
ggccactgatcaaggcctttgggta

SEQ ID NO: 145545 - DNA, 25 bp, Homo sapien
ggtagtctgcagtttaattaagacc

SEQ ID NO: 145546 - DNA, 25 bp, Homo sapien
gcagtttaattaagaccaaattaca

SEQ ID NO: 145547 - DNA, 25 bp, Homo sapien
gaaggaataacaatagagtcagtgg

SEQ ID NO: 145548 - DNA, 25 bp, Homo sapien
gaggagctctgtgtttaattggcac

SEQ ID NO: 145549 - DNA, 25 bp, Homo sapien
tgatacaattagtgctgcccggcca

SEQ ID NO: 145550 - DNA, 25 bp, Homo sapien
gagtcagtggaaaaatagccctatc

SEQ ID NO: 145551 - DNA, 25 bp, Homo sapien
aaagctcctgcgcagttttcatgct

SEQ ID NO: 145552 - DNA, 25 bp, Homo sapien
gtcctttatagaatctgaaggcagc

SEQ ID NO: 145553 - DNA, 25 bp, Homo sapien
cctttatagaatctgaaggcagcaa

SEQ ID NO: 145554 - DNA, 25 bp, Homo sapien
aagctcctgcgcagttttcatgctg

SEQ ID NO: 145555 - DNA, 25 bp, Homo sapien
tgcatttatataactcataaagctt

SEQ ID NO: 145556 - DNA, 25 bp, Homo sapien
cattcttacataatatattaactaa

SEQ ID NO: 145557 - DNA, 25 bp, Homo sapien
aaaaaatgtattgtttacctatgca

SEQ ID NO: 145558 - DNA, 25 bp, Homo sapien
tattaactaacttattacttagcaa

SEQ ID NO: 145559 - DNA, 25 bp, Homo sapien
caaatgacccggacttctgtggctc

SEQ ID NO: 145560 - DNA, 25 bp, Homo sapien
cttagtgaagtgagagcctgtgctt

SEQ ID NO: 145561 - DNA, 25 bp, Homo sapien
cagattggagttttgccagggaact

SEQ ID NO: 145562 - DNA, 25 bp, Homo sapien
ggaaacagagactcttagtgaagtg

SEQ ID NO: 145563 - DNA, 25 bp, Homo sapien
agatggggtccttgttccatggtca

SEQ ID NO: 145564 - DNA, 25 bp, Homo sapien
aaagatggggtccttgttccatggt

SEQ ID NO: 145565 - DNA, 25 bp, Homo sapien
tgttccatggtcatgaaaatttagg

SEQ ID NO: 145566 - DNA, 25 bp, Homo sapien
ggtccttgttccatggtcatgaaaa

SEQ ID NO: 145567 - DNA, 25 bp, Homo sapien
tatccattaagaggatatgttggca

SEQ ID NO: 145568 - DNA, 25 bp, Homo sapien
tattgtatccattaagaggatatgt

SEQ ID NO: 145569 - DNA, 25 bp, Homo sapien
ttgtatccattaagaggatatgttg

SEQ ID NO: 145570 - DNA, 25 bp, Homo sapien
tttattgtatccattaagaggatat

SEQ ID NO: 145571 - DNA, 25 bp, Homo sapien
tggactgatgcagttaaatttcagg

SEQ ID NO: 145572 - DNA, 25 bp, Homo sapien
cctattaccctttattggactgatg

SEQ ID NO: 145573 - DNA, 25 bp, Homo sapien
tcccaaccagagtctgtcttgttaa

SEQ ID NO: 145574 - DNA, 25 bp, Homo sapien
ggtaccaccctagtgctacacagaa

SEQ ID NO: 145575 - DNA, 25 bp, Homo sapien
ggtaaattagccatagtaattacat

SEQ ID NO: 145576 - DNA, 25 bp, Homo sapien
taaattagccatagtaattacatgg

SEQ ID NO: 145577 - DNA, 25 bp, Homo sapien
gaaggtaaattagccatagtaatta

SEQ ID NO: 145578 - DNA, 25 bp, Homo sapien
aggtaaattagccatagtaattaca

SEQ ID NO: 145579 - DNA, 25 bp, Homo sapien
actcattctggtagtgaacatagaa

SEQ ID NO: 145580 - DNA, 25 bp, Homo sapien
agaggattggctctctgccaacaac

SEQ ID NO: 145581 - DNA, 25 bp, Homo sapien
caactcattctggtagtgaacatag

SEQ ID NO: 145582 - DNA, 25 bp, Homo sapien
aacaactcattctggtagtgaacat

SEQ ID NO: 145583 - DNA, 25 bp, Homo sapien
acatccacaccaaaatctgtgacca

SEQ ID NO: 145584 - DNA, 25 bp, Homo sapien
ccacaccaaaatctgtgaccaggat

SEQ ID NO: 145585 - DNA, 25 bp, Homo sapien
atccacaccaaaatctgtgaccagg

SEQ ID NO: 145586 - DNA, 25 bp, Homo sapien
ctccctttttaccacatccacacca

SEQ ID NO: 145587 - DNA, 25 bp, Homo sapien
caatatttggttttgcatcaatgag

SEQ ID NO: 145588 - DNA, 25 bp, Homo sapien
tcacatagaataattgtcttcaacc

SEQ ID NO: 145589 - DNA, 25 bp, Homo sapien
ccgaggggcaattaggctggttcca

SEQ ID NO: 145590 - DNA, 25 bp, Homo sapien
aagctcttcagtggcgatttctaag

SEQ ID NO: 145591 - DNA, 25 bp, Homo sapien
gtttgaaagcatgtagtacttcccc

SEQ ID NO: 145592 - DNA, 25 bp, Homo sapien
ttgaagcggcagtgtacagtaccag

SEQ ID NO: 145593 - DNA, 25 bp, Homo sapien
aacagactaataacagcccgggagg

SEQ ID NO: 145594 - DNA, 25 bp, Homo sapien
tttacactgcacctggagttgatga

SEQ ID NO: 145595 - DNA, 25 bp, Homo sapien
agtaaagctagcaggccccaggcaa

SEQ ID NO: 145596 - DNA, 25 bp, Homo sapien
gattcttgggctctatgtgggacac

SEQ ID NO: 145597 - DNA, 25 bp, Homo sapien
taggccactgagaatttgcactatc

SEQ ID NO: 145598 - DNA, 25 bp, Homo sapien
tgaggcagacaaatagccaagggct

SEQ ID NO: 145599 - DNA, 25 bp, Homo sapien
ttgagctcccaagtgactctctgat

SEQ ID NO: 145600 - DNA, 25 bp, Homo sapien
cagacatcctagtcacttccacagg

SEQ ID NO: 145601 - DNA, 25 bp, Homo sapien
cttgagctcccaagtgactctctga

SEQ ID NO: 145602 - DNA, 25 bp, Homo sapien
tgagctcccaagtgactctctgatg

SEQ ID NO: 145603 - DNA, 25 bp, Homo sapien
gaatctgcgctaagttgagctgcct

SEQ ID NO: 145604 - DNA, 25 bp, Homo sapien
aggagatgactaaggaatctgcgct

SEQ ID NO: 145605 - DNA, 25 bp, Homo sapien
gatgactaaggaatctgcgctaagt

SEQ ID NO: 145606 - DNA, 25 bp, Homo sapien
gactaaggaatctgcgctaagttga

SEQ ID NO: 145607 - DNA, 25 bp, Homo sapien
tcactcagtgtatttggagaagcct

SEQ ID NO: 145608 - DNA, 25 bp, Homo sapien
cttgcgttcatgaatgttcccactt

SEQ ID NO: 145609 - DNA, 25 bp, Homo sapien
tcttgcgttcatgaatgttcccact

SEQ ID NO: 145610 - DNA, 25 bp, Homo sapien
cagtgtatttggagaagcctgatga

SEQ ID NO: 145611 - DNA, 25 bp, Homo sapien
gaaacggattgtcttctttgcaaca

SEQ ID NO: 145612 - DNA, 25 bp, Homo sapien
taaactcaagcattcctgtgatgaa

SEQ ID NO: 145613 - DNA, 25 bp, Homo sapien
gaatcccagagcttagaagatcacc

SEQ ID NO: 145614 - DNA, 25 bp, Homo sapien
gatcccacagattctaaggtttaag

SEQ ID NO: 145615 - DNA, 25 bp, Homo sapien
ggtggtaatacgttcatatttgact

SEQ ID NO: 145616 - DNA, 25 bp, Homo sapien
tgttgtaagaggtagggtttgggca

SEQ ID NO: 145617 - DNA, 25 bp, Homo sapien
caactctatacttggtggtaatacg

SEQ ID NO: 145618 - DNA, 25 bp, Homo sapien
cgttcatatttgactgttgtaagag

SEQ ID NO: 145619 - DNA, 25 bp, Homo sapien
gctcttgtcttatggttcttcttga

SEQ ID NO: 145620 - DNA, 25 bp, Homo sapien
agactgcaacaggagacttcaacat

SEQ ID NO: 145621 - DNA, 25 bp, Homo sapien
gaagactgcaacaggagacttcaac

SEQ ID NO: 145622 - DNA, 25 bp, Homo sapien
cttgctcttgtcttatggttcttct

SEQ ID NO: 145623 - DNA, 25 bp, Homo sapien
ctattagctttatgggagtattgcc

SEQ ID NO: 145624 - DNA, 25 bp, Homo sapien
gagtattgcctgatgtagcgctgaa

SEQ ID NO: 145625 - DNA, 25 bp, Homo sapien
gggtcatgttacctttcaattctgc

SEQ ID NO: 145626 - DNA, 25 bp, Homo sapien
ccaggaacagagcagggcaattagc

SEQ ID NO: 145627 - DNA, 25 bp, Homo sapien
tcagaaagaacgctgtgttcaaata

SEQ ID NO: 145628 - DNA, 25 bp, Homo sapien
caagtctataccactataggagatc

SEQ ID NO: 145629 - DNA, 25 bp, Homo sapien
ctttaggaactctgcccaagtctat

SEQ ID NO: 145630 - DNA, 25 bp, Homo sapien
gaggacatgcagacaacacactatt

SEQ ID NO: 145631 - DNA, 25 bp, Homo sapien
caaagcataacatgctgcgatattc

SEQ ID NO: 145632 - DNA, 25 bp, Homo sapien
ctatttcgtgtgagaagaagctgat

SEQ ID NO: 145633 - DNA, 25 bp, Homo sapien
ctgaaatgctcgttaattacccgga

SEQ ID NO: 145634 - DNA, 25 bp, Homo sapien
ttacccggaaatttgcagagcagca

SEQ ID NO: 145635 - DNA, 25 bp, Homo sapien
aaagccagttgggaatggtgtttgc

SEQ ID NO: 145636 - DNA, 25 bp, Homo sapien
cagatggtaaagccagttgggaatg

SEQ ID NO: 145637 - DNA, 25 bp, Homo sapien
tgtttgcctttcagtcaaacttgat

SEQ ID NO: 145638 - DNA, 25 bp, Homo sapien
cctttcagtcaaacttgatctgggt

SEQ ID NO: 145639 - DNA, 25 bp, Homo sapien
gcactttatagcctgtgagttgtct

SEQ ID NO: 145640 - DNA, 25 bp, Homo sapien
actttatagcctgtgagttgtctct

SEQ ID NO: 145641 - DNA, 25 bp, Homo sapien
cactttatagcctgtgagttgtctc

SEQ ID NO: 145642 - DNA, 25 bp, Homo sapien
cactgtaactcgcaaatgagtccga

SEQ ID NO: 145643 - DNA, 25 bp, Homo sapien
ttctcatcactgtaactcgcaaatg

SEQ ID NO: 145644 - DNA, 25 bp, Homo sapien
ctagaggtgtaggacaattgttgac

SEQ ID NO: 145645 - DNA, 25 bp, Homo sapien
tgagtccgaactcctagaggtgtag

SEQ ID NO: 145646 - DNA, 25 bp, Homo sapien
gatcagactgacgaaggaatgtttc

SEQ ID NO: 145647 - DNA, 25 bp, Homo sapien
taggagcggatctagaaccaggaac

SEQ ID NO: 145648 - DNA, 25 bp, Homo sapien
gaatgtttctagaccctgttgctct

SEQ ID NO: 145649 - DNA, 25 bp, Homo sapien
gaacgctggtttttggagatcatca

SEQ ID NO: 145650 - DNA, 25 bp, Homo sapien
tgtgacaagtattaagtgacaagtt

SEQ ID NO: 145651 - DNA, 25 bp, Homo sapien
ttggctggctgacgatagaaggatt

SEQ ID NO: 145652 - DNA, 25 bp, Homo sapien
ccaggattggctggctgacgataga

SEQ ID NO: 145653 - DNA, 25 bp, Homo sapien
caagttttccaggattggctggctg

SEQ ID NO: 145654 - DNA, 25 bp, Homo sapien
ttgatccactctttcacatgacttt

SEQ ID NO: 145655 - DNA, 25 bp, Homo sapien
atgagcggttgcagtccacaggcat

SEQ ID NO: 145656 - DNA, 25 bp, Homo sapien
ttttgtggggtaccaccttgatcca

SEQ ID NO: 145657 - DNA, 25 bp, Homo sapien
acttttcccatgagcggttgcagtc

SEQ ID NO: 145658 - DNA, 25 bp, Homo sapien
acgcgataaacatctctacagatgg

SEQ ID NO: 145659 - DNA, 25 bp, Homo sapien
ggtgttgaggaagcgtatgtggggc

SEQ ID NO: 145660 - DNA, 25 bp, Homo sapien
ttaacacgcgataaacatctctaca

SEQ ID NO: 145661 - DNA, 25 bp, Homo sapien
aacacgcgataaacatctctacaga

SEQ ID NO: 145662 - DNA, 25 bp, Homo sapien
gactctatgtctgtgaaccttctgg

SEQ ID NO: 145663 - DNA, 25 bp, Homo sapien
aattatattcttgggtgaaagcagc

SEQ ID NO: 145664 - DNA, 25 bp, Homo sapien
cagctgttaccctatcactgctcaa

SEQ ID NO: 145665 - DNA, 25 bp, Homo sapien
tgctcaaatcaatatcgactctatg

SEQ ID NO: 145666 - DNA, 25 bp, Homo sapien
tcagttaaccaagatgtggttttct

SEQ ID NO: 145667 - DNA, 25 bp, Homo sapien
ctcagttaaccaagatgtggttttc

SEQ ID NO: 145668 - DNA, 25 bp, Homo sapien
tttagtaggtgcaccaggagaatgc

SEQ ID NO: 145669 - DNA, 25 bp, Homo sapien
tatttagtaggtgcaccaggagaat

SEQ ID NO: 145670 - DNA, 25 bp, Homo sapien
tagtaggtgcaccaggagaatgcca

SEQ ID NO: 145671 - DNA, 25 bp, Homo sapien
agtaggtgcaccaggagaatgccac

SEQ ID NO: 145672 - DNA, 25 bp, Homo sapien
ttgcatccttgcaaactgccatgtt

SEQ ID NO: 145673 - DNA, 25 bp, Homo sapien
tgccatgttcacccattctccaaat

SEQ ID NO: 145674 - DNA, 25 bp, Homo sapien
gccatgttcacccattctccaaata

SEQ ID NO: 145675 - DNA, 25 bp, Homo sapien
gcatccttgcaaactgccatgttca

SEQ ID NO: 145676 - DNA, 25 bp, Homo sapien
cctgaaggcctgctgagtgatgctg

SEQ ID NO: 145677 - DNA, 25 bp, Homo sapien
gcaatgggaagcaaacgtcctcaag

SEQ ID NO: 145678 - DNA, 25 bp, Homo sapien
ctgtgcctgatgagactcttcttgc

SEQ ID NO: 145679 - DNA, 25 bp, Homo sapien
ttgcttcgcttgaatgaccttgcct

SEQ ID NO: 145680 - DNA, 25 bp, Homo sapien
ttcctagctgttggcagcctagtct

SEQ ID NO: 145681 - DNA, 25 bp, Homo sapien
cacttctttcctagctgttggcagc

SEQ ID NO: 145682 - DNA, 25 bp, Homo sapien
tctttcctagctgttggcagcctag

SEQ ID NO: 145683 - DNA, 25 bp, Homo sapien
tcttcacacttctttcctagctgtt

SEQ ID NO: 145684 - DNA, 25 bp, Homo sapien
agtgacataggcctgcttgagacat

SEQ ID NO: 145685 - DNA, 25 bp, Homo sapien
tacgttaacacactgaaagagtgac

SEQ ID NO: 145686 - DNA, 25 bp, Homo sapien
ggagagaagagtacgttaacacact

SEQ ID NO: 145687 - DNA, 25 bp, Homo sapien
cactgaaagagtgacataggcctgc

SEQ ID NO: 145688 - DNA, 25 bp, Homo sapien
ttttctcttgctgggttgagtgtct

SEQ ID NO: 145689 - DNA, 25 bp, Homo sapien
cagagtcaaggtccatttactcata

SEQ ID NO: 145690 - DNA, 25 bp, Homo sapien
gctgggttgagtgtctcagagtcaa

SEQ ID NO: 145691 - DNA, 25 bp, Homo sapien
gtctcagagtcaaggtccatttact

SEQ ID NO: 145692 - DNA, 25 bp, Homo sapien
ttttttcaattccaaccatggccat

SEQ ID NO: 145693 - DNA, 25 bp, Homo sapien
tcttcagttttttcaattccaacca

SEQ ID NO: 145694 - DNA, 25 bp, Homo sapien
cagttttttcaattccaaccatggc

SEQ ID NO: 145695 - DNA, 25 bp, Homo sapien
ttcagttttttcaattccaaccatg

SEQ ID NO: 145696 - DNA, 25 bp, Homo sapien
atgacatccaggtatctgatttgga

SEQ ID NO: 145697 - DNA, 25 bp, Homo sapien
ggagaaagattggaaagaagatcta

SEQ ID NO: 145698 - DNA, 25 bp, Homo sapien
aaaggagaaagattggaaagaagat

SEQ ID NO: 145699 - DNA, 25 bp, Homo sapien
gagaaagattggaaagaagatctac

SEQ ID NO: 145700 - DNA, 25 bp, Homo sapien
aaggagaaagattggaaagaagatc

SEQ ID NO: 145701 - DNA, 25 bp, Homo sapien
aagatgcccattttagttccacttc

SEQ ID NO: 145702 - DNA, 25 bp, Homo sapien
atgcccattttagttccacttctag

SEQ ID NO: 145703 - DNA, 25 bp, Homo sapien
agatgcccattttagttccacttct

SEQ ID NO: 145704 - DNA, 25 bp, Homo sapien
gatgcccattttagttccacttcta

SEQ ID NO: 145705 - DNA, 25 bp, Homo sapien
cagccagactgcgtgtgaagccact

SEQ ID NO: 145706 - DNA, 25 bp, Homo sapien
tggcaggaatctaacaggctaagcg

SEQ ID NO: 145707 - DNA, 25 bp, Homo sapien
gctaagcgtgatggccagccagact

SEQ ID NO: 145708 - DNA, 25 bp, Homo sapien
gatgggtaacaggaaccgctctctc

SEQ ID NO: 145709 - DNA, 25 bp, Homo sapien
tatgactcagtaagaagcctcttgc

SEQ ID NO: 145710 - DNA, 25 bp, Homo sapien
gactagtgccatggtttaatgtccc

SEQ ID NO: 145711 - DNA, 25 bp, Homo sapien
aaatggcttagttatcctgggagtg

SEQ ID NO: 145712 - DNA, 25 bp, Homo sapien
ctatggaagtatatggagacactcc

SEQ ID NO: 145713 - DNA, 25 bp, Homo sapien
ttaacggggatggttcttgcagtca

SEQ ID NO: 145714 - DNA, 25 bp, Homo sapien
gccctccaatgtgaggcttaacggg

SEQ ID NO: 145715 - DNA, 25 bp, Homo sapien
ccctgccctccaatgtgaggcttaa

SEQ ID NO: 145716 - DNA, 25 bp, Homo sapien
gcttaacggggatggttcttgcagt

SEQ ID NO: 145717 - DNA, 25 bp, Homo sapien
tggtgaaagccatgacttgctacat

SEQ ID NO: 145718 - DNA, 25 bp, Homo sapien
taaggacttctgtttgcttgcactg

SEQ ID NO: 145719 - DNA, 25 bp, Homo sapien
cactgtcagctgctaagtaggaacc

SEQ ID NO: 145720 - DNA, 25 bp, Homo sapien
aaccatatggtgaaagccatgactt

SEQ ID NO: 145721 - DNA, 25 bp, Homo sapien
tttcaattaactcctgtaataaatc

SEQ ID NO: 145722 - DNA, 25 bp, Homo sapien
cgcacccagccgatgggacttctta

SEQ ID NO: 145723 - DNA, 25 bp, Homo sapien
ctcctgtaataaatctccttgtgtt

SEQ ID NO: 145724 - DNA, 25 bp, Homo sapien
gcacccagccgatgggacttcttaa

SEQ ID NO: 145725 - DNA, 25 bp, Homo sapien
cagtagactgactagggaagatcca

SEQ ID NO: 145726 - DNA, 25 bp, Homo sapien
tcatgcaataccttgagggtctaca

SEQ ID NO: 145727 - DNA, 25 bp, Homo sapien
tacccaggctggcataacattgttg

SEQ ID NO: 145728 - DNA, 25 bp, Homo sapien
gacagttatcggtctctgccagagg

SEQ ID NO: 145729 - DNA, 25 bp, Homo sapien
gtgggtcaagcctgaggcttgttcc

SEQ ID NO: 145730 - DNA, 25 bp, Homo sapien
ctgtcctgtagtgggtcaagcctga

SEQ ID NO: 145731 - DNA, 25 bp, Homo sapien
tcctgtagtgggtcaagcctgaggc

SEQ ID NO: 145732 - DNA, 25 bp, Homo sapien
ctgtagtgggtcaagcctgaggctt

SEQ ID NO: 145733 - DNA, 25 bp, Homo sapien
aataactcagtattgttgtgttgtt

SEQ ID NO: 145734 - DNA, 25 bp, Homo sapien
aaataactcagtattgttgtgttgt

SEQ ID NO: 145735 - DNA, 25 bp, Homo sapien
tctgtatatgaactaggacctgtaa

SEQ ID NO: 145736 - DNA, 25 bp, Homo sapien
gacctgtaacttaggtacactgatg

SEQ ID NO: 145737 - DNA, 25 bp, Homo sapien
cctaataggcctttgtgaaatatgc

SEQ ID NO: 145738 - DNA, 25 bp, Homo sapien
taatctcccttgcaactacagttct

SEQ ID NO: 145739 - DNA, 25 bp, Homo sapien
caatgatacacatctcccttgcttc

SEQ ID NO: 145740 - DNA, 25 bp, Homo sapien
tacacatctcccttgcttcagatct

SEQ ID NO: 145741 - DNA, 25 bp, Homo sapien
tgatacacatctcccttgcttcaga

SEQ ID NO: 145742 - DNA, 25 bp, Homo sapien
catctcccttgcttcagatcttcat

SEQ ID NO: 145743 - DNA, 25 bp, Homo sapien
agccaccttgcacagtccctgtgtt

SEQ ID NO: 145744 - DNA, 25 bp, Homo sapien
agcagccaccttgcacagtccctgt

SEQ ID NO: 145745 - DNA, 25 bp, Homo sapien
agaagcagccaccttgcacagtccc

SEQ ID NO: 145746 - DNA, 25 bp, Homo sapien
gcagccaccttgcacagtccctgtg

SEQ ID NO: 145747 - DNA, 25 bp, Homo sapien
tcatcaattcttcccgtagaatttc

SEQ ID NO: 145748 - DNA, 25 bp, Homo sapien
tcaattcttcccgtagaatttctac

SEQ ID NO: 145749 - DNA, 25 bp, Homo sapien
catcaattcttcccgtagaatttct

SEQ ID NO: 145750 - DNA, 25 bp, Homo sapien
ttcatcaattcttcccgtagaattt

SEQ ID NO: 145751 - DNA, 25 bp, Homo sapien
tgatctggacaacatcgccgactct

SEQ ID NO: 145752 - DNA, 25 bp, Homo sapien
gtacaagctgtattttcttgcattg

SEQ ID NO: 145753 - DNA, 25 bp, Homo sapien
gctagattaaacctgtgatctggac

SEQ ID NO: 145754 - DNA, 25 bp, Homo sapien
gtcatagatctatgttcagatttca

SEQ ID NO: 145755 - DNA, 25 bp, Homo sapien
tcttggtcgcccagcgtggtggtca

SEQ ID NO: 145756 - DNA, 25 bp, Homo sapien
ttttctcttggtcgcccagcgtggt

SEQ ID NO: 145757 - DNA, 25 bp, Homo sapien
ctttttctcttggtcgcccagcgtg

SEQ ID NO: 145758 - DNA, 25 bp, Homo sapien
tgcccatgacgcagttcctttttct

SEQ ID NO: 145759 - DNA, 25 bp, Homo sapien
ccaaaaccatgaaatgatggttgtg

SEQ ID NO: 145760 - DNA, 25 bp, Homo sapien
aaccatgaaatgatggttgtgagtg

SEQ ID NO: 145761 - DNA, 25 bp, Homo sapien
catgaaatgatggttgtgagtggat

SEQ ID NO: 145762 - DNA, 25 bp, Homo sapien
gaaatgatggttgtgagtggatttc

SEQ ID NO: 145763 - DNA, 25 bp, Homo sapien
gatgtgattgtgtcctttaggccaa

SEQ ID NO: 145764 - DNA, 25 bp, Homo sapien
gaactagactgagcaaacactaaac

SEQ ID NO: 145765 - DNA, 25 bp, Homo sapien
tgggtttctcctgaagggaatggca

SEQ ID NO: 145766 - DNA, 25 bp, Homo sapien
gccaaaggcgaataccccaacagta

SEQ ID NO: 145767 - DNA, 25 bp, Homo sapien
atcattcacctaagtagagacgagg

SEQ ID NO: 145768 - DNA, 25 bp, Homo sapien
tatggaagacataagcaggccaaag

SEQ ID NO: 145769 - DNA, 25 bp, Homo sapien
tgtggctatggaagacataagcagg

SEQ ID NO: 145770 - DNA, 25 bp, Homo sapien
gcaggccaaaggcatcattcaccta

SEQ ID NO: 145771 - DNA, 25 bp, Homo sapien
ttccataaagagtgagagtttctgc

SEQ ID NO: 145772 - DNA, 25 bp, Homo sapien
cataaagagtgagagtttctgcaac

SEQ ID NO: 145773 - DNA, 25 bp, Homo sapien
tattttccataaagagtgagagttt

SEQ ID NO: 145774 - DNA, 25 bp, Homo sapien
tctattttccataaagagtgagagt

SEQ ID NO: 145775 - DNA, 25 bp, Homo sapien
tctgcatacagtaattgtttcttgt

SEQ ID NO: 145776 - DNA, 25 bp, Homo sapien
catacagtaattgtttcttgtacat

SEQ ID NO: 145777 - DNA, 25 bp, Homo sapien
ctgccttatctgcatacagtaattg

SEQ ID NO: 145778 - DNA, 25 bp, Homo sapien
tgcatacagtaattgtttcttgtac

SEQ ID NO: 145779 - DNA, 25 bp, Homo sapien
cttgatgaaatgtcaaagacaccat

SEQ ID NO: 145780 - DNA, 25 bp, Homo sapien
gccttgatgaaatgtcaaagacacc

SEQ ID NO: 145781 - DNA, 25 bp, Homo sapien
tgccttgatgaaatgtcaaagacac

SEQ ID NO: 145782 - DNA, 25 bp, Homo sapien
gctgccttgatgaaatgtcaaagac

SEQ ID NO: 145783 - DNA, 25 bp, Homo sapien
tggtacaaatactctggagaacagt

SEQ ID NO: 145784 - DNA, 25 bp, Homo sapien
ggtacaaatactctggagaacagtt

SEQ ID NO: 145785 - DNA, 25 bp, Homo sapien
acaaatactctggagaacagtttgg

SEQ ID NO: 145786 - DNA, 25 bp, Homo sapien
aatggtacaaatactctggagaaca

SEQ ID NO: 145787 - DNA, 25 bp, Homo sapien
gaggaggactttcttaacttgataa

SEQ ID NO: 145788 - DNA, 25 bp, Homo sapien
ccatgttccagatttggtctcaaga

SEQ ID NO: 145789 - DNA, 25 bp, Homo sapien
gaaagactgtcttgggtaaacagaa

SEQ ID NO: 145790 - DNA, 25 bp, Homo sapien
gctggcattactctgatacttaaaa

SEQ ID NO: 145791 - DNA, 25 bp, Homo sapien
tgctcctctatttccaggtctctgt

SEQ ID NO: 145792 - DNA, 25 bp, Homo sapien
ctggaagggccattttgctcctcta

SEQ ID NO: 145793 - DNA, 25 bp, Homo sapien
aagggccattttgctcctctatttc

SEQ ID NO: 145794 - DNA, 25 bp, Homo sapien
ggaagggccattttgctcctctatt

SEQ ID NO: 145795 - DNA, 25 bp, Homo sapien
gaccggacaagttgggatatgcttc

SEQ ID NO: 145796 - DNA, 25 bp, Homo sapien
aataacttctcataaaggctggtgg

SEQ ID NO: 145797 - DNA, 25 bp, Homo sapien
gaggatgattcccttgaccggacaa

SEQ ID NO: 145798 - DNA, 25 bp, Homo sapien
gacagaaggcggaacttacacaggg

SEQ ID NO: 145799 - DNA, 25 bp, Homo sapien
ctctccaagcatggcatcaacctgt

SEQ ID NO: 145800 - DNA, 25 bp, Homo sapien
caagagctctccaagcatggcatca

SEQ ID NO: 145801 - DNA, 25 bp, Homo sapien
tccaagcatggcatcaacctgttcc

SEQ ID NO: 145802 - DNA, 25 bp, Homo sapien
gagctctccaagcatggcatcaacc

SEQ ID NO: 145803 - DNA, 25 bp, Homo sapien
aggaatctggtctccatccaactgt

SEQ ID NO: 145804 - DNA, 25 bp, Homo sapien
gactgccaggatgattgaccaagca

SEQ ID NO: 145805 - DNA, 25 bp, Homo sapien
gcaactcttcgtaagtatgtggtct

SEQ ID NO: 145806 - DNA, 25 bp, Homo sapien
tgtccagaccatctcagcaaagggc

SEQ ID NO: 145807 - DNA, 25 bp, Homo sapien
tgccatatgataacagaagttgatt

SEQ ID NO: 145808 - DNA, 25 bp, Homo sapien
gagtcctaatgccatatgataacag

SEQ ID NO: 145809 - DNA, 25 bp, Homo sapien
gattttgtattcctattttgcccaa

SEQ ID NO: 145810 - DNA, 25 bp, Homo sapien
aataaacccttgagtcctaatgcca

SEQ ID NO: 145811 - DNA, 25 bp, Homo sapien
aagacagtctctctggggcatctat

SEQ ID NO: 145812 - DNA, 25 bp, Homo sapien
gacagtctctctggggcatctatat

SEQ ID NO: 145813 - DNA, 25 bp, Homo sapien
gtctctctggggcatctatatttct

SEQ ID NO: 145814 - DNA, 25 bp, Homo sapien
ctctctggggcatctatatttcttc

SEQ ID NO: 145815 - DNA, 25 bp, Homo sapien
ggagaagtgggctttcaaatctcta

SEQ ID NO: 145816 - DNA, 25 bp, Homo sapien
gaaggtttttagcattctgcctctg

SEQ ID NO: 145817 - DNA, 25 bp, Homo sapien
gaagtgggctttcaaatctctaaac

SEQ ID NO: 145818 - DNA, 25 bp, Homo sapien
ctaaactgtgtcaatctgagatgaa

SEQ ID NO: 145819 - DNA, 25 bp, Homo sapien
tgttgaaggaatcagcaccagcaag

SEQ ID NO: 145820 - DNA, 25 bp, Homo sapien
ggaaagctattcttgaccctcttcg

SEQ ID NO: 145821 - DNA, 25 bp, Homo sapien
gaataaacttcatacagacttgctg

SEQ ID NO: 145822 - DNA, 25 bp, Homo sapien
cgactctgaatagaatactggcttg

SEQ ID NO: 145823 - DNA, 25 bp, Homo sapien
tattgatccggtggttatgaaaacc

SEQ ID NO: 145824 - DNA, 25 bp, Homo sapien
aatcagggttttcgcctttctcagc

SEQ ID NO: 145825 - DNA, 25 bp, Homo sapien
cttaatccttagttcgtaaatcagg

SEQ ID NO: 145826 - DNA, 25 bp, Homo sapien
gcattttctattgatccggtggtta

SEQ ID NO: 145827 - DNA, 25 bp, Homo sapien
ttaatagatgttgccccaaagagcg

SEQ ID NO: 145828 - DNA, 25 bp, Homo sapien
ccagtattgtaagggtcctgaggca

SEQ ID NO: 145829 - DNA, 25 bp, Homo sapien
aagagtgccttatcgaatgctagtc

SEQ ID NO: 145830 - DNA, 25 bp, Homo sapien
tagatcaatgctctcttaggaaggg

SEQ ID NO: 145831 - DNA, 25 bp, Homo sapien
cagttaggttaatttcgattgccat

SEQ ID NO: 145832 - DNA, 25 bp, Homo sapien
gttaatttcgattgccattaggctc

SEQ ID NO: 145833 - DNA, 25 bp, Homo sapien
ttaggttaatttcgattgccattag

SEQ ID NO: 145834 - DNA, 25 bp, Homo sapien
aggttaatttcgattgccattaggc

SEQ ID NO: 145835 - DNA, 25 bp, Homo sapien
ggttgaaaatatgctggcacagtca

SEQ ID NO: 145836 - DNA, 25 bp, Homo sapien
aggttgaaaatatgctggcacagtc

SEQ ID NO: 145837 - DNA, 25 bp, Homo sapien
cagaatgattagcaactgatttgtg

SEQ ID NO: 145838 - DNA, 25 bp, Homo sapien
gattagcaactgatttgtgttcttt

SEQ ID NO: 145839 - DNA, 25 bp, Homo sapien
gacacgtgttaacagcagaagtgaa

SEQ ID NO: 145840 - DNA, 25 bp, Homo sapien
tcagacacgtgttaacagcagaagt

SEQ ID NO: 145841 - DNA, 25 bp, Homo sapien
tagccagcagaaagtaagcttgaat

SEQ ID NO: 145842 - DNA, 25 bp, Homo sapien
cagcagaaagtaagcttgaatgttc

SEQ ID NO: 145843 - DNA, 25 bp, Homo sapien
ttcagtagccagcagaaagtaagct

SEQ ID NO: 145844 - DNA, 25 bp, Homo sapien
ttgttcagtagccagcagaaagtaa

SEQ ID NO: 145845 - DNA, 25 bp, Homo sapien
acctcttgcattccttgtgagttgc

SEQ ID NO: 145846 - DNA, 25 bp, Homo sapien
tttcttttcccgctcacctcttgca

SEQ ID NO: 145847 - DNA, 25 bp, Homo sapien
cttgtgagttgctgtttttctcctc

SEQ ID NO: 145848 - DNA, 25 bp, Homo sapien
aagggccacagatgtcatctccgtt

SEQ ID NO: 145849 - DNA, 25 bp, Homo sapien
tatgagcctagcaccaacttgtgta

SEQ ID NO: 145850 - DNA, 25 bp, Homo sapien
tacagctgaaggagctagtccagat

SEQ ID NO: 145851 - DNA, 25 bp, Homo sapien
tgggcatgccttccaagtattctgt

SEQ ID NO: 145852 - DNA, 25 bp, Homo sapien
cttgcaacggtagaggaaagaaaca

SEQ ID NO: 145853 - DNA, 25 bp, Homo sapien
ccatataatacagcagctgctgtct

SEQ ID NO: 145854 - DNA, 25 bp, Homo sapien
atgccccatataatacagcagctgc

SEQ ID NO: 145855 - DNA, 25 bp, Homo sapien
ccccatataatacagcagctgctgt

SEQ ID NO: 145856 - DNA, 25 bp, Homo sapien
gccccatataatacagcagctgctg

SEQ ID NO: 145857 - DNA, 25 bp, Homo sapien
catccgtgcaactagagagctgttt

SEQ ID NO: 145858 - DNA, 25 bp, Homo sapien
catgcatcattagatcagtgcacca

SEQ ID NO: 145859 - DNA, 25 bp, Homo sapien
attcccaacttaaaccatgcatcat

SEQ ID NO: 145860 - DNA, 25 bp, Homo sapien
accagtggcccatccgtgcaactag

SEQ ID NO: 145861 - DNA, 25 bp, Homo sapien
atattgattttgctccattctcaat

SEQ ID NO: 145862 - DNA, 25 bp, Homo sapien
attgattttgctccattctcaatgg

SEQ ID NO: 145863 - DNA, 25 bp, Homo sapien
tgaatattgattttgctccattctc

SEQ ID NO: 145864 - DNA, 25 bp, Homo sapien
gaatattgattttgctccattctca

SEQ ID NO: 145865 - DNA, 25 bp, Homo sapien
agttcatgtgagaggttctgcttca

SEQ ID NO: 145866 - DNA, 25 bp, Homo sapien
catgtgagaggttctgcttcattcc

SEQ ID NO: 145867 - DNA, 25 bp, Homo sapien
ccagttcatgtgagaggttctgctt

SEQ ID NO: 145868 - DNA, 25 bp, Homo sapien
tgccagttcatgtgagaggttctgc

SEQ ID NO: 145869 - DNA, 25 bp, Homo sapien
ggtccatacattctaattacactac

SEQ ID NO: 145870 - DNA, 25 bp, Homo sapien
cactacttcctgattcatcataagg

SEQ ID NO: 145871 - DNA, 25 bp, Homo sapien
actaaaattggtccatacattctaa

SEQ ID NO: 145872 - DNA, 25 bp, Homo sapien
tacattctaattacactacttcctg

SEQ ID NO: 145873 - DNA, 25 bp, Homo sapien
tctggaattgtaacacaggtttttc

SEQ ID NO: 145874 - DNA, 25 bp, Homo sapien
catctggaattgtaacacaggtttt

SEQ ID NO: 145875 - DNA, 25 bp, Homo sapien
tatgtaactcgcgtaaatgaccctt

SEQ ID NO: 145876 - DNA, 25 bp, Homo sapien
ttctattatatgtaactcgcgtaaa

SEQ ID NO: 145877 - DNA, 25 bp, Homo sapien
tgcaatgtccagcaatttaacccct

SEQ ID NO: 145878 - DNA, 25 bp, Homo sapien
cactccaggcttaaactgtaagtgg

SEQ ID NO: 145879 - DNA, 25 bp, Homo sapien
ggagagtgcaatgtccagcaattta

SEQ ID NO: 145880 - DNA, 25 bp, Homo sapien
actgtaagtggagagtgcaatgtcc

SEQ ID NO: 145881 - DNA, 25 bp, Homo sapien
gataaacaataggtgtctttgcttc

SEQ ID NO: 145882 - DNA, 25 bp, Homo sapien
tctctctggaaaaccctccagttat

SEQ ID NO: 145883 - DNA, 25 bp, Homo sapien
tttgtgagataaacaataggtgtct

SEQ ID NO: 145884 - DNA, 25 bp, Homo sapien
tgcttcagtgaacttttgcttgagt

SEQ ID NO: 145885 - DNA, 25 bp, Homo sapien
agtcttacccttacgtctgtcatgg

SEQ ID NO: 145886 - DNA, 25 bp, Homo sapien
tggatggcacaggatataacttcac

SEQ ID NO: 145887 - DNA, 25 bp, Homo sapien
tgggtaagcccacacagctctttag

SEQ ID NO: 145888 - DNA, 25 bp, Homo sapien
gctctggttgctaagaacagccctt

SEQ ID NO: 145889 - DNA, 25 bp, Homo sapien
ggatttggaagatctacaactacca

SEQ ID NO: 145890 - DNA, 25 bp, Homo sapien
caccctaggatttggaagatctaca

SEQ ID NO: 145891 - DNA, 25 bp, Homo sapien
tgctcagagtcaccctaggatttgg

SEQ ID NO: 145892 - DNA, 25 bp, Homo sapien
ggtggcatgctcagagtcaccctag

SEQ ID NO: 145893 - DNA, 25 bp, Homo sapien
tgctgctattctgttggtgaatgtt

SEQ ID NO: 145894 - DNA, 25 bp, Homo sapien
ctgctattctgttggtgaatgttca

SEQ ID NO: 145895 - DNA, 25 bp, Homo sapien
tgctattctgttggtgaatgttcat

SEQ ID NO: 145896 - DNA, 25 bp, Homo sapien
gctgctattctgttggtgaatgttc

SEQ ID NO: 145897 - DNA, 25 bp, Homo sapien
tcagtgaatcggagaaatgagctcc

SEQ ID NO: 145898 - DNA, 25 bp, Homo sapien
ccatgagagcaacggccaggtttct

SEQ ID NO: 145899 - DNA, 25 bp, Homo sapien
caagttctgggacaatatggattat

SEQ ID NO: 145900 - DNA, 25 bp, Homo sapien
caaaaggagtcattgcagtgaggtt

SEQ ID NO: 145901 - DNA, 25 bp, Homo sapien
tgttttctttcctaagagtgacttc

SEQ ID NO: 145902 - DNA, 25 bp, Homo sapien
gagtgacttcgaggcaggagacatc

SEQ ID NO: 145903 - DNA, 25 bp, Homo sapien
tcctaagagtgacttcgaggcagga

SEQ ID NO: 145904 - DNA, 25 bp, Homo sapien
cacttctggatctgagaaatgctca

SEQ ID NO: 145905 - DNA, 25 bp, Homo sapien
gacgttcgggttggcaacattcaca

SEQ ID NO: 145906 - DNA, 25 bp, Homo sapien
tcgggttggcaacattcacatctct

SEQ ID NO: 145907 - DNA, 25 bp, Homo sapien
ggttggcaacattcacatctctgct

SEQ ID NO: 145908 - DNA, 25 bp, Homo sapien
ttggacgttcgggttggcaacattc

SEQ ID NO: 145909 - DNA, 25 bp, Homo sapien
cttcctccagatctacctctccaat

SEQ ID NO: 145910 - DNA, 25 bp, Homo sapien
atggtccttacgctgtcaaatggac

SEQ ID NO: 145911 - DNA, 25 bp, Homo sapien
actatcttcctccagatctacctct

SEQ ID NO: 145912 - DNA, 25 bp, Homo sapien
ggtccttacgctgtcaaatggacta

SEQ ID NO: 145913 - DNA, 25 bp, Homo sapien
ctcttgccaccatttcctgatttct

SEQ ID NO: 145914 - DNA, 25 bp, Homo sapien
tcttcatcagccagactttaaatgt

SEQ ID NO: 145915 - DNA, 25 bp, Homo sapien
ctttcttctgatagtcttcatcagc

SEQ ID NO: 145916 - DNA, 25 bp, Homo sapien
tcttgccaccatttcctgatttctt

SEQ ID NO: 145917 - DNA, 25 bp, Homo sapien
tccattttttaacagacatcagtct

SEQ ID NO: 145918 - DNA, 25 bp, Homo sapien
cagctcatagcataagctccatata

SEQ ID NO: 145919 - DNA, 25 bp, Homo sapien
taagctccatatagctgaggcactg

SEQ ID NO: 145920 - DNA, 25 bp, Homo sapien
tgaggcactgtatttattcatctcc

SEQ ID NO: 145921 - DNA, 25 bp, Homo sapien
ccagcatagttgacttttgcaatac

SEQ ID NO: 145922 - DNA, 25 bp, Homo sapien
cagaccagcatagttgacttttgca

SEQ ID NO: 145923 - DNA, 25 bp, Homo sapien
catagttgacttttgcaatactcat

SEQ ID NO: 145924 - DNA, 25 bp, Homo sapien
gaccagcatagttgacttttgcaat

SEQ ID NO: 145925 - DNA, 25 bp, Homo sapien
tccagcatcagtaatgagcatgaat

SEQ ID NO: 145926 - DNA, 25 bp, Homo sapien
taggcttgaatccaagctcacatac

SEQ ID NO: 145927 - DNA, 25 bp, Homo sapien
taagacaatgagcaatgagctgcag

SEQ ID NO: 145928 - DNA, 25 bp, Homo sapien
catggagtcagtgacttaggcttga

SEQ ID NO: 145929 - DNA, 25 bp, Homo sapien
gcctcggaatggttgacatcccaag

SEQ ID NO: 145930 - DNA, 25 bp, Homo sapien
gaatggttgacatcccaaggagagc

SEQ ID NO: 145931 - DNA, 25 bp, Homo sapien
ctagcaaagcctcggaatggttgac

SEQ ID NO: 145932 - DNA, 25 bp, Homo sapien
tacagctagcaaagcctcggaatgg

SEQ ID NO: 145933 - DNA, 25 bp, Homo sapien
taagtagctgaggacttaatttcag

SEQ ID NO: 145934 - DNA, 25 bp, Homo sapien
agtagctgaggacttaatttcaggc

SEQ ID NO: 145935 - DNA, 25 bp, Homo sapien
cagtaagtagctgaggacttaattt

SEQ ID NO: 145936 - DNA, 25 bp, Homo sapien
gctgaggacttaatttcaggctagg

SEQ ID NO: 145937 - DNA, 25 bp, Homo sapien
tttcaaccactgtgcaatccacagg

SEQ ID NO: 145938 - DNA, 25 bp, Homo sapien
tcaaccactgtgcaatccacaggtc

SEQ ID NO: 145939 - DNA, 25 bp, Homo sapien
accactgtgcaatccacaggtccat

SEQ ID NO: 145940 - DNA, 25 bp, Homo sapien
ctttcaaccactgtgcaatccacag

SEQ ID NO: 145941 - DNA, 25 bp, Homo sapien
aattgctcgtaaagccaccgttgag

SEQ ID NO: 145942 - DNA, 25 bp, Homo sapien
tcaattgctcgtaaagccaccgttg

SEQ ID NO: 145943 - DNA, 25 bp, Homo sapien
ctattcaattgctcgtaaagccacc

SEQ ID NO: 145944 - DNA, 25 bp, Homo sapien
gctcgtaaagccaccgttgagttat

SEQ ID NO: 145945 - DNA, 25 bp, Homo sapien
aaaagataatacataagcccagtgt

SEQ ID NO: 145946 - DNA, 25 bp, Homo sapien
gcccagtgtgcttgtatttcagtcc

SEQ ID NO: 145947 - DNA, 25 bp, Homo sapien
aaagctctcacaggaggtaccaccc

SEQ ID NO: 145948 - DNA, 25 bp, Homo sapien
gtcctacaaagctctcacaggaggt

SEQ ID NO: 145949 - DNA, 25 bp, Homo sapien
tcttcatgagaaattccagatattg

SEQ ID NO: 145950 - DNA, 25 bp, Homo sapien
ttcttcatgagaaattccagatatt

SEQ ID NO: 145951 - DNA, 25 bp, Homo sapien
attcttcatgagaaattccagatat

SEQ ID NO: 145952 - DNA, 25 bp, Homo sapien
atttttcacactccacttacgtagg

SEQ ID NO: 145953 - DNA, 25 bp, Homo sapien
cttacgtaggttaatggatgagaca

SEQ ID NO: 145954 - DNA, 25 bp, Homo sapien
tatggccttaattaaacagtacaca

SEQ ID NO: 145955 - DNA, 25 bp, Homo sapien
gataatcaactggtctatggcctta

SEQ ID NO: 145956 - DNA, 25 bp, Homo sapien
aacatctgtagctaaatccaatcac

SEQ ID NO: 145957 - DNA, 25 bp, Homo sapien
tttatagccgtgatacaatgttggc

SEQ ID NO: 145958 - DNA, 25 bp, Homo sapien
agtgtacaatgtagagacctttgat

SEQ ID NO: 145959 - DNA, 25 bp, Homo sapien
ttgacattggcagattgaatccggc

SEQ ID NO: 145960 - DNA, 25 bp, Homo sapien
gattgcttgaaccccagagattgag

SEQ ID NO: 145961 - DNA, 25 bp, Homo sapien
ttgaaccccagagattgaggctaca

SEQ ID NO: 145962 - DNA, 25 bp, Homo sapien
ttgcttgaaccccagagattgaggc

SEQ ID NO: 145963 - DNA, 25 bp, Homo sapien
gcttgaaccccagagattgaggcta

SEQ ID NO: 145964 - DNA, 25 bp, Homo sapien
gatcccgtcatccagataatagtag

SEQ ID NO: 145965 - DNA, 25 bp, Homo sapien
taatagtagtacaagatgggcagtt

SEQ ID NO: 145966 - DNA, 25 bp, Homo sapien
gagatgctgacgtttgggcatctat

SEQ ID NO: 145967 - DNA, 25 bp, Homo sapien
tcattcaggatagtagcctccagct

SEQ ID NO: 145968 - DNA, 25 bp, Homo sapien
ccttcttgatcagtgcatgaatcat

SEQ ID NO: 145969 - DNA, 25 bp, Homo sapien
tatctctgccattagattgtcagca

SEQ ID NO: 145970 - DNA, 25 bp, Homo sapien
ttatgtttgtatatctatctctgcc

SEQ ID NO: 145971 - DNA, 25 bp, Homo sapien
tatatctatctctgccattagattg

SEQ ID NO: 145972 - DNA, 25 bp, Homo sapien
tttgtatatctatctctgccattag

SEQ ID NO: 145973 - DNA, 25 bp, Homo sapien
tgaggcatccaaacaggactgagac

SEQ ID NO: 145974 - DNA, 25 bp, Homo sapien
ccagttaatgtttgagaggagtccg

SEQ ID NO: 145975 - DNA, 25 bp, Homo sapien
taacgctacactaagtactggtggg

SEQ ID NO: 145976 - DNA, 25 bp, Homo sapien
cttgttataaggatcaggctcaggc

SEQ ID NO: 145977 - DNA, 25 bp, Homo sapien
tgggatgtgccttttgtggccagct

SEQ ID NO: 145978 - DNA, 25 bp, Homo sapien
ttaaagcccaattacgctggctggg

SEQ ID NO: 145979 - DNA, 25 bp, Homo sapien
ttttcatgcgatcatctttactttc

SEQ ID NO: 145980 - DNA, 25 bp, Homo sapien
tttgtggccagctaaggtatcattt

SEQ ID NO: 145981 - DNA, 25 bp, Homo sapien
tccataccagcccactttttagcat

SEQ ID NO: 145982 - DNA, 25 bp, Homo sapien
cattaaagagctttccataccagcc

SEQ ID NO: 145983 - DNA, 25 bp, Homo sapien
cataccagcccactttttagcatct

SEQ ID NO: 145984 - DNA, 25 bp, Homo sapien
gagctttccataccagcccactttt

SEQ ID NO: 145985 - DNA, 25 bp, Homo sapien
gcaacgtattcataggttcttgtga

SEQ ID NO: 145986 - DNA, 25 bp, Homo sapien
ttcttgtgattaggagataggacac

SEQ ID NO: 145987 - DNA, 25 bp, Homo sapien
ggagataggacacggacatctttgg

SEQ ID NO: 145988 - DNA, 25 bp, Homo sapien
gacacggacatctttggagatgagg

SEQ ID NO: 145989 - DNA, 25 bp, Homo sapien
gggttaaaactaaggcatcatcaga

SEQ ID NO: 145990 - DNA, 25 bp, Homo sapien
tagaaatttgacatggttttcactg

SEQ ID NO: 145991 - DNA, 25 bp, Homo sapien
aagttttgacattccattagctttc

SEQ ID NO: 145992 - DNA, 25 bp, Homo sapien
tctgtaggttagaaatttgacatgg

SEQ ID NO: 145993 - DNA, 25 bp, Homo sapien
aagcgaggtgtctggctgtcaatct

SEQ ID NO: 145994 - DNA, 25 bp, Homo sapien
ccagggccgttctttgatgattcaa

SEQ ID NO: 145995 - DNA, 25 bp, Homo sapien
tttcttctgaccagcaaggcgggac

SEQ ID NO: 145996 - DNA, 25 bp, Homo sapien
gggacagtctcatcgaagccgacat

SEQ ID NO: 145997 - DNA, 25 bp, Homo sapien
tgtgggtcccatagcctcagatatt

SEQ ID NO: 145998 - DNA, 25 bp, Homo sapien
ctagatgaaattgagctgtgggtcc

SEQ ID NO: 145999 - DNA, 25 bp, Homo sapien
tatagatcccatgagggaagaccta

SEQ ID NO: 146000 - DNA, 25 bp, Homo sapien
gagggaagacctagatgaaattgag

SEQ ID NO: 146001 - DNA, 25 bp, Homo sapien
tgctgtccatggtgaccttgtgaga

SEQ ID NO: 146002 - DNA, 25 bp, Homo sapien
aatgaggtgccatcattctcaggga

SEQ ID NO: 146003 - DNA, 25 bp, Homo sapien
tccatggtgaccttgtgagaaatga

SEQ ID NO: 146004 - DNA, 25 bp, Homo sapien
gtgaccttgtgagaaatgacaggtt

SEQ ID NO: 146005 - DNA, 25 bp, Homo sapien
cctttgtgaagagaatcctccagag

SEQ ID NO: 146006 - DNA, 25 bp, Homo sapien
caatgcggcattatttacttgatgc

SEQ ID NO: 146007 - DNA, 25 bp, Homo sapien
gaagagaatcctccagaggaatgca

SEQ ID NO: 146008 - DNA, 25 bp, Homo sapien
acaatgcggcattatttacttgatg

SEQ ID NO: 146009 - DNA, 25 bp, Homo sapien
taccaaaccctgagacagggcctct

SEQ ID NO: 146010 - DNA, 25 bp, Homo sapien
tccagtgctttaccaaaccctgaga

SEQ ID NO: 146011 - DNA, 25 bp, Homo sapien
gagacagggcctcttcactatttgg

SEQ ID NO: 146012 - DNA, 25 bp, Homo sapien
tcttcactatttgggctgctggaac

SEQ ID NO: 146013 - DNA, 25 bp, Homo sapien
tccccacaatatgttggagatcagc

SEQ ID NO: 146014 - DNA, 25 bp, Homo sapien
ctccagcttgtgaggatgtctaacc

SEQ ID NO: 146015 - DNA, 25 bp, Homo sapien
tcctgagtgtggctgctatgggcac

SEQ ID NO: 146016 - DNA, 25 bp, Homo sapien
gccttgtggttgaaacggtccctga

SEQ ID NO: 146017 - DNA, 25 bp, Homo sapien
ctgggctgttaccagctctatatta

SEQ ID NO: 146018 - DNA, 25 bp, Homo sapien
ttgccatggtaacagctgggctgtt

SEQ ID NO: 146019 - DNA, 25 bp, Homo sapien
ttaccagctctatattaagtctttg

SEQ ID NO: 146020 - DNA, 25 bp, Homo sapien
gctgttaccagctctatattaagtc

SEQ ID NO: 146021 - DNA, 25 bp, Homo sapien
tttggatgttggagccactgaagca

SEQ ID NO: 146022 - DNA, 25 bp, Homo sapien
attctttttggatgttggagccact

SEQ ID NO: 146023 - DNA, 25 bp, Homo sapien
ttttggatgttggagccactgaagc

SEQ ID NO: 146024 - DNA, 25 bp, Homo sapien
tctttttggatgttggagccactga

SEQ ID NO: 146025 - DNA, 25 bp, Homo sapien
tgagggaggataggagaatggactg

SEQ ID NO: 146026 - DNA, 25 bp, Homo sapien
gaggataggagaatggactgaatat

SEQ ID NO: 146027 - DNA, 25 bp, Homo sapien
gatgagggaggataggagaatggac

SEQ ID NO: 146028 - DNA, 25 bp, Homo sapien
gggaggataggagaatggactgaat

SEQ ID NO: 146029 - DNA, 25 bp, Homo sapien
gcagtttggaaaaatcggaagacca

SEQ ID NO: 146030 - DNA, 25 bp, Homo sapien
ctcttgcctgctcccgttgtgcaaa

SEQ ID NO: 146031 - DNA, 25 bp, Homo sapien
ctgctcccgttgtgcaaatcaggat

SEQ ID NO: 146032 - DNA, 25 bp, Homo sapien
aaaatcggaagaccatctggaattc

SEQ ID NO: 146033 - DNA, 25 bp, Homo sapien
ctctgaaatccttactcaccaattt

SEQ ID NO: 146034 - DNA, 25 bp, Homo sapien
tctgaaatccttactcaccaatttc

SEQ ID NO: 146035 - DNA, 25 bp, Homo sapien
ctagtatgtggtctgtcttctagct

SEQ ID NO: 146036 - DNA, 25 bp, Homo sapien
tgaaatccttactcaccaatttcat

SEQ ID NO: 146037 - DNA, 25 bp, Homo sapien
tttgctttggtgtttaaccggcagc

SEQ ID NO: 146038 - DNA, 25 bp, Homo sapien
ggcagcgactttgtgcaagatgtac

SEQ ID NO: 146039 - DNA, 25 bp, Homo sapien
tccaagcaccatctgctgttttgct

SEQ ID NO: 146040 - DNA, 25 bp, Homo sapien
gagaaatgtagtgaatccaagcacc

SEQ ID NO: 146041 - DNA, 25 bp, Homo sapien
ttgggccaagtactctgtgagtact

SEQ ID NO: 146042 - DNA, 25 bp, Homo sapien
aactgagtagatttgctgtttagta

SEQ ID NO: 146043 - DNA, 25 bp, Homo sapien
gggccaagtactctgtgagtactca

SEQ ID NO: 146044 - DNA, 25 bp, Homo sapien
aaaggaggtagagccggcagctctg

SEQ ID NO: 146045 - DNA, 25 bp, Homo sapien
tttgaaatctaaagaggtactaaca

SEQ ID NO: 146046 - DNA, 25 bp, Homo sapien
aatctaaagaggtactaacatgcat

SEQ ID NO: 146047 - DNA, 25 bp, Homo sapien
gaaatctaaagaggtactaacatgc

SEQ ID NO: 146048 - DNA, 25 bp, Homo sapien
tgaaatctaaagaggtactaacatg

SEQ ID NO: 146049 - DNA, 25 bp, Homo sapien
tctatcttccttcataattgcacca

SEQ ID NO: 146050 - DNA, 25 bp, Homo sapien
tatcttccttcataattgcaccatc

SEQ ID NO: 146051 - DNA, 25 bp, Homo sapien
cttcctctcctctaatggatctttt

SEQ ID NO: 146052 - DNA, 25 bp, Homo sapien
cctctcctctaatggatcttttcta

SEQ ID NO: 146053 - DNA, 25 bp, Homo sapien
cttctttgacttgtttatcttggaa

SEQ ID NO: 146054 - DNA, 25 bp, Homo sapien
attttcttctttgacttgtttatct

SEQ ID NO: 146055 - DNA, 25 bp, Homo sapien
tttcttctttgacttgtttatcttg

SEQ ID NO: 146056 - DNA, 25 bp, Homo sapien
cttaacaacgtgcctattttcttct

SEQ ID NO: 146057 - DNA, 25 bp, Homo sapien
gcctctgcaagcgtttcaatacgtc

SEQ ID NO: 146058 - DNA, 25 bp, Homo sapien
aacagcctctgcaagcgtttcaata

SEQ ID NO: 146059 - DNA, 25 bp, Homo sapien
gcgtttcaatacgtcttccatgaga

SEQ ID NO: 146060 - DNA, 25 bp, Homo sapien
tcattcccatccctactgttaaatc

SEQ ID NO: 146061 - DNA, 25 bp, Homo sapien
cagaatgtgagaatgcacaaaccac

SEQ ID NO: 146062 - DNA, 25 bp, Homo sapien
agagcatttcagaatgtgagaatgc

SEQ ID NO: 146063 - DNA, 25 bp, Homo sapien
agcatttcagaatgtgagaatgcac

SEQ ID NO: 146064 - DNA, 25 bp, Homo sapien
ctagcaacacatgacagagcatttc

SEQ ID NO: 146065 - DNA, 25 bp, Homo sapien
gcagtaacttcaactgaaactctgc

SEQ ID NO: 146066 - DNA, 25 bp, Homo sapien
tagcagtaacttcaactgaaactct

SEQ ID NO: 146067 - DNA, 25 bp, Homo sapien
agcagtaacttcaactgaaactctg

SEQ ID NO: 146068 - DNA, 25 bp, Homo sapien
ttagcagtaacttcaactgaaactc

SEQ ID NO: 146069 - DNA, 25 bp, Homo sapien
tctgcatgttcctattcactatccc

SEQ ID NO: 146070 - DNA, 25 bp, Homo sapien
tgttcctattcactatccctttctg

SEQ ID NO: 146071 - DNA, 25 bp, Homo sapien
tcctattcactatccctttctgagc

SEQ ID NO: 146072 - DNA, 25 bp, Homo sapien
ccatctgcatgttcctattcactat

SEQ ID NO: 146073 - DNA, 25 bp, Homo sapien
taatttctattacctgttccaccat

SEQ ID NO: 146074 - DNA, 25 bp, Homo sapien
ttcacaatcgactgaacacacatcc

SEQ ID NO: 146075 - DNA, 25 bp, Homo sapien
gacatcctaatttctattacctgtt

SEQ ID NO: 146076 - DNA, 25 bp, Homo sapien
tattcacaatcgactgaacacacat

SEQ ID NO: 146077 - DNA, 25 bp, Homo sapien
aacatctcttctaagaagccccagg

SEQ ID NO: 146078 - DNA, 25 bp, Homo sapien
caacatctcttctaagaagccccag

SEQ ID NO: 146079 - DNA, 25 bp, Homo sapien
caggggattgccaacatctcttcta

SEQ ID NO: 146080 - DNA, 25 bp, Homo sapien
cagggagatcaaggaacttttcaac

SEQ ID NO: 146081 - DNA, 25 bp, Homo sapien
gaatgcttagctggaaatgggagtg

SEQ ID NO: 146082 - DNA, 25 bp, Homo sapien
tggtgtgttcctcagggagatcaag

SEQ ID NO: 146083 - DNA, 25 bp, Homo sapien
tcaactttgtggcataagaatccac

SEQ ID NO: 146084 - DNA, 25 bp, Homo sapien
gacctctgctcctctaaaggccatt

SEQ ID NO: 146085 - DNA, 25 bp, Homo sapien
ctctaaaggccattggacctatcag

SEQ ID NO: 146086 - DNA, 25 bp, Homo sapien
gccattggacctatcagctggttaa

SEQ ID NO: 146087 - DNA, 25 bp, Homo sapien
ttggacctatcagctggttaatgtg

SEQ ID NO: 146088 - DNA, 25 bp, Homo sapien
caccataatcttcaggagctgtgga

SEQ ID NO: 146089 - DNA, 25 bp, Homo sapien
tcagatctgacattgcaggatctca

SEQ ID NO: 146090 - DNA, 25 bp, Homo sapien
tccaacatattataggaagggtttg

SEQ ID NO: 146091 - DNA, 25 bp, Homo sapien
tataggaagggtttggcaccctcaa

SEQ ID NO: 146092 - DNA, 25 bp, Homo sapien
acacagacctattccttctgtaagg

SEQ ID NO: 146093 - DNA, 25 bp, Homo sapien
gaggtcttccaagaacaatctctct

SEQ ID NO: 146094 - DNA, 25 bp, Homo sapien
tctgtggacaagttctgcccagatc

SEQ ID NO: 146095 - DNA, 25 bp, Homo sapien
tgcccagatccctgatcggtgaggt

SEQ ID NO: 146096 - DNA, 25 bp, Homo sapien
aataaataccacgatgacagggttt

SEQ ID NO: 146097 - DNA, 25 bp, Homo sapien
acattaggaaggaggaccacagtgg

SEQ ID NO: 146098 - DNA, 25 bp, Homo sapien
agacaataaataccacgatgacagg

SEQ ID NO: 146099 - DNA, 25 bp, Homo sapien
gacaataaataccacgatgacaggg

SEQ ID NO: 146100 - DNA, 25 bp, Homo sapien
tgggtgtgcactgaagctgcaacac

SEQ ID NO: 146101 - DNA, 25 bp, Homo sapien
tggggattgcagatgaggtcacact

SEQ ID NO: 146102 - DNA, 25 bp, Homo sapien
gaaggggcagatgtccctcctccag

SEQ ID NO: 146103 - DNA, 25 bp, Homo sapien
acagacttctagtgacattcaggga

SEQ ID NO: 146104 - DNA, 25 bp, Homo sapien
gtgccagtgggtcagagcttgtttc

SEQ ID NO: 146105 - DNA, 25 bp, Homo sapien
taatggtaaccaagaacttcacagt

SEQ ID NO: 146106 - DNA, 25 bp, Homo sapien
agtccacagggccagtataatggta

SEQ ID NO: 146107 - DNA, 25 bp, Homo sapien
tcacagtagagtgccagtgggtcag

SEQ ID NO: 146108 - DNA, 25 bp, Homo sapien
tctttgctcactaatgcacttagct

SEQ ID NO: 146109 - DNA, 25 bp, Homo sapien
ttcgtcccagcatgatacgatcatt

SEQ ID NO: 146110 - DNA, 25 bp, Homo sapien
cctcttccatttcgtcccagcatga

SEQ ID NO: 146111 - DNA, 25 bp, Homo sapien
gcatgatacgatcatttctttgctc

SEQ ID NO: 146112 - DNA, 25 bp, Homo sapien
tcacctctggtgagagaccactcac

SEQ ID NO: 146113 - DNA, 25 bp, Homo sapien
tgagcaaacatgtgctcacctctgg

SEQ ID NO: 146114 - DNA, 25 bp, Homo sapien
ttttttgtagcccaatagctgagca

SEQ ID NO: 146115 - DNA, 25 bp, Homo sapien
cccaatagctgagcaaacatgtgct

SEQ ID NO: 146116 - DNA, 25 bp, Homo sapien
aagccggctgcttgcagaaactgca

SEQ ID NO: 146117 - DNA, 25 bp, Homo sapien
tattaacataataagagggaagccg

SEQ ID NO: 146118 - DNA, 25 bp, Homo sapien
tatcagatacgccatcccaaggtac

SEQ ID NO: 146119 - DNA, 25 bp, Homo sapien
aatgtctggaacatgcagttgttct

SEQ ID NO: 146120 - DNA, 25 bp, Homo sapien
gttgacccctgtgcattgtaaaagt

SEQ ID NO: 146121 - DNA, 25 bp, Homo sapien
gacccctgtgcattgtaaaagttgc

SEQ ID NO: 146122 - DNA, 25 bp, Homo sapien
ccctgtgcattgtaaaagttgccag

SEQ ID NO: 146123 - DNA, 25 bp, Homo sapien
tgacccctgtgcattgtaaaagttg

SEQ ID NO: 146124 - DNA, 25 bp, Homo sapien
acttcctcatagatcatgaaactca

SEQ ID NO: 146125 - DNA, 25 bp, Homo sapien
gaagcttctgtaatcttccattcat

SEQ ID NO: 146126 - DNA, 25 bp, Homo sapien
tcatgaaactcaacttcagctcact

SEQ ID NO: 146127 - DNA, 25 bp, Homo sapien
catagatcatgaaactcaacttcag

SEQ ID NO: 146128 - DNA, 25 bp, Homo sapien
gcattttcctttgccctagtattag

SEQ ID NO: 146129 - DNA, 25 bp, Homo sapien
tgccctagtattagggccagagtgg

SEQ ID NO: 146130 - DNA, 25 bp, Homo sapien
ctgtttccacaaagcggtgctctgt

SEQ ID NO: 146131 - DNA, 25 bp, Homo sapien
agctgcccctctaccgctgtcttct

SEQ ID NO: 146132 - DNA, 25 bp, Homo sapien
tgtaaattacacacttgtaaattac

SEQ ID NO: 146133 - DNA, 25 bp, Homo sapien
aattacacacttgtaaattacccat

SEQ ID NO: 146134 - DNA, 25 bp, Homo sapien
ctgtaaattacacacttgtaaatta

SEQ ID NO: 146135 - DNA, 25 bp, Homo sapien
tcagcattctgggcactgccgtaga

SEQ ID NO: 146136 - DNA, 25 bp, Homo sapien
agcattctgggcactgccgtagata

SEQ ID NO: 146137 - DNA, 25 bp, Homo sapien
cattctgggcactgccgtagatatc

SEQ ID NO: 146138 - DNA, 25 bp, Homo sapien
cagcattctgggcactgccgtagat

SEQ ID NO: 146139 - DNA, 25 bp, Homo sapien
caagcagggaaggttgtaagatcaa

SEQ ID NO: 146140 - DNA, 25 bp, Homo sapien
caggcaagcctgatgtaaaagcaat

SEQ ID NO: 146141 - DNA, 25 bp, Homo sapien
acagagtgataagcagaaggtgcct

SEQ ID NO: 146142 - DNA, 25 bp, Homo sapien
taaaagcaatagcagttggcaaagc

SEQ ID NO: 146143 - DNA, 25 bp, Homo sapien
ggaggacttagtgtggctgttccca

SEQ ID NO: 146144 - DNA, 25 bp, Homo sapien
gggaagtctgttcgccccaaactgc

SEQ ID NO: 146145 - DNA, 25 bp, Homo sapien
ttcccacaggaaggtactgagatca

SEQ ID NO: 146146 - DNA, 25 bp, Homo sapien
aacacagtgcataaatttctctgga

SEQ ID NO: 146147 - DNA, 25 bp, Homo sapien
ctgagaaggacagaataatagttgt

SEQ ID NO: 146148 - DNA, 25 bp, Homo sapien
tctctgagaaggacagaataatagt

SEQ ID NO: 146149 - DNA, 25 bp, Homo sapien
ctgttctctgagaaggacagaataa

SEQ ID NO: 146150 - DNA, 25 bp, Homo sapien
gaaggacagaataatagttgtccat

SEQ ID NO: 146151 - DNA, 25 bp, Homo sapien
tttgtgagctgctatgacttaatct

SEQ ID NO: 146152 - DNA, 25 bp, Homo sapien
ttcggtagtaggtggctgcctctga

SEQ ID NO: 146153 - DNA, 25 bp, Homo sapien
ccacaggtcttatcctcatggacct

SEQ ID NO: 146154 - DNA, 25 bp, Homo sapien
tcctctgagtgcttcggtagtaggt

SEQ ID NO: 146155 - DNA, 25 bp, Homo sapien
agacaggttctcctagagcctggat

SEQ ID NO: 146156 - DNA, 25 bp, Homo sapien
cataacgaagtagccaaatttttgg

SEQ ID NO: 146157 - DNA, 25 bp, Homo sapien
gcattttcccgtactctcgcaggtg

SEQ ID NO: 146158 - DNA, 25 bp, Homo sapien
gagagtggcatgacagaagacataa

SEQ ID NO: 146159 - DNA, 25 bp, Homo sapien
ggatctccgtgcagacttgccctgc

SEQ ID NO: 146160 - DNA, 25 bp, Homo sapien
tgtcttgcaggaagatgtgtgcctg

SEQ ID NO: 146161 - DNA, 25 bp, Homo sapien
gatgtcttgcaggaagatgtgtgcc

SEQ ID NO: 146162 - DNA, 25 bp, Homo sapien
gatgtgtgcctgcaatgtatagcaa

SEQ ID NO: 146163 - DNA, 25 bp, Homo sapien
tgcaatgtatagcaactggctgggc

SEQ ID NO: 146164 - DNA, 25 bp, Homo sapien
catagatcggaggactgtctgtcca

SEQ ID NO: 146165 - DNA, 25 bp, Homo sapien
taagcaggtagctgacttcagaatg

SEQ ID NO: 146166 - DNA, 25 bp, Homo sapien
actgtctgtccacgtcactttcggg

SEQ ID NO: 146167 - DNA, 25 bp, Homo sapien
tttcgggatgaatttctgcccacac

SEQ ID NO: 146168 - DNA, 25 bp, Homo sapien
tatccttagaacaacctaagaggca

SEQ ID NO: 146169 - DNA, 25 bp, Homo sapien
gaacccaggtggtcaagctccagag

SEQ ID NO: 146170 - DNA, 25 bp, Homo sapien
ggccgtattctaagtgcattgcata

SEQ ID NO: 146171 - DNA, 25 bp, Homo sapien
tcggttgcccaagccacactgttaa

SEQ ID NO: 146172 - DNA, 25 bp, Homo sapien
cattgacagtgacattcgtgggtcc

SEQ ID NO: 146173 - DNA, 25 bp, Homo sapien
tcagctcttaggcatttccaactta

SEQ ID NO: 146174 - DNA, 25 bp, Homo sapien
ttctcccttgatgtgtgtgaatgcg

SEQ ID NO: 146175 - DNA, 25 bp, Homo sapien
gaatgcgttttggttctaactggcc

SEQ ID NO: 146176 - DNA, 25 bp, Homo sapien
aaggtggctttatctctgtgttcaa

SEQ ID NO: 146177 - DNA, 25 bp, Homo sapien
tcaagaggcaccttattgtttcttt

SEQ ID NO: 146178 - DNA, 25 bp, Homo sapien
tgctatccatcctgtgctgacttca

SEQ ID NO: 146179 - DNA, 25 bp, Homo sapien
tgctgctatccatcctgtgctgact

SEQ ID NO: 146180 - DNA, 25 bp, Homo sapien
tgcatctgaggcctgaggaacctcc

SEQ ID NO: 146181 - DNA, 25 bp, Homo sapien
gctttccttaggtgcatctgaggcc

SEQ ID NO: 146182 - DNA, 25 bp, Homo sapien
ctttccttaggtgcatctgaggcct

SEQ ID NO: 146183 - DNA, 25 bp, Homo sapien
atctgaggcctgaggaacctccctg

SEQ ID NO: 146184 - DNA, 25 bp, Homo sapien
cctgttaccaatgatttaggtctct

SEQ ID NO: 146185 - DNA, 25 bp, Homo sapien
ttctatgctgtctcctgttaccaat

SEQ ID NO: 146186 - DNA, 25 bp, Homo sapien
ttaccaatgatttaggtctcttaac

SEQ ID NO: 146187 - DNA, 25 bp, Homo sapien
ctatgctgtctcctgttaccaatga

SEQ ID NO: 146188 - DNA, 25 bp, Homo sapien
tccacattgtctgcaagtccctcac

SEQ ID NO: 146189 - DNA, 25 bp, Homo sapien
caagtccctcactgcttttggtgaa

SEQ ID NO: 146190 - DNA, 25 bp, Homo sapien
ctacctggaactgacatacgggaat

SEQ ID NO: 146191 - DNA, 25 bp, Homo sapien
agctgggtcagacactacctggaac

SEQ ID NO: 146192 - DNA, 25 bp, Homo sapien
gaggtactgagggttgacttcaaca

SEQ ID NO: 146193 - DNA, 25 bp, Homo sapien
tgctaggcctgccagaaaaaagctt

SEQ ID NO: 146194 - DNA, 25 bp, Homo sapien
ggagtccggagtctttcaaaatcag

SEQ ID NO: 146195 - DNA, 25 bp, Homo sapien
taaagaccctagctccacatatagt

SEQ ID NO: 146196 - DNA, 25 bp, Homo sapien
tgggatccggaaatctaagactaac

SEQ ID NO: 146197 - DNA, 25 bp, Homo sapien
ggttcttgggcaggcaaatagcatg

SEQ ID NO: 146198 - DNA, 25 bp, Homo sapien
gtaggaattttgtggtccagagaca

SEQ ID NO: 146199 - DNA, 25 bp, Homo sapien
gcaggcaaatagcatgtgtctggga

SEQ ID NO: 146200 - DNA, 25 bp, Homo sapien
tcagcttggccttgtatgagactca

SEQ ID NO: 146201 - DNA, 25 bp, Homo sapien
tattgaccacactaaaagcagcatc

SEQ ID NO: 146202 - DNA, 25 bp, Homo sapien
tcctttccgggcttctattgaccac

SEQ ID NO: 146203 - DNA, 25 bp, Homo sapien
gaatcgacctgcaaattgttcctca

SEQ ID NO: 146204 - DNA, 25 bp, Homo sapien
tcagtcgtggaaatctgcttgtgga

SEQ ID NO: 146205 - DNA, 25 bp, Homo sapien
ataaaaggatagcaccacagccaag

SEQ ID NO: 146206 - DNA, 25 bp, Homo sapien
caaatcaaagatggatcagtcgtgg

SEQ ID NO: 146207 - DNA, 25 bp, Homo sapien
aagtgaggttcattttaacaaatca

SEQ ID NO: 146208 - DNA, 25 bp, Homo sapien
tgaaacaagtatgaactagaaaagt

SEQ ID NO: 146209 - DNA, 25 bp, Homo sapien
aaaatgaaacaagtatgaactagaa

SEQ ID NO: 146210 - DNA, 25 bp, Homo sapien
accagtagatccaaacgcagataat

SEQ ID NO: 146211 - DNA, 25 bp, Homo sapien
tagattttctgtaaccagtagatcc

SEQ ID NO: 146212 - DNA, 25 bp, Homo sapien
tgtgcattggccatacccttaggag

SEQ ID NO: 146213 - DNA, 25 bp, Homo sapien
tttgagtagtacagacctcgaagcc

SEQ ID NO: 146214 - DNA, 25 bp, Homo sapien
tatttatgcatgctgaccgtgtgtc

SEQ ID NO: 146215 - DNA, 25 bp, Homo sapien
caagcggtcctgtagatggcagtaa

SEQ ID NO: 146216 - DNA, 25 bp, Homo sapien
ggaacagtatatgaggcttttgaga

SEQ ID NO: 146217 - DNA, 25 bp, Homo sapien
ggttcagagccaattcttgtttcat

SEQ ID NO: 146218 - DNA, 25 bp, Homo sapien
tgtttcattggaacagtatatgagg

SEQ ID NO: 146219 - DNA, 25 bp, Homo sapien
ttggttttggttcagagccaattct

SEQ ID NO: 146220 - DNA, 25 bp, Homo sapien
aatgcagaactatgctttcaaatcc

SEQ ID NO: 146221 - DNA, 25 bp, Homo sapien
tttgagtgaaagttctgaccacaga

SEQ ID NO: 146222 - DNA, 25 bp, Homo sapien
tagctgcacatttgtggtctaactg

SEQ ID NO: 146223 - DNA, 25 bp, Homo sapien
gctcgttacctcactcagtctagag

SEQ ID NO: 146224 - DNA, 25 bp, Homo sapien
agagaaattccgtatcagttgacat

SEQ ID NO: 146225 - DNA, 25 bp, Homo sapien
acagagaaattccgtatcagttgac

SEQ ID NO: 146226 - DNA, 25 bp, Homo sapien
cagagaaattccgtatcagttgaca

SEQ ID NO: 146227 - DNA, 25 bp, Homo sapien
cttttgagctaaaaaagcaacctgg

SEQ ID NO: 146228 - DNA, 25 bp, Homo sapien
cgccctttatctttcttttgagcta

SEQ ID NO: 146229 - DNA, 25 bp, Homo sapien
tcttttgagctaaaaaagcaacctg

SEQ ID NO: 146230 - DNA, 25 bp, Homo sapien
tatttataggactccgccctttatc

SEQ ID NO: 146231 - DNA, 25 bp, Homo sapien
aaaatcatcaagttgaatggaattc

SEQ ID NO: 146232 - DNA, 25 bp, Homo sapien
tttcttcaggacctttgtcagagtt

SEQ ID NO: 146233 - DNA, 25 bp, Homo sapien
tcatcaagttgaatggaattctctt

SEQ ID NO: 146234 - DNA, 25 bp, Homo sapien
caagttgaatggaattctcttcaga

SEQ ID NO: 146235 - DNA, 25 bp, Homo sapien
ctagatagagcttcagactggccca

SEQ ID NO: 146236 - DNA, 25 bp, Homo sapien
agaatctcctgcattagaaatcaac

SEQ ID NO: 146237 - DNA, 25 bp, Homo sapien
ttcctctgatccatttctacaacag

SEQ ID NO: 146238 - DNA, 25 bp, Homo sapien
acattcctctgatccatttctacaa

SEQ ID NO: 146239 - DNA, 25 bp, Homo sapien
ggagatagcaccatgactaaacaat

SEQ ID NO: 146240 - DNA, 25 bp, Homo sapien
catggagatagcaccatgactaaac

SEQ ID NO: 146241 - DNA, 25 bp, Homo sapien
atggagatagcaccatgactaaaca

SEQ ID NO: 146242 - DNA, 25 bp, Homo sapien
tggagatagcaccatgactaaacaa

SEQ ID NO: 146243 - DNA, 25 bp, Homo sapien
aggcactttagagccagaatttggt

SEQ ID NO: 146244 - DNA, 25 bp, Homo sapien
aaatgctgcagtcctctacagaaaa

SEQ ID NO: 146245 - DNA, 25 bp, Homo sapien
cccaaaatgctgcagtcctctacag

SEQ ID NO: 146246 - DNA, 25 bp, Homo sapien
caaaatgctgcagtcctctacagaa

SEQ ID NO: 146247 - DNA, 25 bp, Homo sapien
ctgtatatgcccaaaatgctgcagt

SEQ ID NO: 146248 - DNA, 25 bp, Homo sapien
agtaaaattatatctccaagaaaca

SEQ ID NO: 146249 - DNA, 25 bp, Homo sapien
gcgagtaaaattatatctccaagaa

SEQ ID NO: 146250 - DNA, 25 bp, Homo sapien
ctgcgagtaaaattatatctccaag

SEQ ID NO: 146251 - DNA, 25 bp, Homo sapien
gagtaaaattatatctccaagaaac

SEQ ID NO: 146252 - DNA, 25 bp, Homo sapien
taaatgttgattgtagtactgtctc

SEQ ID NO: 146253 - DNA, 25 bp, Homo sapien
ttcaggctgaatagatgaataactc

SEQ ID NO: 146254 - DNA, 25 bp, Homo sapien
gactgctaaatgttgattgtagtac

SEQ ID NO: 146255 - DNA, 25 bp, Homo sapien
tgaatagatgaataactcccaagat

SEQ ID NO: 146256 - DNA, 25 bp, Homo sapien
gaaggtgctccaattctataaagtc

SEQ ID NO: 146257 - DNA, 25 bp, Homo sapien
tgtggactaatacatcaggctgaag

SEQ ID NO: 146258 - DNA, 25 bp, Homo sapien
ctcttagtattgtgtggactaatac

SEQ ID NO: 146259 - DNA, 25 bp, Homo sapien
tattgtgtggactaatacatcaggc

SEQ ID NO: 146260 - DNA, 25 bp, Homo sapien
ataatgttgatcttgggcctgttcc

SEQ ID NO: 146261 - DNA, 25 bp, Homo sapien
aatgttgatcttgggcctgttccac

SEQ ID NO: 146262 - DNA, 25 bp, Homo sapien
taatgttgatcttgggcctgttcca

SEQ ID NO: 146263 - DNA, 25 bp, Homo sapien
agttgagggtaccaggctgctccag

SEQ ID NO: 146264 - DNA, 25 bp, Homo sapien
gcattgtatgcgattttaggttttc

SEQ ID NO: 146265 - DNA, 25 bp, Homo sapien
atgaccaaggcattgtatgcgattt

SEQ ID NO: 146266 - DNA, 25 bp, Homo sapien
caaggcattgtatgcgattttaggt

SEQ ID NO: 146267 - DNA, 25 bp, Homo sapien
gaccaaggcattgtatgcgatttta

SEQ ID NO: 146268 - DNA, 25 bp, Homo sapien
tctgagctgccgtaataggaaatga

SEQ ID NO: 146269 - DNA, 25 bp, Homo sapien
ctgagctgccgtaataggaaatgac

SEQ ID NO: 146270 - DNA, 25 bp, Homo sapien
caatccatattttgcgcagccagta

SEQ ID NO: 146271 - DNA, 25 bp, Homo sapien
gcagccagtatatatgatgttggga

SEQ ID NO: 146272 - DNA, 25 bp, Homo sapien
ttttgcgcagccagtatatatgatg

SEQ ID NO: 146273 - DNA, 25 bp, Homo sapien
tagttccaatccatattttgcgcag

SEQ ID NO: 146274 - DNA, 25 bp, Homo sapien
aaatggcaagcagctaaaacattgt

SEQ ID NO: 146275 - DNA, 25 bp, Homo sapien
taaatggcaagcagctaaaacattg

SEQ ID NO: 146276 - DNA, 25 bp, Homo sapien
gtaaatggcaagcagctaaaacatt

SEQ ID NO: 146277 - DNA, 25 bp, Homo sapien
agtaaatggcaagcagctaaaacat

SEQ ID NO: 146278 - DNA, 25 bp, Homo sapien
tcagctttgagtctacacggatgta

SEQ ID NO: 146279 - DNA, 25 bp, Homo sapien
aacatcatgtcttccatcaactaca

SEQ ID NO: 146280 - DNA, 25 bp, Homo sapien
catgtcttccatcaactacagtcat

SEQ ID NO: 146281 - DNA, 25 bp, Homo sapien
gtctacacggatgtaaacatcatgt

SEQ ID NO: 146282 - DNA, 25 bp, Homo sapien
atacacaaggttctgcgctgactgc

SEQ ID NO: 146283 - DNA, 25 bp, Homo sapien
tacacaaggttctgcgctgactgcc

SEQ ID NO: 146284 - DNA, 25 bp, Homo sapien
aaagggcatcggctccatgctttac

SEQ ID NO: 146285 - DNA, 25 bp, Homo sapien
gaaaagggcatcggctccatgcttt

SEQ ID NO: 146286 - DNA, 25 bp, Homo sapien
aaaagggcatcggctccatgcttta

SEQ ID NO: 146287 - DNA, 25 bp, Homo sapien
ggcactcaaatcctagacacgaact

SEQ ID NO: 146288 - DNA, 25 bp, Homo sapien
gagaacagattgctacatgtttgct

SEQ ID NO: 146289 - DNA, 25 bp, Homo sapien
cattcagtaaggcactcaaatccta

SEQ ID NO: 146290 - DNA, 25 bp, Homo sapien
ctttttatagaaagacacgcttgtc

SEQ ID NO: 146291 - DNA, 25 bp, Homo sapien
cacttgagacgacattaggaacttt

SEQ ID NO: 146292 - DNA, 25 bp, Homo sapien
gacttgccttaagaagcacccgaga

SEQ ID NO: 146293 - DNA, 25 bp, Homo sapien
tgtccatctagtcagtgccctcaag

SEQ ID NO: 146294 - DNA, 25 bp, Homo sapien
aaggtaaggcatcttcatggcagag

SEQ ID NO: 146295 - DNA, 25 bp, Homo sapien
ccatgacagtgatcttgcacctgct

SEQ ID NO: 146296 - DNA, 25 bp, Homo sapien
ggacagatttccctcgacttcaact

SEQ ID NO: 146297 - DNA, 25 bp, Homo sapien
taaagaagcgactagaaagataggg

SEQ ID NO: 146298 - DNA, 25 bp, Homo sapien
taaagcagcagttaagagccaattg

SEQ ID NO: 146299 - DNA, 25 bp, Homo sapien
tttctgacagcctaatagcaaaaac

SEQ ID NO: 146300 - DNA, 25 bp, Homo sapien
cataccgttttatgatagtcttggg

SEQ ID NO: 146301 - DNA, 25 bp, Homo sapien
aaaaaatccagactgctattagagt

SEQ ID NO: 146302 - DNA, 25 bp, Homo sapien
gacaacagactgctatcataccgtt

SEQ ID NO: 146303 - DNA, 25 bp, Homo sapien
tatttcttccggtgatgtgtttgtt

SEQ ID NO: 146304 - DNA, 25 bp, Homo sapien
ccatatttcttccggtgatgtgttt

SEQ ID NO: 146305 - DNA, 25 bp, Homo sapien
gcttgataaatctgtgcctgcatca

SEQ ID NO: 146306 - DNA, 25 bp, Homo sapien
tcttccggtgatgtgtttgttgact

SEQ ID NO: 146307 - DNA, 25 bp, Homo sapien
ctcacagtagattggtgcaaacatg

SEQ ID NO: 146308 - DNA, 25 bp, Homo sapien
caatttttacacagatatcagcagt

SEQ ID NO: 146309 - DNA, 25 bp, Homo sapien
taagtgtacatagagagttgtccgc

SEQ ID NO: 146310 - DNA, 25 bp, Homo sapien
aacagcccacaagcatcaactgagg

SEQ ID NO: 146311 - DNA, 25 bp, Homo sapien
tcttcgaagttcacagcatgctcta

SEQ ID NO: 146312 - DNA, 25 bp, Homo sapien
tattgcatagcctgtacacgtcctg

SEQ ID NO: 146313 - DNA, 25 bp, Homo sapien
tagactttccggttgcagatcagga

SEQ ID NO: 146314 - DNA, 25 bp, Homo sapien
caggctgaccatgagtgcaaatctt

SEQ ID NO: 146315 - DNA, 25 bp, Homo sapien
ctcccagtgcagaattttaatatat

SEQ ID NO: 146316 - DNA, 25 bp, Homo sapien
tcccagtgcagaattttaatatatt

SEQ ID NO: 146317 - DNA, 25 bp, Homo sapien
cacagaaagtatgcgttttctttgt

SEQ ID NO: 146318 - DNA, 25 bp, Homo sapien
tagacacagaaagtatgcgttttct

SEQ ID NO: 146319 - DNA, 25 bp, Homo sapien
tagtatcttttgtagacacagaaag

SEQ ID NO: 146320 - DNA, 25 bp, Homo sapien
atagtatcttttgtagacacagaaa

SEQ ID NO: 146321 - DNA, 25 bp, Homo sapien
ccctcacatgctagatttccttttc

SEQ ID NO: 146322 - DNA, 25 bp, Homo sapien
ttttattggactggattaaaacatc

SEQ ID NO: 146323 - DNA, 25 bp, Homo sapien
actctgagaacacttagtcccctca

SEQ ID NO: 146324 - DNA, 25 bp, Homo sapien
taataatgcataacttaaacttccc

SEQ ID NO: 146325 - DNA, 25 bp, Homo sapien
ataaaacgcagggagggagctgtac

SEQ ID NO: 146326 - DNA, 25 bp, Homo sapien
aaaacgcagggagggagctgtacaa

SEQ ID NO: 146327 - DNA, 25 bp, Homo sapien
acatcatttaataaaacgcagggag

SEQ ID NO: 146328 - DNA, 25 bp, Homo sapien
catttaataaaacgcagggagggag

SEQ ID NO: 146329 - DNA, 25 bp, Homo sapien
tgttggagaccggtacacaaaatta

SEQ ID NO: 146330 - DNA, 25 bp, Homo sapien
tactgactctaagggattatagcac

SEQ ID NO: 146331 - DNA, 25 bp, Homo sapien
ttaggagacctgatggctgacaccc

SEQ ID NO: 146332 - DNA, 25 bp, Homo sapien
aacagtcccctacatactttactga

SEQ ID NO: 146333 - DNA, 25 bp, Homo sapien
tttcctttatatagaaatctttcaa

SEQ ID NO: 146334 - DNA, 25 bp, Homo sapien
tagaaatctttcaagctcggtgact

SEQ ID NO: 146335 - DNA, 25 bp, Homo sapien
gaaatctttcaagctcggtgactag

SEQ ID NO: 146336 - DNA, 25 bp, Homo sapien
agaaatctttcaagctcggtgacta

SEQ ID NO: 146337 - DNA, 25 bp, Homo sapien
taagaggtcccgtacagaacacgat

SEQ ID NO: 146338 - DNA, 25 bp, Homo sapien
gatgattgccgagctttccagagag

SEQ ID NO: 146339 - DNA, 25 bp, Homo sapien
gaacacgatcgtcacctagtggcca

SEQ ID NO: 146340 - DNA, 25 bp, Homo sapien
tgcaccggtgcatcataaagagctt

SEQ ID NO: 146341 - DNA, 25 bp, Homo sapien
taactggctcctatcaggtcctgcc

SEQ ID NO: 146342 - DNA, 25 bp, Homo sapien
ccaagagattcagggaggccgtaaa

SEQ ID NO: 146343 - DNA, 25 bp, Homo sapien
tatgtgacttaactcttgcttggcg

SEQ ID NO: 146344 - DNA, 25 bp, Homo sapien
tctacctgatgcacaagaatctggg

SEQ ID NO: 146345 - DNA, 25 bp, Homo sapien
cagtataattggtgatctggtggtc

SEQ ID NO: 146346 - DNA, 25 bp, Homo sapien
tgtgtcccctccagttatactccct

SEQ ID NO: 146347 - DNA, 25 bp, Homo sapien
cagttatactcccttgtcttggttc

SEQ ID NO: 146348 - DNA, 25 bp, Homo sapien
gtctgctgggggtctactgtgtccc

SEQ ID NO: 146349 - DNA, 25 bp, Homo sapien
ctctggcctttgagatgatgtcctg

SEQ ID NO: 146350 - DNA, 25 bp, Homo sapien
ctggcctttgagatgatgtcctgtc

SEQ ID NO: 146351 - DNA, 25 bp, Homo sapien
tctggcctttgagatgatgtcctgt

SEQ ID NO: 146352 - DNA, 25 bp, Homo sapien
agtgtatcgtgtccctgggtactca

SEQ ID NO: 146353 - DNA, 25 bp, Homo sapien
tatcgtgtccctgggtactcaagat

SEQ ID NO: 146354 - DNA, 25 bp, Homo sapien
tactcaagattagagaatggcgatg

SEQ ID NO: 146355 - DNA, 25 bp, Homo sapien
agccttccgcagtgtatcgtgtccc

SEQ ID NO: 146356 - DNA, 25 bp, Homo sapien
gtgtttttcgtcaggtgggacaaga

SEQ ID NO: 146357 - DNA, 25 bp, Homo sapien
ccaagtgggctttagaactgaaggg

SEQ ID NO: 146358 - DNA, 25 bp, Homo sapien
caataaacgggaggtgcatttgcca

SEQ ID NO: 146359 - DNA, 25 bp, Homo sapien
aaatactgccacatgtggaatgagc

SEQ ID NO: 146360 - DNA, 25 bp, Homo sapien
ttgtcaggcagaaaacttgattaat

SEQ ID NO: 146361 - DNA, 25 bp, Homo sapien
ttttaagcagtaagcagaatcatag

SEQ ID NO: 146362 - DNA, 25 bp, Homo sapien
tttttaagcagtaagcagaatcata

SEQ ID NO: 146363 - DNA, 25 bp, Homo sapien
taactcactggacacatagggatgt

SEQ ID NO: 146364 - DNA, 25 bp, Homo sapien
gtgcttttgcctagtcatgaacaga

SEQ ID NO: 146365 - DNA, 25 bp, Homo sapien
tttcataactcactggacacatagg

SEQ ID NO: 146366 - DNA, 25 bp, Homo sapien
catagggatgttatgtgcttttgcc

SEQ ID NO: 146367 - DNA, 25 bp, Homo sapien
agctatcactgatgaattcccagaa

SEQ ID NO: 146368 - DNA, 25 bp, Homo sapien
gctatcactgatgaattcccagaaa

SEQ ID NO: 146369 - DNA, 25 bp, Homo sapien
ctatcactgatgaattcccagaaac

SEQ ID NO: 146370 - DNA, 25 bp, Homo sapien
gtctctggatcctgtgtcagactta

SEQ ID NO: 146371 - DNA, 25 bp, Homo sapien
tcctgtgtcagacttaaggcttccc

SEQ ID NO: 146372 - DNA, 25 bp, Homo sapien
tggatcctgtgtcagacttaaggct

SEQ ID NO: 146373 - DNA, 25 bp, Homo sapien
ctgtgtcagacttaaggcttcccaa

SEQ ID NO: 146374 - DNA, 25 bp, Homo sapien
tgctctgtgagacaaacctttgacc

SEQ ID NO: 146375 - DNA, 25 bp, Homo sapien
gggccaccctgatgatacttatata

SEQ ID NO: 146376 - DNA, 25 bp, Homo sapien
aaatatgtgttatatggaggtgcag

SEQ ID NO: 146377 - DNA, 25 bp, Homo sapien
tataagaaccctgttgcactcaaat

SEQ ID NO: 146378 - DNA, 25 bp, Homo sapien
agcagcttgtttttcacagggcttg

SEQ ID NO: 146379 - DNA, 25 bp, Homo sapien
cttggtgataaacatccatggattg

SEQ ID NO: 146380 - DNA, 25 bp, Homo sapien
cagcttgtttttcacagggcttgtt

SEQ ID NO: 146381 - DNA, 25 bp, Homo sapien
gcttggtgataaacatccatggatt

SEQ ID NO: 146382 - DNA, 25 bp, Homo sapien
aaagaccagttatctttgctccatc

SEQ ID NO: 146383 - DNA, 25 bp, Homo sapien
gcatcctttgaactaaaagaccagt

SEQ ID NO: 146384 - DNA, 25 bp, Homo sapien
aagttcagcatcctttgaactaaaa

SEQ ID NO: 146385 - DNA, 25 bp, Homo sapien
aaagtcgaggatctccaaatgatgc

SEQ ID NO: 146386 - DNA, 25 bp, Homo sapien
tcacttagtggtccctatagagcca

SEQ ID NO: 146387 - DNA, 25 bp, Homo sapien
ccaaacgtagaggtgacatgtgtca

SEQ ID NO: 146388 - DNA, 25 bp, Homo sapien
tttgccacaccaatcaaccagtaga

SEQ ID NO: 146389 - DNA, 25 bp, Homo sapien
taagtgtgaggtttgtatgggccaa

SEQ ID NO: 146390 - DNA, 25 bp, Homo sapien
gactcatttcccaacaaggtagtct

SEQ ID NO: 146391 - DNA, 25 bp, Homo sapien
aaacgaggacttctatctcccaaag

SEQ ID NO: 146392 - DNA, 25 bp, Homo sapien
agggcagaggtcaaaacgaggactt

SEQ ID NO: 146393 - DNA, 25 bp, Homo sapien
taatgtagaccatcaaattgtgtga

SEQ ID NO: 146394 - DNA, 25 bp, Homo sapien
caaaaattaacatagggccagaagc

SEQ ID NO: 146395 - DNA, 25 bp, Homo sapien
cacttggttcaacatgggacccagg

SEQ ID NO: 146396 - DNA, 25 bp, Homo sapien
ttccacctgcacaaatataggaggc

SEQ ID NO: 146397 - DNA, 25 bp, Homo sapien
tcaagtttagatggcccagatggta

SEQ ID NO: 146398 - DNA, 25 bp, Homo sapien
tattttatctacatgcattgagaac

SEQ ID NO: 146399 - DNA, 25 bp, Homo sapien
cattgagaactacattggacagtgt

SEQ ID NO: 146400 - DNA, 25 bp, Homo sapien
aacttatcaaagtctactggcatcg

SEQ ID NO: 146401 - DNA, 25 bp, Homo sapien
gacgtccccatgactctttctttta

SEQ ID NO: 146402 - DNA, 25 bp, Homo sapien
tatcccatgctcagaattactaagg

SEQ ID NO: 146403 - DNA, 25 bp, Homo sapien
gcactggccctaatgtctgcagaaa

SEQ ID NO: 146404 - DNA, 25 bp, Homo sapien
caatatctctccttgggtgacacac

SEQ ID NO: 146405 - DNA, 25 bp, Homo sapien
cacttgaggtctacccagttggtca

SEQ ID NO: 146406 - DNA, 25 bp, Homo sapien
tctggaaaatactggtgcaatgaat

SEQ ID NO: 146407 - DNA, 25 bp, Homo sapien
cgagggaaaatctgagttgacttga

SEQ ID NO: 146408 - DNA, 25 bp, Homo sapien
gagagtcatgtttagtcctgacagc

SEQ ID NO: 146409 - DNA, 25 bp, Homo sapien
tacaaagccctggatataggtagac

SEQ ID NO: 146410 - DNA, 25 bp, Homo sapien
cacacaatgaagtgtttcaatatca

SEQ ID NO: 146411 - DNA, 25 bp, Homo sapien
acaatgaagtgtttcaatatcatcc

SEQ ID NO: 146412 - DNA, 25 bp, Homo sapien
tttccctgttgcacacaatgaagtg

SEQ ID NO: 146413 - DNA, 25 bp, Homo sapien
tgttgcacacaatgaagtgtttcaa

SEQ ID NO: 146414 - DNA, 25 bp, Homo sapien
gggaaggccgcttacattcatgtac

SEQ ID NO: 146415 - DNA, 25 bp, Homo sapien
cagtagccaggtttagagattgagc

SEQ ID NO: 146416 - DNA, 25 bp, Homo sapien
gggacattgtctccacctaattgaa

SEQ ID NO: 146417 - DNA, 25 bp, Homo sapien
gaagagcatggcattgaggtcactg

SEQ ID NO: 146418 - DNA, 25 bp, Homo sapien
gagctggtgggttactctccctcat

SEQ ID NO: 146419 - DNA, 25 bp, Homo sapien
tctgtggagctggtgggttactctc

SEQ ID NO: 146420 - DNA, 25 bp, Homo sapien
tgtggagctggtgggttactctccc

SEQ ID NO: 146421 - DNA, 25 bp, Homo sapien
tggagctggtgggttactctccctc

SEQ ID NO: 146422 - DNA, 25 bp, Homo sapien
ttgacactggagcttagagtgatcc

SEQ ID NO: 146423 - DNA, 25 bp, Homo sapien
agggagtggaggcagagaattcctg

SEQ ID NO: 146424 - DNA, 25 bp, Homo sapien
acataacagagttccaagaaaactg

SEQ ID NO: 146425 - DNA, 25 bp, Homo sapien
cacagagtttagaagtgggtgcttc

SEQ ID NO: 146426 - DNA, 25 bp, Homo sapien
tgctgtgacattgtcatctccagat

SEQ ID NO: 146427 - DNA, 25 bp, Homo sapien
tctccagatccacataacagagttc

SEQ ID NO: 146428 - DNA, 25 bp, Homo sapien
ttctgggtaatctattgatactctg

SEQ ID NO: 146429 - DNA, 25 bp, Homo sapien
aactatcctatataaagtgaagaca

SEQ ID NO: 146430 - DNA, 25 bp, Homo sapien
tgatactctgactatcactaccgcc

SEQ ID NO: 146431 - DNA, 25 bp, Homo sapien
ctaccgcccaccacatcctaactat

SEQ ID NO: 146432 - DNA, 25 bp, Homo sapien
gaacataatagtagcagaaggtggg

SEQ ID NO: 146433 - DNA, 25 bp, Homo sapien
gggctcctccggcagatactggatc

SEQ ID NO: 146434 - DNA, 25 bp, Homo sapien
catctgaagaacataatagtagcag

SEQ ID NO: 146435 - DNA, 25 bp, Homo sapien
ccactctcttctactcatctgaaga

SEQ ID NO: 146436 - DNA, 25 bp, Homo sapien
gcaggatgtgcaaacaaaaacgctt

SEQ ID NO: 146437 - DNA, 25 bp, Homo sapien
aatattaataatgcaggatgtgcaa

SEQ ID NO: 146438 - DNA, 25 bp, Homo sapien
taataatgcaggatgtgcaaacaaa

SEQ ID NO: 146439 - DNA, 25 bp, Homo sapien
taatgcaggatgtgcaaacaaaaac

SEQ ID NO: 146440 - DNA, 25 bp, Homo sapien
catgatagaccttaaattgcactgc

SEQ ID NO: 146441 - DNA, 25 bp, Homo sapien
catttgaggccatagttattgtcca

SEQ ID NO: 146442 - DNA, 25 bp, Homo sapien
aaaaatattaactcaggccactgaa

SEQ ID NO: 146443 - DNA, 25 bp, Homo sapien
tccaggctgcgtgaagcatgacaac

SEQ ID NO: 146444 - DNA, 25 bp, Homo sapien
aggaacagagaaccaatattgcatg

SEQ ID NO: 146445 - DNA, 25 bp, Homo sapien
gaacagagaaccaatattgcatgtt

SEQ ID NO: 146446 - DNA, 25 bp, Homo sapien
caggaacagagaaccaatattgcat

SEQ ID NO: 146447 - DNA, 25 bp, Homo sapien
gcaggacaaggaaagctccctcagt

SEQ ID NO: 146448 - DNA, 25 bp, Homo sapien
caggtgtcacaaggcctaaatcatg

SEQ ID NO: 146449 - DNA, 25 bp, Homo sapien
ggctgtagatgtggaagcttgcatc

SEQ ID NO: 146450 - DNA, 25 bp, Homo sapien
gaacattgacgaagctggagaccat

SEQ ID NO: 146451 - DNA, 25 bp, Homo sapien
gagaacttaactgggtcttccatac

SEQ ID NO: 146452 - DNA, 25 bp, Homo sapien
taattgatatctccttgcattagtt

SEQ ID NO: 146453 - DNA, 25 bp, Homo sapien
aacttactactggtgaactatattt

SEQ ID NO: 146454 - DNA, 25 bp, Homo sapien
tattattgatttgtaaatggcttgc

SEQ ID NO: 146455 - DNA, 25 bp, Homo sapien
aagactctttgccatatagtttctc

SEQ ID NO: 146456 - DNA, 25 bp, Homo sapien
agactctttgccatatagtttctca

SEQ ID NO: 146457 - DNA, 25 bp, Homo sapien
cttcaaagactctttgccatatagt

SEQ ID NO: 146458 - DNA, 25 bp, Homo sapien
caaagactctttgccatatagtttc

SEQ ID NO: 146459 - DNA, 25 bp, Homo sapien
gaacgttacactaattgatatccct

SEQ ID NO: 146460 - DNA, 25 bp, Homo sapien
tcatagtgctcctataagctaggca

SEQ ID NO: 146461 - DNA, 25 bp, Homo sapien
tcctgtcccttaaggctgggtccta

SEQ ID NO: 146462 - DNA, 25 bp, Homo sapien
catctcctccagacagaacgttaca

SEQ ID NO: 146463 - DNA, 25 bp, Homo sapien
taatgtggcgaattctatacaaccc

SEQ ID NO: 146464 - DNA, 25 bp, Homo sapien
tatgacatgggtccataatgtggcg

SEQ ID NO: 146465 - DNA, 25 bp, Homo sapien
tacactgggaatcttgaagggtctc

SEQ ID NO: 146466 - DNA, 25 bp, Homo sapien
gcagctaacaaatgcaccgtggatt

SEQ ID NO: 146467 - DNA, 25 bp, Homo sapien
ttctgaatagccttgcatccaggta

SEQ ID NO: 146468 - DNA, 25 bp, Homo sapien
tcattctgaatagccttgcatccag

SEQ ID NO: 146469 - DNA, 25 bp, Homo sapien
gaatagccttgcatccaggtaaatt

SEQ ID NO: 146470 - DNA, 25 bp, Homo sapien
atcttcattctgaatagccttgcat

SEQ ID NO: 146471 - DNA, 25 bp, Homo sapien
gccttagggacttgttccaatatag

SEQ ID NO: 146472 - DNA, 25 bp, Homo sapien
cgcctttcacctaggcagccttagg

SEQ ID NO: 146473 - DNA, 25 bp, Homo sapien
catccatttacccagtcttggagtg

SEQ ID NO: 146474 - DNA, 25 bp, Homo sapien
gcgggagggtgcaattaacaccttc

SEQ ID NO: 146475 - DNA, 25 bp, Homo sapien
tgcaaacctgagacaacactaagtg

SEQ ID NO: 146476 - DNA, 25 bp, Homo sapien
cctcagctccaaacaggtggacttt

SEQ ID NO: 146477 - DNA, 25 bp, Homo sapien
tcttaaagctaaaagtgtgcctcac

SEQ ID NO: 146478 - DNA, 25 bp, Homo sapien
catgagtggctatgtgaaattcttc

SEQ ID NO: 146479 - DNA, 25 bp, Homo sapien
taggacccaggatgtgccatagcct

SEQ ID NO: 146480 - DNA, 25 bp, Homo sapien
tatgtgcagtatgctcccagttctc

SEQ ID NO: 146481 - DNA, 25 bp, Homo sapien
tagagagggatcaacctgcctgttc

SEQ ID NO: 146482 - DNA, 25 bp, Homo sapien
tattcacatgaactaggacagcctt

SEQ ID NO: 146483 - DNA, 25 bp, Homo sapien
ccccaactggatagtaagcttctag

SEQ ID NO: 146484 - DNA, 25 bp, Homo sapien
tctactggatgtacacctacggtct

SEQ ID NO: 146485 - DNA, 25 bp, Homo sapien
taagatttgtcatatccccaactgg

SEQ ID NO: 146486 - DNA, 25 bp, Homo sapien
tcttcttccgtgatattggttcttc

SEQ ID NO: 146487 - DNA, 25 bp, Homo sapien
taagaatgtgctacaggaaaaagct

SEQ ID NO: 146488 - DNA, 25 bp, Homo sapien
ggtaactcaattgccccagcccaat

SEQ ID NO: 146489 - DNA, 25 bp, Homo sapien
tcatggaaatggtcaggtaactcaa

SEQ ID NO: 146490 - DNA, 25 bp, Homo sapien
cattgcattaggttagcactgtgac

SEQ ID NO: 146491 - DNA, 25 bp, Homo sapien
tattcactaagagggcacatactgg

SEQ ID NO: 146492 - DNA, 25 bp, Homo sapien
tactggcaatatgcagtcattatca

SEQ ID NO: 146493 - DNA, 25 bp, Homo sapien
tacaaaacttaatgagaatgaacca

SEQ ID NO: 146494 - DNA, 25 bp, Homo sapien
accaaatacctatgtactctgtttt

SEQ ID NO: 146495 - DNA, 25 bp, Homo sapien
ggtctctcgagggtgggaacatggg

SEQ ID NO: 146496 - DNA, 25 bp, Homo sapien
gcatggtgattgtttggaggtctct

SEQ ID NO: 146497 - DNA, 25 bp, Homo sapien
gaatcactgccattcatgctggtga

SEQ ID NO: 146498 - DNA, 25 bp, Homo sapien
aatttttgttactgaatgttcactg

SEQ ID NO: 146499 - DNA, 25 bp, Homo sapien
gaggaatgttcagccctgttgctgc

SEQ ID NO: 146500 - DNA, 25 bp, Homo sapien
ggatgaggaatgttcagccctgttg

SEQ ID NO: 146501 - DNA, 25 bp, Homo sapien
tactggtgaagggagagttagggat

SEQ ID NO: 146502 - DNA, 25 bp, Homo sapien
agttagggatgaggaatgttcagcc

SEQ ID NO: 146503 - DNA, 25 bp, Homo sapien
aggtcccatggagggctactagtag

SEQ ID NO: 146504 - DNA, 25 bp, Homo sapien
tgggcctgcggtgattgcagttatc

SEQ ID NO: 146505 - DNA, 25 bp, Homo sapien
ctgagttgacatgcttccttaagaa

SEQ ID NO: 146506 - DNA, 25 bp, Homo sapien
tactagtagtagaacttcaggccag

SEQ ID NO: 146507 - DNA, 25 bp, Homo sapien
caattgtagaactgaggtcttggct

SEQ ID NO: 146508 - DNA, 25 bp, Homo sapien
ccatactggtaatctgacagggaga

SEQ ID NO: 146509 - DNA, 25 bp, Homo sapien
gccgtgttctcacctgaagctcaga

SEQ ID NO: 146510 - DNA, 25 bp, Homo sapien
tctggcatggagtggctgcattctt

SEQ ID NO: 146511 - DNA, 25 bp, Homo sapien
ctctattatagcaagaagttactaa

SEQ ID NO: 146512 - DNA, 25 bp, Homo sapien
actgctggacagatctaggtttaag

SEQ ID NO: 146513 - DNA, 25 bp, Homo sapien
ttttttagagaacagttaccagcac

SEQ ID NO: 146514 - DNA, 25 bp, Homo sapien
agtgtctgtccacatttgtactcta

SEQ ID NO: 146515 - DNA, 25 bp, Homo sapien
cagcagtggctatgctctcagggat

SEQ ID NO: 146516 - DNA, 25 bp, Homo sapien
cagtaaggctcatgggataaggtcc

SEQ ID NO: 146517 - DNA, 25 bp, Homo sapien
cacatggcatcatgggaatggcact

SEQ ID NO: 146518 - DNA, 25 bp, Homo sapien
gaatagcatgggatcaaagacagtc

SEQ ID NO: 146519 - DNA, 25 bp, Homo sapien
gaagtgttaagattcctagttcctc

SEQ ID NO: 146520 - DNA, 25 bp, Homo sapien
tgagagttaaaccaagctatgtctg

SEQ ID NO: 146521 - DNA, 25 bp, Homo sapien
actaagcttattatctggacaggga

SEQ ID NO: 146522 - DNA, 25 bp, Homo sapien
gctatgtctgtggaaagtggagacc

SEQ ID NO: 146523 - DNA, 25 bp, Homo sapien
tcccaaaagggatggtccagactct

SEQ ID NO: 146524 - DNA, 25 bp, Homo sapien
ggtggtggtgcacacacatgagcat

SEQ ID NO: 146525 - DNA, 25 bp, Homo sapien
tgggcatacccattgcttcaagaga

SEQ ID NO: 146526 - DNA, 25 bp, Homo sapien
tgtacacatgggcaatgcagtctgc

SEQ ID NO: 146527 - DNA, 25 bp, Homo sapien
gattgtcagcacaaagaattcacca

SEQ ID NO: 146528 - DNA, 25 bp, Homo sapien
tatatatagcgcattgtcccagtag

SEQ ID NO: 146529 - DNA, 25 bp, Homo sapien
tcattgtaaatgctccagaaggcaa

SEQ ID NO: 146530 - DNA, 25 bp, Homo sapien
tcaccagtgaggtagattttgtgca

SEQ ID NO: 146531 - DNA, 25 bp, Homo sapien
ggtggctccacgttaaatgtcttaa

SEQ ID NO: 146532 - DNA, 25 bp, Homo sapien
cagggtttcactccacgagcattta

SEQ ID NO: 146533 - DNA, 25 bp, Homo sapien
gtgctaatggttgggtctcttcctc

SEQ ID NO: 146534 - DNA, 25 bp, Homo sapien
cacttggccatatctcaacctgaag

SEQ ID NO: 146535 - DNA, 25 bp, Homo sapien
tgagcccgctttcttcacaggaaga

SEQ ID NO: 146536 - DNA, 25 bp, Homo sapien
gtctccactggggtgaccaatccag

SEQ ID NO: 146537 - DNA, 25 bp, Homo sapien
tggggtgaccaatccagtgcttgct

SEQ ID NO: 146538 - DNA, 25 bp, Homo sapien
ccagtgcttgctgagcccgctttct

SEQ ID NO: 146539 - DNA, 25 bp, Homo sapien
ggtccccatttcttgcgagagtgtg

SEQ ID NO: 146540 - DNA, 25 bp, Homo sapien
gaatgaatcccagttgataattcat

SEQ ID NO: 146541 - DNA, 25 bp, Homo sapien
cccatttcttgcgagagtgtgtaga

SEQ ID NO: 146542 - DNA, 25 bp, Homo sapien
cgagagtgtgtagaatgaatcccag

SEQ ID NO: 146543 - DNA, 25 bp, Homo sapien
tagagattaatttccggctggtgtc

SEQ ID NO: 146544 - DNA, 25 bp, Homo sapien
gacagctagcatagttccctcggag

SEQ ID NO: 146545 - DNA, 25 bp, Homo sapien
gacctaatagagtcaggccctgcct

SEQ ID NO: 146546 - DNA, 25 bp, Homo sapien
gatgtcctataatgccaagctctgc

SEQ ID NO: 146547 - DNA, 25 bp, Homo sapien
gctttcctttcagactaaattggct

SEQ ID NO: 146548 - DNA, 25 bp, Homo sapien
taaattggcttaattgtaccccaga

SEQ ID NO: 146549 - DNA, 25 bp, Homo sapien
tccaatactcttgttatgtgttatt

SEQ ID NO: 146550 - DNA, 25 bp, Homo sapien
gcaaggccctcggtctctgatagag

SEQ ID NO: 146551 - DNA, 25 bp, Homo sapien
tctacttgtaccctgtgcatcttgc

SEQ ID NO: 146552 - DNA, 25 bp, Homo sapien
tgcaatctggcctgatacttggctc

SEQ ID NO: 146553 - DNA, 25 bp, Homo sapien
agagctttgcccgatgagaattagg

SEQ ID NO: 146554 - DNA, 25 bp, Homo sapien
catccaggcagcccatttctacttg

SEQ ID NO: 146555 - DNA, 25 bp, Homo sapien
ctgtgcagtgaagagtcttatgcag

SEQ ID NO: 146556 - DNA, 25 bp, Homo sapien
cagtgaagagtcttatgcagagagg

SEQ ID NO: 146557 - DNA, 25 bp, Homo sapien
tgcagtgaagagtcttatgcagaga

SEQ ID NO: 146558 - DNA, 25 bp, Homo sapien
aagagtcttatgcagagagggctgc

SEQ ID NO: 146559 - DNA, 25 bp, Homo sapien
ctactggctctctgagggttctcag

SEQ ID NO: 146560 - DNA, 25 bp, Homo sapien
tgagtgctcgctagagccttctgct

SEQ ID NO: 146561 - DNA, 25 bp, Homo sapien
gctctcccaactcctgtcagagggc

SEQ ID NO: 146562 - DNA, 25 bp, Homo sapien
cttctgctggtgtgagtgctcgcta

SEQ ID NO: 146563 - DNA, 25 bp, Homo sapien
ggtggtgctcttccttatgtccagc

SEQ ID NO: 146564 - DNA, 25 bp, Homo sapien
ggtgtgcgcctctcaatgtcccgat

SEQ ID NO: 146565 - DNA, 25 bp, Homo sapien
tgggtaatgcaaccatagggcagga

SEQ ID NO: 146566 - DNA, 25 bp, Homo sapien
tgtccacacttagatccataggcac

SEQ ID NO: 146567 - DNA, 25 bp, Homo sapien
gtcatcccagagtgaaaaagctact

SEQ ID NO: 146568 - DNA, 25 bp, Homo sapien
tcctgatcctactgaattccctttt

SEQ ID NO: 146569 - DNA, 25 bp, Homo sapien
tggcaccttgtagctctttgttttt

SEQ ID NO: 146570 - DNA, 25 bp, Homo sapien
tgggttaacagaagggcttttgtca

SEQ ID NO: 146571 - DNA, 25 bp, Homo sapien
gcgcaggtgtaggagcattggagag

SEQ ID NO: 146572 - DNA, 25 bp, Homo sapien
tgtccaagatcggtaatagcgctgg

SEQ ID NO: 146573 - DNA, 25 bp, Homo sapien
ggagaaggtttggacctgtccaaga

SEQ ID NO: 146574 - DNA, 25 bp, Homo sapien
tcaagcagtgttcagcagcgcaggt

SEQ ID NO: 146575 - DNA, 25 bp, Homo sapien
ctgagcatgtggactgaaaagagta

SEQ ID NO: 146576 - DNA, 25 bp, Homo sapien
tgtggactgaaaagagtagaacctt

SEQ ID NO: 146577 - DNA, 25 bp, Homo sapien
gagcatgtggactgaaaagagtaga

SEQ ID NO: 146578 - DNA, 25 bp, Homo sapien
catgtggactgaaaagagtagaacc

SEQ ID NO: 146579 - DNA, 25 bp, Homo sapien
actgaggcacgctatattgatgttc

SEQ ID NO: 146580 - DNA, 25 bp, Homo sapien
tcgccttgcctaatggttgcttcca

SEQ ID NO: 146581 - DNA, 25 bp, Homo sapien
caaacacttctgcagtgcaaaaaca

SEQ ID NO: 146582 - DNA, 25 bp, Homo sapien
gatgttctactgtttttcgccttgc

SEQ ID NO: 146583 - DNA, 25 bp, Homo sapien
catctctgggagtcgaaactttctg

SEQ ID NO: 146584 - DNA, 25 bp, Homo sapien
ccatgaccatctctgggagtcgaaa

SEQ ID NO: 146585 - DNA, 25 bp, Homo sapien
tctgggagtcgaaactttctggtag

SEQ ID NO: 146586 - DNA, 25 bp, Homo sapien
gaccatctctgggagtcgaaacttt

SEQ ID NO: 146587 - DNA, 25 bp, Homo sapien
agaaaaccttcctttgtcagccact

SEQ ID NO: 146588 - DNA, 25 bp, Homo sapien
acagtctgccaggacactccactga

SEQ ID NO: 146589 - DNA, 25 bp, Homo sapien
tgggttcacatgagtcaagaaaacc

SEQ ID NO: 146590 - DNA, 25 bp, Homo sapien
caggcaaaggactcgaaggccctat

SEQ ID NO: 146591 - DNA, 25 bp, Homo sapien
atgtgacaggcagtggcatcaggtc

SEQ ID NO: 146592 - DNA, 25 bp, Homo sapien
tctttagcacggatgtgacaggcag

SEQ ID NO: 146593 - DNA, 25 bp, Homo sapien
gggccttgagcattgtgcctttctt

SEQ ID NO: 146594 - DNA, 25 bp, Homo sapien
gtgcctttctttagcacggatgtga

SEQ ID NO: 146595 - DNA, 25 bp, Homo sapien
ggtgggtagtaatggtgcagaaatg

SEQ ID NO: 146596 - DNA, 25 bp, Homo sapien
catcccatgagtcttgcagggtgta

SEQ ID NO: 146597 - DNA, 25 bp, Homo sapien
tccctaaaaggtccatcccatgagt

SEQ ID NO: 146598 - DNA, 25 bp, Homo sapien
taaaaggtccatcccatgagtcttg

SEQ ID NO: 146599 - DNA, 25 bp, Homo sapien
gaaaattcccagctagcatgtcagg

SEQ ID NO: 146600 - DNA, 25 bp, Homo sapien
tgctggcccatcgaggagtttaaac

SEQ ID NO: 146601 - DNA, 25 bp, Homo sapien
cattttaggtgaggaagcgcatcag

SEQ ID NO: 146602 - DNA, 25 bp, Homo sapien
tgtgattaatctccagcctgcgaaa

SEQ ID NO: 146603 - DNA, 25 bp, Homo sapien
tctaagaatagcaattccctactgt

SEQ ID NO: 146604 - DNA, 25 bp, Homo sapien
gctttacggttaaggatatggtcaa

SEQ ID NO: 146605 - DNA, 25 bp, Homo sapien
tcaagagtccagtataattccagag

SEQ ID NO: 146606 - DNA, 25 bp, Homo sapien
cagaatgttttatatgcagatgaga

SEQ ID NO: 146607 - DNA, 25 bp, Homo sapien
tgaaactgatgtcatgatgatctac

SEQ ID NO: 146608 - DNA, 25 bp, Homo sapien
gatgtcatgatgatctacagaaaat

SEQ ID NO: 146609 - DNA, 25 bp, Homo sapien
actgatgtcatgatgatctacagaa

SEQ ID NO: 146610 - DNA, 25 bp, Homo sapien
gaaactgatgtcatgatgatctaca

SEQ ID NO: 146611 - DNA, 25 bp, Homo sapien
tttccgtgagcgaatatgaacccca

SEQ ID NO: 146612 - DNA, 25 bp, Homo sapien
cctgtgatgtatgaggccctgggaa

SEQ ID NO: 146613 - DNA, 25 bp, Homo sapien
taggtcatgttcacggccctcaaag

SEQ ID NO: 146614 - DNA, 25 bp, Homo sapien
ttttgtcagtcaaggcaggcttcct

SEQ ID NO: 146615 - DNA, 25 bp, Homo sapien
tctgtaaagtgcctatattgatggc

SEQ ID NO: 146616 - DNA, 25 bp, Homo sapien
ttttccaacataataattgatgctg

SEQ ID NO: 146617 - DNA, 25 bp, Homo sapien
ttcattatttggaatcatgcaggat

SEQ ID NO: 146618 - DNA, 25 bp, Homo sapien
catgcaggataagtaaagatttttc

SEQ ID NO: 146619 - DNA, 25 bp, Homo sapien
tctgaactggcatacaggtcagcct

SEQ ID NO: 146620 - DNA, 25 bp, Homo sapien
cggatctgaactggcatacaggtca

SEQ ID NO: 146621 - DNA, 25 bp, Homo sapien
tctacggatctgaactggcatacag

SEQ ID NO: 146622 - DNA, 25 bp, Homo sapien
ctggctctacggatctgaactggca

SEQ ID NO: 146623 - DNA, 25 bp, Homo sapien
ctggtcacctccatgaacttgcatc

SEQ ID NO: 146624 - DNA, 25 bp, Homo sapien
agtggcgcagatactcttccaacca

SEQ ID NO: 146625 - DNA, 25 bp, Homo sapien
tccaggacaaaggatagcagtccag

SEQ ID NO: 146626 - DNA, 25 bp, Homo sapien
aaccaaagaagccagagtggcgcag

SEQ ID NO: 146627 - DNA, 25 bp, Homo sapien
cagagagtcggagcagaagggagcc

SEQ ID NO: 146628 - DNA, 25 bp, Homo sapien
agagagtcggagcagaagggagccc

SEQ ID NO: 146629 - DNA, 25 bp, Homo sapien
cagaagggagcccaaatttggggtg

SEQ ID NO: 146630 - DNA, 25 bp, Homo sapien
cattaatttcatgggcttggcacag

SEQ ID NO: 146631 - DNA, 25 bp, Homo sapien
tccccacatcgagagttcctagagg

SEQ ID NO: 146632 - DNA, 25 bp, Homo sapien
gcctttcagcaactccatgactgga

SEQ ID NO: 146633 - DNA, 25 bp, Homo sapien
cacagtgaatagacgtggcaggaac

SEQ ID NO: 146634 - DNA, 25 bp, Homo sapien
gccaagactggcagcgtaagtaact

SEQ ID NO: 146635 - DNA, 25 bp, Homo sapien
gaagcggaagtcatttggagccaag

SEQ ID NO: 146636 - DNA, 25 bp, Homo sapien
tatggcctagtgatccaagtaggac

SEQ ID NO: 146637 - DNA, 25 bp, Homo sapien
tagttccgagagtccctagagaggt

SEQ ID NO: 146638 - DNA, 25 bp, Homo sapien
gccgggactacaccagcatgataaa

SEQ ID NO: 146639 - DNA, 25 bp, Homo sapien
tgagtatctcactaggccatgtggc

SEQ ID NO: 146640 - DNA, 25 bp, Homo sapien
ggaagtcgtcctcactgatgcgcca

SEQ ID NO: 146641 - DNA, 25 bp, Homo sapien
cactaagtttagacatcgcgccagg

SEQ ID NO: 146642 - DNA, 25 bp, Homo sapien
tgcactcacttatgacattcatggg

SEQ ID NO: 146643 - DNA, 25 bp, Homo sapien
gatccaatccaatgtctcttctgtt

SEQ ID NO: 146644 - DNA, 25 bp, Homo sapien
ttcatagtagctgggttgggagctc

SEQ ID NO: 146645 - DNA, 25 bp, Homo sapien
aaaaattgcaacaaagaccttctgg

SEQ ID NO: 146646 - DNA, 25 bp, Homo sapien
catgcctgccctaagtcagttgaca

SEQ ID NO: 146647 - DNA, 25 bp, Homo sapien
cacaggtgcctgagatttggtatct

SEQ ID NO: 146648 - DNA, 25 bp, Homo sapien
tgagaggactcctgctccgtcgatt

SEQ ID NO: 146649 - DNA, 25 bp, Homo sapien
cagaaggtaactgcggaagctctct

SEQ ID NO: 146650 - DNA, 25 bp, Homo sapien
tcatcgaacattgaccagctacggg

SEQ ID NO: 146651 - DNA, 25 bp, Homo sapien
cagtggcgctagatgtggttacaac

SEQ ID NO: 146652 - DNA, 25 bp, Homo sapien
caatatttcgcaactctgtctggga

SEQ ID NO: 146653 - DNA, 25 bp, Homo sapien
taagcaatgcaatttccagaccggt

SEQ ID NO: 146654 - DNA, 25 bp, Homo sapien
tcttaggatttttaccgcagtgtct

SEQ ID NO: 146655 - DNA, 25 bp, Homo sapien
gagaaattatcctcagttcagatgt

SEQ ID NO: 146656 - DNA, 25 bp, Homo sapien
ccaagccgtaaactgagctctgcat

SEQ ID NO: 146657 - DNA, 25 bp, Homo sapien
ctgcatgtttagcttctgtcttagg

SEQ ID NO: 146658 - DNA, 25 bp, Homo sapien
cagctgcatagctaagagatgggtg

SEQ ID NO: 146659 - DNA, 25 bp, Homo sapien
gttccagggaacagctgcatagcta

SEQ ID NO: 146660 - DNA, 25 bp, Homo sapien
gtactcttggatactggttccaggg

SEQ ID NO: 146661 - DNA, 25 bp, Homo sapien
tctcttttacgtgttctgggtactc

SEQ ID NO: 146662 - DNA, 25 bp, Homo sapien
ctccacagctagtgactgagcctgc

SEQ ID NO: 146663 - DNA, 25 bp, Homo sapien
cctcattgtcatatccccagtggtt

SEQ ID NO: 146664 - DNA, 25 bp, Homo sapien
tcattgtcatatccccagtggttcc

SEQ ID NO: 146665 - DNA, 25 bp, Homo sapien
ttgtcatatccccagtggttccctt

SEQ ID NO: 146666 - DNA, 25 bp, Homo sapien
tgtcctcattgtcatatccccagtg

SEQ ID NO: 146667 - DNA, 25 bp, Homo sapien
tgggaaaaagtgtcacgcattgtag

SEQ ID NO: 146668 - DNA, 25 bp, Homo sapien
gaaaaagtgtcacgcattgtaggag

SEQ ID NO: 146669 - DNA, 25 bp, Homo sapien
aaaagtgtcacgcattgtaggagga

SEQ ID NO: 146670 - DNA, 25 bp, Homo sapien
aaagtgtcacgcattgtaggaggat

SEQ ID NO: 146671 - DNA, 25 bp, Homo sapien
tagtatacgggcaaaaagtgttagc

SEQ ID NO: 146672 - DNA, 25 bp, Homo sapien
gtcaggtttcattgtgttcagcaga

SEQ ID NO: 146673 - DNA, 25 bp, Homo sapien
ttagcaacctgaacaacaccagagg

SEQ ID NO: 146674 - DNA, 25 bp, Homo sapien
gatccaagaagaccaatgtcaggtt

SEQ ID NO: 146675 - DNA, 25 bp, Homo sapien
taggtcagcttaatccacagactca

SEQ ID NO: 146676 - DNA, 25 bp, Homo sapien
ttaggtcagcttaatccacagactc

SEQ ID NO: 146677 - DNA, 25 bp, Homo sapien
aggtcagcttaatccacagactcac

SEQ ID NO: 146678 - DNA, 25 bp, Homo sapien
cataggtacccgtttgtttgctaat

SEQ ID NO: 146679 - DNA, 25 bp, Homo sapien
agtccaataggaaactcttccaaca

SEQ ID NO: 146680 - DNA, 25 bp, Homo sapien
tgctggaactgtcattacgaccata

SEQ ID NO: 146681 - DNA, 25 bp, Homo sapien
gtttgtttgctaatatctcttcctc

SEQ ID NO: 146682 - DNA, 25 bp, Homo sapien
tgccatgacagcacgtcctaccttt

SEQ ID NO: 146683 - DNA, 25 bp, Homo sapien
cagcatgtgtttcggctgccatgac

SEQ ID NO: 146684 - DNA, 25 bp, Homo sapien
tgtgaacagcatgtgtttcggctgc

SEQ ID NO: 146685 - DNA, 25 bp, Homo sapien
tatcccagttcacccgtgtgaacag

SEQ ID NO: 146686 - DNA, 25 bp, Homo sapien
cagttgacacccctttttgtcgctt

SEQ ID NO: 146687 - DNA, 25 bp, Homo sapien
tgtcgctttatttcttcttgtcctc

SEQ ID NO: 146688 - DNA, 25 bp, Homo sapien
ctgtcagttgacacccctttttgtc

SEQ ID NO: 146689 - DNA, 25 bp, Homo sapien
tctgatccttccctcttagggtata

SEQ ID NO: 146690 - DNA, 25 bp, Homo sapien
tatctatagccgtcgaagctttacg

SEQ ID NO: 146691 - DNA, 25 bp, Homo sapien
tagccgtcgaagctttacgtatttc

SEQ ID NO: 146692 - DNA, 25 bp, Homo sapien
cagattcccttggtatctatagccg

SEQ ID NO: 146693 - DNA, 25 bp, Homo sapien
tcttctttatgcatgagcagattcc

SEQ ID NO: 146694 - DNA, 25 bp, Homo sapien
gtgggcagcggcatgtgaggagtgg

SEQ ID NO: 146695 - DNA, 25 bp, Homo sapien
tgtcatggcaaccaaagctgctatt

SEQ ID NO: 146696 - DNA, 25 bp, Homo sapien
tgtgggcagcggcatgtgaggagtg

SEQ ID NO: 146697 - DNA, 25 bp, Homo sapien
ttgtcatggcaaccaaagctgctat

SEQ ID NO: 146698 - DNA, 25 bp, Homo sapien
cattggcagcagtcttttttcaggt

SEQ ID NO: 146699 - DNA, 25 bp, Homo sapien
ttggcagcagtcttttttcaggtta

SEQ ID NO: 146700 - DNA, 25 bp, Homo sapien
tttgagtgtcttcaggggagctcga

SEQ ID NO: 146701 - DNA, 25 bp, Homo sapien
cagatgtttgaagattttgagtgtc

SEQ ID NO: 146702 - DNA, 25 bp, Homo sapien
gaaggcggaattcctgcgggatcat

SEQ ID NO: 146703 - DNA, 25 bp, Homo sapien
ctggagacgttgatccaggtgagca

SEQ ID NO: 146704 - DNA, 25 bp, Homo sapien
gaagaataccatcgccttggagaag

SEQ ID NO: 146705 - DNA, 25 bp, Homo sapien
tgcagaccgtcatgaagtggaagac

SEQ ID NO: 146706 - DNA, 25 bp, Homo sapien
ttctcatcaattcttggcagcactt

SEQ ID NO: 146707 - DNA, 25 bp, Homo sapien
tctcatcaattcttggcagcacttt

SEQ ID NO: 146708 - DNA, 25 bp, Homo sapien
ctcatcaattcttggcagcactttt

SEQ ID NO: 146709 - DNA, 25 bp, Homo sapien
gcctttaaggtagggctgtcccatg

SEQ ID NO: 146710 - DNA, 25 bp, Homo sapien
tgggatcagcttgattgcctttaag

SEQ ID NO: 146711 - DNA, 25 bp, Homo sapien
gaggcagcacagatactgctctaag

SEQ ID NO: 146712 - DNA, 25 bp, Homo sapien
tggagcacccgaggtggaatcctgc

SEQ ID NO: 146713 - DNA, 25 bp, Homo sapien
ccagtgggcaccttgtctttgcatt

SEQ ID NO: 146714 - DNA, 25 bp, Homo sapien
tgattcatggctgagtgtctttgta

SEQ ID NO: 146715 - DNA, 25 bp, Homo sapien
tcttcggtggcactgacactctctc

SEQ ID NO: 146716 - DNA, 25 bp, Homo sapien
tctagtcctgacacgcagacctgag

SEQ ID NO: 146717 - DNA, 25 bp, Homo sapien
ttattttggtgtagccatcttcaca

SEQ ID NO: 146718 - DNA, 25 bp, Homo sapien
tattttggtgtagccatcttcacac

SEQ ID NO: 146719 - DNA, 25 bp, Homo sapien
ggagccagtgaggagagataactgc

SEQ ID NO: 146720 - DNA, 25 bp, Homo sapien
ccagtgaggagagataactgctttt

SEQ ID NO: 146721 - DNA, 25 bp, Homo sapien
cctccgggagccagtgaggagagat

SEQ ID NO: 146722 - DNA, 25 bp, Homo sapien
gccagtgaggagagataactgcttt

SEQ ID NO: 146723 - DNA, 25 bp, Homo sapien
tctgtagatccacagtataactact

SEQ ID NO: 146724 - DNA, 25 bp, Homo sapien
cttgtgattgcagatactgaaggag

SEQ ID NO: 146725 - DNA, 25 bp, Homo sapien
ttgctttctactgtggatctgtaga

SEQ ID NO: 146726 - DNA, 25 bp, Homo sapien
taactacttatggtctatttgcttg

SEQ ID NO: 146727 - DNA, 25 bp, Homo sapien
ctatatgatccatgtaagggtctgt

SEQ ID NO: 146728 - DNA, 25 bp, Homo sapien
gaggtgaagataccgccagctctca

SEQ ID NO: 146729 - DNA, 25 bp, Homo sapien
gagattttgggtgccttctctagcc

SEQ ID NO: 146730 - DNA, 25 bp, Homo sapien
cttctgaattccataggggtggagg

SEQ ID NO: 146731 - DNA, 25 bp, Homo sapien
ctggctctgaatatagcaactgcat

SEQ ID NO: 146732 - DNA, 25 bp, Homo sapien
gtgaatgaaaaggtcttcctctggc

SEQ ID NO: 146733 - DNA, 25 bp, Homo sapien
ttcctctggctctgaatatagcaac

SEQ ID NO: 146734 - DNA, 25 bp, Homo sapien
tgtgaatgaaaaggtcttcctctgg

SEQ ID NO: 146735 - DNA, 25 bp, Homo sapien
cacagcacggttctgccacttgaat

SEQ ID NO: 146736 - DNA, 25 bp, Homo sapien
tgacgctgacctagaagcttctggt

SEQ ID NO: 146737 - DNA, 25 bp, Homo sapien
caatagtttgtacaagacgtgtggg

SEQ ID NO: 146738 - DNA, 25 bp, Homo sapien
tgtcaggctgccctagtgggcctct

SEQ ID NO: 146739 - DNA, 25 bp, Homo sapien
tgcagtactccgataaactggaaca

SEQ ID NO: 146740 - DNA, 25 bp, Homo sapien
tctgtgcagtactccgataaactgg

SEQ ID NO: 146741 - DNA, 25 bp, Homo sapien
gtactccgataaactggaacaagag

SEQ ID NO: 146742 - DNA, 25 bp, Homo sapien
ctgtgcagtactccgataaactgga

SEQ ID NO: 146743 - DNA, 25 bp, Homo sapien
gggtggcccactggaaatttcctca

SEQ ID NO: 146744 - DNA, 25 bp, Homo sapien
agaacgaagagaagggtggcccact

SEQ ID NO: 146745 - DNA, 25 bp, Homo sapien
agaaacgtctaagtctgcatctccc

SEQ ID NO: 146746 - DNA, 25 bp, Homo sapien
atttcctcagagaaacgtctaagtc

SEQ ID NO: 146747 - DNA, 25 bp, Homo sapien
gcagctttgagatttggtattccca

SEQ ID NO: 146748 - DNA, 25 bp, Homo sapien
taacgagcagctttgagatttggta

SEQ ID NO: 146749 - DNA, 25 bp, Homo sapien
aagagcagatgaacgcataacgagc

SEQ ID NO: 146750 - DNA, 25 bp, Homo sapien
tgaacgcataacgagcagctttgag

SEQ ID NO: 146751 - DNA, 25 bp, Homo sapien
tctacctgaaaagatcttacggttg

SEQ ID NO: 146752 - DNA, 25 bp, Homo sapien
tgccaggattcctctatttcaatct

SEQ ID NO: 146753 - DNA, 25 bp, Homo sapien
aggattcctctatttcaatctcttg

SEQ ID NO: 146754 - DNA, 25 bp, Homo sapien
aaagatcttacggttggtggctgtg

SEQ ID NO: 146755 - DNA, 25 bp, Homo sapien
ggaaattggcccctgaatcagataa

SEQ ID NO: 146756 - DNA, 25 bp, Homo sapien
tgacttaaaactagtggaaattggc

SEQ ID NO: 146757 - DNA, 25 bp, Homo sapien
attggcccctgaatcagataattag

SEQ ID NO: 146758 - DNA, 25 bp, Homo sapien
agtggaaattggcccctgaatcaga

SEQ ID NO: 146759 - DNA, 25 bp, Homo sapien
gaaagcttctgatgtgccgatccct

SEQ ID NO: 146760 - DNA, 25 bp, Homo sapien
tctggcagggtgagaacgcagtttc

SEQ ID NO: 146761 - DNA, 25 bp, Homo sapien
tctataggagcgtgaatgcctgctg

SEQ ID NO: 146762 - DNA, 25 bp, Homo sapien
tggaaggcctcccaaaagcctgaat

SEQ ID NO: 146763 - DNA, 25 bp, Homo sapien
tctactggctaagaatgttgcttta

SEQ ID NO: 146764 - DNA, 25 bp, Homo sapien
tcctggattctactggctaagaatg

SEQ ID NO: 146765 - DNA, 25 bp, Homo sapien
taggccaaaggaatttatccctcat

SEQ ID NO: 146766 - DNA, 25 bp, Homo sapien
agaatgttgctttaggccaaaggaa

SEQ ID NO: 146767 - DNA, 25 bp, Homo sapien
cctcagtgggaaaggtttcctggca

SEQ ID NO: 146768 - DNA, 25 bp, Homo sapien
caagtggggctcgagttgcagcagc

SEQ ID NO: 146769 - DNA, 25 bp, Homo sapien
gttgcagcagccgtccctaggggtg

SEQ ID NO: 146770 - DNA, 25 bp, Homo sapien
agctgcgccgcatgcccgggtgtcc

SEQ ID NO: 146771 - DNA, 25 bp, Homo sapien
tttcatccacccctcgccgatctta

SEQ ID NO: 146772 - DNA, 25 bp, Homo sapien
cagttctcccccaagctaatatttt

SEQ ID NO: 146773 - DNA, 25 bp, Homo sapien
tggccggtgcaaacacccaagccct

SEQ ID NO: 146774 - DNA, 25 bp, Homo sapien
tgccggcaccgcttttgggaagcag

SEQ ID NO: 146775 - DNA, 25 bp, Homo sapien
tggagtgcggcggggacgtgggttc

SEQ ID NO: 146776 - DNA, 25 bp, Homo sapien
cttggagtgcggcggggacgtgggt

SEQ ID NO: 146777 - DNA, 25 bp, Homo sapien
acaaaaggctcatggctggcacggg

SEQ ID NO: 146778 - DNA, 25 bp, Homo sapien
ctgtgccttgggagcgagcttcccc

SEQ ID NO: 146779 - DNA, 25 bp, Homo sapien
gcgcagcagatgcggagcggtccca

SEQ ID NO: 146780 - DNA, 25 bp, Homo sapien
atgcggagcggtcccagaacaaaag

SEQ ID NO: 146781 - DNA, 25 bp, Homo sapien
gcctcctttccagccaacgaccagc

SEQ ID NO: 146782 - DNA, 25 bp, Homo sapien
gggtcttggcaactccgctttcctc

SEQ ID NO: 146783 - DNA, 25 bp, Homo sapien
gggcccccgtgcctctctcaagcct

SEQ ID NO: 146784 - DNA, 25 bp, Homo sapien
tgccgggtcttggcaactccgcttt

SEQ ID NO: 146785 - DNA, 25 bp, Homo sapien
taaaatgtgcataagctggccaaat

SEQ ID NO: 146786 - DNA, 25 bp, Homo sapien
gatgcagaaactcggtaaggcttag

SEQ ID NO: 146787 - DNA, 25 bp, Homo sapien
caaccctgtaggcagaactagccag

SEQ ID NO: 146788 - DNA, 25 bp, Homo sapien
tgctccctactgaaaagaacggtgg

SEQ ID NO: 146789 - DNA, 25 bp, Homo sapien
gtcgcacaagcaagtcctgtcattt

SEQ ID NO: 146790 - DNA, 25 bp, Homo sapien
gcacaagcaagtcctgtcattttca

SEQ ID NO: 146791 - DNA, 25 bp, Homo sapien
cttgtcgcacaagcaagtcctgtca

SEQ ID NO: 146792 - DNA, 25 bp, Homo sapien
ttgtcgcacaagcaagtcctgtcat

SEQ ID NO: 146793 - DNA, 25 bp, Homo sapien
taaagatgtgctggggttagcaggg

SEQ ID NO: 146794 - DNA, 25 bp, Homo sapien
tgtgctggggttagcagggtcccga

SEQ ID NO: 146795 - DNA, 25 bp, Homo sapien
ctggggttagcagggtcccgattga

SEQ ID NO: 146796 - DNA, 25 bp, Homo sapien
tagcagggtcccgattgattctctc

SEQ ID NO: 146797 - DNA, 25 bp, Homo sapien
ttgccttggagtggactgtatgttc

SEQ ID NO: 146798 - DNA, 25 bp, Homo sapien
cttgccttggagtggactgtatgtt

SEQ ID NO: 146799 - DNA, 25 bp, Homo sapien
cactgtgtaatcttctgctttgccc

SEQ ID NO: 146800 - DNA, 25 bp, Homo sapien
tgcatgagcagtttctgatgacaaa

SEQ ID NO: 146801 - DNA, 25 bp, Homo sapien
ctctttgcgggtgctccactgtgta

SEQ ID NO: 146802 - DNA, 25 bp, Homo sapien
tctgcatgagcagtttctgatgaca

SEQ ID NO: 146803 - DNA, 25 bp, Homo sapien
ttttgcaaactccttggtgtcttct

SEQ ID NO: 146804 - DNA, 25 bp, Homo sapien
ccttggtgtcttctagtggttacag

SEQ ID NO: 146805 - DNA, 25 bp, Homo sapien
tgtataagtagcttcttctgtactc

SEQ ID NO: 146806 - DNA, 25 bp, Homo sapien
gtactctttcattaaacgtgatgtt

SEQ ID NO: 146807 - DNA, 25 bp, Homo sapien
gagcagatccactgactaatgtaga

SEQ ID NO: 146808 - DNA, 25 bp, Homo sapien
ggtgagcagatccactgactaatgt

SEQ ID NO: 146809 - DNA, 25 bp, Homo sapien
gcagatccactgactaatgtagaca

SEQ ID NO: 146810 - DNA, 25 bp, Homo sapien
ggcaggtgagcagatccactgacta

SEQ ID NO: 146811 - DNA, 25 bp, Homo sapien
tgtgggatccttttctgtacttctt

SEQ ID NO: 146812 - DNA, 25 bp, Homo sapien
ctgtgggatccttttctgtacttct

SEQ ID NO: 146813 - DNA, 25 bp, Homo sapien
atccttttctgtacttcttgggatc

SEQ ID NO: 146814 - DNA, 25 bp, Homo sapien
cttttctgtacttcttgggatctgg

SEQ ID NO: 146815 - DNA, 25 bp, Homo sapien
tgctacagcaatccccagctagaga

SEQ ID NO: 146816 - DNA, 25 bp, Homo sapien
ctgctacagcaatccccagctagag

SEQ ID NO: 146817 - DNA, 25 bp, Homo sapien
ttcaatgtagacaagcgatggctct

SEQ ID NO: 146818 - DNA, 25 bp, Homo sapien
gatggctctagcatgcccctctgat

SEQ ID NO: 146819 - DNA, 25 bp, Homo sapien
acaccgttgttgtctgagggttcaa

SEQ ID NO: 146820 - DNA, 25 bp, Homo sapien
tttgactccaaatgaagaccctcgg

SEQ ID NO: 146821 - DNA, 25 bp, Homo sapien
tatagggatattgtaaagtgtcagg

SEQ ID NO: 146822 - DNA, 25 bp, Homo sapien
gggatattgtaaagtgtcaggaagc

SEQ ID NO: 146823 - DNA, 25 bp, Homo sapien
tagggatattgtaaagtgtcaggaa

SEQ ID NO: 146824 - DNA, 25 bp, Homo sapien
gtctatagggatattgtaaagtgtc

SEQ ID NO: 146825 - DNA, 25 bp, Homo sapien
aagctttgataatctccaccgaatg

SEQ ID NO: 146826 - DNA, 25 bp, Homo sapien
agctttgataatctccaccgaatgc

SEQ ID NO: 146827 - DNA, 25 bp, Homo sapien
gctttgataatctccaccgaatgca

SEQ ID NO: 146828 - DNA, 25 bp, Homo sapien
ctttgataatctccaccgaatgcat

SEQ ID NO: 146829 - DNA, 25 bp, Homo sapien
gagaggaggtggactcatctggcat

SEQ ID NO: 146830 - DNA, 25 bp, Homo sapien
gggagaggaggtggactcatctggc

SEQ ID NO: 146831 - DNA, 25 bp, Homo sapien
ctgcgggaagagcagggagaggagg

SEQ ID NO: 146832 - DNA, 25 bp, Homo sapien
cagggagaggaggtggactcatctg

SEQ ID NO: 146833 - DNA, 25 bp, Homo sapien
tacccggtactaggaggacagttgc

SEQ ID NO: 146834 - DNA, 25 bp, Homo sapien
gcagagcgacctcctgtcaggatcc

SEQ ID NO: 146835 - DNA, 25 bp, Homo sapien
gagtcgctattgtgacgtcacggcg

SEQ ID NO: 146836 - DNA, 25 bp, Homo sapien
ggcatcgagccccagtctgttgctc

SEQ ID NO: 146837 - DNA, 25 bp, Homo sapien
gggacacgctgtatccccttcggtc

SEQ ID NO: 146838 - DNA, 25 bp, Homo sapien
aaaagaggagccgacgggggctgca

SEQ ID NO: 146839 - DNA, 25 bp, Homo sapien
gccccggcagtggaggactggaaaa

SEQ ID NO: 146840 - DNA, 25 bp, Homo sapien
gcccagccccggcagtggaggactg

SEQ ID NO: 146841 - DNA, 25 bp, Homo sapien
aacactggcgactcagccaggggta

SEQ ID NO: 146842 - DNA, 25 bp, Homo sapien
gcaacactggcgactcagccagggg

SEQ ID NO: 146843 - DNA, 25 bp, Homo sapien
cttcctttgcgcaggcctgggcagc

SEQ ID NO: 146844 - DNA, 25 bp, Homo sapien
tccctcttcctttgcgcaggcctgg

SEQ ID NO: 146845 - DNA, 25 bp, Homo sapien
tcagggcgacaaattcagggcaaag

SEQ ID NO: 146846 - DNA, 25 bp, Homo sapien
taatcctcaagaactccatggcctg

SEQ ID NO: 146847 - DNA, 25 bp, Homo sapien
ggttttaaaggctgcacgaccctga

SEQ ID NO: 146848 - DNA, 25 bp, Homo sapien
gaaaactgagggtcgtctccatgga

SEQ ID NO: 146849 - DNA, 25 bp, Homo sapien
gctgaccagcaacaccgcattactt

SEQ ID NO: 146850 - DNA, 25 bp, Homo sapien
acccccaagggacctactgaatcat

SEQ ID NO: 146851 - DNA, 25 bp, Homo sapien
gctaaaactgcagtccgctgaccag

SEQ ID NO: 146852 - DNA, 25 bp, Homo sapien
gggattcctattcacagaaagttac

SEQ ID NO: 146853 - DNA, 25 bp, Homo sapien
tagttatctcctacattcggagtag

SEQ ID NO: 146854 - DNA, 25 bp, Homo sapien
caaatcctgttctgccgctgtgatc

SEQ ID NO: 146855 - DNA, 25 bp, Homo sapien
tcactatgaaataaggctaatgcct

SEQ ID NO: 146856 - DNA, 25 bp, Homo sapien
gaaagacatcaaggaatcatctagc

SEQ ID NO: 146857 - DNA, 25 bp, Homo sapien
gacatgctgaagattacctagttag

SEQ ID NO: 146858 - DNA, 25 bp, Homo sapien
gcccagggacgtacagtgacatgct

SEQ ID NO: 146859 - DNA, 25 bp, Homo sapien
tctgaaataactaaaagcacctcct

SEQ ID NO: 146860 - DNA, 25 bp, Homo sapien
tatactaataggttgtctcctctcc

SEQ ID NO: 146861 - DNA, 25 bp, Homo sapien
tatatgagagcagcccattttccta

SEQ ID NO: 146862 - DNA, 25 bp, Homo sapien
aagtgtttcttgtggcaaggtttct

SEQ ID NO: 146863 - DNA, 25 bp, Homo sapien
aaatcactgtatggtttctatctcc

SEQ ID NO: 146864 - DNA, 25 bp, Homo sapien
tcctgactggactggacccagaatg

SEQ ID NO: 146865 - DNA, 25 bp, Homo sapien
ggtgctcaagtgtcctttaaatagg

SEQ ID NO: 146866 - DNA, 25 bp, Homo sapien
taggcacggtggaccatatctggga

SEQ ID NO: 146867 - DNA, 25 bp, Homo sapien
cggtggaccatatctgggaaggaca

SEQ ID NO: 146868 - DNA, 25 bp, Homo sapien
cctttaaataggcacggtggaccat

SEQ ID NO: 146869 - DNA, 25 bp, Homo sapien
ctgagagaagaggagtcagtgcaaa

SEQ ID NO: 146870 - DNA, 25 bp, Homo sapien
agagaagaggagtcagtgcaaaaag

SEQ ID NO: 146871 - DNA, 25 bp, Homo sapien
gagagaagaggagtcagtgcaaaaa

SEQ ID NO: 146872 - DNA, 25 bp, Homo sapien
tgagagaagaggagtcagtgcaaaa

SEQ ID NO: 146873 - DNA, 25 bp, Homo sapien
catgtgattcttgaccagctggaga

SEQ ID NO: 146874 - DNA, 25 bp, Homo sapien
tttattatagtgaacagccatgtga

SEQ ID NO: 146875 - DNA, 25 bp, Homo sapien
gaacagccatgtgattcttgaccag

SEQ ID NO: 146876 - DNA, 25 bp, Homo sapien
tagtgaacagccatgtgattcttga

SEQ ID NO: 146877 - DNA, 25 bp, Homo sapien
attttaatgagaagtgaagctggag

SEQ ID NO: 146878 - DNA, 25 bp, Homo sapien
aaacaaatacaaatcctctcatata

SEQ ID NO: 146879 - DNA, 25 bp, Homo sapien
aaggtattcatttttgctatagata

SEQ ID NO: 146880 - DNA, 25 bp, Homo sapien
ggtattcatttttgctatagatata

SEQ ID NO: 146881 - DNA, 25 bp, Homo sapien
tacagatgggaagtaataaggcaac

SEQ ID NO: 146882 - DNA, 25 bp, Homo sapien
aaaggactgtcaacgccaagggttg

SEQ ID NO: 146883 - DNA, 25 bp, Homo sapien
gagtgaaacgtaaacacatgcgcca

SEQ ID NO: 146884 - DNA, 25 bp, Homo sapien
aaggcaacatcactagaaatcaggg

SEQ ID NO: 146885 - DNA, 25 bp, Homo sapien
actggaaccgagcagtctactgcag

SEQ ID NO: 146886 - DNA, 25 bp, Homo sapien
ttactggaaccgagcagtctactgc

SEQ ID NO: 146887 - DNA, 25 bp, Homo sapien
gcttactggaaccgagcagtctact

SEQ ID NO: 146888 - DNA, 25 bp, Homo sapien
tactggaaccgagcagtctactgca

SEQ ID NO: 146889 - DNA, 25 bp, Homo sapien
atgtttctagggatttaccgaggtg

SEQ ID NO: 146890 - DNA, 25 bp, Homo sapien
ttgagttgtttgagatcccctcttt

SEQ ID NO: 146891 - DNA, 25 bp, Homo sapien
gaggtatacagttgagttgtttgag

SEQ ID NO: 146892 - DNA, 25 bp, Homo sapien
gttccttgaggtatacagttgagtt

SEQ ID NO: 146893 - DNA, 25 bp, Homo sapien
ccttctgcatgggactatccaggtt

SEQ ID NO: 146894 - DNA, 25 bp, Homo sapien
caggtttcccagagtcattcattga

SEQ ID NO: 146895 - DNA, 25 bp, Homo sapien
tgtggtcccacatgaattttacgat

SEQ ID NO: 146896 - DNA, 25 bp, Homo sapien
gttgcctatgcactctgtcgattgt

SEQ ID NO: 146897 - DNA, 25 bp, Homo sapien
gcaaaccaccatggcacatgtatac

SEQ ID NO: 146898 - DNA, 25 bp, Homo sapien
tgcagcaaaccaccatggcacatgt

SEQ ID NO: 146899 - DNA, 25 bp, Homo sapien
cagcaaaccaccatggcacatgtat

SEQ ID NO: 146900 - DNA, 25 bp, Homo sapien
ctaatgtagatgacaggttgatggg

SEQ ID NO: 146901 - DNA, 25 bp, Homo sapien
ctattacaagtccacagccaacatc

SEQ ID NO: 146902 - DNA, 25 bp, Homo sapien
ggaagcattcctcttttgaactgga

SEQ ID NO: 146903 - DNA, 25 bp, Homo sapien
caacaaattaggcatcaaaagaaca

SEQ ID NO: 146904 - DNA, 25 bp, Homo sapien
tgaactggaacagcataaggatgcc

SEQ ID NO: 146905 - DNA, 25 bp, Homo sapien
gaggcaagtttacagtgctaaatac

SEQ ID NO: 146906 - DNA, 25 bp, Homo sapien
agaggcaagtttacagtgctaaata

SEQ ID NO: 146907 - DNA, 25 bp, Homo sapien
taggtatatttgcacccaacactgg

SEQ ID NO: 146908 - DNA, 25 bp, Homo sapien
ctaggtatatttgcacccaacactg

SEQ ID NO: 146909 - DNA, 25 bp, Homo sapien
tcctaggtatatttgcacccaacac

SEQ ID NO: 146910 - DNA, 25 bp, Homo sapien
tatcctaggtatatttgcacccaac

SEQ ID NO: 146911 - DNA, 25 bp, Homo sapien
cctagcctataggaaatgctcaagg

SEQ ID NO: 146912 - DNA, 25 bp, Homo sapien
cataaatacagaggttcacagatcc

SEQ ID NO: 146913 - DNA, 25 bp, Homo sapien
catttcatatggcaagaacgagagg

SEQ ID NO: 146914 - DNA, 25 bp, Homo sapien
caagatatgacaaactggccaagcc

SEQ ID NO: 146915 - DNA, 25 bp, Homo sapien
tatttttataattggctcgcattgc

SEQ ID NO: 146916 - DNA, 25 bp, Homo sapien
ttcacattgtgctaattcctttttg

SEQ ID NO: 146917 - DNA, 25 bp, Homo sapien
tttgagtttctctcttcgttgttgg

SEQ ID NO: 146918 - DNA, 25 bp, Homo sapien
ttctctcttcgttgttggtctgcat

SEQ ID NO: 146919 - DNA, 25 bp, Homo sapien
gagactgctggccttctaataccaa

SEQ ID NO: 146920 - DNA, 25 bp, Homo sapien
tccccatcctgaaccctggcactga

SEQ ID NO: 146921 - DNA, 25 bp, Homo sapien
ggctactcctcaactagatgacttg

SEQ ID NO: 146922 - DNA, 25 bp, Homo sapien
taataccaactctaacaaactcaaa

SEQ ID NO: 146923 - DNA, 25 bp, Homo sapien
ggctgcataatccacactggacggg

SEQ ID NO: 146924 - DNA, 25 bp, Homo sapien
tagacttaggtgtagtctctctgaa

SEQ ID NO: 146925 - DNA, 25 bp, Homo sapien
catgtcatcctcaatttgcggttcg

SEQ ID NO: 146926 - DNA, 25 bp, Homo sapien
gaactggagttcttctcaggaccat

SEQ ID NO: 146927 - DNA, 25 bp, Homo sapien
tgcgaggagtgaatggcaattgttt

SEQ ID NO: 146928 - DNA, 25 bp, Homo sapien
aaaagatccccactgggtgctttcg

SEQ ID NO: 146929 - DNA, 25 bp, Homo sapien
atgactaactgaaaccggtgggaat

SEQ ID NO: 146930 - DNA, 25 bp, Homo sapien
ttttaaagtgcgaggagtgaatggc

SEQ ID NO: 146931 - DNA, 25 bp, Homo sapien
gcttctatccgttgatctgtaaaat

SEQ ID NO: 146932 - DNA, 25 bp, Homo sapien
tttggcaggtgtataatagcgatac

SEQ ID NO: 146933 - DNA, 25 bp, Homo sapien
ctgggtttcagcttctatccgttga

SEQ ID NO: 146934 - DNA, 25 bp, Homo sapien
ttcttttggcaggtgtataatagcg

SEQ ID NO: 146935 - DNA, 25 bp, Homo sapien
ggatttactgttggttgctgatgtg

SEQ ID NO: 146936 - DNA, 25 bp, Homo sapien
actgttggttgctgatgtgtcatac

SEQ ID NO: 146937 - DNA, 25 bp, Homo sapien
ctgaaggatttactgttggttgctg

SEQ ID NO: 146938 - DNA, 25 bp, Homo sapien
tttactgttggttgctgatgtgtca

SEQ ID NO: 146939 - DNA, 25 bp, Homo sapien
gtttttagtctcagctgtccccaac

SEQ ID NO: 146940 - DNA, 25 bp, Homo sapien
ttagtctcagctgtccccaactcag

SEQ ID NO: 146941 - DNA, 25 bp, Homo sapien
ctcagctgtccccaactcagattta

SEQ ID NO: 146942 - DNA, 25 bp, Homo sapien
tctcagctgtccccaactcagattt

SEQ ID NO: 146943 - DNA, 25 bp, Homo sapien
ctgctttatgttcatttctgaatct

SEQ ID NO: 146944 - DNA, 25 bp, Homo sapien
tttatgttcatttctgaatctgtca

SEQ ID NO: 146945 - DNA, 25 bp, Homo sapien
gctttatgttcatttctgaatctgt

SEQ ID NO: 146946 - DNA, 25 bp, Homo sapien
ttatgttcatttctgaatctgtcat

SEQ ID NO: 146947 - DNA, 25 bp, Homo sapien
aaatatgtagaagcagtggtagcgc

SEQ ID NO: 146948 - DNA, 25 bp, Homo sapien
tcttcaagtcaagtactgatggcac

SEQ ID NO: 146949 - DNA, 25 bp, Homo sapien
tggctcctctagtaatccaggtctg

SEQ ID NO: 146950 - DNA, 25 bp, Homo sapien
ggcagggccctatgtcaaacagcga

SEQ ID NO: 146951 - DNA, 25 bp, Homo sapien
tctttggcatcatatgtcacacaat

SEQ ID NO: 146952 - DNA, 25 bp, Homo sapien
tccttaatctcatcccatgttgagt

SEQ ID NO: 146953 - DNA, 25 bp, Homo sapien
tggcatcatatgtcacacaattaga

SEQ ID NO: 146954 - DNA, 25 bp, Homo sapien
gagtcatgcccttctaaaggtaaag

SEQ ID NO: 146955 - DNA, 25 bp, Homo sapien
agagtagattttacgagttgaaggg

SEQ ID NO: 146956 - DNA, 25 bp, Homo sapien
cagagtagattttacgagttgaagg

SEQ ID NO: 146957 - DNA, 25 bp, Homo sapien
tcagagtagattttacgagttgaag

SEQ ID NO: 146958 - DNA, 25 bp, Homo sapien
gcaacgaaggacaaggcgcaatcaa

SEQ ID NO: 146959 - DNA, 25 bp, Homo sapien
taagaagtcctctcctagccctagg

SEQ ID NO: 146960 - DNA, 25 bp, Homo sapien
gcaagcactcccgaggaatgtttta

SEQ ID NO: 146961 - DNA, 25 bp, Homo sapien
agcaggagcttcaactaagaagtcc

SEQ ID NO: 146962 - DNA, 25 bp, Homo sapien
tgttacatcttcaatgaaactcaga

SEQ ID NO: 146963 - DNA, 25 bp, Homo sapien
tcatctgttacatcttcaatgaaac

SEQ ID NO: 146964 - DNA, 25 bp, Homo sapien
atcttcaatgaaactcagatacaac

SEQ ID NO: 146965 - DNA, 25 bp, Homo sapien
actcagatacaacagttcttcttca

SEQ ID NO: 146966 - DNA, 25 bp, Homo sapien
ccattaagtgctactgtgctagtca

SEQ ID NO: 146967 - DNA, 25 bp, Homo sapien
ccagatgtgtctggctccacagaat

SEQ ID NO: 146968 - DNA, 25 bp, Homo sapien
tggataccccactctccgtgacgtt

SEQ ID NO: 146969 - DNA, 25 bp, Homo sapien
tctagttctgaccaatgtagggagg

SEQ ID NO: 146970 - DNA, 25 bp, Homo sapien
ttttatatgtcgctcgaacagtcgt

SEQ ID NO: 146971 - DNA, 25 bp, Homo sapien
ttttgttttatatgtcgctcgaaca

SEQ ID NO: 146972 - DNA, 25 bp, Homo sapien
tcgctcgaacagtcgttctaaaaac

SEQ ID NO: 146973 - DNA, 25 bp, Homo sapien
tatgtcgctcgaacagtcgttctaa

SEQ ID NO: 146974 - DNA, 25 bp, Homo sapien
gagttttcctccgatgtgcagccta

SEQ ID NO: 146975 - DNA, 25 bp, Homo sapien
gcagcctaagtctactttcaggaca

SEQ ID NO: 146976 - DNA, 25 bp, Homo sapien
tcctccgatgtgcagcctaagtcta

SEQ ID NO: 146977 - DNA, 25 bp, Homo sapien
agtctactttcaggacatgcagcag

SEQ ID NO: 146978 - DNA, 25 bp, Homo sapien
tcagttggtgaagggaatatctcgt

SEQ ID NO: 146979 - DNA, 25 bp, Homo sapien
aatgacattcacagaagtttcccga

SEQ ID NO: 146980 - DNA, 25 bp, Homo sapien
ggtgccgacaataacatatccaaag

SEQ ID NO: 146981 - DNA, 25 bp, Homo sapien
taaactgtctgaaatacttggatga

SEQ ID NO: 146982 - DNA, 25 bp, Homo sapien
tcaaccttttcagggtcactatcac

SEQ ID NO: 146983 - DNA, 25 bp, Homo sapien
aatctcaaccttttcagggtcacta

SEQ ID NO: 146984 - DNA, 25 bp, Homo sapien
atttgaaatctcaaccttttcaggg

SEQ ID NO: 146985 - DNA, 25 bp, Homo sapien
tgggagggtgatgtgttaagaccac

SEQ ID NO: 146986 - DNA, 25 bp, Homo sapien
catgtcatgattattgtcgcctttg

SEQ ID NO: 146987 - DNA, 25 bp, Homo sapien
taagagttgataactccatgtcatg

SEQ ID NO: 146988 - DNA, 25 bp, Homo sapien
taactccatgtcatgattattgtcg

SEQ ID NO: 146989 - DNA, 25 bp, Homo sapien
gagttgataactccatgtcatgatt

SEQ ID NO: 146990 - DNA, 25 bp, Homo sapien
gccatttgaggtatttattaatgaa

SEQ ID NO: 146991 - DNA, 25 bp, Homo sapien
ccatttgaggtatttattaatgaag

SEQ ID NO: 146992 - DNA, 25 bp, Homo sapien
catttgaggtatttattaatgaaga

SEQ ID NO: 146993 - DNA, 25 bp, Homo sapien
ttctggtaacttattattgcagcac

SEQ ID NO: 146994 - DNA, 25 bp, Homo sapien
agagaaatcttatacatacatttta

SEQ ID NO: 146995 - DNA, 25 bp, Homo sapien
cttattattgcagcacagaaaacca

SEQ ID NO: 146996 - DNA, 25 bp, Homo sapien
cacagaaaaccaatagagaaatctt

SEQ ID NO: 146997 - DNA, 25 bp, Homo sapien
gatgccacaagtgacggaacgcagg

SEQ ID NO: 146998 - DNA, 25 bp, Homo sapien
ccacaattggctagaaaatggagga

SEQ ID NO: 146999 - DNA, 25 bp, Homo sapien
ggactgtgcagatgtgactaaatga

SEQ ID NO: 147000 - DNA, 25 bp, Homo sapien
taggctgaatagcagctccccagat

SEQ ID NO: 147001 - DNA, 25 bp, Homo sapien
gcttgcagagctcttcatgtggcca

SEQ ID NO: 147002 - DNA, 25 bp, Homo sapien
gatatttgtgggtcaattaatacac

SEQ ID NO: 147003 - DNA, 25 bp, Homo sapien
gttgttttcggaccagtagtagcag

SEQ ID NO: 147004 - DNA, 25 bp, Homo sapien
catgtggccacctctatagtagaac

SEQ ID NO: 147005 - DNA, 25 bp, Homo sapien
ggaagtggtaacagatggcacctgg

SEQ ID NO: 147006 - DNA, 25 bp, Homo sapien
agggtgaggcatcgcctcagccggg

SEQ ID NO: 147007 - DNA, 25 bp, Homo sapien
aaacatactgtttgcggttccaaga

SEQ ID NO: 147008 - DNA, 25 bp, Homo sapien
atctcacggggcttgtcggacagtg

SEQ ID NO: 147009 - DNA, 25 bp, Homo sapien
catgtttggcgtcattcctaagagc

SEQ ID NO: 147010 - DNA, 25 bp, Homo sapien
tcctaaatagtgtgtgcaccagcct

SEQ ID NO: 147011 - DNA, 25 bp, Homo sapien
tacatgtatgttgtcagccacgaga

SEQ ID NO: 147012 - DNA, 25 bp, Homo sapien
ttgtcacagtgaccgctgagtaggc

SEQ ID NO: 147013 - DNA, 25 bp, Homo sapien
tagtgagtagaatgccacagctgac

SEQ ID NO: 147014 - DNA, 25 bp, Homo sapien
tttaactttgttccgaggacagctg

SEQ ID NO: 147015 - DNA, 25 bp, Homo sapien
aatacacagactggcctgaacatgg

SEQ ID NO: 147016 - DNA, 25 bp, Homo sapien
ctgtccagaagacctcaagggattt

SEQ ID NO: 147017 - DNA, 25 bp, Homo sapien
ttttagtactaccatgaatgcatgc

SEQ ID NO: 147018 - DNA, 25 bp, Homo sapien
tctctgtcagtggaatcgaatggga

SEQ ID NO: 147019 - DNA, 25 bp, Homo sapien
tgggattatattgccacacagggac

SEQ ID NO: 147020 - DNA, 25 bp, Homo sapien
tggtatgggaacagggaattgcaat

SEQ ID NO: 147021 - DNA, 25 bp, Homo sapien
aattcttaagaaacggctagttgat

SEQ ID NO: 147022 - DNA, 25 bp, Homo sapien
gcacgactccctgaaaatgcagaaa

SEQ ID NO: 147023 - DNA, 25 bp, Homo sapien
gacgtgtggctgtattcatgttatt

SEQ ID NO: 147024 - DNA, 25 bp, Homo sapien
tctggaacaacgattagaacaagga

SEQ ID NO: 147025 - DNA, 25 bp, Homo sapien
cgaggacttcgaggaggagagcggg

SEQ ID NO: 147026 - DNA, 25 bp, Homo sapien
gacgaggacttcgaggaggagagcg

SEQ ID NO: 147027 - DNA, 25 bp, Homo sapien
ggacgaggacttcgaggaggagagc

SEQ ID NO: 147028 - DNA, 25 bp, Homo sapien
gaggacgaggacttcgaggaggaga

SEQ ID NO: 147029 - DNA, 25 bp, Homo sapien
tcagcgtgccggagctgaccaatgc

SEQ ID NO: 147030 - DNA, 25 bp, Homo sapien
accactcggtgcaaacgttccagga

SEQ ID NO: 147031 - DNA, 25 bp, Homo sapien
tctcccaacatcatgcggacgcagg

SEQ ID NO: 147032 - DNA, 25 bp, Homo sapien
ttttcaccgagaggacacagcgaga

SEQ ID NO: 147033 - DNA, 25 bp, Homo sapien
tgggcctgggaagtatgctctgatc

SEQ ID NO: 147034 - DNA, 25 bp, Homo sapien
gcttctcctgcgacaagtgtgtggg

SEQ ID NO: 147035 - DNA, 25 bp, Homo sapien
tactgcttgaggcttctgggttgac

SEQ ID NO: 147036 - DNA, 25 bp, Homo sapien
ccagcgcataggagaaacacatttg

SEQ ID NO: 147037 - DNA, 25 bp, Homo sapien
accctcctttggcattccacttctt

SEQ ID NO: 147038 - DNA, 25 bp, Homo sapien
ccctgcccagatcctttcactcttc

SEQ ID NO: 147039 - DNA, 25 bp, Homo sapien
ttcttaaccctcctttggcattcca

SEQ ID NO: 147040 - DNA, 25 bp, Homo sapien
ccttatgttacccacaccggtctca

SEQ ID NO: 147041 - DNA, 25 bp, Homo sapien
cacagagtcttcaaggatgctcgca

SEQ ID NO: 147042 - DNA, 25 bp, Homo sapien
taggagcacctgatagagaagttgt

SEQ ID NO: 147043 - DNA, 25 bp, Homo sapien
tcagagatggcaagactataggcag

SEQ ID NO: 147044 - DNA, 25 bp, Homo sapien
tataggcaggacaccagtttaggaa

SEQ ID NO: 147045 - DNA, 25 bp, Homo sapien
ttctagtttatgcacgcaaaggcgt

SEQ ID NO: 147046 - DNA, 25 bp, Homo sapien
caaaggcgttcatagtagacttgaa

SEQ ID NO: 147047 - DNA, 25 bp, Homo sapien
ggagagttgtctatttccaggattt

SEQ ID NO: 147048 - DNA, 25 bp, Homo sapien
tgagcatagattgtctgtgtgctct

SEQ ID NO: 147049 - DNA, 25 bp, Homo sapien
gaaacacctaggttgcatccaagtg

SEQ ID NO: 147050 - DNA, 25 bp, Homo sapien
ttacccatgcgtgatggtgtatgcc

SEQ ID NO: 147051 - DNA, 25 bp, Homo sapien
tattttcataagtcggccaggcgcg

SEQ ID NO: 147052 - DNA, 25 bp, Homo sapien
agggcaccttttcctctgcgcggtg

SEQ ID NO: 147053 - DNA, 25 bp, Homo sapien
gagttgcctggttgcccggatccaa

SEQ ID NO: 147054 - DNA, 25 bp, Homo sapien
taataacgagtttgtggagttcacc

SEQ ID NO: 147055 - DNA, 25 bp, Homo sapien
tacacggtgtccagcaagagttgcc

SEQ ID NO: 147056 - DNA, 25 bp, Homo sapien
ccggatccaactgcttaataacgag

SEQ ID NO: 147057 - DNA, 25 bp, Homo sapien
tgtggctccaaagcgggcatcctat

SEQ ID NO: 147058 - DNA, 25 bp, Homo sapien
gcgtattttgaggtcctgtggctcc

SEQ ID NO: 147059 - DNA, 25 bp, Homo sapien
tcgctctataaaacacgttgtaagg

SEQ ID NO: 147060 - DNA, 25 bp, Homo sapien
gtggcatagcgagacttcgctctat

SEQ ID NO: 147061 - DNA, 25 bp, Homo sapien
tagggaaccgtctcaggaccctgga

SEQ ID NO: 147062 - DNA, 25 bp, Homo sapien
aaatgtccgggattttgtagactcg

SEQ ID NO: 147063 - DNA, 25 bp, Homo sapien
gccccagaaaccatcaacaggtctg

SEQ ID NO: 147064 - DNA, 25 bp, Homo sapien
aaaactgttagagcccggcttggtg

SEQ ID NO: 147065 - DNA, 25 bp, Homo sapien
cagagacgcaatacacatttgtgga

SEQ ID NO: 147066 - DNA, 25 bp, Homo sapien
gaactcagcgtagccagctatggct

SEQ ID NO: 147067 - DNA, 25 bp, Homo sapien
tcctagcgtgaaactgcgaaagccg

SEQ ID NO: 147068 - DNA, 25 bp, Homo sapien
gcttttacctacagaaggcactcag

SEQ ID NO: 147069 - DNA, 25 bp, Homo sapien
aatcattgttttaacatagtgggtt

SEQ ID NO: 147070 - DNA, 25 bp, Homo sapien
agtctgagggacaattgaaagtttt

SEQ ID NO: 147071 - DNA, 25 bp, Homo sapien
tattacaccatttggcaacaaatac

SEQ ID NO: 147072 - DNA, 25 bp, Homo sapien
tatccctgatgcagtaatacatttc

SEQ ID NO: 147073 - DNA, 25 bp, Homo sapien
actgcgcgccggagtgaacgcgcat

SEQ ID NO: 147074 - DNA, 25 bp, Homo sapien
ccccggccgcgcacacggcgtatcc

SEQ ID NO: 147075 - DNA, 25 bp, Homo sapien
cgcacacggcgtatccccgccccgg

SEQ ID NO: 147076 - DNA, 25 bp, Homo sapien
gaggctgccgcggactcctaccccg

SEQ ID NO: 147077 - DNA, 25 bp, Homo sapien
gaactcagcactgcgcggcgcttgg

SEQ ID NO: 147078 - DNA, 25 bp, Homo sapien
cgtgcgggaactcagcactgcgcgg

SEQ ID NO: 147079 - DNA, 25 bp, Homo sapien
tgcggcgtgcgggaactcagcactg

SEQ ID NO: 147080 - DNA, 25 bp, Homo sapien
ctctgcggcgtgcgggaactcagca

SEQ ID NO: 147081 - DNA, 25 bp, Homo sapien
cggatcttgcggctgatctcggtgc

SEQ ID NO: 147082 - DNA, 25 bp, Homo sapien
tcttgcggctgatctcggtgccgat

SEQ ID NO: 147083 - DNA, 25 bp, Homo sapien
ggctgatctcggtgccgatctccat

SEQ ID NO: 147084 - DNA, 25 bp, Homo sapien
tgcggctgatctcggtgccgatctc

SEQ ID NO: 147085 - DNA, 25 bp, Homo sapien
cctgacaaccgcccgctcgccgaga

SEQ ID NO: 147086 - DNA, 25 bp, Homo sapien
ccgctcgccgagacctggcttccca

SEQ ID NO: 147087 - DNA, 25 bp, Homo sapien
tcctgacaaccgcccgctcgccgag

SEQ ID NO: 147088 - DNA, 25 bp, Homo sapien
gctcgccgagacctggcttcccacc

SEQ ID NO: 147089 - DNA, 25 bp, Homo sapien
ctcccgcagcggatccaaagcggcg

SEQ ID NO: 147090 - DNA, 25 bp, Homo sapien
ttcccggcggctacttcagccgcag

SEQ ID NO: 147091 - DNA, 25 bp, Homo sapien
tgtccttccatttcccggcggctac

SEQ ID NO: 147092 - DNA, 25 bp, Homo sapien
aaagcggcgccgtgcgccgcggtgg

SEQ ID NO: 147093 - DNA, 25 bp, Homo sapien
agagcaaacgtgcatgtgagaaagg

SEQ ID NO: 147094 - DNA, 25 bp, Homo sapien
gagaaaaagagcaaacgtgcatgtg

SEQ ID NO: 147095 - DNA, 25 bp, Homo sapien
gaaaaagagcaaacgtgcatgtgag

SEQ ID NO: 147096 - DNA, 25 bp, Homo sapien
aaaagagcaaacgtgcatgtgagaa

SEQ ID NO: 147097 - DNA, 25 bp, Homo sapien
ttcttgtaatttccccttaatggca

SEQ ID NO: 147098 - DNA, 25 bp, Homo sapien
caacataagctcctaattcttgtaa

SEQ ID NO: 147099 - DNA, 25 bp, Homo sapien
cataagctcctaattcttgtaattt

SEQ ID NO: 147100 - DNA, 25 bp, Homo sapien
taagctcctaattcttgtaatttcc

SEQ ID NO: 147101 - DNA, 25 bp, Homo sapien
tggacaagatggcttagctttaatt

SEQ ID NO: 147102 - DNA, 25 bp, Homo sapien
gacaagatggcttagctttaatttt

SEQ ID NO: 147103 - DNA, 25 bp, Homo sapien
attggacaagatggcttagctttaa

SEQ ID NO: 147104 - DNA, 25 bp, Homo sapien
ggacaagatggcttagctttaattt

SEQ ID NO: 147105 - DNA, 25 bp, Homo sapien
aatcgaattgtgttgttccctagaa

SEQ ID NO: 147106 - DNA, 25 bp, Homo sapien
gggacagatcctctgtcatttggtc

SEQ ID NO: 147107 - DNA, 25 bp, Homo sapien
catacggtgaatcgaattgtgttgt

SEQ ID NO: 147108 - DNA, 25 bp, Homo sapien
ggacagatcctctgtcatttggtcc

SEQ ID NO: 147109 - DNA, 25 bp, Homo sapien
gcgaagtttatctaatacaccatga

SEQ ID NO: 147110 - DNA, 25 bp, Homo sapien
cagttgtaacagagcgaagtttatc

SEQ ID NO: 147111 - DNA, 25 bp, Homo sapien
tgtaacagagcgaagtttatctaat

SEQ ID NO: 147112 - DNA, 25 bp, Homo sapien
cagagcgaagtttatctaatacacc

SEQ ID NO: 147113 - DNA, 25 bp, Homo sapien
gatgttggtatcagaagacttcaga

SEQ ID NO: 147114 - DNA, 25 bp, Homo sapien
tgaaggcacgttactatcaaagatg

SEQ ID NO: 147115 - DNA, 25 bp, Homo sapien
cctgcgaacttgtagaaactctgga

SEQ ID NO: 147116 - DNA, 25 bp, Homo sapien
tctcgcgctaggaatggcaagtggt

SEQ ID NO: 147117 - DNA, 25 bp, Homo sapien
tgcagctccatcatcgtaagtctgt

SEQ ID NO: 147118 - DNA, 25 bp, Homo sapien
catttctacttgcaggtggtcgata

SEQ ID NO: 147119 - DNA, 25 bp, Homo sapien
caatagaagggcgagaagaaccata

SEQ ID NO: 147120 - DNA, 25 bp, Homo sapien
ggtgctggctccctcaaaggtttca

SEQ ID NO: 147121 - DNA, 25 bp, Homo sapien
tgcttggcagcatgaatactattct

SEQ ID NO: 147122 - DNA, 25 bp, Homo sapien
tctggtatagcatgagaaacagcag

SEQ ID NO: 147123 - DNA, 25 bp, Homo sapien
taatatctcaaatgctggaaatccc

SEQ ID NO: 147124 - DNA, 25 bp, Homo sapien
ggttgctcactagcaattaccatga

SEQ ID NO: 147125 - DNA, 25 bp, Homo sapien
tacagatgtgatacaaaagaactct

SEQ ID NO: 147126 - DNA, 25 bp, Homo sapien
taacaactgaacttaccacaggcaa

SEQ ID NO: 147127 - DNA, 25 bp, Homo sapien
agacacactgctggagatgcttcct

SEQ ID NO: 147128 - DNA, 25 bp, Homo sapien
gatgcttcctgttcgagacccgtaa

SEQ ID NO: 147129 - DNA, 25 bp, Homo sapien
caggcaactttctcttccgaaagtt

SEQ ID NO: 147130 - DNA, 25 bp, Homo sapien
caaagactcattacatcgcccaggc

SEQ ID NO: 147131 - DNA, 25 bp, Homo sapien
gccagccatctattatgcctttacc

SEQ ID NO: 147132 - DNA, 25 bp, Homo sapien
agagacaaagactcattacatcgcc

SEQ ID NO: 147133 - DNA, 25 bp, Homo sapien
gaaaatgccaactacactggaacct

SEQ ID NO: 147134 - DNA, 25 bp, Homo sapien
cttgttagcttgtttagaaggtgga

SEQ ID NO: 147135 - DNA, 25 bp, Homo sapien
tgagcttcagatatagccttcaaaa

SEQ ID NO: 147136 - DNA, 25 bp, Homo sapien
cagatatagccttcaaaatcagatt

SEQ ID NO: 147137 - DNA, 25 bp, Homo sapien
tttgttacggattcttgagcttcag

SEQ ID NO: 147138 - DNA, 25 bp, Homo sapien
aaaaagcgagagagtggataagcag

SEQ ID NO: 147139 - DNA, 25 bp, Homo sapien
tcaaaaactgatggtgccaggcgcg

SEQ ID NO: 147140 - DNA, 25 bp, Homo sapien
gaggacagacaagtatcaggatcaa

SEQ ID NO: 147141 - DNA, 25 bp, Homo sapien
tatatcattaggtcaagagtgcgcc

SEQ ID NO: 147142 - DNA, 25 bp, Homo sapien
ctgggagcaactggaagtgtctgtt

SEQ ID NO: 147143 - DNA, 25 bp, Homo sapien
cacttctgctagcaattcttcttga

SEQ ID NO: 147144 - DNA, 25 bp, Homo sapien
tcttcttgagaagttcgagttctgg

SEQ ID NO: 147145 - DNA, 25 bp, Homo sapien
gagaagttcgagttctgggagcaac

SEQ ID NO: 147146 - DNA, 25 bp, Homo sapien
tgtagtaaagagtgaaacatcattt

SEQ ID NO: 147147 - DNA, 25 bp, Homo sapien
agtgaaacatcatttaagttattac

SEQ ID NO: 147148 - DNA, 25 bp, Homo sapien
ctgtagtaaagagtgaaacatcatt

SEQ ID NO: 147149 - DNA, 25 bp, Homo sapien
aagagtgaaacatcatttaagttat

SEQ ID NO: 147150 - DNA, 25 bp, Homo sapien
gacgtggtctaccattcattgacag

SEQ ID NO: 147151 - DNA, 25 bp, Homo sapien
atggaaacctctaagttggcgcctg

SEQ ID NO: 147152 - DNA, 25 bp, Homo sapien
tctttgctatctgggatgttgagcc

SEQ ID NO: 147153 - DNA, 25 bp, Homo sapien
taagttggcgcctgcatcctttgga

SEQ ID NO: 147154 - DNA, 25 bp, Homo sapien
gcgtgtgcctatggtccctgaggtg

SEQ ID NO: 147155 - DNA, 25 bp, Homo sapien
attaaaagagaagtcgggccaggtg

SEQ ID NO: 147156 - DNA, 25 bp, Homo sapien
gaactgcgagatcacctttcactgc

SEQ ID NO: 147157 - DNA, 25 bp, Homo sapien
catttctctcaactacaagcggtat

SEQ ID NO: 147158 - DNA, 25 bp, Homo sapien
ccagaaatggtgaataactgcagcc

SEQ ID NO: 147159 - DNA, 25 bp, Homo sapien
gaactgtcgcagagatggttgcatc

SEQ ID NO: 147160 - DNA, 25 bp, Homo sapien
aatatatgggatgcttccatacatt

SEQ ID NO: 147161 - DNA, 25 bp, Homo sapien
taaaaggaaatccacgcctagacac

SEQ ID NO: 147162 - DNA, 25 bp, Homo sapien
gcttccatacattataccaaacagg

SEQ ID NO: 147163 - DNA, 25 bp, Homo sapien
ctagacacatcgtagtgaaactgca

SEQ ID NO: 147164 - DNA, 25 bp, Homo sapien
taacagaacgggtcacagagaaaca

SEQ ID NO: 147165 - DNA, 25 bp, Homo sapien
gaaatgcctagaagacgacaccaat

SEQ ID NO: 147166 - DNA, 25 bp, Homo sapien
gaaacaaagggccatccaactgtga

SEQ ID NO: 147167 - DNA, 25 bp, Homo sapien
taggagtgtaagcataccaacctgc

SEQ ID NO: 147168 - DNA, 25 bp, Homo sapien
ccacgggtctgtatggtcatcctta

SEQ ID NO: 147169 - DNA, 25 bp, Homo sapien
taacaccgctgccaaaaattgatgg

SEQ ID NO: 147170 - DNA, 25 bp, Homo sapien
taggatcagcctgccgatttctaca

SEQ ID NO: 147171 - DNA, 25 bp, Homo sapien
tggattctcaattccggtccacggg

SEQ ID NO: 147172 - DNA, 25 bp, Homo sapien
gaccaattgctcttcgctacaacta

SEQ ID NO: 147173 - DNA, 25 bp, Homo sapien
aaaagcagtgatcaaggctgttacc

SEQ ID NO: 147174 - DNA, 25 bp, Homo sapien
cgtagggccctacatcctctaagta

SEQ ID NO: 147175 - DNA, 25 bp, Homo sapien
tgaaaaagctaaacgtaccagacca

SEQ ID NO: 147176 - DNA, 25 bp, Homo sapien
tgacaggaacctcaaagacattttc

SEQ ID NO: 147177 - DNA, 25 bp, Homo sapien
ggtgacaggaacctcaaagacattt

SEQ ID NO: 147178 - DNA, 25 bp, Homo sapien
aaaggtgacaggaacctcaaagaca

SEQ ID NO: 147179 - DNA, 25 bp, Homo sapien
gacaggaacctcaaagacattttca

SEQ ID NO: 147180 - DNA, 25 bp, Homo sapien
aagaggagcttgttatggaacctaa

SEQ ID NO: 147181 - DNA, 25 bp, Homo sapien
aagtccactggctccggtggaagaa

SEQ ID NO: 147182 - DNA, 25 bp, Homo sapien
tgggaaatattgtctagctcattca

SEQ ID NO: 147183 - DNA, 25 bp, Homo sapien
aaatattgtctagctcattcagtga

SEQ ID NO: 147184 - DNA, 25 bp, Homo sapien
ttctcaacgtttctaaggaagccga

SEQ ID NO: 147185 - DNA, 25 bp, Homo sapien
tcaaactgtctgttgcattcatatg

SEQ ID NO: 147186 - DNA, 25 bp, Homo sapien
tagttcttgactgtgattcagtatc

SEQ ID NO: 147187 - DNA, 25 bp, Homo sapien
aggaagccgattatttttacatcag

SEQ ID NO: 147188 - DNA, 25 bp, Homo sapien
gatacagatcaaaggatgggtacct

SEQ ID NO: 147189 - DNA, 25 bp, Homo sapien
gtcaacatacgtggaaagatacaga

SEQ ID NO: 147190 - DNA, 25 bp, Homo sapien
tcaagttctctgtaacttgctccct

SEQ ID NO: 147191 - DNA, 25 bp, Homo sapien
tccacatcagagctacagtcaacat

SEQ ID NO: 147192 - DNA, 25 bp, Homo sapien
tctgccattactgggtcgatttgca

SEQ ID NO: 147193 - DNA, 25 bp, Homo sapien
ctgggtcgatttgcagtcgggataa

SEQ ID NO: 147194 - DNA, 25 bp, Homo sapien
gcagtcgggataataattgcctctg

SEQ ID NO: 147195 - DNA, 25 bp, Homo sapien
atttgcagtcgggataataattgcc

SEQ ID NO: 147196 - DNA, 25 bp, Homo sapien
gagagcaaaatcacgggcagagaat

SEQ ID NO: 147197 - DNA, 25 bp, Homo sapien
agatgagagagcaaaatcacgggca

SEQ ID NO: 147198 - DNA, 25 bp, Homo sapien
gagagagcaaaatcacgggcagaga

SEQ ID NO: 147199 - DNA, 25 bp, Homo sapien
cacgggcagagaatgtctgaacacc

SEQ ID NO: 147200 - DNA, 25 bp, Homo sapien
tctcggctgtcaaccttttcaaata

SEQ ID NO: 147201 - DNA, 25 bp, Homo sapien
agatctcggctgtcaaccttttcaa

SEQ ID NO: 147202 - DNA, 25 bp, Homo sapien
gatctcggctgtcaaccttttcaaa

SEQ ID NO: 147203 - DNA, 25 bp, Homo sapien
ctcggctgtcaaccttttcaaatac

SEQ ID NO: 147204 - DNA, 25 bp, Homo sapien
gagctgatgaagtggatcccacaca

SEQ ID NO: 147205 - DNA, 25 bp, Homo sapien
cacaagagctgatgaagtggatccc

SEQ ID NO: 147206 - DNA, 25 bp, Homo sapien
cttgctatttcaaactgcgtgcacc

SEQ ID NO: 147207 - DNA, 25 bp, Homo sapien
ccatgggtacaatgaaaagctgaag

SEQ ID NO: 147208 - DNA, 25 bp, Homo sapien
gaacccaagtgtaacatgctccagg

SEQ ID NO: 147209 - DNA, 25 bp, Homo sapien
tccagggttgaggaaagcgtgcacc

SEQ ID NO: 147210 - DNA, 25 bp, Homo sapien
taaagacagagtgaactggaagccg

SEQ ID NO: 147211 - DNA, 25 bp, Homo sapien
gaggagatgcgctgacacatgagaa

SEQ ID NO: 147212 - DNA, 25 bp, Homo sapien
aagggcagtacagatggtaaaggga

SEQ ID NO: 147213 - DNA, 25 bp, Homo sapien
cagtacagatggtaaagggagacag

SEQ ID NO: 147214 - DNA, 25 bp, Homo sapien
aagagaagacatgctccatcctggg

SEQ ID NO: 147215 - DNA, 25 bp, Homo sapien
agagaagacatgctccatcctggga

SEQ ID NO: 147216 - DNA, 25 bp, Homo sapien
tgcatggaccatggattccatgtca

SEQ ID NO: 147217 - DNA, 25 bp, Homo sapien
tggaccatggattccatgtcatagt

SEQ ID NO: 147218 - DNA, 25 bp, Homo sapien
gaccatggattccatgtcatagtaa

SEQ ID NO: 147219 - DNA, 25 bp, Homo sapien
catggaccatggattccatgtcata

SEQ ID NO: 147220 - DNA, 25 bp, Homo sapien
ctgaaagtacccgaagggaatctgc

SEQ ID NO: 147221 - DNA, 25 bp, Homo sapien
tcttcatccccgactcttggtttgg

SEQ ID NO: 147222 - DNA, 25 bp, Homo sapien
tacccgaagggaatctgcagtcttc

SEQ ID NO: 147223 - DNA, 25 bp, Homo sapien
ttggtttggtgccactactacttcc

SEQ ID NO: 147224 - DNA, 25 bp, Homo sapien
ctgcagtttggtttacgggtttcat

SEQ ID NO: 147225 - DNA, 25 bp, Homo sapien
gggacaccatccagcgtcactataa

SEQ ID NO: 147226 - DNA, 25 bp, Homo sapien
tcactataaacttgggacttgcagg

SEQ ID NO: 147227 - DNA, 25 bp, Homo sapien
gctcagcaagtgcaactgctgtggg

SEQ ID NO: 147228 - DNA, 25 bp, Homo sapien
tcccctaacagcaagactgactggg

SEQ ID NO: 147229 - DNA, 25 bp, Homo sapien
gagactgggcagttcccctaacagc

SEQ ID NO: 147230 - DNA, 25 bp, Homo sapien
tgggcagttcccctaacagcaagac

SEQ ID NO: 147231 - DNA, 25 bp, Homo sapien
gcagttcccctaacagcaagactga

SEQ ID NO: 147232 - DNA, 25 bp, Homo sapien
ccagtacttgcagcgctccaaaagt

SEQ ID NO: 147233 - DNA, 25 bp, Homo sapien
caagcaggccagtacttgcagcgct

SEQ ID NO: 147234 - DNA, 25 bp, Homo sapien
tggggtgatggtaggcacactcatc

SEQ ID NO: 147235 - DNA, 25 bp, Homo sapien
aggccagtacttgcagcgctccaaa

SEQ ID NO: 147236 - DNA, 25 bp, Homo sapien
tgtggccaaaatgcatacaaactgg

SEQ ID NO: 147237 - DNA, 25 bp, Homo sapien
tatttcagtatctcacaggtccgag

SEQ ID NO: 147238 - DNA, 25 bp, Homo sapien
caagaaatacgctactctggagagg

SEQ ID NO: 147239 - DNA, 25 bp, Homo sapien
aatctgtgtatactgcgtgtggcca

SEQ ID NO: 147240 - DNA, 25 bp, Homo sapien
agcaaatttacaattggggaaggct

SEQ ID NO: 147241 - DNA, 25 bp, Homo sapien
cagcaaatttacaattggggaaggc

SEQ ID NO: 147242 - DNA, 25 bp, Homo sapien
cacatgagtgaagggacaatctggt

SEQ ID NO: 147243 - DNA, 25 bp, Homo sapien
tggaattcttctactcacatgagtg

SEQ ID NO: 147244 - DNA, 25 bp, Homo sapien
ggagacagtactggaattcttctac

SEQ ID NO: 147245 - DNA, 25 bp, Homo sapien
ggttttggagacagtactggaattc

SEQ ID NO: 147246 - DNA, 25 bp, Homo sapien
tacccaaatgtagtagcacagtcac

SEQ ID NO: 147247 - DNA, 25 bp, Homo sapien
tacagataggcacacttgctcttta

SEQ ID NO: 147248 - DNA, 25 bp, Homo sapien
gactggttggattaactgatcctgc

SEQ ID NO: 147249 - DNA, 25 bp, Homo sapien
ggactgatctccaatctgtttggaa

SEQ ID NO: 147250 - DNA, 25 bp, Homo sapien
gggaagtaacggcagagctgactac

SEQ ID NO: 147251 - DNA, 25 bp, Homo sapien
ttttggatgatagaagggacattcc

SEQ ID NO: 147252 - DNA, 25 bp, Homo sapien
tccatcttcttacaagcagggaagt

SEQ ID NO: 147253 - DNA, 25 bp, Homo sapien
gtaacggcagagctgactactggaa

SEQ ID NO: 147254 - DNA, 25 bp, Homo sapien
tgagtaccctcatctacgcccagtt

SEQ ID NO: 147255 - DNA, 25 bp, Homo sapien
gtactaggatagcaggcctgaccca

SEQ ID NO: 147256 - DNA, 25 bp, Homo sapien
ttcatatggtcctcaagctaccggg

SEQ ID NO: 147257 - DNA, 25 bp, Homo sapien
tctgacattaggttcaaactgcccc

SEQ ID NO: 147258 - DNA, 25 bp, Homo sapien
gatggtagaatgtgcagtccggtct

SEQ ID NO: 147259 - DNA, 25 bp, Homo sapien
caaggcatgtcgtggtgggacatta

SEQ ID NO: 147260 - DNA, 25 bp, Homo sapien
ggtttgaggtcgaatccatttcaag

SEQ ID NO: 147261 - DNA, 25 bp, Homo sapien
cagtccggtcttgtacattgagtgt

SEQ ID NO: 147262 - DNA, 25 bp, Homo sapien
actgacatgagaaaaacgaatttga

SEQ ID NO: 147263 - DNA, 25 bp, Homo sapien
tatctcccagttgctaatgtcgaag

SEQ ID NO: 147264 - DNA, 25 bp, Homo sapien
cctgctggccttagtatatgtttgc

SEQ ID NO: 147265 - DNA, 25 bp, Homo sapien
gaaacttcctttcagtatctcccag

SEQ ID NO: 147266 - DNA, 25 bp, Homo sapien
gccacggtggaaggatatcgcttca

SEQ ID NO: 147267 - DNA, 25 bp, Homo sapien
agtacatgaaaacttccaaactgca

SEQ ID NO: 147268 - DNA, 25 bp, Homo sapien
cacccaatgttaaaaccacataata

SEQ ID NO: 147269 - DNA, 25 bp, Homo sapien
ctgtagagtatctttcatcagtaca

SEQ ID NO: 147270 - DNA, 25 bp, Homo sapien
tttcatcagtacatgaaaacttcca

SEQ ID NO: 147271 - DNA, 25 bp, Homo sapien
taagcagcctcagtacctttggcca

SEQ ID NO: 147272 - DNA, 25 bp, Homo sapien
cattcatcctgtcacagaaggcagg

SEQ ID NO: 147273 - DNA, 25 bp, Homo sapien
taagctgcagtaccatgactaacca

SEQ ID NO: 147274 - DNA, 25 bp, Homo sapien
gaataatgacaactgcctcactgca

SEQ ID NO: 147275 - DNA, 25 bp, Homo sapien
ctttgaaatcagtgatctgttattt

SEQ ID NO: 147276 - DNA, 25 bp, Homo sapien
gacacttcttgccttaacagtttta

SEQ ID NO: 147277 - DNA, 25 bp, Homo sapien
taacactatacaccaagtctttgaa

SEQ ID NO: 147278 - DNA, 25 bp, Homo sapien
ttaactctaaagcatttgacacttc

SEQ ID NO: 147279 - DNA, 25 bp, Homo sapien
tgcagtctttattaccccttttgca

SEQ ID NO: 147280 - DNA, 25 bp, Homo sapien
ggtcctgagaatgttgcagtcttta

SEQ ID NO: 147281 - DNA, 25 bp, Homo sapien
taatttggtcctgagaatgttgcag

SEQ ID NO: 147282 - DNA, 25 bp, Homo sapien
gaatgttgcagtctttattacccct

SEQ ID NO: 147283 - DNA, 25 bp, Homo sapien
tgctggcttgacaatcttaaacgtg

SEQ ID NO: 147284 - DNA, 25 bp, Homo sapien
tggcaacacaacagtagactgctgg

SEQ ID NO: 147285 - DNA, 25 bp, Homo sapien
cagcaaagtgcaacttaccaaatgg

SEQ ID NO: 147286 - DNA, 25 bp, Homo sapien
aagccgaagacaacagccttatgca

SEQ ID NO: 147287 - DNA, 25 bp, Homo sapien
tggtacccttgcttccaatcgccaa

SEQ ID NO: 147288 - DNA, 25 bp, Homo sapien
catgataggccatatagaatctgcc

SEQ ID NO: 147289 - DNA, 25 bp, Homo sapien
tatctaagctcctgattgtgtaacc

SEQ ID NO: 147290 - DNA, 25 bp, Homo sapien
tcataagccatagcaactgaaagat

SEQ ID NO: 147291 - DNA, 25 bp, Homo sapien
tgtccttcaaagtggccaacctgat

SEQ ID NO: 147292 - DNA, 25 bp, Homo sapien
tactctacatttgagcctgctgcag

SEQ ID NO: 147293 - DNA, 25 bp, Homo sapien
tcaggaacagatccaaagttagcag

SEQ ID NO: 147294 - DNA, 25 bp, Homo sapien
tccattacagtgcaggtagaaactc

SEQ ID NO: 147295 - DNA, 25 bp, Homo sapien
aagtgtgtgatttcggcagacctgc

SEQ ID NO: 147296 - DNA, 25 bp, Homo sapien
cctgcatggtcaagtggtgctaacc

SEQ ID NO: 147297 - DNA, 25 bp, Homo sapien
gatcgaatacttgatggtaaaggcc

SEQ ID NO: 147298 - DNA, 25 bp, Homo sapien
ggtgctaacccaagactgtaacagg

SEQ ID NO: 147299 - DNA, 25 bp, Homo sapien
aatggtatgttcatgttgggacccc

SEQ ID NO: 147300 - DNA, 25 bp, Homo sapien
gcaagaactgactttgaaggccagt

SEQ ID NO: 147301 - DNA, 25 bp, Homo sapien
gaattacttgggctacatggactag

SEQ ID NO: 147302 - DNA, 25 bp, Homo sapien
gaaaacatcttatggatcatgccgc

SEQ ID NO: 147303 - DNA, 25 bp, Homo sapien
ccagggcctgtagcatttcccgtat

SEQ ID NO: 147304 - DNA, 25 bp, Homo sapien
cactgggcaccaactataatagcaa

SEQ ID NO: 147305 - DNA, 25 bp, Homo sapien
gacatgctgctcgtactgtgtgtta

SEQ ID NO: 147306 - DNA, 25 bp, Homo sapien
tagccttgccttcaaaaagaggtcc

SEQ ID NO: 147307 - DNA, 25 bp, Homo sapien
gaactgaggcggtgccgtgccttca

SEQ ID NO: 147308 - DNA, 25 bp, Homo sapien
tctgtgtgcagaggcaaagtaagat

SEQ ID NO: 147309 - DNA, 25 bp, Homo sapien
caagccacagattgtgttcgttctg

SEQ ID NO: 147310 - DNA, 25 bp, Homo sapien
tgcataacgatggatttgcttgcca

SEQ ID NO: 147311 - DNA, 25 bp, Homo sapien
acaagcaattcatctagcagaaaag

SEQ ID NO: 147312 - DNA, 25 bp, Homo sapien
cacataggcatgctttcagacaagc

SEQ ID NO: 147313 - DNA, 25 bp, Homo sapien
caagcgcagaatttgtgccttttac

SEQ ID NO: 147314 - DNA, 25 bp, Homo sapien
cataaaggaagaatgcacataggca

SEQ ID NO: 147315 - DNA, 25 bp, Homo sapien
cttgtcaggtgccaaaattgccagc

SEQ ID NO: 147316 - DNA, 25 bp, Homo sapien
gcagagctggtcacaatcaacgtat

SEQ ID NO: 147317 - DNA, 25 bp, Homo sapien
caatcattcagtggaggcctatgca

SEQ ID NO: 147318 - DNA, 25 bp, Homo sapien
tgagcacactggaagatgcccggat

SEQ ID NO: 147319 - DNA, 25 bp, Homo sapien
gacatatgaggtggaatccggagca

SEQ ID NO: 147320 - DNA, 25 bp, Homo sapien
gatgacagtaaccttgggcctttgc

SEQ ID NO: 147321 - DNA, 25 bp, Homo sapien
taggcaagcctactgaagtctcaga

SEQ ID NO: 147322 - DNA, 25 bp, Homo sapien
tcatgccagggattacacagaacct

SEQ ID NO: 147323 - DNA, 25 bp, Homo sapien
catgttttgggtatatgaaatccca

SEQ ID NO: 147324 - DNA, 25 bp, Homo sapien
aatcccagaattctctaccagatgg

SEQ ID NO: 147325 - DNA, 25 bp, Homo sapien
agtgacagactgtacaaccaatgtg

SEQ ID NO: 147326 - DNA, 25 bp, Homo sapien
gaacctactaatggccctgcatgag

SEQ ID NO: 147327 - DNA, 25 bp, Homo sapien
gacatgtaggtaaagactctttggg

SEQ ID NO: 147328 - DNA, 25 bp, Homo sapien
aaaacaaacctaaccacacatatat

SEQ ID NO: 147329 - DNA, 25 bp, Homo sapien
tctgaaacgacagtgtggaaatggc

SEQ ID NO: 147330 - DNA, 25 bp, Homo sapien
gagggtaactatggtatttgtatgt

SEQ ID NO: 147331 - DNA, 25 bp, Homo sapien
gaactgagcccatttgtaggaagca

SEQ ID NO: 147332 - DNA, 25 bp, Homo sapien
gctgtccggaagctgaaaaagggta

SEQ ID NO: 147333 - DNA, 25 bp, Homo sapien
caatgtctacttgctcatggtgcca

SEQ ID NO: 147334 - DNA, 25 bp, Homo sapien
ggtaagaggctctcacacttgaacg

SEQ ID NO: 147335 - DNA, 25 bp, Homo sapien
tcgtctagggactctctctcgggtc

SEQ ID NO: 147336 - DNA, 25 bp, Homo sapien
tctcgggtccgtgcaggaagatcag

SEQ ID NO: 147337 - DNA, 25 bp, Homo sapien
agcgacgacatcatcaggtaccggg

SEQ ID NO: 147338 - DNA, 25 bp, Homo sapien
cactgcggccaaggagatcgtatac

SEQ ID NO: 147339 - DNA, 25 bp, Homo sapien
gctacgggctgaggagactaggcga

SEQ ID NO: 147340 - DNA, 25 bp, Homo sapien
catgttccgcgaggcgagggttttc

SEQ ID NO: 147341 - DNA, 25 bp, Homo sapien
tctgggcatccacttgacagccggc

SEQ ID NO: 147342 - DNA, 25 bp, Homo sapien
gccctcagcatgttccgcgaggcga

SEQ ID NO: 147343 - DNA, 25 bp, Homo sapien
tgagctccaagtttaccagttagaa

SEQ ID NO: 147344 - DNA, 25 bp, Homo sapien
taccgcttggagagtttaacgtggc

SEQ ID NO: 147345 - DNA, 25 bp, Homo sapien
caatgggtgtgtgtaactgagatgt

SEQ ID NO: 147346 - DNA, 25 bp, Homo sapien
cagtttcaacttcactaccgcttgg

SEQ ID NO: 147347 - DNA, 25 bp, Homo sapien
ctcattggctaccatatttccactg

SEQ ID NO: 147348 - DNA, 25 bp, Homo sapien
acctcattggctaccatatttccac

SEQ ID NO: 147349 - DNA, 25 bp, Homo sapien
gtgctgactatcttgcaagttgtca

SEQ ID NO: 147350 - DNA, 25 bp, Homo sapien
cctcattggctaccatatttccact

SEQ ID NO: 147351 - DNA, 25 bp, Homo sapien
aatcctgaaattgtccgctgtttct

SEQ ID NO: 147352 - DNA, 25 bp, Homo sapien
tgaaattgtccgctgtttctcgagg

SEQ ID NO: 147353 - DNA, 25 bp, Homo sapien
tcctgaaattgtccgctgtttctcg

SEQ ID NO: 147354 - DNA, 25 bp, Homo sapien
aattgtccgctgtttctcgaggtcc

SEQ ID NO: 147355 - DNA, 25 bp, Homo sapien
cttgtccgagaggtgcccgcagcgc

SEQ ID NO: 147356 - DNA, 25 bp, Homo sapien
gaggtgggcgtggagtgaagagctg

SEQ ID NO: 147357 - DNA, 25 bp, Homo sapien
tggcggcgtccgactctgcccggca

SEQ ID NO: 147358 - DNA, 25 bp, Homo sapien
ggctgccggtgcggccagcgaaggc

SEQ ID NO: 147359 - DNA, 25 bp, Homo sapien
tgcgtgcatagatcggcgcagagct

SEQ ID NO: 147360 - DNA, 25 bp, Homo sapien
gctggaacttcctgcgcctaaaata

SEQ ID NO: 147361 - DNA, 25 bp, Homo sapien
tagatcggcgcagagctggaacttc

SEQ ID NO: 147362 - DNA, 25 bp, Homo sapien
cagcatctgcgtgcatagatcggcg

SEQ ID NO: 147363 - DNA, 25 bp, Homo sapien
gatgcactggcaattcaggatctgg

SEQ ID NO: 147364 - DNA, 25 bp, Homo sapien
gcactggcaattcaggatctggttc

SEQ ID NO: 147365 - DNA, 25 bp, Homo sapien
tgcactggcaattcaggatctggtt

SEQ ID NO: 147366 - DNA, 25 bp, Homo sapien
ctgatgcactggcaattcaggatct

SEQ ID NO: 147367 - DNA, 25 bp, Homo sapien
gtccttgtgctagtttaaagctctt

SEQ ID NO: 147368 - DNA, 25 bp, Homo sapien
gtttaatactacacaagcctccata

SEQ ID NO: 147369 - DNA, 25 bp, Homo sapien
tagttttgccccatctatcagtttg

SEQ ID NO: 147370 - DNA, 25 bp, Homo sapien
tgatccttcttgaatgacttgtacc

SEQ ID NO: 147371 - DNA, 25 bp, Homo sapien
cttattaacaaatgggagggtcaca

SEQ ID NO: 147372 - DNA, 25 bp, Homo sapien
caccaactgagttagtctataggac

SEQ ID NO: 147373 - DNA, 25 bp, Homo sapien
gatacttgccagcaaacatcaggaa

SEQ ID NO: 147374 - DNA, 25 bp, Homo sapien
taatacagaatgcaaggccagtaga

SEQ ID NO: 147375 - DNA, 25 bp, Homo sapien
actgcaccaaggctaggaatatctt

SEQ ID NO: 147376 - DNA, 25 bp, Homo sapien
gccactgcaccaaggctaggaatat

SEQ ID NO: 147377 - DNA, 25 bp, Homo sapien
ccactgcaccaaggctaggaatatc

SEQ ID NO: 147378 - DNA, 25 bp, Homo sapien
ctgcaccaaggctaggaatatcttt

SEQ ID NO: 147379 - DNA, 25 bp, Homo sapien
ttatcctgatgagaagctaatgagg

SEQ ID NO: 147380 - DNA, 25 bp, Homo sapien
gaactatgatttggagtcctaccta

SEQ ID NO: 147381 - DNA, 25 bp, Homo sapien
gatggatcctgtatgccgcagtgag

SEQ ID NO: 147382 - DNA, 25 bp, Homo sapien
caataggcaggctagctagagagcc

SEQ ID NO: 147383 - DNA, 25 bp, Homo sapien
ttctgttagcgctcttgcttttaag

SEQ ID NO: 147384 - DNA, 25 bp, Homo sapien
gcgctcttgcttttaagatccaagc

SEQ ID NO: 147385 - DNA, 25 bp, Homo sapien
ctcttgcttttaagatccaagctgc

SEQ ID NO: 147386 - DNA, 25 bp, Homo sapien
tctgttagcgctcttgcttttaaga

SEQ ID NO: 147387 - DNA, 25 bp, Homo sapien
ggaacttgagctatagcattttcat

SEQ ID NO: 147388 - DNA, 25 bp, Homo sapien
gaacttgagctatagcattttcatc

SEQ ID NO: 147389 - DNA, 25 bp, Homo sapien
gaataaagtgatgttttcgaacgac

SEQ ID NO: 147390 - DNA, 25 bp, Homo sapien
ttaaagtgctcttagaacacctctg

SEQ ID NO: 147391 - DNA, 25 bp, Homo sapien
tccaataccatttgtaccaccacat

SEQ ID NO: 147392 - DNA, 25 bp, Homo sapien
tttttcccatatgatcagcagttga

SEQ ID NO: 147393 - DNA, 25 bp, Homo sapien
gtaaacaacactcttagatcagcca

SEQ ID NO: 147394 - DNA, 25 bp, Homo sapien
ttgtaaacaacactcttagatcagc

SEQ ID NO: 147395 - DNA, 25 bp, Homo sapien
aattagttgtaaacaacactcttag

SEQ ID NO: 147396 - DNA, 25 bp, Homo sapien
agttgtaaacaacactcttagatca

SEQ ID NO: 147397 - DNA, 25 bp, Homo sapien
cagggagtttcaaagacgttccagg

SEQ ID NO: 147398 - DNA, 25 bp, Homo sapien
ggctaggccctcctgtctgattagt

SEQ ID NO: 147399 - DNA, 25 bp, Homo sapien
tccagggagtttcaaagacgttcca

SEQ ID NO: 147400 - DNA, 25 bp, Homo sapien
ggccctcctgtctgattagttccag

SEQ ID NO: 147401 - DNA, 25 bp, Homo sapien
tagggcgggctgtgtaggcggttct

SEQ ID NO: 147402 - DNA, 25 bp, Homo sapien
gttcccagcctgacaaatcttccgg

SEQ ID NO: 147403 - DNA, 25 bp, Homo sapien
tctgatagcctgttccatagtgcct

SEQ ID NO: 147404 - DNA, 25 bp, Homo sapien
ctgtgtaggcggttctgggtgttct

SEQ ID NO: 147405 - DNA, 25 bp, Homo sapien
gaaatgtaaacaagtttaatatgca

SEQ ID NO: 147406 - DNA, 25 bp, Homo sapien
tgatataccataatataaagctact

SEQ ID NO: 147407 - DNA, 25 bp, Homo sapien
taatacaaggctatgggaaagctga

SEQ ID NO: 147408 - DNA, 25 bp, Homo sapien
tataattctccactataacaacagg

SEQ ID NO: 147409 - DNA, 25 bp, Homo sapien
taaatggtccatcaggacttgtaag

SEQ ID NO: 147410 - DNA, 25 bp, Homo sapien
ggtccatcaggacttgtaagcatgg

SEQ ID NO: 147411 - DNA, 25 bp, Homo sapien
gttaaattcagcctagataaattta

SEQ ID NO: 147412 - DNA, 25 bp, Homo sapien
tttataaatggtccatcaggacttg

SEQ ID NO: 147413 - DNA, 25 bp, Homo sapien
taactcaaaatcattttaagtacat

SEQ ID NO: 147414 - DNA, 25 bp, Homo sapien
cataactcaaaatcattttaagtac

SEQ ID NO: 147415 - DNA, 25 bp, Homo sapien
gtgtaatattacttcataactcaaa

SEQ ID NO: 147416 - DNA, 25 bp, Homo sapien
actcaaaatcattttaagtacatac

SEQ ID NO: 147417 - DNA, 25 bp, Homo sapien
attcattttctaatttgtcattatc

SEQ ID NO: 147418 - DNA, 25 bp, Homo sapien
ttcacaagtttttattcattttcta

SEQ ID NO: 147419 - DNA, 25 bp, Homo sapien
cttcacaagtttttattcattttct

SEQ ID NO: 147420 - DNA, 25 bp, Homo sapien
cattttctaatttgtcattatcatc

SEQ ID NO: 147421 - DNA, 25 bp, Homo sapien
taagcttcattctacaaagatgatg

SEQ ID NO: 147422 - DNA, 25 bp, Homo sapien
gatgctgcatacctgctttctttgt

SEQ ID NO: 147423 - DNA, 25 bp, Homo sapien
cctataataatggtatatgtacttt

SEQ ID NO: 147424 - DNA, 25 bp, Homo sapien
tatacagatgacttcttaagcttca

SEQ ID NO: 147425 - DNA, 25 bp, Homo sapien
tcgtaaaacagatgcagacaattct

SEQ ID NO: 147426 - DNA, 25 bp, Homo sapien
cagctaagctggacattggaatcac

SEQ ID NO: 147427 - DNA, 25 bp, Homo sapien
gataaaagggcctatccatcttttg

SEQ ID NO: 147428 - DNA, 25 bp, Homo sapien
ccaacttcagaattgtcgtaaaaca

SEQ ID NO: 147429 - DNA, 25 bp, Homo sapien
catgatgaaagatatactcaaacaa

SEQ ID NO: 147430 - DNA, 25 bp, Homo sapien
ttcatgatgaaagatatactcaaac

SEQ ID NO: 147431 - DNA, 25 bp, Homo sapien
gatgaaagatatactcaaacaaagc

SEQ ID NO: 147432 - DNA, 25 bp, Homo sapien
tgatgaaagatatactcaaacaaag

SEQ ID NO: 147433 - DNA, 25 bp, Homo sapien
tcttctcacagcatctctaggaggc

SEQ ID NO: 147434 - DNA, 25 bp, Homo sapien
cacagcatctctaggaggcaaattt

SEQ ID NO: 147435 - DNA, 25 bp, Homo sapien
ctctaggaggcaaatttgacctgtc

SEQ ID NO: 147436 - DNA, 25 bp, Homo sapien
gaggcaaatttgacctgtctgtctt

SEQ ID NO: 147437 - DNA, 25 bp, Homo sapien
tattcctcaataagaatgggtaaat

SEQ ID NO: 147438 - DNA, 25 bp, Homo sapien
gatgtagaactacatcttcaagatg

SEQ ID NO: 147439 - DNA, 25 bp, Homo sapien
aaattccaagatgtagaactacatc

SEQ ID NO: 147440 - DNA, 25 bp, Homo sapien
taagaatgggtaaattccaagatgt

SEQ ID NO: 147441 - DNA, 25 bp, Homo sapien
tcatatgcatgaagaactatgatac

SEQ ID NO: 147442 - DNA, 25 bp, Homo sapien
tcggctaacccttagaatctttaga

SEQ ID NO: 147443 - DNA, 25 bp, Homo sapien
aactatgatactaacataatatgta

SEQ ID NO: 147444 - DNA, 25 bp, Homo sapien
attacagtcggctaacccttagaat

SEQ ID NO: 147445 - DNA, 25 bp, Homo sapien
tgtctgttttacgtattagggtctc

SEQ ID NO: 147446 - DNA, 25 bp, Homo sapien
ttacgtattagggtctcgataagat

SEQ ID NO: 147447 - DNA, 25 bp, Homo sapien
tagggtctcgataagatttcacttg

SEQ ID NO: 147448 - DNA, 25 bp, Homo sapien
tattagggtctcgataagatttcac

SEQ ID NO: 147449 - DNA, 25 bp, Homo sapien
tatgttctaagtttgctagccctgc

SEQ ID NO: 147450 - DNA, 25 bp, Homo sapien
tttagaagcagagccctatatagga

SEQ ID NO: 147451 - DNA, 25 bp, Homo sapien
tatataggaactacccaacagcccc

SEQ ID NO: 147452 - DNA, 25 bp, Homo sapien
aagtctagcacagatccagaagtcc

SEQ ID NO: 147453 - DNA, 25 bp, Homo sapien
cccatctgggacaattttaagtggc

SEQ ID NO: 147454 - DNA, 25 bp, Homo sapien
ggcccatctgggacaattttaagtg

SEQ ID NO: 147455 - DNA, 25 bp, Homo sapien
catctgggacaattttaagtggctg

SEQ ID NO: 147456 - DNA, 25 bp, Homo sapien
gcccatctgggacaattttaagtgg

SEQ ID NO: 147457 - DNA, 25 bp, Homo sapien
tggagagggcagccagatccaaagc

SEQ ID NO: 147458 - DNA, 25 bp, Homo sapien
ctgtggagagggcagccagatccaa

SEQ ID NO: 147459 - DNA, 25 bp, Homo sapien
tgtggagagggcagccagatccaaa

SEQ ID NO: 147460 - DNA, 25 bp, Homo sapien
gtggagagggcagccagatccaaag

SEQ ID NO: 147461 - DNA, 25 bp, Homo sapien
tttccaatctgtactttccaccacc

SEQ ID NO: 147462 - DNA, 25 bp, Homo sapien
ctgcttcagggctgatttaaactgt

SEQ ID NO: 147463 - DNA, 25 bp, Homo sapien
tgcttcagggctgatttaaactgtt

SEQ ID NO: 147464 - DNA, 25 bp, Homo sapien
ttttgccaagtacagaaatgtatct

SEQ ID NO: 147465 - DNA, 25 bp, Homo sapien
gccaagtacagaaatgtatctacca

SEQ ID NO: 147466 - DNA, 25 bp, Homo sapien
aaaacatactaagactagcacagta

SEQ ID NO: 147467 - DNA, 25 bp, Homo sapien
tcttcttttgaatctcctttaccac

SEQ ID NO: 147468 - DNA, 25 bp, Homo sapien
atttaagaaactctaacagataaag

SEQ ID NO: 147469 - DNA, 25 bp, Homo sapien
catatttaggaactagtagcacttc

SEQ ID NO: 147470 - DNA, 25 bp, Homo sapien
gggtgacagagtgacacccctactc

SEQ ID NO: 147471 - DNA, 25 bp, Homo sapien
tgacagagtgacacccctactcaga

SEQ ID NO: 147472 - DNA, 25 bp, Homo sapien
ggtgacagagtgacacccctactca

SEQ ID NO: 147473 - DNA, 25 bp, Homo sapien
acagagtgacacccctactcagaaa

SEQ ID NO: 147474 - DNA, 25 bp, Homo sapien
aagcagtcacaggttgatccaatga

SEQ ID NO: 147475 - DNA, 25 bp, Homo sapien
cttatctaagccttgtttgaaaaga

SEQ ID NO: 147476 - DNA, 25 bp, Homo sapien
caggttgatccaatgagacataaac

SEQ ID NO: 147477 - DNA, 25 bp, Homo sapien
ggaaacttatctaagccttgtttga

SEQ ID NO: 147478 - DNA, 25 bp, Homo sapien
attccacagagcagggttacttctc

SEQ ID NO: 147479 - DNA, 25 bp, Homo sapien
agattcttgcaattccacagagcag

SEQ ID NO: 147480 - DNA, 25 bp, Homo sapien
catagattcttgcaattccacagag

SEQ ID NO: 147481 - DNA, 25 bp, Homo sapien
ctcatagattcttgcaattccacag

SEQ ID NO: 147482 - DNA, 25 bp, Homo sapien
tgtctaagaagagaagggcaaaagg

SEQ ID NO: 147483 - DNA, 25 bp, Homo sapien
ctgtctaagaagagaagggcaaaag

SEQ ID NO: 147484 - DNA, 25 bp, Homo sapien
taaagatgtgatagttctctagctc

SEQ ID NO: 147485 - DNA, 25 bp, Homo sapien
gagctactccgtatcacagccacag

SEQ ID NO: 147486 - DNA, 25 bp, Homo sapien
caccagcaaccatgcaataaagatg

SEQ ID NO: 147487 - DNA, 25 bp, Homo sapien
gagaaaaggaatccactccagagct

SEQ ID NO: 147488 - DNA, 25 bp, Homo sapien
ctgtaaaaccggagagctatttctg

SEQ ID NO: 147489 - DNA, 25 bp, Homo sapien
ccggagagctatttctggctgatca

SEQ ID NO: 147490 - DNA, 25 bp, Homo sapien
gatcagaatagaagtggttgcttcc

SEQ ID NO: 147491 - DNA, 25 bp, Homo sapien
gcttccaatgcatgcgatggcttcc

SEQ ID NO: 147492 - DNA, 25 bp, Homo sapien
aaaagctggccgttataaatgccca

SEQ ID NO: 147493 - DNA, 25 bp, Homo sapien
tttcagccaaagaaagggcacgttc

SEQ ID NO: 147494 - DNA, 25 bp, Homo sapien
tatcatactgctgggcatagaagca

SEQ ID NO: 147495 - DNA, 25 bp, Homo sapien
tagaagcaacacagccccagattgt

SEQ ID NO: 147496 - DNA, 25 bp, Homo sapien
gccagcctgaagcactgatgggcca

SEQ ID NO: 147497 - DNA, 25 bp, Homo sapien
agcacagccaggttgttgtaggcct

SEQ ID NO: 147498 - DNA, 25 bp, Homo sapien
tgttcaacgtggcccttccgcatct

SEQ ID NO: 147499 - DNA, 25 bp, Homo sapien
gttgttgttgaccagagccagcctg

SEQ ID NO: 147500 - DNA, 25 bp, Homo sapien
taagagatgtgataacacccaaggg

SEQ ID NO: 147501 - DNA, 25 bp, Homo sapien
ggtcactcttttcatacagctgaca

SEQ ID NO: 147502 - DNA, 25 bp, Homo sapien
tgagcatctaccatacggcaggtac

SEQ ID NO: 147503 - DNA, 25 bp, Homo sapien
taacagttacatgacagatatggtc

SEQ ID NO: 147504 - DNA, 25 bp, Homo sapien
ggatcatcaatgcagagaccactga

SEQ ID NO: 147505 - DNA, 25 bp, Homo sapien
gagcctgtgataaataccgacaaca

SEQ ID NO: 147506 - DNA, 25 bp, Homo sapien
ggactttaataacacgagcctgtga

SEQ ID NO: 147507 - DNA, 25 bp, Homo sapien
tccatgaccctgaagacaaatttgt

SEQ ID NO: 147508 - DNA, 25 bp, Homo sapien
cttatcagagattgttgcaaaatta

SEQ ID NO: 147509 - DNA, 25 bp, Homo sapien
gatgcagtttgtaatagtgcccttg

SEQ ID NO: 147510 - DNA, 25 bp, Homo sapien
taaaatgcggttcatacatatgggg

SEQ ID NO: 147511 - DNA, 25 bp, Homo sapien
gcggttcatacatatggggtgctaa

SEQ ID NO: 147512 - DNA, 25 bp, Homo sapien
gctttcggatactaactgacttgca

SEQ ID NO: 147513 - DNA, 25 bp, Homo sapien
taagcagtagcacagtacagtggga

SEQ ID NO: 147514 - DNA, 25 bp, Homo sapien
cactgccaagggacgcagaagtctt

SEQ ID NO: 147515 - DNA, 25 bp, Homo sapien
taaaatgtggtgctattcccgaagg

SEQ ID NO: 147516 - DNA, 25 bp, Homo sapien
cacatggtctggaaatgctgcttca

SEQ ID NO: 147517 - DNA, 25 bp, Homo sapien
taaatgttgtgtgtccacatggtct

SEQ ID NO: 147518 - DNA, 25 bp, Homo sapien
acttctgcgcagcaacatagcttct

SEQ ID NO: 147519 - DNA, 25 bp, Homo sapien
gcgcagcaacatagcttctctgcag

SEQ ID NO: 147520 - DNA, 25 bp, Homo sapien
cacacctggcttaaaggtgcagttt

SEQ ID NO: 147521 - DNA, 25 bp, Homo sapien
aagaacatatgtggtctaaggaaca

SEQ ID NO: 147522 - DNA, 25 bp, Homo sapien
taatgtgagagacagtttcaggatc

SEQ ID NO: 147523 - DNA, 25 bp, Homo sapien
cagactccttaagctacatgatggc

SEQ ID NO: 147524 - DNA, 25 bp, Homo sapien
gaaaggttcaagtctaaggtgcagg

SEQ ID NO: 147525 - DNA, 25 bp, Homo sapien
gaattcattcccataaagagctcag

SEQ ID NO: 147526 - DNA, 25 bp, Homo sapien
gacctagtgattaagagcacacact

SEQ ID NO: 147527 - DNA, 25 bp, Homo sapien
gcctgcataggactacggtgagaat

SEQ ID NO: 147528 - DNA, 25 bp, Homo sapien
taaaaaagacataatccagtagaga

SEQ ID NO: 147529 - DNA, 25 bp, Homo sapien
aacagtgaattttgacagtaccttc

SEQ ID NO: 147530 - DNA, 25 bp, Homo sapien
tttgccacactactctcaagattgt

SEQ ID NO: 147531 - DNA, 25 bp, Homo sapien
gaggcaggcttaaaggaaatgtgat

SEQ ID NO: 147532 - DNA, 25 bp, Homo sapien
gcataccatggaggaaccgacagct

SEQ ID NO: 147533 - DNA, 25 bp, Homo sapien
gagctttctagtgggtgccagaccc

SEQ ID NO: 147534 - DNA, 25 bp, Homo sapien
ttaccggcactcgaggacagtctag

SEQ ID NO: 147535 - DNA, 25 bp, Homo sapien
ccaagagtggtgttcttaccggcac

SEQ ID NO: 147536 - DNA, 25 bp, Homo sapien
ggtatctcacaactgcccttagtgg

SEQ ID NO: 147537 - DNA, 25 bp, Homo sapien
actgggtttgacttccggtatctca

SEQ ID NO: 147538 - DNA, 25 bp, Homo sapien
gttaaattgaaaatcagtgacataa

SEQ ID NO: 147539 - DNA, 25 bp, Homo sapien
ggactgcaaccaccgtggtaacact

SEQ ID NO: 147540 - DNA, 25 bp, Homo sapien
ttggtttatcgtgaaaccagccaaa

SEQ ID NO: 147541 - DNA, 25 bp, Homo sapien
tctttggtttatcgtgaaaccagcc

SEQ ID NO: 147542 - DNA, 25 bp, Homo sapien
ttctttggtttatcgtgaaaccagc

SEQ ID NO: 147543 - DNA, 25 bp, Homo sapien
ctttggtttatcgtgaaaccagcca

SEQ ID NO: 147544 - DNA, 25 bp, Homo sapien
tccaaactcatggtggtgaccgcca

SEQ ID NO: 147545 - DNA, 25 bp, Homo sapien
ccaaactcatggtggtgaccgccag

SEQ ID NO: 147546 - DNA, 25 bp, Homo sapien
attgggaacaaataacatgatctac

SEQ ID NO: 147547 - DNA, 25 bp, Homo sapien
ttattgggaacaaataacatgatct

SEQ ID NO: 147548 - DNA, 25 bp, Homo sapien
tattgggaacaaataacatgatcta

SEQ ID NO: 147549 - DNA, 25 bp, Homo sapien
gcctgctccttgacaatctgagctt

SEQ ID NO: 147550 - DNA, 25 bp, Homo sapien
tgacaatctgagcttctccattaca

SEQ ID NO: 147551 - DNA, 25 bp, Homo sapien
tccatccttactgtggccagcctgc

SEQ ID NO: 147552 - DNA, 25 bp, Homo sapien
ttctccattacatctgtgataatga

SEQ ID NO: 147553 - DNA, 25 bp, Homo sapien
catagagtcacaaagacatgtctgg

SEQ ID NO: 147554 - DNA, 25 bp, Homo sapien
agctaggctgccctgatgcatccca

SEQ ID NO: 147555 - DNA, 25 bp, Homo sapien
tatgagtctacgtccaagctaggct

SEQ ID NO: 147556 - DNA, 25 bp, Homo sapien
cggagtgtgtgcttggagttctctc

SEQ ID NO: 147557 - DNA, 25 bp, Homo sapien
acacattctggacccgactgccagc

SEQ ID NO: 147558 - DNA, 25 bp, Homo sapien
agagatgtcgataacacacattctg

SEQ ID NO: 147559 - DNA, 25 bp, Homo sapien
gcttgagaagagatgtcgataacac

SEQ ID NO: 147560 - DNA, 25 bp, Homo sapien
attagaacactaatgagagccacag

SEQ ID NO: 147561 - DNA, 25 bp, Homo sapien
ctttctgcagcagccccgtctccct

SEQ ID NO: 147562 - DNA, 25 bp, Homo sapien
ttatatctctctttctgcagcagcc

SEQ ID NO: 147563 - DNA, 25 bp, Homo sapien
ttctgcagcagccccgtctcccttt

SEQ ID NO: 147564 - DNA, 25 bp, Homo sapien
tgcagcagccccgtctccctttgac

SEQ ID NO: 147565 - DNA, 25 bp, Homo sapien
gtgccgataggcctgttttccatca

SEQ ID NO: 147566 - DNA, 25 bp, Homo sapien
tgggctcgcagatctagggctgact

SEQ ID NO: 147567 - DNA, 25 bp, Homo sapien
tctgggcacctgcaaggtgttcagt

SEQ ID NO: 147568 - DNA, 25 bp, Homo sapien
tttccatcaccttgggctcgcagat

SEQ ID NO: 147569 - DNA, 25 bp, Homo sapien
gctgtcctagaccattggcttgcgg

SEQ ID NO: 147570 - DNA, 25 bp, Homo sapien
tagaccattggcttgcggactccat

SEQ ID NO: 147571 - DNA, 25 bp, Homo sapien
tcttttggaagctgtcctagaccat

SEQ ID NO: 147572 - DNA, 25 bp, Homo sapien
tggaagatgcaatagcaaaataatc

SEQ ID NO: 147573 - DNA, 25 bp, Homo sapien
tctctttcatgtgatctttcacttc

SEQ ID NO: 147574 - DNA, 25 bp, Homo sapien
caattatttctctgtcaggttgaca

SEQ ID NO: 147575 - DNA, 25 bp, Homo sapien
ctgagaaggttttgtctctttcatg

SEQ ID NO: 147576 - DNA, 25 bp, Homo sapien
atcaattatttctctgtcaggttga

SEQ ID NO: 147577 - DNA, 25 bp, Homo sapien
cagttatgcagatggtgagatagag

SEQ ID NO: 147578 - DNA, 25 bp, Homo sapien
ctagtgaatcagcagttatgcagat

SEQ ID NO: 147579 - DNA, 25 bp, Homo sapien
tgttgtcctgatcaacaatcagtgc

SEQ ID NO: 147580 - DNA, 25 bp, Homo sapien
aggatctgaagtctgttgtcctgat

SEQ ID NO: 147581 - DNA, 25 bp, Homo sapien
cctttggtttccagcattgagtcca

SEQ ID NO: 147582 - DNA, 25 bp, Homo sapien
gcctttggtttccagcattgagtcc

SEQ ID NO: 147583 - DNA, 25 bp, Homo sapien
gcaaattatagggaacaaatgtccc

SEQ ID NO: 147584 - DNA, 25 bp, Homo sapien
gaaaagtggcaaattatagggaaca

SEQ ID NO: 147585 - DNA, 25 bp, Homo sapien
ggcattgttcatgtgcattcgttcc

SEQ ID NO: 147586 - DNA, 25 bp, Homo sapien
ttggcattgttcatgtgcattcgtt

SEQ ID NO: 147587 - DNA, 25 bp, Homo sapien
tggcattgttcatgtgcattcgttc

SEQ ID NO: 147588 - DNA, 25 bp, Homo sapien
gcattgttcatgtgcattcgttccc

SEQ ID NO: 147589 - DNA, 25 bp, Homo sapien
gccttctccaaagagtcgttcgtat

SEQ ID NO: 147590 - DNA, 25 bp, Homo sapien
gtttcagagttctcttattcaacaa

SEQ ID NO: 147591 - DNA, 25 bp, Homo sapien
gagccttctccaaagagtcgttcgt

SEQ ID NO: 147592 - DNA, 25 bp, Homo sapien
gagttctcttattcaacaatgggaa

SEQ ID NO: 147593 - DNA, 25 bp, Homo sapien
gtgcaattctaggacagaagagcat

SEQ ID NO: 147594 - DNA, 25 bp, Homo sapien
agcagcacaaagtgcaattctagga

SEQ ID NO: 147595 - DNA, 25 bp, Homo sapien
ccaggcatgccccaagggaatgaat

SEQ ID NO: 147596 - DNA, 25 bp, Homo sapien
gggaatgaatctaatagaagagaca

SEQ ID NO: 147597 - DNA, 25 bp, Homo sapien
tcaacataagcctaaagggccactt

SEQ ID NO: 147598 - DNA, 25 bp, Homo sapien
ggccactgagtggtgattctgggag

SEQ ID NO: 147599 - DNA, 25 bp, Homo sapien
cactgagtggtgattctgggagtct

SEQ ID NO: 147600 - DNA, 25 bp, Homo sapien
cataagcctaaagggccacttagag

SEQ ID NO: 147601 - DNA, 25 bp, Homo sapien
tgctccacctggcgccttcttccac

SEQ ID NO: 147602 - DNA, 25 bp, Homo sapien
ctccacctggcgccttcttccacca

SEQ ID NO: 147603 - DNA, 25 bp, Homo sapien
ttgctccacctggcgccttcttcca

SEQ ID NO: 147604 - DNA, 25 bp, Homo sapien
cttgctccacctggcgccttcttcc

SEQ ID NO: 147605 - DNA, 25 bp, Homo sapien
ttccatgcagaggacgtctcttctt

SEQ ID NO: 147606 - DNA, 25 bp, Homo sapien
gcagaggacgtctcttcttgtgtct

SEQ ID NO: 147607 - DNA, 25 bp, Homo sapien
tgtcaaaatctgcatcccttccatg

SEQ ID NO: 147608 - DNA, 25 bp, Homo sapien
tccaaagcactttccgtgtcaaaat

SEQ ID NO: 147609 - DNA, 25 bp, Homo sapien
tgctccaagaaaccaagggacactg

SEQ ID NO: 147610 - DNA, 25 bp, Homo sapien
aggtgctccaagaaaccaagggaca

SEQ ID NO: 147611 - DNA, 25 bp, Homo sapien
tcatcctcttctgctaatggtgcca

SEQ ID NO: 147612 - DNA, 25 bp, Homo sapien
tcttctgctaatggtgccaccatgc

SEQ ID NO: 147613 - DNA, 25 bp, Homo sapien
ggagaatgcgggcatcgatcccact

SEQ ID NO: 147614 - DNA, 25 bp, Homo sapien
aagcgagcgctctaccacttgagct

SEQ ID NO: 147615 - DNA, 25 bp, Homo sapien
ctctaccacttgagctaattcccca

SEQ ID NO: 147616 - DNA, 25 bp, Homo sapien
aatgcgggcatcgatcccactacct

SEQ ID NO: 147617 - DNA, 25 bp, Homo sapien
tagtgtcaaaaagctcttcagtttc

SEQ ID NO: 147618 - DNA, 25 bp, Homo sapien
tgtcaaaaagctcttcagtttcttt

SEQ ID NO: 147619 - DNA, 25 bp, Homo sapien
ctagtgtcaaaaagctcttcagttt

SEQ ID NO: 147620 - DNA, 25 bp, Homo sapien
agtgtcaaaaagctcttcagtttct

SEQ ID NO: 147621 - DNA, 25 bp, Homo sapien
ggaagctggctctcacacacaattt

SEQ ID NO: 147622 - DNA, 25 bp, Homo sapien
tggaagctggctctcacacacaatt

SEQ ID NO: 147623 - DNA, 25 bp, Homo sapien
agctggctctcacacacaatttgcc

SEQ ID NO: 147624 - DNA, 25 bp, Homo sapien
gaagctggctctcacacacaatttg

SEQ ID NO: 147625 - DNA, 25 bp, Homo sapien
tgagcggtggttagtggagcctgga

SEQ ID NO: 147626 - DNA, 25 bp, Homo sapien
gagcggtggttagtggagcctggaa

SEQ ID NO: 147627 - DNA, 25 bp, Homo sapien
catgagcggtggttagtggagcctg

SEQ ID NO: 147628 - DNA, 25 bp, Homo sapien
agcggtggttagtggagcctggaat

SEQ ID NO: 147629 - DNA, 25 bp, Homo sapien
tttagaatcacacgcctcttgaagg

SEQ ID NO: 147630 - DNA, 25 bp, Homo sapien
catttggaccttcaagtgggttcga

SEQ ID NO: 147631 - DNA, 25 bp, Homo sapien
gtgcaaatctcttactctctcgggt

SEQ ID NO: 147632 - DNA, 25 bp, Homo sapien
tcctggacaaaacctgtgagaaggc

SEQ ID NO: 147633 - DNA, 25 bp, Homo sapien
tccttatccactctttgctgtagtt

SEQ ID NO: 147634 - DNA, 25 bp, Homo sapien
tctttgctgtagtttggacttttct

SEQ ID NO: 147635 - DNA, 25 bp, Homo sapien
tccactctttgctgtagtttggact

SEQ ID NO: 147636 - DNA, 25 bp, Homo sapien
ttatccactctttgctgtagtttgg

SEQ ID NO: 147637 - DNA, 25 bp, Homo sapien
gggggaagcagggcaccgctggctt

SEQ ID NO: 147638 - DNA, 25 bp, Homo sapien
ggggaagcagggcaccgctggcttc

SEQ ID NO: 147639 - DNA, 25 bp, Homo sapien
ccagatggatactctgagtgctcca

SEQ ID NO: 147640 - DNA, 25 bp, Homo sapien
gcactgtccagctggagaacttaga

SEQ ID NO: 147641 - DNA, 25 bp, Homo sapien
ggagaacttagattcccagatggat

SEQ ID NO: 147642 - DNA, 25 bp, Homo sapien
tgaagaaacccagcccaaagcactg

SEQ ID NO: 147643 - DNA, 25 bp, Homo sapien
gtagaactaggagattttcttcata

SEQ ID NO: 147644 - DNA, 25 bp, Homo sapien
accatttttgcaaccgttgtatcat

SEQ ID NO: 147645 - DNA, 25 bp, Homo sapien
ttgtagaactaggagattttcttca

SEQ ID NO: 147646 - DNA, 25 bp, Homo sapien
gcaaccgttgtatcatagtcctcaa

SEQ ID NO: 147647 - DNA, 25 bp, Homo sapien
tggccgccacgcccaggcaggagct

SEQ ID NO: 147648 - DNA, 25 bp, Homo sapien
ccctgtggccgccacgcccaggcag

SEQ ID NO: 147649 - DNA, 25 bp, Homo sapien
tgggacttcccactgcgccctgtgg

SEQ ID NO: 147650 - DNA, 25 bp, Homo sapien
atctaaccagagcatgggacttccc

SEQ ID NO: 147651 - DNA, 25 bp, Homo sapien
tccctgttacctcgaggacgcgcct

SEQ ID NO: 147652 - DNA, 25 bp, Homo sapien
ggacgcgcctctccgccaaccccat

SEQ ID NO: 147653 - DNA, 25 bp, Homo sapien
cagcatccctgttacctcgaggacg

SEQ ID NO: 147654 - DNA, 25 bp, Homo sapien
tctcagcatccctgttacctcgagg

SEQ ID NO: 147655 - DNA, 25 bp, Homo sapien
tttgggcaacaactgcctcgcaggt

SEQ ID NO: 147656 - DNA, 25 bp, Homo sapien
cccgggtcgcgattccagaaatcat

SEQ ID NO: 147657 - DNA, 25 bp, Homo sapien
cagacgaacgtggataacggagacg

SEQ ID NO: 147658 - DNA, 25 bp, Homo sapien
cggacacgctccagacccgtgagtt

SEQ ID NO: 147659 - DNA, 25 bp, Homo sapien
gcggagccggagagcgacttccccg

SEQ ID NO: 147660 - DNA, 25 bp, Homo sapien
cgcggagccggagagcgacttcccc

SEQ ID NO: 147661 - DNA, 25 bp, Homo sapien
gagccggagagcgacttccccggag

SEQ ID NO: 147662 - DNA, 25 bp, Homo sapien
cggagccggagagcgacttccccgg

SEQ ID NO: 147663 - DNA, 25 bp, Homo sapien
cgtgtggccgcgcgacatcaaagcg

SEQ ID NO: 147664 - DNA, 25 bp, Homo sapien
gccgcgcgacatcaaagcgccgcgc

SEQ ID NO: 147665 - DNA, 25 bp, Homo sapien
cgcgacatcaaagcgccgcgcctct

SEQ ID NO: 147666 - DNA, 25 bp, Homo sapien
cgcgcgacatcaaagcgccgcgcct

SEQ ID NO: 147667 - DNA, 25 bp, Homo sapien
ctggcccccagtctccgccagcggg

SEQ ID NO: 147668 - DNA, 25 bp, Homo sapien
cagtctccgccagcgggcggtgcgg

SEQ ID NO: 147669 - DNA, 25 bp, Homo sapien
ggcccccagtctccgccagcgggcg

SEQ ID NO: 147670 - DNA, 25 bp, Homo sapien
ccccagtctccgccagcgggcggtg

SEQ ID NO: 147671 - DNA, 25 bp, Homo sapien
tttccctaaggatctcatgtgagcg

SEQ ID NO: 147672 - DNA, 25 bp, Homo sapien
gcgatgcgtccaccaggcacgggtc

SEQ ID NO: 147673 - DNA, 25 bp, Homo sapien
tgcagattcccaattcttcggcctc

SEQ ID NO: 147674 - DNA, 25 bp, Homo sapien
catgtgagcgttcagggtccgcgtc

SEQ ID NO: 147675 - DNA, 25 bp, Homo sapien
agcagcaggccggcacctttacgca

SEQ ID NO: 147676 - DNA, 25 bp, Homo sapien
gcggctgaaaggctgccagccccgg

SEQ ID NO: 147677 - DNA, 25 bp, Homo sapien
ccgcggcggctgaaaggctgccagc

SEQ ID NO: 147678 - DNA, 25 bp, Homo sapien
acctttacgcaacctctcctcatcc

SEQ ID NO: 147679 - DNA, 25 bp, Homo sapien
tccgagtgactctcttggctgccaa

SEQ ID NO: 147680 - DNA, 25 bp, Homo sapien
ctccacctccagtggtaacagacag

SEQ ID NO: 147681 - DNA, 25 bp, Homo sapien
ccggctgatagggatcactgtctaa

SEQ ID NO: 147682 - DNA, 25 bp, Homo sapien
gctaagcaacggcaaaaacagcgcc

SEQ ID NO: 147683 - DNA, 25 bp, Homo sapien
tgcatttctcccggaggtgccacag

SEQ ID NO: 147684 - DNA, 25 bp, Homo sapien
taaagtcaaggtataggcagtactg

SEQ ID NO: 147685 - DNA, 25 bp, Homo sapien
cttaacataatgcctggtctattag

SEQ ID NO: 147686 - DNA, 25 bp, Homo sapien
ggtgccacaggagaatatgcttctt

SEQ ID NO: 147687 - DNA, 25 bp, Homo sapien
cagagactgacctgctggactactt

SEQ ID NO: 147688 - DNA, 25 bp, Homo sapien
ccagagactgacctgctggactact

SEQ ID NO: 147689 - DNA, 25 bp, Homo sapien
agagactgacctgctggactacttt

SEQ ID NO: 147690 - DNA, 25 bp, Homo sapien
ttcctggaccctgaacttctttgct

SEQ ID NO: 147691 - DNA, 25 bp, Homo sapien
tgtctttcctggaccctgaacttct

SEQ ID NO: 147692 - DNA, 25 bp, Homo sapien
ttctccctcgctgtccccgtgtgtg

SEQ ID NO: 147693 - DNA, 25 bp, Homo sapien
tcgctgtccccgtgtgtgtctttcc

SEQ ID NO: 147694 - DNA, 25 bp, Homo sapien
gacagctttcggtgctaatgggagc

SEQ ID NO: 147695 - DNA, 25 bp, Homo sapien
gacctggaggaacatgtgagtgcct

SEQ ID NO: 147696 - DNA, 25 bp, Homo sapien
ccaaccgagtgggtagacagctttc

SEQ ID NO: 147697 - DNA, 25 bp, Homo sapien
cctggagccacgtggataaactggg

SEQ ID NO: 147698 - DNA, 25 bp, Homo sapien
gtagcggtggtgctctaggagggga

SEQ ID NO: 147699 - DNA, 25 bp, Homo sapien
ggtagcggtggtgctctaggagggg

SEQ ID NO: 147700 - DNA, 25 bp, Homo sapien
gtggtagcggtggtgctctaggagg

SEQ ID NO: 147701 - DNA, 25 bp, Homo sapien
tggtagcggtggtgctctaggaggg

SEQ ID NO: 147702 - DNA, 25 bp, Homo sapien
tctgaggtctttggccgtgtctttg

SEQ ID NO: 147703 - DNA, 25 bp, Homo sapien
taagcagagcaaatccatccatagc

SEQ ID NO: 147704 - DNA, 25 bp, Homo sapien
gaagactcgatcttgcctcacaggg

SEQ ID NO: 147705 - DNA, 25 bp, Homo sapien
taacttgttgatgtgtaaaccagga

SEQ ID NO: 147706 - DNA, 25 bp, Homo sapien
gagtgcgatacacgtatgaaaatgc

SEQ ID NO: 147707 - DNA, 25 bp, Homo sapien
tgaacgaacagcttgttcattctct

SEQ ID NO: 147708 - DNA, 25 bp, Homo sapien
ggcttgctgtaagaactgagtgcga

SEQ ID NO: 147709 - DNA, 25 bp, Homo sapien
gtgaggctggctgaacgaacagctt

SEQ ID NO: 147710 - DNA, 25 bp, Homo sapien
tcacaaacgtgtcatggttttggga

SEQ ID NO: 147711 - DNA, 25 bp, Homo sapien
gggagtataaaaatgatgcccccaa

SEQ ID NO: 147712 - DNA, 25 bp, Homo sapien
tataaaaatgatgcccccaaacaga

SEQ ID NO: 147713 - DNA, 25 bp, Homo sapien
ctttgcaggtcacaaacgtgtcatg

SEQ ID NO: 147714 - DNA, 25 bp, Homo sapien
gtgccgatggtcctgagcagtgctt

SEQ ID NO: 147715 - DNA, 25 bp, Homo sapien
tcacattctttatcttcatggcggg

SEQ ID NO: 147716 - DNA, 25 bp, Homo sapien
gcagtgcttgaaaagcggtcaccct

SEQ ID NO: 147717 - DNA, 25 bp, Homo sapien
aaagcggtcaccctcggtgcagctg

SEQ ID NO: 147718 - DNA, 25 bp, Homo sapien
gctttgcactttggtccttcccttg

SEQ ID NO: 147719 - DNA, 25 bp, Homo sapien
cttgttccagccacaccaatctctg

SEQ ID NO: 147720 - DNA, 25 bp, Homo sapien
cactttggtccttcccttgttccag

SEQ ID NO: 147721 - DNA, 25 bp, Homo sapien
tttggtccttcccttgttccagcca

SEQ ID NO: 147722 - DNA, 25 bp, Homo sapien
tggaagctcattagcatgtctgctc

SEQ ID NO: 147723 - DNA, 25 bp, Homo sapien
ctggaagctcattagcatgtctgct

SEQ ID NO: 147724 - DNA, 25 bp, Homo sapien
ctcattagcatgtctgctcatcagg

SEQ ID NO: 147725 - DNA, 25 bp, Homo sapien
tcccccagatctttggatcctgttg

SEQ ID NO: 147726 - DNA, 25 bp, Homo sapien
ctcccccagatctttggatcctgtt

SEQ ID NO: 147727 - DNA, 25 bp, Homo sapien
cccccagatctttggatcctgttgg

SEQ ID NO: 147728 - DNA, 25 bp, Homo sapien
gcaggataggactcaaaaattgtag

SEQ ID NO: 147729 - DNA, 25 bp, Homo sapien
aaaaattgtagagcgcaagtgcccc

SEQ ID NO: 147730 - DNA, 25 bp, Homo sapien
tgtagagcgcaagtgccccattgca

SEQ ID NO: 147731 - DNA, 25 bp, Homo sapien
gccccattgcaccaaggcccagtgg

SEQ ID NO: 147732 - DNA, 25 bp, Homo sapien
ggaacacagggaacatgttggcggg

SEQ ID NO: 147733 - DNA, 25 bp, Homo sapien
ccactgccatggcaaacttgtggag

SEQ ID NO: 147734 - DNA, 25 bp, Homo sapien
ccatggcaaacttgtggagaggaac

SEQ ID NO: 147735 - DNA, 25 bp, Homo sapien
agaggaacacagggaacatgttggc

SEQ ID NO: 147736 - DNA, 25 bp, Homo sapien
tcatccaagctggctctcctcagct

SEQ ID NO: 147737 - DNA, 25 bp, Homo sapien
atccaagctggctctcctcagctga

SEQ ID NO: 147738 - DNA, 25 bp, Homo sapien
catccaagctggctctcctcagctg

SEQ ID NO: 147739 - DNA, 25 bp, Homo sapien
tccaagctggctctcctcagctgac

SEQ ID NO: 147740 - DNA, 25 bp, Homo sapien
ctacgtcactttgctcatggaggct

SEQ ID NO: 147741 - DNA, 25 bp, Homo sapien
tacgtcactttgctcatggaggctt

SEQ ID NO: 147742 - DNA, 25 bp, Homo sapien
tgctacgtcactttgctcatggagg

SEQ ID NO: 147743 - DNA, 25 bp, Homo sapien
ggctgctacgtcactttgctcatgg

SEQ ID NO: 147744 - DNA, 25 bp, Homo sapien
tctgcagagaagacctcgtcatgtg

SEQ ID NO: 147745 - DNA, 25 bp, Homo sapien
ggcccatctgtctgtgttgcacgga

SEQ ID NO: 147746 - DNA, 25 bp, Homo sapien
tcatgtgaccgagatcagttgggca

SEQ ID NO: 147747 - DNA, 25 bp, Homo sapien
ttgaaagcggtctgtgtggcccatc

SEQ ID NO: 147748 - DNA, 25 bp, Homo sapien
ggtgctaaagtagggaatccagaac

SEQ ID NO: 147749 - DNA, 25 bp, Homo sapien
gctcatccgaaggaaaaggacaagg

SEQ ID NO: 147750 - DNA, 25 bp, Homo sapien
tttcttggattgtaaaggatgctca

SEQ ID NO: 147751 - DNA, 25 bp, Homo sapien
tgctcagcctagtgatggctaaggg

SEQ ID NO: 147752 - DNA, 25 bp, Homo sapien
aagcctgttacattttctcttgatc

SEQ ID NO: 147753 - DNA, 25 bp, Homo sapien
tttaagcctgttacattttctcttg

SEQ ID NO: 147754 - DNA, 25 bp, Homo sapien
tgagctttagcactttttgtcgttt

SEQ ID NO: 147755 - DNA, 25 bp, Homo sapien
atgaagttgagctttagcacttttt

SEQ ID NO: 147756 - DNA, 25 bp, Homo sapien
taccatgtccattcaggcactcagg

SEQ ID NO: 147757 - DNA, 25 bp, Homo sapien
tcagggtttagttcgacacctctac

SEQ ID NO: 147758 - DNA, 25 bp, Homo sapien
tgtccattcaggcactcagggttta

SEQ ID NO: 147759 - DNA, 25 bp, Homo sapien
caggcactcagggtttagttcgaca

SEQ ID NO: 147760 - DNA, 25 bp, Homo sapien
ggaagcactggggaatgcttgacca

SEQ ID NO: 147761 - DNA, 25 bp, Homo sapien
tctgggaagcactggggaatgcttg

SEQ ID NO: 147762 - DNA, 25 bp, Homo sapien
tgggaagcactggggaatgcttgac

SEQ ID NO: 147763 - DNA, 25 bp, Homo sapien
gaagcactggggaatgcttgaccat

SEQ ID NO: 147764 - DNA, 25 bp, Homo sapien
ttcttccagtttccacccaaggtca

SEQ ID NO: 147765 - DNA, 25 bp, Homo sapien
aaagatgacagaaaatccattcttc

SEQ ID NO: 147766 - DNA, 25 bp, Homo sapien
tcttccagtttccacccaaggtcat

SEQ ID NO: 147767 - DNA, 25 bp, Homo sapien
ctcaaagatgacagaaaatccattc

SEQ ID NO: 147768 - DNA, 25 bp, Homo sapien
ctgtcggcaatgatggagaatctga

SEQ ID NO: 147769 - DNA, 25 bp, Homo sapien
tggagccatcgtgctgagcagcagc

SEQ ID NO: 147770 - DNA, 25 bp, Homo sapien
gctctttgctgaccgttagggtgga

SEQ ID NO: 147771 - DNA, 25 bp, Homo sapien
gcagctctttgctgaccgttagggt

SEQ ID NO: 147772 - DNA, 25 bp, Homo sapien
tctgagttcatcgttgtcttggtgc

SEQ ID NO: 147773 - DNA, 25 bp, Homo sapien
ggcagttctgggacgcaaacttttc

SEQ ID NO: 147774 - DNA, 25 bp, Homo sapien
agattcagcataaaactcagcccca

SEQ ID NO: 147775 - DNA, 25 bp, Homo sapien
cccagtattcggcacagattcagca

SEQ ID NO: 147776 - DNA, 25 bp, Homo sapien
tcctttgcaggagcaaattcaccca

SEQ ID NO: 147777 - DNA, 25 bp, Homo sapien
accgggcttagagccaggcccatat

SEQ ID NO: 147778 - DNA, 25 bp, Homo sapien
agataccagaggaacaccgggctta

SEQ ID NO: 147779 - DNA, 25 bp, Homo sapien
gacattccagaaatcagcaccccag

SEQ ID NO: 147780 - DNA, 25 bp, Homo sapien
ctgaaccatgctatgaacttcattg

SEQ ID NO: 147781 - DNA, 25 bp, Homo sapien
tgaaccatgctatgaacttcattga

SEQ ID NO: 147782 - DNA, 25 bp, Homo sapien
ttcattgagaaaggatcctgaaatc

SEQ ID NO: 147783 - DNA, 25 bp, Homo sapien
gaatttccacatcctactctggctt

SEQ ID NO: 147784 - DNA, 25 bp, Homo sapien
tcccggcttcttcccggtagcgcat

SEQ ID NO: 147785 - DNA, 25 bp, Homo sapien
aggctccattccagaatttccacat

SEQ ID NO: 147786 - DNA, 25 bp, Homo sapien
ctctggctttcttaggtgtcccggc

SEQ ID NO: 147787 - DNA, 25 bp, Homo sapien
gagccaacaatcagtttgggttttg

SEQ ID NO: 147788 - DNA, 25 bp, Homo sapien
agccaacaatcagtttgggttttgg

SEQ ID NO: 147789 - DNA, 25 bp, Homo sapien
agagccaacaatcagtttgggtttt

SEQ ID NO: 147790 - DNA, 25 bp, Homo sapien
ttttgtgctgactcgccatgctgga

SEQ ID NO: 147791 - DNA, 25 bp, Homo sapien
gaaatcacatcaaaacgtctctgca

SEQ ID NO: 147792 - DNA, 25 bp, Homo sapien
gagacgatcgatgttcttggccagc

SEQ ID NO: 147793 - DNA, 25 bp, Homo sapien
ttggcctggctaagtcaaaattctg

SEQ ID NO: 147794 - DNA, 25 bp, Homo sapien
aggacccacaggatctactatctcc

SEQ ID NO: 147795 - DNA, 25 bp, Homo sapien
acaggatctactatctcccagtcca

SEQ ID NO: 147796 - DNA, 25 bp, Homo sapien
cacaggatctactatctcccagtcc

SEQ ID NO: 147797 - DNA, 25 bp, Homo sapien
gacaggacccacaggatctactatc

SEQ ID NO: 147798 - DNA, 25 bp, Homo sapien
cagcaggctgaaggaatcatcctcc

SEQ ID NO: 147799 - DNA, 25 bp, Homo sapien
cttcccctgaatgtgaggcccagaa

SEQ ID NO: 147800 - DNA, 25 bp, Homo sapien
gctgaaggaatcatcctccttcccc

SEQ ID NO: 147801 - DNA, 25 bp, Homo sapien
acagttccaaaggcttctaaagtat

SEQ ID NO: 147802 - DNA, 25 bp, Homo sapien
taggccatatccatggccaggttct

SEQ ID NO: 147803 - DNA, 25 bp, Homo sapien
ctaggccatatccatggccaggttc

SEQ ID NO: 147804 - DNA, 25 bp, Homo sapien
tcctcttgcccagatgatgaccaca

SEQ ID NO: 147805 - DNA, 25 bp, Homo sapien
gaccacaggtgctggtctccactga

SEQ ID NO: 147806 - DNA, 25 bp, Homo sapien
accacaggtgctggtctccactgac

SEQ ID NO: 147807 - DNA, 25 bp, Homo sapien
tcactgaacatgctgcatagacctg

SEQ ID NO: 147808 - DNA, 25 bp, Homo sapien
tatcaggctagacttccctgcaaaa

SEQ ID NO: 147809 - DNA, 25 bp, Homo sapien
tcatggccaaacaagggtgtgcaga

SEQ ID NO: 147810 - DNA, 25 bp, Homo sapien
gcctgaatgtggaccatggcagcaa

SEQ ID NO: 147811 - DNA, 25 bp, Homo sapien
tgtctgcaggtcttgccaccaacag

SEQ ID NO: 147812 - DNA, 25 bp, Homo sapien
gttggccttggacactacccttctg

SEQ ID NO: 147813 - DNA, 25 bp, Homo sapien
cagtaaccgtagtgtagagttggcc

SEQ ID NO: 147814 - DNA, 25 bp, Homo sapien
tagaaagaggatgttctcgtgcatc

SEQ ID NO: 147815 - DNA, 25 bp, Homo sapien
cccagaccctcgcacacacatcccc

SEQ ID NO: 147816 - DNA, 25 bp, Homo sapien
acatcccccaggagccaacaaggag

SEQ ID NO: 147817 - DNA, 25 bp, Homo sapien
gattacttgctattggccctcggat

SEQ ID NO: 147818 - DNA, 25 bp, Homo sapien
ccaagggctactgacgcaagttcca

SEQ ID NO: 147819 - DNA, 25 bp, Homo sapien
gatcagccgaactctagggacttgg

SEQ ID NO: 147820 - DNA, 25 bp, Homo sapien
tttaagaaggaatgtgccagaggcc

SEQ ID NO: 147821 - DNA, 25 bp, Homo sapien
tgggaataaagtatcttcgcagtgc

SEQ ID NO: 147822 - DNA, 25 bp, Homo sapien
aagtatcttcgcagtgctctgttcc

SEQ ID NO: 147823 - DNA, 25 bp, Homo sapien
tgtaggtgggaataaagtatcttcg

SEQ ID NO: 147824 - DNA, 25 bp, Homo sapien
aataaagtatcttcgcagtgctctg

SEQ ID NO: 147825 - DNA, 25 bp, Homo sapien
ggccatcgctaccttcagcacactg

SEQ ID NO: 147826 - DNA, 25 bp, Homo sapien
acatcctatcgccacaatgccatgt

SEQ ID NO: 147827 - DNA, 25 bp, Homo sapien
tgtgaaggaggaagcgatgccgagg

SEQ ID NO: 147828 - DNA, 25 bp, Homo sapien
tgccatgtcgcaataggaagcaggg

SEQ ID NO: 147829 - DNA, 25 bp, Homo sapien
tagggcttggatggttgaactctgt

SEQ ID NO: 147830 - DNA, 25 bp, Homo sapien
gacaaattctgactgttggggaact

SEQ ID NO: 147831 - DNA, 25 bp, Homo sapien
ggggaacttactctgcaatataaaa

SEQ ID NO: 147832 - DNA, 25 bp, Homo sapien
gccttgtgtgcacttcagccccgac

SEQ ID NO: 147833 - DNA, 25 bp, Homo sapien
cactggaattgtcacacggcgagca

SEQ ID NO: 147834 - DNA, 25 bp, Homo sapien
taggagcagacccaagcttgtggca

SEQ ID NO: 147835 - DNA, 25 bp, Homo sapien
caaagtaatcatcgttcaggcccaa

SEQ ID NO: 147836 - DNA, 25 bp, Homo sapien
catgcgcatcgggtgtcagtgactc

SEQ ID NO: 147837 - DNA, 25 bp, Homo sapien
gaatccgcagggatgtcaacgtcaa

SEQ ID NO: 147838 - DNA, 25 bp, Homo sapien
gcagggatgtcaacgtcaatatcac

SEQ ID NO: 147839 - DNA, 25 bp, Homo sapien
tggctgaatccgcagggatgtcaac

SEQ ID NO: 147840 - DNA, 25 bp, Homo sapien
tcaacgtcaatatcacaggaacaca

SEQ ID NO: 147841 - DNA, 25 bp, Homo sapien
gaagccatagaactcatattgacac

SEQ ID NO: 147842 - DNA, 25 bp, Homo sapien
tttttaaaggagattgaagccatag

SEQ ID NO: 147843 - DNA, 25 bp, Homo sapien
ggagattgaagccatagaactcata

SEQ ID NO: 147844 - DNA, 25 bp, Homo sapien
tagaactcatattgacactcagctg

SEQ ID NO: 147845 - DNA, 25 bp, Homo sapien
gacgaccactatgagtttgccacca

SEQ ID NO: 147846 - DNA, 25 bp, Homo sapien
tgaataacatcaccaatcggacggc

SEQ ID NO: 147847 - DNA, 25 bp, Homo sapien
ctgcacttagcagggatccggtcct

SEQ ID NO: 147848 - DNA, 25 bp, Homo sapien
caaggaggatcacaactacagcagt

SEQ ID NO: 147849 - DNA, 25 bp, Homo sapien
gccagctgcttctacacccactcct

SEQ ID NO: 147850 - DNA, 25 bp, Homo sapien
agctgcttctacacccactcctgcc

SEQ ID NO: 147851 - DNA, 25 bp, Homo sapien
ccgccagctgcttctacacccactc

SEQ ID NO: 147852 - DNA, 25 bp, Homo sapien
cagctgcttctacacccactcctgc

SEQ ID NO: 147853 - DNA, 25 bp, Homo sapien
tcataggcaccattggcggagcctc

SEQ ID NO: 147854 - DNA, 25 bp, Homo sapien
gaggccagctgccaaaccgcatgaa

SEQ ID NO: 147855 - DNA, 25 bp, Homo sapien
caaaccgcatgaacccttccttggg

SEQ ID NO: 147856 - DNA, 25 bp, Homo sapien
caaatgcaaaatcagatgtgaggcg

SEQ ID NO: 147857 - DNA, 25 bp, Homo sapien
tattaattggattctaggctaacgg

SEQ ID NO: 147858 - DNA, 25 bp, Homo sapien
aaacagaaggcaggatattaattgg

SEQ ID NO: 147859 - DNA, 25 bp, Homo sapien
ggcctagcgcaagacccagtcctgt

SEQ ID NO: 147860 - DNA, 25 bp, Homo sapien
gattctaggctaacgggcctagcgc

SEQ ID NO: 147861 - DNA, 25 bp, Homo sapien
gagacagagaggagctgcttcgaac

SEQ ID NO: 147862 - DNA, 25 bp, Homo sapien
tctttctcgggccaccagatgatcc

SEQ ID NO: 147863 - DNA, 25 bp, Homo sapien
gaggagctgcttcgaactagtgaca

SEQ ID NO: 147864 - DNA, 25 bp, Homo sapien
taaacctggtttgcgtgctcagaaa

SEQ ID NO: 147865 - DNA, 25 bp, Homo sapien
gatccaaaatggagcgcgggtcctg

SEQ ID NO: 147866 - DNA, 25 bp, Homo sapien
cccattggggtgacagcggccatga

SEQ ID NO: 147867 - DNA, 25 bp, Homo sapien
gtcctgagccgagggctgtttcctg

SEQ ID NO: 147868 - DNA, 25 bp, Homo sapien
tgtttcctggcgtgcggccgctgcc

SEQ ID NO: 147869 - DNA, 25 bp, Homo sapien
cggaaatcttcacagttgaattcac

SEQ ID NO: 147870 - DNA, 25 bp, Homo sapien
ggaacggaaatcttcacagttgaat

SEQ ID NO: 147871 - DNA, 25 bp, Homo sapien
aacggaaatcttcacagttgaattc

SEQ ID NO: 147872 - DNA, 25 bp, Homo sapien
ttggaacggaaatcttcacagttga

SEQ ID NO: 147873 - DNA, 25 bp, Homo sapien
agaagaacagtgttcggagagggaa

SEQ ID NO: 147874 - DNA, 25 bp, Homo sapien
aacagtgttcggagagggaaacaga

SEQ ID NO: 147875 - DNA, 25 bp, Homo sapien
agaacagtgttcggagagggaaaca

SEQ ID NO: 147876 - DNA, 25 bp, Homo sapien
cttagaagaacagtgttcggagagg

SEQ ID NO: 147877 - DNA, 25 bp, Homo sapien
cagagctctggggagtcttgaaccc

SEQ ID NO: 147878 - DNA, 25 bp, Homo sapien
tcttgaacccatgatggtagacagg

SEQ ID NO: 147879 - DNA, 25 bp, Homo sapien
ttgaacccatgatggtagacagggt

SEQ ID NO: 147880 - DNA, 25 bp, Homo sapien
gggagtcttgaacccatgatggtag

SEQ ID NO: 147881 - DNA, 25 bp, Homo sapien
tgccactatctgagactgtgccagg

SEQ ID NO: 147882 - DNA, 25 bp, Homo sapien
ccactatctgagactgtgccaggga

SEQ ID NO: 147883 - DNA, 25 bp, Homo sapien
gccactatctgagactgtgccaggg

SEQ ID NO: 147884 - DNA, 25 bp, Homo sapien
cttgccactatctgagactgtgcca

SEQ ID NO: 147885 - DNA, 25 bp, Homo sapien
ccaggaagatggctacattcttcca

SEQ ID NO: 147886 - DNA, 25 bp, Homo sapien
tgggtgtttttgctgcaagggtggc

SEQ ID NO: 147887 - DNA, 25 bp, Homo sapien
gtgttttgggtgtttttgctgcaag

SEQ ID NO: 147888 - DNA, 25 bp, Homo sapien
gcaagggtggctctgatatgacatg

SEQ ID NO: 147889 - DNA, 25 bp, Homo sapien
ctgcaagggtggctctgatatgaca

SEQ ID NO: 147890 - DNA, 25 bp, Homo sapien
tccttgattggcagatggcttgaca

SEQ ID NO: 147891 - DNA, 25 bp, Homo sapien
tgcgctccctaacttggatttgctc

SEQ ID NO: 147892 - DNA, 25 bp, Homo sapien
gacaaccatgctagggttaagaaga

SEQ ID NO: 147893 - DNA, 25 bp, Homo sapien
tatttgggcagaggactctgtcatg

SEQ ID NO: 147894 - DNA, 25 bp, Homo sapien
ttgtctggagagagccacaaatccg

SEQ ID NO: 147895 - DNA, 25 bp, Homo sapien
tacatcaggtgcgtcagattggctg

SEQ ID NO: 147896 - DNA, 25 bp, Homo sapien
ggccagtgcacttcagtacatcagg

SEQ ID NO: 147897 - DNA, 25 bp, Homo sapien
ttgatgtcttacatagctggaggcc

SEQ ID NO: 147898 - DNA, 25 bp, Homo sapien
gaatgattaggcagtcatcccctgc

SEQ ID NO: 147899 - DNA, 25 bp, Homo sapien
ggtcaagggcaagtacagtcaagga

SEQ ID NO: 147900 - DNA, 25 bp, Homo sapien
caaccagaggaatgtatctgcagct

SEQ ID NO: 147901 - DNA, 25 bp, Homo sapien
gcatggagcgtcttctctgtgcact

SEQ ID NO: 147902 - DNA, 25 bp, Homo sapien
tttgcattcaccgtcccatctgacc

SEQ ID NO: 147903 - DNA, 25 bp, Homo sapien
atctgaccgccagccctggttcaat

SEQ ID NO: 147904 - DNA, 25 bp, Homo sapien
attcaccgtcccatctgaccgccag

SEQ ID NO: 147905 - DNA, 25 bp, Homo sapien
accgtcccatctgaccgccagccct

SEQ ID NO: 147906 - DNA, 25 bp, Homo sapien
tgggacctcatcaccaagctgccat

SEQ ID NO: 147907 - DNA, 25 bp, Homo sapien
gccagcttaaacgtaatggaccgga

SEQ ID NO: 147908 - DNA, 25 bp, Homo sapien
cttctgctagaagaggctatatggg

SEQ ID NO: 147909 - DNA, 25 bp, Homo sapien
gaccggagcagtacccatttttaga

SEQ ID NO: 147910 - DNA, 25 bp, Homo sapien
ccagtgccatgatgcttttgaatac

SEQ ID NO: 147911 - DNA, 25 bp, Homo sapien
tgccagtgccatgatgcttttgaat

SEQ ID NO: 147912 - DNA, 25 bp, Homo sapien
gtgccatgatgcttttgaatactcc

SEQ ID NO: 147913 - DNA, 25 bp, Homo sapien
gccatgatgcttttgaatactcccc

SEQ ID NO: 147914 - DNA, 25 bp, Homo sapien
gttcttttcagcctattcagtgacc

SEQ ID NO: 147915 - DNA, 25 bp, Homo sapien
acaggcggcagcttctgtcacgcgg

SEQ ID NO: 147916 - DNA, 25 bp, Homo sapien
gcggcatcaccgcactattagtgaa

SEQ ID NO: 147917 - DNA, 25 bp, Homo sapien
tattagtgaatttcgccccagggca

SEQ ID NO: 147918 - DNA, 25 bp, Homo sapien
tctcaataatggcagagaccttttg

SEQ ID NO: 147919 - DNA, 25 bp, Homo sapien
ctgtagcactttcgttctcaataat

SEQ ID NO: 147920 - DNA, 25 bp, Homo sapien
gcactttcgttctcaataatggcag

SEQ ID NO: 147921 - DNA, 25 bp, Homo sapien
ttcgttctcaataatggcagagacc

SEQ ID NO: 147922 - DNA, 25 bp, Homo sapien
cagggaccatgtagccaggccaacc

SEQ ID NO: 147923 - DNA, 25 bp, Homo sapien
agggaccatgtagccaggccaacca

SEQ ID NO: 147924 - DNA, 25 bp, Homo sapien
gcagggaccatgtagccaggccaac

SEQ ID NO: 147925 - DNA, 25 bp, Homo sapien
ggaccatgtagccaggccaaccatg

SEQ ID NO: 147926 - DNA, 25 bp, Homo sapien
gagaagaggcaatgtgataagacaa

SEQ ID NO: 147927 - DNA, 25 bp, Homo sapien
cagagaagaggcaatgtgataagac

SEQ ID NO: 147928 - DNA, 25 bp, Homo sapien
acagagaagaggcaatgtgataaga

SEQ ID NO: 147929 - DNA, 25 bp, Homo sapien
ctacagagaagaggcaatgtgataa

SEQ ID NO: 147930 - DNA, 25 bp, Homo sapien
aaacatctttaagacgtgtgaccgt

SEQ ID NO: 147931 - DNA, 25 bp, Homo sapien
taagacgtgtgaccgttttccagtc

SEQ ID NO: 147932 - DNA, 25 bp, Homo sapien
cagcataatataactgtgtgtgtac

SEQ ID NO: 147933 - DNA, 25 bp, Homo sapien
gtctccctgcagcataatataactg

SEQ ID NO: 147934 - DNA, 25 bp, Homo sapien
ctagaatccccttcctgattaagtg

SEQ ID NO: 147935 - DNA, 25 bp, Homo sapien
gctgacttggacagatgtattccga

SEQ ID NO: 147936 - DNA, 25 bp, Homo sapien
tttacacgagttagaaagatgcccc

SEQ ID NO: 147937 - DNA, 25 bp, Homo sapien
tgtgatactgttcctcagagcccgt

SEQ ID NO: 147938 - DNA, 25 bp, Homo sapien
tggcttctggccgtggcacatcctt

SEQ ID NO: 147939 - DNA, 25 bp, Homo sapien
tctggccgtggcacatcctttctct

SEQ ID NO: 147940 - DNA, 25 bp, Homo sapien
ccattcctgttcctgccctgtggaa

SEQ ID NO: 147941 - DNA, 25 bp, Homo sapien
gaagccttcttgcacctgaggctgg

SEQ ID NO: 147942 - DNA, 25 bp, Homo sapien
tgggtggatgaggaccgtcagactg

SEQ ID NO: 147943 - DNA, 25 bp, Homo sapien
ctgggtggatgaggaccgtcagact

SEQ ID NO: 147944 - DNA, 25 bp, Homo sapien
gggtggatgaggaccgtcagactgg

SEQ ID NO: 147945 - DNA, 25 bp, Homo sapien
cttcccttctgtggggtgctctggg

SEQ ID NO: 147946 - DNA, 25 bp, Homo sapien
tttcttagcactaaaggcgtgcaga

SEQ ID NO: 147947 - DNA, 25 bp, Homo sapien
agaagtccctgctctgttggctcgt

SEQ ID NO: 147948 - DNA, 25 bp, Homo sapien
agtccctgctctgttggctcgttac

SEQ ID NO: 147949 - DNA, 25 bp, Homo sapien
cactaaaggcgtgcagaagtccctg

SEQ ID NO: 147950 - DNA, 25 bp, Homo sapien
tcctctttgtgcctgaagctcgggt

SEQ ID NO: 147951 - DNA, 25 bp, Homo sapien
tctcagtgtggacagaccgaagcca

SEQ ID NO: 147952 - DNA, 25 bp, Homo sapien
ctggacagagctcggtgcccatgag

SEQ ID NO: 147953 - DNA, 25 bp, Homo sapien
catttcccgtgaagagtgtaccaca

SEQ ID NO: 147954 - DNA, 25 bp, Homo sapien
tgtaaccagcagtgaattgccaagg

SEQ ID NO: 147955 - DNA, 25 bp, Homo sapien
ggcaagtctaggaccagtcaagtct

SEQ ID NO: 147956 - DNA, 25 bp, Homo sapien
ggcattagtattccaagcagctgaa

SEQ ID NO: 147957 - DNA, 25 bp, Homo sapien
tacacagataggtgcaggcatggcg

SEQ ID NO: 147958 - DNA, 25 bp, Homo sapien
ctaggtccagatcagacatctttac

SEQ ID NO: 147959 - DNA, 25 bp, Homo sapien
taggtccagatcagacatctttacc

SEQ ID NO: 147960 - DNA, 25 bp, Homo sapien
gatcagtggtgttgtaccctgtctc

SEQ ID NO: 147961 - DNA, 25 bp, Homo sapien
actgcagagcttcaagggtaagagg

SEQ ID NO: 147962 - DNA, 25 bp, Homo sapien
agagcttcaagggtaagaggccagt

SEQ ID NO: 147963 - DNA, 25 bp, Homo sapien
aagtccattgatcagtggtgttgta

SEQ ID NO: 147964 - DNA, 25 bp, Homo sapien
taggcaggtccgatttggagcacag

SEQ ID NO: 147965 - DNA, 25 bp, Homo sapien
cagcatagaggcaccgcaaggtagg

SEQ ID NO: 147966 - DNA, 25 bp, Homo sapien
cagtattgcatggagcggctgtacc

SEQ ID NO: 147967 - DNA, 25 bp, Homo sapien
gagaccttctgaatagctgctggtg

SEQ ID NO: 147968 - DNA, 25 bp, Homo sapien
attgcttgcacaagtgtcctttgtg

SEQ ID NO: 147969 - DNA, 25 bp, Homo sapien
ggatcattttgctcggcagcacagg

SEQ ID NO: 147970 - DNA, 25 bp, Homo sapien
taagacataaaggacacatggagag

SEQ ID NO: 147971 - DNA, 25 bp, Homo sapien
tgtcggatgccctcgaatgtaattt

SEQ ID NO: 147972 - DNA, 25 bp, Homo sapien
ctaagggttcagaagaaatgtcaca

SEQ ID NO: 147973 - DNA, 25 bp, Homo sapien
agaagaaatgtcacatacaaggtac

SEQ ID NO: 147974 - DNA, 25 bp, Homo sapien
ggttcagaagaaatgtcacatacaa

SEQ ID NO: 147975 - DNA, 25 bp, Homo sapien
tcagaagaaatgtcacatacaaggt

SEQ ID NO: 147976 - DNA, 25 bp, Homo sapien
tgctgggcgttcaggtgtcatcctc

SEQ ID NO: 147977 - DNA, 25 bp, Homo sapien
cctttggagaagacatgcttactgc

SEQ ID NO: 147978 - DNA, 25 bp, Homo sapien
gcttactgccatgattgccaggacc

SEQ ID NO: 147979 - DNA, 25 bp, Homo sapien
ccacagcgggtcaggttcttctcac

SEQ ID NO: 147980 - DNA, 25 bp, Homo sapien
taagacatctctgccatcgtacagc

SEQ ID NO: 147981 - DNA, 25 bp, Homo sapien
gacatctctgccatcgtacagcaca

SEQ ID NO: 147982 - DNA, 25 bp, Homo sapien
ttggtgcccataatgtgctagagtg

SEQ ID NO: 147983 - DNA, 25 bp, Homo sapien
tgctagagtgtgaactaagacatct

SEQ ID NO: 147984 - DNA, 25 bp, Homo sapien
tcccagtgttgggcttcgttctggt

SEQ ID NO: 147985 - DNA, 25 bp, Homo sapien
cccagtgttgggcttcgttctggtg

SEQ ID NO: 147986 - DNA, 25 bp, Homo sapien
taccaattcagctcttgtggttccg

SEQ ID NO: 147987 - DNA, 25 bp, Homo sapien
cctgcttggagataccaattcagct

SEQ ID NO: 147988 - DNA, 25 bp, Homo sapien
ttgtggttccgctggcttgacagga

SEQ ID NO: 147989 - DNA, 25 bp, Homo sapien
ggcttgacaggaaacactctctgct

SEQ ID NO: 147990 - DNA, 25 bp, Homo sapien
tcctgacgccttgtccgggggagca

SEQ ID NO: 147991 - DNA, 25 bp, Homo sapien
ctggtcctgacgccttgtccggggg

SEQ ID NO: 147992 - DNA, 25 bp, Homo sapien
tggtcctgacgccttgtccggggga

SEQ ID NO: 147993 - DNA, 25 bp, Homo sapien
tgacgccttgtccgggggagcagca

SEQ ID NO: 147994 - DNA, 25 bp, Homo sapien
atgccatgtgcaggatgatcagtgg

SEQ ID NO: 147995 - DNA, 25 bp, Homo sapien
aatgccatgtgcaggatgatcagtg

SEQ ID NO: 147996 - DNA, 25 bp, Homo sapien
ctaatgccatgtgcaggatgatcag

SEQ ID NO: 147997 - DNA, 25 bp, Homo sapien
taatgccatgtgcaggatgatcagt

SEQ ID NO: 147998 - DNA, 25 bp, Homo sapien
gggcaccactcgtaccttctctctg

SEQ ID NO: 147999 - DNA, 25 bp, Homo sapien
ctggcggtcatcaagactggaacct

SEQ ID NO: 148000 - DNA, 25 bp, Homo sapien
aagcatgtataatagctggcggtca

SEQ ID NO: 148001 - DNA, 25 bp, Homo sapien
aaggctgccaggaacgcgggcacca

SEQ ID NO: 148002 - DNA, 25 bp, Homo sapien
ttaagtgctgcatatcccgtgatga

SEQ ID NO: 148003 - DNA, 25 bp, Homo sapien
cccgtgatgattatgagaagattac

SEQ ID NO: 148004 - DNA, 25 bp, Homo sapien
tacttaagcattaagtcgcgggcat

SEQ ID NO: 148005 - DNA, 25 bp, Homo sapien
gcattttcccagtgtaattgttgat

SEQ ID NO: 148006 - DNA, 25 bp, Homo sapien
gattggatacacttcttgctcccct

SEQ ID NO: 148007 - DNA, 25 bp, Homo sapien
tgctccccttgcattgatttcctac

SEQ ID NO: 148008 - DNA, 25 bp, Homo sapien
ttagattggatacacttcttgctcc

SEQ ID NO: 148009 - DNA, 25 bp, Homo sapien
ggatacacttcttgctccccttgca

SEQ ID NO: 148010 - DNA, 25 bp, Homo sapien
cagaggctcttttccgcgatgccgg

SEQ ID NO: 148011 - DNA, 25 bp, Homo sapien
atgcaaagacgtgctggccctgggc

SEQ ID NO: 148012 - DNA, 25 bp, Homo sapien
cagaagcttcatgccctagagcgaa

SEQ ID NO: 148013 - DNA, 25 bp, Homo sapien
ttcgcatcaggccttaatgagccct

SEQ ID NO: 148014 - DNA, 25 bp, Homo sapien
acagagttggtgagttgttcgtgat

SEQ ID NO: 148015 - DNA, 25 bp, Homo sapien
tgtgagaggtgaagctcagaggaag

SEQ ID NO: 148016 - DNA, 25 bp, Homo sapien
gataaccgagcatgtgagaggatgt

SEQ ID NO: 148017 - DNA, 25 bp, Homo sapien
tgttcgtgatcaggggataaccgag

SEQ ID NO: 148018 - DNA, 25 bp, Homo sapien
gttaggtggtaccagcatcctcctg

SEQ ID NO: 148019 - DNA, 25 bp, Homo sapien
tagccaggttcctgacgatggaaac

SEQ ID NO: 148020 - DNA, 25 bp, Homo sapien
actgagtagcgtcctcatagccagg

SEQ ID NO: 148021 - DNA, 25 bp, Homo sapien
tggatggcacttgtttgtggaaact

SEQ ID NO: 148022 - DNA, 25 bp, Homo sapien
tcaccagcagcgttgctgagttggg

SEQ ID NO: 148023 - DNA, 25 bp, Homo sapien
gaggagagcctgtccaagcctattt

SEQ ID NO: 148024 - DNA, 25 bp, Homo sapien
gcctattttcaccagcagcgttgct

SEQ ID NO: 148025 - DNA, 25 bp, Homo sapien
agagtagggcttggtaaatgccatt

SEQ ID NO: 148026 - DNA, 25 bp, Homo sapien
tcaaagctgctgtttgtagccccag

SEQ ID NO: 148027 - DNA, 25 bp, Homo sapien
aaagctgctgtttgtagccccaggg

SEQ ID NO: 148028 - DNA, 25 bp, Homo sapien
ggggaaatgctagattcaaagctgc

SEQ ID NO: 148029 - DNA, 25 bp, Homo sapien
attcaaagctgctgtttgtagcccc

SEQ ID NO: 148030 - DNA, 25 bp, Homo sapien
aggctggtctgattacagtgattct

SEQ ID NO: 148031 - DNA, 25 bp, Homo sapien
tggtctgattacagtgattctcaga

SEQ ID NO: 148032 - DNA, 25 bp, Homo sapien
ggctggtctgattacagtgattctc

SEQ ID NO: 148033 - DNA, 25 bp, Homo sapien
gctggtctgattacagtgattctca

SEQ ID NO: 148034 - DNA, 25 bp, Homo sapien
cgtgcctttggtatgagcctcatta

SEQ ID NO: 148035 - DNA, 25 bp, Homo sapien
tgttgctgcaaatacaatggcgtct

SEQ ID NO: 148036 - DNA, 25 bp, Homo sapien
tcattactgggtgagcttcgccaaa

SEQ ID NO: 148037 - DNA, 25 bp, Homo sapien
gagatggtgatgttttctccccgca

SEQ ID NO: 148038 - DNA, 25 bp, Homo sapien
atctcctcagggtcaaacctgctca

SEQ ID NO: 148039 - DNA, 25 bp, Homo sapien
tgagaacccactgtgtagccaccct

SEQ ID NO: 148040 - DNA, 25 bp, Homo sapien
taaattgtaccgtctaccctgagaa

SEQ ID NO: 148041 - DNA, 25 bp, Homo sapien
acctgctcacagtacctttatcaga

SEQ ID NO: 148042 - DNA, 25 bp, Homo sapien
ctagttgtggattcatttcccacat

SEQ ID NO: 148043 - DNA, 25 bp, Homo sapien
tcatggtcaccgcagcatacactgg

SEQ ID NO: 148044 - DNA, 25 bp, Homo sapien
tcttggtgttgatgacgtctgccag

SEQ ID NO: 148045 - DNA, 25 bp, Homo sapien
gatctggtcctgctaatttgacaca

SEQ ID NO: 148046 - DNA, 25 bp, Homo sapien
tctgccagtagagatgctcccaacg

SEQ ID NO: 148047 - DNA, 25 bp, Homo sapien
tgctccgcaagctgactcttttgtc

SEQ ID NO: 148048 - DNA, 25 bp, Homo sapien
aatgcataaatctcctgattctcac

SEQ ID NO: 148049 - DNA, 25 bp, Homo sapien
tcccatttggttggagcttgaagcc

SEQ ID NO: 148050 - DNA, 25 bp, Homo sapien
atttgtcttattgttctgcactgca

SEQ ID NO: 148051 - DNA, 25 bp, Homo sapien
caaagtgggaggtgtagaaggtatc

SEQ ID NO: 148052 - DNA, 25 bp, Homo sapien
ccgggccaccttctatcatctccat

SEQ ID NO: 148053 - DNA, 25 bp, Homo sapien
ctctctggggtcagcacggccaaag

SEQ ID NO: 148054 - DNA, 25 bp, Homo sapien
ggtcagcacggccaaagtgggaggt

SEQ ID NO: 148055 - DNA, 25 bp, Homo sapien
tatttttagcagagtgatcaccggc

SEQ ID NO: 148056 - DNA, 25 bp, Homo sapien
tcagcatcatgtaaacacgctggag

SEQ ID NO: 148057 - DNA, 25 bp, Homo sapien
ggctgccttcaactatcaacagtgg

SEQ ID NO: 148058 - DNA, 25 bp, Homo sapien
gcaagaagctggaaacggctgcctt

SEQ ID NO: 148059 - DNA, 25 bp, Homo sapien
ccacgcctggctaaactgtgtattt

SEQ ID NO: 148060 - DNA, 25 bp, Homo sapien
ccaccacgcctggctaaactgtgta

SEQ ID NO: 148061 - DNA, 25 bp, Homo sapien
cgcctggctaaactgtgtatttttg

SEQ ID NO: 148062 - DNA, 25 bp, Homo sapien
gcctggctaaactgtgtatttttgg

SEQ ID NO: 148063 - DNA, 25 bp, Homo sapien
ccacggatgtgggttcaggcgttat

SEQ ID NO: 148064 - DNA, 25 bp, Homo sapien
cggtgcgggacatctcgaacaaatt

SEQ ID NO: 148065 - DNA, 25 bp, Homo sapien
ggagagctaattccatcctgcagga

SEQ ID NO: 148066 - DNA, 25 bp, Homo sapien
gagacccatagtggccacagcaagt

SEQ ID NO: 148067 - DNA, 25 bp, Homo sapien
ttttaattctaataccagaggccac

SEQ ID NO: 148068 - DNA, 25 bp, Homo sapien
tgtcatggaaacagcggtgacctgg

SEQ ID NO: 148069 - DNA, 25 bp, Homo sapien
taaccccaatctcgtgttccgatgg

SEQ ID NO: 148070 - DNA, 25 bp, Homo sapien
aagtggtggcacgtggcaactcctg

SEQ ID NO: 148071 - DNA, 25 bp, Homo sapien
aaagtctttagaccagcattaaggg

SEQ ID NO: 148072 - DNA, 25 bp, Homo sapien
gcctttctattgtggatattaactc

SEQ ID NO: 148073 - DNA, 25 bp, Homo sapien
aagcatcagaatcacaagagggaca

SEQ ID NO: 148074 - DNA, 25 bp, Homo sapien
gcaagtattttctccgtcctgtagg

SEQ ID NO: 148075 - DNA, 25 bp, Homo sapien
catattataaagctttcttgcccat

SEQ ID NO: 148076 - DNA, 25 bp, Homo sapien
tagagcaaatgagggtttcctcttg

SEQ ID NO: 148077 - DNA, 25 bp, Homo sapien
tgcccatgaattcttcttagagcaa

SEQ ID NO: 148078 - DNA, 25 bp, Homo sapien
tttcttgcccatgaattcttcttag

SEQ ID NO: 148079 - DNA, 25 bp, Homo sapien
ctgtggtgccagaggtcctgatttt

SEQ ID NO: 148080 - DNA, 25 bp, Homo sapien
ggtgccagaggtcctgatttttctg

SEQ ID NO: 148081 - DNA, 25 bp, Homo sapien
tctggaggcattctggcggcatacc

SEQ ID NO: 148082 - DNA, 25 bp, Homo sapien
gatttttctggaggcattctggcgg

SEQ ID NO: 148083 - DNA, 25 bp, Homo sapien
tgcacgaggccagactgtttggacc

SEQ ID NO: 148084 - DNA, 25 bp, Homo sapien
caaggtccgagtgtccctctgggta

SEQ ID NO: 148085 - DNA, 25 bp, Homo sapien
tccctctgggtatgcacgaggccag

SEQ ID NO: 148086 - DNA, 25 bp, Homo sapien
tgccaaggtccgagtgtccctctgg

SEQ ID NO: 148087 - DNA, 25 bp, Homo sapien
ggggactggagggtctccatgcttc

SEQ ID NO: 148088 - DNA, 25 bp, Homo sapien
gggactggagggtctccatgcttcc

SEQ ID NO: 148089 - DNA, 25 bp, Homo sapien
cagacggggactggagggtctccat

SEQ ID NO: 148090 - DNA, 25 bp, Homo sapien
ctggtgcagacggggactggagggt

SEQ ID NO: 148091 - DNA, 25 bp, Homo sapien
ccagcattggaaggagcaggatccg

SEQ ID NO: 148092 - DNA, 25 bp, Homo sapien
catgagctttagtgccccagagagg

SEQ ID NO: 148093 - DNA, 25 bp, Homo sapien
gaagctctcaaagcgtgactctggc

SEQ ID NO: 148094 - DNA, 25 bp, Homo sapien
agtggccccgaattggtgctgcaga

SEQ ID NO: 148095 - DNA, 25 bp, Homo sapien
ctctctttctctttgcagctgtggg

SEQ ID NO: 148096 - DNA, 25 bp, Homo sapien
tctttctctttgcagctgtgggtct

SEQ ID NO: 148097 - DNA, 25 bp, Homo sapien
cagctgtgggtcttctgaatgaaag

SEQ ID NO: 148098 - DNA, 25 bp, Homo sapien
agctgtgggtcttctgaatgaaagc

SEQ ID NO: 148099 - DNA, 25 bp, Homo sapien
ttatcgcttccagctcttgagatgt

SEQ ID NO: 148100 - DNA, 25 bp, Homo sapien
gccatgacagtcgaggcatatccct

SEQ ID NO: 148101 - DNA, 25 bp, Homo sapien
ttcttgggctgccatgacagtcgag

SEQ ID NO: 148102 - DNA, 25 bp, Homo sapien
ttccagctcttgagatgttgtttct

SEQ ID NO: 148103 - DNA, 25 bp, Homo sapien
agactctggcgtggggccttcggaa

SEQ ID NO: 148104 - DNA, 25 bp, Homo sapien
tcatgcacaccgagccacgccagct

SEQ ID NO: 148105 - DNA, 25 bp, Homo sapien
agcttgcttggggaatctacacctt

SEQ ID NO: 148106 - DNA, 25 bp, Homo sapien
ggcgtggggccttcggaatctagat

SEQ ID NO: 148107 - DNA, 25 bp, Homo sapien
tttcgcagtctccatgtagacggtg

SEQ ID NO: 148108 - DNA, 25 bp, Homo sapien
gctcccaggtgaccattttgttgtg

SEQ ID NO: 148109 - DNA, 25 bp, Homo sapien
catctggccggtctctgcagacatt

SEQ ID NO: 148110 - DNA, 25 bp, Homo sapien
tggccggtctctgcagacattcagt

SEQ ID NO: 148111 - DNA, 25 bp, Homo sapien
gaaaagtcgacagctttcacatctc

SEQ ID NO: 148112 - DNA, 25 bp, Homo sapien
gacagctttcacatctcggtgtgtg

SEQ ID NO: 148113 - DNA, 25 bp, Homo sapien
cacatctcggtgtgtgtcatgtttt

SEQ ID NO: 148114 - DNA, 25 bp, Homo sapien
tacaaagaaaagtcgacagctttca

SEQ ID NO: 148115 - DNA, 25 bp, Homo sapien
cttcatggtgggtgaaatcatgtct

SEQ ID NO: 148116 - DNA, 25 bp, Homo sapien
ctgctgcagcgtcagaggaatgtgc

SEQ ID NO: 148117 - DNA, 25 bp, Homo sapien
tcatggtgggtgaaatcatgtcttc

SEQ ID NO: 148118 - DNA, 25 bp, Homo sapien
gaggaatgtgcttccagaaggcttc

SEQ ID NO: 148119 - DNA, 25 bp, Homo sapien
gagatggccacaatgaactgaccaa

SEQ ID NO: 148120 - DNA, 25 bp, Homo sapien
cagagacctgggcaaaagactttca

SEQ ID NO: 148121 - DNA, 25 bp, Homo sapien
catgagtcagtgatagtagcttccc

SEQ ID NO: 148122 - DNA, 25 bp, Homo sapien
tcttcccagtgaatttgttgagcca

SEQ ID NO: 148123 - DNA, 25 bp, Homo sapien
atttcttcctacaatatgggctctt

SEQ ID NO: 148124 - DNA, 25 bp, Homo sapien
ttcttcctacaatatgggctcttgt

SEQ ID NO: 148125 - DNA, 25 bp, Homo sapien
tcttcctacaatatgggctcttgtt

SEQ ID NO: 148126 - DNA, 25 bp, Homo sapien
tttcttcctacaatatgggctcttg

SEQ ID NO: 148127 - DNA, 25 bp, Homo sapien
ttatccccgttctttaggcactgcc

SEQ ID NO: 148128 - DNA, 25 bp, Homo sapien
gacccatgaatgtatctggcccacg

SEQ ID NO: 148129 - DNA, 25 bp, Homo sapien
gaaattgttacaggctatccctccc

SEQ ID NO: 148130 - DNA, 25 bp, Homo sapien
tactgtcctagatcagtggatacca

SEQ ID NO: 148131 - DNA, 25 bp, Homo sapien
tctgaagtgtaaatatcatctgcat

SEQ ID NO: 148132 - DNA, 25 bp, Homo sapien
cataataaggttgttataaaatgta

SEQ ID NO: 148133 - DNA, 25 bp, Homo sapien
tcatctgcataataaggttgttata

SEQ ID NO: 148134 - DNA, 25 bp, Homo sapien
gaagtgtaaatatcatctgcataat

SEQ ID NO: 148135 - DNA, 25 bp, Homo sapien
gttctctgcaggtgctcttgccact

SEQ ID NO: 148136 - DNA, 25 bp, Homo sapien
ggtgctcttgccacttccagcccat

SEQ ID NO: 148137 - DNA, 25 bp, Homo sapien
atcagttctctgcaggtgctcttgc

SEQ ID NO: 148138 - DNA, 25 bp, Homo sapien
tctgcaggtgctcttgccacttcca

SEQ ID NO: 148139 - DNA, 25 bp, Homo sapien
gaaccaacacccatggtcatcttgg

SEQ ID NO: 148140 - DNA, 25 bp, Homo sapien
ggtcatcttggtcctggaccgtcat

SEQ ID NO: 148141 - DNA, 25 bp, Homo sapien
ctgaaccaacacccatggtcatctt

SEQ ID NO: 148142 - DNA, 25 bp, Homo sapien
catggtcatcttggtcctggaccgt

SEQ ID NO: 148143 - DNA, 25 bp, Homo sapien
tacagtcgcgcgttgcataatagcg

SEQ ID NO: 148144 - DNA, 25 bp, Homo sapien
tatgagcttctgctagaaaggttgg

SEQ ID NO: 148145 - DNA, 25 bp, Homo sapien
tgatgttaaacctctaaagccagac

SEQ ID NO: 148146 - DNA, 25 bp, Homo sapien
ggcttatgcagtccattcctccaga

SEQ ID NO: 148147 - DNA, 25 bp, Homo sapien
ctgtggctgggattatcagggactc

SEQ ID NO: 148148 - DNA, 25 bp, Homo sapien
caggtgcaagagtggaagccttttc

SEQ ID NO: 148149 - DNA, 25 bp, Homo sapien
tccctgcctgttggtgctgatccca

SEQ ID NO: 148150 - DNA, 25 bp, Homo sapien
catcacagagctcaggtgtctgaat

SEQ ID NO: 148151 - DNA, 25 bp, Homo sapien
cagaagaagcatttacaagagtcct

SEQ ID NO: 148152 - DNA, 25 bp, Homo sapien
cgttctgaggtatatgaggtggatt

SEQ ID NO: 148153 - DNA, 25 bp, Homo sapien
ttctccacctgttccacatgcgttc

SEQ ID NO: 148154 - DNA, 25 bp, Homo sapien
tctacccatgggcctaaaagaattc

SEQ ID NO: 148155 - DNA, 25 bp, Homo sapien
ttcctgcgtccattcaaacacgcat

SEQ ID NO: 148156 - DNA, 25 bp, Homo sapien
ttgatttttcctgcgtccattcaaa

SEQ ID NO: 148157 - DNA, 25 bp, Homo sapien
tccattcaaacacgcataagcacac

SEQ ID NO: 148158 - DNA, 25 bp, Homo sapien
gtgttgatgcaagcagattattgat

SEQ ID NO: 148159 - DNA, 25 bp, Homo sapien
gacaatgttatttggtccctgcagc

SEQ ID NO: 148160 - DNA, 25 bp, Homo sapien
gcagcttctcacatgtgggtcggag

SEQ ID NO: 148161 - DNA, 25 bp, Homo sapien
cagcgctgacaagaacgctggagga

SEQ ID NO: 148162 - DNA, 25 bp, Homo sapien
cgctggaggaatcgataacactgac

SEQ ID NO: 148163 - DNA, 25 bp, Homo sapien
ctgcagttttccctggcacccctgt

SEQ ID NO: 148164 - DNA, 25 bp, Homo sapien
gcagttttccctggcacccctgtcc

SEQ ID NO: 148165 - DNA, 25 bp, Homo sapien
tcctctccctggcaacctcgggcat

SEQ ID NO: 148166 - DNA, 25 bp, Homo sapien
cctgtcctctccctggcaacctcgg

SEQ ID NO: 148167 - DNA, 25 bp, Homo sapien
tgaattcagaaaccttggcttccgc

SEQ ID NO: 148168 - DNA, 25 bp, Homo sapien
gtgggaaccctctgaaccatcccaa

SEQ ID NO: 148169 - DNA, 25 bp, Homo sapien
gcacagatgtgcatgagtttcccac

SEQ ID NO: 148170 - DNA, 25 bp, Homo sapien
tttggtacagccctttgtgcagccg

SEQ ID NO: 148171 - DNA, 25 bp, Homo sapien
tgaacagcactttgtattgtcagtg

SEQ ID NO: 148172 - DNA, 25 bp, Homo sapien
taaaggtgtggtttagatgactgga

SEQ ID NO: 148173 - DNA, 25 bp, Homo sapien
cctcaatcctactattaaaggtgtg

SEQ ID NO: 148174 - DNA, 25 bp, Homo sapien
gccattccagtggtatgtagttgta

SEQ ID NO: 148175 - DNA, 25 bp, Homo sapien
gctagtgcagacataacaaagtacc

SEQ ID NO: 148176 - DNA, 25 bp, Homo sapien
tcatcctgagtagctatcttagctc

SEQ ID NO: 148177 - DNA, 25 bp, Homo sapien
cactcacgtactatcctgggagctc

SEQ ID NO: 148178 - DNA, 25 bp, Homo sapien
tcttccctatcatgatgttactgtg

SEQ ID NO: 148179 - DNA, 25 bp, Homo sapien
gttttaagcatctctcccaggatat

SEQ ID NO: 148180 - DNA, 25 bp, Homo sapien
agcaggcagacttgggcgttttaag

SEQ ID NO: 148181 - DNA, 25 bp, Homo sapien
gacttgggcgttttaagcatctctc

SEQ ID NO: 148182 - DNA, 25 bp, Homo sapien
cctgtgggtgcacgagagagagcct

SEQ ID NO: 148183 - DNA, 25 bp, Homo sapien
ggaaggtccccgagtgaaggtcaga

SEQ ID NO: 148184 - DNA, 25 bp, Homo sapien
aaggtccccgagtgaaggtcagatg

SEQ ID NO: 148185 - DNA, 25 bp, Homo sapien
aggtccccgagtgaaggtcagatgg

SEQ ID NO: 148186 - DNA, 25 bp, Homo sapien
gaaggtccccgagtgaaggtcagat

SEQ ID NO: 148187 - DNA, 25 bp, Homo sapien
ggagagaaatgtactccagtaaaca

SEQ ID NO: 148188 - DNA, 25 bp, Homo sapien
ggggcagccgcatctctgatatcag

SEQ ID NO: 148189 - DNA, 25 bp, Homo sapien
cctttacttttgtaccaagagtgca

SEQ ID NO: 148190 - DNA, 25 bp, Homo sapien
tagttgctggctgtagttttgcagg

SEQ ID NO: 148191 - DNA, 25 bp, Homo sapien
tcttgaggagctagacagagacgca

SEQ ID NO: 148192 - DNA, 25 bp, Homo sapien
gttcttagggcattgcgggtttcca

SEQ ID NO: 148193 - DNA, 25 bp, Homo sapien
gatggcatcagctagcatgttccca

SEQ ID NO: 148194 - DNA, 25 bp, Homo sapien
tctccattacatgaaagaagtcttg

SEQ ID NO: 148195 - DNA, 25 bp, Homo sapien
tgacaagtgggtgttggatgccctg

SEQ ID NO: 148196 - DNA, 25 bp, Homo sapien
gaggagctgttctcccgccatgcga

SEQ ID NO: 148197 - DNA, 25 bp, Homo sapien
atgttttccagggatgaagattgtc

SEQ ID NO: 148198 - DNA, 25 bp, Homo sapien
tgggaacattattcatcagtcagcc

SEQ ID NO: 148199 - DNA, 25 bp, Homo sapien
tgaactggctgcacgagagcaagaa

SEQ ID NO: 148200 - DNA, 25 bp, Homo sapien
gaattagtgtctccagtggactgag

SEQ ID NO: 148201 - DNA, 25 bp, Homo sapien
tccaaggcccttcaggaagacgatg

SEQ ID NO: 148202 - DNA, 25 bp, Homo sapien
gaagacgatgacctcgacttttctc

SEQ ID NO: 148203 - DNA, 25 bp, Homo sapien
tccaagggtactgaactcccataac

SEQ ID NO: 148204 - DNA, 25 bp, Homo sapien
cataaccctctcttcgtgacaatgc

SEQ ID NO: 148205 - DNA, 25 bp, Homo sapien
catgatccaagggtactgaactccc

SEQ ID NO: 148206 - DNA, 25 bp, Homo sapien
tcttcgtgacaatgccactttttct

SEQ ID NO: 148207 - DNA, 25 bp, Homo sapien
taggcgagaaactaagctttcttgc

SEQ ID NO: 148208 - DNA, 25 bp, Homo sapien
ggcgagaaactaagctttcttgccg

SEQ ID NO: 148209 - DNA, 25 bp, Homo sapien
cgagaaactaagctttcttgccgca

SEQ ID NO: 148210 - DNA, 25 bp, Homo sapien
gagaaactaagctttcttgccgcat

SEQ ID NO: 148211 - DNA, 25 bp, Homo sapien
actcccgcaggtccccttgaaatgt

SEQ ID NO: 148212 - DNA, 25 bp, Homo sapien
gaaggtatgcgagctcccaattgcc

SEQ ID NO: 148213 - DNA, 25 bp, Homo sapien
gttgcccggcaacgccgctgattga

SEQ ID NO: 148214 - DNA, 25 bp, Homo sapien
tacagtagacgagagtgaagcgcgt

SEQ ID NO: 148215 - DNA, 25 bp, Homo sapien
aacaggctcctaacaaagatcaccc

SEQ ID NO: 148216 - DNA, 25 bp, Homo sapien
cagacttggcacaggcaacgaacgt

SEQ ID NO: 148217 - DNA, 25 bp, Homo sapien
ccccaagatgagaaacaggctccta

SEQ ID NO: 148218 - DNA, 25 bp, Homo sapien
ggttccgatcaagtggagaccccaa

SEQ ID NO: 148219 - DNA, 25 bp, Homo sapien
ctctgggaagacgagggaccccgca

SEQ ID NO: 148220 - DNA, 25 bp, Homo sapien
gtttcctgccccgacgtgcgtgctg

SEQ ID NO: 148221 - DNA, 25 bp, Homo sapien
ccgaagagtttcctgccccgacgtg

SEQ ID NO: 148222 - DNA, 25 bp, Homo sapien
agacgcccgcaaggaacagagttgg

SEQ ID NO: 148223 - DNA, 25 bp, Homo sapien
cgccccggcgggtcagtgccccgcg

SEQ ID NO: 148224 - DNA, 25 bp, Homo sapien
gcccagccccggcctccgccctggc

SEQ ID NO: 148225 - DNA, 25 bp, Homo sapien
cagccccggcctccgccctggctga

SEQ ID NO: 148226 - DNA, 25 bp, Homo sapien
ccgcgcggcccagccccggcctccg

SEQ ID NO: 148227 - DNA, 25 bp, Homo sapien
gccgcgcggcccagccccggcctcc

SEQ ID NO: 148228 - DNA, 25 bp, Homo sapien
ggacagggcacgcgccgcctgaccc

SEQ ID NO: 148229 - DNA, 25 bp, Homo sapien
ggggacagggcacgcgccgcctgac

SEQ ID NO: 148230 - DNA, 25 bp, Homo sapien
gacagggcacgcgccgcctgaccca

SEQ ID NO: 148231 - DNA, 25 bp, Homo sapien
acagggcacgcgccgcctgacccac

SEQ ID NO: 148232 - DNA, 25 bp, Homo sapien
gagcgttcccgcgacacgttgccag

SEQ ID NO: 148233 - DNA, 25 bp, Homo sapien
gcctcgcccgcatcgtaattctttt

SEQ ID NO: 148234 - DNA, 25 bp, Homo sapien
ttttactttcgagccatgtaaggca

SEQ ID NO: 148235 - DNA, 25 bp, Homo sapien
gggtcctatcaggacgcagcactgg

SEQ ID NO: 148236 - DNA, 25 bp, Homo sapien
gagacttagagtggtggctgcacca

SEQ ID NO: 148237 - DNA, 25 bp, Homo sapien
tggttcctgagagctcaaactgaga

SEQ ID NO: 148238 - DNA, 25 bp, Homo sapien
gcttgcgaattgtcagtctggttcc

SEQ ID NO: 148239 - DNA, 25 bp, Homo sapien
gcgtggcctttaggacggtgcctct

SEQ ID NO: 148240 - DNA, 25 bp, Homo sapien
tgtagaggaaccaaccaatttggct

SEQ ID NO: 148241 - DNA, 25 bp, Homo sapien
ctgtagaggaaccaaccaatttggc

SEQ ID NO: 148242 - DNA, 25 bp, Homo sapien
gtagaggaaccaaccaatttggcta

SEQ ID NO: 148243 - DNA, 25 bp, Homo sapien
tagaggaaccaaccaatttggctac

SEQ ID NO: 148244 - DNA, 25 bp, Homo sapien
gggtggcaggaagggtgccctgggc

SEQ ID NO: 148245 - DNA, 25 bp, Homo sapien
tggcaggaagggtgccctgggcttc

SEQ ID NO: 148246 - DNA, 25 bp, Homo sapien
gatgtcctgtccactggctcaggag

SEQ ID NO: 148247 - DNA, 25 bp, Homo sapien
aggaagggtgccctgggcttctcct

SEQ ID NO: 148248 - DNA, 25 bp, Homo sapien
caggtctactcgctgtttttttctg

SEQ ID NO: 148249 - DNA, 25 bp, Homo sapien
tccaggtctactcgctgtttttttc

SEQ ID NO: 148250 - DNA, 25 bp, Homo sapien
aggtctactcgctgtttttttctgt

SEQ ID NO: 148251 - DNA, 25 bp, Homo sapien
ctccaggtctactcgctgttttttt

SEQ ID NO: 148252 - DNA, 25 bp, Homo sapien
cagaagcctaactggtgtttccctt

SEQ ID NO: 148253 - DNA, 25 bp, Homo sapien
ttcagaagcctaactggtgtttccc

SEQ ID NO: 148254 - DNA, 25 bp, Homo sapien
tttcagaagcctaactggtgtttcc

SEQ ID NO: 148255 - DNA, 25 bp, Homo sapien
attttcagaagcctaactggtgttt

SEQ ID NO: 148256 - DNA, 25 bp, Homo sapien
gttcctctggcggagaataagcacc

SEQ ID NO: 148257 - DNA, 25 bp, Homo sapien
cagcaagggcttggacaaaggtctc

SEQ ID NO: 148258 - DNA, 25 bp, Homo sapien
tgtaagggggcgacttcgtcctctc

SEQ ID NO: 148259 - DNA, 25 bp, Homo sapien
ggcgacttcgtcctctctaggccag

SEQ ID NO: 148260 - DNA, 25 bp, Homo sapien
tgcaccctaggtcaggaagcaagtc

SEQ ID NO: 148261 - DNA, 25 bp, Homo sapien
ccatttcagatagaccgacaggcag

SEQ ID NO: 148262 - DNA, 25 bp, Homo sapien
ctcaaagtgatttctagggcacata

SEQ ID NO: 148263 - DNA, 25 bp, Homo sapien
tctcaggacctaagacgcaagggtc

SEQ ID NO: 148264 - DNA, 25 bp, Homo sapien
tctttagggacaaagaccgtctatc

SEQ ID NO: 148265 - DNA, 25 bp, Homo sapien
aattgctcaccctgctattcaagga

SEQ ID NO: 148266 - DNA, 25 bp, Homo sapien
catcgatttctcttggaacagcagt

SEQ ID NO: 148267 - DNA, 25 bp, Homo sapien
catgcacttggtaggcactcagcaa

SEQ ID NO: 148268 - DNA, 25 bp, Homo sapien
tgcttggacccctgcgctgaggtct

SEQ ID NO: 148269 - DNA, 25 bp, Homo sapien
atggctgccgtcaccaacgtgggca

SEQ ID NO: 148270 - DNA, 25 bp, Homo sapien
gaggtctctctgacgtctgctgcga

SEQ ID NO: 148271 - DNA, 25 bp, Homo sapien
ccatattgttagacagctggcctgg

SEQ ID NO: 148272 - DNA, 25 bp, Homo sapien
ggtttgaactgtttcaattctgagt

SEQ ID NO: 148273 - DNA, 25 bp, Homo sapien
gatgtttcagggtaggtttgaactg

SEQ ID NO: 148274 - DNA, 25 bp, Homo sapien
tctgagtatcagtgtgatgagggta

SEQ ID NO: 148275 - DNA, 25 bp, Homo sapien
tagaccgaggatgtcactggaattt

SEQ ID NO: 148276 - DNA, 25 bp, Homo sapien
ttttgtggttgtcattactcgagcc

SEQ ID NO: 148277 - DNA, 25 bp, Homo sapien
gaatgagctcattagtcaccttttc

SEQ ID NO: 148278 - DNA, 25 bp, Homo sapien
ctgtttgtcttgagtgggatcagtg

SEQ ID NO: 148279 - DNA, 25 bp, Homo sapien
taatttatagccagcatgaatgagc

SEQ ID NO: 148280 - DNA, 25 bp, Homo sapien
caggttctgtatggtaaggttttga

SEQ ID NO: 148281 - DNA, 25 bp, Homo sapien
gaagcaggttctgtatggtaaggtt

SEQ ID NO: 148282 - DNA, 25 bp, Homo sapien
caaactggaatcatgaccactggaa

SEQ ID NO: 148283 - DNA, 25 bp, Homo sapien
ttcaaactggaatcatgaccactgg

SEQ ID NO: 148284 - DNA, 25 bp, Homo sapien
tgaacccggttcaagtgaagctgaa

SEQ ID NO: 148285 - DNA, 25 bp, Homo sapien
gaacccggttcaagtgaagctgaag

SEQ ID NO: 148286 - DNA, 25 bp, Homo sapien
cttgaacccggttcaagtgaagctg

SEQ ID NO: 148287 - DNA, 25 bp, Homo sapien
cacttgaacccggttcaagtgaagc

SEQ ID NO: 148288 - DNA, 25 bp, Homo sapien
gttaagggagtatgcttcttctctg

SEQ ID NO: 148289 - DNA, 25 bp, Homo sapien
gtctatctgggagcgccatggacgt

SEQ ID NO: 148290 - DNA, 25 bp, Homo sapien
tcatgtatacagcttgggtgaaggc

SEQ ID NO: 148291 - DNA, 25 bp, Homo sapien
ctgtcgtaccacagtctatctggga

SEQ ID NO: 148292 - DNA, 25 bp, Homo sapien
tagtgcagctcctgtgatggtcgat

SEQ ID NO: 148293 - DNA, 25 bp, Homo sapien
tcctgtgtccacattagtgcagctc

SEQ ID NO: 148294 - DNA, 25 bp, Homo sapien
cctgtgatggtcgatgacggtctca

SEQ ID NO: 148295 - DNA, 25 bp, Homo sapien
gtcgatgacggtctcagctgtgctc

SEQ ID NO: 148296 - DNA, 25 bp, Homo sapien
gagtctgaatcattaataacggtga

SEQ ID NO: 148297 - DNA, 25 bp, Homo sapien
ccatttgccgtgtataagtagttca

SEQ ID NO: 148298 - DNA, 25 bp, Homo sapien
cccataccctggagaggtggttatt

SEQ ID NO: 148299 - DNA, 25 bp, Homo sapien
cagacaaaggacctgggctcagaaa

SEQ ID NO: 148300 - DNA, 25 bp, Homo sapien
tgcaccaactgacaatatcctgact

SEQ ID NO: 148301 - DNA, 25 bp, Homo sapien
ctttacaggcactccgtgaaggtct

SEQ ID NO: 148302 - DNA, 25 bp, Homo sapien
actgacaatatcctgactaaagctg

SEQ ID NO: 148303 - DNA, 25 bp, Homo sapien
tccgtgaaggtctctagaaagaatg

SEQ ID NO: 148304 - DNA, 25 bp, Homo sapien
ctctgacatcaagagtaatgttcag

SEQ ID NO: 148305 - DNA, 25 bp, Homo sapien
ttcagcaggtgagacacagcactct

SEQ ID NO: 148306 - DNA, 25 bp, Homo sapien
tcagcaggtgagacacagcactctc

SEQ ID NO: 148307 - DNA, 25 bp, Homo sapien
tccaaatctcctgatcactctgaca

SEQ ID NO: 148308 - DNA, 25 bp, Homo sapien
gaacggtgaactccagatagggtgc

SEQ ID NO: 148309 - DNA, 25 bp, Homo sapien
tcttcccctcttgctgtagggctga

SEQ ID NO: 148310 - DNA, 25 bp, Homo sapien
gcagctgtcgggcagagttcgtatt

SEQ ID NO: 148311 - DNA, 25 bp, Homo sapien
catcttggcattccttagcagctgt

SEQ ID NO: 148312 - DNA, 25 bp, Homo sapien
tcttttacaacaaaatgcaagaaaa

SEQ ID NO: 148313 - DNA, 25 bp, Homo sapien
aaatggtgtaactaggatgtccttg

SEQ ID NO: 148314 - DNA, 25 bp, Homo sapien
gggtagcagctctgttagacacagc

SEQ ID NO: 148315 - DNA, 25 bp, Homo sapien
ttgctttccccacatcgagaagtag

SEQ ID NO: 148316 - DNA, 25 bp, Homo sapien
taattgaagcacttagtatttggct

SEQ ID NO: 148317 - DNA, 25 bp, Homo sapien
ttgaagcacttagtatttggctctg

SEQ ID NO: 148318 - DNA, 25 bp, Homo sapien
gaagcacttagtatttggctctgac

SEQ ID NO: 148319 - DNA, 25 bp, Homo sapien
gcacttagtatttggctctgacctt

SEQ ID NO: 148320 - DNA, 25 bp, Homo sapien
actggccctcggcaccttggaatat

SEQ ID NO: 148321 - DNA, 25 bp, Homo sapien
gctttgatagccaattggttggtca

SEQ ID NO: 148322 - DNA, 25 bp, Homo sapien
ggaatatcagaatgtaggtgtaaat

SEQ ID NO: 148323 - DNA, 25 bp, Homo sapien
gaatgtaggtgtaaattacaaggct

SEQ ID NO: 148324 - DNA, 25 bp, Homo sapien
tcacaaggggcgattctgagaagtg

SEQ ID NO: 148325 - DNA, 25 bp, Homo sapien
ggtcagttcctggtgattcacaagg

SEQ ID NO: 148326 - DNA, 25 bp, Homo sapien
ctggtgattcacaaggggcgattct

SEQ ID NO: 148327 - DNA, 25 bp, Homo sapien
gtcagttcctggtgattcacaaggg

SEQ ID NO: 148328 - DNA, 25 bp, Homo sapien
tgttgttaaaattctgtcctaatct

SEQ ID NO: 148329 - DNA, 25 bp, Homo sapien
cctccgggccttcgctttggttgct

SEQ ID NO: 148330 - DNA, 25 bp, Homo sapien
gctttggttgctgtctggtttttgt

SEQ ID NO: 148331 - DNA, 25 bp, Homo sapien
aattctgtcctaatctcaaggccat

SEQ ID NO: 148332 - DNA, 25 bp, Homo sapien
tgggactaaactactgcagagatga

SEQ ID NO: 148333 - DNA, 25 bp, Homo sapien
tctgggactaaactactgcagagat

SEQ ID NO: 148334 - DNA, 25 bp, Homo sapien
catctgggactaaactactgcagag

SEQ ID NO: 148335 - DNA, 25 bp, Homo sapien
taaattagtaaatggtccatctggg

SEQ ID NO: 148336 - DNA, 25 bp, Homo sapien
ctgctgaattcaggcaagttcagac

SEQ ID NO: 148337 - DNA, 25 bp, Homo sapien
ttagccgtcgctgaggacacggcag

SEQ ID NO: 148338 - DNA, 25 bp, Homo sapien
gcagctgctgaattcaggcaagttc

SEQ ID NO: 148339 - DNA, 25 bp, Homo sapien
cagctgctgaattcaggcaagttca

SEQ ID NO: 148340 - DNA, 25 bp, Homo sapien
gccaggacaggttttggattataaa

SEQ ID NO: 148341 - DNA, 25 bp, Homo sapien
tagtctgagcaatccagagatggga

SEQ ID NO: 148342 - DNA, 25 bp, Homo sapien
tgaggcgctcggagtttctgagcac

SEQ ID NO: 148343 - DNA, 25 bp, Homo sapien
cccagtgggtagatacaatgtgcct

SEQ ID NO: 148344 - DNA, 25 bp, Homo sapien
taggtgcagtgaatgagtttgactt

SEQ ID NO: 148345 - DNA, 25 bp, Homo sapien
ttttaggtgcagtgaatgagtttga

SEQ ID NO: 148346 - DNA, 25 bp, Homo sapien
gcattgataaggacagagatatgaa

SEQ ID NO: 148347 - DNA, 25 bp, Homo sapien
aagcattgataaggacagagatatg

SEQ ID NO: 148348 - DNA, 25 bp, Homo sapien
tggcccagtgcaccaataaccatac

SEQ ID NO: 148349 - DNA, 25 bp, Homo sapien
gtggcccagtgcaccaataaccata

SEQ ID NO: 148350 - DNA, 25 bp, Homo sapien
ggcccagtgcaccaataaccataca

SEQ ID NO: 148351 - DNA, 25 bp, Homo sapien
gcccagtgcaccaataaccatacat

SEQ ID NO: 148352 - DNA, 25 bp, Homo sapien
ttttcaggtgagtggtcctcagact

SEQ ID NO: 148353 - DNA, 25 bp, Homo sapien
gactcattgcctcagtgcaaagatc

SEQ ID NO: 148354 - DNA, 25 bp, Homo sapien
gcctcttaggccatccgtgccgatg

SEQ ID NO: 148355 - DNA, 25 bp, Homo sapien
tccttgcattaagagttgggttttc

SEQ ID NO: 148356 - DNA, 25 bp, Homo sapien
ggcccagagggtaacaagaaccatc

SEQ ID NO: 148357 - DNA, 25 bp, Homo sapien
cctttttccagccccgatgctgttg

SEQ ID NO: 148358 - DNA, 25 bp, Homo sapien
gcccagagggtaacaagaaccatct

SEQ ID NO: 148359 - DNA, 25 bp, Homo sapien
ccagccccgatgctgttggataggg

SEQ ID NO: 148360 - DNA, 25 bp, Homo sapien
ccgtgactcccatgcctgcacgaca

SEQ ID NO: 148361 - DNA, 25 bp, Homo sapien
taccaggctggttacaatacctgct

SEQ ID NO: 148362 - DNA, 25 bp, Homo sapien
ccaggctggttacaatacctgcttt

SEQ ID NO: 148363 - DNA, 25 bp, Homo sapien
gactcccatgcctgcacgacaaact

SEQ ID NO: 148364 - DNA, 25 bp, Homo sapien
cgatggctagatatctgtgtcccat

SEQ ID NO: 148365 - DNA, 25 bp, Homo sapien
cacttcctcgatggctagatatctg

SEQ ID NO: 148366 - DNA, 25 bp, Homo sapien
cctcgatggctagatatctgtgtcc

SEQ ID NO: 148367 - DNA, 25 bp, Homo sapien
cttcctcgatggctagatatctgtg

SEQ ID NO: 148368 - DNA, 25 bp, Homo sapien
tgatattagagcctgtttcatggcg

SEQ ID NO: 148369 - DNA, 25 bp, Homo sapien
gggcaaatccgatgggcttgatatt

SEQ ID NO: 148370 - DNA, 25 bp, Homo sapien
tctgtttggctctggtcatttcctt

SEQ ID NO: 148371 - DNA, 25 bp, Homo sapien
tcctttgtagctatgtagataaata

SEQ ID NO: 148372 - DNA, 25 bp, Homo sapien
tgctgtatttcgctgaccaggatgg

SEQ ID NO: 148373 - DNA, 25 bp, Homo sapien
ctgtatttcgctgaccaggatggag

SEQ ID NO: 148374 - DNA, 25 bp, Homo sapien
tatgctgtatttcgctgaccaggat

SEQ ID NO: 148375 - DNA, 25 bp, Homo sapien
cgtatgctgtatttcgctgaccagg

SEQ ID NO: 148376 - DNA, 25 bp, Homo sapien
ctggcctgctaaggactctaataga

SEQ ID NO: 148377 - DNA, 25 bp, Homo sapien
ccattggtggggcaactcgatagct

SEQ ID NO: 148378 - DNA, 25 bp, Homo sapien
gcaactcgatagctccgattgcctg

SEQ ID NO: 148379 - DNA, 25 bp, Homo sapien
tgctaaggactctaatagaaagcag

SEQ ID NO: 148380 - DNA, 25 bp, Homo sapien
ggctctgtggaatttctaggctgtc

SEQ ID NO: 148381 - DNA, 25 bp, Homo sapien
ctctgggagctgatactctggctct

SEQ ID NO: 148382 - DNA, 25 bp, Homo sapien
gctgtctttcttcagtgtgctcaga

SEQ ID NO: 148383 - DNA, 25 bp, Homo sapien
tgtagactgggaaggtgcctctggg

SEQ ID NO: 148384 - DNA, 25 bp, Homo sapien
gcgagtgccactttcaacaccgctt

SEQ ID NO: 148385 - DNA, 25 bp, Homo sapien
caagctcttcggcttttctgagcga

SEQ ID NO: 148386 - DNA, 25 bp, Homo sapien
ttctgagcgagtgccactttcaaca

SEQ ID NO: 148387 - DNA, 25 bp, Homo sapien
ttccccatccatcagaccaatctct

SEQ ID NO: 148388 - DNA, 25 bp, Homo sapien
acactggtctcatgtgtgatcggag

SEQ ID NO: 148389 - DNA, 25 bp, Homo sapien
cactggtctcatgtgtgatcggagc

SEQ ID NO: 148390 - DNA, 25 bp, Homo sapien
tctcatgtgtgatcggagctgtgtg

SEQ ID NO: 148391 - DNA, 25 bp, Homo sapien
tggtctcatgtgtgatcggagctgt

SEQ ID NO: 148392 - DNA, 25 bp, Homo sapien
ctctgacaacttcctgtcgctctga

SEQ ID NO: 148393 - DNA, 25 bp, Homo sapien
tgtggttcctctgagagtcgaggtg

SEQ ID NO: 148394 - DNA, 25 bp, Homo sapien
tgacaacttcctgtcgctctgagtg

SEQ ID NO: 148395 - DNA, 25 bp, Homo sapien
aacttcctgtcgctctgagtgtgac

SEQ ID NO: 148396 - DNA, 25 bp, Homo sapien
ctgagaacagcggtgtgccctctga

SEQ ID NO: 148397 - DNA, 25 bp, Homo sapien
gtcccagccatagaacctagagaaa

SEQ ID NO: 148398 - DNA, 25 bp, Homo sapien
taccctatgccgtgtaaaaatgtta

SEQ ID NO: 148399 - DNA, 25 bp, Homo sapien
tatcagttcaattcacaggtcccag

SEQ ID NO: 148400 - DNA, 25 bp, Homo sapien
gccctttagcattagccacttgcat

SEQ ID NO: 148401 - DNA, 25 bp, Homo sapien
ggcttgtccccttattatcttgtct

SEQ ID NO: 148402 - DNA, 25 bp, Homo sapien
ttgtctttcaagatgagcgtcatca

SEQ ID NO: 148403 - DNA, 25 bp, Homo sapien
caagatgagcgtcatcacctggttc

SEQ ID NO: 148404 - DNA, 25 bp, Homo sapien
tacaccttagatgagtggaagcctc

SEQ ID NO: 148405 - DNA, 25 bp, Homo sapien
caccttagatgagtggaagcctcca

SEQ ID NO: 148406 - DNA, 25 bp, Homo sapien
ttagatgagtggaagcctccatttc

SEQ ID NO: 148407 - DNA, 25 bp, Homo sapien
ttctacaccttagatgagtggaagc

SEQ ID NO: 148408 - DNA, 25 bp, Homo sapien
aggctcttctgacgcgtacataatg

SEQ ID NO: 148409 - DNA, 25 bp, Homo sapien
caccacacgcagagagctccagtgg

SEQ ID NO: 148410 - DNA, 25 bp, Homo sapien
agccagcggccctcacactcttttt

SEQ ID NO: 148411 - DNA, 25 bp, Homo sapien
actgtttccaccacacgcagagagc

SEQ ID NO: 148412 - DNA, 25 bp, Homo sapien
tgtgcgctctgggtacgttatgctc

SEQ ID NO: 148413 - DNA, 25 bp, Homo sapien
ccaagaccaggaatatcagtgccct

SEQ ID NO: 148414 - DNA, 25 bp, Homo sapien
tcagtgccctgtttcttatctcctc

SEQ ID NO: 148415 - DNA, 25 bp, Homo sapien
agaggccttcgttttttgatccaag

SEQ ID NO: 148416 - DNA, 25 bp, Homo sapien
cagtgtctcacgcagcagttcctga

SEQ ID NO: 148417 - DNA, 25 bp, Homo sapien
cagttcctgaccatcaaagtgtgct

SEQ ID NO: 148418 - DNA, 25 bp, Homo sapien
tcagaaggcacagctgccgtggact

SEQ ID NO: 148419 - DNA, 25 bp, Homo sapien
tgccgtggactaaccctaacgagcc

SEQ ID NO: 148420 - DNA, 25 bp, Homo sapien
tgcccagcaaccttgccggaggaat

SEQ ID NO: 148421 - DNA, 25 bp, Homo sapien
cactggctccctttttagtcgaggc

SEQ ID NO: 148422 - DNA, 25 bp, Homo sapien
cctggagacatcagccacatgccaa

SEQ ID NO: 148423 - DNA, 25 bp, Homo sapien
gaatagattttctgccactggctcc

SEQ ID NO: 148424 - DNA, 25 bp, Homo sapien
tgtccatgccagtatgtgcagtttt

SEQ ID NO: 148425 - DNA, 25 bp, Homo sapien
gtccatgccagtatgtgcagttttt

SEQ ID NO: 148426 - DNA, 25 bp, Homo sapien
tccatgccagtatgtgcagtttttt

SEQ ID NO: 148427 - DNA, 25 bp, Homo sapien
gacactcttagacatgtgggcacga

SEQ ID NO: 148428 - DNA, 25 bp, Homo sapien
tgcattctccgtgttagaaggagcc

SEQ ID NO: 148429 - DNA, 25 bp, Homo sapien
tgttttggttgcatttaccctcagt

SEQ ID NO: 148430 - DNA, 25 bp, Homo sapien
cagtaggcacagtttggtttcaccc

SEQ ID NO: 148431 - DNA, 25 bp, Homo sapien
cactgtgcagagatagagtggtcca

SEQ ID NO: 148432 - DNA, 25 bp, Homo sapien
tccacaagcgtgtcatgagtacctg

SEQ ID NO: 148433 - DNA, 25 bp, Homo sapien
tcttgagccccatagcacagtcggg

SEQ ID NO: 148434 - DNA, 25 bp, Homo sapien
ggatttagtcatgggtgaggcccta

SEQ ID NO: 148435 - DNA, 25 bp, Homo sapien
ggtagaccagagaccagatttccag

SEQ ID NO: 148436 - DNA, 25 bp, Homo sapien
gcattccttgtcagtagccaaaacg

SEQ ID NO: 148437 - DNA, 25 bp, Homo sapien
cagagacggcttgggaatcaatatc

SEQ ID NO: 148438 - DNA, 25 bp, Homo sapien
gatttccagggataggccagagacg

SEQ ID NO: 148439 - DNA, 25 bp, Homo sapien
gtgtctgcaagagctccattagatt

SEQ ID NO: 148440 - DNA, 25 bp, Homo sapien
ctggtaggtgtctgcaagagctcca

SEQ ID NO: 148441 - DNA, 25 bp, Homo sapien
cattagattcccttggaatgatccc

SEQ ID NO: 148442 - DNA, 25 bp, Homo sapien
tgaaaccagtagtggtgctggtagg

SEQ ID NO: 148443 - DNA, 25 bp, Homo sapien
cgaggtcaagccgtagtccaggata

SEQ ID NO: 148444 - DNA, 25 bp, Homo sapien
aacctccttccgatgcttgcaacag

SEQ ID NO: 148445 - DNA, 25 bp, Homo sapien
tgctgaagccccaccaataagcctt

SEQ ID NO: 148446 - DNA, 25 bp, Homo sapien
tgtccacagctaaccaggcgaggtc

SEQ ID NO: 148447 - DNA, 25 bp, Homo sapien
tgacccatttcgtggttcggtcatc

SEQ ID NO: 148448 - DNA, 25 bp, Homo sapien
gatgacccatttcgtggttcggtca

SEQ ID NO: 148449 - DNA, 25 bp, Homo sapien
ctggatgacccatttcgtggttcgg

SEQ ID NO: 148450 - DNA, 25 bp, Homo sapien
acccatttcgtggttcggtcatcat

SEQ ID NO: 148451 - DNA, 25 bp, Homo sapien
ctgcctgtcaccttcgatgtctgca

SEQ ID NO: 148452 - DNA, 25 bp, Homo sapien
gaaacgagggtcctgtgcttagcca

SEQ ID NO: 148453 - DNA, 25 bp, Homo sapien
ggtcctgtgcttagccattccccat

SEQ ID NO: 148454 - DNA, 25 bp, Homo sapien
ctggaaacgagggtcctgtgcttag

SEQ ID NO: 148455 - DNA, 25 bp, Homo sapien
gagggtcctgtgcttagccattccc

SEQ ID NO: 148456 - DNA, 25 bp, Homo sapien
ctgctgtcttgtttccctggctgag

SEQ ID NO: 148457 - DNA, 25 bp, Homo sapien
ttaaactgctgtcttgtttccctgg

SEQ ID NO: 148458 - DNA, 25 bp, Homo sapien
taaactgctgtcttgtttccctggc

SEQ ID NO: 148459 - DNA, 25 bp, Homo sapien
tgtcttgtttccctggctgagaacc

SEQ ID NO: 148460 - DNA, 25 bp, Homo sapien
aggagtttgatcccagaatcctcat

SEQ ID NO: 148461 - DNA, 25 bp, Homo sapien
caaggagtttgatcccagaatcctc

SEQ ID NO: 148462 - DNA, 25 bp, Homo sapien
aaggagtttgatcccagaatcctca

SEQ ID NO: 148463 - DNA, 25 bp, Homo sapien
tcaaggagtttgatcccagaatcct

SEQ ID NO: 148464 - DNA, 25 bp, Homo sapien
gtagctttcacttttagcacggaag

SEQ ID NO: 148465 - DNA, 25 bp, Homo sapien
cttttcctgtcaagtgaggaacctg

SEQ ID NO: 148466 - DNA, 25 bp, Homo sapien
gagtcccgtccatgtattattaacg

SEQ ID NO: 148467 - DNA, 25 bp, Homo sapien
caactgtacattcagagcttgctct

SEQ ID NO: 148468 - DNA, 25 bp, Homo sapien
ttttctcctccccactctcttattc

SEQ ID NO: 148469 - DNA, 25 bp, Homo sapien
tcctccttttctcctccccactctc

SEQ ID NO: 148470 - DNA, 25 bp, Homo sapien
ctcctccccactctcttattcccac

SEQ ID NO: 148471 - DNA, 25 bp, Homo sapien
ttctcctccccactctcttattccc

SEQ ID NO: 148472 - DNA, 25 bp, Homo sapien
tggatgtctggtccttgtgccacca

SEQ ID NO: 148473 - DNA, 25 bp, Homo sapien
ggatgtctggtccttgtgccaccat

SEQ ID NO: 148474 - DNA, 25 bp, Homo sapien
ctggatgtctggtccttgtgccacc

SEQ ID NO: 148475 - DNA, 25 bp, Homo sapien
tggccaagagcaacacctgatggct

SEQ ID NO: 148476 - DNA, 25 bp, Homo sapien
gccaagagcaacacctgatggctcc

SEQ ID NO: 148477 - DNA, 25 bp, Homo sapien
gtgatggccaagagcaacacctgat

SEQ ID NO: 148478 - DNA, 25 bp, Homo sapien
gatggccaagagcaacacctgatgg

SEQ ID NO: 148479 - DNA, 25 bp, Homo sapien
agctcttgagaaagttaaattgagt

SEQ ID NO: 148480 - DNA, 25 bp, Homo sapien
taggcccttgttccttgtggatagc

SEQ ID NO: 148481 - DNA, 25 bp, Homo sapien
tccacgtgtttcctgtcttccctgt

SEQ ID NO: 148482 - DNA, 25 bp, Homo sapien
cctgtggccaggtgagtaagtaagc

SEQ ID NO: 148483 - DNA, 25 bp, Homo sapien
gtagcagtagagtgttttagagttc

SEQ ID NO: 148484 - DNA, 25 bp, Homo sapien
gctggccttgtttgcataccgatca

SEQ ID NO: 148485 - DNA, 25 bp, Homo sapien
gtttgcataccgatcagctggtggg

SEQ ID NO: 148486 - DNA, 25 bp, Homo sapien
cttcccgctggccttgtttgcatac

SEQ ID NO: 148487 - DNA, 25 bp, Homo sapien
ggcttagagcacttcgtgattttct

SEQ ID NO: 148488 - DNA, 25 bp, Homo sapien
tttggcttagagcacttcgtgattt

SEQ ID NO: 148489 - DNA, 25 bp, Homo sapien
gcttagagcacttcgtgattttctt

SEQ ID NO: 148490 - DNA, 25 bp, Homo sapien
ttagagcacttcgtgattttcttac

SEQ ID NO: 148491 - DNA, 25 bp, Homo sapien
ctccaagggcccgagcgtggcagct

SEQ ID NO: 148492 - DNA, 25 bp, Homo sapien
gactgggtttttgctttgcagagaa

SEQ ID NO: 148493 - DNA, 25 bp, Homo sapien
ttcaccagcattggagaggacctgc

SEQ ID NO: 148494 - DNA, 25 bp, Homo sapien
tataacaatgagttgcagactgggt

SEQ ID NO: 148495 - DNA, 25 bp, Homo sapien
ttccgtgagaccttgtgcaaaaatc

SEQ ID NO: 148496 - DNA, 25 bp, Homo sapien
gaatttgcttccgtgagaccttgtg

SEQ ID NO: 148497 - DNA, 25 bp, Homo sapien
gatgtcagcgatggaatttgcttcc

SEQ ID NO: 148498 - DNA, 25 bp, Homo sapien
cgatggaatttgcttccgtgagacc

SEQ ID NO: 148499 - DNA, 25 bp, Homo sapien
gatgggtgtctctggaaaataaact

SEQ ID NO: 148500 - DNA, 25 bp, Homo sapien
cccagaattgcctaagatgggtgtc

SEQ ID NO: 148501 - DNA, 25 bp, Homo sapien
ccatcagaggtgtcaggaacagctg

SEQ ID NO: 148502 - DNA, 25 bp, Homo sapien
gctaaatgctagagcacgtggctgt

SEQ ID NO: 148503 - DNA, 25 bp, Homo sapien
gatgggccacccttctaattctgca

SEQ ID NO: 148504 - DNA, 25 bp, Homo sapien
ggagcaccatttgagggcccattct

SEQ ID NO: 148505 - DNA, 25 bp, Homo sapien
tagtttggcagtgaaaggcacccgg

SEQ ID NO: 148506 - DNA, 25 bp, Homo sapien
taattctgcagtagcttgccgtgac

SEQ ID NO: 148507 - DNA, 25 bp, Homo sapien
gcaaagtcaacagcggaagtgttcg

SEQ ID NO: 148508 - DNA, 25 bp, Homo sapien
cgggaggaggtccatttgcaaagtc

SEQ ID NO: 148509 - DNA, 25 bp, Homo sapien
agctgctcctgttctaattgccatt

SEQ ID NO: 148510 - DNA, 25 bp, Homo sapien
tactcttcctaagtggccagttggg

SEQ ID NO: 148511 - DNA, 25 bp, Homo sapien
tcccagccttttacggtgacaagag

SEQ ID NO: 148512 - DNA, 25 bp, Homo sapien
tatcagcatacggatggaggcagcc

SEQ ID NO: 148513 - DNA, 25 bp, Homo sapien
gctttactcagcacagggcgctttt

SEQ ID NO: 148514 - DNA, 25 bp, Homo sapien
gcactgagcggagtctagtccttag

SEQ ID NO: 148515 - DNA, 25 bp, Homo sapien
tccacattatccagggtaagaatga

SEQ ID NO: 148516 - DNA, 25 bp, Homo sapien
cattatccagggtaagaatgacttc

SEQ ID NO: 148517 - DNA, 25 bp, Homo sapien
ttccccgggtccgaagcaggcactc

SEQ ID NO: 148518 - DNA, 25 bp, Homo sapien
ccccgggtccgaagcaggcactcca

SEQ ID NO: 148519 - DNA, 25 bp, Homo sapien
tccatatttgttcatgatgaactga

SEQ ID NO: 148520 - DNA, 25 bp, Homo sapien
atttccatatttgttcatgatgaac

SEQ ID NO: 148521 - DNA, 25 bp, Homo sapien
ttccatatttgttcatgatgaactg

SEQ ID NO: 148522 - DNA, 25 bp, Homo sapien
tttccatatttgttcatgatgaact

SEQ ID NO: 148523 - DNA, 25 bp, Homo sapien
atctattagtttttgtgatcagtta

SEQ ID NO: 148524 - DNA, 25 bp, Homo sapien
taaatctattagtttttgtgatcag

SEQ ID NO: 148525 - DNA, 25 bp, Homo sapien
aataaatctattagtttttgtgatc

SEQ ID NO: 148526 - DNA, 25 bp, Homo sapien
ctattagtttttgtgatcagttagt

SEQ ID NO: 148527 - DNA, 25 bp, Homo sapien
acgaggtttccccatatcgtccagg

SEQ ID NO: 148528 - DNA, 25 bp, Homo sapien
acaaatgcaccaagtctcagccaag

SEQ ID NO: 148529 - DNA, 25 bp, Homo sapien
gcttgaaggagtttccaaaactaca

SEQ ID NO: 148530 - DNA, 25 bp, Homo sapien
atagtatatagggtccaggaactgg

SEQ ID NO: 148531 - DNA, 25 bp, Homo sapien
cagccaagggcattaatagtatata

SEQ ID NO: 148532 - DNA, 25 bp, Homo sapien
gaatagcatcgtcaaaattccagga

SEQ ID NO: 148533 - DNA, 25 bp, Homo sapien
tttatctgattgagcatctccctgg

SEQ ID NO: 148534 - DNA, 25 bp, Homo sapien
ctgggcttggctctggcattaatca

SEQ ID NO: 148535 - DNA, 25 bp, Homo sapien
gaggcaaatctagctctctcagaag

SEQ ID NO: 148536 - DNA, 25 bp, Homo sapien
ggagttcagttgaggagtctataga

SEQ ID NO: 148537 - DNA, 25 bp, Homo sapien
tgttactttcattgtgcttgccatg

SEQ ID NO: 148538 - DNA, 25 bp, Homo sapien
cagtagaactgtgctgctcatggcc

SEQ ID NO: 148539 - DNA, 25 bp, Homo sapien
cacagccaacctccctgcattgttt

SEQ ID NO: 148540 - DNA, 25 bp, Homo sapien
caaatgggaaagatccagccatggc

SEQ ID NO: 148541 - DNA, 25 bp, Homo sapien
cagattgatttatagcttgcagccc

SEQ ID NO: 148542 - DNA, 25 bp, Homo sapien
ggcaggcgatcgaaggtaacgaaaa

SEQ ID NO: 148543 - DNA, 25 bp, Homo sapien
tcgggtttagcattgtcacgagaag

SEQ ID NO: 148544 - DNA, 25 bp, Homo sapien
tcagggacagtcgtcctcttcgatg

SEQ ID NO: 148545 - DNA, 25 bp, Homo sapien
gacagtcgtcctcttcgatggagtg

SEQ ID NO: 148546 - DNA, 25 bp, Homo sapien
gggacagtcgtcctcttcgatggag

SEQ ID NO: 148547 - DNA, 25 bp, Homo sapien
cagtcgtcctcttcgatggagtgcg

SEQ ID NO: 148548 - DNA, 25 bp, Homo sapien
tcatctggatcaactgtagcgggtg

SEQ ID NO: 148549 - DNA, 25 bp, Homo sapien
taatccaggtgtgatgcagagaccg

SEQ ID NO: 148550 - DNA, 25 bp, Homo sapien
gatttagtgctgtcaccgctgaggc

SEQ ID NO: 148551 - DNA, 25 bp, Homo sapien
aaatgattcctaaagggcctgagcc

SEQ ID NO: 148552 - DNA, 25 bp, Homo sapien
caatttgagctagagggtccaagca

SEQ ID NO: 148553 - DNA, 25 bp, Homo sapien
ggtccaagcagccatagcagaacta

SEQ ID NO: 148554 - DNA, 25 bp, Homo sapien
ggctgggactaaacataaagatggc

SEQ ID NO: 148555 - DNA, 25 bp, Homo sapien
acattaattcagactggctgggact

SEQ ID NO: 148556 - DNA, 25 bp, Homo sapien
ggtcactatggaggtatcttaatat

SEQ ID NO: 148557 - DNA, 25 bp, Homo sapien
gtttttggtcactatggaggtatct

SEQ ID NO: 148558 - DNA, 25 bp, Homo sapien
taatatagtacactaaaaatatagg

SEQ ID NO: 148559 - DNA, 25 bp, Homo sapien
cttggcatgtttttggtcactatgg

SEQ ID NO: 148560 - DNA, 25 bp, Homo sapien
tttcctatcgtgaggttcagtgtca

SEQ ID NO: 148561 - DNA, 25 bp, Homo sapien
aagtttcctatcgtgaggttcagtg

SEQ ID NO: 148562 - DNA, 25 bp, Homo sapien
tgaaagtttcctatcgtgaggttca

SEQ ID NO: 148563 - DNA, 25 bp, Homo sapien
gaaagtttcctatcgtgaggttcag

SEQ ID NO: 148564 - DNA, 25 bp, Homo sapien
tcagggatcagttctttgctctttg

SEQ ID NO: 148565 - DNA, 25 bp, Homo sapien
tttgctctttgaaacgagatgatcc

SEQ ID NO: 148566 - DNA, 25 bp, Homo sapien
tgctctttgaaacgagatgatccat

SEQ ID NO: 148567 - DNA, 25 bp, Homo sapien
tctctcaatcttttcagggatcagt

SEQ ID NO: 148568 - DNA, 25 bp, Homo sapien
tggagtcacagtcgctggacaactg

SEQ ID NO: 148569 - DNA, 25 bp, Homo sapien
ctcatggagtcacagtcgctggaca

SEQ ID NO: 148570 - DNA, 25 bp, Homo sapien
tgcagggatgaccaccctccctcat

SEQ ID NO: 148571 - DNA, 25 bp, Homo sapien
gggatgaccaccctccctcatggag

SEQ ID NO: 148572 - DNA, 25 bp, Homo sapien
tatctgtattcgttctggactccag

SEQ ID NO: 148573 - DNA, 25 bp, Homo sapien
gaggctacatcctactgggtcctga

SEQ ID NO: 148574 - DNA, 25 bp, Homo sapien
ctgggactagttgggctccatcctg

SEQ ID NO: 148575 - DNA, 25 bp, Homo sapien
ttttgctacagctacgaggctacat

SEQ ID NO: 148576 - DNA, 25 bp, Homo sapien
agaaaagagcagagtcaaaagaagg

SEQ ID NO: 148577 - DNA, 25 bp, Homo sapien
gaaaagagcagagtcaaaagaagga

SEQ ID NO: 148578 - DNA, 25 bp, Homo sapien
gaatgtcccaaacagtttgaagtac

SEQ ID NO: 148579 - DNA, 25 bp, Homo sapien
cttggatgaaggtgggctctggaat

SEQ ID NO: 148580 - DNA, 25 bp, Homo sapien
ctgcttggatgaaggtgggctctgg

SEQ ID NO: 148581 - DNA, 25 bp, Homo sapien
caaacagtttgaagtaccaagtcta

SEQ ID NO: 148582 - DNA, 25 bp, Homo sapien
tacgtactgtagtcatctccattac

SEQ ID NO: 148583 - DNA, 25 bp, Homo sapien
cttcaaggttgtaccatgttcagta

SEQ ID NO: 148584 - DNA, 25 bp, Homo sapien
atgtctttgagtcttcaaggttgta

SEQ ID NO: 148585 - DNA, 25 bp, Homo sapien
cattaccctggaaatcatgtttctc

SEQ ID NO: 148586 - DNA, 25 bp, Homo sapien
tgcagacccactctgaataaaggaa

SEQ ID NO: 148587 - DNA, 25 bp, Homo sapien
ccctggtaggcattgtgtttactgc

SEQ ID NO: 148588 - DNA, 25 bp, Homo sapien
tgtacaccaatttgctcacctggag

SEQ ID NO: 148589 - DNA, 25 bp, Homo sapien
gatgtctcatgaatacgttttacaa

SEQ ID NO: 148590 - DNA, 25 bp, Homo sapien
ccagggtctcactttcactccagct

SEQ ID NO: 148591 - DNA, 25 bp, Homo sapien
acagatcactgtaatctcgaattcc

SEQ ID NO: 148592 - DNA, 25 bp, Homo sapien
tcactttcactccagctggtgtgca

SEQ ID NO: 148593 - DNA, 25 bp, Homo sapien
cacagatcactgtaatctcgaattc

SEQ ID NO: 148594 - DNA, 25 bp, Homo sapien
gcatagtctgtcatattctctctca

SEQ ID NO: 148595 - DNA, 25 bp, Homo sapien
tggataggaggatacagcatagtct

SEQ ID NO: 148596 - DNA, 25 bp, Homo sapien
cagcatagtctgtcatattctctct

SEQ ID NO: 148597 - DNA, 25 bp, Homo sapien
ggaggatacagcatagtctgtcata

SEQ ID NO: 148598 - DNA, 25 bp, Homo sapien
tcttatgtctatttccaaatcccca

SEQ ID NO: 148599 - DNA, 25 bp, Homo sapien
tccaaatccccagaaagggcagaca

SEQ ID NO: 148600 - DNA, 25 bp, Homo sapien
gtttctccccatgccgggctgcaga

SEQ ID NO: 148601 - DNA, 25 bp, Homo sapien
actgtggtttctccccatgccgggc

SEQ ID NO: 148602 - DNA, 25 bp, Homo sapien
ctttgtacaccatcagattggtact

SEQ ID NO: 148603 - DNA, 25 bp, Homo sapien
ataaattcgtggttgagagtgggca

SEQ ID NO: 148604 - DNA, 25 bp, Homo sapien
ttcatggtaataaattcgtggttga

SEQ ID NO: 148605 - DNA, 25 bp, Homo sapien
tacaccatcagattggtacttttca

SEQ ID NO: 148606 - DNA, 25 bp, Homo sapien
tctgtcccagcagatgacaccatga

SEQ ID NO: 148607 - DNA, 25 bp, Homo sapien
taagatgctgcgtagttggatgatg

SEQ ID NO: 148608 - DNA, 25 bp, Homo sapien
gaggacctgtaagatgctgcgtagt

SEQ ID NO: 148609 - DNA, 25 bp, Homo sapien
tgacaccatgaggacctgtaagatg

SEQ ID NO: 148610 - DNA, 25 bp, Homo sapien
gcatacgcacgtctgcagcctgatg

SEQ ID NO: 148611 - DNA, 25 bp, Homo sapien
taccctaggtgttgtcacctgaagg

SEQ ID NO: 148612 - DNA, 25 bp, Homo sapien
cctagtcaagactgcacgcgtgtgc

SEQ ID NO: 148613 - DNA, 25 bp, Homo sapien
gtgtcagtggagaaaccgagtcgcc

SEQ ID NO: 148614 - DNA, 25 bp, Homo sapien
agggcgcgggactcaatacttgtac

SEQ ID NO: 148615 - DNA, 25 bp, Homo sapien
aaaggccgtcaactcgacctggaag

SEQ ID NO: 148616 - DNA, 25 bp, Homo sapien
tctaaatttgctgagcgccgtctcc

SEQ ID NO: 148617 - DNA, 25 bp, Homo sapien
cattgtcctaatagagccggcaggg

SEQ ID NO: 148618 - DNA, 25 bp, Homo sapien
ccaaaaatgtctgggaactcgcaaa

SEQ ID NO: 148619 - DNA, 25 bp, Homo sapien
cctcttcacgcagatgcttccagaa

SEQ ID NO: 148620 - DNA, 25 bp, Homo sapien
gaaccaaaaatgtctgggaactcgc

SEQ ID NO: 148621 - DNA, 25 bp, Homo sapien
cctggaacctcttcacgcagatgct

SEQ ID NO: 148622 - DNA, 25 bp, Homo sapien
tccccagtggtttcttcagagatag

SEQ ID NO: 148623 - DNA, 25 bp, Homo sapien
ccccagtggtttcttcagagataga

SEQ ID NO: 148624 - DNA, 25 bp, Homo sapien
gtctccccagtggtttcttcagaga

SEQ ID NO: 148625 - DNA, 25 bp, Homo sapien
ttatgtctccccagtggtttcttca

SEQ ID NO: 148626 - DNA, 25 bp, Homo sapien
gagctacatgttgtacacgaacagg

SEQ ID NO: 148627 - DNA, 25 bp, Homo sapien
ggcccatcagaacctttacagtaaa

SEQ ID NO: 148628 - DNA, 25 bp, Homo sapien
ggtgttgaggcctgattgagaacac

SEQ ID NO: 148629 - DNA, 25 bp, Homo sapien
taaagacaattccatctaggagggt

SEQ ID NO: 148630 - DNA, 25 bp, Homo sapien
cctcttcgaccgagcgcgcagcttc

SEQ ID NO: 148631 - DNA, 25 bp, Homo sapien
cttcgaccgagcgcgcagcttcggg

SEQ ID NO: 148632 - DNA, 25 bp, Homo sapien
gtcgtcctcttcgaccgagcgcgca

SEQ ID NO: 148633 - DNA, 25 bp, Homo sapien
tcgtcctcttcgaccgagcgcgcag

SEQ ID NO: 148634 - DNA, 25 bp, Homo sapien
gaccaggtgagtaatcctttgccat

SEQ ID NO: 148635 - DNA, 25 bp, Homo sapien
ttctctacttgactcagagtaactg

SEQ ID NO: 148636 - DNA, 25 bp, Homo sapien
cttctctacttgactcagagtaact

SEQ ID NO: 148637 - DNA, 25 bp, Homo sapien
agaccaggtgagtaatcctttgcca

SEQ ID NO: 148638 - DNA, 25 bp, Homo sapien
tgatgaatttgacaagtttgcccct

SEQ ID NO: 148639 - DNA, 25 bp, Homo sapien
ctggcttggttcaaagttgtgactt

SEQ ID NO: 148640 - DNA, 25 bp, Homo sapien
gaatttgacaagtttgcccctggcc

SEQ ID NO: 148641 - DNA, 25 bp, Homo sapien
tttgacaagtttgcccctggccctg

SEQ ID NO: 148642 - DNA, 25 bp, Homo sapien
aagttgcttaaaatggttgcgtcca

SEQ ID NO: 148643 - DNA, 25 bp, Homo sapien
agttgcttaaaatggttgcgtccat

SEQ ID NO: 148644 - DNA, 25 bp, Homo sapien
caagttgcttaaaatggttgcgtcc

SEQ ID NO: 148645 - DNA, 25 bp, Homo sapien
gacaaatgccgtctctagatttacg

SEQ ID NO: 148646 - DNA, 25 bp, Homo sapien
gcagttcatacagatcattcctaga

SEQ ID NO: 148647 - DNA, 25 bp, Homo sapien
ttacgtgaagtaatgagagggtaag

SEQ ID NO: 148648 - DNA, 25 bp, Homo sapien
gccaaaagataaaggatctccacaa

SEQ ID NO: 148649 - DNA, 25 bp, Homo sapien
aacttcggttggttccacaggtgca

SEQ ID NO: 148650 - DNA, 25 bp, Homo sapien
cttgtttatccatgggtgttccctg

SEQ ID NO: 148651 - DNA, 25 bp, Homo sapien
ctgtgcagtgatgagggaccctgtc

SEQ ID NO: 148652 - DNA, 25 bp, Homo sapien
agatggagccacaggttccctggtc

SEQ ID NO: 148653 - DNA, 25 bp, Homo sapien
gtgttgattgtttataaataccaga

SEQ ID NO: 148654 - DNA, 25 bp, Homo sapien
taaataccagatccatgatatacag

SEQ ID NO: 148655 - DNA, 25 bp, Homo sapien
taccagatccatgatatacagtcat

SEQ ID NO: 148656 - DNA, 25 bp, Homo sapien
tatggtgttgattgtttataaatac

SEQ ID NO: 148657 - DNA, 25 bp, Homo sapien
taggtatattcttgtgactcgaggg

SEQ ID NO: 148658 - DNA, 25 bp, Homo sapien
gaagcatgattctgccagtgtggcg

SEQ ID NO: 148659 - DNA, 25 bp, Homo sapien
tacggcattacctgcatgaagtcgc

SEQ ID NO: 148660 - DNA, 25 bp, Homo sapien
ggacgatcatggaacaggtgccagc

SEQ ID NO: 148661 - DNA, 25 bp, Homo sapien
tactacatgaagaaggtgcaaaaga

SEQ ID NO: 148662 - DNA, 25 bp, Homo sapien
tgcagtctactggacctggaacgcc

SEQ ID NO: 148663 - DNA, 25 bp, Homo sapien
tcaatgtactcagaagagccctggg

SEQ ID NO: 148664 - DNA, 25 bp, Homo sapien
cagagctgcctgaaaggccgctgat

SEQ ID NO: 148665 - DNA, 25 bp, Homo sapien
aaacacctggtgtgctttagactgc

SEQ ID NO: 148666 - DNA, 25 bp, Homo sapien
gtgctattgcaattgtttaaatcca

SEQ ID NO: 148667 - DNA, 25 bp, Homo sapien
tgttgaaattggatgtgctattgca

SEQ ID NO: 148668 - DNA, 25 bp, Homo sapien
ttcacctcactccagacttcgcatg

SEQ ID NO: 148669 - DNA, 25 bp, Homo sapien
tgccattgaatatagcaccgagtac

SEQ ID NO: 148670 - DNA, 25 bp, Homo sapien
agcaccgagtactcagagtgatttc

SEQ ID NO: 148671 - DNA, 25 bp, Homo sapien
tagccttgaaagcaacaaatcactg

SEQ ID NO: 148672 - DNA, 25 bp, Homo sapien
caaatcactgttgcatgagtttttg

SEQ ID NO: 148673 - DNA, 25 bp, Homo sapien
taataggcaagaagcctgatggctt

SEQ ID NO: 148674 - DNA, 25 bp, Homo sapien
aataaaactgcatcccgaacttcct

SEQ ID NO: 148675 - DNA, 25 bp, Homo sapien
gcgctcattgttcctgagaatagga

SEQ ID NO: 148676 - DNA, 25 bp, Homo sapien
gaggctccaagctaatcagaaacag

SEQ ID NO: 148677 - DNA, 25 bp, Homo sapien
gccattatgccatctgttaaagtgg

SEQ ID NO: 148678 - DNA, 25 bp, Homo sapien
acttgttgctttcagagaggccaca

SEQ ID NO: 148679 - DNA, 25 bp, Homo sapien
tgtggaaggacttgtactgtaaaaa

SEQ ID NO: 148680 - DNA, 25 bp, Homo sapien
cagtcaaggagatgaacttgttgct

SEQ ID NO: 148681 - DNA, 25 bp, Homo sapien
tttgccctgagatccatgcaccttc

SEQ ID NO: 148682 - DNA, 25 bp, Homo sapien
tttcccgaacagctttccaagtctc

SEQ ID NO: 148683 - DNA, 25 bp, Homo sapien
aggcggcttcccttctaattccttg

SEQ ID NO: 148684 - DNA, 25 bp, Homo sapien
tcccacaaatgtcttccgcagagtt

SEQ ID NO: 148685 - DNA, 25 bp, Homo sapien
gatgatgtccagttcatggattgcc

SEQ ID NO: 148686 - DNA, 25 bp, Homo sapien
agctggatcgtaggcatgtatctga

SEQ ID NO: 148687 - DNA, 25 bp, Homo sapien
gcagaggactttcttggctgtgtgc

SEQ ID NO: 148688 - DNA, 25 bp, Homo sapien
gccggtactgaagagagccaactgc

SEQ ID NO: 148689 - DNA, 25 bp, Homo sapien
gaattccataaacatgtagatcctg

SEQ ID NO: 148690 - DNA, 25 bp, Homo sapien
gatccaggacatttaaaattggcta

SEQ ID NO: 148691 - DNA, 25 bp, Homo sapien
aaattggctaagtatgtgggtgttg

SEQ ID NO: 148692 - DNA, 25 bp, Homo sapien
tgtgttaaagggagtgcatttgagc

SEQ ID NO: 148693 - DNA, 25 bp, Homo sapien
gcccttgccccgtgtcagtggtgat

SEQ ID NO: 148694 - DNA, 25 bp, Homo sapien
tcaccaacctgagctgaaagtgctg

SEQ ID NO: 148695 - DNA, 25 bp, Homo sapien
agtggtgatcttggactgactccca

SEQ ID NO: 148696 - DNA, 25 bp, Homo sapien
tgctctactcaggacggtcacaagc

SEQ ID NO: 148697 - DNA, 25 bp, Homo sapien
gatagtaataaatgtagggactgcc

SEQ ID NO: 148698 - DNA, 25 bp, Homo sapien
taggtttgagttgccaatacgccag

SEQ ID NO: 148699 - DNA, 25 bp, Homo sapien
gattggctgaggtcatccgtgactg

SEQ ID NO: 148700 - DNA, 25 bp, Homo sapien
cagcagaagctccattggttgaggt

SEQ ID NO: 148701 - DNA, 25 bp, Homo sapien
cttagatgtccacggctgcatgtgc

SEQ ID NO: 148702 - DNA, 25 bp, Homo sapien
cccttagatgtccacggctgcatgt

SEQ ID NO: 148703 - DNA, 25 bp, Homo sapien
gcgaaccccgagcagtcagcatccc

SEQ ID NO: 148704 - DNA, 25 bp, Homo sapien
cgaaccccgagcagtcagcatcccc

SEQ ID NO: 148705 - DNA, 25 bp, Homo sapien
ggagatagcatgaccaagaggccca

SEQ ID NO: 148706 - DNA, 25 bp, Homo sapien
gtaatagaacccattctgggccctg

SEQ ID NO: 148707 - DNA, 25 bp, Homo sapien
tcctaatcagctacccaaatgggag

SEQ ID NO: 148708 - DNA, 25 bp, Homo sapien
taactcagccaagcttctgggaaaa

SEQ ID NO: 148709 - DNA, 25 bp, Homo sapien
cgacccgaaattggtagcggcagcc

SEQ ID NO: 148710 - DNA, 25 bp, Homo sapien
ccgaaattggtagcggcagccctcg

SEQ ID NO: 148711 - DNA, 25 bp, Homo sapien
ccagcagcgcgacccgaaattggta

SEQ ID NO: 148712 - DNA, 25 bp, Homo sapien
gcagcgcgacccgaaattggtagcg

SEQ ID NO: 148713 - DNA, 25 bp, Homo sapien
tttgggtcttgtggatgagccggac

SEQ ID NO: 148714 - DNA, 25 bp, Homo sapien
tgggtcttgtggatgagccggacac

SEQ ID NO: 148715 - DNA, 25 bp, Homo sapien
gggatttgggtcttgtggatgagcc

SEQ ID NO: 148716 - DNA, 25 bp, Homo sapien
gatttgggtcttgtggatgagccgg

SEQ ID NO: 148717 - DNA, 25 bp, Homo sapien
tagaaacccttgactctaaaatcca

SEQ ID NO: 148718 - DNA, 25 bp, Homo sapien
tgtagaaacccttgactctaaaatc

SEQ ID NO: 148719 - DNA, 25 bp, Homo sapien
ttttctgtagaaacccttgactcta

SEQ ID NO: 148720 - DNA, 25 bp, Homo sapien
tctgtagaaacccttgactctaaaa

SEQ ID NO: 148721 - DNA, 25 bp, Homo sapien
tgtaacgcagatgcggcattgttca

SEQ ID NO: 148722 - DNA, 25 bp, Homo sapien
tgtttcctcctaatgactgacctaa

SEQ ID NO: 148723 - DNA, 25 bp, Homo sapien
gactgacctaatgtgttgtgtctcc

SEQ ID NO: 148724 - DNA, 25 bp, Homo sapien
ctagacatgtaggagagccagattc

SEQ ID NO: 148725 - DNA, 25 bp, Homo sapien
tgtcctccaatcattaggctcatgt

SEQ ID NO: 148726 - DNA, 25 bp, Homo sapien
ctaaagagatagaagtagcttaact

SEQ ID NO: 148727 - DNA, 25 bp, Homo sapien
cattaggctcatgttaattctaaag

SEQ ID NO: 148728 - DNA, 25 bp, Homo sapien
gaatcttttcgttctccctcctctg

SEQ ID NO: 148729 - DNA, 25 bp, Homo sapien
tctgttttgctttgcgaagttcttt

SEQ ID NO: 148730 - DNA, 25 bp, Homo sapien
ccagggcacacggcaatgcctattt

SEQ ID NO: 148731 - DNA, 25 bp, Homo sapien
cagggcacacggcaatgcctattta

SEQ ID NO: 148732 - DNA, 25 bp, Homo sapien
gggcacacggcaatgcctatttatt

SEQ ID NO: 148733 - DNA, 25 bp, Homo sapien
agctctgagtacagcccacagcaga

SEQ ID NO: 148734 - DNA, 25 bp, Homo sapien
tgaatggcatcatatgccgcaggtg

SEQ ID NO: 148735 - DNA, 25 bp, Homo sapien
ccgcaggtgtattagtaatttctga

SEQ ID NO: 148736 - DNA, 25 bp, Homo sapien
tatgcaagtttgatttatagacgtg

SEQ ID NO: 148737 - DNA, 25 bp, Homo sapien
caaggagcaggatgctttctgcttg

SEQ ID NO: 148738 - DNA, 25 bp, Homo sapien
ctgggtctccggcatacaaagatga

SEQ ID NO: 148739 - DNA, 25 bp, Homo sapien
tctgcttggcaggaattgataagca

SEQ ID NO: 148740 - DNA, 25 bp, Homo sapien
agagctgcagactcaaggagcagga

SEQ ID NO: 148741 - DNA, 25 bp, Homo sapien
cgtggttaatgactgatcctggagc

SEQ ID NO: 148742 - DNA, 25 bp, Homo sapien
aaagactctggccaatagccctgcg

SEQ ID NO: 148743 - DNA, 25 bp, Homo sapien
gcgatgttcttctccgaggccagag

SEQ ID NO: 148744 - DNA, 25 bp, Homo sapien
tagccctgcgggattaacgcgagtg

SEQ ID NO: 148745 - DNA, 25 bp, Homo sapien
tacgcttaggttaaaggcagctgca

SEQ ID NO: 148746 - DNA, 25 bp, Homo sapien
tctgaacgagaatcctggacttggc

SEQ ID NO: 148747 - DNA, 25 bp, Homo sapien
tgaaccagcacctagaagcgcttgg

SEQ ID NO: 148748 - DNA, 25 bp, Homo sapien
ccaatgacttgctgatctgaacgag

SEQ ID NO: 148749 - DNA, 25 bp, Homo sapien
tggggaaacctggtctctcctagct

SEQ ID NO: 148750 - DNA, 25 bp, Homo sapien
ggggaaacctggtctctcctagctc

SEQ ID NO: 148751 - DNA, 25 bp, Homo sapien
gccccttcggcggccgccgcgcatg

SEQ ID NO: 148752 - DNA, 25 bp, Homo sapien
gcgcagttcaaaccctggcggcagc

SEQ ID NO: 148753 - DNA, 25 bp, Homo sapien
cggcagcggcttgtgcctcgaggcc

SEQ ID NO: 148754 - DNA, 25 bp, Homo sapien
cttccggagagcccaccgctgggtc

SEQ ID NO: 148755 - DNA, 25 bp, Homo sapien
cgcacagaaccaacgcttgcctcgg

SEQ ID NO: 148756 - DNA, 25 bp, Homo sapien
ctgaggcgcacagaaccaacgcttg

SEQ ID NO: 148757 - DNA, 25 bp, Homo sapien
gcacagaaccaacgcttgcctcgga

SEQ ID NO: 148758 - DNA, 25 bp, Homo sapien
aggcgcacagaaccaacgcttgcct

SEQ ID NO: 148759 - DNA, 25 bp, Homo sapien
gcgccgcttcctcgcggtccgcctc

SEQ ID NO: 148760 - DNA, 25 bp, Homo sapien
gctgtgatcggaggaaaccgaggcc

SEQ ID NO: 148761 - DNA, 25 bp, Homo sapien
gggccgaggcgaccctgccccatct

SEQ ID NO: 148762 - DNA, 25 bp, Homo sapien
tgcgcgccccctgaggcgctgtgat

SEQ ID NO: 148763 - DNA, 25 bp, Homo sapien
agaatgggttgaagacaaaggaagt

SEQ ID NO: 148764 - DNA, 25 bp, Homo sapien
aatgggttgaagacaaaggaagtga

SEQ ID NO: 148765 - DNA, 25 bp, Homo sapien
tgcggagaatgggttgaagacaaag

SEQ ID NO: 148766 - DNA, 25 bp, Homo sapien
gcggagaatgggttgaagacaaagg

SEQ ID NO: 148767 - DNA, 25 bp, Homo sapien
ccgcgcccggccttcgatttgcctt

SEQ ID NO: 148768 - DNA, 25 bp, Homo sapien
cgatttgcctttttaatacagctgt

SEQ ID NO: 148769 - DNA, 25 bp, Homo sapien
tttgcctttttaatacagctgtgtg

SEQ ID NO: 148770 - DNA, 25 bp, Homo sapien
tgcctttttaatacagctgtgtgct

SEQ ID NO: 148771 - DNA, 25 bp, Homo sapien
catataaatgagacccagagggcca

SEQ ID NO: 148772 - DNA, 25 bp, Homo sapien
tgcaatgatcaatgggaccccactg

SEQ ID NO: 148773 - DNA, 25 bp, Homo sapien
ggtgaagagcattcccaagtagagg

SEQ ID NO: 148774 - DNA, 25 bp, Homo sapien
gagggccaaaaggaacctgctgtct

SEQ ID NO: 148775 - DNA, 25 bp, Homo sapien
ccttctcattgagcttaaagaccat

SEQ ID NO: 148776 - DNA, 25 bp, Homo sapien
tccccactatatgagacccagctgg

SEQ ID NO: 148777 - DNA, 25 bp, Homo sapien
agcctaacctcattattcttggacg

SEQ ID NO: 148778 - DNA, 25 bp, Homo sapien
ggacaagaaattcggaccagctaaa

SEQ ID NO: 148779 - DNA, 25 bp, Homo sapien
tcggttgtcagcctaacctcattat

SEQ ID NO: 148780 - DNA, 25 bp, Homo sapien
acgcaggacaagaaattcggaccag

SEQ ID NO: 148781 - DNA, 25 bp, Homo sapien
caacagaaggtatcttatggctacg

SEQ ID NO: 148782 - DNA, 25 bp, Homo sapien
caaatagcagggtttgggctcttct

SEQ ID NO: 148783 - DNA, 25 bp, Homo sapien
atagtctatgtgatagcggcaggag

SEQ ID NO: 148784 - DNA, 25 bp, Homo sapien
cacggaccggattgataacccctct

SEQ ID NO: 148785 - DNA, 25 bp, Homo sapien
aaatgaaaagtggaaacatcagcat

SEQ ID NO: 148786 - DNA, 25 bp, Homo sapien
gaaatgaaaagtggaaacatcagca

SEQ ID NO: 148787 - DNA, 25 bp, Homo sapien
ctggaaatgaaaagtggaaacatca

SEQ ID NO: 148788 - DNA, 25 bp, Homo sapien
ggaaatgaaaagtggaaacatcagc

SEQ ID NO: 148789 - DNA, 25 bp, Homo sapien
agaggtagatggcttgtctggtttt

SEQ ID NO: 148790 - DNA, 25 bp, Homo sapien
agatatggtccacctcccataatcg

SEQ ID NO: 148791 - DNA, 25 bp, Homo sapien
gatatggtccacctcccataatcgc

SEQ ID NO: 148792 - DNA, 25 bp, Homo sapien
agagaagaggtagatggcttgtctg

SEQ ID NO: 148793 - DNA, 25 bp, Homo sapien
tgtacctgggctcatttgctgctcc

SEQ ID NO: 148794 - DNA, 25 bp, Homo sapien
tctgggcctcggaacaggtgtacct

SEQ ID NO: 148795 - DNA, 25 bp, Homo sapien
ggcatttctggttgcagctcatcat

SEQ ID NO: 148796 - DNA, 25 bp, Homo sapien
tgctggacagacaccagccgaggtc

SEQ ID NO: 148797 - DNA, 25 bp, Homo sapien
ccgtcattgggagcagagatgtctt

SEQ ID NO: 148798 - DNA, 25 bp, Homo sapien
tctttgggcagtgccgtcattggga

SEQ ID NO: 148799 - DNA, 25 bp, Homo sapien
cagtgccgtcattgggagcagagat

SEQ ID NO: 148800 - DNA, 25 bp, Homo sapien
tcattgggagcagagatgtctttct

SEQ ID NO: 148801 - DNA, 25 bp, Homo sapien
tgatgtctcatactcgtcttcctcc

SEQ ID NO: 148802 - DNA, 25 bp, Homo sapien
tccagagactctagtgaggtaaaac

SEQ ID NO: 148803 - DNA, 25 bp, Homo sapien
gggctccagagttatactttggctt

SEQ ID NO: 148804 - DNA, 25 bp, Homo sapien
gttatactttggcttaactccagag

SEQ ID NO: 148805 - DNA, 25 bp, Homo sapien
gggcccatggagaactactactgtt

SEQ ID NO: 148806 - DNA, 25 bp, Homo sapien
gggttttgagaacacacgctctgcc

SEQ ID NO: 148807 - DNA, 25 bp, Homo sapien
ccttgtttcacggaggagagactct

SEQ ID NO: 148808 - DNA, 25 bp, Homo sapien
tcaagggctcgtgaaaacacagact

SEQ ID NO: 148809 - DNA, 25 bp, Homo sapien
cactggttacttcatatatttgctc

SEQ ID NO: 148810 - DNA, 25 bp, Homo sapien
ctaaaattcagagaatgttaggtcc

SEQ ID NO: 148811 - DNA, 25 bp, Homo sapien
gaaaacaacctgtagaacactctac

SEQ ID NO: 148812 - DNA, 25 bp, Homo sapien
ggtcctgtgttaacaatccatacag

SEQ ID NO: 148813 - DNA, 25 bp, Homo sapien
aaaatatatgtaagagctcctatca

SEQ ID NO: 148814 - DNA, 25 bp, Homo sapien
gagctcctatcatgttaccacaata

SEQ ID NO: 148815 - DNA, 25 bp, Homo sapien
tgtaagagctcctatcatgttacca

SEQ ID NO: 148816 - DNA, 25 bp, Homo sapien
ctatcatgttaccacaataccttgg

SEQ ID NO: 148817 - DNA, 25 bp, Homo sapien
tccaaggaatacgattgtaacatct

SEQ ID NO: 148818 - DNA, 25 bp, Homo sapien
aagtgcagatgcatcatttatccaa

SEQ ID NO: 148819 - DNA, 25 bp, Homo sapien
cagctctacgaccttgggcactttt

SEQ ID NO: 148820 - DNA, 25 bp, Homo sapien
tgtaacatctactcataagactgtc

SEQ ID NO: 148821 - DNA, 25 bp, Homo sapien
gagtgctatagcaaacagcatggat

SEQ ID NO: 148822 - DNA, 25 bp, Homo sapien
tacaattatggcacatggtagagtg

SEQ ID NO: 148823 - DNA, 25 bp, Homo sapien
ctaagccatctacaattatggcaca

SEQ ID NO: 148824 - DNA, 25 bp, Homo sapien
cacatggtagagtgctatagcaaac

SEQ ID NO: 148825 - DNA, 25 bp, Homo sapien
taccacgagagcaagtacaccatca

SEQ ID NO: 148826 - DNA, 25 bp, Homo sapien
tcctggtcatctctagggaagtctc

SEQ ID NO: 148827 - DNA, 25 bp, Homo sapien
ggaaatctcccaactcaagactaga

SEQ ID NO: 148828 - DNA, 25 bp, Homo sapien
tatgttaggtaagttgaaagctcac

SEQ ID NO: 148829 - DNA, 25 bp, Homo sapien
tgaagaaacaagcgtcccaaataaa

SEQ ID NO: 148830 - DNA, 25 bp, Homo sapien
gctgaagaaacaagcgtcccaaata

SEQ ID NO: 148831 - DNA, 25 bp, Homo sapien
ctgaagaaacaagcgtcccaaataa

SEQ ID NO: 148832 - DNA, 25 bp, Homo sapien
ctgagctgaagaaacaagcgtccca

SEQ ID NO: 148833 - DNA, 25 bp, Homo sapien
ggatactgttttacgagccagtcca

SEQ ID NO: 148834 - DNA, 25 bp, Homo sapien
tctggtggatactgttttacgagcc

SEQ ID NO: 148835 - DNA, 25 bp, Homo sapien
ttttacgagccagtccacgtcaaag

SEQ ID NO: 148836 - DNA, 25 bp, Homo sapien
agtccacgtcaaagcagtagttaaa

SEQ ID NO: 148837 - DNA, 25 bp, Homo sapien
tgtgaggcacatctgttccaagcct

SEQ ID NO: 148838 - DNA, 25 bp, Homo sapien
tactgtattagtgtgccagggcctc

SEQ ID NO: 148839 - DNA, 25 bp, Homo sapien
tcgtaatagccttcccaagatgcat

SEQ ID NO: 148840 - DNA, 25 bp, Homo sapien
ggcacctgaacaatagcatactgag

SEQ ID NO: 148841 - DNA, 25 bp, Homo sapien
gatgttctcgtaaggcttggcctgg

SEQ ID NO: 148842 - DNA, 25 bp, Homo sapien
tgagccttagcctctcgcttatcac

SEQ ID NO: 148843 - DNA, 25 bp, Homo sapien
atggaggtgagccttagcctctcgc

SEQ ID NO: 148844 - DNA, 25 bp, Homo sapien
gagagagatgttctcgtaaggcttg

SEQ ID NO: 148845 - DNA, 25 bp, Homo sapien
ggtgtgttccaaacgcaatatccaa

SEQ ID NO: 148846 - DNA, 25 bp, Homo sapien
gtggtgtgttccaaacgcaatatcc

SEQ ID NO: 148847 - DNA, 25 bp, Homo sapien
tgtgttccaaacgcaatatccaact

SEQ ID NO: 148848 - DNA, 25 bp, Homo sapien
ttccaaacgcaatatccaactttgc

SEQ ID NO: 148849 - DNA, 25 bp, Homo sapien
aggtgtgtatgacaacccggaggcc

SEQ ID NO: 148850 - DNA, 25 bp, Homo sapien
tgtgtatgacaacccggaggccttc

SEQ ID NO: 148851 - DNA, 25 bp, Homo sapien
tttctggtgccagtcagcatggatg

SEQ ID NO: 148852 - DNA, 25 bp, Homo sapien
ttttctggtgccagtcagcatggat

SEQ ID NO: 148853 - DNA, 25 bp, Homo sapien
ctttatcaacacacacactgccagg

SEQ ID NO: 148854 - DNA, 25 bp, Homo sapien
acacacacactgccaggaagtgagc

SEQ ID NO: 148855 - DNA, 25 bp, Homo sapien
acacactgccaggaagtgagcaggc

SEQ ID NO: 148856 - DNA, 25 bp, Homo sapien
aggaagtgagcaggcccctacgaac

SEQ ID NO: 148857 - DNA, 25 bp, Homo sapien
tggtgctagacaaacgtccgagttt

SEQ ID NO: 148858 - DNA, 25 bp, Homo sapien
tagacaaacgtccgagtttctccca

SEQ ID NO: 148859 - DNA, 25 bp, Homo sapien
gctagacaaacgtccgagtttctcc

SEQ ID NO: 148860 - DNA, 25 bp, Homo sapien
gtgctagacaaacgtccgagtttct

SEQ ID NO: 148861 - DNA, 25 bp, Homo sapien
cagtactactgcctgtaagctaagc

SEQ ID NO: 148862 - DNA, 25 bp, Homo sapien
taataggatcccacaccaggatggc

SEQ ID NO: 148863 - DNA, 25 bp, Homo sapien
gggattagcagaaccacagtagacc

SEQ ID NO: 148864 - DNA, 25 bp, Homo sapien
gagagtagaatataggccaagcatg

SEQ ID NO: 148865 - DNA, 25 bp, Homo sapien
aaagttcccaggctgagtgaggctc

SEQ ID NO: 148866 - DNA, 25 bp, Homo sapien
ggaggacctccccttgcaatagcac

SEQ ID NO: 148867 - DNA, 25 bp, Homo sapien
ttgcctccgtgtgtaaaatgaccag

SEQ ID NO: 148868 - DNA, 25 bp, Homo sapien
gcaatagcacctcaaagttcccagg

SEQ ID NO: 148869 - DNA, 25 bp, Homo sapien
tgtgggttccatcagcaattcgtgg

SEQ ID NO: 148870 - DNA, 25 bp, Homo sapien
cgtgcttgtgaatgacatctatcca

SEQ ID NO: 148871 - DNA, 25 bp, Homo sapien
ttgtttcagagagatcgtgcttgtg

SEQ ID NO: 148872 - DNA, 25 bp, Homo sapien
cagctttaaaatgtgttggcgactc

SEQ ID NO: 148873 - DNA, 25 bp, Homo sapien
tgccagacctcatgaggctcccaag

SEQ ID NO: 148874 - DNA, 25 bp, Homo sapien
caccccaaattgataagctgacaca

SEQ ID NO: 148875 - DNA, 25 bp, Homo sapien
agcctatcataagcaccccaaattg

SEQ ID NO: 148876 - DNA, 25 bp, Homo sapien
ctttccaggcccctgcatgccagac

SEQ ID NO: 148877 - DNA, 25 bp, Homo sapien
agcgtcctggggttgaaccaataag

SEQ ID NO: 148878 - DNA, 25 bp, Homo sapien
tttgacttccttgaaagcgtcctgg

SEQ ID NO: 148879 - DNA, 25 bp, Homo sapien
tcctggggttgaaccaataagataa

SEQ ID NO: 148880 - DNA, 25 bp, Homo sapien
taagtctaaaatgtccccaattatc

SEQ ID NO: 148881 - DNA, 25 bp, Homo sapien
aacactgcagaagactgatctgcat

SEQ ID NO: 148882 - DNA, 25 bp, Homo sapien
cactgcagaagactgatctgcattt

SEQ ID NO: 148883 - DNA, 25 bp, Homo sapien
aaaacactgcagaagactgatctgc

SEQ ID NO: 148884 - DNA, 25 bp, Homo sapien
actgcagaagactgatctgcatttc

SEQ ID NO: 148885 - DNA, 25 bp, Homo sapien
tctgcgtgccattcatgctaggccc

SEQ ID NO: 148886 - DNA, 25 bp, Homo sapien
tgctccaagagcaaagcagtatcct

SEQ ID NO: 148887 - DNA, 25 bp, Homo sapien
gaccaaatggactgcctggtagaga

SEQ ID NO: 148888 - DNA, 25 bp, Homo sapien
agtaaggaagtatccacctgcttgc

SEQ ID NO: 148889 - DNA, 25 bp, Homo sapien
cagcaatggccagtgatgtaatcaa

SEQ ID NO: 148890 - DNA, 25 bp, Homo sapien
ggtttagggagctttccgacagctg

SEQ ID NO: 148891 - DNA, 25 bp, Homo sapien
gaagattgggacttttggcacaacc

SEQ ID NO: 148892 - DNA, 25 bp, Homo sapien
gggctaaaggttgagctgatcagca

SEQ ID NO: 148893 - DNA, 25 bp, Homo sapien
ccaggactctgcgttaggcatggat

SEQ ID NO: 148894 - DNA, 25 bp, Homo sapien
ccaaggagccaacgcttgaaaactg

SEQ ID NO: 148895 - DNA, 25 bp, Homo sapien
actttgattcatcggctcccaagga

SEQ ID NO: 148896 - DNA, 25 bp, Homo sapien
tgaaaactgacctacgacaggccag

SEQ ID NO: 148897 - DNA, 25 bp, Homo sapien
gatatccttctaaactggtccgcac

SEQ ID NO: 148898 - DNA, 25 bp, Homo sapien
aactggtccgcacattttccacaga

SEQ ID NO: 148899 - DNA, 25 bp, Homo sapien
tccttctaaactggtccgcacattt

SEQ ID NO: 148900 - DNA, 25 bp, Homo sapien
ttctaaactggtccgcacattttcc

SEQ ID NO: 148901 - DNA, 25 bp, Homo sapien
agccaattctgtttttcagctgtct

SEQ ID NO: 148902 - DNA, 25 bp, Homo sapien
tgaaaataggaatgcagccaattct

SEQ ID NO: 148903 - DNA, 25 bp, Homo sapien
attctgtttttcagctgtctggatg

SEQ ID NO: 148904 - DNA, 25 bp, Homo sapien
caattctgtttttcagctgtctgga

SEQ ID NO: 148905 - DNA, 25 bp, Homo sapien
gaaactccattcaagtaacgcatgc

SEQ ID NO: 148906 - DNA, 25 bp, Homo sapien
cacggtgtgttatgagtagaggctc

SEQ ID NO: 148907 - DNA, 25 bp, Homo sapien
cctaatattaggaaactgcatgaaa

SEQ ID NO: 148908 - DNA, 25 bp, Homo sapien
taaaaatcaacagtggctacacgac

SEQ ID NO: 148909 - DNA, 25 bp, Homo sapien
tatatgtcttaatatgtggcatggc

SEQ ID NO: 148910 - DNA, 25 bp, Homo sapien
gcatggcattgctgcggccagaagt

SEQ ID NO: 148911 - DNA, 25 bp, Homo sapien
gtgacaaggaaccaagcaattttac

SEQ ID NO: 148912 - DNA, 25 bp, Homo sapien
cttgtgacaaggaaccaagcaattt

SEQ ID NO: 148913 - DNA, 25 bp, Homo sapien
cacctctttacttagtttagctgat

SEQ ID NO: 148914 - DNA, 25 bp, Homo sapien
tttacttagtttagctgatctctca

SEQ ID NO: 148915 - DNA, 25 bp, Homo sapien
tctgccccagcaaggcaatacattt

SEQ ID NO: 148916 - DNA, 25 bp, Homo sapien
aacagtgcttccactatggtcctca

SEQ ID NO: 148917 - DNA, 25 bp, Homo sapien
aggcaaccccggagacatcaaagaa

SEQ ID NO: 148918 - DNA, 25 bp, Homo sapien
ccggagacatcaaagaaacggtaat

SEQ ID NO: 148919 - DNA, 25 bp, Homo sapien
caaccccggagacatcaaagaaacg

SEQ ID NO: 148920 - DNA, 25 bp, Homo sapien
ggagacatcaaagaaacggtaatat

SEQ ID NO: 148921 - DNA, 25 bp, Homo sapien
ggcagcctccttggggctgttgatc

SEQ ID NO: 148922 - DNA, 25 bp, Homo sapien
tcagctccagaaagcctaacagcat

SEQ ID NO: 148923 - DNA, 25 bp, Homo sapien
tgatcagctccagaaagcctaacag

SEQ ID NO: 148924 - DNA, 25 bp, Homo sapien
tggggctgttgatcagctccagaaa

SEQ ID NO: 148925 - DNA, 25 bp, Homo sapien
ctgcatagcacaaggaaggtttcca

SEQ ID NO: 148926 - DNA, 25 bp, Homo sapien
aggaaggtttccactaagacctgag

SEQ ID NO: 148927 - DNA, 25 bp, Homo sapien
aggtttccactaagacctgagatag

SEQ ID NO: 148928 - DNA, 25 bp, Homo sapien
caaggaaggtttccactaagacctg

SEQ ID NO: 148929 - DNA, 25 bp, Homo sapien
tgttttcctgagtcccatagtacac

SEQ ID NO: 148930 - DNA, 25 bp, Homo sapien
cagtgtcctgggaatgattcttgtc

SEQ ID NO: 148931 - DNA, 25 bp, Homo sapien
gagtcccatagtacacagtgtcctg

SEQ ID NO: 148932 - DNA, 25 bp, Homo sapien
tagtacacagtgtcctgggaatgat

SEQ ID NO: 148933 - DNA, 25 bp, Homo sapien
tgctgctggataccgagtgatgctt

SEQ ID NO: 148934 - DNA, 25 bp, Homo sapien
ctggataccgagtgatgcttcatca

SEQ ID NO: 148935 - DNA, 25 bp, Homo sapien
tcccaagtgctgtggtttgtgttgt

SEQ ID NO: 148936 - DNA, 25 bp, Homo sapien
tgttgctgctggataccgagtgatg

SEQ ID NO: 148937 - DNA, 25 bp, Homo sapien
gagctcgtaggagcggatcatcagc

SEQ ID NO: 148938 - DNA, 25 bp, Homo sapien
agcggatcatcagctgggtgccatt

SEQ ID NO: 148939 - DNA, 25 bp, Homo sapien
aaaggaccccgagctcgtaggagcg

SEQ ID NO: 148940 - DNA, 25 bp, Homo sapien
tgggtgccattcttctccaatgctc

SEQ ID NO: 148941 - DNA, 25 bp, Homo sapien
ccagagaacgaagcctccacttcat

SEQ ID NO: 148942 - DNA, 25 bp, Homo sapien
ttatccatgcgttaccagagaacga

SEQ ID NO: 148943 - DNA, 25 bp, Homo sapien
ttaccagagaacgaagcctccactt

SEQ ID NO: 148944 - DNA, 25 bp, Homo sapien
cctcagcttatccatgcgttaccag

SEQ ID NO: 148945 - DNA, 25 bp, Homo sapien
agtccggacatcatctcgtgggcca

SEQ ID NO: 148946 - DNA, 25 bp, Homo sapien
cctgacatgtgggtagaaacccagc

SEQ ID NO: 148947 - DNA, 25 bp, Homo sapien
tgatgtcacacaaaggagtccggac

SEQ ID NO: 148948 - DNA, 25 bp, Homo sapien
ctgagggtttaagggcagaggaaca

SEQ ID NO: 148949 - DNA, 25 bp, Homo sapien
actgtgcctaggtttcaatttctgt

SEQ ID NO: 148950 - DNA, 25 bp, Homo sapien
cactgtgcctaggtttcaatttctg

SEQ ID NO: 148951 - DNA, 25 bp, Homo sapien
aatttctgtgtttgtccgcatattc

SEQ ID NO: 148952 - DNA, 25 bp, Homo sapien
ttctgtgtttgtccgcatattctca

SEQ ID NO: 148953 - DNA, 25 bp, Homo sapien
acccttcaaatcctcaataggcaca

SEQ ID NO: 148954 - DNA, 25 bp, Homo sapien
ggcacatacccaacagtgctgatgt

SEQ ID NO: 148955 - DNA, 25 bp, Homo sapien
cttcaaatcctcaataggcacatac

SEQ ID NO: 148956 - DNA, 25 bp, Homo sapien
tccacacacatatccacccttcaaa

SEQ ID NO: 148957 - DNA, 25 bp, Homo sapien
cctcgtgcttccatacattgaccaa

SEQ ID NO: 148958 - DNA, 25 bp, Homo sapien
tcgtgcttccatacattgaccaact

SEQ ID NO: 148959 - DNA, 25 bp, Homo sapien
cgatgtgccccctcgtgcttccata

SEQ ID NO: 148960 - DNA, 25 bp, Homo sapien
gcttccatacattgaccaactcctg

SEQ ID NO: 148961 - DNA, 25 bp, Homo sapien
gacacacagaggaaatctatgattg

SEQ ID NO: 148962 - DNA, 25 bp, Homo sapien
acagaggaaatctatgattgcaccc

SEQ ID NO: 148963 - DNA, 25 bp, Homo sapien
gaaatctatgattgcaccccatttt

SEQ ID NO: 148964 - DNA, 25 bp, Homo sapien
cacacagaggaaatctatgattgca

SEQ ID NO: 148965 - DNA, 25 bp, Homo sapien
gctgccagcgaagaacttctgtttc

SEQ ID NO: 148966 - DNA, 25 bp, Homo sapien
aggaaaggtggccattggctcctgg

SEQ ID NO: 148967 - DNA, 25 bp, Homo sapien
tggctgccagcgaagaacttctgtt

SEQ ID NO: 148968 - DNA, 25 bp, Homo sapien
aaaggtggccattggctcctggctg

SEQ ID NO: 148969 - DNA, 25 bp, Homo sapien
tttacttccatacagttctggaggc

SEQ ID NO: 148970 - DNA, 25 bp, Homo sapien
tacttccatacagttctggaggcaa

SEQ ID NO: 148971 - DNA, 25 bp, Homo sapien
ctttacttccatacagttctggagg

SEQ ID NO: 148972 - DNA, 25 bp, Homo sapien
acttccatacagttctggaggcaaa

SEQ ID NO: 148973 - DNA, 25 bp, Homo sapien
caaacttgagcttccagagggttcc

SEQ ID NO: 148974 - DNA, 25 bp, Homo sapien
tgatcatgtttagggtaggctagac

SEQ ID NO: 148975 - DNA, 25 bp, Homo sapien
caagactaaccagtggctacaaggc

SEQ ID NO: 148976 - DNA, 25 bp, Homo sapien
tttcttatgcatatccacccgtggt

SEQ ID NO: 148977 - DNA, 25 bp, Homo sapien
gaggactcaacagaaaggcataggg

SEQ ID NO: 148978 - DNA, 25 bp, Homo sapien
tgttaacaccatctaagaaagggcc

SEQ ID NO: 148979 - DNA, 25 bp, Homo sapien
gatagccttgctaccgaaaacgaaa

SEQ ID NO: 148980 - DNA, 25 bp, Homo sapien
caggatggcacactggacagcatga

SEQ ID NO: 148981 - DNA, 25 bp, Homo sapien
gctcttctagtgcttccatttttgc

SEQ ID NO: 148982 - DNA, 25 bp, Homo sapien
cttcttagtcctttgaagattagga

SEQ ID NO: 148983 - DNA, 25 bp, Homo sapien
ctcttctagtgcttccatttttgcc

SEQ ID NO: 148984 - DNA, 25 bp, Homo sapien
tttgccttcttagtcctttgaagat

SEQ ID NO: 148985 - DNA, 25 bp, Homo sapien
acagtaactactgcaccaagcaggg

SEQ ID NO: 148986 - DNA, 25 bp, Homo sapien
ccaagcagggtatactggtagctga

SEQ ID NO: 148987 - DNA, 25 bp, Homo sapien
gcacctagatggtgtctgcacacaa

SEQ ID NO: 148988 - DNA, 25 bp, Homo sapien
taggctctcaatatagatctgtgga

SEQ ID NO: 148989 - DNA, 25 bp, Homo sapien
tacgagacatgccagctagaaatgc

SEQ ID NO: 148990 - DNA, 25 bp, Homo sapien
tactatcgtacttgcatcatgcggt

SEQ ID NO: 148991 - DNA, 25 bp, Homo sapien
tctatgcgaaacctgatgtacgacc

SEQ ID NO: 148992 - DNA, 25 bp, Homo sapien
tagcactgtagaggatggcttccag

SEQ ID NO: 148993 - DNA, 25 bp, Homo sapien
atgcttgtttcctaagaggctgagg

SEQ ID NO: 148994 - DNA, 25 bp, Homo sapien
tccccattgcactcattggcctcag

SEQ ID NO: 148995 - DNA, 25 bp, Homo sapien
ttgtttcctaagaggctgagggtct

SEQ ID NO: 148996 - DNA, 25 bp, Homo sapien
attgcactcattggcctcagcaagc

SEQ ID NO: 148997 - DNA, 25 bp, Homo sapien
agacaacagcttttagcgaaggctc

SEQ ID NO: 148998 - DNA, 25 bp, Homo sapien
aactgtggtagagtattttctgaac

SEQ ID NO: 148999 - DNA, 25 bp, Homo sapien
tgtgcttgactctctaaactgtggt

SEQ ID NO: 149000 - DNA, 25 bp, Homo sapien
tttagcgaaggctcctattaggaca

SEQ ID NO: 149001 - DNA, 25 bp, Homo sapien
gttcccatgcgtatccggtgctttg

SEQ ID NO: 149002 - DNA, 25 bp, Homo sapien
tcccatgcgtatccggtgctttgac

SEQ ID NO: 149003 - DNA, 25 bp, Homo sapien
atgttcccatgcgtatccggtgctt

SEQ ID NO: 149004 - DNA, 25 bp, Homo sapien
catgcgtatccggtgctttgacata

SEQ ID NO: 149005 - DNA, 25 bp, Homo sapien
tgtggctcaatgtcttacacttaaa

SEQ ID NO: 149006 - DNA, 25 bp, Homo sapien
catccattcataagagtgacctttg

SEQ ID NO: 149007 - DNA, 25 bp, Homo sapien
gaagagattccatgtttgtggctca

SEQ ID NO: 149008 - DNA, 25 bp, Homo sapien
agactttaagggaagtggacatcca

SEQ ID NO: 149009 - DNA, 25 bp, Homo sapien
gaaacagcacattggtctcagagac

SEQ ID NO: 149010 - DNA, 25 bp, Homo sapien
aatgatcgtgttcttcctgggtaaa

SEQ ID NO: 149011 - DNA, 25 bp, Homo sapien
gatgaatcacggtcaaaagcctgtc

SEQ ID NO: 149012 - DNA, 25 bp, Homo sapien
gctgacagcaccaagagattctatg

SEQ ID NO: 149013 - DNA, 25 bp, Homo sapien
gtcaatacaattcttagctgcaggg

SEQ ID NO: 149014 - DNA, 25 bp, Homo sapien
gacctgtctgtaagcagtgaggcag

SEQ ID NO: 149015 - DNA, 25 bp, Homo sapien
aagctatgaaaagccgctgtgagga

SEQ ID NO: 149016 - DNA, 25 bp, Homo sapien
gaagcctcgtaaagctgaagctgaa

SEQ ID NO: 149017 - DNA, 25 bp, Homo sapien
caccctagggagaacacaatgtaca

SEQ ID NO: 149018 - DNA, 25 bp, Homo sapien
actgcagcctacaaggttcctaagg

SEQ ID NO: 149019 - DNA, 25 bp, Homo sapien
aaagacactcaagctctgagccccg

SEQ ID NO: 149020 - DNA, 25 bp, Homo sapien
tgatgacaaactggaaatcagcctc

SEQ ID NO: 149021 - DNA, 25 bp, Homo sapien
atagagggtagggtcacaaaaggct

SEQ ID NO: 149022 - DNA, 25 bp, Homo sapien
aatgttttcgtacatagagggtagg

SEQ ID NO: 149023 - DNA, 25 bp, Homo sapien
catgatgtcgcctttcactaccagc

SEQ ID NO: 149024 - DNA, 25 bp, Homo sapien
gttgagctcatctgatgtcgagttg

SEQ ID NO: 149025 - DNA, 25 bp, Homo sapien
gaggaatactactccaagtgtgagt

SEQ ID NO: 149026 - DNA, 25 bp, Homo sapien
gacttggagtagtactcctctaggc

SEQ ID NO: 149027 - DNA, 25 bp, Homo sapien
tgtgagtactactgccagacttgga

SEQ ID NO: 149028 - DNA, 25 bp, Homo sapien
cccagggcctagaggaatactactc

SEQ ID NO: 149029 - DNA, 25 bp, Homo sapien
ccctgttgagtaaaaccgtgtgatt

SEQ ID NO: 149030 - DNA, 25 bp, Homo sapien
gtgatttcgaataaagaaacacagc

SEQ ID NO: 149031 - DNA, 25 bp, Homo sapien
gaagggctaggagccctgttgagta

SEQ ID NO: 149032 - DNA, 25 bp, Homo sapien
gagtaaaaccgtgtgatttcgaata

SEQ ID NO: 149033 - DNA, 25 bp, Homo sapien
gcggagcacaggtccgcaccgcgct

SEQ ID NO: 149034 - DNA, 25 bp, Homo sapien
tccgcaccgcgctctgccttctcag

SEQ ID NO: 149035 - DNA, 25 bp, Homo sapien
ccggcgcgcggagcacaggtccgca

SEQ ID NO: 149036 - DNA, 25 bp, Homo sapien
cacaggtccgcaccgcgctctgcct

SEQ ID NO: 149037 - DNA, 25 bp, Homo sapien
cgccgctccgtcgggactgttcccg

SEQ ID NO: 149038 - DNA, 25 bp, Homo sapien
gggactgttcccgggcctcctggca

SEQ ID NO: 149039 - DNA, 25 bp, Homo sapien
tctccgcgccgctccgtcgggactg

SEQ ID NO: 149040 - DNA, 25 bp, Homo sapien
cgcgccgctccgtcgggactgttcc

SEQ ID NO: 149041 - DNA, 25 bp, Homo sapien
ctggacgcggggtccgcgcagaagg

SEQ ID NO: 149042 - DNA, 25 bp, Homo sapien
gacgcggggtccgcgcagaaggcat

SEQ ID NO: 149043 - DNA, 25 bp, Homo sapien
tggacgcggggtccgcgcagaaggc

SEQ ID NO: 149044 - DNA, 25 bp, Homo sapien
ggacgcggggtccgcgcagaaggca

SEQ ID NO: 149045 - DNA, 25 bp, Homo sapien
ggctccgcggccaggagaccttgac

SEQ ID NO: 149046 - DNA, 25 bp, Homo sapien
tgcctagtgcgttccagagttttgc

SEQ ID NO: 149047 - DNA, 25 bp, Homo sapien
gccccgcttccggagaggaggccaa

SEQ ID NO: 149048 - DNA, 25 bp, Homo sapien
accttggagcgttccatctcttccc

SEQ ID NO: 149049 - DNA, 25 bp, Homo sapien
ctcctagttgtggtcgtggtgtcgc

SEQ ID NO: 149050 - DNA, 25 bp, Homo sapien
gatcgacgatggtgcctcctagttg

SEQ ID NO: 149051 - DNA, 25 bp, Homo sapien
ggctttgtaggtgcctccccaggta

SEQ ID NO: 149052 - DNA, 25 bp, Homo sapien
ccgagtctccgaatcggctgccggg

SEQ ID NO: 149053 - DNA, 25 bp, Homo sapien
ctggttcctttgactatcgcttcgc

SEQ ID NO: 149054 - DNA, 25 bp, Homo sapien
ggtccggaggtctgcgggtaagcag

SEQ ID NO: 149055 - DNA, 25 bp, Homo sapien
gtctgcgggtaagcagagcgccggg

SEQ ID NO: 149056 - DNA, 25 bp, Homo sapien
ctttgactatcgcttcgcaggccgc

SEQ ID NO: 149057 - DNA, 25 bp, Homo sapien
gggatgcgggcgcagtttccacccc

SEQ ID NO: 149058 - DNA, 25 bp, Homo sapien
cttcagggcaagctcgagccaactc

SEQ ID NO: 149059 - DNA, 25 bp, Homo sapien
gagccaactcgagtttcccgcaaag

SEQ ID NO: 149060 - DNA, 25 bp, Homo sapien
gggcgtggcgcgtcttcagggcaag

SEQ ID NO: 149061 - DNA, 25 bp, Homo sapien
tcaaatccgctttgtcgccgccgtt

SEQ ID NO: 149062 - DNA, 25 bp, Homo sapien
tcggtagctcctgtggcgccagctc

SEQ ID NO: 149063 - DNA, 25 bp, Homo sapien
gggaacgggcgcagagttcacgtct

SEQ ID NO: 149064 - DNA, 25 bp, Homo sapien
acgtcctccttgactcctagtttca

SEQ ID NO: 149065 - DNA, 25 bp, Homo sapien
ggaaataagggccccggcgctcagc

SEQ ID NO: 149066 - DNA, 25 bp, Homo sapien
aggcccacggcaccgggcgtcggcg

SEQ ID NO: 149067 - DNA, 25 bp, Homo sapien
ccaggcccacggcaccgggcgtcgg

SEQ ID NO: 149068 - DNA, 25 bp, Homo sapien
aataagggccccggcgctcagccag

SEQ ID NO: 149069 - DNA, 25 bp, Homo sapien
agaaagcgcgcgttgtcctcgttca

SEQ ID NO: 149070 - DNA, 25 bp, Homo sapien
gttgtccacgcggatgccggcccga

SEQ ID NO: 149071 - DNA, 25 bp, Homo sapien
cctcctcgtagtggcggaggaagcc

SEQ ID NO: 149072 - DNA, 25 bp, Homo sapien
ctatggtggaaacgacggtgcccac

SEQ ID NO: 149073 - DNA, 25 bp, Homo sapien
tacccagttatggtggtgccatcat

SEQ ID NO: 149074 - DNA, 25 bp, Homo sapien
ccatgggggtgttattcctccttca

SEQ ID NO: 149075 - DNA, 25 bp, Homo sapien
ttcaccaatcttgggcccattctgg

SEQ ID NO: 149076 - DNA, 25 bp, Homo sapien
cattctggtctgctgcaaggtttcc

SEQ ID NO: 149077 - DNA, 25 bp, Homo sapien
tgagcttccccacgaaattttagaa

SEQ ID NO: 149078 - DNA, 25 bp, Homo sapien
cactgctataactggaaacggagag

SEQ ID NO: 149079 - DNA, 25 bp, Homo sapien
tatcctgagtggaggtaagctctca

SEQ ID NO: 149080 - DNA, 25 bp, Homo sapien
tctaatggctgagatgttccccagg

SEQ ID NO: 149081 - DNA, 25 bp, Homo sapien
cccaaagataaggaagcccagagct

SEQ ID NO: 149082 - DNA, 25 bp, Homo sapien
ccctttcaaggagaggcgattcgtt

SEQ ID NO: 149083 - DNA, 25 bp, Homo sapien
gaaggtcctggtataatgtctggca

SEQ ID NO: 149084 - DNA, 25 bp, Homo sapien
gcttataaggatgactctctggcca

SEQ ID NO: 149085 - DNA, 25 bp, Homo sapien
tgaatgatgaaccaaagcctaaggg

SEQ ID NO: 149086 - DNA, 25 bp, Homo sapien
cacgtggtcactttaactggcgatc

SEQ ID NO: 149087 - DNA, 25 bp, Homo sapien
gagacaccatctaagcctggcagaa

SEQ ID NO: 149088 - DNA, 25 bp, Homo sapien
gaatctttatctcaaccatggaggg

SEQ ID NO: 149089 - DNA, 25 bp, Homo sapien
taagaaacgcgtgccaaagagaaag

SEQ ID NO: 149090 - DNA, 25 bp, Homo sapien
taatcttacaagtctagaaggaggc

SEQ ID NO: 149091 - DNA, 25 bp, Homo sapien
gaaagtcagcgtgtggcctgctctg

SEQ ID NO: 149092 - DNA, 25 bp, Homo sapien
tctccggagagatgcagtcgtttga

SEQ ID NO: 149093 - DNA, 25 bp, Homo sapien
tatttctgccgctatgcttgtttgg

SEQ ID NO: 149094 - DNA, 25 bp, Homo sapien
tgggatatgcattcacccatcactt

SEQ ID NO: 149095 - DNA, 25 bp, Homo sapien
atcacttgagagcccacacgtgcca

SEQ ID NO: 149096 - DNA, 25 bp, Homo sapien
tccaggatggtaaggtgctgagggc

SEQ ID NO: 149097 - DNA, 25 bp, Homo sapien
aaccatctctacagtctccaccgtg

SEQ ID NO: 149098 - DNA, 25 bp, Homo sapien
ctgtgcctgatttgtcacgtacaaa

SEQ ID NO: 149099 - DNA, 25 bp, Homo sapien
tgaacgtttgcatcacccctaaaag

SEQ ID NO: 149100 - DNA, 25 bp, Homo sapien
gagatttatccgttgtggacatttc

SEQ ID NO: 149101 - DNA, 25 bp, Homo sapien
gatgtcactagtgggtatagcacca

SEQ ID NO: 149102 - DNA, 25 bp, Homo sapien
caaagagatgtcactagtgggtata

SEQ ID NO: 149103 - DNA, 25 bp, Homo sapien
gcaccaatctgtgcaaattggaaag

SEQ ID NO: 149104 - DNA, 25 bp, Homo sapien
agtgggtatagcaccaatctgtgca

SEQ ID NO: 149105 - DNA, 25 bp, Homo sapien
ttttctggccatactcttcccctgg

SEQ ID NO: 149106 - DNA, 25 bp, Homo sapien
cttctagacactgcctgcctcgatg

SEQ ID NO: 149107 - DNA, 25 bp, Homo sapien
cactgttgccttctagacactgcct

SEQ ID NO: 149108 - DNA, 25 bp, Homo sapien
tcttctgggccatataacagaaaat

SEQ ID NO: 149109 - DNA, 25 bp, Homo sapien
tccatatgaaatgatctgtttgcag

SEQ ID NO: 149110 - DNA, 25 bp, Homo sapien
ccttctgggccatgatgggccagta

SEQ ID NO: 149111 - DNA, 25 bp, Homo sapien
aatgctcctttcttatctgtggcag

SEQ ID NO: 149112 - DNA, 25 bp, Homo sapien
cattcaaggcctagttcaatggcca

SEQ ID NO: 149113 - DNA, 25 bp, Homo sapien
actgcccctgtacatcatttgccta

SEQ ID NO: 149114 - DNA, 25 bp, Homo sapien
ggagtactgcccctgtacatcattt

SEQ ID NO: 149115 - DNA, 25 bp, Homo sapien
ctctggagtactgcccctgtacatc

SEQ ID NO: 149116 - DNA, 25 bp, Homo sapien
agtactgcccctgtacatcatttgc

SEQ ID NO: 149117 - DNA, 25 bp, Homo sapien
cagacagaccttctctgatgtggct

SEQ ID NO: 149118 - DNA, 25 bp, Homo sapien
tgaagaagttcctgttagcatgtac

SEQ ID NO: 149119 - DNA, 25 bp, Homo sapien
tagcatgtacacctgaaactggaaa

SEQ ID NO: 149120 - DNA, 25 bp, Homo sapien
ccttcctgtgcatcagacagacctt

SEQ ID NO: 149121 - DNA, 25 bp, Homo sapien
ctgtcattgtaaccaatcacgcaat

SEQ ID NO: 149122 - DNA, 25 bp, Homo sapien
tacaaatgtccttaacctacaagta

SEQ ID NO: 149123 - DNA, 25 bp, Homo sapien
taaccaatcacgcaatggcagctgg

SEQ ID NO: 149124 - DNA, 25 bp, Homo sapien
atgtccttaacctacaagtaaccat

SEQ ID NO: 149125 - DNA, 25 bp, Homo sapien
ccatttgtatttgacaagaaccagt

SEQ ID NO: 149126 - DNA, 25 bp, Homo sapien
ttatcaagaacagacagacccaggc

SEQ ID NO: 149127 - DNA, 25 bp, Homo sapien
cctgattgattgtgtttatggccct

SEQ ID NO: 149128 - DNA, 25 bp, Homo sapien
caggccatctgcctgattgattgtg

SEQ ID NO: 149129 - DNA, 25 bp, Homo sapien
ttgacaagccatttgtgttcatcat

SEQ ID NO: 149130 - DNA, 25 bp, Homo sapien
tctccttgacaagccatttgtgttc

SEQ ID NO: 149131 - DNA, 25 bp, Homo sapien
tccttgacaagccatttgtgttcat

SEQ ID NO: 149132 - DNA, 25 bp, Homo sapien
ccttgacaagccatttgtgttcatc

SEQ ID NO: 149133 - DNA, 25 bp, Homo sapien
gaggacaggtacacaaggcccctct

SEQ ID NO: 149134 - DNA, 25 bp, Homo sapien
gtggccgttggtgtaaaaagcagaa

SEQ ID NO: 149135 - DNA, 25 bp, Homo sapien
agccccaccctgatcagcactctcc

SEQ ID NO: 149136 - DNA, 25 bp, Homo sapien
tgtacttcttggcctagggtgggtc

SEQ ID NO: 149137 - DNA, 25 bp, Homo sapien
tttcacaagctttccctcctcacgg

SEQ ID NO: 149138 - DNA, 25 bp, Homo sapien
tcctcacggtcagccaggatgatgg

SEQ ID NO: 149139 - DNA, 25 bp, Homo sapien
ggcatttagtgctgtgttttctgct

SEQ ID NO: 149140 - DNA, 25 bp, Homo sapien
agccaggatgatggttggaatgaat

SEQ ID NO: 149141 - DNA, 25 bp, Homo sapien
agtgagacgatagtttctgccctcc

SEQ ID NO: 149142 - DNA, 25 bp, Homo sapien
agaggaggtagtagtgagacgatag

SEQ ID NO: 149143 - DNA, 25 bp, Homo sapien
tagtagtgagacgatagtttctgcc

SEQ ID NO: 149144 - DNA, 25 bp, Homo sapien
gaggtagtagtgagacgatagtttc

SEQ ID NO: 149145 - DNA, 25 bp, Homo sapien
ttgagtattccgtaggtttcaaaca

SEQ ID NO: 149146 - DNA, 25 bp, Homo sapien
tcatgttgagagaggcatgcaagga

SEQ ID NO: 149147 - DNA, 25 bp, Homo sapien
ctctgggaaatcctcgtttctcatg

SEQ ID NO: 149148 - DNA, 25 bp, Homo sapien
aaataaggcagcattgagtattccg

SEQ ID NO: 149149 - DNA, 25 bp, Homo sapien
ctcctcttcttcagctccctgctcc

SEQ ID NO: 149150 - DNA, 25 bp, Homo sapien
cctcttcttcagctccctgctccat

SEQ ID NO: 149151 - DNA, 25 bp, Homo sapien
gtttccctctatcttcctcctcttc

SEQ ID NO: 149152 - DNA, 25 bp, Homo sapien
ctgtttccctctatcttcctcctct

SEQ ID NO: 149153 - DNA, 25 bp, Homo sapien
acaaagagtgctatctgtaactgtg

SEQ ID NO: 149154 - DNA, 25 bp, Homo sapien
agtagaacaaagagtgctatctgta

SEQ ID NO: 149155 - DNA, 25 bp, Homo sapien
aaagagtgctatctgtaactgtgaa

SEQ ID NO: 149156 - DNA, 25 bp, Homo sapien
aaggagtagaacaaagagtgctatc

SEQ ID NO: 149157 - DNA, 25 bp, Homo sapien
aagttacatgcatactccgaaaacc

SEQ ID NO: 149158 - DNA, 25 bp, Homo sapien
gttacatgcatactccgaaaaccaa

SEQ ID NO: 149159 - DNA, 25 bp, Homo sapien
tacatgcatactccgaaaaccaatt

SEQ ID NO: 149160 - DNA, 25 bp, Homo sapien
catgcatactccgaaaaccaattat

SEQ ID NO: 149161 - DNA, 25 bp, Homo sapien
ctttcaatacgtaatatattccctg

SEQ ID NO: 149162 - DNA, 25 bp, Homo sapien
tgatcggtgttcagcccgagtctgg

SEQ ID NO: 149163 - DNA, 25 bp, Homo sapien
ttcaagcctgaagttatctgatcgg

SEQ ID NO: 149164 - DNA, 25 bp, Homo sapien
caatacgtaatatattccctgtgct

SEQ ID NO: 149165 - DNA, 25 bp, Homo sapien
tgatggtgatcaggcgctccaggaa

SEQ ID NO: 149166 - DNA, 25 bp, Homo sapien
tgacgtagtacacggagggcttcca

SEQ ID NO: 149167 - DNA, 25 bp, Homo sapien
catagtgggcgttctggctgctgac

SEQ ID NO: 149168 - DNA, 25 bp, Homo sapien
tgagaattcattgtcccgggccagt

SEQ ID NO: 149169 - DNA, 25 bp, Homo sapien
tacattgaggtctcacagacgccac

SEQ ID NO: 149170 - DNA, 25 bp, Homo sapien
tctaaagatgcttgcggaggctccc

SEQ ID NO: 149171 - DNA, 25 bp, Homo sapien
taaggatcaggagacaagcatcgag

SEQ ID NO: 149172 - DNA, 25 bp, Homo sapien
tatgcagacaccattggcaggtatg

SEQ ID NO: 149173 - DNA, 25 bp, Homo sapien
tgtgttggagatgcaaccacttgct

SEQ ID NO: 149174 - DNA, 25 bp, Homo sapien
tcagggcctccaggaacctgtgttg

SEQ ID NO: 149175 - DNA, 25 bp, Homo sapien
ccacagcacctggtacggtacagag

SEQ ID NO: 149176 - DNA, 25 bp, Homo sapien
tcaaggaatcccataggtgctcctc

SEQ ID NO: 149177 - DNA, 25 bp, Homo sapien
aagatgagccttgggtatgctgatg

SEQ ID NO: 149178 - DNA, 25 bp, Homo sapien
agatgagccttgggtatgctgatgt

SEQ ID NO: 149179 - DNA, 25 bp, Homo sapien
gatgagccttgggtatgctgatgtt

SEQ ID NO: 149180 - DNA, 25 bp, Homo sapien
ggtagtagatgtcctctatgtcccc

SEQ ID NO: 149181 - DNA, 25 bp, Homo sapien
aggtagtagatgtcctctatgtccc

SEQ ID NO: 149182 - DNA, 25 bp, Homo sapien
cctttgggcaggctgagatgtggcc

SEQ ID NO: 149183 - DNA, 25 bp, Homo sapien
tttgggcaggctgagatgtggccac

SEQ ID NO: 149184 - DNA, 25 bp, Homo sapien
ggcaggctgagatgtggccactcac

SEQ ID NO: 149185 - DNA, 25 bp, Homo sapien
tgggcaggctgagatgtggccactc

SEQ ID NO: 149186 - DNA, 25 bp, Homo sapien
cgagaaggaagaagtgtgaaccaca

SEQ ID NO: 149187 - DNA, 25 bp, Homo sapien
gagaaggaagaagtgtgaaccacat

SEQ ID NO: 149188 - DNA, 25 bp, Homo sapien
ctcacgagaaggaagaagtgtgaac

SEQ ID NO: 149189 - DNA, 25 bp, Homo sapien
cacgagaaggaagaagtgtgaacca

SEQ ID NO: 149190 - DNA, 25 bp, Homo sapien
aagcatgtccctctggtggcttcat

SEQ ID NO: 149191 - DNA, 25 bp, Homo sapien
tgcacctgaacttaacgtgccagtc

SEQ ID NO: 149192 - DNA, 25 bp, Homo sapien
tgaacttaacgtgccagtcccatct

SEQ ID NO: 149193 - DNA, 25 bp, Homo sapien
ctcccatcattaacagctgtgtggc

SEQ ID NO: 149194 - DNA, 25 bp, Homo sapien
aggcagccggcatatctgtgactcc

SEQ ID NO: 149195 - DNA, 25 bp, Homo sapien
caaggcagccggcatatctgtgact

SEQ ID NO: 149196 - DNA, 25 bp, Homo sapien
acaaggcagccggcatatctgtgac

SEQ ID NO: 149197 - DNA, 25 bp, Homo sapien
ccacaaggcagccggcatatctgtg

SEQ ID NO: 149198 - DNA, 25 bp, Homo sapien
ggaaagattctcagctttactctgc

SEQ ID NO: 149199 - DNA, 25 bp, Homo sapien
tctcagctttactctgcatttgatt

SEQ ID NO: 149200 - DNA, 25 bp, Homo sapien
gattctcagctttactctgcatttg

SEQ ID NO: 149201 - DNA, 25 bp, Homo sapien
gaaagattctcagctttactctgca

SEQ ID NO: 149202 - DNA, 25 bp, Homo sapien
gtgatgggagacgttcccgacataa

SEQ ID NO: 149203 - DNA, 25 bp, Homo sapien
ggagacgttcccgacataactgtta

SEQ ID NO: 149204 - DNA, 25 bp, Homo sapien
tcccgacataactgttatgggcttc

SEQ ID NO: 149205 - DNA, 25 bp, Homo sapien
ccctgggccagacttttgcttgtga

SEQ ID NO: 149206 - DNA, 25 bp, Homo sapien
tgtgtgttccaagttgagaaccatt

SEQ ID NO: 149207 - DNA, 25 bp, Homo sapien
cttctgtgtgttccaagttgagaac

SEQ ID NO: 149208 - DNA, 25 bp, Homo sapien
taactttcccaatcataacattaca

SEQ ID NO: 149209 - DNA, 25 bp, Homo sapien
tacatatgggcttttctaagtcttc

SEQ ID NO: 149210 - DNA, 25 bp, Homo sapien
ggattgtaggaccaacactatatca

SEQ ID NO: 149211 - DNA, 25 bp, Homo sapien
gattgtaggaccaacactatatcag

SEQ ID NO: 149212 - DNA, 25 bp, Homo sapien
tgtaggaccaacactatatcagaat

SEQ ID NO: 149213 - DNA, 25 bp, Homo sapien
taggaccaacactatatcagaatcc

SEQ ID NO: 149214 - DNA, 25 bp, Homo sapien
attctgcgctgaccaagttgtgctc

SEQ ID NO: 149215 - DNA, 25 bp, Homo sapien
acgctacggaagctgataggaacca

SEQ ID NO: 149216 - DNA, 25 bp, Homo sapien
ccaaattctgcgctgaccaagttgt

SEQ ID NO: 149217 - DNA, 25 bp, Homo sapien
ccagaggcggaagtcgttagggacg

SEQ ID NO: 149218 - DNA, 25 bp, Homo sapien
cgccccacaagaccacgcaggagac

SEQ ID NO: 149219 - DNA, 25 bp, Homo sapien
tgccgccccacaagaccacgcagga

SEQ ID NO: 149220 - DNA, 25 bp, Homo sapien
ctgccgccccacaagaccacgcagg

SEQ ID NO: 149221 - DNA, 25 bp, Homo sapien
agcagcaaagccagcggcctgatcc

SEQ ID NO: 149222 - DNA, 25 bp, Homo sapien
gcagcaaagccagcggcctgatccg

SEQ ID NO: 149223 - DNA, 25 bp, Homo sapien
cagcaaagccagcggcctgatccgt

SEQ ID NO: 149224 - DNA, 25 bp, Homo sapien
agcaaagccagcggcctgatccgtt

SEQ ID NO: 149225 - DNA, 25 bp, Homo sapien
aaactcccagcgccgatcagcaaag

SEQ ID NO: 149226 - DNA, 25 bp, Homo sapien
tttcccggtgactcgaggaggcgcc

SEQ ID NO: 149227 - DNA, 25 bp, Homo sapien
catttttcccggtgactcgaggagg

SEQ ID NO: 149228 - DNA, 25 bp, Homo sapien
aaagcatttttcccggtgactcgag

SEQ ID NO: 149229 - DNA, 25 bp, Homo sapien
tcttctcaatctgaaaagctccatc

SEQ ID NO: 149230 - DNA, 25 bp, Homo sapien
ttctcaatctgaaaagctccatcac

SEQ ID NO: 149231 - DNA, 25 bp, Homo sapien
gggcaggtctttcttctcaatctga

SEQ ID NO: 149232 - DNA, 25 bp, Homo sapien
gctctggggcaggtctttcttctca

SEQ ID NO: 149233 - DNA, 25 bp, Homo sapien
catccttcttgccacctccaggacc

SEQ ID NO: 149234 - DNA, 25 bp, Homo sapien
caggaccatgaccaccactctgact

SEQ ID NO: 149235 - DNA, 25 bp, Homo sapien
catgaccaccactctgactttgacc

SEQ ID NO: 149236 - DNA, 25 bp, Homo sapien
cttgtcatccttcttgccacctcca

SEQ ID NO: 149237 - DNA, 25 bp, Homo sapien
tggtacaggaggttcatatttcttt

SEQ ID NO: 149238 - DNA, 25 bp, Homo sapien
tagttggtacaggaggttcatattt

SEQ ID NO: 149239 - DNA, 25 bp, Homo sapien
agttggtacaggaggttcatatttc

SEQ ID NO: 149240 - DNA, 25 bp, Homo sapien
gttggtacaggaggttcatatttct

SEQ ID NO: 149241 - DNA, 25 bp, Homo sapien
agtggcagtttgctggcagcatctg

SEQ ID NO: 149242 - DNA, 25 bp, Homo sapien
ggcagcatctggtccctttgttttc

SEQ ID NO: 149243 - DNA, 25 bp, Homo sapien
gctggcagcatctggtccctttgtt

SEQ ID NO: 149244 - DNA, 25 bp, Homo sapien
ccagtggcagtttgctggcagcatc

SEQ ID NO: 149245 - DNA, 25 bp, Homo sapien
atgcacagagatggtttatcctaag

SEQ ID NO: 149246 - DNA, 25 bp, Homo sapien
gcacagagatggtttatcctaagaa

SEQ ID NO: 149247 - DNA, 25 bp, Homo sapien
tgcacagagatggtttatcctaaga

SEQ ID NO: 149248 - DNA, 25 bp, Homo sapien
cacagagatggtttatcctaagaac

SEQ ID NO: 149249 - DNA, 25 bp, Homo sapien
aagatagtctttaattctctctaac

SEQ ID NO: 149250 - DNA, 25 bp, Homo sapien
acttcagtaattttaaccggcactg

SEQ ID NO: 149251 - DNA, 25 bp, Homo sapien
cagtaattttaaccggcactgagtg

SEQ ID NO: 149252 - DNA, 25 bp, Homo sapien
ttcagtaattttaaccggcactgag

SEQ ID NO: 149253 - DNA, 25 bp, Homo sapien
gatgtagacacgatggcatgattgt

SEQ ID NO: 149254 - DNA, 25 bp, Homo sapien
caaatgaaagaatgctgacgtagtg

SEQ ID NO: 149255 - DNA, 25 bp, Homo sapien
gaatgctgacgtagtgttctgagcc

SEQ ID NO: 149256 - DNA, 25 bp, Homo sapien
gacacgatggcatgattgtcatcaa

SEQ ID NO: 149257 - DNA, 25 bp, Homo sapien
gtccaaccccccaatatctgcatag

SEQ ID NO: 149258 - DNA, 25 bp, Homo sapien
aaccccccaatatctgcataggtct

SEQ ID NO: 149259 - DNA, 25 bp, Homo sapien
tggttgtccaaccccccaatatctg

SEQ ID NO: 149260 - DNA, 25 bp, Homo sapien
ccaaccccccaatatctgcataggt

SEQ ID NO: 149261 - DNA, 25 bp, Homo sapien
cttcttgagcaagagagacttaata

SEQ ID NO: 149262 - DNA, 25 bp, Homo sapien
caattaaactacagataggactagg

SEQ ID NO: 149263 - DNA, 25 bp, Homo sapien
aaagctcaagttgacccttttcaat

SEQ ID NO: 149264 - DNA, 25 bp, Homo sapien
ggctgttcccatctagggacattac

SEQ ID NO: 149265 - DNA, 25 bp, Homo sapien
taattggcaacatgacaatatcttg

SEQ ID NO: 149266 - DNA, 25 bp, Homo sapien
tttactaattggcaacatgacaata

SEQ ID NO: 149267 - DNA, 25 bp, Homo sapien
ggctttactgaaattattagcatat

SEQ ID NO: 149268 - DNA, 25 bp, Homo sapien
gcaacatgacaatatcttgctttca

SEQ ID NO: 149269 - DNA, 25 bp, Homo sapien
accatagagaatgacccccttagga

SEQ ID NO: 149270 - DNA, 25 bp, Homo sapien
cttaggaggctttatacccatctct

SEQ ID NO: 149271 - DNA, 25 bp, Homo sapien
tagagaatgacccccttaggaggct

SEQ ID NO: 149272 - DNA, 25 bp, Homo sapien
cttcataatattcaggatgggtgag

SEQ ID NO: 149273 - DNA, 25 bp, Homo sapien
aactaaggaattgtggtgtcctctc

SEQ ID NO: 149274 - DNA, 25 bp, Homo sapien
tgcagacaaggttgagcagccctgt

SEQ ID NO: 149275 - DNA, 25 bp, Homo sapien
tgctgctcaagagaccagctgggtg

SEQ ID NO: 149276 - DNA, 25 bp, Homo sapien
cctctcttattagttcagtaattat

SEQ ID NO: 149277 - DNA, 25 bp, Homo sapien
cagagggctcactgaacaagctgcc

SEQ ID NO: 149278 - DNA, 25 bp, Homo sapien
tcagcacggatcttcttaggaacac

SEQ ID NO: 149279 - DNA, 25 bp, Homo sapien
taccgcagcccctttagtactagag

SEQ ID NO: 149280 - DNA, 25 bp, Homo sapien
taggatgttatcgtgcagaagcagc

SEQ ID NO: 149281 - DNA, 25 bp, Homo sapien
tagctactgggtgggcttgctgcca

SEQ ID NO: 149282 - DNA, 25 bp, Homo sapien
gctttggccctaaggagatacacga

SEQ ID NO: 149283 - DNA, 25 bp, Homo sapien
tgtagagccaaagtaaactcctagg

SEQ ID NO: 149284 - DNA, 25 bp, Homo sapien
gaccagctcttgatgaacgccacag

SEQ ID NO: 149285 - DNA, 25 bp, Homo sapien
aataaacacgatggacggtgcatgt

SEQ ID NO: 149286 - DNA, 25 bp, Homo sapien
tcagcaactcggaacaattcccgta

SEQ ID NO: 149287 - DNA, 25 bp, Homo sapien
cttcagcaactcggaacaattcccg

SEQ ID NO: 149288 - DNA, 25 bp, Homo sapien
caactcggaacaattcccgtacgag

SEQ ID NO: 149289 - DNA, 25 bp, Homo sapien
caagagaagagctatgcggtgttcc

SEQ ID NO: 149290 - DNA, 25 bp, Homo sapien
cagggcagagacttgtgctcacaac

SEQ ID NO: 149291 - DNA, 25 bp, Homo sapien
tcacaactgtgtccctagagtccag

SEQ ID NO: 149292 - DNA, 25 bp, Homo sapien
gaaggccacgcacagcaagaactgt

SEQ ID NO: 149293 - DNA, 25 bp, Homo sapien
aagtttctattcggtttgtggccat

SEQ ID NO: 149294 - DNA, 25 bp, Homo sapien
ttctattcggtttgtggccatgata

SEQ ID NO: 149295 - DNA, 25 bp, Homo sapien
gcagttccaacattgttcgctgaat

SEQ ID NO: 149296 - DNA, 25 bp, Homo sapien
tccaacattgttcgctgaatttctc

SEQ ID NO: 149297 - DNA, 25 bp, Homo sapien
tgggcagacctattgtgttaaaaac

SEQ ID NO: 149298 - DNA, 25 bp, Homo sapien
ggtgcacagaccatatcatgctctg

SEQ ID NO: 149299 - DNA, 25 bp, Homo sapien
catacgaagtttcagtcggacagaa

SEQ ID NO: 149300 - DNA, 25 bp, Homo sapien
caaagagatttgaagtcacaccaac

SEQ ID NO: 149301 - DNA, 25 bp, Homo sapien
cagggggaactcaatcttcctgtca

SEQ ID NO: 149302 - DNA, 25 bp, Homo sapien
tagccatgatcaggtcgtccagggt

SEQ ID NO: 149303 - DNA, 25 bp, Homo sapien
ggggaactcaatcttcctgtcaatg

SEQ ID NO: 149304 - DNA, 25 bp, Homo sapien
aggcagggggaactcaatcttcctg

SEQ ID NO: 149305 - DNA, 25 bp, Homo sapien
aataagctgacacggctaggctctc

SEQ ID NO: 149306 - DNA, 25 bp, Homo sapien
tatagactctttcctgattgacggc

SEQ ID NO: 149307 - DNA, 25 bp, Homo sapien
catcccaagagcacatatagactct

SEQ ID NO: 149308 - DNA, 25 bp, Homo sapien
tttcctgattgacggccacattccc

SEQ ID NO: 149309 - DNA, 25 bp, Homo sapien
atttatgcccaacgaaaacccagct

SEQ ID NO: 149310 - DNA, 25 bp, Homo sapien
tagaacccatattcaacgctgccag

SEQ ID NO: 149311 - DNA, 25 bp, Homo sapien
cactgcttgtgctgtccctacctaa

SEQ ID NO: 149312 - DNA, 25 bp, Homo sapien
gactaactgccaatgatccgtgggc

SEQ ID NO: 149313 - DNA, 25 bp, Homo sapien
gaaagaagagtgtgttcagaaagtg

SEQ ID NO: 149314 - DNA, 25 bp, Homo sapien
tcattctacgttctcttaaggccat

SEQ ID NO: 149315 - DNA, 25 bp, Homo sapien
ttagagatacagcccctcaggggtg

SEQ ID NO: 149316 - DNA, 25 bp, Homo sapien
ttgttactttcattctacgttctct

SEQ ID NO: 149317 - DNA, 25 bp, Homo sapien
tcagaccagcttctgtacagattgc

SEQ ID NO: 149318 - DNA, 25 bp, Homo sapien
ctgctgcacagtgaccaacaggcca

SEQ ID NO: 149319 - DNA, 25 bp, Homo sapien
gactgctgcacagtgaccaacaggc

SEQ ID NO: 149320 - DNA, 25 bp, Homo sapien
tgctgcacagtgaccaacaggccac

SEQ ID NO: 149321 - DNA, 25 bp, Homo sapien
actgctgcacagtgaccaacaggcc

SEQ ID NO: 149322 - DNA, 25 bp, Homo sapien
gaacgcatagtgaggtccacactcc

SEQ ID NO: 149323 - DNA, 25 bp, Homo sapien
gaccgcagcctgagttcctgtccaa

SEQ ID NO: 149324 - DNA, 25 bp, Homo sapien
acaggctgctgttgagcggtaggtg

SEQ ID NO: 149325 - DNA, 25 bp, Homo sapien
gtccaaaggcttccctgtagctggg

SEQ ID NO: 149326 - DNA, 25 bp, Homo sapien
aatgacggaaatagacggagaaagg

SEQ ID NO: 149327 - DNA, 25 bp, Homo sapien
tctgtcccacttaatagctttaggc

SEQ ID NO: 149328 - DNA, 25 bp, Homo sapien
gctttaggcctgatttgttcagaaa

SEQ ID NO: 149329 - DNA, 25 bp, Homo sapien
gaaagagaaatgacggaaatagacg

SEQ ID NO: 149330 - DNA, 25 bp, Homo sapien
ggcccagtcatgtcctctaggaaaa

SEQ ID NO: 149331 - DNA, 25 bp, Homo sapien
catggacgcagtactcctagcaggt

SEQ ID NO: 149332 - DNA, 25 bp, Homo sapien
gaaccgtgtgagtcagttgctgaga

SEQ ID NO: 149333 - DNA, 25 bp, Homo sapien
gacactcttgggtggcacgtacttt

SEQ ID NO: 149334 - DNA, 25 bp, Homo sapien
aagagccagtgggttttccgcaggc

SEQ ID NO: 149335 - DNA, 25 bp, Homo sapien
gatgggagagttcaccttaaattgt

SEQ ID NO: 149336 - DNA, 25 bp, Homo sapien
agctactacttgtaaggcacacata

SEQ ID NO: 149337 - DNA, 25 bp, Homo sapien
tgttatttcacaagcacttcatacc

SEQ ID NO: 149338 - DNA, 25 bp, Homo sapien
gaatgaagcagtggcaatgcctctg

SEQ ID NO: 149339 - DNA, 25 bp, Homo sapien
ggcaatgcctctggcacaggattgc

SEQ ID NO: 149340 - DNA, 25 bp, Homo sapien
tgcctctggcacaggattgctgggc

SEQ ID NO: 149341 - DNA, 25 bp, Homo sapien
cagtggcaatgcctctggcacagga

SEQ ID NO: 149342 - DNA, 25 bp, Homo sapien
gctcatgtgtttcatcaggaacgct

SEQ ID NO: 149343 - DNA, 25 bp, Homo sapien
acatcagaccacaggggtcggccca

SEQ ID NO: 149344 - DNA, 25 bp, Homo sapien
gaacgctcgtcatttccccgaagga

SEQ ID NO: 149345 - DNA, 25 bp, Homo sapien
cacctcgggtttgggacagtgttct

SEQ ID NO: 149346 - DNA, 25 bp, Homo sapien
tagcgacagacaggtcgtcagctgc

SEQ ID NO: 149347 - DNA, 25 bp, Homo sapien
ccaccgggtgttccttagcgacaga

SEQ ID NO: 149348 - DNA, 25 bp, Homo sapien
tcacagaaacaaccctcaacttgag

SEQ ID NO: 149349 - DNA, 25 bp, Homo sapien
cagtccctgagctacaggtggctgt

SEQ ID NO: 149350 - DNA, 25 bp, Homo sapien
gaagcctgctcccaagccgtctagg

SEQ ID NO: 149351 - DNA, 25 bp, Homo sapien
gagcacgctgtaccgccagccccag

SEQ ID NO: 149352 - DNA, 25 bp, Homo sapien
agccgtctaggagccgagcacgctg

SEQ ID NO: 149353 - DNA, 25 bp, Homo sapien
ggtcccaggccacttgagtgtggaa

SEQ ID NO: 149354 - DNA, 25 bp, Homo sapien
tagtaataatgtgggctgccagcct

SEQ ID NO: 149355 - DNA, 25 bp, Homo sapien
cactttttgggtgtgtaaatgacac

SEQ ID NO: 149356 - DNA, 25 bp, Homo sapien
gctgtgcctgcgaggccaagttgcc

SEQ ID NO: 149357 - DNA, 25 bp, Homo sapien
cgtgtgtgttaggagaactcggctt

SEQ ID NO: 149358 - DNA, 25 bp, Homo sapien
ccttcccgaagggtctggtggtctg

SEQ ID NO: 149359 - DNA, 25 bp, Homo sapien
ccttggacaggccacgtagaacact

SEQ ID NO: 149360 - DNA, 25 bp, Homo sapien
ggacaggccacgtagaacactgcat

SEQ ID NO: 149361 - DNA, 25 bp, Homo sapien
ctggtggtccttggacaggccacgt

SEQ ID NO: 149362 - DNA, 25 bp, Homo sapien
ttgaagcagtggtgttgcgtcctcg

SEQ ID NO: 149363 - DNA, 25 bp, Homo sapien
cctgtattccattgattgaagcagt

SEQ ID NO: 149364 - DNA, 25 bp, Homo sapien
agtggtgttgcgtcctcgtcccgtc

SEQ ID NO: 149365 - DNA, 25 bp, Homo sapien
tgattgaagcagtggtgttgcgtcc

SEQ ID NO: 149366 - DNA, 25 bp, Homo sapien
agaatccattcggtcagagatccaa

SEQ ID NO: 149367 - DNA, 25 bp, Homo sapien
ttccaagcttctgacgagggagctg

SEQ ID NO: 149368 - DNA, 25 bp, Homo sapien
agcttctgacgagggagctgaccag

SEQ ID NO: 149369 - DNA, 25 bp, Homo sapien
tgccagaatccattcggtcagagat

SEQ ID NO: 149370 - DNA, 25 bp, Homo sapien
tggtgaatggtttttgacaccattc

SEQ ID NO: 149371 - DNA, 25 bp, Homo sapien
aatggtttttgacaccattcaccat

SEQ ID NO: 149372 - DNA, 25 bp, Homo sapien
tgaatggtttttgacaccattcacc

SEQ ID NO: 149373 - DNA, 25 bp, Homo sapien
ggtgaatggtttttgacaccattca

SEQ ID NO: 149374 - DNA, 25 bp, Homo sapien
gaagagccttgtgatcagaactcaa

SEQ ID NO: 149375 - DNA, 25 bp, Homo sapien
tgtttctgaccaacagtaagctgac

SEQ ID NO: 149376 - DNA, 25 bp, Homo sapien
tttagttgaaagaggaagtggctcc

SEQ ID NO: 149377 - DNA, 25 bp, Homo sapien
ccttttgggtggataccagctgcat

SEQ ID NO: 149378 - DNA, 25 bp, Homo sapien
tgctggagccggagagccgttctgg

SEQ ID NO: 149379 - DNA, 25 bp, Homo sapien
tggaaaactctcccgaatacgtcat

SEQ ID NO: 149380 - DNA, 25 bp, Homo sapien
ctggaaaactctcccgaatacgtca

SEQ ID NO: 149381 - DNA, 25 bp, Homo sapien
cttgctggagccggagagccgttct

SEQ ID NO: 149382 - DNA, 25 bp, Homo sapien
gaaatgagatttgctgcctgggcat

SEQ ID NO: 149383 - DNA, 25 bp, Homo sapien
ccagcagaaatgagatttgctgcct

SEQ ID NO: 149384 - DNA, 25 bp, Homo sapien
ttctcccagcagaaatgagatttgc

SEQ ID NO: 149385 - DNA, 25 bp, Homo sapien
gcagaaatgagatttgctgcctggg

SEQ ID NO: 149386 - DNA, 25 bp, Homo sapien
cttgatttgcgttctgtgggctcgg

SEQ ID NO: 149387 - DNA, 25 bp, Homo sapien
gttgtaatgaaaccgcttgatttgc

SEQ ID NO: 149388 - DNA, 25 bp, Homo sapien
gaaaccgcttgatttgcgttctgtg

SEQ ID NO: 149389 - DNA, 25 bp, Homo sapien
gcagtggggtgcgatttgattccat

SEQ ID NO: 149390 - DNA, 25 bp, Homo sapien
tttactagtggcagcgcggacagcc

SEQ ID NO: 149391 - DNA, 25 bp, Homo sapien
ggcggcgctctttggccagtagaaa

SEQ ID NO: 149392 - DNA, 25 bp, Homo sapien
ccagtagaaataggctctgcgcccg

SEQ ID NO: 149393 - DNA, 25 bp, Homo sapien
tgcggccttcggagtgagcggctcc

SEQ ID NO: 149394 - DNA, 25 bp, Homo sapien
ttgacaaggacgctctgataggccg

SEQ ID NO: 149395 - DNA, 25 bp, Homo sapien
gaccctgcagtggttggccgaaaag

SEQ ID NO: 149396 - DNA, 25 bp, Homo sapien
gcttagttggcgctgctgaggcttc

SEQ ID NO: 149397 - DNA, 25 bp, Homo sapien
ctgcaatgcgtcaagccgcgaaggg

SEQ ID NO: 149398 - DNA, 25 bp, Homo sapien
caccgcccgtcaagcggagaggaag

SEQ ID NO: 149399 - DNA, 25 bp, Homo sapien
gcccaagcctttggagcgctcgcgg

SEQ ID NO: 149400 - DNA, 25 bp, Homo sapien
gccgcagcacgggtatttggtatta

SEQ ID NO: 149401 - DNA, 25 bp, Homo sapien
caagggcgagggcactatatctccc

SEQ ID NO: 149402 - DNA, 25 bp, Homo sapien
tgttttcacaaaacgcgaaggacga

SEQ ID NO: 149403 - DNA, 25 bp, Homo sapien
tgtagaaacaaagtgcccatgaggg

SEQ ID NO: 149404 - DNA, 25 bp, Homo sapien
ctgagttccaaaacaggaagggtcg

SEQ ID NO: 149405 - DNA, 25 bp, Homo sapien
gtttatctcatttctgcggcgccaa

SEQ ID NO: 149406 - DNA, 25 bp, Homo sapien
tgcagctccaacgcagctgaaaacc

SEQ ID NO: 149407 - DNA, 25 bp, Homo sapien
cagctccaacgcagctgaaaacccg

SEQ ID NO: 149408 - DNA, 25 bp, Homo sapien
aacgcagctgaaaacccgagcccag

SEQ ID NO: 149409 - DNA, 25 bp, Homo sapien
gctccaacgcagctgaaaacccgag

SEQ ID NO: 149410 - DNA, 25 bp, Homo sapien
tcctagagcgctgcgcgctcccagg

SEQ ID NO: 149411 - DNA, 25 bp, Homo sapien
cagcgagggccaagcagcggctctc

SEQ ID NO: 149412 - DNA, 25 bp, Homo sapien
agcggctctcggctcctagagcgct

SEQ ID NO: 149413 - DNA, 25 bp, Homo sapien
ccagcgagggccaagcagcggctct

SEQ ID NO: 149414 - DNA, 25 bp, Homo sapien
ccaaggccgggtagaagacatcatc

SEQ ID NO: 149415 - DNA, 25 bp, Homo sapien
tgagaggtaccttctggcacgacac

SEQ ID NO: 149416 - DNA, 25 bp, Homo sapien
taagggaaattcactaggcacagac

SEQ ID NO: 149417 - DNA, 25 bp, Homo sapien
gatttttcacggcactgagggctga

SEQ ID NO: 149418 - DNA, 25 bp, Homo sapien
accagtcccatgcaattctgctgag

SEQ ID NO: 149419 - DNA, 25 bp, Homo sapien
gcaattctgctgagtcatcactgtc

SEQ ID NO: 149420 - DNA, 25 bp, Homo sapien
acagcagcccaagagatttgtgact

SEQ ID NO: 149421 - DNA, 25 bp, Homo sapien
agcccaagagatttgtgactcagag

SEQ ID NO: 149422 - DNA, 25 bp, Homo sapien
cttggctgacccatcctttggcaat

SEQ ID NO: 149423 - DNA, 25 bp, Homo sapien
cacataactggatccatcctctgct

SEQ ID NO: 149424 - DNA, 25 bp, Homo sapien
tcagactttcacataactggatcca

SEQ ID NO: 149425 - DNA, 25 bp, Homo sapien
ttggctgacccatcctttggcaatt

SEQ ID NO: 149426 - DNA, 25 bp, Homo sapien
caatggttacacagacttagggacc

SEQ ID NO: 149427 - DNA, 25 bp, Homo sapien
gactggacccatgacttgagcctca

SEQ ID NO: 149428 - DNA, 25 bp, Homo sapien
cttagggaccaagtactgtgagtga

SEQ ID NO: 149429 - DNA, 25 bp, Homo sapien
taactggccattaatgagactggac

SEQ ID NO: 149430 - DNA, 25 bp, Homo sapien
tcaacatctccaaccgctccactag

SEQ ID NO: 149431 - DNA, 25 bp, Homo sapien
atctccaaccgctccactagggctg

SEQ ID NO: 149432 - DNA, 25 bp, Homo sapien
tgcagcggccacttccagtttgggg

SEQ ID NO: 149433 - DNA, 25 bp, Homo sapien
cgtgcccctcgtccttgggtctgca

SEQ ID NO: 149434 - DNA, 25 bp, Homo sapien
tatatatatggtgcgccgtatccct

SEQ ID NO: 149435 - DNA, 25 bp, Homo sapien
tctgcgccccgcgatatatatatgg

SEQ ID NO: 149436 - DNA, 25 bp, Homo sapien
tacgagtaacggcacggcgtccacg

SEQ ID NO: 149437 - DNA, 25 bp, Homo sapien
tcccagcaccactgccggagcgcga

SEQ ID NO: 149438 - DNA, 25 bp, Homo sapien
gggggtacctccgatgccgctgctg

SEQ ID NO: 149439 - DNA, 25 bp, Homo sapien
gctaaggcgcgctgtgcgctatgcc

SEQ ID NO: 149440 - DNA, 25 bp, Homo sapien
gcgacggcgggggtacctccgatgc

SEQ ID NO: 149441 - DNA, 25 bp, Homo sapien
tgctgctaaggcgcgctgtgcgcta

SEQ ID NO: 149442 - DNA, 25 bp, Homo sapien
cccggagcagaaactttgcgtctct

SEQ ID NO: 149443 - DNA, 25 bp, Homo sapien
gtgcgaaagcggcaggaacaagcca

SEQ ID NO: 149444 - DNA, 25 bp, Homo sapien
ctcccgcgggaagtgcctcctggtg

SEQ ID NO: 149445 - DNA, 25 bp, Homo sapien
aatggaaaccaagccgcgcgccagt

SEQ ID NO: 149446 - DNA, 25 bp, Homo sapien
tcgcatctggcaatctagaggctgc

SEQ ID NO: 149447 - DNA, 25 bp, Homo sapien
catctggcaatctagaggctgcaga

SEQ ID NO: 149448 - DNA, 25 bp, Homo sapien
gcgaggcgcacagtcgcatctggca

SEQ ID NO: 149449 - DNA, 25 bp, Homo sapien
agtcgcatctggcaatctagaggct

SEQ ID NO: 149450 - DNA, 25 bp, Homo sapien
ccgccaaaccagaaacgcagtcggt

SEQ ID NO: 149451 - DNA, 25 bp, Homo sapien
cgcagtcggtgatgtcagccctgca

SEQ ID NO: 149452 - DNA, 25 bp, Homo sapien
ccagaaacgcagtcggtgatgtcag

SEQ ID NO: 149453 - DNA, 25 bp, Homo sapien
tgtaccagaaccctgcggggaacca

SEQ ID NO: 149454 - DNA, 25 bp, Homo sapien
ctcgctacagaactctcttgttaga

SEQ ID NO: 149455 - DNA, 25 bp, Homo sapien
gttagaggggttaccaggagcatcc

SEQ ID NO: 149456 - DNA, 25 bp, Homo sapien
gagcatccaactttctcgacaacga

SEQ ID NO: 149457 - DNA, 25 bp, Homo sapien
gctacagaactctcttgttagaggg

SEQ ID NO: 149458 - DNA, 25 bp, Homo sapien
aagtcctaatagaaagctgatgaag

SEQ ID NO: 149459 - DNA, 25 bp, Homo sapien
gctttctttaaatgacggagacacg

SEQ ID NO: 149460 - DNA, 25 bp, Homo sapien
gagacacgatgatttacgtaacgcc

SEQ ID NO: 149461 - DNA, 25 bp, Homo sapien
tgccacacctcgcaagagaaactgt

SEQ ID NO: 149462 - DNA, 25 bp, Homo sapien
tatttggtctccactgaacctgtgc

SEQ ID NO: 149463 - DNA, 25 bp, Homo sapien
ggaactcgagacctcaaggagagct

SEQ ID NO: 149464 - DNA, 25 bp, Homo sapien
taatggccacgaaggtaattcacct

SEQ ID NO: 149465 - DNA, 25 bp, Homo sapien
taaacacacttcgttggaggcagta

SEQ ID NO: 149466 - DNA, 25 bp, Homo sapien
gcttgctctgcgatctaactaggct

SEQ ID NO: 149467 - DNA, 25 bp, Homo sapien
aaatggcacctctagtggcagaagg

SEQ ID NO: 149468 - DNA, 25 bp, Homo sapien
gaaaaggttatcattcagtccacga

SEQ ID NO: 149469 - DNA, 25 bp, Homo sapien
tacaatggctaatgccctgggtcaa

SEQ ID NO: 149470 - DNA, 25 bp, Homo sapien
tctgttcttcggtcagctgatcagc

SEQ ID NO: 149471 - DNA, 25 bp, Homo sapien
caatctgttcttcggtcagctgatc

SEQ ID NO: 149472 - DNA, 25 bp, Homo sapien
cagcaatctgttcttcggtcagctg

SEQ ID NO: 149473 - DNA, 25 bp, Homo sapien
agcaatctgttcttcggtcagctga

SEQ ID NO: 149474 - DNA, 25 bp, Homo sapien
aatctgacaagattggtccatgtgc

SEQ ID NO: 149475 - DNA, 25 bp, Homo sapien
cctgttacatttctaaagccataag

SEQ ID NO: 149476 - DNA, 25 bp, Homo sapien
agaaatgtacattcccaggtaaact

SEQ ID NO: 149477 - DNA, 25 bp, Homo sapien
gaaacagtctcaaaacaagtcctcc

SEQ ID NO: 149478 - DNA, 25 bp, Homo sapien
ttatcaaatagggagaaggcttcct

SEQ ID NO: 149479 - DNA, 25 bp, Homo sapien
tgccatcgccatctttatcaaatag

SEQ ID NO: 149480 - DNA, 25 bp, Homo sapien
tcagcatccacttcattgatcatat

SEQ ID NO: 149481 - DNA, 25 bp, Homo sapien
ttctgttgggttctgacccagtgac

SEQ ID NO: 149482 - DNA, 25 bp, Homo sapien
catatcctgcaattcagcttctgtt

SEQ ID NO: 149483 - DNA, 25 bp, Homo sapien
agcttctgttgggttctgacccagt

SEQ ID NO: 149484 - DNA, 25 bp, Homo sapien
taacatgtctgaacttgaattacac

SEQ ID NO: 149485 - DNA, 25 bp, Homo sapien
tagacactaagcaggatggacgcaa

SEQ ID NO: 149486 - DNA, 25 bp, Homo sapien
tattttaattgtcaatggccctggg

SEQ ID NO: 149487 - DNA, 25 bp, Homo sapien
ggacgcaaggcccatcatcttctat

SEQ ID NO: 149488 - DNA, 25 bp, Homo sapien
taaaagctttgagctcggccaggag

SEQ ID NO: 149489 - DNA, 25 bp, Homo sapien
tcgagaggaacagatgacagaccgc

SEQ ID NO: 149490 - DNA, 25 bp, Homo sapien
agaccgctatcagggttactgctgg

SEQ ID NO: 149491 - DNA, 25 bp, Homo sapien
tccgctgctgtagagtcgagaggaa

SEQ ID NO: 149492 - DNA, 25 bp, Homo sapien
cttgtcaaagactcggaatgcctca

SEQ ID NO: 149493 - DNA, 25 bp, Homo sapien
gactcggaatgcctcacggatttct

SEQ ID NO: 149494 - DNA, 25 bp, Homo sapien
gtcaaagactcggaatgcctcacgg

SEQ ID NO: 149495 - DNA, 25 bp, Homo sapien
aaagactcggaatgcctcacggatt

SEQ ID NO: 149496 - DNA, 25 bp, Homo sapien
tagctatgccctctcaagttactgc

SEQ ID NO: 149497 - DNA, 25 bp, Homo sapien
caaacagctaatgcagaaaacagga

SEQ ID NO: 149498 - DNA, 25 bp, Homo sapien
tactgctaactctgctgccataaac

SEQ ID NO: 149499 - DNA, 25 bp, Homo sapien
agtaggtctttgacttagctatgcc

SEQ ID NO: 149500 - DNA, 25 bp, Homo sapien
cttcatagttgacttgtccgtctcc

SEQ ID NO: 149501 - DNA, 25 bp, Homo sapien
catagttgacttgtccgtctccatc

SEQ ID NO: 149502 - DNA, 25 bp, Homo sapien
tagttgacttgtccgtctccatcaa

SEQ ID NO: 149503 - DNA, 25 bp, Homo sapien
tgacttgtccgtctccatcaatatc

SEQ ID NO: 149504 - DNA, 25 bp, Homo sapien
cactgagctcagagaatttagtttt

SEQ ID NO: 149505 - DNA, 25 bp, Homo sapien
ctgagctcagagaatttagttttac

SEQ ID NO: 149506 - DNA, 25 bp, Homo sapien
aaacactgagctcagagaatttagt

SEQ ID NO: 149507 - DNA, 25 bp, Homo sapien
ctatgaaacactgagctcagagaat

SEQ ID NO: 149508 - DNA, 25 bp, Homo sapien
gcagttggcttgcttacagatctaa

SEQ ID NO: 149509 - DNA, 25 bp, Homo sapien
ggcttgcttacagatctaaaggtaa

SEQ ID NO: 149510 - DNA, 25 bp, Homo sapien
gaagcagttggcttgcttacagatc

SEQ ID NO: 149511 - DNA, 25 bp, Homo sapien
tagtgaagcagttggcttgcttaca

SEQ ID NO: 149512 - DNA, 25 bp, Homo sapien
tttgcagtcatcatctgtacgaatt

SEQ ID NO: 149513 - DNA, 25 bp, Homo sapien
tcattttgcagtcatcatctgtacg

SEQ ID NO: 149514 - DNA, 25 bp, Homo sapien
attttgcagtcatcatctgtacgaa

SEQ ID NO: 149515 - DNA, 25 bp, Homo sapien
cattttgcagtcatcatctgtacga

SEQ ID NO: 149516 - DNA, 25 bp, Homo sapien
tgcaagaggtaagtaaaagattcaa

SEQ ID NO: 149517 - DNA, 25 bp, Homo sapien
tttgcaagaggtaagtaaaagattc

SEQ ID NO: 149518 - DNA, 25 bp, Homo sapien
caagaggtaagtaaaagattcaatt

SEQ ID NO: 149519 - DNA, 25 bp, Homo sapien
gaggtaagtaaaagattcaatttga

SEQ ID NO: 149520 - DNA, 25 bp, Homo sapien
catgcatgaaaaactggccagccca

SEQ ID NO: 149521 - DNA, 25 bp, Homo sapien
ggacaggaccaccaaccaatacatg

SEQ ID NO: 149522 - DNA, 25 bp, Homo sapien
tgtgtggacagaaggtacttttgac

SEQ ID NO: 149523 - DNA, 25 bp, Homo sapien
tgtgctcaatcgtcaagctgcatgc

SEQ ID NO: 149524 - DNA, 25 bp, Homo sapien
tacaagaggaccatcctaccagtgg

SEQ ID NO: 149525 - DNA, 25 bp, Homo sapien
tgccggctccaagtcatggttcaga

SEQ ID NO: 149526 - DNA, 25 bp, Homo sapien
catgggtcggagcacacgaagtaca

SEQ ID NO: 149527 - DNA, 25 bp, Homo sapien
taaaccaacatacacgggcatgcca

SEQ ID NO: 149528 - DNA, 25 bp, Homo sapien
aaaagactagcatttacaacttgga

SEQ ID NO: 149529 - DNA, 25 bp, Homo sapien
taaccaacttcaagggcactgccag

SEQ ID NO: 149530 - DNA, 25 bp, Homo sapien
gaaagggtttgccaagtactcagca

SEQ ID NO: 149531 - DNA, 25 bp, Homo sapien
tcttttaggatacgctgcaggacca

SEQ ID NO: 149532 - DNA, 25 bp, Homo sapien
tgaaactaccgagaggtcatcgacc

SEQ ID NO: 149533 - DNA, 25 bp, Homo sapien
tacagaaacgtccaagtacatctcc

SEQ ID NO: 149534 - DNA, 25 bp, Homo sapien
tattgaatacagtgccaggtttata

SEQ ID NO: 149535 - DNA, 25 bp, Homo sapien
tggtgaagggcaacttcagtaacaa

SEQ ID NO: 149536 - DNA, 25 bp, Homo sapien
tctccttttcaaatagccatggtga

SEQ ID NO: 149537 - DNA, 25 bp, Homo sapien
ggcccgtatgaatcagaaattctgg

SEQ ID NO: 149538 - DNA, 25 bp, Homo sapien
caggcccgtatgaatcagaaattct

SEQ ID NO: 149539 - DNA, 25 bp, Homo sapien
gaatcagaaattctgggcttctcat

SEQ ID NO: 149540 - DNA, 25 bp, Homo sapien
atgaatcagaaattctgggcttctc

SEQ ID NO: 149541 - DNA, 25 bp, Homo sapien
cagcagtctggtggccaattcggta

SEQ ID NO: 149542 - DNA, 25 bp, Homo sapien
caattcggtacatcagacatgcgct

SEQ ID NO: 149543 - DNA, 25 bp, Homo sapien
ttaatccatcattcggcagcgggca

SEQ ID NO: 149544 - DNA, 25 bp, Homo sapien
tggcagacatccaaccagcagtctg

SEQ ID NO: 149545 - DNA, 25 bp, Homo sapien
caggttctcccgcagagggggtcat

SEQ ID NO: 149546 - DNA, 25 bp, Homo sapien
gatgatgtaatgctcggccttcacc

SEQ ID NO: 149547 - DNA, 25 bp, Homo sapien
caggatgtaaaccaatgggagacca

SEQ ID NO: 149548 - DNA, 25 bp, Homo sapien
caccttcattggctgccggtcctgc

SEQ ID NO: 149549 - DNA, 25 bp, Homo sapien
ctgaagactgttcctcggaatagcc

SEQ ID NO: 149550 - DNA, 25 bp, Homo sapien
gactacacgcctggctaagagctca

SEQ ID NO: 149551 - DNA, 25 bp, Homo sapien
cctcggaatagcctggagctgccga

SEQ ID NO: 149552 - DNA, 25 bp, Homo sapien
cgccagactacacgcctggctaaga

SEQ ID NO: 149553 - DNA, 25 bp, Homo sapien
tgatttacgcgccaccgtccttggg

SEQ ID NO: 149554 - DNA, 25 bp, Homo sapien
gacatctcaggaccaaacttgtcaa

SEQ ID NO: 149555 - DNA, 25 bp, Homo sapien
aattccacagttgacctgacataag

SEQ ID NO: 149556 - DNA, 25 bp, Homo sapien
gcaatgcgctaggatcaaattccac

SEQ ID NO: 149557 - DNA, 25 bp, Homo sapien
tacctgggaaccttagggaggctgc

SEQ ID NO: 149558 - DNA, 25 bp, Homo sapien
aactgtagggcacaagtctcgacgc

SEQ ID NO: 149559 - DNA, 25 bp, Homo sapien
tgtgagagtatctgtcgccaccctt

SEQ ID NO: 149560 - DNA, 25 bp, Homo sapien
catatgtgaaagtgtcctgcttgca

SEQ ID NO: 149561 - DNA, 25 bp, Homo sapien
gccactctgaattgtaaaagttccc

SEQ ID NO: 149562 - DNA, 25 bp, Homo sapien
ctgtatacagggatcaattcggacc

SEQ ID NO: 149563 - DNA, 25 bp, Homo sapien
tacagggatcaattcggaccgccca

SEQ ID NO: 149564 - DNA, 25 bp, Homo sapien
tatacagggatcaattcggaccgcc

SEQ ID NO: 149565 - DNA, 25 bp, Homo sapien
cagaggttgctaggatacaccgctc

SEQ ID NO: 149566 - DNA, 25 bp, Homo sapien
ctaaatggtgataaaccggccacgg

SEQ ID NO: 149567 - DNA, 25 bp, Homo sapien
gcttatcattaagggaaggctggca

SEQ ID NO: 149568 - DNA, 25 bp, Homo sapien
caagtggcatattcagttaacggac

SEQ ID NO: 149569 - DNA, 25 bp, Homo sapien
tccggccatgtatctttttatgatg

SEQ ID NO: 149570 - DNA, 25 bp, Homo sapien
tagttatcattggtggatcactgcc

SEQ ID NO: 149571 - DNA, 25 bp, Homo sapien
gtgttgtggtcttccgtcagaagga

SEQ ID NO: 149572 - DNA, 25 bp, Homo sapien
gatcactgcctggattcattgtcct

SEQ ID NO: 149573 - DNA, 25 bp, Homo sapien
gacttaacagaatgacctgggcctc

SEQ ID NO: 149574 - DNA, 25 bp, Homo sapien
gcagggatcgtttatgctccaggaa

SEQ ID NO: 149575 - DNA, 25 bp, Homo sapien
ggtcttctagcccatgttctgcagg

SEQ ID NO: 149576 - DNA, 25 bp, Homo sapien
gaaaccacaagtctgagcttgcagc

SEQ ID NO: 149577 - DNA, 25 bp, Homo sapien
tgagattatgacccctggccttctt

SEQ ID NO: 149578 - DNA, 25 bp, Homo sapien
gccttcttaacattccatgcccacc

SEQ ID NO: 149579 - DNA, 25 bp, Homo sapien
attatgacccctggccttcttaaca

SEQ ID NO: 149580 - DNA, 25 bp, Homo sapien
gctgcggtggctgggtgagattatg

SEQ ID NO: 149581 - DNA, 25 bp, Homo sapien
ccagcaaaaagtgaccggagaggct

SEQ ID NO: 149582 - DNA, 25 bp, Homo sapien
gatgaggggatccagaatagtgccc

SEQ ID NO: 149583 - DNA, 25 bp, Homo sapien
tctgtagtcgttggtggctgctccg

SEQ ID NO: 149584 - DNA, 25 bp, Homo sapien
agcctccttccaacggccagcaaaa

SEQ ID NO: 149585 - DNA, 25 bp, Homo sapien
gctgctgattggctgccctgggact

SEQ ID NO: 149586 - DNA, 25 bp, Homo sapien
tcctccctggtgatacctaatgtta

SEQ ID NO: 149587 - DNA, 25 bp, Homo sapien
ggtccaatcagctatcaccagggag

SEQ ID NO: 149588 - DNA, 25 bp, Homo sapien
tccagcctggacctcttatttattg

SEQ ID NO: 149589 - DNA, 25 bp, Homo sapien
ggcacccagaccaatgctgcccaac

SEQ ID NO: 149590 - DNA, 25 bp, Homo sapien
acccagaccaatgctgcccaacatt

SEQ ID NO: 149591 - DNA, 25 bp, Homo sapien
cacccagaccaatgctgcccaacat

SEQ ID NO: 149592 - DNA, 25 bp, Homo sapien
gggcacccagaccaatgctgcccaa

SEQ ID NO: 149593 - DNA, 25 bp, Homo sapien
ttccagaatctgtatccctcggtca

SEQ ID NO: 149594 - DNA, 25 bp, Homo sapien
gcctttggttctgggtccgtgtctg

SEQ ID NO: 149595 - DNA, 25 bp, Homo sapien
tctgtgtaatagaaactccaggccc

SEQ ID NO: 149596 - DNA, 25 bp, Homo sapien
cctcggtcactaaactgtgtggcct

SEQ ID NO: 149597 - DNA, 25 bp, Homo sapien
tttgctgtgagaaaatcgtggaggt

SEQ ID NO: 149598 - DNA, 25 bp, Homo sapien
caaggcccaagctggatcaaagact

SEQ ID NO: 149599 - DNA, 25 bp, Homo sapien
taatgactttttggctcaaggccca

SEQ ID NO: 149600 - DNA, 25 bp, Homo sapien
tgaagcttgtgtcttagggtctgga

SEQ ID NO: 149601 - DNA, 25 bp, Homo sapien
cactgcgtcacctttctgcctttga

SEQ ID NO: 149602 - DNA, 25 bp, Homo sapien
ttcctctgctccgtcactgcgtcac

SEQ ID NO: 149603 - DNA, 25 bp, Homo sapien
tctctttgttttggaggtcagaagt

SEQ ID NO: 149604 - DNA, 25 bp, Homo sapien
ttctccagcggctagaggcttcctg

SEQ ID NO: 149605 - DNA, 25 bp, Homo sapien
cactttggcccagaaaccaaatgtg

SEQ ID NO: 149606 - DNA, 25 bp, Homo sapien
cattgttcaaaatggatcatgtgcc

SEQ ID NO: 149607 - DNA, 25 bp, Homo sapien
aggacaccagctgacaatttcttgg

SEQ ID NO: 149608 - DNA, 25 bp, Homo sapien
tagaacaaagcctgagtccgagaat

SEQ ID NO: 149609 - DNA, 25 bp, Homo sapien
tgaggtaccctgtcaccactacaac

SEQ ID NO: 149610 - DNA, 25 bp, Homo sapien
cgagagctaggagcctgcgccacat

SEQ ID NO: 149611 - DNA, 25 bp, Homo sapien
tgacgtctacctggcttggtaactg

SEQ ID NO: 149612 - DNA, 25 bp, Homo sapien
cctgacctggagtgaggtaccctgt

SEQ ID NO: 149613 - DNA, 25 bp, Homo sapien
ctgcgtcactctcatgtcctcggag

SEQ ID NO: 149614 - DNA, 25 bp, Homo sapien
aacagcagggaagtcggctgcgtca

SEQ ID NO: 149615 - DNA, 25 bp, Homo sapien
gcagtgccaggcagactgacagaga

SEQ ID NO: 149616 - DNA, 25 bp, Homo sapien
cagggaagtcggctgcgtcactctc

SEQ ID NO: 149617 - DNA, 25 bp, Homo sapien
gggtcccaagagcccgtggtctggc

SEQ ID NO: 149618 - DNA, 25 bp, Homo sapien
cgctgagataactggggacaggcct

SEQ ID NO: 149619 - DNA, 25 bp, Homo sapien
cagccctgagtacagtgaggccctc

SEQ ID NO: 149620 - DNA, 25 bp, Homo sapien
tgaggccctcgcaaagggatgagcc

SEQ ID NO: 149621 - DNA, 25 bp, Homo sapien
tgccagtgttcagtgataaaagatc

SEQ ID NO: 149622 - DNA, 25 bp, Homo sapien
actatccggcctttgtgtcacacag

SEQ ID NO: 149623 - DNA, 25 bp, Homo sapien
caaaatgaccggactcgccgtggca

SEQ ID NO: 149624 - DNA, 25 bp, Homo sapien
tgtcacacagcggtgtggaaaaaac

SEQ ID NO: 149625 - DNA, 25 bp, Homo sapien
tcgccgtggcaggtagtgaactatc

SEQ ID NO: 149626 - DNA, 25 bp, Homo sapien
tagaatcgccctgcagtgtgaacag

SEQ ID NO: 149627 - DNA, 25 bp, Homo sapien
gctaaccagtgtttgtcggcgctaa

SEQ ID NO: 149628 - DNA, 25 bp, Homo sapien
tatgcagtttccaggcggcagttgc

SEQ ID NO: 149629 - DNA, 25 bp, Homo sapien
cctgggtaagcggtcacatcactgt

SEQ ID NO: 149630 - DNA, 25 bp, Homo sapien
ggctcccggaggcctcagcaatcac

SEQ ID NO: 149631 - DNA, 25 bp, Homo sapien
ctggctcccggaggcctcagcaatc

SEQ ID NO: 149632 - DNA, 25 bp, Homo sapien
tggctcccggaggcctcagcaatca

SEQ ID NO: 149633 - DNA, 25 bp, Homo sapien
tgcttcgcttttgagtgtgacttgc

SEQ ID NO: 149634 - DNA, 25 bp, Homo sapien
tcactggttggaggagccgaaatga

SEQ ID NO: 149635 - DNA, 25 bp, Homo sapien
tggtcggccgcgagcacgatgcttc

SEQ ID NO: 149636 - DNA, 25 bp, Homo sapien
aatatatctcggtgcgtggtcggcc

SEQ ID NO: 149637 - DNA, 25 bp, Homo sapien
catcatcccagccaaacccatgtgg

SEQ ID NO: 149638 - DNA, 25 bp, Homo sapien
tgcctatcgtcccagccgaacccat

SEQ ID NO: 149639 - DNA, 25 bp, Homo sapien
tatcgtcccagccgaacccatgtgg

SEQ ID NO: 149640 - DNA, 25 bp, Homo sapien
tatcgtcccagccgaacccgtgtgg

SEQ ID NO: 149641 - DNA, 25 bp, Homo sapien
tatcgtcccggctgtaccccgtggc

SEQ ID NO: 149642 - DNA, 25 bp, Homo sapien
ctatcgtcccggctgtaccccgtgg

SEQ ID NO: 149643 - DNA, 25 bp, Homo sapien
tgtcccagctgaacctgtgtggctt

SEQ ID NO: 149644 - DNA, 25 bp, Homo sapien
gtttctgcccattgtactgcctaca

SEQ ID NO: 149645 - DNA, 25 bp, Homo sapien
tatcattccggccatactcgcatgg

SEQ ID NO: 149646 - DNA, 25 bp, Homo sapien
cccaaggagtgttggcgacgggcag

SEQ ID NO: 149647 - DNA, 25 bp, Homo sapien
tctctgttcccagccgagttctctg

SEQ ID NO: 149648 - DNA, 25 bp, Homo sapien
acatgctactggcacatctcttttg

SEQ ID NO: 149649 - DNA, 25 bp, Homo sapien
gatggattcgatgacatccctctcc

SEQ ID NO: 149650 - DNA, 25 bp, Homo sapien
ttctcccggtcacgacatgctactg

SEQ ID NO: 149651 - DNA, 25 bp, Homo sapien
ctaaaaataccgctagaaggatggg

SEQ ID NO: 149652 - DNA, 25 bp, Homo sapien
tcagttgtttgttcgtgctaaaaat

SEQ ID NO: 149653 - DNA, 25 bp, Homo sapien
gtattccagattgttgacactttga

SEQ ID NO: 149654 - DNA, 25 bp, Homo sapien
gggagtattccagattgttgacact

SEQ ID NO: 149655 - DNA, 25 bp, Homo sapien
ggctcagaaagccgagcagctggga

SEQ ID NO: 149656 - DNA, 25 bp, Homo sapien
cgggggctcagaaagccgagcagct

SEQ ID NO: 149657 - DNA, 25 bp, Homo sapien
cgccgggggctcagaaagccgagca

SEQ ID NO: 149658 - DNA, 25 bp, Homo sapien
ctcagaaagccgagcagctgggaga

SEQ ID NO: 149659 - DNA, 25 bp, Homo sapien
tgaatcactataatccattgcctgt

SEQ ID NO: 149660 - DNA, 25 bp, Homo sapien
cctctgaatcactataatccattgc

SEQ ID NO: 149661 - DNA, 25 bp, Homo sapien
tctgaatcactataatccattgcct

SEQ ID NO: 149662 - DNA, 25 bp, Homo sapien
gaatcactataatccattgcctgtt

SEQ ID NO: 149663 - DNA, 25 bp, Homo sapien
gtattttatcaacccttgtgcttgg

SEQ ID NO: 149664 - DNA, 25 bp, Homo sapien
catctgctttgcatgcggcattgca

SEQ ID NO: 149665 - DNA, 25 bp, Homo sapien
acagctgttgcactgaaaggttcag

SEQ ID NO: 149666 - DNA, 25 bp, Homo sapien
gtgtctggtcctacatgaatttgga

SEQ ID NO: 149667 - DNA, 25 bp, Homo sapien
gttggagcgagaccggaagccatct

SEQ ID NO: 149668 - DNA, 25 bp, Homo sapien
ggttgtgcaagaatgcttcagtcca

SEQ ID NO: 149669 - DNA, 25 bp, Homo sapien
catagccttctactaaggagggagg

SEQ ID NO: 149670 - DNA, 25 bp, Homo sapien
gccaaacctgcatggaatccagggt

SEQ ID NO: 149671 - DNA, 25 bp, Homo sapien
gtatcttgatacaactccttcagct

SEQ ID NO: 149672 - DNA, 25 bp, Homo sapien
cagtttgaagtggtaggtgatcttc

SEQ ID NO: 149673 - DNA, 25 bp, Homo sapien
acttgctgcactctgtatcttgata

SEQ ID NO: 149674 - DNA, 25 bp, Homo sapien
ttattccattgaggctgacctggag

SEQ ID NO: 149675 - DNA, 25 bp, Homo sapien
tacgggcccttagtataagaatgca

SEQ ID NO: 149676 - DNA, 25 bp, Homo sapien
tcctctcccatgtactaatagccgt

SEQ ID NO: 149677 - DNA, 25 bp, Homo sapien
ggagaagacttgcttgatagggaaa

SEQ ID NO: 149678 - DNA, 25 bp, Homo sapien
ccacagatcaccaagcagctttcta

SEQ ID NO: 149679 - DNA, 25 bp, Homo sapien
acgacacagagacccatctgctggg

SEQ ID NO: 149680 - DNA, 25 bp, Homo sapien
cctcagggcctatggattcttcacc

SEQ ID NO: 149681 - DNA, 25 bp, Homo sapien
agcagccatcgccttgccaagtgca

SEQ ID NO: 149682 - DNA, 25 bp, Homo sapien
tccgcaaagccgacaagcttcagct

SEQ ID NO: 149683 - DNA, 25 bp, Homo sapien
taattatgagagaaaccatgatttt

SEQ ID NO: 149684 - DNA, 25 bp, Homo sapien
tacaaattcatggaaagccaatatt

SEQ ID NO: 149685 - DNA, 25 bp, Homo sapien
aaagctgctatatactgagtggacc

SEQ ID NO: 149686 - DNA, 25 bp, Homo sapien
tagcatgttgaaaccccgggtctac

SEQ ID NO: 149687 - DNA, 25 bp, Homo sapien
ccggtcccgcagctgttgaagtcag

SEQ ID NO: 149688 - DNA, 25 bp, Homo sapien
aggagttacaggagctgccggtccc

SEQ ID NO: 149689 - DNA, 25 bp, Homo sapien
aagtcagtatgcagtcagggtctcc

SEQ ID NO: 149690 - DNA, 25 bp, Homo sapien
tcatctggaagcatagccccatgat

SEQ ID NO: 149691 - DNA, 25 bp, Homo sapien
ctaaagccacacgtgcggagctcgt

SEQ ID NO: 149692 - DNA, 25 bp, Homo sapien
tgcctctgtaggagaaggcctctca

SEQ ID NO: 149693 - DNA, 25 bp, Homo sapien
tctgctcatgttagcgagaggcttg

SEQ ID NO: 149694 - DNA, 25 bp, Homo sapien
tctttgcttattggtccccatggcc

SEQ ID NO: 149695 - DNA, 25 bp, Homo sapien
gccacagtgatcattctcatctcct

SEQ ID NO: 149696 - DNA, 25 bp, Homo sapien
ttggctgtctgcgtgccacgcgtgt

SEQ ID NO: 149697 - DNA, 25 bp, Homo sapien
cgcgtgtgccacattcctatcgctt

SEQ ID NO: 149698 - DNA, 25 bp, Homo sapien
gtgccacgcgtgtgccacattccta

SEQ ID NO: 149699 - DNA, 25 bp, Homo sapien
cttcttgggagtgcctgctcgtccc

SEQ ID NO: 149700 - DNA, 25 bp, Homo sapien
tgtgtcataacggaccagattctgt

SEQ ID NO: 149701 - DNA, 25 bp, Homo sapien
tcacttctgtgtcataacggaccag

SEQ ID NO: 149702 - DNA, 25 bp, Homo sapien
taacggaccagattctgttggatca

SEQ ID NO: 149703 - DNA, 25 bp, Homo sapien
ttgagcaggcccttcacttctgtgt

SEQ ID NO: 149704 - DNA, 25 bp, Homo sapien
cagagtacggtagaaagctcccagc

SEQ ID NO: 149705 - DNA, 25 bp, Homo sapien
cagttttggaccagtaatgagtatc

SEQ ID NO: 149706 - DNA, 25 bp, Homo sapien
cttcacctgggccaacggattttct

SEQ ID NO: 149707 - DNA, 25 bp, Homo sapien
tatgtgtacccaggaaggtaacaga

SEQ ID NO: 149708 - DNA, 25 bp, Homo sapien
ttgggaatacgcacccagtggctgg

SEQ ID NO: 149709 - DNA, 25 bp, Homo sapien
gcttcaaaggcttaattgggaatac

SEQ ID NO: 149710 - DNA, 25 bp, Homo sapien
gcttaattgggaatacgcacccagt

SEQ ID NO: 149711 - DNA, 25 bp, Homo sapien
gaatacgcacccagtggctggtgtt

SEQ ID NO: 149712 - DNA, 25 bp, Homo sapien
ggttgtagcttcaggccttctcagc

SEQ ID NO: 149713 - DNA, 25 bp, Homo sapien
tcagctctgtggttactgtggcttc

SEQ ID NO: 149714 - DNA, 25 bp, Homo sapien
acccttctgggtgccgcattcattg

SEQ ID NO: 149715 - DNA, 25 bp, Homo sapien
gaatcttaaactctctccaggaata

SEQ ID NO: 149716 - DNA, 25 bp, Homo sapien
cagccgagctgttgggaacgattcc

SEQ ID NO: 149717 - DNA, 25 bp, Homo sapien
gactatgtccccatgaaaagtggta

SEQ ID NO: 149718 - DNA, 25 bp, Homo sapien
ctctcatggcaacagtggaagcgat

SEQ ID NO: 149719 - DNA, 25 bp, Homo sapien
cagacaagccctggaaggaggttca

SEQ ID NO: 149720 - DNA, 25 bp, Homo sapien
aaaccaggtgcggtaagcttgtacg

SEQ ID NO: 149721 - DNA, 25 bp, Homo sapien
gacagatggcaatattaaagagccg

SEQ ID NO: 149722 - DNA, 25 bp, Homo sapien
tccttggtttgatcacagagggaca

SEQ ID NO: 149723 - DNA, 25 bp, Homo sapien
tcagagtcatagaacaggacgaaac

SEQ ID NO: 149724 - DNA, 25 bp, Homo sapien
tattattgaagtagccactcattac

SEQ ID NO: 149725 - DNA, 25 bp, Homo sapien
aatgattctcatgtccccaaatttc

SEQ ID NO: 149726 - DNA, 25 bp, Homo sapien
gaagtagccactcattacaagctga

SEQ ID NO: 149727 - DNA, 25 bp, Homo sapien
tgagcttattattgaagtagccact

SEQ ID NO: 149728 - DNA, 25 bp, Homo sapien
gggtgcccagcttgttaaacgtcac

SEQ ID NO: 149729 - DNA, 25 bp, Homo sapien
taaacgtcactggtactggctggcc

SEQ ID NO: 149730 - DNA, 25 bp, Homo sapien
tctgggaatataagatggtgctcac

SEQ ID NO: 149731 - DNA, 25 bp, Homo sapien
tccctttgtaactgagataactctt

SEQ ID NO: 149732 - DNA, 25 bp, Homo sapien
ggtatacgtatatgatgatgggatg

SEQ ID NO: 149733 - DNA, 25 bp, Homo sapien
gatgtatctcatggtataccaagta

SEQ ID NO: 149734 - DNA, 25 bp, Homo sapien
atgggatgtatctcatggtatacca

SEQ ID NO: 149735 - DNA, 25 bp, Homo sapien
cataagggtatacgtatatgatgat

SEQ ID NO: 149736 - DNA, 25 bp, Homo sapien
gttgacaatatccagaatgacattg

SEQ ID NO: 149737 - DNA, 25 bp, Homo sapien
tggacctagaagatacatggtatgt

SEQ ID NO: 149738 - DNA, 25 bp, Homo sapien
tgtatctgcttttccggagttgtaa

SEQ ID NO: 149739 - DNA, 25 bp, Homo sapien
tcaagcctgagaactaaaagtgatg

SEQ ID NO: 149740 - DNA, 25 bp, Homo sapien
gtttgaggtgagacatccggaagcc

SEQ ID NO: 149741 - DNA, 25 bp, Homo sapien
catctcggcgtggatggctgtcaca

SEQ ID NO: 149742 - DNA, 25 bp, Homo sapien
tgttgttaagcccagtacagctctc

SEQ ID NO: 149743 - DNA, 25 bp, Homo sapien
tccgtcactatatccaggctgcagc

SEQ ID NO: 149744 - DNA, 25 bp, Homo sapien
gctgtcttggtaatttagtgacatc

SEQ ID NO: 149745 - DNA, 25 bp, Homo sapien
ggagctgtcttggtaatttagtgac

SEQ ID NO: 149746 - DNA, 25 bp, Homo sapien
ggtaatttagtgacatctgcatcac

SEQ ID NO: 149747 - DNA, 25 bp, Homo sapien
gtcttggtaatttagtgacatctgc

SEQ ID NO: 149748 - DNA, 25 bp, Homo sapien
gagaagataatgttactccctactt

SEQ ID NO: 149749 - DNA, 25 bp, Homo sapien
aagataatgttactccctacttgag

SEQ ID NO: 149750 - DNA, 25 bp, Homo sapien
gataatgttactccctacttgagtc

SEQ ID NO: 149751 - DNA, 25 bp, Homo sapien
gaagataatgttactccctacttga

SEQ ID NO: 149752 - DNA, 25 bp, Homo sapien
aaagctgcaatgtccctcagctctg

SEQ ID NO: 149753 - DNA, 25 bp, Homo sapien
caggttgcaaagctgcaatgtccct

SEQ ID NO: 149754 - DNA, 25 bp, Homo sapien
ctcatcagctcatcttggagctcat

SEQ ID NO: 149755 - DNA, 25 bp, Homo sapien
tgcagatcacagcactcatcagctc

SEQ ID NO: 149756 - DNA, 25 bp, Homo sapien
aatgccgattgttagaaaaggccct

SEQ ID NO: 149757 - DNA, 25 bp, Homo sapien
taatgccgattgttagaaaaggccc

SEQ ID NO: 149758 - DNA, 25 bp, Homo sapien
ttaatgccgattgttagaaaaggcc

SEQ ID NO: 149759 - DNA, 25 bp, Homo sapien
tgccgattgttagaaaaggcccttc

SEQ ID NO: 149760 - DNA, 25 bp, Homo sapien
agacttcccgtgttcatgaaggggc

SEQ ID NO: 149761 - DNA, 25 bp, Homo sapien
ttcccgtgttcatgaaggggctgtt

SEQ ID NO: 149762 - DNA, 25 bp, Homo sapien
ctagacttcccgtgttcatgaaggg

SEQ ID NO: 149763 - DNA, 25 bp, Homo sapien
acttcccgtgttcatgaaggggctg

SEQ ID NO: 149764 - DNA, 25 bp, Homo sapien
aggtgggttaactcatgtgcctccc

SEQ ID NO: 149765 - DNA, 25 bp, Homo sapien
tgtaaaaccgcagtcctagttgcca

SEQ ID NO: 149766 - DNA, 25 bp, Homo sapien
tatctgttcctgtgtcacctggctg

SEQ ID NO: 149767 - DNA, 25 bp, Homo sapien
tgtatctcaggatcctcgtctgtaa

SEQ ID NO: 149768 - DNA, 25 bp, Homo sapien
gctgttcctgtttgctccgctgggc

SEQ ID NO: 149769 - DNA, 25 bp, Homo sapien
tgttcctgtttgctccgctgggcag

SEQ ID NO: 149770 - DNA, 25 bp, Homo sapien
ttcctgtttgctccgctgggcagag

SEQ ID NO: 149771 - DNA, 25 bp, Homo sapien
ctgtttgctccgctgggcagaggtg

SEQ ID NO: 149772 - DNA, 25 bp, Homo sapien
gggttctaagctcgcagcctcagac

SEQ ID NO: 149773 - DNA, 25 bp, Homo sapien
gctcgcagcctcagacagaggaggt

SEQ ID NO: 149774 - DNA, 25 bp, Homo sapien
taagctcgcagcctcagacagagga

SEQ ID NO: 149775 - DNA, 25 bp, Homo sapien
aacgagtgagctcggggttctaagc

SEQ ID NO: 149776 - DNA, 25 bp, Homo sapien
gatggaaacgagcagctgacaagag

SEQ ID NO: 149777 - DNA, 25 bp, Homo sapien
aaacgagcagctgacaagagggcct

SEQ ID NO: 149778 - DNA, 25 bp, Homo sapien
ggtgatggaaacgagcagctgacaa

SEQ ID NO: 149779 - DNA, 25 bp, Homo sapien
gtgggtgatggaaacgagcagctga

SEQ ID NO: 149780 - DNA, 25 bp, Homo sapien
gagctgagtacatcgggtatccccg

SEQ ID NO: 149781 - DNA, 25 bp, Homo sapien
tatccccggagaccatcagggatgg

SEQ ID NO: 149782 - DNA, 25 bp, Homo sapien
gacgtggaccgaagtagaccgagct

SEQ ID NO: 149783 - DNA, 25 bp, Homo sapien
gaagtagaccgagctgagtacatcg

SEQ ID NO: 149784 - DNA, 25 bp, Homo sapien
ctgggccattgagcaaaactccatc

SEQ ID NO: 149785 - DNA, 25 bp, Homo sapien
cacttcactctagcctgggccattg

SEQ ID NO: 149786 - DNA, 25 bp, Homo sapien
tcactctagcctgggccattgagca

SEQ ID NO: 149787 - DNA, 25 bp, Homo sapien
ctagcctgggccattgagcaaaact

SEQ ID NO: 149788 - DNA, 25 bp, Homo sapien
tccacgtcctcagccaaacttccag

SEQ ID NO: 149789 - DNA, 25 bp, Homo sapien
gccaaacttccagagaatctacagg

SEQ ID NO: 149790 - DNA, 25 bp, Homo sapien
gatgtgtagctttctccacgtcctc

SEQ ID NO: 149791 - DNA, 25 bp, Homo sapien
tcaggcaatgagatgtgtagctttc

SEQ ID NO: 149792 - DNA, 25 bp, Homo sapien
gaaaattcctggtcataaggactat

SEQ ID NO: 149793 - DNA, 25 bp, Homo sapien
ataaggactataaaagcccaaagag

SEQ ID NO: 149794 - DNA, 25 bp, Homo sapien
ggattttcctggagtgttccttgag

SEQ ID NO: 149795 - DNA, 25 bp, Homo sapien
ttcctggagtgttccttgagagatt

SEQ ID NO: 149796 - DNA, 25 bp, Homo sapien
ggcttccatcgtttccaaaccatgt

SEQ ID NO: 149797 - DNA, 25 bp, Homo sapien
caaaccatgtctggtgttcattttc

SEQ ID NO: 149798 - DNA, 25 bp, Homo sapien
gcagaacacagattgttctgtggag

SEQ ID NO: 149799 - DNA, 25 bp, Homo sapien
ttggaaagctcagaactctctcggg

SEQ ID NO: 149800 - DNA, 25 bp, Homo sapien
gcggcagtacaagaggtggcacgta

SEQ ID NO: 149801 - DNA, 25 bp, Homo sapien
agtacaagaggtggcacgtaggcct

SEQ ID NO: 149802 - DNA, 25 bp, Homo sapien
ggcagtacaagaggtggcacgtagg

SEQ ID NO: 149803 - DNA, 25 bp, Homo sapien
catggcggcagtacaagaggtggca

SEQ ID NO: 149804 - DNA, 25 bp, Homo sapien
ctgcccatcgatgatggtgttgagt

SEQ ID NO: 149805 - DNA, 25 bp, Homo sapien
tgcccatcgatgatggtgttgagta

SEQ ID NO: 149806 - DNA, 25 bp, Homo sapien
tggcagggatggtaaaggctgtttt

SEQ ID NO: 149807 - DNA, 25 bp, Homo sapien
cagggatggtaaaggctgttttcca

SEQ ID NO: 149808 - DNA, 25 bp, Homo sapien
ttaatggcagggatggtaaaggctg

SEQ ID NO: 149809 - DNA, 25 bp, Homo sapien
taatggcagggatggtaaaggctgt

SEQ ID NO: 149810 - DNA, 25 bp, Homo sapien
cccaggagtggcacagccctctatg

SEQ ID NO: 149811 - DNA, 25 bp, Homo sapien
caccacatgaacatatctttggccc

SEQ ID NO: 149812 - DNA, 25 bp, Homo sapien
tcttggtgcagtcaatgtctgcttt

SEQ ID NO: 149813 - DNA, 25 bp, Homo sapien
aggagtggcacagccctctatgggc

SEQ ID NO: 149814 - DNA, 25 bp, Homo sapien
gccagtggtcttggtgtgctgactt

SEQ ID NO: 149815 - DNA, 25 bp, Homo sapien
ttcttggacacacccacagtgcggc

SEQ ID NO: 149816 - DNA, 25 bp, Homo sapien
ccagtggtcttggtgtgctgacttt

SEQ ID NO: 149817 - DNA, 25 bp, Homo sapien
ggacacacccacagtgcggccatgg

SEQ ID NO: 149818 - DNA, 25 bp, Homo sapien
aactatttattaacagacaaggcct

SEQ ID NO: 149819 - DNA, 25 bp, Homo sapien
tatttattaacagacaaggcctaca

SEQ ID NO: 149820 - DNA, 25 bp, Homo sapien
tataaactatttattaacagacaag

SEQ ID NO: 149821 - DNA, 25 bp, Homo sapien
ttattaacagacaaggcctacagac

SEQ ID NO: 149822 - DNA, 25 bp, Homo sapien
tctgtggctctaattcttgtgggca

SEQ ID NO: 149823 - DNA, 25 bp, Homo sapien
gataaaggcatgacactccgaagct

SEQ ID NO: 149824 - DNA, 25 bp, Homo sapien
taccccagtgtactctgtatgcgcc

SEQ ID NO: 149825 - DNA, 25 bp, Homo sapien
cacgcactggagtcgcactttgtac

SEQ ID NO: 149826 - DNA, 25 bp, Homo sapien
cacgtgctcaggactgggagtggct

SEQ ID NO: 149827 - DNA, 25 bp, Homo sapien
tccgggtgagtcctggcttgctggc

SEQ ID NO: 149828 - DNA, 25 bp, Homo sapien
cacgccgaagactgttggtgtcatc

SEQ ID NO: 149829 - DNA, 25 bp, Homo sapien
gagacctggtcccacgccgaagact

SEQ ID NO: 149830 - DNA, 25 bp, Homo sapien
tggttgtactgattgtgactcaggc

SEQ ID NO: 149831 - DNA, 25 bp, Homo sapien
tcggtttctttgcaaagggtgcagg

SEQ ID NO: 149832 - DNA, 25 bp, Homo sapien
tcagatgctcggtttctttgcaaag

SEQ ID NO: 149833 - DNA, 25 bp, Homo sapien
tactgattgtgactcaggcccaaag

SEQ ID NO: 149834 - DNA, 25 bp, Homo sapien
tgtgctgtgaaagcccgctgtgctg

SEQ ID NO: 149835 - DNA, 25 bp, Homo sapien
tcgtggacatgcacgcagcgctgtg

SEQ ID NO: 149836 - DNA, 25 bp, Homo sapien
ggcagatgcctgctgggcacgtcct

SEQ ID NO: 149837 - DNA, 25 bp, Homo sapien
cgctgtgcggcattcatggtttgag

SEQ ID NO: 149838 - DNA, 25 bp, Homo sapien
gatttgagctgcttgtaagtcacag

SEQ ID NO: 149839 - DNA, 25 bp, Homo sapien
ggttttccagatgtctgccaacaag

SEQ ID NO: 149840 - DNA, 25 bp, Homo sapien
tttttagcaacctagcatgatgcca

SEQ ID NO: 149841 - DNA, 25 bp, Homo sapien
caaggtcccatactctgtattcggg

SEQ ID NO: 149842 - DNA, 25 bp, Homo sapien
gggtttacaagttagggatgctcaa

SEQ ID NO: 149843 - DNA, 25 bp, Homo sapien
gtcattgttgttgtgcctgccacca

SEQ ID NO: 149844 - DNA, 25 bp, Homo sapien
gctgcttctcactatagaggtgcaa

SEQ ID NO: 149845 - DNA, 25 bp, Homo sapien
ccattgagcatgttggcgctcagaa

SEQ ID NO: 149846 - DNA, 25 bp, Homo sapien
gaagcaggtacttttaccccatgaa

SEQ ID NO: 149847 - DNA, 25 bp, Homo sapien
atagcagcaaacattgaagcaggta

SEQ ID NO: 149848 - DNA, 25 bp, Homo sapien
cctcatagggcttgtctggctgttt

SEQ ID NO: 149849 - DNA, 25 bp, Homo sapien
tgcctcatagggcttgtctggctgt

SEQ ID NO: 149850 - DNA, 25 bp, Homo sapien
tccccagcagctgatattgagtaga

SEQ ID NO: 149851 - DNA, 25 bp, Homo sapien
tctgccttcgcaggactgactgttc

SEQ ID NO: 149852 - DNA, 25 bp, Homo sapien
ttttgaggatgaacccaccatggtg

SEQ ID NO: 149853 - DNA, 25 bp, Homo sapien
tgttttccgccgacatgctttcaga

SEQ ID NO: 149854 - DNA, 25 bp, Homo sapien
cggactgcagggaattgatttcatt

SEQ ID NO: 149855 - DNA, 25 bp, Homo sapien
actgggaagtactggcccacggact

SEQ ID NO: 149856 - DNA, 25 bp, Homo sapien
ccacggactgcagggaattgatttc

SEQ ID NO: 149857 - DNA, 25 bp, Homo sapien
cattaatcagtggactatttgttga

SEQ ID NO: 149858 - DNA, 25 bp, Homo sapien
aatgaatgccatcccagccttgtag

SEQ ID NO: 149859 - DNA, 25 bp, Homo sapien
tgtgtggcatgtcacgttaagacta

SEQ ID NO: 149860 - DNA, 25 bp, Homo sapien
ctatcaagagagatttgggtggtcc

SEQ ID NO: 149861 - DNA, 25 bp, Homo sapien
tcactagtatgacgaaacagacagt

SEQ ID NO: 149862 - DNA, 25 bp, Homo sapien
aacttacatgtctagctcttcagga

SEQ ID NO: 149863 - DNA, 25 bp, Homo sapien
gaaccttgctaacagtttgtctgat

SEQ ID NO: 149864 - DNA, 25 bp, Homo sapien
gcatgtgtgcccctggtatctcttt

SEQ ID NO: 149865 - DNA, 25 bp, Homo sapien
cagcctgtaacagtcccaaaaggtt

SEQ ID NO: 149866 - DNA, 25 bp, Homo sapien
aattttggccttgactgttgtttca

SEQ ID NO: 149867 - DNA, 25 bp, Homo sapien
cagtggcttagtgtagcctttatga

SEQ ID NO: 149868 - DNA, 25 bp, Homo sapien
tcaacctgtacattggcttcactgt

SEQ ID NO: 149869 - DNA, 25 bp, Homo sapien
ttcagtggcttagtgtagcctttat

SEQ ID NO: 149870 - DNA, 25 bp, Homo sapien
catcctcatgcattttagcttaggg

SEQ ID NO: 149871 - DNA, 25 bp, Homo sapien
tgtgtcaggcatttacttccctaag

SEQ ID NO: 149872 - DNA, 25 bp, Homo sapien
gtgatttagcttgctcacatgaaca

SEQ ID NO: 149873 - DNA, 25 bp, Homo sapien
tataattactatatacttggcacca

SEQ ID NO: 149874 - DNA, 25 bp, Homo sapien
gaaatgctttgattagcatcttctg

SEQ ID NO: 149875 - DNA, 25 bp, Homo sapien
gaaggtgagggtttcatcagctgaa

SEQ ID NO: 149876 - DNA, 25 bp, Homo sapien
tggcttttttgggtatatctcttca

SEQ ID NO: 149877 - DNA, 25 bp, Homo sapien
cccctcctgtgcagtagcttttata

SEQ ID NO: 149878 - DNA, 25 bp, Homo sapien
aaggtacaggtgagagagcatacag

SEQ ID NO: 149879 - DNA, 25 bp, Homo sapien
agcagaaggtacaggtgagagagca

SEQ ID NO: 149880 - DNA, 25 bp, Homo sapien
cagaaggtacaggtgagagagcata

SEQ ID NO: 149881 - DNA, 25 bp, Homo sapien
tacaggtgagagagcatacaggcat

SEQ ID NO: 149882 - DNA, 25 bp, Homo sapien
tgttgttgggctgtggttgcttcca

SEQ ID NO: 149883 - DNA, 25 bp, Homo sapien
tcatctctgggggatcttctcttgc

SEQ ID NO: 149884 - DNA, 25 bp, Homo sapien
agaccttcatctctgggggatcttc

SEQ ID NO: 149885 - DNA, 25 bp, Homo sapien
accttcatctctgggggatcttctc

SEQ ID NO: 149886 - DNA, 25 bp, Homo sapien
tctttaatccagtaaaagtgtgtca

SEQ ID NO: 149887 - DNA, 25 bp, Homo sapien
tcaatctttaatccagtaaaagtgt

SEQ ID NO: 149888 - DNA, 25 bp, Homo sapien
cagtaaaagtgtgtcaaatcctttc

SEQ ID NO: 149889 - DNA, 25 bp, Homo sapien
taatccagtaaaagtgtgtcaaatc

SEQ ID NO: 149890 - DNA, 25 bp, Homo sapien
cagatacagttgtctgctgggagct

SEQ ID NO: 149891 - DNA, 25 bp, Homo sapien
gtctgctgggagctgagtctgaggt

SEQ ID NO: 149892 - DNA, 25 bp, Homo sapien
ctttagtaagttctagccagataca

SEQ ID NO: 149893 - DNA, 25 bp, Homo sapien
caataaataagtgcaacgaaaacaa

SEQ ID NO: 149894 - DNA, 25 bp, Homo sapien
ggagagtaagtggtcctcaccgaga

SEQ ID NO: 149895 - DNA, 25 bp, Homo sapien
cagggagagtaagtggtcctcaccg

SEQ ID NO: 149896 - DNA, 25 bp, Homo sapien
gtaagtggtcctcaccgagatccat

SEQ ID NO: 149897 - DNA, 25 bp, Homo sapien
gagtaagtggtcctcaccgagatcc

SEQ ID NO: 149898 - DNA, 25 bp, Homo sapien
ggatgtagcttgtggggcagtggca

SEQ ID NO: 149899 - DNA, 25 bp, Homo sapien
agaggatgtagcttgtggggcagtg

SEQ ID NO: 149900 - DNA, 25 bp, Homo sapien
aggatgtagcttgtggggcagtggc

SEQ ID NO: 149901 - DNA, 25 bp, Homo sapien
gatgtagcttgtggggcagtggcat

SEQ ID NO: 149902 - DNA, 25 bp, Homo sapien
ctgggagtttgacagggacagtgga

SEQ ID NO: 149903 - DNA, 25 bp, Homo sapien
gatgtcttaggcatcttcctcagtg

SEQ ID NO: 149904 - DNA, 25 bp, Homo sapien
cagtggagatggaacagccaaggct

SEQ ID NO: 149905 - DNA, 25 bp, Homo sapien
gccaaggctccaccagatgtcttag

SEQ ID NO: 149906 - DNA, 25 bp, Homo sapien
ccacagtcaccctggaagatggagc

SEQ ID NO: 149907 - DNA, 25 bp, Homo sapien
gtcaccctggaagatggagccatcc

SEQ ID NO: 149908 - DNA, 25 bp, Homo sapien
tcaccctggaagatggagccatccc

SEQ ID NO: 149909 - DNA, 25 bp, Homo sapien
ccctggaagatggagccatccccac

SEQ ID NO: 149910 - DNA, 25 bp, Homo sapien
cagacaggctatggacctttgtcca

SEQ ID NO: 149911 - DNA, 25 bp, Homo sapien
tataccaactatcttctgccccaaa

SEQ ID NO: 149912 - DNA, 25 bp, Homo sapien
ggcgtctttgccctctataccaact

SEQ ID NO: 149913 - DNA, 25 bp, Homo sapien
aaacatgcacatgtgaattgtccag

SEQ ID NO: 149914 - DNA, 25 bp, Homo sapien
cggctcttgagtccacgctgctgtt

SEQ ID NO: 149915 - DNA, 25 bp, Homo sapien
cctaggaacacagcggctcttgagt

SEQ ID NO: 149916 - DNA, 25 bp, Homo sapien
ccagtcctaggaacacagcggctct

SEQ ID NO: 149917 - DNA, 25 bp, Homo sapien
agtcctaggaacacagcggctcttg

SEQ ID NO: 149918 - DNA, 25 bp, Homo sapien
cagccccaagcgctgactgtagcag

SEQ ID NO: 149919 - DNA, 25 bp, Homo sapien
tgttctgcagggctcgggtctacaa

SEQ ID NO: 149920 - DNA, 25 bp, Homo sapien
ctcgggtctacaagctgaggccagc

SEQ ID NO: 149921 - DNA, 25 bp, Homo sapien
tctggacgagggctacaaacagttc

SEQ ID NO: 149922 - DNA, 25 bp, Homo sapien
tgggcctcagtggagaatttcagga

SEQ ID NO: 149923 - DNA, 25 bp, Homo sapien
ggcctcagtggagaatttcaggaat

SEQ ID NO: 149924 - DNA, 25 bp, Homo sapien
tggcttgaaccaagccttgactttt

SEQ ID NO: 149925 - DNA, 25 bp, Homo sapien
tctgtcctcaggtgctatctggctt

SEQ ID NO: 149926 - DNA, 25 bp, Homo sapien
tgagatgagctaaccagtggcctgg

SEQ ID NO: 149927 - DNA, 25 bp, Homo sapien
gcctttagccttgggtgggtacaca

SEQ ID NO: 149928 - DNA, 25 bp, Homo sapien
ggtatccacgaagctctggcctgtg

SEQ ID NO: 149929 - DNA, 25 bp, Homo sapien
tgggtacacaggtccaaagcacacc

SEQ ID NO: 149930 - DNA, 25 bp, Homo sapien
aaagaaggtgggttatagctagctc

SEQ ID NO: 149931 - DNA, 25 bp, Homo sapien
tgcaatttagtgtggttctcatgaa

SEQ ID NO: 149932 - DNA, 25 bp, Homo sapien
taaagcacaaagcagctctcgtccc

SEQ ID NO: 149933 - DNA, 25 bp, Homo sapien
tgccaacataatctcaacctgctgc

SEQ ID NO: 149934 - DNA, 25 bp, Homo sapien
agaagcaatccaggctttccccaaa

SEQ ID NO: 149935 - DNA, 25 bp, Homo sapien
ttgagaagcaatccaggctttcccc

SEQ ID NO: 149936 - DNA, 25 bp, Homo sapien
gagaagcaatccaggctttccccaa

SEQ ID NO: 149937 - DNA, 25 bp, Homo sapien
gtatttgagaagcaatccaggcttt

SEQ ID NO: 149938 - DNA, 25 bp, Homo sapien
taaagaccagagaagagacagatgc

SEQ ID NO: 149939 - DNA, 25 bp, Homo sapien
tcaaggcaatctagacaacaaggtg

SEQ ID NO: 149940 - DNA, 25 bp, Homo sapien
tctcccagtgctcaaaacgtattca

SEQ ID NO: 149941 - DNA, 25 bp, Homo sapien
tgcctgtgaggtgcttaaagaccag

SEQ ID NO: 149942 - DNA, 25 bp, Homo sapien
ccacagtggacctgtttcctacctc

SEQ ID NO: 149943 - DNA, 25 bp, Homo sapien
cccacagtggacctgtttcctacct

SEQ ID NO: 149944 - DNA, 25 bp, Homo sapien
tacactcgccagtagttgtgcccca

SEQ ID NO: 149945 - DNA, 25 bp, Homo sapien
gatgtctcaagtacagcaggtaaaa

SEQ ID NO: 149946 - DNA, 25 bp, Homo sapien
gagtctgcagcaagtacgtgtttga

SEQ ID NO: 149947 - DNA, 25 bp, Homo sapien
gggcttgacgctgtcatccctggcc

SEQ ID NO: 149948 - DNA, 25 bp, Homo sapien
attctgtaccaggagcagggttttg

SEQ ID NO: 149949 - DNA, 25 bp, Homo sapien
tcattgtgacctccatgcctgcgct

SEQ ID NO: 149950 - DNA, 25 bp, Homo sapien
gcaaatgacagaccctaatatctgg

SEQ ID NO: 149951 - DNA, 25 bp, Homo sapien
caattgcaatcaagtgtcctaagta

SEQ ID NO: 149952 - DNA, 25 bp, Homo sapien
tgggcaaaggactcgaatggccctt

SEQ ID NO: 149953 - DNA, 25 bp, Homo sapien
cacgctgattccaaaacttacaggg

SEQ ID NO: 149954 - DNA, 25 bp, Homo sapien
gggcttgtcctctaccagatattaa

SEQ ID NO: 149955 - DNA, 25 bp, Homo sapien
tgttcacgacagaaagacgcaatgt

SEQ ID NO: 149956 - DNA, 25 bp, Homo sapien
cctgaggactcaagtccccttttga

SEQ ID NO: 149957 - DNA, 25 bp, Homo sapien
gtcaacagccctgaggactcaagtc

SEQ ID NO: 149958 - DNA, 25 bp, Homo sapien
cagccctgaggactcaagtcccctt

SEQ ID NO: 149959 - DNA, 25 bp, Homo sapien
tcaacagccctgaggactcaagtcc

SEQ ID NO: 149960 - DNA, 25 bp, Homo sapien
actagccgcatcagccttgtcttgg

SEQ ID NO: 149961 - DNA, 25 bp, Homo sapien
tatgcctcaagattgctctcatggg

SEQ ID NO: 149962 - DNA, 25 bp, Homo sapien
tgtgtggcctgaggcttcaaaaatg

SEQ ID NO: 149963 - DNA, 25 bp, Homo sapien
aatgtcccactcgtcttgctgcagg

SEQ ID NO: 149964 - DNA, 25 bp, Homo sapien
tacttttgaggtcactgttggccaa

SEQ ID NO: 149965 - DNA, 25 bp, Homo sapien
catatcagacgtggttatgccctac

SEQ ID NO: 149966 - DNA, 25 bp, Homo sapien
tatcaacagccttgcagagatggtt

SEQ ID NO: 149967 - DNA, 25 bp, Homo sapien
taagtgctacgggatggttccagca

SEQ ID NO: 149968 - DNA, 25 bp, Homo sapien
agaattacacttgccctgctctgaa

SEQ ID NO: 149969 - DNA, 25 bp, Homo sapien
cttcagttggttggtctggtctcag

SEQ ID NO: 149970 - DNA, 25 bp, Homo sapien
ttcagttggttggtctggtctcaga

SEQ ID NO: 149971 - DNA, 25 bp, Homo sapien
cagaatcacacattggtccagaatt

SEQ ID NO: 149972 - DNA, 25 bp, Homo sapien
tacaggctcacgtgcgccactgcgc

SEQ ID NO: 149973 - DNA, 25 bp, Homo sapien
aacaataatttatgagttaatgatg

SEQ ID NO: 149974 - DNA, 25 bp, Homo sapien
gagttaatgatgttattgagtttta

SEQ ID NO: 149975 - DNA, 25 bp, Homo sapien
gtaggaatatcgcttgagccttggg

SEQ ID NO: 149976 - DNA, 25 bp, Homo sapien
taaaataaattcctagccaggcaca

SEQ ID NO: 149977 - DNA, 25 bp, Homo sapien
gtttcactatcttgtccaaggctgg

SEQ ID NO: 149978 - DNA, 25 bp, Homo sapien
tgttagcaccttctggttctatcat

SEQ ID NO: 149979 - DNA, 25 bp, Homo sapien
gcaggacagacattttgttagcacc

SEQ ID NO: 149980 - DNA, 25 bp, Homo sapien
ttcatgtcaaatgccacacatgcag

SEQ ID NO: 149981 - DNA, 25 bp, Homo sapien
agccaccgcgcgtagcctttacttt

SEQ ID NO: 149982 - DNA, 25 bp, Homo sapien
tatgagccaccgcgcgtagccttta

SEQ ID NO: 149983 - DNA, 25 bp, Homo sapien
ggtatgagccaccgcgcgtagcctt

SEQ ID NO: 149984 - DNA, 25 bp, Homo sapien
tgagccaccgcgcgtagcctttact

SEQ ID NO: 149985 - DNA, 25 bp, Homo sapien
gaacaaaatgagtaggtgtgcagac

SEQ ID NO: 149986 - DNA, 25 bp, Homo sapien
aatttttgtggtaggagttgctcaa

SEQ ID NO: 149987 - DNA, 25 bp, Homo sapien
gtttctgtagatgtcccctggatca

SEQ ID NO: 149988 - DNA, 25 bp, Homo sapien
atgtttgccaagagagttgctggtg

SEQ ID NO: 149989 - DNA, 25 bp, Homo sapien
aataagatcgctaaaagatgaattc

SEQ ID NO: 149990 - DNA, 25 bp, Homo sapien
tttgttcctaaataagatcgctaaa

SEQ ID NO: 149991 - DNA, 25 bp, Homo sapien
gctgcaggtcggggacggacagcag

SEQ ID NO: 149992 - DNA, 25 bp, Homo sapien
tgttcctaaataagatcgctaaaag

SEQ ID NO: 149993 - DNA, 25 bp, Homo sapien
ggccatcagtcaactctctagccta

SEQ ID NO: 149994 - DNA, 25 bp, Homo sapien
ttataggagtgagccgccgtgcaag

SEQ ID NO: 149995 - DNA, 25 bp, Homo sapien
ggaaaccagaggaagaccaaataca

SEQ ID NO: 149996 - DNA, 25 bp, Homo sapien
tctagcctataaaaacacgtttatc

SEQ ID NO: 149997 - DNA, 25 bp, Homo sapien
tgaaggcagggttaaacagggtgta

SEQ ID NO: 149998 - DNA, 25 bp, Homo sapien
cttacagagtcgtccctttgaaggc

SEQ ID NO: 149999 - DNA, 25 bp, Homo sapien
agagtcgtccctttgaaggcagggt

SEQ ID NO: 150000 - DNA, 25 bp, Homo sapien
acagagtcgtccctttgaaggcagg

SEQ ID NO: 150001 - DNA, 25 bp, Homo sapien
tctgatgagaaattcctaacgcaaa

SEQ ID NO: 150002 - DNA, 25 bp, Homo sapien
gctttccattcctcgggagctgcag

SEQ ID NO: 150003 - DNA, 25 bp, Homo sapien
tgaaggcagcagattcagcctcaca

SEQ ID NO: 150004 - DNA, 25 bp, Homo sapien
ccttgtggtgggcattgtttggaat

SEQ ID NO: 150005 - DNA, 25 bp, Homo sapien
gtgtcaacttgaataagtagcagag

SEQ ID NO: 150006 - DNA, 25 bp, Homo sapien
tcaacttgaataagtagcagagaat

SEQ ID NO: 150007 - DNA, 25 bp, Homo sapien
tgtcaacttgaataagtagcagaga

SEQ ID NO: 150008 - DNA, 25 bp, Homo sapien
cgtgtcaacttgaataagtagcaga

SEQ ID NO: 150009 - DNA, 25 bp, Homo sapien
tagaatcaaactccttatggcagag

SEQ ID NO: 150010 - DNA, 25 bp, Homo sapien
ttatggcagagggaaggcgggacct

SEQ ID NO: 150011 - DNA, 25 bp, Homo sapien
ccttatggcagagggaaggcgggac

SEQ ID NO: 150012 - DNA, 25 bp, Homo sapien
tccttatggcagagggaaggcggga

SEQ ID NO: 150013 - DNA, 25 bp, Homo sapien
ctgagcccactggtggttctccata

SEQ ID NO: 150014 - DNA, 25 bp, Homo sapien
gagcccactggtggttctccatatg

SEQ ID NO: 150015 - DNA, 25 bp, Homo sapien
cccactggtggttctccatatgggg

SEQ ID NO: 150016 - DNA, 25 bp, Homo sapien
agcccactggtggttctccatatgg

SEQ ID NO: 150017 - DNA, 25 bp, Homo sapien
cacctcggtgttcaggaagcaggga

SEQ ID NO: 150018 - DNA, 25 bp, Homo sapien
tagactgctagtgtggctgactgcc

SEQ ID NO: 150019 - DNA, 25 bp, Homo sapien
ggtggtaaacacacctgggcttgaa

SEQ ID NO: 150020 - DNA, 25 bp, Homo sapien
cttgcaccagtggtatgtgagcatc

SEQ ID NO: 150021 - DNA, 25 bp, Homo sapien
gatatttattggcccatgttgggcc

SEQ ID NO: 150022 - DNA, 25 bp, Homo sapien
gggccaactgttccatgttggacag

SEQ ID NO: 150023 - DNA, 25 bp, Homo sapien
tattggcccatgttgggccaactgt

SEQ ID NO: 150024 - DNA, 25 bp, Homo sapien
atttattggcccatgttgggccaac

SEQ ID NO: 150025 - DNA, 25 bp, Homo sapien
aggaccaccaggctggctggtcgga

SEQ ID NO: 150026 - DNA, 25 bp, Homo sapien
ctgggcaggaccaccaggctggctg

SEQ ID NO: 150027 - DNA, 25 bp, Homo sapien
gcaggaccaccaggctggctggtcg

SEQ ID NO: 150028 - DNA, 25 bp, Homo sapien
accaccaggctggctggtcggagct

SEQ ID NO: 150029 - DNA, 25 bp, Homo sapien
gagggggcagcatccacttttctgg

SEQ ID NO: 150030 - DNA, 25 bp, Homo sapien
ggtctctgagatagcaccttgaggg

SEQ ID NO: 150031 - DNA, 25 bp, Homo sapien
tctttcaaaagctggagcaagggac

SEQ ID NO: 150032 - DNA, 25 bp, Homo sapien
gtagaggaccagtgttgacctggca

SEQ ID NO: 150033 - DNA, 25 bp, Homo sapien
acagagaggtcccggatgacagaga

SEQ ID NO: 150034 - DNA, 25 bp, Homo sapien
tggacactcccaagcttcaacccac

SEQ ID NO: 150035 - DNA, 25 bp, Homo sapien
aagcttcaacccacagtaacccaag

SEQ ID NO: 150036 - DNA, 25 bp, Homo sapien
gaggtcccggatgacagagacacct

SEQ ID NO: 150037 - DNA, 25 bp, Homo sapien
acagtcatgagtgaggttctgtgcc

SEQ ID NO: 150038 - DNA, 25 bp, Homo sapien
tctggcttgggcgatggagtggaca

SEQ ID NO: 150039 - DNA, 25 bp, Homo sapien
cgccaggtgataggggaaggagtca

SEQ ID NO: 150040 - DNA, 25 bp, Homo sapien
taatcctgtacaggcgggtttctgg

SEQ ID NO: 150041 - DNA, 25 bp, Homo sapien
actttctccatgatctcaaagatct

SEQ ID NO: 150042 - DNA, 25 bp, Homo sapien
ggaaagctgggagggccccagactc

SEQ ID NO: 150043 - DNA, 25 bp, Homo sapien
ctggggacataaggggaaagctggg

SEQ ID NO: 150044 - DNA, 25 bp, Homo sapien
aagctgggagggccccagactctca

SEQ ID NO: 150045 - DNA, 25 bp, Homo sapien
gacataaggggaaagctgggagggc

SEQ ID NO: 150046 - DNA, 25 bp, Homo sapien
ggtgcaggcaccgaactcgtatttc

SEQ ID NO: 150047 - DNA, 25 bp, Homo sapien
aggctgccggtgcaggcaccgaact

SEQ ID NO: 150048 - DNA, 25 bp, Homo sapien
tgccggtgcaggcaccgaactcgta

SEQ ID NO: 150049 - DNA, 25 bp, Homo sapien
aggcaccgaactcgtatttccagaa

SEQ ID NO: 150050 - DNA, 25 bp, Homo sapien
ccatgtccttcagctgctccgagta

SEQ ID NO: 150051 - DNA, 25 bp, Homo sapien
aggccaccatgtccttcagctgctc

SEQ ID NO: 150052 - DNA, 25 bp, Homo sapien
ggaagaaggccaccatgtccttcag

SEQ ID NO: 150053 - DNA, 25 bp, Homo sapien
agcccaggaagaaggccaccatgtc

SEQ ID NO: 150054 - DNA, 25 bp, Homo sapien
ctggctgtgacctgctgggtctctt

SEQ ID NO: 150055 - DNA, 25 bp, Homo sapien
ggctgtgacctgctgggtctcttct

SEQ ID NO: 150056 - DNA, 25 bp, Homo sapien
tgctgggtctcttctggggagcccc

SEQ ID NO: 150057 - DNA, 25 bp, Homo sapien
ctgggtctcttctggggagccccgc

SEQ ID NO: 150058 - DNA, 25 bp, Homo sapien
ggaatgggcctcatcgtgaccacca

SEQ ID NO: 150059 - DNA, 25 bp, Homo sapien
ttgggaatgggcctcatcgtgacca

SEQ ID NO: 150060 - DNA, 25 bp, Homo sapien
atgggcctcatcgtgaccaccagag

SEQ ID NO: 150061 - DNA, 25 bp, Homo sapien
gggcctcatcgtgaccaccagaggg

SEQ ID NO: 150062 - DNA, 25 bp, Homo sapien
ggtcgcccatgtgaacaggttgccc

SEQ ID NO: 150063 - DNA, 25 bp, Homo sapien
tcgcccatgtgaacaggttgcccct

SEQ ID NO: 150064 - DNA, 25 bp, Homo sapien
cccatgtgaacaggttgcccctgct

SEQ ID NO: 150065 - DNA, 25 bp, Homo sapien
ctgggtcgcccatgtgaacaggttg

SEQ ID NO: 150066 - DNA, 25 bp, Homo sapien
agcctttgagccttgttcagggcct

SEQ ID NO: 150067 - DNA, 25 bp, Homo sapien
gcctttgagccttgttcagggcctt

SEQ ID NO: 150068 - DNA, 25 bp, Homo sapien
aagcccagccctgatacagctgcca

SEQ ID NO: 150069 - DNA, 25 bp, Homo sapien
ctgcagatggaaaaggaaaatgtaa

SEQ ID NO: 150070 - DNA, 25 bp, Homo sapien
ggagcatccaattagaactggttga

SEQ ID NO: 150071 - DNA, 25 bp, Homo sapien
ggagaatagggattaaggctttgac

SEQ ID NO: 150072 - DNA, 25 bp, Homo sapien
caaattgcaggattattgtaaatgg

SEQ ID NO: 150073 - DNA, 25 bp, Homo sapien
catggcatccccgtaggcaggtttg

SEQ ID NO: 150074 - DNA, 25 bp, Homo sapien
ggaaagctctttgattcccaacagt

SEQ ID NO: 150075 - DNA, 25 bp, Homo sapien
gtcagcggagaaggccagaacactg

SEQ ID NO: 150076 - DNA, 25 bp, Homo sapien
cagaacactggaacctcccctgggg

SEQ ID NO: 150077 - DNA, 25 bp, Homo sapien
tttgcatccttcaggtcagtcataa

SEQ ID NO: 150078 - DNA, 25 bp, Homo sapien
ggagcctttgcatccttcaggtcag

SEQ ID NO: 150079 - DNA, 25 bp, Homo sapien
catccttcaggtcagtcataactgt

SEQ ID NO: 150080 - DNA, 25 bp, Homo sapien
tgggatgctggcaaaagccagtggg

SEQ ID NO: 150081 - DNA, 25 bp, Homo sapien
ctgtagtgcagaggatcttgggaaa

SEQ ID NO: 150082 - DNA, 25 bp, Homo sapien
tgggtctatgccgatcatagactct

SEQ ID NO: 150083 - DNA, 25 bp, Homo sapien
catagactctagttctctgatcttc

SEQ ID NO: 150084 - DNA, 25 bp, Homo sapien
gagactgacgcgatgctgtagtgca

SEQ ID NO: 150085 - DNA, 25 bp, Homo sapien
gggaggccacatatgccttctcctc

SEQ ID NO: 150086 - DNA, 25 bp, Homo sapien
ccaggtttaggagcacggcccatga

SEQ ID NO: 150087 - DNA, 25 bp, Homo sapien
tccaggtgccaagggcggtttgtac

SEQ ID NO: 150088 - DNA, 25 bp, Homo sapien
cggcccatgagaaggtccagaagag

SEQ ID NO: 150089 - DNA, 25 bp, Homo sapien
tgagcgggcatgggacagcgagaga

SEQ ID NO: 150090 - DNA, 25 bp, Homo sapien
gagcgggcatgggacagcgagagag

SEQ ID NO: 150091 - DNA, 25 bp, Homo sapien
gcgggcatgggacagcgagagagag

SEQ ID NO: 150092 - DNA, 25 bp, Homo sapien
agcgggcatgggacagcgagagaga

SEQ ID NO: 150093 - DNA, 25 bp, Homo sapien
aggaaggcaaccagagcaacagctc

SEQ ID NO: 150094 - DNA, 25 bp, Homo sapien
agcatcttcaacaatcttctggtgc

SEQ ID NO: 150095 - DNA, 25 bp, Homo sapien
gtcaacgattatggcgacctccttc

SEQ ID NO: 150096 - DNA, 25 bp, Homo sapien
gtgcaagttccaggctctctggtca

SEQ ID NO: 150097 - DNA, 25 bp, Homo sapien
ttccactgatccaccttggtaagtt

SEQ ID NO: 150098 - DNA, 25 bp, Homo sapien
ctaggtgtctgcgggtccccatttt

SEQ ID NO: 150099 - DNA, 25 bp, Homo sapien
atcgggatctgcgtcttcagaacac

SEQ ID NO: 150100 - DNA, 25 bp, Homo sapien
ccatttttgcacaggaatgcctgag

SEQ ID NO: 150101 - DNA, 25 bp, Homo sapien
cagttgatgagattccaggaatctt

SEQ ID NO: 150102 - DNA, 25 bp, Homo sapien
tgcattgtagtaattgccatcagca

SEQ ID NO: 150103 - DNA, 25 bp, Homo sapien
gggtcaaccaagtgcttgatgttca

SEQ ID NO: 150104 - DNA, 25 bp, Homo sapien
cagcaagaaaaagatcgtcaatggg

SEQ ID NO: 150105 - DNA, 25 bp, Homo sapien
cactaattagctgcgccatctggga

SEQ ID NO: 150106 - DNA, 25 bp, Homo sapien
cagtctactcctaatgctaccagca

SEQ ID NO: 150107 - DNA, 25 bp, Homo sapien
ctgagacccacccagagggaagaaa

SEQ ID NO: 150108 - DNA, 25 bp, Homo sapien
ctttccgcaattcataaaggcatga

SEQ ID NO: 150109 - DNA, 25 bp, Homo sapien
aagctcgttgcctccatcaccgact

SEQ ID NO: 150110 - DNA, 25 bp, Homo sapien
cacagcctccttgactttacccatc

SEQ ID NO: 150111 - DNA, 25 bp, Homo sapien
cagcaatgacggcaaagtcagcctc

SEQ ID NO: 150112 - DNA, 25 bp, Homo sapien
acgtcgcaggcgatgacatccccgt

SEQ ID NO: 150113 - DNA, 25 bp, Homo sapien
cctgggtagccggccggactgggcg

SEQ ID NO: 150114 - DNA, 25 bp, Homo sapien
ggactgggcggccatccgagtgctc

SEQ ID NO: 150115 - DNA, 25 bp, Homo sapien
actgggcggccatccgagtgctcac

SEQ ID NO: 150116 - DNA, 25 bp, Homo sapien
tagccggccggactgggcggccatc

SEQ ID NO: 150117 - DNA, 25 bp, Homo sapien
tcaggtactgactgtggacagcaca

SEQ ID NO: 150118 - DNA, 25 bp, Homo sapien
tacaggatgtagagtgcgcaggcca

SEQ ID NO: 150119 - DNA, 25 bp, Homo sapien
cttaatgaccgacgggagggcctga

SEQ ID NO: 150120 - DNA, 25 bp, Homo sapien
cagggcatagcctccccagttagaa

SEQ ID NO: 150121 - DNA, 25 bp, Homo sapien
ctgctgctcatccagggtaaaagct

SEQ ID NO: 150122 - DNA, 25 bp, Homo sapien
tgctgctcatccagggtaaaagctg

SEQ ID NO: 150123 - DNA, 25 bp, Homo sapien
gctgctcatccagggtaaaagctgc

SEQ ID NO: 150124 - DNA, 25 bp, Homo sapien
ttaaagggcacccaatccaggagac

SEQ ID NO: 150125 - DNA, 25 bp, Homo sapien
tcaggcctgccacacgattcagaac

SEQ ID NO: 150126 - DNA, 25 bp, Homo sapien
aaatggtcacttggatcaggcctgc

SEQ ID NO: 150127 - DNA, 25 bp, Homo sapien
gaactgcgagtagcttaaagggcac

SEQ ID NO: 150128 - DNA, 25 bp, Homo sapien
taatggccccagactacttgaagaa

SEQ ID NO: 150129 - DNA, 25 bp, Homo sapien
tggaccagggattcttaatggcccc

SEQ ID NO: 150130 - DNA, 25 bp, Homo sapien
tatggctgattgacttactctggag

SEQ ID NO: 150131 - DNA, 25 bp, Homo sapien
taacagtatgaagtacccaccatgg

SEQ ID NO: 150132 - DNA, 25 bp, Homo sapien
gctggagtgcagtgaagtgaacata

SEQ ID NO: 150133 - DNA, 25 bp, Homo sapien
gagtgcagtgaagtgaacatagctc

SEQ ID NO: 150134 - DNA, 25 bp, Homo sapien
tggagtgcagtgaagtgaacatagc

SEQ ID NO: 150135 - DNA, 25 bp, Homo sapien
actgcagccttggattcctgggctc

SEQ ID NO: 150136 - DNA, 25 bp, Homo sapien
tgtcccgttaagcactgaggcattg

SEQ ID NO: 150137 - DNA, 25 bp, Homo sapien
ccaagtaggtgtcccgttaagcact

SEQ ID NO: 150138 - DNA, 25 bp, Homo sapien
cactgaggcattgtgaatgtcccgc

SEQ ID NO: 150139 - DNA, 25 bp, Homo sapien
atgtcccgcaagtctggtccaccag

SEQ ID NO: 150140 - DNA, 25 bp, Homo sapien
gcctcgccaacttggagaaatcctg

SEQ ID NO: 150141 - DNA, 25 bp, Homo sapien
agagacagggtgtaagaaaacagga

SEQ ID NO: 150142 - DNA, 25 bp, Homo sapien
ccagcctcgccaacttggagaaatc

SEQ ID NO: 150143 - DNA, 25 bp, Homo sapien
gaagagacagggtgtaagaaaacag

SEQ ID NO: 150144 - DNA, 25 bp, Homo sapien
tttgtgtctgcgtgaatcaggaatc

SEQ ID NO: 150145 - DNA, 25 bp, Homo sapien
tacctgggacacttctgagcggaat

SEQ ID NO: 150146 - DNA, 25 bp, Homo sapien
tgggcccctctagggcagaccattt

SEQ ID NO: 150147 - DNA, 25 bp, Homo sapien
atcaggaatcatgtgtgaagcagcc

SEQ ID NO: 150148 - DNA, 25 bp, Homo sapien
gatgcaactcactgagcagagctgt

SEQ ID NO: 150149 - DNA, 25 bp, Homo sapien
gcttttccactagctcaggccacag

SEQ ID NO: 150150 - DNA, 25 bp, Homo sapien
cgtagtgacctgcagaactctagtg

SEQ ID NO: 150151 - DNA, 25 bp, Homo sapien
tgagatccttaagaacccctgtccc

SEQ ID NO: 150152 - DNA, 25 bp, Homo sapien
tctgaggcctccatcgggctgaggg

SEQ ID NO: 150153 - DNA, 25 bp, Homo sapien
aggacttggtcctaggaaacagaga

SEQ ID NO: 150154 - DNA, 25 bp, Homo sapien
aagagagtggccctaacccagacca

SEQ ID NO: 150155 - DNA, 25 bp, Homo sapien
caaggcaggcccgatgtttttacaa

SEQ ID NO: 150156 - DNA, 25 bp, Homo sapien
catccatgtcaccatgggtgctcag

SEQ ID NO: 150157 - DNA, 25 bp, Homo sapien
ggctgatggcatattccacatccat

SEQ ID NO: 150158 - DNA, 25 bp, Homo sapien
cacatggctgctatgccctgggctg

SEQ ID NO: 150159 - DNA, 25 bp, Homo sapien
ccctgggctgatggcatattccaca

SEQ ID NO: 150160 - DNA, 25 bp, Homo sapien
tctagaataggacattagggcggct

SEQ ID NO: 150161 - DNA, 25 bp, Homo sapien
gctaagtatgtgtcaggccctgaac

SEQ ID NO: 150162 - DNA, 25 bp, Homo sapien
tattaagtcacactgggagcacggt

SEQ ID NO: 150163 - DNA, 25 bp, Homo sapien
taacagtggcagagaattaccaggg

SEQ ID NO: 150164 - DNA, 25 bp, Homo sapien
ggcctttagcctagagctttctccc

SEQ ID NO: 150165 - DNA, 25 bp, Homo sapien
aggtcttctggcctttagcctagag

SEQ ID NO: 150166 - DNA, 25 bp, Homo sapien
attttattggcagggctaggtcttc

SEQ ID NO: 150167 - DNA, 25 bp, Homo sapien
gggtccttggcacacaacaggcatt

SEQ ID NO: 150168 - DNA, 25 bp, Homo sapien
caatcacgggaatagtttgggctgc

SEQ ID NO: 150169 - DNA, 25 bp, Homo sapien
caatagtctttgtgccaaaggcccc

SEQ ID NO: 150170 - DNA, 25 bp, Homo sapien
ggatcctttgccttgacatacttgc

SEQ ID NO: 150171 - DNA, 25 bp, Homo sapien
ccttctagaaatgaccagggtgact

SEQ ID NO: 150172 - DNA, 25 bp, Homo sapien
tgtgccgtggtgacgtccaccagct

SEQ ID NO: 150173 - DNA, 25 bp, Homo sapien
cgagacgccactccggactttgtgc

SEQ ID NO: 150174 - DNA, 25 bp, Homo sapien
gcttctggatcatctcggcgtgggt

SEQ ID NO: 150175 - DNA, 25 bp, Homo sapien
ggactttgtgctgcaccaagatgcc

SEQ ID NO: 150176 - DNA, 25 bp, Homo sapien
tgcattctccccggatgcagacctg

SEQ ID NO: 150177 - DNA, 25 bp, Homo sapien
gggactctgctcacacggaacatgg

SEQ ID NO: 150178 - DNA, 25 bp, Homo sapien
agacctgcccgttggtagggactct

SEQ ID NO: 150179 - DNA, 25 bp, Homo sapien
actctgctcacacggaacatggacg

SEQ ID NO: 150180 - DNA, 25 bp, Homo sapien
ctagcaggattgtcgccagaagcag

SEQ ID NO: 150181 - DNA, 25 bp, Homo sapien
gaccagtgtttactagcaggattgt

SEQ ID NO: 150182 - DNA, 25 bp, Homo sapien
tgtttactagcaggattgtcgccag

SEQ ID NO: 150183 - DNA, 25 bp, Homo sapien
cgaagaccagtgtttactagcagga

SEQ ID NO: 150184 - DNA, 25 bp, Homo sapien
ctaacccctcccagaaagtgggcat

SEQ ID NO: 150185 - DNA, 25 bp, Homo sapien
aggccaggcgagtgttcgttgctca

SEQ ID NO: 150186 - DNA, 25 bp, Homo sapien
ctgcactaacccctcccagaaagtg

SEQ ID NO: 150187 - DNA, 25 bp, Homo sapien
ggccaggcgagtgttcgttgctcac

SEQ ID NO: 150188 - DNA, 25 bp, Homo sapien
ccccagagaaatgttgtcctttgtc

SEQ ID NO: 150189 - DNA, 25 bp, Homo sapien
gaaatcaacgcctttagagtcttag

SEQ ID NO: 150190 - DNA, 25 bp, Homo sapien
aaaagccccagagaaatgttgtcct

SEQ ID NO: 150191 - DNA, 25 bp, Homo sapien
gccagagtgaaggagggttgaaatc

SEQ ID NO: 150192 - DNA, 25 bp, Homo sapien
cacaagtgtccccataagtaactgt

SEQ ID NO: 150193 - DNA, 25 bp, Homo sapien
aagtaactgtcgagaagattctcac

SEQ ID NO: 150194 - DNA, 25 bp, Homo sapien
ccataagtaactgtcgagaagattc

SEQ ID NO: 150195 - DNA, 25 bp, Homo sapien
agtgtccccataagtaactgtcgag

SEQ ID NO: 150196 - DNA, 25 bp, Homo sapien
tttgttctcatgctctgcctggcag

SEQ ID NO: 150197 - DNA, 25 bp, Homo sapien
gatgactggagtctggagtatccta

SEQ ID NO: 150198 - DNA, 25 bp, Homo sapien
gagtatcctatcctacatggcctgg

SEQ ID NO: 150199 - DNA, 25 bp, Homo sapien
catggcctgggaatgtttgttctca

SEQ ID NO: 150200 - DNA, 25 bp, Homo sapien
tcatttagtattttcggtctgcagt

SEQ ID NO: 150201 - DNA, 25 bp, Homo sapien
agtcgatctgatcacctgctgggtg

SEQ ID NO: 150202 - DNA, 25 bp, Homo sapien
gaggttcttgaatataagcactgca

SEQ ID NO: 150203 - DNA, 25 bp, Homo sapien
gatttcatcacgatattccgaagag

SEQ ID NO: 150204 - DNA, 25 bp, Homo sapien
gtgtagacagcacgggtaccctgga

SEQ ID NO: 150205 - DNA, 25 bp, Homo sapien
gactatgccctaatgataacagtac

SEQ ID NO: 150206 - DNA, 25 bp, Homo sapien
actatgccctaatgataacagtacc

SEQ ID NO: 150207 - DNA, 25 bp, Homo sapien
acccaagaactttgtaaatatatat

SEQ ID NO: 150208 - DNA, 25 bp, Homo sapien
cagagaggaggtggaatagtgttag

SEQ ID NO: 150209 - DNA, 25 bp, Homo sapien
ggctgccctcctatgcaagaggtta

SEQ ID NO: 150210 - DNA, 25 bp, Homo sapien
tgccctcctatgcaagaggttaaag

SEQ ID NO: 150211 - DNA, 25 bp, Homo sapien
tcctatgcaagaggttaaagggtct

SEQ ID NO: 150212 - DNA, 25 bp, Homo sapien
tattgtaagagtgtaatgggacacg

SEQ ID NO: 150213 - DNA, 25 bp, Homo sapien
tttctaatgttgttgggcactgtgc

SEQ ID NO: 150214 - DNA, 25 bp, Homo sapien
taatgggacacggtcagtgactcag

SEQ ID NO: 150215 - DNA, 25 bp, Homo sapien
cagtgggagcttgtgaaagagataa

SEQ ID NO: 150216 - DNA, 25 bp, Homo sapien
agaaccactgtgctacatcctcacg

SEQ ID NO: 150217 - DNA, 25 bp, Homo sapien
tgggaactcccctagaatgacaaag

SEQ ID NO: 150218 - DNA, 25 bp, Homo sapien
tcacgcttaactgctgtgtgtacaa

SEQ ID NO: 150219 - DNA, 25 bp, Homo sapien
ccctgcatagggagaactgaagtca

SEQ ID NO: 150220 - DNA, 25 bp, Homo sapien
gtacaatctcaatcagaggccctcg

SEQ ID NO: 150221 - DNA, 25 bp, Homo sapien
tggaactctgcagtcccaaatcagg

SEQ ID NO: 150222 - DNA, 25 bp, Homo sapien
ggccctcgctacatggaactctgca

SEQ ID NO: 150223 - DNA, 25 bp, Homo sapien
tgcagtcccaaatcagggacaaaaa

SEQ ID NO: 150224 - DNA, 25 bp, Homo sapien
gacgagaaccagcaccgcgtgtgct

SEQ ID NO: 150225 - DNA, 25 bp, Homo sapien
caactactaccgcttcctggtgggc

SEQ ID NO: 150226 - DNA, 25 bp, Homo sapien
tacttcctgatgcacgaggaggtca

SEQ ID NO: 150227 - DNA, 25 bp, Homo sapien
tctactgcttcgtcagcgagaccac

SEQ ID NO: 150228 - DNA, 25 bp, Homo sapien
cttctataaacaggatggcggtgga

SEQ ID NO: 150229 - DNA, 25 bp, Homo sapien
tgagctgtaccatcgaccataccat

SEQ ID NO: 150230 - DNA, 25 bp, Homo sapien
catgtccagccgttcagatattcta

SEQ ID NO: 150231 - DNA, 25 bp, Homo sapien
tgcagacaactcctcgatgagctgt

SEQ ID NO: 150232 - DNA, 25 bp, Homo sapien
ccaggggtaggtgtctaaaatggct

SEQ ID NO: 150233 - DNA, 25 bp, Homo sapien
tgtcttatacagttgcagataagag

SEQ ID NO: 150234 - DNA, 25 bp, Homo sapien
gaaagaagaacaggataaagcgatg

SEQ ID NO: 150235 - DNA, 25 bp, Homo sapien
gaatgcattcccaggggtaggtgtc

SEQ ID NO: 150236 - DNA, 25 bp, Homo sapien
ggaatattttcgcatccactgtgtt

SEQ ID NO: 150237 - DNA, 25 bp, Homo sapien
ctgtcctcagggaacagtagaaggg

SEQ ID NO: 150238 - DNA, 25 bp, Homo sapien
tgcagggccctcgacagatgtggct

SEQ ID NO: 150239 - DNA, 25 bp, Homo sapien
tggtgaaaaatcaggaccctcagac

SEQ ID NO: 150240 - DNA, 25 bp, Homo sapien
caagggttctagaagtgagatgcta

SEQ ID NO: 150241 - DNA, 25 bp, Homo sapien
agtgagatgctatggtccacgttgt

SEQ ID NO: 150242 - DNA, 25 bp, Homo sapien
acaagggttctagaagtgagatgct

SEQ ID NO: 150243 - DNA, 25 bp, Homo sapien
tatggtccacgttgttgctggagtg

SEQ ID NO: 150244 - DNA, 25 bp, Homo sapien
cccattcatgggtcagtaaatcaac

SEQ ID NO: 150245 - DNA, 25 bp, Homo sapien
caggtgggggtccatccagctgttt

SEQ ID NO: 150246 - DNA, 25 bp, Homo sapien
gtaaatcaacttcatagctcatgac

SEQ ID NO: 150247 - DNA, 25 bp, Homo sapien
tgtttccaaactgcgggttgtgacc

SEQ ID NO: 150248 - DNA, 25 bp, Homo sapien
tgacttcaattttagccacgctggc

SEQ ID NO: 150249 - DNA, 25 bp, Homo sapien
tccaccagattgttagtttctgact

SEQ ID NO: 150250 - DNA, 25 bp, Homo sapien
tcttcttgttgcctcatcctatatc

SEQ ID NO: 150251 - DNA, 25 bp, Homo sapien
tgcctcatcctatatcctgactgtt

SEQ ID NO: 150252 - DNA, 25 bp, Homo sapien
cctcaaaaaccggtacagtgtcgct

SEQ ID NO: 150253 - DNA, 25 bp, Homo sapien
ttgggtcggccacaacttgagtctt

SEQ ID NO: 150254 - DNA, 25 bp, Homo sapien
ctgtcatcgaggctgcttggcttcc

SEQ ID NO: 150255 - DNA, 25 bp, Homo sapien
tcaaacagtttgcagccaccttggg

SEQ ID NO: 150256 - DNA, 25 bp, Homo sapien
tattaacttagaccgggcgcagtgg

SEQ ID NO: 150257 - DNA, 25 bp, Homo sapien
ctgggtaaggtgcacactgtcagaa

SEQ ID NO: 150258 - DNA, 25 bp, Homo sapien
tactgtcataccacacgcttctggg

SEQ ID NO: 150259 - DNA, 25 bp, Homo sapien
agagaagactcagctaacaggaaac

SEQ ID NO: 150260 - DNA, 25 bp, Homo sapien
gaaaacaggttcaaggcagcaaatg

SEQ ID NO: 150261 - DNA, 25 bp, Homo sapien
gctggatgggagcagacgcaacttt

SEQ ID NO: 150262 - DNA, 25 bp, Homo sapien
aacagatgtggaattcaaacccggg

SEQ ID NO: 150263 - DNA, 25 bp, Homo sapien
ggttgtcccattcatcagctcaggc

SEQ ID NO: 150264 - DNA, 25 bp, Homo sapien
cccagggaggctacataacttgcca

SEQ ID NO: 150265 - DNA, 25 bp, Homo sapien
tgagagagtcccagcagaatggctc

SEQ ID NO: 150266 - DNA, 25 bp, Homo sapien
gtgaaggatttaggaactccctgtc

SEQ ID NO: 150267 - DNA, 25 bp, Homo sapien
ggccaagaaaggatagcgtctctga

SEQ ID NO: 150268 - DNA, 25 bp, Homo sapien
tcagtcagatcttgccgggtgacac

SEQ ID NO: 150269 - DNA, 25 bp, Homo sapien
tctcatagtcgcgtattggaatcca

SEQ ID NO: 150270 - DNA, 25 bp, Homo sapien
gcctatgtttcccacctccggtgta

SEQ ID NO: 150271 - DNA, 25 bp, Homo sapien
tatgttactcagtccttacggtggc

SEQ ID NO: 150272 - DNA, 25 bp, Homo sapien
catactctagaacagaagttggcag

SEQ ID NO: 150273 - DNA, 25 bp, Homo sapien
atctcaaaaactcaccattttttat

SEQ ID NO: 150274 - DNA, 25 bp, Homo sapien
catctcaaaaactcaccatttttta

SEQ ID NO: 150275 - DNA, 25 bp, Homo sapien
ccatctcaaaaactcaccatttttt

SEQ ID NO: 150276 - DNA, 25 bp, Homo sapien
tctcaaaaactcaccattttttatg

SEQ ID NO: 150277 - DNA, 25 bp, Homo sapien
taaaggcctaacaggagctttcttg

SEQ ID NO: 150278 - DNA, 25 bp, Homo sapien
tccgcatgttatgcaatagagcgac

SEQ ID NO: 150279 - DNA, 25 bp, Homo sapien
tagaatagttatgaaacccaccctc

SEQ ID NO: 150280 - DNA, 25 bp, Homo sapien
cgaaactagttgtgtcttaacagaa

SEQ ID NO: 150281 - DNA, 25 bp, Homo sapien
tgagttcttctggacgcgtgggcac

SEQ ID NO: 150282 - DNA, 25 bp, Homo sapien
tcactgcagcaggtcgttcctaaag

SEQ ID NO: 150283 - DNA, 25 bp, Homo sapien
gataagacaggtctgcccacagagc

SEQ ID NO: 150284 - DNA, 25 bp, Homo sapien
tcttccaaggagtcgaatgccgtgt

SEQ ID NO: 150285 - DNA, 25 bp, Homo sapien
tttagataacgtgcagacagggctg

SEQ ID NO: 150286 - DNA, 25 bp, Homo sapien
tctgtgcacatctggttctcagttg

SEQ ID NO: 150287 - DNA, 25 bp, Homo sapien
ccagactccctgaacggtggttctg

SEQ ID NO: 150288 - DNA, 25 bp, Homo sapien
gttctcagttgtccttcatcgtggg

SEQ ID NO: 150289 - DNA, 25 bp, Homo sapien
ggaaaggcctcaggttcagccagca

SEQ ID NO: 150290 - DNA, 25 bp, Homo sapien
gctaggttaagtgatgcctgcctgc

SEQ ID NO: 150291 - DNA, 25 bp, Homo sapien
ccccggagcatgttgagagcacagt

SEQ ID NO: 150292 - DNA, 25 bp, Homo sapien
tgcccagcaaaacctgacggctagg

SEQ ID NO: 150293 - DNA, 25 bp, Homo sapien
cattggaggcaagtgtggctggaca

SEQ ID NO: 150294 - DNA, 25 bp, Homo sapien
cacttcctgccgagatattagtcat

SEQ ID NO: 150295 - DNA, 25 bp, Homo sapien
gctgttcgaaataaagtgttcttta

SEQ ID NO: 150296 - DNA, 25 bp, Homo sapien
agttggaggtcccaaaaagcctctg

SEQ ID NO: 150297 - DNA, 25 bp, Homo sapien
agtctcccctcatctcgtggcttgg

SEQ ID NO: 150298 - DNA, 25 bp, Homo sapien
gccctgaggagcctcgcacagggaa

SEQ ID NO: 150299 - DNA, 25 bp, Homo sapien
gctggaagagtccacttgctgccga

SEQ ID NO: 150300 - DNA, 25 bp, Homo sapien
gcacggacagggttgagtctcccct

SEQ ID NO: 150301 - DNA, 25 bp, Homo sapien
cgtggcccccatgggagggcaccat

SEQ ID NO: 150302 - DNA, 25 bp, Homo sapien
acagacagcaccagccactcttccg

SEQ ID NO: 150303 - DNA, 25 bp, Homo sapien
ctgggcctccccacagacagcacca

SEQ ID NO: 150304 - DNA, 25 bp, Homo sapien
ctgggggtgcgtggcccccatggga

SEQ ID NO: 150305 - DNA, 25 bp, Homo sapien
ggttagtggttatagtcacagaagg

SEQ ID NO: 150306 - DNA, 25 bp, Homo sapien
ggtggttagtggttatagtcacaga

SEQ ID NO: 150307 - DNA, 25 bp, Homo sapien
gctggtggttagtggttatagtcac

SEQ ID NO: 150308 - DNA, 25 bp, Homo sapien
ttagtggttatagtcacagaaggga

SEQ ID NO: 150309 - DNA, 25 bp, Homo sapien
gattggtgggccacgttgtcagcct

SEQ ID NO: 150310 - DNA, 25 bp, Homo sapien
cggattggtgggccacgttgtcagc

SEQ ID NO: 150311 - DNA, 25 bp, Homo sapien
ttggtgggccacgttgtcagccttc

SEQ ID NO: 150312 - DNA, 25 bp, Homo sapien
attggtgggccacgttgtcagcctt

SEQ ID NO: 150313 - DNA, 25 bp, Homo sapien
tcagtgggttaaacagagggtggac

SEQ ID NO: 150314 - DNA, 25 bp, Homo sapien
ttcagtgggttaaacagagggtgga

SEQ ID NO: 150315 - DNA, 25 bp, Homo sapien
gagcccctgagtgatggaggtaacc

SEQ ID NO: 150316 - DNA, 25 bp, Homo sapien
ccctgagtgatggaggtaacctttc

SEQ ID NO: 150317 - DNA, 25 bp, Homo sapien
gcccctgagtgatggaggtaacctt

SEQ ID NO: 150318 - DNA, 25 bp, Homo sapien
ctgggagcccctgagtgatggaggt

SEQ ID NO: 150319 - DNA, 25 bp, Homo sapien
agatggtgtctgtaggacccatgtc

SEQ ID NO: 150320 - DNA, 25 bp, Homo sapien
ctgctagatggtgtctgtaggaccc

SEQ ID NO: 150321 - DNA, 25 bp, Homo sapien
ctagatggtgtctgtaggacccatg

SEQ ID NO: 150322 - DNA, 25 bp, Homo sapien
tgctagatggtgtctgtaggaccca

SEQ ID NO: 150323 - DNA, 25 bp, Homo sapien
agaagcagcttccccagctccaagt

SEQ ID NO: 150324 - DNA, 25 bp, Homo sapien
ctttgagaagcagcttccccagctc

SEQ ID NO: 150325 - DNA, 25 bp, Homo sapien
tttgagaagcagcttccccagctcc

SEQ ID NO: 150326 - DNA, 25 bp, Homo sapien
tgagaagcagcttccccagctccaa

SEQ ID NO: 150327 - DNA, 25 bp, Homo sapien
atcttcccgggatgcaccagtgtgc

SEQ ID NO: 150328 - DNA, 25 bp, Homo sapien
taattggatgcaccagtcctcttgg

SEQ ID NO: 150329 - DNA, 25 bp, Homo sapien
tacccagatgtggtgccctaggaac

SEQ ID NO: 150330 - DNA, 25 bp, Homo sapien
tgacgcattggcttttgcacctcgg

SEQ ID NO: 150331 - DNA, 25 bp, Homo sapien
gggatctgagggatcacactgcatt

SEQ ID NO: 150332 - DNA, 25 bp, Homo sapien
gtggctcattagaaaaggcttccag

SEQ ID NO: 150333 - DNA, 25 bp, Homo sapien
catgtggctcattagaaaaggcttc

SEQ ID NO: 150334 - DNA, 25 bp, Homo sapien
atgtggctcattagaaaaggcttcc

SEQ ID NO: 150335 - DNA, 25 bp, Homo sapien
gtttcttgtgctaaagttacttgtg

SEQ ID NO: 150336 - DNA, 25 bp, Homo sapien
tacatgccatgagggcgtttcttgt

SEQ ID NO: 150337 - DNA, 25 bp, Homo sapien
atgagggcgtttcttgtgctaaagt

SEQ ID NO: 150338 - DNA, 25 bp, Homo sapien
gtacatgccatgagggcgtttcttg

SEQ ID NO: 150339 - DNA, 25 bp, Homo sapien
cttcgtaatatgcgtcagggtgctg

SEQ ID NO: 150340 - DNA, 25 bp, Homo sapien
ttcgtaatatgcgtcagggtgctgc

SEQ ID NO: 150341 - DNA, 25 bp, Homo sapien
agccccttgaaactgactgtcagtt

SEQ ID NO: 150342 - DNA, 25 bp, Homo sapien
cacatgctgcggaggtagcttggcc

SEQ ID NO: 150343 - DNA, 25 bp, Homo sapien
aactgtcattgccttcctgggagca

SEQ ID NO: 150344 - DNA, 25 bp, Homo sapien
gagagctcttataggcggcaactgt

SEQ ID NO: 150345 - DNA, 25 bp, Homo sapien
cctttggaagaagacgcagcggagt

SEQ ID NO: 150346 - DNA, 25 bp, Homo sapien
ctgcacctgccaggagtgcggaaag

SEQ ID NO: 150347 - DNA, 25 bp, Homo sapien
cctgccaggagtgcggaaaggcgca

SEQ ID NO: 150348 - DNA, 25 bp, Homo sapien
tgcggaaaggcgcagggccgaggtc

SEQ ID NO: 150349 - DNA, 25 bp, Homo sapien
ggctgcacctgccaggagtgcggaa

SEQ ID NO: 150350 - DNA, 25 bp, Homo sapien
atattgtcttgtcaagtcacatggg

SEQ ID NO: 150351 - DNA, 25 bp, Homo sapien
gccttccaagcttgctacacctggg

SEQ ID NO: 150352 - DNA, 25 bp, Homo sapien
tctttttacatgcatcaccttgagc

SEQ ID NO: 150353 - DNA, 25 bp, Homo sapien
acctggggcaccatccagtttgcct

SEQ ID NO: 150354 - DNA, 25 bp, Homo sapien
tacaactatgtgcatacaaaagcaa

SEQ ID NO: 150355 - DNA, 25 bp, Homo sapien
gcaactgtcttgagaattcagggaa

SEQ ID NO: 150356 - DNA, 25 bp, Homo sapien
taacctaacgttgtgctggtacctg

SEQ ID NO: 150357 - DNA, 25 bp, Homo sapien
cctcccctgagtgtatgcttagttg

SEQ ID NO: 150358 - DNA, 25 bp, Homo sapien
taagctatttttggtgggtatgaat

SEQ ID NO: 150359 - DNA, 25 bp, Homo sapien
gggtatgaattgattaaattaagcc

SEQ ID NO: 150360 - DNA, 25 bp, Homo sapien
tttggttatctctaagattatgtag

SEQ ID NO: 150361 - DNA, 25 bp, Homo sapien
gggactactatagtagccagtgtac

SEQ ID NO: 150362 - DNA, 25 bp, Homo sapien
gatggttatgacctggacttggcca

SEQ ID NO: 150363 - DNA, 25 bp, Homo sapien
tggcatgtggacaaagtatacttgg

SEQ ID NO: 150364 - DNA, 25 bp, Homo sapien
catgaatgggttaatggcatgtcac

SEQ ID NO: 150365 - DNA, 25 bp, Homo sapien
tataattggtagcttagtcagtggc

SEQ ID NO: 150366 - DNA, 25 bp, Homo sapien
agaaaaagtgagaacaccaaggcca

SEQ ID NO: 150367 - DNA, 25 bp, Homo sapien
tctcatatactatcacagaaaaagt

SEQ ID NO: 150368 - DNA, 25 bp, Homo sapien
agatatcgcggtgagctgaaattgc

SEQ ID NO: 150369 - DNA, 25 bp, Homo sapien
ttcctatcagggcaacattatattc

SEQ ID NO: 150370 - DNA, 25 bp, Homo sapien
aacactgtcatatgtcctgtcagat

SEQ ID NO: 150371 - DNA, 25 bp, Homo sapien
tatttagggctatgtccctgtacca

SEQ ID NO: 150372 - DNA, 25 bp, Homo sapien
cctgtaccacactttagggaatgaa

SEQ ID NO: 150373 - DNA, 25 bp, Homo sapien
tgcagttaacaaaacagctagagcc

SEQ ID NO: 150374 - DNA, 25 bp, Homo sapien
gaagattttcgttcaccagtgttgg

SEQ ID NO: 150375 - DNA, 25 bp, Homo sapien
tgtatctggcaactctacactaaga

SEQ ID NO: 150376 - DNA, 25 bp, Homo sapien
gagaaaacgctttcccttgcgaaga

SEQ ID NO: 150377 - DNA, 25 bp, Homo sapien
tttctgatcgtgttgaagcttggca

SEQ ID NO: 150378 - DNA, 25 bp, Homo sapien
ggtaccccagtcttgcgggagctcc

SEQ ID NO: 150379 - DNA, 25 bp, Homo sapien
gagctccccggagagcgcttgaaat

SEQ ID NO: 150380 - DNA, 25 bp, Homo sapien
gagccaagcgtgtttgagctgtgcc

SEQ ID NO: 150381 - DNA, 25 bp, Homo sapien
tcgctccacgagaacagagggacgg

SEQ ID NO: 150382 - DNA, 25 bp, Homo sapien
tgaaggtgtacacgctcaacgagga

SEQ ID NO: 150383 - DNA, 25 bp, Homo sapien
cgggaagctgcttcgcggagatcat

SEQ ID NO: 150384 - DNA, 25 bp, Homo sapien
catgtgtcgtctggctacgtggagc

SEQ ID NO: 150385 - DNA, 25 bp, Homo sapien
tgagagcgacggtaagtgaagcccc

SEQ ID NO: 150386 - DNA, 25 bp, Homo sapien
cgcagtaaggctcccggtctcgctg

SEQ ID NO: 150387 - DNA, 25 bp, Homo sapien
cgtcggaagcctccgccgcagtaag

SEQ ID NO: 150388 - DNA, 25 bp, Homo sapien
ggtctcgctgctgtctctttaaatg

SEQ ID NO: 150389 - DNA, 25 bp, Homo sapien
tctttaaatggtggggctacgagcc

SEQ ID NO: 150390 - DNA, 25 bp, Homo sapien
ctcgggctgtcaccggcgcaatctg

SEQ ID NO: 150391 - DNA, 25 bp, Homo sapien
gacggtgcgtgcaaggaggcgggag

SEQ ID NO: 150392 - DNA, 25 bp, Homo sapien
ggcgcaatctgcgtcccgcctcctc

SEQ ID NO: 150393 - DNA, 25 bp, Homo sapien
gggagcctcgggctgtcaccggcgc

SEQ ID NO: 150394 - DNA, 25 bp, Homo sapien
acacagggcgcgacggacgcacaca

SEQ ID NO: 150395 - DNA, 25 bp, Homo sapien
gggcagaggccgcaaacgtatccac

SEQ ID NO: 150396 - DNA, 25 bp, Homo sapien
acgcccctcgtgcatcctggagcgg

SEQ ID NO: 150397 - DNA, 25 bp, Homo sapien
gctgatgacgaacacagggcgcgac

SEQ ID NO: 150398 - DNA, 25 bp, Homo sapien
gctctcggaagcgggtaggggccca

SEQ ID NO: 150399 - DNA, 25 bp, Homo sapien
ctctcggaagcgggtaggggcccag

SEQ ID NO: 150400 - DNA, 25 bp, Homo sapien
ccagaaatcgcaaacagtcccaagt

SEQ ID NO: 150401 - DNA, 25 bp, Homo sapien
cagacagttctgatagggatgaagg

SEQ ID NO: 150402 - DNA, 25 bp, Homo sapien
aattgtcacttggaactcggtccca

SEQ ID NO: 150403 - DNA, 25 bp, Homo sapien
catttcattccctcaagtccgcaag

SEQ ID NO: 150404 - DNA, 25 bp, Homo sapien
tttcaggtagttcattggctgatga

SEQ ID NO: 150405 - DNA, 25 bp, Homo sapien
ctttcaggtagttcattggctgatg

SEQ ID NO: 150406 - DNA, 25 bp, Homo sapien
ggcttaggcatccacacttttggca

SEQ ID NO: 150407 - DNA, 25 bp, Homo sapien
gaatggtatttcatccccgaagcca

SEQ ID NO: 150408 - DNA, 25 bp, Homo sapien
tttaagctgaagactgcgcctggcc

SEQ ID NO: 150409 - DNA, 25 bp, Homo sapien
cctggcctgaggtgtcatattctga

SEQ ID NO: 150410 - DNA, 25 bp, Homo sapien
gaatgctccttaaacccagctgcca

SEQ ID NO: 150411 - DNA, 25 bp, Homo sapien
cataacctttggtggattctggcat

SEQ ID NO: 150412 - DNA, 25 bp, Homo sapien
tttcatggtaggtgtttacataggc

SEQ ID NO: 150413 - DNA, 25 bp, Homo sapien
cataggcataacctttggtggattc

SEQ ID NO: 150414 - DNA, 25 bp, Homo sapien
ggtgtttacataggcataacctttg

SEQ ID NO: 150415 - DNA, 25 bp, Homo sapien
gatgttctctgtagccattatctct

SEQ ID NO: 150416 - DNA, 25 bp, Homo sapien
tatgatgttctctgtagccattatc

SEQ ID NO: 150417 - DNA, 25 bp, Homo sapien
ctgtagccattatctctcccaaagt

SEQ ID NO: 150418 - DNA, 25 bp, Homo sapien
tctctgtagccattatctctcccaa

SEQ ID NO: 150419 - DNA, 25 bp, Homo sapien
cagaaaattggcttcattcactgtg

SEQ ID NO: 150420 - DNA, 25 bp, Homo sapien
ctgtgttagccagtagcacgggaat

SEQ ID NO: 150421 - DNA, 25 bp, Homo sapien
gcagaaaattggcttcattcactgt

SEQ ID NO: 150422 - DNA, 25 bp, Homo sapien
cagtagcacgggaatctccttttgt

SEQ ID NO: 150423 - DNA, 25 bp, Homo sapien
aatgagcagggatagtgtcaccatc

SEQ ID NO: 150424 - DNA, 25 bp, Homo sapien
gggacaactcttatgggctacagct

SEQ ID NO: 150425 - DNA, 25 bp, Homo sapien
tggagttgggacaaaaccattctgg

SEQ ID NO: 150426 - DNA, 25 bp, Homo sapien
ttgaaccaatcccattgaaggcctg

SEQ ID NO: 150427 - DNA, 25 bp, Homo sapien
caagttcagtgatcggattttgtgg

SEQ ID NO: 150428 - DNA, 25 bp, Homo sapien
cagtgatcggattttgtggttggtt

SEQ ID NO: 150429 - DNA, 25 bp, Homo sapien
cttctttattcaagttcagtgatcg

SEQ ID NO: 150430 - DNA, 25 bp, Homo sapien
tattcaagttcagtgatcggatttt

SEQ ID NO: 150431 - DNA, 25 bp, Homo sapien
gctatggtaactgaaagctacatct

SEQ ID NO: 150432 - DNA, 25 bp, Homo sapien
tgctatggtaactgaaagctacatc

SEQ ID NO: 150433 - DNA, 25 bp, Homo sapien
tatggtaactgaaagctacatcttc

SEQ ID NO: 150434 - DNA, 25 bp, Homo sapien
ttgctatggtaactgaaagctacat

SEQ ID NO: 150435 - DNA, 25 bp, Homo sapien
cccccattcaatgtccatgtgttct

SEQ ID NO: 150436 - DNA, 25 bp, Homo sapien
gtatgttgtcccccattcaatgtcc

SEQ ID NO: 150437 - DNA, 25 bp, Homo sapien
cagtttggaatttggatgcctggaa

SEQ ID NO: 150438 - DNA, 25 bp, Homo sapien
tctgcaccccaagagtatgtcagtt

SEQ ID NO: 150439 - DNA, 25 bp, Homo sapien
tgagagattctaaccagtgatgtgt

SEQ ID NO: 150440 - DNA, 25 bp, Homo sapien
caaagactgtttcaggtcatcatca

SEQ ID NO: 150441 - DNA, 25 bp, Homo sapien
tatcagtatcctgcaccacaatggt

SEQ ID NO: 150442 - DNA, 25 bp, Homo sapien
ataatatagtatagtttcgctgccc

SEQ ID NO: 150443 - DNA, 25 bp, Homo sapien
catggtttacattagagtcccctct

SEQ ID NO: 150444 - DNA, 25 bp, Homo sapien
cttggtgttatacatgctagaggac

SEQ ID NO: 150445 - DNA, 25 bp, Homo sapien
tattgattaggtcttggctccactg

SEQ ID NO: 150446 - DNA, 25 bp, Homo sapien
caagtctctgttagtactattggca

SEQ ID NO: 150447 - DNA, 25 bp, Homo sapien
tattggcatttagaagactttacca

SEQ ID NO: 150448 - DNA, 25 bp, Homo sapien
caaaacctggtatatcaagtctctg

SEQ ID NO: 150449 - DNA, 25 bp, Homo sapien
gcagcagtcccaaatagtcaaaatg

SEQ ID NO: 150450 - DNA, 25 bp, Homo sapien
agaagtaccatttgtggtgcccaag

SEQ ID NO: 150451 - DNA, 25 bp, Homo sapien
tctgtacctccattgacttctgttt

SEQ ID NO: 150452 - DNA, 25 bp, Homo sapien
ttgtggtgcccaagtttaagttatc

SEQ ID NO: 150453 - DNA, 25 bp, Homo sapien
gtaatggcaacagaatttataaaga

SEQ ID NO: 150454 - DNA, 25 bp, Homo sapien
aatgtaatggcaacagaatttataa

SEQ ID NO: 150455 - DNA, 25 bp, Homo sapien
tgtaatggcaacagaatttataaag

SEQ ID NO: 150456 - DNA, 25 bp, Homo sapien
agagttgctgtggaggatgtttcta

SEQ ID NO: 150457 - DNA, 25 bp, Homo sapien
ctttatccagtctggcaatttctgc

SEQ ID NO: 150458 - DNA, 25 bp, Homo sapien
tttgttttctactcatcctatctgt

SEQ ID NO: 150459 - DNA, 25 bp, Homo sapien
tctacagtcagtcctcaaatgatat

SEQ ID NO: 150460 - DNA, 25 bp, Homo sapien
gatatgataccacatcacatatact

SEQ ID NO: 150461 - DNA, 25 bp, Homo sapien
gggctgttcccacgtctcctcagcg

SEQ ID NO: 150462 - DNA, 25 bp, Homo sapien
tcctcagcgacgcctgtgtcgcggg

SEQ ID NO: 150463 - DNA, 25 bp, Homo sapien
gcctgagagagctttaggccccgcg

SEQ ID NO: 150464 - DNA, 25 bp, Homo sapien
ttaggccccgcgacagctggaagcg

SEQ ID NO: 150465 - DNA, 25 bp, Homo sapien
cttggctcaggtgcgcttctcccac

SEQ ID NO: 150466 - DNA, 25 bp, Homo sapien
gggaaaggcgcggcgtggcttggct

SEQ ID NO: 150467 - DNA, 25 bp, Homo sapien
gcttggctcaggtgcgcttctccca

SEQ ID NO: 150468 - DNA, 25 bp, Homo sapien
ggggaaaggcgcggcgtggcttggc

SEQ ID NO: 150469 - DNA, 25 bp, Homo sapien
gaatcaaagcgaggatgctccacag

SEQ ID NO: 150470 - DNA, 25 bp, Homo sapien
gaggacttgtcaccaggcatttgat

SEQ ID NO: 150471 - DNA, 25 bp, Homo sapien
tagagtttcgttgctgtggctcaaa

SEQ ID NO: 150472 - DNA, 25 bp, Homo sapien
cacagggcacgtgggagctttactc

SEQ ID NO: 150473 - DNA, 25 bp, Homo sapien
cagaagtcagctgtggtttcctggc

SEQ ID NO: 150474 - DNA, 25 bp, Homo sapien
tgccctgtagaattccaaagtcttc

SEQ ID NO: 150475 - DNA, 25 bp, Homo sapien
tgaattcgtttggttcacaggccat

SEQ ID NO: 150476 - DNA, 25 bp, Homo sapien
tctaaaaactcccataggaagtgga

SEQ ID NO: 150477 - DNA, 25 bp, Homo sapien
gaaggcagatatgggtctgattctc

SEQ ID NO: 150478 - DNA, 25 bp, Homo sapien
tcctttgctggttcaacaaagacca

SEQ ID NO: 150479 - DNA, 25 bp, Homo sapien
caacaaacctgttgacggctgaggt

SEQ ID NO: 150480 - DNA, 25 bp, Homo sapien
ttcctcgcctgctcaaactctgaat

SEQ ID NO: 150481 - DNA, 25 bp, Homo sapien
aggccagaccccacattcttttctg

SEQ ID NO: 150482 - DNA, 25 bp, Homo sapien
gcccagcctccattctttgttctaa

SEQ ID NO: 150483 - DNA, 25 bp, Homo sapien
tcctgaagggcctggaggaagtcac

SEQ ID NO: 150484 - DNA, 25 bp, Homo sapien
gaggaagtcacacccacaggccaga

SEQ ID NO: 150485 - DNA, 25 bp, Homo sapien
atgttctgtcttcccaaacccagtc

SEQ ID NO: 150486 - DNA, 25 bp, Homo sapien
tacccaattggattggaatgcagag

SEQ ID NO: 150487 - DNA, 25 bp, Homo sapien
gaattccttcgaaaggccttcagac

SEQ ID NO: 150488 - DNA, 25 bp, Homo sapien
tgaggaccccttaatcttgctttct

SEQ ID NO: 150489 - DNA, 25 bp, Homo sapien
agctaacgtcaccatgctccagagg

SEQ ID NO: 150490 - DNA, 25 bp, Homo sapien
gaacagcattaacaaggaccaggtg

SEQ ID NO: 150491 - DNA, 25 bp, Homo sapien
gcatatgaacggaagaagacagccc

SEQ ID NO: 150492 - DNA, 25 bp, Homo sapien
cgatgaacagtgaggaataaaaccc

SEQ ID NO: 150493 - DNA, 25 bp, Homo sapien
cacagcctggttgttatggcaccca

SEQ ID NO: 150494 - DNA, 25 bp, Homo sapien
caggaagtcttgttgctacccacag

SEQ ID NO: 150495 - DNA, 25 bp, Homo sapien
tatggacattgtcgtggctccccaa

SEQ ID NO: 150496 - DNA, 25 bp, Homo sapien
ccatgtgtcctgaaagggagggatt

SEQ ID NO: 150497 - DNA, 25 bp, Homo sapien
tgcctgtaagtattactgataattt

SEQ ID NO: 150498 - DNA, 25 bp, Homo sapien
gtattactgataattttcacaggta

SEQ ID NO: 150499 - DNA, 25 bp, Homo sapien
catgcctgtaagtattactgataat

SEQ ID NO: 150500 - DNA, 25 bp, Homo sapien
aagtattactgataattttcacagg

SEQ ID NO: 150501 - DNA, 25 bp, Homo sapien
ggtccatgcaatcctcctgactggg

SEQ ID NO: 150502 - DNA, 25 bp, Homo sapien
cctggtacaggaatgttattgaaat

SEQ ID NO: 150503 - DNA, 25 bp, Homo sapien
gacattccatcggtatacacagaga

SEQ ID NO: 150504 - DNA, 25 bp, Homo sapien
gagaagtttacatggctttgggcca

SEQ ID NO: 150505 - DNA, 25 bp, Homo sapien
acaggcgtgagccactgtgcccaac

SEQ ID NO: 150506 - DNA, 25 bp, Homo sapien
aggcatacaccaccacaccgggata

SEQ ID NO: 150507 - DNA, 25 bp, Homo sapien
gcatacaccaccacaccgggataat

SEQ ID NO: 150508 - DNA, 25 bp, Homo sapien
ttggcctcccaaagcgcttggatta

SEQ ID NO: 150509 - DNA, 25 bp, Homo sapien
tgttgctggaaggtcataggttccc

SEQ ID NO: 150510 - DNA, 25 bp, Homo sapien
gtggcttctctgcatagtgcagaaa

SEQ ID NO: 150511 - DNA, 25 bp, Homo sapien
ctttgtggagacaggccaacaagat

SEQ ID NO: 150512 - DNA, 25 bp, Homo sapien
gatcatctttagaggactttgtgga

SEQ ID NO: 150513 - DNA, 25 bp, Homo sapien
tactttatcacaaagtggcctttgg

SEQ ID NO: 150514 - DNA, 25 bp, Homo sapien
acccagctggacttggacctggtgg

SEQ ID NO: 150515 - DNA, 25 bp, Homo sapien
gccagagacaatctagcactttaaa

SEQ ID NO: 150516 - DNA, 25 bp, Homo sapien
cacatttacacctttgccagcgtta

SEQ ID NO: 150517 - DNA, 25 bp, Homo sapien
agaatccaggtctggtagaagaaca

SEQ ID NO: 150518 - DNA, 25 bp, Homo sapien
atccaggtctggtagaagaacagat

SEQ ID NO: 150519 - DNA, 25 bp, Homo sapien
acagcagaatccaggtctggtagaa

SEQ ID NO: 150520 - DNA, 25 bp, Homo sapien
cagcagaatccaggtctggtagaag

SEQ ID NO: 150521 - DNA, 25 bp, Homo sapien
ttctgtctcactaaattgtaagggt

SEQ ID NO: 150522 - DNA, 25 bp, Homo sapien
tactggcacgcaagaaaatttatca

SEQ ID NO: 150523 - DNA, 25 bp, Homo sapien
gactaatatgtttactaattggact

SEQ ID NO: 150524 - DNA, 25 bp, Homo sapien
tttatgttcatatcatatatactgg

SEQ ID NO: 150525 - DNA, 25 bp, Homo sapien
atgatatgaaacctctggattcacc

SEQ ID NO: 150526 - DNA, 25 bp, Homo sapien
tcatgatatgaaacctctggattca

SEQ ID NO: 150527 - DNA, 25 bp, Homo sapien
ttctgttcatgatatgaaacctctg

SEQ ID NO: 150528 - DNA, 25 bp, Homo sapien
aaagagatacaaatgcaccagaaag

SEQ ID NO: 150529 - DNA, 25 bp, Homo sapien
taaagcttaacctcaaattgcaaat

SEQ ID NO: 150530 - DNA, 25 bp, Homo sapien
taacctcaaattgcaaatagtataa

SEQ ID NO: 150531 - DNA, 25 bp, Homo sapien
gcttaacctcaaattgcaaatagta

SEQ ID NO: 150532 - DNA, 25 bp, Homo sapien
tgtaaagcttaacctcaaattgcaa

SEQ ID NO: 150533 - DNA, 25 bp, Homo sapien
gaactacctttacggtgctggatgg

SEQ ID NO: 150534 - DNA, 25 bp, Homo sapien
catataagaagtaccagatgcagtt

SEQ ID NO: 150535 - DNA, 25 bp, Homo sapien
cattcccagacgctttgttacccaa

SEQ ID NO: 150536 - DNA, 25 bp, Homo sapien
tatacctgtatctgaaagggcagca

SEQ ID NO: 150537 - DNA, 25 bp, Homo sapien
tggtagggcacgccagtgatccgat

SEQ ID NO: 150538 - DNA, 25 bp, Homo sapien
gacatggtagggcacgccagtgatc

SEQ ID NO: 150539 - DNA, 25 bp, Homo sapien
catggtagggcacgccagtgatccg

SEQ ID NO: 150540 - DNA, 25 bp, Homo sapien
gtagggcacgccagtgatccgatgc

SEQ ID NO: 150541 - DNA, 25 bp, Homo sapien
cccattttcctcgtcagcaggggcg

SEQ ID NO: 150542 - DNA, 25 bp, Homo sapien
cattttcctcgtcagcaggggcgtc

SEQ ID NO: 150543 - DNA, 25 bp, Homo sapien
ccattttcctcgtcagcaggggcgt

SEQ ID NO: 150544 - DNA, 25 bp, Homo sapien
tgttgcaaattctcatggtttgggt

SEQ ID NO: 150545 - DNA, 25 bp, Homo sapien
ttgcaaattctcatggtttgggttg

SEQ ID NO: 150546 - DNA, 25 bp, Homo sapien
gttgcaaattctcatggtttgggtt

SEQ ID NO: 150547 - DNA, 25 bp, Homo sapien
tacgttccccatgccataaaggtgc

SEQ ID NO: 150548 - DNA, 25 bp, Homo sapien
cagaagggctggataactatgggaa

SEQ ID NO: 150549 - DNA, 25 bp, Homo sapien
tgtttatcctatgccagaattgtcc

SEQ ID NO: 150550 - DNA, 25 bp, Homo sapien
gactggtcgctccttgtatcctaga

SEQ ID NO: 150551 - DNA, 25 bp, Homo sapien
gtttcaatctaagtctgctccaggg

SEQ ID NO: 150552 - DNA, 25 bp, Homo sapien
tacattatagcgttccagctgagaa

SEQ ID NO: 150553 - DNA, 25 bp, Homo sapien
ttttctatgatgaaagaccactggg

SEQ ID NO: 150554 - DNA, 25 bp, Homo sapien
gaaactgctcctacgttaagtcgag

SEQ ID NO: 150555 - DNA, 25 bp, Homo sapien
caggcctctgcgtttctaggcagaa

SEQ ID NO: 150556 - DNA, 25 bp, Homo sapien
taaactcgccgcgatgtcgtcctgg

SEQ ID NO: 150557 - DNA, 25 bp, Homo sapien
tcaaggatatttggtcggatcgccc

SEQ ID NO: 150558 - DNA, 25 bp, Homo sapien
tatcgtatcctgtctcgcgaaggca

SEQ ID NO: 150559 - DNA, 25 bp, Homo sapien
ttgcgccaaggacacgtccggcggc

SEQ ID NO: 150560 - DNA, 25 bp, Homo sapien
caccgcggcgcttttctatgatccg

SEQ ID NO: 150561 - DNA, 25 bp, Homo sapien
gcacctaaccttgcgctaggcactg

SEQ ID NO: 150562 - DNA, 25 bp, Homo sapien
gcggttaatccagcccgcgctcggt

SEQ ID NO: 150563 - DNA, 25 bp, Homo sapien
tacccaccaagggtcggctctgctt

SEQ ID NO: 150564 - DNA, 25 bp, Homo sapien
aggagcgccgcgatgccccagttat

SEQ ID NO: 150565 - DNA, 25 bp, Homo sapien
tgctttgaaacgcagctgcaggagg

SEQ ID NO: 150566 - DNA, 25 bp, Homo sapien
gatgccccagttatccaggccattc

SEQ ID NO: 150567 - DNA, 25 bp, Homo sapien
taccatagtgcctgtcacggagcag

SEQ ID NO: 150568 - DNA, 25 bp, Homo sapien
tagtgccgccaataccataggagcg

SEQ ID NO: 150569 - DNA, 25 bp, Homo sapien
gagaattactactgcctggtgccat

SEQ ID NO: 150570 - DNA, 25 bp, Homo sapien
cagcccagcggttagatgtgcagac

SEQ ID NO: 150571 - DNA, 25 bp, Homo sapien
tctatggactcatctgacctctccc

SEQ ID NO: 150572 - DNA, 25 bp, Homo sapien
cctcacaccgtgtctggcttacagt

SEQ ID NO: 150573 - DNA, 25 bp, Homo sapien
cctcctcacaccgtgtctggcttac

SEQ ID NO: 150574 - DNA, 25 bp, Homo sapien
ggactcatctgacctctcccctctt

SEQ ID NO: 150575 - DNA, 25 bp, Homo sapien
gcctggattgctctttcgcagatac

SEQ ID NO: 150576 - DNA, 25 bp, Homo sapien
tctaacctgccaaggattctgctgc

SEQ ID NO: 150577 - DNA, 25 bp, Homo sapien
taatttctgcactagccatccttgc

SEQ ID NO: 150578 - DNA, 25 bp, Homo sapien
catgagaaacttttaggacatagct

SEQ ID NO: 150579 - DNA, 25 bp, Homo sapien
tttttacaacactgggctattagga

SEQ ID NO: 150580 - DNA, 25 bp, Homo sapien
caacactgggctattaggaataact

SEQ ID NO: 150581 - DNA, 25 bp, Homo sapien
gccatgatacaagtgcactgtggca

SEQ ID NO: 150582 - DNA, 25 bp, Homo sapien
aagcattgttgtttggccatgatac

SEQ ID NO: 150583 - DNA, 25 bp, Homo sapien
acacagagctccttatatccttcac

SEQ ID NO: 150584 - DNA, 25 bp, Homo sapien
tgtgaatatttgcactatacttacc

SEQ ID NO: 150585 - DNA, 25 bp, Homo sapien
ctcggatttaggatgcttgacctgt

SEQ ID NO: 150586 - DNA, 25 bp, Homo sapien
tgagcacctcttttgagtatcatgt

SEQ ID NO: 150587 - DNA, 25 bp, Homo sapien
tgtgccatttttccgttcactgcct

SEQ ID NO: 150588 - DNA, 25 bp, Homo sapien
ctacgaagggccttgcaaccatttc

SEQ ID NO: 150589 - DNA, 25 bp, Homo sapien
agctgtgtaggtagcaatatctgcc

SEQ ID NO: 150590 - DNA, 25 bp, Homo sapien
aactttggccctaaagaagctgtgt

SEQ ID NO: 150591 - DNA, 25 bp, Homo sapien
taatctcctatacagtccattctgg

SEQ ID NO: 150592 - DNA, 25 bp, Homo sapien
ttttgggcgtcctcaagagtacgca

SEQ ID NO: 150593 - DNA, 25 bp, Homo sapien
tatcagcatgtgtataggcctacag

SEQ ID NO: 150594 - DNA, 25 bp, Homo sapien
gagtacgcacctataaccatatggc

SEQ ID NO: 150595 - DNA, 25 bp, Homo sapien
tgcctggtcccattgtgcctctaga

SEQ ID NO: 150596 - DNA, 25 bp, Homo sapien
tgccagtgggcatacagctgggtag

SEQ ID NO: 150597 - DNA, 25 bp, Homo sapien
aagacaggatgcctgccagtgggca

SEQ ID NO: 150598 - DNA, 25 bp, Homo sapien
gagtgatagcaactggcagctgcct

SEQ ID NO: 150599 - DNA, 25 bp, Homo sapien
gtcccgaggtcgcagcttccactgg

SEQ ID NO: 150600 - DNA, 25 bp, Homo sapien
cactggcgcgggttgagttccctgt

SEQ ID NO: 150601 - DNA, 25 bp, Homo sapien
gcgggcgcggcgaatggcaggtccc

SEQ ID NO: 150602 - DNA, 25 bp, Homo sapien
cttccactggcgcgggttgagttcc

SEQ ID NO: 150603 - DNA, 25 bp, Homo sapien
ctaggcgaatccaggttcaagacgt

SEQ ID NO: 150604 - DNA, 25 bp, Homo sapien
tcaagacgtagaaaagccgatgctg

SEQ ID NO: 150605 - DNA, 25 bp, Homo sapien
cgccagggactaccggccggcagaa

SEQ ID NO: 150606 - DNA, 25 bp, Homo sapien
agccgatgctgggtcagcagcgcca

SEQ ID NO: 150607 - DNA, 25 bp, Homo sapien
ctcgtcaggcctcccccaacgccgt

SEQ ID NO: 150608 - DNA, 25 bp, Homo sapien
caacgccgtccacagcccttcccaa

SEQ ID NO: 150609 - DNA, 25 bp, Homo sapien
ggcctcccccaacgccgtccacagc

SEQ ID NO: 150610 - DNA, 25 bp, Homo sapien
ccaacgccgtccacagcccttccca

SEQ ID NO: 150611 - DNA, 25 bp, Homo sapien
ggctgccgcaaaacagctgggagct

SEQ ID NO: 150612 - DNA, 25 bp, Homo sapien
aacgaccgggacagtcgcagccgaa

SEQ ID NO: 150613 - DNA, 25 bp, Homo sapien
tcgctgaccacttctgccgggaacg

SEQ ID NO: 150614 - DNA, 25 bp, Homo sapien
cttgaaacccatggagaagtcactt

SEQ ID NO: 150615 - DNA, 25 bp, Homo sapien
gagaaggtactcaaaacagaggagt

SEQ ID NO: 150616 - DNA, 25 bp, Homo sapien
gtaaaggaataccagacatctcaga

SEQ ID NO: 150617 - DNA, 25 bp, Homo sapien
tcactaaggattggtaagacatggg

SEQ ID NO: 150618 - DNA, 25 bp, Homo sapien
gaaactgtgaacctagtcctgcagg

SEQ ID NO: 150619 - DNA, 25 bp, Homo sapien
tgatgaaacaccaggaattctgaag

SEQ ID NO: 150620 - DNA, 25 bp, Homo sapien
atcttagtcgtatatatgatgaaac

SEQ ID NO: 150621 - DNA, 25 bp, Homo sapien
tgatatcttagtcgtatatatgatg

SEQ ID NO: 150622 - DNA, 25 bp, Homo sapien
atgatgaaacaccaggaattctgaa

SEQ ID NO: 150623 - DNA, 25 bp, Homo sapien
gaatgcagactccatgaaggtaaag

SEQ ID NO: 150624 - DNA, 25 bp, Homo sapien
ccacatgtatttgcccttgcttggg

SEQ ID NO: 150625 - DNA, 25 bp, Homo sapien
tccttagtacattagcacatccctg

SEQ ID NO: 150626 - DNA, 25 bp, Homo sapien
cagtgcctaatatacagtggtagcc

SEQ ID NO: 150627 - DNA, 25 bp, Homo sapien
ggtccagaaacagcaagctagaaga

SEQ ID NO: 150628 - DNA, 25 bp, Homo sapien
tttttttggtccagaaacagcaagc

SEQ ID NO: 150629 - DNA, 25 bp, Homo sapien
tccagaaacagcaagctagaagagt

SEQ ID NO: 150630 - DNA, 25 bp, Homo sapien
tttttggtccagaaacagcaagcta

SEQ ID NO: 150631 - DNA, 25 bp, Homo sapien
agggtagttaatttgataatagacg

SEQ ID NO: 150632 - DNA, 25 bp, Homo sapien
gggaatcaataatatccatagaaaa

SEQ ID NO: 150633 - DNA, 25 bp, Homo sapien
aataatatccatagaaaagtgctca

SEQ ID NO: 150634 - DNA, 25 bp, Homo sapien
ggtagttaatttgataatagacgtc

SEQ ID NO: 150635 - DNA, 25 bp, Homo sapien
cagcactgcatcaatctggtgaaca

SEQ ID NO: 150636 - DNA, 25 bp, Homo sapien
ggtgagacaacagcactgcatcaat

SEQ ID NO: 150637 - DNA, 25 bp, Homo sapien
ccaactttccgacagcatacgggag

SEQ ID NO: 150638 - DNA, 25 bp, Homo sapien
ggcaccaaggtggagaggatcaggg

SEQ ID NO: 150639 - DNA, 25 bp, Homo sapien
gttgcatagatagcacagttcagac

SEQ ID NO: 150640 - DNA, 25 bp, Homo sapien
aaacaggaatggttgcatagatagc

SEQ ID NO: 150641 - DNA, 25 bp, Homo sapien
aatggttgcatagatagcacagttc

SEQ ID NO: 150642 - DNA, 25 bp, Homo sapien
caggaatggttgcatagatagcaca

SEQ ID NO: 150643 - DNA, 25 bp, Homo sapien
gtaaaatcttctgtattgtgtcgag

SEQ ID NO: 150644 - DNA, 25 bp, Homo sapien
taaaatcttctgtattgtgtcgaga

SEQ ID NO: 150645 - DNA, 25 bp, Homo sapien
acaatctgagagaattttagctgct

SEQ ID NO: 150646 - DNA, 25 bp, Homo sapien
tcacaatctgagagaattttagctg

SEQ ID NO: 150647 - DNA, 25 bp, Homo sapien
ctgctgtattttatcaaaggctgca

SEQ ID NO: 150648 - DNA, 25 bp, Homo sapien
ctgagagaattttagctgctgtatt

SEQ ID NO: 150649 - DNA, 25 bp, Homo sapien
gaagtcaactgcataaacaatttct

SEQ ID NO: 150650 - DNA, 25 bp, Homo sapien
tccacctatcatatgaccagctggc

SEQ ID NO: 150651 - DNA, 25 bp, Homo sapien
tctccatctttgactattttccata

SEQ ID NO: 150652 - DNA, 25 bp, Homo sapien
ccagctggcagaggtgtgatagaca

SEQ ID NO: 150653 - DNA, 25 bp, Homo sapien
gcacctgaggcctgactgccctcag

SEQ ID NO: 150654 - DNA, 25 bp, Homo sapien
aatcacaagaaacacctgcacctga

SEQ ID NO: 150655 - DNA, 25 bp, Homo sapien
acctgcacctgaggcctgactgccc

SEQ ID NO: 150656 - DNA, 25 bp, Homo sapien
ctgcacctgaggcctgactgccctc

SEQ ID NO: 150657 - DNA, 25 bp, Homo sapien
gggaaggcctgcttagcatttccag

SEQ ID NO: 150658 - DNA, 25 bp, Homo sapien
ttcttctaggctgtacatatgtagc

SEQ ID NO: 150659 - DNA, 25 bp, Homo sapien
tgaatgaatctgtgataagtaggga

SEQ ID NO: 150660 - DNA, 25 bp, Homo sapien
taggctgtacatatgtagcattgaa

SEQ ID NO: 150661 - DNA, 25 bp, Homo sapien
gttgagcaagttccaaaactctgcc

SEQ ID NO: 150662 - DNA, 25 bp, Homo sapien
catttccatcacctcgaagtgtttc

SEQ ID NO: 150663 - DNA, 25 bp, Homo sapien
caagaagttgagcaagttccaaaac

SEQ ID NO: 150664 - DNA, 25 bp, Homo sapien
ccatcacctcgaagtgtttccagga

SEQ ID NO: 150665 - DNA, 25 bp, Homo sapien
cacattgtaactgacattatttagg

SEQ ID NO: 150666 - DNA, 25 bp, Homo sapien
gaaaactccaccacattgtaactga

SEQ ID NO: 150667 - DNA, 25 bp, Homo sapien
tgggacttagaaaactccaccacat

SEQ ID NO: 150668 - DNA, 25 bp, Homo sapien
gccaatgagtaaacacccaatcctg

SEQ ID NO: 150669 - DNA, 25 bp, Homo sapien
ggtcctgacaccactgaataaagag

SEQ ID NO: 150670 - DNA, 25 bp, Homo sapien
aaaatccgcattccaggtcaggttg

SEQ ID NO: 150671 - DNA, 25 bp, Homo sapien
tagggctaggtacacgggccaagtc

SEQ ID NO: 150672 - DNA, 25 bp, Homo sapien
gaaacgtgctaaagtcccaggagta

SEQ ID NO: 150673 - DNA, 25 bp, Homo sapien
taagaagcctgtgtaagtagcatgg

SEQ ID NO: 150674 - DNA, 25 bp, Homo sapien
gatcctgatgcaccgtagggcatag

SEQ ID NO: 150675 - DNA, 25 bp, Homo sapien
ggagccatttaagcaagtgaatgac

SEQ ID NO: 150676 - DNA, 25 bp, Homo sapien
tctctgggagctgttatccaatagg

SEQ ID NO: 150677 - DNA, 25 bp, Homo sapien
caacctattaatccttcgttgttca

SEQ ID NO: 150678 - DNA, 25 bp, Homo sapien
taaaaacagttagcaacctacatag

SEQ ID NO: 150679 - DNA, 25 bp, Homo sapien
tatttggcatctcacatttgcctaa

SEQ ID NO: 150680 - DNA, 25 bp, Homo sapien
ttacctctgtgatttagtttatgcc

SEQ ID NO: 150681 - DNA, 25 bp, Homo sapien
tcactctgttgcctacgatgagtgc

SEQ ID NO: 150682 - DNA, 25 bp, Homo sapien
cagtggcatgatcactgctcactgc

SEQ ID NO: 150683 - DNA, 25 bp, Homo sapien
tggcatgatcactgctcactgcagc

SEQ ID NO: 150684 - DNA, 25 bp, Homo sapien
tctgttgcctacgatgagtgcagtg

SEQ ID NO: 150685 - DNA, 25 bp, Homo sapien
ttttgactgctcaagctttttggca

SEQ ID NO: 150686 - DNA, 25 bp, Homo sapien
tcttttgactgctcaagctttttgg

SEQ ID NO: 150687 - DNA, 25 bp, Homo sapien
tttcccttcaagcttcacacgtttc

SEQ ID NO: 150688 - DNA, 25 bp, Homo sapien
tctttcccttcaagcttcacacgtt

SEQ ID NO: 150689 - DNA, 25 bp, Homo sapien
gctgatggctggtcaatatcttcct

SEQ ID NO: 150690 - DNA, 25 bp, Homo sapien
ctttacgactgccttcacctttcat

SEQ ID NO: 150691 - DNA, 25 bp, Homo sapien
ttcatcatcaagtcatgcttcgtct

SEQ ID NO: 150692 - DNA, 25 bp, Homo sapien
tctcatcactggaatctatatctgc

SEQ ID NO: 150693 - DNA, 25 bp, Homo sapien
aaatgcaatcaccagccatccaaag

SEQ ID NO: 150694 - DNA, 25 bp, Homo sapien
aaaagtcttgatcacgtgatcatgt

SEQ ID NO: 150695 - DNA, 25 bp, Homo sapien
caaatttgcaattacaacatgtgat

SEQ ID NO: 150696 - DNA, 25 bp, Homo sapien
gatttcactcatgctatctcacatt

SEQ ID NO: 150697 - DNA, 25 bp, Homo sapien
gaaatacatttagtaggaacatcag

SEQ ID NO: 150698 - DNA, 25 bp, Homo sapien
ttatttcaatagactctgttgtaga

SEQ ID NO: 150699 - DNA, 25 bp, Homo sapien
aatcctgatccataggttcatctcc

SEQ ID NO: 150700 - DNA, 25 bp, Homo sapien
gctctggcactaagaaatcctctgg

SEQ ID NO: 150701 - DNA, 25 bp, Homo sapien
catagtctatgtaggtaacccgggc

SEQ ID NO: 150702 - DNA, 25 bp, Homo sapien
ttttttaatggaatccccatcagag

SEQ ID NO: 150703 - DNA, 25 bp, Homo sapien
cagagcgtccttcatagtctatgta

SEQ ID NO: 150704 - DNA, 25 bp, Homo sapien
ggaatccccatcagagcgtccttca

SEQ ID NO: 150705 - DNA, 25 bp, Homo sapien
taatatctttcccaccaaaggcgcg

SEQ ID NO: 150706 - DNA, 25 bp, Homo sapien
ggcgcgacagcactctgccagatct

SEQ ID NO: 150707 - DNA, 25 bp, Homo sapien
cttgactggcctctggtgggccatg

SEQ ID NO: 150708 - DNA, 25 bp, Homo sapien
tgtgagtttcactagtggcatcaac

SEQ ID NO: 150709 - DNA, 25 bp, Homo sapien
ttttcatcatctccgaacagacttt

SEQ ID NO: 150710 - DNA, 25 bp, Homo sapien
gggagcttccacttgcatctctgag

SEQ ID NO: 150711 - DNA, 25 bp, Homo sapien
tggaaactctcatatctaagacacc

SEQ ID NO: 150712 - DNA, 25 bp, Homo sapien
tgtgctataacgctagaatctgagg

SEQ ID NO: 150713 - DNA, 25 bp, Homo sapien
ggttccaaagtaggaatgatctcac

SEQ ID NO: 150714 - DNA, 25 bp, Homo sapien
caagggttccaaagtaggaatgatc

SEQ ID NO: 150715 - DNA, 25 bp, Homo sapien
agggttccaaagtaggaatgatctc

SEQ ID NO: 150716 - DNA, 25 bp, Homo sapien
gttccaaagtaggaatgatctcact

SEQ ID NO: 150717 - DNA, 25 bp, Homo sapien
taaaatactacattatctctaagag

SEQ ID NO: 150718 - DNA, 25 bp, Homo sapien
gtaaaatactacattatctctaaga

SEQ ID NO: 150719 - DNA, 25 bp, Homo sapien
aagactgtaaatcacattccaagtt

SEQ ID NO: 150720 - DNA, 25 bp, Homo sapien
cacattccaagttgttattctaaat

SEQ ID NO: 150721 - DNA, 25 bp, Homo sapien
gattgttgcaaacaagtacacctcc

SEQ ID NO: 150722 - DNA, 25 bp, Homo sapien
tctgcggactgctacttgattgttg

SEQ ID NO: 150723 - DNA, 25 bp, Homo sapien
atcccctcccgtaagagaacttgct

SEQ ID NO: 150724 - DNA, 25 bp, Homo sapien
acttgcttgaagtctgacagccttg

SEQ ID NO: 150725 - DNA, 25 bp, Homo sapien
gctctgattcacagcatatggatat

SEQ ID NO: 150726 - DNA, 25 bp, Homo sapien
cagacgtatgtgttcaattcagccc

SEQ ID NO: 150727 - DNA, 25 bp, Homo sapien
taagcctttgaggtcatgatcatga

SEQ ID NO: 150728 - DNA, 25 bp, Homo sapien
tatgattggtcaggacatgggttgc

SEQ ID NO: 150729 - DNA, 25 bp, Homo sapien
ctaatccaatgcgtccagtttccgt

SEQ ID NO: 150730 - DNA, 25 bp, Homo sapien
ggtctcttatcctataaaaatcttg

SEQ ID NO: 150731 - DNA, 25 bp, Homo sapien
catattgttcatataaaaggtctct

SEQ ID NO: 150732 - DNA, 25 bp, Homo sapien
aaaaatcttgacaaaggcagccttc

SEQ ID NO: 150733 - DNA, 25 bp, Homo sapien
tattcaagtaaaaagcccttctaga

SEQ ID NO: 150734 - DNA, 25 bp, Homo sapien
caactcttgggcctgtacacctgtt

SEQ ID NO: 150735 - DNA, 25 bp, Homo sapien
cttagaaaggtcaagcagatacttc

SEQ ID NO: 150736 - DNA, 25 bp, Homo sapien
cccttctagagaacaaggagtctgt

SEQ ID NO: 150737 - DNA, 25 bp, Homo sapien
tgatattactgggttgttccacaca

SEQ ID NO: 150738 - DNA, 25 bp, Homo sapien
gtataaaatccaaccactgcttggg

SEQ ID NO: 150739 - DNA, 25 bp, Homo sapien
ggtggttagtcacaagaaagacgca

SEQ ID NO: 150740 - DNA, 25 bp, Homo sapien
tgggtgaccttaggagacagcaagc

SEQ ID NO: 150741 - DNA, 25 bp, Homo sapien
tagcacagccatcttaaggcaatac

SEQ ID NO: 150742 - DNA, 25 bp, Homo sapien
gcagatatcagttgatagtccacgt

SEQ ID NO: 150743 - DNA, 25 bp, Homo sapien
gaaaattccgtctacagtcatacca

SEQ ID NO: 150744 - DNA, 25 bp, Homo sapien
tcctgttcataggacaaggtgaggc

SEQ ID NO: 150745 - DNA, 25 bp, Homo sapien
actggtagtgggtatggtgtttctt

SEQ ID NO: 150746 - DNA, 25 bp, Homo sapien
gatgaaagtgttctgggattatata

SEQ ID NO: 150747 - DNA, 25 bp, Homo sapien
gcatgaggagtgactggtagtgggt

SEQ ID NO: 150748 - DNA, 25 bp, Homo sapien
tctgggattatatagtggtaatagt

SEQ ID NO: 150749 - DNA, 25 bp, Homo sapien
gaaagaggctccacatcatcagtca

SEQ ID NO: 150750 - DNA, 25 bp, Homo sapien
cacccacactatgatgactaaaatt

SEQ ID NO: 150751 - DNA, 25 bp, Homo sapien
aatggaaccctcaaacacatgctgg

SEQ ID NO: 150752 - DNA, 25 bp, Homo sapien
tccattcggtggaataatattcagt

SEQ ID NO: 150753 - DNA, 25 bp, Homo sapien
tggcaataactgatccagacaagga

SEQ ID NO: 150754 - DNA, 25 bp, Homo sapien
taaatgcgtgcttcatcctgattgg

SEQ ID NO: 150755 - DNA, 25 bp, Homo sapien
gaaaaaattgacatgatgtgcctcc

SEQ ID NO: 150756 - DNA, 25 bp, Homo sapien
cattctacaaagtacctggcctgca

SEQ ID NO: 150757 - DNA, 25 bp, Homo sapien
tggatgaggtaacaagcatagacgc

SEQ ID NO: 150758 - DNA, 25 bp, Homo sapien
tgggagaacgcacagtggcaatgct

SEQ ID NO: 150759 - DNA, 25 bp, Homo sapien
tgccatctgagccaaaagtgccttc

SEQ ID NO: 150760 - DNA, 25 bp, Homo sapien
caggtgctgtcatggatcgaggaaa

SEQ ID NO: 150761 - DNA, 25 bp, Homo sapien
tcagctttaggtactcattgaggaa

SEQ ID NO: 150762 - DNA, 25 bp, Homo sapien
ccattgtatactggcactgaggaca

SEQ ID NO: 150763 - DNA, 25 bp, Homo sapien
taaggattttcgtgtgacatccata

SEQ ID NO: 150764 - DNA, 25 bp, Homo sapien
gcagacctgggttagaatctttcct

SEQ ID NO: 150765 - DNA, 25 bp, Homo sapien
gcagactccagatctcgtggcccat

SEQ ID NO: 150766 - DNA, 25 bp, Homo sapien
cattcagctgaagcaaagcagcatt

SEQ ID NO: 150767 - DNA, 25 bp, Homo sapien
ttcagctgaagcaaagcagcattgc

SEQ ID NO: 150768 - DNA, 25 bp, Homo sapien
tgggtcccataaccagatcgcagac

SEQ ID NO: 150769 - DNA, 25 bp, Homo sapien
tggcatataaacataagcatcaagg

SEQ ID NO: 150770 - DNA, 25 bp, Homo sapien
atagttagcacaccaaccacctagg

SEQ ID NO: 150771 - DNA, 25 bp, Homo sapien
ggatctcttgacctgtcacagggca

SEQ ID NO: 150772 - DNA, 25 bp, Homo sapien
gggagcatgttaatacttcttgttc

SEQ ID NO: 150773 - DNA, 25 bp, Homo sapien
ttgcagcgaactcagacagcagata

SEQ ID NO: 150774 - DNA, 25 bp, Homo sapien
cagcgaactcagacagcagatagaa

SEQ ID NO: 150775 - DNA, 25 bp, Homo sapien
actgtaattgcagcgaactcagaca

SEQ ID NO: 150776 - DNA, 25 bp, Homo sapien
taattgcagcgaactcagacagcag

SEQ ID NO: 150777 - DNA, 25 bp, Homo sapien
ggcgcatgttcccaagtgagccttt

SEQ ID NO: 150778 - DNA, 25 bp, Homo sapien
tgttcccaagtgagcctttacaatg

SEQ ID NO: 150779 - DNA, 25 bp, Homo sapien
tgagcctttacaatggtgatgagca

SEQ ID NO: 150780 - DNA, 25 bp, Homo sapien
caagtgagcctttacaatggtgatg

SEQ ID NO: 150781 - DNA, 25 bp, Homo sapien
caggagccaggctaaagtgggctcc

SEQ ID NO: 150782 - DNA, 25 bp, Homo sapien
ctggccagcgcaagcgtgcacagga

SEQ ID NO: 150783 - DNA, 25 bp, Homo sapien
cacaggctggccagcgcaagcgtgc

SEQ ID NO: 150784 - DNA, 25 bp, Homo sapien
ggagccaggctaaagtgggctccat

SEQ ID NO: 150785 - DNA, 25 bp, Homo sapien
tcatggtggaatcatagaatcagca

SEQ ID NO: 150786 - DNA, 25 bp, Homo sapien
tagaatcagcatcagtctcatcaag

SEQ ID NO: 150787 - DNA, 25 bp, Homo sapien
agaatcagcatcagtctcatcaaga

SEQ ID NO: 150788 - DNA, 25 bp, Homo sapien
tggtggaatcatagaatcagcatca

SEQ ID NO: 150789 - DNA, 25 bp, Homo sapien
gtgttctttggcaacgcccactgcg

SEQ ID NO: 150790 - DNA, 25 bp, Homo sapien
gacttcacacagtctccggaacatc

SEQ ID NO: 150791 - DNA, 25 bp, Homo sapien
aacgtcggcctcgtgttctttggca

SEQ ID NO: 150792 - DNA, 25 bp, Homo sapien
cccaacgtcggcctcgtgttctttg

SEQ ID NO: 150793 - DNA, 25 bp, Homo sapien
tatcatcttcctttgggactcccac

SEQ ID NO: 150794 - DNA, 25 bp, Homo sapien
actgaggatagaggctttatcatct

SEQ ID NO: 150795 - DNA, 25 bp, Homo sapien
atcatcttcctttgggactcccact

SEQ ID NO: 150796 - DNA, 25 bp, Homo sapien
gaggatagaggctttatcatcttcc

SEQ ID NO: 150797 - DNA, 25 bp, Homo sapien
tggggtcccctgattgagcctggtc

SEQ ID NO: 150798 - DNA, 25 bp, Homo sapien
ggtggaagataaagcccagactcct

SEQ ID NO: 150799 - DNA, 25 bp, Homo sapien
gtctccagcccatggaagccagcgg

SEQ ID NO: 150800 - DNA, 25 bp, Homo sapien
gaagcaggcacactgacggtaacaa

SEQ ID NO: 150801 - DNA, 25 bp, Homo sapien
ccatggaagccagcggccggaagca

SEQ ID NO: 150802 - DNA, 25 bp, Homo sapien
gcacactgacggtaacaagcaacat

SEQ ID NO: 150803 - DNA, 25 bp, Homo sapien
tgttccaagtttggaacaaaattgc

SEQ ID NO: 150804 - DNA, 25 bp, Homo sapien
gtaaaaacgttctatggctgccctg

SEQ ID NO: 150805 - DNA, 25 bp, Homo sapien
ggtaagaagtagaacggtgctgccc

SEQ ID NO: 150806 - DNA, 25 bp, Homo sapien
tgactaacccagtagccacatgcag

SEQ ID NO: 150807 - DNA, 25 bp, Homo sapien
gctatcaagtccttaacacgtggct

SEQ ID NO: 150808 - DNA, 25 bp, Homo sapien
gggccagagagacaagcatggacaa

SEQ ID NO: 150809 - DNA, 25 bp, Homo sapien
tggacaaactaggtttgctaaggga

SEQ ID NO: 150810 - DNA, 25 bp, Homo sapien
gaccttggggtatagcactttctct

SEQ ID NO: 150811 - DNA, 25 bp, Homo sapien
gtgcaaaatcaatgagggagggcat

SEQ ID NO: 150812 - DNA, 25 bp, Homo sapien
tcagtggggagacccaatgggccat

SEQ ID NO: 150813 - DNA, 25 bp, Homo sapien
ggcatcagtggggagacccaatggg

SEQ ID NO: 150814 - DNA, 25 bp, Homo sapien
catcagtggggagacccaatgggcc

SEQ ID NO: 150815 - DNA, 25 bp, Homo sapien
ctggcatcagtggggagacccaatg

SEQ ID NO: 150816 - DNA, 25 bp, Homo sapien
cccagaatttgaccctcttacacat

SEQ ID NO: 150817 - DNA, 25 bp, Homo sapien
ccaaggttaccagtggcctgtgaat

SEQ ID NO: 150818 - DNA, 25 bp, Homo sapien
ggcctgtgaatacatctcccagaat

SEQ ID NO: 150819 - DNA, 25 bp, Homo sapien
tctcccagaatttgaccctcttaca

SEQ ID NO: 150820 - DNA, 25 bp, Homo sapien
gctctctggtgtaaaccgctttaaa

SEQ ID NO: 150821 - DNA, 25 bp, Homo sapien
tctcctttctggtcggctctctggt

SEQ ID NO: 150822 - DNA, 25 bp, Homo sapien
cgcttcccagggcttgctggtttgg

SEQ ID NO: 150823 - DNA, 25 bp, Homo sapien
ggttttgtatctctcctttctggtc

SEQ ID NO: 150824 - DNA, 25 bp, Homo sapien
gggaaccagagagatctgcgggccc

SEQ ID NO: 150825 - DNA, 25 bp, Homo sapien
gaaccagagagatctgcgggcccca

SEQ ID NO: 150826 - DNA, 25 bp, Homo sapien
aggggaaccagagagatctgcgggc

SEQ ID NO: 150827 - DNA, 25 bp, Homo sapien
accagagagatctgcgggccccaca

SEQ ID NO: 150828 - DNA, 25 bp, Homo sapien
ggcttgcaccaagccaacacgagct

SEQ ID NO: 150829 - DNA, 25 bp, Homo sapien
tccttcagggctctcggggctgttg

SEQ ID NO: 150830 - DNA, 25 bp, Homo sapien
cacgagcttggacccgctgggacca

SEQ ID NO: 150831 - DNA, 25 bp, Homo sapien
ctgttggggatctgcgaggccgcga

SEQ ID NO: 150832 - DNA, 25 bp, Homo sapien
gctggacgcgcggtacctgagaccc

SEQ ID NO: 150833 - DNA, 25 bp, Homo sapien
ccagccggcgatgttcccctgcttc

SEQ ID NO: 150834 - DNA, 25 bp, Homo sapien
tcctccaagtttggcggcggccgcc

SEQ ID NO: 150835 - DNA, 25 bp, Homo sapien
gcggcgagcaggctcgacgtcggcc

SEQ ID NO: 150836 - DNA, 25 bp, Homo sapien
gcccccgcgccccgcgccgccgcgc

SEQ ID NO: 150837 - DNA, 25 bp, Homo sapien
agtgcgcccccgcgccccgcgccgc

SEQ ID NO: 150838 - DNA, 25 bp, Homo sapien
ccgcgccccgcgccgccgcgcccac

SEQ ID NO: 150839 - DNA, 25 bp, Homo sapien
gcgcccccgcgccccgcgccgccgc

SEQ ID NO: 150840 - DNA, 25 bp, Homo sapien
gcagtcccggcgctagagccgctac

SEQ ID NO: 150841 - DNA, 25 bp, Homo sapien
gcgctagagccgctacctgcccgct

SEQ ID NO: 150842 - DNA, 25 bp, Homo sapien
cagggctggcgcagtcccggcgcta

SEQ ID NO: 150843 - DNA, 25 bp, Homo sapien
ggctggcgcagtcccggcgctagag

SEQ ID NO: 150844 - DNA, 25 bp, Homo sapien
ccgtggcgaggaggcgacgccggca

SEQ ID NO: 150845 - DNA, 25 bp, Homo sapien
tggcgaggaggcgacgccggcacgg

SEQ ID NO: 150846 - DNA, 25 bp, Homo sapien
gcgaggaggcgacgccggcacggtg

SEQ ID NO: 150847 - DNA, 25 bp, Homo sapien
gctccgtggcgaggaggcgacgccg

SEQ ID NO: 150848 - DNA, 25 bp, Homo sapien
agtcccgcgcgccgcgtgcgcgctg

SEQ ID NO: 150849 - DNA, 25 bp, Homo sapien
gagtcccgcgcgccgcgtgcgcgct

SEQ ID NO: 150850 - DNA, 25 bp, Homo sapien
cgggccaaagcctcatggcccgagg

SEQ ID NO: 150851 - DNA, 25 bp, Homo sapien
tggagcaggcggtgcgcgactcaga

SEQ ID NO: 150852 - DNA, 25 bp, Homo sapien
gcgaggagctccgggccaaagcctc

SEQ ID NO: 150853 - DNA, 25 bp, Homo sapien
gcgactcagaggcgaggagctccgg

SEQ ID NO: 150854 - DNA, 25 bp, Homo sapien
agagtgcaatcagtggccgagcggc

SEQ ID NO: 150855 - DNA, 25 bp, Homo sapien
agtgcaatcagtggccgagcggcgc

SEQ ID NO: 150856 - DNA, 25 bp, Homo sapien
cttcagcggccagagtgcaatcagt

SEQ ID NO: 150857 - DNA, 25 bp, Homo sapien
gcaatcagtggccgagcggcgctgg

SEQ ID NO: 150858 - DNA, 25 bp, Homo sapien
tcgcctcctgcgaactttgagcggc

SEQ ID NO: 150859 - DNA, 25 bp, Homo sapien
ctcgcctcctgcgaactttgagcgg

SEQ ID NO: 150860 - DNA, 25 bp, Homo sapien
ctctcgcctcctgcgaactttgagc

SEQ ID NO: 150861 - DNA, 25 bp, Homo sapien
cgcctcctgcgaactttgagcggcc

SEQ ID NO: 150862 - DNA, 25 bp, Homo sapien
gcacacgaagccgacttgctgcggc

SEQ ID NO: 150863 - DNA, 25 bp, Homo sapien
cgaagccgacttgctgcggcagcat

SEQ ID NO: 150864 - DNA, 25 bp, Homo sapien
acacgaagccgacttgctgcggcag

SEQ ID NO: 150865 - DNA, 25 bp, Homo sapien
gcgcacacgaagccgacttgctgcg

SEQ ID NO: 150866 - DNA, 25 bp, Homo sapien
agccgccccgagactccccagccaa

SEQ ID NO: 150867 - DNA, 25 bp, Homo sapien
cagccgccccgagactccccagcca

SEQ ID NO: 150868 - DNA, 25 bp, Homo sapien
gccgccccgagactccccagccaaa

SEQ ID NO: 150869 - DNA, 25 bp, Homo sapien
gaggggactggatgaacccttggga

SEQ ID NO: 150870 - DNA, 25 bp, Homo sapien
ggactggatgaacccttgggaccaa

SEQ ID NO: 150871 - DNA, 25 bp, Homo sapien
gcccggcggggaggggactggatga

SEQ ID NO: 150872 - DNA, 25 bp, Homo sapien
ctgcccggcggggaggggactggat

SEQ ID NO: 150873 - DNA, 25 bp, Homo sapien
ccatcagctcttctgggcgcgctct

SEQ ID NO: 150874 - DNA, 25 bp, Homo sapien
cccaggggccgctcgtagctcaggg

SEQ ID NO: 150875 - DNA, 25 bp, Homo sapien
atcagctcttctgggcgcgctctac

SEQ ID NO: 150876 - DNA, 25 bp, Homo sapien
tgcagccgcgtcctgagccccccca

SEQ ID NO: 150877 - DNA, 25 bp, Homo sapien
ggcaggacacgtttgctagcagaag

SEQ ID NO: 150878 - DNA, 25 bp, Homo sapien
gacacgtttgctagcagaagctgtt

SEQ ID NO: 150879 - DNA, 25 bp, Homo sapien
ctatttctccacgtgtctggcagga

SEQ ID NO: 150880 - DNA, 25 bp, Homo sapien
tgtctggcaggacacgtttgctagc

SEQ ID NO: 150881 - DNA, 25 bp, Homo sapien
agttcttggctgtctgtgtcccatt

SEQ ID NO: 150882 - DNA, 25 bp, Homo sapien
ttcttggctgtctgtgtcccattca

SEQ ID NO: 150883 - DNA, 25 bp, Homo sapien
tggctgtctgtgtcccattcactgg

SEQ ID NO: 150884 - DNA, 25 bp, Homo sapien
caggatctgtgcagttcttggctgt

SEQ ID NO: 150885 - DNA, 25 bp, Homo sapien
agcctggctgatgagaggagacacc

SEQ ID NO: 150886 - DNA, 25 bp, Homo sapien
accagcctggctgatgagaggagac

SEQ ID NO: 150887 - DNA, 25 bp, Homo sapien
tcagtcggcccacatgtccaccagc

SEQ ID NO: 150888 - DNA, 25 bp, Homo sapien
agtcggcccacatgtccaccagcct

SEQ ID NO: 150889 - DNA, 25 bp, Homo sapien
tatttgagtctgggaggacataagg

SEQ ID NO: 150890 - DNA, 25 bp, Homo sapien
tttgagtctgggaggacataaggtt

SEQ ID NO: 150891 - DNA, 25 bp, Homo sapien
agtctgggaggacataaggttgggc

SEQ ID NO: 150892 - DNA, 25 bp, Homo sapien
ctgggaggacataaggttgggccgg

SEQ ID NO: 150893 - DNA, 25 bp, Homo sapien
gtttccaccggcagttctctttggc

SEQ ID NO: 150894 - DNA, 25 bp, Homo sapien
aggtttccaccggcagttctctttg

SEQ ID NO: 150895 - DNA, 25 bp, Homo sapien
tccaggtttccaccggcagttctct

SEQ ID NO: 150896 - DNA, 25 bp, Homo sapien
caggtttccaccggcagttctcttt

SEQ ID NO: 150897 - DNA, 25 bp, Homo sapien
gacacagctcgagtaagtctcaaga

SEQ ID NO: 150898 - DNA, 25 bp, Homo sapien
caggagatctgattctttctggcaa

SEQ ID NO: 150899 - DNA, 25 bp, Homo sapien
tctgaattgtgccagtcggccacag

SEQ ID NO: 150900 - DNA, 25 bp, Homo sapien
gaaacatcaagttgcccctcgttgg

SEQ ID NO: 150901 - DNA, 25 bp, Homo sapien
gctgagcgcctcgtcttctcgggtg

SEQ ID NO: 150902 - DNA, 25 bp, Homo sapien
agtttgaagagcatgcctgatcccg

SEQ ID NO: 150903 - DNA, 25 bp, Homo sapien
tcattaactagagcttggcacaagc

SEQ ID NO: 150904 - DNA, 25 bp, Homo sapien
ttaaaacccactggcgtgctccaag

SEQ ID NO: 150905 - DNA, 25 bp, Homo sapien
caatgctccaatcgcctggtgaggt

SEQ ID NO: 150906 - DNA, 25 bp, Homo sapien
tataagccaacgacggcacacagtc

SEQ ID NO: 150907 - DNA, 25 bp, Homo sapien
cagtgtgtgccaggcaatataagcc

SEQ ID NO: 150908 - DNA, 25 bp, Homo sapien
ttgccctccgggcgctctggagaca

SEQ ID NO: 150909 - DNA, 25 bp, Homo sapien
cccagaaccatgcttcgatctctag

SEQ ID NO: 150910 - DNA, 25 bp, Homo sapien
caggaacggtgaggtaacagtcaca

SEQ ID NO: 150911 - DNA, 25 bp, Homo sapien
ctcaggaacggtgaggtaacagtca

SEQ ID NO: 150912 - DNA, 25 bp, Homo sapien
agaaccatgcttcgatctctaggac

SEQ ID NO: 150913 - DNA, 25 bp, Homo sapien
tcagactccgatctccaatgcggag

SEQ ID NO: 150914 - DNA, 25 bp, Homo sapien
ttagtatactaagggcacaaatata

SEQ ID NO: 150915 - DNA, 25 bp, Homo sapien
aatgcggagcatcatgagaaaatgc

SEQ ID NO: 150916 - DNA, 25 bp, Homo sapien
tatactaagggcacaaatataaaat

SEQ ID NO: 150917 - DNA, 25 bp, Homo sapien
gggataggaaaggggagacgccaga

SEQ ID NO: 150918 - DNA, 25 bp, Homo sapien
ggataggaaaggggagacgccagag

SEQ ID NO: 150919 - DNA, 25 bp, Homo sapien
agggataggaaaggggagacgccag

SEQ ID NO: 150920 - DNA, 25 bp, Homo sapien
gagggataggaaaggggagacgcca

SEQ ID NO: 150921 - DNA, 25 bp, Homo sapien
cttcggatgcagagcaccccgtttt

SEQ ID NO: 150922 - DNA, 25 bp, Homo sapien
ccagcctgttctgccttcggatgca

SEQ ID NO: 150923 - DNA, 25 bp, Homo sapien
tttttgcttcgagcgccatgtcctc

SEQ ID NO: 150924 - DNA, 25 bp, Homo sapien
tctggcccttggatctgctctcggt

SEQ ID NO: 150925 - DNA, 25 bp, Homo sapien
gctctgctccgctgaaagcatgctg

SEQ ID NO: 150926 - DNA, 25 bp, Homo sapien
cgccacggcgagtgtggtccagcca

SEQ ID NO: 150927 - DNA, 25 bp, Homo sapien
gtccagccaggcatggcttgggacc

SEQ ID NO: 150928 - DNA, 25 bp, Homo sapien
gctgaagatcttcccgcggaaatgc

SEQ ID NO: 150929 - DNA, 25 bp, Homo sapien
tactggagagttacagagtgtgtca

SEQ ID NO: 150930 - DNA, 25 bp, Homo sapien
cagatttaaaccaacacggtccttg

SEQ ID NO: 150931 - DNA, 25 bp, Homo sapien
cccctgaagtaggatacttgatcat

SEQ ID NO: 150932 - DNA, 25 bp, Homo sapien
gaagtaggatacttgatcatcctca

SEQ ID NO: 150933 - DNA, 25 bp, Homo sapien
tagtatgtggaccactctaggtcac

SEQ ID NO: 150934 - DNA, 25 bp, Homo sapien
ccactctaggtcacttgaaagagct

SEQ ID NO: 150935 - DNA, 25 bp, Homo sapien
tttgatcatagtatgtggaccactc

SEQ ID NO: 150936 - DNA, 25 bp, Homo sapien
tgtggaccactctaggtcacttgaa

SEQ ID NO: 150937 - DNA, 25 bp, Homo sapien
gctttagctgcagttgccaacacac

SEQ ID NO: 150938 - DNA, 25 bp, Homo sapien
ttgcagagataggagagctttagct

SEQ ID NO: 150939 - DNA, 25 bp, Homo sapien
gataggagagctttagctgcagttg

SEQ ID NO: 150940 - DNA, 25 bp, Homo sapien
atgtttgcagagataggagagcttt

SEQ ID NO: 150941 - DNA, 25 bp, Homo sapien
gctccacggtgacgctctgaattag

SEQ ID NO: 150942 - DNA, 25 bp, Homo sapien
acggtgacgctctgaattagtgctg

SEQ ID NO: 150943 - DNA, 25 bp, Homo sapien
gctctgaattagtgctgcccgttca

SEQ ID NO: 150944 - DNA, 25 bp, Homo sapien
acaaaaagctccacggtgacgctct

SEQ ID NO: 150945 - DNA, 25 bp, Homo sapien
ctccttattggagaacagatctgtg

SEQ ID NO: 150946 - DNA, 25 bp, Homo sapien
cagatctgtggggaactcgtgaatc

SEQ ID NO: 150947 - DNA, 25 bp, Homo sapien
tgtcgctccttattggagaacagat

SEQ ID NO: 150948 - DNA, 25 bp, Homo sapien
tccgtgctgtcgctccttattggag

SEQ ID NO: 150949 - DNA, 25 bp, Homo sapien
tctctagagacggaacaaagaagtc

SEQ ID NO: 150950 - DNA, 25 bp, Homo sapien
caaagaagtcatcgcacactatggc

SEQ ID NO: 150951 - DNA, 25 bp, Homo sapien
tcatcgcacactatggccaaggcat

SEQ ID NO: 150952 - DNA, 25 bp, Homo sapien
tcacagatcttctctagagacggaa

SEQ ID NO: 150953 - DNA, 25 bp, Homo sapien
tgacaagcgtctggatggaggcgag

SEQ ID NO: 150954 - DNA, 25 bp, Homo sapien
gaggcgagcacatggctccatctga

SEQ ID NO: 150955 - DNA, 25 bp, Homo sapien
cacgtttgccaggtcaccgcttggg

SEQ ID NO: 150956 - DNA, 25 bp, Homo sapien
cacacgtttgccaggtcaccgcttg

SEQ ID NO: 150957 - DNA, 25 bp, Homo sapien
cgcaaacagctctggcgttgagctt

SEQ ID NO: 150958 - DNA, 25 bp, Homo sapien
tccagccacatcttcgctcagatgg

SEQ ID NO: 150959 - DNA, 25 bp, Homo sapien
ccacatcttcgctcagatggagtct

SEQ ID NO: 150960 - DNA, 25 bp, Homo sapien
agctctggcgttgagcttcctgcag

SEQ ID NO: 150961 - DNA, 25 bp, Homo sapien
cccgacgtccccatgggtgatgaac

SEQ ID NO: 150962 - DNA, 25 bp, Homo sapien
ccaccccgacgtccccatgggtgat

SEQ ID NO: 150963 - DNA, 25 bp, Homo sapien
accccgacgtccccatgggtgatga

SEQ ID NO: 150964 - DNA, 25 bp, Homo sapien
ccccgacgtccccatgggtgatgaa

SEQ ID NO: 150965 - DNA, 25 bp, Homo sapien
tccaattatgcacaggatgttgaac

SEQ ID NO: 150966 - DNA, 25 bp, Homo sapien
caattatgcacaggatgttgaacac

SEQ ID NO: 150967 - DNA, 25 bp, Homo sapien
aattatgcacaggatgttgaacaca

SEQ ID NO: 150968 - DNA, 25 bp, Homo sapien
ttatgcacaggatgttgaacacagc

SEQ ID NO: 150969 - DNA, 25 bp, Homo sapien
gccagcagagccccgtcgttggctg

SEQ ID NO: 150970 - DNA, 25 bp, Homo sapien
agtacacggagtctcggcacacggc

SEQ ID NO: 150971 - DNA, 25 bp, Homo sapien
gtgtagtacacggagtctcggcaca

SEQ ID NO: 150972 - DNA, 25 bp, Homo sapien
atggtgtagtacacggagtctcggc

SEQ ID NO: 150973 - DNA, 25 bp, Homo sapien
acggcccaccacgtcagacggacca

SEQ ID NO: 150974 - DNA, 25 bp, Homo sapien
acacaatttgttcatcatatatgaa

SEQ ID NO: 150975 - DNA, 25 bp, Homo sapien
cacacaatttgttcatcatatatga

SEQ ID NO: 150976 - DNA, 25 bp, Homo sapien
aacacatacaagatgatgagcacca

SEQ ID NO: 150977 - DNA, 25 bp, Homo sapien
aaaacacatacaagatgatgagcac

SEQ ID NO: 150978 - DNA, 25 bp, Homo sapien
tcatgatcagaatataaaacacata

SEQ ID NO: 150979 - DNA, 25 bp, Homo sapien
ataaaacacatacaagatgatgagc

SEQ ID NO: 150980 - DNA, 25 bp, Homo sapien
ttgaccgggttaccgtttgcaatgc

SEQ ID NO: 150981 - DNA, 25 bp, Homo sapien
ttgtttgactgtgaaaaaggcttgc

SEQ ID NO: 150982 - DNA, 25 bp, Homo sapien
cgggttaccgtttgcaatgctcttt

SEQ ID NO: 150983 - DNA, 25 bp, Homo sapien
tgcaatgctcttttgtttgactgtg

SEQ ID NO: 150984 - DNA, 25 bp, Homo sapien
tggcacggaagggtcatcatagcta

SEQ ID NO: 150985 - DNA, 25 bp, Homo sapien
gggtcatcatagctaccgtcataga

SEQ ID NO: 150986 - DNA, 25 bp, Homo sapien
tagctaccgtcatagaaatcattac

SEQ ID NO: 150987 - DNA, 25 bp, Homo sapien
ccccagcaatggcacggaagggtca

SEQ ID NO: 150988 - DNA, 25 bp, Homo sapien
agaacaagggtgtgtgcccatgccc

SEQ ID NO: 150989 - DNA, 25 bp, Homo sapien
gcaccatatatacgacagggcagca

SEQ ID NO: 150990 - DNA, 25 bp, Homo sapien
gtctgtgagacaagagccaggcctc

SEQ ID NO: 150991 - DNA, 25 bp, Homo sapien
caaggaagtgctactgtcacaggca

SEQ ID NO: 150992 - DNA, 25 bp, Homo sapien
taaccagcgaataggtccggagagc

SEQ ID NO: 150993 - DNA, 25 bp, Homo sapien
tatctaagccttaccagggcagcca

SEQ ID NO: 150994 - DNA, 25 bp, Homo sapien
gcactgggccggtatccttgggaat

SEQ ID NO: 150995 - DNA, 25 bp, Homo sapien
ggcactggctctgaacttcctacga

SEQ ID NO: 150996 - DNA, 25 bp, Homo sapien
gcgcaacaccgtgattagtgctgat

SEQ ID NO: 150997 - DNA, 25 bp, Homo sapien
gttgagcgcaacaccgtgattagtg

SEQ ID NO: 150998 - DNA, 25 bp, Homo sapien
aacaccgtgattagtgctgatctct

SEQ ID NO: 150999 - DNA, 25 bp, Homo sapien
ctgttgagcgcaacaccgtgattag

SEQ ID NO: 151000 - DNA, 25 bp, Homo sapien
atcctgctggccatccgtagtcggg

SEQ ID NO: 151001 - DNA, 25 bp, Homo sapien
ggtgatcatgattcgtaagcctgct

SEQ ID NO: 151002 - DNA, 25 bp, Homo sapien
gtcctgggtccaaacttattggtga

SEQ ID NO: 151003 - DNA, 25 bp, Homo sapien
tggagctcataatctcgtccaccat

SEQ ID NO: 151004 - DNA, 25 bp, Homo sapien
ttcctactgccagctcgacaaccca

SEQ ID NO: 151005 - DNA, 25 bp, Homo sapien
ggaaaactttgaggatttatcagag

SEQ ID NO: 151006 - DNA, 25 bp, Homo sapien
tgacagccatcattcggggctctcc

SEQ ID NO: 151007 - DNA, 25 bp, Homo sapien
tttgaggatttatcagagggcctgg

SEQ ID NO: 151008 - DNA, 25 bp, Homo sapien
cctgattctgctgagggtcttcggg

SEQ ID NO: 151009 - DNA, 25 bp, Homo sapien
caccattggccgagttgatcagtct

SEQ ID NO: 151010 - DNA, 25 bp, Homo sapien
caatgttctcgtgcctcccgttttg

SEQ ID NO: 151011 - DNA, 25 bp, Homo sapien
tcccgttttgaagcggcttactgct

SEQ ID NO: 151012 - DNA, 25 bp, Homo sapien
tgcgcagttctaggaatgacagtgt

SEQ ID NO: 151013 - DNA, 25 bp, Homo sapien
cagttctaggaatgacagtgtgttc

SEQ ID NO: 151014 - DNA, 25 bp, Homo sapien
gcaggtgcgcagttctaggaatgac

SEQ ID NO: 151015 - DNA, 25 bp, Homo sapien
gtgtgttctaggaatgacagtgagg

SEQ ID NO: 151016 - DNA, 25 bp, Homo sapien
gggatgcagataaatgcagtagaca

SEQ ID NO: 151017 - DNA, 25 bp, Homo sapien
gcccctactatgtggccagtcctgg

SEQ ID NO: 151018 - DNA, 25 bp, Homo sapien
taaatgcagtagacaaaagtacctg

SEQ ID NO: 151019 - DNA, 25 bp, Homo sapien
aagcccctactatgtggccagtcct

SEQ ID NO: 151020 - DNA, 25 bp, Homo sapien
acctggaaacacatccgcagacgca

SEQ ID NO: 151021 - DNA, 25 bp, Homo sapien
gccattcgtggtttccagggacaac

SEQ ID NO: 151022 - DNA, 25 bp, Homo sapien
gaagcagctgtacaactccgttccc

SEQ ID NO: 151023 - DNA, 25 bp, Homo sapien
cgcagacgcacaaaggaggtttccc

SEQ ID NO: 151024 - DNA, 25 bp, Homo sapien
tcccggctggaccagatcttgaggg

SEQ ID NO: 151025 - DNA, 25 bp, Homo sapien
ctctgggctggtgctttgggactct

SEQ ID NO: 151026 - DNA, 25 bp, Homo sapien
ccggctggaccagatcttgagggta

SEQ ID NO: 151027 - DNA, 25 bp, Homo sapien
gctggaccagatcttgagggtattc

SEQ ID NO: 151028 - DNA, 25 bp, Homo sapien
tgtgtataaagcaccctgtctcggc

SEQ ID NO: 151029 - DNA, 25 bp, Homo sapien
aagcaccctgtctcggctgggcatg

SEQ ID NO: 151030 - DNA, 25 bp, Homo sapien
aatgacttaatgtgtataaagcacc

SEQ ID NO: 151031 - DNA, 25 bp, Homo sapien
taatgggtttaatgacttaatgtgt

SEQ ID NO: 151032 - DNA, 25 bp, Homo sapien
tgttcaggaccctgacacgtggtcc

SEQ ID NO: 151033 - DNA, 25 bp, Homo sapien
tggtcccgggcaggtctttatctcc

SEQ ID NO: 151034 - DNA, 25 bp, Homo sapien
cactcccagcatgtactatattggc

SEQ ID NO: 151035 - DNA, 25 bp, Homo sapien
ttgctggcatgcgaagatctgttgg

SEQ ID NO: 151036 - DNA, 25 bp, Homo sapien
cagtcgagtgacacagggatcctgt

SEQ ID NO: 151037 - DNA, 25 bp, Homo sapien
tatgcttcctcgctgaagcagctgc

SEQ ID NO: 151038 - DNA, 25 bp, Homo sapien
tcacacaggcacagtcgagtgacac

SEQ ID NO: 151039 - DNA, 25 bp, Homo sapien
atcctgtgtatgcttcctcgctgaa

SEQ ID NO: 151040 - DNA, 25 bp, Homo sapien
tgcaccagtgtggaccatacaatta

SEQ ID NO: 151041 - DNA, 25 bp, Homo sapien
cacagctggtaacagctcctggtgc

SEQ ID NO: 151042 - DNA, 25 bp, Homo sapien
ctctcctgactgggttgcaaacaca

SEQ ID NO: 151043 - DNA, 25 bp, Homo sapien
gtgtggaccatacaattagcaggtg

SEQ ID NO: 151044 - DNA, 25 bp, Homo sapien
ccacgtggccagtgtcacggcccac

SEQ ID NO: 151045 - DNA, 25 bp, Homo sapien
acgtggccagtgtcacggcccacca

SEQ ID NO: 151046 - DNA, 25 bp, Homo sapien
cgtggccagtgtcacggcccaccat

SEQ ID NO: 151047 - DNA, 25 bp, Homo sapien
cacgtggccagtgtcacggcccacc

SEQ ID NO: 151048 - DNA, 25 bp, Homo sapien
catgatgtaggagaacacagcgatc

SEQ ID NO: 151049 - DNA, 25 bp, Homo sapien
gggccaggtgaacacccacttgacc

SEQ ID NO: 151050 - DNA, 25 bp, Homo sapien
cgatccacagcgtggcggtgatgaa

SEQ ID NO: 151051 - DNA, 25 bp, Homo sapien
ctgcagttgggaatggtgacgcaca

SEQ ID NO: 151052 - DNA, 25 bp, Homo sapien
tttgggatacagagctctaagccgg

SEQ ID NO: 151053 - DNA, 25 bp, Homo sapien
catggaacgtttactggccctgctg

SEQ ID NO: 151054 - DNA, 25 bp, Homo sapien
taacgactggatgcttctgacacag

SEQ ID NO: 151055 - DNA, 25 bp, Homo sapien
tcagcgctgttctcatgtgatccag

SEQ ID NO: 151056 - DNA, 25 bp, Homo sapien
tgccaggaaagtaatgcccatgatg

SEQ ID NO: 151057 - DNA, 25 bp, Homo sapien
gatgacatccgggatcccaagtgtg

SEQ ID NO: 151058 - DNA, 25 bp, Homo sapien
ccaagtgtgtatccgataatagtca

SEQ ID NO: 151059 - DNA, 25 bp, Homo sapien
tggccatgcagtctggaacacttgt

SEQ ID NO: 151060 - DNA, 25 bp, Homo sapien
gcgggaacatgcagcaactgttgtg

SEQ ID NO: 151061 - DNA, 25 bp, Homo sapien
tcagtgtccggtaagatgcgggaac

SEQ ID NO: 151062 - DNA, 25 bp, Homo sapien
ttaggagtggcgtctctgggaacct

SEQ ID NO: 151063 - DNA, 25 bp, Homo sapien
actgttgtggcccagttagttgcac

SEQ ID NO: 151064 - DNA, 25 bp, Homo sapien
gtcaaacacgttgcttcctatggtg

SEQ ID NO: 151065 - DNA, 25 bp, Homo sapien
ttaacaaccatggtctgcaggcccc

SEQ ID NO: 151066 - DNA, 25 bp, Homo sapien
cttcctatggtgttggagactgcca

SEQ ID NO: 151067 - DNA, 25 bp, Homo sapien
ataattaacaaccatggtctgcagg

SEQ ID NO: 151068 - DNA, 25 bp, Homo sapien
ccagcccccggctgttgatcttcac

SEQ ID NO: 151069 - DNA, 25 bp, Homo sapien
agagcccagcaacaggaccacggaa

SEQ ID NO: 151070 - DNA, 25 bp, Homo sapien
agcccagcaacaggaccacggaata

SEQ ID NO: 151071 - DNA, 25 bp, Homo sapien
ccacggaatagaccagcccccggct

SEQ ID NO: 151072 - DNA, 25 bp, Homo sapien
tgagccccgatttcttctgcaatgg

SEQ ID NO: 151073 - DNA, 25 bp, Homo sapien
tcagcaaaagcacagcgagagtgcc

SEQ ID NO: 151074 - DNA, 25 bp, Homo sapien
tagggaggcctcaattattccgacg

SEQ ID NO: 151075 - DNA, 25 bp, Homo sapien
tcacgtaagtgacgaggcggaatca

SEQ ID NO: 151076 - DNA, 25 bp, Homo sapien
ctaaggacagaccaacctgggttca

SEQ ID NO: 151077 - DNA, 25 bp, Homo sapien
tccctgatccttctatctttccttc

SEQ ID NO: 151078 - DNA, 25 bp, Homo sapien
cttgtccctcgatcaaggcttcctg

SEQ ID NO: 151079 - DNA, 25 bp, Homo sapien
tcctccttgtccctcgatcaaggct

SEQ ID NO: 151080 - DNA, 25 bp, Homo sapien
tcctccctgatccttctatctttcc

SEQ ID NO: 151081 - DNA, 25 bp, Homo sapien
cctgtgcttcagagcgtggaaccat

SEQ ID NO: 151082 - DNA, 25 bp, Homo sapien
tggaaccatggtcttttcccttgtc

SEQ ID NO: 151083 - DNA, 25 bp, Homo sapien
tttccaaggctcctatggacccctg

SEQ ID NO: 151084 - DNA, 25 bp, Homo sapien
tcctcccggctggtcgtaggcatgt

SEQ ID NO: 151085 - DNA, 25 bp, Homo sapien
gggaaacctagaacattctgcagaa

SEQ ID NO: 151086 - DNA, 25 bp, Homo sapien
ttgaccagaataagccctagagggc

SEQ ID NO: 151087 - DNA, 25 bp, Homo sapien
tactggaaagcgacacctatgtggg

SEQ ID NO: 151088 - DNA, 25 bp, Homo sapien
gggcttagacttgccccatgaaagg

SEQ ID NO: 151089 - DNA, 25 bp, Homo sapien
tcggcaagttgacgaaggtaaagac

SEQ ID NO: 151090 - DNA, 25 bp, Homo sapien
tggcgtagagaaccagcacgtagac

SEQ ID NO: 151091 - DNA, 25 bp, Homo sapien
cgtcttcccggcacatcggcaagtt

SEQ ID NO: 151092 - DNA, 25 bp, Homo sapien
gagaagcacaagaagatggcgtaga

SEQ ID NO: 151093 - DNA, 25 bp, Homo sapien
gatgtgaatcccaaatagaagcctg

SEQ ID NO: 151094 - DNA, 25 bp, Homo sapien
gactggccattgaactagagaccct

SEQ ID NO: 151095 - DNA, 25 bp, Homo sapien
ttggcctgccacgtgtagaaactac

SEQ ID NO: 151096 - DNA, 25 bp, Homo sapien
tgtgaaagaacggacagtggctgcc

SEQ ID NO: 151097 - DNA, 25 bp, Homo sapien
cctgcgtagtgatgaaagcgtaatt

SEQ ID NO: 151098 - DNA, 25 bp, Homo sapien
taaattgcctatttctgtagcagag

SEQ ID NO: 151099 - DNA, 25 bp, Homo sapien
tataggcattttccatctgagtgca

SEQ ID NO: 151100 - DNA, 25 bp, Homo sapien
taaccacgcttgacctggtgaggca

SEQ ID NO: 151101 - DNA, 25 bp, Homo sapien
cacggtgtgctgaaaggaggaccac

SEQ ID NO: 151102 - DNA, 25 bp, Homo sapien
gttcccatggaaatcacgtcttgag

SEQ ID NO: 151103 - DNA, 25 bp, Homo sapien
tggacttactgccacccaagagctg

SEQ ID NO: 151104 - DNA, 25 bp, Homo sapien
agaagtttctatgggcacggtgtgc

SEQ ID NO: 151105 - DNA, 25 bp, Homo sapien
gatgatcctgctttgcccattagag

SEQ ID NO: 151106 - DNA, 25 bp, Homo sapien
gaagcagccaattcccagacctgta

SEQ ID NO: 151107 - DNA, 25 bp, Homo sapien
tttaacagagactatggcacctggg

SEQ ID NO: 151108 - DNA, 25 bp, Homo sapien
gacaactggacactgacaccgtgag

SEQ ID NO: 151109 - DNA, 25 bp, Homo sapien
tctacttcctgtatcggagcgagcg

SEQ ID NO: 151110 - DNA, 25 bp, Homo sapien
ttctacttcctgtatcggagcgagc

SEQ ID NO: 151111 - DNA, 25 bp, Homo sapien
ggggaacggaggcgctcaggcgccg

SEQ ID NO: 151112 - DNA, 25 bp, Homo sapien
cggggaacggaggcgctcaggcgcc

SEQ ID NO: 151113 - DNA, 25 bp, Homo sapien
cgggacggggaacggaggcgctcag

SEQ ID NO: 151114 - DNA, 25 bp, Homo sapien
acggggaacggaggcgctcaggcgc

SEQ ID NO: 151115 - DNA, 25 bp, Homo sapien
gcgggcgccccggcgtgtcggatca

SEQ ID NO: 151116 - DNA, 25 bp, Homo sapien
cgggcgccccggcgtgtcggatcat

SEQ ID NO: 151117 - DNA, 25 bp, Homo sapien
ccagttcttcccaccggatggtatt

SEQ ID NO: 151118 - DNA, 25 bp, Homo sapien
cagagagtttaaataaccgacccag

SEQ ID NO: 151119 - DNA, 25 bp, Homo sapien
tggatcacactaggtcatctctggg

SEQ ID NO: 151120 - DNA, 25 bp, Homo sapien
tgcagaggtcgctttcgagagaaag

SEQ ID NO: 151121 - DNA, 25 bp, Homo sapien
gtgtcccgcgaaccgctcactgagg

SEQ ID NO: 151122 - DNA, 25 bp, Homo sapien
gaaaaggggctacttgtggcagctg

SEQ ID NO: 151123 - DNA, 25 bp, Homo sapien
actggagtgtgtcccgcgaaccgct

SEQ ID NO: 151124 - DNA, 25 bp, Homo sapien
cagaactggagtgtgtcccgcgaac

SEQ ID NO: 151125 - DNA, 25 bp, Homo sapien
ccgtgtagctcagaggctgctgggc

SEQ ID NO: 151126 - DNA, 25 bp, Homo sapien
catgggccgtgtagctcagaggctg

SEQ ID NO: 151127 - DNA, 25 bp, Homo sapien
tgtagctcagaggctgctgggccat

SEQ ID NO: 151128 - DNA, 25 bp, Homo sapien
atgggccgtgtagctcagaggctgc

SEQ ID NO: 151129 - DNA, 25 bp, Homo sapien
aactgtcctttcgaacacttcaatg

SEQ ID NO: 151130 - DNA, 25 bp, Homo sapien
tggaaactgtcctttcgaacacttc

SEQ ID NO: 151131 - DNA, 25 bp, Homo sapien
gaaactgtcctttcgaacacttcaa

SEQ ID NO: 151132 - DNA, 25 bp, Homo sapien
tcttggaaactgtcctttcgaacac

SEQ ID NO: 151133 - DNA, 25 bp, Homo sapien
caacctgtggcagcccatacattcc

SEQ ID NO: 151134 - DNA, 25 bp, Homo sapien
ctgtggcagcccatacattccaccg

SEQ ID NO: 151135 - DNA, 25 bp, Homo sapien
agcccatacattccaccgtggcccc

SEQ ID NO: 151136 - DNA, 25 bp, Homo sapien
tggcagcccatacattccaccgtgg

SEQ ID NO: 151137 - DNA, 25 bp, Homo sapien
gcccccgctcagccactgtggttga

SEQ ID NO: 151138 - DNA, 25 bp, Homo sapien
ggcccccgctcagccactgtggttg

SEQ ID NO: 151139 - DNA, 25 bp, Homo sapien
cccccgctcagccactgtggttgaa

SEQ ID NO: 151140 - DNA, 25 bp, Homo sapien
tggctcccaccacgccagacccacc

SEQ ID NO: 151141 - DNA, 25 bp, Homo sapien
ctgtttgtggatacatgcacacacc

SEQ ID NO: 151142 - DNA, 25 bp, Homo sapien
acacaccaaactcaggaagatggct

SEQ ID NO: 151143 - DNA, 25 bp, Homo sapien
tgcacacaccaaactcaggaagatg

SEQ ID NO: 151144 - DNA, 25 bp, Homo sapien
tacatgcacacaccaaactcaggaa

SEQ ID NO: 151145 - DNA, 25 bp, Homo sapien
gcaaaagcattagaccagacacaga

SEQ ID NO: 151146 - DNA, 25 bp, Homo sapien
tccttggcaagaataaatgggccca

SEQ ID NO: 151147 - DNA, 25 bp, Homo sapien
gagggtctgcaggaatccacagaga

SEQ ID NO: 151148 - DNA, 25 bp, Homo sapien
taaagaatccggtccagtcccttca

SEQ ID NO: 151149 - DNA, 25 bp, Homo sapien
ggtcaccaggaaaatatgagtgtcc

SEQ ID NO: 151150 - DNA, 25 bp, Homo sapien
accaggaaaatatgagtgtcccggg

SEQ ID NO: 151151 - DNA, 25 bp, Homo sapien
tcaccaggaaaatatgagtgtcccg

SEQ ID NO: 151152 - DNA, 25 bp, Homo sapien
aagaaggagccaggtcaccaggaaa

SEQ ID NO: 151153 - DNA, 25 bp, Homo sapien
tccagggcatgtgctgtaaggagcc

SEQ ID NO: 151154 - DNA, 25 bp, Homo sapien
agggatcaaggttggcattggttcc

SEQ ID NO: 151155 - DNA, 25 bp, Homo sapien
gggatcaaggttggcattggttcca

SEQ ID NO: 151156 - DNA, 25 bp, Homo sapien
atccagggcatgtgctgtaaggagc

SEQ ID NO: 151157 - DNA, 25 bp, Homo sapien
tattcagcatgaggtagtcagtggc

SEQ ID NO: 151158 - DNA, 25 bp, Homo sapien
ttattcagcatgaggtagtcagtgg

SEQ ID NO: 151159 - DNA, 25 bp, Homo sapien
attcagcatgaggtagtcagtggcc

SEQ ID NO: 151160 - DNA, 25 bp, Homo sapien
tccaggatgctgatgccccggcggt

SEQ ID NO: 151161 - DNA, 25 bp, Homo sapien
ccacaccgggcatgttttgatgagc

SEQ ID NO: 151162 - DNA, 25 bp, Homo sapien
gctggcagacaaagccgcatgccat

SEQ ID NO: 151163 - DNA, 25 bp, Homo sapien
accacccggtgcaggatcctggcca

SEQ ID NO: 151164 - DNA, 25 bp, Homo sapien
gaacgagtccattcgccatctgagc

SEQ ID NO: 151165 - DNA, 25 bp, Homo sapien
tcgtccgaggtgaacgagtccattc

SEQ ID NO: 151166 - DNA, 25 bp, Homo sapien
gagccctgtacttatacgtctggac

SEQ ID NO: 151167 - DNA, 25 bp, Homo sapien
gtccattcgccatctgagccctgta

SEQ ID NO: 151168 - DNA, 25 bp, Homo sapien
ctagtaattccgattttcaggtaca

SEQ ID NO: 151169 - DNA, 25 bp, Homo sapien
tcaggtacaactggcgacttgatgc

SEQ ID NO: 151170 - DNA, 25 bp, Homo sapien
caactggcgacttgatgcattttac

SEQ ID NO: 151171 - DNA, 25 bp, Homo sapien
gattttcaggtacaactggcgactt

SEQ ID NO: 151172 - DNA, 25 bp, Homo sapien
tgcctacctgacagaaatcgctgag

SEQ ID NO: 151173 - DNA, 25 bp, Homo sapien
tgttgtgaagcaaagcgccttgcca

SEQ ID NO: 151174 - DNA, 25 bp, Homo sapien
tgaaaatgggaacacactaatgcct

SEQ ID NO: 151175 - DNA, 25 bp, Homo sapien
tccggcccggtgtctgtatctttag

SEQ ID NO: 151176 - DNA, 25 bp, Homo sapien
gtgtccccaggtcatactccaaggg

SEQ ID NO: 151177 - DNA, 25 bp, Homo sapien
catgatggctgttacaagtgagtac

SEQ ID NO: 151178 - DNA, 25 bp, Homo sapien
tgcccatgatggctgttacaagtga

SEQ ID NO: 151179 - DNA, 25 bp, Homo sapien
tcgctgatcgagtgtccccaggtca

SEQ ID NO: 151180 - DNA, 25 bp, Homo sapien
aggcaccaggactggtatcactcag

SEQ ID NO: 151181 - DNA, 25 bp, Homo sapien
gcaccaggactggtatcactcagtc

SEQ ID NO: 151182 - DNA, 25 bp, Homo sapien
ggcaccaggactggtatcactcagt

SEQ ID NO: 151183 - DNA, 25 bp, Homo sapien
ggcaagaggaggcgaatgcaagatt

SEQ ID NO: 151184 - DNA, 25 bp, Homo sapien
agggcaagaggaggcgaatgcaaga

SEQ ID NO: 151185 - DNA, 25 bp, Homo sapien
caagaggaggcgaatgcaagattat

SEQ ID NO: 151186 - DNA, 25 bp, Homo sapien
agaggaggcgaatgcaagattataa

SEQ ID NO: 151187 - DNA, 25 bp, Homo sapien
ctcacaaactgtgcccgtgggctca

SEQ ID NO: 151188 - DNA, 25 bp, Homo sapien
tacatctcacaaactgtgcccgtgg

SEQ ID NO: 151189 - DNA, 25 bp, Homo sapien
tctcgattacatctcacaaactgtg

SEQ ID NO: 151190 - DNA, 25 bp, Homo sapien
agcatcttctcgattacatctcaca

SEQ ID NO: 151191 - DNA, 25 bp, Homo sapien
ctggtgatatcccaattctgctgcc

SEQ ID NO: 151192 - DNA, 25 bp, Homo sapien
ttgctctggtgatatcccaattctg

SEQ ID NO: 151193 - DNA, 25 bp, Homo sapien
tgctctggtgatatcccaattctgc

SEQ ID NO: 151194 - DNA, 25 bp, Homo sapien
ctctggtgatatcccaattctgctg

SEQ ID NO: 151195 - DNA, 25 bp, Homo sapien
aaaactaggtgtctggccaaggttg

SEQ ID NO: 151196 - DNA, 25 bp, Homo sapien
gaaggacttggtccatgtcttcccc

SEQ ID NO: 151197 - DNA, 25 bp, Homo sapien
caagcttctgggttagcgtttggaa

SEQ ID NO: 151198 - DNA, 25 bp, Homo sapien
gatatctgagtgtccgtctgaacca

SEQ ID NO: 151199 - DNA, 25 bp, Homo sapien
ggttctgctccagtgagggtcccga

SEQ ID NO: 151200 - DNA, 25 bp, Homo sapien
tccagtgagggtcccgaaggcaagc

SEQ ID NO: 151201 - DNA, 25 bp, Homo sapien
catggggagcgggattctgctgcct

SEQ ID NO: 151202 - DNA, 25 bp, Homo sapien
ctgctccagtgagggtcccgaaggc

SEQ ID NO: 151203 - DNA, 25 bp, Homo sapien
ccagcatgttgacggacactcgctt

SEQ ID NO: 151204 - DNA, 25 bp, Homo sapien
tgttgacggacactcgcttctcctt

SEQ ID NO: 151205 - DNA, 25 bp, Homo sapien
gagccagcatgttgacggacactcg

SEQ ID NO: 151206 - DNA, 25 bp, Homo sapien
gcatgttgacggacactcgcttctc

SEQ ID NO: 151207 - DNA, 25 bp, Homo sapien
taagggtattggaggcacagagtcc

SEQ ID NO: 151208 - DNA, 25 bp, Homo sapien
gatgcagctccgtgaattaaagatt

SEQ ID NO: 151209 - DNA, 25 bp, Homo sapien
ggctagggagatcaaggatgcctca

SEQ ID NO: 151210 - DNA, 25 bp, Homo sapien
tgaggaggacaaccacgagatggaa

SEQ ID NO: 151211 - DNA, 25 bp, Homo sapien
gccgagctttcgttcagagaaggaa

SEQ ID NO: 151212 - DNA, 25 bp, Homo sapien
tgctgtcccggcgaaccaggaacat

SEQ ID NO: 151213 - DNA, 25 bp, Homo sapien
taatggtgtattcgagcacctcggc

SEQ ID NO: 151214 - DNA, 25 bp, Homo sapien
aaggaaagtggacacagagcaccag

SEQ ID NO: 151215 - DNA, 25 bp, Homo sapien
gacactaggactcaagggtgcagac

SEQ ID NO: 151216 - DNA, 25 bp, Homo sapien
gcgtccctgcattgagctaacaaga

SEQ ID NO: 151217 - DNA, 25 bp, Homo sapien
gctgctgccgcgtggtcaaagtgaa

SEQ ID NO: 151218 - DNA, 25 bp, Homo sapien
tctgtggttagaaggtgcagcctct

SEQ ID NO: 151219 - DNA, 25 bp, Homo sapien
tgcccagcgagttgtgttttatcca

SEQ ID NO: 151220 - DNA, 25 bp, Homo sapien
gtgatgtctgtttcccataccagtg

SEQ ID NO: 151221 - DNA, 25 bp, Homo sapien
tatactgcacagcaagtgatgtctg

SEQ ID NO: 151222 - DNA, 25 bp, Homo sapien
tccttatagcaggaaaggtaacctg

SEQ ID NO: 151223 - DNA, 25 bp, Homo sapien
gtagacacacgaaccctttccagtg

SEQ ID NO: 151224 - DNA, 25 bp, Homo sapien
gcaggagaaaacagcgggattcaaa

SEQ ID NO: 151225 - DNA, 25 bp, Homo sapien
tctcaactgctgtgtcaaggaggag

SEQ ID NO: 151226 - DNA, 25 bp, Homo sapien
tggccacagtgtctaaagtcctaag

SEQ ID NO: 151227 - DNA, 25 bp, Homo sapien
gttagggttgtttgttaccacagca

SEQ ID NO: 151228 - DNA, 25 bp, Homo sapien
gactagcccaagctgactgcttcag

SEQ ID NO: 151229 - DNA, 25 bp, Homo sapien
gccagctgcacactcattttacttt

SEQ ID NO: 151230 - DNA, 25 bp, Homo sapien
tccgtggatgtggaaaccacaggtt

SEQ ID NO: 151231 - DNA, 25 bp, Homo sapien
aacatgtctgatgtcacaaggtgac

SEQ ID NO: 151232 - DNA, 25 bp, Homo sapien
caagattaccacgatgccatcagta

SEQ ID NO: 151233 - DNA, 25 bp, Homo sapien
ccagaactgccagcctttctaaagc

SEQ ID NO: 151234 - DNA, 25 bp, Homo sapien
ccttactttttatggactgaaactg

SEQ ID NO: 151235 - DNA, 25 bp, Homo sapien
cctggcccaactccagtgttggagg

SEQ ID NO: 151236 - DNA, 25 bp, Homo sapien
tccatctctgtcaaaacttcttcct

SEQ ID NO: 151237 - DNA, 25 bp, Homo sapien
tgcctctgaggccatgtgttctaga

SEQ ID NO: 151238 - DNA, 25 bp, Homo sapien
cttgcctctgaggccatgtgttcta

SEQ ID NO: 151239 - DNA, 25 bp, Homo sapien
tccactgtccctatgttcccgtttc

SEQ ID NO: 151240 - DNA, 25 bp, Homo sapien
cctcctttaagttgggcaggatggc

SEQ ID NO: 151241 - DNA, 25 bp, Homo sapien
ggaagatagcatcaagccatgaggg

SEQ ID NO: 151242 - DNA, 25 bp, Homo sapien
tctaaatcctatgggtaagtctcag

SEQ ID NO: 151243 - DNA, 25 bp, Homo sapien
gaagcacggtgctcgtatcagctca

SEQ ID NO: 151244 - DNA, 25 bp, Homo sapien
ctggggagacacaagaagggccctg

SEQ ID NO: 151245 - DNA, 25 bp, Homo sapien
caatcaatctgaagatgtcctcaaa

SEQ ID NO: 151246 - DNA, 25 bp, Homo sapien
tcaaacacaagagccgagccttcca

SEQ ID NO: 151247 - DNA, 25 bp, Homo sapien
acagtagaacgcaatcaatctgaag

SEQ ID NO: 151248 - DNA, 25 bp, Homo sapien
ctactgacacagtagaacgcaatca

SEQ ID NO: 151249 - DNA, 25 bp, Homo sapien
aatcacaagctacctcccatgaagg

SEQ ID NO: 151250 - DNA, 25 bp, Homo sapien
tggtccacgcaggactccaggctgt

SEQ ID NO: 151251 - DNA, 25 bp, Homo sapien
tgtcaaggtcccgtagcttaagtca

SEQ ID NO: 151252 - DNA, 25 bp, Homo sapien
tgttgctgcccctacaggaagtttc

SEQ ID NO: 151253 - DNA, 25 bp, Homo sapien
aatcagtcagaaacgaaacattggt

SEQ ID NO: 151254 - DNA, 25 bp, Homo sapien
ggtacctcattatggctgcctcaca

SEQ ID NO: 151255 - DNA, 25 bp, Homo sapien
tatcccttatgacaggctctacagc

SEQ ID NO: 151256 - DNA, 25 bp, Homo sapien
gttaaagatatcattgccaggaggc

SEQ ID NO: 151257 - DNA, 25 bp, Homo sapien
gaccggccagctgacgttggcatct

SEQ ID NO: 151258 - DNA, 25 bp, Homo sapien
tgaactggaggcatagcagagcaga

SEQ ID NO: 151259 - DNA, 25 bp, Homo sapien
ctttctcaggtctcgggagtggcct

SEQ ID NO: 151260 - DNA, 25 bp, Homo sapien
gaggctccaaggctatttgctgaat

SEQ ID NO: 151261 - DNA, 25 bp, Homo sapien
cctgttctctgaagccatttcctcc

SEQ ID NO: 151262 - DNA, 25 bp, Homo sapien
ctgttctctgaagccatttcctcct

SEQ ID NO: 151263 - DNA, 25 bp, Homo sapien
gccctgttctctgaagccatttcct

SEQ ID NO: 151264 - DNA, 25 bp, Homo sapien
ctgccctgttctctgaagccatttc

SEQ ID NO: 151265 - DNA, 25 bp, Homo sapien
atggcctggggtagccgcagtgtga

SEQ ID NO: 151266 - DNA, 25 bp, Homo sapien
ccgcagtgtgaagggcagtaagtct

SEQ ID NO: 151267 - DNA, 25 bp, Homo sapien
tagccgcagtgtgaagggcagtaag

SEQ ID NO: 151268 - DNA, 25 bp, Homo sapien
gggtagccgcagtgtgaagggcagt

SEQ ID NO: 151269 - DNA, 25 bp, Homo sapien
caggttggcgatggtctcaaggtcc

SEQ ID NO: 151270 - DNA, 25 bp, Homo sapien
tatttcacatgaaggttggcagggc

SEQ ID NO: 151271 - DNA, 25 bp, Homo sapien
aagaaagcccgtgcctatttagcag

SEQ ID NO: 151272 - DNA, 25 bp, Homo sapien
tattccatgctgcaccacgtgtcag

SEQ ID NO: 151273 - DNA, 25 bp, Homo sapien
gctgactatacaaggtaacccctgg

SEQ ID NO: 151274 - DNA, 25 bp, Homo sapien
tgctgcagtcctcgatgaaaatagg

SEQ ID NO: 151275 - DNA, 25 bp, Homo sapien
gattcacaaaccacaggcggtcatt

SEQ ID NO: 151276 - DNA, 25 bp, Homo sapien
caggcacagtttgcgtcatgggctg

SEQ ID NO: 151277 - DNA, 25 bp, Homo sapien
gacagctcgatttcacaggcacagt

SEQ ID NO: 151278 - DNA, 25 bp, Homo sapien
tgcagggctgcaggggcagcactgg

SEQ ID NO: 151279 - DNA, 25 bp, Homo sapien
gggctgcaggggcagcactggggga

SEQ ID NO: 151280 - DNA, 25 bp, Homo sapien
gctgcaggggcagcactgggggagg

SEQ ID NO: 151281 - DNA, 25 bp, Homo sapien
cagggctgcaggggcagcactgggg

SEQ ID NO: 151282 - DNA, 25 bp, Homo sapien
tgtgacgtggggggcaggcactggg

SEQ ID NO: 151283 - DNA, 25 bp, Homo sapien
gcgggggcaagagcagggagcacag

SEQ ID NO: 151284 - DNA, 25 bp, Homo sapien
tgggcaaaggacaggcaggggcggg

SEQ ID NO: 151285 - DNA, 25 bp, Homo sapien
ggcatggggtgtgacgtggggggca

SEQ ID NO: 151286 - DNA, 25 bp, Homo sapien
caggcctgcagtggggcatgggagt

SEQ ID NO: 151287 - DNA, 25 bp, Homo sapien
catgggagtctctcgcaggtcatca

SEQ ID NO: 151288 - DNA, 25 bp, Homo sapien
gcaggtcatcatgggcggctggttc

SEQ ID NO: 151289 - DNA, 25 bp, Homo sapien
catgggcggctggttcggatggtct

SEQ ID NO: 151290 - DNA, 25 bp, Homo sapien
ctgcaagggactggaggctgcccct

SEQ ID NO: 151291 - DNA, 25 bp, Homo sapien
ggacctgctgcaagggactggaggc

SEQ ID NO: 151292 - DNA, 25 bp, Homo sapien
tggaggctgcccctggcttcatcgc

SEQ ID NO: 151293 - DNA, 25 bp, Homo sapien
ggaggctgcccctggcttcatcgct

SEQ ID NO: 151294 - DNA, 25 bp, Homo sapien
aaggttcttcttcgcaggcagtggc

SEQ ID NO: 151295 - DNA, 25 bp, Homo sapien
gaaggttcttcttcgcaggcagtgg

SEQ ID NO: 151296 - DNA, 25 bp, Homo sapien
gttcttcttcgcaggcagtggcggg

SEQ ID NO: 151297 - DNA, 25 bp, Homo sapien
gggaaggttcttcttcgcaggcagt

SEQ ID NO: 151298 - DNA, 25 bp, Homo sapien
ctaaggacaccctctcggaaacgcg

SEQ ID NO: 151299 - DNA, 25 bp, Homo sapien
ctcagggccgtctgaggtcccttgg

SEQ ID NO: 151300 - DNA, 25 bp, Homo sapien
gccatccccggactttggtcttcta

SEQ ID NO: 151301 - DNA, 25 bp, Homo sapien
catgctgtgaggatcgctggctttc

SEQ ID NO: 151302 - DNA, 25 bp, Homo sapien
cagttgtcgagagatccgttttttc

SEQ ID NO: 151303 - DNA, 25 bp, Homo sapien
tcagcgttctctaagggagctggga

SEQ ID NO: 151304 - DNA, 25 bp, Homo sapien
gtcgaggccagttgtcgagagatcc

SEQ ID NO: 151305 - DNA, 25 bp, Homo sapien
gcagagctcagcgttctctaaggga

SEQ ID NO: 151306 - DNA, 25 bp, Homo sapien
cccggcgtgggtgtctccaaggcca

SEQ ID NO: 151307 - DNA, 25 bp, Homo sapien
ccggcgtgggtgtctccaaggccat

SEQ ID NO: 151308 - DNA, 25 bp, Homo sapien
ctgggtggacccggcgtgggtgtct

SEQ ID NO: 151309 - DNA, 25 bp, Homo sapien
tggacccggcgtgggtgtctccaag

SEQ ID NO: 151310 - DNA, 25 bp, Homo sapien
ggtcatcatggtgcgaatctcctgc

SEQ ID NO: 151311 - DNA, 25 bp, Homo sapien
tgccaaagtacgagcccttgtcctg

SEQ ID NO: 151312 - DNA, 25 bp, Homo sapien
tggagggcttcttcttcacgctggg

SEQ ID NO: 151313 - DNA, 25 bp, Homo sapien
tgaaactggcaaagctcagccggtg

SEQ ID NO: 151314 - DNA, 25 bp, Homo sapien
aagctactgtgttcagaggcccacg

SEQ ID NO: 151315 - DNA, 25 bp, Homo sapien
cctgggaaaggaacacctgaagctc

SEQ ID NO: 151316 - DNA, 25 bp, Homo sapien
tatctgagccagcacctgatgcgga

SEQ ID NO: 151317 - DNA, 25 bp, Homo sapien
tccccgcaggcagaaacttttgagt

SEQ ID NO: 151318 - DNA, 25 bp, Homo sapien
cactttgccatatcacctgccagga

SEQ ID NO: 151319 - DNA, 25 bp, Homo sapien
ttggccttaacaggacccatggtgt

SEQ ID NO: 151320 - DNA, 25 bp, Homo sapien
cagagactcagctcatggaaagggc

SEQ ID NO: 151321 - DNA, 25 bp, Homo sapien
tcttggtgcccgaagcagatttggc

SEQ ID NO: 151322 - DNA, 25 bp, Homo sapien
ccatggagtcgtagatgagtttgca

SEQ ID NO: 151323 - DNA, 25 bp, Homo sapien
gacacatttgtacaaggcagactct

SEQ ID NO: 151324 - DNA, 25 bp, Homo sapien
taggccttgtgcatgctggtgaact

SEQ ID NO: 151325 - DNA, 25 bp, Homo sapien
tggtggtcacacctaggtcagtggt

SEQ ID NO: 151326 - DNA, 25 bp, Homo sapien
tgtctttagagggagcacagccatg

SEQ ID NO: 151327 - DNA, 25 bp, Homo sapien
caggagttcgaacccacgtctgtga

SEQ ID NO: 151328 - DNA, 25 bp, Homo sapien
gatccatgaataagcccacgcaagc

SEQ ID NO: 151329 - DNA, 25 bp, Homo sapien
tgacatcatgccagttcagggccag

SEQ ID NO: 151330 - DNA, 25 bp, Homo sapien
gccaccgtgcctagcccagtttaat

SEQ ID NO: 151331 - DNA, 25 bp, Homo sapien
caccgtgcctagcccagtttaattt

SEQ ID NO: 151332 - DNA, 25 bp, Homo sapien
ccaccgtgcctagcccagtttaatt

SEQ ID NO: 151333 - DNA, 25 bp, Homo sapien
acacagatttaaaaaaatcaacagc

SEQ ID NO: 151334 - DNA, 25 bp, Homo sapien
tgaactgtccgctgcacagatgaaa

SEQ ID NO: 151335 - DNA, 25 bp, Homo sapien
gctccttgaagctaccctgtttggt

SEQ ID NO: 151336 - DNA, 25 bp, Homo sapien
tgggtaccttatgcacagttcagct

SEQ ID NO: 151337 - DNA, 25 bp, Homo sapien
cagctatgtctgtggcccctagaga

SEQ ID NO: 151338 - DNA, 25 bp, Homo sapien
gaatcttgaccgacaatcccacgtt

SEQ ID NO: 151339 - DNA, 25 bp, Homo sapien
attttttagacaatgcggccccttg

SEQ ID NO: 151340 - DNA, 25 bp, Homo sapien
aatgtggattctgcttatggcccgt

SEQ ID NO: 151341 - DNA, 25 bp, Homo sapien
ggatttacaagcgtaagccgccgca

SEQ ID NO: 151342 - DNA, 25 bp, Homo sapien
tcaccagctgtggaccgtagcaagc

SEQ ID NO: 151343 - DNA, 25 bp, Homo sapien
tgtcagccgtcacaaacgtatgtgg

SEQ ID NO: 151344 - DNA, 25 bp, Homo sapien
gaaacggcacaggtggtcagagcca

SEQ ID NO: 151345 - DNA, 25 bp, Homo sapien
caaaaggaaaactgcgtgccccata

SEQ ID NO: 151346 - DNA, 25 bp, Homo sapien
aggcaggaagtcatccgccccatag

SEQ ID NO: 151347 - DNA, 25 bp, Homo sapien
gcacaggcaggaagtcatccgcccc

SEQ ID NO: 151348 - DNA, 25 bp, Homo sapien
ctgcgggccagcacatacatgagca

SEQ ID NO: 151349 - DNA, 25 bp, Homo sapien
gcaggaagtcatccgccccataggg

SEQ ID NO: 151350 - DNA, 25 bp, Homo sapien
ctccatcatgtactccacattgaga

SEQ ID NO: 151351 - DNA, 25 bp, Homo sapien
cattgagaagcatctccgtgaggtt

SEQ ID NO: 151352 - DNA, 25 bp, Homo sapien
catcatgtactccacattgagaagc

SEQ ID NO: 151353 - DNA, 25 bp, Homo sapien
attgagaagcatctccgtgaggttg

SEQ ID NO: 151354 - DNA, 25 bp, Homo sapien
tattccagcacttgttacgtggagg

SEQ ID NO: 151355 - DNA, 25 bp, Homo sapien
aacatgctcctatgccttctgggat

SEQ ID NO: 151356 - DNA, 25 bp, Homo sapien
gaggtggcacagtctcttgactggc

SEQ ID NO: 151357 - DNA, 25 bp, Homo sapien
cacatttgcatccatgggtccagag

SEQ ID NO: 151358 - DNA, 25 bp, Homo sapien
ctctctggggcgaatgcgttgattg

SEQ ID NO: 151359 - DNA, 25 bp, Homo sapien
gggcgaatgcgttgattggaaaaac

SEQ ID NO: 151360 - DNA, 25 bp, Homo sapien
ttttctctctggggcgaatgcgttg

SEQ ID NO: 151361 - DNA, 25 bp, Homo sapien
gcgaatgcgttgattggaaaaaccc

SEQ ID NO: 151362 - DNA, 25 bp, Homo sapien
accgtgatcttgtcgtagctcttga

SEQ ID NO: 151363 - DNA, 25 bp, Homo sapien
agctgccgggtcaccgtgatcttgt

SEQ ID NO: 151364 - DNA, 25 bp, Homo sapien
tacgccggcgctcccagcggtggat

SEQ ID NO: 151365 - DNA, 25 bp, Homo sapien
gcccgggccttgttgagagtacgcc

SEQ ID NO: 151366 - DNA, 25 bp, Homo sapien
tgatatgtttctagacgcacccaag

SEQ ID NO: 151367 - DNA, 25 bp, Homo sapien
aagcttccgtctcccaaacagtggg

SEQ ID NO: 151368 - DNA, 25 bp, Homo sapien
ccttgtggccggattgggaacagca

SEQ ID NO: 151369 - DNA, 25 bp, Homo sapien
gattagccatagtcagcctgtgtgg

SEQ ID NO: 151370 - DNA, 25 bp, Homo sapien
aagctgtctgcgagtccggcacctg

SEQ ID NO: 151371 - DNA, 25 bp, Homo sapien
cctccctggatggatagcgggtggc

SEQ ID NO: 151372 - DNA, 25 bp, Homo sapien
gagatgaattaaggcgcgtctcgga

SEQ ID NO: 151373 - DNA, 25 bp, Homo sapien
cagctgggccgacagttctgggaga

SEQ ID NO: 151374 - DNA, 25 bp, Homo sapien
tccaggtacgacacgcagatgaagt

SEQ ID NO: 151375 - DNA, 25 bp, Homo sapien
caaagtggaagtcgcgcttgggctc

SEQ ID NO: 151376 - DNA, 25 bp, Homo sapien
tagcccttgatgcagtgcggcagcg

SEQ ID NO: 151377 - DNA, 25 bp, Homo sapien
gctgcgcagcaggtagcccttgatg

SEQ ID NO: 151378 - DNA, 25 bp, Homo sapien
cgtctcggtgtctcagggctattag

SEQ ID NO: 151379 - DNA, 25 bp, Homo sapien
ttaggacttgccctcaggaagtggc

SEQ ID NO: 151380 - DNA, 25 bp, Homo sapien
gtctcttaaccgacaccctgaggtg

SEQ ID NO: 151381 - DNA, 25 bp, Homo sapien
aactgtcctgcgacgttggcctggg

SEQ ID NO: 151382 - DNA, 25 bp, Homo sapien
ttaaattctccccacacgatggctc

SEQ ID NO: 151383 - DNA, 25 bp, Homo sapien
ctggccgtgcttggcgccctggcgt

SEQ ID NO: 151384 - DNA, 25 bp, Homo sapien
cctggcgtgtgtctagctgcttctt

SEQ ID NO: 151385 - DNA, 25 bp, Homo sapien
ttattaaattctccccacacgatgg

SEQ ID NO: 151386 - DNA, 25 bp, Homo sapien
ggaaggaggtgaggctgtgaatgcg

SEQ ID NO: 151387 - DNA, 25 bp, Homo sapien
aaggaggtgaggctgtgaatgcggg

SEQ ID NO: 151388 - DNA, 25 bp, Homo sapien
gaggctgtgaatgcggggctggctg

SEQ ID NO: 151389 - DNA, 25 bp, Homo sapien
ggtgaggctgtgaatgcggggctgg

SEQ ID NO: 151390 - DNA, 25 bp, Homo sapien
atccaatacaactgatgtccttata

SEQ ID NO: 151391 - DNA, 25 bp, Homo sapien
agagacaccagggatgtgtgaacag

SEQ ID NO: 151392 - DNA, 25 bp, Homo sapien
tgtgaacagggaggaggctgagtga

SEQ ID NO: 151393 - DNA, 25 bp, Homo sapien
cctaatccaatacaactgatgtcct

SEQ ID NO: 151394 - DNA, 25 bp, Homo sapien
ggttctggtacagctttcctggaag

SEQ ID NO: 151395 - DNA, 25 bp, Homo sapien
ctgctggcttagggctgtgtgggct

SEQ ID NO: 151396 - DNA, 25 bp, Homo sapien
gttctggtacagctttcctggaagc

SEQ ID NO: 151397 - DNA, 25 bp, Homo sapien
cctgctggcttagggctgtgtgggc

SEQ ID NO: 151398 - DNA, 25 bp, Homo sapien
tgcaggacctgtaaagtactgtgcc

SEQ ID NO: 151399 - DNA, 25 bp, Homo sapien
caaagacttttcactatacatgcag

SEQ ID NO: 151400 - DNA, 25 bp, Homo sapien
gagggagaaactatctggatcatct

SEQ ID NO: 151401 - DNA, 25 bp, Homo sapien
catgcagaaatgcaagcgacccatg

SEQ ID NO: 151402 - DNA, 25 bp, Homo sapien
caagatgacttgctcgctgttacct

SEQ ID NO: 151403 - DNA, 25 bp, Homo sapien
agtgagaagtctccgctgctcgggc

SEQ ID NO: 151404 - DNA, 25 bp, Homo sapien
agagggccgcaagccccaaatggaa

SEQ ID NO: 151405 - DNA, 25 bp, Homo sapien
ttctgtagcccctctcaaaaggagt

SEQ ID NO: 151406 - DNA, 25 bp, Homo sapien
ggattagtgcagaggctgggtacag

SEQ ID NO: 151407 - DNA, 25 bp, Homo sapien
ctgaccaacagtgtgaatccccgtc

SEQ ID NO: 151408 - DNA, 25 bp, Homo sapien
gaccaacagtgtgaatccccgtctc

SEQ ID NO: 151409 - DNA, 25 bp, Homo sapien
acacccaccctgaccaacagtgtga

SEQ ID NO: 151410 - DNA, 25 bp, Homo sapien
gtgtgaatctgaatccctgtgccca

SEQ ID NO: 151411 - DNA, 25 bp, Homo sapien
ggagaggcacattcgtaagtccctt

SEQ ID NO: 151412 - DNA, 25 bp, Homo sapien
ccccactggctgtgggctagagatg

SEQ ID NO: 151413 - DNA, 25 bp, Homo sapien
tcatattggaggaagtggactttca

SEQ ID NO: 151414 - DNA, 25 bp, Homo sapien
aattcaccttatgatccagggcccc

SEQ ID NO: 151415 - DNA, 25 bp, Homo sapien
aggtgcttagggctgttgtttcagt

SEQ ID NO: 151416 - DNA, 25 bp, Homo sapien
ggtggcccatttctgcactgaattc

SEQ ID NO: 151417 - DNA, 25 bp, Homo sapien
cactgaattcaccttatgatccagg

SEQ ID NO: 151418 - DNA, 25 bp, Homo sapien
cctcatgttgagcttcgaccataac

SEQ ID NO: 151419 - DNA, 25 bp, Homo sapien
gttgagcttcgaccataacttgggt

SEQ ID NO: 151420 - DNA, 25 bp, Homo sapien
ccatgtctggccctcatgttgagct

SEQ ID NO: 151421 - DNA, 25 bp, Homo sapien
tggccctcatgttgagcttcgacca

SEQ ID NO: 151422 - DNA, 25 bp, Homo sapien
tgcatcacttggacactgactcctg

SEQ ID NO: 151423 - DNA, 25 bp, Homo sapien
ggctccactttctcgtcttttccag

SEQ ID NO: 151424 - DNA, 25 bp, Homo sapien
gattgccacagacttcatggcttga

SEQ ID NO: 151425 - DNA, 25 bp, Homo sapien
taaatcacggtgttgcctgggctgt

SEQ ID NO: 151426 - DNA, 25 bp, Homo sapien
tgaactcgaggctgagaaagagcag

SEQ ID NO: 151427 - DNA, 25 bp, Homo sapien
gagccctccctggtggtttgaaaga

SEQ ID NO: 151428 - DNA, 25 bp, Homo sapien
cacatcgggtgccttcaagtgcatg

SEQ ID NO: 151429 - DNA, 25 bp, Homo sapien
gaaggatgacgggatttccacagaa

SEQ ID NO: 151430 - DNA, 25 bp, Homo sapien
gatggaccgcatacacgacaagtgg

SEQ ID NO: 151431 - DNA, 25 bp, Homo sapien
tcatgcgccgtataacaagtttgtt

SEQ ID NO: 151432 - DNA, 25 bp, Homo sapien
aagtttgttcagtgatggaccgcat

SEQ ID NO: 151433 - DNA, 25 bp, Homo sapien
gtcatttgtaattagtcatgcgccg

SEQ ID NO: 151434 - DNA, 25 bp, Homo sapien
caaagcggtacagctcacaagtggt

SEQ ID NO: 151435 - DNA, 25 bp, Homo sapien
caaacatgctaaggagctagtcaca

SEQ ID NO: 151436 - DNA, 25 bp, Homo sapien
tctatggtgcatgaactctatctca

SEQ ID NO: 151437 - DNA, 25 bp, Homo sapien
cacaacttggtgaacatactagaaa

SEQ ID NO: 151438 - DNA, 25 bp, Homo sapien
gaaaggaagaagtactcacacatgc

SEQ ID NO: 151439 - DNA, 25 bp, Homo sapien
tggtatagccctgtaacctgagcag

SEQ ID NO: 151440 - DNA, 25 bp, Homo sapien
gactttgtgtagctcagatactcca

SEQ ID NO: 151441 - DNA, 25 bp, Homo sapien
cctgtaacctgagcagggatgaagt

SEQ ID NO: 151442 - DNA, 25 bp, Homo sapien
cattggaggctggtgaagtctgtaa

SEQ ID NO: 151443 - DNA, 25 bp, Homo sapien
cactttttccaaaaggtgtgagtgg

SEQ ID NO: 151444 - DNA, 25 bp, Homo sapien
tagccaagagtctattatattcact

SEQ ID NO: 151445 - DNA, 25 bp, Homo sapien
cattttccctcatacgaatggaccc

SEQ ID NO: 151446 - DNA, 25 bp, Homo sapien
aggagttgaatagtcctgtttgcag

SEQ ID NO: 151447 - DNA, 25 bp, Homo sapien
aaaccagggctgacttgcaacaaga

SEQ ID NO: 151448 - DNA, 25 bp, Homo sapien
tcatgttcagcaaaaacacatacgc

SEQ ID NO: 151449 - DNA, 25 bp, Homo sapien
caaaaaactctgtagggtggatgaa

SEQ ID NO: 151450 - DNA, 25 bp, Homo sapien
tctggtatctggaacccatgacttc

SEQ ID NO: 151451 - DNA, 25 bp, Homo sapien
tgaggactccggagaggctgcacta

SEQ ID NO: 151452 - DNA, 25 bp, Homo sapien
agggaagcgaggaccccacaacaga

SEQ ID NO: 151453 - DNA, 25 bp, Homo sapien
ctgctaccgcttccgggagacgtgg

SEQ ID NO: 151454 - DNA, 25 bp, Homo sapien
gtggctttcgagctgcctgcacggc

SEQ ID NO: 151455 - DNA, 25 bp, Homo sapien
tgagcgcgacccgaaagaaaacgga

SEQ ID NO: 151456 - DNA, 25 bp, Homo sapien
cagcccctaacagggcgaagatgag

SEQ ID NO: 151457 - DNA, 25 bp, Homo sapien
agtaaacgacgtcggctgaagccca

SEQ ID NO: 151458 - DNA, 25 bp, Homo sapien
catctcgttccgtgcgggaagaacg

SEQ ID NO: 151459 - DNA, 25 bp, Homo sapien
aggtcagtcggtcaggcccagtccg

SEQ ID NO: 151460 - DNA, 25 bp, Homo sapien
gcctgcttcgaaggccaggcgtcag

SEQ ID NO: 151461 - DNA, 25 bp, Homo sapien
ttggggaatctcaggtaagcgagca

SEQ ID NO: 151462 - DNA, 25 bp, Homo sapien
gtcaggcccagtccgtagagccctg

SEQ ID NO: 151463 - DNA, 25 bp, Homo sapien
attaaatacttagatgggccctggg

SEQ ID NO: 151464 - DNA, 25 bp, Homo sapien
tcaaagacacgaaggacttcagagg

SEQ ID NO: 151465 - DNA, 25 bp, Homo sapien
tcaattccccagacactgcccaggg

SEQ ID NO: 151466 - DNA, 25 bp, Homo sapien
gacttcagaggcacccgtcaattcc

SEQ ID NO: 151467 - DNA, 25 bp, Homo sapien
aattctttatatcttgcctcccatt

SEQ ID NO: 151468 - DNA, 25 bp, Homo sapien
taattctttatatcttgcctcccat

SEQ ID NO: 151469 - DNA, 25 bp, Homo sapien
atcttgcctcccatttcaaaattaa

SEQ ID NO: 151470 - DNA, 25 bp, Homo sapien
attctttatatcttgcctcccattt

SEQ ID NO: 151471 - DNA, 25 bp, Homo sapien
tacacatgtgactattaaatgccta

SEQ ID NO: 151472 - DNA, 25 bp, Homo sapien
caagtctaagttaccctagtgccaa

SEQ ID NO: 151473 - DNA, 25 bp, Homo sapien
tagacagcagctcagatactcaagt

SEQ ID NO: 151474 - DNA, 25 bp, Homo sapien
cgttatgtggtaaacagcaatatcc

SEQ ID NO: 151475 - DNA, 25 bp, Homo sapien
cgcccggccgggcaaatcttaatgt

SEQ ID NO: 151476 - DNA, 25 bp, Homo sapien
cccggccgggcaaatcttaatgtag

SEQ ID NO: 151477 - DNA, 25 bp, Homo sapien
gcccggccgggcaaatcttaatgta

SEQ ID NO: 151478 - DNA, 25 bp, Homo sapien
ttcctactgagagctgttgcagccc

SEQ ID NO: 151479 - DNA, 25 bp, Homo sapien
cattttcaacaggatgagaggcctc

SEQ ID NO: 151480 - DNA, 25 bp, Homo sapien
caaaatgggatgaaggcctaggaac

SEQ ID NO: 151481 - DNA, 25 bp, Homo sapien
gcagccccttgatcaactcggttta

SEQ ID NO: 151482 - DNA, 25 bp, Homo sapien
catggctagaatctgagttactggc

SEQ ID NO: 151483 - DNA, 25 bp, Homo sapien
ctttgaagattcctcttgaccttca

SEQ ID NO: 151484 - DNA, 25 bp, Homo sapien
ctttggatctttggagtaacgaggc

SEQ ID NO: 151485 - DNA, 25 bp, Homo sapien
gctgattctccagtcgaaggttaga

SEQ ID NO: 151486 - DNA, 25 bp, Homo sapien
gactgaacttcattcctcagcagct

SEQ ID NO: 151487 - DNA, 25 bp, Homo sapien
aggttagacagttcatgtgatttgc

SEQ ID NO: 151488 - DNA, 25 bp, Homo sapien
aatcctgaacaatttaagcctctac

SEQ ID NO: 151489 - DNA, 25 bp, Homo sapien
tcctaatcctgaacaatttaagcct

SEQ ID NO: 151490 - DNA, 25 bp, Homo sapien
taatcctgaacaatttaagcctcta

SEQ ID NO: 151491 - DNA, 25 bp, Homo sapien
attcctaatcctgaacaatttaagc

SEQ ID NO: 151492 - DNA, 25 bp, Homo sapien
tagctggtcagcttcctggagtctc

SEQ ID NO: 151493 - DNA, 25 bp, Homo sapien
tctaatgcttctgtgcgagtactca

SEQ ID NO: 151494 - DNA, 25 bp, Homo sapien
ggagtcctcgagtcattcgatcact

SEQ ID NO: 151495 - DNA, 25 bp, Homo sapien
catctacttgggctcggagtcctcg

SEQ ID NO: 151496 - DNA, 25 bp, Homo sapien
gtggcatccgcttcatgcagtctct

SEQ ID NO: 151497 - DNA, 25 bp, Homo sapien
agtctgcagagcttgattctgcagg

SEQ ID NO: 151498 - DNA, 25 bp, Homo sapien
tgcaggctgttaccttcactttgat

SEQ ID NO: 151499 - DNA, 25 bp, Homo sapien
tcttcagagtggcatccgcttcatg

SEQ ID NO: 151500 - DNA, 25 bp, Homo sapien
tattaaggcgtgcagcaaactcgct

SEQ ID NO: 151501 - DNA, 25 bp, Homo sapien
tgcttagaggactccaagttcaact

SEQ ID NO: 151502 - DNA, 25 bp, Homo sapien
ttttctttcggccagtgtaattgct

SEQ ID NO: 151503 - DNA, 25 bp, Homo sapien
tagtcaattaattcctgcttagagg

SEQ ID NO: 151504 - DNA, 25 bp, Homo sapien
tatgtgatggagactacaggtagcc

SEQ ID NO: 151505 - DNA, 25 bp, Homo sapien
ccaggaatttagctcgggacttgtc

SEQ ID NO: 151506 - DNA, 25 bp, Homo sapien
tctagactaggaacaacaaggacca

SEQ ID NO: 151507 - DNA, 25 bp, Homo sapien
ggacttgtcacatcagagccgcgtg

SEQ ID NO: 151508 - DNA, 25 bp, Homo sapien
tcggatctgagctgatgtatctggc

SEQ ID NO: 151509 - DNA, 25 bp, Homo sapien
tgctgctatctaggccttcaaaacc

SEQ ID NO: 151510 - DNA, 25 bp, Homo sapien
tctcatgccgaagttcttccagctc

SEQ ID NO: 151511 - DNA, 25 bp, Homo sapien
tttcaagctgttaatcaatttttcc

SEQ ID NO: 151512 - DNA, 25 bp, Homo sapien
ggcaggcagtatgcacagtggtcaa

SEQ ID NO: 151513 - DNA, 25 bp, Homo sapien
tcgggcaaattcttgagaggcaggc

SEQ ID NO: 151514 - DNA, 25 bp, Homo sapien
tcatcaatttgactacatcgggcaa

SEQ ID NO: 151515 - DNA, 25 bp, Homo sapien
cagtggtcaaaaacatgtcctggag

SEQ ID NO: 151516 - DNA, 25 bp, Homo sapien
gggatatggctttattgcacaggct

SEQ ID NO: 151517 - DNA, 25 bp, Homo sapien
tatagggagcatataacctgacacc

SEQ ID NO: 151518 - DNA, 25 bp, Homo sapien
gacatggtttcagcctatagggagc

SEQ ID NO: 151519 - DNA, 25 bp, Homo sapien
tttcacgagtatcggcagaggctca

SEQ ID NO: 151520 - DNA, 25 bp, Homo sapien
tcatgcagatcctgtaactgttctc

SEQ ID NO: 151521 - DNA, 25 bp, Homo sapien
gctatttggtcatgcagatcctgta

SEQ ID NO: 151522 - DNA, 25 bp, Homo sapien
agatcctgtaactgttctcttgctg

SEQ ID NO: 151523 - DNA, 25 bp, Homo sapien
tggtcatgcagatcctgtaactgtt

SEQ ID NO: 151524 - DNA, 25 bp, Homo sapien
tttgaatttcttcgtctcgatcttt

SEQ ID NO: 151525 - DNA, 25 bp, Homo sapien
tgttctttgttcgataaagatcttc

SEQ ID NO: 151526 - DNA, 25 bp, Homo sapien
ttcgtctcgatctttaattctgctt

SEQ ID NO: 151527 - DNA, 25 bp, Homo sapien
atgtgttctttgttcgataaagatc

SEQ ID NO: 151528 - DNA, 25 bp, Homo sapien
ccacactgatgtcaaaggtctgaaa

SEQ ID NO: 151529 - DNA, 25 bp, Homo sapien
caattatgaacctggcaatcagcac

SEQ ID NO: 151530 - DNA, 25 bp, Homo sapien
catctacttcgtgactttggctaca

SEQ ID NO: 151531 - DNA, 25 bp, Homo sapien
caccactgttacaaaagaactcagg

SEQ ID NO: 151532 - DNA, 25 bp, Homo sapien
gactttctgctagcacatcacgtga

SEQ ID NO: 151533 - DNA, 25 bp, Homo sapien
agtgtagaggtgcactgagagctca

SEQ ID NO: 151534 - DNA, 25 bp, Homo sapien
cctggcctaattcttgattaacaaa

SEQ ID NO: 151535 - DNA, 25 bp, Homo sapien
gcaatacttcagatacagtaggtac

SEQ ID NO: 151536 - DNA, 25 bp, Homo sapien
aaaacattcaaactggcaacctatt

SEQ ID NO: 151537 - DNA, 25 bp, Homo sapien
ttttttaacctacatgcagaaagcc

SEQ ID NO: 151538 - DNA, 25 bp, Homo sapien
cctacatgcagaaagcccaaaaata

SEQ ID NO: 151539 - DNA, 25 bp, Homo sapien
cagaaagcccaaaaataataagcat

SEQ ID NO: 151540 - DNA, 25 bp, Homo sapien
ctgaaagagaaagtgttcacaaaat

SEQ ID NO: 151541 - DNA, 25 bp, Homo sapien
gaaagagaaagtgttcacaaaattc

SEQ ID NO: 151542 - DNA, 25 bp, Homo sapien
tgaaagagaaagtgttcacaaaatt

SEQ ID NO: 151543 - DNA, 25 bp, Homo sapien
gagttcatctgctgttcgaggcgct

SEQ ID NO: 151544 - DNA, 25 bp, Homo sapien
tcgaggcgctccagttgaaagacca

SEQ ID NO: 151545 - DNA, 25 bp, Homo sapien
tactacttccagaggcggagttcat

SEQ ID NO: 151546 - DNA, 25 bp, Homo sapien
tcagactgactgctattgcttaaag

SEQ ID NO: 151547 - DNA, 25 bp, Homo sapien
agaactgagaaatttgctgaatgac

SEQ ID NO: 151548 - DNA, 25 bp, Homo sapien
gacacttttcaacgaggtcttcctg

SEQ ID NO: 151549 - DNA, 25 bp, Homo sapien
tgtagactttacgaagttccaagat

SEQ ID NO: 151550 - DNA, 25 bp, Homo sapien
ggcacccagcgtctcttaaacaatt

SEQ ID NO: 151551 - DNA, 25 bp, Homo sapien
taaactgatcaattgaactagcagc

SEQ ID NO: 151552 - DNA, 25 bp, Homo sapien
aacttttccgtacattcctgccaga

SEQ ID NO: 151553 - DNA, 25 bp, Homo sapien
acaggaacatttcgcagacgagtgc

SEQ ID NO: 151554 - DNA, 25 bp, Homo sapien
actagcagctttgcgaacttttccg

SEQ ID NO: 151555 - DNA, 25 bp, Homo sapien
ggtgtcaactatgtgactggggaaa

SEQ ID NO: 151556 - DNA, 25 bp, Homo sapien
tttagtggaattacagaagttacga

SEQ ID NO: 151557 - DNA, 25 bp, Homo sapien
tggaattacagaagttacgaaagat

SEQ ID NO: 151558 - DNA, 25 bp, Homo sapien
cagaagttacgaaagattaggtggg

SEQ ID NO: 151559 - DNA, 25 bp, Homo sapien
cgcgctatggggtatcttcggagaa

SEQ ID NO: 151560 - DNA, 25 bp, Homo sapien
gctatggggtatcttcggagaaaaa

SEQ ID NO: 151561 - DNA, 25 bp, Homo sapien
tataattacaaaaactcgcgctatg

SEQ ID NO: 151562 - DNA, 25 bp, Homo sapien
taattacaaaaactcgcgctatggg

SEQ ID NO: 151563 - DNA, 25 bp, Homo sapien
gtagggcccagaacacgattcatag

SEQ ID NO: 151564 - DNA, 25 bp, Homo sapien
caaaggcccactgtacactgagggc

SEQ ID NO: 151565 - DNA, 25 bp, Homo sapien
cagaattcagttgagaggagtcagc

SEQ ID NO: 151566 - DNA, 25 bp, Homo sapien
gacttgctactcctacagaattcag

SEQ ID NO: 151567 - DNA, 25 bp, Homo sapien
tcatttgccatatggttggtcgtgg

SEQ ID NO: 151568 - DNA, 25 bp, Homo sapien
aacagaacaatcatgacccagaggt

SEQ ID NO: 151569 - DNA, 25 bp, Homo sapien
tcaacagaacaatcatgacccagag

SEQ ID NO: 151570 - DNA, 25 bp, Homo sapien
catatggttggtcgtggtgcatttc

SEQ ID NO: 151571 - DNA, 25 bp, Homo sapien
gtctgtacagaggtgaacaacccca

SEQ ID NO: 151572 - DNA, 25 bp, Homo sapien
tctcagaaattttaggcaattggcc

SEQ ID NO: 151573 - DNA, 25 bp, Homo sapien
gcaattggccttcttgcagatccca

SEQ ID NO: 151574 - DNA, 25 bp, Homo sapien
aaataatcttgtgcactgttctcag

SEQ ID NO: 151575 - DNA, 25 bp, Homo sapien
cctgtaacatgtacaaagtaaatct

SEQ ID NO: 151576 - DNA, 25 bp, Homo sapien
aaaagatttacaccaatcaagcctg

SEQ ID NO: 151577 - DNA, 25 bp, Homo sapien
tacaccaatcaagcctgtaacatgt

SEQ ID NO: 151578 - DNA, 25 bp, Homo sapien
caatcaagcctgtaacatgtacaaa

SEQ ID NO: 151579 - DNA, 25 bp, Homo sapien
atcatcctttgtcaggccgcagaac

SEQ ID NO: 151580 - DNA, 25 bp, Homo sapien
tcatcctttgtcaggccgcagaacc

SEQ ID NO: 151581 - DNA, 25 bp, Homo sapien
agatcatcctttgtcaggccgcaga

SEQ ID NO: 151582 - DNA, 25 bp, Homo sapien
gatcatcctttgtcaggccgcagaa

SEQ ID NO: 151583 - DNA, 25 bp, Homo sapien
gacaccagtggcctttcagaaacca

SEQ ID NO: 151584 - DNA, 25 bp, Homo sapien
tgtatgacaagatgaggctccctcc

SEQ ID NO: 151585 - DNA, 25 bp, Homo sapien
tcagcactgttgagtgacatgtcca

SEQ ID NO: 151586 - DNA, 25 bp, Homo sapien
gggcagctttgtcctgcacagatgg

SEQ ID NO: 151587 - DNA, 25 bp, Homo sapien
cacgtaggatgactgaggaaataga

SEQ ID NO: 151588 - DNA, 25 bp, Homo sapien
tcttctcatcaggtggcctggcaaa

SEQ ID NO: 151589 - DNA, 25 bp, Homo sapien
gcagaaatagcaatccacgtaggat

SEQ ID NO: 151590 - DNA, 25 bp, Homo sapien
tagcaatccacgtaggatgactgag

SEQ ID NO: 151591 - DNA, 25 bp, Homo sapien
caggtgaagcccgtctgcatcctga

SEQ ID NO: 151592 - DNA, 25 bp, Homo sapien
gaacccgctggaacggacgttgatc

SEQ ID NO: 151593 - DNA, 25 bp, Homo sapien
gccctgggagctttccattgcacca

SEQ ID NO: 151594 - DNA, 25 bp, Homo sapien
tcaatagcaaccttggaggccgctg

SEQ ID NO: 151595 - DNA, 25 bp, Homo sapien
acgcttcttctaaacacaaggcttt

SEQ ID NO: 151596 - DNA, 25 bp, Homo sapien
tcttctaaacacaaggctttcgggc

SEQ ID NO: 151597 - DNA, 25 bp, Homo sapien
gggcccccagcaactcggtttgcag

SEQ ID NO: 151598 - DNA, 25 bp, Homo sapien
caactcggtttgcagaatgataaaa

SEQ ID NO: 151599 - DNA, 25 bp, Homo sapien
cctctctttccaggctggtgttccc

SEQ ID NO: 151600 - DNA, 25 bp, Homo sapien
tctctttccaggctggtgttccctc

SEQ ID NO: 151601 - DNA, 25 bp, Homo sapien
ctctctttccaggctggtgttccct

SEQ ID NO: 151602 - DNA, 25 bp, Homo sapien
tgctgagcccctgaagttgcttcag

SEQ ID NO: 151603 - DNA, 25 bp, Homo sapien
tgacccggatgcagactatgatgtg

SEQ ID NO: 151604 - DNA, 25 bp, Homo sapien
gagattcattacctagaagcacgag

SEQ ID NO: 151605 - DNA, 25 bp, Homo sapien
cggttccatccagtggagctgtggt

SEQ ID NO: 151606 - DNA, 25 bp, Homo sapien
ttctcttagtgatgggagtgggtcc

SEQ ID NO: 151607 - DNA, 25 bp, Homo sapien
ggcttctcctggtctaaggcgagcc

SEQ ID NO: 151608 - DNA, 25 bp, Homo sapien
ttctcctggtctaaggcgagccctg

SEQ ID NO: 151609 - DNA, 25 bp, Homo sapien
ggtctaaggcgagccctgaaggcac

SEQ ID NO: 151610 - DNA, 25 bp, Homo sapien
ctcctggtctaaggcgagccctgaa

SEQ ID NO: 151611 - DNA, 25 bp, Homo sapien
taagacggagttagccatgctggac

SEQ ID NO: 151612 - DNA, 25 bp, Homo sapien
tgatagaaactagggcacctcccct

SEQ ID NO: 151613 - DNA, 25 bp, Homo sapien
tggaacctggctctgataactggct

SEQ ID NO: 151614 - DNA, 25 bp, Homo sapien
gagaaaatgtgtaaagtcccagccc

SEQ ID NO: 151615 - DNA, 25 bp, Homo sapien
ctgaaaaacatctcaaaagaccaat

SEQ ID NO: 151616 - DNA, 25 bp, Homo sapien
ctgtaggttaccacaatgcaaattt

SEQ ID NO: 151617 - DNA, 25 bp, Homo sapien
taataaatacagaaccagctaagtg

SEQ ID NO: 151618 - DNA, 25 bp, Homo sapien
gaagacaggagtgtattacttaaat

SEQ ID NO: 151619 - DNA, 25 bp, Homo sapien
tccttatgctctgagtcagcttctg

SEQ ID NO: 151620 - DNA, 25 bp, Homo sapien
ggtgtggaaaatgctccttatgctc

SEQ ID NO: 151621 - DNA, 25 bp, Homo sapien
ggctgactctactctacacaataga

SEQ ID NO: 151622 - DNA, 25 bp, Homo sapien
tagggcaagcagagcagtgagcttt

SEQ ID NO: 151623 - DNA, 25 bp, Homo sapien
gaatgagttctctcactagggcaag

SEQ ID NO: 151624 - DNA, 25 bp, Homo sapien
gccaactgcacagatagagctaatt

SEQ ID NO: 151625 - DNA, 25 bp, Homo sapien
gctatttgcttcagaccttttttgt

SEQ ID NO: 151626 - DNA, 25 bp, Homo sapien
gcatcctggttccttgcacaaagcc

SEQ ID NO: 151627 - DNA, 25 bp, Homo sapien
cgatgatttggctccatcgtgcccc

SEQ ID NO: 151628 - DNA, 25 bp, Homo sapien
gaaataaactgtcgatgatttggct

SEQ ID NO: 151629 - DNA, 25 bp, Homo sapien
gatgatactagcttgctcacctgaa

SEQ ID NO: 151630 - DNA, 25 bp, Homo sapien
tgccttagccaacctagtagttatg

SEQ ID NO: 151631 - DNA, 25 bp, Homo sapien
tggtgcaaccgtgcaatcatggttc

SEQ ID NO: 151632 - DNA, 25 bp, Homo sapien
tgatgtgtgtcacttccagaggaag

SEQ ID NO: 151633 - DNA, 25 bp, Homo sapien
gaccaagtagaagtcaggccctggg

SEQ ID NO: 151634 - DNA, 25 bp, Homo sapien
ggatttgagccagacagagtgcaat

SEQ ID NO: 151635 - DNA, 25 bp, Homo sapien
tccggtgagaaggtcgcagggattt

SEQ ID NO: 151636 - DNA, 25 bp, Homo sapien
acatgaccaagtagaagtcaggccc

SEQ ID NO: 151637 - DNA, 25 bp, Homo sapien
aggtgaagtcatatgtctcctccat

SEQ ID NO: 151638 - DNA, 25 bp, Homo sapien
tggaggtgaagtcatatgtctcctc

SEQ ID NO: 151639 - DNA, 25 bp, Homo sapien
aaactggaggtgaagtcatatgtct

SEQ ID NO: 151640 - DNA, 25 bp, Homo sapien
actggaggtgaagtcatatgtctcc

SEQ ID NO: 151641 - DNA, 25 bp, Homo sapien
gacccagttcaatccaggcactgac

SEQ ID NO: 151642 - DNA, 25 bp, Homo sapien
cccagttcaatccaggcactgacct

SEQ ID NO: 151643 - DNA, 25 bp, Homo sapien
ccaggcactgacctggtgtcttcat

SEQ ID NO: 151644 - DNA, 25 bp, Homo sapien
ctggacccagttcaatccaggcact

SEQ ID NO: 151645 - DNA, 25 bp, Homo sapien
ggttgagctacacatggctgtgtct

SEQ ID NO: 151646 - DNA, 25 bp, Homo sapien
tacacatggctgtgtctagtgcccc

SEQ ID NO: 151647 - DNA, 25 bp, Homo sapien
gttcaggatggttgagctacacatg

SEQ ID NO: 151648 - DNA, 25 bp, Homo sapien
agctttgggatgtggtttttcaggt

SEQ ID NO: 151649 - DNA, 25 bp, Homo sapien
gacagtgcacacttgatagcgcaca

SEQ ID NO: 151650 - DNA, 25 bp, Homo sapien
gacagctcgcagtttattgacagca

SEQ ID NO: 151651 - DNA, 25 bp, Homo sapien
agtgcacactttatcgacagcgcgc

SEQ ID NO: 151652 - DNA, 25 bp, Homo sapien
tgacagcacgcactatattgacagc

SEQ ID NO: 151653 - DNA, 25 bp, Homo sapien
cgggcacctaggcaccgggcgaggg

SEQ ID NO: 151654 - DNA, 25 bp, Homo sapien
gtctgtcggtcgatcctcccgcaag

SEQ ID NO: 151655 - DNA, 25 bp, Homo sapien
gggcgcagtgcctcggcgtgcgtcc

SEQ ID NO: 151656 - DNA, 25 bp, Homo sapien
gtcgggctgcggtggcaccggcgcg

SEQ ID NO: 151657 - DNA, 25 bp, Homo sapien
ttgcccggcgcagagcagaagagcc

SEQ ID NO: 151658 - DNA, 25 bp, Homo sapien
cttgcccggcgcagagcagaagagc

SEQ ID NO: 151659 - DNA, 25 bp, Homo sapien
tcggtatcccctttattcatagggc

SEQ ID NO: 151660 - DNA, 25 bp, Homo sapien
ggtatcccctttattcatagggctg

SEQ ID NO: 151661 - DNA, 25 bp, Homo sapien
ctcggtatcccctttattcataggg

SEQ ID NO: 151662 - DNA, 25 bp, Homo sapien
tatcccctttattcatagggctgtt

SEQ ID NO: 151663 - DNA, 25 bp, Homo sapien
cctccaaggtggatcatagtgagaa

SEQ ID NO: 151664 - DNA, 25 bp, Homo sapien
ttagccagacagtgatagcaatgat

SEQ ID NO: 151665 - DNA, 25 bp, Homo sapien
cgtgaagatgcccaaaggtcaggtc

SEQ ID NO: 151666 - DNA, 25 bp, Homo sapien
tctttgggagtccatgatccctggc

SEQ ID NO: 151667 - DNA, 25 bp, Homo sapien
tcggagtgtctcaaaacattcctgg

SEQ ID NO: 151668 - DNA, 25 bp, Homo sapien
gagatgacctcaacgatgcatttca

SEQ ID NO: 151669 - DNA, 25 bp, Homo sapien
cttggaaagtgtgtcggagatgacc

SEQ ID NO: 151670 - DNA, 25 bp, Homo sapien
ctcctcggagtgtctcaaaacattc

SEQ ID NO: 151671 - DNA, 25 bp, Homo sapien
ctcagaatggaaaggatccgttcat

SEQ ID NO: 151672 - DNA, 25 bp, Homo sapien
gtctcagaatggaaaggatccgttc

SEQ ID NO: 151673 - DNA, 25 bp, Homo sapien
cttggagagcgaggtcttggagctc

SEQ ID NO: 151674 - DNA, 25 bp, Homo sapien
tctcagaatggaaaggatccgttca

SEQ ID NO: 151675 - DNA, 25 bp, Homo sapien
tgacttgcaaggctagggccgtgct

SEQ ID NO: 151676 - DNA, 25 bp, Homo sapien
caggtgcagggccaaactcaggttt

SEQ ID NO: 151677 - DNA, 25 bp, Homo sapien
atttacccagagtcaagtgcagtgg

SEQ ID NO: 151678 - DNA, 25 bp, Homo sapien
gaatatcatcagtgacgagtggctc

SEQ ID NO: 151679 - DNA, 25 bp, Homo sapien
gaaaaacactctcgcttcgttggga

SEQ ID NO: 151680 - DNA, 25 bp, Homo sapien
cagtgtgttagcttggaaagggcca

SEQ ID NO: 151681 - DNA, 25 bp, Homo sapien
tgttctcacacatggcctggtctgt

SEQ ID NO: 151682 - DNA, 25 bp, Homo sapien
tggatactgcttatacgggatacac

SEQ ID NO: 151683 - DNA, 25 bp, Homo sapien
gttcatcttcaaaaccgctgtgttt

SEQ ID NO: 151684 - DNA, 25 bp, Homo sapien
tcatcttcaaaaccgctgtgtttct

SEQ ID NO: 151685 - DNA, 25 bp, Homo sapien
atcttcaaaaccgctgtgtttcttc

SEQ ID NO: 151686 - DNA, 25 bp, Homo sapien
cttcaaaaccgctgtgtttcttctg

SEQ ID NO: 151687 - DNA, 25 bp, Homo sapien
ctccggccagaccggctgggacaga

SEQ ID NO: 151688 - DNA, 25 bp, Homo sapien
tccggccagaccggctgggacagac

SEQ ID NO: 151689 - DNA, 25 bp, Homo sapien
gtgaaaattcctcccgtcattagaa

SEQ ID NO: 151690 - DNA, 25 bp, Homo sapien
cttcagcatcctgtgaaagggctca

SEQ ID NO: 151691 - DNA, 25 bp, Homo sapien
taagaggcaccatgactgcaacttc

SEQ ID NO: 151692 - DNA, 25 bp, Homo sapien
tgaacaaagtgctcccaagtacatt

SEQ ID NO: 151693 - DNA, 25 bp, Homo sapien
tctgcctccttggaatcctctcttt

SEQ ID NO: 151694 - DNA, 25 bp, Homo sapien
taacatccttggatgatggctcttc

SEQ ID NO: 151695 - DNA, 25 bp, Homo sapien
gcctccttggaatcctctcttttct

SEQ ID NO: 151696 - DNA, 25 bp, Homo sapien
ttttctccataacatccttggatga

SEQ ID NO: 151697 - DNA, 25 bp, Homo sapien
ggcctgattgttcccctcagccttg

SEQ ID NO: 151698 - DNA, 25 bp, Homo sapien
ttggactcctgcatgggctccggga

SEQ ID NO: 151699 - DNA, 25 bp, Homo sapien
gggcctggctccgtctgtggcttca

SEQ ID NO: 151700 - DNA, 25 bp, Homo sapien
agaccctgagagaggccctcactgt

SEQ ID NO: 151701 - DNA, 25 bp, Homo sapien
gttcagcactacagtggggccttct

SEQ ID NO: 151702 - DNA, 25 bp, Homo sapien
tttccggatctccttgtagccaagg

SEQ ID NO: 151703 - DNA, 25 bp, Homo sapien
ctcgcctttccggatctccttgtag

SEQ ID NO: 151704 - DNA, 25 bp, Homo sapien
tctccttgtagccaaggctcgggtg

SEQ ID NO: 151705 - DNA, 25 bp, Homo sapien
ttgaggtcttcgccatcatacgtac

SEQ ID NO: 151706 - DNA, 25 bp, Homo sapien
tcgttgaggtcttcgccatcatacg

SEQ ID NO: 151707 - DNA, 25 bp, Homo sapien
cgttgaggtcttcgccatcatacgt

SEQ ID NO: 151708 - DNA, 25 bp, Homo sapien
gttcgttgaggtcttcgccatcata

SEQ ID NO: 151709 - DNA, 25 bp, Homo sapien
aagaccctctcggctcagaggggtg

SEQ ID NO: 151710 - DNA, 25 bp, Homo sapien
ctttgcaagaccctctcggctcaga

SEQ ID NO: 151711 - DNA, 25 bp, Homo sapien
tgcaagaccctctcggctcagaggg

SEQ ID NO: 151712 - DNA, 25 bp, Homo sapien
agaccctctcggctcagaggggtgg

SEQ ID NO: 151713 - DNA, 25 bp, Homo sapien
aggccttgcgggaccactgccatct

SEQ ID NO: 151714 - DNA, 25 bp, Homo sapien
ctccgctcttcccaccccggaagag

SEQ ID NO: 151715 - DNA, 25 bp, Homo sapien
agctctccgctcttcccaccccgga

SEQ ID NO: 151716 - DNA, 25 bp, Homo sapien
ccggaagaggccttgcgggaccact

SEQ ID NO: 151717 - DNA, 25 bp, Homo sapien
ccagcctcgtcgcagctgcggccca

SEQ ID NO: 151718 - DNA, 25 bp, Homo sapien
ggaaggagagcttcatggaactgtc

SEQ ID NO: 151719 - DNA, 25 bp, Homo sapien
tcatggaactgtcccggttgtcctc

SEQ ID NO: 151720 - DNA, 25 bp, Homo sapien
cccggaaggagagcttcatggaact

SEQ ID NO: 151721 - DNA, 25 bp, Homo sapien
ggggcaggcccgcctcaaggctgtc

SEQ ID NO: 151722 - DNA, 25 bp, Homo sapien
tcctcggggtagcctcggacctgga

SEQ ID NO: 151723 - DNA, 25 bp, Homo sapien
ctcctcggggtagcctcggacctgg

SEQ ID NO: 151724 - DNA, 25 bp, Homo sapien
gggcaggcccgcctcaaggctgtcc

SEQ ID NO: 151725 - DNA, 25 bp, Homo sapien
ggtctgcggtttgcgctgccctcct

SEQ ID NO: 151726 - DNA, 25 bp, Homo sapien
ctgcggtttgcgctgccctcctcct

SEQ ID NO: 151727 - DNA, 25 bp, Homo sapien
tctggtctgcggtttgcgctgccct

SEQ ID NO: 151728 - DNA, 25 bp, Homo sapien
ctctggtctgcggtttgcgctgccc

SEQ ID NO: 151729 - DNA, 25 bp, Homo sapien
tgtgagctggggtgttctcccaccc

SEQ ID NO: 151730 - DNA, 25 bp, Homo sapien
ctccatccccagacttcggcggggg

SEQ ID NO: 151731 - DNA, 25 bp, Homo sapien
tactgccttctggacaacgtcccca

SEQ ID NO: 151732 - DNA, 25 bp, Homo sapien
ggcagtgtgtctgggtgcggctgcc

SEQ ID NO: 151733 - DNA, 25 bp, Homo sapien
cagctgccaacatggagccttcttc

SEQ ID NO: 151734 - DNA, 25 bp, Homo sapien
tgcgaggctcgggtttctaagaaga

SEQ ID NO: 151735 - DNA, 25 bp, Homo sapien
tcagggctgcggacaggtgtcagcc

SEQ ID NO: 151736 - DNA, 25 bp, Homo sapien
ctgcttgtggagaaaggaagctggt

SEQ ID NO: 151737 - DNA, 25 bp, Homo sapien
agccccgccgtagtgcctgcagctg

SEQ ID NO: 151738 - DNA, 25 bp, Homo sapien
ctctgcttcaatggccgacaggctc

SEQ ID NO: 151739 - DNA, 25 bp, Homo sapien
tccagctctgcttcaatggccgaca

SEQ ID NO: 151740 - DNA, 25 bp, Homo sapien
cagctctgcttcaatggccgacagg

SEQ ID NO: 151741 - DNA, 25 bp, Homo sapien
gctgccctgcaaaggatgttccagg

SEQ ID NO: 151742 - DNA, 25 bp, Homo sapien
cagaagttattgcagttgtgcccag

SEQ ID NO: 151743 - DNA, 25 bp, Homo sapien
cagaatatgttacagtcaggagttc

SEQ ID NO: 151744 - DNA, 25 bp, Homo sapien
aacttctagaaagctgcctgtgttc

SEQ ID NO: 151745 - DNA, 25 bp, Homo sapien
tcgtaaaggcctgggagctacatgg

SEQ ID NO: 151746 - DNA, 25 bp, Homo sapien
tgtcgtggtggcgtccataggcctc

SEQ ID NO: 151747 - DNA, 25 bp, Homo sapien
tgttcctgtaccgtttgtggcctcc

SEQ ID NO: 151748 - DNA, 25 bp, Homo sapien
ccagggcccagataccgagtaactg

SEQ ID NO: 151749 - DNA, 25 bp, Homo sapien
taaagtcacctaggtgaggataggc

SEQ ID NO: 151750 - DNA, 25 bp, Homo sapien
gacatttgagatcagagagcaccac

SEQ ID NO: 151751 - DNA, 25 bp, Homo sapien
catgacaccatggagatcggggccc

SEQ ID NO: 151752 - DNA, 25 bp, Homo sapien
tctcattgcaagccccaagcactga

SEQ ID NO: 151753 - DNA, 25 bp, Homo sapien
gtgctgaggatttgtgctgtgattt

SEQ ID NO: 151754 - DNA, 25 bp, Homo sapien
ggctggaggcccgagccgatggcgc

SEQ ID NO: 151755 - DNA, 25 bp, Homo sapien
tgcacagcggtctccttcccctaag

SEQ ID NO: 151756 - DNA, 25 bp, Homo sapien
cccgagccgatggcgcctgtgctga

SEQ ID NO: 151757 - DNA, 25 bp, Homo sapien
tactggtctccaccaaggctttgtt

SEQ ID NO: 151758 - DNA, 25 bp, Homo sapien
tcggtgcatgtgagagtggcttccc

SEQ ID NO: 151759 - DNA, 25 bp, Homo sapien
gaagagagtaccaggtggtccaccg

SEQ ID NO: 151760 - DNA, 25 bp, Homo sapien
tgtgtttgcaacactaggtctggat

SEQ ID NO: 151761 - DNA, 25 bp, Homo sapien
gtacccggggaagccaagtacagca

SEQ ID NO: 151762 - DNA, 25 bp, Homo sapien
tcgggagtcctcgtctgcatcccag

SEQ ID NO: 151763 - DNA, 25 bp, Homo sapien
ggcctctgaatctcccagcccgaga

SEQ ID NO: 151764 - DNA, 25 bp, Homo sapien
gcccgagactcaaccaaaaccagga

SEQ ID NO: 151765 - DNA, 25 bp, Homo sapien
ggaagatgcagcagcatgggccttt

SEQ ID NO: 151766 - DNA, 25 bp, Homo sapien
tccccagagctcacgactaaaaggg

SEQ ID NO: 151767 - DNA, 25 bp, Homo sapien
tttatccctggcctgcacttccggg

SEQ ID NO: 151768 - DNA, 25 bp, Homo sapien
cagtgtcagcgtagcgcagcacatg

SEQ ID NO: 151769 - DNA, 25 bp, Homo sapien
gaggatcctgcatcgaagctgtgtg

SEQ ID NO: 151770 - DNA, 25 bp, Homo sapien
tataaataactacttgaggcctgtc

SEQ ID NO: 151771 - DNA, 25 bp, Homo sapien
tctctggacttgttctggcaactga

SEQ ID NO: 151772 - DNA, 25 bp, Homo sapien
atggagttcactcggctgcctcagg

SEQ ID NO: 151773 - DNA, 25 bp, Homo sapien
gcatggatctcgctggcttgcaggc

SEQ ID NO: 151774 - DNA, 25 bp, Homo sapien
ggtgggcatggatctcgctggcttg

SEQ ID NO: 151775 - DNA, 25 bp, Homo sapien
gcttgcaggcgactgggatgcgtgc

SEQ ID NO: 151776 - DNA, 25 bp, Homo sapien
ctgtggtgggcatggatctcgctgg

SEQ ID NO: 151777 - DNA, 25 bp, Homo sapien
ggcttgcccggaccctgaatctggg

SEQ ID NO: 151778 - DNA, 25 bp, Homo sapien
cttgcccggaccctgaatctgggcc

SEQ ID NO: 151779 - DNA, 25 bp, Homo sapien
ttggcttgcccggaccctgaatctg

SEQ ID NO: 151780 - DNA, 25 bp, Homo sapien
tgcccggaccctgaatctgggccat

SEQ ID NO: 151781 - DNA, 25 bp, Homo sapien
tcctgaacgagctggcacatgcatt

SEQ ID NO: 151782 - DNA, 25 bp, Homo sapien
agcagtcctgaacgagctggcacat

SEQ ID NO: 151783 - DNA, 25 bp, Homo sapien
gaacgagctggcacatgcatttgga

SEQ ID NO: 151784 - DNA, 25 bp, Homo sapien
agtcctgaacgagctggcacatgca

SEQ ID NO: 151785 - DNA, 25 bp, Homo sapien
gtgggtagcacccaccttcaggatg

SEQ ID NO: 151786 - DNA, 25 bp, Homo sapien
ccttcaggatgggtgtgcctgtgac

SEQ ID NO: 151787 - DNA, 25 bp, Homo sapien
cagtagcccccatgggaggatgacc

SEQ ID NO: 151788 - DNA, 25 bp, Homo sapien
gaggatgacccgaagtgaccattgt

SEQ ID NO: 151789 - DNA, 25 bp, Homo sapien
tgatcttcccaacctcaggcacttg

SEQ ID NO: 151790 - DNA, 25 bp, Homo sapien
tagcaggagagcagtatggaacaga

SEQ ID NO: 151791 - DNA, 25 bp, Homo sapien
gacatgtggcgggtcaggaagcggg

SEQ ID NO: 151792 - DNA, 25 bp, Homo sapien
taaacaccttccctggcatagcagg

SEQ ID NO: 151793 - DNA, 25 bp, Homo sapien
cgagagccagcacaggacaaagttc

SEQ ID NO: 151794 - DNA, 25 bp, Homo sapien
gagaggagtttagtaagggaccatc

SEQ ID NO: 151795 - DNA, 25 bp, Homo sapien
agttccccggtgctaacaagccctg

SEQ ID NO: 151796 - DNA, 25 bp, Homo sapien
caaaaatgtacctggagccataggg

SEQ ID NO: 151797 - DNA, 25 bp, Homo sapien
agggtggcccgtttccagagctcag

SEQ ID NO: 151798 - DNA, 25 bp, Homo sapien
gctgctgttctcacagaagggtttt

SEQ ID NO: 151799 - DNA, 25 bp, Homo sapien
tgtttaccttcagtggagcgccggg

SEQ ID NO: 151800 - DNA, 25 bp, Homo sapien
ctgcggttgtcaggtctacgggcct

SEQ ID NO: 151801 - DNA, 25 bp, Homo sapien
ctgttcacggtgctgtcgggcacca

SEQ ID NO: 151802 - DNA, 25 bp, Homo sapien
cctggacagccatggttgttcccat

SEQ ID NO: 151803 - DNA, 25 bp, Homo sapien
tgttcacggtgctgtcgggcaccag

SEQ ID NO: 151804 - DNA, 25 bp, Homo sapien
ccctggacagccatggttgttccca

SEQ ID NO: 151805 - DNA, 25 bp, Homo sapien
gaggaggtcacgtgtttgtcattgt

SEQ ID NO: 151806 - DNA, 25 bp, Homo sapien
tcccctgcggtattgagatgagtgg

SEQ ID NO: 151807 - DNA, 25 bp, Homo sapien
tgctgagcctggtgagtcatgaggg

SEQ ID NO: 151808 - DNA, 25 bp, Homo sapien
ttccaccccttgacagcaggtaggt

SEQ ID NO: 151809 - DNA, 25 bp, Homo sapien
gcaggtaggtccctttttggcagct

SEQ ID NO: 151810 - DNA, 25 bp, Homo sapien
cccgggctcgccagtaggagttctt

SEQ ID NO: 151811 - DNA, 25 bp, Homo sapien
gcagctgggtcatgttaagggttcc

SEQ ID NO: 151812 - DNA, 25 bp, Homo sapien
cctggccttggactcccgttgtgaa

SEQ ID NO: 151813 - DNA, 25 bp, Homo sapien
ctcaggtgagcatgtaaggtgcatc

SEQ ID NO: 151814 - DNA, 25 bp, Homo sapien
agccccacagggttgggtgatggtt

SEQ ID NO: 151815 - DNA, 25 bp, Homo sapien
ctcctctgagatctacagccccaca

SEQ ID NO: 151816 - DNA, 25 bp, Homo sapien
acagggttgggtgatggttgtcgcc

SEQ ID NO: 151817 - DNA, 25 bp, Homo sapien
ggtgatggttgtcgccacattggtc

SEQ ID NO: 151818 - DNA, 25 bp, Homo sapien
gttgctgtccgctgggccactgtcc

SEQ ID NO: 151819 - DNA, 25 bp, Homo sapien
ttcttccctctctgccgtgttgctg

SEQ ID NO: 151820 - DNA, 25 bp, Homo sapien
tgccgtgttgctgtccgctgggcca

SEQ ID NO: 151821 - DNA, 25 bp, Homo sapien
tccctctctgccgtgttgctgtccg

SEQ ID NO: 151822 - DNA, 25 bp, Homo sapien
tggtttcctggccggctgcatggac

SEQ ID NO: 151823 - DNA, 25 bp, Homo sapien
tgtggtttcctggccggctgcatgg

SEQ ID NO: 151824 - DNA, 25 bp, Homo sapien
ggctgcatggaccagccctcaagcg

SEQ ID NO: 151825 - DNA, 25 bp, Homo sapien
gtttcctggccggctgcatggacca

SEQ ID NO: 151826 - DNA, 25 bp, Homo sapien
gcaatggccacaagaaagtcctgtt

SEQ ID NO: 151827 - DNA, 25 bp, Homo sapien
agcaatggccacaagaaagtcctgt

SEQ ID NO: 151828 - DNA, 25 bp, Homo sapien
agcctgggcgatgaggtcaagatgc

SEQ ID NO: 151829 - DNA, 25 bp, Homo sapien
caggattcttgtgtattgctgactt

SEQ ID NO: 151830 - DNA, 25 bp, Homo sapien
cacaggattcttgtgtattgctgac

SEQ ID NO: 151831 - DNA, 25 bp, Homo sapien
ttcttgtgtattgctgactttcccc

SEQ ID NO: 151832 - DNA, 25 bp, Homo sapien
gattcttgtgtattgctgactttcc

SEQ ID NO: 151833 - DNA, 25 bp, Homo sapien
ctgtgggctcctcgcaggcactcac

SEQ ID NO: 151834 - DNA, 25 bp, Homo sapien
tccttgccaggagtgatgcaggctc

SEQ ID NO: 151835 - DNA, 25 bp, Homo sapien
ccgaggatgaaccacctggtgagaa

SEQ ID NO: 151836 - DNA, 25 bp, Homo sapien
tagccccagcggcatctttcttgct

SEQ ID NO: 151837 - DNA, 25 bp, Homo sapien
cgtacatatcaggacatggccaccg

SEQ ID NO: 151838 - DNA, 25 bp, Homo sapien
tggcagttggggctaggaccggata

SEQ ID NO: 151839 - DNA, 25 bp, Homo sapien
taaggatgggtccttggactttgga

SEQ ID NO: 151840 - DNA, 25 bp, Homo sapien
ccggataaggatgggtccttggact

SEQ ID NO: 151841 - DNA, 25 bp, Homo sapien
ggctaggaccggataaggatgggtc

SEQ ID NO: 151842 - DNA, 25 bp, Homo sapien
gaggttgccctgttcatactgcaga

SEQ ID NO: 151843 - DNA, 25 bp, Homo sapien
gccctgttcatactgcagaatccag

SEQ ID NO: 151844 - DNA, 25 bp, Homo sapien
ggttgccctgttcatactgcagaat

SEQ ID NO: 151845 - DNA, 25 bp, Homo sapien
ttggtgaggttgccctgttcatact

SEQ ID NO: 151846 - DNA, 25 bp, Homo sapien
cagcatgtggtgatgccagaatcgt

SEQ ID NO: 151847 - DNA, 25 bp, Homo sapien
ccagaatcgtgggtcatgatccttt

SEQ ID NO: 151848 - DNA, 25 bp, Homo sapien
ggtagccccttgagagacagcatgt

SEQ ID NO: 151849 - DNA, 25 bp, Homo sapien
tagcgccaccaagcatggtgagaat

SEQ ID NO: 151850 - DNA, 25 bp, Homo sapien
tctggctggggtgcatttgggggca

SEQ ID NO: 151851 - DNA, 25 bp, Homo sapien
tgtcctctggggttagagcagattt

SEQ ID NO: 151852 - DNA, 25 bp, Homo sapien
gggcatgggctgatttatgttttcc

SEQ ID NO: 151853 - DNA, 25 bp, Homo sapien
ttgtcctctggggttagagcagatt

SEQ ID NO: 151854 - DNA, 25 bp, Homo sapien
gatgcattgcctcaggtcagttcca

SEQ ID NO: 151855 - DNA, 25 bp, Homo sapien
tcggttcccgtttggcctggtgcag

SEQ ID NO: 151856 - DNA, 25 bp, Homo sapien
tcagttccaaagaccaggaagcgtc

SEQ ID NO: 151857 - DNA, 25 bp, Homo sapien
gaaccatcgtagtcaaagccaggaa

SEQ ID NO: 151858 - DNA, 25 bp, Homo sapien
tgacagcgcacaggattgaagacac

SEQ ID NO: 151859 - DNA, 25 bp, Homo sapien
aaatagaagctgtcaccgtgttgca

SEQ ID NO: 151860 - DNA, 25 bp, Homo sapien
tgtgaaagcatgatccccatagtgt

SEQ ID NO: 151861 - DNA, 25 bp, Homo sapien
ctttgggaataacaatcgctgtggg

SEQ ID NO: 151862 - DNA, 25 bp, Homo sapien
gctgaccccggtgctcttgatggat

SEQ ID NO: 151863 - DNA, 25 bp, Homo sapien
ttccaggtcactggggcataggtag

SEQ ID NO: 151864 - DNA, 25 bp, Homo sapien
ccccggtgctcttgatggattttat

SEQ ID NO: 151865 - DNA, 25 bp, Homo sapien
gctggctgaccccggtgctcttgat

SEQ ID NO: 151866 - DNA, 25 bp, Homo sapien
cttacagacaaggagcatggccagg

SEQ ID NO: 151867 - DNA, 25 bp, Homo sapien
gacacttgctatggataggccccag

SEQ ID NO: 151868 - DNA, 25 bp, Homo sapien
taagtaagttctcccggcttgcgaa

SEQ ID NO: 151869 - DNA, 25 bp, Homo sapien
tgtcaaatgatcaatccacagcggg

SEQ ID NO: 151870 - DNA, 25 bp, Homo sapien
taaaacctaccacgatacctctctg

SEQ ID NO: 151871 - DNA, 25 bp, Homo sapien
taatccgctcggtctgtgggaggaa

SEQ ID NO: 151872 - DNA, 25 bp, Homo sapien
gagccattgtgtcagaatgtccggg

SEQ ID NO: 151873 - DNA, 25 bp, Homo sapien
ggcttctgtgcgcaggatctccagg

SEQ ID NO: 151874 - DNA, 25 bp, Homo sapien
ctgtggttccgcccagccacttggg

SEQ ID NO: 151875 - DNA, 25 bp, Homo sapien
tgccctgtggttccgcccagccact

SEQ ID NO: 151876 - DNA, 25 bp, Homo sapien
tgtggttccgcccagccacttggga

SEQ ID NO: 151877 - DNA, 25 bp, Homo sapien
gccctgtggttccgcccagccactt

SEQ ID NO: 151878 - DNA, 25 bp, Homo sapien
catctccttgtcttacgggcctcat

SEQ ID NO: 151879 - DNA, 25 bp, Homo sapien
ttggtaaacctgatggtggcctggc

SEQ ID NO: 151880 - DNA, 25 bp, Homo sapien
tcttacgggcctcatctgcctgtag

SEQ ID NO: 151881 - DNA, 25 bp, Homo sapien
ctggcacctaatgggtacttggtaa

SEQ ID NO: 151882 - DNA, 25 bp, Homo sapien
ttggagggttgctgtggctttgtca

SEQ ID NO: 151883 - DNA, 25 bp, Homo sapien
ctccgacaggggcttctcgggtttg

SEQ ID NO: 151884 - DNA, 25 bp, Homo sapien
gcttctcgggtttggagggttgctg

SEQ ID NO: 151885 - DNA, 25 bp, Homo sapien
cgggtttggagggttgctgtggctt

SEQ ID NO: 151886 - DNA, 25 bp, Homo sapien
cagtctcggtgatttgggacttgag

SEQ ID NO: 151887 - DNA, 25 bp, Homo sapien
ctgggtcaggttcccgtcagtgacg

SEQ ID NO: 151888 - DNA, 25 bp, Homo sapien
tcagtgacgcttccttcagttttct

SEQ ID NO: 151889 - DNA, 25 bp, Homo sapien
tcacagtctcggtgatttgggactt

SEQ ID NO: 151890 - DNA, 25 bp, Homo sapien
cagaacaaccctgttccagaaatcc

SEQ ID NO: 151891 - DNA, 25 bp, Homo sapien
gggcaatggcatccatccttttggc

SEQ ID NO: 151892 - DNA, 25 bp, Homo sapien
cagaggctggaccttaggaagtgcc

SEQ ID NO: 151893 - DNA, 25 bp, Homo sapien
agaggcagctctgtccagaacaacc

SEQ ID NO: 151894 - DNA, 25 bp, Homo sapien
cgctcacggacaggtatggatggaa

SEQ ID NO: 151895 - DNA, 25 bp, Homo sapien
agcctgtgccaaggcgtgacgctgt

SEQ ID NO: 151896 - DNA, 25 bp, Homo sapien
ggagccaggagtccttcaacacgga

SEQ ID NO: 151897 - DNA, 25 bp, Homo sapien
ccaggtgtggacacatgctcgtcaa

SEQ ID NO: 151898 - DNA, 25 bp, Homo sapien
ggtggacctgtcaggttggacaagc

SEQ ID NO: 151899 - DNA, 25 bp, Homo sapien
tggtggacctgtcaggttggacaag

SEQ ID NO: 151900 - DNA, 25 bp, Homo sapien
ctggtggacctgtcaggttggacaa

SEQ ID NO: 151901 - DNA, 25 bp, Homo sapien
cctctggatggcccctgggagtgct

SEQ ID NO: 151902 - DNA, 25 bp, Homo sapien
cccctgggagtgctcccacagccat

SEQ ID NO: 151903 - DNA, 25 bp, Homo sapien
ggcccctgggagtgctcccacagcc

SEQ ID NO: 151904 - DNA, 25 bp, Homo sapien
gatggcccctgggagtgctcccaca

SEQ ID NO: 151905 - DNA, 25 bp, Homo sapien
ttctggggcttcgtcttgctgctct

SEQ ID NO: 151906 - DNA, 25 bp, Homo sapien
tcatcttgcagggatgtgggtttga

SEQ ID NO: 151907 - DNA, 25 bp, Homo sapien
atggctgaactgatcatcttgcagg

SEQ ID NO: 151908 - DNA, 25 bp, Homo sapien
cagtttgcaagtcaccctgaaggcc

SEQ ID NO: 151909 - DNA, 25 bp, Homo sapien
tggcagtttgcaagtcaccctgaag

SEQ ID NO: 151910 - DNA, 25 bp, Homo sapien
cgttcaggtgcactgtgacccggct

SEQ ID NO: 151911 - DNA, 25 bp, Homo sapien
tgcatatcatgaggttaagcccagt

SEQ ID NO: 151912 - DNA, 25 bp, Homo sapien
tgaagaaagggcacccacgtttgtg

SEQ ID NO: 151913 - DNA, 25 bp, Homo sapien
cccagttgaagcgagtagcaattct

SEQ ID NO: 151914 - DNA, 25 bp, Homo sapien
ctcaagtgaaaaatccttggatgag

SEQ ID NO: 151915 - DNA, 25 bp, Homo sapien
atccttggatgagacatcaacaggc

SEQ ID NO: 151916 - DNA, 25 bp, Homo sapien
gatgagacatcaacaggcacctttt

SEQ ID NO: 151917 - DNA, 25 bp, Homo sapien
ctgggactcaagtgaaaaatccttg

SEQ ID NO: 151918 - DNA, 25 bp, Homo sapien
ctgaggacaacatccacatggggga

SEQ ID NO: 151919 - DNA, 25 bp, Homo sapien
gccctgaggacaacatccacatggg

SEQ ID NO: 151920 - DNA, 25 bp, Homo sapien
aggccctgaggacaacatccacatg

SEQ ID NO: 151921 - DNA, 25 bp, Homo sapien
cctgaggacaacatccacatggggg

SEQ ID NO: 151922 - DNA, 25 bp, Homo sapien
cccctcgccaggcaccacaccaggg

SEQ ID NO: 151923 - DNA, 25 bp, Homo sapien
tcccctcgccaggcaccacaccagg

SEQ ID NO: 151924 - DNA, 25 bp, Homo sapien
ccctcgccaggcaccacaccagggg

SEQ ID NO: 151925 - DNA, 25 bp, Homo sapien
gtggagtagagcttgtgactccgcc

SEQ ID NO: 151926 - DNA, 25 bp, Homo sapien
cagcctcgtcgggtggagtagagct

SEQ ID NO: 151927 - DNA, 25 bp, Homo sapien
agagcttgtgactccgccagctcca

SEQ ID NO: 151928 - DNA, 25 bp, Homo sapien
gagtagagcttgtgactccgccagc

SEQ ID NO: 151929 - DNA, 25 bp, Homo sapien
tgaatctcctctagggtgtagtact

SEQ ID NO: 151930 - DNA, 25 bp, Homo sapien
ggtgtagtacttcacggcctcgtcc

SEQ ID NO: 151931 - DNA, 25 bp, Homo sapien
cctctagggtgtagtacttcacggc

SEQ ID NO: 151932 - DNA, 25 bp, Homo sapien
cttctgaatctcctctagggtgtag

SEQ ID NO: 151933 - DNA, 25 bp, Homo sapien
tgtgccttgataggcgacggccact

SEQ ID NO: 151934 - DNA, 25 bp, Homo sapien
tggacaattccatggcatctcaaag

SEQ ID NO: 151935 - DNA, 25 bp, Homo sapien
gctgacatggcagggatcactcagt

SEQ ID NO: 151936 - DNA, 25 bp, Homo sapien
caactggagctagaatcaacagcag

SEQ ID NO: 151937 - DNA, 25 bp, Homo sapien
ctgattaaaacatttgccgggcaaa

SEQ ID NO: 151938 - DNA, 25 bp, Homo sapien
gcttagagtctttctgattaaaaca

SEQ ID NO: 151939 - DNA, 25 bp, Homo sapien
agcttagagtctttctgattaaaac

SEQ ID NO: 151940 - DNA, 25 bp, Homo sapien
atttgccgggcaaattcctcttcat

SEQ ID NO: 151941 - DNA, 25 bp, Homo sapien
tggactggggagcagagaaagtcaa

SEQ ID NO: 151942 - DNA, 25 bp, Homo sapien
ctgtggactggggagcagagaaagt

SEQ ID NO: 151943 - DNA, 25 bp, Homo sapien
tgtggactggggagcagagaaagtc

SEQ ID NO: 151944 - DNA, 25 bp, Homo sapien
ggactggggagcagagaaagtcaat

SEQ ID NO: 151945 - DNA, 25 bp, Homo sapien
catgaaaacctggatagtgttagca

SEQ ID NO: 151946 - DNA, 25 bp, Homo sapien
acatgaaaacctggatagtgttagc

SEQ ID NO: 151947 - DNA, 25 bp, Homo sapien
atgaaaacctggatagtgttagcaa

SEQ ID NO: 151948 - DNA, 25 bp, Homo sapien
tccatagagggacatgtgttctcct

SEQ ID NO: 151949 - DNA, 25 bp, Homo sapien
ctgggctctgcctcgcagactctga

SEQ ID NO: 151950 - DNA, 25 bp, Homo sapien
tctgcctcgcagactctgattggtc

SEQ ID NO: 151951 - DNA, 25 bp, Homo sapien
ctgattggtccatagagggacatgt

SEQ ID NO: 151952 - DNA, 25 bp, Homo sapien
tcagttccagggctgccagcagtcc

SEQ ID NO: 151953 - DNA, 25 bp, Homo sapien
tagtccattcaacggccagagggct

SEQ ID NO: 151954 - DNA, 25 bp, Homo sapien
cagtgaggtgttcacctctagtcca

SEQ ID NO: 151955 - DNA, 25 bp, Homo sapien
tgagttaacgtgcaacttgcccagc

SEQ ID NO: 151956 - DNA, 25 bp, Homo sapien
tcaggcctaggctctgattgttccg

SEQ ID NO: 151957 - DNA, 25 bp, Homo sapien
atgtgcacgggccttggaagtaccc

SEQ ID NO: 151958 - DNA, 25 bp, Homo sapien
aagtacccactgctgagctgcagaa

SEQ ID NO: 151959 - DNA, 25 bp, Homo sapien
tcaggggccatgtgcacgggccttg

SEQ ID NO: 151960 - DNA, 25 bp, Homo sapien
cacgggccttggaagtacccactgc

SEQ ID NO: 151961 - DNA, 25 bp, Homo sapien
cactatctgtgtgcagtgctctgag

SEQ ID NO: 151962 - DNA, 25 bp, Homo sapien
tgatgaagatcctgagcggaggtta

SEQ ID NO: 151963 - DNA, 25 bp, Homo sapien
tatcagcttgtttggtactaggtgc

SEQ ID NO: 151964 - DNA, 25 bp, Homo sapien
cagacaaggcttgggtgtatatgcc

SEQ ID NO: 151965 - DNA, 25 bp, Homo sapien
aatttttagcgggagagggcatgac

SEQ ID NO: 151966 - DNA, 25 bp, Homo sapien
gcttactgcggagactagtcacgcc

SEQ ID NO: 151967 - DNA, 25 bp, Homo sapien
ggaaagcgctattgattgccggcat

SEQ ID NO: 151968 - DNA, 25 bp, Homo sapien
gatggacatgaaccctcggaaagcg

SEQ ID NO: 151969 - DNA, 25 bp, Homo sapien
tggtggccagcccgcccgccgtccc

SEQ ID NO: 151970 - DNA, 25 bp, Homo sapien
ctgtcccgtggtggccagcccgccc

SEQ ID NO: 151971 - DNA, 25 bp, Homo sapien
cttcctgtcccgtggtggccagccc

SEQ ID NO: 151972 - DNA, 25 bp, Homo sapien
agcccgcccgccgtcccggatgccg

SEQ ID NO: 151973 - DNA, 25 bp, Homo sapien
tggagcaccagctactagtgattaa

SEQ ID NO: 151974 - DNA, 25 bp, Homo sapien
ggtcacccggctaggagaaaggtga

SEQ ID NO: 151975 - DNA, 25 bp, Homo sapien
gcagggaggcgtccccgccacttgg

SEQ ID NO: 151976 - DNA, 25 bp, Homo sapien
tagtgattaagaacggcgtgactgc

SEQ ID NO: 151977 - DNA, 25 bp, Homo sapien
cttcctgttcccacggcaagcgtta

SEQ ID NO: 151978 - DNA, 25 bp, Homo sapien
aatcgggtggctttggcatttcaga

SEQ ID NO: 151979 - DNA, 25 bp, Homo sapien
gagtcactcagctctgaataatcgg

SEQ ID NO: 151980 - DNA, 25 bp, Homo sapien
ttcccacggcaagcgttaaagagtc

SEQ ID NO: 151981 - DNA, 25 bp, Homo sapien
gctgatctgattagaagccttgaca

SEQ ID NO: 151982 - DNA, 25 bp, Homo sapien
taactgccaagcatatagggatgat

SEQ ID NO: 151983 - DNA, 25 bp, Homo sapien
cctggtggcgattgcaaataactgc

SEQ ID NO: 151984 - DNA, 25 bp, Homo sapien
tacgtgtcaatcagttgtagtctgc

SEQ ID NO: 151985 - DNA, 25 bp, Homo sapien
tcagactccatataggactggcagt

SEQ ID NO: 151986 - DNA, 25 bp, Homo sapien
aactgcagtcttgtgatcagactcc

SEQ ID NO: 151987 - DNA, 25 bp, Homo sapien
tattcagataaagatagctccctaa

SEQ ID NO: 151988 - DNA, 25 bp, Homo sapien
ctggcagttttgtaatcgtagggaa

SEQ ID NO: 151989 - DNA, 25 bp, Homo sapien
ggagcgtacgttctcagggccttct

SEQ ID NO: 151990 - DNA, 25 bp, Homo sapien
tgcagtgagccgaaggttccagtga

SEQ ID NO: 151991 - DNA, 25 bp, Homo sapien
aacctgctagattttcattgaacac

SEQ ID NO: 151992 - DNA, 25 bp, Homo sapien
ttctaaatcagtagcattggagcgt

SEQ ID NO: 151993 - DNA, 25 bp, Homo sapien
ctcttgtggcccatgcgatcttggc

SEQ ID NO: 151994 - DNA, 25 bp, Homo sapien
tcttgtggcccatgcgatcttggct

SEQ ID NO: 151995 - DNA, 25 bp, Homo sapien
tgctcttgtggcccatgcgatcttg

SEQ ID NO: 151996 - DNA, 25 bp, Homo sapien
gctcttgtggcccatgcgatcttgg

SEQ ID NO: 151997 - DNA, 25 bp, Homo sapien
agactcaggatttatgcttctgcca

SEQ ID NO: 151998 - DNA, 25 bp, Homo sapien
cctaaagatgcaactgtttctcaaa

SEQ ID NO: 151999 - DNA, 25 bp, Homo sapien
cttctgccactagttgcctttcaaa

SEQ ID NO: 152000 - DNA, 25 bp, Homo sapien
tctgtggccctcagtttattatgta

SEQ ID NO: 152001 - DNA, 25 bp, Homo sapien
taaagttactctttgaaacagctcc

SEQ ID NO: 152002 - DNA, 25 bp, Homo sapien
cacctgacaaatctgccttctgtgg

SEQ ID NO: 152003 - DNA, 25 bp, Homo sapien
gaacaggaaagtcagccgcacaatc

SEQ ID NO: 152004 - DNA, 25 bp, Homo sapien
aagtaagtccttttgcgtcacagaa

SEQ ID NO: 152005 - DNA, 25 bp, Homo sapien
ccatgcccggactaatcaactttta

SEQ ID NO: 152006 - DNA, 25 bp, Homo sapien
tagaaaaagttatggatggtcagaa

SEQ ID NO: 152007 - DNA, 25 bp, Homo sapien
gcagccttccactaagtactcttgg

SEQ ID NO: 152008 - DNA, 25 bp, Homo sapien
ggcaatcaaaacagtgccaactaga

SEQ ID NO: 152009 - DNA, 25 bp, Homo sapien
gccggacgcgggctgatttccgcct

SEQ ID NO: 152010 - DNA, 25 bp, Homo sapien
tctggaagcttagcggtcaccatgg

SEQ ID NO: 152011 - DNA, 25 bp, Homo sapien
agaagctgcgggtgtcctgtgaggc

SEQ ID NO: 152012 - DNA, 25 bp, Homo sapien
tggcgcttcccggtgtcgtgttctg

SEQ ID NO: 152013 - DNA, 25 bp, Homo sapien
cggaggcgggaaaagcggccgtgag

SEQ ID NO: 152014 - DNA, 25 bp, Homo sapien
ggaggagcgacttccgacaaacgga

SEQ ID NO: 152015 - DNA, 25 bp, Homo sapien
ctgtcagccgaacagcggctcggcc

SEQ ID NO: 152016 - DNA, 25 bp, Homo sapien
gggcccgagtgccaggaaccaatga

SEQ ID NO: 152017 - DNA, 25 bp, Homo sapien
acgtcgaccaacgataccacgggct

SEQ ID NO: 152018 - DNA, 25 bp, Homo sapien
tcctcaaggacgtcgaccaacgata

SEQ ID NO: 152019 - DNA, 25 bp, Homo sapien
tcctcgtcctcctcaaggacgtcga

SEQ ID NO: 152020 - DNA, 25 bp, Homo sapien
acagcgcacgcctcattctccagct

SEQ ID NO: 152021 - DNA, 25 bp, Homo sapien
actacaggcatatagtgcttgtctc

SEQ ID NO: 152022 - DNA, 25 bp, Homo sapien
taactgcaagctaaacaaattcctg

SEQ ID NO: 152023 - DNA, 25 bp, Homo sapien
tgacattcataactgcaagctaaac

SEQ ID NO: 152024 - DNA, 25 bp, Homo sapien
gctcaaatagtttgtgacttccatg

SEQ ID NO: 152025 - DNA, 25 bp, Homo sapien
ctgtttccacaatcacaacgaaaat

SEQ ID NO: 152026 - DNA, 25 bp, Homo sapien
tgtttccacaatcacaacgaaaatt

SEQ ID NO: 152027 - DNA, 25 bp, Homo sapien
aggaagtaatttgcattccaaattt

SEQ ID NO: 152028 - DNA, 25 bp, Homo sapien
acttattgccagaatttacctttgc

SEQ ID NO: 152029 - DNA, 25 bp, Homo sapien
ctcttgcaaatgcagtacaatccaa

SEQ ID NO: 152030 - DNA, 25 bp, Homo sapien
caatccaaaaaagttgtcattgtac

SEQ ID NO: 152031 - DNA, 25 bp, Homo sapien
cattgtacttattgccagaatttac

SEQ ID NO: 152032 - DNA, 25 bp, Homo sapien
gtcttcacagactacgcactggatc

SEQ ID NO: 152033 - DNA, 25 bp, Homo sapien
cttcacagactacgcactggatcat

SEQ ID NO: 152034 - DNA, 25 bp, Homo sapien
tggaaccagtcttcacagactacgc

SEQ ID NO: 152035 - DNA, 25 bp, Homo sapien
ccagtcttcacagactacgcactgg

SEQ ID NO: 152036 - DNA, 25 bp, Homo sapien
cactctcagggggaatggcaccaag

SEQ ID NO: 152037 - DNA, 25 bp, Homo sapien
aaagaacaacgtttcatgcaggcct

SEQ ID NO: 152038 - DNA, 25 bp, Homo sapien
ggcctggcataccatctcctgaaaa

SEQ ID NO: 152039 - DNA, 25 bp, Homo sapien
gcagcataagcccacaaaaaagaac

SEQ ID NO: 152040 - DNA, 25 bp, Homo sapien
tctactttaacctcccggacatcat

SEQ ID NO: 152041 - DNA, 25 bp, Homo sapien
ttcagaactagagccggcacatggt

SEQ ID NO: 152042 - DNA, 25 bp, Homo sapien
gatcacctattccatcaatgttccg

SEQ ID NO: 152043 - DNA, 25 bp, Homo sapien
tctttgagggtactatcttgatgct

SEQ ID NO: 152044 - DNA, 25 bp, Homo sapien
ttcttgatggctcgtacttcacaca

SEQ ID NO: 152045 - DNA, 25 bp, Homo sapien
atttcttgatggctcgtacttcaca

SEQ ID NO: 152046 - DNA, 25 bp, Homo sapien
tgatggctcgtacttcacacattac

SEQ ID NO: 152047 - DNA, 25 bp, Homo sapien
tcttgatggctcgtacttcacacat

SEQ ID NO: 152048 - DNA, 25 bp, Homo sapien
aagccataagtttacagaattaatt

SEQ ID NO: 152049 - DNA, 25 bp, Homo sapien
tttcatagtttagattttgtaaaga

SEQ ID NO: 152050 - DNA, 25 bp, Homo sapien
aatccaaagccataagtttacagaa

SEQ ID NO: 152051 - DNA, 25 bp, Homo sapien
catagttttcatagtttagattttg

SEQ ID NO: 152052 - DNA, 25 bp, Homo sapien
gctttaagctcctgaagtttgcagc

SEQ ID NO: 152053 - DNA, 25 bp, Homo sapien
cacaacttgctacgccagttcaggg

SEQ ID NO: 152054 - DNA, 25 bp, Homo sapien
tgtctttctttataagctgcttagc

SEQ ID NO: 152055 - DNA, 25 bp, Homo sapien
cagtcttggcaggtacacaacttgc

SEQ ID NO: 152056 - DNA, 25 bp, Homo sapien
tggcctgggcaatcttccctttgtt

SEQ ID NO: 152057 - DNA, 25 bp, Homo sapien
tggactctattcatgctgctaaggg

SEQ ID NO: 152058 - DNA, 25 bp, Homo sapien
catctgtcaggaataagacatctag

SEQ ID NO: 152059 - DNA, 25 bp, Homo sapien
gttttcataagccagaactgtgtcg

SEQ ID NO: 152060 - DNA, 25 bp, Homo sapien
gagatagtctttaagttcagtcttc

SEQ ID NO: 152061 - DNA, 25 bp, Homo sapien
cttgagatagtctttaagttcagtc

SEQ ID NO: 152062 - DNA, 25 bp, Homo sapien
tagtctttaagttcagtcttcaaat

SEQ ID NO: 152063 - DNA, 25 bp, Homo sapien
tttaagttcagtcttcaaatcattg

SEQ ID NO: 152064 - DNA, 25 bp, Homo sapien
taagtaacagaatcgcaatccgagg

SEQ ID NO: 152065 - DNA, 25 bp, Homo sapien
caatccgaggtcatagcattcacaa

SEQ ID NO: 152066 - DNA, 25 bp, Homo sapien
ttatgaaagagaactaagtaacaga

SEQ ID NO: 152067 - DNA, 25 bp, Homo sapien
gaatcgcaatccgaggtcatagcat

SEQ ID NO: 152068 - DNA, 25 bp, Homo sapien
gctgcagtaatactgcatcccatcc

SEQ ID NO: 152069 - DNA, 25 bp, Homo sapien
gctgaatgtcctctctcttaacaac

SEQ ID NO: 152070 - DNA, 25 bp, Homo sapien
ctagctgcagtaatactgcatccca

SEQ ID NO: 152071 - DNA, 25 bp, Homo sapien
tgcagtaatactgcatcccatccac

SEQ ID NO: 152072 - DNA, 25 bp, Homo sapien
cgcattttcattggcttgaatgaga

SEQ ID NO: 152073 - DNA, 25 bp, Homo sapien
ttcattggcttgaatgagaaagctt

SEQ ID NO: 152074 - DNA, 25 bp, Homo sapien
gggaagcgcattttcattggcttga

SEQ ID NO: 152075 - DNA, 25 bp, Homo sapien
gaatgggaagcgcattttcattggc

SEQ ID NO: 152076 - DNA, 25 bp, Homo sapien
cctgagtgccgaagaacatggttgt

SEQ ID NO: 152077 - DNA, 25 bp, Homo sapien
aactcatcattcgtgcagcctcggg

SEQ ID NO: 152078 - DNA, 25 bp, Homo sapien
tctaggtgacgggaagagagccttc

SEQ ID NO: 152079 - DNA, 25 bp, Homo sapien
ttaatatacatggtggccccacagc

SEQ ID NO: 152080 - DNA, 25 bp, Homo sapien
tgaacactgtgactggtcacagccc

SEQ ID NO: 152081 - DNA, 25 bp, Homo sapien
tttgttctgctgttcatctagaccc

SEQ ID NO: 152082 - DNA, 25 bp, Homo sapien
ctagaccccaattattagaccccag

SEQ ID NO: 152083 - DNA, 25 bp, Homo sapien
agcccagcccattgctttgttctgc

SEQ ID NO: 152084 - DNA, 25 bp, Homo sapien
agagggtgaggaggcggagccagga

SEQ ID NO: 152085 - DNA, 25 bp, Homo sapien
tgaggaggcggagccaggaaagcct

SEQ ID NO: 152086 - DNA, 25 bp, Homo sapien
ggtgaggaggcggagccaggaaagc

SEQ ID NO: 152087 - DNA, 25 bp, Homo sapien
aggaggcggagccaggaaagcctgc

SEQ ID NO: 152088 - DNA, 25 bp, Homo sapien
gagagctcgccgctgctttgagcct

SEQ ID NO: 152089 - DNA, 25 bp, Homo sapien
cagttccgtacaaccacgtccattt

SEQ ID NO: 152090 - DNA, 25 bp, Homo sapien
taagctgtgtccctcggagagctcg

SEQ ID NO: 152091 - DNA, 25 bp, Homo sapien
gagtgttcctgtgcccgctgctggc

SEQ ID NO: 152092 - DNA, 25 bp, Homo sapien
cacattttattctgaatcatcaagt

SEQ ID NO: 152093 - DNA, 25 bp, Homo sapien
tcatcatcgttttctcggaaatcac

SEQ ID NO: 152094 - DNA, 25 bp, Homo sapien
tattctgaatcatcaagttcattat

SEQ ID NO: 152095 - DNA, 25 bp, Homo sapien
tcgttttctcggaaatcacacattt

SEQ ID NO: 152096 - DNA, 25 bp, Homo sapien
tttacacgctagagccgagaggacg

SEQ ID NO: 152097 - DNA, 25 bp, Homo sapien
gattgcggaccgatgcgacttgcag

SEQ ID NO: 152098 - DNA, 25 bp, Homo sapien
gacatgttcatgtactgcgccggta

SEQ ID NO: 152099 - DNA, 25 bp, Homo sapien
gatcgtggacaatcaggcctttgga

SEQ ID NO: 152100 - DNA, 25 bp, Homo sapien
tacatgtcctacttgaactccactg

SEQ ID NO: 152101 - DNA, 25 bp, Homo sapien
cactgggacgctggtttggcattta

SEQ ID NO: 152102 - DNA, 25 bp, Homo sapien
cacacagccgtagcacttagaagaa

SEQ ID NO: 152103 - DNA, 25 bp, Homo sapien
ggcatttactaaaccactgagcaca

SEQ ID NO: 152104 - DNA, 25 bp, Homo sapien
tgggcttcattcctccagcgggagt

SEQ ID NO: 152105 - DNA, 25 bp, Homo sapien
tagttcagagatcttcccgctcagc

SEQ ID NO: 152106 - DNA, 25 bp, Homo sapien
cacagtgtggatgcagtcagaatcc

SEQ ID NO: 152107 - DNA, 25 bp, Homo sapien
cctgtgatcggcacttcggaaggcc

SEQ ID NO: 152108 - DNA, 25 bp, Homo sapien
caatccatgtgcattggattgcaca

SEQ ID NO: 152109 - DNA, 25 bp, Homo sapien
tctaccaatccatgtgcattggatt

SEQ ID NO: 152110 - DNA, 25 bp, Homo sapien
tctttgaacaattatgtcgggaggc

SEQ ID NO: 152111 - DNA, 25 bp, Homo sapien
caattatgtcgggaggcatttttaa

SEQ ID NO: 152112 - DNA, 25 bp, Homo sapien
cagttgagctcagcgcactcaacct

SEQ ID NO: 152113 - DNA, 25 bp, Homo sapien
tgagctcagcgcactcaaccttcag

SEQ ID NO: 152114 - DNA, 25 bp, Homo sapien
gcactcaaccttcagcacagtcttt

SEQ ID NO: 152115 - DNA, 25 bp, Homo sapien
agcgcactcaaccttcagcacagtc

SEQ ID NO: 152116 - DNA, 25 bp, Homo sapien
ccctggtgcatagtcaggactcaaa

SEQ ID NO: 152117 - DNA, 25 bp, Homo sapien
gaatctgctctgtgtacaccttgaa

SEQ ID NO: 152118 - DNA, 25 bp, Homo sapien
tgtgcaccctaatatccaagtccaa

SEQ ID NO: 152119 - DNA, 25 bp, Homo sapien
aactcgggctgttcagtatgatcaa

SEQ ID NO: 152120 - DNA, 25 bp, Homo sapien
aggagagtttggaatggaggactca

SEQ ID NO: 152121 - DNA, 25 bp, Homo sapien
ttggtgttaaaacagcgaagtacat

SEQ ID NO: 152122 - DNA, 25 bp, Homo sapien
cttaggcaaactagcagtctccatt

SEQ ID NO: 152123 - DNA, 25 bp, Homo sapien
ttaaaacagcgaagtacatatttcc

SEQ ID NO: 152124 - DNA, 25 bp, Homo sapien
taggcaaactagcagtctccattgg

SEQ ID NO: 152125 - DNA, 25 bp, Homo sapien
aaaggcctctgggattatactctga

SEQ ID NO: 152126 - DNA, 25 bp, Homo sapien
tatactctgaagaacccgcagacgg

SEQ ID NO: 152127 - DNA, 25 bp, Homo sapien
ccgcagacggaatgcctgagtgact

SEQ ID NO: 152128 - DNA, 25 bp, Homo sapien
ctcattcatgttccccgagggtagg

SEQ ID NO: 152129 - DNA, 25 bp, Homo sapien
tagactcagtctccgtaatgtgaag

SEQ ID NO: 152130 - DNA, 25 bp, Homo sapien
tcaggcttactctagggttcaccca

SEQ ID NO: 152131 - DNA, 25 bp, Homo sapien
tcatcagaatggagtgactagccag

SEQ ID NO: 152132 - DNA, 25 bp, Homo sapien
taattcatagggctagtcacatgcc

SEQ ID NO: 152133 - DNA, 25 bp, Homo sapien
gattatgtcataaggtctcaggaac

SEQ ID NO: 152134 - DNA, 25 bp, Homo sapien
tcaggaaccaatttgaataaggctc

SEQ ID NO: 152135 - DNA, 25 bp, Homo sapien
ggaagtacatactacctgccacctg

SEQ ID NO: 152136 - DNA, 25 bp, Homo sapien
taaggctctactgtccaaagatggg

SEQ ID NO: 152137 - DNA, 25 bp, Homo sapien
gagcaaaaataatgcgcgcgcactc

SEQ ID NO: 152138 - DNA, 25 bp, Homo sapien
cacaattcgctggactaagcaggat

SEQ ID NO: 152139 - DNA, 25 bp, Homo sapien
ccggccgccgaacggaaacatgaat

SEQ ID NO: 152140 - DNA, 25 bp, Homo sapien
gaaatggccatctggtgacgtagta

SEQ ID NO: 152141 - DNA, 25 bp, Homo sapien
tgccaagaagcagccaccggaatgc

SEQ ID NO: 152142 - DNA, 25 bp, Homo sapien
tcagcaatgactttccgcggaagag

SEQ ID NO: 152143 - DNA, 25 bp, Homo sapien
gccaccggaatgccaggactgtcag

SEQ ID NO: 152144 - DNA, 25 bp, Homo sapien
agagttgttctcgagaaagatgcac

SEQ ID NO: 152145 - DNA, 25 bp, Homo sapien
gtttagaatcccatgtaccaggttg

SEQ ID NO: 152146 - DNA, 25 bp, Homo sapien
taaagaagcagtgtttacacaccgc

SEQ ID NO: 152147 - DNA, 25 bp, Homo sapien
aaagtcggccctctcaatacggtgt

SEQ ID NO: 152148 - DNA, 25 bp, Homo sapien
taccaggttgcattgatcgatccgc

SEQ ID NO: 152149 - DNA, 25 bp, Homo sapien
caggccttactggtgagaccttaga

SEQ ID NO: 152150 - DNA, 25 bp, Homo sapien
gctcggcttgtgctaccagcctgga

SEQ ID NO: 152151 - DNA, 25 bp, Homo sapien
caggtgttgcttcgccagctggaaa

SEQ ID NO: 152152 - DNA, 25 bp, Homo sapien
cggcagcacctctgcttgagttttg

SEQ ID NO: 152153 - DNA, 25 bp, Homo sapien
cgcgtcaggtgagacaaagccaggc

SEQ ID NO: 152154 - DNA, 25 bp, Homo sapien
atcgcgtcaggtgagacaaagccag

SEQ ID NO: 152155 - DNA, 25 bp, Homo sapien
cgtcaggtgagacaaagccaggcgt

SEQ ID NO: 152156 - DNA, 25 bp, Homo sapien
ggtgaggccaagtaacgcaagctcc

SEQ ID NO: 152157 - DNA, 25 bp, Homo sapien
cgagtgggcgaagcggggagcgggc

SEQ ID NO: 152158 - DNA, 25 bp, Homo sapien
gacagcgcccacgcaggagaggcat

SEQ ID NO: 152159 - DNA, 25 bp, Homo sapien
gcggcagacaggggccgctggcgcg

SEQ ID NO: 152160 - DNA, 25 bp, Homo sapien
ccccgagtgggcgaagcggggagcg

SEQ ID NO: 152161 - DNA, 25 bp, Homo sapien
aacaccacaagtccaacagccattt

SEQ ID NO: 152162 - DNA, 25 bp, Homo sapien
tgcctagcacatatgcagctggtgt

SEQ ID NO: 152163 - DNA, 25 bp, Homo sapien
tgaactgcttcaggttgcctagcac

SEQ ID NO: 152164 - DNA, 25 bp, Homo sapien
cagctggtgttaagaaggtcgtaaa

SEQ ID NO: 152165 - DNA, 25 bp, Homo sapien
ggttgcatcaactcaactaggcaat

SEQ ID NO: 152166 - DNA, 25 bp, Homo sapien
ttttttggacgttaacagctgttca

SEQ ID NO: 152167 - DNA, 25 bp, Homo sapien
aagtgaataccacaatggttgcatc

SEQ ID NO: 152168 - DNA, 25 bp, Homo sapien
taggcaattttgctcgttaacaaaa

SEQ ID NO: 152169 - DNA, 25 bp, Homo sapien
gactcagagttgaactatgttgccc

SEQ ID NO: 152170 - DNA, 25 bp, Homo sapien
ttaagtccccattacagagataagg

SEQ ID NO: 152171 - DNA, 25 bp, Homo sapien
tgtggcatggcagtactaatagaac

SEQ ID NO: 152172 - DNA, 25 bp, Homo sapien
aagaaatggttgtacttctcacagc

SEQ ID NO: 152173 - DNA, 25 bp, Homo sapien
tatctaaagataacccaaaagtcaa

SEQ ID NO: 152174 - DNA, 25 bp, Homo sapien
gagaatacatgactcttagtaatag

SEQ ID NO: 152175 - DNA, 25 bp, Homo sapien
cccataaatgggctttatctaaaga

SEQ ID NO: 152176 - DNA, 25 bp, Homo sapien
tttaatcagacacagagtctgttca

SEQ ID NO: 152177 - DNA, 25 bp, Homo sapien
ctcttggttgaggttagcatgatat

SEQ ID NO: 152178 - DNA, 25 bp, Homo sapien
gggtcacgtcttctggtccactctg

SEQ ID NO: 152179 - DNA, 25 bp, Homo sapien
tgaagtaggtatcttgcagacaata

SEQ ID NO: 152180 - DNA, 25 bp, Homo sapien
ggattgtatttcaagaactgactct

SEQ ID NO: 152181 - DNA, 25 bp, Homo sapien
tgatacatatcagcctattcagatt

SEQ ID NO: 152182 - DNA, 25 bp, Homo sapien
tccaaggaattaggttgtgcacact

SEQ ID NO: 152183 - DNA, 25 bp, Homo sapien
cttgcagaatgtgttagaaagtatt

SEQ ID NO: 152184 - DNA, 25 bp, Homo sapien
ttgagttttggcagactgtcttcca

SEQ ID NO: 152185 - DNA, 25 bp, Homo sapien
agaaaatgtatctgagaactcctgt

SEQ ID NO: 152186 - DNA, 25 bp, Homo sapien
agtagaaaatgtatctgagaactcc

SEQ ID NO: 152187 - DNA, 25 bp, Homo sapien
tgaagggatatgtgatgaaaatgaa

SEQ ID NO: 152188 - DNA, 25 bp, Homo sapien
aaatgtatctgagaactcctgttgg

SEQ ID NO: 152189 - DNA, 25 bp, Homo sapien
tccacagtcaatatttcaaaccgaa

SEQ ID NO: 152190 - DNA, 25 bp, Homo sapien
tcaaaccgaattaacagtcctgtgt

SEQ ID NO: 152191 - DNA, 25 bp, Homo sapien
tgtcagagaagatgccgattaagga

SEQ ID NO: 152192 - DNA, 25 bp, Homo sapien
cactcatccacagtcaatatttcaa

SEQ ID NO: 152193 - DNA, 25 bp, Homo sapien
gtttccaaaaagttatacagctaga

SEQ ID NO: 152194 - DNA, 25 bp, Homo sapien
gaaaagttacctgtcactccaattg

SEQ ID NO: 152195 - DNA, 25 bp, Homo sapien
gcccacactgttaggtgatatttaa

SEQ ID NO: 152196 - DNA, 25 bp, Homo sapien
aactgaatacgactccccattttgt

SEQ ID NO: 152197 - DNA, 25 bp, Homo sapien
ggcctgtaaatcctgctcccggagc

SEQ ID NO: 152198 - DNA, 25 bp, Homo sapien
cattggcgttctccgggcctgtaaa

SEQ ID NO: 152199 - DNA, 25 bp, Homo sapien
aggtgcgtcccacgcttcgtctcaa

SEQ ID NO: 152200 - DNA, 25 bp, Homo sapien
accagagagggacccaggtgcgtcc

SEQ ID NO: 152201 - DNA, 25 bp, Homo sapien
ccagagaaaagcctcttaaagcgcc

SEQ ID NO: 152202 - DNA, 25 bp, Homo sapien
agagaaaagcctcttaaagcgccgg

SEQ ID NO: 152203 - DNA, 25 bp, Homo sapien
tgtttcccagagaaaagcctcttaa

SEQ ID NO: 152204 - DNA, 25 bp, Homo sapien
agaaaagcctcttaaagcgccggag

SEQ ID NO: 152205 - DNA, 25 bp, Homo sapien
gagctgcccgcgttgatgtgggcgg

SEQ ID NO: 152206 - DNA, 25 bp, Homo sapien
caaattgcagaattcggtcccggaa

SEQ ID NO: 152207 - DNA, 25 bp, Homo sapien
tgggatttaataggcggccaaaggc

SEQ ID NO: 152208 - DNA, 25 bp, Homo sapien
gagtatttccattcataaggcgcac

SEQ ID NO: 152209 - DNA, 25 bp, Homo sapien
catggtgctgtccagttggaaaggc

SEQ ID NO: 152210 - DNA, 25 bp, Homo sapien
aatctgtgtcgtgtgagctccctcg

SEQ ID NO: 152211 - DNA, 25 bp, Homo sapien
gctccgccagcgatgttgcgaggaa

SEQ ID NO: 152212 - DNA, 25 bp, Homo sapien
ttgcgaggaaaagagtgcatacccc

SEQ ID NO: 152213 - DNA, 25 bp, Homo sapien
ccccgcaccagcacaatgccaaggt

SEQ ID NO: 152214 - DNA, 25 bp, Homo sapien
agcacaatgccaaggtctcccagca

SEQ ID NO: 152215 - DNA, 25 bp, Homo sapien
gcaccagcacaatgccaaggtctcc

SEQ ID NO: 152216 - DNA, 25 bp, Homo sapien
ccagcacaatgccaaggtctcccag

SEQ ID NO: 152217 - DNA, 25 bp, Homo sapien
aatctttctaagataaggataaggg

SEQ ID NO: 152218 - DNA, 25 bp, Homo sapien
aggacacaaggaatctttctaagat

SEQ ID NO: 152219 - DNA, 25 bp, Homo sapien
tcagacagaaaagagtatgcactga

SEQ ID NO: 152220 - DNA, 25 bp, Homo sapien
aaggaagggatcaagagcaaaggac

SEQ ID NO: 152221 - DNA, 25 bp, Homo sapien
taccactgcacaccaactagaaaga

SEQ ID NO: 152222 - DNA, 25 bp, Homo sapien
cacatgccatggactatatagagca

SEQ ID NO: 152223 - DNA, 25 bp, Homo sapien
taaaagtcttgcttctcgaaagtca

SEQ ID NO: 152224 - DNA, 25 bp, Homo sapien
ccacagattggaagcaaaatgtttc

SEQ ID NO: 152225 - DNA, 25 bp, Homo sapien
aaccagagactagagtttaagcact

SEQ ID NO: 152226 - DNA, 25 bp, Homo sapien
gagagtagatgaacagccacaagcc

SEQ ID NO: 152227 - DNA, 25 bp, Homo sapien
tttaagcactcaaaaataatcagct

SEQ ID NO: 152228 - DNA, 25 bp, Homo sapien
cattttgacccagaaacagagagta

SEQ ID NO: 152229 - DNA, 25 bp, Homo sapien
ttacctggcactttcagcagacagg

SEQ ID NO: 152230 - DNA, 25 bp, Homo sapien
tagcaaattttacctggcactttca

SEQ ID NO: 152231 - DNA, 25 bp, Homo sapien
aattttacctggcactttcagcaga

SEQ ID NO: 152232 - DNA, 25 bp, Homo sapien
caaattttacctggcactttcagca

SEQ ID NO: 152233 - DNA, 25 bp, Homo sapien
gagcatccactatgcaccaggtgct

SEQ ID NO: 152234 - DNA, 25 bp, Homo sapien
tgaggtgccacgtgtgaccagatgt

SEQ ID NO: 152235 - DNA, 25 bp, Homo sapien
gattgctgagtcatacagaaaacac

SEQ ID NO: 152236 - DNA, 25 bp, Homo sapien
tgtgaataacatctcttgagcatcc

SEQ ID NO: 152237 - DNA, 25 bp, Homo sapien
tctatcctcaccgtttcttgggagc

SEQ ID NO: 152238 - DNA, 25 bp, Homo sapien
gctactttttgagagcaaaagccat

SEQ ID NO: 152239 - DNA, 25 bp, Homo sapien
ggccaactgttaaaactgtgatgaa

SEQ ID NO: 152240 - DNA, 25 bp, Homo sapien
taaaaatagcccagaaggccaactg

SEQ ID NO: 152241 - DNA, 25 bp, Homo sapien
ctattaagtactgaatttgctgagt

SEQ ID NO: 152242 - DNA, 25 bp, Homo sapien
gcctattaagtactgaatttgctga

SEQ ID NO: 152243 - DNA, 25 bp, Homo sapien
attaagtactgaatttgctgagttc

SEQ ID NO: 152244 - DNA, 25 bp, Homo sapien
cctcggtgcctattaagtactgaat

SEQ ID NO: 152245 - DNA, 25 bp, Homo sapien
ttatttaggtgaccgttgactgtct

SEQ ID NO: 152246 - DNA, 25 bp, Homo sapien
tccttgtccaaaatgattccctgat

SEQ ID NO: 152247 - DNA, 25 bp, Homo sapien
cagttttgtccagagtagtgagcac

SEQ ID NO: 152248 - DNA, 25 bp, Homo sapien
ttcatagagtgctttccctccacac

SEQ ID NO: 152249 - DNA, 25 bp, Homo sapien
cctctttgcaaatcccaaggagcca

SEQ ID NO: 152250 - DNA, 25 bp, Homo sapien
gccatgatgatcaacgtctctctgg

SEQ ID NO: 152251 - DNA, 25 bp, Homo sapien
tggctgtagtgaaggaccccgttct

SEQ ID NO: 152252 - DNA, 25 bp, Homo sapien
ctggagtcaccagcattgtccacat

SEQ ID NO: 152253 - DNA, 25 bp, Homo sapien
caggataaatgttgtggagaacccg

SEQ ID NO: 152254 - DNA, 25 bp, Homo sapien
tgcaagtaccggatcttggaagcaa

SEQ ID NO: 152255 - DNA, 25 bp, Homo sapien
ggagaacccggttatgatattcctg

SEQ ID NO: 152256 - DNA, 25 bp, Homo sapien
tgatggtacaggataaatgttgtgg

SEQ ID NO: 152257 - DNA, 25 bp, Homo sapien
tgtaaaggagggagcgagtaacagt

SEQ ID NO: 152258 - DNA, 25 bp, Homo sapien
aaaagacacatggtcatgggcactg

SEQ ID NO: 152259 - DNA, 25 bp, Homo sapien
cgagtaacagtagggttgatggaac

SEQ ID NO: 152260 - DNA, 25 bp, Homo sapien
tgatggaactgacctgcggtcttag

SEQ ID NO: 152261 - DNA, 25 bp, Homo sapien
cgtagaggccttggtagtccaaaga

SEQ ID NO: 152262 - DNA, 25 bp, Homo sapien
ttctgagggagcatctcgcaggacg

SEQ ID NO: 152263 - DNA, 25 bp, Homo sapien
tgagcatcacgactttgcgggccgc

SEQ ID NO: 152264 - DNA, 25 bp, Homo sapien
caaagaagggtagtctgacaactga

SEQ ID NO: 152265 - DNA, 25 bp, Homo sapien
gctgtagtaaaggaactagatccag

SEQ ID NO: 152266 - DNA, 25 bp, Homo sapien
tagtaaaggaactagatccaggagg

SEQ ID NO: 152267 - DNA, 25 bp, Homo sapien
gccgtgctgtagtaaaggaactaga

SEQ ID NO: 152268 - DNA, 25 bp, Homo sapien
cgtgttggccgtgctgtagtaaagg

SEQ ID NO: 152269 - DNA, 25 bp, Homo sapien
tatcatcattgagaaaaggtagcaa

SEQ ID NO: 152270 - DNA, 25 bp, Homo sapien
gtataaaatatcgactgtccaagat

SEQ ID NO: 152271 - DNA, 25 bp, Homo sapien
tggtagaaaagatgtgctaagatat

SEQ ID NO: 152272 - DNA, 25 bp, Homo sapien
ggaaaggtagccaacgttgatatca

SEQ ID NO: 152273 - DNA, 25 bp, Homo sapien
gaaaggtagccaacgttgatatcat

SEQ ID NO: 152274 - DNA, 25 bp, Homo sapien
aaagatgtgctaagatattcaatga

SEQ ID NO: 152275 - DNA, 25 bp, Homo sapien
gatgtaaacagatgtgcagcttgtc

SEQ ID NO: 152276 - DNA, 25 bp, Homo sapien
cccatgagggtgtaaaaagccaaga

SEQ ID NO: 152277 - DNA, 25 bp, Homo sapien
gtccccatgagggtgtaaaaagcca

SEQ ID NO: 152278 - DNA, 25 bp, Homo sapien
gcagcttgtccccatgagggtgtaa

SEQ ID NO: 152279 - DNA, 25 bp, Homo sapien
atgatgcagagaggttaacatgggc

SEQ ID NO: 152280 - DNA, 25 bp, Homo sapien
tgatgcagagaggttaacatgggca

SEQ ID NO: 152281 - DNA, 25 bp, Homo sapien
caatcattagcatggatgatgcaga

SEQ ID NO: 152282 - DNA, 25 bp, Homo sapien
ctggattggatgtgtactgcattgc

SEQ ID NO: 152283 - DNA, 25 bp, Homo sapien
ggcattccagtaattgacaatgata

SEQ ID NO: 152284 - DNA, 25 bp, Homo sapien
gaggcattccagtaattgacaatga

SEQ ID NO: 152285 - DNA, 25 bp, Homo sapien
atgaggcattccagtaattgacaat

SEQ ID NO: 152286 - DNA, 25 bp, Homo sapien
cattccagtaattgacaatgataca

SEQ ID NO: 152287 - DNA, 25 bp, Homo sapien
gcccatacgcaatcacatacaaaag

SEQ ID NO: 152288 - DNA, 25 bp, Homo sapien
ctgtactcgcttattgccccaggag

SEQ ID NO: 152289 - DNA, 25 bp, Homo sapien
tgtgtactgcaaccccctgtactcg

SEQ ID NO: 152290 - DNA, 25 bp, Homo sapien
ggccagtagtggaaaagcatttgca

SEQ ID NO: 152291 - DNA, 25 bp, Homo sapien
taaagtaaagcacagctgatgaata

SEQ ID NO: 152292 - DNA, 25 bp, Homo sapien
gctggtttgttaattgcattgtggc

SEQ ID NO: 152293 - DNA, 25 bp, Homo sapien
tgtggcattcaatgtgctggcagtg

SEQ ID NO: 152294 - DNA, 25 bp, Homo sapien
cacagctggtttgttaattgcattg

SEQ ID NO: 152295 - DNA, 25 bp, Homo sapien
cattcaatgtgctggcagtggatgg

SEQ ID NO: 152296 - DNA, 25 bp, Homo sapien
tactgacagggaagggtctatacac

SEQ ID NO: 152297 - DNA, 25 bp, Homo sapien
cctgcaatcctctcgctgcattctt

SEQ ID NO: 152298 - DNA, 25 bp, Homo sapien
tggtttatcacccaacgctactgac

SEQ ID NO: 152299 - DNA, 25 bp, Homo sapien
tcacagagatacaacgggggtggtt

SEQ ID NO: 152300 - DNA, 25 bp, Homo sapien
catcaatcagccactcactgtggtc

SEQ ID NO: 152301 - DNA, 25 bp, Homo sapien
acatcaatcagccactcactgtggt

SEQ ID NO: 152302 - DNA, 25 bp, Homo sapien
gaacatcaatcagccactcactgtg

SEQ ID NO: 152303 - DNA, 25 bp, Homo sapien
aagaacatcaatcagccactcactg

SEQ ID NO: 152304 - DNA, 25 bp, Homo sapien
ctttttctgacatatagcagatatt

SEQ ID NO: 152305 - DNA, 25 bp, Homo sapien
ttctgacatatagcagatatttcag

SEQ ID NO: 152306 - DNA, 25 bp, Homo sapien
tttctgacatatagcagatatttca

SEQ ID NO: 152307 - DNA, 25 bp, Homo sapien
ttttctgacatatagcagatatttc

SEQ ID NO: 152308 - DNA, 25 bp, Homo sapien
gaagggaaccgcaaatgaagtgatg

SEQ ID NO: 152309 - DNA, 25 bp, Homo sapien
gaaaagtggtggagcgtaagacatt

SEQ ID NO: 152310 - DNA, 25 bp, Homo sapien
cagaacccttcgtagagtcagcatt

SEQ ID NO: 152311 - DNA, 25 bp, Homo sapien
tgacatcaaccgcaggaagggaacc

SEQ ID NO: 152312 - DNA, 25 bp, Homo sapien
ctcttctaacgtgggaactgcagtt

SEQ ID NO: 152313 - DNA, 25 bp, Homo sapien
tgctcttctaacgtgggaactgcag

SEQ ID NO: 152314 - DNA, 25 bp, Homo sapien
actgctcttctaacgtgggaactgc

SEQ ID NO: 152315 - DNA, 25 bp, Homo sapien
ctgtttccgtgacgaccacagcacc

SEQ ID NO: 152316 - DNA, 25 bp, Homo sapien
ctgtgatgatttgagtggcacctct

SEQ ID NO: 152317 - DNA, 25 bp, Homo sapien
ggcacctcttgcagtaccgaacagg

SEQ ID NO: 152318 - DNA, 25 bp, Homo sapien
agaggtctgatagaggtgagtctcc

SEQ ID NO: 152319 - DNA, 25 bp, Homo sapien
ccgcattcccgcgtgttgatgggcg

SEQ ID NO: 152320 - DNA, 25 bp, Homo sapien
tgccgccgccggttcagctcatgtt

SEQ ID NO: 152321 - DNA, 25 bp, Homo sapien
cagctcatgttctcgctgctcagca

SEQ ID NO: 152322 - DNA, 25 bp, Homo sapien
atggaactcggcttctttcaacaag

SEQ ID NO: 152323 - DNA, 25 bp, Homo sapien
tcgctgctcagcatggaactcggct

SEQ ID NO: 152324 - DNA, 25 bp, Homo sapien
tctgatcgtgtttatcatcgtcctt

SEQ ID NO: 152325 - DNA, 25 bp, Homo sapien
taagaaccatattccgaattgactg

SEQ ID NO: 152326 - DNA, 25 bp, Homo sapien
cgtccttgttatcaaagtcagcatt

SEQ ID NO: 152327 - DNA, 25 bp, Homo sapien
ttccgaattgactgagcagcctctg

SEQ ID NO: 152328 - DNA, 25 bp, Homo sapien
caagctttctgtaggcgtgttctca

SEQ ID NO: 152329 - DNA, 25 bp, Homo sapien
gcacatgaccatgacatcgaagcga

SEQ ID NO: 152330 - DNA, 25 bp, Homo sapien
tcgaagcgaacatcacatacggtct

SEQ ID NO: 152331 - DNA, 25 bp, Homo sapien
ccatcatatacgcagtggagtgaaa

SEQ ID NO: 152332 - DNA, 25 bp, Homo sapien
cacctttctgggttagatgcaaatt

SEQ ID NO: 152333 - DNA, 25 bp, Homo sapien
cctttctgggttagatgcaaattac

SEQ ID NO: 152334 - DNA, 25 bp, Homo sapien
tccacctttctgggttagatgcaaa

SEQ ID NO: 152335 - DNA, 25 bp, Homo sapien
ccacctttctgggttagatgcaaat

SEQ ID NO: 152336 - DNA, 25 bp, Homo sapien
cggctggcctcatgtcaattaaact

SEQ ID NO: 152337 - DNA, 25 bp, Homo sapien
gtgtccgcacccataatcaactcag

SEQ ID NO: 152338 - DNA, 25 bp, Homo sapien
cctgcggataacatcactatgatag

SEQ ID NO: 152339 - DNA, 25 bp, Homo sapien
gcaataactcagtctctcgtgtggc

SEQ ID NO: 152340 - DNA, 25 bp, Homo sapien
catgtcctagactatttaagagaac

SEQ ID NO: 152341 - DNA, 25 bp, Homo sapien
tcttacaattgtgttgctccctata

SEQ ID NO: 152342 - DNA, 25 bp, Homo sapien
tgttggttaatcaagtactcaaatc

SEQ ID NO: 152343 - DNA, 25 bp, Homo sapien
cacagtgacctgtaatgttggttaa

SEQ ID NO: 152344 - DNA, 25 bp, Homo sapien
gctgagtcactgtgctacaggactt

SEQ ID NO: 152345 - DNA, 25 bp, Homo sapien
cattccggcataatacactcccaga

SEQ ID NO: 152346 - DNA, 25 bp, Homo sapien
tacaggacttatcccagtagccacc

SEQ ID NO: 152347 - DNA, 25 bp, Homo sapien
tcaggcagaggattcggttgagacc

SEQ ID NO: 152348 - DNA, 25 bp, Homo sapien
gaggacagagttcaatgtcaaacat

SEQ ID NO: 152349 - DNA, 25 bp, Homo sapien
gtatcctgtaaaccgacaactaata

SEQ ID NO: 152350 - DNA, 25 bp, Homo sapien
tatcctgtaaaccgacaactaataa

SEQ ID NO: 152351 - DNA, 25 bp, Homo sapien
tcgagatgcaaggttccctgccagt

SEQ ID NO: 152352 - DNA, 25 bp, Homo sapien
gctctttgactgaattaactccatc

SEQ ID NO: 152353 - DNA, 25 bp, Homo sapien
ggaaccatgatatctaactccgata

SEQ ID NO: 152354 - DNA, 25 bp, Homo sapien
cttattagtagttgaagtggaacca

SEQ ID NO: 152355 - DNA, 25 bp, Homo sapien
gactatgaaatggactaagcatatt

SEQ ID NO: 152356 - DNA, 25 bp, Homo sapien
catattgtgctgaactcgtcggcca

SEQ ID NO: 152357 - DNA, 25 bp, Homo sapien
gactaagcatattgtgctgaactcg

SEQ ID NO: 152358 - DNA, 25 bp, Homo sapien
tgaaatggactaagcatattgtgct

SEQ ID NO: 152359 - DNA, 25 bp, Homo sapien
catcttcacaatcaaagtcaatagt

SEQ ID NO: 152360 - DNA, 25 bp, Homo sapien
gctacgaaacggactacgcaaagga

SEQ ID NO: 152361 - DNA, 25 bp, Homo sapien
aagatcaaacatgaggatgaaacaa

SEQ ID NO: 152362 - DNA, 25 bp, Homo sapien
tcctcctgggtgtccaaaattcttg

SEQ ID NO: 152363 - DNA, 25 bp, Homo sapien
ccaggagttcacaagcaagctgata

SEQ ID NO: 152364 - DNA, 25 bp, Homo sapien
caccagccggctttcttctttagga

SEQ ID NO: 152365 - DNA, 25 bp, Homo sapien
gactgacataagttgcactcgattg

SEQ ID NO: 152366 - DNA, 25 bp, Homo sapien
taagctgtgctctaaacccatcgtg

SEQ ID NO: 152367 - DNA, 25 bp, Homo sapien
gaaaggaggctatcctccaggctgt

SEQ ID NO: 152368 - DNA, 25 bp, Homo sapien
cccttcagggcctatgataaactct

SEQ ID NO: 152369 - DNA, 25 bp, Homo sapien
cagcatgttccacgggctcggtgca

SEQ ID NO: 152370 - DNA, 25 bp, Homo sapien
catgcttgcttgcaggattctcctc

SEQ ID NO: 152371 - DNA, 25 bp, Homo sapien
tatatattagtctcaatgttaccgg

SEQ ID NO: 152372 - DNA, 25 bp, Homo sapien
tttctttcggtatcattctttactg

SEQ ID NO: 152373 - DNA, 25 bp, Homo sapien
tgttaccggaagctgttggtagcaa

SEQ ID NO: 152374 - DNA, 25 bp, Homo sapien
tagtctcaatgttaccggaagctgt

SEQ ID NO: 152375 - DNA, 25 bp, Homo sapien
tcttcaggcaattgagcatattaaa

SEQ ID NO: 152376 - DNA, 25 bp, Homo sapien
cttgcaatcaacatgtggtcctgaa

SEQ ID NO: 152377 - DNA, 25 bp, Homo sapien
tccatgcagacagagaatcttcagg

SEQ ID NO: 152378 - DNA, 25 bp, Homo sapien
gaatgtaggctaaaaattgagggtg

SEQ ID NO: 152379 - DNA, 25 bp, Homo sapien
gagaactcggatttgacgaccctcc

SEQ ID NO: 152380 - DNA, 25 bp, Homo sapien
agctgagagaactcggatttgacga

SEQ ID NO: 152381 - DNA, 25 bp, Homo sapien
actcggatttgacgaccctccacag

SEQ ID NO: 152382 - DNA, 25 bp, Homo sapien
tgagagaactcggatttgacgaccc

SEQ ID NO: 152383 - DNA, 25 bp, Homo sapien
gattgtccagaagatgtcagcacca

SEQ ID NO: 152384 - DNA, 25 bp, Homo sapien
gaaattgccatttatgattgtccag

SEQ ID NO: 152385 - DNA, 25 bp, Homo sapien
aattgccatttatgattgtccagaa

SEQ ID NO: 152386 - DNA, 25 bp, Homo sapien
ttgccatttatgattgtccagaaga

SEQ ID NO: 152387 - DNA, 25 bp, Homo sapien
caatggcggcatttgaaggtggatc

SEQ ID NO: 152388 - DNA, 25 bp, Homo sapien
cctcaatggcggcatttgaaggtgg

SEQ ID NO: 152389 - DNA, 25 bp, Homo sapien
aaggtggatcatgtggaggtggcat

SEQ ID NO: 152390 - DNA, 25 bp, Homo sapien
aaggtggacctcaatggcggcattt

SEQ ID NO: 152391 - DNA, 25 bp, Homo sapien
cagggagtacttcagcaggtggttt

SEQ ID NO: 152392 - DNA, 25 bp, Homo sapien
ctggtagccactgcggggttgacat

SEQ ID NO: 152393 - DNA, 25 bp, Homo sapien
gaaggcatgtgccagggagtacttc

SEQ ID NO: 152394 - DNA, 25 bp, Homo sapien
tgagtgaatatccagaaatctacaa

SEQ ID NO: 152395 - DNA, 25 bp, Homo sapien
tgcaatgctggcctctttatggtgt

SEQ ID NO: 152396 - DNA, 25 bp, Homo sapien
ctttatggtgtcaagcaggagacca

SEQ ID NO: 152397 - DNA, 25 bp, Homo sapien
tttatggtgtcaagcaggagaccag

SEQ ID NO: 152398 - DNA, 25 bp, Homo sapien
caatgctggcctctttatggtgtca

SEQ ID NO: 152399 - DNA, 25 bp, Homo sapien
caaactggaagtcaagacaaagaca

SEQ ID NO: 152400 - DNA, 25 bp, Homo sapien
gcttgctcaaaattgtgggtctgtc

SEQ ID NO: 152401 - DNA, 25 bp, Homo sapien
caatccaaatgtagctgggcttcca

SEQ ID NO: 152402 - DNA, 25 bp, Homo sapien
ggcttccaaagaaagcgtctcaaat

SEQ ID NO: 152403 - DNA, 25 bp, Homo sapien
tccataaggctgcatcgctgaggtt

SEQ ID NO: 152404 - DNA, 25 bp, Homo sapien
tctggcggtttcttgcaaagcgagc

SEQ ID NO: 152405 - DNA, 25 bp, Homo sapien
ggagagcgccctcttggattccaca

SEQ ID NO: 152406 - DNA, 25 bp, Homo sapien
cagggaacgtacactcttctggcgg

SEQ ID NO: 152407 - DNA, 25 bp, Homo sapien
tctgttcgggtgtcccaccgagagc

SEQ ID NO: 152408 - DNA, 25 bp, Homo sapien
ctggcgtctgttcgggtgtcccacc

SEQ ID NO: 152409 - DNA, 25 bp, Homo sapien
tgctcatgcctggtcaacctcatag

SEQ ID NO: 152410 - DNA, 25 bp, Homo sapien
tggagcagactgctcatgcctggtc

SEQ ID NO: 152411 - DNA, 25 bp, Homo sapien
gagtacgcgagtcccacgagagatg

SEQ ID NO: 152412 - DNA, 25 bp, Homo sapien
ctgaggcagaacttggagtacgcga

SEQ ID NO: 152413 - DNA, 25 bp, Homo sapien
caaagtcttttggtctggacactca

SEQ ID NO: 152414 - DNA, 25 bp, Homo sapien
caaatgcaggccaagagatctccag

SEQ ID NO: 152415 - DNA, 25 bp, Homo sapien
gaaactccaaagtgtaatacagcat

SEQ ID NO: 152416 - DNA, 25 bp, Homo sapien
gattgaaactccaaagtgtaataca

SEQ ID NO: 152417 - DNA, 25 bp, Homo sapien
gacaatctgcccacagagctgtgta

SEQ ID NO: 152418 - DNA, 25 bp, Homo sapien
taactgattgaaactccaaagtgta

SEQ ID NO: 152419 - DNA, 25 bp, Homo sapien
tcatagccgagtaagacgtacaggt

SEQ ID NO: 152420 - DNA, 25 bp, Homo sapien
taatcagctggtgaactgtctggtg

SEQ ID NO: 152421 - DNA, 25 bp, Homo sapien
caggcgcattttttgaggtgcaatc

SEQ ID NO: 152422 - DNA, 25 bp, Homo sapien
tacaggtgtcgcttgaccgtgttga

SEQ ID NO: 152423 - DNA, 25 bp, Homo sapien
gcaacgaggcggctgttggaaataa

SEQ ID NO: 152424 - DNA, 25 bp, Homo sapien
tcaaccacatctgccggatgtgagg

SEQ ID NO: 152425 - DNA, 25 bp, Homo sapien
ttgaggacaagagcagtatttgagc

SEQ ID NO: 152426 - DNA, 25 bp, Homo sapien
gaaataatgccggagttgaggacaa

SEQ ID NO: 152427 - DNA, 25 bp, Homo sapien
gggcttgcagctatgatactgcgca

SEQ ID NO: 152428 - DNA, 25 bp, Homo sapien
tgttactgttgtcactgtacaaagg

SEQ ID NO: 152429 - DNA, 25 bp, Homo sapien
tcttgctgatatcacagtctcggta

SEQ ID NO: 152430 - DNA, 25 bp, Homo sapien
tgttatgtgaatcagatgcagcagg

SEQ ID NO: 152431 - DNA, 25 bp, Homo sapien
taggtgtatcatgaatatcagattc

SEQ ID NO: 152432 - DNA, 25 bp, Homo sapien
ttcaccattttgctgccgcctattc

SEQ ID NO: 152433 - DNA, 25 bp, Homo sapien
tctcaaccggctgatatttcaccat

SEQ ID NO: 152434 - DNA, 25 bp, Homo sapien
aagtttgagactctttattgcaggg

SEQ ID NO: 152435 - DNA, 25 bp, Homo sapien
tgtcttgtaatgcacccgtctctct

SEQ ID NO: 152436 - DNA, 25 bp, Homo sapien
taatgcacccgtctctctatattca

SEQ ID NO: 152437 - DNA, 25 bp, Homo sapien
gaaggctgtcttgtaatgcacccgt

SEQ ID NO: 152438 - DNA, 25 bp, Homo sapien
ggagaaggctgtcttgtaatgcacc

SEQ ID NO: 152439 - DNA, 25 bp, Homo sapien
taatgtaaacaaaagcgagtctgca

SEQ ID NO: 152440 - DNA, 25 bp, Homo sapien
atgtaaacaaaagcgagtctgcatt

SEQ ID NO: 152441 - DNA, 25 bp, Homo sapien
tgtaaacaaaagcgagtctgcattc

SEQ ID NO: 152442 - DNA, 25 bp, Homo sapien
aatgtaaacaaaagcgagtctgcat

SEQ ID NO: 152443 - DNA, 25 bp, Homo sapien
tatgacaggccttcgagcatctgga

SEQ ID NO: 152444 - DNA, 25 bp, Homo sapien
gaagaggcagcatttttaccggagg

SEQ ID NO: 152445 - DNA, 25 bp, Homo sapien
tctttaggagcaggctttaccggcg

SEQ ID NO: 152446 - DNA, 25 bp, Homo sapien
atagagtgtttttcaggccccgagg

SEQ ID NO: 152447 - DNA, 25 bp, Homo sapien
gcccgggtcagggtgatcatccagc

SEQ ID NO: 152448 - DNA, 25 bp, Homo sapien
cgggtcagggtgatcatccagcgac

SEQ ID NO: 152449 - DNA, 25 bp, Homo sapien
ccgggtcagggtgatcatccagcga

SEQ ID NO: 152450 - DNA, 25 bp, Homo sapien
gtgcccgggtcagggtgatcatcca

SEQ ID NO: 152451 - DNA, 25 bp, Homo sapien
gcctgggaacaatctgaatcttaaa

SEQ ID NO: 152452 - DNA, 25 bp, Homo sapien
gattctgcactggtatcaggcttct

SEQ ID NO: 152453 - DNA, 25 bp, Homo sapien
catcttcgggaactttgaggaggac

SEQ ID NO: 152454 - DNA, 25 bp, Homo sapien
tctctctggatagcactgacagcaa

SEQ ID NO: 152455 - DNA, 25 bp, Homo sapien
agatgaagattctcgtggcatttcc

SEQ ID NO: 152456 - DNA, 25 bp, Homo sapien
gaagattctcgtggcatttccaaag

SEQ ID NO: 152457 - DNA, 25 bp, Homo sapien
ttctcgtggcatttccaaagttgaa

SEQ ID NO: 152458 - DNA, 25 bp, Homo sapien
gggcagatgaagattctcgtggcat

SEQ ID NO: 152459 - DNA, 25 bp, Homo sapien
gaatggctacttgtttccggcacac

SEQ ID NO: 152460 - DNA, 25 bp, Homo sapien
gaggaatggctacttgtttccggca

SEQ ID NO: 152461 - DNA, 25 bp, Homo sapien
ttgatattgaggaatggctacttgt

SEQ ID NO: 152462 - DNA, 25 bp, Homo sapien
attgaggaatggctacttgtttccg

SEQ ID NO: 152463 - DNA, 25 bp, Homo sapien
taactggctcattgtcagaactccc

SEQ ID NO: 152464 - DNA, 25 bp, Homo sapien
tcattgtcagaactcccagggatcc

SEQ ID NO: 152465 - DNA, 25 bp, Homo sapien
agtgtcccagttgctgatgttatgg

SEQ ID NO: 152466 - DNA, 25 bp, Homo sapien
ccagctgccgcttcattaactggct

SEQ ID NO: 152467 - DNA, 25 bp, Homo sapien
ctgtggataaatagagggtttcagt

SEQ ID NO: 152468 - DNA, 25 bp, Homo sapien
ctccaggtcagggtttaggcacgtt

SEQ ID NO: 152469 - DNA, 25 bp, Homo sapien
atcctcaatggctgtccctccaggt

SEQ ID NO: 152470 - DNA, 25 bp, Homo sapien
ggcacgttggcacgttacactggcg

SEQ ID NO: 152471 - DNA, 25 bp, Homo sapien
ttacactggcgtttcccaggctgta

SEQ ID NO: 152472 - DNA, 25 bp, Homo sapien
actatgcttggtgctgatagcaggc

SEQ ID NO: 152473 - DNA, 25 bp, Homo sapien
gaactcttcaggtgcaggcacaaac

SEQ ID NO: 152474 - DNA, 25 bp, Homo sapien
ttgtccgtcatcaccgtcggctgct

SEQ ID NO: 152475 - DNA, 25 bp, Homo sapien
ggcacaaacatactgactatgcttg

SEQ ID NO: 152476 - DNA, 25 bp, Homo sapien
gaatgaatgtggagaggaccacgat

SEQ ID NO: 152477 - DNA, 25 bp, Homo sapien
tcttcaagaatggccccacagtcat

SEQ ID NO: 152478 - DNA, 25 bp, Homo sapien
agaggaccacgatggctagcccaag

SEQ ID NO: 152479 - DNA, 25 bp, Homo sapien
gcccaagtgtctcttcatcgtattc

SEQ ID NO: 152480 - DNA, 25 bp, Homo sapien
cttgattagaaaaggtagtactgga

SEQ ID NO: 152481 - DNA, 25 bp, Homo sapien
gattagaaaaggtagtactggatgc

SEQ ID NO: 152482 - DNA, 25 bp, Homo sapien
gcttgattagaaaaggtagtactgg

SEQ ID NO: 152483 - DNA, 25 bp, Homo sapien
tagaaaaggtagtactggatgccaa

SEQ ID NO: 152484 - DNA, 25 bp, Homo sapien
ggccaactgatggaagatgcagcgc

SEQ ID NO: 152485 - DNA, 25 bp, Homo sapien
ccccgccgcattgccgggaaccatc

SEQ ID NO: 152486 - DNA, 25 bp, Homo sapien
aactgatggaagatgcagcgcagga

SEQ ID NO: 152487 - DNA, 25 bp, Homo sapien
ctttgatcgtgctttggaacagctg

SEQ ID NO: 152488 - DNA, 25 bp, Homo sapien
gaaagtcaacgatcggatttagtgt

SEQ ID NO: 152489 - DNA, 25 bp, Homo sapien
caacgatcggatttagtgtttgggt

SEQ ID NO: 152490 - DNA, 25 bp, Homo sapien
agtcaacgatcggatttagtgtttg

SEQ ID NO: 152491 - DNA, 25 bp, Homo sapien
ctggaaagtcaacgatcggatttag

SEQ ID NO: 152492 - DNA, 25 bp, Homo sapien
cagagacgaggctaaggtccgtaaa

SEQ ID NO: 152493 - DNA, 25 bp, Homo sapien
agctcattgaagtccatcagagacg

SEQ ID NO: 152494 - DNA, 25 bp, Homo sapien
agctgcgatggagctcagctcattg

SEQ ID NO: 152495 - DNA, 25 bp, Homo sapien
ctgactgagagctgcgatggagctc

SEQ ID NO: 152496 - DNA, 25 bp, Homo sapien
aatgtctgaaactggttgctaattg

SEQ ID NO: 152497 - DNA, 25 bp, Homo sapien
tggtccagaggctactaggagaatc

SEQ ID NO: 152498 - DNA, 25 bp, Homo sapien
tgttttccaaacagcgaatcatagc

SEQ ID NO: 152499 - DNA, 25 bp, Homo sapien
ttgctaattgtggtccagaggctac

SEQ ID NO: 152500 - DNA, 25 bp, Homo sapien
tcttcaagaggcaaatcataattct

SEQ ID NO: 152501 - DNA, 25 bp, Homo sapien
ccttgtagcattggtagaagggatc

SEQ ID NO: 152502 - DNA, 25 bp, Homo sapien
ttcttaaactggaatctaaagaaca

SEQ ID NO: 152503 - DNA, 25 bp, Homo sapien
tagcattggtagaagggatcttcaa

SEQ ID NO: 152504 - DNA, 25 bp, Homo sapien
tacaaagctgagcagttttgaaaat

SEQ ID NO: 152505 - DNA, 25 bp, Homo sapien
tcggtaacataagccacacagctcc

SEQ ID NO: 152506 - DNA, 25 bp, Homo sapien
caccaggtaggccagagtgaagacg

SEQ ID NO: 152507 - DNA, 25 bp, Homo sapien
gtgaagacggcattctgaattacaa

SEQ ID NO: 152508 - DNA, 25 bp, Homo sapien
taaagggcttatagaaatggacaac

SEQ ID NO: 152509 - DNA, 25 bp, Homo sapien
gataagattccaatctcagaggcca

SEQ ID NO: 152510 - DNA, 25 bp, Homo sapien
catgacagaatggacccaagttggt

SEQ ID NO: 152511 - DNA, 25 bp, Homo sapien
tccactttctcagtagtgggccagg

SEQ ID NO: 152512 - DNA, 25 bp, Homo sapien
tcttgtgggaaatgatcttgctact

SEQ ID NO: 152513 - DNA, 25 bp, Homo sapien
ctgggcctaggttggagatatattc

SEQ ID NO: 152514 - DNA, 25 bp, Homo sapien
taactataggaatcctgctgggcct

SEQ ID NO: 152515 - DNA, 25 bp, Homo sapien
tgatccaagataggcccatgtttac

SEQ ID NO: 152516 - DNA, 25 bp, Homo sapien
cttcctgtcttgcagaactgaatgg

SEQ ID NO: 152517 - DNA, 25 bp, Homo sapien
ggctagatgtttctggtagacccac

SEQ ID NO: 152518 - DNA, 25 bp, Homo sapien
tgcacctgctgaataatgatagaag

SEQ ID NO: 152519 - DNA, 25 bp, Homo sapien
gctgagctctcttgtaggttctaaa

SEQ ID NO: 152520 - DNA, 25 bp, Homo sapien
aaacctataggttgttctgtgagaa

SEQ ID NO: 152521 - DNA, 25 bp, Homo sapien
tgtgagaattacctgtttttactac

SEQ ID NO: 152522 - DNA, 25 bp, Homo sapien
tccaggattttaattgtcattatac

SEQ ID NO: 152523 - DNA, 25 bp, Homo sapien
gctctccagtaaaatgttccagtta

SEQ ID NO: 152524 - DNA, 25 bp, Homo sapien
tctagaacaacactacgagacaagt

SEQ ID NO: 152525 - DNA, 25 bp, Homo sapien
gagacaagtagaatttatctcgttc

SEQ ID NO: 152526 - DNA, 25 bp, Homo sapien
gagatttgagctttagggcctgcag

SEQ ID NO: 152527 - DNA, 25 bp, Homo sapien
caagcagaagaaggtttgtatctgg

SEQ ID NO: 152528 - DNA, 25 bp, Homo sapien
gttcagaagtttcagcaccagtcgc

SEQ ID NO: 152529 - DNA, 25 bp, Homo sapien
gaagtttcagcaccagtcgctccgc

SEQ ID NO: 152530 - DNA, 25 bp, Homo sapien
tcagaagtttcagcaccagtcgctc

SEQ ID NO: 152531 - DNA, 25 bp, Homo sapien
agaagtttcagcaccagtcgctccg

SEQ ID NO: 152532 - DNA, 25 bp, Homo sapien
ccctctggccagtagccttaacaac

SEQ ID NO: 152533 - DNA, 25 bp, Homo sapien
gccctctggccagtagccttaacaa

SEQ ID NO: 152534 - DNA, 25 bp, Homo sapien
cctctggccagtagccttaacaact

SEQ ID NO: 152535 - DNA, 25 bp, Homo sapien
ttgactcagctagtttggttccagc

SEQ ID NO: 152536 - DNA, 25 bp, Homo sapien
acagaggctatcatctgcttgctca

SEQ ID NO: 152537 - DNA, 25 bp, Homo sapien
tccaggtacagaggctatcatctgc

SEQ ID NO: 152538 - DNA, 25 bp, Homo sapien
gcttgctcaggattgttgactcagc

SEQ ID NO: 152539 - DNA, 25 bp, Homo sapien
tagacttggcctgtgaaaaccccat

SEQ ID NO: 152540 - DNA, 25 bp, Homo sapien
gaagaaacctgatccccgagtatgc

SEQ ID NO: 152541 - DNA, 25 bp, Homo sapien
gcagcggactgcacataatggaaga

SEQ ID NO: 152542 - DNA, 25 bp, Homo sapien
aggaaacagcgagcatgcagcagag

SEQ ID NO: 152543 - DNA, 25 bp, Homo sapien
ttggtcagcgtgtgcatgtctgcca

SEQ ID NO: 152544 - DNA, 25 bp, Homo sapien
ccatgaaatccagcacttcgttgat

SEQ ID NO: 152545 - DNA, 25 bp, Homo sapien
cttcagtttggtcagcgtgtgcatg

SEQ ID NO: 152546 - DNA, 25 bp, Homo sapien
cacttcgttgatgtactgcctcaca

SEQ ID NO: 152547 - DNA, 25 bp, Homo sapien
gatgataaagccaaggcagatagcg

SEQ ID NO: 152548 - DNA, 25 bp, Homo sapien
gcagatagcggatcacagctttgtt

SEQ ID NO: 152549 - DNA, 25 bp, Homo sapien
gttgccccgtgagatgtccatggct

SEQ ID NO: 152550 - DNA, 25 bp, Homo sapien
aaaggtatcttcatgcagaggctgg

SEQ ID NO: 152551 - DNA, 25 bp, Homo sapien
tttggcagcatgtcaaagagcattc

SEQ ID NO: 152552 - DNA, 25 bp, Homo sapien
gcaagtacgtaaggagatgggatct

SEQ ID NO: 152553 - DNA, 25 bp, Homo sapien
ctgtcataaatcttcggtgtactcc

SEQ ID NO: 152554 - DNA, 25 bp, Homo sapien
taactctagctgagcccgaggaaac

SEQ ID NO: 152555 - DNA, 25 bp, Homo sapien
cgccaaggcaattgagtgtcaacaa

SEQ ID NO: 152556 - DNA, 25 bp, Homo sapien
gatgaggagatataacacagctgcc

SEQ ID NO: 152557 - DNA, 25 bp, Homo sapien
aaagggtgggctcaaacctactctg

SEQ ID NO: 152558 - DNA, 25 bp, Homo sapien
tttagcctccctaaaaggcagagcc

SEQ ID NO: 152559 - DNA, 25 bp, Homo sapien
gctctggaaatccaatcaggataac

SEQ ID NO: 152560 - DNA, 25 bp, Homo sapien
taagatggtctgcaacgtgggagcc

SEQ ID NO: 152561 - DNA, 25 bp, Homo sapien
tgcattgtgagtgagggaacccagc

SEQ ID NO: 152562 - DNA, 25 bp, Homo sapien
gcagccaggacaacagtcggatatg

SEQ ID NO: 152563 - DNA, 25 bp, Homo sapien
aaagttcccctgtgtaggtcatgcc

SEQ ID NO: 152564 - DNA, 25 bp, Homo sapien
ttgccgaagctctgtgaaggtcccc

SEQ ID NO: 152565 - DNA, 25 bp, Homo sapien
gaaatgcctgggaagccaactcttg

SEQ ID NO: 152566 - DNA, 25 bp, Homo sapien
tagttaggaatcaaacccggatctg

SEQ ID NO: 152567 - DNA, 25 bp, Homo sapien
tgagcaaagatgaacgcgtggaaga

SEQ ID NO: 152568 - DNA, 25 bp, Homo sapien
tagctgaaggatgctgggtgtcacc

SEQ ID NO: 152569 - DNA, 25 bp, Homo sapien
tagtgctgtcagtatcgccgtgaag

SEQ ID NO: 152570 - DNA, 25 bp, Homo sapien
ttttggagatttgtagcgacggcac

SEQ ID NO: 152571 - DNA, 25 bp, Homo sapien
tgcttatgcaagcagaacatccagc

SEQ ID NO: 152572 - DNA, 25 bp, Homo sapien
gaagggaaactcgtctgtgaactca

SEQ ID NO: 152573 - DNA, 25 bp, Homo sapien
tataaggtaacatatccccgatcca

SEQ ID NO: 152574 - DNA, 25 bp, Homo sapien
tacaactgagatctgtgaaaacagg

SEQ ID NO: 152575 - DNA, 25 bp, Homo sapien
tatagcatcaaacaacccttcaagg

SEQ ID NO: 152576 - DNA, 25 bp, Homo sapien
taggctagccataccccagacattt

SEQ ID NO: 152577 - DNA, 25 bp, Homo sapien
cataggtccctataagccagcttga

SEQ ID NO: 152578 - DNA, 25 bp, Homo sapien
ttgaggcctgagtggaatgaacacc

SEQ ID NO: 152579 - DNA, 25 bp, Homo sapien
cttgacaaaaatggtcgaattgcat

SEQ ID NO: 152580 - DNA, 25 bp, Homo sapien
aaaatggtcgaattgcattcctgca

SEQ ID NO: 152581 - DNA, 25 bp, Homo sapien
tcctgcaatgcctccattaaactaa

SEQ ID NO: 152582 - DNA, 25 bp, Homo sapien
catggagacacaccatttctaccat

SEQ ID NO: 152583 - DNA, 25 bp, Homo sapien
gggggacactgatgtaatgaacaaa

SEQ ID NO: 152584 - DNA, 25 bp, Homo sapien
tgggggacactgatgtaatgaacaa

SEQ ID NO: 152585 - DNA, 25 bp, Homo sapien
actgggggacactgatgtaatgaac

SEQ ID NO: 152586 - DNA, 25 bp, Homo sapien
ctgggggacactgatgtaatgaaca

SEQ ID NO: 152587 - DNA, 25 bp, Homo sapien
gatgaagacagggacctacaagcca

SEQ ID NO: 152588 - DNA, 25 bp, Homo sapien
tattgaggtcctaatctgcactgca

SEQ ID NO: 152589 - DNA, 25 bp, Homo sapien
catgtgaggctcttagaaaacggcc

SEQ ID NO: 152590 - DNA, 25 bp, Homo sapien
cagagagaaggcatggcgaagctca

SEQ ID NO: 152591 - DNA, 25 bp, Homo sapien
tatttgactgaatcattggcaacca

SEQ ID NO: 152592 - DNA, 25 bp, Homo sapien
cttgatatttgactgaatcattggc

SEQ ID NO: 152593 - DNA, 25 bp, Homo sapien
atttgactgaatcattggcaaccac

SEQ ID NO: 152594 - DNA, 25 bp, Homo sapien
gatatttgactgaatcattggcaac

SEQ ID NO: 152595 - DNA, 25 bp, Homo sapien
caacctcaagcagtaggacaatggt

SEQ ID NO: 152596 - DNA, 25 bp, Homo sapien
ggcctcggcctgtactctcatcagt

SEQ ID NO: 152597 - DNA, 25 bp, Homo sapien
cattatcagccctctaaggccagga

SEQ ID NO: 152598 - DNA, 25 bp, Homo sapien
gaggcttgctcagaccctgggatac

SEQ ID NO: 152599 - DNA, 25 bp, Homo sapien
attttgaactgagtgcactgcaacc

SEQ ID NO: 152600 - DNA, 25 bp, Homo sapien
gctgcttccgaggactggatctcca

SEQ ID NO: 152601 - DNA, 25 bp, Homo sapien
cacgtggttctgaatagcctggagg

SEQ ID NO: 152602 - DNA, 25 bp, Homo sapien
tgcaaccactttcggagggctgcca

SEQ ID NO: 152603 - DNA, 25 bp, Homo sapien
tgttgacactgagcgccgaggagtc

SEQ ID NO: 152604 - DNA, 25 bp, Homo sapien
tgtgagtacccaccagtctattttt

SEQ ID NO: 152605 - DNA, 25 bp, Homo sapien
cttaatcagatagcccaaggagtca

SEQ ID NO: 152606 - DNA, 25 bp, Homo sapien
tagcaagaaagcttcattttcggcc

SEQ ID NO: 152607 - DNA, 25 bp, Homo sapien
tattgcattgccaagagtggatttt

SEQ ID NO: 152608 - DNA, 25 bp, Homo sapien
ttttttattgcattgccaagagtgg

SEQ ID NO: 152609 - DNA, 25 bp, Homo sapien
ttttattgcattgccaagagtggat

SEQ ID NO: 152610 - DNA, 25 bp, Homo sapien
ttattgcattgccaagagtggattt

SEQ ID NO: 152611 - DNA, 25 bp, Homo sapien
actgtgccagtgagggactcatctg

SEQ ID NO: 152612 - DNA, 25 bp, Homo sapien
tacaagagagtacagcctagaacta

SEQ ID NO: 152613 - DNA, 25 bp, Homo sapien
ggaatgcacagtccaacgctaggta

SEQ ID NO: 152614 - DNA, 25 bp, Homo sapien
tctggtccagtgtgcaagctacagt

SEQ ID NO: 152615 - DNA, 25 bp, Homo sapien
cctgggagttctctcaatgggcaaa

SEQ ID NO: 152616 - DNA, 25 bp, Homo sapien
gagacttttgtaccggaagcgagac

SEQ ID NO: 152617 - DNA, 25 bp, Homo sapien
gatctcccagaggtttcaggtgttc

SEQ ID NO: 152618 - DNA, 25 bp, Homo sapien
caacgtgccgcgtgtactggagaga

SEQ ID NO: 152619 - DNA, 25 bp, Homo sapien
tcctggatcgcagggggaccatcac

SEQ ID NO: 152620 - DNA, 25 bp, Homo sapien
tgacaatctccgagcagccttttgt

SEQ ID NO: 152621 - DNA, 25 bp, Homo sapien
cttttgtgtccccatcctggatcgc

SEQ ID NO: 152622 - DNA, 25 bp, Homo sapien
tgaaatgacaatctccgagcagcct

SEQ ID NO: 152623 - DNA, 25 bp, Homo sapien
tcatcattgccgtatgctgtgcctc

SEQ ID NO: 152624 - DNA, 25 bp, Homo sapien
tggtgatcatcattgccgtatgctg

SEQ ID NO: 152625 - DNA, 25 bp, Homo sapien
gtcggggctggtgatcatcattgcc

SEQ ID NO: 152626 - DNA, 25 bp, Homo sapien
tcattgccgtatgctgtgcctccct

SEQ ID NO: 152627 - DNA, 25 bp, Homo sapien
tagtatgtactgagttagctgtgag

SEQ ID NO: 152628 - DNA, 25 bp, Homo sapien
gctgtgagtaccgtcgcaaggcccc

SEQ ID NO: 152629 - DNA, 25 bp, Homo sapien
gtttgcccgggtcatacattagtat

SEQ ID NO: 152630 - DNA, 25 bp, Homo sapien
gtaccgtcgcaaggcccctggctgt

SEQ ID NO: 152631 - DNA, 25 bp, Homo sapien
ccagtgaagcgccaggtcctttcag

SEQ ID NO: 152632 - DNA, 25 bp, Homo sapien
gactacaatcaaggccagtgaagcg

SEQ ID NO: 152633 - DNA, 25 bp, Homo sapien
gaagcgccaggtcctttcagctcct

SEQ ID NO: 152634 - DNA, 25 bp, Homo sapien
aatcaaggccagtgaagcgccaggt

SEQ ID NO: 152635 - DNA, 25 bp, Homo sapien
gctgaacttaacctcggagtcttgg

SEQ ID NO: 152636 - DNA, 25 bp, Homo sapien
tgggaagcacattcaccgacatcgg

SEQ ID NO: 152637 - DNA, 25 bp, Homo sapien
ccgacatcggctccttgagggagat

SEQ ID NO: 152638 - DNA, 25 bp, Homo sapien
caggcccacactggttttaagacag

SEQ ID NO: 152639 - DNA, 25 bp, Homo sapien
ggcgcacaagggcaccgtgttcatc

SEQ ID NO: 152640 - DNA, 25 bp, Homo sapien
gggtctccatgctaaacccagaagc

SEQ ID NO: 152641 - DNA, 25 bp, Homo sapien
cctgctgtaggaatccgtgattgga

SEQ ID NO: 152642 - DNA, 25 bp, Homo sapien
gggccctgaattgcaggcgcacaag

SEQ ID NO: 152643 - DNA, 25 bp, Homo sapien
aggcactgggctgccctaaagctgg

SEQ ID NO: 152644 - DNA, 25 bp, Homo sapien
agtatgcggaccttctgcgcagccg

SEQ ID NO: 152645 - DNA, 25 bp, Homo sapien
cagccgtgcgtctgcagccctggtg

SEQ ID NO: 152646 - DNA, 25 bp, Homo sapien
aaagctggcaagtatgcggaccttc

SEQ ID NO: 152647 - DNA, 25 bp, Homo sapien
cattacgttcagtcagctcacactg

SEQ ID NO: 152648 - DNA, 25 bp, Homo sapien
gctcattacgttcagtcagctcaca

SEQ ID NO: 152649 - DNA, 25 bp, Homo sapien
ctcattacgttcagtcagctcacac

SEQ ID NO: 152650 - DNA, 25 bp, Homo sapien
tgagctcattacgttcagtcagctc

SEQ ID NO: 152651 - DNA, 25 bp, Homo sapien
aacctggattgcagacagcacgagg

SEQ ID NO: 152652 - DNA, 25 bp, Homo sapien
caacctggattgcagacagcacgag

SEQ ID NO: 152653 - DNA, 25 bp, Homo sapien
accctggaggtggaggtcgcggtga

SEQ ID NO: 152654 - DNA, 25 bp, Homo sapien
tgaaccctggaggtggaggtcgcgg

SEQ ID NO: 152655 - DNA, 25 bp, Homo sapien
gccaagatcgcaccactgcactcca

SEQ ID NO: 152656 - DNA, 25 bp, Homo sapien
cactccagcctgggcgacagagtga

SEQ ID NO: 152657 - DNA, 25 bp, Homo sapien
tcctcgtgtggagaagcactctggc

SEQ ID NO: 152658 - DNA, 25 bp, Homo sapien
gctgagagctgaccgaaagggaata

SEQ ID NO: 152659 - DNA, 25 bp, Homo sapien
caaatcacacatgcgaggtcctggc

SEQ ID NO: 152660 - DNA, 25 bp, Homo sapien
gatagccccagatatttagcacgtg

SEQ ID NO: 152661 - DNA, 25 bp, Homo sapien
tcttatctggccttatgggtctctg

SEQ ID NO: 152662 - DNA, 25 bp, Homo sapien
caagttaccgtggtgctggcctgtc

SEQ ID NO: 152663 - DNA, 25 bp, Homo sapien
taaagtactagttagagagacagcc

SEQ ID NO: 152664 - DNA, 25 bp, Homo sapien
tgtctccatgaaagatgccagaagc

SEQ ID NO: 152665 - DNA, 25 bp, Homo sapien
ggtcagctgcagctatagcagacag

SEQ ID NO: 152666 - DNA, 25 bp, Homo sapien
agctcccaagcctgcgggcagagtc

SEQ ID NO: 152667 - DNA, 25 bp, Homo sapien
agtgccaccccaccgtcagctgagg

SEQ ID NO: 152668 - DNA, 25 bp, Homo sapien
agctcccagtggaagaacccacaaa

SEQ ID NO: 152669 - DNA, 25 bp, Homo sapien
tgtgcagatcgggagcagctcccag

SEQ ID NO: 152670 - DNA, 25 bp, Homo sapien
tgcagccacttggaaccctagcctt

SEQ ID NO: 152671 - DNA, 25 bp, Homo sapien
gaaaatgcccagtcttgctgactct

SEQ ID NO: 152672 - DNA, 25 bp, Homo sapien
ttgctcagtaccctttttggctgac

SEQ ID NO: 152673 - DNA, 25 bp, Homo sapien
ggatgggtgtcctgaccccatctgt

SEQ ID NO: 152674 - DNA, 25 bp, Homo sapien
ccacagtcacatgaatggtaggaaa

SEQ ID NO: 152675 - DNA, 25 bp, Homo sapien
ggaaaatttggcacagtgtttgcca

SEQ ID NO: 152676 - DNA, 25 bp, Homo sapien
aatttggcacagtgtttgccacaaa

SEQ ID NO: 152677 - DNA, 25 bp, Homo sapien
agtgtttgccacaaacacgggtcat

SEQ ID NO: 152678 - DNA, 25 bp, Homo sapien
cgataggaaaatttggcacagtgtt

SEQ ID NO: 152679 - DNA, 25 bp, Homo sapien
tctgaccattccagagcaagggaaa

SEQ ID NO: 152680 - DNA, 25 bp, Homo sapien
tcctgtaacagcgagagagtttgtg

SEQ ID NO: 152681 - DNA, 25 bp, Homo sapien
agatcacactggctaccatataagg

SEQ ID NO: 152682 - DNA, 25 bp, Homo sapien
cataggagcttcctgtgctggtcaa

SEQ ID NO: 152683 - DNA, 25 bp, Homo sapien
gagaagcagatgcagggcaatgagc

SEQ ID NO: 152684 - DNA, 25 bp, Homo sapien
agagaagcagatgcagggcaatgag

SEQ ID NO: 152685 - DNA, 25 bp, Homo sapien
gaagcagatgcagggcaatgagcac

SEQ ID NO: 152686 - DNA, 25 bp, Homo sapien
agaagcagatgcagggcaatgagca

SEQ ID NO: 152687 - DNA, 25 bp, Homo sapien
ctgccttcagggcgtgcctgtggct

SEQ ID NO: 152688 - DNA, 25 bp, Homo sapien
cctgccttcagggcgtgcctgtggc

SEQ ID NO: 152689 - DNA, 25 bp, Homo sapien
ccccctgccttcagggcgtgcctgt

SEQ ID NO: 152690 - DNA, 25 bp, Homo sapien
ccctgccttcagggcgtgcctgtgg

SEQ ID NO: 152691 - DNA, 25 bp, Homo sapien
tcctcagagcagtcgttgtgtccca

SEQ ID NO: 152692 - DNA, 25 bp, Homo sapien
ctcctcagagcagtcgttgtgtccc

SEQ ID NO: 152693 - DNA, 25 bp, Homo sapien
ggacgcttggcataaccatctgcag

SEQ ID NO: 152694 - DNA, 25 bp, Homo sapien
cagccctgtccacacattggtcagg

SEQ ID NO: 152695 - DNA, 25 bp, Homo sapien
agcatcctacccagcggacgcttgg

SEQ ID NO: 152696 - DNA, 25 bp, Homo sapien
cacacattggtcaggactgagaggc

SEQ ID NO: 152697 - DNA, 25 bp, Homo sapien
acattccttcggcaccggcatgaca

SEQ ID NO: 152698 - DNA, 25 bp, Homo sapien
cggcatgacattctgcttggccaac

SEQ ID NO: 152699 - DNA, 25 bp, Homo sapien
catgttcccggtaaacacgggacat

SEQ ID NO: 152700 - DNA, 25 bp, Homo sapien
gaggccattatctcccatgttcccg

SEQ ID NO: 152701 - DNA, 25 bp, Homo sapien
tcagcacttcgacatgtgctgacag

SEQ ID NO: 152702 - DNA, 25 bp, Homo sapien
attcagagggaaacagataccaggg

SEQ ID NO: 152703 - DNA, 25 bp, Homo sapien
agcaaaaactcagcacttcgacatg

SEQ ID NO: 152704 - DNA, 25 bp, Homo sapien
acagcaagattcagagggaaacaga

SEQ ID NO: 152705 - DNA, 25 bp, Homo sapien
tagggtttcccaattaatgtgccca

SEQ ID NO: 152706 - DNA, 25 bp, Homo sapien
caaagtcgctgacggtcagtgttcc

SEQ ID NO: 152707 - DNA, 25 bp, Homo sapien
tgacggtcagtgttccaggatccaa

SEQ ID NO: 152708 - DNA, 25 bp, Homo sapien
gccagttccttcactccagctcctc

SEQ ID NO: 152709 - DNA, 25 bp, Homo sapien
ccgccaaagtcgctgacggtcagtg

SEQ ID NO: 152710 - DNA, 25 bp, Homo sapien
ggtgcgggagttctttgcgatacat

SEQ ID NO: 152711 - DNA, 25 bp, Homo sapien
cttcagggaacggtgcgggagttct

SEQ ID NO: 152712 - DNA, 25 bp, Homo sapien
aacggtgcgggagttctttgcgata

SEQ ID NO: 152713 - DNA, 25 bp, Homo sapien
gtctccttcagggaacggtgcggga

SEQ ID NO: 152714 - DNA, 25 bp, Homo sapien
ttccccgaggacctaagtgcacagt

SEQ ID NO: 152715 - DNA, 25 bp, Homo sapien
ctccgtgctcacaggcagtttccat

SEQ ID NO: 152716 - DNA, 25 bp, Homo sapien
taagtgcacagtactacggttaggt

SEQ ID NO: 152717 - DNA, 25 bp, Homo sapien
tactacggttaggtgcacagaggca

SEQ ID NO: 152718 - DNA, 25 bp, Homo sapien
ccttgtaagctgtaaacacgctgca

SEQ ID NO: 152719 - DNA, 25 bp, Homo sapien
tgtaaacacgctgcaccacgaggtc

SEQ ID NO: 152720 - DNA, 25 bp, Homo sapien
tccatcatcgggtgtgtgagttgat

SEQ ID NO: 152721 - DNA, 25 bp, Homo sapien
cgaggtcccgctgtccatcatcggg

SEQ ID NO: 152722 - DNA, 25 bp, Homo sapien
caggccttgccgactctggcttcat

SEQ ID NO: 152723 - DNA, 25 bp, Homo sapien
ccaaacagcccggctcaacttccag

SEQ ID NO: 152724 - DNA, 25 bp, Homo sapien
aggccttgccgactctggcttcata

SEQ ID NO: 152725 - DNA, 25 bp, Homo sapien
taatccaaacagcccggctcaactt

SEQ ID NO: 152726 - DNA, 25 bp, Homo sapien
tggcgagatggggcagagcatggaa

SEQ ID NO: 152727 - DNA, 25 bp, Homo sapien
ctggcgagatggggcagagcatgga

SEQ ID NO: 152728 - DNA, 25 bp, Homo sapien
accagtgcagggttgccgcaggaat

SEQ ID NO: 152729 - DNA, 25 bp, Homo sapien
ggaaccagtgcagggttgccgcagg

SEQ ID NO: 152730 - DNA, 25 bp, Homo sapien
aaccagtgcagggttgccgcaggaa

SEQ ID NO: 152731 - DNA, 25 bp, Homo sapien
gtttggttgaagctgggaaccagtg

SEQ ID NO: 152732 - DNA, 25 bp, Homo sapien
tgtgagtgcgtccatcacatcctga

SEQ ID NO: 152733 - DNA, 25 bp, Homo sapien
tgaaggtgatgccgcctccttgagg

SEQ ID NO: 152734 - DNA, 25 bp, Homo sapien
cacgaagaaggtcgtccagggccat

SEQ ID NO: 152735 - DNA, 25 bp, Homo sapien
aagtgaaggatgcacgaagaaggtc

SEQ ID NO: 152736 - DNA, 25 bp, Homo sapien
tggagtacctgctcagtgccgggtc

SEQ ID NO: 152737 - DNA, 25 bp, Homo sapien
gagtacctgctcagtgccgggtcat

SEQ ID NO: 152738 - DNA, 25 bp, Homo sapien
cagtgccgggtcatctcctggaggt

SEQ ID NO: 152739 - DNA, 25 bp, Homo sapien
gctcagtgccgggtcatctcctgga

SEQ ID NO: 152740 - DNA, 25 bp, Homo sapien
cagagaggtcatcggcagtgctgct

SEQ ID NO: 152741 - DNA, 25 bp, Homo sapien
cagtgctgctttccgagatggtgaa

SEQ ID NO: 152742 - DNA, 25 bp, Homo sapien
ggcttgtggccacggtgaaagcaaa

SEQ ID NO: 152743 - DNA, 25 bp, Homo sapien
actttagccagtccacacgtgcaga

SEQ ID NO: 152744 - DNA, 25 bp, Homo sapien
cagctctaggttgggtgttgaggac

SEQ ID NO: 152745 - DNA, 25 bp, Homo sapien
attttccgtgcgagcctctgccctg

SEQ ID NO: 152746 - DNA, 25 bp, Homo sapien
tgcacagctctaggttgggtgttga

SEQ ID NO: 152747 - DNA, 25 bp, Homo sapien
cctgcacagctctaggttgggtgtt

SEQ ID NO: 152748 - DNA, 25 bp, Homo sapien
tcagactagccagtcctttttccat

SEQ ID NO: 152749 - DNA, 25 bp, Homo sapien
cctcagactagccagtcctttttcc

SEQ ID NO: 152750 - DNA, 25 bp, Homo sapien
ctcagactagccagtcctttttcca

SEQ ID NO: 152751 - DNA, 25 bp, Homo sapien
cagtcctgtgtcccgtttcctccag

SEQ ID NO: 152752 - DNA, 25 bp, Homo sapien
ccagtcctgtgtcccgtttcctcca

SEQ ID NO: 152753 - DNA, 25 bp, Homo sapien
cctgtgtcccgtttcctccagacca

SEQ ID NO: 152754 - DNA, 25 bp, Homo sapien
gcattttggagagcggagacagtga

SEQ ID NO: 152755 - DNA, 25 bp, Homo sapien
cttgagtcaaggcactgagacggag

SEQ ID NO: 152756 - DNA, 25 bp, Homo sapien
ctgagacggagagtgttaggcattt

SEQ ID NO: 152757 - DNA, 25 bp, Homo sapien
cagtgagaagctcagtgcagcggcg

SEQ ID NO: 152758 - DNA, 25 bp, Homo sapien
tgtgtcctccagtactgataggcct

SEQ ID NO: 152759 - DNA, 25 bp, Homo sapien
ccagtactgataggcctcgtcactc

SEQ ID NO: 152760 - DNA, 25 bp, Homo sapien
tcctccagtactgataggcctcgtc

SEQ ID NO: 152761 - DNA, 25 bp, Homo sapien
gactgtgtcctccagtactgatagg

SEQ ID NO: 152762 - DNA, 25 bp, Homo sapien
atgtgggactttctcggcaacaaga

SEQ ID NO: 152763 - DNA, 25 bp, Homo sapien
tctttggcaacgagaaagacctatg

SEQ ID NO: 152764 - DNA, 25 bp, Homo sapien
ggacacctactatgtacaggacatt

SEQ ID NO: 152765 - DNA, 25 bp, Homo sapien
gcaacaagaagacccacgtgggact

SEQ ID NO: 152766 - DNA, 25 bp, Homo sapien
cataacaaaggccacgcggaggaca

SEQ ID NO: 152767 - DNA, 25 bp, Homo sapien
cagctcggggaacataacaaaggcc

SEQ ID NO: 152768 - DNA, 25 bp, Homo sapien
aaaggccacgcggaggacagagtgg

SEQ ID NO: 152769 - DNA, 25 bp, Homo sapien
taacaaaggccacgcggaggacaga

SEQ ID NO: 152770 - DNA, 25 bp, Homo sapien
tttccaaagctcttaatgtgggctg

SEQ ID NO: 152771 - DNA, 25 bp, Homo sapien
tcttagccagtagtaagcctcccca

SEQ ID NO: 152772 - DNA, 25 bp, Homo sapien
ggtgagttggtgtcttacgaaagtc

SEQ ID NO: 152773 - DNA, 25 bp, Homo sapien
ttctgcactgcccgctcatgaagct

SEQ ID NO: 152774 - DNA, 25 bp, Homo sapien
tctccccaggccttctgtgatttgt

SEQ ID NO: 152775 - DNA, 25 bp, Homo sapien
gaagatcttctctcttctaagggca

SEQ ID NO: 152776 - DNA, 25 bp, Homo sapien
gctttgctgtgctcgcccttttctc

SEQ ID NO: 152777 - DNA, 25 bp, Homo sapien
ccccaggccttctgtgatttgtggg

SEQ ID NO: 152778 - DNA, 25 bp, Homo sapien
gctggaagcagttgtgcaacccttg

SEQ ID NO: 152779 - DNA, 25 bp, Homo sapien
caacccttgagtgggctgaatggag

SEQ ID NO: 152780 - DNA, 25 bp, Homo sapien
agtgggctgaatggaggacaactcc

SEQ ID NO: 152781 - DNA, 25 bp, Homo sapien
aatggaggacaactccccggagctg

SEQ ID NO: 152782 - DNA, 25 bp, Homo sapien
aggccccaccaacgtggcccggcag

SEQ ID NO: 152783 - DNA, 25 bp, Homo sapien
cttgcgggctgatctcaggctgcgg

SEQ ID NO: 152784 - DNA, 25 bp, Homo sapien
ggattcccccgaagaagcatctgca

SEQ ID NO: 152785 - DNA, 25 bp, Homo sapien
tgcagcaatttcatgcctcctcggc

SEQ ID NO: 152786 - DNA, 25 bp, Homo sapien
acccgccacccagtcgggccagagc

SEQ ID NO: 152787 - DNA, 25 bp, Homo sapien
caccagggggccactgcacgaggct

SEQ ID NO: 152788 - DNA, 25 bp, Homo sapien
gccactgcacgaggctttccatgaa

SEQ ID NO: 152789 - DNA, 25 bp, Homo sapien
atgaagagggtaggctctgctggtg

SEQ ID NO: 152790 - DNA, 25 bp, Homo sapien
gggccactgcacgaggctttccatg

SEQ ID NO: 152791 - DNA, 25 bp, Homo sapien
tagcaagacattcctccctgtaggg

SEQ ID NO: 152792 - DNA, 25 bp, Homo sapien
ccttttcaggtagggctcagcagct

SEQ ID NO: 152793 - DNA, 25 bp, Homo sapien
gcaggtacttgcgatggtccacgga

SEQ ID NO: 152794 - DNA, 25 bp, Homo sapien
ttcccagaaggaagcgggcagctgt

SEQ ID NO: 152795 - DNA, 25 bp, Homo sapien
ggcaaggaagggcaacatcccagta

SEQ ID NO: 152796 - DNA, 25 bp, Homo sapien
caacaactgagattggctcgcagag

SEQ ID NO: 152797 - DNA, 25 bp, Homo sapien
cccagtacctatggtctgcacaggg

SEQ ID NO: 152798 - DNA, 25 bp, Homo sapien
ccatgcgcacacaaacggaagaggc

SEQ ID NO: 152799 - DNA, 25 bp, Homo sapien
ctcatgtaccctgatgacacttggg

SEQ ID NO: 152800 - DNA, 25 bp, Homo sapien
gaagactcaaggcttcagagccgcc

SEQ ID NO: 152801 - DNA, 25 bp, Homo sapien
aacacacccgaatcttccagacagg

SEQ ID NO: 152802 - DNA, 25 bp, Homo sapien
gcatgtttgttgtcttcactaaggc

SEQ ID NO: 152803 - DNA, 25 bp, Homo sapien
gaggagctgtactcacaacgtgcat

SEQ ID NO: 152804 - DNA, 25 bp, Homo sapien
ccttggtaatgtggaggactgaagc

SEQ ID NO: 152805 - DNA, 25 bp, Homo sapien
gaagttcagcaggattatgacaccg

SEQ ID NO: 152806 - DNA, 25 bp, Homo sapien
ctgacacggacacagagaagcttcc

SEQ ID NO: 152807 - DNA, 25 bp, Homo sapien
cagctggaagcgtttccttgggttt

SEQ ID NO: 152808 - DNA, 25 bp, Homo sapien
cactccagctggaagcgtttccttg

SEQ ID NO: 152809 - DNA, 25 bp, Homo sapien
tacacctccgagcactccagctgga

SEQ ID NO: 152810 - DNA, 25 bp, Homo sapien
ctccgagcactccagctggaagcgt

SEQ ID NO: 152811 - DNA, 25 bp, Homo sapien
ttttcttgagttatacagcacgctg

SEQ ID NO: 152812 - DNA, 25 bp, Homo sapien
gcacgctggtgactttcgttttgga

SEQ ID NO: 152813 - DNA, 25 bp, Homo sapien
gaaaccgcttgtagtcaaactgtga

SEQ ID NO: 152814 - DNA, 25 bp, Homo sapien
tggatgcaatgaacagagactcagc

SEQ ID NO: 152815 - DNA, 25 bp, Homo sapien
gaattgtacccttgtttcagagcct

SEQ ID NO: 152816 - DNA, 25 bp, Homo sapien
caggtaatgcatgctttcaactttc

SEQ ID NO: 152817 - DNA, 25 bp, Homo sapien
taaactccctgcttcaaaggacagc

SEQ ID NO: 152818 - DNA, 25 bp, Homo sapien
aacgttggtcatgcggtggccccaa

SEQ ID NO: 152819 - DNA, 25 bp, Homo sapien
cccggaggaacggaaggcaggattg

SEQ ID NO: 152820 - DNA, 25 bp, Homo sapien
tgtattcgatgcacccggaggaacg

SEQ ID NO: 152821 - DNA, 25 bp, Homo sapien
aaggcaggattgcagcttcctcagt

SEQ ID NO: 152822 - DNA, 25 bp, Homo sapien
tctgaagtgagagtctgtattcgat

SEQ ID NO: 152823 - DNA, 25 bp, Homo sapien
ctttcctgtggtggccacattcttc

SEQ ID NO: 152824 - DNA, 25 bp, Homo sapien
gggctttcctgtggtggccacattc

SEQ ID NO: 152825 - DNA, 25 bp, Homo sapien
ttcccactcccttgcaggttgatca

SEQ ID NO: 152826 - DNA, 25 bp, Homo sapien
tcccttgcaggttgatcagttgcat

SEQ ID NO: 152827 - DNA, 25 bp, Homo sapien
cagacatttgatcccactgggccag

SEQ ID NO: 152828 - DNA, 25 bp, Homo sapien
cgtgtggcacggcagacatttgatc

SEQ ID NO: 152829 - DNA, 25 bp, Homo sapien
acctctgggtactgcagcgtggaga

SEQ ID NO: 152830 - DNA, 25 bp, Homo sapien
ggcaatgcacggcagcccttgggtt

SEQ ID NO: 152831 - DNA, 25 bp, Homo sapien
cagaggagatgccctcccaagaggc

SEQ ID NO: 152832 - DNA, 25 bp, Homo sapien
atagctcagaggagatgccctccca

SEQ ID NO: 152833 - DNA, 25 bp, Homo sapien
gctcagaggagatgccctcccaaga

SEQ ID NO: 152834 - DNA, 25 bp, Homo sapien
tagctcagaggagatgccctcccaa

SEQ ID NO: 152835 - DNA, 25 bp, Homo sapien
acagctccaggagcacaaagccaca

SEQ ID NO: 152836 - DNA, 25 bp, Homo sapien
ctacagctccaggagcacaaagcca

SEQ ID NO: 152837 - DNA, 25 bp, Homo sapien
agctccaggagcacaaagccacagc

SEQ ID NO: 152838 - DNA, 25 bp, Homo sapien
gctccaggagcacaaagccacagcc

SEQ ID NO: 152839 - DNA, 25 bp, Homo sapien
cacggtcttgcaaactgttcctgag

SEQ ID NO: 152840 - DNA, 25 bp, Homo sapien
caaggtcagtctttctagccccaag

SEQ ID NO: 152841 - DNA, 25 bp, Homo sapien
catggtcaagctgggaaaatggtct

SEQ ID NO: 152842 - DNA, 25 bp, Homo sapien
tcacccaaggccagtatgcaagcat

SEQ ID NO: 152843 - DNA, 25 bp, Homo sapien
cctcttcagatccttggaagccagg

SEQ ID NO: 152844 - DNA, 25 bp, Homo sapien
ttggaagccagggttagcatcccca

SEQ ID NO: 152845 - DNA, 25 bp, Homo sapien
aggagacccgtgagtcaggcaggat

SEQ ID NO: 152846 - DNA, 25 bp, Homo sapien
aagggacagtcacagccgcagcttc

SEQ ID NO: 152847 - DNA, 25 bp, Homo sapien
ggagctggtagagttcctgccacag

SEQ ID NO: 152848 - DNA, 25 bp, Homo sapien
cacagcccttgaaggtccccttcct

SEQ ID NO: 152849 - DNA, 25 bp, Homo sapien
caccaggattgcttgggtcagctct

SEQ ID NO: 152850 - DNA, 25 bp, Homo sapien
tagcctggagctggtagagttcctg

SEQ ID NO: 152851 - DNA, 25 bp, Homo sapien
tgagcaaactgagccacaagcagat

SEQ ID NO: 152852 - DNA, 25 bp, Homo sapien
atctcccaggcagcaaagaaggtat

SEQ ID NO: 152853 - DNA, 25 bp, Homo sapien
cactttatcagttggccatagactt

SEQ ID NO: 152854 - DNA, 25 bp, Homo sapien
cagatcaaataaacgcccatagcag

SEQ ID NO: 152855 - DNA, 25 bp, Homo sapien
ttaatcagatagtcttcaaaaagct

SEQ ID NO: 152856 - DNA, 25 bp, Homo sapien
tgcttctcgacttctctcttgagct

SEQ ID NO: 152857 - DNA, 25 bp, Homo sapien
ggaccttaatcagatagtcttcaaa

SEQ ID NO: 152858 - DNA, 25 bp, Homo sapien
aaagcttgtgcttctcgacttctct

SEQ ID NO: 152859 - DNA, 25 bp, Homo sapien
ctttccgaggaagctgtgtacatac

SEQ ID NO: 152860 - DNA, 25 bp, Homo sapien
ttgggaccaagcagtcagactcggc

SEQ ID NO: 152861 - DNA, 25 bp, Homo sapien
ttaccaggtactagctaaatgtggg

SEQ ID NO: 152862 - DNA, 25 bp, Homo sapien
gccctgtgctgtgcttataaaggat

SEQ ID NO: 152863 - DNA, 25 bp, Homo sapien
tcaaggagatgttgctgcttggagc

SEQ ID NO: 152864 - DNA, 25 bp, Homo sapien
cgaggcgggagactgccctcaagga

SEQ ID NO: 152865 - DNA, 25 bp, Homo sapien
agggattctggatcaagaccaccga

SEQ ID NO: 152866 - DNA, 25 bp, Homo sapien
atcaagaccaccgagcgaggcggga

SEQ ID NO: 152867 - DNA, 25 bp, Homo sapien
agagactccaggctccggtggacag

SEQ ID NO: 152868 - DNA, 25 bp, Homo sapien
gagcttcccgtagtgcttcaccgtg

SEQ ID NO: 152869 - DNA, 25 bp, Homo sapien
gacagcctggatcatctggcagaag

SEQ ID NO: 152870 - DNA, 25 bp, Homo sapien
tcgaggcgcttctgcgtgtcctggc

SEQ ID NO: 152871 - DNA, 25 bp, Homo sapien
ccacgcagaacaacgttaggcacga

SEQ ID NO: 152872 - DNA, 25 bp, Homo sapien
cacatggcttttctaccacgcagaa

SEQ ID NO: 152873 - DNA, 25 bp, Homo sapien
gagaggctacaaactagtcacacag

SEQ ID NO: 152874 - DNA, 25 bp, Homo sapien
tcgcaaggacgctagcaactagggt

SEQ ID NO: 152875 - DNA, 25 bp, Homo sapien
agtccccggtcccagtggcagcatg

SEQ ID NO: 152876 - DNA, 25 bp, Homo sapien
cacgcctttgtcagggcaggctctt

SEQ ID NO: 152877 - DNA, 25 bp, Homo sapien
gaatcttcatgatgccacgcctttg

SEQ ID NO: 152878 - DNA, 25 bp, Homo sapien
tccctcccagcggaagtcctattta

SEQ ID NO: 152879 - DNA, 25 bp, Homo sapien
atcttggtacaacaaaccctccagg

SEQ ID NO: 152880 - DNA, 25 bp, Homo sapien
aaccctccagggcatatgccctggt

SEQ ID NO: 152881 - DNA, 25 bp, Homo sapien
atgggccatcttggtacaacaaacc

SEQ ID NO: 152882 - DNA, 25 bp, Homo sapien
tccagggcatatgccctggtctgag

SEQ ID NO: 152883 - DNA, 25 bp, Homo sapien
gctgacacagccggatcttgaggct

SEQ ID NO: 152884 - DNA, 25 bp, Homo sapien
gcagctgacacagccggatcttgag

SEQ ID NO: 152885 - DNA, 25 bp, Homo sapien
gctcctgcttgcggtagcacttctt

SEQ ID NO: 152886 - DNA, 25 bp, Homo sapien
cctgcttgcggtagcacttcttctg

SEQ ID NO: 152887 - DNA, 25 bp, Homo sapien
aaagtcaatgtccttctggtaagtg

SEQ ID NO: 152888 - DNA, 25 bp, Homo sapien
aagtcaatgtccttctggtaagtga

SEQ ID NO: 152889 - DNA, 25 bp, Homo sapien
cagcactgccgggccatgttggtga

SEQ ID NO: 152890 - DNA, 25 bp, Homo sapien
catttgcatgtagccgagcagctga

SEQ ID NO: 152891 - DNA, 25 bp, Homo sapien
cactgccgggccatgttggtgatgg

SEQ ID NO: 152892 - DNA, 25 bp, Homo sapien
catgctcttgggcacgccgtgggca

SEQ ID NO: 152893 - DNA, 25 bp, Homo sapien
cacatacccaaagtaaaactgttgg

SEQ ID NO: 152894 - DNA, 25 bp, Homo sapien
aaacttttcatattacggtcaattg

SEQ ID NO: 152895 - DNA, 25 bp, Homo sapien
gaaccacagacctaaacagtagagc

SEQ ID NO: 152896 - DNA, 25 bp, Homo sapien
tttagatatgactcctaaaggacaa

SEQ ID NO: 152897 - DNA, 25 bp, Homo sapien
gacagtgttttggcctctggacgct

SEQ ID NO: 152898 - DNA, 25 bp, Homo sapien
ctgacagtgttttggcctctggacg

SEQ ID NO: 152899 - DNA, 25 bp, Homo sapien
cagtgttttggcctctggacgctgc

SEQ ID NO: 152900 - DNA, 25 bp, Homo sapien
tgacagtgttttggcctctggacgc

SEQ ID NO: 152901 - DNA, 25 bp, Homo sapien
agtgcgatcagtcttacagtctcca

SEQ ID NO: 152902 - DNA, 25 bp, Homo sapien
cgtgagcagtgcgatcagtcttaca

SEQ ID NO: 152903 - DNA, 25 bp, Homo sapien
tttgggttccgtgagcagtgcgatc

SEQ ID NO: 152904 - DNA, 25 bp, Homo sapien
cttacagtctccattttgtccaaca

SEQ ID NO: 152905 - DNA, 25 bp, Homo sapien
cttggacatttcctgaagggtttgg

SEQ ID NO: 152906 - DNA, 25 bp, Homo sapien
ctggtcagtacaggccggagcactc

SEQ ID NO: 152907 - DNA, 25 bp, Homo sapien
gcaaggcgcaggctggtcagtacag

SEQ ID NO: 152908 - DNA, 25 bp, Homo sapien
caggtaaggagaggtcgtgatgcca

SEQ ID NO: 152909 - DNA, 25 bp, Homo sapien
gccctggtggctctttacagtgtcc

SEQ ID NO: 152910 - DNA, 25 bp, Homo sapien
taccaacctggtactcaacttctgg

SEQ ID NO: 152911 - DNA, 25 bp, Homo sapien
ggtgaactcccatcgatcccatggc

SEQ ID NO: 152912 - DNA, 25 bp, Homo sapien
gagagtaccaaccatttcaggcagc

SEQ ID NO: 152913 - DNA, 25 bp, Homo sapien
taaaaactacactactcactgggca

SEQ ID NO: 152914 - DNA, 25 bp, Homo sapien
ctatgagacaagaaactcggaacag

SEQ ID NO: 152915 - DNA, 25 bp, Homo sapien
aaactacactactcactgggcacag

SEQ ID NO: 152916 - DNA, 25 bp, Homo sapien
aagaaactcggaacagcggctccct

SEQ ID NO: 152917 - DNA, 25 bp, Homo sapien
gaggtgccctctttcctgtgaaggt

SEQ ID NO: 152918 - DNA, 25 bp, Homo sapien
tgaggtgccctctttcctgtgaagg

SEQ ID NO: 152919 - DNA, 25 bp, Homo sapien
ctgaggtgccctctttcctgtgaag

SEQ ID NO: 152920 - DNA, 25 bp, Homo sapien
ggttccgcatgctccagccaaaatg

SEQ ID NO: 152921 - DNA, 25 bp, Homo sapien
tgcaccgcccttgatggagtctaaa

SEQ ID NO: 152922 - DNA, 25 bp, Homo sapien
gggatactttagcttgctttggaaa

SEQ ID NO: 152923 - DNA, 25 bp, Homo sapien
gccaaaatgcaagtccctactccgg

SEQ ID NO: 152924 - DNA, 25 bp, Homo sapien
tctgcattgatacagggcctcctga

SEQ ID NO: 152925 - DNA, 25 bp, Homo sapien
gcctcctgatgcgtgttcaaacctg

SEQ ID NO: 152926 - DNA, 25 bp, Homo sapien
cctggcttcagcatgtaggatttgc

SEQ ID NO: 152927 - DNA, 25 bp, Homo sapien
ttcaaaatgtaaccccaggaccagc

SEQ ID NO: 152928 - DNA, 25 bp, Homo sapien
cagacaggattagggcagccctcct

SEQ ID NO: 152929 - DNA, 25 bp, Homo sapien
gcacctcccgggaggtcagacagga

SEQ ID NO: 152930 - DNA, 25 bp, Homo sapien
gtccagccccatcgtgcagagggaa

SEQ ID NO: 152931 - DNA, 25 bp, Homo sapien
agagggaattccgaagtccaggcag

SEQ ID NO: 152932 - DNA, 25 bp, Homo sapien
tgctggctgcaaatgtcgactggtg

SEQ ID NO: 152933 - DNA, 25 bp, Homo sapien
cacagaacttcaccctgggcgtaga

SEQ ID NO: 152934 - DNA, 25 bp, Homo sapien
aaatgtctgagctagatcaagcacg

SEQ ID NO: 152935 - DNA, 25 bp, Homo sapien
gaatgacatagagccctcgaaggca

SEQ ID NO: 152936 - DNA, 25 bp, Homo sapien
gctgttaagcgcaatgccgtgtcca

SEQ ID NO: 152937 - DNA, 25 bp, Homo sapien
tagccgcgctgttaagcgcaatgcc

SEQ ID NO: 152938 - DNA, 25 bp, Homo sapien
gcctgaggtagccgcgctgttaagc

SEQ ID NO: 152939 - DNA, 25 bp, Homo sapien
gcaatgccgtgtccaattcacggcc

SEQ ID NO: 152940 - DNA, 25 bp, Homo sapien
gaaaggagaaacagcattctggtac

SEQ ID NO: 152941 - DNA, 25 bp, Homo sapien
ggagaaacagcattctggtacttac

SEQ ID NO: 152942 - DNA, 25 bp, Homo sapien
ctgtaagacaaaaagccaagaaagg

SEQ ID NO: 152943 - DNA, 25 bp, Homo sapien
gccaagaaaggagaaacagcattct

SEQ ID NO: 152944 - DNA, 25 bp, Homo sapien
gtgcagggtcatgggggagcgagct

SEQ ID NO: 152945 - DNA, 25 bp, Homo sapien
gcagggtcatgggggagcgagcttt

SEQ ID NO: 152946 - DNA, 25 bp, Homo sapien
aagtgctttgaaggtgcagggtcat

SEQ ID NO: 152947 - DNA, 25 bp, Homo sapien
ctatgagaaaagtgctttgaaggtg

SEQ ID NO: 152948 - DNA, 25 bp, Homo sapien
aatgcccttgaaggtttttctccag

SEQ ID NO: 152949 - DNA, 25 bp, Homo sapien
attttttctccaaatgcccttgaag

SEQ ID NO: 152950 - DNA, 25 bp, Homo sapien
ggtttttctccagctaatatagaac

SEQ ID NO: 152951 - DNA, 25 bp, Homo sapien
ttattttttctccaaatgcccttga

SEQ ID NO: 152952 - DNA, 25 bp, Homo sapien
ctgctcctgagccaagagcagggct

SEQ ID NO: 152953 - DNA, 25 bp, Homo sapien
gggagcacaggcctcccaagtggcc

SEQ ID NO: 152954 - DNA, 25 bp, Homo sapien
acaggcctcccaagtggcctggctg

SEQ ID NO: 152955 - DNA, 25 bp, Homo sapien
gctgctcctgagccaagagcagggc

SEQ ID NO: 152956 - DNA, 25 bp, Homo sapien
ctgggggtcgaaggttggctggcca

SEQ ID NO: 152957 - DNA, 25 bp, Homo sapien
actggggcttatcccgccctgtgtc

SEQ ID NO: 152958 - DNA, 25 bp, Homo sapien
tgcagcttgagtgtgtgtccacacc

SEQ ID NO: 152959 - DNA, 25 bp, Homo sapien
cagcagaagccttggatgatgccag

SEQ ID NO: 152960 - DNA, 25 bp, Homo sapien
tgtcctcctttggtgctgatccctt

SEQ ID NO: 152961 - DNA, 25 bp, Homo sapien
tctgtcctcctttggtgctgatccc

SEQ ID NO: 152962 - DNA, 25 bp, Homo sapien
aatccctttgaatttccccaccatg

SEQ ID NO: 152963 - DNA, 25 bp, Homo sapien
ttgaatttccccaccatgtctgtcc

SEQ ID NO: 152964 - DNA, 25 bp, Homo sapien
ttctggaatgcccacttgtcagata

SEQ ID NO: 152965 - DNA, 25 bp, Homo sapien
ccttcccggattgcccagatggtca

SEQ ID NO: 152966 - DNA, 25 bp, Homo sapien
tctggaatgcccacttgtcagatac

SEQ ID NO: 152967 - DNA, 25 bp, Homo sapien
tgtccatgaggccttcccggattgc

SEQ ID NO: 152968 - DNA, 25 bp, Homo sapien
tcaagctgggtctgcatcgaaaatg

SEQ ID NO: 152969 - DNA, 25 bp, Homo sapien
gggtctgcatcgaaaatgcagacag

SEQ ID NO: 152970 - DNA, 25 bp, Homo sapien
ccatggcaggggatccgtgtgttct

SEQ ID NO: 152971 - DNA, 25 bp, Homo sapien
acagcgtcgttaggggccgcccatg

SEQ ID NO: 152972 - DNA, 25 bp, Homo sapien
gcggcggagaatacacccgaccgct

SEQ ID NO: 152973 - DNA, 25 bp, Homo sapien
cgggctccgccgctggttcggtggc

SEQ ID NO: 152974 - DNA, 25 bp, Homo sapien
gatccggtgcgggaatgccgcggga

SEQ ID NO: 152975 - DNA, 25 bp, Homo sapien
aggtcccgccccagcgaggagcgat

SEQ ID NO: 152976 - DNA, 25 bp, Homo sapien
tggccctcagtatccgtccggactc

SEQ ID NO: 152977 - DNA, 25 bp, Homo sapien
tatccgtccggactccgtatttcag

SEQ ID NO: 152978 - DNA, 25 bp, Homo sapien
tcagctgcacatccacggggtacag

SEQ ID NO: 152979 - DNA, 25 bp, Homo sapien
ggggcgcgacttggccctcagtatc

SEQ ID NO: 152980 - DNA, 25 bp, Homo sapien
tcgtcagagaggtcgtccaagtcaa

SEQ ID NO: 152981 - DNA, 25 bp, Homo sapien
cagagaggtcgtccaagtcaaccat

SEQ ID NO: 152982 - DNA, 25 bp, Homo sapien
cttcatcgtcagagaggtcgtccaa

SEQ ID NO: 152983 - DNA, 25 bp, Homo sapien
tcatcgtcagagaggtcgtccaagt

SEQ ID NO: 152984 - DNA, 25 bp, Homo sapien
tctgcaggtgatggaaccttgggct

SEQ ID NO: 152985 - DNA, 25 bp, Homo sapien
gggctagctccagcgcaccagtggt

SEQ ID NO: 152986 - DNA, 25 bp, Homo sapien
ggtcccagatgtaattattggggga

SEQ ID NO: 152987 - DNA, 25 bp, Homo sapien
tccatctgcaggtgatggaaccttg

SEQ ID NO: 152988 - DNA, 25 bp, Homo sapien
gatgccagagaaggtgtcagagatc

SEQ ID NO: 152989 - DNA, 25 bp, Homo sapien
tggcactggtacatggagatgccag

SEQ ID NO: 152990 - DNA, 25 bp, Homo sapien
agaaggtgtcagagatctgagctcg

SEQ ID NO: 152991 - DNA, 25 bp, Homo sapien
agaagaggccgcagtgtgtggcact

SEQ ID NO: 152992 - DNA, 25 bp, Homo sapien
caggatggtcccgaagaatggatag

SEQ ID NO: 152993 - DNA, 25 bp, Homo sapien
ccgaagaatggatagaatgtcacat

SEQ ID NO: 152994 - DNA, 25 bp, Homo sapien
ctcgattttcctccggtaaatcctg

SEQ ID NO: 152995 - DNA, 25 bp, Homo sapien
ggtcccgaagaatggatagaatgtc

SEQ ID NO: 152996 - DNA, 25 bp, Homo sapien
actccaggtaggaatagcccaaggc

SEQ ID NO: 152997 - DNA, 25 bp, Homo sapien
gatggcggtgaaccttttgctgagt

SEQ ID NO: 152998 - DNA, 25 bp, Homo sapien
cccctttggtcttgcggatggcggt

SEQ ID NO: 152999 - DNA, 25 bp, Homo sapien
gactccaggtaggaatagcccaagg

SEQ ID NO: 153000 - DNA, 25 bp, Homo sapien
tcagagtgggtcacgaagtacctgc

SEQ ID NO: 153001 - DNA, 25 bp, Homo sapien
tccgagagacttgaggctgacctag

SEQ ID NO: 153002 - DNA, 25 bp, Homo sapien
tctctgggttaaccagcctgagtgt

SEQ ID NO: 153003 - DNA, 25 bp, Homo sapien
tgagtgtaacgaaaacctccgagag

SEQ ID NO: 153004 - DNA, 25 bp, Homo sapien
tggggtctgcagtacgcgttctttg

SEQ ID NO: 153005 - DNA, 25 bp, Homo sapien
tttggggtctgcagtacgcgttctt

SEQ ID NO: 153006 - DNA, 25 bp, Homo sapien
gggtctgcagtacgcgttctttgaa

SEQ ID NO: 153007 - DNA, 25 bp, Homo sapien
atttggggtctgcagtacgcgttct

SEQ ID NO: 153008 - DNA, 25 bp, Homo sapien
catcaatgaagtgccggaagaagtc

SEQ ID NO: 153009 - DNA, 25 bp, Homo sapien
gaggcactctggtcgttgaacacct

SEQ ID NO: 153010 - DNA, 25 bp, Homo sapien
gaactgcacgatgtggtccgaggca

SEQ ID NO: 153011 - DNA, 25 bp, Homo sapien
gaagaagtctgctcggttcctgatg

SEQ ID NO: 153012 - DNA, 25 bp, Homo sapien
tctggatgtggtcacactccgtggc

SEQ ID NO: 153013 - DNA, 25 bp, Homo sapien
ggttcagggcggtatccatctcgtc

SEQ ID NO: 153014 - DNA, 25 bp, Homo sapien
gcctcagggaacacgtggtggttca

SEQ ID NO: 153015 - DNA, 25 bp, Homo sapien
tgcgacaacgccgtgatctggatgt

SEQ ID NO: 153016 - DNA, 25 bp, Homo sapien
aattcccaggcggtttccacagtgg

SEQ ID NO: 153017 - DNA, 25 bp, Homo sapien
tgtcagagcccagtccaacaagtga

SEQ ID NO: 153018 - DNA, 25 bp, Homo sapien
gggacctcctccagttgaagaaaca

SEQ ID NO: 153019 - DNA, 25 bp, Homo sapien
gaatgtttgaaaccacaccgtagcc

SEQ ID NO: 153020 - DNA, 25 bp, Homo sapien
gtgtgtgtccgttcacacctttcag

SEQ ID NO: 153021 - DNA, 25 bp, Homo sapien
tcacaaatcatgtcatgtgttcccc

SEQ ID NO: 153022 - DNA, 25 bp, Homo sapien
cagggatcccctggagacttgtctg

SEQ ID NO: 153023 - DNA, 25 bp, Homo sapien
tagaacagccaaggcgtcatccagg

SEQ ID NO: 153024 - DNA, 25 bp, Homo sapien
tacttactgcctagggaagctgtag

SEQ ID NO: 153025 - DNA, 25 bp, Homo sapien
tttgcagagcccatacgatgagtgt

SEQ ID NO: 153026 - DNA, 25 bp, Homo sapien
caagggcaatggttcggatttggcc

SEQ ID NO: 153027 - DNA, 25 bp, Homo sapien
tttcccttcgagacaaagatctgag

SEQ ID NO: 153028 - DNA, 25 bp, Homo sapien
taatatcccctaatggcacctgagc

SEQ ID NO: 153029 - DNA, 25 bp, Homo sapien
cagtgattgagacttgcccagggcc

SEQ ID NO: 153030 - DNA, 25 bp, Homo sapien
tacttgagcatatagacacccagtg

SEQ ID NO: 153031 - DNA, 25 bp, Homo sapien
tcagtctcagaagtgttgccaagga

SEQ ID NO: 153032 - DNA, 25 bp, Homo sapien
gtgctcagggaactagggacttcct

SEQ ID NO: 153033 - DNA, 25 bp, Homo sapien
tgtaggtgagtatccacaactccca

SEQ ID NO: 153034 - DNA, 25 bp, Homo sapien
agaataggcttttccctcggtctgg

SEQ ID NO: 153035 - DNA, 25 bp, Homo sapien
tggcttccaaacaggtattcgtcgg

SEQ ID NO: 153036 - DNA, 25 bp, Homo sapien
tctcctgggtattgtctgagccacc

SEQ ID NO: 153037 - DNA, 25 bp, Homo sapien
tcacagagccaacagtaacagtcgc

SEQ ID NO: 153038 - DNA, 25 bp, Homo sapien
tctggcgtgtgaagccctcaggatc

SEQ ID NO: 153039 - DNA, 25 bp, Homo sapien
tttacccagagcagcaccctaatag

SEQ ID NO: 153040 - DNA, 25 bp, Homo sapien
ctcctgggccagcacagtgctaagc

SEQ ID NO: 153041 - DNA, 25 bp, Homo sapien
aaggacaggaatagtgtcaggcctc

SEQ ID NO: 153042 - DNA, 25 bp, Homo sapien
tgctaagcccttgaaaggacaggaa

SEQ ID NO: 153043 - DNA, 25 bp, Homo sapien
ttattaacttagtgattctcctggg

SEQ ID NO: 153044 - DNA, 25 bp, Homo sapien
cagccactgtttacggagagccaga

SEQ ID NO: 153045 - DNA, 25 bp, Homo sapien
tccactcacacccatagcgggagag

SEQ ID NO: 153046 - DNA, 25 bp, Homo sapien
gaagacaaagaagccgaaggagcca

SEQ ID NO: 153047 - DNA, 25 bp, Homo sapien
tgtctgccccaagtaagagcgagtc

SEQ ID NO: 153048 - DNA, 25 bp, Homo sapien
gagtagagaccgtataacccaggga

SEQ ID NO: 153049 - DNA, 25 bp, Homo sapien
cagaagtttctacctgcctggctgg

SEQ ID NO: 153050 - DNA, 25 bp, Homo sapien
agtgaatgggctaaacctgggaaca

SEQ ID NO: 153051 - DNA, 25 bp, Homo sapien
taaatcctggataagaagtgactgc

SEQ ID NO: 153052 - DNA, 25 bp, Homo sapien
taagaagtattggatccagcagagg

SEQ ID NO: 153053 - DNA, 25 bp, Homo sapien
gctgggtcaacctttgtggagtcaa

SEQ ID NO: 153054 - DNA, 25 bp, Homo sapien
gggctatcagccatcagtcaatagt

SEQ ID NO: 153055 - DNA, 25 bp, Homo sapien
aatacagtcccagcccctaagaagt

SEQ ID NO: 153056 - DNA, 25 bp, Homo sapien
cagagaccaagatccattgtgagac

SEQ ID NO: 153057 - DNA, 25 bp, Homo sapien
tcacaaggaatgaggccacggtgga

SEQ ID NO: 153058 - DNA, 25 bp, Homo sapien
tatccaggccgcagcttagtgtttg

SEQ ID NO: 153059 - DNA, 25 bp, Homo sapien
cggtggagacgctaacagagaccaa

SEQ ID NO: 153060 - DNA, 25 bp, Homo sapien
tgagactagatcaccaggcaaggct

SEQ ID NO: 153061 - DNA, 25 bp, Homo sapien
cccagtgatattgcagccgaggcca

SEQ ID NO: 153062 - DNA, 25 bp, Homo sapien
gatgcattgcctgacgatactgtaa

SEQ ID NO: 153063 - DNA, 25 bp, Homo sapien
agagaccagaactgaggccggagct

SEQ ID NO: 153064 - DNA, 25 bp, Homo sapien
tttgaagtgaaagatcctgagctgg

SEQ ID NO: 153065 - DNA, 25 bp, Homo sapien
gaaaacctggtccaaactgctccaa

SEQ ID NO: 153066 - DNA, 25 bp, Homo sapien
tgccaaggtgcccaaaaaagcgaag

SEQ ID NO: 153067 - DNA, 25 bp, Homo sapien
ggagggaaagtctagctcaccaaag

SEQ ID NO: 153068 - DNA, 25 bp, Homo sapien
ttgggctccttgtccggtcatcaga

SEQ ID NO: 153069 - DNA, 25 bp, Homo sapien
cagagattaatacgtccaccgcaga

SEQ ID NO: 153070 - DNA, 25 bp, Homo sapien
cactgtgtgcgaacgtgctctcctc

SEQ ID NO: 153071 - DNA, 25 bp, Homo sapien
cgttcgtgcctgagacaaagcgaga

SEQ ID NO: 153072 - DNA, 25 bp, Homo sapien
cttctccggccttttcccaagctgg

SEQ ID NO: 153073 - DNA, 25 bp, Homo sapien
agtaaagctgtaagaggaggtgcca

SEQ ID NO: 153074 - DNA, 25 bp, Homo sapien
tctctcgccggagggagcacacaga

SEQ ID NO: 153075 - DNA, 25 bp, Homo sapien
tactgtgcgggagctgacaaagtct

SEQ ID NO: 153076 - DNA, 25 bp, Homo sapien
cattcataagtactcccacttcagc

SEQ ID NO: 153077 - DNA, 25 bp, Homo sapien
ttggaaagtcaatcaacacattcat

SEQ ID NO: 153078 - DNA, 25 bp, Homo sapien
ttcagccactggcaatggaggcttc

SEQ ID NO: 153079 - DNA, 25 bp, Homo sapien
tctttttggaaagtcaatcaacaca

SEQ ID NO: 153080 - DNA, 25 bp, Homo sapien
gccaggggaatagagtcattaactt

SEQ ID NO: 153081 - DNA, 25 bp, Homo sapien
agaagccgaagcacagcccctgtgt

SEQ ID NO: 153082 - DNA, 25 bp, Homo sapien
gggagtcagcttggcacaattcagg

SEQ ID NO: 153083 - DNA, 25 bp, Homo sapien
tacaatgcttggcagtagaagaagc

SEQ ID NO: 153084 - DNA, 25 bp, Homo sapien
gccttttgaataagctatagacaaa

SEQ ID NO: 153085 - DNA, 25 bp, Homo sapien
ttgaataagctatagacaaaagaag

SEQ ID NO: 153086 - DNA, 25 bp, Homo sapien
aaggaaagagattgtttggaaagct

SEQ ID NO: 153087 - DNA, 25 bp, Homo sapien
tattgtttcagctaagtaaatgact

SEQ ID NO: 153088 - DNA, 25 bp, Homo sapien
agagggtgcttggacctcacacagg

SEQ ID NO: 153089 - DNA, 25 bp, Homo sapien
ttcctttagttcaggggtctcctca

SEQ ID NO: 153090 - DNA, 25 bp, Homo sapien
ggtgcttggacctcacacaggaaga

SEQ ID NO: 153091 - DNA, 25 bp, Homo sapien
cctcaatatcgtcctttcatggttc

SEQ ID NO: 153092 - DNA, 25 bp, Homo sapien
gttggttgagttttgactttattca

SEQ ID NO: 153093 - DNA, 25 bp, Homo sapien
cttcgcctcggtgagcctccactcg

SEQ ID NO: 153094 - DNA, 25 bp, Homo sapien
ggtgagcctccactcggattcttgg

SEQ ID NO: 153095 - DNA, 25 bp, Homo sapien
tccactcggattcttggacttccac

SEQ ID NO: 153096 - DNA, 25 bp, Homo sapien
ggttggccccttcgcctcggtgagc

SEQ ID NO: 153097 - DNA, 25 bp, Homo sapien
tgagtcccatccactctcctttccc

SEQ ID NO: 153098 - DNA, 25 bp, Homo sapien
ctgagtcccatccactctcctttcc

SEQ ID NO: 153099 - DNA, 25 bp, Homo sapien
gagtcccatccactctcctttccca

SEQ ID NO: 153100 - DNA, 25 bp, Homo sapien
agtcccatccactctcctttcccat

SEQ ID NO: 153101 - DNA, 25 bp, Homo sapien
aagccacccgcgtctctcagtggga

SEQ ID NO: 153102 - DNA, 25 bp, Homo sapien
aacccggaatccatcctctcagcag

SEQ ID NO: 153103 - DNA, 25 bp, Homo sapien
ctgctgaacccggaatccatcctct

SEQ ID NO: 153104 - DNA, 25 bp, Homo sapien
gaaatatccagtctgaccatccctc

SEQ ID NO: 153105 - DNA, 25 bp, Homo sapien
tgagctctgtcttagtttcctaggc

SEQ ID NO: 153106 - DNA, 25 bp, Homo sapien
aatccttggtgctccgggcctgtgg

SEQ ID NO: 153107 - DNA, 25 bp, Homo sapien
aagctttgggagttcttcagtcacc

SEQ ID NO: 153108 - DNA, 25 bp, Homo sapien
tgaaggcaaccagaagacagcgtcc

SEQ ID NO: 153109 - DNA, 25 bp, Homo sapien
ctgggcctcctgagttgtgttgagc

SEQ ID NO: 153110 - DNA, 25 bp, Homo sapien
actgggcagagcatgcctgggcctc

SEQ ID NO: 153111 - DNA, 25 bp, Homo sapien
tgagttgtgttgagctctcagggct

SEQ ID NO: 153112 - DNA, 25 bp, Homo sapien
cagggctggcaggaacatctgacaa

SEQ ID NO: 153113 - DNA, 25 bp, Homo sapien
gaccacagctgctacagcagccctg

SEQ ID NO: 153114 - DNA, 25 bp, Homo sapien
ctcctccgaccacagctgctacagc

SEQ ID NO: 153115 - DNA, 25 bp, Homo sapien
tccgaccacagctgctacagcagcc

SEQ ID NO: 153116 - DNA, 25 bp, Homo sapien
ctccgaccacagctgctacagcagc

SEQ ID NO: 153117 - DNA, 25 bp, Homo sapien
gcagtcaacgtgtaaagcagccagt

SEQ ID NO: 153118 - DNA, 25 bp, Homo sapien
taccatgggccctgctttagacggg

SEQ ID NO: 153119 - DNA, 25 bp, Homo sapien
ggaccggctcccaggataatctgaa

SEQ ID NO: 153120 - DNA, 25 bp, Homo sapien
tgatctctccatgcaaaaggttgac

SEQ ID NO: 153121 - DNA, 25 bp, Homo sapien
cccatgggacggagtcccccagact

SEQ ID NO: 153122 - DNA, 25 bp, Homo sapien
catgggacggagtcccccagacttc

SEQ ID NO: 153123 - DNA, 25 bp, Homo sapien
agtggagatttggggttggccccat

SEQ ID NO: 153124 - DNA, 25 bp, Homo sapien
tggccccatgggacggagtccccca

SEQ ID NO: 153125 - DNA, 25 bp, Homo sapien
gagcgccacgagcacagtccccaca

SEQ ID NO: 153126 - DNA, 25 bp, Homo sapien
gcactgagcgccacgagcacagtcc

SEQ ID NO: 153127 - DNA, 25 bp, Homo sapien
ctgagcgccacgagcacagtcccca

SEQ ID NO: 153128 - DNA, 25 bp, Homo sapien
actgagcgccacgagcacagtcccc

SEQ ID NO: 153129 - DNA, 25 bp, Homo sapien
cactgactgcagaatagccaccaga

SEQ ID NO: 153130 - DNA, 25 bp, Homo sapien
tgcagaatagccaccagactgccag

SEQ ID NO: 153131 - DNA, 25 bp, Homo sapien
agaatagccaccagactgccagcag

SEQ ID NO: 153132 - DNA, 25 bp, Homo sapien
tgactgcagaatagccaccagactg

SEQ ID NO: 153133 - DNA, 25 bp, Homo sapien
tggtcatcctgtccagaacactcac

SEQ ID NO: 153134 - DNA, 25 bp, Homo sapien
ctggtcatcctgtccagaacactca

SEQ ID NO: 153135 - DNA, 25 bp, Homo sapien
aagaactctggtgaggaatcccagc

SEQ ID NO: 153136 - DNA, 25 bp, Homo sapien
ggcaggttccttatcttccaaaggc

SEQ ID NO: 153137 - DNA, 25 bp, Homo sapien
tgcctgggttttgtagggttcacca

SEQ ID NO: 153138 - DNA, 25 bp, Homo sapien
ccaggaatgcagatctcttaggctg

SEQ ID NO: 153139 - DNA, 25 bp, Homo sapien
tttagatgtcacagagagtccagct

SEQ ID NO: 153140 - DNA, 25 bp, Homo sapien
gcaaagcccccgataactttagatg

SEQ ID NO: 153141 - DNA, 25 bp, Homo sapien
ccccgataactttagatgtcacaga

SEQ ID NO: 153142 - DNA, 25 bp, Homo sapien
aggccccaagagctgtcccagcaaa

SEQ ID NO: 153143 - DNA, 25 bp, Homo sapien
gagtaggagacttgtcctttggaag

SEQ ID NO: 153144 - DNA, 25 bp, Homo sapien
agagagccaactccctgcctcagtg

SEQ ID NO: 153145 - DNA, 25 bp, Homo sapien
tggaagattgtcatccagaggccca

SEQ ID NO: 153146 - DNA, 25 bp, Homo sapien
cagaggcccaggaaagtcatctcca

SEQ ID NO: 153147 - DNA, 25 bp, Homo sapien
tcgggtccggtgtgctcttccttaa

SEQ ID NO: 153148 - DNA, 25 bp, Homo sapien
cttcgggtccggtgtgctcttcctt

SEQ ID NO: 153149 - DNA, 25 bp, Homo sapien
ggtccggtgtgctcttccttaatgg

SEQ ID NO: 153150 - DNA, 25 bp, Homo sapien
gggtccggtgtgctcttccttaatg

SEQ ID NO: 153151 - DNA, 25 bp, Homo sapien
gctctacgcagaatgaagtcacaag

SEQ ID NO: 153152 - DNA, 25 bp, Homo sapien
tcatgcgcagtccagaagaaaattc

SEQ ID NO: 153153 - DNA, 25 bp, Homo sapien
gctgacctcaccgtcttaagcttgg

SEQ ID NO: 153154 - DNA, 25 bp, Homo sapien
caaggatgggagtgtgctctacgca

SEQ ID NO: 153155 - DNA, 25 bp, Homo sapien
agctcctgcccaccctcccagtctt

SEQ ID NO: 153156 - DNA, 25 bp, Homo sapien
cacgggaagggtagctcctgcccac

SEQ ID NO: 153157 - DNA, 25 bp, Homo sapien
gtagctcctgcccaccctcccagtc

SEQ ID NO: 153158 - DNA, 25 bp, Homo sapien
ctcctgcccaccctcccagtcttac

SEQ ID NO: 153159 - DNA, 25 bp, Homo sapien
tgagaacaaaaacaccgggcagaga

SEQ ID NO: 153160 - DNA, 25 bp, Homo sapien
cagagagtggatgcttaaggcctcc

SEQ ID NO: 153161 - DNA, 25 bp, Homo sapien
aaaacaccgggcagagagtggatgc

SEQ ID NO: 153162 - DNA, 25 bp, Homo sapien
gtggatgcttaaggcctcccctccg

SEQ ID NO: 153163 - DNA, 25 bp, Homo sapien
ggggctcgagtcccttcccatctga

SEQ ID NO: 153164 - DNA, 25 bp, Homo sapien
ccagggacaggtggggctcgagtcc

SEQ ID NO: 153165 - DNA, 25 bp, Homo sapien
gacaggtggggctcgagtcccttcc

SEQ ID NO: 153166 - DNA, 25 bp, Homo sapien
gggctcgagtcccttcccatctgag

SEQ ID NO: 153167 - DNA, 25 bp, Homo sapien
gaaaacctgggcaaggacaaagcta

SEQ ID NO: 153168 - DNA, 25 bp, Homo sapien
aatggcttcgacttggttcctccta

SEQ ID NO: 153169 - DNA, 25 bp, Homo sapien
gcttcgacttggttcctcctaacac

SEQ ID NO: 153170 - DNA, 25 bp, Homo sapien
tgcaatggcttcgacttggttcctc

SEQ ID NO: 153171 - DNA, 25 bp, Homo sapien
gacttgcttcccactgtcctgaaaa

SEQ ID NO: 153172 - DNA, 25 bp, Homo sapien
ctgaaaaatgtgacgggctccaggg

SEQ ID NO: 153173 - DNA, 25 bp, Homo sapien
tgaggacgggatgggcacacaacct

SEQ ID NO: 153174 - DNA, 25 bp, Homo sapien
gggatgggcacacaacctgacttgc

SEQ ID NO: 153175 - DNA, 25 bp, Homo sapien
agagagtaagagatcctcaacttca

SEQ ID NO: 153176 - DNA, 25 bp, Homo sapien
gagagtaagagatcctcaacttcag

SEQ ID NO: 153177 - DNA, 25 bp, Homo sapien
tagagagtaagagatcctcaacttc

SEQ ID NO: 153178 - DNA, 25 bp, Homo sapien
ctagagagtaagagatcctcaactt

SEQ ID NO: 153179 - DNA, 25 bp, Homo sapien
accctgaccactttggccacactgg

SEQ ID NO: 153180 - DNA, 25 bp, Homo sapien
gggcaaaactacggcagagccagag

SEQ ID NO: 153181 - DNA, 25 bp, Homo sapien
ccaggggcaaaactacggcagagcc

SEQ ID NO: 153182 - DNA, 25 bp, Homo sapien
ggccaccctgaccactttggccaca

SEQ ID NO: 153183 - DNA, 25 bp, Homo sapien
gatgtgagatcccataggacacggg

SEQ ID NO: 153184 - DNA, 25 bp, Homo sapien
cagaggagcacttgtcagcaggtag

SEQ ID NO: 153185 - DNA, 25 bp, Homo sapien
tagatagaccctttccggctaggca

SEQ ID NO: 153186 - DNA, 25 bp, Homo sapien
gagtgcaggctcaaacagaggttag

SEQ ID NO: 153187 - DNA, 25 bp, Homo sapien
ccagcatgaaggagctagcctccag

SEQ ID NO: 153188 - DNA, 25 bp, Homo sapien
ccaagttgcaaaacagggtgccagt

SEQ ID NO: 153189 - DNA, 25 bp, Homo sapien
aagttgcaaaacagggtgccagtga

SEQ ID NO: 153190 - DNA, 25 bp, Homo sapien
gtgccagtgagggaccccagcatga

SEQ ID NO: 153191 - DNA, 25 bp, Homo sapien
tagctcatccgaagcagggtcagtg

SEQ ID NO: 153192 - DNA, 25 bp, Homo sapien
ttcatacggcggagtagcctggcca

SEQ ID NO: 153193 - DNA, 25 bp, Homo sapien
gaccaggagttctaaagacagccaa

SEQ ID NO: 153194 - DNA, 25 bp, Homo sapien
tgaatgaatttacgtggccctgacc

SEQ ID NO: 153195 - DNA, 25 bp, Homo sapien
tccactttctaagccgattgcccat

SEQ ID NO: 153196 - DNA, 25 bp, Homo sapien
cctccactttctaagccgattgccc

SEQ ID NO: 153197 - DNA, 25 bp, Homo sapien
ctccactttctaagccgattgccca

SEQ ID NO: 153198 - DNA, 25 bp, Homo sapien
cattctgtgagtagatccacactgg

SEQ ID NO: 153199 - DNA, 25 bp, Homo sapien
ctcctccaatcacaactgtagcaat

SEQ ID NO: 153200 - DNA, 25 bp, Homo sapien
tccaatcacaactgtagcaatcctg

SEQ ID NO: 153201 - DNA, 25 bp, Homo sapien
tcctccaatcacaactgtagcaatc

SEQ ID NO: 153202 - DNA, 25 bp, Homo sapien
ctccaatcacaactgtagcaatcct

SEQ ID NO: 153203 - DNA, 25 bp, Homo sapien
agctcttctgggcagcaggaccttc

SEQ ID NO: 153204 - DNA, 25 bp, Homo sapien
ctggagaaagaggtgaactttgagc

SEQ ID NO: 153205 - DNA, 25 bp, Homo sapien
gagactatgggcacggccaataggc

SEQ ID NO: 153206 - DNA, 25 bp, Homo sapien
tcggtgcgtgggctcagaagggacc

SEQ ID NO: 153207 - DNA, 25 bp, Homo sapien
gacgaggcgattcccgccgcagtga

SEQ ID NO: 153208 - DNA, 25 bp, Homo sapien
attggcaatggccgccgcggacatc

SEQ ID NO: 153209 - DNA, 25 bp, Homo sapien
acaaggctgcccgaggcaactccac

SEQ ID NO: 153210 - DNA, 25 bp, Homo sapien
cccattggcaatggccgccgcggac

SEQ ID NO: 153211 - DNA, 25 bp, Homo sapien
aggagacgccccaggtaacccagca

SEQ ID NO: 153212 - DNA, 25 bp, Homo sapien
ctagaagcagcctcgctcttcaggg

SEQ ID NO: 153213 - DNA, 25 bp, Homo sapien
taacccagcaaatctgcttcgggct

SEQ ID NO: 153214 - DNA, 25 bp, Homo sapien
tggtgaactccagagctagaagcag

SEQ ID NO: 153215 - DNA, 25 bp, Homo sapien
cgcaatggcagacccaatggagccc

SEQ ID NO: 153216 - DNA, 25 bp, Homo sapien
atgaacttggtcaatccggagagtc

SEQ ID NO: 153217 - DNA, 25 bp, Homo sapien
ttggtcaatccggagagtccagttg

SEQ ID NO: 153218 - DNA, 25 bp, Homo sapien
tgacagccgcaatggcagacccaat

SEQ ID NO: 153219 - DNA, 25 bp, Homo sapien
ttctcccctggcatggttctcttct

SEQ ID NO: 153220 - DNA, 25 bp, Homo sapien
tttgggatagttggctcctcgctgg

SEQ ID NO: 153221 - DNA, 25 bp, Homo sapien
acctgccttgcaggaccatttactg

SEQ ID NO: 153222 - DNA, 25 bp, Homo sapien
cagctgtcagagggtgagtgctcct

SEQ ID NO: 153223 - DNA, 25 bp, Homo sapien
ggtgagtgctcctggatgggctgca

SEQ ID NO: 153224 - DNA, 25 bp, Homo sapien
ttcctgtgcccacggttttccacaa

SEQ ID NO: 153225 - DNA, 25 bp, Homo sapien
ccggtgttgaagcttcacagctgtc

SEQ ID NO: 153226 - DNA, 25 bp, Homo sapien
attcaatgttggcattgtcacaggc

SEQ ID NO: 153227 - DNA, 25 bp, Homo sapien
tcaatgttggcattgtcacaggctc

SEQ ID NO: 153228 - DNA, 25 bp, Homo sapien
ttattcaatgttggcattgtcacag

SEQ ID NO: 153229 - DNA, 25 bp, Homo sapien
ttcaatgttggcattgtcacaggct

SEQ ID NO: 153230 - DNA, 25 bp, Homo sapien
ggtacagagcctttcgcagggtgga

SEQ ID NO: 153231 - DNA, 25 bp, Homo sapien
acagagcctttcgcagggtggacat

SEQ ID NO: 153232 - DNA, 25 bp, Homo sapien
tacagagcctttcgcagggtggaca

SEQ ID NO: 153233 - DNA, 25 bp, Homo sapien
ctggtacagagcctttcgcagggtg

SEQ ID NO: 153234 - DNA, 25 bp, Homo sapien
gggttcttaaccttgacaccacaga

SEQ ID NO: 153235 - DNA, 25 bp, Homo sapien
aaaagtcagacctagtcaccatgag

SEQ ID NO: 153236 - DNA, 25 bp, Homo sapien
catctcatgtggagaatgtccttcc

SEQ ID NO: 153237 - DNA, 25 bp, Homo sapien
cctgtgcattgaaaggtaccctcta

SEQ ID NO: 153238 - DNA, 25 bp, Homo sapien
ctggagccgagcgtgaggctgccag

SEQ ID NO: 153239 - DNA, 25 bp, Homo sapien
aggcggcgggagcaagagcacggcc

SEQ ID NO: 153240 - DNA, 25 bp, Homo sapien
cagcaggactttctccggctcttgg

SEQ ID NO: 153241 - DNA, 25 bp, Homo sapien
ggagcggccccgggatgccggacgc

SEQ ID NO: 153242 - DNA, 25 bp, Homo sapien
ggctgttctgactgaaatccatcgc

SEQ ID NO: 153243 - DNA, 25 bp, Homo sapien
tgttctgactgaaatccatcgcggc

SEQ ID NO: 153244 - DNA, 25 bp, Homo sapien
tgactgaaatccatcgcggcggcgg

SEQ ID NO: 153245 - DNA, 25 bp, Homo sapien
ttctgactgaaatccatcgcggcgg

SEQ ID NO: 153246 - DNA, 25 bp, Homo sapien
ccggcggaccggcctctcgatgatg

SEQ ID NO: 153247 - DNA, 25 bp, Homo sapien
ggctccggcggaccggcctctcgat

SEQ ID NO: 153248 - DNA, 25 bp, Homo sapien
ctccggcggaccggcctctcgatga

SEQ ID NO: 153249 - DNA, 25 bp, Homo sapien
ggcggaccggcctctcgatgatggt

SEQ ID NO: 153250 - DNA, 25 bp, Homo sapien
tcagcggaccagaggttggggagcc

SEQ ID NO: 153251 - DNA, 25 bp, Homo sapien
agggggtccgcgacggaggacgctg

SEQ ID NO: 153252 - DNA, 25 bp, Homo sapien
gagcccaggagaggaccggggagaa

SEQ ID NO: 153253 - DNA, 25 bp, Homo sapien
gcggaccagaggttggggagcccag

SEQ ID NO: 153254 - DNA, 25 bp, Homo sapien
ttggagccgccgggaggaagatgac

SEQ ID NO: 153255 - DNA, 25 bp, Homo sapien
aggttggagccgccgggaggaagat

SEQ ID NO: 153256 - DNA, 25 bp, Homo sapien
tggagccgccgggaggaagatgact

SEQ ID NO: 153257 - DNA, 25 bp, Homo sapien
ggttggagccgccgggaggaagatg

SEQ ID NO: 153258 - DNA, 25 bp, Homo sapien
gaggtcttcatcgactgtcaatctt

SEQ ID NO: 153259 - DNA, 25 bp, Homo sapien
ctgaggtcttcatcgactgtcaatc

SEQ ID NO: 153260 - DNA, 25 bp, Homo sapien
tcactgaggtcttcatcgactgtca

SEQ ID NO: 153261 - DNA, 25 bp, Homo sapien
tcttcatcgactgtcaatctttcta

SEQ ID NO: 153262 - DNA, 25 bp, Homo sapien
tggcgctgaactaaggaaacaaggg

SEQ ID NO: 153263 - DNA, 25 bp, Homo sapien
ctgaaactggcgctgaactaaggaa

SEQ ID NO: 153264 - DNA, 25 bp, Homo sapien
aactggcgctgaactaaggaaacaa

SEQ ID NO: 153265 - DNA, 25 bp, Homo sapien
tgaactaaggaaacaagggtgacaa

SEQ ID NO: 153266 - DNA, 25 bp, Homo sapien
caggagatgcctagcacataagtac

SEQ ID NO: 153267 - DNA, 25 bp, Homo sapien
gtatctgctagtataatgaccttca

SEQ ID NO: 153268 - DNA, 25 bp, Homo sapien
tacattagggaacttgggctcacag

SEQ ID NO: 153269 - DNA, 25 bp, Homo sapien
tgactcccagtacctgttaattggg

SEQ ID NO: 153270 - DNA, 25 bp, Homo sapien
tgtgctagttacacaggtgtaccca

SEQ ID NO: 153271 - DNA, 25 bp, Homo sapien
gaatttggtgcccaatctagaaaac

SEQ ID NO: 153272 - DNA, 25 bp, Homo sapien
gataatctaagcacacaagtagtgt

SEQ ID NO: 153273 - DNA, 25 bp, Homo sapien
tctagagaggaaactttgtaacaca

SEQ ID NO: 153274 - DNA, 25 bp, Homo sapien
gattctgtcgcatcaaaaatgggag

SEQ ID NO: 153275 - DNA, 25 bp, Homo sapien
tgttccttggacatcttgaccagca

SEQ ID NO: 153276 - DNA, 25 bp, Homo sapien
ttttggcaacactctccgaagcgtc

SEQ ID NO: 153277 - DNA, 25 bp, Homo sapien
ccgaagcgtctcagtgggattctgt

SEQ ID NO: 153278 - DNA, 25 bp, Homo sapien
tcttttgtcctctagactacatagt

SEQ ID NO: 153279 - DNA, 25 bp, Homo sapien
ctttgtctctggctacttccaagat

SEQ ID NO: 153280 - DNA, 25 bp, Homo sapien
ctagactacatagtttctgatcaga

SEQ ID NO: 153281 - DNA, 25 bp, Homo sapien
cttttaatatgatattcttttgtcc

SEQ ID NO: 153282 - DNA, 25 bp, Homo sapien
actctctggataaataagtgtgcat

SEQ ID NO: 153283 - DNA, 25 bp, Homo sapien
ggataaataagtgtgcatcctcatg

SEQ ID NO: 153284 - DNA, 25 bp, Homo sapien
ctctctggataaataagtgtgcatc

SEQ ID NO: 153285 - DNA, 25 bp, Homo sapien
taaataagtgtgcatcctcatggac

SEQ ID NO: 153286 - DNA, 25 bp, Homo sapien
tcacaccctctggacaaacatatgt

SEQ ID NO: 153287 - DNA, 25 bp, Homo sapien
ccctctggacaaacatatgtgagat

SEQ ID NO: 153288 - DNA, 25 bp, Homo sapien
caccctctggacaaacatatgtgag

SEQ ID NO: 153289 - DNA, 25 bp, Homo sapien
tctggacaaacatatgtgagatcca

SEQ ID NO: 153290 - DNA, 25 bp, Homo sapien
taacttccaagagatgcaattctgc

SEQ ID NO: 153291 - DNA, 25 bp, Homo sapien
tgagggccacaacgtacattccagt

SEQ ID NO: 153292 - DNA, 25 bp, Homo sapien
agtcctgggttttgtacgtatgcaa

SEQ ID NO: 153293 - DNA, 25 bp, Homo sapien
tacttagtcttgactcccgcagcaa

SEQ ID NO: 153294 - DNA, 25 bp, Homo sapien
gatattactgtacttctctatgaga

SEQ ID NO: 153295 - DNA, 25 bp, Homo sapien
ggaatctcagttgctcgcaccttca

SEQ ID NO: 153296 - DNA, 25 bp, Homo sapien
tacctttggatatctagttggaatc

SEQ ID NO: 153297 - DNA, 25 bp, Homo sapien
taaagtcagtagaacaacctggaac

SEQ ID NO: 153298 - DNA, 25 bp, Homo sapien
ttccactcctgcaacatgcagggct

SEQ ID NO: 153299 - DNA, 25 bp, Homo sapien
ccactcctgcaacatgcagggcttc

SEQ ID NO: 153300 - DNA, 25 bp, Homo sapien
tccactcctgcaacatgcagggctt

SEQ ID NO: 153301 - DNA, 25 bp, Homo sapien
ggaatgagtgggtatatgcatgaat

SEQ ID NO: 153302 - DNA, 25 bp, Homo sapien
tgcatgaattgacactgattcgtcc

SEQ ID NO: 153303 - DNA, 25 bp, Homo sapien
gaattgacactgattcgtcctgcag

SEQ ID NO: 153304 - DNA, 25 bp, Homo sapien
gggtatatgcatgaattgacactga

SEQ ID NO: 153305 - DNA, 25 bp, Homo sapien
tttggcaatacttctataacagaca

SEQ ID NO: 153306 - DNA, 25 bp, Homo sapien
gaagagtttccagccatgcattgct

SEQ ID NO: 153307 - DNA, 25 bp, Homo sapien
tcatgccgtagggtttcttttggca

SEQ ID NO: 153308 - DNA, 25 bp, Homo sapien
gagtttccagccatgcattgctgac

SEQ ID NO: 153309 - DNA, 25 bp, Homo sapien
ttacaactaactaaacgagactgga

SEQ ID NO: 153310 - DNA, 25 bp, Homo sapien
gtgtgggcatcaaatttgttggtca

SEQ ID NO: 153311 - DNA, 25 bp, Homo sapien
caactaactaaacgagactggactg

SEQ ID NO: 153312 - DNA, 25 bp, Homo sapien
tgggaaagttgtgccttggaaacaa

SEQ ID NO: 153313 - DNA, 25 bp, Homo sapien
tctaattgccgacacatacaagatc

SEQ ID NO: 153314 - DNA, 25 bp, Homo sapien
gacacatacaagatcgaacttcata

SEQ ID NO: 153315 - DNA, 25 bp, Homo sapien
tattttctaattgccgacacataca

SEQ ID NO: 153316 - DNA, 25 bp, Homo sapien
tattctacatcttgacagagtgatt

SEQ ID NO: 153317 - DNA, 25 bp, Homo sapien
tgccttcatccctagaaagttctat

SEQ ID NO: 153318 - DNA, 25 bp, Homo sapien
aagctgcaagtcgtacactgctgcc

SEQ ID NO: 153319 - DNA, 25 bp, Homo sapien
gtttcaaaagctgcaagtcgtacac

SEQ ID NO: 153320 - DNA, 25 bp, Homo sapien
tatcaagcagattaaccaaagtttc

SEQ ID NO: 153321 - DNA, 25 bp, Homo sapien
tgttagcctcatagtaatagaaaat

SEQ ID NO: 153322 - DNA, 25 bp, Homo sapien
ttagcctcatagtaatagaaaatac

SEQ ID NO: 153323 - DNA, 25 bp, Homo sapien
gttagcctcatagtaatagaaaata

SEQ ID NO: 153324 - DNA, 25 bp, Homo sapien
tatgttagcctcatagtaatagaaa

SEQ ID NO: 153325 - DNA, 25 bp, Homo sapien
gaaataagaattgattcatctgctt

SEQ ID NO: 153326 - DNA, 25 bp, Homo sapien
ttcactaagggaagtatagtttgac

SEQ ID NO: 153327 - DNA, 25 bp, Homo sapien
catatagtccatgacatagttttcc

SEQ ID NO: 153328 - DNA, 25 bp, Homo sapien
tatagtccatgacatagttttccta

SEQ ID NO: 153329 - DNA, 25 bp, Homo sapien
aagtgctgatctggagtgaaaattc

SEQ ID NO: 153330 - DNA, 25 bp, Homo sapien
tgttgcaaacccaatgtacaaagtt

SEQ ID NO: 153331 - DNA, 25 bp, Homo sapien
taagcacagttcttccgtactgaaa

SEQ ID NO: 153332 - DNA, 25 bp, Homo sapien
aaattccaaaaatctcaagtgctga

SEQ ID NO: 153333 - DNA, 25 bp, Homo sapien
gtatctgactggtacttcagggtca

SEQ ID NO: 153334 - DNA, 25 bp, Homo sapien
catgtggaagtttttaggatcaaca

SEQ ID NO: 153335 - DNA, 25 bp, Homo sapien
tagtgtatctgactggtacttcagg

SEQ ID NO: 153336 - DNA, 25 bp, Homo sapien
tgtagaatagagttccatgtggaag

SEQ ID NO: 153337 - DNA, 25 bp, Homo sapien
atatactccagaattcagaagctta

SEQ ID NO: 153338 - DNA, 25 bp, Homo sapien
atactccagaattcagaagcttaga

SEQ ID NO: 153339 - DNA, 25 bp, Homo sapien
tatactccagaattcagaagcttag

SEQ ID NO: 153340 - DNA, 25 bp, Homo sapien
acactgctttctccaccagtagaca

SEQ ID NO: 153341 - DNA, 25 bp, Homo sapien
tttctccaccagtagacataagttc

SEQ ID NO: 153342 - DNA, 25 bp, Homo sapien
gaagatgatctataagagcatctag

SEQ ID NO: 153343 - DNA, 25 bp, Homo sapien
gatgatctataagagcatctagtac

SEQ ID NO: 153344 - DNA, 25 bp, Homo sapien
tccattttaaagaggctgcagctcg

SEQ ID NO: 153345 - DNA, 25 bp, Homo sapien
gtggcaggcaggcatatttctgaag

SEQ ID NO: 153346 - DNA, 25 bp, Homo sapien
tgagtgctggaatcaagtcaggcag

SEQ ID NO: 153347 - DNA, 25 bp, Homo sapien
gatcgcttgatatgacatgtggcag

SEQ ID NO: 153348 - DNA, 25 bp, Homo sapien
taatttttgaatgacctcatgtctc

SEQ ID NO: 153349 - DNA, 25 bp, Homo sapien
aatgcatagagttcgtgaagccgcc

SEQ ID NO: 153350 - DNA, 25 bp, Homo sapien
tcttgtttacgattataacgcagaa

SEQ ID NO: 153351 - DNA, 25 bp, Homo sapien
tgaagccgccttttggacaggtaaa

SEQ ID NO: 153352 - DNA, 25 bp, Homo sapien
ggtatccaaaaatcgaagtctattc

SEQ ID NO: 153353 - DNA, 25 bp, Homo sapien
taaattcacaggtatccaaaaatcg

SEQ ID NO: 153354 - DNA, 25 bp, Homo sapien
cacaggtatccaaaaatcgaagtct

SEQ ID NO: 153355 - DNA, 25 bp, Homo sapien
caaaaatcgaagtctattccagtaa

SEQ ID NO: 153356 - DNA, 25 bp, Homo sapien
cagttcaatagcaggtagaaagaaa

SEQ ID NO: 153357 - DNA, 25 bp, Homo sapien
ctcacatttgctactggatcatgtg

SEQ ID NO: 153358 - DNA, 25 bp, Homo sapien
tgctactggatcatgtgtcagttca

SEQ ID NO: 153359 - DNA, 25 bp, Homo sapien
catgtgtcagttcaatagcaggtag

SEQ ID NO: 153360 - DNA, 25 bp, Homo sapien
tgcctttggccaactgactctgatg

SEQ ID NO: 153361 - DNA, 25 bp, Homo sapien
tcaatgtgtatatccaaatggccga

SEQ ID NO: 153362 - DNA, 25 bp, Homo sapien
tctagaaactaacggatgctcacca

SEQ ID NO: 153363 - DNA, 25 bp, Homo sapien
tcagatgcataagactaagtgcccc

SEQ ID NO: 153364 - DNA, 25 bp, Homo sapien
ctttgggcaacaggtagcaaagttt

SEQ ID NO: 153365 - DNA, 25 bp, Homo sapien
gtagatgcttatcagcaggaatctt

SEQ ID NO: 153366 - DNA, 25 bp, Homo sapien
tgaagtagatgcttatcagcaggaa

SEQ ID NO: 153367 - DNA, 25 bp, Homo sapien
tctttttcttgacacaggagtttcc

SEQ ID NO: 153368 - DNA, 25 bp, Homo sapien
tctttttacaatagccagaacatct

SEQ ID NO: 153369 - DNA, 25 bp, Homo sapien
agcatccatagacatttccattctg

SEQ ID NO: 153370 - DNA, 25 bp, Homo sapien
atttccattctgtccaactctaata

SEQ ID NO: 153371 - DNA, 25 bp, Homo sapien
ccattctgtccaactctaatacagt

SEQ ID NO: 153372 - DNA, 25 bp, Homo sapien
ttccattctgtccaactctaataca

SEQ ID NO: 153373 - DNA, 25 bp, Homo sapien
tctttctttctcttgatccaacaaa

SEQ ID NO: 153374 - DNA, 25 bp, Homo sapien
tttctcttgatccaacaaatctttc

SEQ ID NO: 153375 - DNA, 25 bp, Homo sapien
aatctttctcataaaactttttctg

SEQ ID NO: 153376 - DNA, 25 bp, Homo sapien
catttccaaaagaagtagttcttct

SEQ ID NO: 153377 - DNA, 25 bp, Homo sapien
attttatcactcatgggccttccat

SEQ ID NO: 153378 - DNA, 25 bp, Homo sapien
tttatcactcatgggccttccatca

SEQ ID NO: 153379 - DNA, 25 bp, Homo sapien
atcactcatgggccttccatcattc

SEQ ID NO: 153380 - DNA, 25 bp, Homo sapien
cactcatgggccttccatcattctg

SEQ ID NO: 153381 - DNA, 25 bp, Homo sapien
ctttgcgttggtgtcttagtgtctc

SEQ ID NO: 153382 - DNA, 25 bp, Homo sapien
atgttcttgggcagactttgcgttg

SEQ ID NO: 153383 - DNA, 25 bp, Homo sapien
tgcgttggtgtcttagtgtctctac

SEQ ID NO: 153384 - DNA, 25 bp, Homo sapien
ttcttgggcagactttgcgttggtg

SEQ ID NO: 153385 - DNA, 25 bp, Homo sapien
aagttgccatattttgcatgaaaag

SEQ ID NO: 153386 - DNA, 25 bp, Homo sapien
ctggcttcgaatcagtttggatttc

SEQ ID NO: 153387 - DNA, 25 bp, Homo sapien
gcatgaaaagcttgattattaaaag

SEQ ID NO: 153388 - DNA, 25 bp, Homo sapien
gattattaaaagactggcttcgaat

SEQ ID NO: 153389 - DNA, 25 bp, Homo sapien
ctgagacagaagttgtatatcctgt

SEQ ID NO: 153390 - DNA, 25 bp, Homo sapien
tatttcttgcgataatcaccatcta

SEQ ID NO: 153391 - DNA, 25 bp, Homo sapien
atcaccatctaccttgcagaaaacc

SEQ ID NO: 153392 - DNA, 25 bp, Homo sapien
aaccactctatatactgtacgtgaa

SEQ ID NO: 153393 - DNA, 25 bp, Homo sapien
gctttaatgctagaaagattttctc

SEQ ID NO: 153394 - DNA, 25 bp, Homo sapien
gctactggcattacgagtccggaat

SEQ ID NO: 153395 - DNA, 25 bp, Homo sapien
gtcaactgagttacctgtcccacgg

SEQ ID NO: 153396 - DNA, 25 bp, Homo sapien
aggtagccttccgtggttgtgtatc

SEQ ID NO: 153397 - DNA, 25 bp, Homo sapien
aaaggaagatggaacgctactggca

SEQ ID NO: 153398 - DNA, 25 bp, Homo sapien
gtacattggtcctctttccttgagc

SEQ ID NO: 153399 - DNA, 25 bp, Homo sapien
gggcatatacccaacgaccaattac

SEQ ID NO: 153400 - DNA, 25 bp, Homo sapien
tgcacctggcactttcatgactttt

SEQ ID NO: 153401 - DNA, 25 bp, Homo sapien
catcgtataatcatgggagcaataa

SEQ ID NO: 153402 - DNA, 25 bp, Homo sapien
tattgtcaccacaatccggagggcc

SEQ ID NO: 153403 - DNA, 25 bp, Homo sapien
ccaaaatcgcagacggctatttgca

SEQ ID NO: 153404 - DNA, 25 bp, Homo sapien
gaatgtccgggtacaacatattgtc

SEQ ID NO: 153405 - DNA, 25 bp, Homo sapien
tgcagcagtggttaaagcacattcc

SEQ ID NO: 153406 - DNA, 25 bp, Homo sapien
catagacagtgtggagacattgggc

SEQ ID NO: 153407 - DNA, 25 bp, Homo sapien
gactcatgggcgaggagcatagaca

SEQ ID NO: 153408 - DNA, 25 bp, Homo sapien
gaattcacatcctgggtgggacaga

SEQ ID NO: 153409 - DNA, 25 bp, Homo sapien
tcagaatggcatgctgcttaagact

SEQ ID NO: 153410 - DNA, 25 bp, Homo sapien
tgtcatcaaagtggaccggccattt

SEQ ID NO: 153411 - DNA, 25 bp, Homo sapien
cctgaaacggtggacagtgctgaac

SEQ ID NO: 153412 - DNA, 25 bp, Homo sapien
cagggtggtgaatccgactctccta

SEQ ID NO: 153413 - DNA, 25 bp, Homo sapien
taattcaggacacgcataagcactt

SEQ ID NO: 153414 - DNA, 25 bp, Homo sapien
ccagtatacaaaatagatggtatca

SEQ ID NO: 153415 - DNA, 25 bp, Homo sapien
gctgaaaacagccatcatccaggag

SEQ ID NO: 153416 - DNA, 25 bp, Homo sapien
tccccagactcctcgggtctgcaga

SEQ ID NO: 153417 - DNA, 25 bp, Homo sapien
aggaggactccagtatacaaaatag

SEQ ID NO: 153418 - DNA, 25 bp, Homo sapien
gtgatgttctggccacctttaggga

SEQ ID NO: 153419 - DNA, 25 bp, Homo sapien
tggtggcggacaatcaggcaggctt

SEQ ID NO: 153420 - DNA, 25 bp, Homo sapien
caggctttggctcagtctgaggagc

SEQ ID NO: 153421 - DNA, 25 bp, Homo sapien
ggtaagtttcctgcaggtggactca

SEQ ID NO: 153422 - DNA, 25 bp, Homo sapien
gacaccagcttagaaatgaccatgg

SEQ ID NO: 153423 - DNA, 25 bp, Homo sapien
tggccttagctatgctgtccctggg

SEQ ID NO: 153424 - DNA, 25 bp, Homo sapien
caagcactactatgagtcagaggtc

SEQ ID NO: 153425 - DNA, 25 bp, Homo sapien
tctgagactgagatccaccagggtt

SEQ ID NO: 153426 - DNA, 25 bp, Homo sapien
gagggcttcagcaagatgctccctc

SEQ ID NO: 153427 - DNA, 25 bp, Homo sapien
gggcttcagcaagatgctccctcca

SEQ ID NO: 153428 - DNA, 25 bp, Homo sapien
gcttcagcaagatgctccctccagt

SEQ ID NO: 153429 - DNA, 25 bp, Homo sapien
cagcaagatgctccctccagtactg

SEQ ID NO: 153430 - DNA, 25 bp, Homo sapien
cagctgtaattttggagaggtagcc

SEQ ID NO: 153431 - DNA, 25 bp, Homo sapien
gagttcagaggcatggccgttcatg

SEQ ID NO: 153432 - DNA, 25 bp, Homo sapien
ccattcatggtcagtgtgatttcag

SEQ ID NO: 153433 - DNA, 25 bp, Homo sapien
tttacagatggtgcgattgcagagg

SEQ ID NO: 153434 - DNA, 25 bp, Homo sapien
gcccttctcgatgagcaagagtctc

SEQ ID NO: 153435 - DNA, 25 bp, Homo sapien
caggcccttctcgatgagcaagagt

SEQ ID NO: 153436 - DNA, 25 bp, Homo sapien
accaggcccttctcgatgagcaaga

SEQ ID NO: 153437 - DNA, 25 bp, Homo sapien
gaccaggcccttctcgatgagcaag

SEQ ID NO: 153438 - DNA, 25 bp, Homo sapien
ttgccaaatcctggtgcactgtgca

SEQ ID NO: 153439 - DNA, 25 bp, Homo sapien
tgaatgaaggtttttgccaaatcct

SEQ ID NO: 153440 - DNA, 25 bp, Homo sapien
tgcacaggggtttcagagatgggaa

SEQ ID NO: 153441 - DNA, 25 bp, Homo sapien
agatgggaagaatgatgaccacagc

SEQ ID NO: 153442 - DNA, 25 bp, Homo sapien
agagggaacttgttgcgggtcacct

SEQ ID NO: 153443 - DNA, 25 bp, Homo sapien
cagagggaacttgttgcgggtcacc

SEQ ID NO: 153444 - DNA, 25 bp, Homo sapien
tggctcccagtttgcacctgaggaa

SEQ ID NO: 153445 - DNA, 25 bp, Homo sapien
gtttgcacctgaggaaacagctctt

SEQ ID NO: 153446 - DNA, 25 bp, Homo sapien
cccatggctcccagtttgcacctga

SEQ ID NO: 153447 - DNA, 25 bp, Homo sapien
cccagtttgcacctgaggaaacagc

SEQ ID NO: 153448 - DNA, 25 bp, Homo sapien
ggccagcccggcaggttctgttcct

SEQ ID NO: 153449 - DNA, 25 bp, Homo sapien
agcccggcaggttctgttcctccag

SEQ ID NO: 153450 - DNA, 25 bp, Homo sapien
gcccggcaggttctgttcctccagg

SEQ ID NO: 153451 - DNA, 25 bp, Homo sapien
ctaggccagcccggcaggttctgtt

SEQ ID NO: 153452 - DNA, 25 bp, Homo sapien
ggacacgctgcaaaatgctgctggg

SEQ ID NO: 153453 - DNA, 25 bp, Homo sapien
tgttccatgggacacgctgcaaaat

SEQ ID NO: 153454 - DNA, 25 bp, Homo sapien
tagtggcaagggcagatttgcattt

SEQ ID NO: 153455 - DNA, 25 bp, Homo sapien
catttcggtggctcactctggcggc

SEQ ID NO: 153456 - DNA, 25 bp, Homo sapien
tccaaggccctgctaaaggacacag

SEQ ID NO: 153457 - DNA, 25 bp, Homo sapien
tcagctatgggagaggaagcacatc

SEQ ID NO: 153458 - DNA, 25 bp, Homo sapien
ttgtcctatggaaggcactgcccca

SEQ ID NO: 153459 - DNA, 25 bp, Homo sapien
gaatagcccctgtggtaagggccag

SEQ ID NO: 153460 - DNA, 25 bp, Homo sapien
tcttgacccgctgtcacctaaccag

SEQ ID NO: 153461 - DNA, 25 bp, Homo sapien
ggaggaaccagataccagccatgac

SEQ ID NO: 153462 - DNA, 25 bp, Homo sapien
ccagaactgcctgatcgtgccgtgg

SEQ ID NO: 153463 - DNA, 25 bp, Homo sapien
aggctccaccaagcatcttcatgtc

SEQ ID NO: 153464 - DNA, 25 bp, Homo sapien
tgcataaggctgtgctgaccatcga

SEQ ID NO: 153465 - DNA, 25 bp, Homo sapien
ccatcgacgagaaagggactgaagc

SEQ ID NO: 153466 - DNA, 25 bp, Homo sapien
catgggaaaagtggtgaatcccacc

SEQ ID NO: 153467 - DNA, 25 bp, Homo sapien
caagtctcccctcttcatgggaaaa

SEQ ID NO: 153468 - DNA, 25 bp, Homo sapien
catcactaaggtcttcagcaatggg

SEQ ID NO: 153469 - DNA, 25 bp, Homo sapien
gggtcaactgggcatcactaaggtc

SEQ ID NO: 153470 - DNA, 25 bp, Homo sapien
aactgtccattactggaacctatga

SEQ ID NO: 153471 - DNA, 25 bp, Homo sapien
atttacccaaactgtccattactgg

SEQ ID NO: 153472 - DNA, 25 bp, Homo sapien
cgaggaagaggacttccacgtggac

SEQ ID NO: 153473 - DNA, 25 bp, Homo sapien
cacgatatcatcaccaagttcctgg

SEQ ID NO: 153474 - DNA, 25 bp, Homo sapien
caggtgaccaccgtgaaggtgccta

SEQ ID NO: 153475 - DNA, 25 bp, Homo sapien
gctgatgaaatacctgggcaatgcc

SEQ ID NO: 153476 - DNA, 25 bp, Homo sapien
ggagattccggaggctcagatccat

SEQ ID NO: 153477 - DNA, 25 bp, Homo sapien
ggaccaaggctgacactcacgatga

SEQ ID NO: 153478 - DNA, 25 bp, Homo sapien
cgattacgtggagaagggtactcaa

SEQ ID NO: 153479 - DNA, 25 bp, Homo sapien
ggcctgaatttcaacctcacggaga

SEQ ID NO: 153480 - DNA, 25 bp, Homo sapien
tatctggagtagaaggatcactgtg

SEQ ID NO: 153481 - DNA, 25 bp, Homo sapien
agcctgggcatatctggagtagaag

SEQ ID NO: 153482 - DNA, 25 bp, Homo sapien
ctggtggtccgaagcctgggcatat

SEQ ID NO: 153483 - DNA, 25 bp, Homo sapien
tgggcatatctggagtagaaggatc

SEQ ID NO: 153484 - DNA, 25 bp, Homo sapien
agggtgacttgtcccgggtcacaga

SEQ ID NO: 153485 - DNA, 25 bp, Homo sapien
gcaactcaaagggagagggtgactt

SEQ ID NO: 153486 - DNA, 25 bp, Homo sapien
ctcttgcggcaactcaaagggagag

SEQ ID NO: 153487 - DNA, 25 bp, Homo sapien
ctcaaagggagagggtgacttgtcc

SEQ ID NO: 153488 - DNA, 25 bp, Homo sapien
ggatccaagtccacctagctgcagt

SEQ ID NO: 153489 - DNA, 25 bp, Homo sapien
aaagccaaaatgagcacggccccta

SEQ ID NO: 153490 - DNA, 25 bp, Homo sapien
tctaagcctcagaagagctatgtgg

SEQ ID NO: 153491 - DNA, 25 bp, Homo sapien
caggaagtggctcaggagattacac

SEQ ID NO: 153492 - DNA, 25 bp, Homo sapien
accacaaggcattaagttataggtg

SEQ ID NO: 153493 - DNA, 25 bp, Homo sapien
ataggtgccaactctgaccaggttg

SEQ ID NO: 153494 - DNA, 25 bp, Homo sapien
ggcattaagttataggtgccaactc

SEQ ID NO: 153495 - DNA, 25 bp, Homo sapien
caactctgaccaggttggtgggcat

SEQ ID NO: 153496 - DNA, 25 bp, Homo sapien
acatataaattcctgtggcccattg

SEQ ID NO: 153497 - DNA, 25 bp, Homo sapien
tggcccattgtgagggtaaggtccg

SEQ ID NO: 153498 - DNA, 25 bp, Homo sapien
ggtaaggtccgagccgctcttgaag

SEQ ID NO: 153499 - DNA, 25 bp, Homo sapien
tataaattcctgtggcccattgtga

SEQ ID NO: 153500 - DNA, 25 bp, Homo sapien
cgcatctccttgacttgaggccagg

SEQ ID NO: 153501 - DNA, 25 bp, Homo sapien
tccaagtgtagagtgtaggctgctc

SEQ ID NO: 153502 - DNA, 25 bp, Homo sapien
ggtattgtccaccttcccgagaaga

SEQ ID NO: 153503 - DNA, 25 bp, Homo sapien
gctgctctcagtggcgtctcgtgaa

SEQ ID NO: 153504 - DNA, 25 bp, Homo sapien
agtcttcaagggtgagtggcagtct

SEQ ID NO: 153505 - DNA, 25 bp, Homo sapien
gaggagatagcatttgagccaagtc

SEQ ID NO: 153506 - DNA, 25 bp, Homo sapien
tgagtggcagtctgtatgaaagggt

SEQ ID NO: 153507 - DNA, 25 bp, Homo sapien
ggtcagggaggacttcatagaggag

SEQ ID NO: 153508 - DNA, 25 bp, Homo sapien
taatgcagtcccctctgttaggaca

SEQ ID NO: 153509 - DNA, 25 bp, Homo sapien
aatccacaggcagattgatggctaa

SEQ ID NO: 153510 - DNA, 25 bp, Homo sapien
aatcagtgggctttctcaggcttag

SEQ ID NO: 153511 - DNA, 25 bp, Homo sapien
taataattgcacctgagcccatatc

SEQ ID NO: 153512 - DNA, 25 bp, Homo sapien
cgctgttcattgaccagaggctgca

SEQ ID NO: 153513 - DNA, 25 bp, Homo sapien
actgagcattgggaacacgctgttc

SEQ ID NO: 153514 - DNA, 25 bp, Homo sapien
gcagccacagcgtaagtttttggaa

SEQ ID NO: 153515 - DNA, 25 bp, Homo sapien
ttacatcatccacgagctgacccag

SEQ ID NO: 153516 - DNA, 25 bp, Homo sapien
tcgccgttcacatggtgtctttgac

SEQ ID NO: 153517 - DNA, 25 bp, Homo sapien
ctcgccgttcacatggtgtctttga

SEQ ID NO: 153518 - DNA, 25 bp, Homo sapien
cgttcacatggtgtctttgacccat

SEQ ID NO: 153519 - DNA, 25 bp, Homo sapien
gccgttcacatggtgtctttgaccc

SEQ ID NO: 153520 - DNA, 25 bp, Homo sapien
gaccacctgtactccttggtctcag

SEQ ID NO: 153521 - DNA, 25 bp, Homo sapien
cagtcacaataggaccacctgtact

SEQ ID NO: 153522 - DNA, 25 bp, Homo sapien
cactatagcctctacagtcacaata

SEQ ID NO: 153523 - DNA, 25 bp, Homo sapien
tgatcttccaccactatagcctcta

SEQ ID NO: 153524 - DNA, 25 bp, Homo sapien
ggctcccatagctgtctgtcacaag

SEQ ID NO: 153525 - DNA, 25 bp, Homo sapien
tcactggctcccatagctgtctgtc

SEQ ID NO: 153526 - DNA, 25 bp, Homo sapien
actggctcccatagctgtctgtcac

SEQ ID NO: 153527 - DNA, 25 bp, Homo sapien
ctgtcacaagcatcaactggggatc

SEQ ID NO: 153528 - DNA, 25 bp, Homo sapien
tgctttcgcttatcctggaaggaaa

SEQ ID NO: 153529 - DNA, 25 bp, Homo sapien
actgaaaacctggatgactgaaggg

SEQ ID NO: 153530 - DNA, 25 bp, Homo sapien
agcccacacttggtttctatcagcc

SEQ ID NO: 153531 - DNA, 25 bp, Homo sapien
tggtttctatcagcctgctttcgct

SEQ ID NO: 153532 - DNA, 25 bp, Homo sapien
tggattttggccgtttgagtatcag

SEQ ID NO: 153533 - DNA, 25 bp, Homo sapien
ttttggccgtttgagtatcagctcc

SEQ ID NO: 153534 - DNA, 25 bp, Homo sapien
ggccgtttgagtatcagctccttga

SEQ ID NO: 153535 - DNA, 25 bp, Homo sapien
tggccgtttgagtatcagctccttg

SEQ ID NO: 153536 - DNA, 25 bp, Homo sapien
ctgccccaagaaggagcgggcagac

SEQ ID NO: 153537 - DNA, 25 bp, Homo sapien
gccccaagaaggagcgggcagaccc

SEQ ID NO: 153538 - DNA, 25 bp, Homo sapien
tgaaggagcgggcagccctgaccac

SEQ ID NO: 153539 - DNA, 25 bp, Homo sapien
gaaggagcgggcagccctgaccaca

SEQ ID NO: 153540 - DNA, 25 bp, Homo sapien
tgttgggctcaaatggctggacttt

SEQ ID NO: 153541 - DNA, 25 bp, Homo sapien
tgagttccctgttgggctcaaatgg

SEQ ID NO: 153542 - DNA, 25 bp, Homo sapien
actttgaatctcatcttgctcagcc

SEQ ID NO: 153543 - DNA, 25 bp, Homo sapien
aatctcatcttgctcagcccctggg

SEQ ID NO: 153544 - DNA, 25 bp, Homo sapien
ggacaggtggcatcaggacctagtg

SEQ ID NO: 153545 - DNA, 25 bp, Homo sapien
tcaaggacaggtggcatcaggacct

SEQ ID NO: 153546 - DNA, 25 bp, Homo sapien
aaggacaggtggcatcaggacctag

SEQ ID NO: 153547 - DNA, 25 bp, Homo sapien
aggacaggtggcatcaggacctagt

SEQ ID NO: 153548 - DNA, 25 bp, Homo sapien
gcaacgtagtgataatcaagtgagg

SEQ ID NO: 153549 - DNA, 25 bp, Homo sapien
gaacctccactttatagcaacgtag

SEQ ID NO: 153550 - DNA, 25 bp, Homo sapien
catacgatgagaatcacaggatgcc

SEQ ID NO: 153551 - DNA, 25 bp, Homo sapien
atcaagtgaggtgataaaggagaag

SEQ ID NO: 153552 - DNA, 25 bp, Homo sapien
tgctactctgccgttcaccaggtct

SEQ ID NO: 153553 - DNA, 25 bp, Homo sapien
cttccttcttttccgggagctgcta

SEQ ID NO: 153554 - DNA, 25 bp, Homo sapien
cgggagctgctactctgccgttcac

SEQ ID NO: 153555 - DNA, 25 bp, Homo sapien
agctgctactctgccgttcaccagg

SEQ ID NO: 153556 - DNA, 25 bp, Homo sapien
tgtgccatcggggagctgagtgcat

SEQ ID NO: 153557 - DNA, 25 bp, Homo sapien
ctgtgccatcggggagctgagtgca

SEQ ID NO: 153558 - DNA, 25 bp, Homo sapien
acggtgacgggatgcccacagggtt

SEQ ID NO: 153559 - DNA, 25 bp, Homo sapien
tgtttgactcggtctccacggtgac

SEQ ID NO: 153560 - DNA, 25 bp, Homo sapien
ggatgtttgactcggtctccacggt

SEQ ID NO: 153561 - DNA, 25 bp, Homo sapien
agggatgtttgactcggtctccacg

SEQ ID NO: 153562 - DNA, 25 bp, Homo sapien
ctggccctgccaggattacccgtag

SEQ ID NO: 153563 - DNA, 25 bp, Homo sapien
aggattacccgtagattgcagaccc

SEQ ID NO: 153564 - DNA, 25 bp, Homo sapien
ccaggattacccgtagattgcagac

SEQ ID NO: 153565 - DNA, 25 bp, Homo sapien
cctgccaggattacccgtagattgc

SEQ ID NO: 153566 - DNA, 25 bp, Homo sapien
ttctcctgcttcagggctggacatg

SEQ ID NO: 153567 - DNA, 25 bp, Homo sapien
tctcctgcttcagggctggacatgc

SEQ ID NO: 153568 - DNA, 25 bp, Homo sapien
cttctcctgcttcagggctggacat

SEQ ID NO: 153569 - DNA, 25 bp, Homo sapien
atgccacagcacccgttgccatgga

SEQ ID NO: 153570 - DNA, 25 bp, Homo sapien
tgccatggaaaccatcttgcaaaga

SEQ ID NO: 153571 - DNA, 25 bp, Homo sapien
ggtagcctctgcttcactcggatgc

SEQ ID NO: 153572 - DNA, 25 bp, Homo sapien
gtagcctctgcttcactcggatgcc

SEQ ID NO: 153573 - DNA, 25 bp, Homo sapien
tgaagaactccaacgcatagctcgt

SEQ ID NO: 153574 - DNA, 25 bp, Homo sapien
tagctcgtagacacgacatagccca

SEQ ID NO: 153575 - DNA, 25 bp, Homo sapien
caacgcatagctcgtagacacgaca

SEQ ID NO: 153576 - DNA, 25 bp, Homo sapien
agacacgacatagcccaacatcaca

SEQ ID NO: 153577 - DNA, 25 bp, Homo sapien
acagtctgtcctggagtggaccccc

SEQ ID NO: 153578 - DNA, 25 bp, Homo sapien
agtctgtcctggagtggaccccctg

SEQ ID NO: 153579 - DNA, 25 bp, Homo sapien
cacagtctgtcctggagtggacccc

SEQ ID NO: 153580 - DNA, 25 bp, Homo sapien
ggcacagtctgtcctggagtggacc

SEQ ID NO: 153581 - DNA, 25 bp, Homo sapien
gacaaagtgtcccagcttgcctggg

SEQ ID NO: 153582 - DNA, 25 bp, Homo sapien
ctctagcaagagtgacaaagtgtcc

SEQ ID NO: 153583 - DNA, 25 bp, Homo sapien
tatatcccagaagaattatcagtct

SEQ ID NO: 153584 - DNA, 25 bp, Homo sapien
tagagtctctcgtctccattgtctc

SEQ ID NO: 153585 - DNA, 25 bp, Homo sapien
gatttgacctacaagctgtggtttg

SEQ ID NO: 153586 - DNA, 25 bp, Homo sapien
gtggtttgttgacccctgacctaga

SEQ ID NO: 153587 - DNA, 25 bp, Homo sapien
tgacctagacccttgcagaaagctt

SEQ ID NO: 153588 - DNA, 25 bp, Homo sapien
ggccggatttgacctacaagctgtg

SEQ ID NO: 153589 - DNA, 25 bp, Homo sapien
cagtagtccaaccagcaggaggagc

SEQ ID NO: 153590 - DNA, 25 bp, Homo sapien
gctgttactgcaactctcaccatca

SEQ ID NO: 153591 - DNA, 25 bp, Homo sapien
tcatgctcaacgtgcagctggccat

SEQ ID NO: 153592 - DNA, 25 bp, Homo sapien
tccagaatctgctggtgggagctgt

SEQ ID NO: 153593 - DNA, 25 bp, Homo sapien
aaagcatggcgtaggccgccgagat

SEQ ID NO: 153594 - DNA, 25 bp, Homo sapien
ggtctccgaagcgatcaggtagtag

SEQ ID NO: 153595 - DNA, 25 bp, Homo sapien
gcaaagtcagcattggcaggggcta

SEQ ID NO: 153596 - DNA, 25 bp, Homo sapien
ccctcaaggatctggctgcggctgt

SEQ ID NO: 153597 - DNA, 25 bp, Homo sapien
tgctggaagcccctatggacatcgg

SEQ ID NO: 153598 - DNA, 25 bp, Homo sapien
ctcgagtttccttcttgacgtggtc

SEQ ID NO: 153599 - DNA, 25 bp, Homo sapien
caaggaacttcaggttgtggctcag

SEQ ID NO: 153600 - DNA, 25 bp, Homo sapien
gagtttagcctcatagacggccatg

SEQ ID NO: 153601 - DNA, 25 bp, Homo sapien
aagtaaatgtaattcaccagcacca

SEQ ID NO: 153602 - DNA, 25 bp, Homo sapien
gaagtaaatgtaattcaccagcacc

SEQ ID NO: 153603 - DNA, 25 bp, Homo sapien
ctttgaagtaaatgtaattcaccag

SEQ ID NO: 153604 - DNA, 25 bp, Homo sapien
ttgaagtaaatgtaattcaccagca

SEQ ID NO: 153605 - DNA, 25 bp, Homo sapien
gcatataccaatgatctgactctca

SEQ ID NO: 153606 - DNA, 25 bp, Homo sapien
tagcatataccaatgatctgactct

SEQ ID NO: 153607 - DNA, 25 bp, Homo sapien
ttagcatataccaatgatctgactc

SEQ ID NO: 153608 - DNA, 25 bp, Homo sapien
catataccaatgatctgactctcac

SEQ ID NO: 153609 - DNA, 25 bp, Homo sapien
cacaccgtacaaagttgtttgcaca

SEQ ID NO: 153610 - DNA, 25 bp, Homo sapien
tatcattagatgaattatagttgct

SEQ ID NO: 153611 - DNA, 25 bp, Homo sapien
tgcaaaatcaactgtgtggacatat

SEQ ID NO: 153612 - DNA, 25 bp, Homo sapien
gttgcctctgagtggtaggactaga

SEQ ID NO: 153613 - DNA, 25 bp, Homo sapien
tacatgggatgactaatttggctga

SEQ ID NO: 153614 - DNA, 25 bp, Homo sapien
tttggctgaatcattaggctgggag

SEQ ID NO: 153615 - DNA, 25 bp, Homo sapien
ccctagaattttgttccctgtagat

SEQ ID NO: 153616 - DNA, 25 bp, Homo sapien
gattttgggttcaagctggttagaa

SEQ ID NO: 153617 - DNA, 25 bp, Homo sapien
catagaagtctttgggagtggtcct

SEQ ID NO: 153618 - DNA, 25 bp, Homo sapien
gcatcatgggcacccggactgttgt

SEQ ID NO: 153619 - DNA, 25 bp, Homo sapien
ttgtgttctcatcaacatagaagtc

SEQ ID NO: 153620 - DNA, 25 bp, Homo sapien
caccgagcagggcaagtatctgtca

SEQ ID NO: 153621 - DNA, 25 bp, Homo sapien
cacggttgcgtctcctttgtaatcc

SEQ ID NO: 153622 - DNA, 25 bp, Homo sapien
aacaagttgttccacctcattagca

SEQ ID NO: 153623 - DNA, 25 bp, Homo sapien
ttagcatctctggagtcagaacctc

SEQ ID NO: 153624 - DNA, 25 bp, Homo sapien
tagggagaatgaaaaacacggttgc

SEQ ID NO: 153625 - DNA, 25 bp, Homo sapien
aacagatccgtgaagcccagcctgg

SEQ ID NO: 153626 - DNA, 25 bp, Homo sapien
taagtcagcccacttggagaacaga

SEQ ID NO: 153627 - DNA, 25 bp, Homo sapien
tgatctaatacataggagccagaaa

SEQ ID NO: 153628 - DNA, 25 bp, Homo sapien
ttgctgtttggtgatgccggataag

SEQ ID NO: 153629 - DNA, 25 bp, Homo sapien
gccacacacaatcatggtagctctc

SEQ ID NO: 153630 - DNA, 25 bp, Homo sapien
tgccacacacaatcatggtagctct

SEQ ID NO: 153631 - DNA, 25 bp, Homo sapien
acacacaatcatggtagctctcatt

SEQ ID NO: 153632 - DNA, 25 bp, Homo sapien
cacacacaatcatggtagctctcat

SEQ ID NO: 153633 - DNA, 25 bp, Homo sapien
aatcgcaggatgtggcgattggtct

SEQ ID NO: 153634 - DNA, 25 bp, Homo sapien
tttgatcgcgaagctggtggctgct

SEQ ID NO: 153635 - DNA, 25 bp, Homo sapien
acactctgggtgctggtggaaaaga

SEQ ID NO: 153636 - DNA, 25 bp, Homo sapien
caccacaaggaagggccggttgaat

SEQ ID NO: 153637 - DNA, 25 bp, Homo sapien
tggcatcgtgttgtttactcggtac

SEQ ID NO: 153638 - DNA, 25 bp, Homo sapien
tactcggtacaaccagcctgttgtg

SEQ ID NO: 153639 - DNA, 25 bp, Homo sapien
tgctccaagaggtcggatgctctgc

SEQ ID NO: 153640 - DNA, 25 bp, Homo sapien
tcctcctgcttggaacagatgagca

SEQ ID NO: 153641 - DNA, 25 bp, Homo sapien
ccctagttgcaaagtacagaaagac

SEQ ID NO: 153642 - DNA, 25 bp, Homo sapien
ctgctggaagataacttctgaactc

SEQ ID NO: 153643 - DNA, 25 bp, Homo sapien
ttttcccctagttgcaaagtacaga

SEQ ID NO: 153644 - DNA, 25 bp, Homo sapien
aacaggcacggttcctccgagcact

SEQ ID NO: 153645 - DNA, 25 bp, Homo sapien
ttaggccttggcttaaaggcaattg

SEQ ID NO: 153646 - DNA, 25 bp, Homo sapien
ctccgctggcttgatggggcagcct

SEQ ID NO: 153647 - DNA, 25 bp, Homo sapien
ttaactcagtcttgataggcttagg

SEQ ID NO: 153648 - DNA, 25 bp, Homo sapien
gggcagcctcattaactcagtcttg

SEQ ID NO: 153649 - DNA, 25 bp, Homo sapien
gatgcagcagaacattcaagtagat

SEQ ID NO: 153650 - DNA, 25 bp, Homo sapien
tggtccatggaatccaccagggtga

SEQ ID NO: 153651 - DNA, 25 bp, Homo sapien
ccagggcagtaaacaagggaggaca

SEQ ID NO: 153652 - DNA, 25 bp, Homo sapien
acaagggaggacaagggatatcact

SEQ ID NO: 153653 - DNA, 25 bp, Homo sapien
atttcttgtagattagggggggcat

SEQ ID NO: 153654 - DNA, 25 bp, Homo sapien
cttgaacctgagagctccccacagg

SEQ ID NO: 153655 - DNA, 25 bp, Homo sapien
ctgggtcatagatcccaacagttag

SEQ ID NO: 153656 - DNA, 25 bp, Homo sapien
cacaggcctgctatgctgactgggt

SEQ ID NO: 153657 - DNA, 25 bp, Homo sapien
agggaaagggacagctctagcaaac

SEQ ID NO: 153658 - DNA, 25 bp, Homo sapien
ctattgttggcattccagagacagg

SEQ ID NO: 153659 - DNA, 25 bp, Homo sapien
acagggaaagggacagctctagcaa

SEQ ID NO: 153660 - DNA, 25 bp, Homo sapien
agacagggaaagggacagctctagc

SEQ ID NO: 153661 - DNA, 25 bp, Homo sapien
gtccctcgggctcagaaagggcaga

SEQ ID NO: 153662 - DNA, 25 bp, Homo sapien
tgatcccgaggctttcaccacgatg

SEQ ID NO: 153663 - DNA, 25 bp, Homo sapien
tcctggcaggtttccggccagcagg

SEQ ID NO: 153664 - DNA, 25 bp, Homo sapien
aggcctgcctgcagacgcagctccc

SEQ ID NO: 153665 - DNA, 25 bp, Homo sapien
gatgagactccttcagagctttgca

SEQ ID NO: 153666 - DNA, 25 bp, Homo sapien
gggacctccctttgcggcatcggta

SEQ ID NO: 153667 - DNA, 25 bp, Homo sapien
gagtccatcctctcctcgcctcaca

SEQ ID NO: 153668 - DNA, 25 bp, Homo sapien
caaaccccaaaactctagagtccat

SEQ ID NO: 153669 - DNA, 25 bp, Homo sapien
aggaaacggaggctctgccagagtt

SEQ ID NO: 153670 - DNA, 25 bp, Homo sapien
ctgccagagttagtgtggagcataa

SEQ ID NO: 153671 - DNA, 25 bp, Homo sapien
aaggtcacagagctcgggggaccca

SEQ ID NO: 153672 - DNA, 25 bp, Homo sapien
agtgtggagcataaggtcacagagc

SEQ ID NO: 153673 - DNA, 25 bp, Homo sapien
tggcggtgaagggaggccccctgag

SEQ ID NO: 153674 - DNA, 25 bp, Homo sapien
cccctgagggctgagaagcaccagg

SEQ ID NO: 153675 - DNA, 25 bp, Homo sapien
gggctgagaagcaccaggcacaaga

SEQ ID NO: 153676 - DNA, 25 bp, Homo sapien
agcaccaggcacaagaggaggaaga

SEQ ID NO: 153677 - DNA, 25 bp, Homo sapien
cctacatggaggtcctcgactctct

SEQ ID NO: 153678 - DNA, 25 bp, Homo sapien
tgggggccaccgtggcacctacatg

SEQ ID NO: 153679 - DNA, 25 bp, Homo sapien
tggcacctacatggaggtcctcgac

SEQ ID NO: 153680 - DNA, 25 bp, Homo sapien
tggaggtcctcgactctcttcttca

SEQ ID NO: 153681 - DNA, 25 bp, Homo sapien
ggctggttgagttcctgaaggagct

SEQ ID NO: 153682 - DNA, 25 bp, Homo sapien
tctgggctggttgagttcctgaagg

SEQ ID NO: 153683 - DNA, 25 bp, Homo sapien
tgggctggttgagttcctgaaggag

SEQ ID NO: 153684 - DNA, 25 bp, Homo sapien
tggttgagttcctgaaggagctgct

SEQ ID NO: 153685 - DNA, 25 bp, Homo sapien
cctgcagagtccctaaagttggtag

SEQ ID NO: 153686 - DNA, 25 bp, Homo sapien
gatcacgaccgcattgctatcgagg

SEQ ID NO: 153687 - DNA, 25 bp, Homo sapien
ccaggtcggtgaaaagggcattgcc

SEQ ID NO: 153688 - DNA, 25 bp, Homo sapien
tacagcgtcttcatggcacttacga

SEQ ID NO: 153689 - DNA, 25 bp, Homo sapien
ggtcacgtagaagtcttgctcttgg

SEQ ID NO: 153690 - DNA, 25 bp, Homo sapien
tctccgaggtcacgtagaagtcttg

SEQ ID NO: 153691 - DNA, 25 bp, Homo sapien
cgaggtcacgtagaagtcttgctct

SEQ ID NO: 153692 - DNA, 25 bp, Homo sapien
acagtctccgaggtcacgtagaagt

SEQ ID NO: 153693 - DNA, 25 bp, Homo sapien
accctgcaggagaggttccggtcca

SEQ ID NO: 153694 - DNA, 25 bp, Homo sapien
gggagaatgaacaaagccgtggcat

SEQ ID NO: 153695 - DNA, 25 bp, Homo sapien
catcttaagccacttcctcagcgtt

SEQ ID NO: 153696 - DNA, 25 bp, Homo sapien
tagtgatactgatcctcgcggctca

SEQ ID NO: 153697 - DNA, 25 bp, Homo sapien
gaggtgaagacgttactgatcccca

SEQ ID NO: 153698 - DNA, 25 bp, Homo sapien
tttgggaaggtaaagctcgagctgc

SEQ ID NO: 153699 - DNA, 25 bp, Homo sapien
tatttgagtggttgctgatgccgga

SEQ ID NO: 153700 - DNA, 25 bp, Homo sapien
cagctgataggagccctcaatggag

SEQ ID NO: 153701 - DNA, 25 bp, Homo sapien
gaaatggaacaatggagcagctact

SEQ ID NO: 153702 - DNA, 25 bp, Homo sapien
gatatggcttcccattacatgaagg

SEQ ID NO: 153703 - DNA, 25 bp, Homo sapien
caaagcttctgcctatgggcatcaa

SEQ ID NO: 153704 - DNA, 25 bp, Homo sapien
tgggcatcaacctctaagtatctgt

SEQ ID NO: 153705 - DNA, 25 bp, Homo sapien
tccacctccaccacagctttgtgca

SEQ ID NO: 153706 - DNA, 25 bp, Homo sapien
tcgtccacctccaccacagctttgt

SEQ ID NO: 153707 - DNA, 25 bp, Homo sapien
cctccaccacagctttgtgcaccat

SEQ ID NO: 153708 - DNA, 25 bp, Homo sapien
cacctccaccacagctttgtgcacc

SEQ ID NO: 153709 - DNA, 25 bp, Homo sapien
ctgaaagtgaatattgtccccgtgg

SEQ ID NO: 153710 - DNA, 25 bp, Homo sapien
tgaaagtgaatattgtccccgtggc

SEQ ID NO: 153711 - DNA, 25 bp, Homo sapien
aaagtgaatattgtccccgtggctg

SEQ ID NO: 153712 - DNA, 25 bp, Homo sapien
gaaagtgaatattgtccccgtggct

SEQ ID NO: 153713 - DNA, 25 bp, Homo sapien
ctagcctctgagagttcaggcgggc

SEQ ID NO: 153714 - DNA, 25 bp, Homo sapien
gaacactagcctctgagagttcagg

SEQ ID NO: 153715 - DNA, 25 bp, Homo sapien
ggcctgttgaacactagcctctgag

SEQ ID NO: 153716 - DNA, 25 bp, Homo sapien
cctctgagagttcaggcgggccgac

SEQ ID NO: 153717 - DNA, 25 bp, Homo sapien
tacagatgggccatagcttagcccc

SEQ ID NO: 153718 - DNA, 25 bp, Homo sapien
cctgtgtaaatcactagctaccagc

SEQ ID NO: 153719 - DNA, 25 bp, Homo sapien
cgtgtgggtggaagcaatcatcata

SEQ ID NO: 153720 - DNA, 25 bp, Homo sapien
gcctcattagtcaactaaacctgtg

SEQ ID NO: 153721 - DNA, 25 bp, Homo sapien
cattaggactgaaacagtagcccca

SEQ ID NO: 153722 - DNA, 25 bp, Homo sapien
cactaccatgctggtgaacttgagc

SEQ ID NO: 153723 - DNA, 25 bp, Homo sapien
tcaaaaagttagtcattggcacctg

SEQ ID NO: 153724 - DNA, 25 bp, Homo sapien
gaaatcaaccacgaatgacagggcc

SEQ ID NO: 153725 - DNA, 25 bp, Homo sapien
tcccacatttgctaggtgaagtcct

SEQ ID NO: 153726 - DNA, 25 bp, Homo sapien
acatcacgctcgtctccagccagtc

SEQ ID NO: 153727 - DNA, 25 bp, Homo sapien
tttgctaggtgaagtccttctcacg

SEQ ID NO: 153728 - DNA, 25 bp, Homo sapien
ccacatttgctaggtgaagtccttc

SEQ ID NO: 153729 - DNA, 25 bp, Homo sapien
aatgtctcctctataagggcaggga

SEQ ID NO: 153730 - DNA, 25 bp, Homo sapien
gataataagatgtcagcactgctca

SEQ ID NO: 153731 - DNA, 25 bp, Homo sapien
gctgagtttcctccggccaaagacg

SEQ ID NO: 153732 - DNA, 25 bp, Homo sapien
tgacggcctcattccacagtacttg

SEQ ID NO: 153733 - DNA, 25 bp, Homo sapien
cctcagaactgggaagtggacattg

SEQ ID NO: 153734 - DNA, 25 bp, Homo sapien
tggacattggtacagcctggactta

SEQ ID NO: 153735 - DNA, 25 bp, Homo sapien
agaggtcccatatacgctctccctg

SEQ ID NO: 153736 - DNA, 25 bp, Homo sapien
cctaatgtaaatgtggacagaccac

SEQ ID NO: 153737 - DNA, 25 bp, Homo sapien
cagagacttctgcttagtggagaca

SEQ ID NO: 153738 - DNA, 25 bp, Homo sapien
tgcttagtggagacaccgctctggg

SEQ ID NO: 153739 - DNA, 25 bp, Homo sapien
tatcctgatcaaatccacatgcttc

SEQ ID NO: 153740 - DNA, 25 bp, Homo sapien
tgattatcctgatcaaatccacatg

SEQ ID NO: 153741 - DNA, 25 bp, Homo sapien
caggagcccaagcacaaacgtgccc

SEQ ID NO: 153742 - DNA, 25 bp, Homo sapien
gaagagtgtgcttctggggcataac

SEQ ID NO: 153743 - DNA, 25 bp, Homo sapien
gcttctggggcataaccagcaggag

SEQ ID NO: 153744 - DNA, 25 bp, Homo sapien
aggagcccaagcacaaacgtgccca

SEQ ID NO: 153745 - DNA, 25 bp, Homo sapien
gcttgggaaatgccaggacaaccaa

SEQ ID NO: 153746 - DNA, 25 bp, Homo sapien
tgctgaggcttatttattcctgcag

SEQ ID NO: 153747 - DNA, 25 bp, Homo sapien
tatttattcctgcagagaactcctc

SEQ ID NO: 153748 - DNA, 25 bp, Homo sapien
caggacaaccaagtgttctgttctc

SEQ ID NO: 153749 - DNA, 25 bp, Homo sapien
agctggatgtagctggtggattcca

SEQ ID NO: 153750 - DNA, 25 bp, Homo sapien
caaagccgtctgtctggagtagtgg

SEQ ID NO: 153751 - DNA, 25 bp, Homo sapien
ggtggattccaaagccgtctgtctg

SEQ ID NO: 153752 - DNA, 25 bp, Homo sapien
tctgtctggagtagtggattttcat

SEQ ID NO: 153753 - DNA, 25 bp, Homo sapien
tccaggcaaggggacagcacctctt

SEQ ID NO: 153754 - DNA, 25 bp, Homo sapien
atgttctgagagctgcaccctgctc

SEQ ID NO: 153755 - DNA, 25 bp, Homo sapien
cagctgactcaaatccgaatctgta

SEQ ID NO: 153756 - DNA, 25 bp, Homo sapien
ttccctgagggtcagatgcacagct

SEQ ID NO: 153757 - DNA, 25 bp, Homo sapien
ccggtgaccgcagcaaacaagatta

SEQ ID NO: 153758 - DNA, 25 bp, Homo sapien
ggttcatattagacgtaccgagcag

SEQ ID NO: 153759 - DNA, 25 bp, Homo sapien
gggtccgaggttcagtccaatcaga

SEQ ID NO: 153760 - DNA, 25 bp, Homo sapien
tctagatgtcacgtggtgtggcctc

SEQ ID NO: 153761 - DNA, 25 bp, Homo sapien
gaacccagccgccaagagccccaga

SEQ ID NO: 153762 - DNA, 25 bp, Homo sapien
cagaacccagccgccaagagcccca

SEQ ID NO: 153763 - DNA, 25 bp, Homo sapien
gcagaacccagccgccaagagcccc

SEQ ID NO: 153764 - DNA, 25 bp, Homo sapien
agaacccagccgccaagagccccag

SEQ ID NO: 153765 - DNA, 25 bp, Homo sapien
ggtcagattctcctcgtcaagtggg

SEQ ID NO: 153766 - DNA, 25 bp, Homo sapien
tccacgttggcggaggctaatccga

SEQ ID NO: 153767 - DNA, 25 bp, Homo sapien
ggctaatccgaggtccacgtgtgtc

SEQ ID NO: 153768 - DNA, 25 bp, Homo sapien
tgggtcagattctcctcgtcaagtg

SEQ ID NO: 153769 - DNA, 25 bp, Homo sapien
acattcttatcaggggccttcagga

SEQ ID NO: 153770 - DNA, 25 bp, Homo sapien
atgacattcttatcaggggccttca

SEQ ID NO: 153771 - DNA, 25 bp, Homo sapien
ttcttatcaggggccttcaggacta

SEQ ID NO: 153772 - DNA, 25 bp, Homo sapien
tcttatcaggggccttcaggactaa

SEQ ID NO: 153773 - DNA, 25 bp, Homo sapien
tctgtcagggtggtattatgggccc

SEQ ID NO: 153774 - DNA, 25 bp, Homo sapien
tcatcgctggactgattgagggtgc

SEQ ID NO: 153775 - DNA, 25 bp, Homo sapien
cgtgaacctgtccagcagactgagt

SEQ ID NO: 153776 - DNA, 25 bp, Homo sapien
ctccgtgaggttgaacttgaggcct

SEQ ID NO: 153777 - DNA, 25 bp, Homo sapien
gagtcaaggtccttgatcagatctg

SEQ ID NO: 153778 - DNA, 25 bp, Homo sapien
atctgtgattttccccctagttcca

SEQ ID NO: 153779 - DNA, 25 bp, Homo sapien
caaggtccttgatcagatctgtgat

SEQ ID NO: 153780 - DNA, 25 bp, Homo sapien
cattgtctgcgagtcaaggtccttg

SEQ ID NO: 153781 - DNA, 25 bp, Homo sapien
aagaagatgtaattcaccaggacca

SEQ ID NO: 153782 - DNA, 25 bp, Homo sapien
ctttaaagaagatgtaattcaccag

SEQ ID NO: 153783 - DNA, 25 bp, Homo sapien
taaagaagatgtaattcaccaggac

SEQ ID NO: 153784 - DNA, 25 bp, Homo sapien
agaagatgtaattcaccaggaccat

SEQ ID NO: 153785 - DNA, 25 bp, Homo sapien
tgagatccacctcttctgaacccca

SEQ ID NO: 153786 - DNA, 25 bp, Homo sapien
tgaaccccaagccaggcacactcac

SEQ ID NO: 153787 - DNA, 25 bp, Homo sapien
acagaaatggccctgagatccacct

SEQ ID NO: 153788 - DNA, 25 bp, Homo sapien
tcaggacagaaatggccctgagatc

SEQ ID NO: 153789 - DNA, 25 bp, Homo sapien
tccaggaggaccagagcactgaaca

SEQ ID NO: 153790 - DNA, 25 bp, Homo sapien
catagttctagcatcactgggtgag

SEQ ID NO: 153791 - DNA, 25 bp, Homo sapien
gagcaaaactggcacctggagagtg

SEQ ID NO: 153792 - DNA, 25 bp, Homo sapien
tagtcttagagggagatctggatcc

SEQ ID NO: 153793 - DNA, 25 bp, Homo sapien
gaaaggacccatctcagggtaggag

SEQ ID NO: 153794 - DNA, 25 bp, Homo sapien
gagcaccttcccatattacccaggg

SEQ ID NO: 153795 - DNA, 25 bp, Homo sapien
tccagcatgggtccctgccagaaag

SEQ ID NO: 153796 - DNA, 25 bp, Homo sapien
gtgtccccgttaccaattgcagcag

SEQ ID NO: 153797 - DNA, 25 bp, Homo sapien
tgcttttctggacggcatgtctcct

SEQ ID NO: 153798 - DNA, 25 bp, Homo sapien
aatgggcccaggtcaactttgaatg

SEQ ID NO: 153799 - DNA, 25 bp, Homo sapien
aaacgaggtattgcatgtgaatggc

SEQ ID NO: 153800 - DNA, 25 bp, Homo sapien
gccgctgcgagaattaaacgaggta

SEQ ID NO: 153801 - DNA, 25 bp, Homo sapien
ttctttgggaatcatgacataggcc

SEQ ID NO: 153802 - DNA, 25 bp, Homo sapien
gacataggcccatgattcgcacgca

SEQ ID NO: 153803 - DNA, 25 bp, Homo sapien
gaaactgcctctggtacctctagct

SEQ ID NO: 153804 - DNA, 25 bp, Homo sapien
gaggatagcggtgttggacatcaca

SEQ ID NO: 153805 - DNA, 25 bp, Homo sapien
agaaggtgtgagtgcaagggtcgcc

SEQ ID NO: 153806 - DNA, 25 bp, Homo sapien
aaggtgtgagtgcaagggtcgccct

SEQ ID NO: 153807 - DNA, 25 bp, Homo sapien
gagtgcaagggtcgccctgctcgac

SEQ ID NO: 153808 - DNA, 25 bp, Homo sapien
tgtgagtgcaagggtcgccctgctc

SEQ ID NO: 153809 - DNA, 25 bp, Homo sapien
tcaggtgatgcaaactcatcatggg

SEQ ID NO: 153810 - DNA, 25 bp, Homo sapien
tcatcatgggcaccattacccactt

SEQ ID NO: 153811 - DNA, 25 bp, Homo sapien
gaaccttgactgatgagtatcttgg

SEQ ID NO: 153812 - DNA, 25 bp, Homo sapien
cccggaagtaaggtatagtcaggtg

SEQ ID NO: 153813 - DNA, 25 bp, Homo sapien
cattggtgagaccttgacgtggaga

SEQ ID NO: 153814 - DNA, 25 bp, Homo sapien
tgagaccttgacgtggagagatgtg

SEQ ID NO: 153815 - DNA, 25 bp, Homo sapien
agaccttgacgtggagagatgtggg

SEQ ID NO: 153816 - DNA, 25 bp, Homo sapien
tggacattggtgagaccttgacgtg

SEQ ID NO: 153817 - DNA, 25 bp, Homo sapien
taagtgtaaattccacctgtccctg

SEQ ID NO: 153818 - DNA, 25 bp, Homo sapien
ttgagaccaggagaaaccatgcatg

SEQ ID NO: 153819 - DNA, 25 bp, Homo sapien
gcccaaagccatgtaggcagcatag

SEQ ID NO: 153820 - DNA, 25 bp, Homo sapien
tactctcagggtgcaaattagtgtc

SEQ ID NO: 153821 - DNA, 25 bp, Homo sapien
cctcaggttagtgttgaagcagctc

SEQ ID NO: 153822 - DNA, 25 bp, Homo sapien
gttcctgcgggtgtcactgactcca

SEQ ID NO: 153823 - DNA, 25 bp, Homo sapien
gaaatcggtcagctcaattccgtgt

SEQ ID NO: 153824 - DNA, 25 bp, Homo sapien
aattccgtgtgtcccagcaagttcc

SEQ ID NO: 153825 - DNA, 25 bp, Homo sapien
atgcccagctggagaagtatgtcgt

SEQ ID NO: 153826 - DNA, 25 bp, Homo sapien
gttatagtccctcgagatggaaaac

SEQ ID NO: 153827 - DNA, 25 bp, Homo sapien
agtatgtcgttcaggttatagtccc

SEQ ID NO: 153828 - DNA, 25 bp, Homo sapien
ggtgaaggcttcctcaatgcccagc

SEQ ID NO: 153829 - DNA, 25 bp, Homo sapien
cattacacacgggaaacacagatgc

SEQ ID NO: 153830 - DNA, 25 bp, Homo sapien
ggaaacacagatgcgcaggagttca

SEQ ID NO: 153831 - DNA, 25 bp, Homo sapien
cacgggaaacacagatgcgcaggag

SEQ ID NO: 153832 - DNA, 25 bp, Homo sapien
acacacgggaaacacagatgcgcag

SEQ ID NO: 153833 - DNA, 25 bp, Homo sapien
tctgtgccctcctcaaatacatcaa

SEQ ID NO: 153834 - DNA, 25 bp, Homo sapien
attttgactgctgtggcagcagatg

SEQ ID NO: 153835 - DNA, 25 bp, Homo sapien
tacatcaagcacagccttatggacc

SEQ ID NO: 153836 - DNA, 25 bp, Homo sapien
ctaatgcagaaaggagggtgatttt

SEQ ID NO: 153837 - DNA, 25 bp, Homo sapien
gaaacgcacaatggtccttgtctcc

SEQ ID NO: 153838 - DNA, 25 bp, Homo sapien
gaagaagatgttctgggtgtctgta

SEQ ID NO: 153839 - DNA, 25 bp, Homo sapien
caggaagggcctgttgaaacgcaca

SEQ ID NO: 153840 - DNA, 25 bp, Homo sapien
ggacaatgatcatcaggaagggcct

SEQ ID NO: 153841 - DNA, 25 bp, Homo sapien
gaatcgctgtcaccttccaaggata

SEQ ID NO: 153842 - DNA, 25 bp, Homo sapien
tccatgggcccctgtgcatgtgaga

SEQ ID NO: 153843 - DNA, 25 bp, Homo sapien
cagacagggccacacatgccatggc

SEQ ID NO: 153844 - DNA, 25 bp, Homo sapien
gaccctccagactgaagagtccatg

SEQ ID NO: 153845 - DNA, 25 bp, Homo sapien
gaattggccttagagcagcagggtc

SEQ ID NO: 153846 - DNA, 25 bp, Homo sapien
gagaaactgaaagtgggcacccaga

SEQ ID NO: 153847 - DNA, 25 bp, Homo sapien
ccacaagcttaggtagtcctgggca

SEQ ID NO: 153848 - DNA, 25 bp, Homo sapien
ggatgtcgcatgataaagccctgca

SEQ ID NO: 153849 - DNA, 25 bp, Homo sapien
gtgcgctgatggctcatttgtcctc

SEQ ID NO: 153850 - DNA, 25 bp, Homo sapien
ctggttgttgagggagatcattcac

SEQ ID NO: 153851 - DNA, 25 bp, Homo sapien
cctcagccctgcattctggttgttg

SEQ ID NO: 153852 - DNA, 25 bp, Homo sapien
tgatggctcatttgtcctcagccct

SEQ ID NO: 153853 - DNA, 25 bp, Homo sapien
aattcacacccattctcctcaaagc

SEQ ID NO: 153854 - DNA, 25 bp, Homo sapien
taaattcacacccattctcctcaaa

SEQ ID NO: 153855 - DNA, 25 bp, Homo sapien
tcctcaaagccttccaacagaatca

SEQ ID NO: 153856 - DNA, 25 bp, Homo sapien
ctgcaatcataaattcacacccatt

SEQ ID NO: 153857 - DNA, 25 bp, Homo sapien
taattctgctaacattgcacttgtg

SEQ ID NO: 153858 - DNA, 25 bp, Homo sapien
agcccactgtggtcctcccttaatt

SEQ ID NO: 153859 - DNA, 25 bp, Homo sapien
ttttttccctacacgctgtcttgcc

SEQ ID NO: 153860 - DNA, 25 bp, Homo sapien
tgcacttgtgatccccgagtggttt

SEQ ID NO: 153861 - DNA, 25 bp, Homo sapien
caccaagaacctgcaccggcactga

SEQ ID NO: 153862 - DNA, 25 bp, Homo sapien
cggtgctcagcacaccaagaacctg

SEQ ID NO: 153863 - DNA, 25 bp, Homo sapien
caagaacctgcaccggcactgagtt

SEQ ID NO: 153864 - DNA, 25 bp, Homo sapien
ggtgctcagcacaccaagaacctgc

SEQ ID NO: 153865 - DNA, 25 bp, Homo sapien
gaaccaccaagaattcctgcagctg

SEQ ID NO: 153866 - DNA, 25 bp, Homo sapien
ggctgaactgccgtgacaccgtggc

SEQ ID NO: 153867 - DNA, 25 bp, Homo sapien
tcagcagttggccttcttgaagccc

SEQ ID NO: 153868 - DNA, 25 bp, Homo sapien
agctggatctccaaggcgctcatca

SEQ ID NO: 153869 - DNA, 25 bp, Homo sapien
aaggggcagatatctccctgagatg

SEQ ID NO: 153870 - DNA, 25 bp, Homo sapien
gcccaaaggggcagatatctccctg

SEQ ID NO: 153871 - DNA, 25 bp, Homo sapien
gtacctcgataccctgcaacttcat

SEQ ID NO: 153872 - DNA, 25 bp, Homo sapien
caggggtcacaattcagagttcagc

SEQ ID NO: 153873 - DNA, 25 bp, Homo sapien
cactgggcatgtttgctcttcttca

SEQ ID NO: 153874 - DNA, 25 bp, Homo sapien
cagctttgtttgggttggtgattac

SEQ ID NO: 153875 - DNA, 25 bp, Homo sapien
ggaagtgtcagtacccacacctcct

SEQ ID NO: 153876 - DNA, 25 bp, Homo sapien
ttgggttggtgattacccatttgcc

SEQ ID NO: 153877 - DNA, 25 bp, Homo sapien
ttgtacacaaactcctccatcttct

SEQ ID NO: 153878 - DNA, 25 bp, Homo sapien
gtacacaaactcctccatcttctcc

SEQ ID NO: 153879 - DNA, 25 bp, Homo sapien
cttgtacacaaactcctccatcttc

SEQ ID NO: 153880 - DNA, 25 bp, Homo sapien
acacaaactcctccatcttctccat

SEQ ID NO: 153881 - DNA, 25 bp, Homo sapien
ggatgaccctccaacatctgtccca

SEQ ID NO: 153882 - DNA, 25 bp, Homo sapien
tgcagacagtcattgtccttcagcc

SEQ ID NO: 153883 - DNA, 25 bp, Homo sapien
cagtcattgtccttcagccagtcag

SEQ ID NO: 153884 - DNA, 25 bp, Homo sapien
cattgtccttcagccagtcagggag

SEQ ID NO: 153885 - DNA, 25 bp, Homo sapien
ctgcagacagtcattgtccttcagc

SEQ ID NO: 153886 - DNA, 25 bp, Homo sapien
tatggccatagagcagacagtcatt

SEQ ID NO: 153887 - DNA, 25 bp, Homo sapien
ggccatagagcagacagtcattgtc

SEQ ID NO: 153888 - DNA, 25 bp, Homo sapien
tggccatagagcagacagtcattgt

SEQ ID NO: 153889 - DNA, 25 bp, Homo sapien
ctatggccatagagcagacagtcat

SEQ ID NO: 153890 - DNA, 25 bp, Homo sapien
gatgtgtccggctgctgccggtttc

SEQ ID NO: 153891 - DNA, 25 bp, Homo sapien
aaccaagcagatgtgtccggctgct

SEQ ID NO: 153892 - DNA, 25 bp, Homo sapien
cggctgctgccggtttctgtatgga

SEQ ID NO: 153893 - DNA, 25 bp, Homo sapien
aagcagatgtgtccggctgctgccg

SEQ ID NO: 153894 - DNA, 25 bp, Homo sapien
ctgcacccaaaaggaatatcctcca

SEQ ID NO: 153895 - DNA, 25 bp, Homo sapien
cagtgcggacgagccaggagaagct

SEQ ID NO: 153896 - DNA, 25 bp, Homo sapien
atgacagtagacagtgcggacgagc

SEQ ID NO: 153897 - DNA, 25 bp, Homo sapien
ctgaatgacagtagacagtgcggac

SEQ ID NO: 153898 - DNA, 25 bp, Homo sapien
acagtagacagtgcggacgagccag

SEQ ID NO: 153899 - DNA, 25 bp, Homo sapien
tgtggcgagcagtagaaggagtaac

SEQ ID NO: 153900 - DNA, 25 bp, Homo sapien
caggggacgaagctccttatgagca

SEQ ID NO: 153901 - DNA, 25 bp, Homo sapien
caatccctgaatagtacagtttgga

SEQ ID NO: 153902 - DNA, 25 bp, Homo sapien
cagagccaggggacgaagctcctta

SEQ ID NO: 153903 - DNA, 25 bp, Homo sapien
acatagatgatggagaagtagatga

SEQ ID NO: 153904 - DNA, 25 bp, Homo sapien
tgtcacaatgatggcagagatgccc

SEQ ID NO: 153905 - DNA, 25 bp, Homo sapien
cccaggacatagatgatggagaagt

SEQ ID NO: 153906 - DNA, 25 bp, Homo sapien
ggcagagatgcccaggacatagatg

SEQ ID NO: 153907 - DNA, 25 bp, Homo sapien
ggcacaataccgctcaagccaagtc

SEQ ID NO: 153908 - DNA, 25 bp, Homo sapien
gccttgacgaaaccctcagcaatag

SEQ ID NO: 153909 - DNA, 25 bp, Homo sapien
ggtgggcacaataccgctcaagcca

SEQ ID NO: 153910 - DNA, 25 bp, Homo sapien
tgacgaaaccctcagcaataggaaa

SEQ ID NO: 153911 - DNA, 25 bp, Homo sapien
ggaaccatatgtctaattttccagg

SEQ ID NO: 153912 - DNA, 25 bp, Homo sapien
ctggaaccatatgtctaattttcca

SEQ ID NO: 153913 - DNA, 25 bp, Homo sapien
tggaaccatatgtctaattttccag

SEQ ID NO: 153914 - DNA, 25 bp, Homo sapien
atcagtgcagtcaccttctcggctg

SEQ ID NO: 153915 - DNA, 25 bp, Homo sapien
agtggacaaaggccaccgtcaccat

SEQ ID NO: 153916 - DNA, 25 bp, Homo sapien
agagaagggagtcatcagtgcagtc

SEQ ID NO: 153917 - DNA, 25 bp, Homo sapien
tctcggctgtaatggaattcctgaa

SEQ ID NO: 153918 - DNA, 25 bp, Homo sapien
gaagttcctcctccacccctcagat

SEQ ID NO: 153919 - DNA, 25 bp, Homo sapien
tgggaagttcctcctccacccctca

SEQ ID NO: 153920 - DNA, 25 bp, Homo sapien
cctcctccacccctcagatgggaag

SEQ ID NO: 153921 - DNA, 25 bp, Homo sapien
ttcctcctccacccctcagatggga

SEQ ID NO: 153922 - DNA, 25 bp, Homo sapien
tatgtaagcagattcaggccctaga

SEQ ID NO: 153923 - DNA, 25 bp, Homo sapien
gatgggatcaggttatacaattgct

SEQ ID NO: 153924 - DNA, 25 bp, Homo sapien
tttgccaaagagagcgactgccgag

SEQ ID NO: 153925 - DNA, 25 bp, Homo sapien
agtggaaatggaaagtgtatcgccc

SEQ ID NO: 153926 - DNA, 25 bp, Homo sapien
ttaatggcccttgaaaaagtgcgtc

SEQ ID NO: 153927 - DNA, 25 bp, Homo sapien
gcagggagggttgtgacgggctgga

SEQ ID NO: 153928 - DNA, 25 bp, Homo sapien
tgaaaaagtgcgtccctgcagggag

SEQ ID NO: 153929 - DNA, 25 bp, Homo sapien
aatgctttccgtgagcttttggagg

SEQ ID NO: 153930 - DNA, 25 bp, Homo sapien
cagtcagggcaacagggactggcag

SEQ ID NO: 153931 - DNA, 25 bp, Homo sapien
gaaccaatattcagcagtcagggca

SEQ ID NO: 153932 - DNA, 25 bp, Homo sapien
tgaaccaatattcagcagtcagggc

SEQ ID NO: 153933 - DNA, 25 bp, Homo sapien
gtcagggcaacagggactggcagcc

SEQ ID NO: 153934 - DNA, 25 bp, Homo sapien
gctaagaatccccacatcacaaggt

SEQ ID NO: 153935 - DNA, 25 bp, Homo sapien
cagggctgggctcatataagcccag

SEQ ID NO: 153936 - DNA, 25 bp, Homo sapien
aattcaaagcaatcatgcacggagc

SEQ ID NO: 153937 - DNA, 25 bp, Homo sapien
tccactctgtggcatgctgctaaga

SEQ ID NO: 153938 - DNA, 25 bp, Homo sapien
agccccagccatgagcacagtgacc

SEQ ID NO: 153939 - DNA, 25 bp, Homo sapien
ttggtcaaccagggccacacaatga

SEQ ID NO: 153940 - DNA, 25 bp, Homo sapien
ggccagaatggatgagatcagaagc

SEQ ID NO: 153941 - DNA, 25 bp, Homo sapien
gggccagaatggatgagatcagaag

SEQ ID NO: 153942 - DNA, 25 bp, Homo sapien
caccagaaccgctgtggtttcactg

SEQ ID NO: 153943 - DNA, 25 bp, Homo sapien
ggtttcactgccgaggtccttctcc

SEQ ID NO: 153944 - DNA, 25 bp, Homo sapien
tcctctaggctctggttggccctcg

SEQ ID NO: 153945 - DNA, 25 bp, Homo sapien
tattcgtcaatgtgtttttgggcct

SEQ ID NO: 153946 - DNA, 25 bp, Homo sapien
gtggcacgtgagtcaaagggcttca

SEQ ID NO: 153947 - DNA, 25 bp, Homo sapien
ggtggtgttcccagcgtggtccatc

SEQ ID NO: 153948 - DNA, 25 bp, Homo sapien
tgagcagactgtcccacttaatcag

SEQ ID NO: 153949 - DNA, 25 bp, Homo sapien
gagcattgcagctcacggtcgtgca

SEQ ID NO: 153950 - DNA, 25 bp, Homo sapien
gagatgtcctgggtgatgtaacagc

SEQ ID NO: 153951 - DNA, 25 bp, Homo sapien
agtgctttgaatagggacagtgacc

SEQ ID NO: 153952 - DNA, 25 bp, Homo sapien
tactctgagagggtgacaatatcct

SEQ ID NO: 153953 - DNA, 25 bp, Homo sapien
tatcctgagggatgacggtgtcctg

SEQ ID NO: 153954 - DNA, 25 bp, Homo sapien
tgacagcatcccggggggtgactgt

SEQ ID NO: 153955 - DNA, 25 bp, Homo sapien
gtgacagcatcccggggggtgactg

SEQ ID NO: 153956 - DNA, 25 bp, Homo sapien
aggtgacagcatcccggggggtgac

SEQ ID NO: 153957 - DNA, 25 bp, Homo sapien
ggtgacagcatcccggggggtgact

SEQ ID NO: 153958 - DNA, 25 bp, Homo sapien
gcatctccagtctgcaggttctaga

SEQ ID NO: 153959 - DNA, 25 bp, Homo sapien
ctccagtctgcaggttctagaaatg

SEQ ID NO: 153960 - DNA, 25 bp, Homo sapien
gaggagcatctccagtctgcaggtt

SEQ ID NO: 153961 - DNA, 25 bp, Homo sapien
tcatgggaggagcatctccagtctg

SEQ ID NO: 153962 - DNA, 25 bp, Homo sapien
tttagaaatgttcagtccaggctgc

SEQ ID NO: 153963 - DNA, 25 bp, Homo sapien
tgcccagggaagcctccacccacag

SEQ ID NO: 153964 - DNA, 25 bp, Homo sapien
ttagaaatgttcagtccaggctgcc

SEQ ID NO: 153965 - DNA, 25 bp, Homo sapien
cagggaagcctccacccacagtcac

SEQ ID NO: 153966 - DNA, 25 bp, Homo sapien
catggaggaggtaacatttgtgcaa

SEQ ID NO: 153967 - DNA, 25 bp, Homo sapien
ttcatggaggaggtaacatttgtgc

SEQ ID NO: 153968 - DNA, 25 bp, Homo sapien
atggaggaggtaacatttgtgcaag

SEQ ID NO: 153969 - DNA, 25 bp, Homo sapien
ggaggaggtaacatttgtgcaaggc

SEQ ID NO: 153970 - DNA, 25 bp, Homo sapien
cagcgtcatcatggccttatgagtg

SEQ ID NO: 153971 - DNA, 25 bp, Homo sapien
caggaagggccgactgaactcagtg

SEQ ID NO: 153972 - DNA, 25 bp, Homo sapien
cttcagagcccctctcatccagcgt

SEQ ID NO: 153973 - DNA, 25 bp, Homo sapien
aagggccgactgaactcagtgccca

SEQ ID NO: 153974 - DNA, 25 bp, Homo sapien
cctgtttccgtgtggaaagtcatca

SEQ ID NO: 153975 - DNA, 25 bp, Homo sapien
tcctgtttccgtgtggaaagtcatc

SEQ ID NO: 153976 - DNA, 25 bp, Homo sapien
cttcctgtttccgtgtggaaagtca

SEQ ID NO: 153977 - DNA, 25 bp, Homo sapien
ctgtttccgtgtggaaagtcatcac

SEQ ID NO: 153978 - DNA, 25 bp, Homo sapien
ccttaaacttgaggctgtaatagaa

SEQ ID NO: 153979 - DNA, 25 bp, Homo sapien
gccttgatcaccattactatcctta

SEQ ID NO: 153980 - DNA, 25 bp, Homo sapien
cctgtgtgcagggagaacagccttg

SEQ ID NO: 153981 - DNA, 25 bp, Homo sapien
agctccctgctgtgtaggccattct

SEQ ID NO: 153982 - DNA, 25 bp, Homo sapien
tttggagagcatagagtcggcagtt

SEQ ID NO: 153983 - DNA, 25 bp, Homo sapien
ccttttggagagcatagagtcggca

SEQ ID NO: 153984 - DNA, 25 bp, Homo sapien
cttttggagagcatagagtcggcag

SEQ ID NO: 153985 - DNA, 25 bp, Homo sapien
tcccttttggagagcatagagtcgg

SEQ ID NO: 153986 - DNA, 25 bp, Homo sapien
ggccaggcacgtcccccctgtctcc

SEQ ID NO: 153987 - DNA, 25 bp, Homo sapien
aggccccgcagagcaatgtccatga

SEQ ID NO: 153988 - DNA, 25 bp, Homo sapien
agagcaatgtccatgaggggggcca

SEQ ID NO: 153989 - DNA, 25 bp, Homo sapien
gggccaggcacgtcccccctgtctc

SEQ ID NO: 153990 - DNA, 25 bp, Homo sapien
tctcctttagccttcactgctgggc

SEQ ID NO: 153991 - DNA, 25 bp, Homo sapien
cctttagccttcactgctgggcact

SEQ ID NO: 153992 - DNA, 25 bp, Homo sapien
tgaatttgggttgatgcagcagatg

SEQ ID NO: 153993 - DNA, 25 bp, Homo sapien
gaatttgggttgatgcagcagatgt

SEQ ID NO: 153994 - DNA, 25 bp, Homo sapien
agcaagcaggctctgaacagtggag

SEQ ID NO: 153995 - DNA, 25 bp, Homo sapien
gagcaagcaggctctgaacagtgga

SEQ ID NO: 153996 - DNA, 25 bp, Homo sapien
tgagcaagcaggctctgaacagtgg

SEQ ID NO: 153997 - DNA, 25 bp, Homo sapien
ctgagcaagcaggctctgaacagtg

SEQ ID NO: 153998 - DNA, 25 bp, Homo sapien
gggcaagcccgagttgagccttcct

SEQ ID NO: 153999 - DNA, 25 bp, Homo sapien
tctttactgtctcagaagggcccct

SEQ ID NO: 154000 - DNA, 25 bp, Homo sapien
gcattgaaacttccacgccgaaggg

SEQ ID NO: 154001 - DNA, 25 bp, Homo sapien
tcctgggtgttcgtattttaggctc

SEQ ID NO: 154002 - DNA, 25 bp, Homo sapien
gtcccacacatggaggtgtctgcgt

SEQ ID NO: 154003 - DNA, 25 bp, Homo sapien
tcggttcaccgctccccgaggagaa

SEQ ID NO: 154004 - DNA, 25 bp, Homo sapien
aggtgtctgcgtcggccctcggttc

SEQ ID NO: 154005 - DNA, 25 bp, Homo sapien
gattgtctaatcagtgtcccacaca

SEQ ID NO: 154006 - DNA, 25 bp, Homo sapien
aaattgatttcttgatccccaggca

SEQ ID NO: 154007 - DNA, 25 bp, Homo sapien
caggcacgcatctggagatctgcgg

SEQ ID NO: 154008 - DNA, 25 bp, Homo sapien
tgatccccaggcacgcatctggaga

SEQ ID NO: 154009 - DNA, 25 bp, Homo sapien
tgatttcttgatccccaggcacgca

SEQ ID NO: 154010 - DNA, 25 bp, Homo sapien
gcatctctgtcttgcgcttggatgg

SEQ ID NO: 154011 - DNA, 25 bp, Homo sapien
cctcctctgcttgggcagcaagttt

SEQ ID NO: 154012 - DNA, 25 bp, Homo sapien
tggtttttcctgcagccagattccc

SEQ ID NO: 154013 - DNA, 25 bp, Homo sapien
catggattccccagttctggaactg

SEQ ID NO: 154014 - DNA, 25 bp, Homo sapien
attcacacacaggtgtcccgtggcc

SEQ ID NO: 154015 - DNA, 25 bp, Homo sapien
acatgcttggtggggtttaccctca

SEQ ID NO: 154016 - DNA, 25 bp, Homo sapien
ccagaatccttgtctggggagaaaa

SEQ ID NO: 154017 - DNA, 25 bp, Homo sapien
ctccagaaacgcctacttccacatg

SEQ ID NO: 154018 - DNA, 25 bp, Homo sapien
agaaacgcctacttccacatgcttg

SEQ ID NO: 154019 - DNA, 25 bp, Homo sapien
cacagggcgaaatggtcttggtgaa

SEQ ID NO: 154020 - DNA, 25 bp, Homo sapien
ggtgaagtgtgtattcccatactgg

SEQ ID NO: 154021 - DNA, 25 bp, Homo sapien
ctgccacagggcgaaatggtcttgg

SEQ ID NO: 154022 - DNA, 25 bp, Homo sapien
gtgtattcccatactggcatttggg

SEQ ID NO: 154023 - DNA, 25 bp, Homo sapien
ccgacagcggcttttccaaggcggg

SEQ ID NO: 154024 - DNA, 25 bp, Homo sapien
tcaccgggccgacagcggcttttcc

SEQ ID NO: 154025 - DNA, 25 bp, Homo sapien
ggccgacagcggcttttccaaggcg

SEQ ID NO: 154026 - DNA, 25 bp, Homo sapien
cgggccgacagcggcttttccaagg

SEQ ID NO: 154027 - DNA, 25 bp, Homo sapien
ctctgtaggtagcgcggaaaggcta

SEQ ID NO: 154028 - DNA, 25 bp, Homo sapien
ctgtaggtagcgcggaaaggctatc

SEQ ID NO: 154029 - DNA, 25 bp, Homo sapien
taggtagcgcggaaaggctatcttt

SEQ ID NO: 154030 - DNA, 25 bp, Homo sapien
ggtagcgcggaaaggctatcttttc

SEQ ID NO: 154031 - DNA, 25 bp, Homo sapien
tttgcaggacatcaagcgctccaga

SEQ ID NO: 154032 - DNA, 25 bp, Homo sapien
catttgcaggacatcaagcgctcca

SEQ ID NO: 154033 - DNA, 25 bp, Homo sapien
tcatttgcaggacatcaagcgctcc

SEQ ID NO: 154034 - DNA, 25 bp, Homo sapien
gcaggacatcaagcgctccagacat

SEQ ID NO: 154035 - DNA, 25 bp, Homo sapien
caatagcaataatagcacgagctgc

SEQ ID NO: 154036 - DNA, 25 bp, Homo sapien
gaagccttggctcccagaagtctgc

SEQ ID NO: 154037 - DNA, 25 bp, Homo sapien
tagcaataatagcacgagctgccag

SEQ ID NO: 154038 - DNA, 25 bp, Homo sapien
ttttcaatagcaataatagcacgag

SEQ ID NO: 154039 - DNA, 25 bp, Homo sapien
gacctcccataggtgttcacgagaa

SEQ ID NO: 154040 - DNA, 25 bp, Homo sapien
cataggtgttcacgagaaatggtgc

SEQ ID NO: 154041 - DNA, 25 bp, Homo sapien
cctcccataggtgttcacgagaaat

SEQ ID NO: 154042 - DNA, 25 bp, Homo sapien
cccataggtgttcacgagaaatggt

SEQ ID NO: 154043 - DNA, 25 bp, Homo sapien
ccttggtcactgccttttcagtagc

SEQ ID NO: 154044 - DNA, 25 bp, Homo sapien
gagggcacctgtacaccttcagacc

SEQ ID NO: 154045 - DNA, 25 bp, Homo sapien
cctccttggtcactgccttttcagt

SEQ ID NO: 154046 - DNA, 25 bp, Homo sapien
agggcacctgtacaccttcagacca

SEQ ID NO: 154047 - DNA, 25 bp, Homo sapien
ttccatggcaggctgagcactcctg

SEQ ID NO: 154048 - DNA, 25 bp, Homo sapien
tcttccatggcaggctgagcactcc

SEQ ID NO: 154049 - DNA, 25 bp, Homo sapien
catggcaggctgagcactcctgtct

SEQ ID NO: 154050 - DNA, 25 bp, Homo sapien
tccatggcaggctgagcactcctgt

SEQ ID NO: 154051 - DNA, 25 bp, Homo sapien
attttccgccaatcatttttccgtg

SEQ ID NO: 154052 - DNA, 25 bp, Homo sapien
ccgcatctggcctatattgcgattt

SEQ ID NO: 154053 - DNA, 25 bp, Homo sapien
tttcaatgctatttactatataatc

SEQ ID NO: 154054 - DNA, 25 bp, Homo sapien
caccttcctaccacttattcataat

SEQ ID NO: 154055 - DNA, 25 bp, Homo sapien
ttctctacctttctatggctatcta

SEQ ID NO: 154056 - DNA, 25 bp, Homo sapien
gcccctgtagcatctcttgccagat

SEQ ID NO: 154057 - DNA, 25 bp, Homo sapien
tcctcacacttgcccctgtagcatc

SEQ ID NO: 154058 - DNA, 25 bp, Homo sapien
acacttgcccctgtagcatctcttg

SEQ ID NO: 154059 - DNA, 25 bp, Homo sapien
ttgcccctgtagcatctcttgccag

SEQ ID NO: 154060 - DNA, 25 bp, Homo sapien
aggactcggtgttgccggtggcgca

SEQ ID NO: 154061 - DNA, 25 bp, Homo sapien
agcatgttcagcatcgacaacatcc

SEQ ID NO: 154062 - DNA, 25 bp, Homo sapien
ggccgcgctgcaaggactcggtgtt

SEQ ID NO: 154063 - DNA, 25 bp, Homo sapien
ttcagcatcgacaacatcctagccg

SEQ ID NO: 154064 - DNA, 25 bp, Homo sapien
tgagttcagcgaacgctgcggctag

SEQ ID NO: 154065 - DNA, 25 bp, Homo sapien
tgagctccgtcctacccgcgggttg

SEQ ID NO: 154066 - DNA, 25 bp, Homo sapien
gatgacgtcgactcagtataaaacc

SEQ ID NO: 154067 - DNA, 25 bp, Homo sapien
taaatccaggatgacgtcgactcag

SEQ ID NO: 154068 - DNA, 25 bp, Homo sapien
gcctcccgtggctcgggcaggctgg

SEQ ID NO: 154069 - DNA, 25 bp, Homo sapien
cgctcggccgcctgcttgccgtgag

SEQ ID NO: 154070 - DNA, 25 bp, Homo sapien
ccatgccgagaatcccgcaaatcat

SEQ ID NO: 154071 - DNA, 25 bp, Homo sapien
caggctggccgtgccatgccgagaa

SEQ ID NO: 154072 - DNA, 25 bp, Homo sapien
gcttttgttccgcgcgtaccgtcgc

SEQ ID NO: 154073 - DNA, 25 bp, Homo sapien
gagtggcctgagttgcaagccggga

SEQ ID NO: 154074 - DNA, 25 bp, Homo sapien
cgggagcttgcacccggtccacagg

SEQ ID NO: 154075 - DNA, 25 bp, Homo sapien
tttgttccgcgcgtaccgtcgccta

SEQ ID NO: 154076 - DNA, 25 bp, Homo sapien
gactaaacctccgtgcaatggctct

SEQ ID NO: 154077 - DNA, 25 bp, Homo sapien
taattagcctgagagaaatcgcgaa

SEQ ID NO: 154078 - DNA, 25 bp, Homo sapien
cagtagtgccctcggacaggactaa

SEQ ID NO: 154079 - DNA, 25 bp, Homo sapien
ttacggcggcgacttcagacaactt

SEQ ID NO: 154080 - DNA, 25 bp, Homo sapien
tgagacccatctccgtcatgtccta

SEQ ID NO: 154081 - DNA, 25 bp, Homo sapien
ttacaaccacctctagtttgcgcag

SEQ ID NO: 154082 - DNA, 25 bp, Homo sapien
taccctagacctgacctctctaagg

SEQ ID NO: 154083 - DNA, 25 bp, Homo sapien
gcgcagcactggaaggagcaactct

SEQ ID NO: 154084 - DNA, 25 bp, Homo sapien
caagaacaggacgaggaatctgccc

SEQ ID NO: 154085 - DNA, 25 bp, Homo sapien
caggaaagcacaggcgcagtatagc

SEQ ID NO: 154086 - DNA, 25 bp, Homo sapien
aactgccctgtagctttaaacctgg

SEQ ID NO: 154087 - DNA, 25 bp, Homo sapien
taagttgcagcctctagttgtcgtc

SEQ ID NO: 154088 - DNA, 25 bp, Homo sapien
gggacagcacactcctttgtctcaa

SEQ ID NO: 154089 - DNA, 25 bp, Homo sapien
tctgcggcagcactcgcttttcctt

SEQ ID NO: 154090 - DNA, 25 bp, Homo sapien
ccagctgatgtaggaaccctgtcct

SEQ ID NO: 154091 - DNA, 25 bp, Homo sapien
tcccctagagctccggcagagtgtc

SEQ ID NO: 154092 - DNA, 25 bp, Homo sapien
gggccctgatggtttgtttagcacg

SEQ ID NO: 154093 - DNA, 25 bp, Homo sapien
tgttattccaattgcgccaggcgat

SEQ ID NO: 154094 - DNA, 25 bp, Homo sapien
aggacacttgtgagtttccgcccgc

SEQ ID NO: 154095 - DNA, 25 bp, Homo sapien
tagcaacacgaggtggacaatttgc

SEQ ID NO: 154096 - DNA, 25 bp, Homo sapien
tagaccttatgcatgtggaatccgc

SEQ ID NO: 154097 - DNA, 25 bp, Homo sapien
caatttagtgatgaccgcagtgcaa

SEQ ID NO: 154098 - DNA, 25 bp, Homo sapien
cgcagtgcaaaagcgccgtgacaga

SEQ ID NO: 154099 - DNA, 25 bp, Homo sapien
gtttactgcatttccgacctaagcg

SEQ ID NO: 154100 - DNA, 25 bp, Homo sapien
aggagacccagctctaatgcgcgct

SEQ ID NO: 154101 - DNA, 25 bp, Homo sapien
tgcacatgacacgaaaaatccgact

SEQ ID NO: 154102 - DNA, 25 bp, Homo sapien
taaacgcatccgattgtgaactctg

SEQ ID NO: 154103 - DNA, 25 bp, Homo sapien
tgagggctccgtaccttgaaaagga

SEQ ID NO: 154104 - DNA, 25 bp, Homo sapien
taaatagcccggctgaaatcggatt

SEQ ID NO: 154105 - DNA, 25 bp, Homo sapien
cagatatcagttagcgaagggcttc

SEQ ID NO: 154106 - DNA, 25 bp, Homo sapien
ctgtgacttgcaaaagcaaaggtgc

SEQ ID NO: 154107 - DNA, 25 bp, Homo sapien
gcatttgacccatgacttggctaga

SEQ ID NO: 154108 - DNA, 25 bp, Homo sapien
ggacttgccctgaacagaggctgca

SEQ ID NO: 154109 - DNA, 25 bp, Homo sapien
cacagaagccggtcatcagcagctc

SEQ ID NO: 154110 - DNA, 25 bp, Homo sapien
agggacttgccctgaacagaggctg

SEQ ID NO: 154111 - DNA, 25 bp, Homo sapien
cccagccacagaagccggtcatcag

SEQ ID NO: 154112 - DNA, 25 bp, Homo sapien
tccaggaatgtagttctggctcttc

SEQ ID NO: 154113 - DNA, 25 bp, Homo sapien
gaatgtagttctggctcttccgctc

SEQ ID NO: 154114 - DNA, 25 bp, Homo sapien
ctctccacgggtccaagtttccagg

SEQ ID NO: 154115 - DNA, 25 bp, Homo sapien
tggctcttccgctctccagttgaga

SEQ ID NO: 154116 - DNA, 25 bp, Homo sapien
tatctttgaatgtctgccagatatc

SEQ ID NO: 154117 - DNA, 25 bp, Homo sapien
ctgccagatatcctaaaacagtatc

SEQ ID NO: 154118 - DNA, 25 bp, Homo sapien
tcagtcagacacaaatatctttgaa

SEQ ID NO: 154119 - DNA, 25 bp, Homo sapien
tgtctgccagatatcctaaaacagt

SEQ ID NO: 154120 - DNA, 25 bp, Homo sapien
acctgagtgttctccatggcagtag

SEQ ID NO: 154121 - DNA, 25 bp, Homo sapien
caatggaatcaccaagtccacagct

SEQ ID NO: 154122 - DNA, 25 bp, Homo sapien
tggcagtagacttccccaatggaat

SEQ ID NO: 154123 - DNA, 25 bp, Homo sapien
gacttccccaatggaatcaccaagt

SEQ ID NO: 154124 - DNA, 25 bp, Homo sapien
tgtcaacatggagtctgcctccacc

SEQ ID NO: 154125 - DNA, 25 bp, Homo sapien
gtcaacatggagtctgcctccacct

SEQ ID NO: 154126 - DNA, 25 bp, Homo sapien
tcaacatggagtctgcctccacctc

SEQ ID NO: 154127 - DNA, 25 bp, Homo sapien
tgttaccggactccatgttggtgag

SEQ ID NO: 154128 - DNA, 25 bp, Homo sapien
gctgctctgagaagcaataccctga

SEQ ID NO: 154129 - DNA, 25 bp, Homo sapien
tgagagagggcatctaagctcgacc

SEQ ID NO: 154130 - DNA, 25 bp, Homo sapien
aataccctgaagaagggacatccga

SEQ ID NO: 154131 - DNA, 25 bp, Homo sapien
tctggactccatcagtcgggcaaaa

SEQ ID NO: 154132 - DNA, 25 bp, Homo sapien
gttcccagaaggttcaagctgaaag

SEQ ID NO: 154133 - DNA, 25 bp, Homo sapien
aaaatagtgctactacctgccacgg

SEQ ID NO: 154134 - DNA, 25 bp, Homo sapien
gaaatgtcatgtggagctgcaaacc

SEQ ID NO: 154135 - DNA, 25 bp, Homo sapien
actagaaatccgtgtagcagccccg

SEQ ID NO: 154136 - DNA, 25 bp, Homo sapien
ccttttgtagtacaggtgtctgcca

SEQ ID NO: 154137 - DNA, 25 bp, Homo sapien
ggcccctgtgcggtatggaatcttg

SEQ ID NO: 154138 - DNA, 25 bp, Homo sapien
tagacggctccctaacagtgtgtag

SEQ ID NO: 154139 - DNA, 25 bp, Homo sapien
caacaactgagaacaggtcgaaata

SEQ ID NO: 154140 - DNA, 25 bp, Homo sapien
tcaggcatcaacaactgagaacagg

SEQ ID NO: 154141 - DNA, 25 bp, Homo sapien
caggtcgaaataggcccgctcctgg

SEQ ID NO: 154142 - DNA, 25 bp, Homo sapien
tgagaacaggtcgaaataggcccgc

SEQ ID NO: 154143 - DNA, 25 bp, Homo sapien
aagtctggccagaccccttgctgtg

SEQ ID NO: 154144 - DNA, 25 bp, Homo sapien
agaatggatggcacgactcctccga

SEQ ID NO: 154145 - DNA, 25 bp, Homo sapien
gatagcggggcatgtcaaaggcttc

SEQ ID NO: 154146 - DNA, 25 bp, Homo sapien
tgtgctgcatggaggactctaagtt

SEQ ID NO: 154147 - DNA, 25 bp, Homo sapien
gattctgcatgcattaattaccatg

SEQ ID NO: 154148 - DNA, 25 bp, Homo sapien
aggtcagtgtagtgattctgcatgc

SEQ ID NO: 154149 - DNA, 25 bp, Homo sapien
taattaccatgagcctcccaatgat

SEQ ID NO: 154150 - DNA, 25 bp, Homo sapien
attaattaccatgagcctcccaatg

SEQ ID NO: 154151 - DNA, 25 bp, Homo sapien
gtgatgctctcatgacgttgaccat

SEQ ID NO: 154152 - DNA, 25 bp, Homo sapien
tttgtgatgctctcatgacgttgac

SEQ ID NO: 154153 - DNA, 25 bp, Homo sapien
tgtgatgctctcatgacgttgacca

SEQ ID NO: 154154 - DNA, 25 bp, Homo sapien
tctttgtgatgctctcatgacgttg

SEQ ID NO: 154155 - DNA, 25 bp, Homo sapien
acatgccctctcgctcaagagccat

SEQ ID NO: 154156 - DNA, 25 bp, Homo sapien
tcacacatgccctctcgctcaagag

SEQ ID NO: 154157 - DNA, 25 bp, Homo sapien
ctcacacatgccctctcgctcaaga

SEQ ID NO: 154158 - DNA, 25 bp, Homo sapien
acacatgccctctcgctcaagagcc

SEQ ID NO: 154159 - DNA, 25 bp, Homo sapien
gtgacacctcggtgacgcaggcctg

SEQ ID NO: 154160 - DNA, 25 bp, Homo sapien
cgctgattgccaccgcccggtggat

SEQ ID NO: 154161 - DNA, 25 bp, Homo sapien
gatgagatggtctgctacacaggca

SEQ ID NO: 154162 - DNA, 25 bp, Homo sapien
gatggcctcagctaaatccccgctg

SEQ ID NO: 154163 - DNA, 25 bp, Homo sapien
cctggcattcgcagggcacctgccg

SEQ ID NO: 154164 - DNA, 25 bp, Homo sapien
cagaccttctgaccagccttacaaa

SEQ ID NO: 154165 - DNA, 25 bp, Homo sapien
gcacctgccgccacagaccttctga

SEQ ID NO: 154166 - DNA, 25 bp, Homo sapien
ggctttctccatggcgcctggcatt

SEQ ID NO: 154167 - DNA, 25 bp, Homo sapien
gcatccagagtgtctcgcagtcata

SEQ ID NO: 154168 - DNA, 25 bp, Homo sapien
atccagagtgtctcgcagtcatatg

SEQ ID NO: 154169 - DNA, 25 bp, Homo sapien
tcgcagtcatatgggagtgatttgg

SEQ ID NO: 154170 - DNA, 25 bp, Homo sapien
tcccccgttgccaggggcatccaga

SEQ ID NO: 154171 - DNA, 25 bp, Homo sapien
cctgtgggaacccctcacttccctg

SEQ ID NO: 154172 - DNA, 25 bp, Homo sapien
tgtgggaacccctcacttccctgga

SEQ ID NO: 154173 - DNA, 25 bp, Homo sapien
ccctggaccactctggctcttcagg

SEQ ID NO: 154174 - DNA, 25 bp, Homo sapien
tcacttccctggaccactctggctc

SEQ ID NO: 154175 - DNA, 25 bp, Homo sapien
tgtcctgccctttcgcaggaaggtg

SEQ ID NO: 154176 - DNA, 25 bp, Homo sapien
cctttcgcaggaaggtgctaggctg

SEQ ID NO: 154177 - DNA, 25 bp, Homo sapien
taggctgccgagaagaacgatgcgt

SEQ ID NO: 154178 - DNA, 25 bp, Homo sapien
agaacgatgcgtggagagctgacca

SEQ ID NO: 154179 - DNA, 25 bp, Homo sapien
tcccatccaaaagcatgatagcagt

SEQ ID NO: 154180 - DNA, 25 bp, Homo sapien
ctcccatccaaaagcatgatagcag

SEQ ID NO: 154181 - DNA, 25 bp, Homo sapien
ccatccaaaagcatgatagcagtta

SEQ ID NO: 154182 - DNA, 25 bp, Homo sapien
cccatccaaaagcatgatagcagtt

SEQ ID NO: 154183 - DNA, 25 bp, Homo sapien
tgggctccggttacctctaatgagg

SEQ ID NO: 154184 - DNA, 25 bp, Homo sapien
tcagcatattcttcccgagtgcgtc

SEQ ID NO: 154185 - DNA, 25 bp, Homo sapien
gcagacttgtttccaggatgattaa

SEQ ID NO: 154186 - DNA, 25 bp, Homo sapien
tcccgagtgcgtcccgtcttagtgg

SEQ ID NO: 154187 - DNA, 25 bp, Homo sapien
tggtgcccacccatgcgtcttcctc

SEQ ID NO: 154188 - DNA, 25 bp, Homo sapien
gcccacccatgcgtcttcctcacag

SEQ ID NO: 154189 - DNA, 25 bp, Homo sapien
agcccacttggtgcccacccatgcg

SEQ ID NO: 154190 - DNA, 25 bp, Homo sapien
cacttggtgcccacccatgcgtctt

SEQ ID NO: 154191 - DNA, 25 bp, Homo sapien
aagggtctctttccagttataggca

SEQ ID NO: 154192 - DNA, 25 bp, Homo sapien
tgactctgccgactccttttcaggg

SEQ ID NO: 154193 - DNA, 25 bp, Homo sapien
gccaggacaccatcacgtgacgtta

SEQ ID NO: 154194 - DNA, 25 bp, Homo sapien
ggcaccataatcagcatcgggcttg

SEQ ID NO: 154195 - DNA, 25 bp, Homo sapien
cactctagttcaaactttgtttcac

SEQ ID NO: 154196 - DNA, 25 bp, Homo sapien
tcttatacaataggctgccaatgtc

SEQ ID NO: 154197 - DNA, 25 bp, Homo sapien
ggaaattaagttcactctagttcaa

SEQ ID NO: 154198 - DNA, 25 bp, Homo sapien
aaggacgttatagcagaattggagg

SEQ ID NO: 154199 - DNA, 25 bp, Homo sapien
caggtaacctgatgttgacggcaat

SEQ ID NO: 154200 - DNA, 25 bp, Homo sapien
tgttttccaagtggcttgttcctca

SEQ ID NO: 154201 - DNA, 25 bp, Homo sapien
aatgttgttctagagggagtgtgtc

SEQ ID NO: 154202 - DNA, 25 bp, Homo sapien
tgaggcaatgtatgtgtcattctgc

SEQ ID NO: 154203 - DNA, 25 bp, Homo sapien
tctgtgcgctcccaccaaacgctaa

SEQ ID NO: 154204 - DNA, 25 bp, Homo sapien
ttgggggcttctgtgcgctcccacc

SEQ ID NO: 154205 - DNA, 25 bp, Homo sapien
ggcttctgtgcgctcccaccaaacg

SEQ ID NO: 154206 - DNA, 25 bp, Homo sapien
gggggcttctgtgcgctcccaccaa

SEQ ID NO: 154207 - DNA, 25 bp, Homo sapien
gatgttgctgtcgagtttttcaagc

SEQ ID NO: 154208 - DNA, 25 bp, Homo sapien
tatggaggtgtaatcttgaaaactt

SEQ ID NO: 154209 - DNA, 25 bp, Homo sapien
aagcacctcatctccgatgttgctg

SEQ ID NO: 154210 - DNA, 25 bp, Homo sapien
tcaagcagtttgacgtgaaggactt

SEQ ID NO: 154211 - DNA, 25 bp, Homo sapien
ttggggaacaccagttgtgtctgca

SEQ ID NO: 154212 - DNA, 25 bp, Homo sapien
cttggggaacaccagttgtgtctgc

SEQ ID NO: 154213 - DNA, 25 bp, Homo sapien
tggggaacaccagttgtgtctgcat

SEQ ID NO: 154214 - DNA, 25 bp, Homo sapien
tccgagactttggtgcgtccatcac

SEQ ID NO: 154215 - DNA, 25 bp, Homo sapien
tttcctgtaggtggatacccagtat

SEQ ID NO: 154216 - DNA, 25 bp, Homo sapien
ctgtaggtggatacccagtatggga

SEQ ID NO: 154217 - DNA, 25 bp, Homo sapien
tgatttccgagactttggtgcgtcc

SEQ ID NO: 154218 - DNA, 25 bp, Homo sapien
tgacatgaacacatttgggcactgt

SEQ ID NO: 154219 - DNA, 25 bp, Homo sapien
acacatttgggcactgtatcttttc

SEQ ID NO: 154220 - DNA, 25 bp, Homo sapien
ggactcgaggtccttctttgacatg

SEQ ID NO: 154221 - DNA, 25 bp, Homo sapien
catgaacacatttgggcactgtatc

SEQ ID NO: 154222 - DNA, 25 bp, Homo sapien
tagtgaattttatgagcgtatagtg

SEQ ID NO: 154223 - DNA, 25 bp, Homo sapien
tgaattttatgagcgtatagtggtt

SEQ ID NO: 154224 - DNA, 25 bp, Homo sapien
tatgagcgtatagtggtttgattca

SEQ ID NO: 154225 - DNA, 25 bp, Homo sapien
ttttatgagcgtatagtggtttgat

SEQ ID NO: 154226 - DNA, 25 bp, Homo sapien
tcacagaactccttcttgcctggtt

SEQ ID NO: 154227 - DNA, 25 bp, Homo sapien
ggactggtgttccatgggacatgca

SEQ ID NO: 154228 - DNA, 25 bp, Homo sapien
gagagtcttattagagcctctgtac

SEQ ID NO: 154229 - DNA, 25 bp, Homo sapien
acttcagacgaagtagtgacagggt

SEQ ID NO: 154230 - DNA, 25 bp, Homo sapien
ttatttcaatagctagtcgctgtgc

SEQ ID NO: 154231 - DNA, 25 bp, Homo sapien
aaagcgcatagcgtgtgattctttc

SEQ ID NO: 154232 - DNA, 25 bp, Homo sapien
gctgtgctagttcccaggccttcaa

SEQ ID NO: 154233 - DNA, 25 bp, Homo sapien
ccagtaaagcgcatagcgtgtgatt

SEQ ID NO: 154234 - DNA, 25 bp, Homo sapien
tcggaacagtcagctcaaggtacat

SEQ ID NO: 154235 - DNA, 25 bp, Homo sapien
tcggccttgcatcggaacagtcagc

SEQ ID NO: 154236 - DNA, 25 bp, Homo sapien
tgtttaagccgtcggccttgcatcg

SEQ ID NO: 154237 - DNA, 25 bp, Homo sapien
ttgacaattcggaatgaaacttggg

SEQ ID NO: 154238 - DNA, 25 bp, Homo sapien
ggttgaaagttcccattacagcttc

SEQ ID NO: 154239 - DNA, 25 bp, Homo sapien
agttcccattacagcttcatgaagc

SEQ ID NO: 154240 - DNA, 25 bp, Homo sapien
gaaagttcccattacagcttcatga

SEQ ID NO: 154241 - DNA, 25 bp, Homo sapien
tgaaagttcccattacagcttcatg

SEQ ID NO: 154242 - DNA, 25 bp, Homo sapien
ctttcatggcttctgagctgggcac

SEQ ID NO: 154243 - DNA, 25 bp, Homo sapien
ttcatggcttctgagctgggcactc

SEQ ID NO: 154244 - DNA, 25 bp, Homo sapien
ttagctttcatggcttctgagctgg

SEQ ID NO: 154245 - DNA, 25 bp, Homo sapien
agctttcatggcttctgagctgggc

SEQ ID NO: 154246 - DNA, 25 bp, Homo sapien
tatcgggcctgaagacaagtgtctc

SEQ ID NO: 154247 - DNA, 25 bp, Homo sapien
tgacttgcatccgaatcaggcccgg

SEQ ID NO: 154248 - DNA, 25 bp, Homo sapien
tgaactccggcgctgtgacttgcat

SEQ ID NO: 154249 - DNA, 25 bp, Homo sapien
gaaattaacgccacgaacagagtga

SEQ ID NO: 154250 - DNA, 25 bp, Homo sapien
ctgccaatgtcaaatccagtctccc

SEQ ID NO: 154251 - DNA, 25 bp, Homo sapien
tgccaatgtcaaatccagtctcccc

SEQ ID NO: 154252 - DNA, 25 bp, Homo sapien
ggatcaggctgccttgattggcact

SEQ ID NO: 154253 - DNA, 25 bp, Homo sapien
ggtccatggctctgtgtcatttgta

SEQ ID NO: 154254 - DNA, 25 bp, Homo sapien
ccatgggaacagtgggactggtcca

SEQ ID NO: 154255 - DNA, 25 bp, Homo sapien
catgggaacagtgggactggtccat

SEQ ID NO: 154256 - DNA, 25 bp, Homo sapien
ggctgagaagtagccatctggggca

SEQ ID NO: 154257 - DNA, 25 bp, Homo sapien
ccctgatgatgtgtggcgagcccac

SEQ ID NO: 154258 - DNA, 25 bp, Homo sapien
gtttgaccccgatcctcaggacaca

SEQ ID NO: 154259 - DNA, 25 bp, Homo sapien
taaatacatcagcacgtctcaggaa

SEQ ID NO: 154260 - DNA, 25 bp, Homo sapien
tcaggactccgaatggctgctctgt

SEQ ID NO: 154261 - DNA, 25 bp, Homo sapien
gcagaattaacaatcctccacgtgg

SEQ ID NO: 154262 - DNA, 25 bp, Homo sapien
atgtaatcaaacacccctgagtcag

SEQ ID NO: 154263 - DNA, 25 bp, Homo sapien
cctgagtcagacatcgcagaattaa

SEQ ID NO: 154264 - DNA, 25 bp, Homo sapien
tacatcatgtgtcaccctgttggtg

SEQ ID NO: 154265 - DNA, 25 bp, Homo sapien
agtgaaagcctcttgtactggcagt

SEQ ID NO: 154266 - DNA, 25 bp, Homo sapien
aagcctcttgtactggcagtctcct

SEQ ID NO: 154267 - DNA, 25 bp, Homo sapien
tgaaagcctcttgtactggcagtct

SEQ ID NO: 154268 - DNA, 25 bp, Homo sapien
gggagtgaaagcctcttgtactggc

SEQ ID NO: 154269 - DNA, 25 bp, Homo sapien
aaaatgcacccaacaggctacagcc

SEQ ID NO: 154270 - DNA, 25 bp, Homo sapien
tatcagcggggagcatagaacagag

SEQ ID NO: 154271 - DNA, 25 bp, Homo sapien
atgctctaccagaggtatcagcggg

SEQ ID NO: 154272 - DNA, 25 bp, Homo sapien
aggctacagcccagtaggtgaatgc

SEQ ID NO: 154273 - DNA, 25 bp, Homo sapien
tcctgagctttgtgctggaaattga

SEQ ID NO: 154274 - DNA, 25 bp, Homo sapien
gtcctgagctttgtgctggaaattg

SEQ ID NO: 154275 - DNA, 25 bp, Homo sapien
ggttttttaatacacaccagtgctg

SEQ ID NO: 154276 - DNA, 25 bp, Homo sapien
taccgagtgaatgcagtacagcagg

SEQ ID NO: 154277 - DNA, 25 bp, Homo sapien
tttgaaatggagtcactaccgagtg

SEQ ID NO: 154278 - DNA, 25 bp, Homo sapien
gatgaactcttgcaatgggcagacg

SEQ ID NO: 154279 - DNA, 25 bp, Homo sapien
caccttgttctgtgcggttagatat

SEQ ID NO: 154280 - DNA, 25 bp, Homo sapien
tctgaggagattagtgtcatggcca

SEQ ID NO: 154281 - DNA, 25 bp, Homo sapien
gatattttgtataatgcagccctca

SEQ ID NO: 154282 - DNA, 25 bp, Homo sapien
gctgtccttgtcaccttgttctgtg

SEQ ID NO: 154283 - DNA, 25 bp, Homo sapien
cagctgattggaaaacagggcacag

SEQ ID NO: 154284 - DNA, 25 bp, Homo sapien
tgattggaaaacagggcacaggctt

SEQ ID NO: 154285 - DNA, 25 bp, Homo sapien
gctgattggaaaacagggcacaggc

SEQ ID NO: 154286 - DNA, 25 bp, Homo sapien
tcagctgattggaaaacagggcaca

SEQ ID NO: 154287 - DNA, 25 bp, Homo sapien
gaccttctgggtccctccaaatgtc

SEQ ID NO: 154288 - DNA, 25 bp, Homo sapien
aagaagtgagggccgtggtttccat

SEQ ID NO: 154289 - DNA, 25 bp, Homo sapien
ccttctgggtccctccaaatgtcca

SEQ ID NO: 154290 - DNA, 25 bp, Homo sapien
cttctgggtccctccaaatgtccac

SEQ ID NO: 154291 - DNA, 25 bp, Homo sapien
atgactcttactggttctggaattc

SEQ ID NO: 154292 - DNA, 25 bp, Homo sapien
cctggatgactcttactggttctgg

SEQ ID NO: 154293 - DNA, 25 bp, Homo sapien
gatgactcttactggttctggaatt

SEQ ID NO: 154294 - DNA, 25 bp, Homo sapien
agcttcactgtagcagggcccagga

SEQ ID NO: 154295 - DNA, 25 bp, Homo sapien
ttcactgtagcagggcccaggaact

SEQ ID NO: 154296 - DNA, 25 bp, Homo sapien
tcactgtagcagggcccaggaactc

SEQ ID NO: 154297 - DNA, 25 bp, Homo sapien
cttcactgtagcagggcccaggaac

SEQ ID NO: 154298 - DNA, 25 bp, Homo sapien
catgccagggagtataggagatgca

SEQ ID NO: 154299 - DNA, 25 bp, Homo sapien
ctgggtcatggctttctcaggtgtg

SEQ ID NO: 154300 - DNA, 25 bp, Homo sapien
caggtgtgtttgtgtccagcaagca

SEQ ID NO: 154301 - DNA, 25 bp, Homo sapien
tgtgtccagcaagcatgccagggag

SEQ ID NO: 154302 - DNA, 25 bp, Homo sapien
gacatgcagagctttgcagtcagac

SEQ ID NO: 154303 - DNA, 25 bp, Homo sapien
taacggagacatgcagagctttgca

SEQ ID NO: 154304 - DNA, 25 bp, Homo sapien
ctgcataacggagacatgcagagct

SEQ ID NO: 154305 - DNA, 25 bp, Homo sapien
ggagacatgcagagctttgcagtca

SEQ ID NO: 154306 - DNA, 25 bp, Homo sapien
tgttgctataatgagcgggctggtt

SEQ ID NO: 154307 - DNA, 25 bp, Homo sapien
tgtgttgctataatgagcgggctgg

SEQ ID NO: 154308 - DNA, 25 bp, Homo sapien
gcgggctggttggagtgaatggtcc

SEQ ID NO: 154309 - DNA, 25 bp, Homo sapien
ctggttggagtgaatggtccgagct

SEQ ID NO: 154310 - DNA, 25 bp, Homo sapien
tcagtgcacctgtcatgttatcagc

SEQ ID NO: 154311 - DNA, 25 bp, Homo sapien
agaccaggtcattcctcagtgcacc

SEQ ID NO: 154312 - DNA, 25 bp, Homo sapien
tggcgctccatgcaaaccacttggg

SEQ ID NO: 154313 - DNA, 25 bp, Homo sapien
ttctttacatccctggcgctccatg

SEQ ID NO: 154314 - DNA, 25 bp, Homo sapien
gagccgcggtctaattggatccagg

SEQ ID NO: 154315 - DNA, 25 bp, Homo sapien
gatggcttttcagcgcaacctcaga

SEQ ID NO: 154316 - DNA, 25 bp, Homo sapien
tcagacccgctgagccgcggtctaa

SEQ ID NO: 154317 - DNA, 25 bp, Homo sapien
ctgatggcttttcagcgcaacctca

SEQ ID NO: 154318 - DNA, 25 bp, Homo sapien
ggtcccaggctagtactaaaatgtc

SEQ ID NO: 154319 - DNA, 25 bp, Homo sapien
tgtcagagggcccaagccaagagtt

SEQ ID NO: 154320 - DNA, 25 bp, Homo sapien
tattctgcttgctgtaaaaacaaag

SEQ ID NO: 154321 - DNA, 25 bp, Homo sapien
gtactaaaatgtctgtcactcagca

SEQ ID NO: 154322 - DNA, 25 bp, Homo sapien
ggattgggcgttcacacttactcat

SEQ ID NO: 154323 - DNA, 25 bp, Homo sapien
ttggattgggcgttcacacttactc

SEQ ID NO: 154324 - DNA, 25 bp, Homo sapien
ccccacagtttggattgggcgttca

SEQ ID NO: 154325 - DNA, 25 bp, Homo sapien
gccccacagtttggattgggcgttc

SEQ ID NO: 154326 - DNA, 25 bp, Homo sapien
gtgtcacagcctcctaacgggtctt

SEQ ID NO: 154327 - DNA, 25 bp, Homo sapien
tggtataaggtaatggtccagcctc

SEQ ID NO: 154328 - DNA, 25 bp, Homo sapien
tgtcagtcgtccgtcagcaaattct

SEQ ID NO: 154329 - DNA, 25 bp, Homo sapien
tgaaatggtgctctgcaaacagtcc

SEQ ID NO: 154330 - DNA, 25 bp, Homo sapien
cattcatacagtaatcatgctgcag

SEQ ID NO: 154331 - DNA, 25 bp, Homo sapien
taaggaacatgatgtcattcattca

SEQ ID NO: 154332 - DNA, 25 bp, Homo sapien
tgcatattatttgattgacaataaa

SEQ ID NO: 154333 - DNA, 25 bp, Homo sapien
tagtgaaggaaaattactaaaatca

SEQ ID NO: 154334 - DNA, 25 bp, Homo sapien
ggtgaacaggaagtaaatttctggc

SEQ ID NO: 154335 - DNA, 25 bp, Homo sapien
tgcaaaggtgaacaggaagtaaatt

SEQ ID NO: 154336 - DNA, 25 bp, Homo sapien
ctgcagcagcaggttacatagcaaa

SEQ ID NO: 154337 - DNA, 25 bp, Homo sapien
cactgcagcagcaggttacatagca

SEQ ID NO: 154338 - DNA, 25 bp, Homo sapien
tgatttttcacaactaacttgtaaa

SEQ ID NO: 154339 - DNA, 25 bp, Homo sapien
gatatgtttaagaccaagactatta

SEQ ID NO: 154340 - DNA, 25 bp, Homo sapien
gagacgccaatagcaatatctagga

SEQ ID NO: 154341 - DNA, 25 bp, Homo sapien
ttttatttggacatcaaccacagac

SEQ ID NO: 154342 - DNA, 25 bp, Homo sapien
gattgaagccaccaaactgagacct

SEQ ID NO: 154343 - DNA, 25 bp, Homo sapien
tgacaacatgaaacttgaggctgct

SEQ ID NO: 154344 - DNA, 25 bp, Homo sapien
ggcactgcagaggatcactggaatc

SEQ ID NO: 154345 - DNA, 25 bp, Homo sapien
gaatccagatcgagcgcagttcatg

SEQ ID NO: 154346 - DNA, 25 bp, Homo sapien
cctgtgattgcaatgtgagaccgaa

SEQ ID NO: 154347 - DNA, 25 bp, Homo sapien
gctttccgcagtcctaactatgctg

SEQ ID NO: 154348 - DNA, 25 bp, Homo sapien
tgtaatatggaaaacctaccagtgg

SEQ ID NO: 154349 - DNA, 25 bp, Homo sapien
tatgttgccccactttagagccctg

SEQ ID NO: 154350 - DNA, 25 bp, Homo sapien
taaaagctgtgggtcagtcttgcac

SEQ ID NO: 154351 - DNA, 25 bp, Homo sapien
cagaggtgtctcatatttcccagca

SEQ ID NO: 154352 - DNA, 25 bp, Homo sapien
tgcgagtgcaccgacagaaaactgt

SEQ ID NO: 154353 - DNA, 25 bp, Homo sapien
tcccatcaacataccagtagaggtt

SEQ ID NO: 154354 - DNA, 25 bp, Homo sapien
attttactaaagtcctcctgccagg

SEQ ID NO: 154355 - DNA, 25 bp, Homo sapien
ttatgcattagacgttgagacagcg

SEQ ID NO: 154356 - DNA, 25 bp, Homo sapien
caaagctgtgctgttaatgccgtga

SEQ ID NO: 154357 - DNA, 25 bp, Homo sapien
tcctgccaggtagttcccactgatg

SEQ ID NO: 154358 - DNA, 25 bp, Homo sapien
catctctccgtgtgtgcagtagtgc

SEQ ID NO: 154359 - DNA, 25 bp, Homo sapien
ttttcgagaggagaagtgcgccaat

SEQ ID NO: 154360 - DNA, 25 bp, Homo sapien
ccagtcctgcagtagttgataagct

SEQ ID NO: 154361 - DNA, 25 bp, Homo sapien
tgtaaggtgatgttcccggtcgctg

SEQ ID NO: 154362 - DNA, 25 bp, Homo sapien
gaattcctgggagatgcgattttgg

SEQ ID NO: 154363 - DNA, 25 bp, Homo sapien
gatgcgattttggactacctcataa

SEQ ID NO: 154364 - DNA, 25 bp, Homo sapien
tgttaccagcgcttagaattcctgg

SEQ ID NO: 154365 - DNA, 25 bp, Homo sapien
taccagcgcttagaattcctgggag

SEQ ID NO: 154366 - DNA, 25 bp, Homo sapien
atagcggactgtgtggaagccctgc

SEQ ID NO: 154367 - DNA, 25 bp, Homo sapien
cctactcgggagaatttcaacagcc

SEQ ID NO: 154368 - DNA, 25 bp, Homo sapien
tatctggatcctagcaaagctgttg

SEQ ID NO: 154369 - DNA, 25 bp, Homo sapien
actgatcgggaaaaggccctgtgcc

SEQ ID NO: 154370 - DNA, 25 bp, Homo sapien
acactttcctgtgtacacacgctct

SEQ ID NO: 154371 - DNA, 25 bp, Homo sapien
actttcctgtgtacacacgctctgg

SEQ ID NO: 154372 - DNA, 25 bp, Homo sapien
tttcctgtgtacacacgctctggag

SEQ ID NO: 154373 - DNA, 25 bp, Homo sapien
tcctgtgtacacacgctctggagag

SEQ ID NO: 154374 - DNA, 25 bp, Homo sapien
ctcaactttagaaggcggaagctct

SEQ ID NO: 154375 - DNA, 25 bp, Homo sapien
caagatgctttggaatactgacggc

SEQ ID NO: 154376 - DNA, 25 bp, Homo sapien
cctttacctgatgaactcaacttta

SEQ ID NO: 154377 - DNA, 25 bp, Homo sapien
tgataggaatggttttaactacacc

SEQ ID NO: 154378 - DNA, 25 bp, Homo sapien
gaccaggttccacgaaacgaaggca

SEQ ID NO: 154379 - DNA, 25 bp, Homo sapien
gaatttgcagtccagctcatattgg

SEQ ID NO: 154380 - DNA, 25 bp, Homo sapien
aatttgttaggcgaactggatgacc

SEQ ID NO: 154381 - DNA, 25 bp, Homo sapien
gactttgcctgaagtgtgaatctga

SEQ ID NO: 154382 - DNA, 25 bp, Homo sapien
tgttgggtatttacatcacggccct

SEQ ID NO: 154383 - DNA, 25 bp, Homo sapien
gatgtgttgggtatttacatcacgg

SEQ ID NO: 154384 - DNA, 25 bp, Homo sapien
aggagaagatgtgttgggtatttac

SEQ ID NO: 154385 - DNA, 25 bp, Homo sapien
gtatttacatcacggccctcttttc

SEQ ID NO: 154386 - DNA, 25 bp, Homo sapien
gatccacatacttgagtgaggttgg

SEQ ID NO: 154387 - DNA, 25 bp, Homo sapien
tgtaggaataggatccacatacttg

SEQ ID NO: 154388 - DNA, 25 bp, Homo sapien
ttggtgtcttgaggtgaaaccgggc

SEQ ID NO: 154389 - DNA, 25 bp, Homo sapien
ctgctggtttgtaggaataggatcc

SEQ ID NO: 154390 - DNA, 25 bp, Homo sapien
caaggctgtaatgtgctctgatggt

SEQ ID NO: 154391 - DNA, 25 bp, Homo sapien
ctctgatggtgcctgtaaatagaca

SEQ ID NO: 154392 - DNA, 25 bp, Homo sapien
taaaattctagcactcgttgcacag

SEQ ID NO: 154393 - DNA, 25 bp, Homo sapien
cagtgttaagagtaaagtatgtgcc

SEQ ID NO: 154394 - DNA, 25 bp, Homo sapien
tcttgagggagatggcaataacagc

SEQ ID NO: 154395 - DNA, 25 bp, Homo sapien
ggtgttgtagctagcccatgtgtgc

SEQ ID NO: 154396 - DNA, 25 bp, Homo sapien
ggcgaactctgttggtacacacttg

SEQ ID NO: 154397 - DNA, 25 bp, Homo sapien
taacatgagatgttgcgcagaagct

SEQ ID NO: 154398 - DNA, 25 bp, Homo sapien
gggacgaggcgacggcgagcgcgag

SEQ ID NO: 154399 - DNA, 25 bp, Homo sapien
cctgggctgtgacgcgcgcgccgga

SEQ ID NO: 154400 - DNA, 25 bp, Homo sapien
gagcggggtccgatggttctcgaag

SEQ ID NO: 154401 - DNA, 25 bp, Homo sapien
gacggcgagcgcgaggaaatggcgg

SEQ ID NO: 154402 - DNA, 25 bp, Homo sapien
ttgccgcgggccgtgcgctggctgc

SEQ ID NO: 154403 - DNA, 25 bp, Homo sapien
tccaagcggctgtgcgccgttgccg

SEQ ID NO: 154404 - DNA, 25 bp, Homo sapien
cagtgggattctccaagcggctgtg

SEQ ID NO: 154405 - DNA, 25 bp, Homo sapien
ggcggtgcgggagccagtgggattc

SEQ ID NO: 154406 - DNA, 25 bp, Homo sapien
gtctgccaaacttagccggcctcgg

SEQ ID NO: 154407 - DNA, 25 bp, Homo sapien
caatggaggcagtcgaattccgaga

SEQ ID NO: 154408 - DNA, 25 bp, Homo sapien
tctgtgggtgccagaaggagcaaca

SEQ ID NO: 154409 - DNA, 25 bp, Homo sapien
aattccgagagctcagagagtctgc

SEQ ID NO: 154410 - DNA, 25 bp, Homo sapien
cgcggttccgacctatgcaaatgaa

SEQ ID NO: 154411 - DNA, 25 bp, Homo sapien
gctctccgggaaacaattacggcca

SEQ ID NO: 154412 - DNA, 25 bp, Homo sapien
gcttcaagctgtggtgcgcggttcc

SEQ ID NO: 154413 - DNA, 25 bp, Homo sapien
tgctcagagggaagctaagctctcc

SEQ ID NO: 154414 - DNA, 25 bp, Homo sapien
gcaaaccggcctatcagggggtcca

SEQ ID NO: 154415 - DNA, 25 bp, Homo sapien
tatcagggggtccactgaagagatg

SEQ ID NO: 154416 - DNA, 25 bp, Homo sapien
ctggagcaaaccggcctatcagggg

SEQ ID NO: 154417 - DNA, 25 bp, Homo sapien
accggcctatcagggggtccactga

SEQ ID NO: 154418 - DNA, 25 bp, Homo sapien
tgctcacgcccatggtctgaaagaa

SEQ ID NO: 154419 - DNA, 25 bp, Homo sapien
tgcccaatggcaatataatgcaggc

SEQ ID NO: 154420 - DNA, 25 bp, Homo sapien
tacctcacagggtgcacctaaggat

SEQ ID NO: 154421 - DNA, 25 bp, Homo sapien
ccatactttaagtgctcaggagcca

SEQ ID NO: 154422 - DNA, 25 bp, Homo sapien
gacggatgacaaggtcagaaatcga

SEQ ID NO: 154423 - DNA, 25 bp, Homo sapien
tcttcgtctgttaaaacaggaagca

SEQ ID NO: 154424 - DNA, 25 bp, Homo sapien
cggatgacaaggtcagaaatcgaga

SEQ ID NO: 154425 - DNA, 25 bp, Homo sapien
acggatgacaaggtcagaaatcgag

SEQ ID NO: 154426 - DNA, 25 bp, Homo sapien
tgctgatggaacaagcagcctggct

SEQ ID NO: 154427 - DNA, 25 bp, Homo sapien
taaaggtatgacatgctcaccgtgc

SEQ ID NO: 154428 - DNA, 25 bp, Homo sapien
gaatgagcaggaaacagtggtcacc

SEQ ID NO: 154429 - DNA, 25 bp, Homo sapien
taaaggcttatcagggagtccaccg

SEQ ID NO: 154430 - DNA, 25 bp, Homo sapien
gaccttctcactggttaggcctagg

SEQ ID NO: 154431 - DNA, 25 bp, Homo sapien
catttctctaaagcgccctggttcc

SEQ ID NO: 154432 - DNA, 25 bp, Homo sapien
gagcatttccacactttctagcaca

SEQ ID NO: 154433 - DNA, 25 bp, Homo sapien
catactatactttctctggcccaac

SEQ ID NO: 154434 - DNA, 25 bp, Homo sapien
cagacactccttacagggcaagctt

SEQ ID NO: 154435 - DNA, 25 bp, Homo sapien
tggtgccagctcaaacacccggtag

SEQ ID NO: 154436 - DNA, 25 bp, Homo sapien
tcagtaccttaaggcaggaacctgc

SEQ ID NO: 154437 - DNA, 25 bp, Homo sapien
cacccggtagataaaagcgctaagg

SEQ ID NO: 154438 - DNA, 25 bp, Homo sapien
cccctgcgagaactgaaatgagcta

SEQ ID NO: 154439 - DNA, 25 bp, Homo sapien
gcaagtacggtatcaggtcacagaa

SEQ ID NO: 154440 - DNA, 25 bp, Homo sapien
tataattaacatgaggatgctgccc

SEQ ID NO: 154441 - DNA, 25 bp, Homo sapien
ggtgctcccatttatcccaggctga

SEQ ID NO: 154442 - DNA, 25 bp, Homo sapien
ctactaccaagtatatacctaaaag

SEQ ID NO: 154443 - DNA, 25 bp, Homo sapien
caatcctactaccaagtatatacct

SEQ ID NO: 154444 - DNA, 25 bp, Homo sapien
ggaactgaaggatattatgtgaaat

SEQ ID NO: 154445 - DNA, 25 bp, Homo sapien
atggaactgaaggatattatgtgaa

SEQ ID NO: 154446 - DNA, 25 bp, Homo sapien
ggtggttgcgtccttcccatgagaa

SEQ ID NO: 154447 - DNA, 25 bp, Homo sapien
caggcagagttggaataggaacccg

SEQ ID NO: 154448 - DNA, 25 bp, Homo sapien
gacctgggccatgggatctgcagct

SEQ ID NO: 154449 - DNA, 25 bp, Homo sapien
cagggagcttcgtgtgccattgact

SEQ ID NO: 154450 - DNA, 25 bp, Homo sapien
atgaattacaagttagaagggctgt

SEQ ID NO: 154451 - DNA, 25 bp, Homo sapien
gttggcagcaggcatctagcagcct

SEQ ID NO: 154452 - DNA, 25 bp, Homo sapien
gcaggcatctagcagccttggtgac

SEQ ID NO: 154453 - DNA, 25 bp, Homo sapien
tacaagttagaagggctgttggttg

SEQ ID NO: 154454 - DNA, 25 bp, Homo sapien
ccgagcacgtccttcctccatccgc

SEQ ID NO: 154455 - DNA, 25 bp, Homo sapien
tgctatggagtaaggaaatgtgtcc

SEQ ID NO: 154456 - DNA, 25 bp, Homo sapien
gtgtccttggtccaaacacagaaga

SEQ ID NO: 154457 - DNA, 25 bp, Homo sapien
acagctgctatggagtaaggaaatg

SEQ ID NO: 154458 - DNA, 25 bp, Homo sapien
acaacacatgggctctcatctcctt

SEQ ID NO: 154459 - DNA, 25 bp, Homo sapien
gagttcccagaagaaccctcacaac

SEQ ID NO: 154460 - DNA, 25 bp, Homo sapien
ggctctcatctccttgtccgagcta

SEQ ID NO: 154461 - DNA, 25 bp, Homo sapien
tccttgtccgagctaagccactgac

SEQ ID NO: 154462 - DNA, 25 bp, Homo sapien
ggtccaaaatggtgtctgtacatcc

SEQ ID NO: 154463 - DNA, 25 bp, Homo sapien
caatcgtccttgtctttatggtcca

SEQ ID NO: 154464 - DNA, 25 bp, Homo sapien
actctcagtgctctggctgtgtcat

SEQ ID NO: 154465 - DNA, 25 bp, Homo sapien
tggctgtgtcatccttagacaatcg

SEQ ID NO: 154466 - DNA, 25 bp, Homo sapien
tcggagccgtttgcattccaacaag

SEQ ID NO: 154467 - DNA, 25 bp, Homo sapien
caacactggtatgggtatggagaac

SEQ ID NO: 154468 - DNA, 25 bp, Homo sapien
gccagatttagattggagtcccagc

SEQ ID NO: 154469 - DNA, 25 bp, Homo sapien
tatggagaacccacgtcctagctgt

SEQ ID NO: 154470 - DNA, 25 bp, Homo sapien
tttatcttttatagatacaggtctc

SEQ ID NO: 154471 - DNA, 25 bp, Homo sapien
atagatacaggtctcactgttgctc

SEQ ID NO: 154472 - DNA, 25 bp, Homo sapien
tatcttttatagatacaggtctcac

SEQ ID NO: 154473 - DNA, 25 bp, Homo sapien
ttatagatacaggtctcactgttgc

SEQ ID NO: 154474 - DNA, 25 bp, Homo sapien
caagaatgctttcacatgagctccg

SEQ ID NO: 154475 - DNA, 25 bp, Homo sapien
tggagttttgagacacggcctctct

SEQ ID NO: 154476 - DNA, 25 bp, Homo sapien
gtattcctctgtggagccttgcgcc

SEQ ID NO: 154477 - DNA, 25 bp, Homo sapien
tctccttccgtggtcatgccattgg

SEQ ID NO: 154478 - DNA, 25 bp, Homo sapien
gagttatctcacaggttgcttaggg

SEQ ID NO: 154479 - DNA, 25 bp, Homo sapien
gcttgctgctctgactggtttgtga

SEQ ID NO: 154480 - DNA, 25 bp, Homo sapien
ggcatctctgctgaccactctgtgg

SEQ ID NO: 154481 - DNA, 25 bp, Homo sapien
gtttgtgaacgtgccctgagtccag

SEQ ID NO: 154482 - DNA, 25 bp, Homo sapien
agcccctcccaagcgtgctggttga

SEQ ID NO: 154483 - DNA, 25 bp, Homo sapien
tcatgatggtgttgtatcccgggtg

SEQ ID NO: 154484 - DNA, 25 bp, Homo sapien
tctgcccttaacagaaatgtggctg

SEQ ID NO: 154485 - DNA, 25 bp, Homo sapien
tgattcccgtacctttatatgtgac

SEQ ID NO: 154486 - DNA, 25 bp, Homo sapien
aaatgtccccattaatttgctattc

SEQ ID NO: 154487 - DNA, 25 bp, Homo sapien
ccaagcccagcagtgtgttatggtt

SEQ ID NO: 154488 - DNA, 25 bp, Homo sapien
ttggtgtggcacattctttaataac

SEQ ID NO: 154489 - DNA, 25 bp, Homo sapien
aaggattgttgactcccaagcccag

SEQ ID NO: 154490 - DNA, 25 bp, Homo sapien
ttgacagctgcaacagcttgtcatt

SEQ ID NO: 154491 - DNA, 25 bp, Homo sapien
ttctgaaatacccttgacagctgca

SEQ ID NO: 154492 - DNA, 25 bp, Homo sapien
ccttctgaaatacccttgacagctg

SEQ ID NO: 154493 - DNA, 25 bp, Homo sapien
ttccttctgaaatacccttgacagc

SEQ ID NO: 154494 - DNA, 25 bp, Homo sapien
aaatgtccacattcaagcaaaacca

SEQ ID NO: 154495 - DNA, 25 bp, Homo sapien
gaaagcatgtaccaggcaaccctta

SEQ ID NO: 154496 - DNA, 25 bp, Homo sapien
tgtcaccccttgtaggaaacttcca

SEQ ID NO: 154497 - DNA, 25 bp, Homo sapien
cactaaagctttggtgcacacctcc

SEQ ID NO: 154498 - DNA, 25 bp, Homo sapien
gattttcaaaccagatcgccagggc

SEQ ID NO: 154499 - DNA, 25 bp, Homo sapien
gagagctgccacgttttcctccaag

SEQ ID NO: 154500 - DNA, 25 bp, Homo sapien
cggtaactggttgcattcactaggg

SEQ ID NO: 154501 - DNA, 25 bp, Homo sapien
tgttagtgatcattagcccgcctgg

SEQ ID NO: 154502 - DNA, 25 bp, Homo sapien
tgtactcaaaactcaggcatgcagc

SEQ ID NO: 154503 - DNA, 25 bp, Homo sapien
ctcttcccacaactggatgttagca

SEQ ID NO: 154504 - DNA, 25 bp, Homo sapien
tggctcctggtgtactgcttgctgc

SEQ ID NO: 154505 - DNA, 25 bp, Homo sapien
gtccagcagccggatatgatgtatt

SEQ ID NO: 154506 - DNA, 25 bp, Homo sapien
gagtgactccctgacacagcttgtc

SEQ ID NO: 154507 - DNA, 25 bp, Homo sapien
aaactcaagccttccatttccaggg

SEQ ID NO: 154508 - DNA, 25 bp, Homo sapien
tctcttcagctgagcaagtcactgg

SEQ ID NO: 154509 - DNA, 25 bp, Homo sapien
tgcagacacctttgccatgattgga

SEQ ID NO: 154510 - DNA, 25 bp, Homo sapien
aaaatcactgttatgactattgcag

SEQ ID NO: 154511 - DNA, 25 bp, Homo sapien
acactctctgagcttccgggagtct

SEQ ID NO: 154512 - DNA, 25 bp, Homo sapien
gcacatgtctcctcccaacctcatt

SEQ ID NO: 154513 - DNA, 25 bp, Homo sapien
tgagcttccgggagtctccaagact

SEQ ID NO: 154514 - DNA, 25 bp, Homo sapien
ctctctgagcttccgggagtctcca

SEQ ID NO: 154515 - DNA, 25 bp, Homo sapien
ttgctcgaaacagtgaaaaatgggc

SEQ ID NO: 154516 - DNA, 25 bp, Homo sapien
taatgtgcctaccactaagacccag

SEQ ID NO: 154517 - DNA, 25 bp, Homo sapien
agttaaactagcagcctaacccagg

SEQ ID NO: 154518 - DNA, 25 bp, Homo sapien
cataaaccgggacagccttgtggga

SEQ ID NO: 154519 - DNA, 25 bp, Homo sapien
ctgtagtagttgcatgctgcttggc

SEQ ID NO: 154520 - DNA, 25 bp, Homo sapien
agtagttgcatgctgcttggcgcat

SEQ ID NO: 154521 - DNA, 25 bp, Homo sapien
tagtagttgcatgctgcttggcgca

SEQ ID NO: 154522 - DNA, 25 bp, Homo sapien
gtagtagttgcatgctgcttggcgc

SEQ ID NO: 154523 - DNA, 25 bp, Homo sapien
cagaaaactggattgtcgagtgctc

SEQ ID NO: 154524 - DNA, 25 bp, Homo sapien
tggattgtcgagtgctccaataagc

SEQ ID NO: 154525 - DNA, 25 bp, Homo sapien
tgtcgagtgctccaataagcagagt

SEQ ID NO: 154526 - DNA, 25 bp, Homo sapien
caataagcagagtaattctgggttc

SEQ ID NO: 154527 - DNA, 25 bp, Homo sapien
tgatagtgcctgtctcctgggttgg

SEQ ID NO: 154528 - DNA, 25 bp, Homo sapien
aatgatagtgcctgtctcctgggtt

SEQ ID NO: 154529 - DNA, 25 bp, Homo sapien
atgatagtgcctgtctcctgggttg

SEQ ID NO: 154530 - DNA, 25 bp, Homo sapien
tgaccacattgttggctgccagggt

SEQ ID NO: 154531 - DNA, 25 bp, Homo sapien
ccagtgctcttaccacgtggatcag

SEQ ID NO: 154532 - DNA, 25 bp, Homo sapien
tgattcgaaggaccagtcagttgga

SEQ ID NO: 154533 - DNA, 25 bp, Homo sapien
tctccagtccacgtagcagctaatg

SEQ ID NO: 154534 - DNA, 25 bp, Homo sapien
cccgagtccacggtcttgggcccag

SEQ ID NO: 154535 - DNA, 25 bp, Homo sapien
tccacggtcttgggcccagacccag

SEQ ID NO: 154536 - DNA, 25 bp, Homo sapien
cgagtccacggtcttgggcccagac

SEQ ID NO: 154537 - DNA, 25 bp, Homo sapien
gtccacggtcttgggcccagaccca

SEQ ID NO: 154538 - DNA, 25 bp, Homo sapien
ggcttagtggccctgtccactgaca

SEQ ID NO: 154539 - DNA, 25 bp, Homo sapien
gcttagtggccctgtccactgacag

SEQ ID NO: 154540 - DNA, 25 bp, Homo sapien
caggaggcttagtggccctgtccac

SEQ ID NO: 154541 - DNA, 25 bp, Homo sapien
gaggcttagtggccctgtccactga

SEQ ID NO: 154542 - DNA, 25 bp, Homo sapien
gcaattgcaaatactcacagatggt

SEQ ID NO: 154543 - DNA, 25 bp, Homo sapien
attgcaaatactcacagatggtctg

SEQ ID NO: 154544 - DNA, 25 bp, Homo sapien
gatatggttgggcaattgcaaatac

SEQ ID NO: 154545 - DNA, 25 bp, Homo sapien
ggttgggcaattgcaaatactcaca

SEQ ID NO: 154546 - DNA, 25 bp, Homo sapien
gagcctggtggggttcaggttggca

SEQ ID NO: 154547 - DNA, 25 bp, Homo sapien
gcctggtggggttcaggttggcaga

SEQ ID NO: 154548 - DNA, 25 bp, Homo sapien
ggagcctggtggggttcaggttggc

SEQ ID NO: 154549 - DNA, 25 bp, Homo sapien
ctggtggggttcaggttggcagagc

SEQ ID NO: 154550 - DNA, 25 bp, Homo sapien
tgtatcttcagaccaactttgttcc

SEQ ID NO: 154551 - DNA, 25 bp, Homo sapien
aaacctgctgccagttggtagatct

SEQ ID NO: 154552 - DNA, 25 bp, Homo sapien
tcattctgtgatcatcatttgtatc

SEQ ID NO: 154553 - DNA, 25 bp, Homo sapien
gctgccagttggtagatctgcatga

SEQ ID NO: 154554 - DNA, 25 bp, Homo sapien
gtgacccagcgttgtgagtttccaa

SEQ ID NO: 154555 - DNA, 25 bp, Homo sapien
cgtgtcgtaggtctgaatgaggttc

SEQ ID NO: 154556 - DNA, 25 bp, Homo sapien
tcagacagctgagttgagcgtgacc

SEQ ID NO: 154557 - DNA, 25 bp, Homo sapien
catgaggttcatgtacgatcggttt

SEQ ID NO: 154558 - DNA, 25 bp, Homo sapien
tcctgacttcgtgtgctaggtgcca

SEQ ID NO: 154559 - DNA, 25 bp, Homo sapien
agctgacacacgacacagcctgtgg

SEQ ID NO: 154560 - DNA, 25 bp, Homo sapien
gtggtaataagaatacctcctgact

SEQ ID NO: 154561 - DNA, 25 bp, Homo sapien
ctacttgaccacaattaacatgatg

SEQ ID NO: 154562 - DNA, 25 bp, Homo sapien
tagttcccaaagattactcaagtga

SEQ ID NO: 154563 - DNA, 25 bp, Homo sapien
aagtaggtaagctgagcaattatca

SEQ ID NO: 154564 - DNA, 25 bp, Homo sapien
gctgagcaattatcaagtcatagaa

SEQ ID NO: 154565 - DNA, 25 bp, Homo sapien
tcaagtgacacgaactaaaaggtat

SEQ ID NO: 154566 - DNA, 25 bp, Homo sapien
ctgctccgtggttacccctggatga

SEQ ID NO: 154567 - DNA, 25 bp, Homo sapien
cgtggttacccctggatgatcatgt

SEQ ID NO: 154568 - DNA, 25 bp, Homo sapien
gatcatgtttgtggccggttggatg

SEQ ID NO: 154569 - DNA, 25 bp, Homo sapien
gctccgtggttacccctggatgatc

SEQ ID NO: 154570 - DNA, 25 bp, Homo sapien
agatgaaattcaagtgcacagccct

SEQ ID NO: 154571 - DNA, 25 bp, Homo sapien
atgaaattcaagtgcacagccctgg

SEQ ID NO: 154572 - DNA, 25 bp, Homo sapien
gatgaaattcaagtgcacagccctg

SEQ ID NO: 154573 - DNA, 25 bp, Homo sapien
tgaaattcaagtgcacagccctgga

SEQ ID NO: 154574 - DNA, 25 bp, Homo sapien
tagctggcattcgtttgcttcctcc

SEQ ID NO: 154575 - DNA, 25 bp, Homo sapien
agctggcattcgtttgcttcctcca

SEQ ID NO: 154576 - DNA, 25 bp, Homo sapien
caccgagcccagaacccttcctggg

SEQ ID NO: 154577 - DNA, 25 bp, Homo sapien
aagcaccgagcccagaacccttcct

SEQ ID NO: 154578 - DNA, 25 bp, Homo sapien
gagcccagaacccttcctgggaaca

SEQ ID NO: 154579 - DNA, 25 bp, Homo sapien
tggcaagcaccgagcccagaaccct

SEQ ID NO: 154580 - DNA, 25 bp, Homo sapien
gcgtctcgctctgtagaggcgtctc

SEQ ID NO: 154581 - DNA, 25 bp, Homo sapien
tcgctctgtagaggcgtctctatgt

SEQ ID NO: 154582 - DNA, 25 bp, Homo sapien
ggtgaaatttccgcaggataggttc

SEQ ID NO: 154583 - DNA, 25 bp, Homo sapien
atgttggggtgaaatttccgcagga

SEQ ID NO: 154584 - DNA, 25 bp, Homo sapien
gatacagaagtgaggagaacagacc

SEQ ID NO: 154585 - DNA, 25 bp, Homo sapien
gaacagacctagtctctgctccatg

SEQ ID NO: 154586 - DNA, 25 bp, Homo sapien
cagactacagggagagtatctaaca

SEQ ID NO: 154587 - DNA, 25 bp, Homo sapien
cagaagccgatgtaggcagcagcgt

SEQ ID NO: 154588 - DNA, 25 bp, Homo sapien
tgtggagagtacacagcagtagttg

SEQ ID NO: 154589 - DNA, 25 bp, Homo sapien
ggcatgtcagacttggtgtctgcac

SEQ ID NO: 154590 - DNA, 25 bp, Homo sapien
gcagtagttgacacgtactaagtga

SEQ ID NO: 154591 - DNA, 25 bp, Homo sapien
tctgcactcagggaccatgttgtgg

SEQ ID NO: 154592 - DNA, 25 bp, Homo sapien
ggaggccggtctacaaaggctgctt

SEQ ID NO: 154593 - DNA, 25 bp, Homo sapien
atgtacacaagcgtggagctctctc

SEQ ID NO: 154594 - DNA, 25 bp, Homo sapien
tctttcatgtacacaagcgtggagc

SEQ ID NO: 154595 - DNA, 25 bp, Homo sapien
ctttctggaggccggtctacaaagg

SEQ ID NO: 154596 - DNA, 25 bp, Homo sapien
gttctaatccttgtgtacttttgga

SEQ ID NO: 154597 - DNA, 25 bp, Homo sapien
cagagaaggtggtgtcgttgtgtca

SEQ ID NO: 154598 - DNA, 25 bp, Homo sapien
tctagttgcatacgctgttgtgtgg

SEQ ID NO: 154599 - DNA, 25 bp, Homo sapien
caaagagggtggcatcgtcgtgtcc

SEQ ID NO: 154600 - DNA, 25 bp, Homo sapien
ttttcagccactaagcgtgtggtaa

SEQ ID NO: 154601 - DNA, 25 bp, Homo sapien
ggctgtggtcatagggctgccacca

SEQ ID NO: 154602 - DNA, 25 bp, Homo sapien
cgtgtggtaatctgtcacagcagcc

SEQ ID NO: 154603 - DNA, 25 bp, Homo sapien
ggagagtccggcttgagccaacaga

SEQ ID NO: 154604 - DNA, 25 bp, Homo sapien
atcagcgtgtaggaactgtgggtgc

SEQ ID NO: 154605 - DNA, 25 bp, Homo sapien
gttgagatcagcgtgtaggaactgt

SEQ ID NO: 154606 - DNA, 25 bp, Homo sapien
tgaggttgagatcagcgtgtaggaa

SEQ ID NO: 154607 - DNA, 25 bp, Homo sapien
ttatggtgaggttgagatcagcgtg

SEQ ID NO: 154608 - DNA, 25 bp, Homo sapien
tagattgcgttagtcacagaaggaa

SEQ ID NO: 154609 - DNA, 25 bp, Homo sapien
gggatttgcaaactacggcccacag

SEQ ID NO: 154610 - DNA, 25 bp, Homo sapien
aaaatatgtatcatccagcccagtg

SEQ ID NO: 154611 - DNA, 25 bp, Homo sapien
cttttgcaggacaagggcacagctg

SEQ ID NO: 154612 - DNA, 25 bp, Homo sapien
cactgtggagtgctggagattcact

SEQ ID NO: 154613 - DNA, 25 bp, Homo sapien
tctgggctctactaagcactgctgg

SEQ ID NO: 154614 - DNA, 25 bp, Homo sapien
gctgtcaagttgaaggtacctaggg

SEQ ID NO: 154615 - DNA, 25 bp, Homo sapien
gctttgctatacaagtacacgtggt

SEQ ID NO: 154616 - DNA, 25 bp, Homo sapien
tttccaggagcgtactggggccttg

SEQ ID NO: 154617 - DNA, 25 bp, Homo sapien
ccaggagcgtactggggccttggac

SEQ ID NO: 154618 - DNA, 25 bp, Homo sapien
tccaggagcgtactggggccttgga

SEQ ID NO: 154619 - DNA, 25 bp, Homo sapien
ctttccaggagcgtactggggcctt

SEQ ID NO: 154620 - DNA, 25 bp, Homo sapien
tgggtttcctgccagaattcatcag

SEQ ID NO: 154621 - DNA, 25 bp, Homo sapien
catcagttcccataagcagaggcag

SEQ ID NO: 154622 - DNA, 25 bp, Homo sapien
cagaattcatcagttcccataagca

SEQ ID NO: 154623 - DNA, 25 bp, Homo sapien
aattcatcagttcccataagcagag

SEQ ID NO: 154624 - DNA, 25 bp, Homo sapien
acactgtagagagttggactccctc

SEQ ID NO: 154625 - DNA, 25 bp, Homo sapien
gctacactgtagagagttggactcc

SEQ ID NO: 154626 - DNA, 25 bp, Homo sapien
caggctacactgtagagagttggac

SEQ ID NO: 154627 - DNA, 25 bp, Homo sapien
cagaggcaggctacactgtagagag

SEQ ID NO: 154628 - DNA, 25 bp, Homo sapien
caccacaactaaagggacaatctga

SEQ ID NO: 154629 - DNA, 25 bp, Homo sapien
atctgatccctgtttaagtcctcca

SEQ ID NO: 154630 - DNA, 25 bp, Homo sapien
gatcacttctccacaccacaactaa

SEQ ID NO: 154631 - DNA, 25 bp, Homo sapien
aagctccttgatgtcctttcgataa

SEQ ID NO: 154632 - DNA, 25 bp, Homo sapien
ctagaagcaaaagtgtgtggacagg

SEQ ID NO: 154633 - DNA, 25 bp, Homo sapien
ggcgaaggccgccactgcctgacac

SEQ ID NO: 154634 - DNA, 25 bp, Homo sapien
ctgacacctgtatcaccgaggccag

SEQ ID NO: 154635 - DNA, 25 bp, Homo sapien
tccatgaccaccactccggcgaagg

SEQ ID NO: 154636 - DNA, 25 bp, Homo sapien
ggacatacttgtgtctttttttgct

SEQ ID NO: 154637 - DNA, 25 bp, Homo sapien
ttttttgctagcacttctcacaagc

SEQ ID NO: 154638 - DNA, 25 bp, Homo sapien
tgtatacacctcagactctctggac

SEQ ID NO: 154639 - DNA, 25 bp, Homo sapien
gctagcacttctcacaagctggcat

SEQ ID NO: 154640 - DNA, 25 bp, Homo sapien
tgcccaccaggaaaacatccactta

SEQ ID NO: 154641 - DNA, 25 bp, Homo sapien
aaacatccacttatctttcttggct

SEQ ID NO: 154642 - DNA, 25 bp, Homo sapien
caggaaaacatccacttatctttct

SEQ ID NO: 154643 - DNA, 25 bp, Homo sapien
accaggaaaacatccacttatcttt

SEQ ID NO: 154644 - DNA, 25 bp, Homo sapien
acaccaggcagtttcacacacagca

SEQ ID NO: 154645 - DNA, 25 bp, Homo sapien
gcagctttgctcaccgggctccctt

SEQ ID NO: 154646 - DNA, 25 bp, Homo sapien
tgccgtggctccataaccaagaacc

SEQ ID NO: 154647 - DNA, 25 bp, Homo sapien
gcttggcccaggctacactgagctc

SEQ ID NO: 154648 - DNA, 25 bp, Homo sapien
gctttgctaaatcggcaccggaggc

SEQ ID NO: 154649 - DNA, 25 bp, Homo sapien
cggaggctgcggctaatctgcatag

SEQ ID NO: 154650 - DNA, 25 bp, Homo sapien
taatctgcataggagatgttgccag

SEQ ID NO: 154651 - DNA, 25 bp, Homo sapien
gagcctcggatctggtcaatcatgg

SEQ ID NO: 154652 - DNA, 25 bp, Homo sapien
gactatttgtacaccgagttgtttg

SEQ ID NO: 154653 - DNA, 25 bp, Homo sapien
ttctctcccatatccctgttccacc

SEQ ID NO: 154654 - DNA, 25 bp, Homo sapien
tatttgtacaccgagttgtttgttg

SEQ ID NO: 154655 - DNA, 25 bp, Homo sapien
gcaggggctgatgtgtgtccatccg

SEQ ID NO: 154656 - DNA, 25 bp, Homo sapien
tgcaagttccaagtgagcgtcccct

SEQ ID NO: 154657 - DNA, 25 bp, Homo sapien
tgggcattgctggatccacctcagg

SEQ ID NO: 154658 - DNA, 25 bp, Homo sapien
cacagttccgggtgatgcaagttcc

SEQ ID NO: 154659 - DNA, 25 bp, Homo sapien
tcagggcaccatgatcagaaggaat

SEQ ID NO: 154660 - DNA, 25 bp, Homo sapien
caaagcttagaaccaatgatgcctc

SEQ ID NO: 154661 - DNA, 25 bp, Homo sapien
tgttgagcccgctggaatatctgct

SEQ ID NO: 154662 - DNA, 25 bp, Homo sapien
cctgagaacctacccagtgctggca

SEQ ID NO: 154663 - DNA, 25 bp, Homo sapien
gacaacataatagacagactcaggg

SEQ ID NO: 154664 - DNA, 25 bp, Homo sapien
ccctaactagcttggatgagagaaa

SEQ ID NO: 154665 - DNA, 25 bp, Homo sapien
gcatagagaccgcttcacttaggaa

SEQ ID NO: 154666 - DNA, 25 bp, Homo sapien
gtgagtcaaacaacagcccactgtg

SEQ ID NO: 154667 - DNA, 25 bp, Homo sapien
gacctaagggccagacagcatcttg

SEQ ID NO: 154668 - DNA, 25 bp, Homo sapien
cattgccaagccgttaaagggattt

SEQ ID NO: 154669 - DNA, 25 bp, Homo sapien
caacattgccaagccgttaaaggga

SEQ ID NO: 154670 - DNA, 25 bp, Homo sapien
ttacaggcatggacaacattgccaa

SEQ ID NO: 154671 - DNA, 25 bp, Homo sapien
gacaacattgccaagccgttaaagg

SEQ ID NO: 154672 - DNA, 25 bp, Homo sapien
agccaactggtctccctgagactgt

SEQ ID NO: 154673 - DNA, 25 bp, Homo sapien
gccaactggtctccctgagactgtg

SEQ ID NO: 154674 - DNA, 25 bp, Homo sapien
gcccaagaagctcctgggtgctctt

SEQ ID NO: 154675 - DNA, 25 bp, Homo sapien
caagaagctcctgggtgctcttagg

SEQ ID NO: 154676 - DNA, 25 bp, Homo sapien
ttcaagtccgaaagaccagagccct

SEQ ID NO: 154677 - DNA, 25 bp, Homo sapien
ccagattgagtgctgcgatcgcctt

SEQ ID NO: 154678 - DNA, 25 bp, Homo sapien
ccagctttggaggaacgattacgtt

SEQ ID NO: 154679 - DNA, 25 bp, Homo sapien
catttgtcatccgtcccatgggagg

SEQ ID NO: 154680 - DNA, 25 bp, Homo sapien
ttttacaggttaggactctgagacc

SEQ ID NO: 154681 - DNA, 25 bp, Homo sapien
tcttgtttggccagtgagctcaggg

SEQ ID NO: 154682 - DNA, 25 bp, Homo sapien
taattgggtgagacaaactagcccc

SEQ ID NO: 154683 - DNA, 25 bp, Homo sapien
cagacaatgggatgaactgccaagt

SEQ ID NO: 154684 - DNA, 25 bp, Homo sapien
gctggatcatattctgttctggagt

SEQ ID NO: 154685 - DNA, 25 bp, Homo sapien
gagtgtgacataattcggtgtatcc

SEQ ID NO: 154686 - DNA, 25 bp, Homo sapien
ttttgaatatctatgcacaggtagt

SEQ ID NO: 154687 - DNA, 25 bp, Homo sapien
ggatcagagccagggaacctatttg

SEQ ID NO: 154688 - DNA, 25 bp, Homo sapien
tatcctccctgtgtggaaccgagca

SEQ ID NO: 154689 - DNA, 25 bp, Homo sapien
agggagggcttttcaatagacagac

SEQ ID NO: 154690 - DNA, 25 bp, Homo sapien
tgtcttcactgcatgagcctccgag

SEQ ID NO: 154691 - DNA, 25 bp, Homo sapien
tatccaggctagtggctcagccacc

SEQ ID NO: 154692 - DNA, 25 bp, Homo sapien
ggttctatttggctccacactgttt

SEQ ID NO: 154693 - DNA, 25 bp, Homo sapien
tccagctgaaggcatggaaaggaag

SEQ ID NO: 154694 - DNA, 25 bp, Homo sapien
caatgaaaccgaacggagccatttg

SEQ ID NO: 154695 - DNA, 25 bp, Homo sapien
tcactgtcataaatggaaaagatgg

SEQ ID NO: 154696 - DNA, 25 bp, Homo sapien
ctgtgggtgactccatttgtcttct

SEQ ID NO: 154697 - DNA, 25 bp, Homo sapien
ttaactgtcaaacagcattgtccaa

SEQ ID NO: 154698 - DNA, 25 bp, Homo sapien
ggtcgcagatgaacccagagcagga

SEQ ID NO: 154699 - DNA, 25 bp, Homo sapien
caggacaatcatagggtcgcagatg

SEQ ID NO: 154700 - DNA, 25 bp, Homo sapien
gcaggcaggagactccttaactgtc

SEQ ID NO: 154701 - DNA, 25 bp, Homo sapien
tgccaaagccaatgggtgaatgtag

SEQ ID NO: 154702 - DNA, 25 bp, Homo sapien
cactatgaaaaatcctggaaggctt

SEQ ID NO: 154703 - DNA, 25 bp, Homo sapien
atgttagttcccagtcctctacact

SEQ ID NO: 154704 - DNA, 25 bp, Homo sapien
agccaatgggtgaatgtagccaggc

SEQ ID NO: 154705 - DNA, 25 bp, Homo sapien
tcagatataagacaggaggtaggcc

SEQ ID NO: 154706 - DNA, 25 bp, Homo sapien
taacagtcgaccttggactccaagg

SEQ ID NO: 154707 - DNA, 25 bp, Homo sapien
cagttcctaggctggatgcccggct

SEQ ID NO: 154708 - DNA, 25 bp, Homo sapien
taaacctggcgtctcaaagttctgg

SEQ ID NO: 154709 - DNA, 25 bp, Homo sapien
tcatgcaaagcgtgtggaccatcag

SEQ ID NO: 154710 - DNA, 25 bp, Homo sapien
tgtggtgcccattctatggaggcag

SEQ ID NO: 154711 - DNA, 25 bp, Homo sapien
cgtagcgtagtcaacttgggcacag

SEQ ID NO: 154712 - DNA, 25 bp, Homo sapien
tgtcccctgggtcgtagcgtagtca

SEQ ID NO: 154713 - DNA, 25 bp, Homo sapien
atctttcttccgcatgcgctgtgag

SEQ ID NO: 154714 - DNA, 25 bp, Homo sapien
gcaggtctccagcttagtgtttcct

SEQ ID NO: 154715 - DNA, 25 bp, Homo sapien
tgagctccctaatcgggcctgtttg

SEQ ID NO: 154716 - DNA, 25 bp, Homo sapien
atgcgctgtgagctcctcgagggca

SEQ ID NO: 154717 - DNA, 25 bp, Homo sapien
ggtgtcgtaattagttgcttgttgc

SEQ ID NO: 154718 - DNA, 25 bp, Homo sapien
gcttgcggggcacccacagtggatc

SEQ ID NO: 154719 - DNA, 25 bp, Homo sapien
agatggtggtgtcgtaattagttgc

SEQ ID NO: 154720 - DNA, 25 bp, Homo sapien
gttgtacgtgctggttttccttctg

SEQ ID NO: 154721 - DNA, 25 bp, Homo sapien
gaatgtctttggtggaaactcgctg

SEQ ID NO: 154722 - DNA, 25 bp, Homo sapien
cgacatggagctctactttagaaac

SEQ ID NO: 154723 - DNA, 25 bp, Homo sapien
gaaactcgctgctcgacatggagct

SEQ ID NO: 154724 - DNA, 25 bp, Homo sapien
tgtctttggtggaaactcgctgctc

SEQ ID NO: 154725 - DNA, 25 bp, Homo sapien
tcttcaacgtactgacattggctga

SEQ ID NO: 154726 - DNA, 25 bp, Homo sapien
gacattggctgaggtggacacgaac

SEQ ID NO: 154727 - DNA, 25 bp, Homo sapien
gctttgtaaccagtgccttgggcaa

SEQ ID NO: 154728 - DNA, 25 bp, Homo sapien
gacacgaactaggaagatgccagag

SEQ ID NO: 154729 - DNA, 25 bp, Homo sapien
gcgctcagtagtgcctgggagagca

SEQ ID NO: 154730 - DNA, 25 bp, Homo sapien
caatccgctcctggcgaccgcgagc

SEQ ID NO: 154731 - DNA, 25 bp, Homo sapien
accgcgagcgcgctcagtagtgcct

SEQ ID NO: 154732 - DNA, 25 bp, Homo sapien
tgtcaccaaggcttgcgcgcggcgg

SEQ ID NO: 154733 - DNA, 25 bp, Homo sapien
tgagggcaagatctgccggtgtcct

SEQ ID NO: 154734 - DNA, 25 bp, Homo sapien
agatccaactttcccggagaggcag

SEQ ID NO: 154735 - DNA, 25 bp, Homo sapien
catgtctgggcgcacagatccaact

SEQ ID NO: 154736 - DNA, 25 bp, Homo sapien
gtcctaatcccttttccatgtctgg

SEQ ID NO: 154737 - DNA, 25 bp, Homo sapien
acgccgggccaaggcaacttcatgt

SEQ ID NO: 154738 - DNA, 25 bp, Homo sapien
taaagggttggcgtggctggagcag

SEQ ID NO: 154739 - DNA, 25 bp, Homo sapien
cattctgaggccttgggtttgttgg

SEQ ID NO: 154740 - DNA, 25 bp, Homo sapien
tcttcttggatttcgcgcctacggg

SEQ ID NO: 154741 - DNA, 25 bp, Homo sapien
tcatctgatccagaggcggtgaagc

SEQ ID NO: 154742 - DNA, 25 bp, Homo sapien
ccagaggcggtgaagccaatcatgc

SEQ ID NO: 154743 - DNA, 25 bp, Homo sapien
ccatgtaattactcggaaaaagata

SEQ ID NO: 154744 - DNA, 25 bp, Homo sapien
gaagccaatcatgcaaccatgtaat

SEQ ID NO: 154745 - DNA, 25 bp, Homo sapien
tcttaggatactgacttttacacgg

SEQ ID NO: 154746 - DNA, 25 bp, Homo sapien
cgcatctgtaaaatcgctagccgca

SEQ ID NO: 154747 - DNA, 25 bp, Homo sapien
gggccagttactaaccccgcatctg

SEQ ID NO: 154748 - DNA, 25 bp, Homo sapien
gctagccgcacctaaactgtgatga

SEQ ID NO: 154749 - DNA, 25 bp, Homo sapien
tgctgaagacgaaggtattgtggac

SEQ ID NO: 154750 - DNA, 25 bp, Homo sapien
tcccttcgcattgcttactcaactt

SEQ ID NO: 154751 - DNA, 25 bp, Homo sapien
tggacttcctagttgtaaactgccc

SEQ ID NO: 154752 - DNA, 25 bp, Homo sapien
tagctgcaggtaatgctgaagacga

SEQ ID NO: 154753 - DNA, 25 bp, Homo sapien
ttattccttggagtataatagtagt

SEQ ID NO: 154754 - DNA, 25 bp, Homo sapien
tataatagtagtggtgtttagttat

SEQ ID NO: 154755 - DNA, 25 bp, Homo sapien
tcaaaaagatatataatggagagag

SEQ ID NO: 154756 - DNA, 25 bp, Homo sapien
ggtgtttagttatgttaaatgatga

SEQ ID NO: 154757 - DNA, 25 bp, Homo sapien
cctgagttggtgtctgtcgtgaagc

SEQ ID NO: 154758 - DNA, 25 bp, Homo sapien
taccatagtcgtacacatttgcaca

SEQ ID NO: 154759 - DNA, 25 bp, Homo sapien
catttgcacagaatctaaagtttgc

SEQ ID NO: 154760 - DNA, 25 bp, Homo sapien
tctttggaagcatagtaagcggagg

SEQ ID NO: 154761 - DNA, 25 bp, Homo sapien
tctaatgtgggacctgaaatttacc

SEQ ID NO: 154762 - DNA, 25 bp, Homo sapien
taatccttcggcatgaaacctgagc

SEQ ID NO: 154763 - DNA, 25 bp, Homo sapien
taaactatgaaagtaaactcggcac

SEQ ID NO: 154764 - DNA, 25 bp, Homo sapien
caggtaaatcagaggaacaagcaac

SEQ ID NO: 154765 - DNA, 25 bp, Homo sapien
gaaaaagcatactccagaggaagct

SEQ ID NO: 154766 - DNA, 25 bp, Homo sapien
tgtagtcttggagccgcacagggtt

SEQ ID NO: 154767 - DNA, 25 bp, Homo sapien
cagtgcctaggacgatgcttggaac

SEQ ID NO: 154768 - DNA, 25 bp, Homo sapien
gaataaatccggaagagcaggacca

SEQ ID NO: 154769 - DNA, 25 bp, Homo sapien
aacgtggtaagtgctcctattggcg

SEQ ID NO: 154770 - DNA, 25 bp, Homo sapien
gaagtgaattcgttcgttcgacaaa

SEQ ID NO: 154771 - DNA, 25 bp, Homo sapien
tgagtttccagcctcgttggccctc

SEQ ID NO: 154772 - DNA, 25 bp, Homo sapien
ccggcgcgcgattatttctctagaa

SEQ ID NO: 154773 - DNA, 25 bp, Homo sapien
aacctgttgggcctaggatcaggaa

SEQ ID NO: 154774 - DNA, 25 bp, Homo sapien
tgctcgtcccgcccggcaggtagga

SEQ ID NO: 154775 - DNA, 25 bp, Homo sapien
ctctaaactgccctccgtgattgga

SEQ ID NO: 154776 - DNA, 25 bp, Homo sapien
cagtaattactcgattccaccaatc

SEQ ID NO: 154777 - DNA, 25 bp, Homo sapien
tccgtgattggacaatactgatcag

SEQ ID NO: 154778 - DNA, 25 bp, Homo sapien
agctggccacccagagcgctccccg

SEQ ID NO: 154779 - DNA, 25 bp, Homo sapien
gcggcagtccgacccgccccctgga

SEQ ID NO: 154780 - DNA, 25 bp, Homo sapien
cccacgacggcccgggcccacagct

SEQ ID NO: 154781 - DNA, 25 bp, Homo sapien
gcacgcaagccggagcccacgacgg

SEQ ID NO: 154782 - DNA, 25 bp, Homo sapien
cgcccccagcggagcagagccgccg

SEQ ID NO: 154783 - DNA, 25 bp, Homo sapien
ccgcgcccccagcggagcagagccg

SEQ ID NO: 154784 - DNA, 25 bp, Homo sapien
gcccccagcggagcagagccgccgc

SEQ ID NO: 154785 - DNA, 25 bp, Homo sapien
gcgcccccagcggagcagagccgcc

SEQ ID NO: 154786 - DNA, 25 bp, Homo sapien
cgggtcgtccagcacgttgtaggcc

SEQ ID NO: 154787 - DNA, 25 bp, Homo sapien
ttgtaggccgcgtaatcgcggacgc

SEQ ID NO: 154788 - DNA, 25 bp, Homo sapien
ggcgtccccttgaggaagaccacca

SEQ ID NO: 154789 - DNA, 25 bp, Homo sapien
tgctccggcgtccccttgaggaaga

SEQ ID NO: 154790 - DNA, 25 bp, Homo sapien
aaggagcaggcccttgtgcctggcc

SEQ ID NO: 154791 - DNA, 25 bp, Homo sapien
tcctcccctactcagataagactgg

SEQ ID NO: 154792 - DNA, 25 bp, Homo sapien
cactgaaagtctctaactgggatgc

SEQ ID NO: 154793 - DNA, 25 bp, Homo sapien
gaatgcacgtggagtacttggaaaa

SEQ ID NO: 154794 - DNA, 25 bp, Homo sapien
aggcaacagaaaaagcataggaaaa

SEQ ID NO: 154795 - DNA, 25 bp, Homo sapien
tgattaagtataccctaaagtaatg

SEQ ID NO: 154796 - DNA, 25 bp, Homo sapien
aaggcaacagaaaaagcataggaaa

SEQ ID NO: 154797 - DNA, 25 bp, Homo sapien
taatgaaaacgccattcaggccagg

SEQ ID NO: 154798 - DNA, 25 bp, Homo sapien
caaatgaatcatttatgtgcatgaa

SEQ ID NO: 154799 - DNA, 25 bp, Homo sapien
taaagtaaacgtgagcttcttttca

SEQ ID NO: 154800 - DNA, 25 bp, Homo sapien
catgaacgacctgttttgtttcaat

SEQ ID NO: 154801 - DNA, 25 bp, Homo sapien
gtgaagctttccatgataatcaatt

SEQ ID NO: 154802 - DNA, 25 bp, Homo sapien
aaaacttttacctttatgatgactg

SEQ ID NO: 154803 - DNA, 25 bp, Homo sapien
cttttacctttatgatgactgagag

SEQ ID NO: 154804 - DNA, 25 bp, Homo sapien
caatgatgccgattacaaaactttt

SEQ ID NO: 154805 - DNA, 25 bp, Homo sapien
tttttacaatgatgccgattacaaa

SEQ ID NO: 154806 - DNA, 25 bp, Homo sapien
tcaaaatgtctttataatgccaaat

SEQ ID NO: 154807 - DNA, 25 bp, Homo sapien
gaattcaagttgttcatcatggtga

SEQ ID NO: 154808 - DNA, 25 bp, Homo sapien
caaactctgtcctcaaatacaaagt

SEQ ID NO: 154809 - DNA, 25 bp, Homo sapien
tatctagacatagtagaataccctg

SEQ ID NO: 154810 - DNA, 25 bp, Homo sapien
gactggtgagtctaatgaaggccca

SEQ ID NO: 154811 - DNA, 25 bp, Homo sapien
gctctgtgcagaacccgaagtgact

SEQ ID NO: 154812 - DNA, 25 bp, Homo sapien
tctgagccacaaggatgatgactgt

SEQ ID NO: 154813 - DNA, 25 bp, Homo sapien
caaccagcatgcatgtgatcagtcc

SEQ ID NO: 154814 - DNA, 25 bp, Homo sapien
taaaatacctgatacattgcggacc

SEQ ID NO: 154815 - DNA, 25 bp, Homo sapien
cagaggactggactgggtaatgcaa

SEQ ID NO: 154816 - DNA, 25 bp, Homo sapien
cagtcaagcttcaagcgaaacaaaa

SEQ ID NO: 154817 - DNA, 25 bp, Homo sapien
ccatcacggtaattcatggccaact

SEQ ID NO: 154818 - DNA, 25 bp, Homo sapien
ttgaggtacacttgcgggatggtgg

SEQ ID NO: 154819 - DNA, 25 bp, Homo sapien
cacttgcgggatggtgggccagttg

SEQ ID NO: 154820 - DNA, 25 bp, Homo sapien
gtacacttgcgggatggtgggccag

SEQ ID NO: 154821 - DNA, 25 bp, Homo sapien
tgaggtacacttgcgggatggtggg

SEQ ID NO: 154822 - DNA, 25 bp, Homo sapien
cgaaccaaaatgatcagtgcaagca

SEQ ID NO: 154823 - DNA, 25 bp, Homo sapien
ctctttggagactgacacatttgca

SEQ ID NO: 154824 - DNA, 25 bp, Homo sapien
gcagttgcggtctcaatagtgaaaa

SEQ ID NO: 154825 - DNA, 25 bp, Homo sapien
taaaatattcttagcccgaacacca

SEQ ID NO: 154826 - DNA, 25 bp, Homo sapien
tttaatagaagaatatgagactcac

SEQ ID NO: 154827 - DNA, 25 bp, Homo sapien
ccttacagacatatgcacttcggaa

SEQ ID NO: 154828 - DNA, 25 bp, Homo sapien
taaaacactgcaggcactccaaatc

SEQ ID NO: 154829 - DNA, 25 bp, Homo sapien
ttcggaatcaactcaggcatgcaca

SEQ ID NO: 154830 - DNA, 25 bp, Homo sapien
tgctgaggagcagtgctctaatctg

SEQ ID NO: 154831 - DNA, 25 bp, Homo sapien
tgaggtgggtgactgctgaggagca

SEQ ID NO: 154832 - DNA, 25 bp, Homo sapien
tcttttctctaacacggtgaggtgg

SEQ ID NO: 154833 - DNA, 25 bp, Homo sapien
ctctaatctgatggggcagtcccca

SEQ ID NO: 154834 - DNA, 25 bp, Homo sapien
gggacaattttgcagacccggcctc

SEQ ID NO: 154835 - DNA, 25 bp, Homo sapien
gcaagggacaattttgcagacccgg

SEQ ID NO: 154836 - DNA, 25 bp, Homo sapien
agggacaattttgcagacccggcct

SEQ ID NO: 154837 - DNA, 25 bp, Homo sapien
caagggacaattttgcagacccggc

SEQ ID NO: 154838 - DNA, 25 bp, Homo sapien
catcatttcgcttttcagatgaaac

SEQ ID NO: 154839 - DNA, 25 bp, Homo sapien
tgcttcccatcaataagtttctcat

SEQ ID NO: 154840 - DNA, 25 bp, Homo sapien
atgcttcccatcaataagtttctca

SEQ ID NO: 154841 - DNA, 25 bp, Homo sapien
aagtttctcatcatttcgcttttca

SEQ ID NO: 154842 - DNA, 25 bp, Homo sapien
gagttggatgcgtgggctcaagctt

SEQ ID NO: 154843 - DNA, 25 bp, Homo sapien
tggatgcgtgggctcaagcttgaac

SEQ ID NO: 154844 - DNA, 25 bp, Homo sapien
gcgtgggctcaagcttgaacactga

SEQ ID NO: 154845 - DNA, 25 bp, Homo sapien
ggctcaagcttgaacactgagaggc

SEQ ID NO: 154846 - DNA, 25 bp, Homo sapien
tcttcccattgatcaggataaagat

SEQ ID NO: 154847 - DNA, 25 bp, Homo sapien
cattgatcaggataaagatcatggc

SEQ ID NO: 154848 - DNA, 25 bp, Homo sapien
tcaggataaagatcatggctgacaa

SEQ ID NO: 154849 - DNA, 25 bp, Homo sapien
gatcaggataaagatcatggctgac

SEQ ID NO: 154850 - DNA, 25 bp, Homo sapien
ctggccaaaggttctaattccagta

SEQ ID NO: 154851 - DNA, 25 bp, Homo sapien
tccagtacttccaatttttgattaa

SEQ ID NO: 154852 - DNA, 25 bp, Homo sapien
gagtttaggatattaggttctgcca

SEQ ID NO: 154853 - DNA, 25 bp, Homo sapien
aaggagtttaggatattaggttctg

SEQ ID NO: 154854 - DNA, 25 bp, Homo sapien
ccaacgtgctgtaaggatagagatc

SEQ ID NO: 154855 - DNA, 25 bp, Homo sapien
tagtgacttccctcgtgcaagcaag

SEQ ID NO: 154856 - DNA, 25 bp, Homo sapien
tgaacgtaaggctgatccatgctga

SEQ ID NO: 154857 - DNA, 25 bp, Homo sapien
caagcatgcacggaggaagaaaagg

SEQ ID NO: 154858 - DNA, 25 bp, Homo sapien
tactttgtggaagtgactcagcctc

SEQ ID NO: 154859 - DNA, 25 bp, Homo sapien
tgttactttgtggaagtgactcagc

SEQ ID NO: 154860 - DNA, 25 bp, Homo sapien
cagctgtgttactttgtggaagtga

SEQ ID NO: 154861 - DNA, 25 bp, Homo sapien
tcagcctctcggatcttcaacccgt

SEQ ID NO: 154862 - DNA, 25 bp, Homo sapien
tccacggctaaggtccagggactgg

SEQ ID NO: 154863 - DNA, 25 bp, Homo sapien
gactggaggctggtcccattagaat

SEQ ID NO: 154864 - DNA, 25 bp, Homo sapien
cattagaattccacctggagcctgc

SEQ ID NO: 154865 - DNA, 25 bp, Homo sapien
ggcccaagaccatctgcgcaaatga

SEQ ID NO: 154866 - DNA, 25 bp, Homo sapien
acctccagggcaccctgcgaggtca

SEQ ID NO: 154867 - DNA, 25 bp, Homo sapien
cctccagggcaccctgcgaggtcat

SEQ ID NO: 154868 - DNA, 25 bp, Homo sapien
ggacctccagggcaccctgcgaggt

SEQ ID NO: 154869 - DNA, 25 bp, Homo sapien
tggacctccagggcaccctgcgagg

SEQ ID NO: 154870 - DNA, 25 bp, Homo sapien
tccgcgccacgcagttccagttcag

SEQ ID NO: 154871 - DNA, 25 bp, Homo sapien
tcggtgactcggtcgtcctttgtgt

SEQ ID NO: 154872 - DNA, 25 bp, Homo sapien
gactcggtcgtcctttgtgtgatga

SEQ ID NO: 154873 - DNA, 25 bp, Homo sapien
cgtcctttgtgtgatgatgccagcc

SEQ ID NO: 154874 - DNA, 25 bp, Homo sapien
cgtccagaaactccgggaagcgagg

SEQ ID NO: 154875 - DNA, 25 bp, Homo sapien
tttctgttcacgtccagaaactccg

SEQ ID NO: 154876 - DNA, 25 bp, Homo sapien
ccttgcctgactcctgaatgttcag

SEQ ID NO: 154877 - DNA, 25 bp, Homo sapien
tgttcacgtccagaaactccgggaa

SEQ ID NO: 154878 - DNA, 25 bp, Homo sapien
cccaccaaagttcatccctctcctg

SEQ ID NO: 154879 - DNA, 25 bp, Homo sapien
accaaagttcatccctctcctgccc

SEQ ID NO: 154880 - DNA, 25 bp, Homo sapien
caaagttcatccctctcctgcccac

SEQ ID NO: 154881 - DNA, 25 bp, Homo sapien
ccaccaaagttcatccctctcctgc

SEQ ID NO: 154882 - DNA, 25 bp, Homo sapien
cagggaagcgctgagcgcgggcatt

SEQ ID NO: 154883 - DNA, 25 bp, Homo sapien
gataatcggctgataattgcggcag

SEQ ID NO: 154884 - DNA, 25 bp, Homo sapien
cagaagtgaagcgactgctttgaac

SEQ ID NO: 154885 - DNA, 25 bp, Homo sapien
gctttgaacgctgacagcaccagga

SEQ ID NO: 154886 - DNA, 25 bp, Homo sapien
tgctacttagtaccaggagcttcat

SEQ ID NO: 154887 - DNA, 25 bp, Homo sapien
acttacttggtgagaacaggtcttc

SEQ ID NO: 154888 - DNA, 25 bp, Homo sapien
ttggatgatgcccacttacttggtg

SEQ ID NO: 154889 - DNA, 25 bp, Homo sapien
caatctgggctctcagtggattgga

SEQ ID NO: 154890 - DNA, 25 bp, Homo sapien
gttcaatctgggctctcagtggatt

SEQ ID NO: 154891 - DNA, 25 bp, Homo sapien
gattccacgctaggcattttgggac

SEQ ID NO: 154892 - DNA, 25 bp, Homo sapien
ctagagaagtcatgtggagggccat

SEQ ID NO: 154893 - DNA, 25 bp, Homo sapien
gatagcatctgagctctaccacgta

SEQ ID NO: 154894 - DNA, 25 bp, Homo sapien
cgtatttaccgtgggatcctggaga

SEQ ID NO: 154895 - DNA, 25 bp, Homo sapien
tcctcaaagaccctgccaagactgt

SEQ ID NO: 154896 - DNA, 25 bp, Homo sapien
ccaagactgtcccatagcgtgcatc

SEQ ID NO: 154897 - DNA, 25 bp, Homo sapien
caccaacaggcatccacgttgctgg

SEQ ID NO: 154898 - DNA, 25 bp, Homo sapien
catagcgtgcatctctgtgactatc

SEQ ID NO: 154899 - DNA, 25 bp, Homo sapien
gcccaagtactgtggtttgtcaacc

SEQ ID NO: 154900 - DNA, 25 bp, Homo sapien
tatagccaaataggaatgagtgcgt

SEQ ID NO: 154901 - DNA, 25 bp, Homo sapien
gctctagggctttaaggactggacc

SEQ ID NO: 154902 - DNA, 25 bp, Homo sapien
cacagggaccgacagtaatcaaagc

SEQ ID NO: 154903 - DNA, 25 bp, Homo sapien
gaaagccctggttgataatccactg

SEQ ID NO: 154904 - DNA, 25 bp, Homo sapien
cattcacctgtgcaaggaaatttga

SEQ ID NO: 154905 - DNA, 25 bp, Homo sapien
gaatggcttccagtctcgattttga

SEQ ID NO: 154906 - DNA, 25 bp, Homo sapien
ctcgcctggcaagtactaatctagt

SEQ ID NO: 154907 - DNA, 25 bp, Homo sapien
gctgctagatttcaaggcatgattc

SEQ ID NO: 154908 - DNA, 25 bp, Homo sapien
aaccccgaagtacaccttgctcagt

SEQ ID NO: 154909 - DNA, 25 bp, Homo sapien
tcctgatttagctgaacaccaacct

SEQ ID NO: 154910 - DNA, 25 bp, Homo sapien
gacaggtgccaagcctgattttcct

SEQ ID NO: 154911 - DNA, 25 bp, Homo sapien
ttgctgtgaacgttgggtagtacag

SEQ ID NO: 154912 - DNA, 25 bp, Homo sapien
aggcaaattttccatgccctggtga

SEQ ID NO: 154913 - DNA, 25 bp, Homo sapien
tggtggttgacatgaaggcaaattt

SEQ ID NO: 154914 - DNA, 25 bp, Homo sapien
cagtttgcaggaccatttgcttggc

SEQ ID NO: 154915 - DNA, 25 bp, Homo sapien
tgcagacaacgaaaacagccgagag

SEQ ID NO: 154916 - DNA, 25 bp, Homo sapien
tcacacaaaagggaaggactaactg

SEQ ID NO: 154917 - DNA, 25 bp, Homo sapien
gattccagagctacggtgcccttag

SEQ ID NO: 154918 - DNA, 25 bp, Homo sapien
gacaattctactatgggtgctgccc

SEQ ID NO: 154919 - DNA, 25 bp, Homo sapien
ctgggatagaatgttaaacacattc

SEQ ID NO: 154920 - DNA, 25 bp, Homo sapien
ttgtgtaaaatgtcgtatatgactg

SEQ ID NO: 154921 - DNA, 25 bp, Homo sapien
ctgaagcgttccagggaagacccct

SEQ ID NO: 154922 - DNA, 25 bp, Homo sapien
tatatgactgaagcgttccagggaa

SEQ ID NO: 154923 - DNA, 25 bp, Homo sapien
tgtcgtatatgactgaagcgttcca

SEQ ID NO: 154924 - DNA, 25 bp, Homo sapien
caccaaccttcatctggagtgtctc

SEQ ID NO: 154925 - DNA, 25 bp, Homo sapien
ccttcatctggagtgtctcaagacc

SEQ ID NO: 154926 - DNA, 25 bp, Homo sapien
cccacacatacctccttacacaggt

SEQ ID NO: 154927 - DNA, 25 bp, Homo sapien
ccacaccaaccttcatctggagtgt

SEQ ID NO: 154928 - DNA, 25 bp, Homo sapien
acttgaattgttgggtggaggttgg

SEQ ID NO: 154929 - DNA, 25 bp, Homo sapien
caggttacaggtagatttaaaattg

SEQ ID NO: 154930 - DNA, 25 bp, Homo sapien
ctctggcctggcacagagggagata

SEQ ID NO: 154931 - DNA, 25 bp, Homo sapien
tgcactctggcctggcacagaggga

SEQ ID NO: 154932 - DNA, 25 bp, Homo sapien
ctggcctggcacagagggagataac

SEQ ID NO: 154933 - DNA, 25 bp, Homo sapien
cactctggcctggcacagagggaga

SEQ ID NO: 154934 - DNA, 25 bp, Homo sapien
taatttgccagatatgatgacacgt

SEQ ID NO: 154935 - DNA, 25 bp, Homo sapien
ttttttaatttgccagatatgatga

SEQ ID NO: 154936 - DNA, 25 bp, Homo sapien
tttaatttgccagatatgatgacac

SEQ ID NO: 154937 - DNA, 25 bp, Homo sapien
atttgccagatatgatgacacgtgc

SEQ ID NO: 154938 - DNA, 25 bp, Homo sapien
gaaggacaggcacatttattgatca

SEQ ID NO: 154939 - DNA, 25 bp, Homo sapien
tcagaaatattgaaatgggctgggc

SEQ ID NO: 154940 - DNA, 25 bp, Homo sapien
tattgatcagaaatattgaaatggg

SEQ ID NO: 154941 - DNA, 25 bp, Homo sapien
gaaatattgaaatgggctgggcaca

SEQ ID NO: 154942 - DNA, 25 bp, Homo sapien
ttcacaagttcaacatccagtcgca

SEQ ID NO: 154943 - DNA, 25 bp, Homo sapien
cattgtcagataaggaggggctcaa

SEQ ID NO: 154944 - DNA, 25 bp, Homo sapien
tcctgtgcaccctttcttaggaagc

SEQ ID NO: 154945 - DNA, 25 bp, Homo sapien
gcattattaatcaaaggttagggtc

SEQ ID NO: 154946 - DNA, 25 bp, Homo sapien
ttgatttcaccggacagcgctggcg

SEQ ID NO: 154947 - DNA, 25 bp, Homo sapien
agcgctggcgatcattaacccacca

SEQ ID NO: 154948 - DNA, 25 bp, Homo sapien
gcatgcttgttcagtaaaagtgaaa

SEQ ID NO: 154949 - DNA, 25 bp, Homo sapien
gtagaatagcatgcttgttcagtaa

SEQ ID NO: 154950 - DNA, 25 bp, Homo sapien
gaagtcagatgagcatttgcccaga

SEQ ID NO: 154951 - DNA, 25 bp, Homo sapien
cccagaggttggtagatggagccca

SEQ ID NO: 154952 - DNA, 25 bp, Homo sapien
ggctggtaaatattctccctcttcc

SEQ ID NO: 154953 - DNA, 25 bp, Homo sapien
tgctgtgtgtctatggaagtcagat

SEQ ID NO: 154954 - DNA, 25 bp, Homo sapien
aatgcatatgagatataagcacaga

SEQ ID NO: 154955 - DNA, 25 bp, Homo sapien
taatgcatatgagatataagcacag

SEQ ID NO: 154956 - DNA, 25 bp, Homo sapien
ataatgcatatgagatataagcaca

SEQ ID NO: 154957 - DNA, 25 bp, Homo sapien
atgcatatgagatataagcacagag

SEQ ID NO: 154958 - DNA, 25 bp, Homo sapien
tccatcttgtaaaccaagaagtatc

SEQ ID NO: 154959 - DNA, 25 bp, Homo sapien
ttcagcctccatcttgtaaaccaag

SEQ ID NO: 154960 - DNA, 25 bp, Homo sapien
gaattctcactaagtcctcttccca

SEQ ID NO: 154961 - DNA, 25 bp, Homo sapien
tctgtgagttgagtgaggatctttc

SEQ ID NO: 154962 - DNA, 25 bp, Homo sapien
tgcgctgctcggatgcacttggctg

SEQ ID NO: 154963 - DNA, 25 bp, Homo sapien
tgaactgagatagcatgaaaacagg

SEQ ID NO: 154964 - DNA, 25 bp, Homo sapien
aaaacaggtggcatgggctgcagaa

SEQ ID NO: 154965 - DNA, 25 bp, Homo sapien
aggaaacctggatcctgcgctgctc

SEQ ID NO: 154966 - DNA, 25 bp, Homo sapien
ttcatatacgaaggcaggaagccgt

SEQ ID NO: 154967 - DNA, 25 bp, Homo sapien
aaaaatgtgtttggtgctcagccca

SEQ ID NO: 154968 - DNA, 25 bp, Homo sapien
cagagctgtgcgtgcggtaaacaaa

SEQ ID NO: 154969 - DNA, 25 bp, Homo sapien
tgatttctgcaagaccaggccagac

SEQ ID NO: 154970 - DNA, 25 bp, Homo sapien
gcctcttcctctgtgtcactctggg

SEQ ID NO: 154971 - DNA, 25 bp, Homo sapien
gggcctcttcctctgtgtcactctg

SEQ ID NO: 154972 - DNA, 25 bp, Homo sapien
tcttcctctgtgtcactctgggctc

SEQ ID NO: 154973 - DNA, 25 bp, Homo sapien
ggggcctcttcctctgtgtcactct

SEQ ID NO: 154974 - DNA, 25 bp, Homo sapien
gaagagcctggtaatctcaagcata

SEQ ID NO: 154975 - DNA, 25 bp, Homo sapien
gcctggtaatctcaagcatatcacc

SEQ ID NO: 154976 - DNA, 25 bp, Homo sapien
aggttcagaagagcctggtaatctc

SEQ ID NO: 154977 - DNA, 25 bp, Homo sapien
gaaggtcccccaggttcagaagagc

SEQ ID NO: 154978 - DNA, 25 bp, Homo sapien
taacgtaggatgtgcacagagcagc

SEQ ID NO: 154979 - DNA, 25 bp, Homo sapien
cagaggctctcaagctgtagacagc

SEQ ID NO: 154980 - DNA, 25 bp, Homo sapien
catcacggaagttgggtttggccct

SEQ ID NO: 154981 - DNA, 25 bp, Homo sapien
cagggtctggaaacacttcgtccga

SEQ ID NO: 154982 - DNA, 25 bp, Homo sapien
ttctggagcctctttgacgtgccag

SEQ ID NO: 154983 - DNA, 25 bp, Homo sapien
tatgtgggctccaaactgtagccag

SEQ ID NO: 154984 - DNA, 25 bp, Homo sapien
ccaggcctggggataactattgaaa

SEQ ID NO: 154985 - DNA, 25 bp, Homo sapien
agcctctttgacgtgccaggcctgg

SEQ ID NO: 154986 - DNA, 25 bp, Homo sapien
tacttgtacctctgtcagggacgcc

SEQ ID NO: 154987 - DNA, 25 bp, Homo sapien
ggtcttcatccctatccagaggagg

SEQ ID NO: 154988 - DNA, 25 bp, Homo sapien
gctgcttagaacacgcccatggaaa

SEQ ID NO: 154989 - DNA, 25 bp, Homo sapien
aaaagcttagtagcccagccctgtg

SEQ ID NO: 154990 - DNA, 25 bp, Homo sapien
ctgtagaaaacaggacaaaggtgac

SEQ ID NO: 154991 - DNA, 25 bp, Homo sapien
tgtagaaaacaggacaaaggtgacc

SEQ ID NO: 154992 - DNA, 25 bp, Homo sapien
aatgtaggtatgacttgtgccttgc

SEQ ID NO: 154993 - DNA, 25 bp, Homo sapien
ctccttgaatgtaggtatgacttgt

SEQ ID NO: 154994 - DNA, 25 bp, Homo sapien
aggtatgacttgtgccttgcttcta

SEQ ID NO: 154995 - DNA, 25 bp, Homo sapien
cttgaatgtaggtatgacttgtgcc

SEQ ID NO: 154996 - DNA, 25 bp, Homo sapien
tctagggaagcgcacctgattgcag

SEQ ID NO: 154997 - DNA, 25 bp, Homo sapien
cccagggagttgctaagagctcagt

SEQ ID NO: 154998 - DNA, 25 bp, Homo sapien
cacaaccggaaattacagctctggg

SEQ ID NO: 154999 - DNA, 25 bp, Homo sapien
tttggcaggaccacggagatacaag

SEQ ID NO: 155000 - DNA, 25 bp, Homo sapien
gacgtgactcgaatctgcaatggca

SEQ ID NO: 155001 - DNA, 25 bp, Homo sapien
gaaaaaaggacgtgactcgaatctg

SEQ ID NO: 155002 - DNA, 25 bp, Homo sapien
ctgctcttggcccagtgtgaatgtg

SEQ ID NO: 155003 - DNA, 25 bp, Homo sapien
gtgtctgggatgtaaatctgttgtc

SEQ ID NO: 155004 - DNA, 25 bp, Homo sapien
agcagatccagaggcgaatgagaca

SEQ ID NO: 155005 - DNA, 25 bp, Homo sapien
tatcgggctcccactttgtgctggc

SEQ ID NO: 155006 - DNA, 25 bp, Homo sapien
gcacagtcctggatgcagcagatcc

SEQ ID NO: 155007 - DNA, 25 bp, Homo sapien
gagacaggcacgtgcctctctgctt

SEQ ID NO: 155008 - DNA, 25 bp, Homo sapien
ctccctccttctgccttttgtcacc

SEQ ID NO: 155009 - DNA, 25 bp, Homo sapien
gccttttgtcacctttcatttcttc

SEQ ID NO: 155010 - DNA, 25 bp, Homo sapien
ggtctccctccttctgccttttgtc

SEQ ID NO: 155011 - DNA, 25 bp, Homo sapien
tctgccttttgtcacctttcatttc

SEQ ID NO: 155012 - DNA, 25 bp, Homo sapien
tagtcacccacttgctaagatacca

SEQ ID NO: 155013 - DNA, 25 bp, Homo sapien
tcaagtcctcgtgtatcagctttcc

SEQ ID NO: 155014 - DNA, 25 bp, Homo sapien
cccagacagtggtagtcacccactt

SEQ ID NO: 155015 - DNA, 25 bp, Homo sapien
aagtcctcgtgtatcagctttcccc

SEQ ID NO: 155016 - DNA, 25 bp, Homo sapien
catttactcactcgagatatacatg

SEQ ID NO: 155017 - DNA, 25 bp, Homo sapien
ttactcactcgagatatacatgtat

SEQ ID NO: 155018 - DNA, 25 bp, Homo sapien
cacatttactcactcgagatataca

SEQ ID NO: 155019 - DNA, 25 bp, Homo sapien
tacacatttactcactcgagatata

SEQ ID NO: 155020 - DNA, 25 bp, Homo sapien
taaggaacggcataaagagtacgtc

SEQ ID NO: 155021 - DNA, 25 bp, Homo sapien
taagcttcctgatgctcaaggtcca

SEQ ID NO: 155022 - DNA, 25 bp, Homo sapien
caagcttggatttgggttctggcac

SEQ ID NO: 155023 - DNA, 25 bp, Homo sapien
gccatactagtgttcgaggtcccca

SEQ ID NO: 155024 - DNA, 25 bp, Homo sapien
tgagttcttagaacatgcctggcac

SEQ ID NO: 155025 - DNA, 25 bp, Homo sapien
tattgagtattgtgctagctctcca

SEQ ID NO: 155026 - DNA, 25 bp, Homo sapien
tactagccacgtgaattccagcaag

SEQ ID NO: 155027 - DNA, 25 bp, Homo sapien
ctgaaactgctctcttaaagggccc

SEQ ID NO: 155028 - DNA, 25 bp, Homo sapien
tcttatttatactcgggccctgcag

SEQ ID NO: 155029 - DNA, 25 bp, Homo sapien
tggtggacgctgcaaaccctgttca

SEQ ID NO: 155030 - DNA, 25 bp, Homo sapien
gacggtcacttagccaagatcacag

SEQ ID NO: 155031 - DNA, 25 bp, Homo sapien
caagctactccataacaacagaggg

SEQ ID NO: 155032 - DNA, 25 bp, Homo sapien
cctggcacacggtagatcatcaatg

SEQ ID NO: 155033 - DNA, 25 bp, Homo sapien
ccagaaacattggaagggcccagag

SEQ ID NO: 155034 - DNA, 25 bp, Homo sapien
gtcctcagcatcaaaccagtgccag

SEQ ID NO: 155035 - DNA, 25 bp, Homo sapien
aatcacatttgtaaagtccctggca

SEQ ID NO: 155036 - DNA, 25 bp, Homo sapien
gtttggctgtccagtggctaatctc

SEQ ID NO: 155037 - DNA, 25 bp, Homo sapien
tttggctgtccagtggctaatctcc

SEQ ID NO: 155038 - DNA, 25 bp, Homo sapien
ggatagagtctatcctgcccacagg

SEQ ID NO: 155039 - DNA, 25 bp, Homo sapien
cacagaactaacacaccaggctggg

SEQ ID NO: 155040 - DNA, 25 bp, Homo sapien
ccaagtgggcacatgttacagcgtt

SEQ ID NO: 155041 - DNA, 25 bp, Homo sapien
cactttctctgttagcacgggctcg

SEQ ID NO: 155042 - DNA, 25 bp, Homo sapien
gagagactggactacaggcaaggta

SEQ ID NO: 155043 - DNA, 25 bp, Homo sapien
tttataattagtgaataatcagcag

SEQ ID NO: 155044 - DNA, 25 bp, Homo sapien
taaactgaagtggtgagagcccaag

SEQ ID NO: 155045 - DNA, 25 bp, Homo sapien
tctgaaagtagcattggcctgttgc

SEQ ID NO: 155046 - DNA, 25 bp, Homo sapien
ggcaagtctgcaaccgggacccgcc

SEQ ID NO: 155047 - DNA, 25 bp, Homo sapien
accgggacccgcctctaggctcaca

SEQ ID NO: 155048 - DNA, 25 bp, Homo sapien
gtctgcaaccgggacccgcctctag

SEQ ID NO: 155049 - DNA, 25 bp, Homo sapien
gacccgcctctaggctcacacgtgt

SEQ ID NO: 155050 - DNA, 25 bp, Homo sapien
ggattgaaccgcacgaccacagtca

SEQ ID NO: 155051 - DNA, 25 bp, Homo sapien
ggcctctggatccacagacggccag

SEQ ID NO: 155052 - DNA, 25 bp, Homo sapien
tggcccattccctacgcgagggatt

SEQ ID NO: 155053 - DNA, 25 bp, Homo sapien
tcctcatcttcgtagatgccaggcc

SEQ ID NO: 155054 - DNA, 25 bp, Homo sapien
ggcccacatgattaaactttgtctc

SEQ ID NO: 155055 - DNA, 25 bp, Homo sapien
cccacatgattaaactttgtctctc

SEQ ID NO: 155056 - DNA, 25 bp, Homo sapien
tggcccacatgattaaactttgtct

SEQ ID NO: 155057 - DNA, 25 bp, Homo sapien
cctggcccacatgattaaactttgt

SEQ ID NO: 155058 - DNA, 25 bp, Homo sapien
cttatcccacccgtggctaagttat

SEQ ID NO: 155059 - DNA, 25 bp, Homo sapien
tcccacccgtggctaagttatttga

SEQ ID NO: 155060 - DNA, 25 bp, Homo sapien
cacccgtggctaagttatttgaaga

SEQ ID NO: 155061 - DNA, 25 bp, Homo sapien
cgtggctaagttatttgaagaatcc

SEQ ID NO: 155062 - DNA, 25 bp, Homo sapien
cagaaactggaatccgctgctcggt

SEQ ID NO: 155063 - DNA, 25 bp, Homo sapien
agtagctcccgggtatgcactgcca

SEQ ID NO: 155064 - DNA, 25 bp, Homo sapien
ggccatggtctgctatttcccagaa

SEQ ID NO: 155065 - DNA, 25 bp, Homo sapien
actgccatctgccacaagtgcactg

SEQ ID NO: 155066 - DNA, 25 bp, Homo sapien
cctctccggctgatatgttaggacc

SEQ ID NO: 155067 - DNA, 25 bp, Homo sapien
tctccggctgatatgttaggaccag

SEQ ID NO: 155068 - DNA, 25 bp, Homo sapien
ctctccggctgatatgttaggacca

SEQ ID NO: 155069 - DNA, 25 bp, Homo sapien
tgccatggttaaatctagggacccg

SEQ ID NO: 155070 - DNA, 25 bp, Homo sapien
tatggtctcgaggaagtcattccca

SEQ ID NO: 155071 - DNA, 25 bp, Homo sapien
tgatccctacactgagacgcacagg

SEQ ID NO: 155072 - DNA, 25 bp, Homo sapien
gaggccacgccgtctttctgaaaag

SEQ ID NO: 155073 - DNA, 25 bp, Homo sapien
gagtttccaatcacgagctgcactg

SEQ ID NO: 155074 - DNA, 25 bp, Homo sapien
tcagcagaactgatacccacagggc

SEQ ID NO: 155075 - DNA, 25 bp, Homo sapien
gcactggatctatttcgggccaaag

SEQ ID NO: 155076 - DNA, 25 bp, Homo sapien
cctaagtacagacctgagtgggaca

SEQ ID NO: 155077 - DNA, 25 bp, Homo sapien
gtgagcaataaagtttaattaacca

SEQ ID NO: 155078 - DNA, 25 bp, Homo sapien
aagtttaattaaccagtactgtgag

SEQ ID NO: 155079 - DNA, 25 bp, Homo sapien
ttaattaaccagtactgtgaggtca

SEQ ID NO: 155080 - DNA, 25 bp, Homo sapien
cagtgagcaataaagtttaattaac

SEQ ID NO: 155081 - DNA, 25 bp, Homo sapien
tccatagccctatgtaccactaaga

SEQ ID NO: 155082 - DNA, 25 bp, Homo sapien
gatggctacttttactgtccctgta

SEQ ID NO: 155083 - DNA, 25 bp, Homo sapien
gatatgttaatctgcacaacagccc

SEQ ID NO: 155084 - DNA, 25 bp, Homo sapien
tatctttgcaacaacgaagcctccg

SEQ ID NO: 155085 - DNA, 25 bp, Homo sapien
aaagagtagtatattgtggaaaatg

SEQ ID NO: 155086 - DNA, 25 bp, Homo sapien
gcctcgggctaggcaaattccttgt

SEQ ID NO: 155087 - DNA, 25 bp, Homo sapien
acaaagagtagtatattgtggaaaa

SEQ ID NO: 155088 - DNA, 25 bp, Homo sapien
aattccttgtggctaaaggagaaag

SEQ ID NO: 155089 - DNA, 25 bp, Homo sapien
cagctagccgcaggaagacatctct

SEQ ID NO: 155090 - DNA, 25 bp, Homo sapien
gaaggcgcaggagtgaggaatggag

SEQ ID NO: 155091 - DNA, 25 bp, Homo sapien
ggctctggccgatcaatgccttctc

SEQ ID NO: 155092 - DNA, 25 bp, Homo sapien
tgcctctcagattgacggcgtggag

SEQ ID NO: 155093 - DNA, 25 bp, Homo sapien
tcttgcgtcgggaagacgtcgtcct

SEQ ID NO: 155094 - DNA, 25 bp, Homo sapien
caacccgccagaaaaaagtgtgcct

SEQ ID NO: 155095 - DNA, 25 bp, Homo sapien
taccctgatggacgataccgatcct

SEQ ID NO: 155096 - DNA, 25 bp, Homo sapien
caagcggaacctgaaagtatgccct

SEQ ID NO: 155097 - DNA, 25 bp, Homo sapien
tggacttatttctcacttcacagct

SEQ ID NO: 155098 - DNA, 25 bp, Homo sapien
gatcctagggccattgatgaggctg

SEQ ID NO: 155099 - DNA, 25 bp, Homo sapien
tggccacaaaagtccatcccagcag

SEQ ID NO: 155100 - DNA, 25 bp, Homo sapien
tccccaacagagcttattagcgagc

SEQ ID NO: 155101 - DNA, 25 bp, Homo sapien
tgctgattacaagagagccctcgtc

SEQ ID NO: 155102 - DNA, 25 bp, Homo sapien
cacacatgcacgtagagatccaagc

SEQ ID NO: 155103 - DNA, 25 bp, Homo sapien
taaagctaatctgggcagacccctc

SEQ ID NO: 155104 - DNA, 25 bp, Homo sapien
ggtcattttcaacgaggctgcaggg

SEQ ID NO: 155105 - DNA, 25 bp, Homo sapien
tgtgaagatgcagtaagagccgcca

SEQ ID NO: 155106 - DNA, 25 bp, Homo sapien
agatgcagtaagagccgccatcttg

SEQ ID NO: 155107 - DNA, 25 bp, Homo sapien
tgaagatgcagtaagagccgccatc

SEQ ID NO: 155108 - DNA, 25 bp, Homo sapien
catgtgaagatgcagtaagagccgc

SEQ ID NO: 155109 - DNA, 25 bp, Homo sapien
taacggaagccatgaatcctggacc

SEQ ID NO: 155110 - DNA, 25 bp, Homo sapien
cagtgtctatcctctgcagggataa

SEQ ID NO: 155111 - DNA, 25 bp, Homo sapien
tctatcctctgcagggataacggaa

SEQ ID NO: 155112 - DNA, 25 bp, Homo sapien
tctgcagggataacggaagccatga

SEQ ID NO: 155113 - DNA, 25 bp, Homo sapien
tatttccctaagaaaacagtataga

SEQ ID NO: 155114 - DNA, 25 bp, Homo sapien
tctgctttcattctgttacaatgga

SEQ ID NO: 155115 - DNA, 25 bp, Homo sapien
aatctatgcttacggttctggagtc

SEQ ID NO: 155116 - DNA, 25 bp, Homo sapien
cagtaggtttagtatctggagaggc

SEQ ID NO: 155117 - DNA, 25 bp, Homo sapien
caggtgagtgacaggcagtgaaagt

SEQ ID NO: 155118 - DNA, 25 bp, Homo sapien
caggcagtgaaagtggggaagccat

SEQ ID NO: 155119 - DNA, 25 bp, Homo sapien
gtgagtgacaggcagtgaaagtggg

SEQ ID NO: 155120 - DNA, 25 bp, Homo sapien
ttccaggtgagtgacaggcagtgaa

SEQ ID NO: 155121 - DNA, 25 bp, Homo sapien
tggcgtcttttatgtttactccgta

SEQ ID NO: 155122 - DNA, 25 bp, Homo sapien
ttttatgtttactccgtaattctgc

SEQ ID NO: 155123 - DNA, 25 bp, Homo sapien
tccctggcgtcttttatgtttactc

SEQ ID NO: 155124 - DNA, 25 bp, Homo sapien
gtttactccgtaattctgcaatggc

SEQ ID NO: 155125 - DNA, 25 bp, Homo sapien
tggtgcctggtgttagttatgatga

SEQ ID NO: 155126 - DNA, 25 bp, Homo sapien
tcgagcatccaactggtgcctggtg

SEQ ID NO: 155127 - DNA, 25 bp, Homo sapien
tgcctcgagcatccaactggtgcct

SEQ ID NO: 155128 - DNA, 25 bp, Homo sapien
tgttagttatgatgaggaaggacca

SEQ ID NO: 155129 - DNA, 25 bp, Homo sapien
tgacacaggtgctgttacaggcaga

SEQ ID NO: 155130 - DNA, 25 bp, Homo sapien
tgctgttacaggcagagtgtccacc

SEQ ID NO: 155131 - DNA, 25 bp, Homo sapien
ctggtgacacaggtgctgttacagg

SEQ ID NO: 155132 - DNA, 25 bp, Homo sapien
gcagagtgtccacctcatgctggcc

SEQ ID NO: 155133 - DNA, 25 bp, Homo sapien
cgtggtcagaatgcgtgactggtcc

SEQ ID NO: 155134 - DNA, 25 bp, Homo sapien
agttgtgtgatgcattccgtggtca

SEQ ID NO: 155135 - DNA, 25 bp, Homo sapien
tcttttgtgttattccgtaaagcca

SEQ ID NO: 155136 - DNA, 25 bp, Homo sapien
aattctacctggaggatcagggcag

SEQ ID NO: 155137 - DNA, 25 bp, Homo sapien
cacggtattgagcatgaacttctgg

SEQ ID NO: 155138 - DNA, 25 bp, Homo sapien
gaaaccctgagcagttgctcgaggt

SEQ ID NO: 155139 - DNA, 25 bp, Homo sapien
ccccagtgagtacggacaccgtgga

SEQ ID NO: 155140 - DNA, 25 bp, Homo sapien
cgtggagatcccaagccagagctga

SEQ ID NO: 155141 - DNA, 25 bp, Homo sapien
ggtagggttgaggtcacatgactgc

SEQ ID NO: 155142 - DNA, 25 bp, Homo sapien
aaacaagccagtcttgagtcatgtg

SEQ ID NO: 155143 - DNA, 25 bp, Homo sapien
aagccagtcttgagtcatgtggtca

SEQ ID NO: 155144 - DNA, 25 bp, Homo sapien
gcttggtccaattggctgtggtagg

SEQ ID NO: 155145 - DNA, 25 bp, Homo sapien
gagaagcttgccaaccagaaaagct

SEQ ID NO: 155146 - DNA, 25 bp, Homo sapien
gaagcttgccaaccagaaaagctgg

SEQ ID NO: 155147 - DNA, 25 bp, Homo sapien
agagaagcttgccaaccagaaaagc

SEQ ID NO: 155148 - DNA, 25 bp, Homo sapien
agcttgccaaccagaaaagctggaa

SEQ ID NO: 155149 - DNA, 25 bp, Homo sapien
ggctgcgcgcgagccaggtggtggc

SEQ ID NO: 155150 - DNA, 25 bp, Homo sapien
cagcaatcggcgcaggttaaggcat

SEQ ID NO: 155151 - DNA, 25 bp, Homo sapien
atcggcgcaggttaaggcattctgg

SEQ ID NO: 155152 - DNA, 25 bp, Homo sapien
acctcggcggcagcaatcggcgcag

SEQ ID NO: 155153 - DNA, 25 bp, Homo sapien
ctggctaggtgtgcgcgcagcctgc

SEQ ID NO: 155154 - DNA, 25 bp, Homo sapien
gcgggaggacctcggagaggcagcg

SEQ ID NO: 155155 - DNA, 25 bp, Homo sapien
gggaccccgtgcgcgctgctcatgt

SEQ ID NO: 155156 - DNA, 25 bp, Homo sapien
atgtccccgtctgccgctggctagg

SEQ ID NO: 155157 - DNA, 25 bp, Homo sapien
gaagcgcatccggaggcggttgagg

SEQ ID NO: 155158 - DNA, 25 bp, Homo sapien
tcccgggcagcgttgacccgctggc

SEQ ID NO: 155159 - DNA, 25 bp, Homo sapien
tgcctcattctcccgggcagcgttg

SEQ ID NO: 155160 - DNA, 25 bp, Homo sapien
gcgcggggcacgcagcagagccgca

SEQ ID NO: 155161 - DNA, 25 bp, Homo sapien
gacccaaattacataatagttcttg

SEQ ID NO: 155162 - DNA, 25 bp, Homo sapien
ttgacccaaattacataatagttct

SEQ ID NO: 155163 - DNA, 25 bp, Homo sapien
cattgacccaaattacataatagtt

SEQ ID NO: 155164 - DNA, 25 bp, Homo sapien
cccattgacccaaattacataatag

SEQ ID NO: 155165 - DNA, 25 bp, Homo sapien
ccgctccatttcctgttggctagag

SEQ ID NO: 155166 - DNA, 25 bp, Homo sapien
ctagagtccacgatggctgggcagc

SEQ ID NO: 155167 - DNA, 25 bp, Homo sapien
cagcctgaatgcatttgcagaggca

SEQ ID NO: 155168 - DNA, 25 bp, Homo sapien
aattgctgaagccagcggctacctt

SEQ ID NO: 155169 - DNA, 25 bp, Homo sapien
gatctgcctgataaagcactgaagg

SEQ ID NO: 155170 - DNA, 25 bp, Homo sapien
agatctgcctgataaagcactgaag

SEQ ID NO: 155171 - DNA, 25 bp, Homo sapien
atctgcctgataaagcactgaaggt

SEQ ID NO: 155172 - DNA, 25 bp, Homo sapien
gctggggtgtcagacgcaggagcca

SEQ ID NO: 155173 - DNA, 25 bp, Homo sapien
tgagtggaggattcacggatggatg

SEQ ID NO: 155174 - DNA, 25 bp, Homo sapien
gttgagtggaggattcacggatgga

SEQ ID NO: 155175 - DNA, 25 bp, Homo sapien
ctggctggggtgtcagacgcaggag

SEQ ID NO: 155176 - DNA, 25 bp, Homo sapien
cacgggtcgattctttctgctgctg

SEQ ID NO: 155177 - DNA, 25 bp, Homo sapien
ttaacaatgatttctgaggactccg

SEQ ID NO: 155178 - DNA, 25 bp, Homo sapien
agcaggctccagacacgggtcgatt

SEQ ID NO: 155179 - DNA, 25 bp, Homo sapien
tgggtcccggtgtaagcccacagac

SEQ ID NO: 155180 - DNA, 25 bp, Homo sapien
gacagatgcgaaagcggcacaatcc

SEQ ID NO: 155181 - DNA, 25 bp, Homo sapien
tgcagcatctcagacagatgcgaaa

SEQ ID NO: 155182 - DNA, 25 bp, Homo sapien
ggcagcagctgacttcatgtccctc

SEQ ID NO: 155183 - DNA, 25 bp, Homo sapien
gcggcacaatccgtccacaggctgg

SEQ ID NO: 155184 - DNA, 25 bp, Homo sapien
aacatctgtcactattctctggaga

SEQ ID NO: 155185 - DNA, 25 bp, Homo sapien
cactattctctggagatgctggctg

SEQ ID NO: 155186 - DNA, 25 bp, Homo sapien
tgtcactattctctggagatgctgg

SEQ ID NO: 155187 - DNA, 25 bp, Homo sapien
cagacaacatctgtcactattctct

SEQ ID NO: 155188 - DNA, 25 bp, Homo sapien
agcccagagacaccggagcaacagc

SEQ ID NO: 155189 - DNA, 25 bp, Homo sapien
aggcaccacgtggtggagcagccca

SEQ ID NO: 155190 - DNA, 25 bp, Homo sapien
caagaaaaaggccacctggtggtgg

SEQ ID NO: 155191 - DNA, 25 bp, Homo sapien
ggtggtggatgccatgatgggcagg

SEQ ID NO: 155192 - DNA, 25 bp, Homo sapien
aaagctctgactgcggtatgggtag

SEQ ID NO: 155193 - DNA, 25 bp, Homo sapien
aagccagggaaggtgattcattgag

SEQ ID NO: 155194 - DNA, 25 bp, Homo sapien
atgctaaagctctgactgcggtatg

SEQ ID NO: 155195 - DNA, 25 bp, Homo sapien
gcaggatggtaaagggtctatgcac

SEQ ID NO: 155196 - DNA, 25 bp, Homo sapien
tgatcacaatcaggttcagaatggt

SEQ ID NO: 155197 - DNA, 25 bp, Homo sapien
actagtgattaccatcttggttgca

SEQ ID NO: 155198 - DNA, 25 bp, Homo sapien
tggtcccgataatccccagcattgc

SEQ ID NO: 155199 - DNA, 25 bp, Homo sapien
cacagggtggtgtatatgtagacaa

SEQ ID NO: 155200 - DNA, 25 bp, Homo sapien
tctgctagtgtccagggagttccca

SEQ ID NO: 155201 - DNA, 25 bp, Homo sapien
gactaatacagctggcaatggcaga

SEQ ID NO: 155202 - DNA, 25 bp, Homo sapien
gagtaatgcacctaatcccgagctt

SEQ ID NO: 155203 - DNA, 25 bp, Homo sapien
cacccgcttttgaggaggatcccag

SEQ ID NO: 155204 - DNA, 25 bp, Homo sapien
actatgactcttaccccattctgga

SEQ ID NO: 155205 - DNA, 25 bp, Homo sapien
ctgtgtcagggagggaggtgcgagg

SEQ ID NO: 155206 - DNA, 25 bp, Homo sapien
gaggtgcgaggacctttcattactt

SEQ ID NO: 155207 - DNA, 25 bp, Homo sapien
catgcaactatgactcttaccccat

SEQ ID NO: 155208 - DNA, 25 bp, Homo sapien
ctgattctgcaaatctgatataagc

SEQ ID NO: 155209 - DNA, 25 bp, Homo sapien
gattctgcaaatctgatataagctt

SEQ ID NO: 155210 - DNA, 25 bp, Homo sapien
aatctgatataagctttctgctgtg

SEQ ID NO: 155211 - DNA, 25 bp, Homo sapien
caaatctgatataagctttctgctg

SEQ ID NO: 155212 - DNA, 25 bp, Homo sapien
ctgcataaacttctgctgaggacat

SEQ ID NO: 155213 - DNA, 25 bp, Homo sapien
ggacatgttaataatcaaactaaac

SEQ ID NO: 155214 - DNA, 25 bp, Homo sapien
gacatgttaataatcaaactaaacc

SEQ ID NO: 155215 - DNA, 25 bp, Homo sapien
tgtttgaacagcatctagggtatgt

SEQ ID NO: 155216 - DNA, 25 bp, Homo sapien
tcaatcacatgtattgattcgtcca

SEQ ID NO: 155217 - DNA, 25 bp, Homo sapien
tcgtcatgtcgtcactgccattgcc

SEQ ID NO: 155218 - DNA, 25 bp, Homo sapien
tatgtgcacacttcgtcatgtcgtc

SEQ ID NO: 155219 - DNA, 25 bp, Homo sapien
aaagctggattcaaaattgtaggct

SEQ ID NO: 155220 - DNA, 25 bp, Homo sapien
tgcaactgcatacaatgtggaggcc

SEQ ID NO: 155221 - DNA, 25 bp, Homo sapien
gcaactgcatacaatgtggaggcca

SEQ ID NO: 155222 - DNA, 25 bp, Homo sapien
caactgcatacaatgtggaggccat

SEQ ID NO: 155223 - DNA, 25 bp, Homo sapien
cttactttcaagagcaacactcaag

SEQ ID NO: 155224 - DNA, 25 bp, Homo sapien
gtttccttactttcaagagcaacac

SEQ ID NO: 155225 - DNA, 25 bp, Homo sapien
tactttcaagagcaacactcaagtc

SEQ ID NO: 155226 - DNA, 25 bp, Homo sapien
ctgggtttccttactttcaagagca

SEQ ID NO: 155227 - DNA, 25 bp, Homo sapien
agcccctgtttttggagtccttgtg

SEQ ID NO: 155228 - DNA, 25 bp, Homo sapien
tactgtcacccttgaataatggagc

SEQ ID NO: 155229 - DNA, 25 bp, Homo sapien
tcaggttcccgtgaggatactgtca

SEQ ID NO: 155230 - DNA, 25 bp, Homo sapien
gaataatggagcttgcataagacca

SEQ ID NO: 155231 - DNA, 25 bp, Homo sapien
acgaaaacctgagcactagtactca

SEQ ID NO: 155232 - DNA, 25 bp, Homo sapien
gaaaacctgagcactagtactcagc

SEQ ID NO: 155233 - DNA, 25 bp, Homo sapien
aaacgaaaacctgagcactagtact

SEQ ID NO: 155234 - DNA, 25 bp, Homo sapien
aaacctgagcactagtactcagcat

SEQ ID NO: 155235 - DNA, 25 bp, Homo sapien
agagatggagttggcagctgaacgg

SEQ ID NO: 155236 - DNA, 25 bp, Homo sapien
ttggcagctgaacggccctctgaga

SEQ ID NO: 155237 - DNA, 25 bp, Homo sapien
gaacggccctctgagatatccatgg

SEQ ID NO: 155238 - DNA, 25 bp, Homo sapien
ggagttggcagctgaacggccctct

SEQ ID NO: 155239 - DNA, 25 bp, Homo sapien
taatgaaggcaaagacccgatattt

SEQ ID NO: 155240 - DNA, 25 bp, Homo sapien
tctggtggttgtggatcacccatct

SEQ ID NO: 155241 - DNA, 25 bp, Homo sapien
tggtggttgtggatcacccatctgc

SEQ ID NO: 155242 - DNA, 25 bp, Homo sapien
ttctggtggttgtggatcacccatc

SEQ ID NO: 155243 - DNA, 25 bp, Homo sapien
ctggtggttgtggatcacccatctg

SEQ ID NO: 155244 - DNA, 25 bp, Homo sapien
gctcctcacatcacctaggacatga

SEQ ID NO: 155245 - DNA, 25 bp, Homo sapien
cacctaggacatgatatcctgacat

SEQ ID NO: 155246 - DNA, 25 bp, Homo sapien
atcctgacatcttgatgtctgagct

SEQ ID NO: 155247 - DNA, 25 bp, Homo sapien
tcacatcacctaggacatgatatcc

SEQ ID NO: 155248 - DNA, 25 bp, Homo sapien
aaagagagccatttcaaatgcagcc

SEQ ID NO: 155249 - DNA, 25 bp, Homo sapien
tctcccacatgccaagaggaaagtg

SEQ ID NO: 155250 - DNA, 25 bp, Homo sapien
agccatgctcgttttgctctctaag

SEQ ID NO: 155251 - DNA, 25 bp, Homo sapien
ggatgtgaatgctcaccctcaggaa

SEQ ID NO: 155252 - DNA, 25 bp, Homo sapien
ttcctcactgttgccgggtttctgc

SEQ ID NO: 155253 - DNA, 25 bp, Homo sapien
tttcctcactgttgccgggtttctg

SEQ ID NO: 155254 - DNA, 25 bp, Homo sapien
agcagcgagcgtccggagaccgcac

SEQ ID NO: 155255 - DNA, 25 bp, Homo sapien
cagttggcggggatcgggctgagca

SEQ ID NO: 155256 - DNA, 25 bp, Homo sapien
ggcgcactcggctgtctctgggctt

SEQ ID NO: 155257 - DNA, 25 bp, Homo sapien
gagaccgcacggcgcactcggctgt

SEQ ID NO: 155258 - DNA, 25 bp, Homo sapien
ctgcagccagcgctcgagtcctcgc

SEQ ID NO: 155259 - DNA, 25 bp, Homo sapien
agccagcgctcgagtcctcgctgct

SEQ ID NO: 155260 - DNA, 25 bp, Homo sapien
ctgcgcggccataaaggagagatcc

SEQ ID NO: 155261 - DNA, 25 bp, Homo sapien
gcgcggccataaaggagagatccat

SEQ ID NO: 155262 - DNA, 25 bp, Homo sapien
ttaaacaggcttccactacaggtga

SEQ ID NO: 155263 - DNA, 25 bp, Homo sapien
gaagcttggggaaaaagcaagtgtc

SEQ ID NO: 155264 - DNA, 25 bp, Homo sapien
gcttccactacaggtgaagcttggg

SEQ ID NO: 155265 - DNA, 25 bp, Homo sapien
tcactttttaaacaggcttccacta

SEQ ID NO: 155266 - DNA, 25 bp, Homo sapien
ccagccaagcactgcgaagtattgc

SEQ ID NO: 155267 - DNA, 25 bp, Homo sapien
caagcactgcgaagtattgcaggta

SEQ ID NO: 155268 - DNA, 25 bp, Homo sapien
gaagtattgcaggtagggaagtaac

SEQ ID NO: 155269 - DNA, 25 bp, Homo sapien
cactgcgaagtattgcaggtaggga

SEQ ID NO: 155270 - DNA, 25 bp, Homo sapien
tccacgagcacactctcagtgcctg

SEQ ID NO: 155271 - DNA, 25 bp, Homo sapien
ggctcagaagtaagatggggtccac

SEQ ID NO: 155272 - DNA, 25 bp, Homo sapien
agccacgtgtactgcaccagggagg

SEQ ID NO: 155273 - DNA, 25 bp, Homo sapien
tcttacactgtcatacagccacgtg

SEQ ID NO: 155274 - DNA, 25 bp, Homo sapien
aataggctgacgtgatgcagagacc

SEQ ID NO: 155275 - DNA, 25 bp, Homo sapien
tcaagcatttcattggagactggcc

SEQ ID NO: 155276 - DNA, 25 bp, Homo sapien
tgtggcaaatgcacagctccggtgg

SEQ ID NO: 155277 - DNA, 25 bp, Homo sapien
ggtttgtctgctacctcaaaggcat

SEQ ID NO: 155278 - DNA, 25 bp, Homo sapien
cacacaagaaccagccgatcagctc

SEQ ID NO: 155279 - DNA, 25 bp, Homo sapien
tggctgtacctgaggagctcctcca

SEQ ID NO: 155280 - DNA, 25 bp, Homo sapien
tgtacctgaggagctcctccacgtg

SEQ ID NO: 155281 - DNA, 25 bp, Homo sapien
tccctggctgtacctgaggagctcc

SEQ ID NO: 155282 - DNA, 25 bp, Homo sapien
tgaggagctcctccacgtggctgtg

SEQ ID NO: 155283 - DNA, 25 bp, Homo sapien
catgtttgttgcagtgcctcccttg

SEQ ID NO: 155284 - DNA, 25 bp, Homo sapien
tgtgctatctttctggttcagtgga

SEQ ID NO: 155285 - DNA, 25 bp, Homo sapien
gtttaccactgtgctatctttctgg

SEQ ID NO: 155286 - DNA, 25 bp, Homo sapien
tttttagagcaatgttcatgtttgt

SEQ ID NO: 155287 - DNA, 25 bp, Homo sapien
ccatgctcgtgaactgtcattgtaa

SEQ ID NO: 155288 - DNA, 25 bp, Homo sapien
tgtcattgtaagtttcatccttgct

SEQ ID NO: 155289 - DNA, 25 bp, Homo sapien
gctgtacgtgttccatgctcgtgaa

SEQ ID NO: 155290 - DNA, 25 bp, Homo sapien
agcactcggctgtacgtgttccatg

SEQ ID NO: 155291 - DNA, 25 bp, Homo sapien
atgagatgagtattttcatccaaat

SEQ ID NO: 155292 - DNA, 25 bp, Homo sapien
cctatggagctctctgggcatatgt

SEQ ID NO: 155293 - DNA, 25 bp, Homo sapien
ctctttagggcaaatgtgaatgaga

SEQ ID NO: 155294 - DNA, 25 bp, Homo sapien
tctctgggcatatgtcctgtctctc

SEQ ID NO: 155295 - DNA, 25 bp, Homo sapien
gagagagagaattatccagggccat

SEQ ID NO: 155296 - DNA, 25 bp, Homo sapien
gccatgggggcttgggcagatgtac

SEQ ID NO: 155297 - DNA, 25 bp, Homo sapien
ccatgggggcttgggcagatgtacc

SEQ ID NO: 155298 - DNA, 25 bp, Homo sapien
agagagaattatccagggccatggg

SEQ ID NO: 155299 - DNA, 25 bp, Homo sapien
tgttccccagcgtagctatgatggc

SEQ ID NO: 155300 - DNA, 25 bp, Homo sapien
ggagtactcggtgctgaagtcctcg

SEQ ID NO: 155301 - DNA, 25 bp, Homo sapien
gaagtcctcgttgggcgagtccatg

SEQ ID NO: 155302 - DNA, 25 bp, Homo sapien
tggcaatccatagcaagacggcgtc

SEQ ID NO: 155303 - DNA, 25 bp, Homo sapien
aggtgaaggcatacaccacgcccac

SEQ ID NO: 155304 - DNA, 25 bp, Homo sapien
aaggtgaaggcatacaccacgccca

SEQ ID NO: 155305 - DNA, 25 bp, Homo sapien
gaaggtgaaggcatacaccacgccc

SEQ ID NO: 155306 - DNA, 25 bp, Homo sapien
cccatggtggtgcagggtgtgccgt

SEQ ID NO: 155307 - DNA, 25 bp, Homo sapien
catggtggtgcagggtgtgccgtcc

SEQ ID NO: 155308 - DNA, 25 bp, Homo sapien
ccatggtggtgcagggtgtgccgtc

SEQ ID NO: 155309 - DNA, 25 bp, Homo sapien
catgcaagtctagtggcacctggac

SEQ ID NO: 155310 - DNA, 25 bp, Homo sapien
ttaagacaggcctggctacagcggc

SEQ ID NO: 155311 - DNA, 25 bp, Homo sapien
gaaacagcattctcacgtgggtggc

SEQ ID NO: 155312 - DNA, 25 bp, Homo sapien
caaaacttaagcagtgaggaccggc

SEQ ID NO: 155313 - DNA, 25 bp, Homo sapien
gggatctgaaaggagcgagaatcat

SEQ ID NO: 155314 - DNA, 25 bp, Homo sapien
tgctgcctttccagcgaaatgctgc

SEQ ID NO: 155315 - DNA, 25 bp, Homo sapien
cactgagcctcttcggtctccaggg

SEQ ID NO: 155316 - DNA, 25 bp, Homo sapien
aggaaagtgccatttgtcttgcagg

SEQ ID NO: 155317 - DNA, 25 bp, Homo sapien
tccgaggcctcatatcccgagatgg

SEQ ID NO: 155318 - DNA, 25 bp, Homo sapien
tgaatgtggcaatctggctataagc

SEQ ID NO: 155319 - DNA, 25 bp, Homo sapien
cagggtgcctctagagctgacagaa

SEQ ID NO: 155320 - DNA, 25 bp, Homo sapien
catagaacattcaggatctggctgt

SEQ ID NO: 155321 - DNA, 25 bp, Homo sapien
ttgttgggacaacgcttcgaacggc

SEQ ID NO: 155322 - DNA, 25 bp, Homo sapien
cgcattatttgaacgcagggcagtg

SEQ ID NO: 155323 - DNA, 25 bp, Homo sapien
ttctgccagcatatagagcccttgt

SEQ ID NO: 155324 - DNA, 25 bp, Homo sapien
ttcgaacggcaaacgcagtaatggt

SEQ ID NO: 155325 - DNA, 25 bp, Homo sapien
ggtgcttgggtagcaaaggactcca

SEQ ID NO: 155326 - DNA, 25 bp, Homo sapien
tcagtgatcgcatggtgaaaccagg

SEQ ID NO: 155327 - DNA, 25 bp, Homo sapien
gcagcaacgctaacaaagtgagatt

SEQ ID NO: 155328 - DNA, 25 bp, Homo sapien
gagcacagcgaaatcctttattaag

SEQ ID NO: 155329 - DNA, 25 bp, Homo sapien
tgagaacgcagtcctttgggccatg

SEQ ID NO: 155330 - DNA, 25 bp, Homo sapien
ccagggttgactaggaataggcaca

SEQ ID NO: 155331 - DNA, 25 bp, Homo sapien
tgccatccagcgagcgagggaagat

SEQ ID NO: 155332 - DNA, 25 bp, Homo sapien
tctttgcaaggcacacgattgggag

SEQ ID NO: 155333 - DNA, 25 bp, Homo sapien
gattcccatatccatgtccgtgcag

SEQ ID NO: 155334 - DNA, 25 bp, Homo sapien
gagtggccaggctacttccaaaaca

SEQ ID NO: 155335 - DNA, 25 bp, Homo sapien
catggaatgccttcgcccacgaatg

SEQ ID NO: 155336 - DNA, 25 bp, Homo sapien
cccaaaataggtgctccggaagtgt

SEQ ID NO: 155337 - DNA, 25 bp, Homo sapien
cagaggctagtagtttcctcttctt

SEQ ID NO: 155338 - DNA, 25 bp, Homo sapien
ttggccagaggctagtagtttcctc

SEQ ID NO: 155339 - DNA, 25 bp, Homo sapien
ccttcttctagggtagtgattctca

SEQ ID NO: 155340 - DNA, 25 bp, Homo sapien
tagggtagtgattctcagctcctct

SEQ ID NO: 155341 - DNA, 25 bp, Homo sapien
catgtgaggtcagacttaactctta

SEQ ID NO: 155342 - DNA, 25 bp, Homo sapien
cttgcgtctttgagttcttggtggt

SEQ ID NO: 155343 - DNA, 25 bp, Homo sapien
tggtggtgttttgcccttgttgagt

SEQ ID NO: 155344 - DNA, 25 bp, Homo sapien
tcttggtggtgttttgcccttgttg

SEQ ID NO: 155345 - DNA, 25 bp, Homo sapien
catagaacacgatctttcccctttg

SEQ ID NO: 155346 - DNA, 25 bp, Homo sapien
caccccgtactctgcaggacagaag

SEQ ID NO: 155347 - DNA, 25 bp, Homo sapien
ggacagaagggcctctcatagaaca

SEQ ID NO: 155348 - DNA, 25 bp, Homo sapien
gggcctctcatagaacacgatcttt

SEQ ID NO: 155349 - DNA, 25 bp, Homo sapien
gggagaaggtggtggaggtgtgcat

SEQ ID NO: 155350 - DNA, 25 bp, Homo sapien
ggggagaaggtggtggaggtgtgca

SEQ ID NO: 155351 - DNA, 25 bp, Homo sapien
tggggagaaggtggtggaggtgtgc

SEQ ID NO: 155352 - DNA, 25 bp, Homo sapien
ctggggagaaggtggtggaggtgtg

SEQ ID NO: 155353 - DNA, 25 bp, Homo sapien
tcaacgtggaactcgactctcccat

SEQ ID NO: 155354 - DNA, 25 bp, Homo sapien
cctgcacattgagagtgtgtagccc

SEQ ID NO: 155355 - DNA, 25 bp, Homo sapien
tgtcaagctcaacgtggaactcgac

SEQ ID NO: 155356 - DNA, 25 bp, Homo sapien
caaaagaaataggacaaccctgcac

SEQ ID NO: 155357 - DNA, 25 bp, Homo sapien
cagctgcaactttggagcaggccgg

SEQ ID NO: 155358 - DNA, 25 bp, Homo sapien
tgggtctagagccctgtgggtttcc

SEQ ID NO: 155359 - DNA, 25 bp, Homo sapien
actctgcaggcaaacaacttgcttg

SEQ ID NO: 155360 - DNA, 25 bp, Homo sapien
tgcacgggtgggtctagagccctgt

SEQ ID NO: 155361 - DNA, 25 bp, Homo sapien
gacctcgctgttcaggctcctgtga

SEQ ID NO: 155362 - DNA, 25 bp, Homo sapien
tgtgattctgggagactttccaatt

SEQ ID NO: 155363 - DNA, 25 bp, Homo sapien
gctgttcaggctcctgtgattctgg

SEQ ID NO: 155364 - DNA, 25 bp, Homo sapien
ttgtccttcccaagacctcgctgtt

SEQ ID NO: 155365 - DNA, 25 bp, Homo sapien
ggctccccagtgcacgaagtttcat

SEQ ID NO: 155366 - DNA, 25 bp, Homo sapien
acatttctcatagtagtaccccaat

SEQ ID NO: 155367 - DNA, 25 bp, Homo sapien
ctggctccccagtgcacgaagtttc

SEQ ID NO: 155368 - DNA, 25 bp, Homo sapien
cccaattgccttttggtggccttct

SEQ ID NO: 155369 - DNA, 25 bp, Homo sapien
tggtggcactccattattctccagg

SEQ ID NO: 155370 - DNA, 25 bp, Homo sapien
ctccaggtcaccttggtcatttctg

SEQ ID NO: 155371 - DNA, 25 bp, Homo sapien
cagggtggtggcactccattattct

SEQ ID NO: 155372 - DNA, 25 bp, Homo sapien
tgtgattagagttgggtcactgcca

SEQ ID NO: 155373 - DNA, 25 bp, Homo sapien
tgaggactggcttgcaatctctcgc

SEQ ID NO: 155374 - DNA, 25 bp, Homo sapien
gaggactggcttgcaatctctcgct

SEQ ID NO: 155375 - DNA, 25 bp, Homo sapien
aggactggcttgcaatctctcgctc

SEQ ID NO: 155376 - DNA, 25 bp, Homo sapien
ggactggcttgcaatctctcgctct

SEQ ID NO: 155377 - DNA, 25 bp, Homo sapien
ataaaggcctttttgattgtaggtg

SEQ ID NO: 155378 - DNA, 25 bp, Homo sapien
gcctttttgattgtaggtgtattca

SEQ ID NO: 155379 - DNA, 25 bp, Homo sapien
tactgagataaaggcctttttgatt

SEQ ID NO: 155380 - DNA, 25 bp, Homo sapien
gtactgagataaaggcctttttgat

SEQ ID NO: 155381 - DNA, 25 bp, Homo sapien
agatgtatggcggaggtttctccca

SEQ ID NO: 155382 - DNA, 25 bp, Homo sapien
tcctgggtacgggtgtttgcgctcc

SEQ ID NO: 155383 - DNA, 25 bp, Homo sapien
tctgcagcactttacactcccaggg

SEQ ID NO: 155384 - DNA, 25 bp, Homo sapien
gacacgcggccgtttcttcggagat

SEQ ID NO: 155385 - DNA, 25 bp, Homo sapien
ccctggtactgcggggcagcctgat

SEQ ID NO: 155386 - DNA, 25 bp, Homo sapien
tcagtcgctccctggtactgcgggg

SEQ ID NO: 155387 - DNA, 25 bp, Homo sapien
gagcaagcggcatgggcacttcagt

SEQ ID NO: 155388 - DNA, 25 bp, Homo sapien
gcagcctgatgtccccaccgtcccc

SEQ ID NO: 155389 - DNA, 25 bp, Homo sapien
catgttgggctaggcatcgttttca

SEQ ID NO: 155390 - DNA, 25 bp, Homo sapien
gcttgagcggatagacaaggcccct

SEQ ID NO: 155391 - DNA, 25 bp, Homo sapien
atcgttttcagtgcagaggaggcag

SEQ ID NO: 155392 - DNA, 25 bp, Homo sapien
tctccaagctggtgatattaaaagg

SEQ ID NO: 155393 - DNA, 25 bp, Homo sapien
gtttgctaataacttggatcgggga

SEQ ID NO: 155394 - DNA, 25 bp, Homo sapien
gtgcatttaacaatctgtccattta

SEQ ID NO: 155395 - DNA, 25 bp, Homo sapien
tgtttgggcccaaatctaccttgaa

SEQ ID NO: 155396 - DNA, 25 bp, Homo sapien
tgtggagatgggcagtttgctaata

SEQ ID NO: 155397 - DNA, 25 bp, Homo sapien
taaaaatttaaaggcatgactcatc

SEQ ID NO: 155398 - DNA, 25 bp, Homo sapien
ccataagtttggtaagcagtgttct

SEQ ID NO: 155399 - DNA, 25 bp, Homo sapien
taaaggcatgactcatcccctgact

SEQ ID NO: 155400 - DNA, 25 bp, Homo sapien
ctctttgatgtaacagtgttttcta

SEQ ID NO: 155401 - DNA, 25 bp, Homo sapien
gcgcctgctgttcagagacacagga

SEQ ID NO: 155402 - DNA, 25 bp, Homo sapien
ggcgcctgctgttcagagacacagg

SEQ ID NO: 155403 - DNA, 25 bp, Homo sapien
aggcgcctgctgttcagagacacag

SEQ ID NO: 155404 - DNA, 25 bp, Homo sapien
cagtccaaacagactcccggaagat

SEQ ID NO: 155405 - DNA, 25 bp, Homo sapien
agatatggcccagaccacttgcagg

SEQ ID NO: 155406 - DNA, 25 bp, Homo sapien
tcatggaaaacatgaggactggcgg

SEQ ID NO: 155407 - DNA, 25 bp, Homo sapien
agggaaagtccctgcggctgtactc

SEQ ID NO: 155408 - DNA, 25 bp, Homo sapien
actgtaagtgtgtggcctcctgtca

SEQ ID NO: 155409 - DNA, 25 bp, Homo sapien
ccagctctgccggtcactaagggag

SEQ ID NO: 155410 - DNA, 25 bp, Homo sapien
gaggcaaacctgctgtacaacgaag

SEQ ID NO: 155411 - DNA, 25 bp, Homo sapien
tgggactcaaaccacatttcgggat

SEQ ID NO: 155412 - DNA, 25 bp, Homo sapien
gatcataggttgcttttgggttttc

SEQ ID NO: 155413 - DNA, 25 bp, Homo sapien
tactggcgctggttgtctttgagca

SEQ ID NO: 155414 - DNA, 25 bp, Homo sapien
gctggttgtctttgagcatgggatc

SEQ ID NO: 155415 - DNA, 25 bp, Homo sapien
ctttgagcatgggatcataggttgc

SEQ ID NO: 155416 - DNA, 25 bp, Homo sapien
tgtcatctctgctgctaacaaaggt

SEQ ID NO: 155417 - DNA, 25 bp, Homo sapien
ctgttatataaaggcccaccctcca

SEQ ID NO: 155418 - DNA, 25 bp, Homo sapien
gactaaggcacaggctatatgtggg

SEQ ID NO: 155419 - DNA, 25 bp, Homo sapien
gattctgacatgcatgagcttgcct

SEQ ID NO: 155420 - DNA, 25 bp, Homo sapien
ctgtccgaatagtgaatttgtttgt

SEQ ID NO: 155421 - DNA, 25 bp, Homo sapien
cgaatagtgaatttgtttgtgtgac

SEQ ID NO: 155422 - DNA, 25 bp, Homo sapien
tgtccgaatagtgaatttgtttgtg

SEQ ID NO: 155423 - DNA, 25 bp, Homo sapien
tccgaatagtgaatttgtttgtgtg

SEQ ID NO: 155424 - DNA, 25 bp, Homo sapien
gatgtgaggttctgattcatggatc

SEQ ID NO: 155425 - DNA, 25 bp, Homo sapien
ttcttgggtggtgggcgccggaaca

SEQ ID NO: 155426 - DNA, 25 bp, Homo sapien
ggtgggcgccggaacagcaagatgt

SEQ ID NO: 155427 - DNA, 25 bp, Homo sapien
tctgattcatggatcatattatgga

SEQ ID NO: 155428 - DNA, 25 bp, Homo sapien
gaccttacatacaacaccaggcagg

SEQ ID NO: 155429 - DNA, 25 bp, Homo sapien
aagtgaccttacatacaacaccagg

SEQ ID NO: 155430 - DNA, 25 bp, Homo sapien
gatacagagcacattgtgcctccta

SEQ ID NO: 155431 - DNA, 25 bp, Homo sapien
gtgcctcctagggtcacactcagct

SEQ ID NO: 155432 - DNA, 25 bp, Homo sapien
gtgtccagcgtttcctcgctggcct

SEQ ID NO: 155433 - DNA, 25 bp, Homo sapien
tcatgggggacgtgtccagcgtttc

SEQ ID NO: 155434 - DNA, 25 bp, Homo sapien
agctcagtcatgggggacgtgtcca

SEQ ID NO: 155435 - DNA, 25 bp, Homo sapien
gggacgtgtccagcgtttcctcgct

SEQ ID NO: 155436 - DNA, 25 bp, Homo sapien
tagaacatggggtcccaaacgcgcc

SEQ ID NO: 155437 - DNA, 25 bp, Homo sapien
cccaaacgcgcctgtgagggcgagt

SEQ ID NO: 155438 - DNA, 25 bp, Homo sapien
gtcctgtgagagcatagaacatggg

SEQ ID NO: 155439 - DNA, 25 bp, Homo sapien
ggtcctgtgagagcatagaacatgg

SEQ ID NO: 155440 - DNA, 25 bp, Homo sapien
ttggactcagagtgggatgtgagtg

SEQ ID NO: 155441 - DNA, 25 bp, Homo sapien
gagtgggatgtgagtgaggccacac

SEQ ID NO: 155442 - DNA, 25 bp, Homo sapien
ctcagagtgggatgtgagtgaggcc

SEQ ID NO: 155443 - DNA, 25 bp, Homo sapien
cagagtgggatgtgagtgaggccac

SEQ ID NO: 155444 - DNA, 25 bp, Homo sapien
ggagtcctcacgaacagacagaaac

SEQ ID NO: 155445 - DNA, 25 bp, Homo sapien
tggtgggcacggagtcctcacgaac

SEQ ID NO: 155446 - DNA, 25 bp, Homo sapien
gcacggagtcctcacgaacagacag

SEQ ID NO: 155447 - DNA, 25 bp, Homo sapien
gtcctcacgaacagacagaaacatt

SEQ ID NO: 155448 - DNA, 25 bp, Homo sapien
tgcggaattggaaactataggtcca

SEQ ID NO: 155449 - DNA, 25 bp, Homo sapien
tggaaactataggtccagtgcactg

SEQ ID NO: 155450 - DNA, 25 bp, Homo sapien
agaaagatgcctgctgagtgcggaa

SEQ ID NO: 155451 - DNA, 25 bp, Homo sapien
agctgagatggccatctgctcatct

SEQ ID NO: 155452 - DNA, 25 bp, Homo sapien
gccagatagtcctactgggttcaca

SEQ ID NO: 155453 - DNA, 25 bp, Homo sapien
tgggttcacatcctggctgccttac

SEQ ID NO: 155454 - DNA, 25 bp, Homo sapien
ccttacttataagccgtgtgacgct

SEQ ID NO: 155455 - DNA, 25 bp, Homo sapien
gcaaagcactgaagatgattggagg

SEQ ID NO: 155456 - DNA, 25 bp, Homo sapien
cgcagtgtgcccatggagttctcca

SEQ ID NO: 155457 - DNA, 25 bp, Homo sapien
tcatggtccggaacaccagcatggg

SEQ ID NO: 155458 - DNA, 25 bp, Homo sapien
agataatggcattcaccacgcggca

SEQ ID NO: 155459 - DNA, 25 bp, Homo sapien
tacatcgatgatgcgctcgtcctgg

SEQ ID NO: 155460 - DNA, 25 bp, Homo sapien
tcccaaggtcgtgcatagatgtctc

SEQ ID NO: 155461 - DNA, 25 bp, Homo sapien
gatcctctgggcaagaccgattaga

SEQ ID NO: 155462 - DNA, 25 bp, Homo sapien
tttatcaagtgaatgagtgctgccc

SEQ ID NO: 155463 - DNA, 25 bp, Homo sapien
tacgtctgcgtaatgatgcctcaca

SEQ ID NO: 155464 - DNA, 25 bp, Homo sapien
ttctagccctccaggttctagctct

SEQ ID NO: 155465 - DNA, 25 bp, Homo sapien
ggttctagccctccaggttctagct

SEQ ID NO: 155466 - DNA, 25 bp, Homo sapien
caggttctagccctccaggttctag

SEQ ID NO: 155467 - DNA, 25 bp, Homo sapien
ttctagccctccaggttctagccct

SEQ ID NO: 155468 - DNA, 25 bp, Homo sapien
ttctagccctccaggttctagctct

SEQ ID NO: 155469 - DNA, 25 bp, Homo sapien
ggttctagccctccaggttctagct

SEQ ID NO: 155470 - DNA, 25 bp, Homo sapien
caggttctagccctccaggttctag

SEQ ID NO: 155471 - DNA, 25 bp, Homo sapien
ctccagattctagccctccaggttc

SEQ ID NO: 155472 - DNA, 25 bp, Homo sapien
catctacaccatgcatagggccgct

SEQ ID NO: 155473 - DNA, 25 bp, Homo sapien
gaccatcacgtgctctggtgctgaa

SEQ ID NO: 155474 - DNA, 25 bp, Homo sapien
tgctgaatgactgccctgtgtgaca

SEQ ID NO: 155475 - DNA, 25 bp, Homo sapien
tcagttgcccctcagaccaggtgtg

SEQ ID NO: 155476 - DNA, 25 bp, Homo sapien
tttcctataggaatatacaatcaca

SEQ ID NO: 155477 - DNA, 25 bp, Homo sapien
gcttggagaccactgatctacatgc

SEQ ID NO: 155478 - DNA, 25 bp, Homo sapien
catactgggtatgcataatcaattc

SEQ ID NO: 155479 - DNA, 25 bp, Homo sapien
tacatgccagaagcctgttaacaga

SEQ ID NO: 155480 - DNA, 25 bp, Homo sapien
caaatagcacccagatgctgagcct

SEQ ID NO: 155481 - DNA, 25 bp, Homo sapien
cgaccaaggctgttggcggtcacac

SEQ ID NO: 155482 - DNA, 25 bp, Homo sapien
gactctagtacatgtcacccagcag

SEQ ID NO: 155483 - DNA, 25 bp, Homo sapien
tcccaattgtagacggaggacagaa

SEQ ID NO: 155484 - DNA, 25 bp, Homo sapien
aacattgagggatggcttttggccc

SEQ ID NO: 155485 - DNA, 25 bp, Homo sapien
tataacctccgctccagtgatgtca

SEQ ID NO: 155486 - DNA, 25 bp, Homo sapien
ccaaggctcgcaaagtgtcagtgaa

SEQ ID NO: 155487 - DNA, 25 bp, Homo sapien
tctttcgggactcactccaagtgga

SEQ ID NO: 155488 - DNA, 25 bp, Homo sapien
cacttcagtctgggccgacggactg

SEQ ID NO: 155489 - DNA, 25 bp, Homo sapien
agaatcgtttaagcctggaaggtcg

SEQ ID NO: 155490 - DNA, 25 bp, Homo sapien
cagtctgggccgacggactgagacc

SEQ ID NO: 155491 - DNA, 25 bp, Homo sapien
gtgggagaatcgtttaagcctggaa

SEQ ID NO: 155492 - DNA, 25 bp, Homo sapien
gaaatgaacagaaggtagaataaaa

SEQ ID NO: 155493 - DNA, 25 bp, Homo sapien
ctgaaatgaacagaaggtagaataa

SEQ ID NO: 155494 - DNA, 25 bp, Homo sapien
tgaacagaaggtagaataaaacagg

SEQ ID NO: 155495 - DNA, 25 bp, Homo sapien
cagaaggtagaataaaacaggaagt

SEQ ID NO: 155496 - DNA, 25 bp, Homo sapien
cacaggccgtagcattttgagggaa

SEQ ID NO: 155497 - DNA, 25 bp, Homo sapien
ggcaagcccaagacaaacaccagat

SEQ ID NO: 155498 - DNA, 25 bp, Homo sapien
ccctaggaggccgaagaaacagatg

SEQ ID NO: 155499 - DNA, 25 bp, Homo sapien
agatttctgccacgttcagttgccg

SEQ ID NO: 155500 - DNA, 25 bp, Homo sapien
tgatgaccccgttgatgacacggca

SEQ ID NO: 155501 - DNA, 25 bp, Homo sapien
tagttgaagaagacgatcgcagcca

SEQ ID NO: 155502 - DNA, 25 bp, Homo sapien
aatccttgcaaagtgccaggcctca

SEQ ID NO: 155503 - DNA, 25 bp, Homo sapien
gatgctgatgaacaaattggccttg

SEQ ID NO: 155504 - DNA, 25 bp, Homo sapien
gagccggcccacaaagacataaatt

SEQ ID NO: 155505 - DNA, 25 bp, Homo sapien
tcagggagctgttagtgaaggcaaa

SEQ ID NO: 155506 - DNA, 25 bp, Homo sapien
ataaagttcccagaccttggtcctg

SEQ ID NO: 155507 - DNA, 25 bp, Homo sapien
tgcaggcccaggtcaatgaagtcct

SEQ ID NO: 155508 - DNA, 25 bp, Homo sapien
tcacaaagaattgataagaaagcca

SEQ ID NO: 155509 - DNA, 25 bp, Homo sapien
cacaaagaattgataagaaagccaa

SEQ ID NO: 155510 - DNA, 25 bp, Homo sapien
tgttgtccgatttcaccggccagca

SEQ ID NO: 155511 - DNA, 25 bp, Homo sapien
cagcacgttcttctcgagtgtggga

SEQ ID NO: 155512 - DNA, 25 bp, Homo sapien
tgataagccacctgcttaaggccgg

SEQ ID NO: 155513 - DNA, 25 bp, Homo sapien
tggtttttgcaagacctcgaaagga

SEQ ID NO: 155514 - DNA, 25 bp, Homo sapien
catggtgggctctaacgagcactcc

SEQ ID NO: 155515 - DNA, 25 bp, Homo sapien
gcacagttgcaagtcagccaatgtt

SEQ ID NO: 155516 - DNA, 25 bp, Homo sapien
tgacttggcgtctgagagatccctc

SEQ ID NO: 155517 - DNA, 25 bp, Homo sapien
gcacccgcatcctcagaactgtggg

SEQ ID NO: 155518 - DNA, 25 bp, Homo sapien
gactagagtagatcgcgcatgtcca

SEQ ID NO: 155519 - DNA, 25 bp, Homo sapien
tgtccaccagtgatacgttgagtcc

SEQ ID NO: 155520 - DNA, 25 bp, Homo sapien
tcttgaatggagctaactcggaacc

SEQ ID NO: 155521 - DNA, 25 bp, Homo sapien
tacatgacgagtagagaggcagctg

SEQ ID NO: 155522 - DNA, 25 bp, Homo sapien
caggtatagtgcaggcttgttagga

SEQ ID NO: 155523 - DNA, 25 bp, Homo sapien
gaatttagtgttcatgcacttgaga

SEQ ID NO: 155524 - DNA, 25 bp, Homo sapien
taatagcttcctttaagagtacagg

SEQ ID NO: 155525 - DNA, 25 bp, Homo sapien
tatgccctagttaactatttcagca

SEQ ID NO: 155526 - DNA, 25 bp, Homo sapien
tacagatgtcaggattgagccagct

SEQ ID NO: 155527 - DNA, 25 bp, Homo sapien
taccagtcagatttgctcctacaga

SEQ ID NO: 155528 - DNA, 25 bp, Homo sapien
tgaggaaacgggttctgccagacag

SEQ ID NO: 155529 - DNA, 25 bp, Homo sapien
tggtaatcaccattagagataggcg

SEQ ID NO: 155530 - DNA, 25 bp, Homo sapien
ttgaagaattgctgtactcctactg

SEQ ID NO: 155531 - DNA, 25 bp, Homo sapien
gccataggacccagccagatacttg

SEQ ID NO: 155532 - DNA, 25 bp, Homo sapien
gatcctaatggaaaaactgatgcta

SEQ ID NO: 155533 - DNA, 25 bp, Homo sapien
aaaaggtaccttcggagattcacag

SEQ ID NO: 155534 - DNA, 25 bp, Homo sapien
tgacaacaaattcgtcgcgcggcgg

SEQ ID NO: 155535 - DNA, 25 bp, Homo sapien
tgcactctctccgagccggttggga

SEQ ID NO: 155536 - DNA, 25 bp, Homo sapien
tctgggtctcgtgaacgcgccagga

SEQ ID NO: 155537 - DNA, 25 bp, Homo sapien
gactcccggcaccaaatagggatgg

SEQ ID NO: 155538 - DNA, 25 bp, Homo sapien
gctcaaagtggctgggcggctaata

SEQ ID NO: 155539 - DNA, 25 bp, Homo sapien
tgacttaacttaacagccggctccg

SEQ ID NO: 155540 - DNA, 25 bp, Homo sapien
tcagtgccgggattctaacgaagga

SEQ ID NO: 155541 - DNA, 25 bp, Homo sapien
agaaatacgattgcgcagactgcca

SEQ ID NO: 155542 - DNA, 25 bp, Homo sapien
tccactccctttacattgctttcgt

SEQ ID NO: 155543 - DNA, 25 bp, Homo sapien
tgtctcctcccttcaataaaatgta

SEQ ID NO: 155544 - DNA, 25 bp, Homo sapien
cattgctttcgtttttccaacagcc

SEQ ID NO: 155545 - DNA, 25 bp, Homo sapien
atctcatataaaaatggcaagtccc

SEQ ID NO: 155546 - DNA, 25 bp, Homo sapien
tactgtagccaaagatatcataatg

SEQ ID NO: 155547 - DNA, 25 bp, Homo sapien
taaagtttacaaggcaacacacaat

SEQ ID NO: 155548 - DNA, 25 bp, Homo sapien
gatgagtttgtaccctactgtagcc

SEQ ID NO: 155549 - DNA, 25 bp, Homo sapien
tatcataatgacaggtcctaaacct

SEQ ID NO: 155550 - DNA, 25 bp, Homo sapien
tacaaggatatgcagggatggccca

SEQ ID NO: 155551 - DNA, 25 bp, Homo sapien
gcataagcaaaggtcagcacagggt

SEQ ID NO: 155552 - DNA, 25 bp, Homo sapien
tatcatgcaagtggaactggtggct

SEQ ID NO: 155553 - DNA, 25 bp, Homo sapien
caatttccaatgcaacgtggcagca

SEQ ID NO: 155554 - DNA, 25 bp, Homo sapien
accaaacagttgtgataatcagcac

SEQ ID NO: 155555 - DNA, 25 bp, Homo sapien
aggtcagtgaagtaggtcaccaaac

SEQ ID NO: 155556 - DNA, 25 bp, Homo sapien
aacagttgtgataatcagcaccgag

SEQ ID NO: 155557 - DNA, 25 bp, Homo sapien
gaagtaggtcaccaaacagttgtga

SEQ ID NO: 155558 - DNA, 25 bp, Homo sapien
tgcagaaagatcaagaatccagtac

SEQ ID NO: 155559 - DNA, 25 bp, Homo sapien
atgatgcagaaagatcaagaatcca

SEQ ID NO: 155560 - DNA, 25 bp, Homo sapien
cttgatgatgcagaaagatcaagaa

SEQ ID NO: 155561 - DNA, 25 bp, Homo sapien
tgatgatgcagaaagatcaagaatc

SEQ ID NO: 155562 - DNA, 25 bp, Homo sapien
gaattagtcactcgctacaaacaac

SEQ ID NO: 155563 - DNA, 25 bp, Homo sapien
gaaatgactactataaatctcttga

SEQ ID NO: 155564 - DNA, 25 bp, Homo sapien
gagcaatctgttgggtaactgaaag

SEQ ID NO: 155565 - DNA, 25 bp, Homo sapien
caagtacttcaattggagatgtcag

SEQ ID NO: 155566 - DNA, 25 bp, Homo sapien
gatataggccacatcatccgcacac

SEQ ID NO: 155567 - DNA, 25 bp, Homo sapien
aactgcttcagcttcgagcctcatg

SEQ ID NO: 155568 - DNA, 25 bp, Homo sapien
cgcaggcttttcgagacaaacatgt

SEQ ID NO: 155569 - DNA, 25 bp, Homo sapien
gcttcagtgagttctaggcaatatc

SEQ ID NO: 155570 - DNA, 25 bp, Homo sapien
aaaatttggaagctactgaatatcc

SEQ ID NO: 155571 - DNA, 25 bp, Homo sapien
tctttttgataaagtggtaaagaca

SEQ ID NO: 155572 - DNA, 25 bp, Homo sapien
gataaagtggtaaagacataaataa

SEQ ID NO: 155573 - DNA, 25 bp, Homo sapien
gaatatccagttctcttttaacact

SEQ ID NO: 155574 - DNA, 25 bp, Homo sapien
gatactccaattgatcttaggcaaa

SEQ ID NO: 155575 - DNA, 25 bp, Homo sapien
gttaatggagcaagagcctattcta

SEQ ID NO: 155576 - DNA, 25 bp, Homo sapien
aaagatactccaattgatcttaggc

SEQ ID NO: 155577 - DNA, 25 bp, Homo sapien
ccaggtcgatgtgtgaagttaatgg

SEQ ID NO: 155578 - DNA, 25 bp, Homo sapien
gctgagtgtatccaacaaggagtag

SEQ ID NO: 155579 - DNA, 25 bp, Homo sapien
tccagtctttgaagcagtgcgtttc

SEQ ID NO: 155580 - DNA, 25 bp, Homo sapien
ttccaaatgcttctcggtaggcggg

SEQ ID NO: 155581 - DNA, 25 bp, Homo sapien
tacctggtcaaaagcatagcctacc

SEQ ID NO: 155582 - DNA, 25 bp, Homo sapien
gatggtatcatagcaacggcctcag

SEQ ID NO: 155583 - DNA, 25 bp, Homo sapien
tgtccaagctagtattgaacccctg

SEQ ID NO: 155584 - DNA, 25 bp, Homo sapien
tgaacccctgatttagcaggctgaa

SEQ ID NO: 155585 - DNA, 25 bp, Homo sapien
gctggcagcatcaaagccctgtaat

SEQ ID NO: 155586 - DNA, 25 bp, Homo sapien
gaacaatttcaattcttaaacatac

SEQ ID NO: 155587 - DNA, 25 bp, Homo sapien
ggaattaatcatttatcacaaaatg

SEQ ID NO: 155588 - DNA, 25 bp, Homo sapien
tttcaattcttaaacatacaatcac

SEQ ID NO: 155589 - DNA, 25 bp, Homo sapien
caatttcaattcttaaacatacaat

SEQ ID NO: 155590 - DNA, 25 bp, Homo sapien
tgaaagcgccactcgcttgccaagg

SEQ ID NO: 155591 - DNA, 25 bp, Homo sapien
cttggctccgggcagtttgccgggc

SEQ ID NO: 155592 - DNA, 25 bp, Homo sapien
ctaaggtgaaagcgccactcgcttg

SEQ ID NO: 155593 - DNA, 25 bp, Homo sapien
cgccactcgcttgccaaggaggcgg

SEQ ID NO: 155594 - DNA, 25 bp, Homo sapien
ctctgggtccggataaccttctccg

SEQ ID NO: 155595 - DNA, 25 bp, Homo sapien
ggataaccttctccgtgagagcagc

SEQ ID NO: 155596 - DNA, 25 bp, Homo sapien
tgggtccggataaccttctccgtga

SEQ ID NO: 155597 - DNA, 25 bp, Homo sapien
caacaggtttataaacaccctctgg

SEQ ID NO: 155598 - DNA, 25 bp, Homo sapien
tagaaatgtaataggagccacatag

SEQ ID NO: 155599 - DNA, 25 bp, Homo sapien
gaaatgtaataggagccacataggt

SEQ ID NO: 155600 - DNA, 25 bp, Homo sapien
tgtaataggagccacataggttatt

SEQ ID NO: 155601 - DNA, 25 bp, Homo sapien
tttattgttaaagatgtggtcttgc

SEQ ID NO: 155602 - DNA, 25 bp, Homo sapien
gcgaagccccaactacacagttaga

SEQ ID NO: 155603 - DNA, 25 bp, Homo sapien
agccccaactacacagttagataga

SEQ ID NO: 155604 - DNA, 25 bp, Homo sapien
caagcgaagccccaactacacagtt

SEQ ID NO: 155605 - DNA, 25 bp, Homo sapien
tttcttcaagcgaagccccaactac

SEQ ID NO: 155606 - DNA, 25 bp, Homo sapien
ttgaggaagcttccagcatagctga

SEQ ID NO: 155607 - DNA, 25 bp, Homo sapien
tggttgaggaagcttccagcatagc

SEQ ID NO: 155608 - DNA, 25 bp, Homo sapien
tgaggaagcttccagcatagctgac

SEQ ID NO: 155609 - DNA, 25 bp, Homo sapien
ctttggttgaggaagcttccagcat

SEQ ID NO: 155610 - DNA, 25 bp, Homo sapien
agagtacgtctccaccgcaaagtca

SEQ ID NO: 155611 - DNA, 25 bp, Homo sapien
gctgtcaggcttggacagcgtgccc

SEQ ID NO: 155612 - DNA, 25 bp, Homo sapien
caggcttggacagcgtgcccacaat

SEQ ID NO: 155613 - DNA, 25 bp, Homo sapien
accgcaaagtcaggccgcgggctgt

SEQ ID NO: 155614 - DNA, 25 bp, Homo sapien
ggagcggaaggtgactcttccctct

SEQ ID NO: 155615 - DNA, 25 bp, Homo sapien
agtaaaacaagttgtcaaggcgttg

SEQ ID NO: 155616 - DNA, 25 bp, Homo sapien
cgttggagcggaaggtgactcttcc

SEQ ID NO: 155617 - DNA, 25 bp, Homo sapien
aacaagttgtcaaggcgttggagcg

SEQ ID NO: 155618 - DNA, 25 bp, Homo sapien
cacagactcgtcttggataatgcaa

SEQ ID NO: 155619 - DNA, 25 bp, Homo sapien
gaaagctgtatggtaggctccagag

SEQ ID NO: 155620 - DNA, 25 bp, Homo sapien
cagggataaacaagtcacggtctcc

SEQ ID NO: 155621 - DNA, 25 bp, Homo sapien
cactatgatctaggcaggcaaagga

SEQ ID NO: 155622 - DNA, 25 bp, Homo sapien
gaagaagccagtggcaagaagagag

SEQ ID NO: 155623 - DNA, 25 bp, Homo sapien
atgtgtaggtatagaggaagaagcc

SEQ ID NO: 155624 - DNA, 25 bp, Homo sapien
ggaatgatttgagcatatgtgtagg

SEQ ID NO: 155625 - DNA, 25 bp, Homo sapien
tgaatgggaaagaatacccggaaga

SEQ ID NO: 155626 - DNA, 25 bp, Homo sapien
tgctgtgagctctcagtgatgttat

SEQ ID NO: 155627 - DNA, 25 bp, Homo sapien
tgagaaggtcttctcgagagatggc

SEQ ID NO: 155628 - DNA, 25 bp, Homo sapien
tataaataataacatcacactccag

SEQ ID NO: 155629 - DNA, 25 bp, Homo sapien
cctccatttgctgtgagctctcagt

SEQ ID NO: 155630 - DNA, 25 bp, Homo sapien
catccctggagataaaagagtacac

SEQ ID NO: 155631 - DNA, 25 bp, Homo sapien
gactattaggtgaagtaggcagcac

SEQ ID NO: 155632 - DNA, 25 bp, Homo sapien
ggcagcactacaatagcatccctgg

SEQ ID NO: 155633 - DNA, 25 bp, Homo sapien
catactttaggtaagtctcagacca

SEQ ID NO: 155634 - DNA, 25 bp, Homo sapien
cacttttcaaagcaagatgacagag

SEQ ID NO: 155635 - DNA, 25 bp, Homo sapien
tagacttgaggtccttacattacag

SEQ ID NO: 155636 - DNA, 25 bp, Homo sapien
ggaggaggtgaatcacaaaagcacc

SEQ ID NO: 155637 - DNA, 25 bp, Homo sapien
caaaggcaccatcttactaaacagc

SEQ ID NO: 155638 - DNA, 25 bp, Homo sapien
tggatgtattaaatgaggttgcttg

SEQ ID NO: 155639 - DNA, 25 bp, Homo sapien
catttggatgtattaaatgaggttg

SEQ ID NO: 155640 - DNA, 25 bp, Homo sapien
ggcatttggatgtattaaatgaggt

SEQ ID NO: 155641 - DNA, 25 bp, Homo sapien
tttggatgtattaaatgaggttgct

SEQ ID NO: 155642 - DNA, 25 bp, Homo sapien
catcaccgtcgacagtaaaataaat

SEQ ID NO: 155643 - DNA, 25 bp, Homo sapien
gcccaagtcatcaccgtcgacagta

SEQ ID NO: 155644 - DNA, 25 bp, Homo sapien
gggctttggagcgcgcccaagtcat

SEQ ID NO: 155645 - DNA, 25 bp, Homo sapien
ttggagcgcgcccaagtcatcaccg

SEQ ID NO: 155646 - DNA, 25 bp, Homo sapien
accttcgtggccagacatagcgcct

SEQ ID NO: 155647 - DNA, 25 bp, Homo sapien
gccaccttcgtggccagacatagcg

SEQ ID NO: 155648 - DNA, 25 bp, Homo sapien
gtggccagacatagcgcctaccaca

SEQ ID NO: 155649 - DNA, 25 bp, Homo sapien
ttcgtggccagacatagcgcctacc

SEQ ID NO: 155650 - DNA, 25 bp, Homo sapien
ttttagcccctcaaatttcttctgc

SEQ ID NO: 155651 - DNA, 25 bp, Homo sapien
tttagcccctcaaatttcttctgct

SEQ ID NO: 155652 - DNA, 25 bp, Homo sapien
cttttagcccctcaaatttcttctg

SEQ ID NO: 155653 - DNA, 25 bp, Homo sapien
tgcttttagcccctcaaatttcttc

SEQ ID NO: 155654 - DNA, 25 bp, Homo sapien
atatacatggaatcaagggtcacca

SEQ ID NO: 155655 - DNA, 25 bp, Homo sapien
atgtacagtagactccaagacaaca

SEQ ID NO: 155656 - DNA, 25 bp, Homo sapien
gtacagtagactccaagacaacact

SEQ ID NO: 155657 - DNA, 25 bp, Homo sapien
aaatgtacagtagactccaagacaa

SEQ ID NO: 155658 - DNA, 25 bp, Homo sapien
cacagcctgtgcagtcccatagagg

SEQ ID NO: 155659 - DNA, 25 bp, Homo sapien
ccacagcctgtgcagtcccatagag

SEQ ID NO: 155660 - DNA, 25 bp, Homo sapien
cagcctgtgcagtcccatagaggga

SEQ ID NO: 155661 - DNA, 25 bp, Homo sapien
cctgtgcagtcccatagagggatgc

SEQ ID NO: 155662 - DNA, 25 bp, Homo sapien
cttcttcagtgaatggaacctcaga

SEQ ID NO: 155663 - DNA, 25 bp, Homo sapien
ttatgtggtccagaaaattaggatg

SEQ ID NO: 155664 - DNA, 25 bp, Homo sapien
tttcttcttcgataatcttcttcag

SEQ ID NO: 155665 - DNA, 25 bp, Homo sapien
aaattaggatgagactttcttcttc

SEQ ID NO: 155666 - DNA, 25 bp, Homo sapien
ctgatggctctcagactgaatctca

SEQ ID NO: 155667 - DNA, 25 bp, Homo sapien
ggacatcaatgtgcgtagataacag

SEQ ID NO: 155668 - DNA, 25 bp, Homo sapien
ccaggaaatgcgctgaggacatcaa

SEQ ID NO: 155669 - DNA, 25 bp, Homo sapien
caagataaattctattgaatgatgg

SEQ ID NO: 155670 - DNA, 25 bp, Homo sapien
ataaagcaagtccttagagactaca

SEQ ID NO: 155671 - DNA, 25 bp, Homo sapien
taaagcaagtccttagagactacaa

SEQ ID NO: 155672 - DNA, 25 bp, Homo sapien
ttagacacatcaatgagacagaagg

SEQ ID NO: 155673 - DNA, 25 bp, Homo sapien
cacatcaatgagacagaaggttaac

SEQ ID NO: 155674 - DNA, 25 bp, Homo sapien
gagtccagcagcaactacgtatgct

SEQ ID NO: 155675 - DNA, 25 bp, Homo sapien
tgtgtgtaacatgcctccttccgct

SEQ ID NO: 155676 - DNA, 25 bp, Homo sapien
tccttccgctccatactggagtcca

SEQ ID NO: 155677 - DNA, 25 bp, Homo sapien
cagcaactacgtatgctgcaaattt

SEQ ID NO: 155678 - DNA, 25 bp, Homo sapien
aatgcaggaatctcgcccaaccaag

SEQ ID NO: 155679 - DNA, 25 bp, Homo sapien
ttgttccatcgccaaaaactggtaa

SEQ ID NO: 155680 - DNA, 25 bp, Homo sapien
gaacatggattgttggaattacatt

SEQ ID NO: 155681 - DNA, 25 bp, Homo sapien
cgccaaaaactggtaatgcaggaat

SEQ ID NO: 155682 - DNA, 25 bp, Homo sapien
gctttggcacgtgatctatgacgtt

SEQ ID NO: 155683 - DNA, 25 bp, Homo sapien
gtgaggctttggcacgtgatctatg

SEQ ID NO: 155684 - DNA, 25 bp, Homo sapien
ggcacgtgatctatgacgttttgta

SEQ ID NO: 155685 - DNA, 25 bp, Homo sapien
cgtgatctatgacgttttgtatcac

SEQ ID NO: 155686 - DNA, 25 bp, Homo sapien
ggttaggtatgcattttctctgggt

SEQ ID NO: 155687 - DNA, 25 bp, Homo sapien
tcccagggccagtatttttactgat

SEQ ID NO: 155688 - DNA, 25 bp, Homo sapien
ccttggttaggtatgcattttctct

SEQ ID NO: 155689 - DNA, 25 bp, Homo sapien
ttcccagggccagtatttttactga

SEQ ID NO: 155690 - DNA, 25 bp, Homo sapien
tgggcagcccatcgaatattaaaat

SEQ ID NO: 155691 - DNA, 25 bp, Homo sapien
ccagtaaatggtcaagacaatcttg

SEQ ID NO: 155692 - DNA, 25 bp, Homo sapien
gcgcttccattcttaagttgaccag

SEQ ID NO: 155693 - DNA, 25 bp, Homo sapien
tgctttgcttgtactccttgaggat

SEQ ID NO: 155694 - DNA, 25 bp, Homo sapien
cagaaatgacatccttcagttggat

SEQ ID NO: 155695 - DNA, 25 bp, Homo sapien
gaccaagaatgcagatcttgattgg

SEQ ID NO: 155696 - DNA, 25 bp, Homo sapien
ttggccaattctttagcaatactgg

SEQ ID NO: 155697 - DNA, 25 bp, Homo sapien
tctttagcaatactggattttccca

SEQ ID NO: 155698 - DNA, 25 bp, Homo sapien
ctgagttggccacgaagaagacgac

SEQ ID NO: 155699 - DNA, 25 bp, Homo sapien
ggctactgattaggacaccttggat

SEQ ID NO: 155700 - DNA, 25 bp, Homo sapien
tgttcattgcgggtgccaaagccag

SEQ ID NO: 155701 - DNA, 25 bp, Homo sapien
aagaagctctctgacgccagtgtgg

SEQ ID NO: 155702 - DNA, 25 bp, Homo sapien
caagatggctctgaaggtaaagaag

SEQ ID NO: 155703 - DNA, 25 bp, Homo sapien
ttacaagatggctctgaaggtaaag

SEQ ID NO: 155704 - DNA, 25 bp, Homo sapien
gcagcccagacatcctcccaagagt

SEQ ID NO: 155705 - DNA, 25 bp, Homo sapien
tccacacgtcatccaccttctggtg

SEQ ID NO: 155706 - DNA, 25 bp, Homo sapien
cttctccttcccctacatcgttagg

SEQ ID NO: 155707 - DNA, 25 bp, Homo sapien
catcgttaggggcaacaatcgcctc

SEQ ID NO: 155708 - DNA, 25 bp, Homo sapien
tctccttgatgccatctaggagctc

SEQ ID NO: 155709 - DNA, 25 bp, Homo sapien
ccatctaggagctcctgtgcatctt

SEQ ID NO: 155710 - DNA, 25 bp, Homo sapien
ccctcctagatcacgaagtgctggg

SEQ ID NO: 155711 - DNA, 25 bp, Homo sapien
taactctcttatcaatttgcctgaa

SEQ ID NO: 155712 - DNA, 25 bp, Homo sapien
aggatttcataactctcttatcaat

SEQ ID NO: 155713 - DNA, 25 bp, Homo sapien
ggacattaacttatcatatcagtgg

SEQ ID NO: 155714 - DNA, 25 bp, Homo sapien
ctctgtccttctcccctgtccttga

SEQ ID NO: 155715 - DNA, 25 bp, Homo sapien
tccttctctgtccttctcccctgtc

SEQ ID NO: 155716 - DNA, 25 bp, Homo sapien
tgtccttctcccctgtccttgatcc

SEQ ID NO: 155717 - DNA, 25 bp, Homo sapien
atccgagttggccacatccttctct

SEQ ID NO: 155718 - DNA, 25 bp, Homo sapien
ctccatcccagaaaactaggttgat

SEQ ID NO: 155719 - DNA, 25 bp, Homo sapien
cctccatcccagaaaactaggttga

SEQ ID NO: 155720 - DNA, 25 bp, Homo sapien
ctcctccatcccagaaaactaggtt

SEQ ID NO: 155721 - DNA, 25 bp, Homo sapien
tcctccatcccagaaaactaggttg

SEQ ID NO: 155722 - DNA, 25 bp, Homo sapien
tcataaatctaattatatattgatc

SEQ ID NO: 155723 - DNA, 25 bp, Homo sapien
tgattttagcttttctttcataaat

SEQ ID NO: 155724 - DNA, 25 bp, Homo sapien
cataaatctaattatatattgatcg

SEQ ID NO: 155725 - DNA, 25 bp, Homo sapien
gcttttctttcataaatctaattat

SEQ ID NO: 155726 - DNA, 25 bp, Homo sapien
gattgaacaggtcttttgcttgatc

SEQ ID NO: 155727 - DNA, 25 bp, Homo sapien
ctttgggaatccatccaaaatataa

SEQ ID NO: 155728 - DNA, 25 bp, Homo sapien
gaacaggtcttttgcttgatcatag

SEQ ID NO: 155729 - DNA, 25 bp, Homo sapien
aatataaccttgattcctgcaaggc

SEQ ID NO: 155730 - DNA, 25 bp, Homo sapien
agggaaacattctgcctctgacatc

SEQ ID NO: 155731 - DNA, 25 bp, Homo sapien
caggtataattaatttatcaaaggg

SEQ ID NO: 155732 - DNA, 25 bp, Homo sapien
taatttatcaaagggaaacattctg

SEQ ID NO: 155733 - DNA, 25 bp, Homo sapien
aaacattctgcctctgacatcatct

SEQ ID NO: 155734 - DNA, 25 bp, Homo sapien
gaaggaggctacatgactcacgaag

SEQ ID NO: 155735 - DNA, 25 bp, Homo sapien
tcacgaagtcaagccatcagcagat

SEQ ID NO: 155736 - DNA, 25 bp, Homo sapien
gatattgggctactctaggcacact

SEQ ID NO: 155737 - DNA, 25 bp, Homo sapien
tgtagccctgctccttaagaagtag

SEQ ID NO: 155738 - DNA, 25 bp, Homo sapien
tctcaggaaggtttatcacacgctc

SEQ ID NO: 155739 - DNA, 25 bp, Homo sapien
gatgtcccggtagttgctcagagcc

SEQ ID NO: 155740 - DNA, 25 bp, Homo sapien
gaaactcatccgaagcatccagtgc

SEQ ID NO: 155741 - DNA, 25 bp, Homo sapien
tcggtcttggctgtagtgggtcccc

SEQ ID NO: 155742 - DNA, 25 bp, Homo sapien
cccataggaggaatacgtgcgaagg

SEQ ID NO: 155743 - DNA, 25 bp, Homo sapien
gaatacgtgcgaaggtccagaaaac

SEQ ID NO: 155744 - DNA, 25 bp, Homo sapien
caacaagccaagggaagtagcagca

SEQ ID NO: 155745 - DNA, 25 bp, Homo sapien
cgtgcgaaggtccagaaaaccagaa

SEQ ID NO: 155746 - DNA, 25 bp, Homo sapien
gatagcaagtctattctgagcatct

SEQ ID NO: 155747 - DNA, 25 bp, Homo sapien
gaggctccccaatctctttgatgag

SEQ ID NO: 155748 - DNA, 25 bp, Homo sapien
cgtctgttaaaccataatttcgagg

SEQ ID NO: 155749 - DNA, 25 bp, Homo sapien
ggtgctcgcgttctgcttcctcagc

SEQ ID NO: 155750 - DNA, 25 bp, Homo sapien
ttcaggccctgaataagagttggca

SEQ ID NO: 155751 - DNA, 25 bp, Homo sapien
gagttggcatcacataggtcattaa

SEQ ID NO: 155752 - DNA, 25 bp, Homo sapien
tgactgagcctccagtaattctctt

SEQ ID NO: 155753 - DNA, 25 bp, Homo sapien
ggacgttgcaacattcattcaggcc

SEQ ID NO: 155754 - DNA, 25 bp, Homo sapien
atcatcctgggccaagcttggtggc

SEQ ID NO: 155755 - DNA, 25 bp, Homo sapien
tcctgggccaagcttggtggctcat

SEQ ID NO: 155756 - DNA, 25 bp, Homo sapien
taaaaatcatcctgggccaagcttg

SEQ ID NO: 155757 - DNA, 25 bp, Homo sapien
aaaaatcatcctgggccaagcttgg

SEQ ID NO: 155758 - DNA, 25 bp, Homo sapien
aaaagacaagtcaacagtttacaag

SEQ ID NO: 155759 - DNA, 25 bp, Homo sapien
gacaagtcaacagtttacaagttat

SEQ ID NO: 155760 - DNA, 25 bp, Homo sapien
acaagtcaacagtttacaagttatt

SEQ ID NO: 155761 - DNA, 25 bp, Homo sapien
aagacaagtcaacagtttacaagtt

SEQ ID NO: 155762 - DNA, 25 bp, Homo sapien
cactgtgcttcaggattgttcttga

SEQ ID NO: 155763 - DNA, 25 bp, Homo sapien
tcactgtgcttcaggattgttcttg

SEQ ID NO: 155764 - DNA, 25 bp, Homo sapien
gagctatgcacaaatgtctttatca

SEQ ID NO: 155765 - DNA, 25 bp, Homo sapien
gacatagtcatgtcatatagctttt

SEQ ID NO: 155766 - DNA, 25 bp, Homo sapien
tgtaaaggtagataataccagatct

SEQ ID NO: 155767 - DNA, 25 bp, Homo sapien
gtatttgtctcatgagctatgcaca

SEQ ID NO: 155768 - DNA, 25 bp, Homo sapien
gcacaaataaaaagtcgggcagtta

SEQ ID NO: 155769 - DNA, 25 bp, Homo sapien
tatgcagatttctccgcctaaaggt

SEQ ID NO: 155770 - DNA, 25 bp, Homo sapien
ctaaaggtttacagttctctccgat

SEQ ID NO: 155771 - DNA, 25 bp, Homo sapien
tggagcgtgactgcctaataggtgc

SEQ ID NO: 155772 - DNA, 25 bp, Homo sapien
ccggagcagcgtccctggaggcgct

SEQ ID NO: 155773 - DNA, 25 bp, Homo sapien
gcgcggcgcttagaacgactcgcat

SEQ ID NO: 155774 - DNA, 25 bp, Homo sapien
ggcacccacgcgtgcaccgtatgta

SEQ ID NO: 155775 - DNA, 25 bp, Homo sapien
ctttcccgccgcctgaggtcgcggc

SEQ ID NO: 155776 - DNA, 25 bp, Homo sapien
ttcgtcctaacatggcgcccgagcg

SEQ ID NO: 155777 - DNA, 25 bp, Homo sapien
cgagcgctaccacagcaacgttcta

SEQ ID NO: 155778 - DNA, 25 bp, Homo sapien
gctcccgccgctttaagcgcttctc

SEQ ID NO: 155779 - DNA, 25 bp, Homo sapien
ccctgggcatgatccactgaggcgg

SEQ ID NO: 155780 - DNA, 25 bp, Homo sapien
tttgtggacggggcggagaagctgg

SEQ ID NO: 155781 - DNA, 25 bp, Homo sapien
gagtggccgggcgagttagaggttc

SEQ ID NO: 155782 - DNA, 25 bp, Homo sapien
tgattttctttgtggacggggcgga

SEQ ID NO: 155783 - DNA, 25 bp, Homo sapien
tggagtggccgggcgagttagaggt

SEQ ID NO: 155784 - DNA, 25 bp, Homo sapien
cactgcttttgcaccgttaagtaca

SEQ ID NO: 155785 - DNA, 25 bp, Homo sapien
tgttatggcgatgtaaaactactac

SEQ ID NO: 155786 - DNA, 25 bp, Homo sapien
tcctatgatggatacagcattttcc

SEQ ID NO: 155787 - DNA, 25 bp, Homo sapien
ttgtctcgcctaaaccttgcagtaa

SEQ ID NO: 155788 - DNA, 25 bp, Homo sapien
ggaaatgactatatacaataccggt

SEQ ID NO: 155789 - DNA, 25 bp, Homo sapien
ctatatacaataccggttctctgcc

SEQ ID NO: 155790 - DNA, 25 bp, Homo sapien
aatgactatatacaataccggttct

SEQ ID NO: 155791 - DNA, 25 bp, Homo sapien
gactatatacaataccggttctctg

SEQ ID NO: 155792 - DNA, 25 bp, Homo sapien
ctccgtcaagaacggaaggaagcaa

SEQ ID NO: 155793 - DNA, 25 bp, Homo sapien
gactccgtcaagaacggaaggaagc

SEQ ID NO: 155794 - DNA, 25 bp, Homo sapien
caagactccgtcaagaacggaagga

SEQ ID NO: 155795 - DNA, 25 bp, Homo sapien
gcaagactccgtcaagaacggaagg

SEQ ID NO: 155796 - DNA, 25 bp, Homo sapien
cacacacacagctacctcttatttt

SEQ ID NO: 155797 - DNA, 25 bp, Homo sapien
gaataacatacaaaaccaagtacac

SEQ ID NO: 155798 - DNA, 25 bp, Homo sapien
cacaataaggaaagacccaaaatct

SEQ ID NO: 155799 - DNA, 25 bp, Homo sapien
aaatctggatcggttatttctccca

SEQ ID NO: 155800 - DNA, 25 bp, Homo sapien
catagtgcttctgtggcggttgtgt

SEQ ID NO: 155801 - DNA, 25 bp, Homo sapien
tgtgtaagtacgcagtcagtctcct

SEQ ID NO: 155802 - DNA, 25 bp, Homo sapien
ggctgctaagctgataggagaagta

SEQ ID NO: 155803 - DNA, 25 bp, Homo sapien
aaagggtttcaatgtctcaattagt

SEQ ID NO: 155804 - DNA, 25 bp, Homo sapien
tgttgataaaacaattatcaatcaa

SEQ ID NO: 155805 - DNA, 25 bp, Homo sapien
gttgataaaacaattatcaatcaag

SEQ ID NO: 155806 - DNA, 25 bp, Homo sapien
ttatcaatcaagtattccagatcat

SEQ ID NO: 155807 - DNA, 25 bp, Homo sapien
ttgataaaacaattatcaatcaagt

SEQ ID NO: 155808 - DNA, 25 bp, Homo sapien
tcgtatccactcttttaccaggtta

SEQ ID NO: 155809 - DNA, 25 bp, Homo sapien
tgatttctcgtatccactcttttac

SEQ ID NO: 155810 - DNA, 25 bp, Homo sapien
tctcgtatccactcttttaccaggt

SEQ ID NO: 155811 - DNA, 25 bp, Homo sapien
tttctcgtatccactcttttaccag

SEQ ID NO: 155812 - DNA, 25 bp, Homo sapien
cagaaaactaaataggccgggcagc

SEQ ID NO: 155813 - DNA, 25 bp, Homo sapien
caggaatttcaggttacagtgcact

SEQ ID NO: 155814 - DNA, 25 bp, Homo sapien
tataatggtgtcactacactccgcc

SEQ ID NO: 155815 - DNA, 25 bp, Homo sapien
gaaacccaaagaatgttattacaga

SEQ ID NO: 155816 - DNA, 25 bp, Homo sapien
cttttgtatgcactcctaatctgta

SEQ ID NO: 155817 - DNA, 25 bp, Homo sapien
cattttcaattacagattgtggaag

SEQ ID NO: 155818 - DNA, 25 bp, Homo sapien
tgtatgcactcctaatctgtaagat

SEQ ID NO: 155819 - DNA, 25 bp, Homo sapien
gcactcctaatctgtaagatccaaa

SEQ ID NO: 155820 - DNA, 25 bp, Homo sapien
taattcagtgcttgataagaggcca

SEQ ID NO: 155821 - DNA, 25 bp, Homo sapien
tattagaacaggaagaacggtgtac

SEQ ID NO: 155822 - DNA, 25 bp, Homo sapien
ccaaagacagtacagcctcgggatg

SEQ ID NO: 155823 - DNA, 25 bp, Homo sapien
ggttaaagaatacagcctcagctgg

SEQ ID NO: 155824 - DNA, 25 bp, Homo sapien
aaaaagtcacttcgatcaacatgtc

SEQ ID NO: 155825 - DNA, 25 bp, Homo sapien
acttcgatcaacatgtcttggtgca

SEQ ID NO: 155826 - DNA, 25 bp, Homo sapien
catgtcttggtgcaacacacaacgc

SEQ ID NO: 155827 - DNA, 25 bp, Homo sapien
aacacacaacgcatcaatatcagca

SEQ ID NO: 155828 - DNA, 25 bp, Homo sapien
catcagatgtatgattgtggccaga

SEQ ID NO: 155829 - DNA, 25 bp, Homo sapien
aaagtaaacaagttcagggtctctg

SEQ ID NO: 155830 - DNA, 25 bp, Homo sapien
tgaatgttcataactcatcccattt

SEQ ID NO: 155831 - DNA, 25 bp, Homo sapien
tagctttaagactgggctgttcgat

SEQ ID NO: 155832 - DNA, 25 bp, Homo sapien
gagtttaataactggtacgaatgcc

SEQ ID NO: 155833 - DNA, 25 bp, Homo sapien
agtttaataactggtacgaatgcct

SEQ ID NO: 155834 - DNA, 25 bp, Homo sapien
cagagtttaataactggtacgaatg

SEQ ID NO: 155835 - DNA, 25 bp, Homo sapien
acagagtttaataactggtacgaat

SEQ ID NO: 155836 - DNA, 25 bp, Homo sapien
gattataggctcataaaactaggta

SEQ ID NO: 155837 - DNA, 25 bp, Homo sapien
gaaaatgaggcctcaacttatactt

SEQ ID NO: 155838 - DNA, 25 bp, Homo sapien
tgaaaaagcaactcagtaataatac

SEQ ID NO: 155839 - DNA, 25 bp, Homo sapien
actaggtaactgaaaaagcaactca

SEQ ID NO: 155840 - DNA, 25 bp, Homo sapien
caggaattgtctgcagtgctaatct

SEQ ID NO: 155841 - DNA, 25 bp, Homo sapien
catctcgtagatccaaatcttcagg

SEQ ID NO: 155842 - DNA, 25 bp, Homo sapien
tatctaaattttttagcagactgtc

SEQ ID NO: 155843 - DNA, 25 bp, Homo sapien
ttttagcagactgtcatctcgtaga

SEQ ID NO: 155844 - DNA, 25 bp, Homo sapien
cactactgtgttaacaatatagcta

SEQ ID NO: 155845 - DNA, 25 bp, Homo sapien
tatttaactcactactgtgttaaca

SEQ ID NO: 155846 - DNA, 25 bp, Homo sapien
tacacaaaaggaagtaggctttctc

SEQ ID NO: 155847 - DNA, 25 bp, Homo sapien
caaaaggaagtaggctttctcatac

SEQ ID NO: 155848 - DNA, 25 bp, Homo sapien
tatactgcggaagacttaatccact

SEQ ID NO: 155849 - DNA, 25 bp, Homo sapien
gaaacctaaatcactagcaacagag

SEQ ID NO: 155850 - DNA, 25 bp, Homo sapien
taagcactgaccaaagaaaccaaag

SEQ ID NO: 155851 - DNA, 25 bp, Homo sapien
taacctgccccaatttgaacttcag

SEQ ID NO: 155852 - DNA, 25 bp, Homo sapien
tttgatagctctcagagttaacctg

SEQ ID NO: 155853 - DNA, 25 bp, Homo sapien
agctctcagagttaacctgaagttg

SEQ ID NO: 155854 - DNA, 25 bp, Homo sapien
tagtttgatagctctcagagttaac

SEQ ID NO: 155855 - DNA, 25 bp, Homo sapien
gatagctctcagagttaacctgaag

SEQ ID NO: 155856 - DNA, 25 bp, Homo sapien
gcaaaaagataagttagtgttgaac

SEQ ID NO: 155857 - DNA, 25 bp, Homo sapien
gctagccaacaaattctgaactcac

SEQ ID NO: 155858 - DNA, 25 bp, Homo sapien
catttttaataagctagccaacaaa

SEQ ID NO: 155859 - DNA, 25 bp, Homo sapien
aagataagttagtgttgaacaaaag

SEQ ID NO: 155860 - DNA, 25 bp, Homo sapien
caccaccgaggaaacctaatatatt

SEQ ID NO: 155861 - DNA, 25 bp, Homo sapien
agctggcaagttcttgctactagca

SEQ ID NO: 155862 - DNA, 25 bp, Homo sapien
ttggataaagctggcaagttcttgc

SEQ ID NO: 155863 - DNA, 25 bp, Homo sapien
tgctactagcatagcccaggaaaca

SEQ ID NO: 155864 - DNA, 25 bp, Homo sapien
atgtacaagagttgatgctattgca

SEQ ID NO: 155865 - DNA, 25 bp, Homo sapien
tatgtacaagagttgatgctattgc

SEQ ID NO: 155866 - DNA, 25 bp, Homo sapien
gccttactatcctggccaaactagg

SEQ ID NO: 155867 - DNA, 25 bp, Homo sapien
gaaactaatggcctatagatagaga

SEQ ID NO: 155868 - DNA, 25 bp, Homo sapien
ggaagtacaaatagaatctgcctta

SEQ ID NO: 155869 - DNA, 25 bp, Homo sapien
caaggctgcctacatgactacatca

SEQ ID NO: 155870 - DNA, 25 bp, Homo sapien
aaatctgggttaatgactaatctca

SEQ ID NO: 155871 - DNA, 25 bp, Homo sapien
ttttgtcccgaagcacttaatgtta

SEQ ID NO: 155872 - DNA, 25 bp, Homo sapien
ttgggccaaggcaattaatataaaa

SEQ ID NO: 155873 - DNA, 25 bp, Homo sapien
tatgtggaaatgaaacgaagaaact

SEQ ID NO: 155874 - DNA, 25 bp, Homo sapien
aagaaattctgacagccggacgcgg

SEQ ID NO: 155875 - DNA, 25 bp, Homo sapien
gactgaaaccaaaaacgttctctgc

SEQ ID NO: 155876 - DNA, 25 bp, Homo sapien
aaactagctactttggtcccatatg

SEQ ID NO: 155877 - DNA, 25 bp, Homo sapien
catacagcatttgtgaacgtgatcc

SEQ ID NO: 155878 - DNA, 25 bp, Homo sapien
caatagcactggatttggccattcc

SEQ ID NO: 155879 - DNA, 25 bp, Homo sapien
aattaagattgcattcttcaggctg

SEQ ID NO: 155880 - DNA, 25 bp, Homo sapien
ttaagattgcattcttcaggctgtt

SEQ ID NO: 155881 - DNA, 25 bp, Homo sapien
gctgtttcaatagcactggatttgg

SEQ ID NO: 155882 - DNA, 25 bp, Homo sapien
gaaagtgtaatacggacatgaccat

SEQ ID NO: 155883 - DNA, 25 bp, Homo sapien
taaagcacaaatgcccacacaactt

SEQ ID NO: 155884 - DNA, 25 bp, Homo sapien
gaagtctccctggagtttatgcaga

SEQ ID NO: 155885 - DNA, 25 bp, Homo sapien
cacacaactttgacttacaaggtag

SEQ ID NO: 155886 - DNA, 25 bp, Homo sapien
catcctctaaaagtaaatgccttga

SEQ ID NO: 155887 - DNA, 25 bp, Homo sapien
taacacgcggtgaaactacattatc

SEQ ID NO: 155888 - DNA, 25 bp, Homo sapien
gggatgcacatacaattacctttag

SEQ ID NO: 155889 - DNA, 25 bp, Homo sapien
aatgccttgaggttcggaaaacctg

SEQ ID NO: 155890 - DNA, 25 bp, Homo sapien
aattataggcataagatggtaccta

SEQ ID NO: 155891 - DNA, 25 bp, Homo sapien
ctggtgtaattataggcataagatg

SEQ ID NO: 155892 - DNA, 25 bp, Homo sapien
gatggtacctatcactggggtttac

SEQ ID NO: 155893 - DNA, 25 bp, Homo sapien
ggcataagatggtacctatcactgg

SEQ ID NO: 155894 - DNA, 25 bp, Homo sapien
cattgtacgtggagttctgttgtgg

SEQ ID NO: 155895 - DNA, 25 bp, Homo sapien
tcaaccatgaccatccgtgttgaaa

SEQ ID NO: 155896 - DNA, 25 bp, Homo sapien
gaccatccgtgttgaaacggacaca

SEQ ID NO: 155897 - DNA, 25 bp, Homo sapien
tgaaacggacacattgtacgtggag

SEQ ID NO: 155898 - DNA, 25 bp, Homo sapien
tgactactgggtctacaatggtacg

SEQ ID NO: 155899 - DNA, 25 bp, Homo sapien
ttctaaagggatagaggcatcttcc

SEQ ID NO: 155900 - DNA, 25 bp, Homo sapien
tctttcccaggagtatacagcctgc

SEQ ID NO: 155901 - DNA, 25 bp, Homo sapien
gtatgcaactaaaccagcttactgg

SEQ ID NO: 155902 - DNA, 25 bp, Homo sapien
tctgccttactcagcaaaatttcat

SEQ ID NO: 155903 - DNA, 25 bp, Homo sapien
gagcttcaaaaagtttggaccactc

SEQ ID NO: 155904 - DNA, 25 bp, Homo sapien
ttttgaaagaagtttggagcttcaa

SEQ ID NO: 155905 - DNA, 25 bp, Homo sapien
gtttggaccactctgccttactcag

SEQ ID NO: 155906 - DNA, 25 bp, Homo sapien
catgactgatgtatgcctacagaac

SEQ ID NO: 155907 - DNA, 25 bp, Homo sapien
tagcaggagttcagttagatcgggc

SEQ ID NO: 155908 - DNA, 25 bp, Homo sapien
cagggtgcatccacttgccactgta

SEQ ID NO: 155909 - DNA, 25 bp, Homo sapien
tggcacattttcagcccagggcaaa

SEQ ID NO: 155910 - DNA, 25 bp, Homo sapien
taaaaccaggattggtactcaattc

SEQ ID NO: 155911 - DNA, 25 bp, Homo sapien
cacagaaacctagtgtacatctaaa

SEQ ID NO: 155912 - DNA, 25 bp, Homo sapien
gagtcattaggaattcatttacaaa

SEQ ID NO: 155913 - DNA, 25 bp, Homo sapien
taaggtcccaatcagaccacagaaa

SEQ ID NO: 155914 - DNA, 25 bp, Homo sapien
gacacggttttgctggcaattcaaa

SEQ ID NO: 155915 - DNA, 25 bp, Homo sapien
tcaaagttttgaatcctagagttca

SEQ ID NO: 155916 - DNA, 25 bp, Homo sapien
aaacatacaatccatttggacacgg

SEQ ID NO: 155917 - DNA, 25 bp, Homo sapien
gagttcaacataacttcttactgaa

SEQ ID NO: 155918 - DNA, 25 bp, Homo sapien
tccatgtttctaactactagtgagt

SEQ ID NO: 155919 - DNA, 25 bp, Homo sapien
gggactacaatctcaatatgcacat

SEQ ID NO: 155920 - DNA, 25 bp, Homo sapien
acacgctttgtgctggatattaaac

SEQ ID NO: 155921 - DNA, 25 bp, Homo sapien
tagatccacatcaatttagcaaggg

SEQ ID NO: 155922 - DNA, 25 bp, Homo sapien
cattccaggcgttgtttttctgttg

SEQ ID NO: 155923 - DNA, 25 bp, Homo sapien
aataagttgcatatggatctcctga

SEQ ID NO: 155924 - DNA, 25 bp, Homo sapien
gccttatgttctacccaaaattgcc

SEQ ID NO: 155925 - DNA, 25 bp, Homo sapien
ttaagaaattatgcacggatctcca

SEQ ID NO: 155926 - DNA, 25 bp, Homo sapien
ttcaactagctgaactcccacagat

SEQ ID NO: 155927 - DNA, 25 bp, Homo sapien
tgaacaaatgtcacttagtattaac

SEQ ID NO: 155928 - DNA, 25 bp, Homo sapien
gaacaaatgtcacttagtattaaca

SEQ ID NO: 155929 - DNA, 25 bp, Homo sapien
ctgaacaaatgtcacttagtattaa

SEQ ID NO: 155930 - DNA, 25 bp, Homo sapien
acaaatgtcacttagtattaacaaa

SEQ ID NO: 155931 - DNA, 25 bp, Homo sapien
ttctttgggtgctggaaatgactgg

SEQ ID NO: 155932 - DNA, 25 bp, Homo sapien
gggattcacatgagccagtgtaata

SEQ ID NO: 155933 - DNA, 25 bp, Homo sapien
ttcggatttttgattccaccaagcc

SEQ ID NO: 155934 - DNA, 25 bp, Homo sapien
ttccaaccaggattcggatttttga

SEQ ID NO: 155935 - DNA, 25 bp, Homo sapien
tgagatcaacactgaggttttcaga

SEQ ID NO: 155936 - DNA, 25 bp, Homo sapien
gatcaacactgaggttttcagagtt

SEQ ID NO: 155937 - DNA, 25 bp, Homo sapien
gtgagatcaacactgaggttttcag

SEQ ID NO: 155938 - DNA, 25 bp, Homo sapien
gagatcaacactgaggttttcagag

SEQ ID NO: 155939 - DNA, 25 bp, Homo sapien
catctggacactaggtaagaacagc

SEQ ID NO: 155940 - DNA, 25 bp, Homo sapien
ccaatgtctctaggttgaacaacca

SEQ ID NO: 155941 - DNA, 25 bp, Homo sapien
tcagtaccaaatgctgctccaggcc

SEQ ID NO: 155942 - DNA, 25 bp, Homo sapien
gagtaccaatggttccctgcagaaa

SEQ ID NO: 155943 - DNA, 25 bp, Homo sapien
caatactgcatatctgtagatcggt

SEQ ID NO: 155944 - DNA, 25 bp, Homo sapien
gagaaactattctaagtagggatcc

SEQ ID NO: 155945 - DNA, 25 bp, Homo sapien
aaaggcagttatactcactccagag

SEQ ID NO: 155946 - DNA, 25 bp, Homo sapien
cggtcaagacctattcctaatctga

SEQ ID NO: 155947 - DNA, 25 bp, Homo sapien
agcaattttcatatccacctcaaac

SEQ ID NO: 155948 - DNA, 25 bp, Homo sapien
cagcaattttcatatccacctcaaa

SEQ ID NO: 155949 - DNA, 25 bp, Homo sapien
tgattaggtagtagttgatggagtt

SEQ ID NO: 155950 - DNA, 25 bp, Homo sapien
taggtagtagttgatggagttgctt

SEQ ID NO: 155951 - DNA, 25 bp, Homo sapien
tgtccatagacaagtcgaggctgct

SEQ ID NO: 155952 - DNA, 25 bp, Homo sapien
tagcactagtaggtgaaggcacaga

SEQ ID NO: 155953 - DNA, 25 bp, Homo sapien
tgagagctgccagaactgttcaatg

SEQ ID NO: 155954 - DNA, 25 bp, Homo sapien
aatggactggtcttcgtagcactag

SEQ ID NO: 155955 - DNA, 25 bp, Homo sapien
caggtttccctaactatcatagaca

SEQ ID NO: 155956 - DNA, 25 bp, Homo sapien
tacagtgcactgtagcagtagctat

SEQ ID NO: 155957 - DNA, 25 bp, Homo sapien
tgattgatttagcaaacagcccctc

SEQ ID NO: 155958 - DNA, 25 bp, Homo sapien
gcttcatacccagggcagtggcatg

SEQ ID NO: 155959 - DNA, 25 bp, Homo sapien
tgaagtctttggattatgcatgatt

SEQ ID NO: 155960 - DNA, 25 bp, Homo sapien
gcctgaagtctttggattatgcatg

SEQ ID NO: 155961 - DNA, 25 bp, Homo sapien
cctgaagtctttggattatgcatga

SEQ ID NO: 155962 - DNA, 25 bp, Homo sapien
aagtctttggattatgcatgatttg

SEQ ID NO: 155963 - DNA, 25 bp, Homo sapien
ttggtacttacatgacatccacagg

SEQ ID NO: 155964 - DNA, 25 bp, Homo sapien
gagcaggtgttaccactcagggaca

SEQ ID NO: 155965 - DNA, 25 bp, Homo sapien
gggaaccacggagcagtcaacttat

SEQ ID NO: 155966 - DNA, 25 bp, Homo sapien
ggaggtaggcaacacttcgaagact

SEQ ID NO: 155967 - DNA, 25 bp, Homo sapien
tatatcgccagagtggttctaaaag

SEQ ID NO: 155968 - DNA, 25 bp, Homo sapien
taaattgtcacatatggcggctggc

SEQ ID NO: 155969 - DNA, 25 bp, Homo sapien
catccagtggcccagttaaagacct

SEQ ID NO: 155970 - DNA, 25 bp, Homo sapien
gcttgagctcaagtctgaaactagc

SEQ ID NO: 155971 - DNA, 25 bp, Homo sapien
ctgtatgttggtcacagatgctgct

SEQ ID NO: 155972 - DNA, 25 bp, Homo sapien
cctgtatgttggtcacagatgctgc

SEQ ID NO: 155973 - DNA, 25 bp, Homo sapien
cccctgagctttcactggaatttac

SEQ ID NO: 155974 - DNA, 25 bp, Homo sapien
atggctggttgtgtggcagtttgag

SEQ ID NO: 155975 - DNA, 25 bp, Homo sapien
agaaacaactctggagaccgtaggc

SEQ ID NO: 155976 - DNA, 25 bp, Homo sapien
ggctggttgtgtggcagtttgagga

SEQ ID NO: 155977 - DNA, 25 bp, Homo sapien
aacaactctggagaccgtaggcttt

SEQ ID NO: 155978 - DNA, 25 bp, Homo sapien
taggagtaggtatttttgttgctgc

SEQ ID NO: 155979 - DNA, 25 bp, Homo sapien
tctttatgaggtgaggatgtcctct

SEQ ID NO: 155980 - DNA, 25 bp, Homo sapien
tctcttctttatgaggtgaggatgt

SEQ ID NO: 155981 - DNA, 25 bp, Homo sapien
tcttgactcctactataggagtagg

SEQ ID NO: 155982 - DNA, 25 bp, Homo sapien
taaagcaccatgagatttaggcctg

SEQ ID NO: 155983 - DNA, 25 bp, Homo sapien
gggccatttgagcactgactagatg

SEQ ID NO: 155984 - DNA, 25 bp, Homo sapien
gatccgtaactggaaaagccactaa

SEQ ID NO: 155985 - DNA, 25 bp, Homo sapien
caaacaattgcaacacagggatctt

SEQ ID NO: 155986 - DNA, 25 bp, Homo sapien
ggccaaatctgaatactgactgata

SEQ ID NO: 155987 - DNA, 25 bp, Homo sapien
gttgaagctaggtgatgcaaacatg

SEQ ID NO: 155988 - DNA, 25 bp, Homo sapien
caaggctggctgtgagttgttaact

SEQ ID NO: 155989 - DNA, 25 bp, Homo sapien
taatgtgtcacaattggccaaatct

SEQ ID NO: 155990 - DNA, 25 bp, Homo sapien
aagcaagacagttagcatcttcact

SEQ ID NO: 155991 - DNA, 25 bp, Homo sapien
aaagcaagacagttagcatcttcac

SEQ ID NO: 155992 - DNA, 25 bp, Homo sapien
aagacagttagcatcttcacttgtt

SEQ ID NO: 155993 - DNA, 25 bp, Homo sapien
gcaagacagttagcatcttcacttg

SEQ ID NO: 155994 - DNA, 25 bp, Homo sapien
taatcatagccttaagacagcattc

SEQ ID NO: 155995 - DNA, 25 bp, Homo sapien
aaagcaagggcattatgagggcaca

SEQ ID NO: 155996 - DNA, 25 bp, Homo sapien
ggtatttagctgtaaccaatattac

SEQ ID NO: 155997 - DNA, 25 bp, Homo sapien
taagataaagcatactattttcctc

SEQ ID NO: 155998 - DNA, 25 bp, Homo sapien
agagaagccgctgtctgaatagttt

SEQ ID NO: 155999 - DNA, 25 bp, Homo sapien
cgctgtctgaatagtttctgattga

SEQ ID NO: 156000 - DNA, 25 bp, Homo sapien
tgagaggccaacagagaagccgctg

SEQ ID NO: 156001 - DNA, 25 bp, Homo sapien
tttctgattgagttgtacttgtctc

SEQ ID NO: 156002 - DNA, 25 bp, Homo sapien
catttacaaaattctccttgctttt

SEQ ID NO: 156003 - DNA, 25 bp, Homo sapien
acactaatcttaaggacatttacaa

SEQ ID NO: 156004 - DNA, 25 bp, Homo sapien
ttttaatagtcttctatgaactctc

SEQ ID NO: 156005 - DNA, 25 bp, Homo sapien
taatagtcttctatgaactctcact

SEQ ID NO: 156006 - DNA, 25 bp, Homo sapien
aaataagtcccgagagtatgtggca

SEQ ID NO: 156007 - DNA, 25 bp, Homo sapien
tatcacctccccagaaataagtacg

SEQ ID NO: 156008 - DNA, 25 bp, Homo sapien
gagcactgtataatgcatccccatg

SEQ ID NO: 156009 - DNA, 25 bp, Homo sapien
tatctaaaaggcaaatacccatggg

SEQ ID NO: 156010 - DNA, 25 bp, Homo sapien
tatcatataatgcttaagttactgc

SEQ ID NO: 156011 - DNA, 25 bp, Homo sapien
aatggaatgtaaatatgcctatcac

SEQ ID NO: 156012 - DNA, 25 bp, Homo sapien
aagtgggagaatactcaaagctcat

SEQ ID NO: 156013 - DNA, 25 bp, Homo sapien
tcacaagcgttctttaacactaaaa

SEQ ID NO: 156014 - DNA, 25 bp, Homo sapien
agagcagggatatcagaaaggtctg

SEQ ID NO: 156015 - DNA, 25 bp, Homo sapien
atcagaaaggtctgtactggatgtt

SEQ ID NO: 156016 - DNA, 25 bp, Homo sapien
ggagagcagggatatcagaaaggtc

SEQ ID NO: 156017 - DNA, 25 bp, Homo sapien
cagaaaggtctgtactggatgtttt

SEQ ID NO: 156018 - DNA, 25 bp, Homo sapien
taacctggacttccgatcaagtgct

SEQ ID NO: 156019 - DNA, 25 bp, Homo sapien
cctggcttcacatactaacctggac

SEQ ID NO: 156020 - DNA, 25 bp, Homo sapien
caagtgctgattagcccagtaaggg

SEQ ID NO: 156021 - DNA, 25 bp, Homo sapien
ttcagtcatgtctagtcttgtaccc

SEQ ID NO: 156022 - DNA, 25 bp, Homo sapien
tctctgaagtataacagtacaccac

SEQ ID NO: 156023 - DNA, 25 bp, Homo sapien
tataacagtacaccactgcacaaca

SEQ ID NO: 156024 - DNA, 25 bp, Homo sapien
gaagtataacagtacaccactgcac

SEQ ID NO: 156025 - DNA, 25 bp, Homo sapien
tctgaagtataacagtacaccactg

SEQ ID NO: 156026 - DNA, 25 bp, Homo sapien
tcacagggtcattggtttcacatca

SEQ ID NO: 156027 - DNA, 25 bp, Homo sapien
cttttagagatcaaatggccatccc

SEQ ID NO: 156028 - DNA, 25 bp, Homo sapien
tacatcatgcgaaagcaacagtctg

SEQ ID NO: 156029 - DNA, 25 bp, Homo sapien
gaagtaagtcctaccttgtgcatac

SEQ ID NO: 156030 - DNA, 25 bp, Homo sapien
acaaagcaaactccagtcatgagac

SEQ ID NO: 156031 - DNA, 25 bp, Homo sapien
tcttgaaaaatacaaggagtacaga

SEQ ID NO: 156032 - DNA, 25 bp, Homo sapien
gctcttgaaaaatacaaggagtaca

SEQ ID NO: 156033 - DNA, 25 bp, Homo sapien
ttgaaaaatacaaggagtacagata

SEQ ID NO: 156034 - DNA, 25 bp, Homo sapien
tctgtttacaaaatagctcttgaaa

SEQ ID NO: 156035 - DNA, 25 bp, Homo sapien
tttattgtgttttcaatggagaaat

SEQ ID NO: 156036 - DNA, 25 bp, Homo sapien
tattgtgttttcaatggagaaatac

SEQ ID NO: 156037 - DNA, 25 bp, Homo sapien
ttattgtgttttcaatggagaaata

SEQ ID NO: 156038 - DNA, 25 bp, Homo sapien
catttaccaaagtcaggtctgagtg

SEQ ID NO: 156039 - DNA, 25 bp, Homo sapien
ccatttgtgatactggtttgaagaa

SEQ ID NO: 156040 - DNA, 25 bp, Homo sapien
ctcagtgctgcttcaggtaaacagt

SEQ ID NO: 156041 - DNA, 25 bp, Homo sapien
gtatatccaaaggattgctcagtgc

SEQ ID NO: 156042 - DNA, 25 bp, Homo sapien
tgcgtgaagcatccatccccgcagg

SEQ ID NO: 156043 - DNA, 25 bp, Homo sapien
aagcatccatccccgcaggagccgg

SEQ ID NO: 156044 - DNA, 25 bp, Homo sapien
agcatccatccccgcaggagccgga

SEQ ID NO: 156045 - DNA, 25 bp, Homo sapien
gtgaagcatccatccccgcaggagc

SEQ ID NO: 156046 - DNA, 25 bp, Homo sapien
ccgccttggcgtgggttgataacca

SEQ ID NO: 156047 - DNA, 25 bp, Homo sapien
taatggaccaaagcttcgacggagc

SEQ ID NO: 156048 - DNA, 25 bp, Homo sapien
taaccatgcctatctcaccgcgtgg

SEQ ID NO: 156049 - DNA, 25 bp, Homo sapien
gacgctggcgaatgactatggaaac

SEQ ID NO: 156050 - DNA, 25 bp, Homo sapien
gagcccgatagagcacgcgggaaaa

SEQ ID NO: 156051 - DNA, 25 bp, Homo sapien
cctccgtgtccaggggagcccgata

SEQ ID NO: 156052 - DNA, 25 bp, Homo sapien
ggagctaggcggactccccatggct

SEQ ID NO: 156053 - DNA, 25 bp, Homo sapien
ggtgtctacgcttccgcgacttagg

SEQ ID NO: 156054 - DNA, 25 bp, Homo sapien
tagtggtcactagacatgaaatcag

SEQ ID NO: 156055 - DNA, 25 bp, Homo sapien
atgaaatcagatccacacagacaca

SEQ ID NO: 156056 - DNA, 25 bp, Homo sapien
tctgggtcgtgaatattctccagct

SEQ ID NO: 156057 - DNA, 25 bp, Homo sapien
gaggatgaagccattctcgccctta

SEQ ID NO: 156058 - DNA, 25 bp, Homo sapien
gggctgtctttcagctactcggacc

SEQ ID NO: 156059 - DNA, 25 bp, Homo sapien
gctacaaaggcggatccaggtaagg

SEQ ID NO: 156060 - DNA, 25 bp, Homo sapien
gaggaggctacaaaggcggatccag

SEQ ID NO: 156061 - DNA, 25 bp, Homo sapien
caaaggcggatccaggtaaggtgtc

SEQ ID NO: 156062 - DNA, 25 bp, Homo sapien
ctgccactttgaaattgctcttggc

SEQ ID NO: 156063 - DNA, 25 bp, Homo sapien
actttgaaattgctcttggcagagg

SEQ ID NO: 156064 - DNA, 25 bp, Homo sapien
ccactttgaaattgctcttggcaga

SEQ ID NO: 156065 - DNA, 25 bp, Homo sapien
gccactttgaaattgctcttggcag

SEQ ID NO: 156066 - DNA, 25 bp, Homo sapien
tcccggaatgggactagagtgaagc

SEQ ID NO: 156067 - DNA, 25 bp, Homo sapien
ggtgccccttcaattctgtgcccag

SEQ ID NO: 156068 - DNA, 25 bp, Homo sapien
tggtggtctcccgaatgctcacgaa

SEQ ID NO: 156069 - DNA, 25 bp, Homo sapien
gatcccactgcgcaatgaagcagct

SEQ ID NO: 156070 - DNA, 25 bp, Homo sapien
ggccacttctgtcccgacctcaggg

SEQ ID NO: 156071 - DNA, 25 bp, Homo sapien
gggctcactggatggtttagttcaa

SEQ ID NO: 156072 - DNA, 25 bp, Homo sapien
gatggtttagttcaagggtggtctc

SEQ ID NO: 156073 - DNA, 25 bp, Homo sapien
tcaagggtggtctcaaatgggccac

SEQ ID NO: 156074 - DNA, 25 bp, Homo sapien
gctggataaggtgggctccaccaca

SEQ ID NO: 156075 - DNA, 25 bp, Homo sapien
caggccaccttgtgctggataaggt

SEQ ID NO: 156076 - DNA, 25 bp, Homo sapien
tggataaggtgggctccaccacagt

SEQ ID NO: 156077 - DNA, 25 bp, Homo sapien
aggccaccttgtgctggataaggtg

SEQ ID NO: 156078 - DNA, 25 bp, Homo sapien
ggccctccagctacaaaaatgagta

SEQ ID NO: 156079 - DNA, 25 bp, Homo sapien
tcctcagctaagaagaagctggact

SEQ ID NO: 156080 - DNA, 25 bp, Homo sapien
gggctgtgacgagactcaaatgtcc

SEQ ID NO: 156081 - DNA, 25 bp, Homo sapien
aagcaaagatagacagaggccaggc

SEQ ID NO: 156082 - DNA, 25 bp, Homo sapien
tttttccggcaggtacttgtcagct

SEQ ID NO: 156083 - DNA, 25 bp, Homo sapien
cacttgtgatcttacaggttcttca

SEQ ID NO: 156084 - DNA, 25 bp, Homo sapien
gagagagagttgatacagccaagga

SEQ ID NO: 156085 - DNA, 25 bp, Homo sapien
aacttcctgaagtcccgcgtgcaaa

SEQ ID NO: 156086 - DNA, 25 bp, Homo sapien
tactgactacactggtcaatgaccc

SEQ ID NO: 156087 - DNA, 25 bp, Homo sapien
gagttggtgtccaagagattcctgg

SEQ ID NO: 156088 - DNA, 25 bp, Homo sapien
aaacatttctcatgtgactagtaca

SEQ ID NO: 156089 - DNA, 25 bp, Homo sapien
tattgtctgatcatccacggagttg

SEQ ID NO: 156090 - DNA, 25 bp, Homo sapien
tctccaagcgtgctgaaagtcgctc

SEQ ID NO: 156091 - DNA, 25 bp, Homo sapien
tcaggccggtctggcacgagtatct

SEQ ID NO: 156092 - DNA, 25 bp, Homo sapien
caagggtctggaccgtttcaggccg

SEQ ID NO: 156093 - DNA, 25 bp, Homo sapien
ggagctcacgtctgctctggttaca

SEQ ID NO: 156094 - DNA, 25 bp, Homo sapien
ttccaaaagccgtccagtgatccag

SEQ ID NO: 156095 - DNA, 25 bp, Homo sapien
tgcttgctctatgcggcagccagat

SEQ ID NO: 156096 - DNA, 25 bp, Homo sapien
gatgcctctatatcctgcccaatta

SEQ ID NO: 156097 - DNA, 25 bp, Homo sapien
tgatccagcgcacgccgaatctttg

SEQ ID NO: 156098 - DNA, 25 bp, Homo sapien
agatggcggctgtgcgagcaccagg

SEQ ID NO: 156099 - DNA, 25 bp, Homo sapien
atggcggctgtgcgagcaccagggg

SEQ ID NO: 156100 - DNA, 25 bp, Homo sapien
gatggcggctgtgcgagcaccaggg

SEQ ID NO: 156101 - DNA, 25 bp, Homo sapien
agcagagagccagatggcggctgtg

SEQ ID NO: 156102 - DNA, 25 bp, Homo sapien
gttcacgtggtggttgccgctgctg

SEQ ID NO: 156103 - DNA, 25 bp, Homo sapien
tgcatggctcgcccacggggcctga

SEQ ID NO: 156104 - DNA, 25 bp, Homo sapien
catcgggttcacgtggtggttgccg

SEQ ID NO: 156105 - DNA, 25 bp, Homo sapien
agtccatggcatcgggttcacgtgg

SEQ ID NO: 156106 - DNA, 25 bp, Homo sapien
gctgcggggtgcactcagaggtgct

SEQ ID NO: 156107 - DNA, 25 bp, Homo sapien
tgctgcggggtgcactcagaggtgc

SEQ ID NO: 156108 - DNA, 25 bp, Homo sapien
gcctccttggctcgtcattaggcat

SEQ ID NO: 156109 - DNA, 25 bp, Homo sapien
atcagtgcctgctccaaacgcctcc

SEQ ID NO: 156110 - DNA, 25 bp, Homo sapien
caaacgcctccttggctcgtcatta

SEQ ID NO: 156111 - DNA, 25 bp, Homo sapien
gtgcctgctccaaacgcctccttgg

SEQ ID NO: 156112 - DNA, 25 bp, Homo sapien
gcatgggagtgaatgccaatcagcc

SEQ ID NO: 156113 - DNA, 25 bp, Homo sapien
ggaggtcagactgcaatacttctgg

SEQ ID NO: 156114 - DNA, 25 bp, Homo sapien
cgccaggtgcctaatggatgcggca

SEQ ID NO: 156115 - DNA, 25 bp, Homo sapien
tgcctaatggatgcggcagatgtgc

SEQ ID NO: 156116 - DNA, 25 bp, Homo sapien
tgccaaccgctggtggtgactctga

SEQ ID NO: 156117 - DNA, 25 bp, Homo sapien
accgctggtggtgactctgaccggc

SEQ ID NO: 156118 - DNA, 25 bp, Homo sapien
ctgccaaccgctggtggtgactctg

SEQ ID NO: 156119 - DNA, 25 bp, Homo sapien
ccaaccgctggtggtgactctgacc

SEQ ID NO: 156120 - DNA, 25 bp, Homo sapien
ttatcttggcaagctggtcagcagc

SEQ ID NO: 156121 - DNA, 25 bp, Homo sapien
aaaagccgatgatctgggacaagga

SEQ ID NO: 156122 - DNA, 25 bp, Homo sapien
aattatcttggcaagctggtcagca

SEQ ID NO: 156123 - DNA, 25 bp, Homo sapien
atcttggcaagctggtcagcagctt

SEQ ID NO: 156124 - DNA, 25 bp, Homo sapien
acagtgcatccctaggtggggccct

SEQ ID NO: 156125 - DNA, 25 bp, Homo sapien
tgcatccctaggtggggccctccta

SEQ ID NO: 156126 - DNA, 25 bp, Homo sapien
agtgcatccctaggtggggccctcc

SEQ ID NO: 156127 - DNA, 25 bp, Homo sapien
gacagtgcatccctaggtggggccc

SEQ ID NO: 156128 - DNA, 25 bp, Homo sapien
ccagtctggatttggacttggccag

SEQ ID NO: 156129 - DNA, 25 bp, Homo sapien
gacttggccaggaccaaggtcacca

SEQ ID NO: 156130 - DNA, 25 bp, Homo sapien
gagcagccagtctggatttggactt

SEQ ID NO: 156131 - DNA, 25 bp, Homo sapien
ggacctagagaagagggcatgatgg

SEQ ID NO: 156132 - DNA, 25 bp, Homo sapien
cttgtcaatctgaccttcaacttcc

SEQ ID NO: 156133 - DNA, 25 bp, Homo sapien
gtcaatctgaccttcaacttccaca

SEQ ID NO: 156134 - DNA, 25 bp, Homo sapien
tgtcaatctgaccttcaacttccac

SEQ ID NO: 156135 - DNA, 25 bp, Homo sapien
ttgtcaatctgaccttcaacttcca

SEQ ID NO: 156136 - DNA, 25 bp, Homo sapien
tgtataccacctggaagcccaagga

SEQ ID NO: 156137 - DNA, 25 bp, Homo sapien
tgacacctgagtaagcctcctggag

SEQ ID NO: 156138 - DNA, 25 bp, Homo sapien
cttggaaatgctaaaacgggtgatc

SEQ ID NO: 156139 - DNA, 25 bp, Homo sapien
tgtccctaggaaaacttcatcacag

SEQ ID NO: 156140 - DNA, 25 bp, Homo sapien
gcccaaggtggatgatcacaacatt

SEQ ID NO: 156141 - DNA, 25 bp, Homo sapien
ttgacaatcattggctggctgacag

SEQ ID NO: 156142 - DNA, 25 bp, Homo sapien
cacacactgatatatcagtagaagg

SEQ ID NO: 156143 - DNA, 25 bp, Homo sapien
cactgatatatcagtagaaggtaga

SEQ ID NO: 156144 - DNA, 25 bp, Homo sapien
gaatgtgctgttgctctgacgcgcc

SEQ ID NO: 156145 - DNA, 25 bp, Homo sapien
agcacgcgtcggcaaaacttgctgg

SEQ ID NO: 156146 - DNA, 25 bp, Homo sapien
tgcaaatcccgcacaggttgaatgt

SEQ ID NO: 156147 - DNA, 25 bp, Homo sapien
tgacgcgcccgtacttgaaaggttg

SEQ ID NO: 156148 - DNA, 25 bp, Homo sapien
gcaattagatcatgggttgtccctg

SEQ ID NO: 156149 - DNA, 25 bp, Homo sapien
gactgatgggataataagcagtagt

SEQ ID NO: 156150 - DNA, 25 bp, Homo sapien
cccagtgaaggtcccatatgaataa

SEQ ID NO: 156151 - DNA, 25 bp, Homo sapien
taagtattaagttgacccagtgaag

SEQ ID NO: 156152 - DNA, 25 bp, Homo sapien
ggaagaaacccaacgagcatgtgct

SEQ ID NO: 156153 - DNA, 25 bp, Homo sapien
tgataaagagctccctccaaagtag

SEQ ID NO: 156154 - DNA, 25 bp, Homo sapien
caggtagcttacttgggagacaatc

SEQ ID NO: 156155 - DNA, 25 bp, Homo sapien
tgaaaggactttggtgcaggtagct

SEQ ID NO: 156156 - DNA, 25 bp, Homo sapien
tgttatgggtctcatacacagtttc

SEQ ID NO: 156157 - DNA, 25 bp, Homo sapien
gttatgggtctcatacacagtttct

SEQ ID NO: 156158 - DNA, 25 bp, Homo sapien
ttatgggtctcatacacagtttctt

SEQ ID NO: 156159 - DNA, 25 bp, Homo sapien
cctgttatgggtctcatacacagtt

SEQ ID NO: 156160 - DNA, 25 bp, Homo sapien
cgccaaatggaactatggtcttgca

SEQ ID NO: 156161 - DNA, 25 bp, Homo sapien
tcaatccagagtggaagccgccaaa

SEQ ID NO: 156162 - DNA, 25 bp, Homo sapien
gattcctgggaagatcaatccagag

SEQ ID NO: 156163 - DNA, 25 bp, Homo sapien
tatggtcttgcaaatgacatcaact

SEQ ID NO: 156164 - DNA, 25 bp, Homo sapien
gaagagcctctataggaaatgggag

SEQ ID NO: 156165 - DNA, 25 bp, Homo sapien
gggaccgtaagcaatgcagcatcac

SEQ ID NO: 156166 - DNA, 25 bp, Homo sapien
gcatcacgaatctgtagggcagcag

SEQ ID NO: 156167 - DNA, 25 bp, Homo sapien
tactggccatgaatattgggagctt

SEQ ID NO: 156168 - DNA, 25 bp, Homo sapien
accctgttgctcttcatcacaaaga

SEQ ID NO: 156169 - DNA, 25 bp, Homo sapien
caccagattgtcatgactgctgagc

SEQ ID NO: 156170 - DNA, 25 bp, Homo sapien
caatccactgagatgctaggacaga

SEQ ID NO: 156171 - DNA, 25 bp, Homo sapien
ctttgaaatactgctgcagctttgg

SEQ ID NO: 156172 - DNA, 25 bp, Homo sapien
cctccactttgattgggctgtttgg

SEQ ID NO: 156173 - DNA, 25 bp, Homo sapien
tttcctagaactacttgggatgcct

SEQ ID NO: 156174 - DNA, 25 bp, Homo sapien
tctgggtcatcattggatataaaga

SEQ ID NO: 156175 - DNA, 25 bp, Homo sapien
ggatataaagaagtacaatgggaaa

SEQ ID NO: 156176 - DNA, 25 bp, Homo sapien
gctccccctcgcaaacagaaaataa

SEQ ID NO: 156177 - DNA, 25 bp, Homo sapien
atgaaagtgggtatggactcggggc

SEQ ID NO: 156178 - DNA, 25 bp, Homo sapien
ttctgggaggcaaagctccccctcg

SEQ ID NO: 156179 - DNA, 25 bp, Homo sapien
tcacatgctatgacagcgatgaaag

SEQ ID NO: 156180 - DNA, 25 bp, Homo sapien
tctctggatgatggaggccactgtc

SEQ ID NO: 156181 - DNA, 25 bp, Homo sapien
ggttctctggatgatggaggccact

SEQ ID NO: 156182 - DNA, 25 bp, Homo sapien
gaacatacctgtgtgccgtggtgac

SEQ ID NO: 156183 - DNA, 25 bp, Homo sapien
tcaaaccaaatacaacacggcagtg

SEQ ID NO: 156184 - DNA, 25 bp, Homo sapien
ccgtggtgacagagggactcaaacc

SEQ ID NO: 156185 - DNA, 25 bp, Homo sapien
catagcccttccttccgatgtgggt

SEQ ID NO: 156186 - DNA, 25 bp, Homo sapien
tccatggttacaagctcccgggcct

SEQ ID NO: 156187 - DNA, 25 bp, Homo sapien
atggttacaagctcccgggcctcac

SEQ ID NO: 156188 - DNA, 25 bp, Homo sapien
aagggtcctccatggttacaagctc

SEQ ID NO: 156189 - DNA, 25 bp, Homo sapien
gtcctccatggttacaagctcccgg

SEQ ID NO: 156190 - DNA, 25 bp, Homo sapien
cttagtacgcgcagctttctggcct

SEQ ID NO: 156191 - DNA, 25 bp, Homo sapien
tgctccggcagaccgctgcgtctgg

SEQ ID NO: 156192 - DNA, 25 bp, Homo sapien
ttgcttcacttagtacgcgcagctt

SEQ ID NO: 156193 - DNA, 25 bp, Homo sapien
tccggcagaccgctgcgtctggcag

SEQ ID NO: 156194 - DNA, 25 bp, Homo sapien
aggaaacctcacaataagcttcaga

SEQ ID NO: 156195 - DNA, 25 bp, Homo sapien
gagtgtggccgggcggcttcacagg

SEQ ID NO: 156196 - DNA, 25 bp, Homo sapien
ctgtaagcgccgtggtggtcatccc

SEQ ID NO: 156197 - DNA, 25 bp, Homo sapien
gcttcacaggaaacctcacaataag

SEQ ID NO: 156198 - DNA, 25 bp, Homo sapien
tcttgtacccctaaatgagcgcagg

SEQ ID NO: 156199 - DNA, 25 bp, Homo sapien
gggcccacctgagcatctagaataa

SEQ ID NO: 156200 - DNA, 25 bp, Homo sapien
catcgagaggagagtagtggacact

SEQ ID NO: 156201 - DNA, 25 bp, Homo sapien
tcaagtggcatcgagaacagaagtg

SEQ ID NO: 156202 - DNA, 25 bp, Homo sapien
aggcagcgtcacgtttccagtatct

SEQ ID NO: 156203 - DNA, 25 bp, Homo sapien
tcagagtcttaaaatctgaggcagc

SEQ ID NO: 156204 - DNA, 25 bp, Homo sapien
cacgtttccagtatcttgaagaggc

SEQ ID NO: 156205 - DNA, 25 bp, Homo sapien
gagtcttaaaatctgaggcagcgtc

SEQ ID NO: 156206 - DNA, 25 bp, Homo sapien
tggatgaagaggcaagtctagaaac

SEQ ID NO: 156207 - DNA, 25 bp, Homo sapien
atgaagaggcaagtctagaaacagc

SEQ ID NO: 156208 - DNA, 25 bp, Homo sapien
ctggatgaagaggcaagtctagaaa

SEQ ID NO: 156209 - DNA, 25 bp, Homo sapien
gatgaagaggcaagtctagaaacag

SEQ ID NO: 156210 - DNA, 25 bp, Homo sapien
tgtttggctgagagactcggtcccc

SEQ ID NO: 156211 - DNA, 25 bp, Homo sapien
cttggtgggcgccattcctgtttgg

SEQ ID NO: 156212 - DNA, 25 bp, Homo sapien
ccgtcttggccggatgcctcgggct

SEQ ID NO: 156213 - DNA, 25 bp, Homo sapien
tgcatggccttaatatcttggtggg

SEQ ID NO: 156214 - DNA, 25 bp, Homo sapien
tggtgctggtttataacaagttttc

SEQ ID NO: 156215 - DNA, 25 bp, Homo sapien
actgcttttaccgaaccatttgttg

SEQ ID NO: 156216 - DNA, 25 bp, Homo sapien
tcagacccatggaaataggaagctg

SEQ ID NO: 156217 - DNA, 25 bp, Homo sapien
gaaggatcacttgcaagtcgggaag

SEQ ID NO: 156218 - DNA, 25 bp, Homo sapien
ccgaaccatttgttgtgcgtgtgtg

SEQ ID NO: 156219 - DNA, 25 bp, Homo sapien
tccaccaaaaccaacgagcttgcag

SEQ ID NO: 156220 - DNA, 25 bp, Homo sapien
ggcatgagaatcgccaaatccacca

SEQ ID NO: 156221 - DNA, 25 bp, Homo sapien
tgagaatcgccaaatccaccaaaac

SEQ ID NO: 156222 - DNA, 25 bp, Homo sapien
aaaaccaacgagcttgcagccattg

SEQ ID NO: 156223 - DNA, 25 bp, Homo sapien
ggcctgggatggaaacgcattcgaa

SEQ ID NO: 156224 - DNA, 25 bp, Homo sapien
cagttgttcaccagagggtcgatct

SEQ ID NO: 156225 - DNA, 25 bp, Homo sapien
cagacttgtggtaagaacctcctag

SEQ ID NO: 156226 - DNA, 25 bp, Homo sapien
aaatagcactgggtagcctcgctgc

SEQ ID NO: 156227 - DNA, 25 bp, Homo sapien
gaggagcggcgggtagaaacgcaaa

SEQ ID NO: 156228 - DNA, 25 bp, Homo sapien
cgtgcgggccagctcgtggtaatcc

SEQ ID NO: 156229 - DNA, 25 bp, Homo sapien
gcgcaaaggttgctgcgccgcgcca

SEQ ID NO: 156230 - DNA, 25 bp, Homo sapien
gtaatccccgatgctgacgctagag

SEQ ID NO: 156231 - DNA, 25 bp, Homo sapien
tcctggaaagtccaaactctgggag

SEQ ID NO: 156232 - DNA, 25 bp, Homo sapien
tcggcagggaagatgcaaggctgtc

SEQ ID NO: 156233 - DNA, 25 bp, Homo sapien
gattctccgtgaccacggccttctg

SEQ ID NO: 156234 - DNA, 25 bp, Homo sapien
ggttccaaggctgcccgatcggcag

SEQ ID NO: 156235 - DNA, 25 bp, Homo sapien
ggtgatggagacttctctcaaatac

SEQ ID NO: 156236 - DNA, 25 bp, Homo sapien
ttattttggtgatggagacttctct

SEQ ID NO: 156237 - DNA, 25 bp, Homo sapien
tttggtgatggagacttctctcaaa

SEQ ID NO: 156238 - DNA, 25 bp, Homo sapien
tattattttggtgatggagacttct

SEQ ID NO: 156239 - DNA, 25 bp, Homo sapien
cagagcccgtgtcgctttcacagcc

SEQ ID NO: 156240 - DNA, 25 bp, Homo sapien
agagcccgtgtcgctttcacagcca

SEQ ID NO: 156241 - DNA, 25 bp, Homo sapien
acagagcccgtgtcgctttcacagc

SEQ ID NO: 156242 - DNA, 25 bp, Homo sapien
agcccctgctcatccgagaacctcg

SEQ ID NO: 156243 - DNA, 25 bp, Homo sapien
gctcatccgagaacctcgtttcctt

SEQ ID NO: 156244 - DNA, 25 bp, Homo sapien
tgctcatccgagaacctcgtttcct

SEQ ID NO: 156245 - DNA, 25 bp, Homo sapien
ccctgctcatccgagaacctcgttt

SEQ ID NO: 156246 - DNA, 25 bp, Homo sapien
ttctcttgcaactagatggtcccat

SEQ ID NO: 156247 - DNA, 25 bp, Homo sapien
gagcttgttctcttgcaactagatg

SEQ ID NO: 156248 - DNA, 25 bp, Homo sapien
cttgttctcttgcaactagatggtc

SEQ ID NO: 156249 - DNA, 25 bp, Homo sapien
tgagcttgttctcttgcaactagat

SEQ ID NO: 156250 - DNA, 25 bp, Homo sapien
tggctggtcccgtgggatttaatct

SEQ ID NO: 156251 - DNA, 25 bp, Homo sapien
ctggctggtcccgtgggatttaatc

SEQ ID NO: 156252 - DNA, 25 bp, Homo sapien
tgcttaggaggcacgcctgccctgg

SEQ ID NO: 156253 - DNA, 25 bp, Homo sapien
tctgcatctgcttaggaggcacgcc

SEQ ID NO: 156254 - DNA, 25 bp, Homo sapien
agctggaattcccaatccttggctc

SEQ ID NO: 156255 - DNA, 25 bp, Homo sapien
tccaacccttgctttcgctcccact

SEQ ID NO: 156256 - DNA, 25 bp, Homo sapien
ccttgctttcgctcccactcctgca

SEQ ID NO: 156257 - DNA, 25 bp, Homo sapien
ggaattcccaatccttggctccaca

SEQ ID NO: 156258 - DNA, 25 bp, Homo sapien
ggtggacactgccatcagaaccacg

SEQ ID NO: 156259 - DNA, 25 bp, Homo sapien
ggacactgccatcagaaccacgggc

SEQ ID NO: 156260 - DNA, 25 bp, Homo sapien
ctgccatcagaaccacgggccccag

SEQ ID NO: 156261 - DNA, 25 bp, Homo sapien
tgccatcagaaccacgggccccagg

SEQ ID NO: 156262 - DNA, 25 bp, Homo sapien
aagaaaccagggcacgacattgtcc

SEQ ID NO: 156263 - DNA, 25 bp, Homo sapien
aaaccagggcacgacattgtccttc

SEQ ID NO: 156264 - DNA, 25 bp, Homo sapien
aaagaaaccagggcacgacattgtc

SEQ ID NO: 156265 - DNA, 25 bp, Homo sapien
gaaaccagggcacgacattgtcctt

SEQ ID NO: 156266 - DNA, 25 bp, Homo sapien
cgttcgttcttgcaactgtagtgtg

SEQ ID NO: 156267 - DNA, 25 bp, Homo sapien
tagtgtgccttcctggtgtgccctc

SEQ ID NO: 156268 - DNA, 25 bp, Homo sapien
tctgttttcccgttcgttcttgcaa

SEQ ID NO: 156269 - DNA, 25 bp, Homo sapien
ttcttgcaactgtagtgtgccttcc

SEQ ID NO: 156270 - DNA, 25 bp, Homo sapien
gctgactcgtgaacagtacttggaa

SEQ ID NO: 156271 - DNA, 25 bp, Homo sapien
gggctgactcgtgaacagtacttgg

SEQ ID NO: 156272 - DNA, 25 bp, Homo sapien
gacaggggctgactcgtgaacagta

SEQ ID NO: 156273 - DNA, 25 bp, Homo sapien
tgactcgtgaacagtacttggaaaa

SEQ ID NO: 156274 - DNA, 25 bp, Homo sapien
catccagaatgttccgatcccttgc

SEQ ID NO: 156275 - DNA, 25 bp, Homo sapien
tactcttctatggtgttctgcatcc

SEQ ID NO: 156276 - DNA, 25 bp, Homo sapien
tcatactcttctatggtgttctgca

SEQ ID NO: 156277 - DNA, 25 bp, Homo sapien
agaatgttccgatcccttgcttctg

SEQ ID NO: 156278 - DNA, 25 bp, Homo sapien
tattagatccttgctgtagatcagt

SEQ ID NO: 156279 - DNA, 25 bp, Homo sapien
tccttgctgtagatcagttgattca

SEQ ID NO: 156280 - DNA, 25 bp, Homo sapien
tttacttattagatccttgctgtag

SEQ ID NO: 156281 - DNA, 25 bp, Homo sapien
tgctgtagatcagttgattcatgtg

SEQ ID NO: 156282 - DNA, 25 bp, Homo sapien
ttctgaagcactggggtccagtgtc

SEQ ID NO: 156283 - DNA, 25 bp, Homo sapien
cttcatagccacaattctgaagcac

SEQ ID NO: 156284 - DNA, 25 bp, Homo sapien
tctgaagcactggggtccagtgtcc

SEQ ID NO: 156285 - DNA, 25 bp, Homo sapien
catagccacaattctgaagcactgg

SEQ ID NO: 156286 - DNA, 25 bp, Homo sapien
tattgcaaaagccttgctagatcta

SEQ ID NO: 156287 - DNA, 25 bp, Homo sapien
gctgttgcagaagcaaatcccatgg

SEQ ID NO: 156288 - DNA, 25 bp, Homo sapien
taaaaggcacttaaatgctttgaac

SEQ ID NO: 156289 - DNA, 25 bp, Homo sapien
tgctagatctaccaattttgccatt

SEQ ID NO: 156290 - DNA, 25 bp, Homo sapien
tcagtgctccatctctatcttgcac

SEQ ID NO: 156291 - DNA, 25 bp, Homo sapien
cagtgctccatctctatcttgcacc

SEQ ID NO: 156292 - DNA, 25 bp, Homo sapien
ctcagtgctccatctctatcttgca

SEQ ID NO: 156293 - DNA, 25 bp, Homo sapien
gagctgcacggctctgatctgggcc

SEQ ID NO: 156294 - DNA, 25 bp, Homo sapien
agagctgcacggctctgatctgggc

SEQ ID NO: 156295 - DNA, 25 bp, Homo sapien
gctgcacggctctgatctgggccaa

SEQ ID NO: 156296 - DNA, 25 bp, Homo sapien
agctgcacggctctgatctgggcca

SEQ ID NO: 156297 - DNA, 25 bp, Homo sapien
gggcatctaacacttgacggagtct

SEQ ID NO: 156298 - DNA, 25 bp, Homo sapien
aagtctctctagatcatttctcctc

SEQ ID NO: 156299 - DNA, 25 bp, Homo sapien
cttctcacattgcacactggatccg

SEQ ID NO: 156300 - DNA, 25 bp, Homo sapien
ttctaggatatctggtgtttgcttc

SEQ ID NO: 156301 - DNA, 25 bp, Homo sapien
cctgttccaaggcagttgccggcac

SEQ ID NO: 156302 - DNA, 25 bp, Homo sapien
cagagcatggcaggtcaccagtcca

SEQ ID NO: 156303 - DNA, 25 bp, Homo sapien
agttgccggcacctacaacatcatc

SEQ ID NO: 156304 - DNA, 25 bp, Homo sapien
catggcaggtcaccagtccaagctg

SEQ ID NO: 156305 - DNA, 25 bp, Homo sapien
gctgctgacccacaagttactgcat

SEQ ID NO: 156306 - DNA, 25 bp, Homo sapien
gttgagaccctaacagagcatgggc

SEQ ID NO: 156307 - DNA, 25 bp, Homo sapien
gagcactcgataaaatctgtcagca

SEQ ID NO: 156308 - DNA, 25 bp, Homo sapien
caggtctggaagtgatgacatcacg

SEQ ID NO: 156309 - DNA, 25 bp, Homo sapien
tggagaaccccacagaagattggag

SEQ ID NO: 156310 - DNA, 25 bp, Homo sapien
gagcttcagtccctacaaaacctgg

SEQ ID NO: 156311 - DNA, 25 bp, Homo sapien
tacaaattacttcgcgctccctgtg

SEQ ID NO: 156312 - DNA, 25 bp, Homo sapien
ggaatcactctgtccattagacagg

SEQ ID NO: 156313 - DNA, 25 bp, Homo sapien
gagttggagtctcttagcggcaaag

SEQ ID NO: 156314 - DNA, 25 bp, Homo sapien
tacagccttgttcgtagtagcttga

SEQ ID NO: 156315 - DNA, 25 bp, Homo sapien
gagctgtggtccagcgctcccaagg

SEQ ID NO: 156316 - DNA, 25 bp, Homo sapien
gcaaagggagatccccgtccttctg

SEQ ID NO: 156317 - DNA, 25 bp, Homo sapien
gcgggacgagtggtaacgcgaggcg

SEQ ID NO: 156318 - DNA, 25 bp, Homo sapien
ttcgcaccctgcagtatggagcctt

SEQ ID NO: 156319 - DNA, 25 bp, Homo sapien
gctttcgccgactcgtaactcggca

SEQ ID NO: 156320 - DNA, 25 bp, Homo sapien
ttcccattggctcggaggcgacgag

SEQ ID NO: 156321 - DNA, 25 bp, Homo sapien
tgacagaaccggcttcccggtgagg

SEQ ID NO: 156322 - DNA, 25 bp, Homo sapien
gcgtttgcgagctcggccgcgacac

SEQ ID NO: 156323 - DNA, 25 bp, Homo sapien
gacaccacgcgcgtccagaacgtgg

SEQ ID NO: 156324 - DNA, 25 bp, Homo sapien
cgtccagaacgtggagctcagatgg

SEQ ID NO: 156325 - DNA, 25 bp, Homo sapien
cggggcaggggcctcgcctgcgctg

SEQ ID NO: 156326 - DNA, 25 bp, Homo sapien
gcaggggcctcgcctgcgctgttca

SEQ ID NO: 156327 - DNA, 25 bp, Homo sapien
caggggcctcgcctgcgctgttcac

SEQ ID NO: 156328 - DNA, 25 bp, Homo sapien
gggcaggggcctcgcctgcgctgtt

SEQ ID NO: 156329 - DNA, 25 bp, Homo sapien
taagaaagcatttccgtatccgcaa

SEQ ID NO: 156330 - DNA, 25 bp, Homo sapien
catcgcagctgcgtgtgttgtttcc

SEQ ID NO: 156331 - DNA, 25 bp, Homo sapien
tttccgtatccgcaaaacatcgcag

SEQ ID NO: 156332 - DNA, 25 bp, Homo sapien
tagcccgcaactgcctgtcccgttt

SEQ ID NO: 156333 - DNA, 25 bp, Homo sapien
tttctctaggataaaggctcaggag

SEQ ID NO: 156334 - DNA, 25 bp, Homo sapien
ggctcaggagtgcaatcgctggatt

SEQ ID NO: 156335 - DNA, 25 bp, Homo sapien
ttctgcaagtctgaaaaaacaagat

SEQ ID NO: 156336 - DNA, 25 bp, Homo sapien
caaggcttctacgagcattcatgta

SEQ ID NO: 156337 - DNA, 25 bp, Homo sapien
acagtcctgtgcatacactaaaagc

SEQ ID NO: 156338 - DNA, 25 bp, Homo sapien
taacacatgtacaacagggatgaac

SEQ ID NO: 156339 - DNA, 25 bp, Homo sapien
cactggattatagcgttctgtggaa

SEQ ID NO: 156340 - DNA, 25 bp, Homo sapien
ggatgaaccctgaacacacgttaag

SEQ ID NO: 156341 - DNA, 25 bp, Homo sapien
cactcaggctattgtaaggacttca

SEQ ID NO: 156342 - DNA, 25 bp, Homo sapien
ggatcactctggttgacgcatcaag

SEQ ID NO: 156343 - DNA, 25 bp, Homo sapien
ccacattgagggaggagcgactaca

SEQ ID NO: 156344 - DNA, 25 bp, Homo sapien
cagaggtggagaacatgcccaacac

SEQ ID NO: 156345 - DNA, 25 bp, Homo sapien
caactgcaaaggacaatgtcattcc

SEQ ID NO: 156346 - DNA, 25 bp, Homo sapien
tcacccaactgcaaaggacaatgtc

SEQ ID NO: 156347 - DNA, 25 bp, Homo sapien
aaaggacaatgtcattcctcaaaag

SEQ ID NO: 156348 - DNA, 25 bp, Homo sapien
taatatacatcacccaactgcaaag

SEQ ID NO: 156349 - DNA, 25 bp, Homo sapien
taatgagctctatgaattcatcata

SEQ ID NO: 156350 - DNA, 25 bp, Homo sapien
ttaatgagctctatgaattcatcat

SEQ ID NO: 156351 - DNA, 25 bp, Homo sapien
cttaatgagctctatgaattcatca

SEQ ID NO: 156352 - DNA, 25 bp, Homo sapien
caggtataagcagggccaatggcag

SEQ ID NO: 156353 - DNA, 25 bp, Homo sapien
tgctggcccctataatctcaggtgg

SEQ ID NO: 156354 - DNA, 25 bp, Homo sapien
tagctctgtgtcttgcgcataaacg

SEQ ID NO: 156355 - DNA, 25 bp, Homo sapien
gcaagaggccactatgacagaaata

SEQ ID NO: 156356 - DNA, 25 bp, Homo sapien
caaattgttctgcaagatgtctctt

SEQ ID NO: 156357 - DNA, 25 bp, Homo sapien
gcttgagctgcttttacacgaggca

SEQ ID NO: 156358 - DNA, 25 bp, Homo sapien
tccttggccaatgggtaatcctact

SEQ ID NO: 156359 - DNA, 25 bp, Homo sapien
atatatacagccaaagcctccttgg

SEQ ID NO: 156360 - DNA, 25 bp, Homo sapien
caacacaaggtgcatcactgccaac

SEQ ID NO: 156361 - DNA, 25 bp, Homo sapien
cacttttacaacacaaggtgcatca

SEQ ID NO: 156362 - DNA, 25 bp, Homo sapien
aacacaaggtgcatcactgccaact

SEQ ID NO: 156363 - DNA, 25 bp, Homo sapien
cttttacaacacaaggtgcatcact

SEQ ID NO: 156364 - DNA, 25 bp, Homo sapien
cacacctggctaggggtttcaccat

SEQ ID NO: 156365 - DNA, 25 bp, Homo sapien
ccacacctggctaggggtttcacca

SEQ ID NO: 156366 - DNA, 25 bp, Homo sapien
gttttgcagctcgttggtagaactt

SEQ ID NO: 156367 - DNA, 25 bp, Homo sapien
agtaaaaagaggtccattgtcactg

SEQ ID NO: 156368 - DNA, 25 bp, Homo sapien
taaaaagaggtccattgtcactggg

SEQ ID NO: 156369 - DNA, 25 bp, Homo sapien
ttgcagctcgttggtagaactttaa

SEQ ID NO: 156370 - DNA, 25 bp, Homo sapien
tttcttcctcaatataaaagtcctc

SEQ ID NO: 156371 - DNA, 25 bp, Homo sapien
ttcttcctcaatataaaagtcctca

SEQ ID NO: 156372 - DNA, 25 bp, Homo sapien
tgtcaatagttatactgtactagtt

SEQ ID NO: 156373 - DNA, 25 bp, Homo sapien
atcaaaactacagtgcagtcattcc

SEQ ID NO: 156374 - DNA, 25 bp, Homo sapien
gcagtcattcctttgttctaggggc

SEQ ID NO: 156375 - DNA, 25 bp, Homo sapien
caaaactacagtgcagtcattcctt

SEQ ID NO: 156376 - DNA, 25 bp, Homo sapien
gcttacgggtacgaatccatttctg

SEQ ID NO: 156377 - DNA, 25 bp, Homo sapien
caggtacttcagcttacgggtacga

SEQ ID NO: 156378 - DNA, 25 bp, Homo sapien
tttttgtcatgtagaccagaccccc

SEQ ID NO: 156379 - DNA, 25 bp, Homo sapien
catgtagaccagacccccaatactt

SEQ ID NO: 156380 - DNA, 25 bp, Homo sapien
aattcttaagcttagctgcaagaca

SEQ ID NO: 156381 - DNA, 25 bp, Homo sapien
cccaaagcgatccattatcataaac

SEQ ID NO: 156382 - DNA, 25 bp, Homo sapien
gctgcaagacagttttccgagaaaa

SEQ ID NO: 156383 - DNA, 25 bp, Homo sapien
ggtcactcccaaagcgatccattat

SEQ ID NO: 156384 - DNA, 25 bp, Homo sapien
gccagcagaggaccaagcttcaaca

SEQ ID NO: 156385 - DNA, 25 bp, Homo sapien
gcagaggaccaagcttcaacataaa

SEQ ID NO: 156386 - DNA, 25 bp, Homo sapien
cagccagcagaggaccaagcttcaa

SEQ ID NO: 156387 - DNA, 25 bp, Homo sapien
gaccaagcttcaacataaactagcc

SEQ ID NO: 156388 - DNA, 25 bp, Homo sapien
tgcacatactcatgctcgtgaatat

SEQ ID NO: 156389 - DNA, 25 bp, Homo sapien
catactcatgctcgtgaatatattc

SEQ ID NO: 156390 - DNA, 25 bp, Homo sapien
ctccatgcacatactcatgctcgtg

SEQ ID NO: 156391 - DNA, 25 bp, Homo sapien
ctggtcaggattcttgtagttcaga

SEQ ID NO: 156392 - DNA, 25 bp, Homo sapien
tcgatgctcgtgaattcaatagtgc

SEQ ID NO: 156393 - DNA, 25 bp, Homo sapien
taagcaaggccataatctaccaagt

SEQ ID NO: 156394 - DNA, 25 bp, Homo sapien
acgccattgtgtgcatcgatgctcg

SEQ ID NO: 156395 - DNA, 25 bp, Homo sapien
tagtgccatcgtgacatcttttggg

SEQ ID NO: 156396 - DNA, 25 bp, Homo sapien
gatcatgcaataaccaagtatttcc

SEQ ID NO: 156397 - DNA, 25 bp, Homo sapien
gatggccagtaagccattggatcat

SEQ ID NO: 156398 - DNA, 25 bp, Homo sapien
gtatttccaaatcaccacgtcttga

SEQ ID NO: 156399 - DNA, 25 bp, Homo sapien
caaattatcctcccaaggaagatgg

SEQ ID NO: 156400 - DNA, 25 bp, Homo sapien
tttgtccatcaaacttgcaatattt

SEQ ID NO: 156401 - DNA, 25 bp, Homo sapien
atttgtccatcaaacttgcaatatt

SEQ ID NO: 156402 - DNA, 25 bp, Homo sapien
ttgtccatcaaacttgcaatatttt

SEQ ID NO: 156403 - DNA, 25 bp, Homo sapien
tgccatcatccttacttcctatagc

SEQ ID NO: 156404 - DNA, 25 bp, Homo sapien
gaatgtcacgtaaattttcataaag

SEQ ID NO: 156405 - DNA, 25 bp, Homo sapien
tcagtgtagtctagtaatttcactg

SEQ ID NO: 156406 - DNA, 25 bp, Homo sapien
cctatagcttttagtccttgcaaaa

SEQ ID NO: 156407 - DNA, 25 bp, Homo sapien
gaactactgctatactttcttttag

SEQ ID NO: 156408 - DNA, 25 bp, Homo sapien
gccttaattgccatgcaatctgtta

SEQ ID NO: 156409 - DNA, 25 bp, Homo sapien
atttttctacaaccctctacacatt

SEQ ID NO: 156410 - DNA, 25 bp, Homo sapien
ttattgttcttcattgaactactgc

SEQ ID NO: 156411 - DNA, 25 bp, Homo sapien
cgacttaactacagtactatgatca

SEQ ID NO: 156412 - DNA, 25 bp, Homo sapien
taacaacttcacttaattagggcaa

SEQ ID NO: 156413 - DNA, 25 bp, Homo sapien
aaagaattcaataacagacctaaag

SEQ ID NO: 156414 - DNA, 25 bp, Homo sapien
tagcaaatgctgactcgacttaact

SEQ ID NO: 156415 - DNA, 25 bp, Homo sapien
cattatcacaactgccggaaactgg

SEQ ID NO: 156416 - DNA, 25 bp, Homo sapien
aaaaaggattatcaaggctggcagg

SEQ ID NO: 156417 - DNA, 25 bp, Homo sapien
tcaacataagtaagccctaggctgc

SEQ ID NO: 156418 - DNA, 25 bp, Homo sapien
ggaactcctccatgctactgataag

SEQ ID NO: 156419 - DNA, 25 bp, Homo sapien
gagtggccgggtcatgctttaatta

SEQ ID NO: 156420 - DNA, 25 bp, Homo sapien
caatgaactacggtctagaagacta

SEQ ID NO: 156421 - DNA, 25 bp, Homo sapien
cacaggcatgctgcaaaagttataa

SEQ ID NO: 156422 - DNA, 25 bp, Homo sapien
tcctctgagggttccatgacatgca

SEQ ID NO: 156423 - DNA, 25 bp, Homo sapien
gtccaatcctgcgttaagtttctaa

SEQ ID NO: 156424 - DNA, 25 bp, Homo sapien
taatccaaagcttctcttggttgcc

SEQ ID NO: 156425 - DNA, 25 bp, Homo sapien
tttagaaaaccatccgacatgcccc

SEQ ID NO: 156426 - DNA, 25 bp, Homo sapien
acataggtaaaattatagacgggca

SEQ ID NO: 156427 - DNA, 25 bp, Homo sapien
tcaactagacagttaacccagatgg

SEQ ID NO: 156428 - DNA, 25 bp, Homo sapien
gatagtagttacctaaaggaatgga

SEQ ID NO: 156429 - DNA, 25 bp, Homo sapien
tattcaaagctatggtttaaccatc

SEQ ID NO: 156430 - DNA, 25 bp, Homo sapien
ccatcaggactaatcatacagaaac

SEQ ID NO: 156431 - DNA, 25 bp, Homo sapien
tgtgtttgaccattccgtatcttca

SEQ ID NO: 156432 - DNA, 25 bp, Homo sapien
ccgtatcttcaacaccaggttcctt

SEQ ID NO: 156433 - DNA, 25 bp, Homo sapien
tcttcaacaccaggttccttgcttt

SEQ ID NO: 156434 - DNA, 25 bp, Homo sapien
tgtgtgtttgaccattccgtatctt

SEQ ID NO: 156435 - DNA, 25 bp, Homo sapien
gttgacccctcatctaatgggagga

SEQ ID NO: 156436 - DNA, 25 bp, Homo sapien
tatgaaagcagctaggcaaaactgt

SEQ ID NO: 156437 - DNA, 25 bp, Homo sapien
agtgtctcgggttccaaatctgcaa

SEQ ID NO: 156438 - DNA, 25 bp, Homo sapien
aagacattggcctgacagttaagag

SEQ ID NO: 156439 - DNA, 25 bp, Homo sapien
gtttataagccatctcagaaaaatg

SEQ ID NO: 156440 - DNA, 25 bp, Homo sapien
acatatcagaccaaagtccaaccta

SEQ ID NO: 156441 - DNA, 25 bp, Homo sapien
ttcagtgccagtttataagccatct

SEQ ID NO: 156442 - DNA, 25 bp, Homo sapien
cagaccaaagtccaacctagctctg

SEQ ID NO: 156443 - DNA, 25 bp, Homo sapien
ctaatgtcactagcaaaaggaaggt

SEQ ID NO: 156444 - DNA, 25 bp, Homo sapien
aaaacctctcgccttcagtgtgaag

SEQ ID NO: 156445 - DNA, 25 bp, Homo sapien
gaatactgtgctttccacaaacatg

SEQ ID NO: 156446 - DNA, 25 bp, Homo sapien
ggcattactcaatatggcacctatg

SEQ ID NO: 156447 - DNA, 25 bp, Homo sapien
catgcttcgatgtattgctccttgg

SEQ ID NO: 156448 - DNA, 25 bp, Homo sapien
gagacatgcttcgatgtattgctcc

SEQ ID NO: 156449 - DNA, 25 bp, Homo sapien
gctgagacatgcttcgatgtattgc

SEQ ID NO: 156450 - DNA, 25 bp, Homo sapien
tgcttcgatgtattgctccttggga

SEQ ID NO: 156451 - DNA, 25 bp, Homo sapien
ccttcaatccaaagtttctcactgc

SEQ ID NO: 156452 - DNA, 25 bp, Homo sapien
ctccttcaatccaaagtttctcact

SEQ ID NO: 156453 - DNA, 25 bp, Homo sapien
tcacggctgcctagtgctggtgaaa

SEQ ID NO: 156454 - DNA, 25 bp, Homo sapien
gctgcctagtgctggtgaaagaagc

SEQ ID NO: 156455 - DNA, 25 bp, Homo sapien
cggctgcctagtgctggtgaaagaa

SEQ ID NO: 156456 - DNA, 25 bp, Homo sapien
ctttcccactgccgcatgctacgct

SEQ ID NO: 156457 - DNA, 25 bp, Homo sapien
gaaactgaaatcactagtcaataat

SEQ ID NO: 156458 - DNA, 25 bp, Homo sapien
aatcgactctcgtgatttgcaaaga

SEQ ID NO: 156459 - DNA, 25 bp, Homo sapien
atatgctgacaaaacctaccttctc

SEQ ID NO: 156460 - DNA, 25 bp, Homo sapien
catacaaaggtatgattgctaatac

SEQ ID NO: 156461 - DNA, 25 bp, Homo sapien
tctggactctctttctggttcttga

SEQ ID NO: 156462 - DNA, 25 bp, Homo sapien
acttctggactctctttctggttct

SEQ ID NO: 156463 - DNA, 25 bp, Homo sapien
ttacttctggactctctttctggtt

SEQ ID NO: 156464 - DNA, 25 bp, Homo sapien
tggactctctttctggttcttgaac

SEQ ID NO: 156465 - DNA, 25 bp, Homo sapien
ggaaatctggttcacagcatctgaa

SEQ ID NO: 156466 - DNA, 25 bp, Homo sapien
ccacctcgcaagactcacaggaaaa

SEQ ID NO: 156467 - DNA, 25 bp, Homo sapien
tttctgaacacatgagtatttaatc

SEQ ID NO: 156468 - DNA, 25 bp, Homo sapien
aattagcctttaatgaattgtacaa

SEQ ID NO: 156469 - DNA, 25 bp, Homo sapien
cacggctttgggataacttaaggag

SEQ ID NO: 156470 - DNA, 25 bp, Homo sapien
acaatgattagaaaagtgcgtgtca

SEQ ID NO: 156471 - DNA, 25 bp, Homo sapien
catttccttaaaagtgaggactttg

SEQ ID NO: 156472 - DNA, 25 bp, Homo sapien
ttttatccactctgagaaatgtaca

SEQ ID NO: 156473 - DNA, 25 bp, Homo sapien
ccaaaccttacagccacaacatact

SEQ ID NO: 156474 - DNA, 25 bp, Homo sapien
ggcagtctgtctagtcttattccca

SEQ ID NO: 156475 - DNA, 25 bp, Homo sapien
tatggcatacgaatctggcagctcc

SEQ ID NO: 156476 - DNA, 25 bp, Homo sapien
tgtgcagcaaacctaattgcattac

SEQ ID NO: 156477 - DNA, 25 bp, Homo sapien
aagtcaaccagacaatgtgcagcaa

SEQ ID NO: 156478 - DNA, 25 bp, Homo sapien
tagtgcgcaacaggccaatgcttgg

SEQ ID NO: 156479 - DNA, 25 bp, Homo sapien
gaaatccctaccagtgttttggcca

SEQ ID NO: 156480 - DNA, 25 bp, Homo sapien
caacgttaactcagtgcctggcaga

SEQ ID NO: 156481 - DNA, 25 bp, Homo sapien
gagctgtgagcatcccttaaggaag

SEQ ID NO: 156482 - DNA, 25 bp, Homo sapien
atcattaattttagagttattcctg

SEQ ID NO: 156483 - DNA, 25 bp, Homo sapien
cattaattttagagttattcctgta

SEQ ID NO: 156484 - DNA, 25 bp, Homo sapien
ctttgaaacatcattaattttagag

SEQ ID NO: 156485 - DNA, 25 bp, Homo sapien
ttaattttagagttattcctgtatc

SEQ ID NO: 156486 - DNA, 25 bp, Homo sapien
tgctgcggttctttccttgtggagg

SEQ ID NO: 156487 - DNA, 25 bp, Homo sapien
ctgcggttctttccttgtggagggt

SEQ ID NO: 156488 - DNA, 25 bp, Homo sapien
ctagtaacccaagacgcacaatcat

SEQ ID NO: 156489 - DNA, 25 bp, Homo sapien
gctgctgcggttctttccttgtgga

SEQ ID NO: 156490 - DNA, 25 bp, Homo sapien
tcttggactcgctcagaaggacctg

SEQ ID NO: 156491 - DNA, 25 bp, Homo sapien
tggcaatgactcgaacatctacggg

SEQ ID NO: 156492 - DNA, 25 bp, Homo sapien
tacacggtcctatggtggcttcaca

SEQ ID NO: 156493 - DNA, 25 bp, Homo sapien
gacgtccgtgacatgcctggcaatg

SEQ ID NO: 156494 - DNA, 25 bp, Homo sapien
gtgcccagaaggcacatggcagttt

SEQ ID NO: 156495 - DNA, 25 bp, Homo sapien
ctgtaattaaccagtgcccagaagg

SEQ ID NO: 156496 - DNA, 25 bp, Homo sapien
ttaaccagtgcccagaaggcacatg

SEQ ID NO: 156497 - DNA, 25 bp, Homo sapien
taattaaccagtgcccagaaggcac

SEQ ID NO: 156498 - DNA, 25 bp, Homo sapien
aggggaaggcgcagcacactgaggg

SEQ ID NO: 156499 - DNA, 25 bp, Homo sapien
gctcttttggcaaagctaaatcttc

SEQ ID NO: 156500 - DNA, 25 bp, Homo sapien
ctcttttggcaaagctaaatcttcc

SEQ ID NO: 156501 - DNA, 25 bp, Homo sapien
tagaaaggactctcccctagagcct

SEQ ID NO: 156502 - DNA, 25 bp, Homo sapien
cactgtcacgagaatggcaccaagt

SEQ ID NO: 156503 - DNA, 25 bp, Homo sapien
gatgcagctacaaagaacgccaggg

SEQ ID NO: 156504 - DNA, 25 bp, Homo sapien
gaagacagattgaagcgatgcagct

SEQ ID NO: 156505 - DNA, 25 bp, Homo sapien
gctgagtgtctgtaagtccgctgct

SEQ ID NO: 156506 - DNA, 25 bp, Homo sapien
tttgcacaggtactcatgtctggga

SEQ ID NO: 156507 - DNA, 25 bp, Homo sapien
aatcaccaggcaaccccgtgatgag

SEQ ID NO: 156508 - DNA, 25 bp, Homo sapien
gctcagtaaactcgtccaagatgga

SEQ ID NO: 156509 - DNA, 25 bp, Homo sapien
gatttattcccttgcagaaaactcc

SEQ ID NO: 156510 - DNA, 25 bp, Homo sapien
aactccggttgggacctccacgcat

SEQ ID NO: 156511 - DNA, 25 bp, Homo sapien
tgcagaaaactccggttgggacctc

SEQ ID NO: 156512 - DNA, 25 bp, Homo sapien
ggttgggacctccacgcatccccat

SEQ ID NO: 156513 - DNA, 25 bp, Homo sapien
cacccccttcccaaaagtcattctg

SEQ ID NO: 156514 - DNA, 25 bp, Homo sapien
aaagtcattctgcccccctctttct

SEQ ID NO: 156515 - DNA, 25 bp, Homo sapien
cattctgcccccctctttctgtcct

SEQ ID NO: 156516 - DNA, 25 bp, Homo sapien
tcccaaaagtcattctgcccccctc

SEQ ID NO: 156517 - DNA, 25 bp, Homo sapien
caggcagctgggtaatggagcccct

SEQ ID NO: 156518 - DNA, 25 bp, Homo sapien
tattgaacaacagagagcgcacaca

SEQ ID NO: 156519 - DNA, 25 bp, Homo sapien
tgtaaatctgattgccgatggcccc

SEQ ID NO: 156520 - DNA, 25 bp, Homo sapien
gccagaaaggtcagtccccaagatg

SEQ ID NO: 156521 - DNA, 25 bp, Homo sapien
acagcttcacacgcccagacagaaa

SEQ ID NO: 156522 - DNA, 25 bp, Homo sapien
gaatggaccctttcgatgatgcact

SEQ ID NO: 156523 - DNA, 25 bp, Homo sapien
gatgcactttatcccagaactggaa

SEQ ID NO: 156524 - DNA, 25 bp, Homo sapien
cagacagaaagagttccccggttct

SEQ ID NO: 156525 - DNA, 25 bp, Homo sapien
agatggccacgtgaagactcggaac

SEQ ID NO: 156526 - DNA, 25 bp, Homo sapien
gtctctgctgtagccgctcagtggg

SEQ ID NO: 156527 - DNA, 25 bp, Homo sapien
tctccatgccacgtctctgctgtag

SEQ ID NO: 156528 - DNA, 25 bp, Homo sapien
gtccttctgaagttaaagcccacga

SEQ ID NO: 156529 - DNA, 25 bp, Homo sapien
ggatcagaaagtctagcctcctggt

SEQ ID NO: 156530 - DNA, 25 bp, Homo sapien
cctaggatgagaccttagggatcag

SEQ ID NO: 156531 - DNA, 25 bp, Homo sapien
acacccaagtgttctctagtagaac

SEQ ID NO: 156532 - DNA, 25 bp, Homo sapien
tctctagtagaacagatggtcaggc

SEQ ID NO: 156533 - DNA, 25 bp, Homo sapien
aatttatccgatttgcagctgagag

SEQ ID NO: 156534 - DNA, 25 bp, Homo sapien
ctccagcgagtacacagcccataat

SEQ ID NO: 156535 - DNA, 25 bp, Homo sapien
cactgaaacaggcatttgctccagc

SEQ ID NO: 156536 - DNA, 25 bp, Homo sapien
cagcccataatatcttgtctcagaa

SEQ ID NO: 156537 - DNA, 25 bp, Homo sapien
ttggtgccactttcctggttaccca

SEQ ID NO: 156538 - DNA, 25 bp, Homo sapien
ttatgcactgggctcgtgacacctg

SEQ ID NO: 156539 - DNA, 25 bp, Homo sapien
tccatgagccacaccgaatgaaggc

SEQ ID NO: 156540 - DNA, 25 bp, Homo sapien
agtccatcagcccaaaagtcagagc

SEQ ID NO: 156541 - DNA, 25 bp, Homo sapien
tcaatgtctcggtgctgtttgccag

SEQ ID NO: 156542 - DNA, 25 bp, Homo sapien
cgatgtattcgaagtgacccaaggg

SEQ ID NO: 156543 - DNA, 25 bp, Homo sapien
cagtacctgggagggtcacattata

SEQ ID NO: 156544 - DNA, 25 bp, Homo sapien
cactgcaaagtgcaagtctatgccg

SEQ ID NO: 156545 - DNA, 25 bp, Homo sapien
ctctacaccatcctgaagagatgtc

SEQ ID NO: 156546 - DNA, 25 bp, Homo sapien
gatgtcatctcgtcctctcgtggtt

SEQ ID NO: 156547 - DNA, 25 bp, Homo sapien
cagctgagtcaagtcataatggcat

SEQ ID NO: 156548 - DNA, 25 bp, Homo sapien
agcaccatggatgcaacgtgtcccc

SEQ ID NO: 156549 - DNA, 25 bp, Homo sapien
agctagggcccatcttttaactcct

SEQ ID NO: 156550 - DNA, 25 bp, Homo sapien
ctcaggaaagctagggcccatcttt

SEQ ID NO: 156551 - DNA, 25 bp, Homo sapien
catcttttaactcctcctgttagac

SEQ ID NO: 156552 - DNA, 25 bp, Homo sapien
ccacgatcttgtgctcttcacctgc

SEQ ID NO: 156553 - DNA, 25 bp, Homo sapien
gaagtcgaagacaagaagtgaaatt

SEQ ID NO: 156554 - DNA, 25 bp, Homo sapien
agtcgaagacaagaagtgaaattca

SEQ ID NO: 156555 - DNA, 25 bp, Homo sapien
ctgaagtcgaagacaagaagtgaaa

SEQ ID NO: 156556 - DNA, 25 bp, Homo sapien
agaagctgctccggggtcacactgt

SEQ ID NO: 156557 - DNA, 25 bp, Homo sapien
gtctctctccgtcagcctcagagcc

SEQ ID NO: 156558 - DNA, 25 bp, Homo sapien
tctctctccgtcagcctcagagccc

SEQ ID NO: 156559 - DNA, 25 bp, Homo sapien
ggtctctctccgtcagcctcagagc

SEQ ID NO: 156560 - DNA, 25 bp, Homo sapien
ctggtaacatggagtttcccaggga

SEQ ID NO: 156561 - DNA, 25 bp, Homo sapien
taacatggagtttcccagggacaag

SEQ ID NO: 156562 - DNA, 25 bp, Homo sapien
ggtaacatggagtttcccagggaca

SEQ ID NO: 156563 - DNA, 25 bp, Homo sapien
cagggacaagggacgaggtgaccta

SEQ ID NO: 156564 - DNA, 25 bp, Homo sapien
ctggagggtggatataggattcgga

SEQ ID NO: 156565 - DNA, 25 bp, Homo sapien
gtggatataggattcggagccatgc

SEQ ID NO: 156566 - DNA, 25 bp, Homo sapien
ggatataggattcggagccatgctg

SEQ ID NO: 156567 - DNA, 25 bp, Homo sapien
tataggattcggagccatgctgata

SEQ ID NO: 156568 - DNA, 25 bp, Homo sapien
tctcccttgacagaagcgccactgt

SEQ ID NO: 156569 - DNA, 25 bp, Homo sapien
ggaaggtcgttgaggtctcccttga

SEQ ID NO: 156570 - DNA, 25 bp, Homo sapien
cactgtctttctgagcgggtaggtc

SEQ ID NO: 156571 - DNA, 25 bp, Homo sapien
ggtaggtccaccttgatcgtccaag

SEQ ID NO: 156572 - DNA, 25 bp, Homo sapien
tatgtcaggatgcagacccagggac

SEQ ID NO: 156573 - DNA, 25 bp, Homo sapien
gagcctaagcaagtttcccaatcca

SEQ ID NO: 156574 - DNA, 25 bp, Homo sapien
caaccactgcacgatgtccatgaga

SEQ ID NO: 156575 - DNA, 25 bp, Homo sapien
tgccttgtgaaaagcactcgctgcc

SEQ ID NO: 156576 - DNA, 25 bp, Homo sapien
tctgctccagcttaacaagcctctt

SEQ ID NO: 156577 - DNA, 25 bp, Homo sapien
tccagcttaacaagcctcttccacc

SEQ ID NO: 156578 - DNA, 25 bp, Homo sapien
tgctccagcttaacaagcctcttcc

SEQ ID NO: 156579 - DNA, 25 bp, Homo sapien
tctctgctccagcttaacaagcctc

SEQ ID NO: 156580 - DNA, 25 bp, Homo sapien
gatggaagcagacccagggtattgg

SEQ ID NO: 156581 - DNA, 25 bp, Homo sapien
ggatggaagcagacccagggtattg

SEQ ID NO: 156582 - DNA, 25 bp, Homo sapien
tcctttgaagagagcagcggggttt

SEQ ID NO: 156583 - DNA, 25 bp, Homo sapien
agcctggggtcctccaaacacaggc

SEQ ID NO: 156584 - DNA, 25 bp, Homo sapien
ggactatggttgggtcctttgaaga

SEQ ID NO: 156585 - DNA, 25 bp, Homo sapien
ggtttgccctgagccatacaaagaa

SEQ ID NO: 156586 - DNA, 25 bp, Homo sapien
cagcagccaggagcctcataaccaa

SEQ ID NO: 156587 - DNA, 25 bp, Homo sapien
tcagcagccaggagcctcataacca

SEQ ID NO: 156588 - DNA, 25 bp, Homo sapien
cacattggtaatcactctttccttt

SEQ ID NO: 156589 - DNA, 25 bp, Homo sapien
tcattcacattggtaatcactcttt

SEQ ID NO: 156590 - DNA, 25 bp, Homo sapien
ttttcattcacattggtaatcactc

SEQ ID NO: 156591 - DNA, 25 bp, Homo sapien
cattcacattggtaatcactctttc

SEQ ID NO: 156592 - DNA, 25 bp, Homo sapien
cacgttgctccagatcggtggtccc

SEQ ID NO: 156593 - DNA, 25 bp, Homo sapien
ccctgctcaggtggacacgttgctc

SEQ ID NO: 156594 - DNA, 25 bp, Homo sapien
tgctcaggtggacacgttgctccag

SEQ ID NO: 156595 - DNA, 25 bp, Homo sapien
acgttgctccagatcggtggtcccc

SEQ ID NO: 156596 - DNA, 25 bp, Homo sapien
gcttctaccctgcactcaggactgg

SEQ ID NO: 156597 - DNA, 25 bp, Homo sapien
ccctgatggggaaccatggcactgg

SEQ ID NO: 156598 - DNA, 25 bp, Homo sapien
ctgcacagaggcccatgcccgcttc

SEQ ID NO: 156599 - DNA, 25 bp, Homo sapien
ctggtccagcagcctgataccagcc

SEQ ID NO: 156600 - DNA, 25 bp, Homo sapien
aagtgttgcaaggacgcaaaccagc

SEQ ID NO: 156601 - DNA, 25 bp, Homo sapien
cctttacaagtgttgcaaggacgca

SEQ ID NO: 156602 - DNA, 25 bp, Homo sapien
tggtcttatcactcctccacagcta

SEQ ID NO: 156603 - DNA, 25 bp, Homo sapien
agctacctcctttacaagtgttgca

SEQ ID NO: 156604 - DNA, 25 bp, Homo sapien
tttcaccttatgaaaggcattgtcc

SEQ ID NO: 156605 - DNA, 25 bp, Homo sapien
gtagccacgaactgaaatacagcag

SEQ ID NO: 156606 - DNA, 25 bp, Homo sapien
cagcagcaggccaatgagttttcac

SEQ ID NO: 156607 - DNA, 25 bp, Homo sapien
cctttaagccaagcttgggaagtca

SEQ ID NO: 156608 - DNA, 25 bp, Homo sapien
tgtggtggtccctactgtgggttgc

SEQ ID NO: 156609 - DNA, 25 bp, Homo sapien
gatacattggaaattgattggccca

SEQ ID NO: 156610 - DNA, 25 bp, Homo sapien
atgacccagtcttgaggcgctcctc

SEQ ID NO: 156611 - DNA, 25 bp, Homo sapien
tgcaaattcccatgacccagtcttg

SEQ ID NO: 156612 - DNA, 25 bp, Homo sapien
gatgtataaacacagccacgttgct

SEQ ID NO: 156613 - DNA, 25 bp, Homo sapien
tatcaataaacgaggaagtggccca

SEQ ID NO: 156614 - DNA, 25 bp, Homo sapien
tctgcaagcagaacctagatagctc

SEQ ID NO: 156615 - DNA, 25 bp, Homo sapien
taatttgtcatcagggatagtccag

SEQ ID NO: 156616 - DNA, 25 bp, Homo sapien
cactggctgcagcaatgtgggaaag

SEQ ID NO: 156617 - DNA, 25 bp, Homo sapien
agaaggtcgcggtctgctgctgcca

SEQ ID NO: 156618 - DNA, 25 bp, Homo sapien
agattacactggctgcagcaatgtg

SEQ ID NO: 156619 - DNA, 25 bp, Homo sapien
ctgcagcaatgtgggaaaggtagca

SEQ ID NO: 156620 - DNA, 25 bp, Homo sapien
gagagatctggtgggaccatctgca

SEQ ID NO: 156621 - DNA, 25 bp, Homo sapien
cagaacacgccttaaccccagggag

SEQ ID NO: 156622 - DNA, 25 bp, Homo sapien
gaccatctgcagaacacgccttaac

SEQ ID NO: 156623 - DNA, 25 bp, Homo sapien
cccagcctgagagatctggtgggac

SEQ ID NO: 156624 - DNA, 25 bp, Homo sapien
ctttgatattctgtcagagtccagc

SEQ ID NO: 156625 - DNA, 25 bp, Homo sapien
tttgatattctgtcagagtccagct

SEQ ID NO: 156626 - DNA, 25 bp, Homo sapien
cactttgatattctgtcagagtcca

SEQ ID NO: 156627 - DNA, 25 bp, Homo sapien
actttgatattctgtcagagtccag

SEQ ID NO: 156628 - DNA, 25 bp, Homo sapien
tctgaagtgactcctgggacctcct

SEQ ID NO: 156629 - DNA, 25 bp, Homo sapien
ggctcgcagacagtttagttatgca

SEQ ID NO: 156630 - DNA, 25 bp, Homo sapien
tcagcagtcgctccggtctgaagtg

SEQ ID NO: 156631 - DNA, 25 bp, Homo sapien
actgttctatatgcaaatggccttg

SEQ ID NO: 156632 - DNA, 25 bp, Homo sapien
tagcgaaactgaaggagcggttcgc

SEQ ID NO: 156633 - DNA, 25 bp, Homo sapien
gcccgctccgcatagcgaaactgaa

SEQ ID NO: 156634 - DNA, 25 bp, Homo sapien
ggcgcagacgccaaggagctgaagc

SEQ ID NO: 156635 - DNA, 25 bp, Homo sapien
tccgcatagcgaaactgaaggagcg

SEQ ID NO: 156636 - DNA, 25 bp, Homo sapien
ggcccttccacaagctatcttctcc

SEQ ID NO: 156637 - DNA, 25 bp, Homo sapien
tggctctcattccacgaacagtgct

SEQ ID NO: 156638 - DNA, 25 bp, Homo sapien
tctgagttgagctccgggaccaatg

SEQ ID NO: 156639 - DNA, 25 bp, Homo sapien
tctcatgtcccggtggctgggctct

SEQ ID NO: 156640 - DNA, 25 bp, Homo sapien
tatccccatgtaagacattacagag

SEQ ID NO: 156641 - DNA, 25 bp, Homo sapien
tagctctgtttcaccccacagcaaa

SEQ ID NO: 156642 - DNA, 25 bp, Homo sapien
acagcaaaaccaaggagtctccttt

SEQ ID NO: 156643 - DNA, 25 bp, Homo sapien
aaattgtgacgtctgaaatgtatca

SEQ ID NO: 156644 - DNA, 25 bp, Homo sapien
aaagcacagatccaatttaagtgaa

SEQ ID NO: 156645 - DNA, 25 bp, Homo sapien
taataggagagaccataaaagcaca

SEQ ID NO: 156646 - DNA, 25 bp, Homo sapien
catggcagcccagaaatataaagtc

SEQ ID NO: 156647 - DNA, 25 bp, Homo sapien
gagtccctgtgtaagcattgcttgt

SEQ ID NO: 156648 - DNA, 25 bp, Homo sapien
acatcaacaccagggttgtgagaag

SEQ ID NO: 156649 - DNA, 25 bp, Homo sapien
tgaccaacccacactagctcttgac

SEQ ID NO: 156650 - DNA, 25 bp, Homo sapien
tctccaactacatcaacaccagggt

SEQ ID NO: 156651 - DNA, 25 bp, Homo sapien
ggttctgaccaacccacactagctc

SEQ ID NO: 156652 - DNA, 25 bp, Homo sapien
cgtctgtctgaaccttgatcacaca

SEQ ID NO: 156653 - DNA, 25 bp, Homo sapien
gcagccactgagagcgctcttctgg

SEQ ID NO: 156654 - DNA, 25 bp, Homo sapien
ctgagagcgctcttctggacaatat

SEQ ID NO: 156655 - DNA, 25 bp, Homo sapien
agtgggtgatcagttgtctgcgtct

SEQ ID NO: 156656 - DNA, 25 bp, Homo sapien
tgggccatgcatcaggcagcaccga

SEQ ID NO: 156657 - DNA, 25 bp, Homo sapien
agtgggccatgcatcaggcagcacc

SEQ ID NO: 156658 - DNA, 25 bp, Homo sapien
cagtgggccatgcatcaggcagcac

SEQ ID NO: 156659 - DNA, 25 bp, Homo sapien
ggccatgcatcaggcagcaccgagc

SEQ ID NO: 156660 - DNA, 25 bp, Homo sapien
catttgcacggcttaattaaggagg

SEQ ID NO: 156661 - DNA, 25 bp, Homo sapien
ctttttcgacatttgcacggcttaa

SEQ ID NO: 156662 - DNA, 25 bp, Homo sapien
cacggcttaattaaggaggtgacca

SEQ ID NO: 156663 - DNA, 25 bp, Homo sapien
tacagcagcaggaggtacaagagag

SEQ ID NO: 156664 - DNA, 25 bp, Homo sapien
tggcagagacaagaggcgatgcatt

SEQ ID NO: 156665 - DNA, 25 bp, Homo sapien
gcagagacaagaggcgatgcattgc

SEQ ID NO: 156666 - DNA, 25 bp, Homo sapien
caagaggcgatgcattgcaggaaga

SEQ ID NO: 156667 - DNA, 25 bp, Homo sapien
agacaagaggcgatgcattgcagga

SEQ ID NO: 156668 - DNA, 25 bp, Homo sapien
ggtcactggagacaatgctccccac

SEQ ID NO: 156669 - DNA, 25 bp, Homo sapien
gtcactggagacaatgctccccaca

SEQ ID NO: 156670 - DNA, 25 bp, Homo sapien
tcactggagacaatgctccccacat

SEQ ID NO: 156671 - DNA, 25 bp, Homo sapien
tgcagctcctcatatcgcagctgac

SEQ ID NO: 156672 - DNA, 25 bp, Homo sapien
cgatgttcctcatgttgcagttgac

SEQ ID NO: 156673 - DNA, 25 bp, Homo sapien
cttgggcctgtcgatgttcctcatg

SEQ ID NO: 156674 - DNA, 25 bp, Homo sapien
cagactaaatggtagctctttaaaa

SEQ ID NO: 156675 - DNA, 25 bp, Homo sapien
tcagactaaatggtagctctttaaa

SEQ ID NO: 156676 - DNA, 25 bp, Homo sapien
agactaaatggtagctctttaaaag

SEQ ID NO: 156677 - DNA, 25 bp, Homo sapien
gacaggtgagaagctaatcctccac

SEQ ID NO: 156678 - DNA, 25 bp, Homo sapien
tgagatctccagacgagcactgaca

SEQ ID NO: 156679 - DNA, 25 bp, Homo sapien
ggaatctattcctctggccctctga

SEQ ID NO: 156680 - DNA, 25 bp, Homo sapien
gcaggtcccatgaagagccagaagg

SEQ ID NO: 156681 - DNA, 25 bp, Homo sapien
ccaggccagcggattttttgattaa

SEQ ID NO: 156682 - DNA, 25 bp, Homo sapien
tggcacaagaaaagtgggatgaagt

SEQ ID NO: 156683 - DNA, 25 bp, Homo sapien
ggagtgcgtcacgtttccaggccag

SEQ ID NO: 156684 - DNA, 25 bp, Homo sapien
taatgtaatatcatgtccaatgcat

SEQ ID NO: 156685 - DNA, 25 bp, Homo sapien
tgaatctgagcttgccaaacgccac

SEQ ID NO: 156686 - DNA, 25 bp, Homo sapien
gcaaatagcattatggagccattca

SEQ ID NO: 156687 - DNA, 25 bp, Homo sapien
cattatggagccattcagcgtctga

SEQ ID NO: 156688 - DNA, 25 bp, Homo sapien
cagcgtctgattccttgtagatgaa

SEQ ID NO: 156689 - DNA, 25 bp, Homo sapien
acttcgggtgtctcctcttcaggcg

SEQ ID NO: 156690 - DNA, 25 bp, Homo sapien
gtggctcctcgttccagtctccagg

SEQ ID NO: 156691 - DNA, 25 bp, Homo sapien
ccctgagtggcctttgtttgtctaa

SEQ ID NO: 156692 - DNA, 25 bp, Homo sapien
tcttcaggcgtaacagccctgggtg

SEQ ID NO: 156693 - DNA, 25 bp, Homo sapien
cggctctctgaaagcccacgcaggg

SEQ ID NO: 156694 - DNA, 25 bp, Homo sapien
aaaatccttccgctctgagctcctg

SEQ ID NO: 156695 - DNA, 25 bp, Homo sapien
gcccacgcaggggtaagtcatgtac

SEQ ID NO: 156696 - DNA, 25 bp, Homo sapien
tgagctcctgctactccggctctct

SEQ ID NO: 156697 - DNA, 25 bp, Homo sapien
agggagctgtgaccagccacaggca

SEQ ID NO: 156698 - DNA, 25 bp, Homo sapien
agccagacagggagctgtgaccagc

SEQ ID NO: 156699 - DNA, 25 bp, Homo sapien
agacagggagctgtgaccagccaca

SEQ ID NO: 156700 - DNA, 25 bp, Homo sapien
ccagacagggagctgtgaccagcca

SEQ ID NO: 156701 - DNA, 25 bp, Homo sapien
tctgcccagaaaccgcaacacacag

SEQ ID NO: 156702 - DNA, 25 bp, Homo sapien
gggccaaccgctacagaacctcaaa

SEQ ID NO: 156703 - DNA, 25 bp, Homo sapien
agaaaccgcaacacacagggccaac

SEQ ID NO: 156704 - DNA, 25 bp, Homo sapien
acacacagggccaaccgctacagaa

SEQ ID NO: 156705 - DNA, 25 bp, Homo sapien
agctgctctatcagagggcccggca

SEQ ID NO: 156706 - DNA, 25 bp, Homo sapien
ccggcgatgtcgcaggacctgtcat

SEQ ID NO: 156707 - DNA, 25 bp, Homo sapien
gacctgtcatttgggttaggcacct

SEQ ID NO: 156708 - DNA, 25 bp, Homo sapien
tggagaaggatcaatccctcctcca

SEQ ID NO: 156709 - DNA, 25 bp, Homo sapien
gttttctgtgctaggccttggttaa

SEQ ID NO: 156710 - DNA, 25 bp, Homo sapien
cagaagggaggcagtcacttgagca

SEQ ID NO: 156711 - DNA, 25 bp, Homo sapien
ctccaaaacttccagacagcagcat

SEQ ID NO: 156712 - DNA, 25 bp, Homo sapien
cagagtgatgggtgttttctgtgct

SEQ ID NO: 156713 - DNA, 25 bp, Homo sapien
catcactaagcagacacaaaaggcc

SEQ ID NO: 156714 - DNA, 25 bp, Homo sapien
tcactaagcagacacaaaaggccct

SEQ ID NO: 156715 - DNA, 25 bp, Homo sapien
tcatcactaagcagacacaaaaggc

SEQ ID NO: 156716 - DNA, 25 bp, Homo sapien
atcactaagcagacacaaaaggccc

SEQ ID NO: 156717 - DNA, 25 bp, Homo sapien
tgaaatactgaatacctcggggagt

SEQ ID NO: 156718 - DNA, 25 bp, Homo sapien
aaatactgaatacctcggggagtct

SEQ ID NO: 156719 - DNA, 25 bp, Homo sapien
aattcagaataactccatttaacag

SEQ ID NO: 156720 - DNA, 25 bp, Homo sapien
tcagaataactccatttaacagtta

SEQ ID NO: 156721 - DNA, 25 bp, Homo sapien
acctggaggatgagctaacaaaggg

SEQ ID NO: 156722 - DNA, 25 bp, Homo sapien
tgagctaacaaagggctcctgctcc

SEQ ID NO: 156723 - DNA, 25 bp, Homo sapien
ttcttcaggactcactgccaacctc

SEQ ID NO: 156724 - DNA, 25 bp, Homo sapien
gaggatgagctaacaaagggctcct

SEQ ID NO: 156725 - DNA, 25 bp, Homo sapien
gaaccaaaggcctctagtccttgtg

SEQ ID NO: 156726 - DNA, 25 bp, Homo sapien
gcctctagtccttgtgtagctgtca

SEQ ID NO: 156727 - DNA, 25 bp, Homo sapien
gtagctgtcaagtcccctccactat

SEQ ID NO: 156728 - DNA, 25 bp, Homo sapien
attgttgtgattcacagcatgtgaa

SEQ ID NO: 156729 - DNA, 25 bp, Homo sapien
gcagaaaagtgagataaaggggagc

SEQ ID NO: 156730 - DNA, 25 bp, Homo sapien
ctgcagaaaagtgagataaagggga

SEQ ID NO: 156731 - DNA, 25 bp, Homo sapien
tgcagaaaagtgagataaaggggag

SEQ ID NO: 156732 - DNA, 25 bp, Homo sapien
gatttcacgtgcaaaatcaggagcc

SEQ ID NO: 156733 - DNA, 25 bp, Homo sapien
ggataaagctttgtgaccgatttca

SEQ ID NO: 156734 - DNA, 25 bp, Homo sapien
gatggaagtgtaaccctggcagcaa

SEQ ID NO: 156735 - DNA, 25 bp, Homo sapien
tcaggagccaatcatggtttgtggt

SEQ ID NO: 156736 - DNA, 25 bp, Homo sapien
cctgcacttagtgcccaccaggcac

SEQ ID NO: 156737 - DNA, 25 bp, Homo sapien
gaagaaacacttaaaccggctgtca

SEQ ID NO: 156738 - DNA, 25 bp, Homo sapien
gggcagggccatgtgcactcatcag

SEQ ID NO: 156739 - DNA, 25 bp, Homo sapien
ggccatgtgcactcatcagacatct

SEQ ID NO: 156740 - DNA, 25 bp, Homo sapien
cacatccgatttttaatttggtcac

SEQ ID NO: 156741 - DNA, 25 bp, Homo sapien
atcatgcaccagaggacaccaagaa

SEQ ID NO: 156742 - DNA, 25 bp, Homo sapien
actcagcgcctatcatgcaccagag

SEQ ID NO: 156743 - DNA, 25 bp, Homo sapien
ttggtcactggactcccactcagcg

SEQ ID NO: 156744 - DNA, 25 bp, Homo sapien
tttgaattttgaagctaggaaactg

SEQ ID NO: 156745 - DNA, 25 bp, Homo sapien
tttaagctcctatggacaatgtccc

SEQ ID NO: 156746 - DNA, 25 bp, Homo sapien
gctaggaaactgatgacttcacttt

SEQ ID NO: 156747 - DNA, 25 bp, Homo sapien
cctgggagtccggtatctggttgct

SEQ ID NO: 156748 - DNA, 25 bp, Homo sapien
taaggctttagcactgatgggtctc

SEQ ID NO: 156749 - DNA, 25 bp, Homo sapien
gatttcagtgctgcaggatctgaga

SEQ ID NO: 156750 - DNA, 25 bp, Homo sapien
catgaggagccagtacttttgcagg

SEQ ID NO: 156751 - DNA, 25 bp, Homo sapien
taagctgtttgtagccgtggcttcc

SEQ ID NO: 156752 - DNA, 25 bp, Homo sapien
tcaatgagaggtgctcatgcaagat

SEQ ID NO: 156753 - DNA, 25 bp, Homo sapien
gcctctgtgaccagcggggttacac

SEQ ID NO: 156754 - DNA, 25 bp, Homo sapien
gttacacagtaggttcttcaatgag

SEQ ID NO: 156755 - DNA, 25 bp, Homo sapien
ccagcggggttacacagtaggttct

SEQ ID NO: 156756 - DNA, 25 bp, Homo sapien
caagtccaaaactgacagaggcctg

SEQ ID NO: 156757 - DNA, 25 bp, Homo sapien
ttgggaatggccaagcctatgctca

SEQ ID NO: 156758 - DNA, 25 bp, Homo sapien
ccttccaggtaacccctcatcgtgg

SEQ ID NO: 156759 - DNA, 25 bp, Homo sapien
cctcatcgtgggtgacttgggaatg

SEQ ID NO: 156760 - DNA, 25 bp, Homo sapien
agggggtgccccatgcctatcatcc

SEQ ID NO: 156761 - DNA, 25 bp, Homo sapien
ggggtgccccatgcctatcatccat

SEQ ID NO: 156762 - DNA, 25 bp, Homo sapien
gggggtgccccatgcctatcatcca

SEQ ID NO: 156763 - DNA, 25 bp, Homo sapien
gcaggataaagagatggtggccctg

SEQ ID NO: 156764 - DNA, 25 bp, Homo sapien
agcaggataaagagatggtggccct

SEQ ID NO: 156765 - DNA, 25 bp, Homo sapien
caggataaagagatggtggccctgg

SEQ ID NO: 156766 - DNA, 25 bp, Homo sapien
ttccttaaatgctctctctggttct

SEQ ID NO: 156767 - DNA, 25 bp, Homo sapien
gatgaaggcttacttcaaatgcaaa

SEQ ID NO: 156768 - DNA, 25 bp, Homo sapien
tcaaatgcaaaaagattaggtctct

SEQ ID NO: 156769 - DNA, 25 bp, Homo sapien
tgggctgatgatgaaggcttacttc

SEQ ID NO: 156770 - DNA, 25 bp, Homo sapien
ctttgcaaaagcgtaaatctgtcat

SEQ ID NO: 156771 - DNA, 25 bp, Homo sapien
tcttggcctgccgttatcctgtagc

SEQ ID NO: 156772 - DNA, 25 bp, Homo sapien
catggcagtctgagttgaataattc

SEQ ID NO: 156773 - DNA, 25 bp, Homo sapien
tagaacccgaggcaaagaaattgga

SEQ ID NO: 156774 - DNA, 25 bp, Homo sapien
tacagtgcactgtgcgaattgcaaa

SEQ ID NO: 156775 - DNA, 25 bp, Homo sapien
ttctgaacctttgattaaaatatac

SEQ ID NO: 156776 - DNA, 25 bp, Homo sapien
ctgaatcccaaccctcatccctgtg

SEQ ID NO: 156777 - DNA, 25 bp, Homo sapien
tttctgaacctttgattaaaatata

SEQ ID NO: 156778 - DNA, 25 bp, Homo sapien
ggagttttctcgacatcaccagcag

SEQ ID NO: 156779 - DNA, 25 bp, Homo sapien
ttaatccaatctgggactcgggacg

SEQ ID NO: 156780 - DNA, 25 bp, Homo sapien
tccgcctcagagttgcaagggcaag

SEQ ID NO: 156781 - DNA, 25 bp, Homo sapien
gcctttgtgggacagagcctcatga

SEQ ID NO: 156782 - DNA, 25 bp, Homo sapien
tgctttgtgccagcccgcccgtgtt

SEQ ID NO: 156783 - DNA, 25 bp, Homo sapien
ggctggtctgacttgtgtacatcca

SEQ ID NO: 156784 - DNA, 25 bp, Homo sapien
tctcccctaattacagaacatctgc

SEQ ID NO: 156785 - DNA, 25 bp, Homo sapien
tccatgacagggaagcggtagcggc

SEQ ID NO: 156786 - DNA, 25 bp, Homo sapien
gagcagttcctccagaaagtcgtga

SEQ ID NO: 156787 - DNA, 25 bp, Homo sapien
tccagaaagtcgtgagagactcagc

SEQ ID NO: 156788 - DNA, 25 bp, Homo sapien
tcagcaagtcacaattaagaagcgt

SEQ ID NO: 156789 - DNA, 25 bp, Homo sapien
attaagaagcgttggaagctcattc

SEQ ID NO: 156790 - DNA, 25 bp, Homo sapien
ccagaaagcttgaaacctgttttga

SEQ ID NO: 156791 - DNA, 25 bp, Homo sapien
gagatcgttctctaccaactttaga

SEQ ID NO: 156792 - DNA, 25 bp, Homo sapien
ttgaccaccagaaagcttgaaacct

SEQ ID NO: 156793 - DNA, 25 bp, Homo sapien
aacctgttttgagatcgttctctac

SEQ ID NO: 156794 - DNA, 25 bp, Homo sapien
tgacacgcatgagccctaaggtgca

SEQ ID NO: 156795 - DNA, 25 bp, Homo sapien
tgtactccgtggcaagtcttccggg

SEQ ID NO: 156796 - DNA, 25 bp, Homo sapien
tattaaaagcaggtctgtgaatgtt

SEQ ID NO: 156797 - DNA, 25 bp, Homo sapien
agccctaaggtgcagttttgtactc

SEQ ID NO: 156798 - DNA, 25 bp, Homo sapien
agaaggcaggagagcaaaagaccat

SEQ ID NO: 156799 - DNA, 25 bp, Homo sapien
taagaaggcaggagagcaaaagacc

SEQ ID NO: 156800 - DNA, 25 bp, Homo sapien
aagaaggcaggagagcaaaagacca

SEQ ID NO: 156801 - DNA, 25 bp, Homo sapien
ctaagaaggcaggagagcaaaagac

SEQ ID NO: 156802 - DNA, 25 bp, Homo sapien
cgggagagcatccttctgtcctggt

SEQ ID NO: 156803 - DNA, 25 bp, Homo sapien
tcccctctggacctccgggagagca

SEQ ID NO: 156804 - DNA, 25 bp, Homo sapien
gacctccgggagagcatccttctgt

SEQ ID NO: 156805 - DNA, 25 bp, Homo sapien
ctggacctccgggagagcatccttc

SEQ ID NO: 156806 - DNA, 25 bp, Homo sapien
cctgagaacctgaccttggcttgac

SEQ ID NO: 156807 - DNA, 25 bp, Homo sapien
ggaccttgacttgaccaccgaggaa

SEQ ID NO: 156808 - DNA, 25 bp, Homo sapien
gatcttagcttgaccactgtggaac

SEQ ID NO: 156809 - DNA, 25 bp, Homo sapien
catgaccttgacgtaaccactgagg

SEQ ID NO: 156810 - DNA, 25 bp, Homo sapien
gagcatgagtatctgcttagctccc

SEQ ID NO: 156811 - DNA, 25 bp, Homo sapien
ttgagcatgagtatctgcttagctc

SEQ ID NO: 156812 - DNA, 25 bp, Homo sapien
ctttgagcatgagtatctgcttagc

SEQ ID NO: 156813 - DNA, 25 bp, Homo sapien
gcatgagtatctgcttagctcccat

SEQ ID NO: 156814 - DNA, 25 bp, Homo sapien
cctggtgaccaacaaccaggcagct

SEQ ID NO: 156815 - DNA, 25 bp, Homo sapien
aaccaggcagctgtatcatctccct

SEQ ID NO: 156816 - DNA, 25 bp, Homo sapien
gaccaacaaccaggcagctgtatca

SEQ ID NO: 156817 - DNA, 25 bp, Homo sapien
cacacaggtgtccaacagccctggt

SEQ ID NO: 156818 - DNA, 25 bp, Homo sapien
ctttgtggtggaaagtactataaca

SEQ ID NO: 156819 - DNA, 25 bp, Homo sapien
ttgtggtggaaagtactataacacc

SEQ ID NO: 156820 - DNA, 25 bp, Homo sapien
tgtggtggaaagtactataacacct

SEQ ID NO: 156821 - DNA, 25 bp, Homo sapien
tttgtggtggaaagtactataacac

SEQ ID NO: 156822 - DNA, 25 bp, Homo sapien
atgaggtcttgcattcaggtgatca

SEQ ID NO: 156823 - DNA, 25 bp, Homo sapien
ggtcttgcattcaggtgatcatctg

SEQ ID NO: 156824 - DNA, 25 bp, Homo sapien
tgatcatctgccatgtaactcaagg

SEQ ID NO: 156825 - DNA, 25 bp, Homo sapien
ctcaaggagccatctggatccctgc

SEQ ID NO: 156826 - DNA, 25 bp, Homo sapien
cactttttgcaaaggcttttatcct

SEQ ID NO: 156827 - DNA, 25 bp, Homo sapien
ctttttgcaaaggcttttatcctca

SEQ ID NO: 156828 - DNA, 25 bp, Homo sapien
tttttgcaaaggcttttatcctcac

SEQ ID NO: 156829 - DNA, 25 bp, Homo sapien
gctttctgtggctctatcgtacatg

SEQ ID NO: 156830 - DNA, 25 bp, Homo sapien
tctgtggctctatcgtacatgaggc

SEQ ID NO: 156831 - DNA, 25 bp, Homo sapien
tgtggctctatcgtacatgaggctt

SEQ ID NO: 156832 - DNA, 25 bp, Homo sapien
tttctgtggctctatcgtacatgag

SEQ ID NO: 156833 - DNA, 25 bp, Homo sapien
tgacaccaacagcacggccttcaag

SEQ ID NO: 156834 - DNA, 25 bp, Homo sapien
caggtaagcatgcaggtaactgaca

SEQ ID NO: 156835 - DNA, 25 bp, Homo sapien
caggtaactgacaccaacagcacgg

SEQ ID NO: 156836 - DNA, 25 bp, Homo sapien
gcctgcacaggtaagcatgcaggta

SEQ ID NO: 156837 - DNA, 25 bp, Homo sapien
caaggaggccagtggtacgtcagcc

SEQ ID NO: 156838 - DNA, 25 bp, Homo sapien
ccaagacggggtggtcacatttctc

SEQ ID NO: 156839 - DNA, 25 bp, Homo sapien
cctgattccactgtgagttgtcccc

SEQ ID NO: 156840 - DNA, 25 bp, Homo sapien
tctctcaggttctgttcgctgaact

SEQ ID NO: 156841 - DNA, 25 bp, Homo sapien
tccaagcaccttaatttagggacca

SEQ ID NO: 156842 - DNA, 25 bp, Homo sapien
gaacaacagtctccaagcaccttaa

SEQ ID NO: 156843 - DNA, 25 bp, Homo sapien
atgccctgtgcttacagtccttcct

SEQ ID NO: 156844 - DNA, 25 bp, Homo sapien
agtccttcctattttcatggtttga

SEQ ID NO: 156845 - DNA, 25 bp, Homo sapien
tggcacaggagtgggcgggacagtc

SEQ ID NO: 156846 - DNA, 25 bp, Homo sapien
catcttcacagtcgtgtggtgaagg

SEQ ID NO: 156847 - DNA, 25 bp, Homo sapien
tttaacttggacagcttgagtgggg

SEQ ID NO: 156848 - DNA, 25 bp, Homo sapien
gaggctgagcttcggggagctttcc

SEQ ID NO: 156849 - DNA, 25 bp, Homo sapien
tccctggctctgactcatacccttc

SEQ ID NO: 156850 - DNA, 25 bp, Homo sapien
ccctggctctgactcatacccttcc

SEQ ID NO: 156851 - DNA, 25 bp, Homo sapien
cctggctctgactcatacccttcca

SEQ ID NO: 156852 - DNA, 25 bp, Homo sapien
ctggctctgactcatacccttccat

SEQ ID NO: 156853 - DNA, 25 bp, Homo sapien
atgagaggctggcagtctccagatc

SEQ ID NO: 156854 - DNA, 25 bp, Homo sapien
aaatggcagcgttgcttcgagggcc

SEQ ID NO: 156855 - DNA, 25 bp, Homo sapien
gacatccctttatcttcctcccagt

SEQ ID NO: 156856 - DNA, 25 bp, Homo sapien
gcgttgcttcgagggccttgcaaca

SEQ ID NO: 156857 - DNA, 25 bp, Homo sapien
agcccagtgacttgcttttttgttc

SEQ ID NO: 156858 - DNA, 25 bp, Homo sapien
gatttagagatcaaacactggtcct

SEQ ID NO: 156859 - DNA, 25 bp, Homo sapien
ggcttccacgctttttcatttcagt

SEQ ID NO: 156860 - DNA, 25 bp, Homo sapien
gagtcacaaaaccacgtccacgggc

SEQ ID NO: 156861 - DNA, 25 bp, Homo sapien
aacactcgtcttcccgtgatttaga

SEQ ID NO: 156862 - DNA, 25 bp, Homo sapien
gaactccttggctctgatctgcata

SEQ ID NO: 156863 - DNA, 25 bp, Homo sapien
gattgaattggaacaatacctttga

SEQ ID NO: 156864 - DNA, 25 bp, Homo sapien
agtccttgacaatgaccttagccgc

SEQ ID NO: 156865 - DNA, 25 bp, Homo sapien
tgcatactaattgatcccaagtcct

SEQ ID NO: 156866 - DNA, 25 bp, Homo sapien
gcatcacatcggcaaatcaggaaaa

SEQ ID NO: 156867 - DNA, 25 bp, Homo sapien
caggcaatgagtagcggccactggt

SEQ ID NO: 156868 - DNA, 25 bp, Homo sapien
gcatctgtgtccctactcttccgtg

SEQ ID NO: 156869 - DNA, 25 bp, Homo sapien
gtatgttttaaggacacaggcaatg

SEQ ID NO: 156870 - DNA, 25 bp, Homo sapien
tttccacgtgtgtctggacgacagc

SEQ ID NO: 156871 - DNA, 25 bp, Homo sapien
cgtgtggacggaaggcagcacttca

SEQ ID NO: 156872 - DNA, 25 bp, Homo sapien
tgagaacgtttgcagtgaccctatc

SEQ ID NO: 156873 - DNA, 25 bp, Homo sapien
gagaccaggtctcttcggcagtcac

SEQ ID NO: 156874 - DNA, 25 bp, Homo sapien
tcttgacaatactggaagttcccac

SEQ ID NO: 156875 - DNA, 25 bp, Homo sapien
tcccaacaatatctctgaaggtcct

SEQ ID NO: 156876 - DNA, 25 bp, Homo sapien
tcattcctgatgaacttaccaagtt

SEQ ID NO: 156877 - DNA, 25 bp, Homo sapien
gttcaaaactcacacgacatgcgta

SEQ ID NO: 156878 - DNA, 25 bp, Homo sapien
tgaagacaccgaggatgccatgact

SEQ ID NO: 156879 - DNA, 25 bp, Homo sapien
gaagacaccgaggatgccatgactt

SEQ ID NO: 156880 - DNA, 25 bp, Homo sapien
actggacagccaagtttcccttgct

SEQ ID NO: 156881 - DNA, 25 bp, Homo sapien
cctgaagacaccgaggatgccatga

SEQ ID NO: 156882 - DNA, 25 bp, Homo sapien
ctcttgcagtcccaaggagtccagc

SEQ ID NO: 156883 - DNA, 25 bp, Homo sapien
cacatgtcggtaggaagctgatgaa

SEQ ID NO: 156884 - DNA, 25 bp, Homo sapien
acccaagcgtttgggacttgcacat

SEQ ID NO: 156885 - DNA, 25 bp, Homo sapien
tgatgaatggaggttgggccctcct

SEQ ID NO: 156886 - DNA, 25 bp, Homo sapien
taatgacacttcgtaaagaaaaaga

SEQ ID NO: 156887 - DNA, 25 bp, Homo sapien
tcaacagacttcttaatgaagctgc

SEQ ID NO: 156888 - DNA, 25 bp, Homo sapien
gccaatactgtcaatagcatctttt

SEQ ID NO: 156889 - DNA, 25 bp, Homo sapien
aactccctcctatgttgccgtgtgg

SEQ ID NO: 156890 - DNA, 25 bp, Homo sapien
gacacattctggcattgctgtgcca

SEQ ID NO: 156891 - DNA, 25 bp, Homo sapien
tgaatcccaaatgtgccagccttat

SEQ ID NO: 156892 - DNA, 25 bp, Homo sapien
tctggcattgctgtgccagcccaag

SEQ ID NO: 156893 - DNA, 25 bp, Homo sapien
tctgccactgtcttgagaagtgtca

SEQ ID NO: 156894 - DNA, 25 bp, Homo sapien
gctgaaacccactgtgatctgtgag

SEQ ID NO: 156895 - DNA, 25 bp, Homo sapien
aacccactgtgatctgtgagagctc

SEQ ID NO: 156896 - DNA, 25 bp, Homo sapien
actgtgatctgtgagagctcccttg

SEQ ID NO: 156897 - DNA, 25 bp, Homo sapien
cccactgtgatctgtgagagctccc

SEQ ID NO: 156898 - DNA, 25 bp, Homo sapien
gctgctggcatttcaataatgctgg

SEQ ID NO: 156899 - DNA, 25 bp, Homo sapien
cacagatgtgcttcgtggacgctgc

SEQ ID NO: 156900 - DNA, 25 bp, Homo sapien
ctgtgtgaccggttagcacagatgt

SEQ ID NO: 156901 - DNA, 25 bp, Homo sapien
gcttcgtggacgctgctggcatttc

SEQ ID NO: 156902 - DNA, 25 bp, Homo sapien
tgactgcaaggccacggagcaggac

SEQ ID NO: 156903 - DNA, 25 bp, Homo sapien
actatgatgactgcaaggccacgga

SEQ ID NO: 156904 - DNA, 25 bp, Homo sapien
actgcaaggccacggagcaggactg

SEQ ID NO: 156905 - DNA, 25 bp, Homo sapien
cagactatgatgactgcaaggccac

SEQ ID NO: 156906 - DNA, 25 bp, Homo sapien
ggatctttgagctggcacttgacgc

SEQ ID NO: 156907 - DNA, 25 bp, Homo sapien
gatctttgagctggcacttgacgcc

SEQ ID NO: 156908 - DNA, 25 bp, Homo sapien
tctttgagctggcacttgacgcccc

SEQ ID NO: 156909 - DNA, 25 bp, Homo sapien
ttgagctggcacttgacgccccagg

SEQ ID NO: 156910 - DNA, 25 bp, Homo sapien
cacactgccctgcatgaagtagtgg

SEQ ID NO: 156911 - DNA, 25 bp, Homo sapien
gcacactgccctgcatgaagtagtg

SEQ ID NO: 156912 - DNA, 25 bp, Homo sapien
acactgccctgcatgaagtagtggt

SEQ ID NO: 156913 - DNA, 25 bp, Homo sapien
ggcacactgccctgcatgaagtagt

SEQ ID NO: 156914 - DNA, 25 bp, Homo sapien
aaaagtgtttgttctgctgggccct

SEQ ID NO: 156915 - DNA, 25 bp, Homo sapien
taaaaaagtgtttgttctgctgggc

SEQ ID NO: 156916 - DNA, 25 bp, Homo sapien
ccttctctgcagtcaccggtgatgg

SEQ ID NO: 156917 - DNA, 25 bp, Homo sapien
gtcaccggtgatggggagaacacac

SEQ ID NO: 156918 - DNA, 25 bp, Homo sapien
agaaaaacagatgcagtcggccacc

SEQ ID NO: 156919 - DNA, 25 bp, Homo sapien
gctgtatggagatgacaacgtggtc

SEQ ID NO: 156920 - DNA, 25 bp, Homo sapien
cctcctgcactgagttgaccagctg

SEQ ID NO: 156921 - DNA, 25 bp, Homo sapien
gacccacttagacctggaccatatt

SEQ ID NO: 156922 - DNA, 25 bp, Homo sapien
tgcagagagaggatacttgctcccc

SEQ ID NO: 156923 - DNA, 25 bp, Homo sapien
tcattgcagcgggatgaacaggaat

SEQ ID NO: 156924 - DNA, 25 bp, Homo sapien
gaacaggaatttcttgcactgccac

SEQ ID NO: 156925 - DNA, 25 bp, Homo sapien
cacagtggcacaattaacgttatcc

SEQ ID NO: 156926 - DNA, 25 bp, Homo sapien
ccgaagacgccttcccgtccaccag

SEQ ID NO: 156927 - DNA, 25 bp, Homo sapien
tgtcaaccaccggaccgaagacgcc

SEQ ID NO: 156928 - DNA, 25 bp, Homo sapien
ttgtcaaccaccggaccgaagacgc

SEQ ID NO: 156929 - DNA, 25 bp, Homo sapien
taaattccaaacaccagagtgcaca

SEQ ID NO: 156930 - DNA, 25 bp, Homo sapien
aaattccaaacaccagagtgcacac

SEQ ID NO: 156931 - DNA, 25 bp, Homo sapien
ttaaattccaaacaccagagtgcac

SEQ ID NO: 156932 - DNA, 25 bp, Homo sapien
tgctttcatcacttggtggacaaag

SEQ ID NO: 156933 - DNA, 25 bp, Homo sapien
cacttggtggacaaagtcctcggca

SEQ ID NO: 156934 - DNA, 25 bp, Homo sapien
gtggacaaagtcctcggcaagtctc

SEQ ID NO: 156935 - DNA, 25 bp, Homo sapien
catcacttggtggacaaagtcctcg

SEQ ID NO: 156936 - DNA, 25 bp, Homo sapien
tgaggccccgccgaaagcgacggaa

SEQ ID NO: 156937 - DNA, 25 bp, Homo sapien
tgacatctgtcttggcggcagcctc

SEQ ID NO: 156938 - DNA, 25 bp, Homo sapien
gctgtacggctgacgggctgtcacc

SEQ ID NO: 156939 - DNA, 25 bp, Homo sapien
tcctcaggcggttctcttggcagcc

SEQ ID NO: 156940 - DNA, 25 bp, Homo sapien
cacaacgcccagttttattagtatt

SEQ ID NO: 156941 - DNA, 25 bp, Homo sapien
caacgcccagttttattagtattat

SEQ ID NO: 156942 - DNA, 25 bp, Homo sapien
ccttcacaacgcccagttttattag

SEQ ID NO: 156943 - DNA, 25 bp, Homo sapien
ttcacaacgcccagttttattagta

SEQ ID NO: 156944 - DNA, 25 bp, Homo sapien
cactatctggttgggtcagctggga

SEQ ID NO: 156945 - DNA, 25 bp, Homo sapien
ccacatgatgccgacaagggttgct

SEQ ID NO: 156946 - DNA, 25 bp, Homo sapien
tcacacttcatacgtggctcaggcc

SEQ ID NO: 156947 - DNA, 25 bp, Homo sapien
cagctgggattgttgaccagagcaa

SEQ ID NO: 156948 - DNA, 25 bp, Homo sapien
tcatggtttctccaacggccaggac

SEQ ID NO: 156949 - DNA, 25 bp, Homo sapien
caaacatgttgctccattcagcgat

SEQ ID NO: 156950 - DNA, 25 bp, Homo sapien
ggaaggacgtggacaatcacacata

SEQ ID NO: 156951 - DNA, 25 bp, Homo sapien
ctcaatagcaagttacatgggccct

SEQ ID NO: 156952 - DNA, 25 bp, Homo sapien
agctgaagctgaaagtccatggtgt

SEQ ID NO: 156953 - DNA, 25 bp, Homo sapien
ctttgaggctgtccaccgaaggcct

SEQ ID NO: 156954 - DNA, 25 bp, Homo sapien
tcatctctggagtctaaactggaaa

SEQ ID NO: 156955 - DNA, 25 bp, Homo sapien
gaaagtccatggtgtagtgagacct

SEQ ID NO: 156956 - DNA, 25 bp, Homo sapien
caggacagcctagtctgccatgctt

SEQ ID NO: 156957 - DNA, 25 bp, Homo sapien
cagggaatgctatcccaggctctgg

SEQ ID NO: 156958 - DNA, 25 bp, Homo sapien
tgaaaccaccctccggttgcaggac

SEQ ID NO: 156959 - DNA, 25 bp, Homo sapien
tctctagctgcctgtagatagcagg

SEQ ID NO: 156960 - DNA, 25 bp, Homo sapien
gatgcgacgatataacttccagttt

SEQ ID NO: 156961 - DNA, 25 bp, Homo sapien
tactatccgtaaatttagaggctgc

SEQ ID NO: 156962 - DNA, 25 bp, Homo sapien
gatgccggtgcagaaaccttcgtct

SEQ ID NO: 156963 - DNA, 25 bp, Homo sapien
gaattcagtgctaacggatgcgacg

SEQ ID NO: 156964 - DNA, 25 bp, Homo sapien
ggctaaaaggtgagtagaagccact

SEQ ID NO: 156965 - DNA, 25 bp, Homo sapien
tcaccaagtggtggagggaataaag

SEQ ID NO: 156966 - DNA, 25 bp, Homo sapien
tgcacctaggagctcaccaagtggt

SEQ ID NO: 156967 - DNA, 25 bp, Homo sapien
gacctatttatcttgcagaggagac

SEQ ID NO: 156968 - DNA, 25 bp, Homo sapien
cctgggcaagcaagctatctgcaat

SEQ ID NO: 156969 - DNA, 25 bp, Homo sapien
tgccttgttgatcatacttggattg

SEQ ID NO: 156970 - DNA, 25 bp, Homo sapien
tacttggattgtaattcccctgggc

SEQ ID NO: 156971 - DNA, 25 bp, Homo sapien
ctgaataatcagtaatcaagaaatg

SEQ ID NO: 156972 - DNA, 25 bp, Homo sapien
tagcccaatatataagtccccttct

SEQ ID NO: 156973 - DNA, 25 bp, Homo sapien
accccctacatgaacgaacttgtct

SEQ ID NO: 156974 - DNA, 25 bp, Homo sapien
catgaacgaacttgtctataccttc

SEQ ID NO: 156975 - DNA, 25 bp, Homo sapien
cccctacatgaacgaacttgtctat

SEQ ID NO: 156976 - DNA, 25 bp, Homo sapien
tcgtggaagtccaaccactttgagc

SEQ ID NO: 156977 - DNA, 25 bp, Homo sapien
tttcctgagtacatatctctgagtt

SEQ ID NO: 156978 - DNA, 25 bp, Homo sapien
tctgagttttatacctgagatcatc

SEQ ID NO: 156979 - DNA, 25 bp, Homo sapien
tctgctgtaattcatttgtctgatt

SEQ ID NO: 156980 - DNA, 25 bp, Homo sapien
tgcaaattgcattgactgtgaccat

SEQ ID NO: 156981 - DNA, 25 bp, Homo sapien
catggcagaggtcaatgtccttctt

SEQ ID NO: 156982 - DNA, 25 bp, Homo sapien
aatgcatggcagaggtcaatgtcct

SEQ ID NO: 156983 - DNA, 25 bp, Homo sapien
tcttgcatcttgagctctcttgacc

SEQ ID NO: 156984 - DNA, 25 bp, Homo sapien
gcctccctaatcactgtacccattg

SEQ ID NO: 156985 - DNA, 25 bp, Homo sapien
ctccctaatcactgtacccattgcc

SEQ ID NO: 156986 - DNA, 25 bp, Homo sapien
agcctccctaatcactgtacccatt

SEQ ID NO: 156987 - DNA, 25 bp, Homo sapien
caaatccctccagccaaactgccca

SEQ ID NO: 156988 - DNA, 25 bp, Homo sapien
tagggctgtgtagcaagccagagtc

SEQ ID NO: 156989 - DNA, 25 bp, Homo sapien
gcagctgtctgcttcgtgtgttcga

SEQ ID NO: 156990 - DNA, 25 bp, Homo sapien
tattaaagctagcaggcagtgcaga

SEQ ID NO: 156991 - DNA, 25 bp, Homo sapien
tcagctggaggttcggaagtgctaa

SEQ ID NO: 156992 - DNA, 25 bp, Homo sapien
caccaccagccctgatgagatggtt

SEQ ID NO: 156993 - DNA, 25 bp, Homo sapien
ccaccaccagccctgatgagatggt

SEQ ID NO: 156994 - DNA, 25 bp, Homo sapien
agccaggcatggctcttccgcaaga

SEQ ID NO: 156995 - DNA, 25 bp, Homo sapien
ggctcttccgcaagaggttgtctcc

SEQ ID NO: 156996 - DNA, 25 bp, Homo sapien
cttacagcagctttccatccatgta

SEQ ID NO: 156997 - DNA, 25 bp, Homo sapien
ggcatggctcttccgcaagaggttg

SEQ ID NO: 156998 - DNA, 25 bp, Homo sapien
tgccacgcctccaccaataaactgt

SEQ ID NO: 156999 - DNA, 25 bp, Homo sapien
atgccacgcctccaccaataaactg

SEQ ID NO: 157000 - DNA, 25 bp, Homo sapien
gcatgccacgcctccaccaataaac

SEQ ID NO: 157001 - DNA, 25 bp, Homo sapien
cacgcctccaccaataaactgtctt

SEQ ID NO: 157002 - DNA, 25 bp, Homo sapien
tgccggcatctccatattgcaaact

SEQ ID NO: 157003 - DNA, 25 bp, Homo sapien
ctgccggcatctccatattgcaaac

SEQ ID NO: 157004 - DNA, 25 bp, Homo sapien
ctcctgattctatggtagaagctga

SEQ ID NO: 157005 - DNA, 25 bp, Homo sapien
tcctgattctatggtagaagctgat

SEQ ID NO: 157006 - DNA, 25 bp, Homo sapien
cacagcctgtttgagaggtggctca

SEQ ID NO: 157007 - DNA, 25 bp, Homo sapien
tgagaggtggctcatacacgactac

SEQ ID NO: 157008 - DNA, 25 bp, Homo sapien
tgcacctggatcactcacagcctgt

SEQ ID NO: 157009 - DNA, 25 bp, Homo sapien
cagcaggtcccctgcacctggatca

SEQ ID NO: 157010 - DNA, 25 bp, Homo sapien
cacccaatggcacattgcacaaagt

SEQ ID NO: 157011 - DNA, 25 bp, Homo sapien
gcaactgactaccactacttcgaat

SEQ ID NO: 157012 - DNA, 25 bp, Homo sapien
tcataatctactataacaggcagct

SEQ ID NO: 157013 - DNA, 25 bp, Homo sapien
ccagacactatgctagactaataca

SEQ ID NO: 157014 - DNA, 25 bp, Homo sapien
cgtatcaggggagataactgctcca

SEQ ID NO: 157015 - DNA, 25 bp, Homo sapien
tacagacttcctccacgtatcaggg

SEQ ID NO: 157016 - DNA, 25 bp, Homo sapien
agcgccttctctcctattggataca

SEQ ID NO: 157017 - DNA, 25 bp, Homo sapien
tctcctattggatacagacttcctc

SEQ ID NO: 157018 - DNA, 25 bp, Homo sapien
ctcgacatgtttctaagagatagca

SEQ ID NO: 157019 - DNA, 25 bp, Homo sapien
tgccatgagccgagcacagagacag

SEQ ID NO: 157020 - DNA, 25 bp, Homo sapien
gagatagcatgatgccatgagccga

SEQ ID NO: 157021 - DNA, 25 bp, Homo sapien
aaggggcacgggcttgtctatgaca

SEQ ID NO: 157022 - DNA, 25 bp, Homo sapien
ccagtttggtttacaacggcgccat

SEQ ID NO: 157023 - DNA, 25 bp, Homo sapien
aaagtggaattgagcgtcttttttg

SEQ ID NO: 157024 - DNA, 25 bp, Homo sapien
cagtttggtttacaacggcgccatc

SEQ ID NO: 157025 - DNA, 25 bp, Homo sapien
tatgatagagtcagcctgggcagga

SEQ ID NO: 157026 - DNA, 25 bp, Homo sapien
ggctgataggactggcagaagttac

SEQ ID NO: 157027 - DNA, 25 bp, Homo sapien
gttacagcttgtatgatagagtcag

SEQ ID NO: 157028 - DNA, 25 bp, Homo sapien
ctggctgataggactggcagaagtt

SEQ ID NO: 157029 - DNA, 25 bp, Homo sapien
tgtgtgcaaagcctctagagctagg

SEQ ID NO: 157030 - DNA, 25 bp, Homo sapien
tctagagctaggacagttctaccag

SEQ ID NO: 157031 - DNA, 25 bp, Homo sapien
tctgtcctgtctggtatcttgctca

SEQ ID NO: 157032 - DNA, 25 bp, Homo sapien
gacagttctaccagcttctgtcctg

SEQ ID NO: 157033 - DNA, 25 bp, Homo sapien
gaatctgcaaatgctccgatgaggt

SEQ ID NO: 157034 - DNA, 25 bp, Homo sapien
gcaaatgctccgatgaggtgtttct

SEQ ID NO: 157035 - DNA, 25 bp, Homo sapien
aatctgcaaatgctccgatgaggtg

SEQ ID NO: 157036 - DNA, 25 bp, Homo sapien
tctgcaaatgctccgatgaggtgtt

SEQ ID NO: 157037 - DNA, 25 bp, Homo sapien
tacacagcttaagcaattctgaccc

SEQ ID NO: 157038 - DNA, 25 bp, Homo sapien
tggaatacacagcttaagcaattct

SEQ ID NO: 157039 - DNA, 25 bp, Homo sapien
gcaattctgaccctgagcctttggg

SEQ ID NO: 157040 - DNA, 25 bp, Homo sapien
cagcttaagcaattctgaccctgag

SEQ ID NO: 157041 - DNA, 25 bp, Homo sapien
tagatgcttgggtctcagctccaac

SEQ ID NO: 157042 - DNA, 25 bp, Homo sapien
ctcaagaggtaaggccgtggctcca

SEQ ID NO: 157043 - DNA, 25 bp, Homo sapien
gcccatgacataaagagctgcactg

SEQ ID NO: 157044 - DNA, 25 bp, Homo sapien
gctgtaagacgtgtccaggtcgatg

SEQ ID NO: 157045 - DNA, 25 bp, Homo sapien
ccagatgtgagatatggaggcacca

SEQ ID NO: 157046 - DNA, 25 bp, Homo sapien
tttcaaagacgagaagcctgggagg

SEQ ID NO: 157047 - DNA, 25 bp, Homo sapien
ctcagcattggctcttgcctagaaa

SEQ ID NO: 157048 - DNA, 25 bp, Homo sapien
tgtttccagaccacatatgacttaa

SEQ ID NO: 157049 - DNA, 25 bp, Homo sapien
agaataaccctgcataagttatcag

SEQ ID NO: 157050 - DNA, 25 bp, Homo sapien
ttagaataaccctgcataagttatc

SEQ ID NO: 157051 - DNA, 25 bp, Homo sapien
ataaccctgcataagttatcagctc

SEQ ID NO: 157052 - DNA, 25 bp, Homo sapien
gaataaccctgcataagttatcagc

SEQ ID NO: 157053 - DNA, 25 bp, Homo sapien
gctgcagcatatagcaccgagtgtg

SEQ ID NO: 157054 - DNA, 25 bp, Homo sapien
tgagcgtggtggttagacatgcccc

SEQ ID NO: 157055 - DNA, 25 bp, Homo sapien
tgtgttattccccaaggtccagaga

SEQ ID NO: 157056 - DNA, 25 bp, Homo sapien
tcactctgaaacttgggctgcagca

SEQ ID NO: 157057 - DNA, 25 bp, Homo sapien
tatgcccctgtcagttgttggtctt

SEQ ID NO: 157058 - DNA, 25 bp, Homo sapien
cttcttcttatctatgcccctgtca

SEQ ID NO: 157059 - DNA, 25 bp, Homo sapien
cactgccatggttagtttgtttgta

SEQ ID NO: 157060 - DNA, 25 bp, Homo sapien
ccagtcactgccatggttagtttgt

SEQ ID NO: 157061 - DNA, 25 bp, Homo sapien
tcaaacaggccaaacgccacagtct

SEQ ID NO: 157062 - DNA, 25 bp, Homo sapien
ggaggcagatagcaacgatttgcaa

SEQ ID NO: 157063 - DNA, 25 bp, Homo sapien
tagcaacgatttgcaaattgcctcc

SEQ ID NO: 157064 - DNA, 25 bp, Homo sapien
ccaaggtttagcgtggcaaagccta

SEQ ID NO: 157065 - DNA, 25 bp, Homo sapien
ttctaagccattcgcatctcccagg

SEQ ID NO: 157066 - DNA, 25 bp, Homo sapien
tatgtcccatttggtctggctcttc

SEQ ID NO: 157067 - DNA, 25 bp, Homo sapien
gtcccatttggtctggctcttcatc

SEQ ID NO: 157068 - DNA, 25 bp, Homo sapien
tctgcatgtaattctaagccattcg

SEQ ID NO: 157069 - DNA, 25 bp, Homo sapien
ttgcttctcagtgcctataccccta

SEQ ID NO: 157070 - DNA, 25 bp, Homo sapien
gaagcacagagacatgcaaccgatg

SEQ ID NO: 157071 - DNA, 25 bp, Homo sapien
tacattttgtgggagacttgaacac

SEQ ID NO: 157072 - DNA, 25 bp, Homo sapien
gcaaccgatgttctcagatgaatcc

SEQ ID NO: 157073 - DNA, 25 bp, Homo sapien
cgcatttagattgatgcaggctggg

SEQ ID NO: 157074 - DNA, 25 bp, Homo sapien
taataggaattgcagtttctcgaca

SEQ ID NO: 157075 - DNA, 25 bp, Homo sapien
tcgtgctgagtaaacagtcaagtgt

SEQ ID NO: 157076 - DNA, 25 bp, Homo sapien
gggctgacgttctcgtgctgagtaa

SEQ ID NO: 157077 - DNA, 25 bp, Homo sapien
cgtctgcacttttcgggggcctgac

SEQ ID NO: 157078 - DNA, 25 bp, Homo sapien
acaagcaaagcctgagaacaggatt

SEQ ID NO: 157079 - DNA, 25 bp, Homo sapien
aacaggatttgcaaataagggaggg

SEQ ID NO: 157080 - DNA, 25 bp, Homo sapien
aagcctgagaacaggatttgcaaat

SEQ ID NO: 157081 - DNA, 25 bp, Homo sapien
caagaacaagcaaagcctgagaaca

SEQ ID NO: 157082 - DNA, 25 bp, Homo sapien
tgctagtgtcatcagaaccaaccca

SEQ ID NO: 157083 - DNA, 25 bp, Homo sapien
acgcagaactgagacttgcagaagt

SEQ ID NO: 157084 - DNA, 25 bp, Homo sapien
gtgctagtgtcatcagaaccaaccc

SEQ ID NO: 157085 - DNA, 25 bp, Homo sapien
cacacgcagaactgagacttgcaga

SEQ ID NO: 157086 - DNA, 25 bp, Homo sapien
tcagggctgctcttaggaagagaaa

SEQ ID NO: 157087 - DNA, 25 bp, Homo sapien
cagtgtttgtctggtacacagggta

SEQ ID NO: 157088 - DNA, 25 bp, Homo sapien
taaaaatagtgagatggcgacggta

SEQ ID NO: 157089 - DNA, 25 bp, Homo sapien
gcagatatcataatatattcagggc

SEQ ID NO: 157090 - DNA, 25 bp, Homo sapien
gacaagcctcacttaggaacaggga

SEQ ID NO: 157091 - DNA, 25 bp, Homo sapien
gatgatgatggtactaatgggacaa

SEQ ID NO: 157092 - DNA, 25 bp, Homo sapien
tggtactaatgggacaagcctcact

SEQ ID NO: 157093 - DNA, 25 bp, Homo sapien
tattctactaagatgatgatggtac

SEQ ID NO: 157094 - DNA, 25 bp, Homo sapien
atggccacaactccactatattggc

SEQ ID NO: 157095 - DNA, 25 bp, Homo sapien
tggccacaactccactatattggcc

SEQ ID NO: 157096 - DNA, 25 bp, Homo sapien
gatgaatataagtcgtagaaacagg

SEQ ID NO: 157097 - DNA, 25 bp, Homo sapien
tgtctgcggtgatgaatataagtcg

SEQ ID NO: 157098 - DNA, 25 bp, Homo sapien
gtcgtagaaacaggatgcatagtct

SEQ ID NO: 157099 - DNA, 25 bp, Homo sapien
ggttgtctgcggtgatgaatataag

SEQ ID NO: 157100 - DNA, 25 bp, Homo sapien
tatgtgctcttatagatgggcgcaa

SEQ ID NO: 157101 - DNA, 25 bp, Homo sapien
tgaaatacagataagataggagcct

SEQ ID NO: 157102 - DNA, 25 bp, Homo sapien
tctttttcagcctaagctagagcaa

SEQ ID NO: 157103 - DNA, 25 bp, Homo sapien
tccctaagcaacaggacttttctgg

SEQ ID NO: 157104 - DNA, 25 bp, Homo sapien
atgtttgtggatgggcttaatgaac

SEQ ID NO: 157105 - DNA, 25 bp, Homo sapien
tgtggatgggcttaatgaacgactc

SEQ ID NO: 157106 - DNA, 25 bp, Homo sapien
taatgaacgactctgtcctttgagc

SEQ ID NO: 157107 - DNA, 25 bp, Homo sapien
tgggcttaatgaacgactctgtcct

SEQ ID NO: 157108 - DNA, 25 bp, Homo sapien
ctgcatgtccagttccttcctatta

SEQ ID NO: 157109 - DNA, 25 bp, Homo sapien
tcctattaccacttaaggaactgca

SEQ ID NO: 157110 - DNA, 25 bp, Homo sapien
ttaccacttaaggaactgcaggtca

SEQ ID NO: 157111 - DNA, 25 bp, Homo sapien
catgtccagttccttcctattacca

SEQ ID NO: 157112 - DNA, 25 bp, Homo sapien
ttcgctcaagccctgtatggtagcc

SEQ ID NO: 157113 - DNA, 25 bp, Homo sapien
tagcgggttcccattgtaagcaggg

SEQ ID NO: 157114 - DNA, 25 bp, Homo sapien
gtggtctcttgggtcttggcatcta

SEQ ID NO: 157115 - DNA, 25 bp, Homo sapien
gcatcttcccaagttgtcgcccttt

SEQ ID NO: 157116 - DNA, 25 bp, Homo sapien
gatttgaaattctgggcagagtctc

SEQ ID NO: 157117 - DNA, 25 bp, Homo sapien
atttgaaattctgggcagagtctct

SEQ ID NO: 157118 - DNA, 25 bp, Homo sapien
tgatttgaaattctgggcagagtct

SEQ ID NO: 157119 - DNA, 25 bp, Homo sapien
caggggcaacacaagatctctgtgc

SEQ ID NO: 157120 - DNA, 25 bp, Homo sapien
ggggcaacacaagatctctgtgcat

SEQ ID NO: 157121 - DNA, 25 bp, Homo sapien
tcaggggcaacacaagatctctgtg

SEQ ID NO: 157122 - DNA, 25 bp, Homo sapien
aggggcaacacaagatctctgtgca

SEQ ID NO: 157123 - DNA, 25 bp, Homo sapien
aagctggagattgtaggtgtggggc

SEQ ID NO: 157124 - DNA, 25 bp, Homo sapien
agctggagattgtaggtgtggggct

SEQ ID NO: 157125 - DNA, 25 bp, Homo sapien
gaagctggagattgtaggtgtgggg

SEQ ID NO: 157126 - DNA, 25 bp, Homo sapien
agaatgcactcctcacgaatctcat

SEQ ID NO: 157127 - DNA, 25 bp, Homo sapien
gctaaagaatgcactcctcacgaat

SEQ ID NO: 157128 - DNA, 25 bp, Homo sapien
taagctaaagaatgcactcctcacg

SEQ ID NO: 157129 - DNA, 25 bp, Homo sapien
cccataagctaaagaatgcactcct

SEQ ID NO: 157130 - DNA, 25 bp, Homo sapien
gctccacgagatttggaagcgttca

SEQ ID NO: 157131 - DNA, 25 bp, Homo sapien
ggcaaggtcaaggctatggcaatga

SEQ ID NO: 157132 - DNA, 25 bp, Homo sapien
ctatggcaatgagggagccagcgca

SEQ ID NO: 157133 - DNA, 25 bp, Homo sapien
aaaacaagatcagttgctccacgag

SEQ ID NO: 157134 - DNA, 25 bp, Homo sapien
gttctttgtacctgggggtatctga

SEQ ID NO: 157135 - DNA, 25 bp, Homo sapien
gggggtatctgaccctccctgattc

SEQ ID NO: 157136 - DNA, 25 bp, Homo sapien
ctttccaccttccatatgctcccct

SEQ ID NO: 157137 - DNA, 25 bp, Homo sapien
ccaccttccatatgctcccctctga

SEQ ID NO: 157138 - DNA, 25 bp, Homo sapien
acatgcttgggccaaagcccctcat

SEQ ID NO: 157139 - DNA, 25 bp, Homo sapien
catgcttgggccaaagcccctcatc

SEQ ID NO: 157140 - DNA, 25 bp, Homo sapien
ctcttggcagcctaggaattttttg

SEQ ID NO: 157141 - DNA, 25 bp, Homo sapien
tcatcagcccatcaaatactcttgg

SEQ ID NO: 157142 - DNA, 25 bp, Homo sapien
tggcagcctaggaattttttggaaa

SEQ ID NO: 157143 - DNA, 25 bp, Homo sapien
tggttctgccctcatcagcccatca

SEQ ID NO: 157144 - DNA, 25 bp, Homo sapien
cacatcagaggagccagtgttaagc

SEQ ID NO: 157145 - DNA, 25 bp, Homo sapien
cctaataccacatcagaggagccag

SEQ ID NO: 157146 - DNA, 25 bp, Homo sapien
cagaggagccagtgttaagctctgg

SEQ ID NO: 157147 - DNA, 25 bp, Homo sapien
ggagaaccctaataccacatcagag

SEQ ID NO: 157148 - DNA, 25 bp, Homo sapien
ctctgcatttgctccggtgtctggt

SEQ ID NO: 157149 - DNA, 25 bp, Homo sapien
tctgcatttgctccggtgtctggtg

SEQ ID NO: 157150 - DNA, 25 bp, Homo sapien
ctgcatttgctccggtgtctggtgg

SEQ ID NO: 157151 - DNA, 25 bp, Homo sapien
gcatttgctccggtgtctggtgggg

SEQ ID NO: 157152 - DNA, 25 bp, Homo sapien
tgtcgaagttggtacaaccaagtgt

SEQ ID NO: 157153 - DNA, 25 bp, Homo sapien
aaaaggcccatgtgaagagcttcag

SEQ ID NO: 157154 - DNA, 25 bp, Homo sapien
catatttgaggactggaatgcgttc

SEQ ID NO: 157155 - DNA, 25 bp, Homo sapien
tctggagaaatgtcgaagttggtac

SEQ ID NO: 157156 - DNA, 25 bp, Homo sapien
caacagcctgttcgagatctgccag

SEQ ID NO: 157157 - DNA, 25 bp, Homo sapien
caacaaagttactggcctgcagatg

SEQ ID NO: 157158 - DNA, 25 bp, Homo sapien
aaactgagccactcaagttgcacag

SEQ ID NO: 157159 - DNA, 25 bp, Homo sapien
gcacagtgtgcaacctgcgtgcaga

SEQ ID NO: 157160 - DNA, 25 bp, Homo sapien
gtctgaaaccagagctgagatcggc

SEQ ID NO: 157161 - DNA, 25 bp, Homo sapien
caacccgataaagggttgttgatct

SEQ ID NO: 157162 - DNA, 25 bp, Homo sapien
tcagatgccggagatgtgttgaaac

SEQ ID NO: 157163 - DNA, 25 bp, Homo sapien
ggttgttgatctccggtctgaaacc

SEQ ID NO: 157164 - DNA, 25 bp, Homo sapien
ctgcccttatgctttctaacttctt

SEQ ID NO: 157165 - DNA, 25 bp, Homo sapien
tgcccttatgctttctaacttcttt

SEQ ID NO: 157166 - DNA, 25 bp, Homo sapien
tgctttctaacttcttttcttcttc

SEQ ID NO: 157167 - DNA, 25 bp, Homo sapien
gataggccttcctgtatgtggttct

SEQ ID NO: 157168 - DNA, 25 bp, Homo sapien
tggataggccttcctgtatgtggtt

SEQ ID NO: 157169 - DNA, 25 bp, Homo sapien
ctctggataggccttcctgtatgtg

SEQ ID NO: 157170 - DNA, 25 bp, Homo sapien
ggccttcctgtatgtggttcttttc

SEQ ID NO: 157171 - DNA, 25 bp, Homo sapien
tgaccaaaagttgtggactgcatgc

SEQ ID NO: 157172 - DNA, 25 bp, Homo sapien
tgggcctcaggtccactgtgataga

SEQ ID NO: 157173 - DNA, 25 bp, Homo sapien
ctgcatgctgaaaatgacagtagcc

SEQ ID NO: 157174 - DNA, 25 bp, Homo sapien
gtagccaggtggactttgcagatgc

SEQ ID NO: 157175 - DNA, 25 bp, Homo sapien
tgacagagccttcaacccaaccaaa

SEQ ID NO: 157176 - DNA, 25 bp, Homo sapien
tcacttgacagagccttcaacccaa

SEQ ID NO: 157177 - DNA, 25 bp, Homo sapien
acttgacagagccttcaacccaacc

SEQ ID NO: 157178 - DNA, 25 bp, Homo sapien
ttgacagagccttcaacccaaccaa

SEQ ID NO: 157179 - DNA, 25 bp, Homo sapien
ctgatttggctttgttcaccaggga

SEQ ID NO: 157180 - DNA, 25 bp, Homo sapien
tctgatttggctttgttcaccaggg

SEQ ID NO: 157181 - DNA, 25 bp, Homo sapien
gaccagagcagctccgggcatgttt

SEQ ID NO: 157182 - DNA, 25 bp, Homo sapien
tctccactggcccaaggtgtttctg

SEQ ID NO: 157183 - DNA, 25 bp, Homo sapien
aactgtccctcagtggaccagagca

SEQ ID NO: 157184 - DNA, 25 bp, Homo sapien
cattcatagcacgtggtctcagcag

SEQ ID NO: 157185 - DNA, 25 bp, Homo sapien
gagctaaagagaaggatcctgctca

SEQ ID NO: 157186 - DNA, 25 bp, Homo sapien
agctaaagagaaggatcctgctcac

SEQ ID NO: 157187 - DNA, 25 bp, Homo sapien
ctgttgagattgaagccttccactg

SEQ ID NO: 157188 - DNA, 25 bp, Homo sapien
tgttgagattgaagccttccactga

SEQ ID NO: 157189 - DNA, 25 bp, Homo sapien
gttgagattgaagccttccactgac

SEQ ID NO: 157190 - DNA, 25 bp, Homo sapien
ttgagattgaagccttccactgact

SEQ ID NO: 157191 - DNA, 25 bp, Homo sapien
gaaagacctcggttctattgaggga

SEQ ID NO: 157192 - DNA, 25 bp, Homo sapien
cggttctattgagggactattctga

SEQ ID NO: 157193 - DNA, 25 bp, Homo sapien
attctgagaaggcacatggattcca

SEQ ID NO: 157194 - DNA, 25 bp, Homo sapien
agaatgacagtcctcagctatgggc

SEQ ID NO: 157195 - DNA, 25 bp, Homo sapien
caacagtagtaaacatcccgtttct

SEQ ID NO: 157196 - DNA, 25 bp, Homo sapien
tcatgagcccaagtagacatattct

SEQ ID NO: 157197 - DNA, 25 bp, Homo sapien
ggtgccctgaaattctatcctcatg

SEQ ID NO: 157198 - DNA, 25 bp, Homo sapien
aggaacagcaacagtagtaaacatc

SEQ ID NO: 157199 - DNA, 25 bp, Homo sapien
cactgagtcatcttggagcatccta

SEQ ID NO: 157200 - DNA, 25 bp, Homo sapien
ttagggattaccaaacactcccaca

SEQ ID NO: 157201 - DNA, 25 bp, Homo sapien
cctagaaacttctaggtggatggca

SEQ ID NO: 157202 - DNA, 25 bp, Homo sapien
tacctacattgtagagagctttagg

SEQ ID NO: 157203 - DNA, 25 bp, Homo sapien
cgtgtgtgggcttgtggactatcaa

SEQ ID NO: 157204 - DNA, 25 bp, Homo sapien
tctgagaacaattgccaatagtgtg

SEQ ID NO: 157205 - DNA, 25 bp, Homo sapien
tgtggactatcaaggagcccagggc

SEQ ID NO: 157206 - DNA, 25 bp, Homo sapien
tccactctgagaacaattgccaata

SEQ ID NO: 157207 - DNA, 25 bp, Homo sapien
cttgatacattgaatcacctgggtc

SEQ ID NO: 157208 - DNA, 25 bp, Homo sapien
tcttaggaccatggttcccactcaa

SEQ ID NO: 157209 - DNA, 25 bp, Homo sapien
attttgttgagagcacccaagcgcc

SEQ ID NO: 157210 - DNA, 25 bp, Homo sapien
cagcagggaggttgaccttgataca

SEQ ID NO: 157211 - DNA, 25 bp, Homo sapien
gggttggaggactggcctgtatctg

SEQ ID NO: 157212 - DNA, 25 bp, Homo sapien
tgaccctcagcagagcttcctcttt

SEQ ID NO: 157213 - DNA, 25 bp, Homo sapien
gctgccggtagccacagttacatgg

SEQ ID NO: 157214 - DNA, 25 bp, Homo sapien
cactacttcgtccaagctgccggta

SEQ ID NO: 157215 - DNA, 25 bp, Homo sapien
gcagtgtaaacgcagcagccttcct

SEQ ID NO: 157216 - DNA, 25 bp, Homo sapien
tcaggattggactaactgagcggaa

SEQ ID NO: 157217 - DNA, 25 bp, Homo sapien
ctctgaggatcaatgggccatcagt

SEQ ID NO: 157218 - DNA, 25 bp, Homo sapien
gcagctgagcgagggctccagatct

SEQ ID NO: 157219 - DNA, 25 bp, Homo sapien
gggctaaggccacatcaaaaagtat

SEQ ID NO: 157220 - DNA, 25 bp, Homo sapien
ttctggttcggcagccagggaaaaa

SEQ ID NO: 157221 - DNA, 25 bp, Homo sapien
aatgacccctttattcagtgaggaa

SEQ ID NO: 157222 - DNA, 25 bp, Homo sapien
acgaccgctgggctcatggacatgg

SEQ ID NO: 157223 - DNA, 25 bp, Homo sapien
tggtggctggactgattgtctatca

SEQ ID NO: 157224 - DNA, 25 bp, Homo sapien
cttaactgtaccaacgggatgctgg

SEQ ID NO: 157225 - DNA, 25 bp, Homo sapien
tatcactgtctcatccttaggcttc

SEQ ID NO: 157226 - DNA, 25 bp, Homo sapien
ggcttctcaaatctggagatgtaga

SEQ ID NO: 157227 - DNA, 25 bp, Homo sapien
ttctaacttttcaagaaggcctgaa

SEQ ID NO: 157228 - DNA, 25 bp, Homo sapien
caggtttctcggcagacattccaac

SEQ ID NO: 157229 - DNA, 25 bp, Homo sapien
caacctttgccaacatgtaagtggg

SEQ ID NO: 157230 - DNA, 25 bp, Homo sapien
agggaggctatccaccaggtttctc

SEQ ID NO: 157231 - DNA, 25 bp, Homo sapien
actgctctgggtcttgttagggaag

SEQ ID NO: 157232 - DNA, 25 bp, Homo sapien
gctctgggtcttgttagggaagaga

SEQ ID NO: 157233 - DNA, 25 bp, Homo sapien
tgctctgggtcttgttagggaagag

SEQ ID NO: 157234 - DNA, 25 bp, Homo sapien
ctgctctgggtcttgttagggaaga

SEQ ID NO: 157235 - DNA, 25 bp, Homo sapien
gaaggtctgggatcaagttgcagtt

SEQ ID NO: 157236 - DNA, 25 bp, Homo sapien
aaagtccagtcaagaccttcacagg

SEQ ID NO: 157237 - DNA, 25 bp, Homo sapien
cctgtgaccaggacggctgcattca

SEQ ID NO: 157238 - DNA, 25 bp, Homo sapien
atgaccataaagtccagtcaagacc

SEQ ID NO: 157239 - DNA, 25 bp, Homo sapien
tgctccacacctatctgcacaaaga

SEQ ID NO: 157240 - DNA, 25 bp, Homo sapien
tgtgtgtgtgaagggctcctgagaa

SEQ ID NO: 157241 - DNA, 25 bp, Homo sapien
tctgcacaaagacattgagtgtgtg

SEQ ID NO: 157242 - DNA, 25 bp, Homo sapien
aaagggcggtagtgcaaactgagcc

SEQ ID NO: 157243 - DNA, 25 bp, Homo sapien
ggaaatcaggcctaaaccaacaaga

SEQ ID NO: 157244 - DNA, 25 bp, Homo sapien
ccccacggtccacatgattgggagg

SEQ ID NO: 157245 - DNA, 25 bp, Homo sapien
tgtcctgccccttagcctttgcaag

SEQ ID NO: 157246 - DNA, 25 bp, Homo sapien
ttgggagggattcatcctggaaatc

SEQ ID NO: 157247 - DNA, 25 bp, Homo sapien
gattatacctgtctgagtaaaataa

SEQ ID NO: 157248 - DNA, 25 bp, Homo sapien
agacaagattatacctgtctgagta

SEQ ID NO: 157249 - DNA, 25 bp, Homo sapien
tatacctgtctgagtaaaataaggg

SEQ ID NO: 157250 - DNA, 25 bp, Homo sapien
caagattatacctgtctgagtaaaa

SEQ ID NO: 157251 - DNA, 25 bp, Homo sapien
tcagtccggtttctgcgagtttgct

SEQ ID NO: 157252 - DNA, 25 bp, Homo sapien
agtccggtttctgcgagtttgctga

SEQ ID NO: 157253 - DNA, 25 bp, Homo sapien
ccggtttctgcgagtttgctgaaca

SEQ ID NO: 157254 - DNA, 25 bp, Homo sapien
tccggtttctgcgagtttgctgaac

SEQ ID NO: 157255 - DNA, 25 bp, Homo sapien
acactcaatggcccttccttagccc

SEQ ID NO: 157256 - DNA, 25 bp, Homo sapien
cactcaatggcccttccttagccca

SEQ ID NO: 157257 - DNA, 25 bp, Homo sapien
actcaatggcccttccttagcccac

SEQ ID NO: 157258 - DNA, 25 bp, Homo sapien
gacactcaatggcccttccttagcc

SEQ ID NO: 157259 - DNA, 25 bp, Homo sapien
gtctctccctatggttgcgcagagg

SEQ ID NO: 157260 - DNA, 25 bp, Homo sapien
cctatggttgcgcagaggcatcctc

SEQ ID NO: 157261 - DNA, 25 bp, Homo sapien
ggcatcctcggtccccagcctttaa

SEQ ID NO: 157262 - DNA, 25 bp, Homo sapien
tggttgcgcagaggcatcctcggtc

SEQ ID NO: 157263 - DNA, 25 bp, Homo sapien
tgaccaagatgagctgagagcctct

SEQ ID NO: 157264 - DNA, 25 bp, Homo sapien
ctgaccaagatgagctgagagcctc

SEQ ID NO: 157265 - DNA, 25 bp, Homo sapien
tggaactgtgaggagagagtctact

SEQ ID NO: 157266 - DNA, 25 bp, Homo sapien
gggctggcggtgaggaggatggata

SEQ ID NO: 157267 - DNA, 25 bp, Homo sapien
tgcttcctggatttaggtcctggag

SEQ ID NO: 157268 - DNA, 25 bp, Homo sapien
gggatgctggctgagaatgctgctt

SEQ ID NO: 157269 - DNA, 25 bp, Homo sapien
gtggtttcgggtgaaaatctgccat

SEQ ID NO: 157270 - DNA, 25 bp, Homo sapien
gcgggctctggtggtttcgggtgaa

SEQ ID NO: 157271 - DNA, 25 bp, Homo sapien
caccagggccagcgcagagataagg

SEQ ID NO: 157272 - DNA, 25 bp, Homo sapien
gctctggtggtttcgggtgaaaatc

SEQ ID NO: 157273 - DNA, 25 bp, Homo sapien
ttcttcttcccaagactcaaagaat

SEQ ID NO: 157274 - DNA, 25 bp, Homo sapien
cagggcctcctcgacataacgtgga

SEQ ID NO: 157275 - DNA, 25 bp, Homo sapien
taacgtggaaatccttgacattgaa

SEQ ID NO: 157276 - DNA, 25 bp, Homo sapien
tgtaatggctggctcaaccctgagg

SEQ ID NO: 157277 - DNA, 25 bp, Homo sapien
gccctgtaatggctggctcaaccct

SEQ ID NO: 157278 - DNA, 25 bp, Homo sapien
tgcacagtgaacaacgtcttactcc

SEQ ID NO: 157279 - DNA, 25 bp, Homo sapien
gaacagaatgcacagtgaacaacgt

SEQ ID NO: 157280 - DNA, 25 bp, Homo sapien
cctcttcattgcacagctgaacaga

SEQ ID NO: 157281 - DNA, 25 bp, Homo sapien
gtgaacaacgtcttactccttgtgc

SEQ ID NO: 157282 - DNA, 25 bp, Homo sapien
tgtaatgacttcagccgccacagat

SEQ ID NO: 157283 - DNA, 25 bp, Homo sapien
aagcagactctttttcggtgtgcat

SEQ ID NO: 157284 - DNA, 25 bp, Homo sapien
agaaatgattgtaatgacttcagcc

SEQ ID NO: 157285 - DNA, 25 bp, Homo sapien
cactctggtcaacgtagatttagaa

SEQ ID NO: 157286 - DNA, 25 bp, Homo sapien
ccacgtccagcttgatacgttggga

SEQ ID NO: 157287 - DNA, 25 bp, Homo sapien
ggacctggcaggtagctccttgaaa

SEQ ID NO: 157288 - DNA, 25 bp, Homo sapien
tgggattttgccagacaggacctgg

SEQ ID NO: 157289 - DNA, 25 bp, Homo sapien
gctgatgactttcctagtgtggtcc

SEQ ID NO: 157290 - DNA, 25 bp, Homo sapien
cctgtcatcagcataggctgttctt

SEQ ID NO: 157291 - DNA, 25 bp, Homo sapien
cctgactcaggatcgtgggcagcaa

SEQ ID NO: 157292 - DNA, 25 bp, Homo sapien
gatgggtatctttagtcagccctga

SEQ ID NO: 157293 - DNA, 25 bp, Homo sapien
aaggcacttcaaaaggatgggtatc

SEQ ID NO: 157294 - DNA, 25 bp, Homo sapien
tgggctctccacaaggtgggtctgc

SEQ ID NO: 157295 - DNA, 25 bp, Homo sapien
cttgggctctccacaaggtgggtct

SEQ ID NO: 157296 - DNA, 25 bp, Homo sapien
tctccacaaggtgggtctgccggac

SEQ ID NO: 157297 - DNA, 25 bp, Homo sapien
caaggtgggtctgccggacacagac

SEQ ID NO: 157298 - DNA, 25 bp, Homo sapien
ctgaggatccctccagcatcttcag

SEQ ID NO: 157299 - DNA, 25 bp, Homo sapien
catcttcagggtgaggtcaccaggt

SEQ ID NO: 157300 - DNA, 25 bp, Homo sapien
tcttcagggtgaggtcaccaggtgc

SEQ ID NO: 157301 - DNA, 25 bp, Homo sapien
tccagcatcttcagggtgaggtcac

SEQ ID NO: 157302 - DNA, 25 bp, Homo sapien
ctgttgatgttgcattcggtgaagc

SEQ ID NO: 157303 - DNA, 25 bp, Homo sapien
ctggagatgccctgcaagtaatgag

SEQ ID NO: 157304 - DNA, 25 bp, Homo sapien
gccctgcaagtaatgagatgcacac

SEQ ID NO: 157305 - DNA, 25 bp, Homo sapien
cactggcatcgccactaggctgctg

SEQ ID NO: 157306 - DNA, 25 bp, Homo sapien
ctgaaaaacagatcggagacctcca

SEQ ID NO: 157307 - DNA, 25 bp, Homo sapien
atcggagacctccaatccatggcca

SEQ ID NO: 157308 - DNA, 25 bp, Homo sapien
aaacagatcggagacctccaatcca

SEQ ID NO: 157309 - DNA, 25 bp, Homo sapien
cagatcggagacctccaatccatgg

SEQ ID NO: 157310 - DNA, 25 bp, Homo sapien
tgcatggtaacacagcccagtgcag

SEQ ID NO: 157311 - DNA, 25 bp, Homo sapien
caattgggtgaccaccctggaggtc

SEQ ID NO: 157312 - DNA, 25 bp, Homo sapien
tggaggtcagcgtctatgcctgctt

SEQ ID NO: 157313 - DNA, 25 bp, Homo sapien
catgagtcgtgcctggaggtctgca

SEQ ID NO: 157314 - DNA, 25 bp, Homo sapien
ctctcagtcccatgacagaaaggat

SEQ ID NO: 157315 - DNA, 25 bp, Homo sapien
cctgactcataggagtccggtaacc

SEQ ID NO: 157316 - DNA, 25 bp, Homo sapien
ctggaatcctctcagtcccatgaca

SEQ ID NO: 157317 - DNA, 25 bp, Homo sapien
gaagtatctgatcctggctcacatc

SEQ ID NO: 157318 - DNA, 25 bp, Homo sapien
tggaagcacgggcgctgtctctgaa

SEQ ID NO: 157319 - DNA, 25 bp, Homo sapien
gaagacaaattgatcgtaacacaag

SEQ ID NO: 157320 - DNA, 25 bp, Homo sapien
cggtggaacgacctccatgctgaac

SEQ ID NO: 157321 - DNA, 25 bp, Homo sapien
caagcagacccggtggaacgacctc

SEQ ID NO: 157322 - DNA, 25 bp, Homo sapien
tcctgggggtccagtgtttgtctgt

SEQ ID NO: 157323 - DNA, 25 bp, Homo sapien
agatttggggatctgtccttcctgg

SEQ ID NO: 157324 - DNA, 25 bp, Homo sapien
ccaccaagcataaaggattacatcg

SEQ ID NO: 157325 - DNA, 25 bp, Homo sapien
tcatttccctttgatcaggcagttc

SEQ ID NO: 157326 - DNA, 25 bp, Homo sapien
agtcagcagcttccacgagttttga

SEQ ID NO: 157327 - DNA, 25 bp, Homo sapien
cagcagcttccacgagttttgatgc

SEQ ID NO: 157328 - DNA, 25 bp, Homo sapien
aggacaaagtcagcagcttccacga

SEQ ID NO: 157329 - DNA, 25 bp, Homo sapien
gacaaagtcagcagcttccacgagt

SEQ ID NO: 157330 - DNA, 25 bp, Homo sapien
tggattccaaatgttccaagtgttc

SEQ ID NO: 157331 - DNA, 25 bp, Homo sapien
ggcaaagccagtggattccaaatgt

SEQ ID NO: 157332 - DNA, 25 bp, Homo sapien
agccagtggattccaaatgttccaa

SEQ ID NO: 157333 - DNA, 25 bp, Homo sapien
gtgtggcaaagccagtggattccaa

SEQ ID NO: 157334 - DNA, 25 bp, Homo sapien
cacgagttttccgatttttcaccat

SEQ ID NO: 157335 - DNA, 25 bp, Homo sapien
acttagaaatagattgtgaacaggc

SEQ ID NO: 157336 - DNA, 25 bp, Homo sapien
tgggtggtgtcatttcactggacag

SEQ ID NO: 157337 - DNA, 25 bp, Homo sapien
gaatcaattcatgacggccacgagt

SEQ ID NO: 157338 - DNA, 25 bp, Homo sapien
catctggctcacatccaaggcttct

SEQ ID NO: 157339 - DNA, 25 bp, Homo sapien
tctggctcacatccaaggcttcttt

SEQ ID NO: 157340 - DNA, 25 bp, Homo sapien
gccttgatgacagacttcttcagtt

SEQ ID NO: 157341 - DNA, 25 bp, Homo sapien
ctgaggccttgatgacagacttctt

SEQ ID NO: 157342 - DNA, 25 bp, Homo sapien
catcaatgcctgactacatacgaca

SEQ ID NO: 157343 - DNA, 25 bp, Homo sapien
tatgtccccttcagaccagggaggg

SEQ ID NO: 157344 - DNA, 25 bp, Homo sapien
aatcaagactttgctgcctaacatg

SEQ ID NO: 157345 - DNA, 25 bp, Homo sapien
catgatctcatcttggcgagtatcc

SEQ ID NO: 157346 - DNA, 25 bp, Homo sapien
agtaaacaccgaaatgcagctgagg

SEQ ID NO: 157347 - DNA, 25 bp, Homo sapien
tgtgaacaggcgttttgtgaagcat

SEQ ID NO: 157348 - DNA, 25 bp, Homo sapien
tgtgaagcattgctaaacctagtgc

SEQ ID NO: 157349 - DNA, 25 bp, Homo sapien
tgaaaagcgaaaaccttctcttgtc

SEQ ID NO: 157350 - DNA, 25 bp, Homo sapien
gagggtgagctttggactgaacacc

SEQ ID NO: 157351 - DNA, 25 bp, Homo sapien
agctacgaggcttcccacaggcttg

SEQ ID NO: 157352 - DNA, 25 bp, Homo sapien
cacaggattccagttctccagtcaa

SEQ ID NO: 157353 - DNA, 25 bp, Homo sapien
caaaccaatgatgcttctttggccc

SEQ ID NO: 157354 - DNA, 25 bp, Homo sapien
tcactgcatgttggcctgaaacagg

SEQ ID NO: 157355 - DNA, 25 bp, Homo sapien
caacctctcaggtgcatttgctgag

SEQ ID NO: 157356 - DNA, 25 bp, Homo sapien
aacctctcaggtgcatttgctgagt

SEQ ID NO: 157357 - DNA, 25 bp, Homo sapien
cttctgtgagggatgtaagtagcca

SEQ ID NO: 157358 - DNA, 25 bp, Homo sapien
aaccttctgtgagggatgtaagtag

SEQ ID NO: 157359 - DNA, 25 bp, Homo sapien
ccttctgtgagggatgtaagtagcc

SEQ ID NO: 157360 - DNA, 25 bp, Homo sapien
tctgtgagggatgtaagtagccaac

SEQ ID NO: 157361 - DNA, 25 bp, Homo sapien
cagacatttatcacacgattcgctt

SEQ ID NO: 157362 - DNA, 25 bp, Homo sapien
agccttgtagaatgaaagcagaagc

SEQ ID NO: 157363 - DNA, 25 bp, Homo sapien
tatcacacgattcgctttagccttg

SEQ ID NO: 157364 - DNA, 25 bp, Homo sapien
cacgattcgctttagccttgtagaa

SEQ ID NO: 157365 - DNA, 25 bp, Homo sapien
gaaccagccctgtatccctttttca

SEQ ID NO: 157366 - DNA, 25 bp, Homo sapien
ttggaattccgttgaatgctggctc

SEQ ID NO: 157367 - DNA, 25 bp, Homo sapien
tgttcagaagtaccatgaggacact

SEQ ID NO: 157368 - DNA, 25 bp, Homo sapien
ttttgtatcaaccttaccatttgga

SEQ ID NO: 157369 - DNA, 25 bp, Homo sapien
atggctgaatcccacccagacctca

SEQ ID NO: 157370 - DNA, 25 bp, Homo sapien
aaatgaaacgaaaggccaccttcag

SEQ ID NO: 157371 - DNA, 25 bp, Homo sapien
cacccagacctcaaaaatgaaacga

SEQ ID NO: 157372 - DNA, 25 bp, Homo sapien
aatgaaacgaaaggccaccttcagg

SEQ ID NO: 157373 - DNA, 25 bp, Homo sapien
tgtggtgtggccttcgctcttgcag

SEQ ID NO: 157374 - DNA, 25 bp, Homo sapien
agatgccccgcagataccttgtggt

SEQ ID NO: 157375 - DNA, 25 bp, Homo sapien
tgtggccttcgctcttgcagggtct

SEQ ID NO: 157376 - DNA, 25 bp, Homo sapien
ccagatgccccgcagataccttgtg

SEQ ID NO: 157377 - DNA, 25 bp, Homo sapien
tgtctgtttcctcggtgacttccag

SEQ ID NO: 157378 - DNA, 25 bp, Homo sapien
gaaacttgatcccaaccctcaggtc

SEQ ID NO: 157379 - DNA, 25 bp, Homo sapien
tgtgcagaaacttgatcccaaccct

SEQ ID NO: 157380 - DNA, 25 bp, Homo sapien
cctttgtgcagaaacttgatcccaa

SEQ ID NO: 157381 - DNA, 25 bp, Homo sapien
ggagctgctgccgattctgcaaaca

SEQ ID NO: 157382 - DNA, 25 bp, Homo sapien
ctgcaaacacggcttctgcattctg

SEQ ID NO: 157383 - DNA, 25 bp, Homo sapien
aagtccttctaaggtcattcccagc

SEQ ID NO: 157384 - DNA, 25 bp, Homo sapien
ggaaccgccctgatccctcattaaa

SEQ ID NO: 157385 - DNA, 25 bp, Homo sapien
gcttggcttccttaacgtagacttg

SEQ ID NO: 157386 - DNA, 25 bp, Homo sapien
cttggcttccttaacgtagacttgc

SEQ ID NO: 157387 - DNA, 25 bp, Homo sapien
ttggcttccttaacgtagacttgct

SEQ ID NO: 157388 - DNA, 25 bp, Homo sapien
gcttccttaacgtagacttgctcat

SEQ ID NO: 157389 - DNA, 25 bp, Homo sapien
tcaatgcctcgtcttacaaatccat

SEQ ID NO: 157390 - DNA, 25 bp, Homo sapien
tgcctcgtcttacaaatccattttc

SEQ ID NO: 157391 - DNA, 25 bp, Homo sapien
tttcaatgcctcgtcttacaaatcc

SEQ ID NO: 157392 - DNA, 25 bp, Homo sapien
gcttttcaatgcctcgtcttacaaa

SEQ ID NO: 157393 - DNA, 25 bp, Homo sapien
cttggtacgctgatttttttctcca

SEQ ID NO: 157394 - DNA, 25 bp, Homo sapien
tccctgcttcttggtacgctgattt

SEQ ID NO: 157395 - DNA, 25 bp, Homo sapien
aaaccatgcagtcacactttccctg

SEQ ID NO: 157396 - DNA, 25 bp, Homo sapien
atgcagtcacactttccctgcttct

SEQ ID NO: 157397 - DNA, 25 bp, Homo sapien
tgaggtcaggtgtacggagggtggg

SEQ ID NO: 157398 - DNA, 25 bp, Homo sapien
gtgggttcttaaacaagtcatccca

SEQ ID NO: 157399 - DNA, 25 bp, Homo sapien
cagatcccaatgcatgaggtcaggt

SEQ ID NO: 157400 - DNA, 25 bp, Homo sapien
ctgtgagagggacgcagatcccaat

SEQ ID NO: 157401 - DNA, 25 bp, Homo sapien
gcttcctcctgaatatcgggcagaa

SEQ ID NO: 157402 - DNA, 25 bp, Homo sapien
ctttgcttcctcctgaatatcgggc

SEQ ID NO: 157403 - DNA, 25 bp, Homo sapien
tcctcctgaatatcgggcagaacag

SEQ ID NO: 157404 - DNA, 25 bp, Homo sapien
tgaatatcgggcagaacagccagcg

SEQ ID NO: 157405 - DNA, 25 bp, Homo sapien
tggatgctttccagaaggacagcac

SEQ ID NO: 157406 - DNA, 25 bp, Homo sapien
ctggatgctttccagaaggacagca

SEQ ID NO: 157407 - DNA, 25 bp, Homo sapien
tgcagttacacctggatattcccct

SEQ ID NO: 157408 - DNA, 25 bp, Homo sapien
ctgcagttacacctggatattcccc

SEQ ID NO: 157409 - DNA, 25 bp, Homo sapien
agttacacctggatattcccctctt

SEQ ID NO: 157410 - DNA, 25 bp, Homo sapien
gcagttacacctggatattcccctc

SEQ ID NO: 157411 - DNA, 25 bp, Homo sapien
tcatttacagccctcttaggccctt

SEQ ID NO: 157412 - DNA, 25 bp, Homo sapien
ttgttaagggaccaaagatgctgcc

SEQ ID NO: 157413 - DNA, 25 bp, Homo sapien
gcccttcaggagtaaagcaattgtg

SEQ ID NO: 157414 - DNA, 25 bp, Homo sapien
gatgctgccagtagatggaatctgt

SEQ ID NO: 157415 - DNA, 25 bp, Homo sapien
actgggcacatcgtgaataagactg

SEQ ID NO: 157416 - DNA, 25 bp, Homo sapien
gaacaagaaaacaggggcttcatct

SEQ ID NO: 157417 - DNA, 25 bp, Homo sapien
tgaggccagggagacaaaacctgtg

SEQ ID NO: 157418 - DNA, 25 bp, Homo sapien
ctgctccacagtgaacaagaaaaca

SEQ ID NO: 157419 - DNA, 25 bp, Homo sapien
aaagacatcatcaatttcctggaaa

SEQ ID NO: 157420 - DNA, 25 bp, Homo sapien
gctggccttgccctttactgccata

SEQ ID NO: 157421 - DNA, 25 bp, Homo sapien
tttgggctaggacccagcagctggc

SEQ ID NO: 157422 - DNA, 25 bp, Homo sapien
tcattttgggctaggacccagcagc

SEQ ID NO: 157423 - DNA, 25 bp, Homo sapien
cagttgacttagactcatctcaatg

SEQ ID NO: 157424 - DNA, 25 bp, Homo sapien
tgacccagttgacttagactcatct

SEQ ID NO: 157425 - DNA, 25 bp, Homo sapien
cccagttgacttagactcatctcaa

SEQ ID NO: 157426 - DNA, 25 bp, Homo sapien
caggtgacccagttgacttagactc

SEQ ID NO: 157427 - DNA, 25 bp, Homo sapien
tctttactgggttgaagtttgccat

SEQ ID NO: 157428 - DNA, 25 bp, Homo sapien
gataaaggtgatatggcacatcgtc

SEQ ID NO: 157429 - DNA, 25 bp, Homo sapien
tattgagcatcgactgtagggtagg

SEQ ID NO: 157430 - DNA, 25 bp, Homo sapien
gcatcgactgtagggtaggcaatgt

SEQ ID NO: 157431 - DNA, 25 bp, Homo sapien
gcaggcagctgaacccagaagtaaa

SEQ ID NO: 157432 - DNA, 25 bp, Homo sapien
agacaatggcaggagcggccttgga

SEQ ID NO: 157433 - DNA, 25 bp, Homo sapien
cagactgtgcatctcacgtgtgtgg

SEQ ID NO: 157434 - DNA, 25 bp, Homo sapien
tggagagccccgattgtcacctggc

SEQ ID NO: 157435 - DNA, 25 bp, Homo sapien
cagaaggaaaagatttcgaaattat

SEQ ID NO: 157436 - DNA, 25 bp, Homo sapien
caacttcctgtaattgcgaattatt

SEQ ID NO: 157437 - DNA, 25 bp, Homo sapien
gaattattgtgagggaaacagaagg

SEQ ID NO: 157438 - DNA, 25 bp, Homo sapien
ggaaaagatttcgaaattatgagcc

SEQ ID NO: 157439 - DNA, 25 bp, Homo sapien
gttgtctacacaacctaggcaggga

SEQ ID NO: 157440 - DNA, 25 bp, Homo sapien
tgcatgagcacaggtccgatggcac

SEQ ID NO: 157441 - DNA, 25 bp, Homo sapien
gcgagaccatcaggatcccaagggt

SEQ ID NO: 157442 - DNA, 25 bp, Homo sapien
gacacttgtctcagtaggcctggcg

SEQ ID NO: 157443 - DNA, 25 bp, Homo sapien
gcagtggattaatcaaagccttgag

SEQ ID NO: 157444 - DNA, 25 bp, Homo sapien
cctatggtgctggatgaaagtttaa

SEQ ID NO: 157445 - DNA, 25 bp, Homo sapien
taaaccaagtcaagcccaaggctgt

SEQ ID NO: 157446 - DNA, 25 bp, Homo sapien
caggtaagacgtcagtcactgtgga

SEQ ID NO: 157447 - DNA, 25 bp, Homo sapien
cagaagatttgaggatgcaaagcaa

SEQ ID NO: 157448 - DNA, 25 bp, Homo sapien
ttctaataagaaagcacggagatgc

SEQ ID NO: 157449 - DNA, 25 bp, Homo sapien
tcaaaaccgaataatattatcagct

SEQ ID NO: 157450 - DNA, 25 bp, Homo sapien
gcaaaatgactttcatatcagtttg

SEQ ID NO: 157451 - DNA, 25 bp, Homo sapien
aaagtggtgactcatagccttcagg

SEQ ID NO: 157452 - DNA, 25 bp, Homo sapien
tgggaagattcaatctagaaccttc

SEQ ID NO: 157453 - DNA, 25 bp, Homo sapien
agtggtgactcatagccttcaggtc

SEQ ID NO: 157454 - DNA, 25 bp, Homo sapien
tcaatctagaaccttctatctccat

SEQ ID NO: 157455 - DNA, 25 bp, Homo sapien
cagtgctggccttcgggccgtgcca

SEQ ID NO: 157456 - DNA, 25 bp, Homo sapien
tgggccagatggcaatccaagttgg

SEQ ID NO: 157457 - DNA, 25 bp, Homo sapien
cagatggcaatccaagttggtctga

SEQ ID NO: 157458 - DNA, 25 bp, Homo sapien
ttcgggccgtgccaggaaaatgtgt

SEQ ID NO: 157459 - DNA, 25 bp, Homo sapien
atactatgccacagaattaaaagag

SEQ ID NO: 157460 - DNA, 25 bp, Homo sapien
tttcagctcacaggaaaatttttaa

SEQ ID NO: 157461 - DNA, 25 bp, Homo sapien
gctaaatcgataagttaatacacac

SEQ ID NO: 157462 - DNA, 25 bp, Homo sapien
gagtgagactacataaagggactct

SEQ ID NO: 157463 - DNA, 25 bp, Homo sapien
atgacaccccctggactcagagact

SEQ ID NO: 157464 - DNA, 25 bp, Homo sapien
gactgggcttccatagcttgtctca

SEQ ID NO: 157465 - DNA, 25 bp, Homo sapien
gtctcccacgatgcctggacacaaa

SEQ ID NO: 157466 - DNA, 25 bp, Homo sapien
caaccgtatatatggctcttcctcc

SEQ ID NO: 157467 - DNA, 25 bp, Homo sapien
ctgtgcacaggatggagaagctact

SEQ ID NO: 157468 - DNA, 25 bp, Homo sapien
gcacaggatggagaagctacttcta

SEQ ID NO: 157469 - DNA, 25 bp, Homo sapien
gtgcacaggatggagaagctacttc

SEQ ID NO: 157470 - DNA, 25 bp, Homo sapien
acaggatggagaagctacttctatt

SEQ ID NO: 157471 - DNA, 25 bp, Homo sapien
gcttctgttccttccgacggtgcag

SEQ ID NO: 157472 - DNA, 25 bp, Homo sapien
tcaagactggcgttcaactgacaaa

SEQ ID NO: 157473 - DNA, 25 bp, Homo sapien
tcagcattgacttgatggcaggtcc

SEQ ID NO: 157474 - DNA, 25 bp, Homo sapien
ttggatcttgaagcccaggcattgt

SEQ ID NO: 157475 - DNA, 25 bp, Homo sapien
ttagccgctccaaagaaacactttc

SEQ ID NO: 157476 - DNA, 25 bp, Homo sapien
gtcacgtttatagctcgccctggaa

SEQ ID NO: 157477 - DNA, 25 bp, Homo sapien
aaccacaagccacggtgtcaactgg

SEQ ID NO: 157478 - DNA, 25 bp, Homo sapien
gaacgctccatgtggcggaggcttt

SEQ ID NO: 157479 - DNA, 25 bp, Homo sapien
tcatttctgactgaaccctcagcat

SEQ ID NO: 157480 - DNA, 25 bp, Homo sapien
ctggtcatttctgactgaaccctca

SEQ ID NO: 157481 - DNA, 25 bp, Homo sapien
tttctgactgaaccctcagcatctc

SEQ ID NO: 157482 - DNA, 25 bp, Homo sapien
tgactgaaccctcagcatctctgac

SEQ ID NO: 157483 - DNA, 25 bp, Homo sapien
gactgaaccctagttgtctctgact

SEQ ID NO: 157484 - DNA, 25 bp, Homo sapien
cagactgaaccctagttgtctctga

SEQ ID NO: 157485 - DNA, 25 bp, Homo sapien
gaaccctagttgtctctgactgaat

SEQ ID NO: 157486 - DNA, 25 bp, Homo sapien
aatctcagactgaaccctagttgtc

SEQ ID NO: 157487 - DNA, 25 bp, Homo sapien
tttcccttccactgcatgccttatg

SEQ ID NO: 157488 - DNA, 25 bp, Homo sapien
ttcccttccactgcatgccttatgc

SEQ ID NO: 157489 - DNA, 25 bp, Homo sapien
gctttcccttccactgcatgcctta

SEQ ID NO: 157490 - DNA, 25 bp, Homo sapien
cccttccactgcatgccttatgcat

SEQ ID NO: 157491 - DNA, 25 bp, Homo sapien
actttcttcatggaaagcttgcagc

SEQ ID NO: 157492 - DNA, 25 bp, Homo sapien
ctcatcttcccaatatagttaatat

SEQ ID NO: 157493 - DNA, 25 bp, Homo sapien
tctctttacacttcctgcgatggct

SEQ ID NO: 157494 - DNA, 25 bp, Homo sapien
tttacacttcctgcgatggctccca

SEQ ID NO: 157495 - DNA, 25 bp, Homo sapien
tgtgggcagctccaacatgactttc

SEQ ID NO: 157496 - DNA, 25 bp, Homo sapien
ttctggagtttgggccaccaggagt

SEQ ID NO: 157497 - DNA, 25 bp, Homo sapien
catgtcatccttgagagtgtgggca

SEQ ID NO: 157498 - DNA, 25 bp, Homo sapien
gccaccaggagtgggcgtacttctg

SEQ ID NO: 157499 - DNA, 25 bp, Homo sapien
taattggtgagctggattaccctcc

SEQ ID NO: 157500 - DNA, 25 bp, Homo sapien
tggtcaggtgtccaacagatgggtt

SEQ ID NO: 157501 - DNA, 25 bp, Homo sapien
tgacaaagcgctaactgaagacccc

SEQ ID NO: 157502 - DNA, 25 bp, Homo sapien
tcccatggccgtggcataatgaagc

SEQ ID NO: 157503 - DNA, 25 bp, Homo sapien
tcattgtattggcaaagaacttgag

SEQ ID NO: 157504 - DNA, 25 bp, Homo sapien
tccaggtacactcccctttaatgga

SEQ ID NO: 157505 - DNA, 25 bp, Homo sapien
tctgctctggttctagaaaggcagt

SEQ ID NO: 157506 - DNA, 25 bp, Homo sapien
tgttttggctttcgtgacactgtcc

SEQ ID NO: 157507 - DNA, 25 bp, Homo sapien
ccccatttggcatcataaagcacgc

SEQ ID NO: 157508 - DNA, 25 bp, Homo sapien
gcatcataaagcacgcgctcatgga

SEQ ID NO: 157509 - DNA, 25 bp, Homo sapien
agaaggccacagatcccccatttgg

SEQ ID NO: 157510 - DNA, 25 bp, Homo sapien
gcgctcatggacaaaagaaaccaga

SEQ ID NO: 157511 - DNA, 25 bp, Homo sapien
agctgttgtagggattggaaacacc

SEQ ID NO: 157512 - DNA, 25 bp, Homo sapien
ctgttgtagggattggaaacaccgg

SEQ ID NO: 157513 - DNA, 25 bp, Homo sapien
ttaagctgttgtagggattggaaac

SEQ ID NO: 157514 - DNA, 25 bp, Homo sapien
taagctgttgtagggattggaaaca

SEQ ID NO: 157515 - DNA, 25 bp, Homo sapien
ttggtcttgccttcagggtgcctga

SEQ ID NO: 157516 - DNA, 25 bp, Homo sapien
ctagcctcagcaggccaaccagggg

SEQ ID NO: 157517 - DNA, 25 bp, Homo sapien
aggcaccacccctagcctcagcagg

SEQ ID NO: 157518 - DNA, 25 bp, Homo sapien
caaccaggggtgctggggttggtct

SEQ ID NO: 157519 - DNA, 25 bp, Homo sapien
tacagttgagtgactgtcagacaag

SEQ ID NO: 157520 - DNA, 25 bp, Homo sapien
aggttgctcggttgctcccaagtgc

SEQ ID NO: 157521 - DNA, 25 bp, Homo sapien
tgaatgaccccatccgcaggttgct

SEQ ID NO: 157522 - DNA, 25 bp, Homo sapien
cttgggctgctgcatttacagttga

SEQ ID NO: 157523 - DNA, 25 bp, Homo sapien
ggctcccagcagtgaagctgacgat

SEQ ID NO: 157524 - DNA, 25 bp, Homo sapien
tatgcacacggcttgcctgaggacg

SEQ ID NO: 157525 - DNA, 25 bp, Homo sapien
cgtgcacaatgggagaccccaggtt

SEQ ID NO: 157526 - DNA, 25 bp, Homo sapien
agttgatggctgctgcaagccgcgt

SEQ ID NO: 157527 - DNA, 25 bp, Homo sapien
tgcagggctaagggacccatggaca

SEQ ID NO: 157528 - DNA, 25 bp, Homo sapien
ctgcagggctaagggacccatggac

SEQ ID NO: 157529 - DNA, 25 bp, Homo sapien
gcagggctaagggacccatggacat

SEQ ID NO: 157530 - DNA, 25 bp, Homo sapien
cctgcagggctaagggacccatgga

SEQ ID NO: 157531 - DNA, 25 bp, Homo sapien
caaagatcgtatcggtgaaactctg

SEQ ID NO: 157532 - DNA, 25 bp, Homo sapien
atctctcacaaggatagtaacaaag

SEQ ID NO: 157533 - DNA, 25 bp, Homo sapien
tgcacgctgctcctgcaagttgttt

SEQ ID NO: 157534 - DNA, 25 bp, Homo sapien
tagtaacaaagatcgtatcggtgaa

SEQ ID NO: 157535 - DNA, 25 bp, Homo sapien
aggggacgagcttgattctggctgc

SEQ ID NO: 157536 - DNA, 25 bp, Homo sapien
gacgagcttgattctggctgctgac

SEQ ID NO: 157537 - DNA, 25 bp, Homo sapien
tcaggaggggacgagcttgattctg

SEQ ID NO: 157538 - DNA, 25 bp, Homo sapien
aggaggggacgagcttgattctggc

SEQ ID NO: 157539 - DNA, 25 bp, Homo sapien
ccccgggacggatgctacctaatgt

SEQ ID NO: 157540 - DNA, 25 bp, Homo sapien
agctgagctgccactcaatcccagg

SEQ ID NO: 157541 - DNA, 25 bp, Homo sapien
tgcgatgctcgcttcacttccacaa

SEQ ID NO: 157542 - DNA, 25 bp, Homo sapien
gagcatgggaaatcggcaacagtcg

SEQ ID NO: 157543 - DNA, 25 bp, Homo sapien
tgagacattccctatgccacgacga

SEQ ID NO: 157544 - DNA, 25 bp, Homo sapien
tcttgctgcggcacttttccaggag

SEQ ID NO: 157545 - DNA, 25 bp, Homo sapien
tgccacgacgagcatgtcctcttgc

SEQ ID NO: 157546 - DNA, 25 bp, Homo sapien
gctccttcagtattctgaagtctgg

SEQ ID NO: 157547 - DNA, 25 bp, Homo sapien
gtctctgagctccttccagggaagg

SEQ ID NO: 157548 - DNA, 25 bp, Homo sapien
tccagggaaggagccataaacctgt

SEQ ID NO: 157549 - DNA, 25 bp, Homo sapien
gaaggagccataaacctgtggtcat

SEQ ID NO: 157550 - DNA, 25 bp, Homo sapien
agggaaggagccataaacctgtggt

SEQ ID NO: 157551 - DNA, 25 bp, Homo sapien
tgtcttcaagatctgaagccacaca

SEQ ID NO: 157552 - DNA, 25 bp, Homo sapien
aagatctgaagccacacagggtcct

SEQ ID NO: 157553 - DNA, 25 bp, Homo sapien
tgctgtcttcaagatctgaagccac

SEQ ID NO: 157554 - DNA, 25 bp, Homo sapien
tgaagccacacagggtcctttttca

SEQ ID NO: 157555 - DNA, 25 bp, Homo sapien
ttcacgtagctgactcttagctgac

SEQ ID NO: 157556 - DNA, 25 bp, Homo sapien
catatgcaagatgagtgctgcttca

SEQ ID NO: 157557 - DNA, 25 bp, Homo sapien
tctgacaacattgcatctcagccct

SEQ ID NO: 157558 - DNA, 25 bp, Homo sapien
tcttagctgacttaaaggtcttagc

SEQ ID NO: 157559 - DNA, 25 bp, Homo sapien
ggactgctcgattgccacagttcac

SEQ ID NO: 157560 - DNA, 25 bp, Homo sapien
cagaaatgcagggattgttgctctc

SEQ ID NO: 157561 - DNA, 25 bp, Homo sapien
ctctggggactgctcgattgccaca

SEQ ID NO: 157562 - DNA, 25 bp, Homo sapien
tgccacagttcaccccagatttcat

SEQ ID NO: 157563 - DNA, 25 bp, Homo sapien
ccatgaggcttaagtgttctaccac

SEQ ID NO: 157564 - DNA, 25 bp, Homo sapien
cctaccaggaattacgttgcataca

SEQ ID NO: 157565 - DNA, 25 bp, Homo sapien
tcttcaaaggcaggctaatgtgtgc

SEQ ID NO: 157566 - DNA, 25 bp, Homo sapien
gaaatgcggtatcatcagtagacag

SEQ ID NO: 157567 - DNA, 25 bp, Homo sapien
cagttttaagcccatcgcagtagag

SEQ ID NO: 157568 - DNA, 25 bp, Homo sapien
tataattggagccacagtttgcatg

SEQ ID NO: 157569 - DNA, 25 bp, Homo sapien
caagcaggcctatgctatggaaccc

SEQ ID NO: 157570 - DNA, 25 bp, Homo sapien
tatcgagcacacgagaatattcagg

SEQ ID NO: 157571 - DNA, 25 bp, Homo sapien
cctgcacgtcactgccccagctgtc

SEQ ID NO: 157572 - DNA, 25 bp, Homo sapien
cctgttggcggaattgttgttgact

SEQ ID NO: 157573 - DNA, 25 bp, Homo sapien
gtaggtcagaccgacttagtgttcc

SEQ ID NO: 157574 - DNA, 25 bp, Homo sapien
taaaacagtaattggcattcgcagc

SEQ ID NO: 157575 - DNA, 25 bp, Homo sapien
tagcccacggccctgttggcggaat

SEQ ID NO: 157576 - DNA, 25 bp, Homo sapien
cacacgacagggttctttgtttccg

SEQ ID NO: 157577 - DNA, 25 bp, Homo sapien
aagaccacatggtgtgcaggaaggt

SEQ ID NO: 157578 - DNA, 25 bp, Homo sapien
gtgcaggaaggtgggggccacacga

SEQ ID NO: 157579 - DNA, 25 bp, Homo sapien
aggaaggtgggggccacacgacagg

SEQ ID NO: 157580 - DNA, 25 bp, Homo sapien
aatcagataaaggctcctgaggagc

SEQ ID NO: 157581 - DNA, 25 bp, Homo sapien
ttcctttattggagtctcctggcat

SEQ ID NO: 157582 - DNA, 25 bp, Homo sapien
ggtgcaaccctcctggccttagaat

SEQ ID NO: 157583 - DNA, 25 bp, Homo sapien
ctttattggagtctcctggcatggg

SEQ ID NO: 157584 - DNA, 25 bp, Homo sapien
ggcacatccacgtcagtgagcctgg

SEQ ID NO: 157585 - DNA, 25 bp, Homo sapien
cttctgtggcacatccacgtcagtg

SEQ ID NO: 157586 - DNA, 25 bp, Homo sapien
tgtggcacatccacgtcagtgagcc

SEQ ID NO: 157587 - DNA, 25 bp, Homo sapien
cccagatctgggttcagccatcttc

SEQ ID NO: 157588 - DNA, 25 bp, Homo sapien
ggagcatttcagcaactttgatgct

SEQ ID NO: 157589 - DNA, 25 bp, Homo sapien
ctggctcttaggctggagcatttca

SEQ ID NO: 157590 - DNA, 25 bp, Homo sapien
gctcttaggctggagcatttcagca

SEQ ID NO: 157591 - DNA, 25 bp, Homo sapien
gcaactttgatgctgccataggact

SEQ ID NO: 157592 - DNA, 25 bp, Homo sapien
tcaggaacgtatctcagaggcattc

SEQ ID NO: 157593 - DNA, 25 bp, Homo sapien
catcttttctcaatatcaggaacgt

SEQ ID NO: 157594 - DNA, 25 bp, Homo sapien
tcagaggcattccaaggtccttctt

SEQ ID NO: 157595 - DNA, 25 bp, Homo sapien
tctcaatatcaggaacgtatctcag

SEQ ID NO: 157596 - DNA, 25 bp, Homo sapien
atacaacttggcgtcttcctttctg

SEQ ID NO: 157597 - DNA, 25 bp, Homo sapien
aagattggcaaggaatcctgtactt

SEQ ID NO: 157598 - DNA, 25 bp, Homo sapien
aaaagcctccttctattcacaatgg

SEQ ID NO: 157599 - DNA, 25 bp, Homo sapien
acaacttggcgtcttcctttctgtg

SEQ ID NO: 157600 - DNA, 25 bp, Homo sapien
cctagaacatcttctctcaactgtt

SEQ ID NO: 157601 - DNA, 25 bp, Homo sapien
taggtcccctcctagaacatcttct

SEQ ID NO: 157602 - DNA, 25 bp, Homo sapien
tgtgctttcagctccggtgcttccc

SEQ ID NO: 157603 - DNA, 25 bp, Homo sapien
tgttgcagaatgtcgtgtgctttca

SEQ ID NO: 157604 - DNA, 25 bp, Homo sapien
tgtaaagtttacagcccagggtcca

SEQ ID NO: 157605 - DNA, 25 bp, Homo sapien
gcagttcaggcaaattaccccttct

SEQ ID NO: 157606 - DNA, 25 bp, Homo sapien
cacgaaggacactgggagcgtaaca

SEQ ID NO: 157607 - DNA, 25 bp, Homo sapien
aattaccccttctacacattggctc

SEQ ID NO: 157608 - DNA, 25 bp, Homo sapien
gcagaggctccagcggaggacctac

SEQ ID NO: 157609 - DNA, 25 bp, Homo sapien
ggatggcagaggctccagcggagga

SEQ ID NO: 157610 - DNA, 25 bp, Homo sapien
tggcagaggctccagcggaggacct

SEQ ID NO: 157611 - DNA, 25 bp, Homo sapien
ctacgccgggatggcagaggctcca

SEQ ID NO: 157612 - DNA, 25 bp, Homo sapien
ttcacggaactcctcatagcatcgc

SEQ ID NO: 157613 - DNA, 25 bp, Homo sapien
ggaactcctcatagcatcgcctgta

SEQ ID NO: 157614 - DNA, 25 bp, Homo sapien
tctgggtcccacttatttccttcac

SEQ ID NO: 157615 - DNA, 25 bp, Homo sapien
cacttatttccttcacggaactcct

SEQ ID NO: 157616 - DNA, 25 bp, Homo sapien
gggcctgttgaattccactcctcag

SEQ ID NO: 157617 - DNA, 25 bp, Homo sapien
tttttgactatgtctctcaattcct

SEQ ID NO: 157618 - DNA, 25 bp, Homo sapien
cctgccacattccttttttgactat

SEQ ID NO: 157619 - DNA, 25 bp, Homo sapien
ttctgtcatcagagtggtaggtagc

SEQ ID NO: 157620 - DNA, 25 bp, Homo sapien
gaagcagcatttgtaggagaggctc

SEQ ID NO: 157621 - DNA, 25 bp, Homo sapien
ccggccggcaagcaggtctggactg

SEQ ID NO: 157622 - DNA, 25 bp, Homo sapien
tggactggaagcagcatttgtagga

SEQ ID NO: 157623 - DNA, 25 bp, Homo sapien
tcaaggtgtgctgacacaagagccg

SEQ ID NO: 157624 - DNA, 25 bp, Homo sapien
tgcaaagtcctagggcgagctgcca

SEQ ID NO: 157625 - DNA, 25 bp, Homo sapien
ggatttgaggataaagtagtgcccc

SEQ ID NO: 157626 - DNA, 25 bp, Homo sapien
cacaggacagccaatttactcatgg

SEQ ID NO: 157627 - DNA, 25 bp, Homo sapien
gagctgccacaagccagccagtgtt

SEQ ID NO: 157628 - DNA, 25 bp, Homo sapien
tgcataagccaagttggagaggcag

SEQ ID NO: 157629 - DNA, 25 bp, Homo sapien
aaggagagacacagcttgcggacac

SEQ ID NO: 157630 - DNA, 25 bp, Homo sapien
gaaggagagacacagcttgcggaca

SEQ ID NO: 157631 - DNA, 25 bp, Homo sapien
gattgtttgcataagccaagttgga

SEQ ID NO: 157632 - DNA, 25 bp, Homo sapien
cctccgatactttaaacagcactgg

SEQ ID NO: 157633 - DNA, 25 bp, Homo sapien
attgctggtaccattgacctcattg

SEQ ID NO: 157634 - DNA, 25 bp, Homo sapien
gcctgctggtcctccgatactttaa

SEQ ID NO: 157635 - DNA, 25 bp, Homo sapien
gctggtaccattgacctcattgttt

SEQ ID NO: 157636 - DNA, 25 bp, Homo sapien
tataaatgtgtgtgagcctggcgaa

SEQ ID NO: 157637 - DNA, 25 bp, Homo sapien
ctggtgtcactatgtctgctgttgc

SEQ ID NO: 157638 - DNA, 25 bp, Homo sapien
tttgtctcggtaaatattgacagac

SEQ ID NO: 157639 - DNA, 25 bp, Homo sapien
acagactcactctctctacttgcag

SEQ ID NO: 157640 - DNA, 25 bp, Homo sapien
gcaacaggctgtggaagacttattg

SEQ ID NO: 157641 - DNA, 25 bp, Homo sapien
cagaggcaatgcgattccgagtgaa

SEQ ID NO: 157642 - DNA, 25 bp, Homo sapien
gaacaatggcttgcctgatagcaac

SEQ ID NO: 157643 - DNA, 25 bp, Homo sapien
tctgaattttgtttcgtgcactgca

SEQ ID NO: 157644 - DNA, 25 bp, Homo sapien
tgtgccactgagaatcttcagggtt

SEQ ID NO: 157645 - DNA, 25 bp, Homo sapien
ctctggcttcagcaactacaggcct

SEQ ID NO: 157646 - DNA, 25 bp, Homo sapien
tcttccgttggcatcgctgggaact

SEQ ID NO: 157647 - DNA, 25 bp, Homo sapien
tctggcttcagcaactacaggcctt

SEQ ID NO: 157648 - DNA, 25 bp, Homo sapien
ggccttcttccgttggcatcgctgg

SEQ ID NO: 157649 - DNA, 25 bp, Homo sapien
ggtgggaagaagtggagatccacac

SEQ ID NO: 157650 - DNA, 25 bp, Homo sapien
gaggtgggaagaagtggagatccac

SEQ ID NO: 157651 - DNA, 25 bp, Homo sapien
aggaggtgggaagaagtggagatcc

SEQ ID NO: 157652 - DNA, 25 bp, Homo sapien
ctaaacacaggtatgggaggggctt

SEQ ID NO: 157653 - DNA, 25 bp, Homo sapien
caagatggtgagagaggcgagagca

SEQ ID NO: 157654 - DNA, 25 bp, Homo sapien
gcaatcagctcaggtatgcttgcca

SEQ ID NO: 157655 - DNA, 25 bp, Homo sapien
agggtgacgatgatgtactcaagat

SEQ ID NO: 157656 - DNA, 25 bp, Homo sapien
tgagagaggcgagagcaatcagctc

SEQ ID NO: 157657 - DNA, 25 bp, Homo sapien
ttcttcggctcccatcaaagccaag

SEQ ID NO: 157658 - DNA, 25 bp, Homo sapien
gagatgactgattaattgcttttgc

SEQ ID NO: 157659 - DNA, 25 bp, Homo sapien
tcacttgcttcttcggctcccatca

SEQ ID NO: 157660 - DNA, 25 bp, Homo sapien
gagagtctcagggagatgactgatt

SEQ ID NO: 157661 - DNA, 25 bp, Homo sapien
tgctaattgcagcagaccctctgcc

SEQ ID NO: 157662 - DNA, 25 bp, Homo sapien
catgccttgccatcgttcttctggg

SEQ ID NO: 157663 - DNA, 25 bp, Homo sapien
gatgcatagcccaagacaccaatgg

SEQ ID NO: 157664 - DNA, 25 bp, Homo sapien
agagagccgctgactttgcatgagt

SEQ ID NO: 157665 - DNA, 25 bp, Homo sapien
gaaagtcacatttggcttcatgtgt

SEQ ID NO: 157666 - DNA, 25 bp, Homo sapien
taatctcgaggcacatgtccattca

SEQ ID NO: 157667 - DNA, 25 bp, Homo sapien
ccacgctgcttgtgagtccttctgt

SEQ ID NO: 157668 - DNA, 25 bp, Homo sapien
aattgaaagcaggatttggccccag

SEQ ID NO: 157669 - DNA, 25 bp, Homo sapien
cagtagacactgagattcttggaaa

SEQ ID NO: 157670 - DNA, 25 bp, Homo sapien
gcctgtttgctccagtagacactga

SEQ ID NO: 157671 - DNA, 25 bp, Homo sapien
ttggaaacataaacgattgttgagc

SEQ ID NO: 157672 - DNA, 25 bp, Homo sapien
ttgacaagcctgtttgctccagtag

SEQ ID NO: 157673 - DNA, 25 bp, Homo sapien
ctgatacatcctaatggatgcacac

SEQ ID NO: 157674 - DNA, 25 bp, Homo sapien
ctgacagccttttgaacttcctata

SEQ ID NO: 157675 - DNA, 25 bp, Homo sapien
tggctccaacctgacagccttttga

SEQ ID NO: 157676 - DNA, 25 bp, Homo sapien
catcctaatggatgcacacctcttc

SEQ ID NO: 157677 - DNA, 25 bp, Homo sapien
gcaaaatttgccctgatgatcttat

SEQ ID NO: 157678 - DNA, 25 bp, Homo sapien
tacagcaaaatttgccctgatgatc

SEQ ID NO: 157679 - DNA, 25 bp, Homo sapien
tttggggacaacaattgtctcctcc

SEQ ID NO: 157680 - DNA, 25 bp, Homo sapien
ttgccctgatgatcttattctttgg

SEQ ID NO: 157681 - DNA, 25 bp, Homo sapien
gacagagtgaatagcgggtaacatc

SEQ ID NO: 157682 - DNA, 25 bp, Homo sapien
gacgacagagtgaatagcgggtaac

SEQ ID NO: 157683 - DNA, 25 bp, Homo sapien
tgaatagcgggtaacatcatcccca

SEQ ID NO: 157684 - DNA, 25 bp, Homo sapien
cttccttgacgacagagtgaatagc

SEQ ID NO: 157685 - DNA, 25 bp, Homo sapien
ggaaaagagagtcagtcgtgcggat

SEQ ID NO: 157686 - DNA, 25 bp, Homo sapien
gtggaaaagagagtcagtcgtgcgg

SEQ ID NO: 157687 - DNA, 25 bp, Homo sapien
agtcagtcgtgcggatgtgtgtcat

SEQ ID NO: 157688 - DNA, 25 bp, Homo sapien
aaaagagagtcagtcgtgcggatgt

SEQ ID NO: 157689 - DNA, 25 bp, Homo sapien
tgaagtccgggatttctctggaaca

SEQ ID NO: 157690 - DNA, 25 bp, Homo sapien
aagtccgggatttctctggaacagc

SEQ ID NO: 157691 - DNA, 25 bp, Homo sapien
ctgcgagacaaggcgaagcaggtgt

SEQ ID NO: 157692 - DNA, 25 bp, Homo sapien
gaagtccgggatttctctggaacag

SEQ ID NO: 157693 - DNA, 25 bp, Homo sapien
cattcggctagaggaagtgtttttt

SEQ ID NO: 157694 - DNA, 25 bp, Homo sapien
ggaagaagagcaggcagtagcgaag

SEQ ID NO: 157695 - DNA, 25 bp, Homo sapien
gtgggaagaagagcaggcagtagcg

SEQ ID NO: 157696 - DNA, 25 bp, Homo sapien
tgggaagaagagcaggcagtagcga

SEQ ID NO: 157697 - DNA, 25 bp, Homo sapien
aagaagagcaggcagtagcgaaggc

SEQ ID NO: 157698 - DNA, 25 bp, Homo sapien
ttaacagagaaggtgacgtgaggct

SEQ ID NO: 157699 - DNA, 25 bp, Homo sapien
cttaacagagaaggtgacgtgaggc

SEQ ID NO: 157700 - DNA, 25 bp, Homo sapien
aggacttaacagagaaggtgacgtg

SEQ ID NO: 157701 - DNA, 25 bp, Homo sapien
tagacgtcactgtttccttcaatat

SEQ ID NO: 157702 - DNA, 25 bp, Homo sapien
ttgctttctgattatgccatagaac

SEQ ID NO: 157703 - DNA, 25 bp, Homo sapien
aaagccatagacgtcactgtttcct

SEQ ID NO: 157704 - DNA, 25 bp, Homo sapien
gccttttgctttctgattatgccat

SEQ ID NO: 157705 - DNA, 25 bp, Homo sapien
gaatgatagcgggaatggatgttca

SEQ ID NO: 157706 - DNA, 25 bp, Homo sapien
tatccagtgcattggaaggactgtc

SEQ ID NO: 157707 - DNA, 25 bp, Homo sapien
tcgaaggtggaccagtggaatgata

SEQ ID NO: 157708 - DNA, 25 bp, Homo sapien
gacaatcggtaattagggcacggga

SEQ ID NO: 157709 - DNA, 25 bp, Homo sapien
gatgcccgagagttggggtctgagg

SEQ ID NO: 157710 - DNA, 25 bp, Homo sapien
gggatgcccgagagttggggtctga

SEQ ID NO: 157711 - DNA, 25 bp, Homo sapien
gaaaatgaccatggatcaggggatg

SEQ ID NO: 157712 - DNA, 25 bp, Homo sapien
aatgaccatggatcaggggatgccc

SEQ ID NO: 157713 - DNA, 25 bp, Homo sapien
tagttgagaacattggcgaagctgt

SEQ ID NO: 157714 - DNA, 25 bp, Homo sapien
ctagttgagaacattggcgaagctg

SEQ ID NO: 157715 - DNA, 25 bp, Homo sapien
ggagctctttgaactgatcggccgt

SEQ ID NO: 157716 - DNA, 25 bp, Homo sapien
ctttgaactgatcggccgttttgac

SEQ ID NO: 157717 - DNA, 25 bp, Homo sapien
gatcggccgttttgacggaaagcat

SEQ ID NO: 157718 - DNA, 25 bp, Homo sapien
actgatcggccgttttgacggaaag

SEQ ID NO: 157719 - DNA, 25 bp, Homo sapien
cactgatcaagcgacagacactcct

SEQ ID NO: 157720 - DNA, 25 bp, Homo sapien
ctgcatgaccccactgatcaagcga

SEQ ID NO: 157721 - DNA, 25 bp, Homo sapien
tgaccccactgatcaagcgacagac

SEQ ID NO: 157722 - DNA, 25 bp, Homo sapien
tgatcaagcgacagacactcctcca

SEQ ID NO: 157723 - DNA, 25 bp, Homo sapien
aatcctgttgcatcgctgacagcca

SEQ ID NO: 157724 - DNA, 25 bp, Homo sapien
tctgtcttggacacactgtagagaa

SEQ ID NO: 157725 - DNA, 25 bp, Homo sapien
ctgtagagaataagcaggttgctga

SEQ ID NO: 157726 - DNA, 25 bp, Homo sapien
cacagagcctttgaacattgaccag

SEQ ID NO: 157727 - DNA, 25 bp, Homo sapien
tgctcacctccagcgtcttaagaca

SEQ ID NO: 157728 - DNA, 25 bp, Homo sapien
tcaaatctggatatcgcacatagct

SEQ ID NO: 157729 - DNA, 25 bp, Homo sapien
tctggatatcgcacatagctgactg

SEQ ID NO: 157730 - DNA, 25 bp, Homo sapien
gtcctgccaagtcctccgcggtgct

SEQ ID NO: 157731 - DNA, 25 bp, Homo sapien
tgacagatatttccccaaatcgtgt

SEQ ID NO: 157732 - DNA, 25 bp, Homo sapien
cagatatttccccaaatcgtgtctc

SEQ ID NO: 157733 - DNA, 25 bp, Homo sapien
aatgacagatatttccccaaatcgt

SEQ ID NO: 157734 - DNA, 25 bp, Homo sapien
gatatttccccaaatcgtgtctcca

SEQ ID NO: 157735 - DNA, 25 bp, Homo sapien
ttactgaacttgtggaggtcttgca

SEQ ID NO: 157736 - DNA, 25 bp, Homo sapien
caaacaggacggtctgcacctcctg

SEQ ID NO: 157737 - DNA, 25 bp, Homo sapien
gtcttgcaaacaggacggtctgcac

SEQ ID NO: 157738 - DNA, 25 bp, Homo sapien
aacttgtggaggtcttgcaaacagg

SEQ ID NO: 157739 - DNA, 25 bp, Homo sapien
gggaccagtaagcagatggagcagt

SEQ ID NO: 157740 - DNA, 25 bp, Homo sapien
cagtgctgcgtgacaagggctttgc

SEQ ID NO: 157741 - DNA, 25 bp, Homo sapien
aggtgagggcgtacacacgacgccc

SEQ ID NO: 157742 - DNA, 25 bp, Homo sapien
cacacgacgcccaaggctggagagt

SEQ ID NO: 157743 - DNA, 25 bp, Homo sapien
ctggatcatcagtcaggcttctgaa

SEQ ID NO: 157744 - DNA, 25 bp, Homo sapien
catcagtcaggcttctgaagcccat

SEQ ID NO: 157745 - DNA, 25 bp, Homo sapien
gatcatcagtcaggcttctgaagcc

SEQ ID NO: 157746 - DNA, 25 bp, Homo sapien
tggatcatcagtcaggcttctgaag

SEQ ID NO: 157747 - DNA, 25 bp, Homo sapien
ttgaagggttttggtgtccacagcc

SEQ ID NO: 157748 - DNA, 25 bp, Homo sapien
cagagtgtgccatatggctggcttt

SEQ ID NO: 157749 - DNA, 25 bp, Homo sapien
ccacagcccttgaggtcatccaaag

SEQ ID NO: 157750 - DNA, 25 bp, Homo sapien
caaaggtattgctccaagcagagtg

SEQ ID NO: 157751 - DNA, 25 bp, Homo sapien
tatagccttgcccattgtacgatct

SEQ ID NO: 157752 - DNA, 25 bp, Homo sapien
ccattaatgatagaagccaggttgt

SEQ ID NO: 157753 - DNA, 25 bp, Homo sapien
ccttgatttgcgagcacagcttaga

SEQ ID NO: 157754 - DNA, 25 bp, Homo sapien
ttgaggccacatgacctgttgctgg

SEQ ID NO: 157755 - DNA, 25 bp, Homo sapien
cccctgggttgtcagtgcacaggag

SEQ ID NO: 157756 - DNA, 25 bp, Homo sapien
cacccctgggttgtcagtgcacagg

SEQ ID NO: 157757 - DNA, 25 bp, Homo sapien
tgcacccctgggttgtcagtgcaca

SEQ ID NO: 157758 - DNA, 25 bp, Homo sapien
ctgatgcacccctgggttgtcagtg

SEQ ID NO: 157759 - DNA, 25 bp, Homo sapien
tacccacttgagcttgaatctgaac

SEQ ID NO: 157760 - DNA, 25 bp, Homo sapien
ttacccacttgagcttgaatctgaa

SEQ ID NO: 157761 - DNA, 25 bp, Homo sapien
acccacttgagcttgaatctgaaca

SEQ ID NO: 157762 - DNA, 25 bp, Homo sapien
gaggaaagcggtgggtatttactga

SEQ ID NO: 157763 - DNA, 25 bp, Homo sapien
tgccagcacaactattcatctgcat

SEQ ID NO: 157764 - DNA, 25 bp, Homo sapien
gtgcctcccctaatccagccttgga

SEQ ID NO: 157765 - DNA, 25 bp, Homo sapien
gcctcccctaatccagccttggagg

SEQ ID NO: 157766 - DNA, 25 bp, Homo sapien
tatcaggatggctaacaatggatga

SEQ ID NO: 157767 - DNA, 25 bp, Homo sapien
catgtctgttttagaccattcacag

SEQ ID NO: 157768 - DNA, 25 bp, Homo sapien
gctgcttgttaattcagaaccaaaa

SEQ ID NO: 157769 - DNA, 25 bp, Homo sapien
gccaacaatgtgtctattacatgcc

SEQ ID NO: 157770 - DNA, 25 bp, Homo sapien
tggagccaccataagagtaggagct

SEQ ID NO: 157771 - DNA, 25 bp, Homo sapien
agacacgtgcagaacctgtgtttac

SEQ ID NO: 157772 - DNA, 25 bp, Homo sapien
gggctgaacttagacacgtgcagaa

SEQ ID NO: 157773 - DNA, 25 bp, Homo sapien
taggagctgtctggaaataagttct

SEQ ID NO: 157774 - DNA, 25 bp, Homo sapien
agaaatctgtgtcgcccccagttaa

SEQ ID NO: 157775 - DNA, 25 bp, Homo sapien
cacagaaatctgtgtcgcccccagt

SEQ ID NO: 157776 - DNA, 25 bp, Homo sapien
aatctgtgtcgcccccagttaatct

SEQ ID NO: 157777 - DNA, 25 bp, Homo sapien
atctgtgtcgcccccagttaatctt

SEQ ID NO: 157778 - DNA, 25 bp, Homo sapien
gggagaagtcttcagcactcaaagt

SEQ ID NO: 157779 - DNA, 25 bp, Homo sapien
gtcttcagatttcacacccagctca

SEQ ID NO: 157780 - DNA, 25 bp, Homo sapien
tggaatctgcatggggacagttagg

SEQ ID NO: 157781 - DNA, 25 bp, Homo sapien
ggcagatgcctctgatgtgtggatc

SEQ ID NO: 157782 - DNA, 25 bp, Homo sapien
tgggccttcagtgcttgcctctaca

SEQ ID NO: 157783 - DNA, 25 bp, Homo sapien
ccagtcgtactggaagcaattgatt

SEQ ID NO: 157784 - DNA, 25 bp, Homo sapien
tggctcccacggctgatcatgggcc

SEQ ID NO: 157785 - DNA, 25 bp, Homo sapien
aagcaattgattcccgtggctccca

SEQ ID NO: 157786 - DNA, 25 bp, Homo sapien
tccctgcttatgtggcctggcagct

SEQ ID NO: 157787 - DNA, 25 bp, Homo sapien
cggctttgttccctgcttatgtggc

SEQ ID NO: 157788 - DNA, 25 bp, Homo sapien
ttgccccaggctctttccgatgcat

SEQ ID NO: 157789 - DNA, 25 bp, Homo sapien
cttgccccaggctctttccgatgca

SEQ ID NO: 157790 - DNA, 25 bp, Homo sapien
cttgttatgtcttaggctctgcagg

SEQ ID NO: 157791 - DNA, 25 bp, Homo sapien
gccttggtgagcgtcagggcatgct

SEQ ID NO: 157792 - DNA, 25 bp, Homo sapien
tggctcactgatgggcgtgtgatca

SEQ ID NO: 157793 - DNA, 25 bp, Homo sapien
gggcatttcccttcaccaagttggc

SEQ ID NO: 157794 - DNA, 25 bp, Homo sapien
ctgtacagaaacaggtagagcactc

SEQ ID NO: 157795 - DNA, 25 bp, Homo sapien
gtacagaaacaggtagagcactcac

SEQ ID NO: 157796 - DNA, 25 bp, Homo sapien
tgtacagaaacaggtagagcactca

SEQ ID NO: 157797 - DNA, 25 bp, Homo sapien
agttcctttgaacagctgcttaaat

SEQ ID NO: 157798 - DNA, 25 bp, Homo sapien
aaatcttggtgtagcacaaaatgca

SEQ ID NO: 157799 - DNA, 25 bp, Homo sapien
cctttgaacagctgcttaaatcttg

SEQ ID NO: 157800 - DNA, 25 bp, Homo sapien
gagatggtcgaagcagacattattt

SEQ ID NO: 157801 - DNA, 25 bp, Homo sapien
taagatcactcgacaagcacatatg

SEQ ID NO: 157802 - DNA, 25 bp, Homo sapien
tctggaagtgtcagcacgagcgtcc

SEQ ID NO: 157803 - DNA, 25 bp, Homo sapien
gacatatgcataagcctcacggaca

SEQ ID NO: 157804 - DNA, 25 bp, Homo sapien
gttgctgtaagtgcttggcccacag

SEQ ID NO: 157805 - DNA, 25 bp, Homo sapien
tgatgactccaagggacctgtagct

SEQ ID NO: 157806 - DNA, 25 bp, Homo sapien
attttcactacggtatgtcacaggg

SEQ ID NO: 157807 - DNA, 25 bp, Homo sapien
gggtcgcaaatgcaacattacctac

SEQ ID NO: 157808 - DNA, 25 bp, Homo sapien
ggttaccgtctatgtatcctgatga

SEQ ID NO: 157809 - DNA, 25 bp, Homo sapien
cattatcatcataaggggagcaaac

SEQ ID NO: 157810 - DNA, 25 bp, Homo sapien
tgttcaatgaacctgctactgttgt

SEQ ID NO: 157811 - DNA, 25 bp, Homo sapien
tgctactgttgttatcattatcatc

SEQ ID NO: 157812 - DNA, 25 bp, Homo sapien
aggtgacgggtgttcaatgaacctg

SEQ ID NO: 157813 - DNA, 25 bp, Homo sapien
tcatacaggttcaagaagaccagga

SEQ ID NO: 157814 - DNA, 25 bp, Homo sapien
tgtatctcatggtcaaatccagtgg

SEQ ID NO: 157815 - DNA, 25 bp, Homo sapien
caaatgtcctggttgttgtatctca

SEQ ID NO: 157816 - DNA, 25 bp, Homo sapien
gcctggagatccttaggaagctgtt

SEQ ID NO: 157817 - DNA, 25 bp, Homo sapien
caaaggaagcacttcaggatgttat

SEQ ID NO: 157818 - DNA, 25 bp, Homo sapien
gaaccaaaggaagcacttcaggatg

SEQ ID NO: 157819 - DNA, 25 bp, Homo sapien
tggttctgatggaaccaaaggaagc

SEQ ID NO: 157820 - DNA, 25 bp, Homo sapien
tttggttctgatggaaccaaaggaa

SEQ ID NO: 157821 - DNA, 25 bp, Homo sapien
tagacctccacctgcggatttggat

SEQ ID NO: 157822 - DNA, 25 bp, Homo sapien
tctttctgggcttagctcctgatcc

SEQ ID NO: 157823 - DNA, 25 bp, Homo sapien
gctgcccgtggacttacaatttgaa

SEQ ID NO: 157824 - DNA, 25 bp, Homo sapien
gaaaggctccatcctacatccgatg

SEQ ID NO: 157825 - DNA, 25 bp, Homo sapien
tttcagatatggccgcagaagctgc

SEQ ID NO: 157826 - DNA, 25 bp, Homo sapien
ctttcagatatggccgcagaagctg

SEQ ID NO: 157827 - DNA, 25 bp, Homo sapien
ttcaatgcgcctgctcactttcaga

SEQ ID NO: 157828 - DNA, 25 bp, Homo sapien
gattcaatgcgcctgctcactttca

SEQ ID NO: 157829 - DNA, 25 bp, Homo sapien
caaattcagtgtggatgctttctct

SEQ ID NO: 157830 - DNA, 25 bp, Homo sapien
cggttggtggatccagttgtgttct

SEQ ID NO: 157831 - DNA, 25 bp, Homo sapien
tgaacggtggatccagttgtgttcc

SEQ ID NO: 157832 - DNA, 25 bp, Homo sapien
tgatcttgaaatcatcacgtgagac

SEQ ID NO: 157833 - DNA, 25 bp, Homo sapien
ttatttaaggtcctctctgacactg

SEQ ID NO: 157834 - DNA, 25 bp, Homo sapien
tggaggcgtgcagataatgtgttat

SEQ ID NO: 157835 - DNA, 25 bp, Homo sapien
tcatcataatcatcgttgatttcat

SEQ ID NO: 157836 - DNA, 25 bp, Homo sapien
tttcatcccagtattggaggcgtgc

SEQ ID NO: 157837 - DNA, 25 bp, Homo sapien
acaggtgtatggcagggaggactcc

SEQ ID NO: 157838 - DNA, 25 bp, Homo sapien
gctcacaggtgtatggcagggagga

SEQ ID NO: 157839 - DNA, 25 bp, Homo sapien
cacaggccacacaagcccttcccag

SEQ ID NO: 157840 - DNA, 25 bp, Homo sapien
gctgaagggctcacaggtgtatggc

SEQ ID NO: 157841 - DNA, 25 bp, Homo sapien
ctgtgaaagttgaggtctaaggcag

SEQ ID NO: 157842 - DNA, 25 bp, Homo sapien
tccagaaggagacatggttacattt

SEQ ID NO: 157843 - DNA, 25 bp, Homo sapien
gaggattagagcctcttttggcaaa

SEQ ID NO: 157844 - DNA, 25 bp, Homo sapien
tcacggatgagctgactccagaagg

SEQ ID NO: 157845 - DNA, 25 bp, Homo sapien
gaggtcaagggaatctcacggatga

SEQ ID NO: 157846 - DNA, 25 bp, Homo sapien
ggtaagtggcagatggctccatcag

SEQ ID NO: 157847 - DNA, 25 bp, Homo sapien
cccaactccaagagggcaggttgaa

SEQ ID NO: 157848 - DNA, 25 bp, Homo sapien
ctccatcagaggtgaggagggcaac

SEQ ID NO: 157849 - DNA, 25 bp, Homo sapien
ctagttgaggatgcaggtaagtggc

SEQ ID NO: 157850 - DNA, 25 bp, Homo sapien
gaacaaagccacgaatgacaccaag

SEQ ID NO: 157851 - DNA, 25 bp, Homo sapien
aaagccacgaatgacaccaagcgcc

SEQ ID NO: 157852 - DNA, 25 bp, Homo sapien
acaaagccacgaatgacaccaagcg

SEQ ID NO: 157853 - DNA, 25 bp, Homo sapien
ggaacaaagccacgaatgacaccaa

SEQ ID NO: 157854 - DNA, 25 bp, Homo sapien
aaagccacacgatggatttgatgca

SEQ ID NO: 157855 - DNA, 25 bp, Homo sapien
taaagccacacgatggatttgatgc

SEQ ID NO: 157856 - DNA, 25 bp, Homo sapien
gtaaagccacacgatggatttgatg

SEQ ID NO: 157857 - DNA, 25 bp, Homo sapien
gagacttcactgcatgcctggtgct

SEQ ID NO: 157858 - DNA, 25 bp, Homo sapien
taggcagatcgcgtttgagacttca

SEQ ID NO: 157859 - DNA, 25 bp, Homo sapien
aaaatgatgagcgttcctacaagga

SEQ ID NO: 157860 - DNA, 25 bp, Homo sapien
cttagcatctatggccaggaaggtt

SEQ ID NO: 157861 - DNA, 25 bp, Homo sapien
ccttggctacctctgtgaataggct

SEQ ID NO: 157862 - DNA, 25 bp, Homo sapien
ctacctctgtgaataggctctggga

SEQ ID NO: 157863 - DNA, 25 bp, Homo sapien
ggctttcctccccgctgttcctctg

SEQ ID NO: 157864 - DNA, 25 bp, Homo sapien
tggctacctctgtgaataggctctg

SEQ ID NO: 157865 - DNA, 25 bp, Homo sapien
gcagtggccagggtgttcccaatag

SEQ ID NO: 157866 - DNA, 25 bp, Homo sapien
tggccagggtgttcccaatagtcat

SEQ ID NO: 157867 - DNA, 25 bp, Homo sapien
cgatcattccattggcagtggccag

SEQ ID NO: 157868 - DNA, 25 bp, Homo sapien
gatcattccattggcagtggccagg

SEQ ID NO: 157869 - DNA, 25 bp, Homo sapien
tcctgaggaactgtccgaggtcttc

SEQ ID NO: 157870 - DNA, 25 bp, Homo sapien
tctgaccacagaactcctagaaaca

SEQ ID NO: 157871 - DNA, 25 bp, Homo sapien
cttatatcaggattgaagatcaggg

SEQ ID NO: 157872 - DNA, 25 bp, Homo sapien
cgaggtcttccattgtgataacaca

SEQ ID NO: 157873 - DNA, 25 bp, Homo sapien
taggctgctggttccctcctgtcca

SEQ ID NO: 157874 - DNA, 25 bp, Homo sapien
tgcacacactggttcctgtctaggc

SEQ ID NO: 157875 - DNA, 25 bp, Homo sapien
cacactggttcctgtctaggctgct

SEQ ID NO: 157876 - DNA, 25 bp, Homo sapien
gcctgcacacactggttcctgtcta

SEQ ID NO: 157877 - DNA, 25 bp, Homo sapien
ccgagagtttactgatgtcaatcac

SEQ ID NO: 157878 - DNA, 25 bp, Homo sapien
gagagtttactgatgtcaatcactg

SEQ ID NO: 157879 - DNA, 25 bp, Homo sapien
tccgagagtttactgatgtcaatca

SEQ ID NO: 157880 - DNA, 25 bp, Homo sapien
catccgagagtttactgatgtcaat

SEQ ID NO: 157881 - DNA, 25 bp, Homo sapien
tcctcatctcctagatgatgaattt

SEQ ID NO: 157882 - DNA, 25 bp, Homo sapien
cctcatctcctagatgatgaatttc

SEQ ID NO: 157883 - DNA, 25 bp, Homo sapien
gcaccctcgtactgccatctgagga

SEQ ID NO: 157884 - DNA, 25 bp, Homo sapien
tgtcgttatagatgggcaccctcgt

SEQ ID NO: 157885 - DNA, 25 bp, Homo sapien
tattgggcgttgtcgttatagatgg

SEQ ID NO: 157886 - DNA, 25 bp, Homo sapien
gcactgacttcattagctcgtgtga

SEQ ID NO: 157887 - DNA, 25 bp, Homo sapien
cagcacaatccattgttcagccagg

SEQ ID NO: 157888 - DNA, 25 bp, Homo sapien
cagccagcacaatccattgttcagc

SEQ ID NO: 157889 - DNA, 25 bp, Homo sapien
cacaatccattgttcagccaggctg

SEQ ID NO: 157890 - DNA, 25 bp, Homo sapien
aatccattgttcagccaggctggcc

SEQ ID NO: 157891 - DNA, 25 bp, Homo sapien
ggaggtaacgggaagattacattca

SEQ ID NO: 157892 - DNA, 25 bp, Homo sapien
gaagattacattcatttgaagttgc

SEQ ID NO: 157893 - DNA, 25 bp, Homo sapien
gtgtcgagttgcgatttcgggaggg

SEQ ID NO: 157894 - DNA, 25 bp, Homo sapien
aggaactgaacatattccaacaaag

SEQ ID NO: 157895 - DNA, 25 bp, Homo sapien
ccagtccagccggcactgttgccat

SEQ ID NO: 157896 - DNA, 25 bp, Homo sapien
gggccagtccagccggcactgttgc

SEQ ID NO: 157897 - DNA, 25 bp, Homo sapien
gccagtccagccggcactgttgcca

SEQ ID NO: 157898 - DNA, 25 bp, Homo sapien
cagtccagccggcactgttgccata

SEQ ID NO: 157899 - DNA, 25 bp, Homo sapien
caggaaactctggatccaactttga

SEQ ID NO: 157900 - DNA, 25 bp, Homo sapien
tgttgagaaccactcttttgcactc

SEQ ID NO: 157901 - DNA, 25 bp, Homo sapien
tctactagtctgacaacttgcggtg

SEQ ID NO: 157902 - DNA, 25 bp, Homo sapien
gatattaaatcaaccaaatgagctc

SEQ ID NO: 157903 - DNA, 25 bp, Homo sapien
cagctcatagaagctgtgtggcagg

SEQ ID NO: 157904 - DNA, 25 bp, Homo sapien
aatgattttccccttcgagcaatgt

SEQ ID NO: 157905 - DNA, 25 bp, Homo sapien
gattgagtgggaacctggtctttct

SEQ ID NO: 157906 - DNA, 25 bp, Homo sapien
tatcgtagcaattaaatctggccag

SEQ ID NO: 157907 - DNA, 25 bp, Homo sapien
cagggcagagtctcgcatatgacca

SEQ ID NO: 157908 - DNA, 25 bp, Homo sapien
gacttggccatacctgccagggcag

SEQ ID NO: 157909 - DNA, 25 bp, Homo sapien
caggacaacagacttgcaggcagcc

SEQ ID NO: 157910 - DNA, 25 bp, Homo sapien
cgtgacagtcaacatcaaagtggga

SEQ ID NO: 157911 - DNA, 25 bp, Homo sapien
atggcaccgccagctgtctgactct

SEQ ID NO: 157912 - DNA, 25 bp, Homo sapien
ctggaaatggcaccgccagctgtct

SEQ ID NO: 157913 - DNA, 25 bp, Homo sapien
tcatggctggaaatggcaccgccag

SEQ ID NO: 157914 - DNA, 25 bp, Homo sapien
aaatggcaccgccagctgtctgact

SEQ ID NO: 157915 - DNA, 25 bp, Homo sapien
ctgaatcgaaattcacagggaagga

SEQ ID NO: 157916 - DNA, 25 bp, Homo sapien
cacagggaaggactttgcagtgtct

SEQ ID NO: 157917 - DNA, 25 bp, Homo sapien
tcacagggaaggactttgcagtgtc

SEQ ID NO: 157918 - DNA, 25 bp, Homo sapien
agggaaggactttgcagtgtctgag

SEQ ID NO: 157919 - DNA, 25 bp, Homo sapien
caaagagggctcgttcaacgggcag

SEQ ID NO: 157920 - DNA, 25 bp, Homo sapien
gtcttccaaagagggctcgttcaac

SEQ ID NO: 157921 - DNA, 25 bp, Homo sapien
cttccaaagagggctcgttcaacgg

SEQ ID NO: 157922 - DNA, 25 bp, Homo sapien
tccaaagagggctcgttcaacgggc

SEQ ID NO: 157923 - DNA, 25 bp, Homo sapien
aagcacatatgggtcatttcttcct

SEQ ID NO: 157924 - DNA, 25 bp, Homo sapien
gaagcacatatgggtcatttcttcc

SEQ ID NO: 157925 - DNA, 25 bp, Homo sapien
tgaagcacatatgggtcatttcttc

SEQ ID NO: 157926 - DNA, 25 bp, Homo sapien
ctgaagcacatatgggtcatttctt

SEQ ID NO: 157927 - DNA, 25 bp, Homo sapien
cttaccccagaaggcatcagaactt

SEQ ID NO: 157928 - DNA, 25 bp, Homo sapien
ttccttaccccagaaggcatcagaa

SEQ ID NO: 157929 - DNA, 25 bp, Homo sapien
ccccagaaggcatcagaacttccca

SEQ ID NO: 157930 - DNA, 25 bp, Homo sapien
atcttcttccttaccccagaaggca

SEQ ID NO: 157931 - DNA, 25 bp, Homo sapien
caaaggcacagtgggtacatatttc

SEQ ID NO: 157932 - DNA, 25 bp, Homo sapien
tggctgaccccaggcgtagaccacc

SEQ ID NO: 157933 - DNA, 25 bp, Homo sapien
catctgtttgatcatacctcctggt

SEQ ID NO: 157934 - DNA, 25 bp, Homo sapien
gggtacatatttcatcgcctccatc

SEQ ID NO: 157935 - DNA, 25 bp, Homo sapien
gaatgtctgtcccatgtacttgaag

SEQ ID NO: 157936 - DNA, 25 bp, Homo sapien
atgtctgtcccatgtacttgaaggg

SEQ ID NO: 157937 - DNA, 25 bp, Homo sapien
gtgggaatgtctgtcccatgtactt

SEQ ID NO: 157938 - DNA, 25 bp, Homo sapien
gaggcagcggatgtgggaatgtctg

SEQ ID NO: 157939 - DNA, 25 bp, Homo sapien
ccagggtagccctgtgcctctggcc

SEQ ID NO: 157940 - DNA, 25 bp, Homo sapien
cagggtagccctgtgcctctggcct

SEQ ID NO: 157941 - DNA, 25 bp, Homo sapien
accagggtagccctgtgcctctggc

SEQ ID NO: 157942 - DNA, 25 bp, Homo sapien
tacttctgtaatcggtaaggtgtcc

SEQ ID NO: 157943 - DNA, 25 bp, Homo sapien
catctgtacttctgtaatcggtaag

SEQ ID NO: 157944 - DNA, 25 bp, Homo sapien
cggtaaggtgtccatcctagagcct

SEQ ID NO: 157945 - DNA, 25 bp, Homo sapien
tctgtaatcggtaaggtgtccatcc

SEQ ID NO: 157946 - DNA, 25 bp, Homo sapien
catggacgtggtgagcattctggaa

SEQ ID NO: 157947 - DNA, 25 bp, Homo sapien
ctgagccacaaagggcaatgcttct

SEQ ID NO: 157948 - DNA, 25 bp, Homo sapien
tatggtgagatgcaggttctgagcc

SEQ ID NO: 157949 - DNA, 25 bp, Homo sapien
tgcttcttcatggacgtggtgagca

SEQ ID NO: 157950 - DNA, 25 bp, Homo sapien
tccttggtggtgtgttcccgtcgtg

SEQ ID NO: 157951 - DNA, 25 bp, Homo sapien
ccgtcgtgggtaaggctcctctcca

SEQ ID NO: 157952 - DNA, 25 bp, Homo sapien
ccttcactgattcctcggggttcct

SEQ ID NO: 157953 - DNA, 25 bp, Homo sapien
cctctccagggcgtctgcctgtggg

SEQ ID NO: 157954 - DNA, 25 bp, Homo sapien
tttatttgttttatatcccagggca

SEQ ID NO: 157955 - DNA, 25 bp, Homo sapien
ttgttttatatcccagggcagacat

SEQ ID NO: 157956 - DNA, 25 bp, Homo sapien
taattcatccagagcttcttccttt

SEQ ID NO: 157957 - DNA, 25 bp, Homo sapien
atttgttttatatcccagggcagac

SEQ ID NO: 157958 - DNA, 25 bp, Homo sapien
tcgtttacggcaagcctggaaatgg

SEQ ID NO: 157959 - DNA, 25 bp, Homo sapien
tcagggagtcctttacttttagtca

SEQ ID NO: 157960 - DNA, 25 bp, Homo sapien
cctcgtttacggcaagcctggaaat

SEQ ID NO: 157961 - DNA, 25 bp, Homo sapien
ctgccctcgtttacggcaagcctgg

SEQ ID NO: 157962 - DNA, 25 bp, Homo sapien
tggaggaactcacagggatccacca

SEQ ID NO: 157963 - DNA, 25 bp, Homo sapien
gacgctggcctctatggaggaactc

SEQ ID NO: 157964 - DNA, 25 bp, Homo sapien
gctggcctctatggaggaactcaca

SEQ ID NO: 157965 - DNA, 25 bp, Homo sapien
aggacgctggcctctatggaggaac

SEQ ID NO: 157966 - DNA, 25 bp, Homo sapien
actcagaccactcgtcctcaaccct

SEQ ID NO: 157967 - DNA, 25 bp, Homo sapien
cataagtacaccctgtttagtcctc

SEQ ID NO: 157968 - DNA, 25 bp, Homo sapien
tacaccctgtttagtcctctgggct

SEQ ID NO: 157969 - DNA, 25 bp, Homo sapien
ggacataagtacaccctgtttagtc

SEQ ID NO: 157970 - DNA, 25 bp, Homo sapien
ggcttcaggcctccactggaaagaa

SEQ ID NO: 157971 - DNA, 25 bp, Homo sapien
agcgttcctggaatcccctcacaat

SEQ ID NO: 157972 - DNA, 25 bp, Homo sapien
catttgaagggctgcgccagcgttc

SEQ ID NO: 157973 - DNA, 25 bp, Homo sapien
ccctcacaatgataggttggcttca

SEQ ID NO: 157974 - DNA, 25 bp, Homo sapien
caaatggatggcatgtcctggtgct

SEQ ID NO: 157975 - DNA, 25 bp, Homo sapien
ggaaccatgagggagcgacagatta

SEQ ID NO: 157976 - DNA, 25 bp, Homo sapien
gattagacgcgattctgatggccat

SEQ ID NO: 157977 - DNA, 25 bp, Homo sapien
cccagcccgagtgcgggaaccatga

SEQ ID NO: 157978 - DNA, 25 bp, Homo sapien
gcccttggcatgcttaatgaaatca

SEQ ID NO: 157979 - DNA, 25 bp, Homo sapien
tctcgatagattgacaatgccctgt

SEQ ID NO: 157980 - DNA, 25 bp, Homo sapien
atgaaatcagcttctcgatagattg

SEQ ID NO: 157981 - DNA, 25 bp, Homo sapien
gacaatgccctgtcaattataatca

SEQ ID NO: 157982 - DNA, 25 bp, Homo sapien
atttgaattcagagacataacgttc

SEQ ID NO: 157983 - DNA, 25 bp, Homo sapien
tgaattcagagacataacgttccct

SEQ ID NO: 157984 - DNA, 25 bp, Homo sapien
cctttgttctcttgccctccagcct

SEQ ID NO: 157985 - DNA, 25 bp, Homo sapien
attcagagacataacgttccctttg

SEQ ID NO: 157986 - DNA, 25 bp, Homo sapien
aatcgatatggggattggccaatgt

SEQ ID NO: 157987 - DNA, 25 bp, Homo sapien
ggctgtggttgaggagggatgtatt

SEQ ID NO: 157988 - DNA, 25 bp, Homo sapien
gcagacaaagcttgatttgattttt

SEQ ID NO: 157989 - DNA, 25 bp, Homo sapien
gagatataatcgatatggggattgg

SEQ ID NO: 157990 - DNA, 25 bp, Homo sapien
tccagaagcagtgattattatgagt

SEQ ID NO: 157991 - DNA, 25 bp, Homo sapien
ctccagaagcagtgattattatgag

SEQ ID NO: 157992 - DNA, 25 bp, Homo sapien
cctacccaagtgtggcacattcctg

SEQ ID NO: 157993 - DNA, 25 bp, Homo sapien
ctgtggtcccctcttctattccttt

SEQ ID NO: 157994 - DNA, 25 bp, Homo sapien
ctgcacctacccaagtgtggcacat

SEQ ID NO: 157995 - DNA, 25 bp, Homo sapien
cccaagtgtggcacattcctgtggt

SEQ ID NO: 157996 - DNA, 25 bp, Homo sapien
tggcgtctactgttggtttggactc

SEQ ID NO: 157997 - DNA, 25 bp, Homo sapien
ttagtaggatggttttagagcaact

SEQ ID NO: 157998 - DNA, 25 bp, Homo sapien
tagagcaactgtggcgtctactgtt

SEQ ID NO: 157999 - DNA, 25 bp, Homo sapien
tggttttagagcaactgtggcgtct

SEQ ID NO: 158000 - DNA, 25 bp, Homo sapien
gaatggtagatgaaccagcccctct

SEQ ID NO: 158001 - DNA, 25 bp, Homo sapien
tgctccactgaatggtagatgaacc

SEQ ID NO: 158002 - DNA, 25 bp, Homo sapien
cactgaatggtagatgaaccagccc

SEQ ID NO: 158003 - DNA, 25 bp, Homo sapien
tggtagatgaaccagcccctctcct

SEQ ID NO: 158004 - DNA, 25 bp, Homo sapien
ggctccttgcgactgggctgtcaac

SEQ ID NO: 158005 - DNA, 25 bp, Homo sapien
ctaggcaccccgtagaccgtgagat

SEQ ID NO: 158006 - DNA, 25 bp, Homo sapien
tgtcaacttcccacgacagtgcgaa

SEQ ID NO: 158007 - DNA, 25 bp, Homo sapien
ggccagagctgtctaggcaccccgt

SEQ ID NO: 158008 - DNA, 25 bp, Homo sapien
tgttttgtctgaaccgctgtgaact

SEQ ID NO: 158009 - DNA, 25 bp, Homo sapien
tctggtcaaaactcctccatggctc

SEQ ID NO: 158010 - DNA, 25 bp, Homo sapien
ttgctaacaagggaaggtctttcta

SEQ ID NO: 158011 - DNA, 25 bp, Homo sapien
ctggaatcccgttcgagctgtcttc

SEQ ID NO: 158012 - DNA, 25 bp, Homo sapien
gcccttggacgatatagccttgacc

SEQ ID NO: 158013 - DNA, 25 bp, Homo sapien
ttggacgatatagccttgaccaagc

SEQ ID NO: 158014 - DNA, 25 bp, Homo sapien
ccttggacgatatagccttgaccaa

SEQ ID NO: 158015 - DNA, 25 bp, Homo sapien
ctgcccttggacgatatagccttga

SEQ ID NO: 158016 - DNA, 25 bp, Homo sapien
actcatgtgaaggtaagaaggccag

SEQ ID NO: 158017 - DNA, 25 bp, Homo sapien
cactcatgtgaaggtaagaaggcca

SEQ ID NO: 158018 - DNA, 25 bp, Homo sapien
caggccgctcccttgcatcaagaat

SEQ ID NO: 158019 - DNA, 25 bp, Homo sapien
cgacagggtggagcaagatgattca

SEQ ID NO: 158020 - DNA, 25 bp, Homo sapien
cgagtttgagagtgggtcccattgc

SEQ ID NO: 158021 - DNA, 25 bp, Homo sapien
agttcacctccaacacagttagtgg

SEQ ID NO: 158022 - DNA, 25 bp, Homo sapien
ggctcagcaagccctccagagcaat

SEQ ID NO: 158023 - DNA, 25 bp, Homo sapien
ggctgcacagggagtgggcgtgtgg

SEQ ID NO: 158024 - DNA, 25 bp, Homo sapien
gcgtgtgggtgccagatccttcctg

SEQ ID NO: 158025 - DNA, 25 bp, Homo sapien
cttggcagacagaccccggctgggc

SEQ ID NO: 158026 - DNA, 25 bp, Homo sapien
tagggctacccacagctcgctggga

SEQ ID NO: 158027 - DNA, 25 bp, Homo sapien
agggctacccacagctcgctgggag

SEQ ID NO: 158028 - DNA, 25 bp, Homo sapien
ggctacccacagctcgctgggaggc

SEQ ID NO: 158029 - DNA, 25 bp, Homo sapien
ctacccacagctcgctgggaggcca

SEQ ID NO: 158030 - DNA, 25 bp, Homo sapien
cgtggcctttgagatggcctgggtg

SEQ ID NO: 158031 - DNA, 25 bp, Homo sapien
tggccgtggaatttgggctggtgga

SEQ ID NO: 158032 - DNA, 25 bp, Homo sapien
accaaggggcagcacgtctgtagag

SEQ ID NO: 158033 - DNA, 25 bp, Homo sapien
agcacgtctgtagagcgcgtggcct

SEQ ID NO: 158034 - DNA, 25 bp, Homo sapien
taaagggctctgcttttagtatcaa

SEQ ID NO: 158035 - DNA, 25 bp, Homo sapien
gacttgcatgtctgctgccataggg

SEQ ID NO: 158036 - DNA, 25 bp, Homo sapien
cacctgccttgaacttctaaagggc

SEQ ID NO: 158037 - DNA, 25 bp, Homo sapien
tcactgtacaggtctcctttgcaca

SEQ ID NO: 158038 - DNA, 25 bp, Homo sapien
tcatcctttggcattagtctctttg

SEQ ID NO: 158039 - DNA, 25 bp, Homo sapien
tcctttggcattagtctctttgatt

SEQ ID NO: 158040 - DNA, 25 bp, Homo sapien
catcctttggcattagtctctttga

SEQ ID NO: 158041 - DNA, 25 bp, Homo sapien
ctttggcattagtctctttgatttt

SEQ ID NO: 158042 - DNA, 25 bp, Homo sapien
caggaacagattttgcagttggtgg

SEQ ID NO: 158043 - DNA, 25 bp, Homo sapien
agattttgcagttggtggggtctca

SEQ ID NO: 158044 - DNA, 25 bp, Homo sapien
gccaggaacagattttgcagttggt

SEQ ID NO: 158045 - DNA, 25 bp, Homo sapien
acagattttgcagttggtggggtct

SEQ ID NO: 158046 - DNA, 25 bp, Homo sapien
tgctgctgcgcttccgaggcaggaa

SEQ ID NO: 158047 - DNA, 25 bp, Homo sapien
gcctgctgctgcgcttccgaggcag

SEQ ID NO: 158048 - DNA, 25 bp, Homo sapien
accttcccacgatgcctgctgctgc

SEQ ID NO: 158049 - DNA, 25 bp, Homo sapien
cccatgtctgggagcggagaacttt

SEQ ID NO: 158050 - DNA, 25 bp, Homo sapien
tatcccaggaaggctgtgaggtgga

SEQ ID NO: 158051 - DNA, 25 bp, Homo sapien
atcccaggaaggctgtgaggtggac

SEQ ID NO: 158052 - DNA, 25 bp, Homo sapien
aattaaaccaatctgttattccaag

SEQ ID NO: 158053 - DNA, 25 bp, Homo sapien
gctggtttattgaatatgtggagaa

SEQ ID NO: 158054 - DNA, 25 bp, Homo sapien
tctagttttattatcaagattgtgc

SEQ ID NO: 158055 - DNA, 25 bp, Homo sapien
tgatcatgttgttctatagttttcc

SEQ ID NO: 158056 - DNA, 25 bp, Homo sapien
tgctggggcactgtacttgagctcc

SEQ ID NO: 158057 - DNA, 25 bp, Homo sapien
ctggggcactgtacttgagctccga

SEQ ID NO: 158058 - DNA, 25 bp, Homo sapien
gggcactgtacttgagctccgatat

SEQ ID NO: 158059 - DNA, 25 bp, Homo sapien
cactgtacttgagctccgatatcat

SEQ ID NO: 158060 - DNA, 25 bp, Homo sapien
tcctgtcgtgggctgattggctggc

SEQ ID NO: 158061 - DNA, 25 bp, Homo sapien
gccaggagataagggcagatgagtt

SEQ ID NO: 158062 - DNA, 25 bp, Homo sapien
gataagggcagatgagttgcagaaa

SEQ ID NO: 158063 - DNA, 25 bp, Homo sapien
cagatgagttgcagaaagagcttcc

SEQ ID NO: 158064 - DNA, 25 bp, Homo sapien
gtcataggtggatctttctcatgga

SEQ ID NO: 158065 - DNA, 25 bp, Homo sapien
ctggtcggtctgaggacctgaggtc

SEQ ID NO: 158066 - DNA, 25 bp, Homo sapien
ggtcataggtggatctttctcatgg

SEQ ID NO: 158067 - DNA, 25 bp, Homo sapien
gtcggtctgaggacctgaggtcata

SEQ ID NO: 158068 - DNA, 25 bp, Homo sapien
gagttacccgaagctcggcatccgt

SEQ ID NO: 158069 - DNA, 25 bp, Homo sapien
gttacccgaagctcggcatccgtga

SEQ ID NO: 158070 - DNA, 25 bp, Homo sapien
agagttacccgaagctcggcatccg

SEQ ID NO: 158071 - DNA, 25 bp, Homo sapien
tgagagttacccgaagctcggcatc

SEQ ID NO: 158072 - DNA, 25 bp, Homo sapien
cggcctaagtggtggggtgacttcg

SEQ ID NO: 158073 - DNA, 25 bp, Homo sapien
tcggcctaagtggtggggtgacttc

SEQ ID NO: 158074 - DNA, 25 bp, Homo sapien
gggctcggcctaagtggtggggtga

SEQ ID NO: 158075 - DNA, 25 bp, Homo sapien
gctcggcctaagtggtggggtgact

SEQ ID NO: 158076 - DNA, 25 bp, Homo sapien
gggagaggtagagggtgacataaga

SEQ ID NO: 158077 - DNA, 25 bp, Homo sapien
tagagggtgacataagaatgggaat

SEQ ID NO: 158078 - DNA, 25 bp, Homo sapien
ggtagagggtgacataagaatggga

SEQ ID NO: 158079 - DNA, 25 bp, Homo sapien
gaggtagagggtgacataagaatgg

SEQ ID NO: 158080 - DNA, 25 bp, Homo sapien
tgtgcaggtcataggggatgccatg

SEQ ID NO: 158081 - DNA, 25 bp, Homo sapien
agtgttgcggtggtgaaaatttttg

SEQ ID NO: 158082 - DNA, 25 bp, Homo sapien
atatgtgcaggtcataggggatgcc

SEQ ID NO: 158083 - DNA, 25 bp, Homo sapien
tgttgaagtgttgcggtggtgaaaa

SEQ ID NO: 158084 - DNA, 25 bp, Homo sapien
tgcctccatcctttaggggagtccc

SEQ ID NO: 158085 - DNA, 25 bp, Homo sapien
ttgttgggggcatactcttcttggg

SEQ ID NO: 158086 - DNA, 25 bp, Homo sapien
tgagagaaacccctgggtacatgtt

SEQ ID NO: 158087 - DNA, 25 bp, Homo sapien
tgggtacatgtttctctgccgctcc

SEQ ID NO: 158088 - DNA, 25 bp, Homo sapien
cacactgggtcagcctgagaaggaa

SEQ ID NO: 158089 - DNA, 25 bp, Homo sapien
taactttgctgatcatcgtcttgag

SEQ ID NO: 158090 - DNA, 25 bp, Homo sapien
catgaccaatgacatcggggggccc

SEQ ID NO: 158091 - DNA, 25 bp, Homo sapien
tgaccacatgggaagactgatttac

SEQ ID NO: 158092 - DNA, 25 bp, Homo sapien
catgctgggaagcagccgtacgttc

SEQ ID NO: 158093 - DNA, 25 bp, Homo sapien
ccatggtgagctggcagtttccccg

SEQ ID NO: 158094 - DNA, 25 bp, Homo sapien
gccatctggcatagaccaatcaggg

SEQ ID NO: 158095 - DNA, 25 bp, Homo sapien
ttctgataggaagagacagcaggcg

SEQ ID NO: 158096 - DNA, 25 bp, Homo sapien
agcagattgagtgggattcctctcc

SEQ ID NO: 158097 - DNA, 25 bp, Homo sapien
gaaaccgaggctcagtaatagccag

SEQ ID NO: 158098 - DNA, 25 bp, Homo sapien
tgtccggaaaacaccaagctggtgt

SEQ ID NO: 158099 - DNA, 25 bp, Homo sapien
ggtgtccctagttcatggaaaccga

SEQ ID NO: 158100 - DNA, 25 bp, Homo sapien
tgaggggttgacagccatggcgact

SEQ ID NO: 158101 - DNA, 25 bp, Homo sapien
gccatggcgactgcctctggtggcc

SEQ ID NO: 158102 - DNA, 25 bp, Homo sapien
acagccatggcgactgcctctggtg

SEQ ID NO: 158103 - DNA, 25 bp, Homo sapien
ctgtgaggggttgacagccatggcg

SEQ ID NO: 158104 - DNA, 25 bp, Homo sapien
ctgtaagcttgacaggcccctcttt

SEQ ID NO: 158105 - DNA, 25 bp, Homo sapien
acagccttttcaatgtgggaaggtg

SEQ ID NO: 158106 - DNA, 25 bp, Homo sapien
cacagccttttcaatgtgggaaggt

SEQ ID NO: 158107 - DNA, 25 bp, Homo sapien
gccttggtactcagtgacactgtaa

SEQ ID NO: 158108 - DNA, 25 bp, Homo sapien
gtcctgcagccaagaaatgtgtttc

SEQ ID NO: 158109 - DNA, 25 bp, Homo sapien
gaagcctcattctgtggcgtacacc

SEQ ID NO: 158110 - DNA, 25 bp, Homo sapien
gtttacctcccttgactgactatgg

SEQ ID NO: 158111 - DNA, 25 bp, Homo sapien
gcatctgaggaacacgcttgccgaa

SEQ ID NO: 158112 - DNA, 25 bp, Homo sapien
accagagccgcactcaaatcacagg

SEQ ID NO: 158113 - DNA, 25 bp, Homo sapien
tgagaccccactgtgggtactggtg

SEQ ID NO: 158114 - DNA, 25 bp, Homo sapien
attgacaaagcgcatggaggcgacc

SEQ ID NO: 158115 - DNA, 25 bp, Homo sapien
ggcaacgcagtcttctgtggcttca

SEQ ID NO: 158116 - DNA, 25 bp, Homo sapien
gacccttgttcagggcacttggacc

SEQ ID NO: 158117 - DNA, 25 bp, Homo sapien
cccttgttcagggcacttggacctt

SEQ ID NO: 158118 - DNA, 25 bp, Homo sapien
tggacccttgttcagggcacttgga

SEQ ID NO: 158119 - DNA, 25 bp, Homo sapien
agcatggagtttgggcggaggggga

SEQ ID NO: 158120 - DNA, 25 bp, Homo sapien
tccccatgggagtctcctgaacgtg

SEQ ID NO: 158121 - DNA, 25 bp, Homo sapien
tgaacgtgcaaaggaaagagcagca

SEQ ID NO: 158122 - DNA, 25 bp, Homo sapien
agcagcagatgcatggcacccgcct

SEQ ID NO: 158123 - DNA, 25 bp, Homo sapien
cagcggtctgagcttctataagggc

SEQ ID NO: 158124 - DNA, 25 bp, Homo sapien
catctgctccatagcagcatcttga

SEQ ID NO: 158125 - DNA, 25 bp, Homo sapien
tcatctgctccatagcagcatcttg

SEQ ID NO: 158126 - DNA, 25 bp, Homo sapien
tgcgtgtaaccgtgggagaaagggc

SEQ ID NO: 158127 - DNA, 25 bp, Homo sapien
ttgtactatgatgaggaccccgata

SEQ ID NO: 158128 - DNA, 25 bp, Homo sapien
gatgaggaccccgatacctttcttc

SEQ ID NO: 158129 - DNA, 25 bp, Homo sapien
ggtcagagcattccaaagagccttg

SEQ ID NO: 158130 - DNA, 25 bp, Homo sapien
tgtagcagagatgtgtcagcctgca

SEQ ID NO: 158131 - DNA, 25 bp, Homo sapien
ccaatcctccaagatgatgaaggtc

SEQ ID NO: 158132 - DNA, 25 bp, Homo sapien
tgtgtggtcctgtggggtcccaatc

SEQ ID NO: 158133 - DNA, 25 bp, Homo sapien
tgcaggggtgaccaattcccaactt

SEQ ID NO: 158134 - DNA, 25 bp, Homo sapien
gcctcccaagcccacagggctcctg

SEQ ID NO: 158135 - DNA, 25 bp, Homo sapien
ctcccaagcccacagggctcctggc

SEQ ID NO: 158136 - DNA, 25 bp, Homo sapien
ctcctggcagccagctgggccccac

SEQ ID NO: 158137 - DNA, 25 bp, Homo sapien
ctgcctcccaagcccacagggctcc

SEQ ID NO: 158138 - DNA, 25 bp, Homo sapien
ggctgcttggcacgggccgccgagg

SEQ ID NO: 158139 - DNA, 25 bp, Homo sapien
gcagggctgcttggcacgggccgcc

SEQ ID NO: 158140 - DNA, 25 bp, Homo sapien
tgggcagggctgcttggcacgggcc

SEQ ID NO: 158141 - DNA, 25 bp, Homo sapien
cgtggccagctcctcgtgcggtctg

SEQ ID NO: 158142 - DNA, 25 bp, Homo sapien
tctgtccacgttgacactgctgaca

SEQ ID NO: 158143 - DNA, 25 bp, Homo sapien
gcttgtagcagggctaggcatgtcc

SEQ ID NO: 158144 - DNA, 25 bp, Homo sapien
gagatgagcctgcatgctaaggagc

SEQ ID NO: 158145 - DNA, 25 bp, Homo sapien
ccatcgtctgtccacgttgacactg

SEQ ID NO: 158146 - DNA, 25 bp, Homo sapien
tgttgctggaaatccttcccccgtg

SEQ ID NO: 158147 - DNA, 25 bp, Homo sapien
tacggacggggtgtgcttgaaacca

SEQ ID NO: 158148 - DNA, 25 bp, Homo sapien
tgctgtttccaattggatttgctgg

SEQ ID NO: 158149 - DNA, 25 bp, Homo sapien
ccccgtggctgtcggcccctccaga

SEQ ID NO: 158150 - DNA, 25 bp, Homo sapien
gcagctggtgccaagttgcaactcg

SEQ ID NO: 158151 - DNA, 25 bp, Homo sapien
tagcttctctcgcactctgaggcag

SEQ ID NO: 158152 - DNA, 25 bp, Homo sapien
catattttgcaaacgctagcttctc

SEQ ID NO: 158153 - DNA, 25 bp, Homo sapien
tgcaactcgccacaaatttttatgg

SEQ ID NO: 158154 - DNA, 25 bp, Homo sapien
tgaccagggtgagtctacagagccc

SEQ ID NO: 158155 - DNA, 25 bp, Homo sapien
tctacagagcccagatgactcaatg

SEQ ID NO: 158156 - DNA, 25 bp, Homo sapien
ccagatgactcaatgagcagtttca

SEQ ID NO: 158157 - DNA, 25 bp, Homo sapien
agcagtttcaaaggaatgtccacag

SEQ ID NO: 158158 - DNA, 25 bp, Homo sapien
gctgggaccagtggagggcaatgcg

SEQ ID NO: 158159 - DNA, 25 bp, Homo sapien
gctgctgggaccagtggagggcaat

SEQ ID NO: 158160 - DNA, 25 bp, Homo sapien
tgctgggaccagtggagggcaatgc

SEQ ID NO: 158161 - DNA, 25 bp, Homo sapien
gggaccagtggagggcaatgcggca

SEQ ID NO: 158162 - DNA, 25 bp, Homo sapien
ttggaggctgcccaaacacctttgg

SEQ ID NO: 158163 - DNA, 25 bp, Homo sapien
ctgtgaatgcaaggtgtttggaggc

SEQ ID NO: 158164 - DNA, 25 bp, Homo sapien
aaacacctttggcaggcctggtgag

SEQ ID NO: 158165 - DNA, 25 bp, Homo sapien
tgcccaaacacctttggcaggcctg

SEQ ID NO: 158166 - DNA, 25 bp, Homo sapien
catttggtggaatcatgaacatcca

SEQ ID NO: 158167 - DNA, 25 bp, Homo sapien
ctatcagacatttggtggaatcatg

SEQ ID NO: 158168 - DNA, 25 bp, Homo sapien
caccccgcttgatgcattttcatgt

SEQ ID NO: 158169 - DNA, 25 bp, Homo sapien
attcccaccccgcttgatgcatttt

SEQ ID NO: 158170 - DNA, 25 bp, Homo sapien
cgcacagtgtcgcaaaatgcttcct

SEQ ID NO: 158171 - DNA, 25 bp, Homo sapien
caggcctgagcgcacagtgtcgcaa

SEQ ID NO: 158172 - DNA, 25 bp, Homo sapien
tgtctctgttggtgttgatacatac

SEQ ID NO: 158173 - DNA, 25 bp, Homo sapien
ctttgtctctgttggtgttgataca

SEQ ID NO: 158174 - DNA, 25 bp, Homo sapien
tgtgtaatgacaggtgaataatagt

SEQ ID NO: 158175 - DNA, 25 bp, Homo sapien
tgctgtgtaatgacaggtgaataat

SEQ ID NO: 158176 - DNA, 25 bp, Homo sapien
gtaatgacaggtgaataatagtaat

SEQ ID NO: 158177 - DNA, 25 bp, Homo sapien
ctaatgctgtgtaatgacaggtgaa

SEQ ID NO: 158178 - DNA, 25 bp, Homo sapien
ttttcaccacaatcattgatctttt

SEQ ID NO: 158179 - DNA, 25 bp, Homo sapien
gttttcaccacaatcattgatcttt

SEQ ID NO: 158180 - DNA, 25 bp, Homo sapien
agaggctagagtggctctgcccagc

SEQ ID NO: 158181 - DNA, 25 bp, Homo sapien
cgcccggcccacagaggctagagtg

SEQ ID NO: 158182 - DNA, 25 bp, Homo sapien
gtctgaagcgtgtgaacctgccgac

SEQ ID NO: 158183 - DNA, 25 bp, Homo sapien
tgaagcgtgtgaacctgccgacccg

SEQ ID NO: 158184 - DNA, 25 bp, Homo sapien
gtcctccaggggcttgagtgacaca

SEQ ID NO: 158185 - DNA, 25 bp, Homo sapien
cttgagtgacacattgggtgttggc

SEQ ID NO: 158186 - DNA, 25 bp, Homo sapien
cctccaggggcttgagtgacacatt

SEQ ID NO: 158187 - DNA, 25 bp, Homo sapien
gacacattgggtgttggcatctttc

SEQ ID NO: 158188 - DNA, 25 bp, Homo sapien
cctttatgggaagccacatgcaggc

SEQ ID NO: 158189 - DNA, 25 bp, Homo sapien
agtagtggctgaatctgctcaggaa

SEQ ID NO: 158190 - DNA, 25 bp, Homo sapien
gaagtagtggctgaatctgctcagg

SEQ ID NO: 158191 - DNA, 25 bp, Homo sapien
ctgagaagcctttatgggaagccac

SEQ ID NO: 158192 - DNA, 25 bp, Homo sapien
taaaaaagagcatacaactgttcca

SEQ ID NO: 158193 - DNA, 25 bp, Homo sapien
tacaagattttgtcccttggtcgat

SEQ ID NO: 158194 - DNA, 25 bp, Homo sapien
tttctcagaagacagccgctgtgtg

SEQ ID NO: 158195 - DNA, 25 bp, Homo sapien
tatctctgggacttgcgcaacatgg

SEQ ID NO: 158196 - DNA, 25 bp, Homo sapien
ccagaggtgtgacgggcccactctg

SEQ ID NO: 158197 - DNA, 25 bp, Homo sapien
tgtccccagaggtgtgacgggccca

SEQ ID NO: 158198 - DNA, 25 bp, Homo sapien
ctatgtgaaccgtgtccccagaggt

SEQ ID NO: 158199 - DNA, 25 bp, Homo sapien
tatgtgaaccgtgtccccagaggtg

SEQ ID NO: 158200 - DNA, 25 bp, Homo sapien
tcagcagggacatctacttgcagcc

SEQ ID NO: 158201 - DNA, 25 bp, Homo sapien
taggcaggacctctcatggagttgc

SEQ ID NO: 158202 - DNA, 25 bp, Homo sapien
ttgcagcctcctcgtgtgcccttgg

SEQ ID NO: 158203 - DNA, 25 bp, Homo sapien
gcaagccatgtcatacttggtagta

SEQ ID NO: 158204 - DNA, 25 bp, Homo sapien
gaagaattccacgtaccttgaaagc

SEQ ID NO: 158205 - DNA, 25 bp, Homo sapien
caggtttgaagaattccacgtacct

SEQ ID NO: 158206 - DNA, 25 bp, Homo sapien
gtttgaagaattccacgtaccttga

SEQ ID NO: 158207 - DNA, 25 bp, Homo sapien
tgaagaattccacgtaccttgaaag

SEQ ID NO: 158208 - DNA, 25 bp, Homo sapien
ggcaccgtggaaccaggaagctgca

SEQ ID NO: 158209 - DNA, 25 bp, Homo sapien
ccgcagggcaccgtggaaccaggaa

SEQ ID NO: 158210 - DNA, 25 bp, Homo sapien
tccatggccgcagggcaccgtggaa

SEQ ID NO: 158211 - DNA, 25 bp, Homo sapien
aggagagcccctccatggccgcagg

SEQ ID NO: 158212 - DNA, 25 bp, Homo sapien
tgagtgatcttggaaggaaggccca

SEQ ID NO: 158213 - DNA, 25 bp, Homo sapien
ccaaatagacactcagagtcttatc

SEQ ID NO: 158214 - DNA, 25 bp, Homo sapien
tcatgactaatttccgggacccgtc

SEQ ID NO: 158215 - DNA, 25 bp, Homo sapien
gagtcttatctttgagtgatcttgg

SEQ ID NO: 158216 - DNA, 25 bp, Homo sapien
cccacggaatgtagcgtgtgggtta

SEQ ID NO: 158217 - DNA, 25 bp, Homo sapien
tgtgggttactaggcagggaccact

SEQ ID NO: 158218 - DNA, 25 bp, Homo sapien
aatgtagcgtgtgggttactaggca

SEQ ID NO: 158219 - DNA, 25 bp, Homo sapien
ctgaggtctatgtcgtcgatgctgg

SEQ ID NO: 158220 - DNA, 25 bp, Homo sapien
gtggcgggatgggttggcttgcttc

SEQ ID NO: 158221 - DNA, 25 bp, Homo sapien
gaatagctcgggttgctccagatct

SEQ ID NO: 158222 - DNA, 25 bp, Homo sapien
gttcaaagcaagctgtgtctgggtc

SEQ ID NO: 158223 - DNA, 25 bp, Homo sapien
tgctccagatctcctgaagtcaagt

SEQ ID NO: 158224 - DNA, 25 bp, Homo sapien
ctagaggaatagctcgggttgctcc

SEQ ID NO: 158225 - DNA, 25 bp, Homo sapien
catctaaaccttctgtgttctccac

SEQ ID NO: 158226 - DNA, 25 bp, Homo sapien
ttaaagtcatctaaaccttctgtgt

SEQ ID NO: 158227 - DNA, 25 bp, Homo sapien
gtcatctaaaccttctgtgttctcc

SEQ ID NO: 158228 - DNA, 25 bp, Homo sapien
tctaaaccttctgtgttctccacat

SEQ ID NO: 158229 - DNA, 25 bp, Homo sapien
ctttttggttgttccacatctccaa

SEQ ID NO: 158230 - DNA, 25 bp, Homo sapien
tttttggttgttccacatctccaaa

SEQ ID NO: 158231 - DNA, 25 bp, Homo sapien
aatcattgtggtgccctagaggctc

SEQ ID NO: 158232 - DNA, 25 bp, Homo sapien
taaatcattgtggtgccctagaggc

SEQ ID NO: 158233 - DNA, 25 bp, Homo sapien
aggtaaatcattgtggtgccctaga

SEQ ID NO: 158234 - DNA, 25 bp, Homo sapien
cattgtggtgccctagaggctctcc

SEQ ID NO: 158235 - DNA, 25 bp, Homo sapien
agggtaggtccatgaaatgagagat

SEQ ID NO: 158236 - DNA, 25 bp, Homo sapien
ggtccatgaaatgagagatgcccac

SEQ ID NO: 158237 - DNA, 25 bp, Homo sapien
gggagggtaggtccatgaaatgaga

SEQ ID NO: 158238 - DNA, 25 bp, Homo sapien
taggtccatgaaatgagagatgccc

SEQ ID NO: 158239 - DNA, 25 bp, Homo sapien
ccactcgcctgtcgggatggcctct

SEQ ID NO: 158240 - DNA, 25 bp, Homo sapien
tttgtcttcctcggcacctccaagg

SEQ ID NO: 158241 - DNA, 25 bp, Homo sapien
caagaccacagtttgtcttcctcgg

SEQ ID NO: 158242 - DNA, 25 bp, Homo sapien
gtggctccttaaggccaagaccaca

SEQ ID NO: 158243 - DNA, 25 bp, Homo sapien
tgcaggtttggccatcctccatgga

SEQ ID NO: 158244 - DNA, 25 bp, Homo sapien
caggctctgtgtgtagtgtggacag

SEQ ID NO: 158245 - DNA, 25 bp, Homo sapien
ccatggattttccatggcccatttg

SEQ ID NO: 158246 - DNA, 25 bp, Homo sapien
gctgatggtttgcacacctgccagg

SEQ ID NO: 158247 - DNA, 25 bp, Homo sapien
gaggacagtagtcagtggacttcga

SEQ ID NO: 158248 - DNA, 25 bp, Homo sapien
ggccagagggaggacagtagtcagt

SEQ ID NO: 158249 - DNA, 25 bp, Homo sapien
cacctttacgttgtgggccagaggg

SEQ ID NO: 158250 - DNA, 25 bp, Homo sapien
tagtcagtggacttcgaagctcact

SEQ ID NO: 158251 - DNA, 25 bp, Homo sapien
tgttttgtaacagttggccctggct

SEQ ID NO: 158252 - DNA, 25 bp, Homo sapien
gttttgtaacagttggccctggctc

SEQ ID NO: 158253 - DNA, 25 bp, Homo sapien
gggaccactcgcctgcagagctgcc

SEQ ID NO: 158254 - DNA, 25 bp, Homo sapien
ccatccagggaccactcgcctgcag

SEQ ID NO: 158255 - DNA, 25 bp, Homo sapien
gcccatccagggaccactcgcctgc

SEQ ID NO: 158256 - DNA, 25 bp, Homo sapien
agggaccactcgcctgcagagctgc

SEQ ID NO: 158257 - DNA, 25 bp, Homo sapien
cgtcagtgtcttcagctggacagag

SEQ ID NO: 158258 - DNA, 25 bp, Homo sapien
gtgtcttcagctggacagagctgat

SEQ ID NO: 158259 - DNA, 25 bp, Homo sapien
tcagtgtcttcagctggacagagct

SEQ ID NO: 158260 - DNA, 25 bp, Homo sapien
cagtgtcttcagctggacagagctg

SEQ ID NO: 158261 - DNA, 25 bp, Homo sapien
cagaatcctgacacatctggacaaa

SEQ ID NO: 158262 - DNA, 25 bp, Homo sapien
tctggacaaattgggcctcggtctt

SEQ ID NO: 158263 - DNA, 25 bp, Homo sapien
tctagatccattgccttacacacag

SEQ ID NO: 158264 - DNA, 25 bp, Homo sapien
gattcctgcagccacaacaatttta

SEQ ID NO: 158265 - DNA, 25 bp, Homo sapien
agccatgccctttcctcaggaactt

SEQ ID NO: 158266 - DNA, 25 bp, Homo sapien
gccatgccctttcctcaggaacttg

SEQ ID NO: 158267 - DNA, 25 bp, Homo sapien
taagcagccatgccctttcctcagg

SEQ ID NO: 158268 - DNA, 25 bp, Homo sapien
agcagccatgccctttcctcaggaa

SEQ ID NO: 158269 - DNA, 25 bp, Homo sapien
gctgattgcgaatgctattttggtt

SEQ ID NO: 158270 - DNA, 25 bp, Homo sapien
gcaatttgtctacgaattgtgacct

SEQ ID NO: 158271 - DNA, 25 bp, Homo sapien
tataacacatcgcaacattgagctg

SEQ ID NO: 158272 - DNA, 25 bp, Homo sapien
taaaagcaaatggtgtgtataacac

SEQ ID NO: 158273 - DNA, 25 bp, Homo sapien
aagactccggtactgcgtttctaga

SEQ ID NO: 158274 - DNA, 25 bp, Homo sapien
tggccattggcatactgtgagacct

SEQ ID NO: 158275 - DNA, 25 bp, Homo sapien
tgtgagacctctcagaagactccgg

SEQ ID NO: 158276 - DNA, 25 bp, Homo sapien
gagggcttcagcatggcgctcaaac

SEQ ID NO: 158277 - DNA, 25 bp, Homo sapien
gttccattggtgagtgctatctaga

SEQ ID NO: 158278 - DNA, 25 bp, Homo sapien
tggtgagtgctatctagagtctcct

SEQ ID NO: 158279 - DNA, 25 bp, Homo sapien
gtgcagtagccacatgtgtcttgtg

SEQ ID NO: 158280 - DNA, 25 bp, Homo sapien
gctatcagattggacagtgcagaca

SEQ ID NO: 158281 - DNA, 25 bp, Homo sapien
cacgtggcgtttcagggattctagc

SEQ ID NO: 158282 - DNA, 25 bp, Homo sapien
tccaatgacctgacatcataaggat

SEQ ID NO: 158283 - DNA, 25 bp, Homo sapien
tcccgtaaagtggtggacagctttc

SEQ ID NO: 158284 - DNA, 25 bp, Homo sapien
cttgctagtgtcacagtcccgtaaa

SEQ ID NO: 158285 - DNA, 25 bp, Homo sapien
ctaagtaaccgtcagccgaaggtct

SEQ ID NO: 158286 - DNA, 25 bp, Homo sapien
cgaaggtctcgtggaacacaggcaa

SEQ ID NO: 158287 - DNA, 25 bp, Homo sapien
caggcaaacccgtgattttggtgct

SEQ ID NO: 158288 - DNA, 25 bp, Homo sapien
tggaacacaggcaaacccgtgattt

SEQ ID NO: 158289 - DNA, 25 bp, Homo sapien
gaagcttttctgttcgatgcactct

SEQ ID NO: 158290 - DNA, 25 bp, Homo sapien
gtataaccaagcatccttttgggca

SEQ ID NO: 158291 - DNA, 25 bp, Homo sapien
tgaggtcctagagtgcctccagggt

SEQ ID NO: 158292 - DNA, 25 bp, Homo sapien
gcagtttcctacctgcagatccagg

SEQ ID NO: 158293 - DNA, 25 bp, Homo sapien
catttctgacctgtacttatttttc

SEQ ID NO: 158294 - DNA, 25 bp, Homo sapien
gggattgctacaccatgtagaaaaa

SEQ ID NO: 158295 - DNA, 25 bp, Homo sapien
tcatatgatgtaggcacttgctgta

SEQ ID NO: 158296 - DNA, 25 bp, Homo sapien
actggagctcgtaattttttaactg

SEQ ID NO: 158297 - DNA, 25 bp, Homo sapien
ctgccattcaatttgatgtgagtgc

SEQ ID NO: 158298 - DNA, 25 bp, Homo sapien
tgatcttcctatttgagtctcttga

SEQ ID NO: 158299 - DNA, 25 bp, Homo sapien
gagtctcttgagacaaatgcaaaac

SEQ ID NO: 158300 - DNA, 25 bp, Homo sapien
cattcaatttgatgtgagtgccttg

SEQ ID NO: 158301 - DNA, 25 bp, Homo sapien
cagtattgctaagcgtggcattcac

SEQ ID NO: 158302 - DNA, 25 bp, Homo sapien
gaattctgttgacccgcactttaaa

SEQ ID NO: 158303 - DNA, 25 bp, Homo sapien
tctcattaggttggaaggtactaaa

SEQ ID NO: 158304 - DNA, 25 bp, Homo sapien
aagggacagctgagattgagtgtca

SEQ ID NO: 158305 - DNA, 25 bp, Homo sapien
tggcccctgtactttagcatctgtg

SEQ ID NO: 158306 - DNA, 25 bp, Homo sapien
ttgggaagggtcattcatttgcacg

SEQ ID NO: 158307 - DNA, 25 bp, Homo sapien
tctttcaagatctcgcatgccatgt

SEQ ID NO: 158308 - DNA, 25 bp, Homo sapien
ctgctggatctgagctgggattctt

SEQ ID NO: 158309 - DNA, 25 bp, Homo sapien
tcctgccggagagggtaacctagaa

SEQ ID NO: 158310 - DNA, 25 bp, Homo sapien
ggtattttaccacgacgagccctca

SEQ ID NO: 158311 - DNA, 25 bp, Homo sapien
ggaaatctcgggtgcatgcagccat

SEQ ID NO: 158312 - DNA, 25 bp, Homo sapien
tcttggtgggacttcaggaacgctg

SEQ ID NO: 158313 - DNA, 25 bp, Homo sapien
ggaacacttttgctctaacgccact

SEQ ID NO: 158314 - DNA, 25 bp, Homo sapien
ggagactgagatcccacgtgtgagt

SEQ ID NO: 158315 - DNA, 25 bp, Homo sapien
tccgaaggcgggacctctaaagaca

SEQ ID NO: 158316 - DNA, 25 bp, Homo sapien
gaaaactctcatgttgggcggcgtg

SEQ ID NO: 158317 - DNA, 25 bp, Homo sapien
tagccttaggctgagtactttattt

SEQ ID NO: 158318 - DNA, 25 bp, Homo sapien
ccttaggctgagtactttatttgcc

SEQ ID NO: 158319 - DNA, 25 bp, Homo sapien
cttaggctgagtactttatttgcca

SEQ ID NO: 158320 - DNA, 25 bp, Homo sapien
gccttaggctgagtactttatttgc

SEQ ID NO: 158321 - DNA, 25 bp, Homo sapien
agcttcctgatatttcgtcttctcc

SEQ ID NO: 158322 - DNA, 25 bp, Homo sapien
tgagcttcctgatatttcgtcttct

SEQ ID NO: 158323 - DNA, 25 bp, Homo sapien
gccctgagcttcctgatatttcgtc

SEQ ID NO: 158324 - DNA, 25 bp, Homo sapien
cctgagcttcctgatatttcgtctt

SEQ ID NO: 158325 - DNA, 25 bp, Homo sapien
tttgctgactgtgacttctgctgct

SEQ ID NO: 158326 - DNA, 25 bp, Homo sapien
ctgggggacagtccggggccagcag

SEQ ID NO: 158327 - DNA, 25 bp, Homo sapien
cggggaaggccttggcggtttgctg

SEQ ID NO: 158328 - DNA, 25 bp, Homo sapien
tgggtgtgttctgtaagccagtgca

SEQ ID NO: 158329 - DNA, 25 bp, Homo sapien
ggtggaactgctgaggcttcagctc

SEQ ID NO: 158330 - DNA, 25 bp, Homo sapien
cggtggaactgctgaggcttcagct

SEQ ID NO: 158331 - DNA, 25 bp, Homo sapien
tcttggggggcatctgtcaagacag

SEQ ID NO: 158332 - DNA, 25 bp, Homo sapien
cagctcctgggaatcttggggggca

SEQ ID NO: 158333 - DNA, 25 bp, Homo sapien
ggtatcctctctgatggtggacaaa

SEQ ID NO: 158334 - DNA, 25 bp, Homo sapien
agagctcctgttccgtttgcaaggt

SEQ ID NO: 158335 - DNA, 25 bp, Homo sapien
ggtcccctctcttgtggacacaggt

SEQ ID NO: 158336 - DNA, 25 bp, Homo sapien
caaacatctatccagtgtgcagctg

SEQ ID NO: 158337 - DNA, 25 bp, Homo sapien
tatgaggtgctcatgtgaaggtgct

SEQ ID NO: 158338 - DNA, 25 bp, Homo sapien
tgctcggtgttcgagttgtatcaca

SEQ ID NO: 158339 - DNA, 25 bp, Homo sapien
tttttgagcgggtgggtttgcacac

SEQ ID NO: 158340 - DNA, 25 bp, Homo sapien
cagccttggcaagcatttggatttt

SEQ ID NO: 158341 - DNA, 25 bp, Homo sapien
ggatcctgtgcagccttggttgaga

SEQ ID NO: 158342 - DNA, 25 bp, Homo sapien
gaggatcctgtgcagccttggttga

SEQ ID NO: 158343 - DNA, 25 bp, Homo sapien
actggtgaggatcctgtgcagcctt

SEQ ID NO: 158344 - DNA, 25 bp, Homo sapien
gtgaggatcctgtgcagccttggtt

SEQ ID NO: 158345 - DNA, 25 bp, Homo sapien
agccgtctgtctgcttcgtttctgg

SEQ ID NO: 158346 - DNA, 25 bp, Homo sapien
agttgatggcctccgtctctgagtc

SEQ ID NO: 158347 - DNA, 25 bp, Homo sapien
ctggcttgcggcttcaaattggaag

SEQ ID NO: 158348 - DNA, 25 bp, Homo sapien
cctcgcacgcagctgtccagttgat

SEQ ID NO: 158349 - DNA, 25 bp, Homo sapien
ggagccagagatgaatacattgaaa

SEQ ID NO: 158350 - DNA, 25 bp, Homo sapien
ccagttgaccttcggtttgtagcag

SEQ ID NO: 158351 - DNA, 25 bp, Homo sapien
aatgaggccattaggagccagagat

SEQ ID NO: 158352 - DNA, 25 bp, Homo sapien
tgccagttgaccttcggtttgtagc

SEQ ID NO: 158353 - DNA, 25 bp, Homo sapien
ggtttcactgcgcacccgtgatgtg

SEQ ID NO: 158354 - DNA, 25 bp, Homo sapien
cactgcgcacccgtgatgtgtgtca

SEQ ID NO: 158355 - DNA, 25 bp, Homo sapien
aggctcttctctcggctgcggaccc

SEQ ID NO: 158356 - DNA, 25 bp, Homo sapien
gcacccgtgatgtgtgtcaataaga

SEQ ID NO: 158357 - DNA, 25 bp, Homo sapien
gggcgcatttaaccagtcattgtag

SEQ ID NO: 158358 - DNA, 25 bp, Homo sapien
gagcaccagagtgaatgcgaatcct

SEQ ID NO: 158359 - DNA, 25 bp, Homo sapien
cctgggccgtctcagttagggactg

SEQ ID NO: 158360 - DNA, 25 bp, Homo sapien
caaaccgtcaaacttgtggagcacc

SEQ ID NO: 158361 - DNA, 25 bp, Homo sapien
actcctttgcgcagactcggctgct

SEQ ID NO: 158362 - DNA, 25 bp, Homo sapien
tgcctcaaacaacgggcccagtgga

SEQ ID NO: 158363 - DNA, 25 bp, Homo sapien
ggttcttccagcgagcactcctttg

SEQ ID NO: 158364 - DNA, 25 bp, Homo sapien
tgaatggaactagagcggttcttcc

SEQ ID NO: 158365 - DNA, 25 bp, Homo sapien
ctgttgcagatccagaacgaaaggg

SEQ ID NO: 158366 - DNA, 25 bp, Homo sapien
agccttggcgtggacccaaagctgg

SEQ ID NO: 158367 - DNA, 25 bp, Homo sapien
tcttggtcctcgggcatgagctgct

SEQ ID NO: 158368 - DNA, 25 bp, Homo sapien
cttggtcctcgggcatgagctgctt

SEQ ID NO: 158369 - DNA, 25 bp, Homo sapien
tggacccaaagctggggaagtcagt

SEQ ID NO: 158370 - DNA, 25 bp, Homo sapien
gcagttgcttgggttgatggcacct

SEQ ID NO: 158371 - DNA, 25 bp, Homo sapien
tcaggtgaatccctgggtaggagga

SEQ ID NO: 158372 - DNA, 25 bp, Homo sapien
gaggagcagttgcttgggttgatgg

SEQ ID NO: 158373 - DNA, 25 bp, Homo sapien
cagtgctcaggtgaatccctgggta

SEQ ID NO: 158374 - DNA, 25 bp, Homo sapien
gagccacccatcagctagaagcaca

SEQ ID NO: 158375 - DNA, 25 bp, Homo sapien
tcagccgggagatggctgtacctgg

SEQ ID NO: 158376 - DNA, 25 bp, Homo sapien
gtagcctcaagccagcactgacttc

SEQ ID NO: 158377 - DNA, 25 bp, Homo sapien
tgtacctgggtgctgtagcctcaag

SEQ ID NO: 158378 - DNA, 25 bp, Homo sapien
atcactgtcattgccgcttccctgg

SEQ ID NO: 158379 - DNA, 25 bp, Homo sapien
tgaatagcggcaggcattactgcta

SEQ ID NO: 158380 - DNA, 25 bp, Homo sapien
tgcggccttaagcagcagctggcct

SEQ ID NO: 158381 - DNA, 25 bp, Homo sapien
tctttctctgttacattgtgcggcc

SEQ ID NO: 158382 - DNA, 25 bp, Homo sapien
cctggggtgtcctggctacccccag

SEQ ID NO: 158383 - DNA, 25 bp, Homo sapien
ctggggtgtcctggctacccccagt

SEQ ID NO: 158384 - DNA, 25 bp, Homo sapien
cgtggcttctgtaggtgctggagcc

SEQ ID NO: 158385 - DNA, 25 bp, Homo sapien
ggcttctgtaggtgctggagcctgg

SEQ ID NO: 158386 - DNA, 25 bp, Homo sapien
ggggcggggatgagtcccagcaggt

SEQ ID NO: 158387 - DNA, 25 bp, Homo sapien
agtcagggacttggcatgtggtccc

SEQ ID NO: 158388 - DNA, 25 bp, Homo sapien
ctcgaccaggctcatctctgtctct

SEQ ID NO: 158389 - DNA, 25 bp, Homo sapien
cagccttaaccaagtcgatttcctc

SEQ ID NO: 158390 - DNA, 25 bp, Homo sapien
aagtcgatttcctcgaccaggctca

SEQ ID NO: 158391 - DNA, 25 bp, Homo sapien
cagtgacaggtgtggatgtggtgtc

SEQ ID NO: 158392 - DNA, 25 bp, Homo sapien
ggtccagtcactgtgggcagtgaca

SEQ ID NO: 158393 - DNA, 25 bp, Homo sapien
taccaccggggaacttgaggctgag

SEQ ID NO: 158394 - DNA, 25 bp, Homo sapien
gcctggagggttgggagatctacag

SEQ ID NO: 158395 - DNA, 25 bp, Homo sapien
gcaggtcccatgaacagctaccatc

SEQ ID NO: 158396 - DNA, 25 bp, Homo sapien
tactggcaggtcccatgaacagcta

SEQ ID NO: 158397 - DNA, 25 bp, Homo sapien
tggcaggtcccatgaacagctacca

SEQ ID NO: 158398 - DNA, 25 bp, Homo sapien
ctggcaggtcccatgaacagctacc

SEQ ID NO: 158399 - DNA, 25 bp, Homo sapien
gttcattaccctgcagtaaaagcca

SEQ ID NO: 158400 - DNA, 25 bp, Homo sapien
tgcacagtacgttcgcctctcaaat

SEQ ID NO: 158401 - DNA, 25 bp, Homo sapien
caaaggcaggagcacagtctcatga

SEQ ID NO: 158402 - DNA, 25 bp, Homo sapien
ctttgttaatcacttggcaagcgct

SEQ ID NO: 158403 - DNA, 25 bp, Homo sapien
gtgcgcgccggtcgggtcgcttcgc

SEQ ID NO: 158404 - DNA, 25 bp, Homo sapien
gggtggcattcgtcccgggtgctgg

SEQ ID NO: 158405 - DNA, 25 bp, Homo sapien
aaccgtgcgcgccggtcgggtcgct

SEQ ID NO: 158406 - DNA, 25 bp, Homo sapien
cgcttcgccggggtggcattcgtcc

SEQ ID NO: 158407 - DNA, 25 bp, Homo sapien
gagtgtccagaaaacacgcgtctac

SEQ ID NO: 158408 - DNA, 25 bp, Homo sapien
cagatgaagccatccgtccaatcca

SEQ ID NO: 158409 - DNA, 25 bp, Homo sapien
ccagtgcctaggctgtgcctctagt

SEQ ID NO: 158410 - DNA, 25 bp, Homo sapien
gcgtctacctcctgatgactgcagg

SEQ ID NO: 158411 - DNA, 25 bp, Homo sapien
aattccgaggactgcagtagttgca

SEQ ID NO: 158412 - DNA, 25 bp, Homo sapien
cattttaacagcacacatgcgcctg

SEQ ID NO: 158413 - DNA, 25 bp, Homo sapien
tcagcaacaggacgaatggatttct

SEQ ID NO: 158414 - DNA, 25 bp, Homo sapien
tcagctgaagacgaccatcccattt

SEQ ID NO: 158415 - DNA, 25 bp, Homo sapien
tgcggggcgtttctgtactgccaca

SEQ ID NO: 158416 - DNA, 25 bp, Homo sapien
gatttcctcgtctgcggggcgtttc

SEQ ID NO: 158417 - DNA, 25 bp, Homo sapien
atttaggatttcctcgtctgcgggg

SEQ ID NO: 158418 - DNA, 25 bp, Homo sapien
taggatttcctcgtctgcggggcgt

SEQ ID NO: 158419 - DNA, 25 bp, Homo sapien
ctggggacaccgagcccggaacagc

SEQ ID NO: 158420 - DNA, 25 bp, Homo sapien
gagcccggaacagccgagcctggcc

SEQ ID NO: 158421 - DNA, 25 bp, Homo sapien
ctggcagagtctacggcgtcggcct

SEQ ID NO: 158422 - DNA, 25 bp, Homo sapien
ccgtaagtgtctgcggagtgcgcgc

SEQ ID NO: 158423 - DNA, 25 bp, Homo sapien
atagagagaccgagagctcccagag

SEQ ID NO: 158424 - DNA, 25 bp, Homo sapien
ggcagccccagccatagagagaccg

SEQ ID NO: 158425 - DNA, 25 bp, Homo sapien
tatcccattgtacagaggcagcccc

SEQ ID NO: 158426 - DNA, 25 bp, Homo sapien
atcccattgtacagaggcagcccca

SEQ ID NO: 158427 - DNA, 25 bp, Homo sapien
ggcggggtctgccttccttgtaatc

SEQ ID NO: 158428 - DNA, 25 bp, Homo sapien
tccgagagcccttgcgccgctcgcg

SEQ ID NO: 158429 - DNA, 25 bp, Homo sapien
cccgtcccgccttgccactggcggg

SEQ ID NO: 158430 - DNA, 25 bp, Homo sapien
tgagggtcgtgggtcgggatttcga

SEQ ID NO: 158431 - DNA, 25 bp, Homo sapien
ccgagaggcggctattgatccggct

SEQ ID NO: 158432 - DNA, 25 bp, Homo sapien
acgtgagacatggagcgcagcaaga

SEQ ID NO: 158433 - DNA, 25 bp, Homo sapien
agaggtcaaggtcggccgagaggcg

SEQ ID NO: 158434 - DNA, 25 bp, Homo sapien
tattgatccggcttggaacgtgaga

SEQ ID NO: 158435 - DNA, 25 bp, Homo sapien
gctgttctggttccacatctggtga

SEQ ID NO: 158436 - DNA, 25 bp, Homo sapien
aatccaacctgggtataggacggca

SEQ ID NO: 158437 - DNA, 25 bp, Homo sapien
tattggcttgcaggatggctggaaa

SEQ ID NO: 158438 - DNA, 25 bp, Homo sapien
ttcagctgcctgttattggcttgca

SEQ ID NO: 158439 - DNA, 25 bp, Homo sapien
ctttgccttagcgtgcagtcccagg

SEQ ID NO: 158440 - DNA, 25 bp, Homo sapien
tttgccttagcgtgcagtcccaggt

SEQ ID NO: 158441 - DNA, 25 bp, Homo sapien
gagctttgccttagcgtgcagtccc

SEQ ID NO: 158442 - DNA, 25 bp, Homo sapien
agctttgccttagcgtgcagtccca

SEQ ID NO: 158443 - DNA, 25 bp, Homo sapien
ggcctgggtcggagatgcagcaggc

SEQ ID NO: 158444 - DNA, 25 bp, Homo sapien
gggcctgggtcggagatgcagcagg

SEQ ID NO: 158445 - DNA, 25 bp, Homo sapien
aatcagggggtacaaacagcatgat

SEQ ID NO: 158446 - DNA, 25 bp, Homo sapien
gtacaaacagcatgatgactctggc

SEQ ID NO: 158447 - DNA, 25 bp, Homo sapien
gcatgatgactctggccacaaggca

SEQ ID NO: 158448 - DNA, 25 bp, Homo sapien
agcatgatgactctggccacaaggc

SEQ ID NO: 158449 - DNA, 25 bp, Homo sapien
ttcaggcccatggcccaagatgtct

SEQ ID NO: 158450 - DNA, 25 bp, Homo sapien
cacagatgccatggaaggggtaacc

SEQ ID NO: 158451 - DNA, 25 bp, Homo sapien
cacaaaaccagcgcatcccctgaag

SEQ ID NO: 158452 - DNA, 25 bp, Homo sapien
aggcccatggcccaagatgtctgct

SEQ ID NO: 158453 - DNA, 25 bp, Homo sapien
gagcatgtaactcggagatgggaaa

SEQ ID NO: 158454 - DNA, 25 bp, Homo sapien
tgtcagcgcgacactctgaagtctc

SEQ ID NO: 158455 - DNA, 25 bp, Homo sapien
gatgggaaaggttgcccagaaagca

SEQ ID NO: 158456 - DNA, 25 bp, Homo sapien
catagaaataaaacacggaggtgac

SEQ ID NO: 158457 - DNA, 25 bp, Homo sapien
acgctggccagataccgccctctta

SEQ ID NO: 158458 - DNA, 25 bp, Homo sapien
tggccagataccgccctcttacatg

SEQ ID NO: 158459 - DNA, 25 bp, Homo sapien
gggctccacgctggccagataccgc

SEQ ID NO: 158460 - DNA, 25 bp, Homo sapien
gttcactgggctccacgctggccag

SEQ ID NO: 158461 - DNA, 25 bp, Homo sapien
cagccccctctgataggtattcagg

SEQ ID NO: 158462 - DNA, 25 bp, Homo sapien
gataggtattcaggatcttgccaag

SEQ ID NO: 158463 - DNA, 25 bp, Homo sapien
gaacctttcaaatgttccatgggaa

SEQ ID NO: 158464 - DNA, 25 bp, Homo sapien
gatcttgccaagaacctttcaaatg

SEQ ID NO: 158465 - DNA, 25 bp, Homo sapien
tcacccaggacattgcgtagagccc

SEQ ID NO: 158466 - DNA, 25 bp, Homo sapien
gtgtcacccaggacattgcgtagag

SEQ ID NO: 158467 - DNA, 25 bp, Homo sapien
acccaggacattgcgtagagcccca

SEQ ID NO: 158468 - DNA, 25 bp, Homo sapien
gtcacccaggacattgcgtagagcc

SEQ ID NO: 158469 - DNA, 25 bp, Homo sapien
gggtgactgactggcttgtgacttg

SEQ ID NO: 158470 - DNA, 25 bp, Homo sapien
actgactggcttgtgacttgtggtg

SEQ ID NO: 158471 - DNA, 25 bp, Homo sapien
aaacaataagaatgaggagcggcat

SEQ ID NO: 158472 - DNA, 25 bp, Homo sapien
gggttgcaggttgaaacaataagaa

SEQ ID NO: 158473 - DNA, 25 bp, Homo sapien
acctgaccgtgaggcctctgtgcag

SEQ ID NO: 158474 - DNA, 25 bp, Homo sapien
gggtcttggtgctgccacctgaccg

SEQ ID NO: 158475 - DNA, 25 bp, Homo sapien
gctgtgtatggtggaagggcccaaa

SEQ ID NO: 158476 - DNA, 25 bp, Homo sapien
ggctgtgtatggtggaagggcccaa

SEQ ID NO: 158477 - DNA, 25 bp, Homo sapien
ctgtgtatggtggaagggcccaaag

SEQ ID NO: 158478 - DNA, 25 bp, Homo sapien
agcagccgggcacactgaggtgcct

SEQ ID NO: 158479 - DNA, 25 bp, Homo sapien
tggcagcagccgggcacactgaggt

SEQ ID NO: 158480 - DNA, 25 bp, Homo sapien
gcagcagccgggcacactgaggtgc

SEQ ID NO: 158481 - DNA, 25 bp, Homo sapien
ctgcggaagtggtggcagcagccgg

SEQ ID NO: 158482 - DNA, 25 bp, Homo sapien
gagaagccctgaggacgttgcagct

SEQ ID NO: 158483 - DNA, 25 bp, Homo sapien
gccctgaggacgttgcagctcccgg

SEQ ID NO: 158484 - DNA, 25 bp, Homo sapien
tgaggacgttgcagctcccggccct

SEQ ID NO: 158485 - DNA, 25 bp, Homo sapien
cagagccagcagacatgctgcccag

SEQ ID NO: 158486 - DNA, 25 bp, Homo sapien
gaggtaacggtaaagtggatcagtc

SEQ ID NO: 158487 - DNA, 25 bp, Homo sapien
gaaagtccgaccatctggatgaggg

SEQ ID NO: 158488 - DNA, 25 bp, Homo sapien
tgactcttcaagcaccctgttgctt

SEQ ID NO: 158489 - DNA, 25 bp, Homo sapien
agcaccctgttgcttggtggaagag

SEQ ID NO: 158490 - DNA, 25 bp, Homo sapien
aagagcaaggaaaagccggtcagcc

SEQ ID NO: 158491 - DNA, 25 bp, Homo sapien
cgctcaggggccacatttgtcaaga

SEQ ID NO: 158492 - DNA, 25 bp, Homo sapien
cacggtgagcccctgatttttcgcc

SEQ ID NO: 158493 - DNA, 25 bp, Homo sapien
gccggtcagcccttttggagacacg

SEQ ID NO: 158494 - DNA, 25 bp, Homo sapien
aaagtagccatctgtgcttaatttc

SEQ ID NO: 158495 - DNA, 25 bp, Homo sapien
taatttcatcaatccactgtcgatg

SEQ ID NO: 158496 - DNA, 25 bp, Homo sapien
cgatggtcacgtgagtgtggctttt

SEQ ID NO: 158497 - DNA, 25 bp, Homo sapien
catcaatccactgtcgatggtcacg

SEQ ID NO: 158498 - DNA, 25 bp, Homo sapien
gaaggctcagctcccatgaggtcag

SEQ ID NO: 158499 - DNA, 25 bp, Homo sapien
aacccttgagttgtagagtgtcagc

SEQ ID NO: 158500 - DNA, 25 bp, Homo sapien
tcagaatcagggaactggttgtcct

SEQ ID NO: 158501 - DNA, 25 bp, Homo sapien
ggagtagacttgtggaatcccagag

SEQ ID NO: 158502 - DNA, 25 bp, Homo sapien
agaacttgaactccgtatttgaagg

SEQ ID NO: 158503 - DNA, 25 bp, Homo sapien
atgagccaggtaagactagcccgga

SEQ ID NO: 158504 - DNA, 25 bp, Homo sapien
tatttgaaggggctgacacgatggt

SEQ ID NO: 158505 - DNA, 25 bp, Homo sapien
ggagacagacccagcggttccttct

SEQ ID NO: 158506 - DNA, 25 bp, Homo sapien
ctcaaggaatcaagagatgaacatg

SEQ ID NO: 158507 - DNA, 25 bp, Homo sapien
agagatgaacatgttcttgggcaca

SEQ ID NO: 158508 - DNA, 25 bp, Homo sapien
gttagcgtggtgagctccaaactcc

SEQ ID NO: 158509 - DNA, 25 bp, Homo sapien
gctcttcctgaatacgcaggttagc

SEQ ID NO: 158510 - DNA, 25 bp, Homo sapien
tagggctcagatttaccaaggacat

SEQ ID NO: 158511 - DNA, 25 bp, Homo sapien
gggccttagggctcagatttaccaa

SEQ ID NO: 158512 - DNA, 25 bp, Homo sapien
ggagtgctgcgatccaagcaaagta

SEQ ID NO: 158513 - DNA, 25 bp, Homo sapien
ctgagtggcaggagtgctgcgatcc

SEQ ID NO: 158514 - DNA, 25 bp, Homo sapien
tccgcagctcggcacgtgggtgcca

SEQ ID NO: 158515 - DNA, 25 bp, Homo sapien
gcagtccggtcgatcttcagcctgg

SEQ ID NO: 158516 - DNA, 25 bp, Homo sapien
agcgtgagtccacttcacactctca

SEQ ID NO: 158517 - DNA, 25 bp, Homo sapien
aggcctcagagcagtccggtcgatc

SEQ ID NO: 158518 - DNA, 25 bp, Homo sapien
ggtgtagtgcccttgctgcaccgat

SEQ ID NO: 158519 - DNA, 25 bp, Homo sapien
tcttttgcaggtgtcattcgaggcc

SEQ ID NO: 158520 - DNA, 25 bp, Homo sapien
gcggtgatgccccatgtcgctgcac

SEQ ID NO: 158521 - DNA, 25 bp, Homo sapien
cctgtgtatcgccagggctgtgtcc

SEQ ID NO: 158522 - DNA, 25 bp, Homo sapien
tccggaggagctccttgtaggatcc

SEQ ID NO: 158523 - DNA, 25 bp, Homo sapien
gaggagctccttgtaggatcccaga

SEQ ID NO: 158524 - DNA, 25 bp, Homo sapien
ctccattttaatgaggttccggagg

SEQ ID NO: 158525 - DNA, 25 bp, Homo sapien
agctccttgtaggatcccagagtca

SEQ ID NO: 158526 - DNA, 25 bp, Homo sapien
taaagagtgcagctgtcaaccggga

SEQ ID NO: 158527 - DNA, 25 bp, Homo sapien
gaatactatcgccaacagatggagg

SEQ ID NO: 158528 - DNA, 25 bp, Homo sapien
ccaggtccgaaaatgaaagtctcaa

SEQ ID NO: 158529 - DNA, 25 bp, Homo sapien
ggtgaaaactctatccctaatggga

SEQ ID NO: 158530 - DNA, 25 bp, Homo sapien
tccctgggtacagattcagggtctc

SEQ ID NO: 158531 - DNA, 25 bp, Homo sapien
tcacttccctgggtacagattcagg

SEQ ID NO: 158532 - DNA, 25 bp, Homo sapien
cacttccctgggtacagattcaggg

SEQ ID NO: 158533 - DNA, 25 bp, Homo sapien
cttccctgggtacagattcagggtc

SEQ ID NO: 158534 - DNA, 25 bp, Homo sapien
gtttggaggccataagactacttag

SEQ ID NO: 158535 - DNA, 25 bp, Homo sapien
caagccttgccaggtagttgggatc

SEQ ID NO: 158536 - DNA, 25 bp, Homo sapien
tgcttgcttaatgacaaccccagcg

SEQ ID NO: 158537 - DNA, 25 bp, Homo sapien
gactacttagcctggtgaatccgag

SEQ ID NO: 158538 - DNA, 25 bp, Homo sapien
atggaagtcttcactagtttgtgtg

SEQ ID NO: 158539 - DNA, 25 bp, Homo sapien
agtcttcactagtttgtgtgtcatc

SEQ ID NO: 158540 - DNA, 25 bp, Homo sapien
tcatcttcccagtattattccagtt

SEQ ID NO: 158541 - DNA, 25 bp, Homo sapien
gctcatcttcccagtattattccag

SEQ ID NO: 158542 - DNA, 25 bp, Homo sapien
ccactccaggtggaccatatctttt

SEQ ID NO: 158543 - DNA, 25 bp, Homo sapien
cagtccactccaggtggaccatatc

SEQ ID NO: 158544 - DNA, 25 bp, Homo sapien
gtgtttgcatgggagtagaggcacc

SEQ ID NO: 158545 - DNA, 25 bp, Homo sapien
tttgcatgggagtagaggcacccat

SEQ ID NO: 158546 - DNA, 25 bp, Homo sapien
caggtgtttgcatgggagtagaggc

SEQ ID NO: 158547 - DNA, 25 bp, Homo sapien
ctgtgacgcaggtgtttgcatggga

SEQ ID NO: 158548 - DNA, 25 bp, Homo sapien
gagcggctcttttccacgtcgtagg

SEQ ID NO: 158549 - DNA, 25 bp, Homo sapien
aggttgttcatctaggttggctgga

SEQ ID NO: 158550 - DNA, 25 bp, Homo sapien
ttctatggtcatgggaactgggtag

SEQ ID NO: 158551 - DNA, 25 bp, Homo sapien
ctggaactgttctgtcggagcggct

SEQ ID NO: 158552 - DNA, 25 bp, Homo sapien
gagccggccgctcttgcccccggga

SEQ ID NO: 158553 - DNA, 25 bp, Homo sapien
agccggccgctcttgcccccgggag

SEQ ID NO: 158554 - DNA, 25 bp, Homo sapien
cgaacggaacgccggctgggtggcg

SEQ ID NO: 158555 - DNA, 25 bp, Homo sapien
gccggccgctcttgcccccgggagc

SEQ ID NO: 158556 - DNA, 25 bp, Homo sapien
gggtcgagattcgtccaatcaaagc

SEQ ID NO: 158557 - DNA, 25 bp, Homo sapien
gggcgaacgcagccagttgcgacat

SEQ ID NO: 158558 - DNA, 25 bp, Homo sapien
gagattcgtccaatcaaagctctgg

SEQ ID NO: 158559 - DNA, 25 bp, Homo sapien
ggcccgggtcgagattcgtccaatc

SEQ ID NO: 158560 - DNA, 25 bp, Homo sapien
aatgtcggggacctacgtcatcacg

SEQ ID NO: 158561 - DNA, 25 bp, Homo sapien
tcagcgacgtctctccttgccgact

SEQ ID NO: 158562 - DNA, 25 bp, Homo sapien
gccatcttgtatatggaatgtcggg

SEQ ID NO: 158563 - DNA, 25 bp, Homo sapien
gggacctacgtcatcacgctgcgtc

SEQ ID NO: 158564 - DNA, 25 bp, Homo sapien
gaaagagagactccgccagtggata

SEQ ID NO: 158565 - DNA, 25 bp, Homo sapien
tgccctcagtcggtgggtcactcac

SEQ ID NO: 158566 - DNA, 25 bp, Homo sapien
tccgacctccagatacgcgggaggt

SEQ ID NO: 158567 - DNA, 25 bp, Homo sapien
ggcggttggccataacctactccga

SEQ ID NO: 158568 - DNA, 25 bp, Homo sapien
taccgagcctatcttgggcagacaa

SEQ ID NO: 158569 - DNA, 25 bp, Homo sapien
ttagcgggcacctacaactgcaagg

SEQ ID NO: 158570 - DNA, 25 bp, Homo sapien
tcagatgacttagcgaaagctccgt

SEQ ID NO: 158571 - DNA, 25 bp, Homo sapien
taaatttagggagcattaccgagcc

SEQ ID NO: 158572 - DNA, 25 bp, Homo sapien
gacatctccccaggcttacatcaac

SEQ ID NO: 158573 - DNA, 25 bp, Homo sapien
agacatctccccaggcttacatcaa

SEQ ID NO: 158574 - DNA, 25 bp, Homo sapien
aaagacatctccccaggcttacatc

SEQ ID NO: 158575 - DNA, 25 bp, Homo sapien
aagacatctccccaggcttacatca

SEQ ID NO: 158576 - DNA, 25 bp, Homo sapien
gacatacaggtcctctaacgctggt

SEQ ID NO: 158577 - DNA, 25 bp, Homo sapien
cactagacatacaggtcctctaacg

SEQ ID NO: 158578 - DNA, 25 bp, Homo sapien
ttttcttcactagacatacaggtcc

SEQ ID NO: 158579 - DNA, 25 bp, Homo sapien
caggtcctctaacgctggtccagat

SEQ ID NO: 158580 - DNA, 25 bp, Homo sapien
ttattgaagtaggcttgttctttcc

SEQ ID NO: 158581 - DNA, 25 bp, Homo sapien
tgaagtaggcttgttctttccaaaa

SEQ ID NO: 158582 - DNA, 25 bp, Homo sapien
tccaaaaggttctctgaaaatgtta

SEQ ID NO: 158583 - DNA, 25 bp, Homo sapien
tattgaagtaggcttgttctttcca

SEQ ID NO: 158584 - DNA, 25 bp, Homo sapien
tgtgagggtgtatgagccaagtctt

SEQ ID NO: 158585 - DNA, 25 bp, Homo sapien
ccaacatggctttgtgtggtccagg

SEQ ID NO: 158586 - DNA, 25 bp, Homo sapien
gcctcggtggctggatcaagtcctt

SEQ ID NO: 158587 - DNA, 25 bp, Homo sapien
atcaaagatgaaccgagcgccctct

SEQ ID NO: 158588 - DNA, 25 bp, Homo sapien
cacctcctcagtggctaagtctaca

SEQ ID NO: 158589 - DNA, 25 bp, Homo sapien
cagcctcaactgtgatcctaatggg

SEQ ID NO: 158590 - DNA, 25 bp, Homo sapien
tttcaagggatgctcctgtctaggc

SEQ ID NO: 158591 - DNA, 25 bp, Homo sapien
gatatttaagaactgctctggtaca

SEQ ID NO: 158592 - DNA, 25 bp, Homo sapien
tgaaacatatagaagcgatgaaaat

SEQ ID NO: 158593 - DNA, 25 bp, Homo sapien
ttccagttgccagggtatcatagtg

SEQ ID NO: 158594 - DNA, 25 bp, Homo sapien
tattccagttgccagggtatcatag

SEQ ID NO: 158595 - DNA, 25 bp, Homo sapien
aaattattccagttgccagggtatc

SEQ ID NO: 158596 - DNA, 25 bp, Homo sapien
tctccaaactggccaaattgtacat

SEQ ID NO: 158597 - DNA, 25 bp, Homo sapien
taataaactacgagctgttttgatg

SEQ ID NO: 158598 - DNA, 25 bp, Homo sapien
tacgagctgttttgatgatatcttt

SEQ ID NO: 158599 - DNA, 25 bp, Homo sapien
catcatttaataaactacgagctgt

SEQ ID NO: 158600 - DNA, 25 bp, Homo sapien
cttgatggtctgcagtaagattctc

SEQ ID NO: 158601 - DNA, 25 bp, Homo sapien
tgatggtctgcagtaagattctctc

SEQ ID NO: 158602 - DNA, 25 bp, Homo sapien
ttgatggtctgcagtaagattctct

SEQ ID NO: 158603 - DNA, 25 bp, Homo sapien
ttctctccagaaccattacttcctc

SEQ ID NO: 158604 - DNA, 25 bp, Homo sapien
ttttagtaggaactggtatggatgt

SEQ ID NO: 158605 - DNA, 25 bp, Homo sapien
tattttagtaggaactggtatggat

SEQ ID NO: 158606 - DNA, 25 bp, Homo sapien
ttagtaggaactggtatggatgttc

SEQ ID NO: 158607 - DNA, 25 bp, Homo sapien
tagtaggaactggtatggatgttct

SEQ ID NO: 158608 - DNA, 25 bp, Homo sapien
caaagagcttttgcgtgggaaacaa

SEQ ID NO: 158609 - DNA, 25 bp, Homo sapien
tcacaggcagcatcaagtatttatt

SEQ ID NO: 158610 - DNA, 25 bp, Homo sapien
aaaacctaccacgtgttcagcacca

SEQ ID NO: 158611 - DNA, 25 bp, Homo sapien
ccactcaaatacacagcaaagagct

SEQ ID NO: 158612 - DNA, 25 bp, Homo sapien
acaaatgtccatgccatttgaacca

SEQ ID NO: 158613 - DNA, 25 bp, Homo sapien
tacaaatgtccatgccatttgaacc

SEQ ID NO: 158614 - DNA, 25 bp, Homo sapien
aaggaaaccctctgccgggaagcag

SEQ ID NO: 158615 - DNA, 25 bp, Homo sapien
tgcaaaaccaaatgggctctaagta

SEQ ID NO: 158616 - DNA, 25 bp, Homo sapien
aatggtccataaagtctctgcctat

SEQ ID NO: 158617 - DNA, 25 bp, Homo sapien
taaggctctaaaactataccaggaa

SEQ ID NO: 158618 - DNA, 25 bp, Homo sapien
tcctatacatgggtttggaggtcca

SEQ ID NO: 158619 - DNA, 25 bp, Homo sapien
tgtatttcaaatttgcacaaacgtc

SEQ ID NO: 158620 - DNA, 25 bp, Homo sapien
cgtcgaccgggacatcttgaacaaa

SEQ ID NO: 158621 - DNA, 25 bp, Homo sapien
aacgtcctgcgagatacatcactgc

SEQ ID NO: 158622 - DNA, 25 bp, Homo sapien
agatgggggctgttgcagctgatgg

SEQ ID NO: 158623 - DNA, 25 bp, Homo sapien
ttccttgtgagtaaagatccaggat

SEQ ID NO: 158624 - DNA, 25 bp, Homo sapien
ccttgtgagtaaagatccaggattt

SEQ ID NO: 158625 - DNA, 25 bp, Homo sapien
gagatgggggctgttgcagctgatg

SEQ ID NO: 158626 - DNA, 25 bp, Homo sapien
ctgtacttgcggcacttgtggtgta

SEQ ID NO: 158627 - DNA, 25 bp, Homo sapien
gggctgggatggttcggagctttga

SEQ ID NO: 158628 - DNA, 25 bp, Homo sapien
tgtacttgcggcacttgtggtgtag

SEQ ID NO: 158629 - DNA, 25 bp, Homo sapien
tcggagctttgagacggctgtgact

SEQ ID NO: 158630 - DNA, 25 bp, Homo sapien
cggctcgcttaacctgtcggggaga

SEQ ID NO: 158631 - DNA, 25 bp, Homo sapien
cacggctcgcttaacctgtcgggga

SEQ ID NO: 158632 - DNA, 25 bp, Homo sapien
acggctcgcttaacctgtcggggag

SEQ ID NO: 158633 - DNA, 25 bp, Homo sapien
gttgccgccacctggaaagcctgct

SEQ ID NO: 158634 - DNA, 25 bp, Homo sapien
ggtgttgccgccacctggaaagcct

SEQ ID NO: 158635 - DNA, 25 bp, Homo sapien
gccgccacctggaaagcctgctcta

SEQ ID NO: 158636 - DNA, 25 bp, Homo sapien
ccgccacctggaaagcctgctctac

SEQ ID NO: 158637 - DNA, 25 bp, Homo sapien
ccaccgacaagcagtcggactgcga

SEQ ID NO: 158638 - DNA, 25 bp, Homo sapien
cagtcggactgcgagtttcggcgaa

SEQ ID NO: 158639 - DNA, 25 bp, Homo sapien
aagcagtcggactgcgagtttcggc

SEQ ID NO: 158640 - DNA, 25 bp, Homo sapien
ggactgcgagtttcggcgaacaccc

SEQ ID NO: 158641 - DNA, 25 bp, Homo sapien
ctcctggttctcagaggcagcctgt

SEQ ID NO: 158642 - DNA, 25 bp, Homo sapien
cctggttctcagaggcagcctgtcc

SEQ ID NO: 158643 - DNA, 25 bp, Homo sapien
cctggcagggatgaaacaggcagca

SEQ ID NO: 158644 - DNA, 25 bp, Homo sapien
cagaaccctggcagggatgaaacag

SEQ ID NO: 158645 - DNA, 25 bp, Homo sapien
tgttctcttctttgggagaaacaac

SEQ ID NO: 158646 - DNA, 25 bp, Homo sapien
tgctttgttctcttctttgggagaa

SEQ ID NO: 158647 - DNA, 25 bp, Homo sapien
gctgctttgttctcttctttgggag

SEQ ID NO: 158648 - DNA, 25 bp, Homo sapien
tttgttctcttctttgggagaaaca

SEQ ID NO: 158649 - DNA, 25 bp, Homo sapien
caacggtggatgagtggtctcaatt

SEQ ID NO: 158650 - DNA, 25 bp, Homo sapien
tggaggcaacggtggatgagtggtc

SEQ ID NO: 158651 - DNA, 25 bp, Homo sapien
cggtggatgagtggtctcaattttg

SEQ ID NO: 158652 - DNA, 25 bp, Homo sapien
gtgggctggaggcaacggtggatga

SEQ ID NO: 158653 - DNA, 25 bp, Homo sapien
tcctagtgcaaaacgtgtgggggct

SEQ ID NO: 158654 - DNA, 25 bp, Homo sapien
aacaattctgtacaagtctctgaca

SEQ ID NO: 158655 - DNA, 25 bp, Homo sapien
gcattttgcagaaaacctcagagtt

SEQ ID NO: 158656 - DNA, 25 bp, Homo sapien
ggtcagggccacactgaactcctgt

SEQ ID NO: 158657 - DNA, 25 bp, Homo sapien
cggcctccgccagcaatggttgctt

SEQ ID NO: 158658 - DNA, 25 bp, Homo sapien
tctgtggcccaacgcatgggcccat

SEQ ID NO: 158659 - DNA, 25 bp, Homo sapien
agagagacgcatcagtgcccggcct

SEQ ID NO: 158660 - DNA, 25 bp, Homo sapien
tgcaggagagagacgcatcagtgcc

SEQ ID NO: 158661 - DNA, 25 bp, Homo sapien
taggagggtccctcggtcttcatca

SEQ ID NO: 158662 - DNA, 25 bp, Homo sapien
tggtagccctctccagacatgtagg

SEQ ID NO: 158663 - DNA, 25 bp, Homo sapien
gtcttcatcatggactgcaggctct

SEQ ID NO: 158664 - DNA, 25 bp, Homo sapien
ggacatcccggtcatgtagctggag

SEQ ID NO: 158665 - DNA, 25 bp, Homo sapien
ctgcgtgggtaggcgggaggcgtgg

SEQ ID NO: 158666 - DNA, 25 bp, Homo sapien
tgggcgggtagacatgggggtggta

SEQ ID NO: 158667 - DNA, 25 bp, Homo sapien
gcaggtgggccgtaggcggggggca

SEQ ID NO: 158668 - DNA, 25 bp, Homo sapien
gtagacatgggggtggtagggcagg

SEQ ID NO: 158669 - DNA, 25 bp, Homo sapien
cccaactggaggcatgccgggtggg

SEQ ID NO: 158670 - DNA, 25 bp, Homo sapien
ggaggtgggtagctggctggcggca

SEQ ID NO: 158671 - DNA, 25 bp, Homo sapien
agccccccaactggaggcatgccgg

SEQ ID NO: 158672 - DNA, 25 bp, Homo sapien
acggcaggaggtgggtagctggctg

SEQ ID NO: 158673 - DNA, 25 bp, Homo sapien
gaaccaagtgtacacagtcagactg

SEQ ID NO: 158674 - DNA, 25 bp, Homo sapien
tactctgaaagctggttgtccccgt

SEQ ID NO: 158675 - DNA, 25 bp, Homo sapien
tcgtgcattatacaaggtaccctgc

SEQ ID NO: 158676 - DNA, 25 bp, Homo sapien
caatatggctggttaacgtcctcac

SEQ ID NO: 158677 - DNA, 25 bp, Homo sapien
aaaaaaaaagccatccaatgaggca

SEQ ID NO: 158678 - DNA, 25 bp, Homo sapien
tccaagtacatttctccccttctcc

SEQ ID NO: 158679 - DNA, 25 bp, Homo sapien
ctgaaggagtctcatttgtaaccaa

SEQ ID NO: 158680 - DNA, 25 bp, Homo sapien
caggaatttgcaaagagatgtaaac

SEQ ID NO: 158681 - DNA, 25 bp, Homo sapien
tatatctctatgtacaggaatttgc

SEQ ID NO: 158682 - DNA, 25 bp, Homo sapien
taactgactgaaggagtctcatttg

SEQ ID NO: 158683 - DNA, 25 bp, Homo sapien
tataagccacagactgcgaaggcct

SEQ ID NO: 158684 - DNA, 25 bp, Homo sapien
cgggcccggcagctacgtctatttt

SEQ ID NO: 158685 - DNA, 25 bp, Homo sapien
cgtggcccctcaaggtggacagtga

SEQ ID NO: 158686 - DNA, 25 bp, Homo sapien
ttggcaggcagctgtgcggatccac

SEQ ID NO: 158687 - DNA, 25 bp, Homo sapien
ggttggcgtggccaccactgaaata

SEQ ID NO: 158688 - DNA, 25 bp, Homo sapien
catgtttgggtcaggttggcgtggc

SEQ ID NO: 158689 - DNA, 25 bp, Homo sapien
aaataagcaataagtacgggctcct

SEQ ID NO: 158690 - DNA, 25 bp, Homo sapien
aagcaataagtacgggctcctggta

SEQ ID NO: 158691 - DNA, 25 bp, Homo sapien
ggtgggaggtggtttatacccatca

SEQ ID NO: 158692 - DNA, 25 bp, Homo sapien
tttatacccatcagcctcctaaggg

SEQ ID NO: 158693 - DNA, 25 bp, Homo sapien
tgccgtcatcacagtagaacatttt

SEQ ID NO: 158694 - DNA, 25 bp, Homo sapien
ggaggacactcagacttgtgccgtc

SEQ ID NO: 158695 - DNA, 25 bp, Homo sapien
cccaggcaagtctcctttaaggcta

SEQ ID NO: 158696 - DNA, 25 bp, Homo sapien
gtccctgggtaaagcaggtgactct

SEQ ID NO: 158697 - DNA, 25 bp, Homo sapien
ttaaggctacctgtgggtcatgggc

SEQ ID NO: 158698 - DNA, 25 bp, Homo sapien
ccagagagggccgtctccgggctca

SEQ ID NO: 158699 - DNA, 25 bp, Homo sapien
ccaagcatttatccggagtcccgtg

SEQ ID NO: 158700 - DNA, 25 bp, Homo sapien
cacgttggagagtggatcgctgaca

SEQ ID NO: 158701 - DNA, 25 bp, Homo sapien
gctctgaaaagccaagggatgccct

SEQ ID NO: 158702 - DNA, 25 bp, Homo sapien
gaagatcgattgatcccggctcggg

SEQ ID NO: 158703 - DNA, 25 bp, Homo sapien
cacattggtgtctccagtgctcagc

SEQ ID NO: 158704 - DNA, 25 bp, Homo sapien
ggccacattggtgtctccagtgctc

SEQ ID NO: 158705 - DNA, 25 bp, Homo sapien
gcagggtctgagtggccacattggt

SEQ ID NO: 158706 - DNA, 25 bp, Homo sapien
cagggtctgagtggccacattggtg

SEQ ID NO: 158707 - DNA, 25 bp, Homo sapien
catgggaactgtttgtcggggttga

SEQ ID NO: 158708 - DNA, 25 bp, Homo sapien
tcccatcacaccgctttgcttgggt

SEQ ID NO: 158709 - DNA, 25 bp, Homo sapien
tttgtcggggttgatagagtaatga

SEQ ID NO: 158710 - DNA, 25 bp, Homo sapien
ctcttcccatcacaccgctttgctt

SEQ ID NO: 158711 - DNA, 25 bp, Homo sapien
tacacccacttgctcacttacctgc

SEQ ID NO: 158712 - DNA, 25 bp, Homo sapien
gccttctacacccacttgctcactt

SEQ ID NO: 158713 - DNA, 25 bp, Homo sapien
cttctacacccacttgctcacttac

SEQ ID NO: 158714 - DNA, 25 bp, Homo sapien
gcacactcacgtactcacctgcaca

SEQ ID NO: 158715 - DNA, 25 bp, Homo sapien
cactcacctgctcacccatctgccc

SEQ ID NO: 158716 - DNA, 25 bp, Homo sapien
tgccctgatggggtctcggcaccac

SEQ ID NO: 158717 - DNA, 25 bp, Homo sapien
cctgatggggtctcggcaccaccat

SEQ ID NO: 158718 - DNA, 25 bp, Homo sapien
taggaaactgcaggtgccctgatgg

SEQ ID NO: 158719 - DNA, 25 bp, Homo sapien
agctctttaggaaactgcaggtgcc

SEQ ID NO: 158720 - DNA, 25 bp, Homo sapien
tcctcaggtcgtcatgcaggcttgc

SEQ ID NO: 158721 - DNA, 25 bp, Homo sapien
ggtcctcaggtcgtcatgcaggctt

SEQ ID NO: 158722 - DNA, 25 bp, Homo sapien
ttggcactgggtccagcggccacgt

SEQ ID NO: 158723 - DNA, 25 bp, Homo sapien
agcggccacgtctttcctgagcggg

SEQ ID NO: 158724 - DNA, 25 bp, Homo sapien
agaacggcacggctgtgcacctctg

SEQ ID NO: 158725 - DNA, 25 bp, Homo sapien
taaggagttgctggcatcgtaaatc

SEQ ID NO: 158726 - DNA, 25 bp, Homo sapien
ttctctaaggagttgctggcatcgt

SEQ ID NO: 158727 - DNA, 25 bp, Homo sapien
tctaaggagttgctggcatcgtaaa

SEQ ID NO: 158728 - DNA, 25 bp, Homo sapien
ggagttgctggcatcgtaaatctta

SEQ ID NO: 158729 - DNA, 25 bp, Homo sapien
atatttacattggcaaaggcccgga

SEQ ID NO: 158730 - DNA, 25 bp, Homo sapien
gacaggccacaaattaccctgtgca

SEQ ID NO: 158731 - DNA, 25 bp, Homo sapien
ttacattggcaaaggcccggacagg

SEQ ID NO: 158732 - DNA, 25 bp, Homo sapien
tatttacattggcaaaggcccggac

SEQ ID NO: 158733 - DNA, 25 bp, Homo sapien
tgataagcagctgtcgtccctggaa

SEQ ID NO: 158734 - DNA, 25 bp, Homo sapien
agctgtcgtccctggaaggtttcca

SEQ ID NO: 158735 - DNA, 25 bp, Homo sapien
caaaggacagatgtcagagctttcc

SEQ ID NO: 158736 - DNA, 25 bp, Homo sapien
gatgtcagagctttcccggagctga

SEQ ID NO: 158737 - DNA, 25 bp, Homo sapien
cccttagctttattgcctccctgcc

SEQ ID NO: 158738 - DNA, 25 bp, Homo sapien
caaggtctggattgaacttggcagg

SEQ ID NO: 158739 - DNA, 25 bp, Homo sapien
gcccaaggtctggattgaacttggc

SEQ ID NO: 158740 - DNA, 25 bp, Homo sapien
ttagctttattgcctccctgcccaa

SEQ ID NO: 158741 - DNA, 25 bp, Homo sapien
ggctgggaccaagccccgttccaga

SEQ ID NO: 158742 - DNA, 25 bp, Homo sapien
tcctgtgtacgggaactcaggtgga

SEQ ID NO: 158743 - DNA, 25 bp, Homo sapien
ctcaggtggaacagggctggatcct

SEQ ID NO: 158744 - DNA, 25 bp, Homo sapien
accctctggctgcagtctcgaccct

SEQ ID NO: 158745 - DNA, 25 bp, Homo sapien
ccaccggcagagcaggttccacagg

SEQ ID NO: 158746 - DNA, 25 bp, Homo sapien
agactcggagtcacactgggcctcc

SEQ ID NO: 158747 - DNA, 25 bp, Homo sapien
tatctctgagcccacagcagactcg

SEQ ID NO: 158748 - DNA, 25 bp, Homo sapien
accggcagagcaggttccacaggtg

SEQ ID NO: 158749 - DNA, 25 bp, Homo sapien
cccagtggtttgagcatgggtgtgg

SEQ ID NO: 158750 - DNA, 25 bp, Homo sapien
ccagtggtttgagcatgggtgtggc

SEQ ID NO: 158751 - DNA, 25 bp, Homo sapien
gcccagtggtttgagcatgggtgtg

SEQ ID NO: 158752 - DNA, 25 bp, Homo sapien
ctgtgttctttgcaggcggggtcca

SEQ ID NO: 158753 - DNA, 25 bp, Homo sapien
tggcatagttggtggtctgttcacg

SEQ ID NO: 158754 - DNA, 25 bp, Homo sapien
tgggtctgaccagcttggtgtggca

SEQ ID NO: 158755 - DNA, 25 bp, Homo sapien
gctctgtcctggaagatagaacttc

SEQ ID NO: 158756 - DNA, 25 bp, Homo sapien
caggcgagagaattgcagacaatgg

SEQ ID NO: 158757 - DNA, 25 bp, Homo sapien
ggttgtttccctgcgagcccattga

SEQ ID NO: 158758 - DNA, 25 bp, Homo sapien
gcccattgagaaatccccctggaaa

SEQ ID NO: 158759 - DNA, 25 bp, Homo sapien
ggtgtgaggcttcatacgctgtcct

SEQ ID NO: 158760 - DNA, 25 bp, Homo sapien
aataccactgcactcagaccagcct

SEQ ID NO: 158761 - DNA, 25 bp, Homo sapien
gaaatctataactgattgtgatcaa

SEQ ID NO: 158762 - DNA, 25 bp, Homo sapien
acaaagaaatctataactgattgtg

SEQ ID NO: 158763 - DNA, 25 bp, Homo sapien
ttgtaaataccactgcactcagacc

SEQ ID NO: 158764 - DNA, 25 bp, Homo sapien
ctggtgccccgagggtctgtgctac

SEQ ID NO: 158765 - DNA, 25 bp, Homo sapien
ctggctggtgccccgagggtctgtg

SEQ ID NO: 158766 - DNA, 25 bp, Homo sapien
ggctggtgccccgagggtctgtgct

SEQ ID NO: 158767 - DNA, 25 bp, Homo sapien
gctggtgccccgagggtctgtgcta

SEQ ID NO: 158768 - DNA, 25 bp, Homo sapien
tttggcaaagggctgggacagccac

SEQ ID NO: 158769 - DNA, 25 bp, Homo sapien
agccacaccaccttgccaggtgggc

SEQ ID NO: 158770 - DNA, 25 bp, Homo sapien
tgtgtttggcaaagggctgggacag

SEQ ID NO: 158771 - DNA, 25 bp, Homo sapien
ctccctgctgtgtttggcaaagggc

SEQ ID NO: 158772 - DNA, 25 bp, Homo sapien
ctgtgaggggcatttgtggcaaagg

SEQ ID NO: 158773 - DNA, 25 bp, Homo sapien
ccagactatgccctgcttgctggtg

SEQ ID NO: 158774 - DNA, 25 bp, Homo sapien
catttgtggcaaaggggattgtgcc

SEQ ID NO: 158775 - DNA, 25 bp, Homo sapien
ggattgtgcctctggtgcctgctga

SEQ ID NO: 158776 - DNA, 25 bp, Homo sapien
tggaggttttggtgattcagcaccc

SEQ ID NO: 158777 - DNA, 25 bp, Homo sapien
tttggtgattcagcaccctggacct

SEQ ID NO: 158778 - DNA, 25 bp, Homo sapien
gcaccctggaccttttccatgccag

SEQ ID NO: 158779 - DNA, 25 bp, Homo sapien
ggttttggtgattcagcaccctgga

SEQ ID NO: 158780 - DNA, 25 bp, Homo sapien
gacctgccccttgttggtctgctga

SEQ ID NO: 158781 - DNA, 25 bp, Homo sapien
catcccaagcaggttggactcggca

SEQ ID NO: 158782 - DNA, 25 bp, Homo sapien
ggttggactcggcattcctttgtag

SEQ ID NO: 158783 - DNA, 25 bp, Homo sapien
tgactgttgtgttcggctgagatgc

SEQ ID NO: 158784 - DNA, 25 bp, Homo sapien
tatacaggcattgactggcattggc

SEQ ID NO: 158785 - DNA, 25 bp, Homo sapien
ggcattggcatctggaaacagcagg

SEQ ID NO: 158786 - DNA, 25 bp, Homo sapien
acagcaggcttaggagcacccggcg

SEQ ID NO: 158787 - DNA, 25 bp, Homo sapien
acttttggatgggtccgtgggctct

SEQ ID NO: 158788 - DNA, 25 bp, Homo sapien
ctaaaaatacaaaattagctgggca

SEQ ID NO: 158789 - DNA, 25 bp, Homo sapien
aggctgaggcaagctgatcacctga

SEQ ID NO: 158790 - DNA, 25 bp, Homo sapien
ccaacatggtgaaacctcatctcta

SEQ ID NO: 158791 - DNA, 25 bp, Homo sapien
ggtcaggagttcgagaccagcctgg

SEQ ID NO: 158792 - DNA, 25 bp, Homo sapien
ctgcattttaaaagcgccctgtagc

SEQ ID NO: 158793 - DNA, 25 bp, Homo sapien
ttaaaagcgccctgtagccctggga

SEQ ID NO: 158794 - DNA, 25 bp, Homo sapien
ccctgggattggctaaggccgcgtc

SEQ ID NO: 158795 - DNA, 25 bp, Homo sapien
cctgggattggctaaggccgcgtcc

SEQ ID NO: 158796 - DNA, 25 bp, Homo sapien
gagacttgtgtccatgagtcccaga

SEQ ID NO: 158797 - DNA, 25 bp, Homo sapien
cgtcactaggtgtatgcattcgaag

SEQ ID NO: 158798 - DNA, 25 bp, Homo sapien
ttaagtgaacgctatcctggcctcc

SEQ ID NO: 158799 - DNA, 25 bp, Homo sapien
gagacatcgcttcatgaccttctag

SEQ ID NO: 158800 - DNA, 25 bp, Homo sapien
gctcattgcagtttcaacctcccgg

SEQ ID NO: 158801 - DNA, 25 bp, Homo sapien
cttttctttctgacacagagtctca

SEQ ID NO: 158802 - DNA, 25 bp, Homo sapien
tcattgcagtttcaacctcccgggc

SEQ ID NO: 158803 - DNA, 25 bp, Homo sapien
tcccgggctctagtaaccctctcac

SEQ ID NO: 158804 - DNA, 25 bp, Homo sapien
agcttgagacactctcgcttgcctt

SEQ ID NO: 158805 - DNA, 25 bp, Homo sapien
cttgcctttctcttacggatgagga

SEQ ID NO: 158806 - DNA, 25 bp, Homo sapien
cttttctctatatttgattctgcaa

SEQ ID NO: 158807 - DNA, 25 bp, Homo sapien
tctccagcttgagacactctcgctt

SEQ ID NO: 158808 - DNA, 25 bp, Homo sapien
tgtggggaacttagcacgtgtgagc

SEQ ID NO: 158809 - DNA, 25 bp, Homo sapien
aaaaggataaaagcccgagctggca

SEQ ID NO: 158810 - DNA, 25 bp, Homo sapien
tggggaacttagcacgtgtgagcat

SEQ ID NO: 158811 - DNA, 25 bp, Homo sapien
gggctgtggggaacttagcacgtgt

SEQ ID NO: 158812 - DNA, 25 bp, Homo sapien
taatgacagcgttgggccagtggct

SEQ ID NO: 158813 - DNA, 25 bp, Homo sapien
tccagatgactctcagccagggaga

SEQ ID NO: 158814 - DNA, 25 bp, Homo sapien
cctagtgctgtttgggacaggaccc

SEQ ID NO: 158815 - DNA, 25 bp, Homo sapien
tgatgaaaggttcctgcggctgcac

SEQ ID NO: 158816 - DNA, 25 bp, Homo sapien
tcatatcaacgaatctccactgtat

SEQ ID NO: 158817 - DNA, 25 bp, Homo sapien
ttaatgttcatatcaacgaatctcc

SEQ ID NO: 158818 - DNA, 25 bp, Homo sapien
tgtttaatgttcatatcaacgaatc

SEQ ID NO: 158819 - DNA, 25 bp, Homo sapien
tgttcatatcaacgaatctccactg

SEQ ID NO: 158820 - DNA, 25 bp, Homo sapien
tggaggtagctggatgggccgtgtc

SEQ ID NO: 158821 - DNA, 25 bp, Homo sapien
ccaggaatgggtccggagcagtttc

SEQ ID NO: 158822 - DNA, 25 bp, Homo sapien
tgggtccggagcagtttccacatct

SEQ ID NO: 158823 - DNA, 25 bp, Homo sapien
ccaggctttggcgttgacctccaag

SEQ ID NO: 158824 - DNA, 25 bp, Homo sapien
gcaactcagtgtgttctccggccaa

SEQ ID NO: 158825 - DNA, 25 bp, Homo sapien
ctctccggcctgaatgagtatcatg

SEQ ID NO: 158826 - DNA, 25 bp, Homo sapien
cactgaaacaatgcccagacttgtc

SEQ ID NO: 158827 - DNA, 25 bp, Homo sapien
tgaccttccagagcacttgttaccc

SEQ ID NO: 158828 - DNA, 25 bp, Homo sapien
caccagcactggtcgtctagcccat

SEQ ID NO: 158829 - DNA, 25 bp, Homo sapien
ccagcactggtcgtctagcccatca

SEQ ID NO: 158830 - DNA, 25 bp, Homo sapien
gcactggtcgtctagcccatcacag

SEQ ID NO: 158831 - DNA, 25 bp, Homo sapien
cccaccagcactggtcgtctagccc

SEQ ID NO: 158832 - DNA, 25 bp, Homo sapien
gaggcacctaggcttggacttggca

SEQ ID NO: 158833 - DNA, 25 bp, Homo sapien
tggctagctctatgaagccacaggg

SEQ ID NO: 158834 - DNA, 25 bp, Homo sapien
aagaaaggtcctacatccgcgggtg

SEQ ID NO: 158835 - DNA, 25 bp, Homo sapien
gactgtgcaacctccagcattcagg

SEQ ID NO: 158836 - DNA, 25 bp, Homo sapien
cactgattttcagcggcatagtcca

SEQ ID NO: 158837 - DNA, 25 bp, Homo sapien
actgattttcagcggcatagtccag

SEQ ID NO: 158838 - DNA, 25 bp, Homo sapien
tcactgattttcagcggcatagtcc

SEQ ID NO: 158839 - DNA, 25 bp, Homo sapien
gcggcatagtccagcctgtggctgt

SEQ ID NO: 158840 - DNA, 25 bp, Homo sapien
ttttttatgtatgttctgcctcttg

SEQ ID NO: 158841 - DNA, 25 bp, Homo sapien
gttttttttatgtatgttctgcctc

SEQ ID NO: 158842 - DNA, 25 bp, Homo sapien
tttatgtatgttctgcctcttgttt

SEQ ID NO: 158843 - DNA, 25 bp, Homo sapien
tatgtatgttctgcctcttgtttat

SEQ ID NO: 158844 - DNA, 25 bp, Homo sapien
caaattcgatgggagtggcccggtc

SEQ ID NO: 158845 - DNA, 25 bp, Homo sapien
gaggacggagcagtctccgcagtcc

SEQ ID NO: 158846 - DNA, 25 bp, Homo sapien
gaatgcggcacgacctcttttaacc

SEQ ID NO: 158847 - DNA, 25 bp, Homo sapien
cacagggcgctctttagccagggag

SEQ ID NO: 158848 - DNA, 25 bp, Homo sapien
ggaagaggcggagggacggcagccc

SEQ ID NO: 158849 - DNA, 25 bp, Homo sapien
ggggaagaggcggagggacggcagc

SEQ ID NO: 158850 - DNA, 25 bp, Homo sapien
agaggcggagggacggcagccccgg

SEQ ID NO: 158851 - DNA, 25 bp, Homo sapien
aagaggcggagggacggcagccccg

SEQ ID NO: 158852 - DNA, 25 bp, Homo sapien
gccccgagcacccaaagcgccagca

SEQ ID NO: 158853 - DNA, 25 bp, Homo sapien
cggcggccccgagcacccaaagcgc

SEQ ID NO: 158854 - DNA, 25 bp, Homo sapien
cggccccgagcacccaaagcgccag

SEQ ID NO: 158855 - DNA, 25 bp, Homo sapien
cccgagcacccaaagcgccagcagc

SEQ ID NO: 158856 - DNA, 25 bp, Homo sapien
acagcaggtccctcgcgtagccggc

SEQ ID NO: 158857 - DNA, 25 bp, Homo sapien
cctcatcgcagcagccgaagtccga

SEQ ID NO: 158858 - DNA, 25 bp, Homo sapien
agaagcggcgggtcagctcggcgtc

SEQ ID NO: 158859 - DNA, 25 bp, Homo sapien
aagtccgagtactgcgcgcagaggc

SEQ ID NO: 158860 - DNA, 25 bp, Homo sapien
ttctttatagcgatgagagaagaga

SEQ ID NO: 158861 - DNA, 25 bp, Homo sapien
tctttatagcgatgagagaagagac

SEQ ID NO: 158862 - DNA, 25 bp, Homo sapien
ctttatagcgatgagagaagagact

SEQ ID NO: 158863 - DNA, 25 bp, Homo sapien
ttatagcgatgagagaagagactaa

SEQ ID NO: 158864 - DNA, 25 bp, Homo sapien
ccactgagtagtagacgtagagcct

SEQ ID NO: 158865 - DNA, 25 bp, Homo sapien
gagactctgaactcgctgatgcgga

SEQ ID NO: 158866 - DNA, 25 bp, Homo sapien
tgaatgggtcctcggcgtcatagag

SEQ ID NO: 158867 - DNA, 25 bp, Homo sapien
aagcagtagtccgtgtcatccaggg

SEQ ID NO: 158868 - DNA, 25 bp, Homo sapien
cagtgcatatgggtgcctgccccca

SEQ ID NO: 158869 - DNA, 25 bp, Homo sapien
tgggtgcctgcccccacccaggccc

SEQ ID NO: 158870 - DNA, 25 bp, Homo sapien
agtgcatatgggtgcctgcccccac

SEQ ID NO: 158871 - DNA, 25 bp, Homo sapien
tttcggtcatccacccggcattggg

SEQ ID NO: 158872 - DNA, 25 bp, Homo sapien
tctaggcttgactttgtgaggtcac

SEQ ID NO: 158873 - DNA, 25 bp, Homo sapien
tgccaggaagctcatagtcaaaact

SEQ ID NO: 158874 - DNA, 25 bp, Homo sapien
gactgacagcggattcaggcaagga

SEQ ID NO: 158875 - DNA, 25 bp, Homo sapien
tgtcccaaaggggtctccggccatc

SEQ ID NO: 158876 - DNA, 25 bp, Homo sapien
ccgtcatccccgaaaagcagctggc

SEQ ID NO: 158877 - DNA, 25 bp, Homo sapien
agtgaagatgtagaggtacccgtca

SEQ ID NO: 158878 - DNA, 25 bp, Homo sapien
ccatcccgccatctccagtgaagat

SEQ ID NO: 158879 - DNA, 25 bp, Homo sapien
cctctggaagagtatgagaagccca

SEQ ID NO: 158880 - DNA, 25 bp, Homo sapien
gaagcccagggatatggagaccaac

SEQ ID NO: 158881 - DNA, 25 bp, Homo sapien
gagaagcccagggatatggagacca

SEQ ID NO: 158882 - DNA, 25 bp, Homo sapien
cccagggatatggagaccaacccac

SEQ ID NO: 158883 - DNA, 25 bp, Homo sapien
atgccaggattcgatatctaagtgg

SEQ ID NO: 158884 - DNA, 25 bp, Homo sapien
gaacccacgcgtcacatgccaggat

SEQ ID NO: 158885 - DNA, 25 bp, Homo sapien
acatgccaggattcgatatctaagt

SEQ ID NO: 158886 - DNA, 25 bp, Homo sapien
ctgaacccacgcgtcacatgccagg

SEQ ID NO: 158887 - DNA, 25 bp, Homo sapien
tgctgaacaccatccagatcacacc

SEQ ID NO: 158888 - DNA, 25 bp, Homo sapien
gctgaacaccatccagatcacaccc

SEQ ID NO: 158889 - DNA, 25 bp, Homo sapien
ctgctgaacaccatccagatcacac

SEQ ID NO: 158890 - DNA, 25 bp, Homo sapien
tttcacggtgatgaaacgctcccac

SEQ ID NO: 158891 - DNA, 25 bp, Homo sapien
caagtatcctctttcacggtgatga

SEQ ID NO: 158892 - DNA, 25 bp, Homo sapien
agggacagcaaacaagtatcctctt

SEQ ID NO: 158893 - DNA, 25 bp, Homo sapien
cccacccgatatatgccttgtgatc

SEQ ID NO: 158894 - DNA, 25 bp, Homo sapien
atgccgtagggcaggccgcgctcct

SEQ ID NO: 158895 - DNA, 25 bp, Homo sapien
gcgctccttacggtccacgtcgatg

SEQ ID NO: 158896 - DNA, 25 bp, Homo sapien
gtcgaaggagcagcgccacatgttg

SEQ ID NO: 158897 - DNA, 25 bp, Homo sapien
acatgttgcgcacgcccagggcgta

SEQ ID NO: 158898 - DNA, 25 bp, Homo sapien
caaaaatgtagaggccgttcaggtt

SEQ ID NO: 158899 - DNA, 25 bp, Homo sapien
acttgccaaccgtgtgcgggtaggc

SEQ ID NO: 158900 - DNA, 25 bp, Homo sapien
ccgctcatgaaatccccaaaaatgt

SEQ ID NO: 158901 - DNA, 25 bp, Homo sapien
ggtaggcgaaaatcggcagcaagtc

SEQ ID NO: 158902 - DNA, 25 bp, Homo sapien
gcctgggaactcacaggtctggccg

SEQ ID NO: 158903 - DNA, 25 bp, Homo sapien
ggcccatgcagatctcactgtactg

SEQ ID NO: 158904 - DNA, 25 bp, Homo sapien
tggcctgtccctgggttctcttgga

SEQ ID NO: 158905 - DNA, 25 bp, Homo sapien
tcgtcctccccgaaggagatgatgt

SEQ ID NO: 158906 - DNA, 25 bp, Homo sapien
ctggatgcgtcaattattttgtaga

SEQ ID NO: 158907 - DNA, 25 bp, Homo sapien
actcggctcccctgtcgacatgaag

SEQ ID NO: 158908 - DNA, 25 bp, Homo sapien
attttgtagacaactccgcgtggag

SEQ ID NO: 158909 - DNA, 25 bp, Homo sapien
cctgtcgacatgaagtacagctccc

SEQ ID NO: 158910 - DNA, 25 bp, Homo sapien
ctgtaaaatgaacggctgagacgtc

SEQ ID NO: 158911 - DNA, 25 bp, Homo sapien
tgaacggctgagacgtcaatgagct

SEQ ID NO: 158912 - DNA, 25 bp, Homo sapien
gtcaatgagctgcacacggaaggag

SEQ ID NO: 158913 - DNA, 25 bp, Homo sapien
aaggagctgggacatagccgggcat

SEQ ID NO: 158914 - DNA, 25 bp, Homo sapien
agagtcagtcgtgtagcccagggat

SEQ ID NO: 158915 - DNA, 25 bp, Homo sapien
tgaagagatacaggcttggccctga

SEQ ID NO: 158916 - DNA, 25 bp, Homo sapien
acctgggcggcctctgcagagtgaa

SEQ ID NO: 158917 - DNA, 25 bp, Homo sapien
ccagggattaccaagtctgagtgat

SEQ ID NO: 158918 - DNA, 25 bp, Homo sapien
ggatctgacatttgccaggtggtgc

SEQ ID NO: 158919 - DNA, 25 bp, Homo sapien
ggctggatctgacatttgccaggtg

SEQ ID NO: 158920 - DNA, 25 bp, Homo sapien
gatctgacatttgccaggtggtgcc

SEQ ID NO: 158921 - DNA, 25 bp, Homo sapien
caggctggatctgacatttgccagg

SEQ ID NO: 158922 - DNA, 25 bp, Homo sapien
tttctttgggcacaaaggggatgag

SEQ ID NO: 158923 - DNA, 25 bp, Homo sapien
caaaggggatgagacggcttctgat

SEQ ID NO: 158924 - DNA, 25 bp, Homo sapien
ggatgagacggcttctgatcttcac

SEQ ID NO: 158925 - DNA, 25 bp, Homo sapien
aaggggatgagacggcttctgatct

SEQ ID NO: 158926 - DNA, 25 bp, Homo sapien
ctggcacacacttcgatcacaaggc

SEQ ID NO: 158927 - DNA, 25 bp, Homo sapien
gggcgcccgcgtgggcgcccgcgct

SEQ ID NO: 158928 - DNA, 25 bp, Homo sapien
gtgctccgtgtcttcgggatgaact

SEQ ID NO: 158929 - DNA, 25 bp, Homo sapien
gagcggccgtggggcgccctcggcg

SEQ ID NO: 158930 - DNA, 25 bp, Homo sapien
gcggggtgctccgtgtcttcgggat

SEQ ID NO: 158931 - DNA, 25 bp, Homo sapien
cgcagcgcacatcgtccagcagaat

SEQ ID NO: 158932 - DNA, 25 bp, Homo sapien
gccgaactcggctctcttgacggcg

SEQ ID NO: 158933 - DNA, 25 bp, Homo sapien
tgctcgcagttgtgggtgcccacgc

SEQ ID NO: 158934 - DNA, 25 bp, Homo sapien
gttctggtggctgcacacgacgccc

SEQ ID NO: 158935 - DNA, 25 bp, Homo sapien
caacctagagtgtacgtgccatgca

SEQ ID NO: 158936 - DNA, 25 bp, Homo sapien
tgactatggcccctagaacaggagg

SEQ ID NO: 158937 - DNA, 25 bp, Homo sapien
aacaggaggattagcattacccagg

SEQ ID NO: 158938 - DNA, 25 bp, Homo sapien
gattaaatgagctgacacacccgag

SEQ ID NO: 158939 - DNA, 25 bp, Homo sapien
ggccgggaggccgcgagccgactca

SEQ ID NO: 158940 - DNA, 25 bp, Homo sapien
cgggaggccgcgagccgactcagct

SEQ ID NO: 158941 - DNA, 25 bp, Homo sapien
gaggccgcgagccgactcagctgtc

SEQ ID NO: 158942 - DNA, 25 bp, Homo sapien
ggccgcgagccgactcagctgtcag

SEQ ID NO: 158943 - DNA, 25 bp, Homo sapien
cgagcagcagcagcccggggctcat

SEQ ID NO: 158944 - DNA, 25 bp, Homo sapien
tgccgagcagcagcagcccggggct

SEQ ID NO: 158945 - DNA, 25 bp, Homo sapien
ccgagcagcagcagcccggggctca

SEQ ID NO: 158946 - DNA, 25 bp, Homo sapien
ctgccgagcagcagcagcccggggc

SEQ ID NO: 158947 - DNA, 25 bp, Homo sapien
tgcgagcgcggtgcacgaaggtgca

SEQ ID NO: 158948 - DNA, 25 bp, Homo sapien
ggcggcccggggatgtgctcgtagc

SEQ ID NO: 158949 - DNA, 25 bp, Homo sapien
tagcggctgcgagcgcggtgcacga

SEQ ID NO: 158950 - DNA, 25 bp, Homo sapien
gggatgtgctcgtagcggctgcgag

SEQ ID NO: 158951 - DNA, 25 bp, Homo sapien
aaaaacacatcttggagcacacggc

SEQ ID NO: 158952 - DNA, 25 bp, Homo sapien
acatcttggagcacacggccaccaa

SEQ ID NO: 158953 - DNA, 25 bp, Homo sapien
aacacatcttggagcacacggccac

SEQ ID NO: 158954 - DNA, 25 bp, Homo sapien
aaaacacatcttggagcacacggcc

SEQ ID NO: 158955 - DNA, 25 bp, Homo sapien
cgttgacccgcacaacaggtccata

SEQ ID NO: 158956 - DNA, 25 bp, Homo sapien
gttttgtggaagacgttgacccgca

SEQ ID NO: 158957 - DNA, 25 bp, Homo sapien
gactcgtgacgatgactgaggtttt

SEQ ID NO: 158958 - DNA, 25 bp, Homo sapien
cttaaccgactcaggactcgtgacg

SEQ ID NO: 158959 - DNA, 25 bp, Homo sapien
gccctgcaaccactagaacaagtag

SEQ ID NO: 158960 - DNA, 25 bp, Homo sapien
ttatgaagggttcaacattccttgc

SEQ ID NO: 158961 - DNA, 25 bp, Homo sapien
atgcaggaagccaaactaatggaac

SEQ ID NO: 158962 - DNA, 25 bp, Homo sapien
tgtgtacacacctgataacagaact

SEQ ID NO: 158963 - DNA, 25 bp, Homo sapien
catcttggagtccttgttgtacttg

SEQ ID NO: 158964 - DNA, 25 bp, Homo sapien
tggagcgcacggtacatcttggagt

SEQ ID NO: 158965 - DNA, 25 bp, Homo sapien
ctcaccaaacacagtctggagcgca

SEQ ID NO: 158966 - DNA, 25 bp, Homo sapien
gagtccttgttgtacttggttgaca

SEQ ID NO: 158967 - DNA, 25 bp, Homo sapien
tgaaggccaggtctatgactctccg

SEQ ID NO: 158968 - DNA, 25 bp, Homo sapien
tatgactctccgctgcttgtgccag

SEQ ID NO: 158969 - DNA, 25 bp, Homo sapien
cttgtgccagcgctcatagttgcat

SEQ ID NO: 158970 - DNA, 25 bp, Homo sapien
agttgcattcggacaccaagccttg

SEQ ID NO: 158971 - DNA, 25 bp, Homo sapien
atcttatttgtatccttattctata

SEQ ID NO: 158972 - DNA, 25 bp, Homo sapien
tatcttatttgtatccttattctat

SEQ ID NO: 158973 - DNA, 25 bp, Homo sapien
cactggccagcccaatatggtggac

SEQ ID NO: 158974 - DNA, 25 bp, Homo sapien
actttgggcctcctacagtccatga

SEQ ID NO: 158975 - DNA, 25 bp, Homo sapien
tccatgagagggcaatcccggttcc

SEQ ID NO: 158976 - DNA, 25 bp, Homo sapien
tgacctcaaagggacgtgacagtgt

SEQ ID NO: 158977 - DNA, 25 bp, Homo sapien
tcagcatgtcctgcatggacactgg

SEQ ID NO: 158978 - DNA, 25 bp, Homo sapien
caggatgtccatggcggtgtaggtc

SEQ ID NO: 158979 - DNA, 25 bp, Homo sapien
tggcttctagaatctccaccagctg

SEQ ID NO: 158980 - DNA, 25 bp, Homo sapien
tcagccttctcgttgaatgtttcca

SEQ ID NO: 158981 - DNA, 25 bp, Homo sapien
ccaacataagtttcactgcctggga

SEQ ID NO: 158982 - DNA, 25 bp, Homo sapien
tgggacagaggcttctgggcaccca

SEQ ID NO: 158983 - DNA, 25 bp, Homo sapien
agtgttgcgggacgcagtgattccc

SEQ ID NO: 158984 - DNA, 25 bp, Homo sapien
gcagtgattccctccaacataagtt

SEQ ID NO: 158985 - DNA, 25 bp, Homo sapien
caatcgttagtgtatagtggttcat

SEQ ID NO: 158986 - DNA, 25 bp, Homo sapien
tcatgggtttgggagaattcagcag

SEQ ID NO: 158987 - DNA, 25 bp, Homo sapien
tccttgtctgtttgtggtatcaggg

SEQ ID NO: 158988 - DNA, 25 bp, Homo sapien
tcagcagtaaagacatctggtcacg

SEQ ID NO: 158989 - DNA, 25 bp, Homo sapien
tctggctagcacttctattaatagt

SEQ ID NO: 158990 - DNA, 25 bp, Homo sapien
tatttggctctttcgtggtttcacg

SEQ ID NO: 158991 - DNA, 25 bp, Homo sapien
ggtttcacgcaaattttaagattgc

SEQ ID NO: 158992 - DNA, 25 bp, Homo sapien
atgggattgctttattggtttcttc

SEQ ID NO: 158993 - DNA, 25 bp, Homo sapien
ctggcgcaggaagcgaatgctctcc

SEQ ID NO: 158994 - DNA, 25 bp, Homo sapien
aggaagcgaatgctctcccggacct

SEQ ID NO: 158995 - DNA, 25 bp, Homo sapien
gcgcaggaagcgaatgctctcccgg

SEQ ID NO: 158996 - DNA, 25 bp, Homo sapien
acctggcgcaggaagcgaatgctct

SEQ ID NO: 158997 - DNA, 25 bp, Homo sapien
cgccctccccagtccgcagaggggg

SEQ ID NO: 158998 - DNA, 25 bp, Homo sapien
agcagaccctcgtcgtcctgggctc

SEQ ID NO: 158999 - DNA, 25 bp, Homo sapien
tgacgaagttgtccagcagaccctc

SEQ ID NO: 159000 - DNA, 25 bp, Homo sapien
gaaggtgacgaagttgtccagcaga

SEQ ID NO: 159001 - DNA, 25 bp, Homo sapien
tgaagaaggtgacgaagttgtccag

SEQ ID NO: 159002 - DNA, 25 bp, Homo sapien
cttgccacgatctctggctggcgag

SEQ ID NO: 159003 - DNA, 25 bp, Homo sapien
cacgatctctggctggcgagacagc

SEQ ID NO: 159004 - DNA, 25 bp, Homo sapien
cactgtgaacgccaagtggttggca

SEQ ID NO: 159005 - DNA, 25 bp, Homo sapien
cagctccatcactgtgaacgccaag

SEQ ID NO: 159006 - DNA, 25 bp, Homo sapien
tcctcgaaatccaggtacctcttag

SEQ ID NO: 159007 - DNA, 25 bp, Homo sapien
gtacctcttagaaccaatgacctca

SEQ ID NO: 159008 - DNA, 25 bp, Homo sapien
tccccaggtcctcgaaatccaggta

SEQ ID NO: 159009 - DNA, 25 bp, Homo sapien
gaaatccaggtacctcttagaacca

SEQ ID NO: 159010 - DNA, 25 bp, Homo sapien
tctcctcttccagcaggcgaaaggt

SEQ ID NO: 159011 - DNA, 25 bp, Homo sapien
caggcgaaaggtgccccatgctggt

SEQ ID NO: 159012 - DNA, 25 bp, Homo sapien
catgctggtgggtacagcctcagcg

SEQ ID NO: 159013 - DNA, 25 bp, Homo sapien
cccatgctggtgggtacagcctcag

SEQ ID NO: 159014 - DNA, 25 bp, Homo sapien
caagagcggggtgttgccggggact

SEQ ID NO: 159015 - DNA, 25 bp, Homo sapien
gagcggggtgttgccggggactctg

SEQ ID NO: 159016 - DNA, 25 bp, Homo sapien
agagcggggtgttgccggggactct

SEQ ID NO: 159017 - DNA, 25 bp, Homo sapien
gcggggtgttgccggggactctgac

SEQ ID NO: 159018 - DNA, 25 bp, Homo sapien
caatgtggcgttcgtttgtaaagct

SEQ ID NO: 159019 - DNA, 25 bp, Homo sapien
tacaaaatcggaccatgctaagtgc

SEQ ID NO: 159020 - DNA, 25 bp, Homo sapien
ccactactgggcatccaagttggtg

SEQ ID NO: 159021 - DNA, 25 bp, Homo sapien
ttctgggtaaatgtccgaggagctg

SEQ ID NO: 159022 - DNA, 25 bp, Homo sapien
tgcgggcaaagggtccgctcatctc

SEQ ID NO: 159023 - DNA, 25 bp, Homo sapien
gcaaagggtccgctcatctctggtt

SEQ ID NO: 159024 - DNA, 25 bp, Homo sapien
aaagggtccgctcatctctggttcc

SEQ ID NO: 159025 - DNA, 25 bp, Homo sapien
ggtccgctcatctctggttcccagg

SEQ ID NO: 159026 - DNA, 25 bp, Homo sapien
gaaagtcagcgggtcctcaaagtat

SEQ ID NO: 159027 - DNA, 25 bp, Homo sapien
cagcgggtcctcaaagtatgtgtcc

SEQ ID NO: 159028 - DNA, 25 bp, Homo sapien
aaagtatgtgtccatccgccccatg

SEQ ID NO: 159029 - DNA, 25 bp, Homo sapien
gtccatccgccccatgacataggtg

SEQ ID NO: 159030 - DNA, 25 bp, Homo sapien
tgctgcccgatgcaggagcggtggc

SEQ ID NO: 159031 - DNA, 25 bp, Homo sapien
aaactgctgcccgatgcaggagcgg

SEQ ID NO: 159032 - DNA, 25 bp, Homo sapien
gcccgatgcaggagcggtggcccag

SEQ ID NO: 159033 - DNA, 25 bp, Homo sapien
gagcaaactgctgcccgatgcagga

SEQ ID NO: 159034 - DNA, 25 bp, Homo sapien
tggggagcctcctgttttgcgctct

SEQ ID NO: 159035 - DNA, 25 bp, Homo sapien
ggttcggagatgcttcccggctcag

SEQ ID NO: 159036 - DNA, 25 bp, Homo sapien
gcaaatgtcacagccggctctcctc

SEQ ID NO: 159037 - DNA, 25 bp, Homo sapien
ggcccagcgggcaaaatgaggaagg

SEQ ID NO: 159038 - DNA, 25 bp, Homo sapien
cagtggcttgagtgtggcctgctcc

SEQ ID NO: 159039 - DNA, 25 bp, Homo sapien
cacagcacggggtccagtggcttga

SEQ ID NO: 159040 - DNA, 25 bp, Homo sapien
agtggcttgagtgtggcctgctcct

SEQ ID NO: 159041 - DNA, 25 bp, Homo sapien
cggggccgcagggtgcacagcacgg

SEQ ID NO: 159042 - DNA, 25 bp, Homo sapien
ggctcagagacaaatcacacgcaga

SEQ ID NO: 159043 - DNA, 25 bp, Homo sapien
acccttgaggcgctgacagcctggc

SEQ ID NO: 159044 - DNA, 25 bp, Homo sapien
ccgaggagtctcgtcctgcctggag

SEQ ID NO: 159045 - DNA, 25 bp, Homo sapien
tgagcaagagttagggtgtctcgtc

SEQ ID NO: 159046 - DNA, 25 bp, Homo sapien
agcataaggcgctcggtgcccgctc

SEQ ID NO: 159047 - DNA, 25 bp, Homo sapien
ctgggcagatgtgaatttagtcact

SEQ ID NO: 159048 - DNA, 25 bp, Homo sapien
caactgactggaccagcataaggcg

SEQ ID NO: 159049 - DNA, 25 bp, Homo sapien
aggggccggctcaggcttctgccaa

SEQ ID NO: 159050 - DNA, 25 bp, Homo sapien
cctggattcagagaaatgaccctcc

SEQ ID NO: 159051 - DNA, 25 bp, Homo sapien
agaaatacccccagtgactgccggg

SEQ ID NO: 159052 - DNA, 25 bp, Homo sapien
ctgtgagtccccttccgtctgccag

SEQ ID NO: 159053 - DNA, 25 bp, Homo sapien
gagaggctgcgttccagaagaaatg

SEQ ID NO: 159054 - DNA, 25 bp, Homo sapien
cctggaggtacaggaaagctggctc

SEQ ID NO: 159055 - DNA, 25 bp, Homo sapien
tcagggttggccgtacagcgcgccc

SEQ ID NO: 159056 - DNA, 25 bp, Homo sapien
ctcgtctgtagcacaggggcctgga

SEQ ID NO: 159057 - DNA, 25 bp, Homo sapien
tacagcgcgcccaacagttgacgct

SEQ ID NO: 159058 - DNA, 25 bp, Homo sapien
ctctgccctctggccctgagatggg

SEQ ID NO: 159059 - DNA, 25 bp, Homo sapien
tctggccctgagatggggcaggccg

SEQ ID NO: 159060 - DNA, 25 bp, Homo sapien
ccctctggccctgagatggggcagg

SEQ ID NO: 159061 - DNA, 25 bp, Homo sapien
tgccctctggccctgagatggggca

SEQ ID NO: 159062 - DNA, 25 bp, Homo sapien
tggagacccctcagacttgggttcc

SEQ ID NO: 159063 - DNA, 25 bp, Homo sapien
tgctggagacccctcagacttgggt

SEQ ID NO: 159064 - DNA, 25 bp, Homo sapien
tgggcctcaggagtgcagcctctcc

SEQ ID NO: 159065 - DNA, 25 bp, Homo sapien
tccctgctggagacccctcagactt

SEQ ID NO: 159066 - DNA, 25 bp, Homo sapien
caccagcactggcgggaaagtgtcc

SEQ ID NO: 159067 - DNA, 25 bp, Homo sapien
gctgccaccgcctggaggaaggcca

SEQ ID NO: 159068 - DNA, 25 bp, Homo sapien
acactgtttggccagccagcaccag

SEQ ID NO: 159069 - DNA, 25 bp, Homo sapien
gaaggccagtccctgggttcccaca

SEQ ID NO: 159070 - DNA, 25 bp, Homo sapien
cgaggacctctgagagtcatccaca

SEQ ID NO: 159071 - DNA, 25 bp, Homo sapien
caggtggtcagcgaggacctctgag

SEQ ID NO: 159072 - DNA, 25 bp, Homo sapien
ggacctctgagagtcatccacacag

SEQ ID NO: 159073 - DNA, 25 bp, Homo sapien
gcaggtggtcagcgaggacctctga

SEQ ID NO: 159074 - DNA, 25 bp, Homo sapien
cagggcccacaggcttgtgggtgga

SEQ ID NO: 159075 - DNA, 25 bp, Homo sapien
agggcccacaggcttgtgggtggag

SEQ ID NO: 159076 - DNA, 25 bp, Homo sapien
ggtgtggaagatgggcggccggctg

SEQ ID NO: 159077 - DNA, 25 bp, Homo sapien
gcggaggggccctcgccgtccgaca

SEQ ID NO: 159078 - DNA, 25 bp, Homo sapien
cggaggggccctcgccgtccgacat

SEQ ID NO: 159079 - DNA, 25 bp, Homo sapien
gagccacagcgggtaaatatagcgc

SEQ ID NO: 159080 - DNA, 25 bp, Homo sapien
cgggtaaatatagcgctgccactca

SEQ ID NO: 159081 - DNA, 25 bp, Homo sapien
cacagcgggtaaatatagcgctgcc

SEQ ID NO: 159082 - DNA, 25 bp, Homo sapien
agtgccctcggcgactggcggcctt

SEQ ID NO: 159083 - DNA, 25 bp, Homo sapien
gctgaatgtcttggtgagaatcaga

SEQ ID NO: 159084 - DNA, 25 bp, Homo sapien
ctgaatgtcttggtgagaatcagaa

SEQ ID NO: 159085 - DNA, 25 bp, Homo sapien
tgaatgtcttggtgagaatcagaag

SEQ ID NO: 159086 - DNA, 25 bp, Homo sapien
tctcttgtcatagatgaaaaagcct

SEQ ID NO: 159087 - DNA, 25 bp, Homo sapien
gcgagggtacttccgacactggcgt

SEQ ID NO: 159088 - DNA, 25 bp, Homo sapien
catttgctgcctggaggttcgtgtg

SEQ ID NO: 159089 - DNA, 25 bp, Homo sapien
gggcccccagtcatgtgaatgtatt

SEQ ID NO: 159090 - DNA, 25 bp, Homo sapien
gaggtggtgcccaataagcacgtga

SEQ ID NO: 159091 - DNA, 25 bp, Homo sapien
tgctcagcaccattggacactaggg

SEQ ID NO: 159092 - DNA, 25 bp, Homo sapien
tatgaaaaccgagacttaaggtggc

SEQ ID NO: 159093 - DNA, 25 bp, Homo sapien
gcttcaagcagcaaatgtcccagga

SEQ ID NO: 159094 - DNA, 25 bp, Homo sapien
ttggcaaagccggtcacagcaagtc

SEQ ID NO: 159095 - DNA, 25 bp, Homo sapien
aaggagcacgatgtcaccccatcgg

SEQ ID NO: 159096 - DNA, 25 bp, Homo sapien
ggcagaggcccaataattccccatg

SEQ ID NO: 159097 - DNA, 25 bp, Homo sapien
tctgcattgaacgtgtgccatctgc

SEQ ID NO: 159098 - DNA, 25 bp, Homo sapien
tcaggtgacggccacacaatcggcc

SEQ ID NO: 159099 - DNA, 25 bp, Homo sapien
atcggcctgaccatcggcacctcca

SEQ ID NO: 159100 - DNA, 25 bp, Homo sapien
gaccatcggcacctccaccagaagt

SEQ ID NO: 159101 - DNA, 25 bp, Homo sapien
ggtgacggccacacaatcggcctga

SEQ ID NO: 159102 - DNA, 25 bp, Homo sapien
tcttgttagctgaagcgccaaccat

SEQ ID NO: 159103 - DNA, 25 bp, Homo sapien
gacttaattgcaatgaggacttccc

SEQ ID NO: 159104 - DNA, 25 bp, Homo sapien
caggccaggaggttcggacttaatt

SEQ ID NO: 159105 - DNA, 25 bp, Homo sapien
aggacttccccctgaagtgtcttgt

SEQ ID NO: 159106 - DNA, 25 bp, Homo sapien
gcagcatcagcatagcgcctctcag

SEQ ID NO: 159107 - DNA, 25 bp, Homo sapien
agcatcagcatagcgcctctcaggc

SEQ ID NO: 159108 - DNA, 25 bp, Homo sapien
tggcagcatcagcatagcgcctctc

SEQ ID NO: 159109 - DNA, 25 bp, Homo sapien
catcagcatagcgcctctcaggccc

SEQ ID NO: 159110 - DNA, 25 bp, Homo sapien
ccttgtggatgtgagtccatgcaga

SEQ ID NO: 159111 - DNA, 25 bp, Homo sapien
tccatgcagatgagtgtatacgcgc

SEQ ID NO: 159112 - DNA, 25 bp, Homo sapien
tgtatacgcgccctgtgagagtgcg

SEQ ID NO: 159113 - DNA, 25 bp, Homo sapien
caggagcacgcgcatccttgtggat

SEQ ID NO: 159114 - DNA, 25 bp, Homo sapien
tcgtggccattaagcaagatgggct

SEQ ID NO: 159115 - DNA, 25 bp, Homo sapien
cacttccctcgtggccattaagcaa

SEQ ID NO: 159116 - DNA, 25 bp, Homo sapien
cactaatgagtctcaggtcccagct

SEQ ID NO: 159117 - DNA, 25 bp, Homo sapien
gcaggcactaatgagtctcaggtcc

SEQ ID NO: 159118 - DNA, 25 bp, Homo sapien
caggggacacgaagcatgaagacaa

SEQ ID NO: 159119 - DNA, 25 bp, Homo sapien
gaagacaaactagtgggacctgttc

SEQ ID NO: 159120 - DNA, 25 bp, Homo sapien
gccaggggacacgaagcatgaagac

SEQ ID NO: 159121 - DNA, 25 bp, Homo sapien
caaactagtgggacctgttccaggt

SEQ ID NO: 159122 - DNA, 25 bp, Homo sapien
gttgaacttccgtgaactagccgtg

SEQ ID NO: 159123 - DNA, 25 bp, Homo sapien
ccacaggattttgtgaaggagcctc

SEQ ID NO: 159124 - DNA, 25 bp, Homo sapien
tgatcatcaggttagcgctgcggga

SEQ ID NO: 159125 - DNA, 25 bp, Homo sapien
gactgtaggctccatgttgaacttc

SEQ ID NO: 159126 - DNA, 25 bp, Homo sapien
tgaggccgccgggccgcgcccgctc

SEQ ID NO: 159127 - DNA, 25 bp, Homo sapien
ctgaggccgccgggccgcgcccgct

SEQ ID NO: 159128 - DNA, 25 bp, Homo sapien
ccggccgcgccgccgccgctcacca

SEQ ID NO: 159129 - DNA, 25 bp, Homo sapien
gccgcgccgccgccgctcaccacac

SEQ ID NO: 159130 - DNA, 25 bp, Homo sapien
acgtgtcgtacaggctgctgtagct

SEQ ID NO: 159131 - DNA, 25 bp, Homo sapien
tgctgtagctggagaagccgtcctc

SEQ ID NO: 159132 - DNA, 25 bp, Homo sapien
gctgctgtagctggagaagccgtcc

SEQ ID NO: 159133 - DNA, 25 bp, Homo sapien
ctgctgtagctggagaagccgtcct

SEQ ID NO: 159134 - DNA, 25 bp, Homo sapien
cttaaattggccattgagggcacca

SEQ ID NO: 159135 - DNA, 25 bp, Homo sapien
gactctctagaatcgccttgcagcc

SEQ ID NO: 159136 - DNA, 25 bp, Homo sapien
aaagcctatgcactccaactctggg

SEQ ID NO: 159137 - DNA, 25 bp, Homo sapien
tacagaggatcacgaaagaatgcac

SEQ ID NO: 159138 - DNA, 25 bp, Homo sapien
ctttgcagtctacaagcactctgaa

SEQ ID NO: 159139 - DNA, 25 bp, Homo sapien
ctccctttgcagtctacaagcactc

SEQ ID NO: 159140 - DNA, 25 bp, Homo sapien
ccctttgcagtctacaagcactctg

SEQ ID NO: 159141 - DNA, 25 bp, Homo sapien
tgcagtctacaagcactctgaagga

SEQ ID NO: 159142 - DNA, 25 bp, Homo sapien
ttctttctgagtttcaagggatgcc

SEQ ID NO: 159143 - DNA, 25 bp, Homo sapien
ctttctgagtttcaagggatgccat

SEQ ID NO: 159144 - DNA, 25 bp, Homo sapien
ctcatgagaacccagccaagcactg

SEQ ID NO: 159145 - DNA, 25 bp, Homo sapien
tgagaacccagccaagcactggctt

SEQ ID NO: 159146 - DNA, 25 bp, Homo sapien
tctctggcctcaggcggaaggcagg

SEQ ID NO: 159147 - DNA, 25 bp, Homo sapien
ctctggcctcaggcggaaggcaggg

SEQ ID NO: 159148 - DNA, 25 bp, Homo sapien
ctacttgcagcagaagcgctgtcat

SEQ ID NO: 159149 - DNA, 25 bp, Homo sapien
gctacttgcagcagaagcgctgtca

SEQ ID NO: 159150 - DNA, 25 bp, Homo sapien
cgccgaaccacatcagctagagctg

SEQ ID NO: 159151 - DNA, 25 bp, Homo sapien
gaagcaatgcggtctgtcacctcca

SEQ ID NO: 159152 - DNA, 25 bp, Homo sapien
tcctcagtaatgttcagccgccgaa

SEQ ID NO: 159153 - DNA, 25 bp, Homo sapien
tttcctgttaagcacggcctgctgt

SEQ ID NO: 159154 - DNA, 25 bp, Homo sapien
ggatcttgaagatgacaggaaagag

SEQ ID NO: 159155 - DNA, 25 bp, Homo sapien
gaggagcagctgtaatgaatcattt

SEQ ID NO: 159156 - DNA, 25 bp, Homo sapien
ctcctagtgttgagtctgaacaggt

SEQ ID NO: 159157 - DNA, 25 bp, Homo sapien
aggtgccagcctggatcttgaagat

SEQ ID NO: 159158 - DNA, 25 bp, Homo sapien
aaaggcagggtctgcatcagtggtc

SEQ ID NO: 159159 - DNA, 25 bp, Homo sapien
aggcagggtctgcatcagtggtctt

SEQ ID NO: 159160 - DNA, 25 bp, Homo sapien
tgttgaccgtggttcttaaaggcag

SEQ ID NO: 159161 - DNA, 25 bp, Homo sapien
ttaaaggcagggtctgcatcagtgg

SEQ ID NO: 159162 - DNA, 25 bp, Homo sapien
cagcagtttctttcctgaccccgga

SEQ ID NO: 159163 - DNA, 25 bp, Homo sapien
ggtagagagccagtaggtttctttg

SEQ ID NO: 159164 - DNA, 25 bp, Homo sapien
tgaccccggagggggatggtagaga

SEQ ID NO: 159165 - DNA, 25 bp, Homo sapien
ggtttctttggtaacacagtgccat

SEQ ID NO: 159166 - DNA, 25 bp, Homo sapien
gcaggcacgtcctttggcaagagag

SEQ ID NO: 159167 - DNA, 25 bp, Homo sapien
gacagcaccaatacgttcatgaggg

SEQ ID NO: 159168 - DNA, 25 bp, Homo sapien
tgtttggaacaacaggcctgcatga

SEQ ID NO: 159169 - DNA, 25 bp, Homo sapien
catgagtccgttttgtgcagctata

SEQ ID NO: 159170 - DNA, 25 bp, Homo sapien
gcaagcattgagaagactcacagat

SEQ ID NO: 159171 - DNA, 25 bp, Homo sapien
cttggtgtcgatctattcagtttgc

SEQ ID NO: 159172 - DNA, 25 bp, Homo sapien
gatctattcagtttgcaagcattga

SEQ ID NO: 159173 - DNA, 25 bp, Homo sapien
ttcagtttgcaagcattgagaagac

SEQ ID NO: 159174 - DNA, 25 bp, Homo sapien
cctgtcaccagaagagacacaaact

SEQ ID NO: 159175 - DNA, 25 bp, Homo sapien
tgtcaccagaagagacacaaactgc

SEQ ID NO: 159176 - DNA, 25 bp, Homo sapien
aaactgctttaatgcagcacctgct

SEQ ID NO: 159177 - DNA, 25 bp, Homo sapien
caccagaagagacacaaactgcttt

SEQ ID NO: 159178 - DNA, 25 bp, Homo sapien
gaatccccattgctttcccttcgac

SEQ ID NO: 159179 - DNA, 25 bp, Homo sapien
tggtggagcctgtgcgattccggtt

SEQ ID NO: 159180 - DNA, 25 bp, Homo sapien
tgtgcgattccggtttcctctggaa

SEQ ID NO: 159181 - DNA, 25 bp, Homo sapien
cccaggagacactcgttcagaagag

SEQ ID NO: 159182 - DNA, 25 bp, Homo sapien
gtgagaacaaagtacaatgttaggt

SEQ ID NO: 159183 - DNA, 25 bp, Homo sapien
ggagtccacgtatttcatgaaacca

SEQ ID NO: 159184 - DNA, 25 bp, Homo sapien
gaaacatagcctctgataaatcata

SEQ ID NO: 159185 - DNA, 25 bp, Homo sapien
ttctggtgttagcatcaatatgaaa

SEQ ID NO: 159186 - DNA, 25 bp, Homo sapien
agccaaaagtccagggaggccgaag

SEQ ID NO: 159187 - DNA, 25 bp, Homo sapien
gtttatatcaaacttgtccaaccca

SEQ ID NO: 159188 - DNA, 25 bp, Homo sapien
catatgtgacaacaaagtttctagc

SEQ ID NO: 159189 - DNA, 25 bp, Homo sapien
gggacacccctgatttatacatatg

SEQ ID NO: 159190 - DNA, 25 bp, Homo sapien
ttatacactacactcatacagcacc

SEQ ID NO: 159191 - DNA, 25 bp, Homo sapien
ttcccattgctcagtccggagtaca

SEQ ID NO: 159192 - DNA, 25 bp, Homo sapien
tgagactgcaggtgattgttgtttc

SEQ ID NO: 159193 - DNA, 25 bp, Homo sapien
tatgcacaagaatggcatttatgtc

SEQ ID NO: 159194 - DNA, 25 bp, Homo sapien
ccagctggatccgtgttctagggct

SEQ ID NO: 159195 - DNA, 25 bp, Homo sapien
tatttgggacaaaagcgactgcttc

SEQ ID NO: 159196 - DNA, 25 bp, Homo sapien
aatacttcccagcttaacatggtgg

SEQ ID NO: 159197 - DNA, 25 bp, Homo sapien
catggtggaaggagcacagattttg

SEQ ID NO: 159198 - DNA, 25 bp, Homo sapien
gcccctgaagcccatgacagaacta

SEQ ID NO: 159199 - DNA, 25 bp, Homo sapien
ctgcccctgaagcccatgacagaac

SEQ ID NO: 159200 - DNA, 25 bp, Homo sapien
cctgaagcccatgacagaactaagc

SEQ ID NO: 159201 - DNA, 25 bp, Homo sapien
ccctgaagcccatgacagaactaag

SEQ ID NO: 159202 - DNA, 25 bp, Homo sapien
ctgcactgaatacaggctccttggg

SEQ ID NO: 159203 - DNA, 25 bp, Homo sapien
tgcactgaatacaggctccttgggt

SEQ ID NO: 159204 - DNA, 25 bp, Homo sapien
gcactgaatacaggctccttgggtt

SEQ ID NO: 159205 - DNA, 25 bp, Homo sapien
actgaatacaggctccttgggtttg

SEQ ID NO: 159206 - DNA, 25 bp, Homo sapien
gatctttgggcatgtacatggtaac

SEQ ID NO: 159207 - DNA, 25 bp, Homo sapien
gctgtaagaatccacttgatctttg

SEQ ID NO: 159208 - DNA, 25 bp, Homo sapien
tgagtctcttggttggaagttctac

SEQ ID NO: 159209 - DNA, 25 bp, Homo sapien
taacagggcgtccacgaagaaacat

SEQ ID NO: 159210 - DNA, 25 bp, Homo sapien
tataatttgtgttccaggcttggca

SEQ ID NO: 159211 - DNA, 25 bp, Homo sapien
aaaccactactgacttaaagacgag

SEQ ID NO: 159212 - DNA, 25 bp, Homo sapien
tgtaaaaagtaacccggcaagatgc

SEQ ID NO: 159213 - DNA, 25 bp, Homo sapien
tccaaaacaggtgcaggtaaatgcc

SEQ ID NO: 159214 - DNA, 25 bp, Homo sapien
tacaggttgttacggcagtctcgac

SEQ ID NO: 159215 - DNA, 25 bp, Homo sapien
aagtacaggttgttacggcagtctc

SEQ ID NO: 159216 - DNA, 25 bp, Homo sapien
ccgtcggaagcaagtacaggttgtt

SEQ ID NO: 159217 - DNA, 25 bp, Homo sapien
ctcccgtcggaagcaagtacaggtt

SEQ ID NO: 159218 - DNA, 25 bp, Homo sapien
gttgtataacaccaccacggatgcg

SEQ ID NO: 159219 - DNA, 25 bp, Homo sapien
tgtggccagcgtaatgcctctgcag

SEQ ID NO: 159220 - DNA, 25 bp, Homo sapien
cacttcacgtcatcgttgtggccag

SEQ ID NO: 159221 - DNA, 25 bp, Homo sapien
gcagttgctcctccacgttgtataa

SEQ ID NO: 159222 - DNA, 25 bp, Homo sapien
ttgtcctgttgctatcgtgatccga

SEQ ID NO: 159223 - DNA, 25 bp, Homo sapien
gatgtgcccgcaacttgtcctgttg

SEQ ID NO: 159224 - DNA, 25 bp, Homo sapien
gatccgatcaggatgaactgctagg

SEQ ID NO: 159225 - DNA, 25 bp, Homo sapien
ttttccatccttcgatgtgcccgca

SEQ ID NO: 159226 - DNA, 25 bp, Homo sapien
gacgtggagagtattcaatgtcaca

SEQ ID NO: 159227 - DNA, 25 bp, Homo sapien
tacaggtgactgctcggtcaaaaaa

SEQ ID NO: 159228 - DNA, 25 bp, Homo sapien
aacctattccaatgacgtggagagt

SEQ ID NO: 159229 - DNA, 25 bp, Homo sapien
aatgcaatacaggtgactgctcggt

SEQ ID NO: 159230 - DNA, 25 bp, Homo sapien
tcctaaagtgctggttagaaggtgt

SEQ ID NO: 159231 - DNA, 25 bp, Homo sapien
agagcccctcctagagcagacagtg

SEQ ID NO: 159232 - DNA, 25 bp, Homo sapien
gggctgcacaatgcctcggctctgg

SEQ ID NO: 159233 - DNA, 25 bp, Homo sapien
gaatactcatccattgcttttgaga

SEQ ID NO: 159234 - DNA, 25 bp, Homo sapien
cagagagcacatggtcgttggagtc

SEQ ID NO: 159235 - DNA, 25 bp, Homo sapien
tggtcgttggagtcatccacagcac

SEQ ID NO: 159236 - DNA, 25 bp, Homo sapien
gccagtcccatacagagagcacatg

SEQ ID NO: 159237 - DNA, 25 bp, Homo sapien
acagcacagagattggttcctccat

SEQ ID NO: 159238 - DNA, 25 bp, Homo sapien
cacaagtaactatgatgttggtgtc

SEQ ID NO: 159239 - DNA, 25 bp, Homo sapien
aatccttgcttcttattaagggagc

SEQ ID NO: 159240 - DNA, 25 bp, Homo sapien
tccgcagcaaacacagcttcattag

SEQ ID NO: 159241 - DNA, 25 bp, Homo sapien
taagggagcttccttctagtgtcca

SEQ ID NO: 159242 - DNA, 25 bp, Homo sapien
accgttttcagagaaagtcacacag

SEQ ID NO: 159243 - DNA, 25 bp, Homo sapien
tactaagatgttgccacttgaatct

SEQ ID NO: 159244 - DNA, 25 bp, Homo sapien
cttgaatctccagtaatggtgtcac

SEQ ID NO: 159245 - DNA, 25 bp, Homo sapien
ccagtaatggtgtcaccgttttcag

SEQ ID NO: 159246 - DNA, 25 bp, Homo sapien
ccacctcccgacaccagtgtgccat

SEQ ID NO: 159247 - DNA, 25 bp, Homo sapien
ccgacaccagtgtgccatctcttaa

SEQ ID NO: 159248 - DNA, 25 bp, Homo sapien
ccaagaaatgagctttcggtctttc

SEQ ID NO: 159249 - DNA, 25 bp, Homo sapien
accagtgtgccatctcttaacatac

SEQ ID NO: 159250 - DNA, 25 bp, Homo sapien
cagccaactgttgagtgagtgatca

SEQ ID NO: 159251 - DNA, 25 bp, Homo sapien
caatttctgatagcaacagtagata

SEQ ID NO: 159252 - DNA, 25 bp, Homo sapien
gtgcgtgtagtagctggaaagctac

SEQ ID NO: 159253 - DNA, 25 bp, Homo sapien
ggaatgctactggttagttttctct

SEQ ID NO: 159254 - DNA, 25 bp, Homo sapien
ccgtattggaccaaactgttctgga

SEQ ID NO: 159255 - DNA, 25 bp, Homo sapien
gtttcgagttgtgccaatcaagatc

SEQ ID NO: 159256 - DNA, 25 bp, Homo sapien
agagtgccctgcaggacaaagtttc

SEQ ID NO: 159257 - DNA, 25 bp, Homo sapien
cggccactgtccgtattggaccaaa

SEQ ID NO: 159258 - DNA, 25 bp, Homo sapien
ctctattattttgtcccagacggga

SEQ ID NO: 159259 - DNA, 25 bp, Homo sapien
ggcatgcttgtcatgcccacaggtc

SEQ ID NO: 159260 - DNA, 25 bp, Homo sapien
tattttgtcccagacgggacggtga

SEQ ID NO: 159261 - DNA, 25 bp, Homo sapien
ttgaggcatggatggccagtcccca

SEQ ID NO: 159262 - DNA, 25 bp, Homo sapien
tcaaaattacatggctgaggccacg

SEQ ID NO: 159263 - DNA, 25 bp, Homo sapien
tacactgtaaatagaatgcaggctc

SEQ ID NO: 159264 - DNA, 25 bp, Homo sapien
gccacgaggcaatgttaaaagtaac

SEQ ID NO: 159265 - DNA, 25 bp, Homo sapien
tgcccagctgactttcaaacgaaag

SEQ ID NO: 159266 - DNA, 25 bp, Homo sapien
gaaaaccagaagactgagctggatc

SEQ ID NO: 159267 - DNA, 25 bp, Homo sapien
ggatgaaaaccagaagactgagctg

SEQ ID NO: 159268 - DNA, 25 bp, Homo sapien
gatgaaaaccagaagactgagctgg

SEQ ID NO: 159269 - DNA, 25 bp, Homo sapien
ctgaaggatgaaaaccagaagactg

SEQ ID NO: 159270 - DNA, 25 bp, Homo sapien
tgagtgttccgactgcaaccacaga

SEQ ID NO: 159271 - DNA, 25 bp, Homo sapien
agtgagtgttccgactgcaaccaca

SEQ ID NO: 159272 - DNA, 25 bp, Homo sapien
ctcccagtgagtgttccgactgcaa

SEQ ID NO: 159273 - DNA, 25 bp, Homo sapien
ccagtgagtgttccgactgcaacca

SEQ ID NO: 159274 - DNA, 25 bp, Homo sapien
ggcgaagcaggaccatgcaggagga

SEQ ID NO: 159275 - DNA, 25 bp, Homo sapien
gaagcaggaccatgcaggaggatgg

SEQ ID NO: 159276 - DNA, 25 bp, Homo sapien
agggcgaagcaggaccatgcaggag

SEQ ID NO: 159277 - DNA, 25 bp, Homo sapien
atggggctgggacaactccggggtg

SEQ ID NO: 159278 - DNA, 25 bp, Homo sapien
agagagctgttcgtttccatctgtg

SEQ ID NO: 159279 - DNA, 25 bp, Homo sapien
tggtgagtatcgcattacagagagc

SEQ ID NO: 159280 - DNA, 25 bp, Homo sapien
gtgagtatcgcattacagagagctg

SEQ ID NO: 159281 - DNA, 25 bp, Homo sapien
gtgtgaacggtgaccaagtcttttg

SEQ ID NO: 159282 - DNA, 25 bp, Homo sapien
tctgaaattccatgtcaatgacaat

SEQ ID NO: 159283 - DNA, 25 bp, Homo sapien
caatctgtgtttgggcatcgaatgc

SEQ ID NO: 159284 - DNA, 25 bp, Homo sapien
gatctcggccgggatcttggcagca

SEQ ID NO: 159285 - DNA, 25 bp, Homo sapien
cttggagatgggctacagatctcgg

SEQ ID NO: 159286 - DNA, 25 bp, Homo sapien
cagggagggggaatgccacatgaca

SEQ ID NO: 159287 - DNA, 25 bp, Homo sapien
ggaatgccacatgacaggggaaagg

SEQ ID NO: 159288 - DNA, 25 bp, Homo sapien
tgcatggggatcaacccagggaggg

SEQ ID NO: 159289 - DNA, 25 bp, Homo sapien
ctgcatggggatcaacccagggagg

SEQ ID NO: 159290 - DNA, 25 bp, Homo sapien
aacagccgtgcagctatggtgtagc

SEQ ID NO: 159291 - DNA, 25 bp, Homo sapien
cctggcacactgattgtaattttgg

SEQ ID NO: 159292 - DNA, 25 bp, Homo sapien
cctctctcctggcacactgattgta

SEQ ID NO: 159293 - DNA, 25 bp, Homo sapien
atggtctgcaggtgtaggaacagcc

SEQ ID NO: 159294 - DNA, 25 bp, Homo sapien
cgccatatatatagatgcagttgtc

SEQ ID NO: 159295 - DNA, 25 bp, Homo sapien
gagcacttgcccactcgcgtgtact

SEQ ID NO: 159296 - DNA, 25 bp, Homo sapien
ctcccgttgtcactaacgccatata

SEQ ID NO: 159297 - DNA, 25 bp, Homo sapien
tgagcctatggctaagaaattccca

SEQ ID NO: 159298 - DNA, 25 bp, Homo sapien
gagtttacagaccagtccaggtgag

SEQ ID NO: 159299 - DNA, 25 bp, Homo sapien
cgtagtctccggaatttgacacgag

SEQ ID NO: 159300 - DNA, 25 bp, Homo sapien
gtagaggatttcgtagtctccggaa

SEQ ID NO: 159301 - DNA, 25 bp, Homo sapien
gaatttgacacgaggaactgtgagt

SEQ ID NO: 159302 - DNA, 25 bp, Homo sapien
ccacccagcggggatggacttcatg

SEQ ID NO: 159303 - DNA, 25 bp, Homo sapien
ctgccgtccacccagcggggatgga

SEQ ID NO: 159304 - DNA, 25 bp, Homo sapien
cccagcggggatggacttcatggtc

SEQ ID NO: 159305 - DNA, 25 bp, Homo sapien
gccgtccacccagcggggatggact

SEQ ID NO: 159306 - DNA, 25 bp, Homo sapien
tctaaggaaccagtgcgtggcatga

SEQ ID NO: 159307 - DNA, 25 bp, Homo sapien
tgtgcttgtaagtgcccgccacgat

SEQ ID NO: 159308 - DNA, 25 bp, Homo sapien
atgaggatgtgcttgtaagtgcccg

SEQ ID NO: 159309 - DNA, 25 bp, Homo sapien
cgatcatcctcgctgttcccaagca

SEQ ID NO: 159310 - DNA, 25 bp, Homo sapien
agcagcgaggccttccttgtgccca

SEQ ID NO: 159311 - DNA, 25 bp, Homo sapien
tcttggggcctgtgttttgggctct

SEQ ID NO: 159312 - DNA, 25 bp, Homo sapien
tccctgcatcatgcggccaagccag

SEQ ID NO: 159313 - DNA, 25 bp, Homo sapien
aaagtgctgtaggtcatctgagaag

SEQ ID NO: 159314 - DNA, 25 bp, Homo sapien
ggacgctcaagtgagtgtgacccgc

SEQ ID NO: 159315 - DNA, 25 bp, Homo sapien
acgctcaagtgagtgtgacccgccc

SEQ ID NO: 159316 - DNA, 25 bp, Homo sapien
tcctggtcctcaacaagtggggacg

SEQ ID NO: 159317 - DNA, 25 bp, Homo sapien
caacaagtggggacgctcaagtgag

SEQ ID NO: 159318 - DNA, 25 bp, Homo sapien
agaaggctctagacccagggcttgt

SEQ ID NO: 159319 - DNA, 25 bp, Homo sapien
cctgaaaatcataccgttcctgtgc

SEQ ID NO: 159320 - DNA, 25 bp, Homo sapien
gggcttgtccctgaaaatcataccg

SEQ ID NO: 159321 - DNA, 25 bp, Homo sapien
cagcagagtacgagaccacatctga

SEQ ID NO: 159322 - DNA, 25 bp, Homo sapien
taggtagcccattcaatgtctcttg

SEQ ID NO: 159323 - DNA, 25 bp, Homo sapien
ccaaagtgcaggtataggtagccca

SEQ ID NO: 159324 - DNA, 25 bp, Homo sapien
cacacttacgacttgcttacaggca

SEQ ID NO: 159325 - DNA, 25 bp, Homo sapien
acttacgacttgcttacaggcagag

SEQ ID NO: 159326 - DNA, 25 bp, Homo sapien
tgtggctgttgcttgcttggggcag

SEQ ID NO: 159327 - DNA, 25 bp, Homo sapien
agctgtgcccatcattactggctcc

SEQ ID NO: 159328 - DNA, 25 bp, Homo sapien
tgcccatcattactggctccaggct

SEQ ID NO: 159329 - DNA, 25 bp, Homo sapien
tgtgcccatcattactggctccagg

SEQ ID NO: 159330 - DNA, 25 bp, Homo sapien
tgtcggttccgtccgagccttctgg

SEQ ID NO: 159331 - DNA, 25 bp, Homo sapien
gacagacggcattgatgtcggttcc

SEQ ID NO: 159332 - DNA, 25 bp, Homo sapien
tctcatgggcccgacagacggcatt

SEQ ID NO: 159333 - DNA, 25 bp, Homo sapien
ttgccaaagtcgtcgcctgttgaca

SEQ ID NO: 159334 - DNA, 25 bp, Homo sapien
tgcatgccccatgggggataagatt

SEQ ID NO: 159335 - DNA, 25 bp, Homo sapien
caggtcgggtgtacgtgcatgcccc

SEQ ID NO: 159336 - DNA, 25 bp, Homo sapien
ggtcgggtgtacgtgcatgccccat

SEQ ID NO: 159337 - DNA, 25 bp, Homo sapien
cccatgggggataagattagtgaag

SEQ ID NO: 159338 - DNA, 25 bp, Homo sapien
cagaggaaatcgacattggtgacat

SEQ ID NO: 159339 - DNA, 25 bp, Homo sapien
gctgtgcccgccgtagatgtggctt

SEQ ID NO: 159340 - DNA, 25 bp, Homo sapien
tgcatgatgcttgtgtctttcccgc

SEQ ID NO: 159341 - DNA, 25 bp, Homo sapien
tctttcccgcccgtggagatgaggt

SEQ ID NO: 159342 - DNA, 25 bp, Homo sapien
tgtctcaccgtgaatcagggcgtgt

SEQ ID NO: 159343 - DNA, 25 bp, Homo sapien
tgaaacttggaaacgcctgtgtacc

SEQ ID NO: 159344 - DNA, 25 bp, Homo sapien
tccccaagggagaatgcaatgaaac
